United States Patent Application Publication US 2024/0084332 A1 - sequence listing, part 13

SEQ ID NO: 56307 - protein, 410 aa, Streptomyces sp.
MYMQLRYSFRLYPSAGQRMALARAFGCARVVYNDALRVRETARAEGLPFPKAGDLSKLLITEAKKTPERAWLGEVSAVVLQQSLRDLDSAYRNFFDGLKDKRPRMGAPRFKSRRGNRQAVRFTANARWKITTGGDLALPKIGDVRVKWSRNLPSTPSTVTVIKDAAGRYFCSFVVETEAGEVLPEVMPEVGIDLGLSHFAVLSDGTKIESPRFLRRAEKKLKRAQQALSRKAKGSNNRNKARLRVARAHARVADARREFHQLSMKLIRENQAVAVEDLAVKGLARTRLAKSVHDAGWSAFVGMLEYKAARHGRTFVKIGRFEPTSQVCSQCGVKDGPKPLHVRVWTCGACGAVLDRDINAAVNVAKAAGLAVSACGARVRPGLVPAPREETGTHPKASRASGSQAGISVL

SEQ ID NO: 56308 - protein, 480 aa, unknown
  TnpB Polypeptide
LHFVRHLDVLESTDITAQACPDCYQDDYGYRRLYRQSDACKSLFHPDFGKDTHSIYRWEELPNTSVMFLYFENKINVIGSMQRAILLQPDATKHKIEVLNEFKDRTISLANFLLANRKSKRLMDLHKEMYSVCKATTPFNSQVICDIERNIVRSKGTIIKAITIKFNVPRNCKTFTMSRFFVDFGLYPRKRIAVPIKQNRNYQRFQDLIKNGWICKTFGLTSSLQIVAYLSKEKEIQQRKNILGIDVNAKYFAISVVSPQGKVLYQTYFGKRIWAKRKKIMNRRALLQSLNATKKLKTLRNRERDFVKTNLGQIVREIIKIATKYDADISIEKLKRFNPKGKRFNKTVMRIPFYKFKQILEQRCFDNDIRLNVVSSWHTSKWCSHCGAVGNGHNSANYSLFKCKCGQTVNSDRKASLAVAVKSLLVRNRHTSNQSNAFFQFTNGRVSVNGLLRSDDVGLNQIAVQHLNQPDGMPTRFSGG

SEQ ID NO: 56309 - protein, 384 aa, unknown
  TnpB Polypeptide
LRAGAKVQNEEWPKKAPEHFWDVPYKIRDSALLDVSKACAALKAKEGAVKRKLKHRSCSDRRQSVALEKRWLNSATKRSVWSCVFGTTADRSALSIEGGKTLPLVFQHDCRLGYERLTNRYYLSVPVDVCVLPVLSDSGRGIVAIDPGIRTFATCYDPAEHTITKCGNIGGRKNGLTKGTELLGWIARKSDRLVSKATRAHGRRRRRIRKVATRLRQRAIDLTDELHHKFALDLCQKYAVVLLPKFSAKGISRRDAKKQRKIGRRTARKLMQLAPFKFRQFIIHKAREFGTQVVICDEHWTSKTCGSCGAIWHGLEGAKTFACPTCGWRGDRDANAARNILLRYISKNEITIDFTLRALSTGDPAPAYMGKDRTSCCATGFSPN

SEQ ID NO: 56310 - protein, 346 aa, Chloroflexales sp.
LHAHSRDAAQQAFHKACKTAKANRSQGAKYPHKRKFYRPTIWKHTGIRMRDRQLLLARARGLEPITVALPPALATLPPASFVEMRLVYDRVGHRYQWHLVVDDRCEPPGAPGEQTLAADLGEIHPAAVANEAGDVVIFSARDLRALNQYRYKRLASLQARQSRLKRGSRRWRRLHRRKTFLLARNNRQRRDIEHKITRAITTYAKDEKARRLVVGDVRNVGKGKRLSATNQQKVSGWSHGRQIQYLTYKLAAEGITLERQNEAYSSKTCCGCGAQNKPRGRTYRCAACGLVCHRDANGAVNQESKALFGSYGHIQPRSTKYRRPFRRSSRDTGNVARSLEREAAPQ

SEQ ID NO: 56311 - protein, 447 aa, Bacillus sp.
MAKKKSVNVLRKQKKSENIQRFTQKQNIGRASLTAKEFRLLQRMSHSSKALRNVGLYAIKQSYLNTNKMATVKEVDAAMQADVNYWGVQSNSVQAIRRTLYAEAKSFFKALEQWTKNPEKFTGRPKFPKYSGSTEKRIIEIYQVPKVDDDGNWSIPMNVEFRKKFGSIKVRMPKNLLNKKISYIEIVPKQKGRFFEVHYTYEVQKPQMKKQPTTTVNVLSCDLGVDRLLSCATNEGDTFLIDGKKLKSINQYFNKMISNLQQKNIENGLSKRVITNSVAELWNKRESQISGYFSQTVGLLFKKVKEFNIDTIVVGYNAGWKQKSNLGKKNNQQFVQIPFQKLISAIENKCLKEGIRFLKQEESYTSKASFLDRDTIPVWSKDDKTSYRFSGKRITRGLYQSKTGRCIHADINGALNTLQKSKVVKLDENLKIKTPILLEVQKRKAVA

SEQ ID NO: 56312 - protein, 421 aa, unknown
  TnpB Polypeptide
VADCSFFNFIYRKRGEIMKVYRVEQHQIKKDHPLYKVIDEFSFRSKNLYNYANYLIRQEFINNRNYIKYKNMDKMLQKTEPYKLLMSQAAQCTLQVLDRNWKSFFVAIKDWSKHPEKYLGKPKIPKYKKKEGRFTWFLKNNQTWIKDEYLGFQLRVMNGYKFKTNAKGRLISVRFVPKGIIYVMEIVYEIEVPEEKPKSKNICSIDLGINNFATITNNIGLQPIIINGKGIKSINQYYNKRKSKIQSELKKRNNKNWSDKLSKLNQKRFNRIKNFMHNASRYVVDYCLKNSIDTIVVGLNKKWKQESSMSKQNNQKFINIPYEMFIGQLEYKCQNNNINLILTEEYYTSGTSFIDGELPVKNNYDKSRRVYRGLFKSNKGKLINADVNGSYQIMKKVFPEIEYGIEGRLTPVIINVVKFAA

SEQ ID NO: 56313 - protein, 383 aa, unknown
  TnpB Polypeptide
MNIRKGYKYRLKTNRQAQRSFVAFAGACRFVWNKILAMNEGRYLAGVPRLSYHDAAGLLTLWKQSEEYGWLHSVHSQVLQQCLIDLERAYTNLCAGRAAPPRYRKKFLADSFRYPQGFKLDGRKVYLPKIGWVEFWHSRDSEGTVKNVTISRQGKHWFVAFQVEIDLPDPAHPATAEVGIDLGIATFAAFSDGRLHPPLNAYRRAEKKKARMQRKLAGMVKYSQHWKKQQQRITKLDSRIANCRSDFLHKLSTETSKNHAVIVIEDLQVKNMSRSARGTLEEPGRSVAQKAGLNKAILDQGWGTFRRMLEYKQRWRGGEVIAVNPRYTSQTCPVCGHVSAKNRLQQALFSCEECGYSYHADVVAARNILAVGHTERLNACAVR

SEQ ID NO: 56314 - protein, 416 aa, unknown
  TnpB Polypeptide
MPEMNPQPLCRRLLLLVKMESICAKTRNELRSRWTRLLNSYRTLCKWSANGVAEQIITKTFKYRIYPSKAQTTCLNNTLALCCELYNAGLQERRDAYRLERKSIRYVEQANQLPEIKEARPELNEIHSQVLQDTLRRLDKAFQNFFRSVKERKARAGFPRFRSRQRYDSFTYAQSGFALKDGKLRLSKIGDVQIKLHRPIEGKIKTLTITRSATGKWYACFSVEVETQPLPACDRSVGVDVGLASFCTLSNGEQISHPRFFRTDEKALAKAQRREKRKAARRIHERIANRRRNFAHQLSHALVSVFGVIAFEDLNIKGMVKNHCLSKSIHDAAWNQLVQFTLYKAENAGRDVRLVDPRNTSKLCSACGSIVEKDLSVRVHHCSCGLSLDRDVNAALNILSRGLARLGIEAKEAALL

SEQ ID NO: 56315 - protein, 389 aa, Bacillus sp.
VFRTLKVGFKANKQIIDQLFDIRRTCGQVWNDCVSLARYYHRLGGKWITKTQLQKELKGLYPIHSQTIQAVAHKFLDAREGTLEARKKGLNPRYPWKFKNQFNPKWVDESFSIKGKKLTLSLGNWNGKRQKALVLTLAKSIPFEVKEVELVFDQNLYICLSYDDGKETEENSNTQTAAVDPGEIHTIASVHENGNSIIITGRKLRSIHRLRNKKLRELQKLMSRCKKHSRQWKKYNRAKQYILSKSEKQLKYHLHKTTKQFVEWCVENNTKTILIGDTEGVQKNTKKKRKTNKNLRQKLSNWSFGKINHYIKYKAETYGIETIKRKEHYTSQECPSCGNRKKTKGRVYKCRCGYECHRDLHGAGNILTEYLYENFRVIKHKDHIYLRAS

SEQ ID NO: 56316 - protein, 412 aa, unknown
  TnpB Polypeptide
MRSQKLRLKLTKEQEDKAWWFSKVSRNYWNLLVDIDKRNNKGEFDEILSRNGNKTYHSKVYDREIYYLNSSDYRNLAKIVVAKNYEEDNEAWSWYYQLSQSFIYNFLARELVKIKRQNKGKLNFRSIDKIQPNFNVTCCISSDKKRPSRIYLKDNGKLQIPTIGDVKFGSTREDFDLSGKKQVANISFDGKYWYLSYVEDIEVQVTDLPEYTDGVGLDLGIKTLATVSDGTTVPNIKTFRRVRILEKRLKRLQRKVSRKYLINKCNKHNKTKNIIKLERQIKLIHRSIRNIRINHIRKFVSDLVKQQPEFIAVEVLNVTGMMKNKYLAKDIVNCSFYTIKEHLIRKAKERHIAVRLVNRFYPSSKTCSYCGHYKKELKLSQRVYHCDNCQEKIDRDLNAALNLANTDKYVLA

SEQ ID NO: 56317 - protein, 357 aa, unknown
  TnpB Polypeptide
VVNVCIAVGIEENVSSLKTLSLRSYHRLSSDILGYYRLGAISVATGILRNYRKAKKRKPQTRFPYAKRMMLTTCYGFKIQNGCLRLPVKPREYIYVKLNSHTLQSLSGLNVRSVTLTRRSLSISYSRETVEIKPEGYIGIDRNLDNVTVVSTDQTVRRFDLSSATRIKSDCRYVKSRFKRNDFRLRTGVFSKYGQKQRNRVQPLLHNVSKRIVDEAKTRRYGIVLERLTGIRRLYRKGNGQSKNYRARMNSWSYGELQRQIEYKAGWEGVRVIYVSARNTSKRCSICGYKTLESTQRRLWCPQCGTILDRDENAARNLAAGGLRFSPSGPPGEAMVEEREPENATLILKVDGGKLSR

SEQ ID NO: 56318 - protein, 284 aa, Burkholderia sp.
MILVYRYRMKSLNGLLNKQSRAVNYVWNFCNDTQKHALKWNKRWPTGFDLNVLTTGSSKELGIHSGAINATCEQYAKSRSQHRRPYLRYRGRKSLGWVPLKGRDLKREGDAFRFAGNTFRVFNSRALPEGKIKDGTNFAQDARGNWFLNIVIEMPDVQARPVRSGVGIDLGLKDFATLSTGEKLPNDRFGRRAAEKLAKAQRALRYKAIAHGATFEEVDESGSTRSCSACGSKDSTTRPKGIAGLRIREWACSDCGVEHDRDTNAALNILRCGRASPGVGITCL

SEQ ID NO: 56319 - protein, 329 aa, unknown
  TnpB Polypeptide
LEAWHQERDFARNRIVNFSGRAVSPDGNYLCKYDPERHTLEVTMINGEKILFHEVHFPYRGEELGQYLKDRKGSVGYMMECKKDGNGREYLIFKATLTVKKESLNHSTSDGVFAYDFNYDHIAWADVSSNGNLIKAGVIPFTLDGLSSGHAKEVLGVAVKKLVALATDRRKPIVREDLDFVRKKRQMEYREKRQNRKLSALIYSKAAAMVEARAFREDTVVLKVNPAYTSLIAKVKYMKLKNLSIHCAAAYVIGRRGMGFSEKLPSYLNHLVPKTRKNRWRTVFTHAKKAGSSYFREDLPVWDKWKQFDANVHNYNENYALWKESYSMQ

SEQ ID NO: 56320 - protein, 398 aa, Escherichia sp.
VKRLQAFKFQLRPGDQQECEMRRFAGACRFVFNRALARQNENHEAGNKYIPYGKMASWLVEWKNATETQWLKDSPSQPLQQSLKDLERAYKNFFQKRAAFPRFKKRGQNDAFRYPQGVKLDQENSRIFLPKLGWMRYRNSRQVTGVVKNVTVSQSCGKWYISIQTENEVSTPVHPSASMVGLDAGVAKLATLSDGTVFEPVNSFQKNQKKLARLQRQLSRKVKFSNNWQKQKRKIQRLHSCIANIRRDYLHKVTTTVSKNHAMIVIEDLKVSNMSKSAAGTVSQPGRNVRAKSGLNRSILDQGWYEMRRQLEYKQLWRGGQVLAVPPAYTSQRCACCGHTAKENRLSQSKFRCQACGYTANADVNGARNILAAGHAVLACGEMVQSGRSLKQEPPEMI

SEQ ID NO: 56321 - protein, 422 aa, unknown
  TnpB Polypeptide
MMTKAERIKQTIKETRERRKNLSPVVYQLKIQNLSKTKEEKLNRIFLEAKWLYNWIISNINRVNISTKEIKEVEVKVGDKLENRELKYLGAQMKQAIQERIKDNLKALKTLKEKGYKVGRLKFKKSVSSIKMPQYNVTFDIDFKRNKVRIQKLGWFRVLGLHQIPQDCEIANAQLMKKPSGYYVYLTCYVKKEHFERNQVRTAIGIDFGVANKLTLSNGLTVDFEIEENNRLKRLQKDLARKKKNSKNRGKTQKKIQREHERLANKRKDIHNKLLSLFRHYEIVIFQDDSIKSWHEGWFGSQIQYSGIGMFKARLKDSLATISVDRFEATTQECHVCGYKQKLNLSNRVYCCPVCGNTINRDLNSAINILEKGLNLCHNQVVGVDRPKLTPVEMSLATKILGSNPYIKVAVIAEAGSSHLKK

SEQ ID NO: 56322 - protein, 199 aa, unknown
  TnpB Polypeptide
LSVGIDLGVANLAIVNYLDKPIKNINKSVKIRKLKKKLKRLQRGLSRKYEANKKGKEFVKTKNIIKLEKQIKLIHRKLNNIRLNHIHQATNMIAKLHPYRVIMENLNISGMMKNKYLSESIQEQKFYEFIRQMKYKCEFNGIEFVTADKFYPSSKTCSCCGNIKKDLRLKDRVYVCDKCGLKIDRDKNASINLGNYKIA

SEQ ID NO: 56323 - protein, 409 aa, unknown
  TnpB Polypeptide
MLLTEQHVLKGKHWQEADQLCFASKNLFNRGLYSVRQHFFETDKFLNYNSLDKQLQKEESYRALPAKVAQGVLRQIDRGFRSFFGTLQKFNAEPHLFAGRPKIPKYKEKQKGRNCLIYSNQAISKKALEKGMIKLSKTSIQVKTKAKQVQEVRLVPKPTGEIILEVVFVRGPQDLHLNKNNRLSIDLGVNNLCAMTSDKPEFQPILVKGGAAKSINQWFNKKKAEMQSLLEEGRKSSKSIHRLIRKRNRKIKHLFHQVSKFVVESCKANDIGTIVIGRNKQWKQKLNIGKSNNQNFTALPFFQLIQQISYKAELAGIEVIEVNEAYTSKCSALDLESVEHHENYLGRRIKRGLFKTAEGILVNSDVNGSLNILRKAFPKAFADGTEAVEQNSQEWRSFVVQPKSAIFAA

SEQ ID NO: 56324 - protein, 411 aa, Clostridiaceae sp.
LLKSNIEINQRLKKECTKRIERIKEKIRKENKTLQNWQKQKEQLIQKSKEHETNEADYLYEVQIVNPNIKQLKHRIGSLTFKLNRETDKLNHLNLGVRAACFGSRKKLHHDLEAYRYERRKRMLIPGRRQGKYSNNLFKYHLESGIMVYRGTEKEVHLPIRFYHHAEKLERAVRLPHNTVGKAVAYELYDHGEYFIIKAIIEVEPKMIVTKKEAGSIGIDINVDHIAVAHIDRQGNLCKQLILPMKLKGKTRNQRKHEIAETASKIIHECVHAHKPLVMEALDFSDKKRKQRYQSKGLNRMLSEFAYSQIIEAIERKAVYEGIEVIKVDPAYTSLIGKLKYVRDKGMSVHQAASYVIARKGIGYKEKILREYRVFVKEKQTQTEQWAAVAEKIGKASTKECQFTAILALFR

SEQ ID NO: 56325 - protein, 364 aa, Halalkalicoccus sp.
MLNRTNGTTKYGEINELPSIKKWWTELSDLYSRTLQNVVERLYDNLSRLKDAKDNGRTVGSLKWKAPNEYRSFTYRQSGFELKNTSGQAVLRLSKIGEIPVRLHRDLPDDATVKQVTVKKEPTGVWFAVLGIETENDAPPKPENPERCVGIDVGILKYAHDTDGVTVGSLDLSDERERLEREQRKLSRKEHGSANYEKQQRVVARRHADLKRKRRDFLHKLSNYYAREYDLVAVEDLDAKGLMELPSNSRNRAGAAWGTFLRMLEYKCEREGTYFVPVNPRGTTKECSNCGVETEKPLWVREHSCPSCGFEADRDANAALNILSRGFKKVGTGCPESTPAETALPTDTHSVSAKRVVETGSPAL

SEQ ID NO: 56326 - protein, 302 aa, Halalkalicoccus sp.
MFSSRILVGSDLKEEYGLETRKRLRLEVRGDPNWKEYDKQGRLELYYDETAQKFRAFQPVTVDDSRLAQPLASEEAALDIGANNLVACTTTTGQQYLYEGRDLFDRFRETTRRIAELQSKLRDGRYSSKQIRSLYRRRTRRRDHAQDALCRDLIERLYNKGVSTVYVGDLTDVLETSWSVRANAKTHNFWAFRAFVKRLACTAEEYGMTVEVRLEAWTSQECPNCGSTDRTTRHQDSLTCACGFDGHADLTASETFLRRHSDVVRPMARPVCLKWDDHEWSESPRSVPNEEHTNPQVASVGR

SEQ ID NO: 56327 - protein, 273 aa, Halalkalicoccus sp.
VANERRNPTSPPIARSTTNEARRSTATTSPFRLSTGASSATTSFPTTLGATPEPDTEHRTVLGVDLGVNNIVVSSTGTFWSADEFNHWRREYEKLRGSLQQTGTRAAHEAIEGVGCKEYGRFEIYLHGVANELIEEAVEYGCSYIVFEDLTHIRNNIPQVTWQHVWAFRRLFQYAEYKAAEHSVEAVQVPPNHTSQRCSTCGCTHEDNRDGEHFECLKCGYQNHADYNAAKNIGYRYLRRRQNAAAGGAPVDVALNHGTLNVSGEYVPPASTA

SEQ ID NO: 56328 - protein, 333 aa, Halalkalicoccus sp.
MRIEQNVKSLGGLKESYGVGQLKWKPPREFRSFTYSQSGFKLDKKGGQTVLSLSKLADIPIRLHRAIPDDATLKQVTVKKEPTGEWFATFGVEVDREPPEKPDELTDVVGIDVGILKYAHDTDGTAVESLDLSNERERLEREQRKLSRKQHGSNNYEKQRRRVAECHADLRRKRRDFLHKLSAYYAREYDLVAVEDLNVKGMIESPSNSRNTASAAWRTFLSLLEYKCNREGTHFVAINPRGTTKECTSCGVSTDKPLWVREHSCPACGFEADRDANAAWNILSRGIEDIGVGYSESTPVETALPVDTAVSAKRVVETGSPTLKERTASAVSE

SEQ ID NO: 56329 - protein, 309 aa, Halalkalicoccus sp.
VQPLAYDSVREDTDLGSQHAILATHQAAQAITGCIERRSKGKKVSKPTFTAPTVKYDTRTMTVFDDDTVSLSTTESRVRCPLDLPDADDGYQRQYLDSDEWSVTESTLTVRDGEFFLHIGFRRHKNDTERNTAEDGTVLGVDLGIENLAVTSTAYFFSGRELIHDLREFEKVRAGLQQTGTRSAHRTLEQSSGRELRYVRDVLHRASNALIDEALRYDCDVIAFENLTHIRDRTGASWGHKWVFRTLYEYVEYKAESVGISVKQVGSAYTSKRCSECGFTADENRPSRNDFRCVKCGSEANADYNAVVG

SEQ ID NO: 56330 - protein, 543 aa, unknown
  TnpB Polypeptide
MVVSENEKWIATIPTQSLANIGKIDLVSNLLNPYYKLMIHFLNDIDLRFVRDDELSKFTKAKVYQTEEQYDALLVNCHKRYQKQVAEGVTPKQSLKEHLEEIHEHAVQTFLSARYAQTCYSQTFGIYKSWLMKLEDTIRTYLTNSSVSEKDEFFLVSCYRINKNHLWYSKEFELKWHQTKEGELLVPTKQNKANVTLPVSEDILFFMRRLMKQARKRIRFPRLKQLKTLKLDEKVATLEVSQNATHFDYFLKLSTLQKGKPIYLPLKRNPYLDECLAKGIRKPFVQLRLDGKKCVISAIVEYDKAPLRPLDSSIGLDFGMVSMFTTSDGEQHGLTSFAKLKIWDEDLIALTKKLQEKGIKFKSNARYVQLQNRIRSYFKNEICRILNKLARKNVGVFVVEQLDFRASGLSNTMNRLIGRTYRSFVKAKLARLGEQFGIEIISVNPAYTSQECSRCHYVSKNNRKSQKQFICEHCHLHCNADVNAGRVIDQRRSLISEFPVYAKKGTSSAIRCQVREASEECHRRYCLNNGLSTINASLAESSL

SEQ ID NO: 56331 - protein, 574 aa, unknown
  TnpB Polypeptide
VRLPDEAQADALRLLDATRRVVNQALIMLWPHLDEFGSERAGPAWKQVGKYLGSPDFHGDRQWRCESEVVGRLLRQQAERKKAFELVAPILSDGFIRPTTEKRPAGKNRPVIKEAITALQKSLEEDETSFVALQNVVEQSCNFFFQHDRFPIDYEELQPVPLLKVGMLTYAGDDGREKGQAYRLALDLEAEVAHFRFRSPDEAGTWHWASVDTIIPLPECLKERLPHGELMAPTLREECRADGERFAVLDFIIEVEKEALPEWRSVERVLGADWGVHSLLTATAVDEHSEQVGRPFFLDSGSFDGRQARTRRQIDELKKKVARYEQERDALPEEHAKRAWYTQRLVLYRREIDLCWRKYEQRNRALAHLASNVLVLLARVHGCSLLSMESLKTLKTTGRGKGVRGRWRNYRNNSTIRGEIWKLLRYKCHLIGLRFHTEQPRGTSHTCPHCGQPASTYRSPSERKKAVKWGRWMYCDACSYNGDRDYCASVNIARLGIAYLIQMKHTGKARSCSMTDPRVKPVSYTGAGAVLLLPPTGSHARPIVSGKISYYPGWLGSAFLQSSQRKAVFLRLCG

SEQ ID NO: 56332 - protein, 230 aa, Crocosphaera sp.
MPSFAVLPISTAGNLHLFSVKSADLNLRFEKKKSDGEKVANPKQFNRLYKKLRRKQKALSRKTKGSNNRYKACLEVAKVHAQIKDARSDFLHKLTTRLVRENDLIAIEDLAVRNMVKNPKLARAISDASWGEFNRQLEYKCEWYEKELVKIDRYFPSSKRCGNCGYIVDKLPLNIREWECPKCETNHDRDINASQNILAAGLAVSVCGASVRPEESKSRKATALKQKPKS

SEQ ID NO: 56333 - protein, 452 aa, Lachnospiraceae sp.
LEGGYGVKIFSTYSVKIKHYNHILKETIEIYREAVDYLIDVCLNEWNDIIAIKGNLNQQRYTERLCHRTSDNPDIKYGSFDKRFYKFPSYLRRGAINEAIGKVSSYKSNLSNWEKADIKARGRKPSYPKAGYVYPCLYKTVMYEETGTYEAKIKVYIRNTWDWIYVQLRKSDVDYITRSCASRKKCAPTLQKRGSQWFLDFPFEENVTLTDTGIFEQTIVAVDLGINSAATVSVMKSDGTILGRHFLKLPREYDSLNHSVNRIKKAQQNHNHKTPRLWSKAKGINEDIAVKTAAFIIDTAVLYNADVIVFEHLNRKGKKRGSKKQRLHMWRSQYVQSMVENKAHRLSMRISHICAWGTSRLAYDGSGAVLRGKEADLGCYSLCKFQSGKMYNSDLSASYNIGSRYYVREILKSLPVKERLELEAKVPQVTKRSTCTLSTLINLNAELGSLVA

SEQ ID NO: 56334 - protein, 370 aa, Paenibacillus sp.
MFAMMHHRAYNFRIYPTSEQATLINKTIGCCRFVFNRFLVLWNDTFKETGKGLTYGACSATLTKLKQELAWLQEPDKFSLQNALRNLNDAYNRFFQKQNDAPKFKSKKNPVQSYQTNYTNGNITVVGNQIKLPKLGLVKFAKSREVEGRILNATVRRSPSGKYFVSVLVETQVHELPKTKLEVGIDMGLKDFAILSNGEVFGNPRFLRTKELKLGKEQRKLSRMTKGGSNWNKQRIKVARIHEDMANARKDYLDKISTQIVKNHDIIAMEDLQVVHMVKNHKLAKSISEVSWSMFRSMLEYKARWYGRLVAIVGKTFASSQLCSCCGYKNKDVKDLNLRVWDCPACRTQHDRDFNASLNILAEGKRLLAV

SEQ ID NO: 56335 - protein, 441 aa, unknown
  TnpB Polypeptide
MFVTRTIQAETVPDLLPVCQHIGFIRADLWRRYGALANIGKNVSEIRAEIVERGYYNHIPIDGTIRNETIKDVVNDILLYKAAAKQKVRQDIAARTADPEERKRLYTLLKNDAWLSDSFLHRRMRKRFKHGVSQVRNQLVVRSDRHTEEVIDGRLVITIKIAKKYGNAIRLVTTTNGKDVDLTGSNLRILVKGDVTEIHSAYEKPAGRPHGEQALGIDKGYSEAFVDSDGEAHGETFGRILTDYSDRVAATGQGRNQLHALEKKHRAAGHTAKADRIKNHNLGRKKLLARRDRTRRQLRNVAYQSAHAVVDKAALVVSEDLTAPIAHKDQWRRFNRRMSSWAKGVLAEALDSVCAQRNANHVLVNGAYTSQMDSPTGLLKGKRVGDKFYRENGDVMQADHNAALNVLARLDDPEIKRFTPYQEVKRILLARSSGGTDRQQA

SEQ ID NO: 56336 - protein, 533 aa, unknown
  TnpB Polypeptide
MKLAYKINFPDNLKGTYKFLQSELNRVLSDDMMRKQILSIDSKLHPGMYWRDLRNLIGKETQYKWKKDNRFPSPSWYFCAFAEQIRQIHAAQREQIALYDALQKFGNCDNVKFYQYCIDNGIPFSKAKIKNLKQCKTTPELPSNARFVLDFAFINTQAAKMDNLIFHYAILDENKKTTWDELPIIFHRSSKYQPGNRVSKPRFSKDSDGNYYGVVTFDFEENQTNGQNIGAIDLGKIHSYTFGYVNPNGIMGEDFYTPSKLTNRLSSKLEQLNNERTLLLKKNEDVDKLFLSANYIPETAIKKWMERRGQIEGISNKITRIKDAINSEMSVEIVELCKRYNCSSLFMEDLSWLGSIGGKWNHSEQQSAIIQACSQESIAVYKVNPKNTSTAHPLTGEIGRPIGRDIIWSNGDLMDRDVVSVMNQVQREGKSAIKSDKYSKKEKKSGIKLVSLRDKKSPTPKRVKRTTSRRKENLKLLESMRNKNLLRASQMVVVLPRTSESATWSCVEKTSTQVIDYMKYKKVYKRRFLYIYN

SEQ ID NO: 56337 - protein, 403 aa, Azotobacter sp.
MQRLQAFKYELMPTGEQQCQMRRFAGSCRFVFNQALALQQANREAGGQYIGYVAMAKQLTAWRNSAETSWLKEAPVHPLQHALKDLEKAYKNFFEKRADFPRFKRKGQRDSFRYPDPKQIKLDQANGRIFLPKLGWLRYRNSRQALGELRNVTVSLSGGRWFVAIQTRREVEIPVSQGGAVGIDLGIARFATLSDGTFYAPLNSFKRHEAALRKAQQAMSRKTKFSSNWKQAKARVQRIHARIGNARRDYLHKTSTAISQNHALVFVEDLQVRNLSRSAAGTTETPGKQVRAKSGLNRAILDQGWFEFRRQLDYKLAWNGGHLVAVPPRNTSRTCPACGHVSADNRRTQERFACVECGFEENADLVGAINVLRAGHARLACEVSGAVRPPAAGTRRGESALSG

SEQ ID NO: 56338 - protein, 504 aa, unknown
  TnpB Polypeptide
MHTVQLLLKTSKYERHEIDRRFHALAHLHNVCVKHARKCMIRLQHDKRYAELRQLYNELVKKEKMSKEEKSQKKKLAKQLAACRTEQGLSKASLEHYLKVCGKQFSKLLSSQQVQAEADRVWCGVERCLFGNGKELHFKKLMDFDTIGGKSNKNGARFDLDAMYVNWLGLSLKCYLPKSENSLSYVWESLKGKISYCNIKRLMFSSGWRYYAEIVVSGDAPTRVLIGTSTMGIDPGVSTIAGVSEDACVLEELAPNAIQYEKKIQKISQRMDRSRRISNPNKYNEDGTINRSNRDPWKYSKNYVKMCRLLKSLYRKKHAYIVDSHRKLCNKLITIARYFPVEKMHFQALQKKAKETKRQEKKTEVKQKDGTVKVIQKYKRKKRFGRSINRRAPARFLLELKRKAEAVGGVYAEVDTKEFKASQYNHVTDTYEKIPLSQREKEIGKRKVQRDLYSAFLIRNADLDFKHPDREKCEYEFEYFADMQDQLILKMKESGLSMRQCFGF

SEQ ID NO: 56339 - protein, 326 aa, Thioclava sp.
MTATRSLSFKLYPSPAQAAALARKHLMLKDLWNAALEERIGAWRHSQTRVSRSDQEKALKEIRLGLEGWCGLVHTHEAQVVLKRLDLAFQAFFRRLRAGETPGFPRFKSAERFRGWGYKEHGNGFRVEMRDGGRHGHATLFGIGRMRMRGIARTPGRVLKADVTRTIRGWRLNVVVETGCAERAPAEGQAVGLDWGVSTFATLAHEDGAFEELPNPRHWGLEAEDLKAEQRRLSAAARARKISQRALRKHRRALARRHAKIAARRKDFLHKTSARIVGRHRLIATEALTVRNMTGSARGTAEAPGRNVAQKAGLNRSILDTAPAGF

SEQ ID NO: 56340 - protein, 412 aa, Fervidicoccus sp.
LASYPVRGEEPVVIEALKMRALPEGSCDHLLEFLRLYRKAVQMVVDKIWGINDKLSRMKLHRLFYNNLVSMGFRAHHAKEIYIYANSLVESAKSNGGRKPVLRKLGARVDKYDYRLDLDNMVLTLKLHSDHEVRLRLTTSRDRVEKFRGWSNYELVVKYDGSGFWVSIYFKRIVKLVKPRTVMSIDLNFDNITVAVLSFNSKLIKLKRYKTPHRKILTHRIWIERIQKRYPRSWRFVRGVRKAIDRHGEREKNISWSYAHKIGDLIAGLALKHQSAVVLEDLEKLRENNKRDRRFNKRLGLWFYRKIQFCVEYEARERNLEVIKMNPRGTSSKCPKCGKKLTENKHRILRCKKYSFIGDRDVIATINLYKKYVLKCSRCGVPGVAPNAPKPDEAPSGMRGSRDEAMKTHQII

SEQ ID NO: 56341 - protein, 398 aa, unknown
  TnpB Polypeptide
MLYTFCMLIYKGYKYRLKTQPSIHQQFVRYAGACRFVWNKILALNEGRYLAGVPRLSYADSTRLLTLWKQSEEYGWLNSVHSQVLQQCLKDLDRAYINLYAARAEPPIYRKKFLSDAFRYPQGFRVEGNRVYLPKIGLVRFWKSRAIDGTIKNVTVSRTGKHWFVAFQTEMDVSEPMHPATAAVGIDLGIATFAAFSDGTLLPPLNALRIHERKLARAQQVLARKVKFSKNWQKQKARITTLHTRIANCRHDFLHQHSTTISKNHAIICVEDLQVRNMSKSARGTLEEPGKRVAQKSGLNKAILDQGWGMFRRMLEYKQAWCGGEVIAVHPRFTSQECPVCGHVSALNRPQQALFSCVQCGYSYHADIVAAKNILARGLRDRLNAFGLSMTVPGIPRL

SEQ ID NO: 56342 - protein, 361 aa, Thaumarchaeota sp.
LYPSRKTEEILLRHLDLCRWLYNRLLEELNKAEGRKLSQKDTQALIVKLKKEKPELKQVYSKVLQMVNYQLWSNIRALSALKKNGRKIGKLRYKGNWFKTLNYNQSGFRLEEKKLYLSKVGAINIKLHRPIKGQVKGVLIKRESSGKWFAIFQVENSKDNTTATGKAIGLDVGIKYFLSDSDGRQIENPKFYKRSLARIRKLHRTLSRKKKGSKNRAKARVKLARAYEKVVNQRDDFLHKLSRFYVNNYDVICVEDLNIKGMVRNHSLAQKILDASWSKFLQMLSYKAENAGGTLLKVNPRGTSLEYKYGELDRDYNASLNILERGLAGLGRPFAPVEIKPLPLVVRASVIVEAGSPHPSG

SEQ ID NO: 56343 - protein, 367 aa, unknown
  TnpB Polypeptide
LSQDSAKEVLSLAKPRPEGRHRPRPVRRAGATLTELYPFYPRRQIPRVLKFRYVGWQCRLYPKRFQAHALAECLEALRELSNALFGESERNYSRIGRHLTNKEFRAFAQQWYHCHSNRHLFPSSAIYQVAADTYAAFLDRQRKTRWIRGLPRFEAKAHAPRIYLSGAGTRFEGDRVRLPKFGWMRWRGGDLPSHRLPGPKRRTTLGLVSGRVWCDAGGRWMLSCVFECGPLPLSAPVAAVAEMRQDGESIVTRLDGRSLDSVWTESDKRLEDDRRRLRRLQRRLSRCQDGSKRKAVLWERYRTVARRIRNRERDRNHKLTTTVVRAAGVIIVEQVRGEVLRQLDYKAEWHGRSLRYGEARRNLERQS

SEQ ID NO: 56344 - protein, 418 aa, unknown
  TnpB Polypeptide
MIKTVKLRIYPNKSQIKIINNTLGCCRYIYNKYIESNITSYKTSNKFISGYEFSKYINWLKKNNDDYNWIKRYSSKAIKGTIMNVEKSFKRFFKSKKGFPRFKSRKRTHKESYFFAKEPIMYITYNIIQIPILGRIRITQNYDLPSIEDVSSGRVIREYNKYYIMLIYEYNNEYLDLTKNSLGIDLGLKNYCTVANSSYNIGTRFIKHFKNNPKYKKISDKIIKLQQIISKKAEVNYYRLLNKWLDKNPTKELNENYKNIMKGESYNSSQIRKMFKKIRVLKSKLRNIRYDFINKTVHTLTAITNPKCITVEDLNIMDMIKHNGTKDTKLHKAIQESSFHSFKIKLMMKCLEYGIKFRMVTRWYPSTKKCFICNHKFKDITLKDRVLYCPNCGLEIDRDINASYNMLNVKDKYCEIVS

SEQ ID NO: 56345 - protein, 418 aa, unknown
  TnpB Polypeptide
VIKTVKVRIYPNKSQIKIINGTLGCCRYIYNKYIEYNIESYRTSNKFISRYDFSKYINWLKKNNEEYEWIKKYSSKAITDTIMSAEKAFKRFFKEKKGFPKFKSRKIIHKESYFFIKDQINYIKYNIIKIPILGRIRITQNYDLPNIRDITSGRVIREYNKYYIVLIYEYTNEYLSLNDNSLGIDLGLKNYCTVANSSYDIGTRFINHFKNNPKYKKINDKIVKLQQIISKKVEVNYYRLLNKWLDNNPTKELSENYKRIMKGESYNSSQIRRLFKKIRVLKSKLNNIRYDFINKTVHMLTVITKPKCITVEDLNIMDMIKHNGTKDTKLHKSIQESSFFIFKVKLITKCLEYGIKFRMVTRWYPSTKKCFICNHKFKNITLKDRVLYCPNCGLEIDRDINAAYNMLNVKDKYCEIVS

SEQ ID NO: 56346 - protein, 401 aa, Rhodovastum sp.
MLIRKAHIYRLYPIDEQEQKLGQWVGAVRFTYNIALEQRRDWYRPGRTFNFASQCREVTTLRAEVDWLRDVPVHPLQQAIKDLDRAYMNWWEGRAQAPQPRKRGLNDAMRFPDPATFDFRRISRHWGEVKLPKLGWVRLRWDRDIPGTVKNITVGRRAGIWTVAAQYEREIADPSPSTLPAVGIDRGVAVFAAVSNGTSIAPADCGKKALKALRRAQRKLARKKRGSNNRRKQVRRVARLHARVARARKDFLHKASSHVAQNHGKVVLEKLEVRNMVRSAGGTVEQPGRNVRAKAGLNRSILDQGWHGFRVMLGYKLAERGGRLIEVPAAYTSQTCSVCGAVDAASRISQSQFRCTACGHEANADGNAAINILRRADSPVLPVEGHRAKRPREAGTRRRAA

SEQ ID NO: 56347 - protein, 306 aa, Bacteroidales sp.
MISIAHRIELKPNNKQKTYFRKAFGCARLAYNWGLAEWKRMYEAGEKPSGRKLRTQFNAIKKEQFPFVYEVTKCATEQPFDYLQKAFDNFFRDLKQGKVSYPQFKKKVSYPQFKKKRDNEGSFYIQADKIRLSETNKNSKAFSKLTHNENGKHQYICMPNMHGGWVKMAEHIRFNYAKINNVCISQNGGKFYASFSLEITEEEYKRTHPNVDLVDANRKVGVDMGIKSALILSDGIAIENPKPLKKNQRKITRLSRQLSKRVHPKTKEERLQGVGMSNNYMKLSVRLAQAQGGHHDSDYTLWRDCH

SEQ ID NO: 56348 - protein, 392 aa, Ktedonobacter sp.
MRKTYKYRIYPTKETEQKLYWTLTRCRELYNAALSERKDAYKYAGKSISYSDQQNDLPEIKSEIREEYQDIAAHVLQDVLRRLSKAFDAFFRRCKNGEHPGYPRFQGRNRYVSFTYPDGAGWKFDGQCLHLAKIGKARVRLHRPLEGKIKTVTIKREVNEWYVAFSCEVDVPEKLPLSSEDVGIDLGVTHLATLSNGQMIEHPRYYRKAQKTLEKRQQALSRKKRGSHRRDKARQLVAKTHRTIARQRKDFQHKESRKLVEHYQVMVFEDIKSGNLIRKPKPKQDETGKYLPNGASAKGGLNKSILDAGWGTFVQLCSSKAAWAGRTLIKVDPKFTSQVCSQCGTVRKKDLSERWHRCDCGAELDRDVNAAINILERGRRQQGAISVEAPCL

SEQ ID NO: 56349 - protein, 531 aa, unknown
  TnpB Polypeptide
MSIRIIALTLAPTDAQRAAFLRLRRAFADACNHISRVAWDTGTFNRVRLQTLVYQDVRATYGLMAQHTCQAVSIVAQTYRADKDTKRAFKPTMAVTLDTPRLYRITGNHVAITTLDGRSAVKLNIGGIQRAWLKGATALKEADLVCDRKGRWRLMVSAVYADPPPMNTNGVIGVDLGRTDIAMTSDGDTFSGQQVTTVRDRYSRTRRMIQRHVSKGTRSSRRRGRQTLARLSGREHRFQAQVNHTISRRIVTWAVESERAIALEDLTGMRERTTRQARTKTERRRSNSWAFHQLRLFLAYKCVGEGVPLVRVNPAYTSQICHCCVRRVGGEDRVRRKPSRLMDHLVRTPLTPDFVSESSKEQGNHSMWGRSRIGESLTPRAISARCAWRELYCPNSSLPVFWHTPSEGGYHTTGPRHGNPKAAGVANHQPWRTFNQKAQKTNGAPTHIVPRFAVNAGSPTQGQHVPAWRQNFHITQSHAVMDMAEGKSATGAHMPYRRRYKAPVTGTENPNAWEEGEYLTSHHDNRKRWVC

SEQ ID NO: 56350 - protein, 376 aa, unknown
  TnpB Polypeptide
MSTRTIALTLRPTTDERAALERLRVQFNAACDYISCVAWDAQEFNKVRLQRLTYATVRADYGLMAQHVIRAIAVVADSYKADKAKRHTFRPTGAVVLDTPRLYRIVHNRASITTLGGRIKIQLGIGGHQRQMLRDAAKLAEADLVCDEKGRWRLKVCAHFLDVPVSTPNDVLGVDLGIVAIATDSDGAQYSGAKVLGLRARYAHMRRKLQKKGTRSARKLRRKRSKREHRFQADVNHVISKAIVQRAAQSGRAVAVEDLTHLRRRVRLNRSQRRTHSGWSYADLRAKIAYKAAMVGVVVVAIDPRYTSQTCSRCGHCERANRHSQSSFRCRQCGFAAHADWNAAENIRVRGRAILSESHTFRPPVSQTAEGQAHGL

SEQ ID NO: 56351 - protein, 392 aa, unknown
  TnpB Polypeptide
MVTQTLSLKLPFLRLNATKAADFARLQDINTATANEILDVPKEERAALTTAHFGHVAVGSAWMNQTIRNARAKTGVKRFKVLPLETNNQNWTLHKVGDTYSLGFGLWRGVKKRVPLEVYGAHAAHALDAIFDGTAKKGGLKLWRSRRGIWYALVSVTMDVPVAKTSGQWIGVDRGQNHLAVASTPTGRPRFWTCGVVRQARRHYAAKRRRLQKAGKHKTITRLEHKEARLVRHVNHIISKQIVRFAVDHGCGIRLEELRGIRQTARQRTDTKRQADKNRDYWPYFDLETKVLYKAALAGVPVEKVPAAYTSKSCCRCGAIGQRERHSFRCPRCGYRGHADHNASRNVGRWVGVACPVVLERGAGAMPASVPPGAVHDSPQAPYATDPVRGTA

SEQ ID NO: 56352 - protein, 192 aa, unknown
  TnpB Polypeptide
VIPVFADSAPAGDWIGVDLNTTGHIAVVAHPASGGVVMLGELADDVDHRERCGSARKGKKGRAERDRESRIRGDQNRRIAGEIVKMARQLQCGIKLEDLTGAGFTGRQKPGTPLPFSRRDGSLHHLRNLVEGRAHAAGVPVVLVDPALTSRRCSRCGEWGARKGKRFLCPHCGYTGHADANAAFNIAAARVR

SEQ ID NO: 56353 - protein, 402 aa, unknown
  TnpB Polypeptide
MKVSRTLQFKIIWENKHKLLSLNITMRQYRKCVNFYLHEIAKGTDITKLYYMAKQQYNLPTALIQTARDIAKEQYKSYTNNKNNSHFPHFIGFMLMRMDHRSISFKETNNHFKMWANISTINGRVRVPITSCDRYIEELKNNRFKAVQLKYNNRGLYLSVTFEDNRVIPSKKDFEYFIGIDRGINNIATVVVQNKYGDLLESRFFSGKRVLEKRRRYAKLREQLGKKKLWGVIHKTKNKERNYVKDINQKISTEIIRIAKKYPNTVIILENLKFIRDKINWSKKMNKKAHSWAFKELEDMIVHKAHDNSIAVRRVYPRGTSSTCKNCFGRVRRSPSARAVCETCKKEYNADWLGAVNITRRFFSYMLKDLGCSESSPRQGNDESEGVTAQDQYGLVAQLKVS

SEQ ID NO: 56354 - protein, 378 aa, Gloeobacter sp.
MTQVLTVSCKLNPTSEQAAKIDATLKAFADACTWVNLSAPTGLTNPAAMQKAVYHEARVLFGLSANLTVRAVARVCANRKTAKVKGHLVKSFAATSIDYDARIFSLNEKRWMVSVTLLGGREHIPLAIGNYQRHLLARQQPTSATLVKRKDGSYYIQIQVKSEPGEPSEPEGCLGVDLGRTDIAHTSTGESFDGQQLKETRDRFARTRARLQHRAAKGTRSTRRRAREHQKRLGSRERRFQTNINHRISHRLVQQAKSLNWSIALEDLTGIRQRTNTGPQSKTERRRSNSWAFYQLRQFVAYKAIRAGVSVVLVKPAYTSQTCHCCHRIGERQGKSFRCGGCGWHGDADFNGSVNISQLGRLVNSPRGPWMACRLEGF

SEQ ID NO: 56355 - protein, 409 aa, Gloeobacter sp.
MRLAYQYRLRPRASQVQDLNRWLDMLRSQYNWLLAERFDWWELNRCPVNACPLTSSIAPPKEQPDYYSQKRSLVTLKKERSGYKEIHSQVLQDMVKRVGLAFDRYLKGDSKGKRSGKPRFKGKGRYHSFTYTQADNDWIVGNLVNLPKLGSIKLIQHRPLPEGFDVKTACISKKADGWYITFSLLDESVPTINPDIDVKKGVGIDLGLKDFLVTGDGLHVPIPQYYRKAEKRLAKEERKLARKKNKASKRRAKRVCKVAKLHAKVANQRKDFHHKTAVLLLRKYEVIAHENLNIKGLARTHLAKSVHDAGWGTFITILANKAEKAGCLTIGVNPSGTTQMCSDCDAHVAKTLSDRRHCCPHCGLELDRDENSGRNMWKRAEGHPVLKARGVRSTSWTVKREAHPIPLCG

SEQ ID NO: 56356 - protein, 426 aa, Gloeobacter sp.
MLLAYQYKLLPTYEQRCRMDKWLDMLRHQYNYLLAERFDWYERNRCSINACPLLCHLPKLKEPPNYYSQKRSLVPLKQEREWYKDIHAHVLQDMVKRVELAFARYLKGDSKANRSGKPRFKGKGRYRTFTFPQLSAQPFMGNRIALPKLGKVKLTQHRPIPDGFFIKTASVTKKPDGWYVQLVLEDVSVPDAPSINIVPTEANSMGVDAGLEYFVACSDGFTNESPKFLRKAEEKLAKLQVKFALRKKGSKACRKLGQRIGRLHQTIARTRRQWHFETAGELLDRADVLFVEDLKVSNLSCRCKPKQDEEGRFLANGQSAKSGLNKSFADAGVARFLNEILPYKAEKAGKQVIKVNPAGTSQHCAKCLKRVPKQLSDRWHSCPHCGVELSRDVNSGMLIKKVGLGVRLTIKRESRKAGEARALSVG

SEQ ID NO: 56357 - protein, 403 aa, Gloeobacter sp.
MERAYRYRFYPTPEQEQLLRRTLGCVRLVFNKALAFRTDAWYQRKEKVDYLATSSLLTTWKQQEDLFFLNAVSSVPLQQCLRHLQKAFSNFWAGRARYPNFKKKRHGGAAEFTRSAFRYKDGQLFLAKCDAPLAIVWSRPLPEAVQPSTVTVKLDAAGRWHVSLLVDDQTVEPLEPNQKAIGLDVGITALVTTSTGEKVTNPRHYEHYYKRLRKAQRDLARKSSREPGQKSSRNREKARRKVARIQARIADSRRDFLHKLTTAIVRENQTVVVEDLAVRNMVRNRHLAHSISDAGWGELVRQLEYKCQWYGRTLVKVDRFFPSSKRCSSCGYILSVMPLSVRGWICPGCGTVHDRDINAAKNLLACGLASAAVGHTVEACGANIRPGGHRAEGQLHRSRNSKS

SEQ ID NO: 56358 - protein, 393 aa, Gloeobacter sp.
MLILEVKLKGRPQQFEAIDGAIRAAQFIRNKAVEYWQNHTTAGKHDLNKYCAVLAQEFEWAQKLNSMARQASAERAWSSIARFLDSRRRKISGKRRFPRFKHNSRTVEYKSTGWKLSDDRKSITFTDGFQIGQLRLIGTYDLSYQRDLIKRVRLVRRADGYYCQFCVDVERQVNHTYNGAMAGLDMGLDDFCTTTSGERIASPAGIARSERGFRRLRRRLNRKQKKSKNRSKLVRRLNRKYLKLTRQRKDFAIKSAKALCESNDLIVYENLKIRPRSRRYRQCRSFSDDIWPVFARWLEYYARLHRIVTVALSPRFSRTLCPRCGHPQQQALSSRTHCCVQCGHRETRAAQLLAREILVRGIQQLSTAGHVETAGLEPEKSLGREAPLPGTGN

SEQ ID NO: 56359 - protein, 379 aa, Gloeobacter sp.
MIKTFQYRLYPTKSQAKSLVATLETCRRFYNLCLEERKMAYQLQGQTITKVQQLRRVKQYRKSHAFAAKVHSHVLQVVVADIDKAFGAFFRRAKAGETPGYPRFKGRNRFRSFGLKELGNGFKLDGRRLKLFGVGRLAVRWHRPLVGTIKTLRIAYKAGQWFGSFACEVQTAQVAATGKEVGVDLGINSLIATSDGQHEENPRWYRSEQSKLRVLQRSVARKLKGGTGRKKAVLALQKQHARIVGRRKDFLDKLAYRLISRYDRIALEDLRITNMVRNRHLSKSILDAGWGYFTQRLAHSAASANRVVSLVSPAYTSKTCSCCGAVFEHLTLAQRWVECSCGLSMDRDENAARNILRLGQSLWASSSTMVGFAQEAVAL

SEQ ID NO: 56360 - protein, 370 aa, unknown
  TnpB Polypeptide
MLRTYKYKLYNTKKLNHIHRTINIAGIIYNHCIALHKRYYKLYGKSLNKFQLQKHLTKLKKRDKYSYWNKLGSQAIQNISERIDEGYKKFYKKQGGLPSFKKVSKYKSFTLKGKVGYKLKDNIISLNGYKYKFWKSREINGKVKTVTVKRDNIGDFYICISLEIEESKYNITSGKTVGIDFGLSKFLSLSDKTDIESPLFHLKNLSKLKRLNRNLSKKIKGSNNRKLAKKQLAKLHIKIANQRKDYFHKLSNDLANNYDTIFIEDLNMKAMQRVWGRKISDLAFSEFVNILNYKTNVVKIDRFYPSSKTCSCCGTVNEDINKDMKNLKNRIFKCNTCNLEIDRDLNASINIHRVGASTLRGETIRLASVS

SEQ ID NO: 56361 - protein, 363 aa, unknown
  TnpB Polypeptide
MITYEYKLYSSRRNKKLHKMINLSAIIWNHCIALHRRYYKLYHKYLKCNTLQKYLTKLKKLPKYNYVKELDAQSIQNIVERIDLAYQKFFKEYKNKKKCSIPKFKKVKKYKSFTLKQNGYKFINETTVIIKKQKYRFHKNQKLEGDIKTVTIKRDSLGDIYLFVVCKVDKPIVLSRIGNKIGYDFGLKTFLTASTSGNDDIISPLFFKKNINEIKRLCKNLSKKQKNSNNYKRAQIQLARLYKKIVNLRKNFHYKTAYDICSKFTIICIEDLNIKAMQKLWGRKINDLGFYNFVQILESVAKKCGCEIRKADKFFASSQICSCCGNINKQVKDLRIRQWQCSVCNTIHDRDRNAAINILNACV

SEQ ID NO: 56362 - protein, 395 aa, unknown
  TnpB Polypeptide
MMIKSIKIQLKPNNKQNTKLFECADVARWAYNFALATEQENYKNGGKFLNDGELRKRLTELKKQKEYAWLNNYSNNITKQAIKDACRAYKNFFEGRAEFPKFKSKKKSKPSFYVDTTKIKITDTHIKLEKLTISKKSNKQKLNFVKLAEKGRIPVGENIKYSNPRVTFDGVNWWLSVGVEEVETKHQEYTDGIGIDLGVKDLAVISSGQKFKNINKSSKVKKLEKRLKRLQRKLSNKYELNKIELEGGEYRYRKTNNIKKLEFLVQKTHRRLKNIRHNYIHQITTSLVKAKPEYVVMENLNTCGMLKNRKLSKAIQEQTFHEFKRQMEYKCAWNNIKFILADRFYPSSKTCSSCGTIKDKLSLSERTFICDECGCKIDRDLNASINLKNYGKSVA

SEQ ID NO: 56363 - protein, 415 aa, Mycobacterium sp.
VANRYRLYPTEEQAVFMRERHCADARYVWNLAVEQFGYRQHRERGTSGRPAPGPTARQRQLAEARQEIEWLRCGSSSVQQQALRAFDRAVQACFDGNAKEPRWRKRGVSEGFCVRDTKVVVHSRAWAQIAVPKLGWVKFKLSRALPADKLRMARITAAPSGRWHVSFPAPQPAVPDAGRAGRAIGIDRGVATTIATSDGQMFRAPTMRKREQAKLARLQREKTRRRKGSARRRSVVMRIAAVHETVAGRRRDWVEKLTTRIAARYDFVAVEHLAVRNMVRKPKPKPNPDRPDQYLPNGAAAKAGLNKRIHANCWGMFARRLGQKTKASGTTLVEVSARYSSQECRNCGHTAKENRESQAVFRCLACGHLDHADHNAAQIILARARPAPTPGPGAIPQGVGTARCAHGSENHDWAA

SEQ ID NO: 56364 - protein, 404 aa, Kutzneria sp.
MMVQARYRYRIEPTPAQRQMLARTFGCARVVFNDAIRCREQAWQAGEKLSPTEVQRRVITHAKTGQARAWLSEVASVALVQSVRDAHRAYQNWFDSLAKRRAGRKVGRPRFKSRKDTRQSFRLTRNGFSLRPNGRLCLAKIGDVTVRWSRDLPSEPSSVTIIREPDGHYYASFVVEVAPTPLPPLDREAGLDLGIARLATVATSDGARLDIPNPKHLARKLRKLARLEREKARRAKSGSNRAKTRRKVAIQHGKVARARRDYHHKQALTLVRDNQAVHIEGLNITGMVRNRRLARAIHDAGWAQFVRLLEEKAERYGRTVVTVSRWLPSSKTCSACGHVMDTMPLSVRAWTCPGCAAAHDRDANAARNILAAGQAERRNACGAWVSPPCGEAQGEEAGTIPDAE

SEQ ID NO: 56365 - protein, 392 aa, Ruminococcus sp.
MLKAYKTEIFPSPKQKQKIHRTIGVCRFIYNFYLAHNKKIYEKEKRFVSGYDFSKWLNQEFLPVNPNFSWITKVSSKSIKQSIMNADRAFRNFFEHRTGFPIWKKKGNSNVKMYFVKNGEKQIISCERHRIKIPTLGWVRLKEKGDIPTNPKTHVIKNGTVSIKAGRYYVSVLVEEAAPAKPVLNDFGIGIDLGIKDFAICSNGKFFANINKSGHIRKLEKSLKRQQRKLSGKYESLKKLSNNLKGEATRQNIRKQILKVQKLHHKLDCIRTDSLNKVISELVKTKPMWMTLENLNIRGMMKNRHLSKTIAQQKFFDFRTKITAKCRVYGIELRIADRFYPSSKLCHQCGCIKSDLKLSDRIYLCSACGYTADRDLNASLNLRDCQIYQVAS

SEQ ID NO: 56366 - protein, 409 aa, unknown
  TnpB Polypeptide
VRVREPVLVETLKMRALPEGSHDKLLEFLRLYRDAVQLVVDRIWGINEKLSKKKLHKLFYSDLVSMGFRAHHAKEVYVYAKSLVDSAKSNGGRKPILKRLSARIDKYDYKLDLDSMVLTLKLHNGYEARLKLVVPRKGVEKFKGWSNYEMVVKYDKEVFWVSIYFKRTVKTVKPRTVIAIDLNFDNVTLAVFTLDGGLVRLKRFKTPHRKILTHKIWIERIQKKYPKSWRFVKGVRKAIERHGERIRNISWDYAHKLGDLIAELALRYRSSIILEDLEKIRKNKENKKSREFNKRLGLWFYRRIQFCVEYEARERGLEVVKINPRGTSSKCPRCGDKLVEYERRVLSCKKCGFIGDRDVTATINLYRKYVSKHSRCGVSGVAPNAPKPDEALSGMQGNRDDAMKTHLVI

SEQ ID NO: 56367 - protein, 280 aa, Scytonema sp.
MTLRGKQLTLSCIGKRIAIILDVPEYFSRVFETWEFCGATVTYTKNTQQFWVRLVFETEDPQQIEGQIQGIDRGLYHQAVTSDGQFFSSSKIRAVQRRYLHNRRQLQQKGTRSAKRRLKAMSGREKRFMKDTNHCVSKKLANQADIAVFVLEDLSSIRTQRRGKKMNKWLGSWGVFTSKSSSCLTKQKHWVNELSIKILVTHPKSAIFVSISKGQIGASPGSSVEIVDIGLTRISMLPRMFGTTIFSLLPSAKSERRLPVSPVLREGFPPQATGEPARAI

SEQ ID NO: 56368 - protein, 372 aa, Clostridium sp.
MILGNKVRLYPTKEQEQKLWQSVGTARFVYNWTLAKQEENYKNGGKFIKDGELRKELTILKKSELNWLNEVSNNVAKQSVKDGCNAYKLFFKGIADKPRFKSRRKSKPSFYNDTSKLKVKENVVLIEKVGWINIKKNSIPIDCKYTNPRISFDGKYWFISVGIEKEQLLVELTKESIGIDVGIKYLAICSNGMTFKNINKTRVVKQLEKRLRRLQRRVSRKYLKNKEGSKFVKTSNIIKFEKQIKLLHRKLANIRSNHSHQATNMIVKTKPSRVVMESLNIKGMMKNKHLSKAIAKQCLYEFKRQMQYKCEFNGIEFVQSDKWFPSSKLCSCCGNIKKDLKLSDRVYKCECGNVMDRDFQASLNLSRYKLAV

SEQ ID NO: 56369 - protein, 405 aa, Nitrincola sp.
MQRLQAFKFELMPDGEQQRDMRRFAGSCRFVYNKALALQQAHYAESKKKLSYAGLCKQLTEWRKNEETKWLSETHSQPLQQTLKDLGRAYKNFFEKRADFPRFKKKGVSDSFRYPQGFKLDQGNSRVFLPKLGWLRYRNSRDVLGTVKNITVSQSSGKWFVSIQTEREIAEPVHPSTSIIGIDVGITRFASLSDGSFIEPLNTFRKYEQRLARCQRAMSRKKKFSNNWKKAKAKVQKLHTRIANIRRDYLHKTTTTISQNHAMVCIEDLQVRNMSKSAEGSVETPGRNVKAKSGLNKSILDQGWFEFRRQLEYKQVWRGGQVVAVNPRNTSRTCPCCGHVSAENRQTQARFACVECGFEENADLVGAINILAAGHAVLACGGTVQSGRPAKQEPAEATMQEFALV

SEQ ID NO: 56370 - protein, 496 aa, unknown
  TnpB Polypeptide
VNIEKFYYDEQTEMYEQIKKERDEHEQSLSVEEREKEHQKLFQEARTIMEKAERKKKEEYQIINPVKYQRYIIFRKNGIRSAVSYLIGIYVQVWEKLAEIPDAKRRFNAAEHLVHTTKKNHACFDFDIRFPKMPSYLRRSAIQHALGTVSSYKTRLDLWEKTDGKSGKPKLVYENHAMPVFYRDVMYREGAEGKDEAYLKLYDGHDWKWSCVRLDHTDMEYLRKCWSGKKASAPTLEKRHQKYFLRFSYKEEVTLTKTPVKEQIICSVDLGINTDAVCTIMRADGTVLGRRFIDHPSEKDRMYRTLGRIRRFQREHGSAQTQGRWAYTKRLNTELGKKIAGAIVRYAEENHADVIVFEYLEMQGKISGKKKQKLHLWRKRDIQKCCEHQAHRKGMRVSRICAWNTSRLAYDGSGAVTRDWENHSLCTFQTGKRYNCDLSASYNIGARYFIRELLKPLPATERSLLEAKVPPVKRRTSCVYADLRKLHSEMELLKAA

SEQ ID NO: 56371 - protein, 363 aa, unknown
  TnpB Polypeptide
LSKFSCSQTPTSERRSRQPSRSPTKRPTSAPRSPGSGAPSAPMISSSSPTVRFARSGYPPSRQCGSSRRSPTPTSWTAAPSAPSAPTPPSPTTTAACPGSPISRPSASGRSPAASRAFGSPWANSGASCWPIARANRTSSTGTASSTCTATCEIPEASVVAPNGFLGVDLGIVNVATTSDGTRYAGKHLNRIRHRNQRLRAKLQRKGTKSGKRLLKQRCRKEARFAADTNHVISKRIVAEAERTGRGIALEDLQGIRGRVRLRKPQRATLHTWSFHQLGSFIVYKALRAGVVVIHVNPAHTSQSCSDCGHVDRANRQDQATFRCRSCGFAGHADWNAARNIAERGGAGWAAANQPHADGRLVA

SEQ ID NO: 56372 - protein, 306 aa, Chloroflexales sp.
MQLGEHHVIKQTDARFGAIDAAAFAAKNFYNAANYRVRQSFIHDGVYLIKPSGLPIEITTRQTRIAQVRIVPRSGFYVVEVIYERDVVPAAVDPALVAGIDVGLNNLAAITSNKPGFIPVLVNGRPLKHINQFYHKQRAHLQSKLGRKGSTRLMERITNRRNRQITHYLHTHSRRIIDMLVRAGIGVLIIGKNDGWKQQITIGRRNNQNFVQVPHARFIPMLQYKAELVGIAVRTINESHTSKCSFLDGEPIGHRERYVGTRVTRGMFRTANGRRTNADVNGAYNIIRKAIPNAFGNGMGGVVATP

SEQ ID NO: 56373 - protein, 386 aa, unknown
  TnpB Polypeptide
MQTRVLQLKLRTPNQGKARRLADMQHAFTGAVRLHLDAAFGIPKPTVSSLHTACYRRARQRFPLPASTIQQARDKALSIYRSVQARRRKKHKTSQPELRRLLPLRLAVENLRIFADQGVVRVTTPEGFLWLPVLIPEVWQHLIKLPHGVSEFVKRGQDWYLMLAVKTEEVPGHDGPHFGLDLGLANLAVLSGPGVVRFFDGKALRYTRGRYFRYRQALQRKRKTGMVKRSKGRESRWVRCENHRVSRQIVDTVAARGGVLHVEKLLGIRDRTKKTRKVNRMLHAWPFAQLLGFICYKAALAGIRVVEEDPRHTSQQCSRCRHTERGNRPRQAAFRCKACGYEVHADLNAARNLAAGGTCSSGVPGVTPGVSRERAGHLACRGNCNL

SEQ ID NO: 56374 - protein, 409 aa, unknown
  TnpB Polypeptide
MLTATRVKLYPNKTQKALLEKHFGSCRFIYNYFLEKRDQYYITHKDAEKSSLNYMDTQNMLIELKKEYPWLYDTNSQSLQMSLRFLDNAFKNFFHKNADHPKFRKKGRDDYFAIPQHIKIKDNRIYFPKFKEGIYFKGSKGKLAEIKDINQIIIRKDAGYYYCSIIYEIDNELPKKKQLSSENSVGIDLGIEKFITLSNGATIENPRFVTKIEKRIKKLQEELSRKEKGSNNYRKHVLKIGKRFMKLRNEREDFQDKVSTAIAKQYDTIIIEDLNVQGMQQNHHIAKSITDVSFYAFKQKLLWKADRFGKNIVKLGRFDPSSKLCSKCGNLKKDLKLSDRIYHCDVCGMIADRDYNASKNIRKIGLIKVGLVQPEFTPVETATSGLHGIYSYRQMSLVGSGSSEASAEG

SEQ ID NO: 56375 - protein, 491 aa, unknown
  TnpB Polypeptide
LPELVINASNVISSLCYSLLRIEPYTTCEYRCTCCYARWYYRWGFEQAKPRIIALRVFKKVARRIAREGLRPIPMRPSTLVEPFQAVEEETKLSLKILRCALDHEYPVIVNMKSSLLAKDPWRKVIESLDDRGLLILQISISTLNPVKSRLIEPNASSPNERLRVAKQLYKYALALVKASKSNGGSKPIIKRMSIRLDRYDARIDLQNMVVEIVIREKRYRLRILHDPSYIKKFMGRKWYEVVVKYENGSLWVSIPFEYEYKPYRPRNVIAIDINLKTLTVFDGRKVRRIDTRFIEALSLKAYAEELQRKYPKRWRYNYRILSRIRSLHRRARNIVIDWCRKIAKYIVLKVRKTRSAIVLEDLEKLWQMRSQSNSKLAWRLSRFSYRKLQLAIVTKAIEHQVPIIFVDPRNASKTCPGCGSELRYFYRLALCPVCGYKRDRDCVGAINIYLRALKGMRGVYGCSPSALPMKDETRQRERTMNEGMKVYQLT

SEQ ID NO: 56376 - protein, 398 aa, unknown
  TnpB Polypeptide
MSRYRLRPTSAQQALLRKHCAHARYVWNLAVEQNSHWHPGRAAAPNYLEQCRQLTQARAENPWLADGPHTVQQQALRDYARAMTAFLDPQNPAGRPTWRKAGRDEGFRIVGRRGRQWDVRRLSRHVGEVWVPKAGWVRFRWSRAVPSGVKSYRVTMDRAGRWHIAFAAIPNFISAPCNGEVVGIDRGVIVSATLSTGELLRVPGLTARERRRLRRLQRKLARTRRGSDRRGQVRLAIAQMRARQTDRRKDWAEKTSTYIARRFDVIRIEDLKISNMTRSARGTAADPGRNVRAKAGLNREILRSGWGLLVRRLEDKAPGRVEKVNPAFTSQRCSACGYVDAKSRESQARFVCTACGFACNADVNAARNIAAGHAVTARGGDGVARPVNREPQLLLQSA

SEQ ID NO: 56377 - protein, 463 aa, unknown
  TnpB Polypeptide
METLDIRITHQGIRNKLIDVLLTYNKFENMLMTLIHENYNLYKEDKAKKDFDFLTSPEHIINALYNSKKFIHPKNLKNGKKLWKDLKETAKKLNPNNLTYVIKKVKDNLSLYETLEKYNTDPNDPSQINGYSVELDKEASLSLARLEENLIGIKLSNGLIYINMNKEQTKKLTGVNKLHSARVVYNDGDLYLQISYLKTEKNKIKYAGIDIGENNLMAVFVDDETTPSLLVSGKPFKDYDKMVNEIIDYLNELKSKEMLDCETSKTETNYTVKNTDKSKNIGRLINFLHTNRRKFLHERFNIMSKYVVEYLYLNGVTDLFISNRLANHTFLKIPFKTLLQCIEHNAQKYGINVHYIDESYTSKASCISDDVKSAQKNPKLADTFNGKRKGDSFHDKAINKRFNADLNAAVNHIIVGTGKSFAWLKEKMFKLCNPIKIKSENKFRKLLDELKSSKEVPNNCYFL

SEQ ID NO: 56378 - protein, 546 aa, unknown
  TnpB Polypeptide
MITLQCLLEFQNKQEKEKVLDLMRRFSSATRYAYKRLLEDENINELYKTISKLFNINRRYSDGAILLAQAMISSYKAREQNPKKLIFGSRKLFEQLSRNHLTGIRREKLKVKWRESRQGNLYSRGDKSKQGNVNLRLQWINDKIYLRINIGNKQYIYAKVIRNVSRKNDKWIDFMFMLLKAKESNSWFPYSVRLKLKNGKVYAFISFEEKLPPVVIKKDNGIIGIDINAYPFHLALAFTNKDGNLEKYQSISLDELLEASSEKRQYLEWQIAHQIIKLAKEERKAISIENLKKLPKGNRGDGFAKLRSRLQKWSYKRLLEKIEILAKRNGIELRKVNPAYTSVIGKLKYAPQFNIDKDIAAAFVIARRGLGYKENIPKNYKELLEDKEFLSYSIAVIEDNIAKHKKEIKEERNEYKRNKLKSNLAKLRKQLKVLQKHLESGKSESVTQQPVNQRKEQMRGLPVGGHKNWQVLSIAFTFSYLESHRDFSPLKRILLNGDWARMVNRLVPMLGIGTMILPKYRLLGLEVSEMAEYKYPNPSCSFAQFG

SEQ ID NO: 56379 - protein, 513 aa, unknown
  TnpB Polypeptide
MFITLRFKVIPQSKEDYEEISKLMRLYGSAVRYAYNRFLDSHNKNEAYHLVRKTFKDLPSWYANSAVEEALEILRSVKSKGENPRKVVFGGKRNFEKLCIRHLQGWRLEEVKRKWDEKRKGRLVSIGHAKNGGNPNIKLLLEDDGICLSITSTRKRKPVKAKVKRKVKSERDKWITLISMILEGKKFPYTIELRKKNGKIYGYVTFQIPIPQIKITKENGVIGIDINAKPFHLAMAEVNKDGNLISYTRIKLGHLNGFSKNRKDYEEWLVAHKIISIAKDKNKAIVIEDINSLSKGKRGDGRRKLRKILSKFSYNRILEKIERLCKLNGIEIIKVNPAWTSIQGKLKYSPQLNIDKDIAGAYVIGRRGLGFKEKVPKNYKRLLNDKKFMEYLKESLKQRQKELEEKLQKETNIYKQNPIKEDLDKLKKHLALLKSLQSEPEGLPGAYGRNSGNHQNLWQALEVALTTLLPEKRCFSPLKPVLVQGTWERVVSRLGPLCLGGRDNYWTRQRFDC

SEQ ID NO: 56380 - protein, 198 aa, unknown
  TnpB Polypeptide
LVETKIEKLPAVDKKVGIDLGLKYFAILSDGTKIENPKWLRKTEGRIRKIQRDLSRKQKGSKNYEKTRLRLAKLYEKIVNQRKDFLHKLSFKIIHENQVIVLEDLKVKNMQQNHKLAKAISEVSWSEFRIMLEYKSNWYGREIIIAPQNYASSQICSECGYKNVEVKNLALREWKCPNCGTIYDRDINASKNLLKLAM

SEQ ID NO: 56381 - protein, 378 aa, Streptomyces sp.
VRAGGLQRRPQGSGDRPQREAAFPEDGRLVQAAHHRGEEHPGAGMARRGVGGRPPAVPPRPGCRVPELLRRPAGQAPAQGRPRYKSRKDTRQAVRFTANARWSITAGGKLRLPKIGDVKVKWSRTLPSTPSTVTVAKDSAGRYFASLVVESSPSEVLPQMTSELGIDLGLGHFAVLSDGTRIDSPRFLRRAEKRLKKAQRALSRKQKGSRNRDKARIHVARAHARVADARREFHHQLSTRLIRENQAVAVEDLAVKGLARTRLAKSVHDAGWSAFVAKLEYKAARYGRTFIRIGRFEPTSQVCSVCGVKDGPKPLHVRVWTCRACGAVLDRDINAAVNVAKAAGLAVSARGAQVRPERVPAPRGEAGTHPTPQPSTAW

SEQ ID NO: 56382 - protein, 264 aa, unknown
  TnpB Polypeptide
MIGSRDLESCPVPQIRRVRIVKRADGYYVQFGVHACREVEHVPTGKYIGIDMGLNAYSTDSEGNTIENPRYLRKAEKRLKRLHRKHSKCVKKSQNRKKAQKKLAKAHLKVQRQREDFARKQANALIQSSDLVAYEKLSIRNMVKNHHLAKSISNAAWGVFLRWVNYYGELYHVPVIAAAPNFTSQDCSRCGTRVKKSLSVRTHVCHACGLVMDRDHNVARNILDKASRTVGQTGTARADVALGNASGQKTSTRVSRGTLSKSAG

SEQ ID NO: 56383 - protein, 383 aa, Sutterellaceae sp.
MQIQLMMQFCGCARYVYNRTLSLEKSLYKKDSKHSFKYTAAANRLPGWKKKNPFLKKCHSQVLQQSLKDLELAYINFFEKRSNFPKYKKKFQHDSIRFPQGVELDEVKQQIRLPKIGWMGYRKSRDIIGTIKNVTVSRRGEKWDVSIQTEYEVVSSAPNPSEIGIDMGVKRFATLSNGDFVEPLNAFKQEQEKLAELQRKLARQKKGSRNSRKTKHKIARLHRYIADSRRDFLHKTSTKIAKNHSIVYVEDLKVSNMSASASGTKESPGKNVKQKSGLNRSILDQGWYGFFQMLSYKLEQRGGKLIKVDPTNTSRTCPRCGLVSAENRKSQATFACIGCGYRSNADEVGAINVLRAGRAQLACAMSGAVRPLSAGTRRDPLQH

SEQ ID NO: 56384 - protein, 231 aa, Sutterellaceae sp.
VTRALIDLGVNNFAAIVTTKPGEKPILVKGGFLKSMNQSYNKRSAELRSKGYKKHLWSVSFKRQRRIDDAIHKISRGIVDYCAEQDIGRIFIDRNKNWKQSTQMGRRNNQNFVNIPHAKLIEQLRYKGKAFGIEVVEVTEDYTSKASAVDYDPIPEYEAGKGRKPFSGKRTLRGLYRTKDGKIINADINGAINIGRKGLGDEWLKKLLGLDEGVFVNTPTVIRSPYGERKP

SEQ ID NO: 56385 - protein, 370 aa, unknown
  TnpB Polypeptide
MRKSYKFKLQNQSNTIKIGNMIDDLWQIHVHILLLARRYYRIFGKNISMYRLKAHLRKLKKTTKPHWADLPSQVVQDVVLRYGKSQDAFFENIEDRKAGKTTRKVGRPKIKPRQKYSSMTFTQAGYTLEGNRIKINCIGTWFSFHKHREIKGNIKTITIKRDKCGDYWICFSCENVKDSEPKLKTGKSAGFDYGNKTFLTSDEGKKIESPQFFKQSLNTLRSLSKALSRKVKGSNNWYRACRALARQHRKVARQRADWQWKLADKFCSEFDILIFETLNLDGMKRLWGRKVSDHAFSQFLQILEQKCAKHGKKFQKISQWTATTKPCSDCGYKNENLSLSDRQWACPECGSHHDRDINAAINIKRAGLAA

SEQ ID NO: 56386 - protein, 372 aa, Clostridioides sp.
VIVVEKAYKFRMYPNKKQQELINKTFGCCRFVYNKYLAKRIEVYKNDKETFTYKQCSSDLTNLKKELKWLKEPDKFSLQNALKDLDNAYKKFFKEKAGFPKFKSKKINRFSYKTNFTNGNIMYCGQYIKLPKLGMVKIRDKQVPQGRILNATISKEPSGRYYVSLCCTDVDIEVFENTNNQIGLDLGIKEFCISSCGDFIENPKYLKKSLNKLAKLQRELSRKTIDSLNRNKARLKVARLQEHIANQRKDFLQKLSTKLIKENDIICIEDLQVKNMIRNRKLSRLISDVSWSEFVRQLEYKANWYGRQIVKVGKFFASSQICNKCGYKNEEVKDLNIREWICPSCNETHDRDINASINILKEGLRLITIQNK

SEQ ID NO: 56387 - protein, 438 aa, unknown
  TnpB Polypeptide
MLEVHRSHQAKILNHGQVAESLDRHGWSASKLWNVANYHSREVWDETGEIPNHGDLKDELKTHNKYKGLHSQSSQRVLEELAEAFNSWYGSDDDRDNPPGYRKENYYDQQGRLVHEEHPRSTVTWKQKGIRHDTENNRVRLSKGRNHKEYPRAREYILVEYETVPGVTVENLQQVRAVYDRAKERWELHLVCKDKIETPTAPGTETAGIDLGICNFATVAYSTEDADLYPGNRLKQDGYYFPKEIAKCDDSGGDEATRLHHKWSERRTHFFHALAKHIVQRCVERQVGRINVGDLEGVRENEDGGSKNWGRHGNLDLHGWAFDRFTDILEYKAKVEGVEVVEVSERDTSKTCCICGREGDSQRVERGLYVCETCDAAFNADMNGAENIRLDINGESNSESVPNSGGDRSTGWLAQPGVYLYDLSCGFQPQTQVVDCKP

SEQ ID NO: 56388 - protein, 379 aa, unknown
  TnpB Polypeptide
MAVTLSHKICLDPTYKQEQYFKQACGTARFTWNWALNEWQHQYESALKPTALKLKKQFNAIKKVDFPWTYEVTKYASQQPFMFLQTAFNRFFNGTSSYPKFKKKGHHDSFYIGNDQFNVKGNRLKIPKLGAIKMHETLRFCGELVSGTISRIADKWFVSLSVKLESAPTSCESQAGVGIDLGIKSLATLSDGEIFEAPKPLKKYLLKLKRFQRRLCRRQKESHNRYKLKQQIAKIVNIRQNSLHQLTSYLTTHFGGIAIEDLNVKGMLANHKLARAIADIGFYEFRRQLEYKSKLKGNYLLIAERWFPSSKQCSACGNKKAELKLSERVYRCDSCGLELDRDLNAAINLKNVLNTGSSSEINACGQDGSVAACCDNQLG

SEQ ID NO: 56389 - protein, 420 aa, unknown
  TnpB Polypeptide
VVKNNMVRTLKLKLLIDQKESELLDEVSRLYNEVCNAVSSHIFENNFQLNFMSLQKDIYDDLRERFGLNSQMTISALKTVTARYKTVKEQLRANPMRFRDKYTDELHIVPRTLDWLMKPLIFKADQADFVRARNYRLTKGKLSLSTQSGTILVDFQAAPKFHKLLDEGWICGTATLVRRKQTWYLCVPMKSPKAEEDALSDKIDRSKINKIVGIDRGIVNLLCAADSTGKTTSSSGRAIQKKRDNFARLRYELQAKDTHSSRKKLKRIEQRENRWMTDVNHVLSKALVERYGAGTLFMIEDLKGVSFAEENLRRKSLKSRRNLRSWAFFQFEQFLIYKAEEQGSYVLKVPAKYTSQRCPKCGVIDKTQRHHDEHEYRCRCGFRTNDDRVGALNLLYLGERFLAGEDKPKFVKSKTLSIAT

SEQ ID NO: 56390 - protein, 460 aa, Waddlia sp.
MLKGISLKANPTREQKIILSQWMGCARFIWNAKCEEDEYLRSFSKRYLPMKTFPKADQSFSQYKNRKLSPWLFDCPSQILRNSSSNWYKTYQSFLKGICGRPKRKRKGSKESIYLTRELFGFEVCTDGVKRLRIGTKKRDLGYLSIKNHGDYKEPNSIYIKKKNGRYSVSFCYEDGKSTQNLPTKERHLKHLKGCTREELESITVGIDRGVVRPVQAGDRFFDFTDEQKRKKKAKDRYIRRCQRRLSRQKKGSNRRKSTKLKISKSHEKIANIRKDFCHKTSRTLVDEKSTKIFVLEDLKTSKMTKKPKPQPCKSGKGWKKNRRRAKAGLNRSILDKGWHQLEIFLEYKALDAGKVVFKVPAPHTSQECVDCGHTHPDNRKNQETFSCVSCGHSGNADENAAEVIKKRAINLILDSGTELSKRGVLLDSGRGAVSKSSDAIATDANSKEASKKKRQAIAA

SEQ ID NO: 56391 - protein, 422 aa, Acidimicrobiaceae sp.
VAQFRFFNNFAIRDALGRPLYLDMAQEGSRCRTFRYRLHPTKLQVQALLLQQRYQCELYNAALEERIGAWTWERRSVSFFDQCRTLTGLKEYRPEVVASGITLCRGTLKRLDRAYGSFYRRVKRDETPGFPRFKPASRFDSLEWEDHGGWKLKTQHRRLYLMGIGEIKANYHRPLTGGPKSITVKREGTKWWLSVRCVNVPAMPLARTCSEIGIDLGVVNQIATSDGELKKGQHFGAQAQKNLARAQRELATKQRGSNRRRRQVEEVVRLHLKIKNQRSNAAHQLSRQLVNDYDFIALEDLKIIKMVRAPKGIPDPEQPGAYLPNGARNQAGLNRSIHDAGWGQFVSLLSYKAESAGRTVVSVNPCYTSQTCAECLHADAGNRVNQEKFRCRKCGHCDFADINAARNVLRAGRALQASACVG

SEQ ID NO: 56392 - protein, 445 aa, unknown
  TnpB Polypeptide
LGNQQLPGPSGRGFNDYPRNGSTLEAQGKCAGSSQEDHDIVCALGKLRGTLCGFWRGVAPANTRTKGGENETIKSYKVRIFPTAKQEQLMWQHIGARRWIWNYFLNLQQERYISGEKHLSAFDMIKLVTSLKQEDDHLWLNMVSITGLHRTCQDLGKAYDSFFAKRSGHPKFKSKKHSKPSFPVRESIFFEDGFVYVEKLGKLIHKTNYELPQGRGHKFSSPRVSYVGDKWLLTFGMECENQTPVLTDKAMGIDLGLKDLAIVSFGQEQIVFHNINKSRKMRQLERKRRHMQRVAARRKKGSQRRAKADDQIARIFRHQANIRQNYRHQTTRALVNRLPCRVVMEELNVSGMMKNRYLARAIVEQGFNEFIQQMRYKCEWYCIEFFQVPRFYPSSKTCSNCGEIIRSLKLSERTFNCPSCGISIDRDLNAALNLEAYKPPTGLVA

SEQ ID NO: 56393 - protein, 371 aa, unknown
  TnpB Polypeptide
VVTVVLKAYKFRVYPNMEQKTQIAKTFGCCRFVYNQTLAYRKELYEKEKKTVGKIACNNYCNQELKKKCEWLKEVDKFALTNAIYNMDAAYRKFFREHAGYPKFKSKHDNHKTYTTNFTNGNIAVDFETGTIKLPKLRNIKAKLHRKFIGKIKSATISQVPSGKYYVSILVETEHISLPEKEGCIGLDLGIKNLCITSAGKKYDNQKTLTKQERKLKKLQRQLAHKEKRSKNYYKAKKKIASCHEKIRNTRKDYLHKVSHEIISENQVIVSENLQIKNMIKNHHLAKAISDVSWYELTRQLEYKAKWNGRKYIKIDTFYASSQLCSVCGYQNPDTKDLSVRTWICPKCGAEHDRDINAAKNILTEGLRQIA

SEQ ID NO: 56394 - protein, 259 aa, unknown
  TnpB Polypeptide
VVNGNILVEDKRIRLPKLKWISMKKHREPAENCCLKSVTVSMEPSGKYFASLLYEGYSCENQAADEDYSNAKILGIDYAMQGMAVFSEEIELEKAGFFRRNEKRLAREQRKLSRCVKESRNYVRQKKKVARCHEKIRNQRKDYLHKLSRRITDQYDIVAVEDIDMKAMGQCLHFGKSVQDNGYGMFRNMLDYKLAWKGKKLVKIDRFFPSSKKCSKCGKIKKELGLSERVYRCTCGNEMDRDRNAAINIREEARRMLAV

SEQ ID NO: 56395 - protein, 373 aa, unknown
  TnpB Polypeptide
MMEYSYKFRLYPNKEQEDLIRRTFGCARFVFNHYLAERIEMYKATGKSPTRFAQDKDLTSLKRQEETTWLKEVDATALQSSIKDLDISYQNFFRRVKNGEKPGFPKFKSKHNHKQSYKSKCVGTNIKVFDKSVQLPKLGKVKCRVSKQVKGRILSATVSQNPSGKYFVAICCTDVEMEQLPKTGATVGLDMGIKSFAVTSDGVEYLNHKYLAKSEKKLAKLQRRLSRKTKGSNRWNKARIKVARAHEHVANQRQDAMQKLSTQLIRENDVICIEDLTPKNMVRNHKLAKSVLDAGWGEFRRQLQYKADWYGKKVVAIDRFYPSSQLCSCCGTQWAGTKDLAVRNWMCPVCGARHDRDVNAARNILNEGLRLLA

SEQ ID NO: 56396 - protein, 348 aa, unknown
  TnpB Polypeptide
VKGSEPYKDMGSNVGQATLRKLNQNWVSYFKSIKDWNKNPNKYKGMPRIPTYLPKDGRYELDIDNIKFRIVDACIYFSWTPLKILNNTYYTKISSDSKLIQCRFVPKGDDYIMEIIYEIEVPDICSDTERIASIDLGVDNLLTITNNCGLQPLIINGRPLKSINQYYNKELAKQKSMLKTKNDKDWSNKLQRLTTKRNNKVCDYIHKATKMIVDYCLDNNIDTLVCGYNQGWKQESNMGKVSNQKFIQIPYKTLVDKLTYKCENVGIIFKTTNESYTSGTSFLDRETPVKENYDKERRKYRGLFISNSGTEINADVNGSYQIMVKAFPNSFEDGIEGVGCHPIRVNLI

SEQ ID NO: 56397 - protein, 426 aa, Nodularia sp.
VLHKAVQVRLYPSKEQEIQLAQTFGCARWWWNYALNQSIETYRETGKGLSRVALNAFLPALKKAEETVWLADCYSQVLQATTLNLTTAYKNFFEKRAGFPKFKSKHGKQSIQYPQHVKIVDGNVKLPGNIGIVKAKIHRTIEGKIKTVTVCKTTSGKYFASILTEVEGENPTITFGKIYGIDLGLKHFAVVTDGEKVSKYDNPKHLAKHEKNLKRKQKKLARKQKGSSSRNKYRKIVAKVYERISNSRQDFLHKLSYKLVSDSQAVIVENLHVKGMVCNHNLAKAISDCGWGTFTNFLAYKLERKGGKFVEIDRWFPSSKLCSNCFHQVSEMPLDVRQWTCPHCGTHHDRDGNAALNIRAEGIRMLALSISTSLDGTEAEGIKAEGSAVSAVGGDVRPRLGRKSKLRHSPVSTEADTVLGTPSQCG

SEQ ID NO: 56398 - protein, 446 aa, Mycobacterium sp.
  misc_feature (199)..(287): Xaa can be any naturally occurring amino acid
MARLKVPEGWCVQAFRFTLNPTQTQAASLARHFGARRKAFNWTVTALKADIKAWRADGTESAKPSLRVLRKRWNTVKDQVCVNAQTGQVWWPECSKEAYADGIAGAVDAYWNWQSCRAGKRAGKTVGVPRFKKKGRDADRVCFTTGAMRVEPDRRHLTLPVIGTIRTYENTRRVERLIAKGRARVLAITVRRNGTRLDXXXXXXXXXXXXXXXXXXXXXXXXXXXXXXXXXXXXXXXXXXXXXXXXXXXXXXXXXXXXXXXXXXXXXXXXXXXXXXXXXXXXXXXXXLSRLHRRVNDVRTHHLHVLTTRLAKTHGRIVVEGLDAAGMLRQKGLPGARARRRALSDAALATPRRHLSYKTGWYGSSLVVADRWFPSSKTCHACRHVQDIGWDEIWQCDGCSITHQRDDNAAINLARYEEPPSVVGPVGAAVKRGADRKTGPGPAGWP

SEQ ID NO: 56399 - protein, 471 aa, unknown
  TnpB Polypeptide
MVKILLNQLNDDQPELFKILKNSKNLRALIAGQKGGKQADKITQCREYLKDHKLYQELRELYKQKLNEKLVYMLVHDIVKDVQNTIDKRKKGQKAAFPKAKKLSKINNFSLNFDNCKVKFNKKDNKIKLCFGREWLIFDLPYQSLSTNFLTNFKTIYKSFKLVYRLGHIEFVFHKKSDNVVPSHQFKKKAGRRKEKTAALDLGFKRLFTLFVNDDTTPSIAYENSEIINENCHYAYRTAKLQQIMNLHFNHHKDKDHHEYRHLKKRHNNAFYYRNNYFSDLFHKMSVEILNYCAKHGVTRLVVSKNLSFAKTDGSIKLVKRQKQPFYQIPFGKLIKMLEAKAKHFRIKIENVDEAYTSKTFFNKNIQNVIQEVKSLKDNQQKVPSTVFGGIRDGDTFYVNGRGKNNTLKIHADINGAINHIQVSKKPIKTDYLLEEKNRFKITQPLVVKSLKELRQLAITDLLWTDGAKAA

SEQ ID NO: 56400 - protein, 420 aa, unknown
  TnpB Polypeptide
MEIKRTVTILLPKDPDLLATVKAFQQVQQVLSQPCYNRGKPLGAIGLQRRCYDLVKGKLSAQMTISAIRIVAGAYKSAKCERKPVTEPFNFQRASALFLVGQRGRDADFRADGTLSIWTVGGRKRLNYQVPEAFQPILSNALEIDSLTVFERNGKLLGRMRVTLEVPAPKGIHPVGVDVNETNTLVAVDADERELFISGQRLNVKTRQTHKTRSRLLQKLAARKAEKKDTRSIRRLLKRLGRKERNRARTFCQQVAKQLVDWAKPNSVLVFEDLKMPKVSKKLRVARGVRHRLAQWQHYLIRQSVTNKAQERGMAIEYVNPRYTSHNCSKCGLRGNRKSHRFECPHCGHQDHADKNAAVNIRTRYTVLRAAGDSNTQAQLVLKASAKRSQSGESWSVDSEALEKSEGKPATVTPGVPPLG

SEQ ID NO: 56401 - protein, 403 aa, Blautia sp.
MGIRRTYKVQIGRGHGLYPWCETITSLANNLYNACRFRQRQLITAARKTDRELTDNEKGVIAEFLSVLNCNGRSGLPACPRYETFDTVMKLTKNPDYYAKGLPRQSAQQVLKRSCADVDNFFAAVKAWKDRGCPEGERPKFPGYKRKGGHGAVAITNQDCTLKEGRDGNLIAGLPFAKSMPLKIGFPLGRLKQAEVCPDNGVYVIAFSFELDLEVPVPVHPASWIAAIDFGVDNLMAVTNNCGLPCLLYKGGIVKSTNQGYNKRLAQIMQEEMKKPGCPKNKEGKPWFVPTEESMGMTLRRNNIVHDFMHKAAKHLVLWCVENRIDTIVGVNAGFKQEVNIGHINNQNFVQIPFAYLRSCIKYLCEEQGILYVKREEDLEYDQMSLVEYIDPFTGEPVRKNKK

SEQ ID NO: 56402 - protein, 348 aa, unknown
  TnpB Polypeptide
MACGVNFVWNYVNELSYRSIRERGVFLSAYDMHKYTSGAGKELGLHSHTIQCVATEHADRRKQFKKAKLGWRSSFGAKRSLGWIPVNTSASKWKNGQVYHAGHYFKVWDSYGLSKYKFRSANFNEDSRGRWYFNVVVDAGASLGFGKDEIGVDLGLKTIATCSDGSSLENNKHYLELQPKLAIAQRARNKDRIRAIHAKIANRRKDALHKFSRSLVDRCGLIVVGDVSSQKLMKTKMAKSVHDAGWSMLKAMLSYKCDHAGIVFKVVDEAYTTQTCSDCGALPDSRPRGIAGLGIREWTCSECGAAHDRDVNAAKNILALGHERPVVEISKSKDKGKMPTPEVLVINL

SEQ ID NO: 56403 - protein, 308 aa, Desulfosporosinus sp.
  misc_feature (98)..(116): Xaa can be any naturally occurring amino acid
LIKNTLQEYIKTANNVVSDYVVGGNTIKHTSKTVSANLPSALKNQVIQDAKSIFKKYTKNLKANTKKEPDKQKGIKVPILKKPVAIWNNQNYSIKFSXXXXXXXXXXXXXXXXXXXGTDTMGIDLGLKIPAVAVTEKGKTIFCGNGRQNKYTKRKHRSLRKKLGKLKKAVAIKKLNNREQRWMQDQDHQVSRQLVNFAKANNISTLRLEKLSGIRQTARTSRKNEKNLHTWSFYRLAQFIEYKAIMEGIKVEYVDPRYTSQTCPACGTRNKANDRKYKCGCGFKKHRDMVGAINIISAPVVSGNSLSA

SEQ ID NO: 56404 - protein, 380 aa, Peptostreptococcus sp.
MKQLKAYKFRISPTEEQEIFFAKSFGCVRKVYNLMLDDRMKSYEETKDDTSKKMKFPTPAKYKKEFPFLKEVDSLALANAQLNLDKAYRNFFRDKSIGFPRFKSKKNPVQSYTTNNQNGTITLVDGKFIKLPKLKSLVRIKLHRQIKGIIKSATISRLASGKYFVSILCEEDIQELPKTNSTIGIDLGISHFAILSDGQKIDNHKFTSKMEQKLKREQRKLSKRCLMAKKKGIKLSDAKNYQKQKNKVAKLHEKVMNQREDFLNKLSTSIVKNHDTICIEDLNIKGMLRNHKLAKSISDVSWSRFVTKLEYKANWYGRKVIKVDKWYPSSQICSNCGHNDGKKELTIREWTCSNCNTNHDRDINASINIKTEGIRLLEIS

SEQ ID NO: 56405 - protein, 372 aa, Peptostreptococcus sp.
MKKAHKIRIYPNTKQQIQFQKTFGCVRFYWNFILNQTQTNYKMKQEDEMYLEDKTTYAILKKQEEYSWLKEVEAQPLSQVTMDLRKAYKNTFKSKFGLPKFKSKKYSKKSYRTAAGMKVNENYCYISRVGWVKMAEKLRFKGKLMNVTISQSKSGKYFAAFLVETENVELEPVENKIGLDLGLSHFCVASTGEKIDNKKFYHSLEKRLIIEQRKLSKRLEIAKKHNRKLDDCKNYQKQKKKVALIHEKIFNQRNNFLHQISSRITDENQVICIEDLNVKNMIKDHKLAKSIADVSWSEFVRQLEYKSKWKGRKLVKVDRFFPSSQICSKCGHNDGKKELTIREWTCSNCNTNHDRDINASINIKTEGLSGLA

SEQ ID NO: 56406 - protein, 399 aa, unknown
  TnpB Polypeptide
MERLQAYKFRLRPKAGQENLMRRFAGCCRFLWNKALALEKETCESEGKRLGFVLLCKILRDWKKDDATSFLSESHSRILQQTLKDLDRAYKNFFAKRADFPRFKKKGVHDAFRYPQGFKLDEGNSRIFLPKIGWVRYRKSRATEGTPKNVTVSFSAGKWYVSIQTEREIPEPVHPSQFAVGIDMGVARFATLSDGSSVTPLNSFRRHEKKLASLQRKLSGRAKFSANWRKLKKRIQRLHRKIADVRNDFLHKLTTAISKNHAFVVIEDLKVRNMSRSASGTMDAPGKNVRAKSGLNKSILDQGWFEFRRQLSYKLTWLGGTLLVIPPQYTSRTCSRCGCVDKHSRQTQAKFKCTSCGFELNADHNAALNILAAGQAVTACGAGRAQAPALKQEPAYGAA

SEQ ID NO: 56407 - protein, 357 aa, Alkalihalobacillus sp.
MSQVMTVKLKLLPTKEQSAFLKISSLIYINTVNSLVSEMIQTKELTKKTSKDIDVLLNSSVKNQVIRDAKSVFNKTKKKNYTVRHILKKPVILWNNQNFKVLDEHISVPLIIKDKSKRVSIKMIADQYELDLLNSSSKIGTLRITQKNKKWIAQIAIECSIPTQSSAKVMGVDLGIKIPAVCSTDEDEVLFAGNGKQNKYIRRRYGSCRKKLGRVKKQNAIDKMNNKEQRYMKDQDHKISRSIVAFAVSKNVGVIKLEQLINIRKQTSKSRKNNRSLSNWSFYRLAMYIEYKANLLGIKVEYVDPSYTSQSCPNCTIKNKAKDRQYKCECGYSGHRDLVGAKNIRYAPVLDGKSLTA

SEQ ID NO: 56408 - protein, 341 aa, unknown
  TnpB Polypeptide
MNYALTELKEQQPMLRNYHSKMLQMISTKVAAAWTALKELKRRGHAAGNGKLQLLKECHSFTYNQSGFNIHQDFDAKCLLWLTKIGHIEIRIHRQYKDIKQVTIVRQTGKWYSVVICAIIRKQHSNIVYTKPVGIDVGITNYAYDSDGNHVNNPLFLNEEIKPLRRAHKTVSRRVHGSKNYKKAITWLQRLHRRIANKRKNFLHNLSASYCRSHDLIFVERLRLQNLNKNHCLSRHVMDSSWGMFKQMLEYKANRLIEVEPYNTTIDCSKCGNKVPKTLAIRIHECDRCGVVLNRDYNAAINILQKGLKILPMQHGEVTPVETLSRVIEAGTSPRALVVDS

SEQ ID NO: 56409 - protein, 314 aa, Aneurinibacillus sp.
MFCPQLPALKKEYEWLKEVDSIAIQTSVRHLADAFTRFFKKQNDRPRFKSKKHPVQSYTTKQTNGNLAVEGNQIKLLKLGFVRFAKSREIEGRLLSATIRRHPSGKYFVSLLCEVEIQPLPRVNQNVGVDLGIKHFAVLSNGEPPVKNPKYLRRYESQLARWQRIFSRRKKDGKNREKARIKVARLHEKIRNTRQDFLHKLSTKLIRENQTICLEDLQVSNMVKNHNLAKAIADASWSEFRSMLEYKAEWYGRTISIVSKGFPSSQLCSGCGYRNKDVKDLNLREWDCPACGSHHDRDTNAAINILREGMRLLA

SEQ ID NO: 56410 - protein, 377 aa, unknown
  TnpB Polypeptide
MILARKVRIIPNKEQEQQLWKSVGTARFIYNWTLARQEENYTLKGTSKNGGKFISDNDLRKELTILKKTEEYKWLNEVSNNVAKQAVKDACNAYKRFFKGQSEKPKFKSRRKSKPSFYNDNIKLKVKNNIVLIEKVGWVNTSEQLPIDVKYNNPRISYDGKYWYISVGIEVENPVVELTGESVGIDVGIKDLAVCSNAMTFKNINKTKLVKNLEKRLRRLQRKISKKYEMNKEGRKFVKTSNIIKLEKQIRLIHRRLSNIRNNHLHQATTKIVKTKPSKVVMETLNIKGMMKNRHLSKAIAQQGLYEFKRQLDYKCQLYGIEFVEADKWYPSSKTCSECGHVKTRLSLSERTYICEDCGVVIDRDYNASINLSRYSA

SEQ ID NO: 56411 - protein, 375 aa, unknown
  TnpB Polypeptide
MRKMFQYRIYPHKKQVKALETTLEECRWLYNHLLENRRDAWEQEGKSLSLYQQQETFSILKQERPSLKTVHSQILQNVAVRIDLAFQAFFRRWKAGEKPGYPRFRGKNRYDSFTFPQSGFSITHENRVCLSKIGTVKMVSHRPVRGNVKTLTIHKSSTGKWYASFSCERERERLPEKTDAVGIDVGLKTFATLSDGQEIANPRFFRAEEKALAKVQRKHSQLAKGTPQRRTHRKVVARVHERIAWRRQNFTHQHSRKIVNQSGLICVEDLSVNRMVHTHCLAKSISDAAWSAFFDQLAAKAEEAGRELIKVNPAYTSQTCSRCGHRQKMALSERTYHCPCCLLVMDRDFNAARTILALGLQCRVVPEAPGLSRGE

SEQ ID NO: 56412 - protein, 304 aa, unknown
  TnpB Polypeptide
MRNFFNGTHRRPSWRKKDLSEGFRIVALRPGHVRRLNRRNGEVLVPKVGWVRFRWSRQIPEFRSCRVRRDRAGRWHVAFAAVPAPVPGPGTGEVVGIDRGIAVTLALSDGTTFQAPDLTPTGSLTRKLSRAKRGSARRLKAREALARVKARNADALKDWAHKASTQVARSYDLILIEDLKIGDMTRSARGTPDNPGRNVAQKSGLNRSILQQGWGMYAAYLEYKATGRVQKISPAYTSQRCSECGHVDARSRESQARFACTSCGYSCNADVNAARNIAAGHAVRGGLALAGPANRGPQELLLAS

SEQ ID NO: 56413 - protein, 369 aa, unknown
  TnpB Polypeptide
MSFRLKVTVPGHISGLHPELEQLIFRFENVRRRVYRIKWKGVGRLEILRQLTKESGLPARYVNAAYDSIKALPPHVTFGGKQTQRFRQGGKLSHEEYRLQRHRILICRGEKARQGNLCLRIKDGKLRITVGRNKWIWLPIHIPKKYQHLVNHAESYTVLLKRRPDLKGYEVRITIKAEVPEIKRPERVMALDINSGHVDFSVADKETLKPVAVGKVDCHELLDANKGKRKILLHLIAEKVTNIARHYGAEVFAGKLHASYTHGHRFNRRVQGMNQFQLRQILEYKLPMKAVSYTELSEAYTSKLGTRLSKPLGLDVHKAASYAFAIKAANYPFFKSLLNRVIFSSGVSAYEGDGIPSTRPSWGSPQTVA

SEQ ID NO: 56414 - protein, 413 aa, unknown
  TnpB Polypeptide
MEYSHRYRAYPTDEVAERLEYQLDVHRQLYNHVRWDYTNSPEDEKPSEYDQNNKLPEWKRKWPIFSKLHSKAAQATVARFHWNLSNLSKKKEKGYKVGRLKRQTPRDYRSVTYNQSGFDLDEKRGCDRFAYVRFSKIGWVKIRYSRAIPDRATMKEVTFKKERTGEWFVSFGLETDDADLPEKPDVDSLDTSNSVGIDLGILNYIHTSDGKTVDWLDLEDEYERLQREQRKLTRKEYGSRNYEKQRRKVATVKRYIRRKVLDYQHKLTTWLVREYDAVFVEDLNVAGMLQADENARNKHDAAWRQFITLLEYKGNLYGTHVVQVEARGTTKECAKCGVETEKPLWVRKHSCPSCGFETDRDANASINVLKRGFAELGMGWPEDTPVETVTATDTTDFRTVSASHVVETGSLPS

SEQ ID NO: 56415 - protein, 375 aa, unknown
  TnpB Polypeptide
MKYTALKVRLIPTKEQQRLLWMHAGTRRYAYNFAKNYSENYYKNYGKGISANDIAKIFRSQYNQIPWIKDICKDVVHESIKDYGKAREKSFKDFNNGFHTSFKSKHDLYQGFAVDFRKIKINGKIYLPKIGWISVNQTPKRCKYINPRVVFDGQFWYLSLILEIPETEVKLTDEVIGVDLGLKSLAVVSNGDIYENINKTKKVKDLEKKKKSLQREMSRRYKKGSKVQSKSYIKSKKAHLNICRKLKNIRQNHLHQVSNAIVKTKPKAIVLEDLKVSKMLKDKCLAKPISEACWRTMRQFITYKAERCGIEIVIADEWFPSSRLCSNCHEKFNEVEQGRTWGLDIREWICTCCKCKHDRDLNAAYNLKWYYNNQV

SEQ ID NO: 56416 - protein, 412 aa, unknown
  TnpB Polypeptide
MAHETSKRCRTFRYRLHPTVRQTQALLRQLDYQRELYNAALEERIGAWKWERRSVSFFDQCRTLTGLGDLRPEVVASGITLCRGTLKRLDRAFAAFYRRAKSGATPGFPRFKSANRFDSLQWEDVSGWKVKSEARRLYLLGVGDVKANYHRPLLGTPKAITVKREGTKWWVSVRCVDVPAMPLAPTGREVGIDLGVANLVATSDGKLIVGEHFGSRARVQLAAVQRKLATKQRGSNRRRRQVEEVARLHRRVANQRKNAAHKLSRRLVNDYDLIVLEDLAITNMVRAPRAKPDLEQPGAYLPNGAAAKAGLNRSIHDAGWGALASLLSYKAESAGRIVVTVDPHYTSQTCAECDHVDAGNRVSQAVFCCRACGHRAHADVNAARNILWAGRARQALPAWVETRPLPDRTPSD

SEQ ID NO: 56417 - protein, 411 aa, unknown
  TnpB Polypeptide
MLIGLKLRLYPTKEKEVYINKLLGSCRFIYNQCLNKKINDYKELKINHNLTSLGKFFHNDLTKNPDFYWFQEHNTKILKQSLIDMLDAYSRFFKQGSGFPKFKSKHDKQSCRFPIEAISKKQDFSKSKINLIKKLNNLKFKTSDKYINYLIKNKSNIRSATISKNKSNEFYLSILIDGHLIKTLDNPINFSIGIDLGIKDFVITSKGDKFENLKLIRNNQKKLSKLQRHHSRKKKGSKNKEKARLRLAKYHQRLVNIKENYLHKIVNTLLNENQVICMEDLNVKGLLKNHNLARSIQELSLYRFETILKYKSNWYNRQVINIDKFYPSSKTCSDCGYINHELKLSDREWICPDCGVIHDRDNNAATNIEQEGLKIYLELYKNKIPIRDGELTPLESSDYTLSELGSKITHF

SEQ ID NO: 56418 - protein, 367 aa, Herbidospora sp.
MTQLVRRAYKYRFYPTSEQAELLSRTFGCVRLVYNRALEERTRAFAEGRRVSYGESSAALTAWKKTPELAFLNEVSSVPLQQALRHLQAAYANFFAKRAGYPVFKSSKRSRHSAEYTRSAFTWRNGELTLAKMRRPLAIVWSRPLPEGARPSTVHVSKDSAGRWFVSILVEERIRPMKPVGAAVGVDVGITDLVTLSTGEKIPNPRHEQAVRRKLARAHRALSRRKKGSRNRVKARVRLAATYARMTDRRRDFLHKLSTRLVRENQTVAIEDLTVRGMLKNRTLSRAISNAAWRELRAMLEYKADWYGRELLVVDHWFPSSKVCSHCGQRRASLPLNVRSWRCACGVTHDRDVNAARNILAAGLAER

SEQ ID NO: 56419 - protein, 419 aa, Ktedonobacterales sp.
MQLVEQHRIDRHDPRWKAIDAAAWASKNLYNKTLWHTRQAYVFQGHTVLSYSFLDKLMQATDLYRALPAKVAQWVIKQVTLAWKSHFEVMNRYTTNPASFAGHPGLPDYLDTKKGRNLLTYTDQAISRDPKNAGWVIPSGLAIQVQTRHTHAEIAQVRIVPRSTHYVVEVVFEQVPNPQPVDPALIASIDIGVNNLAAITSNQPGFVPLLVNGRPLKSLNQGYNKRRAKLQAALPKETYTSRALDAMTDARHRAIESYLHTASRAIITLLVKEGIGTLVIGKNVGWKQNVNLGKKTNQHFVFLPHARFIDMLTYKAALVGIVVMTLEESHTSKCSFLDGEAIGHHDQYVGKRVKRGLFRAATGVLLNADINASYNILRKFAPEAFANGMSTCVLRPAPLRLPDRRQERSKQHVRPRTSV

SEQ ID NO: 56420 - protein, 402 aa, Brenneria sp.
MKRRQAFKFQLRPNGEQERDMRRFAGACRFVFNKALALQNENYEGGSKYIGYANMTSWLVRWKTEPETQWLKETPSQPLQQSLKDLERAYKNFFQKRAEPPRFKKRGRHDAFRYPQGVNLDQENSRISLPKLGWIRYRNSRPVIGEVKNVTVSQSCGKWYISIQTEYEMAEPVHQSTSMVGLDAGVAKLATLSDGTIYQPVNSFKASQRKLARLQRQLSRKVKFSHNWKKQKRKVQRLYSHIANIRHDYLHKVTTAISNNHAMIVIEDLQVKNMSKSAAGTASQPGRNVRAKSGLNRSILDQGWYEMRRQLEYKQCWRGGRVLAIAPAYTSQKCGCCGHVAKGNRRTQSQFECLACGYRANADINGARNILAAGHAVLASGGTVQSGRPVKQEPAEVSRASV

SEQ ID NO: 56421 - protein, 295 aa, unknown
  TnpB Polypeptide
MSSNAFRRCRTYKYRLYPTKRQEDDLVCQLSYQRELYNAALEERIGAWKWEQRSVNYFNQCKTLSSLKEVRPEVLGSGITLCRGTLKRVDRAYAAFFRRVRSGETPGFPRFKGVPRFDSLEWVDKSGWKLTDEHRLRLLGVGVVKMNYHRPLAGTPRALTVKREGRKWWVSVRCVEVPAEPLERTGREVGLDLGIVNLLATSEGELVDADRFARRSCDHLAVAQRSLDRETRVESSSAAGARGCSTAPQGSQSASERPPPTQSTTGQSVRPHCDRRPQDQEHGAVPQAAPRSIKS

SEQ ID NO: 56422 - protein, 295 aa, unknown; identical to SEQ ID NO: 56421
  TnpB Polypeptide

SEQ ID NO: 56423 - protein, 217 aa, Lachnospiraceae sp.
MRSDGTVLGRYFYKTPKEYDCLKRKIDHIKRAQHHGSRCVKNLWRYADGINHDISVKTASFIEGIARMYDADVVVFEHLDTSGRKHGSKKQKLALWRKNEVQRMVADKVHRLGIHISHICAWGTSRLAYDGSGTVLRGNKSQKTNGSYSVCEFTNGRVYKCDLNASYNIGSRYFVREILKSLPATERQHIQAKVPGCAKRSTCTLSTLINLNSALYA

SEQ ID NO: 56424 - protein, 279 aa, Pyrococcus sp.
LKKILSTEKFTKVERKQLRDKLLKEWNYAAHYVDSAINQMLGLVKSYKRKLRRGKKVREPKLKKKFVYVKSTLFTLKGSVLRITIIPRKYYLEVNLANYPYLLPFLKELFEGKIKLGGLFLFPDKLVLNFVKTVEYFKPRDWMSVDINLTNVTVLANLTVYNFDTRELYHIHRVYEVKRQKIQKISAWNKKLSEKLLKKYSRRERNKSKDFLHKLANKIVEIARERGMGIILEDLNGIKENVLRGSKGLNRKLSKWNARELQRLIEYKAKWFGVPVCLC

SEQ ID NO: 56425 - protein, 417 aa, Pyrococcus sp.
MGKIVLTYRMPHNWNINPFLKEYQRLLQRAIDEIWDNTSWKEKKVKHRYSLGNEEYRYYETIRLIPYFPQSNDFKRGLRNKLLREWPFAKHYVDSAIKTAYSILKSWRQNYLKGRRKRVKPVVKRKFVRVKTTLMKVEGSKIRITIKPREEYLELDFSREWFYERIKDWKVGELIIRERDILLTFSKEVEFSGRIKIGIDSNLTSLDVYHPEKGWIRVDLSELHRISETYDRIIDMLKSIQRKAPKRIGLLLEKYWTRRRNRIEDYLNKLAVQLSREFPDAIFIFEGLNKFKMLQNGSRKFNRKLSRATWKKIVGKLSYRVPIEFVNPAYTSSTCPICGSKLESRNGLVECFNCGFKADRQFVGAFNILMRGLGVALSGVERDDLPPNEPRGELNAMRPKSVVRVDLNGRRFTHIHS

SEQ ID NO: 56426 - protein, 404 aa, Pyrococcus sp.
MPSETIKLTAKFKLKEIPNGLDVLFSTYREIVNFLISYAYENNITSFYRLKKETYKNLRKEYPELPSHYHYTAIDMATKIYRGYRKRRGKAKGKPVFKKEVIMLDDHLFKLDFEKRIVKLSTPSGRIELEFYPAKYHEKFKGWKVGQAWLVKTPKGLFINVVFSREVEIREPENFIGVDLNENNVTLCLPKGEFIQIITHEREIRTGYFVKRRKIQKNLRVGKKREELLEKYGSRERNRVDDLYHKLANKIVELAEKYGGIALEDLTEIRDSIRYSAELNGRLHRWSFRKLQRIIEYKAKLRGIKVIFVNPAYTSTLCPICGGKLSPNGHRVLKCKCGFEADRDVVGSWNVRLKALKMWGVTVPPESHPMKKGGWKVSRIDITQITADQNGYFMRRLRRALLLQ

SEQ ID NO: 56427 - protein, 365 aa, unknown
  TnpB Polypeptide
MYPNEETKSQINNIFGSTRFTYNYYLTKIKEDKFKPSKTTIDTKSIIKDINTNLKNTYPFLKEIDNNLIIKTIYQLSDNYKKYSTNNFGYPKYRSKYQRNSFTITNPSIEVNLKTKKVKLPKLGDIKIRGYRNLNKIDGKIINATISKENTGKYYISIIYEQITPAKVTPKTIVGLDLGVKKQITMSNGISYDNQKYEEKYKKKIAILQQILSKRKKGGKNYYKTLKKLNIVYAKLRNARKYNTHKITKEIIQNNDIIVCETLQVKKMLMAKKMSKQITDVTFYEIIRQLNYKATYYSKLFYQINTYYPSSQTCSICNHKDTKYKDLNEREYVCKSCNSVIDRDLNASINIMFEGLKLYIKDNFA

SEQ ID NO: 56428 - protein, 214 aa, Lachnospiraceae sp.
MEQTITAKLQILVNPFDKQILCDTMKAYSDACNYVSEYIYKTHNLSRYSVQKDTYYQVREIYGLRSQMAVSCVRTVIAKYKTILENQKEWIKPVFRLPQLDLAWNRDYSLNTKNDIFSVNTLNGRIKVAFYKNGFEQYFSDNCKFGTAKLVNKHNKFYLHIPVTYEITELKKSEVSNVVGIDRGIRFLAATYDSNGKSVFYEGNVVKQKRAIIP

SEQ ID NO: 56429 - protein, 169 aa, Lachnospiraceae sp.
MIVMENLYFMRVMSLNKNVPSSRRRMKAIGQRENRWMQDVNHCVSKALVENNPVGTLFVIEDLSGIRSATERVKVKDRYVSVSWSYYDLEQKLSYKALKHHQLVEKVNPAYTSQTCPKCGHTEKTNRNKKMHFFCCKNCGYKSNDDRIGAMNLHRMGIELLVPDAVATE

SEQ ID NO: 56430 - protein, 213 aa, unknown
  TnpB Polypeptide
LVGFACSKSFDTIIKVVISKHGHRWFASIVVDTPINTPIPAPHGKPIVGVDVGIKHLAVTSEGHYFENPKALKRHERKLKRLQRQLSRRQKGSRNWRKTKAKLVKLHYRITCIRQDAHHKATTSIVNGASRIGIESLNVAGMLKNHRLAKALSDTALSSFLSMLKYKAERIAVKIVEADTFYASSKTCSACGAKDKDLSLSDRTYHCSDCGHT

SEQ ID NO: 56431 - protein, 410 aa, unknown
  TnpB Polypeptide
MSNYRTYIIHTCERTDELDAINELGGRIYSKTVSLVRKVNDRKDFWLSVGDAKKYLRCLEYPCHAHSVQAIIDDYYGALRSFFSRRKRDPKARPPYKTRKYHPFTWRATGISIQDDKMRLSMGKDRDAILIPVAKVFGKVAVEVSMIYNRKKRCFEFHATYQVKPTQHRPKKRSAVAVDMGEIHPISAFDGQQALIINGRFIRSVKQYRNKFLARINHKISRCKRGSHRWKVLKAAKNRVLTKIKNQIKDTEHKITSFFVSACRVNKAQTIVLGDIKHIRQSINYSKRSNQKLHQWSFGKISRMITYKAEQLGIEVKTESEKYTSQTCPSCKHKHKPSGRVYKCPKCGWTGHRDVVGASNIWTKYQGWVFNPVVGVLASPAGVRFTPHLRRLDSWSPFRGLISKKPVKNR

SEQ ID NO: 56432 - protein, 206 aa, unknown
  TnpB Polypeptide
LGLTSFAALSDGRKVDNPRWLRQRERALRRSQRNLRRKRKGSRNREKARLRTARLHARVADARRDFHHQFSTQVIGEHQTVCVETLNVAGLGRSRFAKSIHDAGWGQFTAMLEYKANLYGRTLVRVDRRFPSSQLCSACGHRDGPKPLKVRIWTCPDCGTVHDRDLNAATNILAAGLAVTACGPGVRPSASRAVGDEAGTTLAGAA

SEQ ID NO: 56433 - protein, 431 aa, unknown
  TnpB Polypeptide
VCRPGNVSTEPYDGPTKPGEATSGVTHTGDMGRVQVRRAYKFRAYPTRPQEGRAMRLLADHCDLYNAALEERRQAWGMSHVSVSYGMQSAQLKEIRRADPDGQGRHSFTAQQQTLRRLDTVFRVFFDRARAGRTKPGYPRFKPYSRFDQVRFVDGDGARWSPAAGGGWARAYFQAAGSVKVRQHRSVRGTVTALQLKREGRRWYVIVIAETDPVPLPAAGREVGVDVGVARFLTTSDGEIVANPRFLAASAEVIADLQRRKARAKPGSGNRARIRRALAREWRKIRNRRRDFHHKTARALVRECDVVALEGLNTAGMTRRPAPKPDPERPGAFFPNQAAAKAGLNKSILDAGWSQFTSILASKAEEAGRRVVFVNPAGTSITCHQCGRRCARPQRKTVICPVHGQMDADVNGARNIYARAGLGSGQAAGAA

SEQ ID NO: 56434 - protein, 373 aa, unknown
  TnpB Polypeptide
VKGGGFVERSYRFRIYPNIKQLTQIQRTFGCCRFIYNHYLAARIESYEASLTTFGYNACSADMTVLKKSLPWLAGADSTALQSSLKDLDTAYQNFFRRVKSGEKPGFPRFKSKREHRRSYKSKGSIKIFENIIQLPKLGRVKCRVSKEVKGRILSATVSQNPGGKYFVSLCCTDVEIEPLPKTGAVIGVDLGLKAFAITSDGTEYPNPRYLAKNQKKLARLQRQFSRKSKGSNRREKARIQVARLHEHITNQRSDMMHKLSTQLIRENDAICIEDLAPQNMVKNHRLAKSINDASWGEFRRQLEYKAAWYGKKVIAIDRFFPSSQICSCCGYRNTSTKNLAVREWVCPECGTRHDRDVNAAKNILSEGLRLLA

SEQ ID NO: 56435 - protein, 302 aa, unknown
  TnpB Polypeptide
MEYSYKFRMYPNAEQENLIRRTFGCCRFVFNYFLAQRVSEYESTGKSPTRFQQDKELTALKQKLECLQEPDKCALQNALKYLDAAYKNFFRRVKNGEKHGFPRFKSKHEHRQSYRTNGSIRIFENAIQLPKLGRVKCRVSKEVKGRILSATISQNPSGKYFVALCCTDVEIEPLLKTGVVIGVDMGLKAFAITSDGMEYPNPRYLAKNQKKLARLQRQLSRKSKGSNRREKARVQVARLHEHITNQRGDMMHKLSTQLIRENDVICIEDLAPQNMVKNHRLAKSISDAAWGEFRRQLEYKAA

SEQ ID NO: 56436 - protein, 328 aa, Haloferacaceae sp.
MRTIRTFEATIPNQQQVRDDLDHLGWAASKLWNVGRYYTQEQWDETGEIPNDGVLKAELKNHERYTDLHSQSSQRVLEELAEAFNGWFAKRRNDDGRARPPGYRKNGDSHPRSTVSFKAAGFKHDAQFTRVRLSKGRNLKEHRSDFILCEYQTRPDVDLTEWDIQQVHAVYTRDEWRLQFVCRTTIDPEPPGEEVVGVDLGICNFAAVSFGGESVLYPGGVLKEDEYYFTKKKAKCDDSSSREATRLDRKRTGRRTHFLHALSKAIVEECVQRCVGTIAVGDLGGIREDDESGESRNWGDHGNLDLHGWAFDRFTRLQGDSSHDCSRG

SEQ ID NO: 56437 - protein, 429 aa, Haloferacaceae sp.
MHYNYKYRLDPPEPLTETLLHHVDTCRQLYNHVLYLLNEADDIPARYEVQGRLPDFKTWWDDLTDVHSKVLQMVVKRVYDNLSTLKAQKENGRAVGMFKWKPPREYRSLTYNQSGFELKNTSGRPVLWLSKIGEIPIHLHRDIPENVTIKQVTVKREPTGEWYATFGIDVEEATPEKPETPEKVVGIDVGILKYAHDTDGYAIESPDFSDERERLERAQRDLSRKEHGSANWEKQRQVVAERHADLKRKRRDFLHKLSNYYAREYDLVAVEDLDAKGLVELPGNSRNRAGTAWGAFLRMLQYKCKREGTHFVAVDAKDTTKECAACGVKTDKLLWVREHSCPSCGFEADRDANAAWNILSRGLEKVGVVHSESTSSESHRDSDGLRKSLRDFRTPVETALPVDTVVSAKRVVETGSPTLTERTAKAVSE

SEQ ID NO: 56438 - protein, 412 aa, Haloferacaceae sp.
MYYAYKYRLTPSDAHREELDRHRDICRQTYNHFLYRLNEYDRDGIPSMSALRSELPDLKQWWDDLTDVYSRTLQVVVERLYDNLSSLSALKRNGYSVGSLQWKAPRDYRSFTYSQRGFKLDKKGGRNVLWLSKIGNIPIRLHREIPDDATLKQVTLKKEPTGEWFATFGVQMDREPPTKPESPERCVGIDVGILSYTHDSDGFSVESLDLSEERERLEREQRKLSRKQHGSVNHRTQQRVVARRHADLKRKRRDFLHRLSAYYAREYDLVAVEDLDAKGLMGLPSNSRNRASAAWGTFLRMLEYKCEREGTHFVAVDPRGTTKECSKCGVSTDKPLWVREHSCPSCGFEVDRDLNAAYNILARGLDHVGVVHSESTPVKTALPTGTHSVPAQRVVEAGSPALTERTAQAVSE

SEQ ID NO: 56439 - protein, 465 aa, unknown
  TnpB Polypeptide
VKTTYQYEFYPNTKQKLELNEWLRISRYWYNRQLGDRFDWWEMNRTYVNACPLVSSIASLRDKPNFYSQKAQLPVIKKDLVKVWHSGELLDFKRVDSTILQEVSKRVDKAFERLIVGDSKGGKSGKPRFKSEANFKTMTFATASSDWIKLVRKNWFYLRLPKIGAIKVRMHREMPAGFNLKQVSITKKADGWFIQMMLEDSAVPESAPEEVIPTWDNSMGLDAVLQENVYLATSEGEKLPSLKPLRSNQAKLDRISIKRNKRKRGSKARRKLAKREGRQHQKIARSRKDFQYKTAHKLVRTGKKVFFHEDLNLRGLTKRAKTKQADDGTFLPNGQAAKSGLNKSWMDAAFGNFFKTLEYIAAKAGSVVISKNPAYSSMVLSYRDEVIFTDCSIRGYWDEQESLMVDRDINAAINLKRLGLDIFPSIKRRSGKLSVVGTMDHSTTKEILRTLHRAGDAYAVSERSA

SEQ ID NO: 56440 - protein, 422 aa, Coleofasciculus sp.
VLNLTFEYKAIPTPEQIQLIEHTLTVCRKVWNFALRDRKDWINSRKCQMNVCSITSEYIIPADAPYPNYALACKSLTKAKAQFRELSTVNAQALQQVLKTLETAFVDMKRKGMGFPRFKNRYRMRSFLYPQLGKGQLLRGNQVKLPQLGWLEYVKSREIPEGFVVKQVRIVRKASGYFVMLTLECDACVPNVMPHGYPLGIDLGLDKFVATSDGDVIDRPRFLDSLHRKLKLLQRRLKHKQKGSNNRHKLNSKIARLHQRISDIRKDWHFKLAHKLIRGAGMIFAENIDFRVWAKGMLGKHTLDAGFGQFLNILQWVCWKLGVYFAKVNKDYTSQVCPQCDSHTGKKELSARIHACPECGYTVHRDVAAAQIVRNRGMSGVGRILDNKENACGDGLTGTGNSLVKSSRSRKKGYEASLKSAS

SEQ ID NO: 56441 - protein, 370 aa, unknown
  TnpB Polypeptide
MNWAYRYRLYPTIEQESLFAKTFGCVRFIYNKMLGDRLDYYQKTGKKLNNTPAQYKAEYPWLKEVDSLALANAQMNLNRAYNNFWKNPKHFGKPHFKSRKSGCFAYSTNNQKGSVRIEDGKIKLPKVGWVKLRQHRPLMLNSTIKTVTIRKTPSGKYYISILVEYENQVLPIIPKHFLGLDFAMKGLYVASDEPDAAYPDFLRKAEKKLAKAQRILSRRAKDSKNREKQRKRVAVLHEKVANQRRDFLHKKSRFLVSRYDAIGIEDISIKEMAKHKKGRKFSFGKSVADNGWSLFVQMLSYKLAWQGKHLVKIDKWYPSSQICHSCGNQNAKTKNLSIREWTCPKCGTHHHRDKNAAINIREETKRIALA

SEQ ID NO: 56442 - protein, 340 aa, unknown
  TnpB Polypeptide
MQQLYTYETELKPKYNQEIIDYFNDYTILFNKIVRNIWQYYNHQNVLVSQKSKLNTLIQKQFGISKRTANSIILYVSGKYNSLKGTKKYELKRNSSKIEKLDDLISELALKLDVMAMKAHHNQLKEKELIKYRGLKKKFVAIKKAKDRLLKENIKVQKQLDDQHFSLCFGSKSLFNHQYLEVDHQNWYNKFKTARDSSILFVGSKEETCCNQQLQLFYNKKNNQFTVQLRKEYAYQANDRDKYLYGQVYFSYGNKELQKVLKTKNSPITYNIIRRDDRYFLQTTITIEKNDISKQDRYIGIDFNKGFIALSEVKEDGNLINTDKIYYRFKQGNKTTNDLR

SEQ ID NO: 56443 - protein, 424 aa, unknown
  TnpB Polypeptide
MILSYKTRLEPNNKQAQKLKQFAGAARYAYNWAIAKEKEAYELGNGFIGENELRRIFTRHKEEADWLYTISNDVTKQAIKDAATAFSNFFKGNADFPQFKTKRKSRPAFYQDVFKFKATDTHIRVEKISDSTRKNKQRINWIKVSEKGRIPLLASGYKNPRITFDGIHWYASVGIEVADKPAEPLNDGIGIDLGVKDLAICSDKHTYKNINKTDRVRRLEKQRRRKQREISRKYEKNKDGDKYVKTKNIVKAELALLKLNHKLTNIRKNYIHQVTDEIIKRKPSFIVLEDLNVKGMMKNRHLAKAVQQQNFAEFATILEYKAKQNNIKIIYADRFFPSSKTCSCCGAIKHDLKLKDRIFKCNSCGLVIDRDYNASLNLYLYGIRTVSSTGIYVCGVLYQTEVALAKQDTMKQKSNINLSKSVSL

SEQ ID NO: 56444 - protein, 433 aa, Streptomyces sp.
VSRFRMYPSPAQAEQMLTHCAHARYVWNLAVEQHAHWRRWRRSAPGFAEQCRQLTEARQANEWLGSGNADVQQQALKDFAKAKNARFASGFGEPTWRRKYRHEGFRVIGAGRVPECNADGSPKLNAKTGKQVMGRSVVVHRLNRRWAQVKVPGCGWVRFRLSAKGKGAKLPEAKTFRVTFRNGQWHIAFAVIPEPIPAPGTGKVIGIDRGVTITAALSDGRKLNCPQLTGRERAQVRKHERRAARARKDSPQKAAEYAKAARLKAREANRRRDWCEKTSTMLARSYGLVRFEKLNIQNMTRSARGTVEQPGTNVAQKSGLNRSILAQGWGLLRQRTEHKAPGRVEDVPAPYTSLRCSACGWIEKKSRKSQADFECVSCGFTCNADNNAATNVAAGQGGIPRPRCSAGAGGATTATSRSSAREPQPNWVGIPLF

SEQ ID NO: 56445 - protein, 222 aa, unknown
  TnpB Polypeptide
VYLYLLESPPLEGARFWKLYNGTWLLYKGVRAKEDYFYFQKKIAEVQSQADKARNVDEYEAQEELNREKRRLFKKLTRRLLHLYRNLASHLLKRLHDQGVSTIYLGYPYNIAQDKGSKFTSNLWSYRKLINAIELKAQEYGMKVYEVVEYNTSRFCAYHDVEVKRHPRGVVSCPKGHKLHSDLNGALNILKKVVGVVVSTVKKPLSFLVLHNGVAPVKGCNT

SEQ ID NO: 56446 - protein, 356 aa, unknown
  TnpB Polypeptide
VRKTIKAKLMFLTKSKEEKIKKEFINFQKSLRGEETELYSATEQQAERLRSKLKNKFKRKKEYPLIIRNDCIRVKETDNKLCKYWARIPLHKKSIYAAIAFPYKDKELLFSGNIRETKLKRHKNNWYLLITIEKEVKMNHNISSVISCDLGEKHLLSTVLVEDNSMKPEFYGDEARGIRRHHSWLRKRLQEKKLLKKVREVGRREKMAVNQICHEISKEVVRTAKENNSAILLGDLKGIRNSAKGKTFNRIVSNMPFDKLSKFIEYKAEAEGVPVVKMREWHASKTCHLCNNEGKRISQGLFRCPTCGLEYNADLNGAINLFKRFDGYILSNGVVFDTAQNLEMKQADAYAEPRIS

SEQ ID NO: 56447 - protein, 286 aa, unknown
  TnpB Polypeptide
MSNYGCQQVLINPSRELKAVLEFVCAESNKLANCGAYYSRQLYFKTGKIPPKYELHRLLKSNPHFKALYSHVAQQTLTSVAESFKSFIGLLKGVAKGTVVQHPKLPGYKKNSLKLATFPRADVKLKDGQLRFPLGSKVKAWFGIDAFYLSMPSNLDYDRLNEIRILPRNGCFYAEFVYKVDEFLVDTDRQRVLGIDHGLNNWLTCVSNCGTSFIVDGLHLKSLNQWYNKRVSVLKEGKPQGFWSNRLAAITEKRNRQMRSGREQGSKESYYSLHSQPYRYCCFWLE

SEQ ID NO: 56448 - protein, 247 aa, Brockia sp.
VVCELHGGRRDSRSPSAKGTCGGDRRRPRIVRHDRGRKGVRKVGAPKPLGKALRRLKRLQRKLSRRGVRDKTGRLVERTKNYEKARLEVAKLHRNVRNIRLDFLLKLTAELVRVHPVIAIEGLNVAGMLKNGHLAWHIAVVGWSTSRALLKAKAKLRALRLVKANHYEPTSKTCYVCGHVLYELPLSTRKGTCPVCGTNHRRDENTAKTQVRLGRWLYDLIASSAGSDAYGGEHCGGMEIRSASTSS

SEQ ID NO: 56449 - protein, 319 aa, unknown
  TnpB Polypeptide
METRHKAYKFRIYPNKEQQVLLAKTFGSVRLVYNHYLIAKTRTYEESGKSLSYTKCAADLVALKKEKEFLQEVDSIALQQALRHLDTAFQNFFRDKSKGYPKFKSKKHHHYSYSTVCVNNNIKLENSVLTLPKIGKVRIKQHRAIPEGYTLKSVTVSQTPTGKYFASILFDYEVDIQPAEFVNIIGLDFSMHDLFVSSEEVQVDEQFLHYYRKALDKLAKEQRILSHRKKGSNRYYKQRKKVALLHEKIANQRKDYLHKLSRQIANAYDLVCVEDLNMQGMSQALNFGKSVSDNAWGMFLRFLDYKLAELGKMLVKIDK

SEQ ID NO: 56450 - protein, 432 aa, unknown
  TnpB Polypeptide
MVTALNLSLSSCATKYLNFVAGIFNTLREYIIVMKTIRTIKIKLGENTEFNSVSKNFINACNHMSSIVFKTKELNSIKLHKKHYTSIRKRFNLPSQLSCSTFKYVSASFQSQKTQNKWNEVVYKKHVFPIVWKRDFSFSKTKGICFWGKPIKFSDPRTPPIETWKDSKLKKVGKQWFLVLSYIIDIPEPKTEGCIVGVDSGIKRIFTATNSMNSKTFTFHGGELNSRRLNIRRVRSQVQAVGSRSSRRLLHKMRSNEASITALLMHTASKRLVAWADSLGARRIVMENLANIREASIAKGKNLRSKVMRWPYAQGQFFTQYKSAAKGIELELVSPKNTSRGCPSCGHIDSHNRNGLKFRCILCGYTGDADRIASINIRNRSVVTRHNLVTTGSDNTPRSSELSEIVSDSHDSSSSRLQSKFTAKTQSSSAIE

SEQ ID NO: 56451 - protein, 444 aa, unknown
  TnpB Polypeptide
MRITSSYGIKLKGDFKSLETSIELYRKSLRMLIPIINDGWDLISECRYTNQKYNLIEKWVHNTRTNHARFDFDEQFPKFPTYLRRSAITKALGIVSSYRNNLENWEREGKGQAPKLSLTHFTYPAYYKGNLFRNFDPIRQTIELKVFKNGDWVYEVYQLKTSDCRYYQTYLTGKKQNVPIIQKKGRRFYATFSYEEETTLIPEESITKICAIDLGLNTDATCSIMDKDGTVYARKFISFSAEHDRLHTQLGRIKRNQKRGSRYNKTLWCAVAGISQDIADKTTKAILDFGNEHGVDAFVLEHLDFKGQSSVKRAHFWRYKRIYKVLAHRAHQNGLRVARVNARNTSRLAFDGSGWSKRGWEITPGTPYSMMQFVTGKIYNADLNASYNIGARYFIKNLLKTVTVTQRLALEAKVPQVAKRSTCTLSHLINLRSELAVLTTRTQA

SEQ ID NO: 56452 - protein, 390 aa, unknown
  TnpB Polypeptide
MPVRKVSQRIPFTPSKTQTALLEQCFGARRFAYNQQVEAFNAYDKDTNPRPKYPGVTDMKVANEWLRDSPIPSSALSNTIMDFRKAQSSYFRQAQYGKNRPRFASKNDNIQSFRNTVPMRHMDGNRYPLSRKLGSVRIRRRDRIRYPLESLSSWTVKRENGVYYLVLLFNVDIQPKTKASGEVGIDLGVKDFLTLSTGEKINYPDRLRQLEERVRWEQRKLFRRVKGSSNYRKQKASVAKAYAKLRHYRENFQHQVSHKLIEDNQFVGMETLVVQNMTRKAKKKLDENGKPMRNGQSRKRVMNRSILRNGWSSFVDKLAYKAQWYGRTFVQVDRFYPSSRLCNGCGHKYAGLRLSEREWVCESCGVLHDRDVNAALNILAEALRISQVGE

SEQ ID NO: 56453 - protein, 429 aa, unknown
  TnpB Polypeptide
MLVQHRVVTEYRSYEERVKAASGESTKYISQGWKRTANGSAPSYGEDYVNLGAVDKQYAAIENNPFVDGEIILKMVTQGAWHRLIFSFDSKRFREGKITLPVIKVQDGAPVFIFTVVTDNPIVQFSGDYTIGVDVGINNYATVVVREAETGRIVYETTLSQRVHSLWNSIRASQWQVRDLRCKAATLLHDRQARMAALDEAQLHREAASRKKRELAILAAQEIADLSHAWGNAVVAVEDLSWVANTMQHGRWNRGAFVQWLAHYVSQNGGWVVAVNSAHTSQLCHSCGAKVSHPTHEVSVCVEHGAMDRDVNAAANIAARAVPRVVKARATRAKNRKIQPQAPLRTPPARTSLKYPGRDRTKNTPTPRRKNLCRAAREVILPVRPARAQAHSLEAGVLADQGACNNLGTNMAALKQGNVAYKCRLCSLI

SEQ ID NO: 56454 - protein, 414 aa, Rhodococcus sp.
  misc_feature (414)..(414): Xaa can be any naturally occurring amino acid
VVRRVVVVKLVPTADQFAALESTLVLCNEVANEVAGLAQSMELRSRRALQVALYPEVKARGLSAQPALHVLRKVADAYTTRQATLTNGNYGRPGSTRYTAVAETAVAFRPCAAQPFDDRCLSWQMDVSTVSIWTTAGRMRGVRFVCAPWQHKLLASRKGESDLVYRDGHFYLHATVDEPSPEPAPPPDTAEGWLGVDLGIVNLAVTTDDDPATLDVRWSAGAETARRKKNAALRASLQRVGTKSAKRKLKARRRKEQRFATDINHQLSKTIVAKAQRTGRGIAVEDLSGIRDRVRLARRQRTQLHSWGYAQLRAQITYKAERSGVPVAVVDPRNTSRTCSHCGYCDKANRVSQATFRCRHCQWTGHADHNAARNIAALGHRTYRAAQSTAPIAATPPAASGNVSTNPALQGRVX

SEQ ID NO: 56455 - protein, 540 aa, Rhodococcus sp.
VVKLVPTADQFAALESTLVLCNEVANEVAGLAQSMELRSRRALQVALYPEVKARGLSAQPALHVLRKVADAYTTRQATLTNGNYGRPGSTRYTAVAETAVAFRPCAAQPFDDRCLSWQMDVSTVSIWTTAGRMRGVRFVCAPWQHKLLASRKGESDLVYRDGHFYLHATVDEPSPEPAPPPDTAEGWLGVDLGIVNLAVTTDDDPATLDVRWSAGAETARRKKNAALRASLQRVGTKSAKRKLKARRRKEQRFATDINHQLSKTIVAKAQRTGRGIAVEDLSGIRDRVRLARRQRTQLHSWGYAQLRAQITYKAERSGVPVAVVDPRNTSRTCSHCGYCDKANRVSQATFRCRHCQWTGHADHNAARNIAALGHRTYRAAQSTAPIAATPPAASGNVSTNPALQGRVVDPHDRRRQEQAGVGDILHHVVRTAGRRARRPFPGGRPRQRGVSRLRGTADRIPAAALCVPRRRGRLRPDLRPDRRVGSRSLGGSAADAAGHHQHQRRRARRLLPRPVRSLSGDHHPPVRVGSVVRGQGARTR

SEQ ID NO: 56456 - protein, 220 aa, Thermolongibacillus sp.
VYENGKIELSMGIHNGKREKPIIAYASNLPQGMIKEIECCYDNGWYLAVTYEDGQEAKAYQPGHMVGVDLGEIHTMGAFCENGQALLITGRKVRSLHRLRNKKLAEIQRRPSKCQKGSRQWKKYERAKRYVLSKSERQLRDALHKTTKQFVDWCLAQSGSDVYIGKVEGVQRNTRKKKRANRKQAQKISNWSFGKVKQYLAYKLAQHGIRLKEVEETYTR

SEQ ID NO: 56457 - protein, 742 aa, unknown
  TnpB Polypeptide
MEFATITRTFSLHPTASRKSQAYPQLKEYLLKVRDLENAYVAILIRAVRNGQLGLQDFSGESKAFIKSHIYNALNLNRVVAPSYKSYELKERMKRCAIQYPYFAMRQWLIRTHHLATLARALSELFRKKKVHILTFLRGRPFSRAILNHLWGELQKDCFGNRTPLSYFFITNMLRQLKNLLISAELLEPYLKQRIREISRNKALLQTFCTSCLNTFSRKKKGKTIMIPPSELIPSILTRYFAAVKRYSTWNAKKRVSTTDLDAFKRRRKEEFLPIIATLRAKGKALSSVHVKALLKRLFSELLDELGSSPDIKMVNSIFKPTFKSPKVGLKPSYEGFQSYLRKMLKNKLKDNLKGHFLTKGILKILTGILDTFHKTMYEIVPPPKIKALAVPINQSEQVYAPDFEKLTVKLSFIPRRYHTFSIRDDKGRLREMLARGVCPGLPVLKMEGQKTLLHVPFDVKRKPLSKPSPSPSPSSSTEGGALRSESARKGRITMGVDLGVRYPAVLSIMDRSNPKKPQELARYFLSTRTLLDMTFNINSGRFEPRGRFKNPISNAPSNQKLKLRRLRQETRHIQRKVHEYKKRCQKRGITRPEEKYKYTSLKRTLSSLWDRIRHCNEELIHLLNHVILELAKYHKVSEIHFENLKWSRHSRKNKTGKYLAFWQTHWFFSQVQEAVKLQAFLHRIRFKRVNAAYTSKTCSECGKRGRLNGKLFTCGNSETHRGGRVIELQSDLNAARNIALA

SEQ ID NO: 56458 - protein, 295 aa, unknown
  TnpB Polypeptide
VYNAALQERRDAYRMVGKSITYYDQANQLPEIKSIREEYQDIHSQVLQDVLRRVKKAFDNFFRRVKNGEEPGYPRFQGCNHYDSFTFPQSGFSLTHDNRVCLSKIGSIKVRLHRPVEGEIKTCTIKREGNCWYVVFSCQVEAELLPVSGEAIGIDLGLLHFATLSDGSAIENPRYFRKGEKKLATLQQALARKKRGSHRRKKTVQRVGKAHRKVRNQRADFLHKQSRKLVNTYGLIVFEELQPANMSKRAKPKQDENGKYLPNGGSAKSGLNKSIVDAGWSQFVQVLYLQSGRCW

SEQ ID NO: 56459 - protein, 419 aa, unknown
  TnpB Polypeptide
MLTLNYAYRLYPDAIQESLIQEWLETCRQTYNYALRELKDWLASRKSLSDRCSLEKEYIIPADAPFPSYQAQQDALPKAKKKFPYLAEVPSQALQTTVRRLHDTWESFQKRGFGFPRFKKFGQFKSLLFPQFKESPITGCHIKLPKLGLVPINLHRPIPDGFVVKQVRIIKKANRWYASINIQCEVNVPDPMPHGHPIGVDTGLEKFLATSDGVLVKPPKFFKNLQSGLKVLQRRLSRKQKRSNNYEKQRLKVARMHHLIDNTRKDFHFKQAHALCDSADMVFMEDLDYRISAKGMLGKHMLDAGFGQFRSLVKYVCWKRGKFFAEVNARGTSQECPECGAEVRKDLSVRVHHCPECNYTTDRDVASGQVIRNRGIALVSTPGHGGTETVCAVGLPRAGATPSRSEAKSRKGTTRKAKS

SEQ ID NO: 56460 - protein, 400 aa, Burkholderiales sp.
MQRLQAYKFELRPNGHQQRQMLRFAGACRFVFNRALAEQKANHAAGQTYIGYVAMAKRLTAWRNDPATPWLREAPVHPLQHALKDLERAYTNFFAKRAAFPKFKKRGQHDSLRYPDPKQIKVDQANGRIFLPKLGWMRLRLSRPVPGLLKNVTVSMRAGRWFVSIQTERDVAQPAPHVTIAVGIDLGIARFATFSDGSFIAPLSSFRRHEARLRRYQRAMSRKVKGSNNWRRAKARVQRIHARIGNVRADFLHKATTRIAREHALVCIEDLAVRNMSRSASGTVEAPGSRVRAKSGLNKAILDQGWFEFRRQLEYKLAWAGGHLIAVPPAHTSRTCPACGHVAAENRTTQARFACVACGHSDHADVVGAINILARGHRVAACGEPVQLGRSTKQEPAEAI

SEQ ID NO: 56461 - protein, 515 aa, Burkholderiales sp.
LDVRGDRRPGLGHELSQEGPQAAARCRDRRRDRSAGHHAQGPAAALRRGTGVRHLRSQGGRGRHPQPRRGHDVRGRPRQGRAGDHCGVQCPAVRQPLAQEPEAARRCAGRCGECRMLIAHRIALDPNNTQATYLARAAGTARFAYNWALAEWKRQYEAWKADNTLPKPSQAALRRQLNAVKREQFPWMLEVTKNAPQMAIIQLGQAFQNFFAGRARYPQFRKKGVHDRFTLTNDQFDIDGSRIRIPNLGWVRMRETLRFAGKIMSATVSRVADRWFVSIAVDTSDSSHLPKAENQGEAGVDLGVSALATLSTGEAIPGPKPHKALLDRLRRLSRSLSRKQKGSANRRKAKVKLAKLHASIAAIRSDALHKLTTDLTRRFHTIGIEDLNARGMVKNRHLARSIADMGFFEFRRQLEYKAAMRGGQVVVADRFYASSKTCSACGHKLDDLPLSVREWTCPSCGTVHDRDVNAAVNLKNMAVSSTVAACGEEGSGLGRKTQVKPASAKQEVSGRFAQQ

SEQ ID NO: 56462 - protein, 529 aa, unknown
  TnpB Polypeptide
VHFRRGALAKNQTYRAFVARPSHVLDLNGEILDGAPVLVSLASEVRDISGYAAYVVRNDEALGGELARVTATAPAEAGRQAGVAMPDFLSSGRTGRSRKEKLFQYNVVTSYRSYQERVKAANGESSKYVSQGWKRTANGAAPSYGEDYVNLGAVDSAYACIENDPFTDGEIILKMVIQGVWYRLIFDFDNKRFREGRVTLPVIKVQDGQLVFIFAVVAENPVVQFSGDYTIGVDVGINNYATVVVRDTKTGRIVYGTTLSQRVHSLWNSVRASELQVRHLRKKAATILGDRQGHMSALDEARLHREAASRKKRELAILAAQEIAYLSHSWGNAVVAVEDLGWVANAMQNGRWNRGAFVRWLTHYVSRNGGWVVSVNPANTSQLCYKCSSKVTHPTHKLSVCHERGVMDRDVNAAANIAARAVPRVAKARETRAKNRKLRPQVALMTPPARGSLKYPGRDRTKSKPTPRRKNNRRVSREVILPLRPARAQAQRLAARVLADQGARGALGTNVAALKQGNVAYECRLYSLI

SEQ ID NO: 56463 - protein, 434 aa, unknown
  TnpB Polypeptide
MGSYEAVKVRLDPTPKQERLMVSHAGAARFAYNAGLAHVKEVLESGEAADWSHYSLLRWWNANKDELAVNHDTGVVWWGQNSKEAYSMALHGLAQGFSNWYKSRKGQRRGHRVGFPRFKSKNSVMRFAYSTNFTAPKAGDPYGLKLPRIGRVHCMENVHERVAGARLVRVSVSRRAGRWYASLTVEREPIANQAPKGGAVGVDLGVKSLATLSDGAVIPNPRALGTRLKALRKAQKALSRKVNGSARRERAKGRVARLYARVTDARMDAINKATTLIAGNYSVVCVEDLNVAGMVKNRHLARSVSDAALGEFRRQLEYKTARSGAVLRVVDRWYPSSKTCSNCGTVKAKLSLSERVFNCDACGLSLDRDLNASINIRVAGSAPETLNARGEDVRRTGLVSGDAGLGEARTKRACQSAVRLGAGLGNEAMQPRVN

SEQ ID NO: 56464 - protein, 503 aa, unknown
  TnpB Polypeptide
MDGELLESESVLGRLAAEVRDVSAYATYVVRNDVTLGTKLSQVTASAPAEAGRQAGVTMPDFLASGKSGKSRKEKLVQYNVVAAYRSWQEREKAANGESSKYVSQGWNRTVDASAPSYGEDYINLGAVDKWYAMIENDPFADGEIILKMVIQGAWYRLIFRFDNTRFRDGKVTLPLIKVENGRPVFIFAVVTDNPIVQFSGDYVIGVDVGINNYATVVVREVATGRIVYETTLSQRAHSLWNSVRASECQVRFLKKKSDRLLPHRQARMSVLGEARFHREAASRKKRELAILAAQEIAALSHAWGNAVVAVEDLSWVVNTMQNGRWNRGALVQWLTHYVSQNGGWVVAVNPANTSQQCHTCGSRVTHPTREVSVCPEHGVMGRDVNAATNIAARAVPRVAKARVTRAKNRKLRPQTALKTPVARRSLKYPGRDRTKGAPTPKRKNRHRTVGEVILPISPARAQAHCLEARVLADCGAQVVTGTCRAAIKQGNVAYECSLCGLG

SEQ ID NO: 56465 - protein, 331 aa, unknown
  TnpB Polypeptide
MKGENEWLRDSPIPSSALSNTIMDFRKAKAAYFRQAQYGKNRPRFASKSDNIQSFRNTVPIRRMDGNRYPLSRKLGSVRIRGRDRIRYPLESLSSWTVKRESGVYYLVLLFDVDVQPKPPVGGQVGIDVGVKDFLTLSTGEKINYPDRIHQLEENIKREQCKLSRRVRGSSNYRKQKAVVAKAYAKLRHYREDFQHQMSHRLIEDNQFIGMETLAVQNMTRKAKKKLDENGKPLRNGQASKRAMNHSILRNGWSSFAEKLAYKAQWYGRTFVQVDRFYPSSRLCNGCGNKYVGLRLSEREWVCESCGASHDRDMNAALNILDEALRLSQTG

SEQ ID NO: 56466 - protein, 434 aa, unknown
  TnpB Polypeptide
MTSYEAVKVRLDPTPRQERLMVSHAGAARFAYNAGLAHVKEALENSEPADWSHYALRRWWNANKDTLAVNRDTGVVWWSQNSKEAYSMALRSLSQGLSNWSQSRKGQRKGKRVGFPRFKSKNHAMRFEYSTGFTAPTASDPYGLKLPRIGRVHCTENVYKRVDRARLVRITVSRRAGNWYASLTVEREPITNPAPRGGAVGVDLGVKNLATLSDGTVIPNPRALGARLKALRKAQQAMSRKVKGSARRERAKKHVARLHARVAGVRADAIHKATAMIASKYSVVCVEDLNVAGMVKNHSLARSVSDASLGEFRRQLEYKTARSGAVLRVVDRWYPSSKTCSNCGVVKAKLSLSERTFNCDACGLSMDRDLNAAINIQVAGSAPGTLNARGEDVRRNQHTVGNAGLGEARTKRAHKSAVRLGAGLGNEAMQPSVN

SEQ ID NO: 56467 - protein, 434 aa, unknown
  TnpB Polypeptide
MLEAVKVALDPTPAQEKLLLSHAGAARFAYNSGLAHVKAAMDAGESLDRSFYALLRWWNANKNELAVDADGVPWWQENSKESYARALESLAKALSNWSKSRRGERKGRRVGFPKFKSKDRTAPRFAYTAGGFGLIKGDPKALRLPKVGRVHCMENVAERVGGAHVMRMTVSQRAGRWYASLTVERDDKSVTNPPKGGAVGVDLGVKTLATLSDGTVIENPRYLKKTEQRLKKAQQALSRKTKGSNRRAKARAKVARLHARVADQRLDAMHKLTTWLSRKYSDISIEDLNVAGMVKNHHLAKSVSDAAFGEFRRQLEYKTARTGARLHVVDRWYRSSKTCSKCGGAKAKLPLSERTYRCDSCGLTMDRDLNAAINICVAGSAPETLNAHGEAVRRGGQTGRATRVSVKCEPSVRRTGAVSLGADGRKAILQATVR

SEQ ID NO: 56468 - protein, 415 aa, Chloroflexi sp.
MLLCKKIKLNVTKQDAATLEFMQGKCRGLYNWWVLQLKNGEKWPGWRIAKKTLQASKRHDPELQQVYGKLLHEVYFRLGAAMDAFFRRVNNGEKPGFPRVRPRHCFFTLIYPAMYIQIEGKTLILPTGGKGAKNKRYPNVEAKLTEIPPEGFREVAISRDGRGDYYASFSYRVKEHDQQPGAVVAFDLGIKTLATGVNEQDRFYAIGGFKGSQWYNKQLDKIRSKREKCQKKSRRYIHLSKVYKRVAQKKRTKQRDSLHKASHLIAHKLVERTVVIGDLSQRQMVMKEHAERNKHRNRAVYNDWGLYTFTEMLKYKCLLYGKELVFLDERNTSKACSGCGHLQAMPLWKRTYCCTNCELVMDRDKNSAVNILTRFLARRGPYTSFGECDVLHAVQNSVEVMEASCPNQVQQRELW

SEQ ID NO: 56469 - protein, 361 aa, unknown
  TnpB Polypeptide
MLIGVMVTELLKLAPSPEQAEALLMTMRACNAAATRAAEVAFEHKTANKITVQKLTYHDLKSRFGIGAQMAILAVHKACGAYKRDKTTQPKFRELGAIVYDPRIMSWKSRDTVSLLTLGGRIVIPVVWQGRWVRAHPERIRGQADLLYRDGKFFLAVVIDVPEPPQGPQPDEWLGVDLGIVNIATDSDGTVHSGKAVRAVRYRNRMLRARLQAKGTKSAKRLLVKRRRREARFARDVNHCISKALVGKAKRTGRGIKLEDLSGIRARVTVRQAQRVGHHSWAFFQLRSFIEYKATLAGVPVALVDPRNTSRRCPGCGHIDKRNRPDQATFRCNSCGLAGHADIFAARNISGWAAVMLPDAA

SEQ ID NO: 56470 - protein, 413 aa, unknown
  TnpB Polypeptide
MSNTKTTPKSKNRPCGPQPLKGHVRAYRMRIYPTPGQAGWIHRMFGQARFVFNEALALWKETRESTGRGLSYGICAARLPGLKKSPDTCWLAEGDSIALQSSLRNLADAWSRYYAKQNREPRFKSKRNPVQSYTTRHVNGNIAVGVCWIELPKVGRIRTAVSRPLKGRIVSVTVKRHGSGRHYVSVLCEDPSLPAGGPVFLLPPTGRTVAIDLGIKSYATMFDSDGHVSVISNPRHFGRLEERLAIEQRKLARKQKRDANGHESNGRRRQAHKVARVHERIGDARNEALHKLSTYLVKTHDVIIIEDLDVAGMIADSPQGGCAKAVADAGWSEFCRLLEYKCGWYGRTLVVVDRYFPSSQLCGTCGTKNPEVKDLSVRHWTCPVCGAVHDRDINAAQNLLREGTRILTAREAV

SEQ ID NO: 56471 - protein, 366 aa, Streptomyces sp.
MKLVVQVKLLPTPVQAAALEATLRACNEAATWASQVAFEEDAKSNFALRRLTYAEVKARWGLGAQAAQHVIKRTCDAYATLKANLKVGNLGKPGSKRYRRATEKPVVFRPEGAQPYDDRMLSWQIAERRVSIWTTAGRIKDVAFTASPEQLATLALYRKGESDLVCRDGMWFLNATCEVPEAPLNTDPVDFLGIHLGIVNIATTSDGEIMAGRELNRGRVRERHLRSKLQKKNTPSAKRRLKKRRRKEARRAKDINHKIAKRVVAEAERTGRGIALEDLTGIRERVRLRKPGGTSHALKAVGEGRPLQLVVRPAGGVHRVQGPPRGGAGGVRRSGIHLPHLRRVRAHRQGEPGLSGLVRVPVLRIR

SEQ ID NO: 56472 - protein, 346 aa, unknown
  TnpB Polypeptide
MAILTYRYRLKDATSSTHLLRLAWACHTVWNFCNEVSLLAWRRDKHCVSAFDLINLCAGAGHDLGLHTDTLSEICQEYARKKRLAKKIKLRWRSRKRSLGWIPFKGRCVRLREGAITSKGRHLRFWQSRPVGGTVKTGSFSQDACGHWYVNLQCEVETPGVPLGHAEIGIDLGLTHQLACSDMAAPYSRANLTRQHEDALAHAQRTHKKRRVTAIHARIANTRRDWAHKVTTAIVRRASLIVVGDVSSSKLRQTRMAKSVYDAGWSQLRTMLAYKAIRLGVTYRVVNESWSSVTCADCLARSGPRGLRALGVRGWVCPACGAVHDRDLNAAQNILRVGRDTLSGIP

SEQ ID NO: 56473 - protein, 366 aa, unknown
  TnpB Polypeptide
MKLTLQLKLLPTPEQHTALLATMRAFNAAASFAAQVAFTAQVFGQPAIHARCYRELRERFGVSSQMAVRAIGKAVETFKRDKTCCPVFRADGAMTYDHHMLGWKDPAHVSLLTLQGRQIVAMVYGEYQAGFMPRLKGQVDLVLRKGTLYLHATIDVPEDPSIHPTHFLGVDLGLVEIATDSEGHSYSGAAIDAVRQRTALARQTFQATGTTSAKRRLKKMAGTQARFQHWVNHGLAKRLVQYAKDTKAALVLEDLTHIRDRITVRRRQRARLQNWSFRQLREFLTYKVQRAGVPLLFVDPRNTSRTCAACAYVDQRNRRSQAVFSCLHCGHTANADHNAARNLATRGAVSRPDFVAPRGSQLAFSW

SEQ ID NO: 56474 - protein, 193 aa, unknown
  TnpB Polypeptide
MQKCLSRKKKGSNSWNRQRIKVARIQEKIHNCRMDKLHKISTNLIKKYDVICCEDLNVKRMQRNHILAQSIADASWGTFITFLVYKAEMNGKQIVKIGRYYPSSKTCHHCGYVKEDLTLEDREWICPACGNVIDRDLNAAINILNEGLKNISVGTTDYTDGTDVIPNVRLSTMKSEVHKSLVCEQFTNIIDKI

SEQ ID NO: 56475 - protein, 369 aa, unknown
  TnpB Polypeptide
MKLTLQIKLLPSDEQAKFLLTTLKEANIACNQISDVIWKEKVFNQFKAHHLVYHPLKKATRLSAQMLVRCISKVVDAYKLDKKVQRRFKPFGAITYDPRILSYKETSVSIWSIDGRLKIPFVCHNPKYLPYIKGEADLITKKGKFYLFQTVEIPEEDVKDIEEFIGVDFGINNIATLSDGTNFGSEKLNQVRDKYFKVRKSVQSKGTAGSRKLLKRLKGRERRFATITNHTIAKQIVEKAKTESKGIAIEDLTHIRKRTTVRKAQRRRHHSWAFAQLRSFLEYKARLIGIPLVTVDPRYTSQTCNVCKCIGNRNGKHFSCPNCGNIADADINAAQNIAQLGIAVTDPEKVNMFSSLIHVPLMPRQLAAG

SEQ ID NO: 56476 - protein, 419 aa, Thioclava sp.
MSSIRSLSFKLYPSRAQRDRLWQKHCLLVDLWNAALEERIGAWRHGVHLRLSDQEKALKHIRVDVENWSGCVHSHEAQVVLKRLDRAFQNFFKRVRAGERSGFPRFRSRQRFRGWGYKQHCNGFKVELGPGGRHGHVTLFGVGRMRMRGVARTPGRILKADVFRSARGWMLNVVVETDCAQREEAHGPAAGLDWGVSDFATLANENGEYEAVANPRHLRGEMEELVEAQRRLSSAAKAKKVSLRSLQRHRKQLARRHAKIASRRKDFLHKVSAGLVARHRLIATERLDVGNMTRSAKGSKQCPGKNVAQKSGLNRAILDAAPSNFLKMLRYKAEEAGVEFLEAPTRKLRPSQRCPDCGAQKRKALSERQHICECGCSLSRDEAAARVLLQWGLTEEARLKSLGGDVDKAAGTVADQVSI

SEQ ID NO: 56477 - protein, 419 aa, unknown
  TnpB Polypeptide
MAMGDKMVERTYKYRLYPDREQEEILNRTLILCKNLYNVALDQRKTFWQVDHESVTYKKQADELKDIKTHHPEYNEVYSQVLQDILRRLDKSFRNFFRTRKGYPRFKSCRNFKSFVYPQSGFRLDGNRLKFSKVGNVRIVLHRPIVGKVKTLTVKRYPDRKWYAFFVVGIPDSPVPNYEPKNPVGLDAGLTNLLTLSTGERLGNPKWFRESERRLARAQRELSKRVKGSKRREKQRIKVARLHRKVRDQRSDFQHKLSKFLVSKFDCIVVEDLKIRNMVRNRCLSKSISDAGWNELYIKIAYKAESAGKWYVRVSPNGTTQDCSKCGTVVPKELKDRTHVCPSCGLTMSRDLNASINILRRGLKSLTESRLIAIPLEQRKSTLVETSPSAGSKNRIGKAGQRSEKPPSLDGGGSRIIIL

SEQ ID NO: 56478 - protein, 405 aa, unknown
  TnpB Polypeptide
MVNNLAHTIRLFPTEAQETFFKKACGCARVAYNYGLAEYQKIRAEGGKPSISEIKKKFNQEKKTLYPWMYETNKDANQQPFSNLQDAFSRFFKRQNRYPKFKKKGIKDSFYISNDKFGVESKKFWIPKLGWVKGSEELRFHGKIMSAVIRRKANYWFVVISVETDKAFTTCDNQAVVGVDLGIKTLATLSDGKVVEALNPLRARLKQLKRLQRWSSRKVKGSSNRYKANQRVAKVHYKVACLRKDVLDKMTTYLCENYQVICIEDLNVKGMLKNHCLALAISDVGWGEFRIQLDYKSLLHGNTIIVADKWFLSSKKCSGCGHVKETLSLSEREYVCENCGLVIDRDLNAAINLRNYALNQLGMACPEVTPADTGALAYSSSIGVSETIVDEAGISVSTHKCSHRK

SEQ ID NO: 56479 - protein, 442 aa, unknown
  TnpB Polypeptide
MRIVSSYGVEIRKQNIPVRQTLEIYRQAVRYLTGVYAQVWEELREIPETKKRFNTAEHLVHTTKNNPARFDFDLRFPKMPSYLRRAAIQHALGSVSSYETRLGLWKETGALSGRPKLTCENHAMPVFYRDVMYREGAEGKDEAYLKLYDGHDWKWFRVCLKHTDMEYLRRNWKGKKASAPTLEKRHRRYFLRFSYTEEVTLTKTPVKEQIICSVDLGINTDAVCTIMRSDGTVLGRKFINFPSEKDRMFRILGRIRRFQREHGSAQAKGRWAYARRLNTELARKIAGAVAAYAEENHADVIVFEYLEMKGKISGNKKQKLHLWRKRDIQKRCEHQAHRKGMRISRICAWNTSRFAYDGSGPVLRDGKNHSLCTFQTGKRYNCDLSASYNIGARYFIREFLKPLPATERSLLEAKVPSVKRRTSCVYADLRELHSQMETLKTA

SEQ ID NO: 56480 - protein, 319 aa, unknown
  TnpB Polypeptide
LHIIPKQKSIRKNRQSFQCPQHCSVDFSSSTISIPKAKSIPAILHRKFAGKIKTVTISMNPSGRYFASVLVETNITELPVSEIKEDNAIGIDLGIKEHAVCSDGRIFDNPKNLAHSLELLRRRQRQLSRKQKGSANRDKARIKLARIQERIRNQRKEHIHKVTSILTHDSQVHTICIEDLNVRGMQQNKKLARSISDASFGMFRSILEYKCRWYGINLISIDRFAPSSKTCSKCGYVYDGLTLNDRSWRCPQCGSLHDRDLNAACNIKNFGLKALPVERGKVKPVDCPIVDERRLRPKKQRQVEAGKTRSNLTPKPLSF

SEQ ID NO: 56481 - protein, 395 aa, unknown
  TnpB Polypeptide
MTTVTIKARIYPTSEQANLLLATMQQYRNACNLVSQYYFNHNFVPKQKDINKALYHKVREQFGLKAQMTQSIFKTVIARYKTVDTQLKQKPYHYKDNNTDTWYTEQRDLSWLQKPINFKRPQCDLVSARDWSFKNDKLSLNTLANREIMDFSMKGFEQYLEGKLGTAKLVKSCGHYFLHISVTVEPHIFEKADLKHVVGIDRGLRFLATTYDEKGKTSFIDGKDIIEKRRKYKKLRQQLQSKGTKSAKRRLKAIGQRENRWMSDINHQITKTLTDKYGKDTLFVLEDLTNVRFATEKVAKTNRYEQVSWAFYQFEQFLAYKAELNGSKVIKVSAQYTSQRCPKCGSVNKNNRKHDIHEYQCVNCGYKSNDDRIGAMNIQYLGTNWVTGDTTKITK

SEQ ID NO: 56482 - protein, 410 aa, Halorientalis sp.
MEVCRTVRVKLEVTEGQADLLHETIDEFLWAANYVVDAAWDGEWAETRSTVLHDETYDDVRARTRLHSNHVQSARDRAVDALKSVVAKWSKGKSASLPTFTTPFCEYNQRNATFHDDHASLSTVDGRITVGYVLPDESRDTPHSEYLHSDDWETTSATLHHRRGDFYLHVRTKADVDVPDKLENGTVLGVDLGVENIAVTSTGVFWSGNELNHWYNEYAQRRNSLQQCGSRYAHENIQAVGRRETGRFKQSLHRVANGIIEEAVSTGCTVIAFEDLTGIRNRLPNAREFHEWAFNRLYEYVSYKAEERGITVKKVNPKNTSRRCSSCGCSREGNRPSQDTFRCQSCGYENHADYNAAKNVGYRLLRNQNGGEGGAPVGVRLNTGMMTANGIQSVPDSVRAGIHGEIHSTG

SEQ ID NO: 56483 - protein, 401 aa, Ruminococcaceae sp.
MFRDQRLAVHLWKPSRNTLRTKNGRKGGGRMEKAYKFRIYPNNGQILQIQRTFGCCRFVFNHFLSRRIELYKDSGETLNYNACSAGLTALKDDFPWLREVDAIGLQSSLRDLDFAYQNFFRRVKKGEKPGFPKFKSKRRHRKSYKTKRVGSNIDVFEKHIKLPKLGLVRSAISKQVTGRILSATVSQNPSGKYFVSVICTDVDIEPMERTCVMAGIDLGLKDLAITSDGSVHPNPRHIRQSEKQLAKAQRELSRKTKGSKNREKARKKVAGIQERIANQRKDATHKLTTSLVREYDVICLEDLHIKGMVKNHKLAKAIADANWGEIARQLEYKAIVRLRIPKQSGQGFVCAVLDLSEMRGGVRQGHKRRQQHLARRIENPCGVARKRYGGTRRNLTLGKSV

SEQ ID NO: 56484 - protein, 372 aa, unknown
  TnpB Polypeptide
MMKTFQYRIYPTKKQLTTLETTLEECRWLYNHLLEKRKTAYMQEGKSLSYYGQQATYPLLKEQRPSLTLVHSQVLQNVAVRVDLGMKAFFRRCKAGEKPGFPRFKGSGRYESFTFPQSGFSITHGTRVSLSKIGSVKMVYHRPVRGTIKTATVHKSSTGKWYITFSCECDPQRLDPLSTPVGIDVGLQTFATLSTGEEIVNPRFFRREEKALARVQRKHAKLTTGTPQRRKHRKVVARVHERTRFKRDNFTQQESRQLVDRFGVICVEDLHVNRMVHHHCLAKSISDAAWSAFFSHLSCKAEEAGRRVVKVNPAYTSQTCSGCGHRQKMPLSERMYHCPCCLLSLDRDLNAARNIKAVGLHSVGLPLEAPAF

SEQ ID NO: 56485 - protein, 567 aa, unknown
  TnpB Polypeptide
VLAKNQTYRAFTARPFHVLDLNGELLDSSTVLGKLTSEIWGISGYATFVARNDMKLGSELAQIGAVQPTTAGRRAGVTMPKFFVEDEDGKPIVGKSGRSRKEFLVQHRVVTSYRSWQERISAVNGESGKYVSQGWKRTVRASPPSYGEDYVNLGAVNKQYAAIENDPFAAGEIVLKMVIQGMWYRLFFRFDAARFREGKVTLPLIKIENNQPVFIFTVATDNPVVQFSGDYVVGVDVGVRNYATVVVRNSKTEKIVYQTTLSQRVHSLWNSVRASEKQVRQLKKKADRLLYHRQARMSAPDEAQFHREAASRKKRELAILASQEIAYLSHFWGNAVVAVEDLSWVSNTMQNGRWNRGELINWVTHYISQNGGWVISVNSANTSQVCHLCGSKVTHPVHKVSLCPEHGILDRDVNAAANIAARAVSKVEKARETRAKNRKVRPQAPRKTPVARASLKYPGRDRTKNKPTLKRKKRRISKGVILPPRPARVNMDTVLADCGAYGAAGTSQAALKQGNIAYTIVGYITLIDTVHEASRARNIVIERNRRIIERFLRDHERVGEQLGINFL

SEQ ID NO: 56486 - protein, 389 aa, unknown
  TnpB Polypeptide
MRKTYKFRLLPTKKQTQKLDWTLDMCRILYNSYLVDRKNHYAQTGKGLSRIKQQEILKADKETIESLNGIHSQVLQDVLFRVERAFQGFFRRLKERRGKAGYPRFRGEGRYDSIIYPQQPGFQLTEQGLNLSKIGTVKLKKHREINGKTKTCTVKKEGDKWYTCLSVEYEPAKKPIPDKTIGIDVGIKSFAVLSDGDVIVNPKHLRKSEEKLISKQRQLSKKKKGSENRKKARLKLAKLHKKVRNQRSDFHHKVSRKIVDTCGFIVVEDLNIKGMVRNHHLAKSISDAGWGQFVSYLEYKAADAGVRIEKVPPHYTSINCSVCGNPVPKTLAQRIHRCPFCNAVLDRDLNAAQNILLKSTAGTAGSNAWGEAVYQCPSLNQEAPSVRAG

SEQ ID NO: 56487 - protein, 410 aa, Proteus sp.
MDQSIIDNMKRLQAFKFQLRPNGQQEREMRRFAGACRFVFNRALARQNENYEAGNKYIPYTKMASWLIEWKSDTETQWLKEAPSQPLQQSLKDLERAYKNFFQKRTAFPRFKKRGKNDAFRYPQGVKLDQSNSRISLPKLGWMRYRNSREVVGEVRNVTVSQSCGKWYVSIQTESEATEAQPESTSIVGLDAGVTKLATLSDGTVYPPVSSFKVNQRKLARLQRKLSRKIKFSANWQKQKRKIQRLHSHIANIRKDYLHKVTSEISKNHAMIVIEDLKVSNMSKSAKGTTERPGRNVKAKSGLNRSILEQGWYEMRRQLEYKQLWRGGQVLQYHRPTPVRSALAVVIQQRKTASHKVNSSALNVDIQRMLISTGARNILAAGHAVLACGGRVQSDRPSKQEPAEVIQTSV

SEQ ID NO: 56488 - protein, 249 aa, unknown
  TnpB Polypeptide
MANRAYKFRMYPYDEQKILFAKTFGCVRMVYNHWLDRKIRQYEENKTNVTYTTCAKEMVAMKKTEEYGFLKEVDSIALQQSLRHLDTAFQNFFKQPKTGFPRFKSKKRNKNSYSTVCINGNITLSNGYLKLPKIGQVRLKQHRSVPSEYRLKSVTVSQTPSGKYYASILFEYEDQVQEKELQKFLGLDFSMHELYRDSNGNEPAYPKYYRNAEEKLAREQRRLSKMQKGSNNRSKQRIKVAKLHEKVSK

SEQ ID NO: 56489 - protein, 272 aa, unknown
  TnpB Polypeptide
MQITHKFRLYPNRQQEEKLFETLNLCRQTYNNLLAEFDSWDNISKYELQSIIPNLKIYNPILKKVYSKTLQYENHRLFSNLKALSKKKKKGYKVGRLRFKGKGWFKTFTYNQSGFKLISTGKRCQILHLSKIGDIPIRCHRNIKGKIKQITVKHMLSGKWFASIIEERKEEIKQQPINKIIGIDLGLTDIVYDSANNKIANPRPLKKKAKKLAHLQRRMSKKKKRSSNRNRWRIRLARQYEKLVNSREDFLHKLSRYYVNNYDAIAMEDIPI

SEQ ID NO: 56490 - protein, 426 aa, unknown
  TnpB Polypeptide
MKRAKTNSFILELPISVTPKDEHTLLARFEAGRKLYNAVLGGSLIRQKRMREPKAWQAARAIPIPAGKEGKAVHQERSLTFHAVCDEYRFTSADLSSFDTHCKNSANYDDRLGAHETQKIAERAFFAAEQYGYGKRGRPRFKGKSRPLHSIGSKTNAAGIRWKAATGHVEWHNLTLPAIIAPEGKDAWQTEALARNTKYCRALWRNLNGKRRWYVHLIQEGTSPRRHAGVAHGTVGLDIGPSTVAIMSNATGELVQFCPSIKQPWKTIRTLQRKLDRSRRATNPVCYNTDGTWKKRKRQTVFSKKYGKTLTLIAEAERKLTAERKRSHGELANTIISHGNIIKAEKLSYRSFQKNFGRSAKVTAPASFIKTLTRKAESAGGLFVSLDTKGLKLSQYDHITWEYVKKPLSQRWHVLENNGTLVQRDT

SEQ ID NO: 56491 - protein, 357 aa, unknown
  TnpB Polypeptide
MHKSYRFRIYPDKMQKIYLAKSFGCVRFLYNKMLADRIDIYKTDKGRKYFSVSHYKKEFPFLKEVDSLALSNVYRNLTNTFNNYSKNRNSGFPKYKSKKNNFNSFLTNNQKGLINIKENKIRIPKLKTRIIIKSHREITGLIKSCTVSQVPSGNYFISILVEEEIRQLPKSHNRIGIDLGIKDFAIMSNGEKISNPKHFKKSEKRIQKLQRELSRKKKGSNNRNKARVKLAKAYEKIVNQRKDFLHKLSTKIIRENQSIVIEDLRVKKMLKNKNLAKAISEASWSKFRTMLEYKSKWYGRELVIAPTYYASSQLCSNCGLQNKAVKSLALREWVCPECGIKHDRDINASENLLKLAT

SEQ ID NO: 56492 - protein, 338 aa, unknown
  TnpB Polypeptide
MEELSDAFQSWFDLRQKDDRENPPGYRKHGDTRPRSTVTFKEDGFKHDPKNNRVRLSKGSNLKEYWSDFLLCEYQTRPDVDLSEVESVQNVRAVWNGDVWELHFVCKVELESSDSAGEEVAGIDLGIKNIATVAFPEEYVLYPGNSLKQDKHYFTRAEYDTEGENGPSEKSMWARRKLATRETHFYHVLTDTIITECVERGVGTLAVSWPEKVRNADWGKTGNKKLHTWAFDRIYQYLAYKGEVRGVEVLKENEWNTSKTCSRCGDDTKSNRKHRGLYVCSSCGLVANADCNGAESMRQKITLSPHGEDRSNGCVAQPSVHLFDRESGRFQTREQVVS

SEQ ID NO: 56493 - protein, 366 aa, unknown
  TnpB Polypeptide
MRVFRYRLKPTKAQVTKLNDQLELCRWVYNETLAMRKNSFEQEGKSISYFASKRMLPIWKESKPELRSVHSQVLQDVVLRVNLAFGAFFRRVQSGEEDPGYPRFKGKGRYDSLSYPQSGFSIDGNTIWLSKIGDIKFKLHRPIEGCVKRLTIRRSTTKKWYVSFLVEDAPNHILEPSDEMVGIDMGILNFAVLSNGDVVANPRFLLADEERLKKAQSKRDKLPKGSPRRRKASKAVSHLYERVSNRREDFAQQLSRQWINQYGTIVFEDLNIANMVHNHNLAKSILDASWNKLIQYTSYKAEDAGRKVVLVNPANTSQMCSSCGQIVKKNLSVRVHDCPYCGLSIDRDLNAALNIARLGIQSLASA

SEQ ID NO: 56494 - protein, 427 aa, Escherichia sp.
MHQENTMLPRRISVSLFIDQSIIWPVKRLQAFKFQLRPGGQQEREMRRFAGACRFVFNHALALQNENHEAGNKYIPYGKMASWLVEWKNATETQWLKDSPSQPLQQSLKDLERAYKNFFRKRAAFPRFKKRGQNDAFRYPQGVKLDQENSRIFLPKLGWMRYRNSRQVTGVVKNVTVSQSCGKWYISIQTESEVSTPVHPSASMVGLDAGVAKLATLSDGTVFEPVNSFQKNQKTLARLQRQLSRKVKFRNNWQKQKRKIQRLHSRIAYIRRDYLHKVTTTVSKNHAMIVIEDLKVSNMSKSAAGTVSQPGRNVRAKSGLNRSILDQGWYEMRRQLAYKQLWRGGQVLAVPPAYTSQRCACCGHTAKENRLSQSKFRCQVCGYTANADVNGARNILAAGHAVLACGGMVQSGRPLKQEPTEMIQATA

SEQ ID NO: 56495 - protein, 350 aa, unknown
  TnpB Polypeptide
MILTYKLRHNQDFDTELKLAFDVAEFVVKNKIKLPNTRFVREIRGTLPSSVACQVMKKYGNQKKIKSVHNVNLIVPGQAIKFNQETRTIRVVCLKLDLPYQFPDTFTKINQIELDKEFAYVSCTVPEQPEMIPQAFLGVDRNTTGHVAVVANPDTGKVEKLGKKALHIHRKYSAIRKHLQREGRFRELKAVKDRESRIVKDLNHKISRKVVEMAKVQHAALVFEDLGGIRETRKQNRSFRYALHSWSFYQLQQFVEYKAKLLGVPILYVDPAYTSQDCSRCGARGQRMGKEFKCPTCGHVDHADANAAFNIALRQVSAINRAVSESCTMGALIPPWSSGEDAADSGISRL

SEQ ID NO: 56496 - protein, 117 aa, Clostridium sp.
VNKTVNEIVKQKPSFITIEDLNIKGMMKNRHLAKAVSQQKFYEFRTNLISKAKHNDIEIRLADRFYASSKICSCCGYTKKDLKLSDRIYKCDNCNTSIDRDLNASINLANAKKYKIA

SEQ ID NO: 56497 - protein, 217 aa, Clostridium sp.
MKKLKKAYKIEIKPTNEQKQKIHQTIGVSRFIYNFYIARNKEVYEKEEKFVSGIDFSKWLNNEYVPNNQDKVWIKEVSSKATKQAIMNGEKAFKKFFKGQSRFPKFKKKKKQDVKSYFPKNNKTDWTIERHRVKVPTLGWVRFKEFGYIPVNSMVKSGTISQKSDRYYVSILVEEEIKVNDKAFSKGIGIDVGLRDFAICSNGVTKKNINKTKKLKD

SEQ ID NO: 56498 - protein, 238 aa, unknown
  TnpB Polypeptide
MRLVERHIIKDNRFEEVCHKSGLLYNYVLYNVRQGIFSNSYLKEYEFSTKLNRENQFDFRNLPSSISQQVIAQVFSIIKGWMRSVKEFEKSPSKFHSKPKLPKYKSSKKQNMIVFTTASCRVKQDGYIHFIKNIIQPIKTNVKKEELKQVRIVPQATCYVVEVIYERVDHLAFETLEKHDIYLGKRKKRGLFQSSVNQLINADINGSIGIARKVFGDSAVRQIIGSGLAFNPIRVNIL

SEQ ID NO: 56499 - protein, 249 aa, Syntrophomonadaceae sp.
VKLQELAPSVENLEKAILRIQRKMDRSRRATNPHKFNEDGTIKKGNREPWIKSNHYRASLRQLIAMNRKLAATREQAHNQLANYLLTLGTDIFVEETDFKALAKRAKETKISPETGKCKRKKRFGKSISIKAPGTFFTILNRKLSYIGKEIHYINPWTFKASQYNHITDSHDKKALSNRWNQIGGNKIQRDLYSAFLIMNSSNDLQETDRQKCIDSFDNFIALHDQEISRIEDNETVKLFTSFGIKRTA

SEQ ID NO: 56500 - protein, 382 aa, unknown
  TnpB Polypeptide
VVVVGAAATPHQWEPETFQGTSSMPYKTHKIALDPTFKQRHWFSSQCGYARFAYNQALSDFKSGLDQDNFQSWWTLNVNFNKAKKRFDWTRSQDQRAALYAIKNLGQGIANWVSKRAKFPKFHGRGRKQSYTTDEQSVQVEGKKIKLPKIGWGRMFESLRFTGPIIKVTISRTAHRWFVSITVDTENTEVVADNATHPVIGVDVGINSLATCSDGTKYDNPRPLKRYEAKLRRAHRKLSRKVRKSNNWFKQKAKIARIHYRIAYIRNDAHHKATTEIVNRASAIGIETLKVTNMLNNRKLAKALSDSALGGFLLKLRTKAEARGIPITEASQFFASSKTCSRCGHKKDDLTLSERIYHCSNCGLKIDRDVNAAINLRPSTVG

SEQ ID NO: 56501 - protein, 368 aa, Methanosarcinales sp.
VLRRTFKYRLYPTEDQVPLVAYCLTTCRYLYNEMLEDRKNAYDRCGIGLNYNGQAGQLKYLNLGVYSQVAQDVLRRLDKAFQNFFRRVKNGDKKAGYPRFQGKNRYDSFTYPQTGFKIKDGKLHLSMIGAIRIFQHREIVGKIKTCTIKRDGDQWYASFSVELPDPEPKEIKTSVGVDVGITTLATLSDGTEIENPKTLDKYDSKLRKAQRDLSRKKKGSSNRNKQRSKVVRIHRKIRNIRKDHLHKASRILTDTYDRIIFEDLQIKNMVKNHHLARSIHDASWGILISLTTYKAEEAGGVVELVNPRNTSKQCSICGNIQSMPLSQRTYRCPDCGAVMDRDRNAAINIKNRYVPADCGELTPVEMVA

SEQ ID NO: 56502 - protein, 421 aa, unknown
  TnpB Polypeptide
VSDAEYLRRTSITRLTISPEEETLLRDTVSSWKRGCQVAVDKAWGQCRSPFEVQKIAYDDVRERTSLGSQHAILACHQAAENIQSCISRLQMGQKASRPTYTSPTVTYDTRTMTLFPEREQVSLTTLGDHSRVQAGLELPEDQDGHQNQYIDSEKWETTESTLHYRDGGWFLHLGFRKLKAETGETTENGTVLGVDLGIENLAVTSTAYFFSGRELAHNLREFEKARAGLQQAGTRSSHRTLEQLSGRELRYVRDVLHHASNAIVTEALRYKCDVIAFEDLTHIRDRTGASWGHKWAFRTLYAQVEYKAEAVGVSVKQVGAKNTSKRCAECGSLADENRFTRNDFRCQKCGSEANADYNAAKNIGMRYVRRGQQSSRRTGNSQLALKSGTVTPSCGFTAHPEGFEAEFTDKSHPPRAKSLD

SEQ ID NO: 56503 - protein, 408 aa, unknown
  TnpB Polypeptide
VLVSFKYRIYPKPRQGRLLKSHLAALCTLYNALRDLKLRKWRSEHVSLTEFDLEQAALAIRRADGTLSQIHSQVVQEVASRVSRAFKNHFEGRARFPKRKKARKYRSLTYPQSGFKLDGEVCWKGKRAELKGKLYLSKVGHVRIFMHRPLQGKVKSLTVKYEAGEWYAIFICEVPGKPKIEHVPEEAVVGGDLGLSKFLTLSDGSPTENPKYLRRTEAKIMRLQKVLSRAQKDSKNYRKLALRIAKLHMHVRRQREDYQDKVVAELYMKAEAVVLERLRVKNLMRNRKLAKSLADSAFHQFIAKAKFKADLLGKWFIPVDPWGTSQFCWKCLNWTPKRLGEKTHECSKCGEKLPKAENSAKLIRRLGVAALPSLKLGYAPGRGVKTPATPKLSLRRLARGKTGSPSLQ

SEQ ID NO: 56504 - protein, 384 aa, Gammaproteobacteria sp.
LNRFLFLSRQLYNAALDERINAHRKAGESIGFYDQCKSLTEIRRDMPEFANFNATAFRSVLNRLDHSFKRFFAHGGFPRFKGRNRGIRSFEVPAGQFRIRQSGKRHAIHIKGFGRFVVRDVPEGTIRLVRVVQTPIRVKLQFVTEYNHPSIQVDTPFTGIDLGVEKQATLSTGESLPKIVIDDTRRKRLQRRLSKAKKGSNGRAKKRLALAREAQRIAERQRNAIHRITTGLVRKYGANWVVENLNVKGMTASGGNRKRGLNRNILAQQWGTFVNQLVCKAERAGGEVRRINPAYTSKTCSECGTVNETLKLSDRTFDCLACGHSLDRDLNAAINIRNKVYVSLPGGDTPGARPDVVSIGEVSSRTAQNSMEGVCRSLAVKPSI

SEQ ID NO: 56505 - protein, 441 aa, Erysipelotrichaceae sp.
MKQVVSYSVKLKMTKASAEVLKQTCSLYCDAVAYILAFLPPYWNSIKVKTYVNEQMMYVEALIHSTKDRKAVCDFDQKFYKLPSYMRRAAIFAAIGMYSSWKSNHDNWENAGHKGKEPVMGTTRNICPAFFRGNTFQMISDDTALIKVFAHHDWVWMPVRMNHSDLKYIRKKISEGWLCGAPVIEKRYGHYEMRFAMQRTNMLNETPVLDQKICAVDLGITTDAACCIMDSHGTILARKFISCGREKDLTEKMLRRVKEFQRLHGSHDSGILWHLARNRNLNHAHLIAHRIVELALEYQCDVIVFEHLDTKGKKHDSKKQKLAMWNHQTVQNTAESLAHQYGMRVSHICAWNTSHLAYDGSGEVLRGRKAFRTTPYDMCLFTTGKMYNCDLNASYNIGARYFLRAMSKDLPNTAAEDLGIGSGTQRTLADLWKLNPAPVNP

SEQ ID NO: 56506 - protein, 522 aa, Synechococcus sp.
  misc_feature (45)..(178): Xaa can be any naturally occurring amino acid
MYPEIQFFEKELVCNGQRSFADGWNGCKGQVLSNQLSIDYPSDYXXXXXXXXXXXXXXXXXXXXXXXXXXXXXXXXXXXXXXXXXXXXXXXXXXXXXXXXXXXXXXXXXXXXXXXXXXXXXXXXXXXXXXXXXXXXXXXXXXXXXXXXXXXXXXXXXXXXXXXXXXXXXXXXXXXXXXGLSSNLAQQVCRRVAGSRKVAKQKKRPVKEFKSGFVTYDARIFSFRQKDWTVSLTTVEGRERFELAIGNYQRGMLAGSNPKSATLVQRKDGSYSIQICVEAEPPKQQNTDKVIGVDLGRRDIAHTSEGDNWNGQQLNKVRDHYCRLRASLQRKASKGTRSCRRRCRQLLQRLSGKERRFQAWVNHSIAKRIVKAAQSLSACIGIEDLSGIRERTNQHPRSREERRRSNSWAFYQLRRFIEYKAVRAGVKVVVVPAAYTSQICHKCLHIHPDSAQSYRKGKQFKCGHCGWEGDADFNGAKVIALLGAAVNQPRGSWLACQLQGYRSRQRAGGLKPALYCEAVRVG

SEQ ID NO: 56507 - protein, 386 aa, unknown
  TnpB Polypeptide
MKTLKSYKFRIYPNKTQEILLAKTFGCVRFSWNSWVEAFNKKEQEKSVKELRQQYDWIKEVSSTILNQKQNDFNETKRQFFSKTRNKKINRPKFKKKGCKESFRQQYPHYNKEIHKIQIAKIGWIKVIDHQEIPNDVKLLSITVSKDSCRDYYASILVEQEVQELPKTRNTIGIDVGLKEFVTTSDKLQIKNPRYFRKSQSNLARAQRHLSRKVKGSNRYHRQRLKVARINRKIARQREWFLHNVSKWLVTNYDVICLENLNVEGMKRNHCLAKSISDAAFANLRRMTEYKSKWYGKTTLKVDRFYPSSKICNKCGQKKENLTLTDRIFVCDNCGNVEDRDYNASKNIRDEAMGVNVAQRAWRECQTEVDLSTLAVPYEMLNASCI

SEQ ID NO: 56508 - protein, 509 aa, Azospirillum sp.
MRATTPSYIAEFPLRTSAANERVLAVRLEAARHIYNACLGEALKRLALMRQSTDWQAARALPKSTARTALFKTTIARYSFTAASIQKHAEACRDACWIGAHLGSHDTQTTSLRAFTAVQRHAFGKRGRPRFKGCGRLHSVEGKGDAVIRLRWQDDKPVVLWSGLVLPLLRDPRDRDGWQEQAFSCRTKYVRVLRRSVRGRTRWFAQLVQEGLAPRKERWPVGEGVVGLDLGPSTIAAVSETDAILERFCPTVADMDRIIRRLQRAMDRSRRATNPDAFSADGTYRRGARIKVRSRRYHLLQARKADLERRLAAERKRTHGELANRVLAQGNLINTEKISYRSFQKAFGRSVKRRAPSLFVSILKRKAASAGASVIEFVTRTTRLSQFSHDTGAYVKKPLSQRWHMFADGSRVQRDLYSAWLARFVDWDRLDASQCCAHWAAAEPLLRRAASGFNQSTSGAGFACPHVRQGVGADRPSKRAGRRAEAADAVAQARAAERTGPGTPRTPAL

SEQ ID NO: 56509 - protein, 502 aa, Caldivirga sp.
MLRRAVAVELEATKELNKLLYSVEAMYLSIVREVVAYAVEHNVTNPTQLHRLFYSKYRREYPSLNSQLVIQAIRQSSEIAKSFIEKKRRGLASKPYPEVKAVSIRFVETTWNYEQFASSIAPVRIVISPISTGKRGRGGRRFEAWLRLHKRFWQYWWRVLNGEAELAGTLIVKRRANKWYAVFIFEVKPREAKPQSVVSFDINENTVAVGRVNLPSTVDRVAGWNRQYMVPELYTIKTDFGRLARRYGRIRDTITERLKPLYTLPNGNHVNIADTREYRKRVKHLREKNRKIGRVRHVANELIKTPGIIITEELGENPQESMINGIGRDELRHRIKQTPFKSIEKAVEDKALERGSRVFHVSAYRNSRVCPIHFTRLEGTSDWHTLQCPLGHLVDRDHASVMNMAWKLTPEAWAKGVWWDLKSEEMNWKAREGDSNPIIPYPIVQYLHAALKEFKASFEQSPAMLARGTPMNPAREANEDWARKPPTPHKAGRRPGMGLSIG

SEQ ID NO: 56510 - protein, 487 aa, unknown
  TnpB Polypeptide
MRRFSSATRYAYNRLLEGKDRKELKREDGSLCALFGLNTRYADGAIEKAQAALDSAKELGQDPRKVVFGGRKLFEQLKRRHLSGKALLALKREWKEKRQGFLYSRGEAAKKSNANLRLEPKDGALWLRVNLGNGAYVCALLQTSHPEMKTLLQRVYASLPYNATLHLKEGKVYAHFSWSEELPPPVHTRANGVLGIDVNADPYHLALAVVSPDGNLVRYFTLSLEEVDSAPNKGAKELALWKVAHRVVAIAEEHEVAVATEKLKYLRKSRRGDGSGRYFRRKQHRFAYQSLLQKIHSLARKRGVEVLEVNPQDTSTIGMLKYAPQLHLSKDVAAALVIGRRALGFEERPPKGYRALLRNKSFFAYTEGFYRSRLQELQKLKGVEKNPYLKRKLSREIGKAKAALTLVSSLQGSSGSRKGSTDGRNPSGANPWRVLRVGLLLPLLGPEVPRDLSPLKPILHLASPTQGSWKGWKVGLGPPPGGWAGVR

SEQ ID NO: 56511 - protein, 503 aa, unknown
  TnpB Polypeptide
MGKVRTSVALRHFGTPGHDHDAVHVDLVSMVRMVQAAATEFTMSPAYGDLIRRILSGDVKVGTRKNHSGRGNVPDVFFPCNRYNMNEMLRALVMGHIETHAVSTGLFQVMGDNPTERDPKTVASLFRDVYPKTALRAPWRTARSHVHRYHDKGQRTPQDPRVPAKIDLSACDGHYLKLEANRRDVTLWFRRLQTAKNVTLTFRLPRGQRFQGNKVCKPTIQVAGGELIFRFTIEKTVADRAPSKVMGVDLGKVEPYTATIINEQENHHSAPFQASRKIKHLNGRYDDLIRRAQHLEVKASRCQASGHRHKASVLTSHAQNIRAAARRVKGETTHQIAHEIAETASKRDTAVALEDLSWLNHMGGRWNHSETQEAITNACRRRGIPVRKVNARDTSNTCTRCGSTVTHNRRNNTCTTCRFTINRDVAASREIALRATRNKHREPLRQRKRQSMTVTHQSAPATTMSGTGPQATMPETSGQGEAHREHRFSRKPNPTDERRENTH

SEQ ID NO: 56512 - protein, 509 aa, unknown
  TnpB Polypeptide
VKYYDTVTRHRFTTKNGVDAKQVERDLAQMVAWMAEAEQEVLASQEFHDLALGVLRGDRPTGSLNSWGRKRLSRYDFSFQKQNMNEILVSNVVGALELYAMSVGLFQVMSTHPKETKPERILSCYRGTYPDAPQPTSGMVRAHLRRYHVKGERKASLPGVSAKLNLAVCDTHFAPKAFRDEKDPLNVLVQVKTPSYGFTRLYFRLPDNESRFGDGKVCRPTIRLNNKGRVVFDITIENEVQQRDTSKVVGVDLGKVEPFVATLIDPKGKYRSAPYHVNYKRRLGSLVKAEKKRRDLSAHLYQRASLCEKYNRDQHAQFLRTEAKRVSAKATRIKHEISQCIASQIVSVADQSDAHLSLENLSWLDAKGGRWPHAEIQSRVENTAKRYGLKVTKVSAKDTSRTCSRCGGKVFNNSKTRVGTCSVCGFSLNRDVSASREIALRAVSNARNREKMRCLLRQRALERSSAVTRQSKPVTDLGGIQGHTGTLGSLSEATLMMVRENLDSRGSPT

SEQ ID NO: 56513 - protein, 368 aa, Ktedonobacter sp.
MNKTLIRTISIKLDIDRHEAALRETQKRFNEAASWIASICWEEHITNTNTAHHRVYGETRSRFGIGAQLAVCARAKAVEAIKATKAKKSETCPQFGPRGSIRYDARTFRLMSLDRVSLNTMQGRVICPMILGRRQHDMLIDRTWKIGGADLIWRRGIYYLNVTQSKDAPEETETSDTLGVDLGIVNLATDSEGESFSGAEVKAVRTRYHKRRQILQKVGTRSAKRRLKQMSGREKRFQKNTNHVISKSLVQKAVRTRKAIALEDLRGIRERTTVRRVNRYERHSWAFSQLRGFMSYKAAWAGIPARFIDPRNTSRTCSQCGHCEKANRQSQASFLCKQCGFCLNADVNAAINISRVPVKVPIVSRLRA

SEQ ID NO: 56514 - protein, 436 aa, unknown
  TnpB Polypeptide
VLRRPPILIGGGISTITSLLYLTSKSPICLVESMNRAILLQTDATTSKQKALSEFSVKALETANFLLSKRKSKKLMELHKVWYSVVKEDTSFNSQVVCDIERCVCKSKGKVLNHITVKFNKPRNCKTFNTKSRFFVSFGIKPKTYIPVPIIENRNYQRYASLIQTGWLCKTYGLTSDGQVVAYLGKEDAELPVRKNIIGIDVNSKCFTASVLTPEGRVLKQLYFGKDIWMRRKQIMLNKSRLQSLADTGSHKAVQSLRRLKTYEQNFVKNRVGEVVRDITNLALKYDADIGIEDLKRFSPKSKKFNREVLRIPFYQFRMNLEARCFDKNITLHVVDAYHTSKWCSHCGAVAKSGHSSNYSLFKCVCGQVVNSDRKASLAVAVKTSLVRNKEHTLNKPASFQFTRLRVPVNGLLRSDDGFVSRALHIGSTPMESHPF

SEQ ID NO: 56515 - protein, 311 aa, Mycobacterium sp.
MARFEVPEGWCVQAFRFTLDPTEDQARALARHFGARRKAYNWAVATLKADIEAWRVTGIGTVKPSLRVLRKRWNTVKDEVCVNAETGAVWWPECSKEAYADGIGGAVDAYWNWQNSRSGKREGKTMGFPRFKKKGRDQDRVTFTTGAMRVEPDRRHLTLPVVGTVRTHENTRRIERLIATGRARVLAISVRRNGTRLDASVRVLVQRPQQPNVAQPGSRVGVDVGVRRLATVANEAGAVLEEVPNPRPLDAALKRATVRQPCAVAVHERLTALPRAHHRDFPAASPGQRCPHSSPACPDNTIGSNPRPHRC

SEQ ID NO: 56516 - protein, 458 aa, Lachnospiraceae sp.
MYLADTTVLSKGHHPDFYDYMERMSVLAKRLYNAALFRLRQAYTGWEREARTANEKAVFEEIRLMQAKYPRVKVRRVLSYRALDAVMRANGNPDFFAGLPMQTAQRVLKEAADVFGAWQSALKEYGRRPWKFTGRPRMPKYLKGDRHTFYITNQDAVLYPARVGGSSAAGAELKLPRIRERLCLPHLPEGSVLKEVQVRPYYGKYMLVLVLEKAGKPLRTDLPHMAGIDLGTVNIAAIVSTDHSSRVYKGGAVLSENRSFHKKKAEAVGIITRGTRHRHADSAHLRRLSLRHDCFMRDMMHKISADIVRYCTEHGVGTVVIGASKGWKQGTDMGKENNQNFVSIPHDRLRKMILYKAGNAGIRVVLQEESYTSKADISAMDPMPVYGREDGTPSFSGRRVRRGLYACSGGYRINADCSGAANILRKAFPGAWEGTEDFRFLAYPETAGWKELQRGRRA

SEQ ID NO: 56517 - protein, 387 aa, unknown
  TnpB Polypeptide
MIRLLKSFKTEINPTEEQKIKIHKTIGTCRYIYNFYLFHNKELYTLGKKFMSGKSFSVWLNNDYLPNHQEYSWIREVSSKSVKHSIEDACTAFSRFFHHQSGFPRYKKKGRSNVKMYFVRNNPKDCLCERHRIKIPTLGWVRLKEKGYIPTSKDGYIIKSGTISMKAGRYYVSALVEVTDPVRDSCFSDGVGIDLGLKNLAFISNGTVYRNINKTARIRKLEKQLRRAQRKLSRKYENLKKGEPTQKANIRKQKLKVQKLHQRLENIRTDYINKTISEIAKTKPSHITVEDLNVSGMMKNRHLSKAVASQKFYEFRTKLKTKCEEFGIELRIVSRWYPSSKICHCCGHIKKDLKLSDRVYKCACGYTEDRDFNAALNLRDAETYEIA

SEQ ID NO: 56518 - protein, 481 aa, unknown
  TnpB Polypeptide
LAKNQTYRAFASCPTHILGLDGEVLDGTRVLASLASEVRDISTYATYAVRNDGTLGDDLARVTATAPAEAGRQAGVTMPDFLASGRTGRSRKEKLLQYNVVTACRSYQERVKAANGESSKYVSQGWKRTVDTSAPSYGEDCVNLGAVDRAYAAIENNPFANGEIILKMVIQGQWYRLIFNFDNKRFTEGKVTLPVIKVQDGAPVFIFAVATDNPVVQFSGDYTIGVDVGINDYATVVVRDVKTGRIVHETTLSRRIHSLWNGVRASERQVRDLKRKAATLLCDRQARMSALDEAQFHREAASRKKRELAILAAQEIAYLSHLWGNAVVAVEDLGWVCNTMQNGRWNRGELVKWLTHYVSQNGGWVVDVSSFNTSQQCNECGQRVTHPTHKLSACPEHGVMDRDVNAAANIAARAVQRVTKARVTRAKNRKLRLQQPLRAKAVVAVPLMVSLPFASVWWMSTVGVSARTRSSRVPVGWLPQS

SEQ ID NO: 56519 - protein, 386 aa, unknown
  TnpB Polypeptide
LKIKNCKVVDHMQLSETVKIYPTEYQRILINQTMAEYIDTVNRLVSSAVSGHSLARITTASINAVLPSALKNQCIRDARSIVKKHFKHCHKAVLKNRTFAKRGTAIRVKAPKLPVLKKPCCYINNQNFQIKDNCLEFPVMVDGRSRRIPVPVKLTDRQKAIFSGAKFGALRIVMKNHTLVAQVVYEVLEPKMKADGNVMGIDLGIKCPAVSYCSDGSVKFYGNGRKNKYMRRHYAYLRRKLQVSKKMKAVKFINDKEQRIMRDIDHKLSHDIIETAVTHNVRTIKLEQLSNIRSTTRKSRKNNHSLHTWSFYRLAQFIEYKARLAGITVEYVDPAYTSQTCPVCGSVHHAEDRDYACRCGFHIHRDLLGAMNICNSTEFAGNRQTA

SEQ ID NO: 56520 - protein, 259 aa, unknown
  TnpB Polypeptide
VKPYYGDLLLVCTFECPDPEEKVKGSGVCAIDLGVENIAAIVSSKGDCWLYKGGVLKEKNQWYNKQLARLRSIAMKGHDPKEAAKMGLLNTKQMRRLHQKRDLFFHDAMHKISSRIVQECMDHGITTIVIGVNERWKQSVELGKNTQSFVQMPFYQLRKMIEYKAERVGIEMISQEESYTSKANLTAGDHIPTYGVDDERAKFSGIRVKRGLYQNKEGNLFNADLIGAGNILRKKFPETFSKITDFSFLQNIKVIQVFS

SEQ ID NO: 56521 - protein, 375 aa, unknown
  TnpB Polypeptide
MKRMSSLAYHFGVKLRFYPSSKQKKIIKLNYDAQRFVYNSYVGRNRTSYHAKRYLAVKQSNAMPFAFSALNSYEVQLAETVVINHELLAKPKNIRDAYSFLRVKEIDSLALANAIQNYHKAWKNYRKMGHGIPTFHKKRSDWSYQTNCQYPKQSEAYLDNGTARFIDAKHIKLPKLGIVRIAGFRKLIKERLLKQIPTRIGTVTIKKTADDQFYLSMQLGSDIAFVKDLPKTQSQIGIDLNLDNFLTASNGAMVANPRFYRKTKKKLAHAQRVLSRRQRRAKQEGQNLGTARNYQKQRLIVAKLHDKIRRQREDFLQALSTALIKNHDLVVAEELRSKNLLKNHALSQSISDVGWRSFLNMLAYKADLYGKEFKS

SEQ ID NO: 56522 - protein, 558 aa, unknown
  TnpB Polypeptide
MRSISSSFVVAPPTGAKVRTRLRLSTTDEEVLLQVGVYLGSLAGGDLALGCRLGRGPDKRTDRKRALTPACSSRWAGAITRTTNDQWTCGYNNLQGERTSLRRAIRRLEQRVQAPVGSKAGRVRGYATSGERWDKQRRLQTLSARLARVEARLVVGKVSVVRGGRRLLRLRHHLEAAELTESLWRQRWAAERLFLTADGEADKAWGNETIRWHPVQGWLELKLPTPLAHLANRPHGRYRLTCPVGFAYRGEEVAAQAAAGAVRYDISQDPDRRRWYLAASWKVDSGPIPSVEEAVAGGVVAVDLNADHLACWTIDHHGNPVGGALTIPLDLDGLPQAARDGHLRTAISQVCALARSRGVGAVAIEDLGFADSRAAGRETLGRGRRGKRRRRIISGIPTRRFRDRLTQMAHNQGLWVVAADPAYTSRWGGQHWQAPLQQRHPTTIVTRHHAAGVVIGRRALGYRARRRAGILDGDQRITGASNCRPGRPEPECAHGPGPPGPRPRTAQAGQTGRGNRDRSRAQAAQDRSEPPISRRQQMLTDADAPGTVAVEAVVRPDL

SEQ ID NO: 56523 - protein, 278 aa, Escherichia sp.
QNENHEAGNKYIPYGKMASWLVEWKNATETQWLKDSPSQPLQQSLKDLERAYKNFFQKRAAFPRFKKRGQNDAFRYPQGVKLDQENSRIFLPKLGWMRYRNSRQVTGVVKNVTVSQSCGKWYISIQTENEVSTPVHPSASMVGLDAGVAKLATLSDGTVFEPVNSFQKNQKKLARLQRQLSRKVKFSNNWQKQKRKIQRLHSCIANIRRDYLHKVTTTVSKNHAMIVIEDLKVSNMSKSAAGTVSQPGRNVRAKSGLNRSILDQGWYEMRRQLEYKQL

SEQ ID NO: 56524 - protein, 310 aa, Escherichia sp.
  misc_feature (2)..(2): Xaa can be any naturally occurring amino acid
  misc_feature (281)..(281): Xaa can be any naturally occurring amino acid
VXQNENHEAGNKYIPYGKMASWLVEWKNATETQWLKDSPSQPLQQSLKDLERAYKNFFQKRAAFPRFKKRGQNDAFRYPQGVKLDQENSRIFLPKLGWMRYRNSRQVTGVVKNVTVSQSCGKWYISIQTENEVSTPVHPSASMVGLDAGVAKLATLSDGTVFEPVNSFQKNQKKLARLQRQLSRKVKFSNNWQKQKRKIQRLHSCIANIRRDYLHKVTTTVSKNHAMIVIEDLKVSNMSKSAAGTVSQPGRNVRAKSGLNRSILDQGWYEMRRQLEYKQLXENTMPSTPDIGFFFHRPKYHLTCETITGI

SEQ ID NO: 56525 - protein, 257 aa, unknown
  TnpB Polypeptide
VCGRRGCRCQQLRRRHHHQRVFHARPLFDRFHHYTERIAGLQSQLPEGEDSSELIETLYDKRTAHRNHAQDALVRHLACLFAEWSVDTVFVGKLDDVREKHWSATVNEKTDLFWAHGRFRRRMHTVVEDECGISVEEESEAGTSSQCPRCNEGTHVSRNGDVFQCGSCGFEGHSDVVGSENFLQNVVDSDGENDGERPMARPVDSGQNSPERGHRKVPRLEWDDHCWRQRGHATATKEEPTNRSTREGNGASDPGPA

SEQ ID NO: 56526 - protein, 297 aa, unknown
  TnpB Polypeptide
MALRNLDNAFTRFFKQKKGFPKFKARHDPRQSCQFPQNIKIDWKTRKIYFPKIGWINIKLSKTFKGKIKTTTLSRTSTGKYFVSVLVETEEQMPVKPTIREDQTVGIDLGIKSYIITSDGLKVNFPRFLRRSIARLKLLQSRASKHPKGGFRRRKAFRKVARLHEKIRNQRHDWLHKLSSKLISENQTVCLEDLNVSGMVKNHCLTQSISDCSWSTFVSFLEYKAEWYGKNIVKIGRFDPSSKMCSICGDINSKLELKHRKWKCNGCGTTHDRDVNAAINIKKFALLRQNTGSGRPG

SEQ ID NO: 56527 - protein, 404 aa, unknown
  TnpB Polypeptide
MLVKGVVFYLESDLPPDAKLLLEDFRLAVNNAIRAGLQARVTSRNALNKLAYKDFRREHPRMYAQHLVSAFEVAGSALKIHRKRFRKGATGRIPFVKRLMMKAENQAYKLDRKSGIIDLPIRAGCHVELRLIVSQYHRKYLDDMALSLGSLTVLPDRVIVAFRKDAPKPYSPDSVISLDTNERSLDGVFVEGDVGKAIKAEFPEVAIIQQRHHDRRKRLQRKKAHDRRTSRNLCRREGAREHRRIDYRLHQVADSVLKFAEERKSAIVLEDLKGIKSNRSKELNRRLSMWPRRKLHQIIEYKAQWKRVPVIKVNPKNSSRTCPICGRIQDSRMGAEFECECGWRLDRHINASINLLQTAISKGMAGGLRFNPGAFQHDVMMILYDPMTGARSEPNGTSGIVGVT

SEQ ID NO: 56528 - protein, 409 aa, unknown
  TnpB Polypeptide
MRIAYRVEIQPTPTQRKSLLQHAGNARWAYNWGLRQHKKAYEEWVEAGKPKKWKGWRNAVSLHRDLNELKKVDLEQGGVPWMYEASKCAPQEALRDLDTAFKNFLSGRGRYPRFKSRNKGVGGFRLTGSIKADKKSVQLPRIGRVRIKPGDHGYIPFDRYAQVSVSEKAGRWFVSVIGPEVTEALPNGGPAVGLDLGVARLATLSDGTVIENPRALMTSQRKISRLQKEVSRRKKGSCNRSKSRKKLAKAHYRVGNIRADALHKATTTIAKSHGMVVIEDLRVKNMTKGGGSRKRGLNRVILDASFGEFRRLLEYKGRRYGCSIVAVPARYTSQRCSRCGCVDPKSRSTQSSFACTRCGFEINADLNAAINILVAGSCPETQNACGELVRPVSLRAGRQGSMKQESAVA

SEQ ID NO: 56529 - protein, 435 aa, unknown
  TnpB Polypeptide
LITIKVPYKTSEENSKIINDLRHQYSSIVKSAYNRAKEGFSQKNIRVELKNLNNVQDLGCWLTQCAILEGLAVLKKNKDKKVIFGGTKVFAQRIKNQISKEEIKKKRLLSINAQGEKLQRGNRSFDLRMLSENKLVFKINRTKHLSLDLQPMKKNYRQKLQFIEQMSSSNDLTVGVRLNESYVYFTYEELKEKVELNQQVYMGIDLNPNYIGISIKENEMILHTQCFDFKLLIDKILNENNSSDSKRFKYLNNKLKHETILAAKHISLLAKQFKCRFVFVEDLKNLAKANLDKSHILNRLTKNLWKRDYFIKNLTKRVTNLGMKVFKVNPMYTSIIGNTQYSYFDPINASLEIARRGFNVIILKNKQFYPEFSIKTLLNNLWKKQLGKEVKDWTELFKHTKNSKLKYRVSLEESSLFKVFQMDSIKSKILCYQFE

SEQ ID NO: 56530 - protein, 957 aa, Nonomuraea sp.
VTVRYGDQSGESKHIRADDPDGQSRWSFSSRQATLRRLDKAFTWFFERVREGRRPGFPRFKGRGWFDTVEWPKDGDGCRWDSQPEHPTATFVRLQGIGHVRVHQHRRVPGTVKTISVRREGSRWYVILSCDGVPAEPLPATGAVVGLDMGVASLVTTSDGSHVANSRHLAATADRLAAAQRSLARKKRGSKRRRKEVARIAALHGKVRRQRLDHAHRTANALVRDHDVIVHEDLRIANMTRSAAGTIEQPGRNVAAKSALNRSILDAGWGVFLTVLAHKAESAGRELIAVNPANTSRTCARCGHVAKENRLTQAEFACTACGHAAHADVNAAVNILRAGLALRRAAEAAWREAAQRRSHQTAHCNPQGTGRQRSASAGCGAPGDGGEQFAGVVVARVVEDLLGRAALHDRALVHDVHGVRDHPHHGQVVADEQVAEAELALQFGQQVEDLCLHQHVQRGDGLVQDHEVGGQGEGSRDGHPLALPAGQLVRQPLAHGRRQRHLLQQLRRRLPAFRGRADAVHAQRLGDRLLDRVAGVERGVRVLEDRLHPPAEREQLAPPQPGQVGAVEADGARGRLVQTEHQVGGGRLARARLAHDRDGVPARDGEGHVVHRGELLARAPGREHLAQVLHHDQVGSVAGRLGDAGGGEARHRLQQPPRVVVTGLGEDARRRSGLHDLPLVHHGHRVGAFGRERQVVRDEQDRRSHLRGEPSELVEDAPLDGHVECGGRLVGDEQPRPAGEAHRDQRPLPHAAGELVRVLRGPARRFWDAHHVEQLHRAGLGRLAGGDAVHLQRLGDLVADAHERVEVRHRVLRHQADARAADRGHLLPARRREVAPLEQDLPAGDAAVVGQQPVDGGGRGRLAGARLAHHGDGLAREDLHRDVLDDGHVLLAGAEGDGQVADLQQRRHAVSARCAVACSRPFQSSSVGVGCPSTRSRLEARASAMSRPGTNPTAQPT

SEQ ID NO: 56531 - protein, 573 aa, Lachnospiraceae sp.
MAFKHVNPENEYLARYRAACPRHSVTFELKISEDDKRHLFALNDRVRRAGNAVTGTMQKRIDQMRRTRAHRKLCRDYAWKTEHMKKLNPDSAEYKTLADGRKKTAQAMSAMQRDFEITHEDVRKLMMQAAKEYNIPSVIASTRGDDIWRGIEKVLFAEGKSLRFRKRGDLPVMRAREIGRIIVLKVDKREERLVVCMQGYPAMPLYVRPKDRWLRDEYNAILDFMEHPEQETKKARQYEKNGQLEPVFRPCYCSIRCEVIRGKLRCYVQILVGADPMPKLDRFGRPRHVPGKGRVGCDIGTQSAAVVSEGTAELVNLGERVPGAYEKNSERKKFLLRKMDTSRRVNNPERYNPDGTYRKGSHGAWVLSRQYRKYQAELHEIERKESLTRRYANRELANHLRSLGDELITEPSNTAALAKRSGRPAERLDRTITVQKKDGTLQVVRKYRRKKRFGASVARRSPAAFQNELRKKFGSGYHETPKMTYRASQYDFMLDDYIKKKLSQRWHILPDQRAVQRDLMAAFLLYCADEHFETIDRSRCIREFENFWESHQNCIRQIVENHLHICNSGINAA

SEQ ID NO: 56532 - protein, 274 aa, unknown
  TnpB Polypeptide
LIEGCPLFPLEEVGESVRRARMQRPHIDLEGGRRIGFCIAGGTLGQVVREAQQGVELRDGEREFGEVEFDVLGVPDELEEVVGDEFDHWRREYEKRRGSLQQCGTRWAHENIQSVGRKEEGRFKLMLHRISNELVAEARENECSVIAFEDLTDIRERTGASWGHKWAFNRLYDYVEYKAEEYGIVVEQIDPANTSRRCSHCGFTHPDNRDDEDFECLRCGYENHAAKNIGLRYLRRNQTGGDGGAPLGVRLHSGTLNVNGGYSCRGIGQNGSPH

SEQ ID NO: 56533 - protein, 263 aa, Methanobrevibacter sp.
  misc_feature (43)..(49): Xaa can be any naturally occurring amino acid
MCDKTFILTDKVEFVPDEEMEKELWFNINASAFVYNKTLEYSXXXXXXXNRTYTQKIVKTLKKHYPFLEDADSTCLQASTDRLIKAYEGYYDHRTGAPRFKKRKKNPVTSITLRNNFYDTKEGRVGAIRWLSENELRVTKLGKITVKHRRHIKGKIKEATLKYENGRWYVCIVYELDENKHGEFSYGGLYVGIDVGITDFLTFSNGKVIAKPDLKKINGRIQYYQQKLDGKKEGGSNWKKTLKKLHKWIRKKNNVVNDYYHKI

SEQ ID NO: 56534 - protein, 456 aa, unknown
  TnpB Polypeptide
MRRWLKALKTYSLNHDKAEEFYPLLEAYRDAVNRTLQELWGQLEWKQKSIPGKKQHRLLPKLKADVHSNEYKRELRNRILADWPYAAHWADSAIKTAYSIFKSWRKNYVKGDRKRRMPVAKRLFARVKQTLVKLEGEKLRLTLKPGEYVYLDLSKRYFKLPSKVSSAGLGEPVITPEKVHLPVHFEETAQTDKPAVAWDFNLLSLDGYSPETGWVRIDTSRLASVHIASFEKRRSVQRRASRSKKARRILAKYSGRERNRARKHQIEVARVITSVSGAVGLEELSKQGMFTRSRVWNRRITRSDWRSIARILEEKLGEDKVAELDPYGSSSFCSRCGWFNKDLNGAEVFECGGCGLRIDRQLNAAINLYMRMRFGYTVKWKGKRKCVELKMGGASRREWWDSTVLPSLLPQPGGCVPTGAEPKGNNEPVSSLYEAVKPKLYYAYDRYDDAYLRRHT

SEQ ID NO: 56535 - protein, 404 aa, unknown
  TnpB Polypeptide
MLLCKKIKLEVSEEDAQALEFMQAKCRGLYNWWIMRLRDGEKWPGWKEAKATLQESKQHDPELHQVYGKLLHEVYFRTDKAMTAFFRRCKAGEKPGFPRVRSRHDFFTLVYPAMYINVQGDRLILPTGGKGTKKRFPNIVARLTEQAPPSFREVAISRDARGHYYASFVSEQPEQPATTTGVVAFDLGIKTLATGVNDQGRVYSIGGFKGARWYNKQLDKMRSKRDCCKKKSKRYIHLTKVYKRVSEQKRNKQKDSLHKASHLISHKLVESTVVVGDLSQRQMVTKQHQEKNKHRNRAVFNEWGCYTFVQMLVYKCLLYGKDLEIISEKYTSKDCHRCGNRQAMPLWKRTYHCERCGVVMDRDENSAHNILERFLARLGPHVADATRCADVFTAIDNVNTLEHI

SEQ ID NO: 56536 - protein, 269 aa, Geitlerinema sp.
LAFYGTEQIKRVRLVRRADGYYAQFCVSVEVRETLEPSGNTVGLDVGLKEFYTDSNGQTEPNPRFYRNAEKKLKRAHRRVGKKQKGSTNRKKAVNQLGRVHLKISRQREEHAKRLARCVIRSNDLVAYEDLRIKNLIRNHCLAKSIHDAGWYQFRKWLEQFGEKFGRITVAVEPAYTSQACSSCGTVVRKTLSTRTHVCQCGCELDRDHNAAINILNAALSTVGHTGTLVRLRSPSAVEVNASGDLTATLAGANLSGQVGSLREESPRL

SEQ ID NO: 56537 - protein, 353 aa, Escherichia sp.
VKRLQAFKFQLRPGDQQECEMRRFAGACRFVFNRALALQNENHEAGNKYIPYGKMASWLVEWKNATETQWLKDSPSQPLQQSLKDLERAYKNFFRKRAAFPRFKKRGQNDAFRYPQGVKLDQENSRIFLPKLGWMRYRNSRQVTGVVKNVTVSQSCGKWYISIQTESEVSTPVHPSASMVGLDAGVAKLATLSDGTVFEPVNSFQKNQKTLARLQRQLSRKVKFSNNWQKQKRKIQRLHSRIANIRRDYLHKVTTTVSKNHAMIVIEDLKVSNMSKSAAGTVSQPGRNVRAKSGLNRSILDQGWYEMRRQLEYKQLWRGGQVLAVPPAYTSQRCACCGHTAKENRLSQSQFRC

SEQ ID NO: 56538 - protein, 462 aa, Fervidicola sp.
MVGHKNLKQLDAIAFKPGDESGFRLCYNGSMKHTNVVRVLPDKRQKQVLEIIGDRCAALWNAVQYRCRQAFFKGDSVPSYAALCSEFKEHPAYKALPAHIGQEVIKKARKAWDSYFACLRLYRKGELKEPPHIPRYWKDRRTGRRIFRVIPVKAPTSYSLDARCLSLTLPQDLRKGQGDRLVLRTKGVLRFHGRPKTLELKYDPVKTRWYAHQVVEVPEPVRKARPEKHAAIDLGARVLVALAVEGLNRQLLFSAREVIKDFLYWTNQIAGEQSRLNRAGRKTSRRLKRLYQLRARRLRHAFVALAAEIVRILKRLRVTTLFLEDLTGIREAMDFGPKNLLVHNFWAFRMLRNLIEAACTRTGIRVVPVEPRGTSCRCAVCGSSVRRPVRHKAVCEKCGRVWHADANAALNIILQGSSKEHGAEATPLKPLALRWDRHRWVSRFESAAGTPSGATSGSRMAA

SEQ ID NO: 56539 - protein, 373 aa, unknown
  TnpB Polypeptide
MIVRKTYKFKLYRSHRNKKLHWQINTGGLAYNHCIALHKRYYRLFHKTLNVYALQKHLAKIKALSRFSYLKELGSQALQDIASRIDKGYKLFFRNLKHHIRTAPPKFRKVKKAKSFTLKQAGWKIDEDTHSIIIGKQRYRYHKSRHIEGKIKTVTIKRDSLNDIYVFFSCECEQNEVIPRLGKSIGFDFGFHGKMLIAPAEEDDVDMPMFLRKNIKAIKTASRNFSRKQKGSANFRRAKRHLAQLYKKAANQRNAKHWEIAYELCEKYATICLETLNMKFMQIGHGKKVSNYGYGNFLQILEYVAFRCGTTIVKIDKWFPSSQICSDCGFQNIAVKNLSVREWDCPNCHERHDRDRNAATNILREGLRILATA

SEQ ID NO: 56540 - protein, 408 aa, unknown
  TnpB Polypeptide
MNKIQLIEIHQIKSSDKNYKELENLCFLSKNLYNATLYAIRQEYIKSKTYLDYYKVNKLFTENNQPDYRALPAKVSKHTQKLVHQSFVSFFKLLKLKNNNKYNKIINLPNYLHKNGKQVVHYEKGALSLVKDGYIKLSKTNIVIKTKIPKNQIQFVRIVPKGNHIRLEVGYKIELTNIKNSNNRYVSIDLGLNNLMTISSNVMKPFIINGKPLKSINQYYNKQKSKYNLLNLSKKELIKLDRLNLKRENKINDYIHKSTRILVNHLVSNDIDTLIIGQNIGWKQDINIGKRNNQNFVYIPFSKIINQLIYKCRLYGIRVETQEESYTSKCSFLDNEEICKHEIYLGKRTKRGLFRTSDNKYINADLNGSLNILKKYLIKNVAWNDTIWSDLVEASSEPNILVLTPGFN

SEQ ID NO: 56541 - protein, 360 aa, unknown
  TnpB Polypeptide
MQRTLRYRIIPSHAQVTRMNGTLALLCELYNAGLQERRDAYQCERKTIRYIDQQNQLPEIKEARPELNEIHSQVLQDVLRRLDKAFQNFFRRVKERKEKAGFPRFRSRKRYDSFTYAQSGFALTNGKLRLSKIGDVRIRMHRPIEGKVKTLTITRSATGKWYACFSVETQAQPLPANDRAIGIDVGLTSFCTLSNGEQIANPRFFRTDEKALAKAQRLEKRKAARRIHERIANRRRNFAHQLSSALVSMFGVITFEDLNIKGMVCNHSLAKSIQDASWNQLVQFTNYKAENAGRTCVQVDPRNTSKLCSACGQIVEKDLSVRVHRCSCGVVLDRDHNAALNILRRGLATLGIEAKEAASF

SEQ ID NO: 56542 - protein, 355 aa, unknown
  TnpB Polypeptide
MFMLLSQTAQEVCKLLDKAWKSFYQLQRTHGVTNPNPPRFKQENIAITYMQNGIVHSEGDSTVRLTLSKQLKQFMSGQYDITNNFLYLKNKIFKDTDVIKQIRIYPPGNGTCTVIVVYEVNDAVMLSDNGRYLSVDIGLHNLMTCYAPSTGKSFIAGRKYLSVCHYFDKEIARVQSQWYKTQTKAGVKYPKMSKHVQKLYKKKSDCISDYLHKVTRFIAEYCHDNGINTVVIGDVTNIRKDNNKGSVTNQKLHSLPYRKLYILLEYKLAMYGIRFVKQNEAYSSQTSPLMSEVCKENAEKSNRIKRGLYTDGDKRWNADCVGAFNILRLYFQTNGIEKQMDPLKIADPYVIKVAV

SEQ ID NO: 56543 - protein, 336 aa, unknown
  TnpB Polypeptide
MTGKSFSVWLNNEYIPNNPDKIWIKEAYSKAVKKSIEDGCTAFTRFFKHQSAFPNFKKKGKSDVKMYFVKNNPKDCFCERHRINIPTLGWVCVKEKGYIPTTKDGYIIKSGTVSIKAGRYYVSVLVEIPNAKIANNSNAGIGIDLGVKDLAIVSNGKTYKNINKSIRIKKLEKKLHREQRCLSRKYENLKKGESTQKNIQKQKFKVQRLHHKIDNIRTDYIYKSITEIVKTKPSYITIENLNVSGMMKNRHLSKAVASQKFYEFRTKLKAKCDENGIELRAVDRWYPSSKICHCCGAIKKDLKLSDRIYRCDCGYVEDRDFNAALNLRDALTYEVA

SEQ ID NO: 56544 - protein, 363 aa, Cyanobacteria sp.
LGSALSAPIIRKLTTLHPTSKERGLCFHFCNTNAATKVKKFKRLPLETNKQNWSLHKVGNTYSVSFGLIRGRKKRIPLTIHQANHAPILEALLNGNAEPGSIKLWRSKKGIWFALLSVSMEVPDSQPKDSWVGVDRGQRHLAVASLPTGLPKFWTFGHIRQIRRRYQKLRQQLQSAKKRKTVKKLESKERRIITHINHIVSKQIVQFAAQNGCGIRLEDLSGIRQTSKQRKKNKSDAGNNRDAWSYYQLESFVEYKALWAGIPVEKVPPPYTSKSCCRCGGIGKQNKHSFSCPRCSYHVHADWNASQNIGHWLGFSCSLVLQQGSSVMGASVQGSGVNDTPPNSVSELAGSARSTSKNENPTA

SEQ ID NO: 56545 - protein, 346 aa, Solibacterales sp.
VKLTYKFRLRDKHAAELNRQARAVNFIWNYCNEAQRHMLRWDRWLSAFDLMRLTANCSKELSIHAHTVQRVCKAYVDARQTHHKAWLRWRSKKSLGWVPFNTGHVSFDGATFTFRGKQYQTMHLRDMPAGIKIGAGSFNQDARGRWYLNCPIEIEEANRTPNACVGIDLGLHSLAALSTGEKIEAPKFYRKSEAFLATAQRARKTKRIKALHAKIANRRKDFLHKASAKLTKEFGLIVIGDVSPSKLTQTAMAKSVLDAGWSDFKNMLSYKSIRNGGRTIEVSEAYTSQVCSTCGALPVSRPKGIADLSKRIWRCDDCGADHDRDHNAAKNIRRIGLDTLIGGTPC

SEQ ID NO: 56546 - protein, 454 aa, Bacterium sp.
MAAVTGTAPPVYASHDASISKVAGKGKGCCELYYFLEAHMAEKVGSSIVTYRLKLRCDHIDWIQETENLYNKVLGFYYGILTEHLDFLELSNMEVLRRLEQMTIMGRDKQPVVMPLPFQKVPLYFRRSAINAAIGHIRSYMGLLQNWEWKKEKAEKKGHLWKRGKPAPAKSFHASVVFYKGMFKEFGGGSILLKLWNGRSWIWVRYTYYGRKLPKDGIILSPTLINKGKKIFLSVSVKFPVNDIRKVKERKAEKESFCAVHFTASEVLAACAVFSSDGHVTDSYFVRGGKEFAYRRKCLLNRMKKIRKNAAKGGKKLRRSIFCLSSYYAHLVSRRILDYCKEKGVKGIIVPKYAEVEGYLYGQGMGYFLGKKIIQFLRYKAWKEGIILTAVSPYHTASHCCHCGVPVKRYNGGHTPGVRYFGGRLFICQNGHQGNAALNAAKNIGYLFYKTETK

SEQ ID NO: 56547 - protein, 410 aa, unknown
  TnpB Polypeptide
MRLVEQHIIRKDDPRFKKLDDAAFASKNLWNLANYYVRQSFIADHKYLNNTEVYHLVKSSDAYQALPAKVSNQVLIQLHKAWMSFLEAMQEWREHPEKFLGRPKLPKYKHKTAGRNLLVYEKGAISKRGLKRGRISLSALGKLVATKQKPDHVVQARVVARSTHYVIEVVYERKEEMAEVDASLFAALDLGVNNLAAITSNKPGFVPVLVNGRVLKSINQGYNKQREHLQKQLAKINRFTSHQLDAITDKRNRRVTHQLHLASKAIIGLLVAEGIGTLIIGKNAFWKQEVEMGKRNNQAFVQIPHTRFIEMLRYKAECVGITVIITEESYTSKASFLDRDTMPVYDPNDQTEHTFSGRRDGRWYRVKGRRPMHSDVNGSYNISRKVFPTAFDGRGIEASPIAVRPRRLAV

SEQ ID NO: 56548 - protein, 398 aa, Bacillus sp.
MAKKPSDWNHISFVFKIHPNHAQQQLIHQTFGCVRFVYNMILHHNLNESKLQRDHAIKKLPLLKKTCEWLKSVDAIALQAAVEHLYNGYERYDKEKTKTYRKNVLRKMASEGYVPTDYDHIKHPKFKTRKNPVQSYTTKQTNGNIAVKEKAIKLPKLGWIRMSQSREINGILKRVTVSRDSVGRYFVSILCQKNDSPYLRAKQASVGIDLGLKSFAVLSHGAKVNHPKSYATYEKRLAFLQRSLSRKEPRSKSFERNKKAIAKLHLKIKNTRHDFLHKLTTRLIHDNQVIGLETLKVKNMVQNKKWSKPIHDASWSTLKAMLTYKAKWYGRKIVFIDSFFPSSQLCSQCGYKHREVKNLELRKWECHACGSYHDRDHNAAKNIEKEALMLSLEIQPSV

SEQ ID NO: 56549 - protein, 410 aa, unknown
  TnpB Polypeptide
MKLVYKFNIGQNEDISSLCKISNNLYNQALYIFRETLSKEDKWLSYFELDSIMKKTKNLDGDINYRLLKAQCSQQILRVLDKNIKSYYKSAQDYKKYPSKYKEKPGLPSYKKRGSEFSLYYTNQSCKIEDGKIILSKELSISIPQYEKYSDLIKDFQQVRIKPLNKGYKVEVIYEVKDVETPKERKEKIASIDLGIDNLVTLISEDFVILFSGKFIKSYNLFFNKKLAKLNSIKDLQKIKGTTRRIKKLYYDREQYIEDVFHKISRKIVDLLVDFKITKLVVGYNKGWKQNVNIGKKNNQKFVQIPFARLVSYLEYKCELAGIEIVIHEESYTSKCDSLAFEKIGRHKSYLGRRKKRGLFQSSVGKLINADVNGALNIMRKVVGDSCESIQRIIDRGLLFNPVRITNVFC

SEQ ID NO: 56550 - protein, 578 aa, unknown
  TnpB Polypeptide
MFYHQKSERLMGTKPRGERKSPHKKTPTFLFELPLLVDAGQAACQRAHLEVGRQFYNAVLSAGQSRLRQMRADPAWQVARAIPRTHPQERRAAFSALRERYGFSEYAFHELAKGLRVSWLAEHLDAVLAQTLATRAYRALNRVCVGKARRVRFKSRGRGLGSIENKRNDTGLRFVLQTPEEGHSGFLLWNDDRLPALIDWDDPVVSHGLAHPVKYARLVRRQASSPRAQGADREGERFVVQLVLQGTPYHKPKHTVGSDTVGLDLGPASIAIVSRQVEARLEPLCAELHPDARVIRRLQRRMDRQRRAANPEHYDERGRPRKRGKGAKGWKQSRGYQVSRRRVAARERRLAAHRKSLHGQMAHQIAAVGHTIITEKISYKGWQKRYGKSVGLRAPGMLIAHLKRTVASTGGTLHEVPTRSTKLSQYCHGCGTFVTKPLSQRWHQCPCGIGPVQRDLYSAFLAAYLDPADPIPSCARYQRYWEGAEARLQAAHERVIQRANEGQVQPRSMGIPRLRPMMAYFPCHLGGGTAEATRLKQCLTSTRKSQGDWSMTCKRLVMVEYYDQDASQLGRIRLRLIA

SEQ ID NO: 56551 - protein, 440 aa, unknown
  TnpB Polypeptide
MIDSGRTSTRRSDRRETTLVAVSTDLVPLPQHARDCHGPGVSSGAVLVRYRYRLRPTSGQQRALARVFGCARVVYNDSLSLREQCHAAGEKISDSEVQRRVLTLAKLAPERAWLAEVPSVALVQACNDARRAYRNWFDSLTGRRKGRKIGHPVFRRKHGRQSIRLTRNGFSLRGQRLYVAKVGEIRLRWSRPLPSVPSSVTVIREPDGRYYASFVVERAATPLPVSDREVGVDLGLNRLAVTSDGEIIANPRFLRAKQRKLVRAQRALARKTKGSANRDKARRRVAVVHRKIRETRLDHAHKIALALVRDNQAVYAEDLAVSGLGRTRLAKSVHDAGWAKLLRLLGEKAQRYGRTFYRISRYTPTTQTCSTCGANDGPKPLQVRTWQCGACGAVHDRDVNAAINLLAAGRAERLNACGGTVRPGATLAGPAETGTHRGAA

SEQ ID NO: 56552 - protein, 162 aa, unknown
  TnpB Polypeptide
VLRKSLPGNRENFPDAKRAAGTIRNRGKGLHYVMKRIKNQRKDFHHKLSHDLAEKYDAVCVEDLNLKGIAGGLHFGKGIQDNGYGQFLSMLGYKLEERGKYLIKVDRYFASSKICSVCGNRKKELALSERTYICECGNWMDRDVNAAVNILKEGKKVYKKCA

SEQ ID NO: 56553 - protein, 489 aa, unknown
  TnpB Polypeptide
VKTTVRGVILQLTEVQKTFLDTKMNRYCAAVRWSFKRLLEGCKTQDIRLAAQSNFSLNSRQANDAVYDAQTTIKSQEELVKLNHTGAANKVEFTQKRLEKAMPSGKRAKLRRRLDKEERKLVFWQKHIDAGTFPPVVFGGKKLFHKRCKGNITREEWQEARSNRYLSRGDKTKGGNLNTRLYIKDGNIYMDIAAEPVETGKVIRYNRVTVPIYLAHKPSKKTGLINGRNYRRMVLEYLKTGGAYQVEIIRENGRYYVYVTIEEEVPVPYTAYNGAVGVDTNPDGLGITHADYLGQFKEGLWPSQGEWTYARSKRRDNLIGEAAALVADMAKRLNCALAVEDLAFKNDKSVTAKFNRMSHGFVWSKFLQAVERRAAREEVPLAKAPPPFTSVIGILKYQQQYGLSNHEAAAYVIARRSLGFSNEKAPEQLVQKYVKKRNTFALLTNWKQWSSVKKAVIAAIKKQTKREVKSLVSWQHHRKQLIARVTPLP

SEQ ID NO: 56554 - protein, 486 aa, Oscillatoriales sp.
MTSITYCKALSTPIDELNAIGKTQLEMFLSAYTPIFHKAVCETVNFMMLGEGFNKSYWNTHLQKTYGISKRHANGVISSAKGAVDSAKECRISHIKTLENQAKSCEAWLTKAERKLKLARKFYAKKNWQNSKSGCAFPLSSDLKYRQTNWQNLRFQIHNKKRKLTRYRQILAVLKSIPVRVRVPKNQAFIVGSKDESYGNQVCQWDGDNLRVRVPACLESKFGKNVDSYIGDFPRNINRLPATGAKTWHFYYKSGKWCVAVSFTPSNVEQVSRSVDYGCIGIDMNPGSIGWAYIDTEGNLKAQGKIRLQTGLRKGQQQAQIVKACRELSALAIKFQCPIVCEELDFTSKKEQLRERGKKYARMLSGWAYSELFKLLNSILSNRGIELLTVNPAYSSIIGLVKYLRMYGLASDEAAALVIGRRGMRLSEKIPGSLTAFVEVNSTKHVWSLWNQLNKKIKQSGIITNRHSYYSNSNWDFLGNLDIEEA

SEQ ID NO: 56555 - protein, 419 aa, unknown
  TnpB Polypeptide
MRRKKKETENPIPTITRTHKIRIYPNKHNQEVFQKYYDYQRSVWNRAIDERNAQYKIYKEMKATGLYTQKELNKNYFPHTNNLRKKMKKFDWENNFHCRVREVQFDNLCQAWSNFFNPNMPNHKKPKYKKKKEIESHKKISLRDVRTKGKWLFLPKSLKSKPEYRFTKIKMAQELRFNGRITSDFSVSVKNNKWYVIITVETPLVEKTSLYNQSTGIDVNVGSIDYLKKDELNKEYGKFYLLPKSLLKQYDKIKYYSRVISKKRNKNPYYKYSKSYKEAITKLNNAYTKAYNIQEANLNNIVKYFFDNYNRIVIEDLDVNSMRMNKRLCKSLHRNAFGRFKQKMINKAGEYNVEFILADRYFPSTQTCSECNHVKTGDERLFLWGDKYGNDHNTYVCYNCGTIQDRTENAILNLDHYGK

SEQ ID NO: 56556 - protein, 379 aa, Turicibacter sp.
MIIAKKIRLKPTPEQEQKMWQAVGAARFVYNWTLDRQIENYKNGGKFISDNELRKEITQLKKDELSWLNQVSNNVAKQAVKDCCVAYKNFFTKKAKRPRFKSRKKSKPSFFNDNVKLKVKENSVLIEKIGWIKTNEQIPMNIKYTNPRISHDGKYWFLSVGVEQSLEDVQLTDVSLGIDVGVKDLAICSDGQVFKNINKTKVVRKLEKRLKRLQKRVSRKYEMNKKQIKGGENRCQFVKTNNIIKLEREIKLLHRRLKNIRSNYLHQTTNQIVKTKPSRIVMETLNIRGMMKNRHLSKAIQQQGLHEFKRQIQYKSKKYGIEFVEADMWYPSSKTCSCCGNIKVKLSLSKRAYHCESCGISIDRDLNAAINLSRYGLVI

SEQ ID NO: 56557 - protein, 469 aa, Actinomadura sp.
  misc_feature (469)..(469): Xaa can be any naturally occurring amino acid
VAIRARLKGLTARDEQVLGEVGAHLGSLAGRDLKARCRAGTAHDADRWAARKRELTGESSARWAGSITKATHDQWALARRGQFAHLKSLEAGVAAIERRLSVPVGQKGTRRAAGGYRSRREWFAKSRRLHVLKDRLTRVRADWDAGKVRVARGGRRLLNNRHHLDAAGLTEEQWRARWEAGRWFCQADGESGKRYGNETIRVTPDGQVSIRLPTPLAHLANAPHGRYALTARVGFAHRGAEWADRIQGDRAVAYRIHLDTGRGRWYLTASWQRPAVPAVSLEAARARGIIGVDTNADHLAAYHLDAHGNPVGDPMRFGYDLSGTATHRDAQVRHAITALLHWARRCGVAAIAIEDLDFAQDKTREKHGRRTRFRRLVSGFPTGKLRARLVSMAAEQGLALVAVDPAYTSKWGDQHWRKPLTSNKRTMTRHDAASVAIGRRALGHPIRRRTTPPCTHQSDGRGHRIVQTX

SEQ ID NO: 56558 - protein, 581 aa, Actinomadura sp.
MSQPAIVKGVDAVPAAATHPGVGDAICEIGQTAGRNGHPQHLRAIDAPFVAAGPSGVAIRARLKGLTARDEQVLGEVGAHLGSLAGRDLKARCRAGTAHDADRWAARKRELTGESSARWAGSITKATHDQWALARRGQFAHLKSLEAGVAAIERRLSVPVGQKGTRRAAGGYRSRREWFAKSRRLHVLKDRLTRVRADWDAGKVRVARGGRRLLNNRHHLDAAGLTEEQWRARWEAGRWFCQADGESGKRYGNETIRVTPDGQVSIRLPTPLAHLANAPHGRYALTARVGFAHRGAEWADRIQGDRAVAYRIHLDTGRGRWYLTASWQRPAVPAVSLEAARARGIIGVDTNADHLAAYHLDAHGNPVGDPMRFGYDLSGTATHRDAQVRHAITALLHWARRCGVAAIAIEDLDFAQDKTREKHGRRTRFRRLVSGFPTGKLRARLVSMAAEQGLALVAVDPAYTSKWGDQHWRKPLTSNKRTMTRHDAASVAIGRRALGHPIRRRTTPPCTHQSDGRGHRIVQTEPSARGREGTRPPVTERAHDARPRTGTQRTRATSASNTVRDARSTRTWVQNSLLDTV

SEQ ID NO: 56559 - protein, 431 aa, Streptomyces sp.
MANAFASGGADRVCMFGSSPFLLRCSDSFRPNTHSDLDSLFVKLVVQVKLLPTPEQASALQATLHACNQAANHVSTIAHATGTKDNRALRAETYTQVKSTWGLGAQAAQHVIKKTCDAYAALKGSLRAGILGRPGSKPYKAATGKPVVFRPTAAQPYDDRMLSWQTEQRTVSIWTTAGRLKRLPYTGSEHQLQLLDQYRRGESDLITRGGQWYLLATLDIPEPAVNPDPQGFIGVDLGIANIATTSTGHRHSGRRLNRTRENDRKLRTRLQQKGTRSAKRRAKRHAGKEARRTRDINHKISKHIVAEAQRTGRGIALEDLGGIRERARLKKPQRVTMNSWAFGQLAEFIAYKARRAGVPVVYVNPAYTSQECSRCHHIDKRNRPRQAVFTCRSCGFVEHADLNASHTISLRGWSAWVRGAESQVPALTLTA

SEQ ID NO: 56560 - protein, 461 aa, Thiotrichaceae sp.
MIVTRIIKSKNLNRGKYKQLEEQAKQLGQIRSKIWHGYASIKGVSIKSDRKIRDLWLKEKRKFKVSANAWKETLRDSFGDIKANRESAKEKVRKVLYKQVTDEKKRLELYNKLKSDDWTCDNYLRRLMRKHWKHGRNHTTNQIVVRSDNYKTFQLGGHAWIKIPSLERGKRLAIPLNTTIEPTSTLRLILIDGEVEVHYAIDIEETKTCGQATVGIDKGYTEVFVDSNGEHYGEGLGQILTQQSDKLKKKYQARNKLRAIANKKSQKKQNIIENNLGRKKLNRHNEKVQSQIKETIYQATHKLVDKASVIAAEDLTSPIASKKWGKNVTRRLSAWTKGVIATALDTISRRRGSSVILVNSAYTSQMDSRYGVLKGKRSGDSFYCFDGVVLQADENAARNVLARLHDPEIDRWTPFQKVKSILVERTERHRLGLLNQDSSCNSSELSTESELPKNVQLCLTF

SEQ ID NO: 56561 - protein, 409 aa, unknown
  TnpB Polypeptide
MLLCRKIKIEVSPRDAEALEFMQAKCRGLYNWLVMRLKNGERWNVNQVKKTLQESKQYDPELRYVYGKLLAEVYYRLDGAMQAFFRRVKAGEKPGFPRVKPRHQFFTLCYPAMYLEVQGNTIILPTGGGGRYGPKRYENIVAHLTEEPPAHFQEVAVSRDARGNYYCSFVYEDAAQQEDLPGKTHKRRKKRQPRPLRDDGIVAFDLGIKTLATGYTDEGRFYHIGGFKGYRWYNKQLDKLRSKRDKCKKKSRRYIRLSKVYKRVSERKRRKQRDCLHKASHLIAHRLAERAVVLGDLSQRQMVTKKQEEETPKEKRKRQIRNRLVYNDWGLYSFVQMLTYKCLHVGKELHIISERDTTKTCHVCKRKQDMPLWVRTYRCENCGLVMDRDENSAVNIYERFLARLGPHTL

SEQ ID NO: 56562 - protein, 446 aa, unknown
  TnpB Polypeptide
MIPAPVVAERNLKNAAAFSFFIRMHVIPLPSGGGCKCAFYFTVIMIYYKDMITATKIRIYPDTKQVEKLAKAFGCARWLWNNSLNESQKTYQETGKGLGHFALNNRLPDLKKSVDWLGETHSQVLQAVCLNLSRAFVNFFERRAEYPSFKSKHDKQSIQYPQGVKIVDGRKLFLPKIGHVKAVVHREIAGTIKTVTISKTPTGKYFASILTENGLDAHAISLDGKILGIDVGLTHLAITSDGSKFDNPKHVAKAQKNLRRKQRKLSRKVKGSNTRNKARILVAKAHEKVANARKDYLHKLSRRLVDENQVIAVEDLHVKGMMKNHCLAKAIGDVGWGAFTGMLKYKAEQAGKGYIEVNRFFPSSKACSCCLHFQSSMPLKIRSWRCDKCGTSHDRDINAAQNIRNEAQRMIAAGIAGTASRGTVSQVRGRKPSVLARAVDVRSPVL

SEQ ID NO: 56563 - protein, 406 aa, unknown
  TnpB Polypeptide
MLIKGVVFRLNTDLPSEAKFLLEDFRLAVNNAIRAGLQARVTSRNALNRIAYKDFRQEHPMMYSQHLVSAFEVAGGVLKNHRGRVRKGVACRIPYVKRLMMKAENQAYKLDRESGTIDLPIRAGHHVKLNLVVSQYHRKHMDDTTLSLGSLTLLPDRVIIAFRKDTQKPYDPLAVLSLDTNERSLDGVFVDSHSEATVTVKAKFHDVAIIQQRHHDRRRRLQKKKAHDRRTARNLCRREGTREHHRIEYRLHQVADAVLSFAESEKSAVVLEDLTGIRFKRGKDMNRRLSLWPRRKLHSIIEYKAQWRGIPVVKVDPRYSSRKCPICGKIQDSRMGTEFVCECGWHLDRHINASLNLLQTAISNGMVGGLRFDPGAFQHDVMMILYEPEMAARSEPNGTSCGREVT

SEQ ID NO: 56564 - protein, 381 aa, Halomonas sp.
MTKRAYKYRFYPTPEQEALLARTFGCVRFVYNAVLRYRTDAFYERREKIGYVAANAELSRMKKADDTAFLNEVSSVPLQQCLRHQQTAFKNFFEDRARYPSFKSKRHRQSAEFTRSAFKCRDGQLFLAKCQAPLAIRWSRELPSEPTTVTVSKDSAGRYFVSLLCEFEPEVLPVTPKMVGIDLGLKDLFVTSDGHRTGNPRHTAKYAAKLAKAQRRLSKKQRGSKNRAKARQKVARLHAKISDCRMDRLHKLSRQIVNENQVICVESLKVKNMLRNRSLAKSISDAGWGEFVRQLEYKVDWAGRQVSAIDQWYPSSKRCSGCGHVMPEMPLQVRAWACPECAVEHDRDINAAINIKAAGLAVLALGENVSGMEPVSVSGSR

SEQ ID NO: 56565 - protein, 293 aa, unknown
  TnpB Polypeptide
MRDSCATGDTMIEAVKVMLDPTAKQARMLTEHAGVARFAYNQALSHVLDQLNNGQKPEYSYYGLRKWWNQNKNTLAVGADERVWWSRNSKEAYNTGLENLSRALRNHADSKHGKRRGKRIGFPRFKSHSRCVSGIHFTTGYRLVPDDSHAIRLPRIGRVHRMENVMRRIGHAHVLRIIVTRSADRWYASIGIEHETSPIRARCKRTSVGIDMGVKNLVTLSDSTAIPNPHPFKRVEKRLARAQRMLSRRKKGSHRRDKARLYVARLHQRIYQLRQDALHKITTEPTRARAYQY

SEQ ID NO: 56566 - protein, 349 aa, unknown
  TnpB Polypeptide
MKLTTYRFRLKDSSCRNRLRKLGYGVSDIWNYCNERNAYQWAFRRTLLSAFGLHKLTAGVGKELGLHSQTVQAVVDEYAKCGKQFKRPKLNWRSRKRSLGWIPFKAVGVKVGADSVAYGGHTYRFWNSRPLPGKVRFGSFCEDAQCRWYVNFVCEDLTPERAPTGKEAGVDLGLKTLATLSDGLELSRENLTRKFGVKLAVTQRARKKKQVPRIHAKIKNQRKDWNHKQTTLLTNEYDVLVVGNVSSSKLMKTKMAKSVSDAGWADFKTMLSYKAIRLGITYLEVNESFSTVTCSACFARTGPSGLRALGVRTWGCSACGTAHHRDQNAAANILRSAGGIQRRREPPCL

SEQ ID NO: 56567 - protein, 482 aa, unknown
  TnpB Polypeptide
LQTVSPLPQGVTQRTSNPVGRGYTVVIGFKRRSCCWPTGPWATFTPDGKRSYASQPSVELRGMNYNYRYRLKPTENQRETLDYHRDTCRQLYNHALYRLNQIPESEGTVKQRVRTIRDELPDLKDWWDALTDIYSKVLQPTVMRIAKNITALGQLKKQGYKIGELRWKSPREFRSFTYNQSGFVLDKKSGQTVLSLSKLADIPIEVHRPLPENATVKEVTLKKEKTSEWFAIFGIEMDTEPPAKPSLEDVDTDDMVGIDVGILKYAHDTDGTAVGSPDLSEERDRLEREQRNLSRKEHGSNNWEKQRRRVAECHQQIKRTRRDFLHKLSNYYAREYDLVAVEALNVKGMLESPGNSRNTASAAWNTFTDLLGYKCKRGGTHFVEVDPEDTTKECASCGVKTDKPLWVREHSCPSCGFKTDRDANAAWNILSRGLTDLGVGHSEGTPVETALPTGTAVVPAKRVVEAGSPCLKEPSTAASRQG

SEQ ID NO: 56568 - protein, 384 aa, unknown
  TnpB Polypeptide
MKKAYLYRLYPTEEQAALLQQQLDVAREVYNACLLERREAYRMAGVTLNYYTQANQLKRIRQDCPDIAAVNFSMLQAICRRAQRAYDTFFRRVKAGQTPGFPRFKSHLRFNSVTFPSYGNGCNLRDNRLYIQGVGTLKVKLHRPVGSPIKTVTLKRVGRRWCAVLVCEVAVVPLPATGRAVGIDLGLASFLMTDAGTAVEHPRPLRAAQARLRRAQRSLARKQCGSHRRAKQRRRVARLHEKVANVRRNFQHQTAHKLVQAFDFICHEDLAIRNMMRNHSLARSISDAAWSQFIAILAGKAEGAGRRAIAVNARDTSQTCVCGAPVPKDLSERWHQCPRCGLSLPRDQVSAKLIKARGLEVLARTMGLGSSPQVVTWPVGACVA

SEQ ID NO: 56569 - protein, 407 aa, unknown
  TnpB Polypeptide
MQYKSFKIRLEPNNKQVSMFLQHAGVARHAYNVGLAYCNEIYKLDKKTPSAIDLHKWLVAIIKKENPWYYDVSKFSPQQSLRNLETAFKNFHRLQKKSSYSLKDKKGRLQGLPKFKKKGGKDKFYLEGAIRIENGKIKLPKIGWVKLSEKFDFDKIKNCVVSRIANEWFVSFKTEYSPTKTTKKFNSVGVDLGIKTLATLSNGETFENLKPYKKAKSKLRKQQKEVSRRFVKGAESQSNNYKKSVIKLSKTHATVANVRKDSLHKITTYLSKNFETVVIENLKPKNMSKNHNLASAILDGGFFEFKRQLLYKKEWYGGNVIVANTFYPSSKLCSCCGNKKEKLKLSERKYACTNCSAILDRDLNASVNLEKLAVSSTVTAFGDESTNHIWFQLVDELGIKHQMLKFV

SEQ ID NO: 56570 - protein, 498 aa, unknown
  TnpB Polypeptide
MRAATPSFIAEFPLRTSAADERALAVRLEAARHIYNACLDETLKRLALMRQSKDWQAARAMPKGEERTALFKATMLRFGFASASIQKHAEACRDACWIGQHLGSHDTQTTSLRAFRAVQMHAFGKRGKPRFKGHNRLHSVEGKGDAVIRLRWQDERPVVMWDGLVLPLKLDPKDKDCWQEQVLSCRTKYVRILRRSVSGKTRWFAQLVQEGLPPRKERLLVGEGVVGLDLGPSIIAAVSDTDATLELFCPGVIDMDRAIRRFQRAMDRSRRATNPAAFNADGTYRRGARIAVRSLRYRVLAAERKRAHGELANRVLAQGDTIKMEKVSYRSFQRNFGRSVKRRAPSLFVSMLKRKAASAGASVIEFTTRMTRLSQFSHDTGEYVKKPLSQRRHVLADGRRVQRDLYSAWLARFVERDRLDASQCALHWAAAEPLLRRAASGFNQSASGAGFARPYVGNGVGADRPLQGKGRRNEAADAVAQARAAESSGTGTPRTPRL

SEQ ID NO: 56571 - protein, 442 aa, Helicobacter sp.
MRVNKGFKFRLYPTKEQESKLQHCFFVYNQAYNIGLNLQQEQYEKSKDLPKKERKWKKSSELDHAIKQCLRARDLPFSSVIAQQSRMNIERAFKDAFKVKNRGFPKFKNSKFAKQSFSWNNQGFSLKESDDERFKIFTLMKMPLLMRMHRDFPPNAKIKQIGISCSHRKYFVSFSVKYEQNIATIKNPKDCVGIDLNVFDIACSCGVNNPEKLTDFKRYFLDMEELLGIKLDAKTHATQLIPTYSKLHSLKKYSKKSKRLQRKQSRRVLKSKQNKTKLGGNFYQTQKRLNQAFDRSSHQKTDRYHKITSELSKQFELIAVEDLQIKNMTKRAKLKKVKQKSGLNQSILNASFYQIIFFLDYKQQHNGKLLVKVPPQYTSKTCCNCGSINPKLKLNHRQYLCPDCGYKEHRDINAANNILSKGLSLFRAGNVHADFKEQSLSC

SEQ ID NO: 56572 - protein, 387 aa, Anoxybacillus sp.
MLLKTYKTEIKPNAEQKRKIHQTLGVCRFVYNFFISHNKERYEQGQSFMSGIDFSKWLNNDFIRNNPMYKWIKDVSSKAVKQSIMNASQAFEKFFRKKAGFPRFKRKKDQDVKAYFPKNNKTDWQVERHRVKIPTLGWVRVKEFGYIPPKANVRSGTVSFKAGRYYVSVLVDEHEPICETNKGAGIGIDVGLKHFAVCSNGMVFSNINETAKIKKLEKRLKREQRKLSRKIHMHKQKGGKPATFGRNIRKQIAKVQKLHHRLCCIRQDYLNKVINEVVKTKPSFITMEDLNVKGMMKNKHLAKHIQKQSFHLFRKKLEWKCKQHGIELRVAPRFYPSSKMCSQCGGTKVHLKLSERVFRCEQCGCEIDRDQNAAINLARAMTYDVAC

SEQ ID NO: 56573 - protein, 347 aa, Anoxybacillus sp.
MLVNKAYKFRIYPNKEQEVLINKTFGCARFAFNYFLAKWNDTYEQTGKGLSYNTCSAQLTKLKKELAWLKEVDSIALQTSLKHLSDAYTRFFNKQNDRPKFKSKKNNVQSYTTKYTNDNIAIVGNKIKLPKLGFVRLAKSREVKGRILCATIRRNPTGKYFVSILTEEEVQPLPKTGSSVGIDMGLKHLVILSDGTAYENPKWLRKLEQKLAKEQRKLARRKQGGSNWYKQRMKVARIHEKIVNARMDYLHKLSTEIIKNHDVIGLEDLQVANMVKNHKLAKAIHEVSWSQFRTMLEYKAKWYGKQVDCGEQALCEFSALFGLWVSKQRSKEIKLACVVVSVLWNTS

SEQ ID NO: 56574 - protein, 380 aa, Achromobacter sp.
MMAPEVSTRVLRVRLKDRHATALRAMAREVNFVWNYCNDLGMQVLRREGRFMSGFDFQKYLNGASKEGLGIGSAVFQQVAEEFATRRRQFKKARLAWRVSNPKSSRYSLGWIPFKARSLTYRAGQVRFQGIALSLWDSYGLGDYELGAGSISEDSRGRWYLNVTVKVKKQAPSPGRTAVGIDLGLKDFFATSDGHKEGAQRFYRDLEPALAIAQRAGKKHRVKAIHAKIAYRRKDFLHKLSSKLVKEHGAIFIGNVSASKLAQTRMAKSVLDAGWSTFRTMLKYKCDDAGVWFDEVNEAYSTQTCHVCDERTGPRGLSGLGMRGWTCSACGTIHDRDVNAAKTILARGLARLAEGTPPGAEIKAEKPRIPVLQGGEWSTL

SEQ ID NO: 56575 - protein, 428 aa, Achromobacter sp.
VAERHAFKHLLSIRPLLRVHKIRLDPNQAQAHHFARACGTARFAWNWALAEWQKQYAAWQADVTLPKPSEGALRKQLNAIKREQFPWMLEVTKCAPQEAIRALGTAYGNWWASLSGRRKGPKVRAPRFKKKGQRDAFKFDEKFAVDGCRVRIPNLGWVRMREPLRFAGTLKGATVSRTAHAWFIAILVETEEMPIRSKSHAAVGVDLGLTALATLSSGEVVTGPKALGTLLGRLKRLSRAHSRKVKGSENRRRSAAQLARLHWRISCVRGDAIHQLTDRLTRDYGWIAIEDLHVKGMMANRRLARHLADASFGEVRRQLVYKAEQRGVQLVVVDRWYPSSKACSGCGTVNDALTLADRRWTCAACGATHERDHNAAKNLLAESIRTMAPGAGVTGCGAVSSGPGRKPRTKLATTKQQVTHNLATAATL

SEQ ID NO: 56576 - protein, 558 aa, Achromobacter sp.
LNPDPRGLPRSFLSKLAPELNSGKLALLEALHSEWVRTLPQAFNWYWQLFLRGGLLPKRPPRSGPKSTFPATRLVTSQKDLMAIAIEGQAQSWASNLKNRIARALMRDAVLAGDPALRRELLWINSMRAWLLPFRQQTALLAALPAKKDALTMLSPQASRLMRKLARAYIAQHRLPDPMQLPLQVNQLSAVLAPAIKTAAPWAGSWLRISTLERGRKIELPLMANVHAQRRGGERATTFSLVKRPVAKGHGWYLRSTQYVAPAPWEACTEVLGIDLGLRNLLSTSEGDVFGDGFLNTLRRYDDQLLRLQRGLQGAGQVRLAQCRRYRQFVARLRGWLKTTIQTHLNRLLQMRRPKKVVVEDLWFVGPDSGLSRRMNRLLRRFGQRYFLQTLEEKSQEWGFALEHVEPAYTSQTCHRCGFVHRSNRRGDAFHCTACGHRAHADVNAAKNIVRRSGEKASSAPGGLRTRWAQSLLEWMARQRAALEADTSALSRRLRAAACARAGLRTLLHHKDSANRLSRVARERLCAALARKTIDGLLNGLCMDRAILLNAHSTRYSE

SEQ ID NO: 56577 - protein, 481 aa, unknown
  TnpB Polypeptide
MFVYTLKLDIDLIHHKQLEKRFRMASDIYQKTLREILKRVRKQKKDPLYKRAYRLPKGAKRNEILKELDLKYDLRGSFTFSKFANDYRNKRNYARYIPSDVAGKLGVRAWEAYSRVKFAKGAKRINLNQPLLSFEAKGDSGIIIRNGLLKMGTKGAQFECPVIYNNDEFEQEVFQLQFKFNRIVRKRQHRQWEYYVQMVFDGQHPSHQEPDLHTTVGNDIGTSTVALSSYFQTELRELAANVSDESQHLARLQRKLDRQMRANNTHRYNDDGTIKRGRGRWIYSKEALATKEEIAEIQRTQAAQRKIDHQTLATEIVQMGDRFVVEQMSFKGLQARVKETEISETTGRFKRKGRFGKSILNHAPAMLIEMIRYKAQFQDKQFIKANTRKVKASQLDHISGQYKKYSLSTRAKTIGDELVQRDLYSAFILQHVMDDGETVDLIACDDDFDTFLRNQEETMLNCETELTSAGKKYFQNIEENA

SEQ ID NO: 56578 - protein, 402 aa, Escherichia sp.
  misc_feature (284)..(285): Xaa can be any naturally occurring amino acid
VERLQAFKFQLRPGGQQEREMRRFAGACRFVFNRALARQNENHEAGNKYIPYGKMASWLVEWKNATETQWLKDSPSQPLQQSLKDLERAYKNFFQNRAAFPRFKKRGQNDAFRYPQGVKLDQENSRIFLPKLGWMRYRNSRQVTGVVKNVTVSQSCGKWYISIQTESEVSTPVHPSASMVGLDAGVAKLATLSDGTVFEPVNSFQKNQKTLARLQRQLSRRVKFSNNWQKQKRKIQRLHSRIANIRRDYLHKVTTTVSKNHAMIVIEDLKVSNMSKSAAGTVSXXGRNVRAKSGLNRSILDQGWYEMRRQLEYKQLWRGGQVLAVPPAYTSQRCACCGHTAKENRLSQSKFRCQVCGYTANADVNGARNILAAGHAVLACGEMVQSGRSLKQEPTEMIQATA

SEQ ID NO: 56579 - protein, 340 aa, unknown
  TnpB Polypeptide
VLQDVLHRLDKAFKAFFRRVKSGEVPGFPRFKAWFRYNSLTYPQSGFGIEPCGPTPQGKNRQAKQWAKLTLAKIGTIWMNMHRPFKGVIKTCAIIRSSTGKWYVSFSCDEIEPEPPPESDEEVGIDVGLKTFAYLSTGEQIENPHFFRKEEQALTRAQRRLSKAGEGTKKRKKRRKVVARIHERIKNRRQNFIQQQVAWLIKRFWFIAVEALTVRNLVKNPRLSKSIADAAWSMFFTHLILKAEEAARCVVKVPPAYTSQTCSVCGHKQNMPLSVRVYDCAACETVLHRDQNASLTILGLGRQARVIPEAPPCRRVESSLPFKCLHSYQENENSPDRQYN

SEQ ID NO: 56580 - protein, 419 aa, unknown
  TnpB Polypeptide
VLKTQLEVACKLYNALLHAEQEEYEKNKRTMSKNELRQLALDLRKQNKEFQVLHSQVTQQVADRFYQARERFLDGLSNKPKKKKPHRYLSLVYPQSGWKLSDIREVGLGKNKKKKARLYLSKIGFFTLIVHTELPLERVSQVCVKLNPSCRIHIIFLVEEAEPLGKALEQPKKAVGVDLGITRLATLSDGRYLENPKPLEHSLERIMVLQRTLSRKRFLSKNWLKTKIRLAKEHEHLKDFRCDLFFKLGALLAQEYDVLVLEDLDVQGLIQKSENKKRRMRLYDSSFSELRRCLEWVFQKQGKTVLAVSSYNSSRECFLCGGINKGLTLEDRVFHCPYCGFTLDRDLNAYLVLLKTSGWVPPTVACFAPPTTFSTLSWVEEAWWSDDSGSSAIYGGVAHFEYIMDEAFTPSGNLDDLKK

SEQ ID NO: 56581 - protein, 374 aa, unknown
  TnpB Polypeptide
MECRVSVPIKLKINEVVVKTIEIYKKSLQHCVDVAWEMKIKNNVELQPFVYKEIRNFGLPSQLAIACIKQSCGIIKKAKSNPNIYKTSIRYNSPRSFSFKNNVLSISTIKGRIKIPIKIPNYALKYFKDWNIKESLLTKNFKGDYYFTFTFLKKALKNSTLQNRVLGVDLGIHNLAVTSDKQFFKSFKVKQIKRKFKFLRDKLQAKGTRSSRRLLKKLSGKEKRFMTWVNHNISKEIISVFDGNKIVMENLKGIRKIWRGKRMNYCINNWSFLQLQNFIQYKAEIKGIEVVRVKPHYTSQLCSKCEKLGSRSGSSFVCHCGYSLNADLNASFNLASPMLEKRQALVTKPCIQTNEHEGVLNPIECEVMDKIPLL

SEQ ID NO: 56582 - protein, 384 aa, unknown
  TnpB Polypeptide
MKLDRKQRIIINKWFDVHTDMYNSALKYIRDTSDLFKNHVIKSKLFNVDNNLINSFKLRDGLIKTRKELILKSQINTIDDDTKIHSHTLDYAVRQLVSNIKSAVTNLKKGNIKRFRLKFWKHSRPSKTMDIEKAYISGNKICHKILGDISYEYNNEEYIPENFTCGVKINYNSMTDEYLLLVPERGPVKETKKTKNIIVLDPGLRTFMTGLSESALYKIGTNITSTVKKSITRLNKIKENVHISKKIKKKNERIINRKITNKIDDMQWKTINFLTQNFKNILLGDMSAKSIVSKNKSVLDNETKVACLRMRFYDFRKRLEYKCNKTKTNYRLINECYTSKICSLCGNYNEKLEGEKIYKCSKCKKEMDRDMNGCRNIMIRSQMR

SEQ ID NO: 56583 - protein, 423 aa, Bacillus sp.
MIRVSYFEYRPNKINALILHHLCYASRKLWNVANFERRNWTKDSGVPYPDWYEQKKRLKDHFWYKHLPSQSAQEVLKVLHEAWKSFYELKKSGEIEHPKPPRYKHRNFNVKFLNNGFRIEDHRIRLSIPAKQKTYLQETCGIKVKYAYIPIPKHIEIHHVKTVEVKPLSDGKYKIILAQEYNDVPIKKGSAKFMSIDMGIANALTCYDYQGKSHILSGRQWLSVERYFHKKIAHYQAISDAQQAAKGIQYPKKSKRVLQLYRKRKAQTFHILHCMTKKVIDLAVKQGVETIIIGDITGIRENTHLGKKTNQKLHQLPYDQIFKQIKYKAEEKGIEVVKISEEYTSQTCAVCKPFPSKEFAHQSNRKHRGLYVCKDCHTALNADVNGAINIAKKYLKEIDDLSQSVVVLDTPTVYTFNGHQFVA

SEQ ID NO: 56584 - protein, 349 aa, Sphaerisporangium sp.
  misc_feature (247)..(259): Xaa can be any naturally occurring amino acid
VGCSPVRPPFGCAPGQGRCACRVGGGVTDRQGYRVELAPTLEQRARLGRHAGLSRVVENFCLEKVKAAFEQREAEKTYGIAGKDLTPVPWSAPALERMWRLEHRGRYPWFSEDGLSSRVPKEACRVRAAGFKNFFDSRSGKRKGRKVGFPDWRKRKHGSRFRYDADRARPVTTRAVRLPGVGTVRVLEDMSWLTGRIADGRARVIGSTVREQAGRWWLSFQLQIDRSEVNERRAVSGGAPWCGIDVXXXXXXXXXXXXXSPRSWTTTAPSPRSTPPSHSRAHSASCGRRTRRSRGNSPARATGPKRQSGSAGFTSRWQTSGRTSCTRPRRCSREPSGPSPWKHSTSPGW

SEQ ID NO: 56585 - protein, 178 aa, Sphaerisporangium sp.
VDDDGTITEVHAPKPLKGALRKLRKANKAVARKQPGSSNRAKAAKRLGRVHLQVANQRADFLHKTTTMLARTKRAIAVETLNVAGMVKNRRLARAICDLGFGEFFRRLEYKTRWYGSSLWAADRWFPSSRLCSGCGAVNGDLTLADRTWTCRCGLEHDRDVNAARNLLAAMRLERQAA

SEQ ID NO: 56586 - protein, 518 aa, unknown
  TnpB Polypeptide
MLVYRNRQFRISKKHPLYGYCDTVTALCCNLENAVRFRQRQVLTAVKKDPSERTENENFIIDEITQAIPLMKKHYNTPSEKTYFYGYEFYNSLLSITDNPDYYAEGLPRQSAQQSVKKCVRDLKGYFASLRSYGKDRSKFTGKPELPGYHRKGGHATAILTNQDAVLKPYQKVRGGFAMKPLKEDRLWYKLKLPLTKLTLPAGELPKDAVVKEVKITPENGTYVLNVALQYNLPDVEVTEAPGRIASIDVGVDNLMAVANNCGLDHLLYKGGVAKSVNQLYNKKIAAIMSDQMPAADGKFVPTQAYYTVTNRRNDTLRDLFHKTAKHFIDWCVDNRIDTIVMGKNPLWKQDCDIKADSAKQNFVQLPFNTLREYIRYLSEAKGILYIEQEESYTSKASFVDRDYIPVYGKDDEKASFSGIRGPKQYRRMHKKSGFRGIYQTKDGSFLNSDLNGAANILRKAFPDVFQTEPDFEKVLIIKHPDFEKAASLKERQLNKRASGTVSHAKAKRDRRKGIPAA

SEQ ID NO: 56587 - protein, 321 aa, Streptomyces sp.
VAWSGRPFLARPSCIYGTSDALNRCSVAGMRDMFVRSPHAPSVHLQVVPESPSAHGAGQGVRVRPRRMQRRRSCIDLGLTHFAILSAGEKIDNPRFLRRAEKRLKKTQRTLTRKEKGSKNREKARIKVARAHAAVADARKEFHHQLSTRLIRENQAIGVENLAVNGLARSRLAKSVHDAGWARFVTMLEYKAARYGRRLVTIGRFLPTSQTCHVCGRIDGPKPLHVRTWTCPGCAIVHDRDINSAINVKKAAGHGGHSLWSAGKTGASVPAQRSEAGSHGFPAEARAAAARASAGKARIIGFPPDEHAKSSTATHRCSTTS

SEQ ID NO: 56588 - protein, 401 aa, Nostoc sp.
MLDVLKVRIYPNKEQEISLAKSFGCSRFVWNFYLNKTNTQYQETGKGMTYCQMAKDLTQLKKLPDHGWLQEPTAAVLQQSLINLETAFKNFFSKRTGFPKFKSKHSKQSIRFPESCSIKSGNLKLPKLGLVKASFSKSVNGKIKSVTVSKTSTDKYFAAILFETDELTTAKTGKISGIDLGLNSLVTVFDGENCYKIAPIKPTRKYAKRLRIRQKSLSRKVKGSNNRRKAVKVVAKVHEKISNTRANFLHKLSRKLVDDNQVIVAENLCVQGLARTKLAVGIHDAGFGMLLNFISYKLDREGGKFVQVDRFFPSSKLCSCCGHKNDLLNLSIREWICSSCQTTHDRDENASRNLRAEGIKILSTNTVGHTELQACGEAVRLVGTCAKKRVSQKQESPATLR

SEQ ID NO: 56589 - protein, 290 aa, Streptomyces sp.
LNKAFVAFFHRVKAGQTPGYPRFKGVGHVRVHRHRPVKGRVKTVTVKREGRHWYVVLACDEVPAEPLPPTGSVVGIDMGTVHFFTDSCGDHESNPEFLAAMADGLTAAQRHLAAFPKRTERRTKKHRAAARKVAKLHAKIRRQRLDHHHKTALALVREHDVIGHEKLNTAGMTKAPAPKPDPEQDGAFLPNGAAAKAGLNKSILDAGWGQVLGILSQKAESAARRVIPVDARNISRTCPPDIGGCGHVSGENRVTQTKFECVKCGLVENADRVGALNVLHRAGLALCDGA

SEQ ID NO: 56590 - protein, 392 aa, unknown
  TnpB Polypeptide
MLTSYKVEINPTSQQAWLIDRHISASRWAYNLFLDINKQRYEDGYHYMGAYKFSTWFNHDYLDFNPDDNWIKQLYAKSTTQAFIDADNAMKRFFKKQSRYPHFRSFKCGQGSFYFVKNSKKQIIKVERHRIKLPKIGWIRLKEKGYIPTDAEHFVIKQGRVKKHAGRYYLTCLVKQADIQFAKLNGDPIGIDLGIKEFAILSNGTIFSNKNKSSRVRGMRKRLRRLQRKWSRQYLAFKARKQKEGSSATDLNLAKTELKMQRLYQRLQNIQADYQKKIISRVVRTKPQWVALEDLNIGGLIKNKNLAKAIMQQGLYTFREKVINKCQQLGIPVHLANRFEPTSKRCHNCGTRKVNLSLADRIYHCDVCGYTEDRDINASLNIRDTENFELAY

SEQ ID NO: 56591 - protein, 378 aa, unknown
  TnpB Polypeptide
MTLKGIKLRIYPNQEQQLKIKLNFGYNRFVWNQMLGMMIKRYENNPKAKFLNVFDLNTLLPTLKTEYPWLKDGIAQSYQQSIKDLSLAYKKFFKEHAGFPKFKSRKFPKQSFRIPQKTRLVDDQYIKFTKIGVVRFKYGRVIRGKIKNATIKKSFTGKYYAVLLVDTNIKKLPKTKQSVGIDMGVADLMITSDGIKYPTIRFDKLLAKNKHYWEKRLARRRPQAMKEIAWDHHNKVMEPRELSDFKNYLKAKCMVAKYSEKIANQRSNYLHNLTKQLVEQYDVIKIEDLKTKNLLKNHKLARAIANQAWREIRRQLEYKCTWYGKQLVTVNPRKTSQICSNCGFDDGKHTLDVRQWKCPKCGMNHDRDINAAKNILAA

SEQ ID NO: 56592 - protein, 379 aa, unknown
  TnpB Polypeptide
MTLKAIKTRIYPNTEQQYKIVNTFGCCRFVWNQLLDMQIERYHNGGKFVNEFGMNYLIVQLKKEYPFLKKVDSRSLFHVSRDLNNAFQKLFKEHSGHPKFKSRKFPKQSYQSSCIKNNIRQVSEHRIKLPKLGTIYFRSGRQLEGKIKNVTIRLSSTGKFYAVVLIDTEVNRLDSTNHSVGIDMGVADLMITSDGVKYPTIRFDKILANKKHYWEKRLARRQAQALKEIACDKHNKVIELRELSDFKNYLKAKRMVAKYSEKVANQRSNYLHNLTKQLVEQYDVIKIEDLKTKNLLKNHKLARAISNQAWRELRSQLEYKCEWYGKQLVTVNPRKTSQICSTCGYDDGKHTLDIRQWTCPQCGTHHDRDINAAINVLKA

SEQ ID NO: 56593 - protein, 234 aa, Halorubrum sp.
VCKVELETVDSAGDGIAGIDLGITNIATVAFPDEYVLYPGNSLKEDKHYFTSAKYDTEGENGPSEQSMWARRKLSERETHYYHTLTDAIIAECVERGVGTLAVSWPEDVRASDWGKTGNKKLHSWAFDRIYQYLEYKGEMCGVEVRKENEWNTSKTCSGCGDDTKSNRVERGLYVCSSCELVANADCNAAENMRQKITPSPHGEDRSSGCVAQPSTYLFVRESGTFHTRERAVS

SEQ ID NO: 56594 - protein, 403 aa, unknown
  TnpB Polypeptide
MELEDIDYKNYVLKVRIYPNLEQKSYLHKAFGCSRFIYNYFLDKSQKEYESEKKYFNCFDLQKEATKLKKSEEYNWLKEIDSSIMYNALNHLETAYKGLYQARKEKRNYNLRFKSKKIHRESFTTQAFKTSAGYNVKIDFENKRIKIPKLKSWIKYRDGREAFEYKSIQKITIKQTPAGNYYVTILFRIPKTVNTYTPDLKKSVGIDFGLKNFITLSNGEKINSPEYLKKSLRKLRRLSKNFSRKKTNSIDGKKVNSNNREKARIKLAKCYEKISNQRKYFNDCLSKKLLDNYDFIFIEDLNISAMQRLWGRKVSDIAWYQFTTMLNYKAIEQGKFVFKIDRFYPSSKLCNHCGYKNEALNLSDRKWICPVCHSELDRDINAAKNILKKGLEAFSNTDAQSGI

SEQ ID NO: 56595 - protein, 429 aa, unknown
  TnpB Polypeptide
MLIAHKIRLDPNNVQATYFARASGTARFAYNWALAEWQRQYEVWKQDNRQPKPSQMALRRQLNALKRGQFPWMLEVTKNAPQMAIIQLGDAFKNFWAGRANYPKFRKKGVHDRFSLSNDQFSVKGSRIRIPNLGWVRMRESLRFTGKIMSATVSHVADKWFVSIAVDTEESPTRSAENQGVVGVDLGVSALATLSTGEKIVGPKPHKALLKRQKRLSHSLSRKHKAAKVKLGLGANAPIPKGVRLPVSENAKKARAKLSRLHARIAHIRQDALHKLTSDLTRRFHTIGIENLNVRGMLKNRRLARSIADMGFFEFRRQLEYKAGRRGGIVVVADRWFPSSKTCSVCGTIQEKMPLAVRQWTCPDCGAIHDRDVNAARNLLALGLAALSGSTASSVVCEACGEEGAGSGRKTGVKPASVKQESNSKATYG

SEQ ID NO: 56596 - protein, 492 aa, unknown
  TnpB Polypeptide
MSIHRVEQKLLPAYFSALPVICLLQFAQAFGPKRPPNILLTSWGRRRPRTFCFAIRVGRGGIGPSTPRRLSTHHFSCNPSVTIYTRLSIIFNIMLLTLKVKLQPTMGQRKLLLDTMESFNAACNRISAEAFSTRTFNKVKLQHSLYKNIREEYHLSAQLAIRAISKVVESYKSTRAGIWERNKMHRALGEPIEVPEQIEFRKHGAVVYDPRILSFKGLDQASITTLEGRIIVPMLMGAYAKLEERRIKGQADLVYVDDEFYLCIVVDVPEKPPLTPEGYLGVDLGIVNIATTSDGIVYTGKDCDKTRQKYTTLKAGLQSCGSKRAKRTLKRISRKERRFKTNVNHRISKELVQVAKDTNRGIVLEDLTGIRSRTTVLPRARIAKQNSSRHEQRDRHSKWAFKQLRSFIEYKAAIAGIFVKLVDPAYTSQQCSECGYIDKNNRHGQEFYCLACGHTENADTNAAKNIQQRAGVNLPIVVRRIFGYSSHGEPSP

SEQ ID NO: 56597 - protein, 420 aa, Lactobacillus sp.
MTKTMAQLSYHYGVKVRIFPATEQKRLIKRNSDASRFIYNEMNGMNRELFMLRQVKIPITMVQQRIQTLEQRLKSPSTGISNSHGWLNDHDLDSLMKANAIKNYRSAWNLFRKVHRSGTPVFHKKRTEQKYQTSCLYASKLNNPSMANGSVRLLDQQHIQLPKLGTLRFKGMPTKLLNRQDDVRIGTTTISMDATGRYYVSMQLASERPFVNKLSNNTAVSIGIDLNIDNFLTDSDGNIVANPHYYRAIKGKLASAQRKLSRRALRAKKEHRPLRDAKNYQKQREIVAIIQLKVANQRKNFLHLVSTTLIKNHDLVVAEELRSKNMLRNHALAMNIADVGWRTLLGMLSYKADMYGKRFITVNPRNTTQTCHDCGFVMGAGSTNKLTLADREWTCPHCGTYHIRDCNAAKNILAKGLVSL

SEQ ID NO: 56598 - protein, 423 aa, unknown
  TnpB Polypeptide
MQLVEQHLIDKNDPRYAVMDEAAFKSKNLYNAALYEIRQSFIHEGKYLNYNEVQRRMQSHEAYKALPAKVSQQILMVLDRNWKSCFEALEAYNEDPSKFLGRPKLPKYKPKTEGRNILVYTVQAISKRGLKRGLVQPSMLAIEVHTKQKDIDQVRIVPRKGFYVVEVVYEKEVKQSPVNPAFYAGVDIGMNNLVALTSNKPGFQSVVVNGRPVKSVNQFYNKRKAELQKQLGHTGTTKRMERMTNKRNRRIDHYMHTASKRIIDVLVKEGIGVLCIGKNDAWKQNSEMSKRTNQNFVNIPHARFISMLAYKAELVGIRVQVTEESYTSKASLLDLDPLPVRKSGDETKHTFSGKRVKRGLYRATNGRYINADINGAGNIIRKVAPDAFQQVEGVEGGKGVLASLVVHPVRIVVPLTKPKASVS

SEQ ID NO: 56599 - protein, 523 aa, unknown
  TnpB Polypeptide
MTRGAITSTRWAMTTCPNTWAISSATWLGRLPHRKQSITARASPNKNIFVAVYQHRMTRDGTTSHPFLESEDMQQIITAKLKLNTTTDQFQALRTTQLAYRDALNAVSHYAFEHGKTSSNVVLHKGMYAELRTCYHLPSQLACSVERQVAATYKGLWTKLKKNAEHRRKKITKKRFQGLDKPPTYSSPTVQYTYERDYTFKLDQQVSIGTLGGRTSIPYQGYDEHMALIRHGASIGDARLWDDKPKKCFYFLVSLEIDVPEPTCEQLSEVVGVDVGIRYLAVTSTATGKASFHSGKRVRHQANHYARQRKRLQQKGTRGAKRRLRRIEQRERRLKLQANHIIAKQIIQQHPHALIGLEQLADIRERTKRRKRKRKQNGKGNARVSPKQRRANRVYSQWSFAELHGLISYKAVLAGSQAIKVDADYTSKACPRCGYTADENRPRKGLRFACQNPTCRYTLHADLVGARNVTLRTLLVRQDWTRTGHLSIAPDASDKEAKAARLRRYAELRWSPDASLRSQTGGH

SEQ ID NO: 56600 - protein, 404 aa, Nostoc sp.
VFNLTYEFKLKPTENQIGMFEEWLETHRRVYNYALAERKDWYKSRSCQVNACSLDSCYIIPADAPRPTFASQCKSLTAARKVNELLKRVNAQSLQQTLRRLEKAFVSMWEQNHGFPRFKKPGRMGSFSFPQLGANPLNNGYVKLPVIGEVKIRQSRDIPNGGVIKQARVVKRISGWYVMLTVQWDVCIPQVAPHGESVGIDVGLTSFIATSNGLSVKRPRFFVDAERKLKLLQQRVSRKPMGSNNWKKAQKKVASLHEYVANCRKDWHRKLSHQICNDAGMVFVEDLNLVGLSRGMLGKHCLDAGFGQFFNILEQTCFKRDVYFQKVDSRKTSQICPSCAIETGNKELSQRIHVCSNCGYTTDRDVAAAQVVLVRGLAAVGHTVKMLAEGKFVGIPMKQESSPL

SEQ ID NO: 56601 - protein, 404 aa, unknown
  TnpB Polypeptide
MFLTIFRYHFLMPRYRLLPSPVQALILRGHCAHARFVWNLAVEQQSWWRPGRVSAPGWVEQCRQLSSARQEHEWLAGGSVVVQQQALRDYAQAMANYFHGSHCKPSWRKAGRDEGFRIVALRPGQVRRLNRHWGQVFIPKAGWVRFRWSRAVPETRSFRVKLDRAGRWHVAFATVPASIEGPGTGQVVGVDRGVTVSAALSTGEMLTCPRLSVGRQQRLKRLQRRLVRTRRGSNRRSRVKSAIATLRAREVDARKDWAEKLSTDLAGRFDVIRVEDLRITGMIRSARGTIGEPGRGVRAKAGLNREILASGWGILVRRLEEKAPGRVEKINPAHTSQRCSACGHVAGENRKSQAVFACTACRYTANADVNAATNIAAGHAVTARGGLPLGGPANREPQPALLST

SEQ ID NO: 56602 - protein, 372 aa, unknown
  TnpB Polypeptide
MRTVVKTYKFKLYKSEKNKHLDDGINIAASIWNYCIAMHRHYYRAFGKHLSANRLKKHLTKVKRTLHPEWQALGSQAIQDVVERVDRSYKAFFGHVKQKRHGRKSPPSFKKRSRYSSFTLKQAGYTFHTDNKVTIMGREYKYCKSRSMEGTIKTLTVKRNVLGEIYLIVVTKQECNDILPRAGKAVGIDFGLKHFLNLDDGSVIDSPQWYKASLKELRSAHRTVPHCQKGSNNRKRAIRNLERVYQHISNRRRDWFFKLANQLVGEYAIICIEDLNLDAMKRLWGRKVSDLAFSEFVAILEWVASNAGSTVVKIDRWAPSSKACHVCGTLNADLALKQRSWECDCCHTILDRDTNAAINIKRFGLAKLGYSA

SEQ ID NO: 56603 - protein, 430 aa, unknown
  TnpB Polypeptide
MAWDVTRTVKIRLDVPDDRKSDLHATNTKFQHCANRTAQWAWNYPDGECVTSKTEAESALYDELRDETDNLHANLVQKAIKRATNDIDNCVDRLAKGDNTSCPHYDTFSIVYDKRAATYYRDKISLATVNGRVECEYDLPENLDDTPHGEYLLNKEWSFATSTVHYDSEADEFVLHAVMETDVDASSPEKAEHSNVLGVDCNVDDHTAVTSTGAHIGNADSLNHKRREFEKRRVSLQQTGTRSAYQTFHRINGRFGRWGEDYLHRCSKAIVAEAQNHGCTHIAFEDLDQIRDRISDEKKFQQWAFKELQTQTENKAELAGIVVETVEPSYTSQQCSRCGCTLEQNRDGQQFACLNCAYAVNADYNAAKNVARKLAVTLRQGQKSPAGGASCQYALKSGVMTVTATEMGADTFVSVEWESTDKPTPEGVGS

SEQ ID NO: 56604 - protein, 388 aa, unknown
  TnpB Polypeptide
MKRAYKYRFYPTPEQAELLAQTFGCVRFVYNSILRWRTDAWDERQEKTGYAQASARLTALKKEPEFAWLNDVSCVPLQQSLRHQQTAFSNFFAGRARYPTFKSKRHKQAAELTASAFKYRDGRLYMAKSKVPLDVRWSRPLPSVPSTVTLTRDTAGRYFVSCLCEFEPVSLPVTAATTGIDVGLKDLFVTDTGFKSGNPRHTAKYAARLALLQRRLSKKARGSKNRAKARLKVARLHAKIADCRLDALHKATRKLINENQVVCVESLKVKNMIRHPSLSGAIADASWGEFVRQLEYKGEWAGRSVVAIDPFFPSSKRCSCCGFTLQKMPLYVRKWSCPECGADHDRDVNAARNIKAAGLAVLAHGEPVNPEPHKAAQVRFREVGIPAL

SEQ ID NO: 56605 - protein, 364 aa, Richelia sp.
MPAKVAQLVLKQNADSWQAYFKAMGAYKLDPIKFTGKPKQPNFIQNKNNLVKFNYQAVGKKEFFGGYIVPSMSPIRIPVKPGLKYSDLCEVRIVPKTGCFVIEIVYEVPDKGKLFCSLNPNLAAAIDIGLDNLATIVLSDPTIQPIALNGKPLKSANQFYNKQLAHLQGFLPSRTRTSMRIHNIVRNRNNFVDSYLQQLTAMIVEQFVALGVTEVAIGKNEQWKTNLNIGKRNNQSFTQIPHARFLEMLTYKLERVGIIVKVGEESYTSKASSIDWDTIPTFDPNNKVKHQFSGSRIKRATYVSKDGFKIHADVNGAFNIGRKVIPNLFSCLQGIIERDRGCLVVHPRRITPLFCRVRDQKGVA

SEQ ID NO: 56606 - protein, 391 aa, Cyanobacterium sp.
MLVFEAKLEGEKHQYEKLDEAIPTARFVRNCCIKYWIENKAIGRYELSAYCKVLTDEFSWANKLNSMARQAWAERAWSVIARFDDNCKKKAKKKGFPRFKKHQTHGCVEYKTCGWKLSEDRRTITFTDGFKAGSFKMWAPRNLHFYQLEQIKRVRVVGRADRYYVQFCINQEGVERREPTGKTIGIDAGLNHFYTDSNGQTVENPRHLRKSEKALKRLSKRLSRTQKGSKNTVKATNRLSRKHLKVSRQRKDFAVKLARCPVQSNDLVAYEDLQVQNMVRNKKLAKSISDAAWSVFRQWLAYFGKVFGVLTVAVPPHYTSTNCSKCGGIVKKSLSTRTHKCHHCGLVLNILELALRTVGYTGTHASGDIDLCIGEETPQCKPSRGKRKPKK

SEQ ID NO: 56607 - protein, 252 aa, Escherichia sp.
VKRLQAFKFQLRPGGQQEREMRRFAGACRFVFNRALARQNENHEAGNKYIPYGKMASWLVEWKNATETQWLKDSPSQPLQQSLKGLERAYKNFFQKRAAFPRFKKRGQNDAFRYPQGVKLDQENSRIFLPKLGWMRYRNSRQVTGVVKNVTVSQSCGKWYISIQTESEVSTPVHPSASMVGLDAGVAKLATLSDGTVFEPVNSFQKNQKTPARLQRQLSRKVKFSNNWQKQKRKIQRLHSCIANIRRDYLHK

SEQ ID NO: 56608 - protein, 345 aa, Escherichia sp.
  misc_feature (139)..(139): Xaa can be any naturally occurring amino acid
  misc_feature (150)..(150): Xaa can be any naturally occurring amino acid
  misc_feature (170)..(170): Xaa can be any naturally occurring amino acid
  misc_feature (173)..(173): Xaa can be any naturally occurring amino acid
  misc_feature (229)..(229): Xaa can be any naturally occurring amino acid
VKRLQAFKFQLRPGGQQECEMRRFAGACRFVFNRALARQNENHEAGNKYIPYGKMASWLVEWKNATETQWLKDSPSQPLQQSLKDLERAYKNFFRKRAAFPRFKKRGQNDAFRYPQGVKLDQENSRIFLPKLGWMRYRXSRQVTGVVKNXTVSQSCGKWYISIQTESEVXTPXHPSASMVGLDAGVAKLATLSDGTVFEPVNSFQKNQKTLARLQRQLSRKVKFSNNWXKQKRKIQRLHSCIANIRRDYLHKVTTAVSKNHAMIVIEDLKVSNMSKSAAGTVSQPGRNVRAKSGSCLWRDGAVRPPVEAGTHRNDSGDSLNVAGIHVLQGVEDVNLRYDTHLTSL

SEQ ID NO: 56609 - protein, 394 aa, unknown
  TnpB Polypeptide
MIIQRAFKFRLKPTVKYRGQFQQFAGARRWTFNHGLELRQKVYQAEGKTLSYYEQNIELTGLKDLPETSWLQEIHSQIPQQALKDLNQAYQHFFRRIKNKEKPGHPKFKKRGVRDSFRYPQGVKVEGSQAYLPKIGWVKFRKSREIQGKIKETTIVQEGNAWYIVFSCEIESDSPSIVPIDEAEAVGIDMGVAHFATTAAGKENIHQEIPHPHFLDTKLSKIKHLSRNVSRKTKGSKNKLKARIKLSKKHAEVKNLRTNFVQQLSTQMIKNHDIFCIESLDISNLLQKSTRRLARAISDAGWRSFLHCLKYKTEQCGKHLVEAGKYFPSSQICSSCGNRKEMPLNQREYHCQNCGLRIGRDYNSAIDLKAAGMSVLKPVELPHEGSLEAGISRL

SEQ ID NO: 56610 - protein, 227 aa, Microcystis sp.
  misc_feature (137)..(170): Xaa can be any naturally occurring amino acid
MEKAYLFRFYPTPEQESLLRRTLGCVRLVYNKALHLRTQAWYERQERVGYTETSSMLTDWKKQEELEFLNEVSCVPLQQGLRHLQTAFTNFFAGRTKYPNFKKKHQGGSAEFTKSAFKFKDRQIYLAKCTEPLPIRXXXXXXXXXXXXXXXXXXXXXXXXXXXXXXXXXXGVGGRQLAYKCRWYRRNYLEIDRWFPSSKRCSNCGYIALENAVKYSRVGLSRLWDSP

SEQ ID NO: 56611 - protein, 393 aa, unknown
  TnpB Polypeptide
MSKKSFKYRLYPNKAQEQTLQETLDRCRELYNAALQERKDAYRLQRKSISYNQQANQLPEIKEDRPEYKNIHSQVLQDTLRRVDKAMQAFFRRVKSGEKVGYPRFKGYNRFDSFTYPQAGFSLTHDNHVCLSKLGSIQVKLHRAGEGTRKTCTIKKEGDQWYIIFSCEATDTEPLPENHEIVGLDMGVTHFATLSDGATIDNPRHFRHSEKQLEKLQQKVARKKKGSHRRGKARKSVAKLHRQSKNQRKDFLHKQSRKLVNTYGTLVFEKLRPANMTRRPKPKIDDATGEYLPNGASAKAGLNKSILDAGWYQFQQYCTYKAENAGRAILFVSPNYTSQICSGCGQIRKKELSERWHSCDCGTELDRDHNAAINIQRLGSSQQVAISVEAPCL

SEQ ID NO: 56612 - protein, 383 aa, unknown
  TnpB Polypeptide
VKTYNTKLIFENEEDKQLLLKSLELKKEAFNVISTIRFKMRKCGGLKPLHQRCYKKIKKLLPTIPSQYIIKAEQDVVAKYEAIRRNRHNIEEAPQTDRLNIQLDKRIYKWADQTTIKLTTFDKRIVCKFNLYPKLEEMYSKYPLQDPSLFVNEKQEVMLSIVFNDEVKYEDNKKCLGVDLGINRLASTSDGKIYKGNDFITYKRKIRWNKRKLQAKQNHSHSARTKLKVMRRKETNFSKNYIHHLVNEILITPANTIVIEDLSKIKRQNKGRSFNDRQAQIPYYLLKTILTYKAASLGKKVVSVKPYNTSKEDHRGLDNGKRKGCRYYGVDGVVLDSDLNAANNITFRHNKKHSISCKALDGQATVNRLNVGLKLWQAPTALA

SEQ ID NO: 56613 - protein, 416 aa, Scytonema sp.
MRTSYQFRLRPTTQQANDIDRWLSMFCAQYNYLLADRFDWYEQNRCPINACPLVCHIPELRESPNYYTQKKTLTKLKKTHPHYGEIHSQVLQDVVKRVNLAFERFLKGDCNGKKSGRPRFKPRDRYRTFTYPAIKDNCIQGNLITLPKLGAIKVIQHRLIPDGFKIKTASVTKKADGYYVTLSLEDPTVPTIKADINPDSVIGIDLGLKDFLTTSEGFAAPIPRYYRKAEKQLKRLQKRVSRRKKGSNRRRKAVKRLARQHKKVADQRKDFHFKTAKRLFNRHDVVAHDSAACPKGIDLNVKGLTKSRLAKSLHDAGWSSFLSILANRAAKAGLLVIPVNPHNTSQDCSNCGAKVPKKLHERWHKCQCGCSLDRDHNAAINIKQRAEGHPVLSKAKSLLSSSRLVLEAYTVISDSV

SEQ ID NO: 56614 - protein, 579 aa, unknown
  TnpB Polypeptide
MAFGNKNSTPSFALTLPMKVSKQDEIFLSKKFRIGCTVYNQMVTKTTKMWHQLRKTREYKNLIKAIKVAPANRDERKALLVQRSNLIKQASFSEGAFHKLVVPYQKAYNVNCDVAQKVASAVWKAWDDFFYGKGKTVHYKKLNDFVTLSGKKNNSGIFFRPANHTVSSLESAKRKAKNSIEKRYFDAYRKPDAKEGEEVVLPDEVKAQMDKEVADATAKIKPYIGEGNLRIIYEKHEFLVKVRNPDTQTGWYQQEALKCGVKYCRIVRSWVGTKWKYYAQLVLEGYPPIKCDSNGVIKHPVKQGRIGIDIGTQTIAFCGKGVCDLRVLAPSAIAEARNGLTKEIARIMRQMDRSRRAMNPQYFNKNGTIKRLKRKNGYKQIRHWNYSKNYYRLLYRLRNLNRKLAAVRKAEHYILANELLTYGNEFVVEDMNYKALQKRSKKTKTNPKTGRAHSKKRFGKSIGRCAPALFITILGQKASRCGGSVIKVSTFETKASQFDHTDDSFTKKKLSQRFAKLSDGTVVQRDLYSAFLLLHLRKNLQSYNKKTIKKDFPQFKMLHDKTKERLQNSHEWLPCSVGF

SEQ ID NO: 56615 - protein, 417 aa, unknown
  TnpB Polypeptide
VYWTDTYPSQHSPSTEAVAFRRQRKCWPVLDRQHRTQHTMCVKLIAQVKLHATKDDRDKLTALMERINEACNWLAGHAFELKTADKIKLQHGFYHELRSRFELPSQHAIRTISKVCEVYKHDKSVRPTFAPHGAVAFDQRLMSFKQGVDRVSLLTLDGRVVMPCIIGDYHRARLAGVRGQADLIYRNGQLYLYVTVEVPDGMLIKPKSWLGVDLGIRNLAVDSDGEKFSGEKTLSVRSQYVKLKSTLQSVGTKSAKRHLKKLSGREHRFHADTNHTISKRLVRKAKDTGRGVALEDLGGIRGRVTVRKAQRSHLHGWSFFQLRTFISYKAALAGVEVRAVDPRNTSRMCPTCGRIDKANRRSQAEFVCTGCGFADHADHVGAVNIAARAAVMQPIAGGGAASPHRPTRKLPALAGSS

SEQ ID NO: 56616 - protein, 405 aa, Syntrophorhabdaceae sp.
MQRLQAFKYELMPNGEQQRKMRCFAGSCRFVYNKALSLQNEWYTEDNSIKFSYVTLANLLPEWKKELPWLKKAPSQTLQQSLKNLERAYKNFFARRAEQPRKKKKGHSDSFRYPDPKQIKLDQGNCRIFLPKLGWIRYRNSRDVIGDIKQVTVSIKFKKWFVSIQTVREVEVSVHPSSSSVGVDMGIARFATLSDGLFVEPLNSFKKHEAALRKAQQSLSRKVKFSQDWKKAKHRVQSLYNRIADVRRDYLHKTSTAISKNHAIVCVEDLQVKNMSRSAKGTTQNPGKRVKAKSGLNKAILDQGWNEFRRQLEYKLAWNGGRLVAVPPQNTSRTCPGCGFVSNDNRKTQEQFMCVGCGFKEHADVVGAINILRAGLAQLACEASDALMSPAAGTHRSDSEVLHAV

SEQ ID NO: 56617 - protein, 446 aa, unknown
  TnpB Polypeptide
MTTETVTPGGTSDELVRDVAFVFVLDPTDAQAAGLARWAGVSRFVFNQGLALAKQRQDARKWLGQQFAPSVAKQVKGLASRNALIPAFNTWKQHEQARGQKLWLDDVSKFVREEALVDVATAYKNWFESLSGKRAGTKARPPRFKKKGRAVESFRLRQPSGGNGTTSGIRFAPVGGDTSPRAICLPSFGWVKLASNPRKVRRMVAKGRFKIAGVTVSHRHGHWQVSVYGKAAAFHTQRRTATKSHEARNRDTVGVDLGVRTQAVAATADSQPVLEREGVKAYQHQLRKLRRASRAYARTKRGSKGREKAARRLAKIHARVVGLRRNALHQLTTELATSHDTIVIEDLDVAAMLRSGRGARGVADQSFGEFRRQLTYKTGWYGTELIVADRWYASSKTCSDCGTRNGELRRGQASWVCPECGVKHDRDVNAAINLARWPATQLEAAA

SEQ ID NO: 56618 - protein, 402 aa, Halococcus sp.
VLRRTVCLKLDVPDDRRDDLHETTDRFRQAAQIAVDRAFERNDDGYVITHKTKLHHLTYEQAREATDGLNANLVQAARNLAGDAAKGVVSRWENGKRASKPEFTAPTVVYNKKALTYREDGVSLATVNGRVECDFVLPPEGENPQTEYLRGDEWELRESTLHYRSESGEYYLHTTVAKDEDVSEEAENGTVLGVDVGVENIAATSTGRFWSSGLLNHRREQYESVRAGLQQTGTESAHRTIQQLGEREQRWVDDLLHRISKDIVSEAVEHDCSRIAFEDLTDIRERMPGAKKFHAWAFRRLFDLVSYKADERGIRTVQVDPAYTSQRCSKCGHTARNNRPSQAEFRCGRCGYENHADYNAAKNVAMKHVRAGQKSPRGRANRHLALKTGTLNGNGEFSPADA

SEQ ID NO: 56619 - protein, 393 aa, unknown
  TnpB Polypeptide
MTEITLVTSSLLYKDKNEQLYNYFNDITPLFTFLVRRTIHHLNNDLNGENITKYRTRLKQEYGLTNRFAKAVVTTAKNTLKLAVTSGEYVHSTYAIKIKKVNAKIIKTKAILNNPNTKKHRIKNLKTKLFWLQMKKNKLIQLQNNGPKPILTFGTKKLLNNNKKLFFKKRDNQIVYIGDKNEHLGNQQFKLFYDKSDNKFTYKVRLEDKFIKNSKYIYGEFIIKDNKAKREILKTLKSPKSNPLSFRIIKRNEVLHLQIMYRIHSEYKTRNSNGVIGVDFNKGFITLSEIDQYGKLLNLDRIDYIHKGKSGVTKNSMLHLVKDLVDIAIKSGKDIVIEDLKSLNKNKKEKTERKHYNRMINTLKFGKFRKFLETRCDKLGVGLSLLTLTTHLK

SEQ ID NO: 56620 - protein, 392 aa, unknown
  TnpB Polypeptide
MKAYKTEIKPNKEQINLIHQTFGNTRYIYNQFISYNFKRLENNQPIISGYDYSKMINNDPNRPDWLIKSPSKAIKQAIMNGHKAMWDYLNGKKGKPNFKKKSKNNSFYLIGTIKVERHRIFLPKLKWVRLKEFGYIPNNVKSVTVSMKNGRYFVSCLTDEVNIKQTVTSTHGIGIDFGIKNQFITKNETIPSINKSKRVIKLEKKLKQKQRALSRKYEHNMINKVYYKTGKKKGQLKSFNWNRPLRECKNLNKNQRLVNKLYERITRIRTDYNQKALQSIMKQKPSFITIEDLNIKSLMKNKHLSKTISNAQWYMSRLFLTNQCEKLGIELRLAPRFYPSSKLCSCCGYKNTELKLKERTWTCPKCSVVHDRDINASLNLEQCQNYTVLTTV

SEQ ID NO: 56621 - protein, 393 aa, Idiomarinaceae sp.
MSTEMLKATKVRIYPTPEQAEYLNRQFGAVRFVYNKALHIISSQYKRHGLKLKAKKDLKPLLAIAKKSRKYHWLNDFDSIALQQACINLDKAFQNFFDPKLPSRYPKFKRKHAKQSSYHCMNVSAGDHWIKVPKMKPIKARVHRALDGKLKSITLSRTATGKYYASLLVEDNVAAPAPAQSVDTVLGLDMGLTHLAIDSEGNKTANPRFLKRAAANLRHKQKALSRCQKGSKGRMKARLKLAKAHERLANARADFQHKLSRQLIDENQAVVVETLKVKNLLKNRHLAKHIADASWFGLIQKLEYKAKAQGKHLVKIDQWFASSKTCSCGGHKVDTLPLSVRTWACPACSSQLDRDINAAINIRQQGVIKLRAEGLSVPANGGLRKSGHAPVAA

SEQ ID NO: 56622 - protein, 452 aa, Cyanobacteria sp.
MLTLSYEYRLEPSQQQIDIIEQTLDVCRSVWNFALRERKDWINSRKCPVNACSLVQEYIMSPDEPYPSYKRQAKALTEAKKTNPRLKAINAQVIQQVLRTLDRAFSDMKSRGFGFPRFKNKYRMRSYVIPQLGKETVKGNQVKLPQLGWVKFRKSREIPEGFVIKQARVIRKASGYFVMLSLQLDVDVPQPFPHGHPRGLDLGFDKFVATSDGLEVKRPRFLKSLQRKLKLLQRRLKNKKKGSNNRHKLNRKIARVHQRISDARKDWHFKLAHQLCDGAGMIFVEDINFISWQRGMLSKHAADAGFGQFVNILQWVCWKRDVYFGKVNKDGTSQECSQCGAHTGKKTLNVRVHHCPECQYIAPRDVVAAEVIRNRGLTQARVSRALESRPEGLSAVGTPVDIKRCDLSAGFPRRAQAHLKNACGDGLTGVDLRIDLVKSLKQESPTIATLGA

SEQ ID NO: 56623 - protein, 357 aa, unknown
  TnpB Polypeptide
MILTFKLKHNRDFSDELKKAFEVAEFTVLNKIKNANTTFVKNIRGILPSSIACQVMRKYGHQKNIKEVHNVNLIVPGQKIKFFEETNSIWIPCLKLHLENTINRTFTKINQIELDKEYAYISCTVAEQPEMISQCFIGVDRNTTGHVAVTANPDTGKIEKFGKSALHVHRKYSAIRKRLQREGKFRELKRVKDRESRIVKDLNHKISRKIVAMAKVQHAALVFEELNGIRKTRKQHRSFKYALHSWSFYQLQQFVEYKAKLLGVPVLYVDPAYTSQDCSRCGTRGQRNGKEFKCPVCGHVDHADVNAAFNIALKVKDMIDRTQKEMCTMGALIPHWSNDKECNRLQINKDCQNATKV

SEQ ID NO: 56624 - protein, 393 aa, unknown
  TnpB Polypeptide
MERLQAYKFQLRPKAGQESLMRRFAGCCRFLWNKALALEKETYEKEGKRLGFSLLCEALRDWKKENDTSFLAEAHSQILQQALKDLDRAYKNFFAKRADFPRFRRKGVHDAFRYPQGFRLDEDNSRIFLPKIGYVRYRNSRRIEGTPKQVTVSLSAGRWFVSIQTEREVPEPVHTSQSAIGIDMGVARFATLSDGSCIKPLHSFRKHEKKLAKRVKFSANWQKLKAKIQRLHRTIANVRNDFLHKTTTIISKNHALVVIEDLKVRNMSRSASGTSELPGKNVRAKAGLNKSILDQGWFEFRRQPEYKLKWLGGKLVVIPPQYTSQTCSHCGCVDRANRPTQAKFKCVACGFECNADYNAALNILAAGQAVSACGAGRAQAPALKQEPAYGVAR

SEQ ID NO: 56625 - protein, 371 aa, unknown
  TnpB Polypeptide
MEYSYKFRIYPTFEQERLIQRTFGCCRYVFNYFLADRQEKYRTTGKSPTRFQQDKDCTILRQNIEWLQEVDSIALKSEIQNLDYAFRNFFRRVRSGIKPYGYPQFKRKHDDRKSYKTKRVGTNISINASQIKLPKLGWVKCKVSKQVKGRILSATVSQNAAGKYFVAVNCTEVEFEPLPKTGAVVGVDLGIKALATTSDGMEYPNRKFIKQSDAKLRRESRRLSRKQKGSKRREKQRIRKARLEEHIANQRRDYLQKTTTELIRNYDVICIENLKTKGMMKNHKLARSLSDVSFYEFRRELEYKAEWYGKAVQVIDTFYPSSQLCHSCGYRNPETKKLSVREWTCPECGEHHDRDVNAAINILNEGLRLLA

SEQ ID NO: 56626 - protein, 390 aa, unknown
  TnpB Polypeptide
MLLCKKIKLNVTEQNAATLEFMQGKCRGLYNWWVMKLRDGEKWPGWRIAKETLQASKQHDSELKQVYGKLLHEVYFRLDAAMGAFFRRCRAGEMPGFPRVRPRHCFFTLVYPAMYIQVQEKTLRLPTGAKGRNKVYPDILAELTEQPPEDFREVAISRDGRGDYYASFSYKDKEEDQAPGQAVAFDLGIKTLATGVNEQGRFYHIGGFKGSQWYNRQLDKIRSKRDKCKKKSHRSIHLSQVYKRVAQKKRNKQHDSLHKASHLIAHKLVERTVVIGDLSQRQMVMREHQERNKHLNRAVFNDWGLYTFTQMLTYKCHLYGKELILENERNTSKACSGCGNLQPMPLWKRTYCCTNCGLVMDRDENSAVNILTRFLARRGPYTSFGACDVL

SEQ ID NO: 56627 - protein, 365 aa, Halorhabdus sp.
VCDLPRRPCFPRHDRRTHRSPVRPTRRRPRHTSQSVSRQRRLRGDGGRTPQQGRRVVPSSPHKGGGGVGHAGAGNDRAQHSPRRSQERSSCAAHQKSKISEDVDLGVNQLAVTSTGTFWSGNEFDHWRREYEKRRASLQRCGSRHAHENIQAVGRKETGRFKMMLHRIANGIIEEAVENGCTVIAFEELTGIRDRLSGASWGHKWAFERLYEYVEYKAELHGIDVEQVDPENTSRRCSHCGFTHPDNRDGEDFECLKCGYENHADYNAAKNIGLRYLRRNQTGDGGGAPVGVCLNRGTLNANGEYEPPAEDFGQSGSPRESPSGGSQPPRRQTSSDGTLNEANGDSAERSSADHSSGPAAREKKP

SEQ ID NO: 56628 - protein, 438 aa, Tagaea sp.
MILKMKRNLSIRYRIYPTPAQEAVFRRIAGACRFVYNLALEQRERFSRRDRAIRYVGQANELPALKGEAPWLKEIPAHCLQAALRDLDRAFVNFFEGRTDFPRYRHRGRSESFRFPDPKQFSIDHMSKLDRRTLRALIAPKFGKNRSNFGAIAIRLHRPLHGRLKNLTILRDGNNWYASFSIETRERHTPVHQYRDSAVAIDRGVSTPFMSSDGEAFGQQTEGPRELLRLRRLQQALARKRRRSSNRRKAIKRIAAHKAKIARRRKDSLHKLTNLIAKSHGTIVIEKLNVRGMTASAAGTATQPGRRVVQKAGLNRAILDKGWGEFRRQLVYKAALLGGRVVEVDARHTSQTCSVCRHVDAASRYNQTRFACVACGYAANADANAAQNILQRGLVAIGALVEIADTGGGLPLAACGDLAFGRSKKQEAKGASLKKVAA

SEQ ID NO: 56629 - protein, 575 aa, unknown
  TnpB Polypeptide
MKTGKTLSLTVTSSLAPIPPETQADLDLLCELYGRTLQKFQMAFCTHELRQKVWNWRSFRDEIVHCLNLAQPKFDALLEELKAQGNRSQAELSKFLRAQQMSEGPHLQARHWKLCLEEASQGLRTYWQTVKAELKRQWGRFFGRYSNEPQTLIYINWILRESEPQFYMASQGKVPYPQPPKLNPKETDAEEKYRKRLTAFEKLKKDIENVKRYAVAKRVYCAIKKVRRKIRLPHCRLSSNRADFDCSCWRLNSKDQNELRLTSYAEGKKKRQPIALRILGKGALRGTLQLIKKFDVYELRVCRLVLCKEQRSEGEILGFDTGYTEVGALSNGAFVGQKFGEKLTRYSDYCKEKGQKRNKLWAKARELGNSAKEKDRRKAQNIFKHNLGRKKHNAKYRRAQDSIKQEVNKAISSIVNGKGKGLDGVIVKELVIEKLSAHMGKTRSKNWNRRLSSWVRGYIRQCLEQKCKQFGIRLTQVNACHSSRVCPACFYPSKENRVSTDRVKCRQCGYEGHADTCAAKEILRRRSGDIPLYAPPGKVLEMLMVQYQRGLEVPKAPPFSCKTRLYESEVEKKDL

SEQ ID NO: 56630 - protein, 435 aa, Synechocystis sp.
MLTLTYRYRIYPQAAQQQELIEWMDICRNAYNYGLRQIKDWCNSRKCLIDRCSIRQEYVMAADLPFPNEAVQHSALPGAKKEFSRLAFVPSQVLQQTIKQLHRSWEGFQKLSHGFPRFKKFGQFKSLLFPQFKQSPVVGNNLLLPKLGLVKVNLHRPISDGFVVKQVRILKKADRWYASISLQCDVSVPDPMPHGHAIGVDIGLEKFLATSDGVLVKPPKFFKSLQSKLKLLQRRLSRKQKRSKNYEKARIKVALVHHQIDNTRKDFHFKQAHALCGAGDMVFMEDLDYTVMAKGMFGKRMLDGGFGAFRTIVKYVCWKTGKFFGVVNSRGTSQECPECGATVKKDLSVRVHNCPECGFTTDRDVASGLVIRNRGIELIAENLWGGFPATEFFKRSTDGQSGIESVCAAVLPGAEETKPRQVAKPRKGKTRKSKL

SEQ ID NO: 56631 - protein, 347 aa, Synechocystis sp.
MIVAYQYKLRLTLQQTIEIDRWLSMLCAQYNYLLADRFDWYERNRSPVNACPLVCHLPELRDNPDYYSQKKTLLNLKKTHPWYSEIYSQVLQDVVKRVKVTFDRFLKGDSNGKRSGRPRFKQRSRYRTFLYPQVKEGCLVGNLVNLPMFGKVKFILHRPIPDGFKIKTVSITKKADGYYLTLSCKDETVPTIKPDFNPESITGIDVGLKEFLTTAQNETVAIPRYYRKAQKRLKVIQKRVSRRKKGSNRRLKAVKQLGKQHKKVADKRKDFHFKTANNLLKKYDVIAYEDLNVKGLAKTNKAKSIHDAGWSNFLSILQTKAAKLAGGSFPRQTLRKCWVINYCSQRL

SEQ ID NO: 56632 - protein, 423 aa, Synechocystis sp.
MNISHQYKLLPTQAQKAIMNRWLDMCRAEYNYLLAERFDWWEKNRNDVNSCPLICHLPELKDNPNYYSQKRALVTLKQERPWYKDVHSQVLQDCAKRVKLAFDRFIKGDCNGNRSGKPRFKALNRYRSFTYTQITGGDITGNAINLSKVGKVKLILHRPIPDGFIAKTAIISKKSDGWYVTISLADESVPDIKIDVTPTKENSVALDLGLEKFAALSTGKFIDIPQYFRCSEDKCALLQQKVSTRKKGSRAKKLLNRKVGKLHQKIARQRKQFHFEAAGKILTNADVVFVENLKVRNMSKRAKPKQDETGKFLHNGQAAKSGLNKSIADAGWASFLDILSFKAEKAGQKVVKVDPYGTSQHCSTCLNKVPKDLSERWHSCPSCSLSIDRDTNSAILIKKLGLDVSLSIKRSTRKGREAHAVLS

SEQ ID NO: 56633 - protein, 519 aa, unknown
  TnpB Polypeptide
LLEDLDRGAASRNDAVRRGPQNRFAVRRHQRRELRPQSSRRHGFEIIHEIRRPRARWHVEQRVDVVGLAVAFQQRSVPRCGEFCEDRARPIDHRASEHRATVLGHQNQVIDDSENCIVVAMENLRCHGEPSMMSSVIRVYKFRLYPTATQENEMLRVLGCLRFLYNACLQERRDAYKAGVKVSKSTQEKAITVIKNDPGCSDYANIHTHLLQDVVKRVDRSFQNFFDRVKAGKKPGYPRFKGRDRYNTFTFKDAASGNGAEVVAGGKRVRLSGIGNVKVKCHRPMEGVLKTIGVTRDGCGHWHALITREVPAHPLPASDAKVGIDLNLTKFAVLSDGSVVDNPRHLWEARIALERKSRVMARRKRGSKRRQKARTQLAKAHAHVANARRDFHHKTARAIVERFGFIAIEDLNVKGLASGMLAKYVNDAAWGQFATILSEKAVDAARVLARVDPRGTTPECSDCGEYVPKDLSVRVHECPKCGLVMDRDLNSSIVIEDRAFAPDTRPGRGRRREASNGNL

SEQ ID NO: 56634 - protein, 439 aa, unknown
  TnpB Polypeptide
MLEVRRTHRAKILNHSQVAEMLDQHGWSASKLWNVANYHSRNVWEETGEIPDHGDLKDELKSHPKYKGLHSQSSQKVLEELSEAFNSWSEKRKSDDRANPPGYRKKTYSDNDGNRVHEEHPRSTVTWKQNGIKHDTKNNRVRLSKGANHKEHPRAWEYILVEYETRPGVTVENLQQVRAVYDNATDRWELHLVCKDEIETPTPPGTETAGIDLGISNFAAVAYSTEKADLYPGNRLKQDGYYFPKEIANCDDSGGDKATRLHHKWSERRTHFFHSLAKHIVQRCVEKDVGRINVGDLEGVRENEDGESKNWGKHGNLDLHGWAFDRFMKILTYKAKVAGIEVLKVSERDTSKTCCVCGREDDSQRVERGLYVCEECDAAFNADVNGAENIRLDMNQSNSESSASLGEDRSTGWLAQPGVYLHDLSRGFLPREQVVDCKP

SEQ ID NO: 56635 - protein, 525 aa, unknown
  TnpB Polypeptide
LYLSYRGETQPLPSLEIVPQIKTYFVKDFVTNIRTHVKRQFWLLAKRNLMAVFRSRGVNDKHARKIAATIVTSALERVTSDIEEEEDDEDLALAMTLDVGPSDVVDDEGDEEVDAMIVDAPDCGEEPDAFEEYIESLSTTFNAGFEDRLRYLYTTNVKNMSFGGKLSPLIPLYTADAKYITIDADALWGLLGCKAGTQLDKKSFGLEALNWWTKVLNLRKPLVQQQSYRRFSFMIHTDGMGCTVKVAKWVPKQPKMTDEEAKVKRREAAVAFGRAELRRVEGLEETGCNFVGVDPGRSKVVTVVKQTFPSAAEVEETVLELSNERYYHECYYNYRSRRIALWSSKLGVARWWQQQPSARYGRLIDTLENVRYIFSGQVDKIFALRLSDKCKKLRWKVYIHQQKTFERFCREMLSDLPSDKHTVIAFGDGKFPTSSRGYAATPRSKKLIETLRRLKQRARWRRYNITVLDIWEFNTSQVCSKCHHDEALKDLRGATKPHFVRRCQSCRTIWNRVCNFAVCLALSLS

SEQ ID NO: 56636 - protein, 386 aa, unknown
  TnpB Polypeptide
MDVRRTIPLKISLDQDLVGLAKEFTRFCNDISSVAFNNGKPLHSVPLHQLVYSQFETSLMSQMRCSAIRKVAAAYGSAKSNKHPATKPFIFKKNTATLLFNKDFSFKKDGTISISTLSGRKRFKFSVPNYAINDFKNAKSYDSLTVLDNGKVQLCITLSVPDPVGLIPVGIDLGMKNALVASTITDTLFISGSKLQIKNRRKRQLRSRLQKKLALHKANNHSTRSVRRLLKRLGRSHRNRNVTFCKESAAKLCSWVPEDSVLVFEDLKFKQQSKKNYKQRKGTRRKLSQFFYSAMLNACKNRAERDGLAVALVNPAYTSQKCRMCGSIGTRFGSKFSCLCGHEEHADINASHNIRLIYAALRDGGAPSTAPEAQTKPVRKYKLRTV

SEQ ID NO: 56637 - protein, 389 aa, Moorea sp.
MRTAYQYRLRLTKLQEAEIERWLDMLRYQYNYLLADRFNWYEQNRCSINSCPLVCHLPELRNNPDYFSQKKTLPQLKKDRPWYKAIHANVLQDCVKKVDLAFKKYLKGDCNGKKSGRPRFKSKNRYKSLTFSAFSKNPIQGNKLNLPKFGWVKMIYHRPIPDGFKIKTATVTRKADGYYVTLSLQDNTVPNVIPIEQASNPIGIDMGLKSFLISSDGTEVPIPQYYRKAQKRLKKIQKAVTRSKKGSNNKKKAVSQLGRAHKKVADTRKYFHFKTAKELLDNYDLVAHEKLNIKGLAKTRMAKSVLDAGWGQFLSILSTKAENAGLVTVAVNPRNTSQNCSNCGTKVPKKLKDRIHYCPYCGYTKDRDINAAINILKLAVGHPVCNKAV

SEQ ID NO: 56638 - protein, 360 aa, Sharpea sp.
MEQMTITAKVQIVATDKDKVLLDETMSVYRDACNYVSDYVFQTHDLKQFSLNKALYSTLREKKTILENQKEWIQPGFKKPQYDLVWNRDYSLSENRFSVNTLNGRVKLSYFTEGMSKYFDHTIYKFGTAKLTKKHGKYYLHIPVTFDVEESNISDICNVVGIDRGINFVVATYDSKHKSGFVSGKAIKQRRASYSKLRKELQMRQTPSARRRLKAIGQRENRWMQDVNHCVSKALVESNPKHTLFVLEDLTGVRNATERVRTKNRYVSVSWAFYDLEQKLIYKAKQNQSSVIKVDPRYTSQCCPLCGHTEKANRNKKIHLFTCKNCGYKSNDDRIGAMNLYRMGISYLADSQVPDTVAAE

SEQ ID NO: 56639 - protein, 372 aa, unknown
  TnpB Polypeptide
MLSAYKYRLYPSVHQRIMIGKTFGCVRFTYNKMLAERKEIYELYKDNKEELKKQKLPTPAKYKTEFAWLKEVDSLALANAQMNLDKAYKNFFRKIKNGEKEAGFPKFKSKRNPVKAYTTNNVNNNIELVGNKIKLPKIGCVKCKLHRELEGDIKSATISQIASGKYYISVLVDTEIIPLPAIEKAVGVDLGIKDFAITSDGEIFENPKFMRKLEYKLTKAQRSLSRKKLGSQRWYKQKLIIGKIHEQIANARRDYLHKLSTKLINDNQVICLEDLGVKNMMQNHKLAKAIGEVSWSEFRVMLTYKAVWYGRKISIVGKTFASSQLCSRCGYKNKDVKNLSLREWECPKCGAKHNRDINASINILNEGLRLLA

SEQ ID NO: 56640 - protein, 499 aa, unknown
  TnpB Polypeptide
MTDTFIHEIPLKTTPHDEAVLDVRLDAARQLYNACLHESLRRFDLMRESKMYQTARELPKGKARNEAFKSVRGLHDFQEYSLHAFAAKTCKACWLGDHLDAFTIQKVATRAFGAVEQYAYGGRGRPRFKRHGWFSSVEGKSNAAGIRWRDDRVLWSGLKLAPLFDLKDKHGVEAHALSCRVKYLRLVKRVIKGNTFWFVQLVLEGTAHQKEKNAISKDACGLDIGPSTIAAVGEEDALLTQFCDNVIQPWKEIKREQRAQDRSRRVTNPDNYNADGTVKRGSRTWRRSNRYKKRQVRIAECQRTLAATRKKQHGELCNKVLSLGNLVKTEKLSYKSFQKNFGRSVAVRAPGLFIAQLTRKAENAGGSVEQINTRTTRLSQTCICGKVEKKPLKQRHHVCCCGVEAQRDLFSGFLAKHCTNHTLDINQAQNAWSAAEPLLRRAMSRVSETASRGPRPASFGLSKARRQSCSPVENGSGSGRGRGCCSRKARATKRSIPCR

SEQ ID NO: 56641 - protein, 390 aa, unknown
  TnpB Polypeptide
MPIKTFAYRLYPTKPQKRLLEATVETCRRFYNDCLAERKDVYASEQRSVAKFEQLRKVKTLKDTSPFARNIHSHILQVVVADLDKAFKAFFRRVKTGEKPGYPRFKGKDRFDSIGLKEYGNGYKIHGRRLKVSGIGRIAVRWHREMPSEPSTVRIIRKADGWYACFACEVEAKPLPVTGKAIGIDVGIKSLITDSAGASTDNPKWYRAGQRKLRVLQRAVSRKKKGGANRRKAVEFLRRHHLKVSRQRQDFLNKLANDLIAENDLVALEDLKIRNMARNRHLSKSILDAGWNYLVQRLHAKAEEAGRIIIQVNPSGTSKACSGCGHIFVEMKLSDRWIDCPGCGLSLDRDHNAAINILRRGFESLGGDGQSLWAPSSLMSEGLAQEAAGF

SEQ ID NO: 56642 - protein, 511 aa, unknown
  TnpB Polypeptide
MRTVKRSTYLLNQRKLREVKDLCGAYSREKRYWLDVFRANENQSRLKLHREVRNEAIASGYVSLNGLQARMWKLALVDAAETWDKYWQAAFVEIRIRVARNSTLAEDQRRYLYWLMKDYSRFADALHGAEPTPPFDVTGSLSRLARYFQKVVRSVKGKTPAVKVARSFCLDANCYTFFVENGTQYLKIMSLKKGKRITIPLSGESSISGNIRILVDGNRVQIHKPQKIKATSNSLSGTVAVDLGYTEVMTDELDNGYGSEFGSVLTAASNCRHLKGKARNKLHALEKKHRAAGNIAKASRIRKYNLGRSKLERQTSREQIHLENIINRSINALLRERKPELLISEDLRHAFTFDKPKGMNRRLSSWVKGVLQDRLEFKVLAGGSRHEQVNPAYGSQVCPSCGFVDSKNRNGDRFKCLHCGHAGHADQVAAMNYFIRKDDRQITRYTPYREVKSILLERFHRRLEAQQSGATVPGRTLDAVVPTVSTGDIGVKTRSSRKQGGGQKPAVNLAA

SEQ ID NO: 56643 - protein, 303 aa, unknown
  TnpB Polypeptide
MFSFIWRKHIRTFFRDPKVGYPHFKSKHHSKNSYTTNVVNGNILIEGSRIRLPKLKWISMKKHREPAENCRLKSVTVSMESSGKYFASLLYEGYSCENQAADKDYSNAKILGIDYAMQGMAVFSEEIELEKAGFFRRNEKRLAREQRKLSRCVKESRNYVRQKKKVASCHEKIRNQRKDYLHKLSRRITDQYDIVAVEDIDMKAMGQCLHFGKSVQDNGYGMFRNMLDYKLAWKGKKLVKTDRFFPSSKKCSKCGKIKKELGLSERVYRCTCGNEMDRDRNAAINIREEARRMLASINCPISG

SEQ ID NO: 56644 - protein, 566 aa, Clostridia sp.
MKKPKKKPINPADSIKYTVCGEFFPEVYPALRSQKWSRRTEDPLDTEMRLFCSCTRWAFNRLLEGRSREELKKEGQEVFGLNSRYCDDAILKARETIGSQRELLVMEIEETEIKLARAKKKLGWAEKDLVRAIKAGDTVKIEKAKHIVHSREARVKKLTNKLGELQTHQNAGTIPKVVFGGRSLWMRVCKGKSTREEWRNARRNRLYARGDETKGGNPNMKISYRNGGFTLLVTISHLSEQTGVDSKGRPIMTRAPRVEGKLWLPEKHRLEAWELLLSGAPYTVELIRDKDGRYRAHITFTVAVPGVLTSPNRGYLGMDTNPDGVALANASYTGQPEPWPEGFTVPYPKALHKFAEEFQVTVHSNGFLYIKIPELCYSRGYRRTYLMGVLAQVVVGIAETLGKPLAVEKLDFGKDRLDTNKKFNRMAANFPFKKIIEAVMRRAFKEGVGVKPVWPAHTSTNGYWKYMRRYGVIIHHAAALVIARRAIGFKERITEELRQKVQAVREKLIKKANSLPGEGKGMTRKVKRLFKRLDRKIPVHNGLTHFKQESFYSLWHDLKQLALASR

SEQ ID NO: 56645 - protein, 428 aa, Cyanothece sp.
MGIGFLLLLTPMTLALSMLVCHFSEFLRSMKQVLTLVVKLQPTLKQRQLLDDTALAFADACNYINKTVKPNLTNRNSIQAVCYQDVKERFGLTANHVVRACARVAANRLTAKQKGRKVKNFKPTSFDCDARTFRFIETGYLASISTTGKRAKIPMRVSNYHRGKLSGQNPTSAQVCQHKDGDWYVHIQLKSDAPPPIVPPNRGDAEGRGVIGVDFGRRDIAVTSTNKSWSGKEIQEKRDKLTKVRASLQKKATQGTRSTRRRCRQILKRLSGKERRYQAWLNHNISKTIINEAKQTQSFVSIEDLTGIRERTNQKPRNKTERRRSNSWAFYQLRTFLEYKGIKEGIEVIAINPRYTSQTCHCCLHIGLRNNKSFKCSNKACGWIGDADLNGSLMIALVGRSVRSPGGSSLLACPVNSGLQKAHAIATA

SEQ ID NO: 56646 - protein, 291 aa, Bacillus sp.
LANSQLNLQTAYKNFFRGQNDFPTFKSKKDRKSYTTNVVNGNIMLLNGHIKLPKLKMVRIKQHREIPQDHIIKSCTISMTPTGKYYVSILTEYEKEIVQKEVETVVGLDFAMDQLYVSSEDERANYPKFYREMLDRLAKAQRVLSRRTKGSGRWDKQRIRVAKLHEKVANQRKNFLHHKSKELATHFDVVAIENLNMKGMSQALHFGKSVADNAWGMFTAFLAYKLNEQGKQLVKIDKWFPSTKTCSSCGNVKNMSLSERVYSCICGVNLDRDYNAAINIKNEAIRLLALA

SEQ ID NO: 56647 - protein, 307 aa, Chloroflexi sp.
MERKQAFRTSKARKRDRLSFYLANDKFSVHGLTLHVPKLGKVNMTEELRFHGKILSAVISSRAGWWFVSIAVEVEHETPTHGGGTVGIDLGIKTLATLSGGEKFENQKHYRKSLGRIQGLSKGLSRKVEGSQNWWKNTKKLAKAHYRVACQRQDGLHKMSRHVARTYAVIGLEDLNTKGMLANHCLAQAVSDASFFEVKRQLLYKTEQYGGYVQLVDRWYASSKTCSSCGWIHDDLALAERVFICHECGLVLDRDLNAAINIRKEALRLRTDVPVVASSERKIACGAGSAGSAMSETFCDEAGTKVS

SEQ ID NO: 56648 - protein, 562 aa, Carboxydothermus sp.
MPKKQEKDEFSFTVCGEFFPEVYPSYRSSKWSRGGEDPLVTEMRLFCACMRWAFNRLLEGTSRDEIKKLGQELFGLNSRYADDARLKAQGVLDSQKKLLELEIEETEKKLGRARKKLGPVMRKLAKAEEKGATPEVIEKLRLAVKGRNNRVASLEKKLAELEVYRENGTVPRVVFGGRKLWKRVSRGRATREEWQATRKNRLYSRGDETKGSNPNIKVTYRDGEFHLAVTVSHLSEKVGEDVLGRPKMNRAPRVEGRLWLPEKHRELVRIWLTMRLPYTVELIRTLEGRYIVHLTFNFGRVQEPDFAQGCLALDTNPDGVALCNVNASGQPEPWPEGFSILYPGNPGKYEREFQVITYPNGFLCIKVPDLTYASGFRRDYLIGVLAKLVVDIALFLGKPITLEGLDFGKDRLDTSKKFNRMASNFPFAKMVEAMCRRAVKEGVSFKVVAARHTSTIGYWKYMKRYAVPVHCAAALVIGRRAMGFKERITKEMKQLVNRIKQNLTWKVNPDIPREGKGMTRKVRACLRQLDRKLPVHNGFAPWQQEAYYSVWHDLKLLALSLR

SEQ ID NO: 56649 - protein, 509 aa, Carboxydothermus sp.
VCELLLRVSPAQEKALLARLEAARQLYNACLGEALKRVGLVQQSKLWQKAWKAGDKELRRALIREACLKYGFTDAALQHYAVKIRRSCWIGDHLDVHVAQKLGTRAFRAAQRVLFGQARKVRFKGKNQMDTVEGKSNGAGIRWRNGRVVWRGLVLPAIIDPEEPVICHALSCRVKYVRLVRRKINGRNRFYAQLICEGTPYQKPENALGEGTVGIDAGPSIIARVNSKEARLDRFCEELAKKEAEIRRLQRRLDRSRRANNPENYNPDGTVRKGPKQWKKTNTYLKTEARLAELWRRLAAHRRSLIGRMVNETLRMGNVFKFEKLSYRALQRMFGKSVNTRAPGMFFRELTRKAESAGGKVLEFPTRLKVKGTETCVGLSSYCVCGEHKKKSLSERWHICSCGVKCQRDLYSAYLACFVEQVGQNDFELDAGTAARQWPGAEPLLQAASGRIPNPRMSGSSGQPRKGTEGVAAEERTAKAEARDAVAPSHGGSESPGEVAVVPLRTPGL

SEQ ID NO: 56650 - protein, 368 aa, unknown
  TnpB Polypeptide
MGVRNGQESDMPYKTHKIALAPTFRERRWFASQCGYARFAYNHALSDFKAGLEHDNFQSWQTLNDNFNKTKKRYDWTRSQDQRAALYAIKHLGQAITNWVSKRVKFPKFKGRGHKQSWTTDEQSVRVEDKRIRLPKIGWIKMREALRFVGKIIQVTISRTAHRWFASITVETEDTEVVDTSTHPVIGIDVGINTLATLSNGTKYDNPRPLKRYERKLRREQRKLSRKVFKSKNWFKQKHRLERIHYRIACIRTDAHHKATTEIVNRASAIGIETLKITNMLKNRKLAKALSDSALGGFLSKLKTKAEARGISITEAAQFFASSKTCSRCGHKKDDLTLSERTYHCSQCDVSIDRDVNAAINLSHLVVG

SEQ ID NO: 56651 - protein, 497 aa, unknown
  TnpB Polypeptide
MDGELLDSSPIMSQLVSEIQGISSYATYVVRNDTKLKNELSRVTTTAPAEAGRQAGVMMPDFLATGRTGRSRKEKLVQYNAVTAFRSWQERIAAAKGESSKYVSQGWKRTVDASAPSYGEGTINLGAVDKQYAVIENNPFITGEIVLKMVIQGKWCRLIFKFDNKRFTGGKVTLPLVKIENEQPVFIFTVITDNPVVQFSSDYTIGVDVGINDYATVAVRNSSTGRVVYETTLSQRVHSLWNSVRASERQVRALNKKAEKLLYDRQAHMAAVDEGQLHREAASRKKKELAVLAAQEIAYLSHFYGNAVVAVEDLSWISNTMQNGRWNRGAFIHWLTHYVTQNGGWVVAVNSANTSQLCHVCNERVAHPAHKVSICPKHGAMDRDVNAAANIAARAVPKVEKARKTRAKNRKLQRQVALKTPITRDSLKYPGRDRTKRVPTPKRKKRVAGEVNLPFSPARVNTTRVLADCGAYGVAETCQAAINQGNVAYECRLCNLN

SEQ ID NO: 56652 - protein, 380 aa, Streptomyces sp.
LLALQRSLAGAAGRLSAQLEDEHQVQRAVRPAQGGPGVRRGASGPLVVLQPAGHLAALGQGIPSLLPASEGRSHPGYPRFKGVGHFDTVTFPKDGDGCRWNSTPDDKQVRVRLQGVGHVRVHRHRPVKGRVKTISVKREGRRWYVVLACDEVLADPLPATGSVVGIDMGTVHFFTDSGGVHVENPRFLGRMAEELAAAQQHLATFPKRTRRRTKKHRAAARKVARLHAKIRRQRADYHHKTALVLVREHDVIGHEKLNTAGMTKAPAPKPDPERDGAFLSNGAAAKAGLNRSILDAGWGQFLTILANKAESAGRRVIAVDARNTSRTCPLVAGGCGHVVKENRVTQAKFECVKCGFVENADTVGALNVLHRAGLVLCDGA

SEQ ID NO: 56653 - protein, 269 aa, unknown
  TnpB Polypeptide
VSDLTKTIKLRIHVSPEQEILFRQMTEQYRQACNFVSQYIFDNQFNLTYQRLNKELYSDLRVLFGLKSQLAQSSIKTTMARYKTVSQQLFQKPYKYKDEDGNWKYITKTLEWLWKPIFFKRPQADLVRNRDYSFVDNGQSLSINTLGKRTKCTFERKPFSKYLDGSWTLGTAKLVELKGRWYLHIPVTKAVEDFQKENVRHVVGMDRGLRFLTVSYDEQGKPNLFPGEKLRQKGTSFSKSDSSSNQKAQNLQSADSKPFPDERTVGCLM

SEQ ID NO: 56654 - protein, 365 aa, Romboutsia sp.
VIKLLRAYKYRIYPNEEQKIFLAKTFGCSRFIYNMMLADRIKSYEENKDLDIKKIKYPTPAQYKKDYEWLKEVDSLALANEQLNLDKAYKNFFRDKSVGFPKFKSKKTNYHSYTTNNQGSTVNIENGYIKIPKLKTRIKIKQHRIFEGIIKSCTISKTPSNRYYISVLVETEIEKLANIDKKIGIDVGLKQFAVCSDGMIVENPKHLRSSEKRLAKLQKDLSRKVKGSKNRNKARLKVAKLHQKIADQRADFLNKLSTKLICENQTIVIEDLKIKNMQKNHKLAKAISEASWYGFRRMLEYKASWYGREIIVAPCNYASSQMCSNCGYKNEDVKNLALREWTCPDCKIHHNRDLNASMNLLKLAI

SEQ ID NO: 56655 - protein, 466 aa, Romboutsia sp.
MSVVSKNYTIETRLELKNNEELVSYFENYIRDYNLILRYVWRQLTSPTYKEEYPKKSYFVTHLCTKYTILKRTANSIMYEVEGRVKSLKALKEYEKRQLEYKIGSLENKRNKLSYAINNIKPKVRVNKATEKQLKKYRENKRYLYYINQKLNKKKMKLKQLSYELENNILKICFGTKKLYDSQYRLNDNGFRSHKGWYNTFVKNRDKNIYYMGSKDETKGNQLFQITYNETTDDFYIKLRKENKYTEDSKYIEGICNFKYQREYLKNMLIEGIYPLTYRVKRVGTKWYLQVVITIRNEVNTCLTRSTNGVLGLDYNKGFIELCEINKEGNIVNLKHIKMYHKGCNIKAINEIRQVVSQVCNYALGVGKDIVIEDLNFKKTKAKILKGKGKQGKTYNKMVNQLDYSRYKETFENSCFRNKVGLKMVNPYNTSKIGIEKYAYEKKLSSHQSASYVIARKGQGFLDKLK

SEQ ID NO: 56656 - protein, 400 aa, unknown
  TnpB Polypeptide
MMRTIVLKLRIDEAQREALLRTMQAYTVAFNMAAEWGFRNRTYNRISTHFGTYRRIRDFLPGLNSSLVQAARDSACEALKGSKLRVKPARRKYAALRYNKNAARIILEHGFASLSTVMGRMKLEFLYPEYYFKKYRGWRIVSATLSFEKGKREFYLGVSIEKEDIVKVAEGKVLGVDRGLKNLVVTSDNRFFNSKKMRGVRGRYAHNRATLQAKGTRSAKRRLRKMAGRERRFIACENHRIAKQIVNTEFQVIVLENLKGIGKQRTMTNGMPTKLKQWPFHQLQEFIEYKAEELGKVVIFVDPRHTSQRCNRCGHVEKSNRKGNLFKCMRCGYQLNPDLNAARNIADSGMSRLGRLPVNQPNASCDEGRTLKWDSGVVECRRKIIPHHEVDPRCALRDRP

SEQ ID NO: 56657 - protein, 326 aa, Fischerella sp.
HRKTAKQKNKPVQSFKPTSADYDARIFAFREKDWTVSLTLMEGREHIKLDVGNYQRGKLKGKKPTSAQLCKHRDGSYYIHIQIKDEAPKPLKPTNVIGVDFGRRDIAVTSNGDKWDGKQITEVRDKYAKVRASLQQKASKGTRSTRRRARQILQRLSGRERRFQQWLNHQISYRIIQQAKSMNAIVAIENLTGIRERTNQQYRNKVERRRSNSWSFYQLRSFLEYKGIKQGVEVIAVPPAYTSQTCHQCLHIGLRSDKRFKCGNCGWHGDADLNGSRVIRLLGQSVNLPGGSGYLCCSLSADRSGLLKAPGFYPWGSLPINFELTE

SEQ ID NO: 56658 - protein, 450 aa, unknown
  TnpB Polypeptide
MKRTNTFAVRSLSDLGEQLLWDLLDASAALWNETNYQRLMRYNDEDGYEDEDVFDADTGRLEGKYKGVLGASTAQQVIRKNSEAWRAFFGLKDQYHDESNTSITEHPEPPGFWGNKDDGRKLHTVIRNTSYTVEWGARSRIEILVGKELKDRYDHTGRLRLEIAGDPNWSDYEKQGRLDLWYDETDSTFRASQPVTISDDARATPLADETAALDIGANNLVACTTTTGEQYLYDGSHLFEQFRETSDRIAELKSKLDDQQGTSERIDRLYDVMYKRRNHAQDALVRDLVDRLYDGGVSTVSVGDIKDVLETHWRADVNAKTHNFWAFRRFIDRLECVCEEYGIEVVEGSESWTTQECPECGEREETERNGDVFRCVCGFEGHADLKASKQFLERETETEVGLMAQPVCLKWDDHNWSEIPHSPERASPNEERTDQSTHYRVGNVASVESA

SEQ ID NO: 56659 - protein, 131 aa, unknown
  TnpB Polypeptide
MVSGVRCPLGADHLINENQALIFETLKIQGMMKNHHLAKAIADAGWGEFMRLCEYKAKHEGRIFAKIGTFFPSSKTCSACGHKLKELSLATRSWTCPHCGAHHDRDINASLNIKQEGIRMLKAAGLTVLRS

SEQ ID NO: 56660 - protein, 442 aa, unknown
  TnpB Polypeptide
MPKGKARTKAFSAVHKAFGLTEFGLTIIANNHRKASGRKDIGAHEAQSIGKAVWRGLQRHMFQKAGRPRFKSFRRGLNSIEGTNNREIMYKPERGAIVWRKHVMPYMKPDTDYMKEALAFDRRVKYCRIVRRTLNDVRRWFVQLVVEGLPPVRKVYAPKCEVVGIDPGPSRIAYFHEQHAAIVEVAPHVDLQEPKIRLLQRRIDRSRRANNPDNYNPDGTVKKGSSTWNTSNRGRRTAAKLAEHHRCLAATRKRDHGELVNDLLQIGGTIKIEKNNYRSFQRCFGRSTNRRGMGEFVEHLKRKAESAGCEVIELNAYKLKMSQYDPQTDAYRKKPLKERWHRWGNTGTLVQRDAMSAFLACHATEKGHDRALLLEKWTTAEALLSGSGLCRHEPCSDPEVSKDASGLTKPNCGSKAERERGLPRTLCTDGDVQAALPPERAV

SEQ ID NO: 56661 - protein, 305 aa, unknown
  TnpB Polypeptide
MPVLRIRTFFKGLQKFPRFKSKKRSMPKFYQDNVKIQFSNTHVKFEGFSSSRKANKQKMNWVRLAEHGRIPTDVKYMNPRISFDGLNWWISVCVEFPDCKETLNDDGVGIDLGIKDLAVCSDAVKYKNINKSQKVKKLEKQKRRLQRSISRSYEKNKKGESYCKTNNVIKKEKLLLKRNHRLTNIRKNYLNQTISEIVNRKPRFICIEDLNVSGMMKNRHLSKAVQEQGFFWFRKQLEYKCSDKGIQLIVADRFYPSSKLCSCCGNIKKDLKLSDREYRCECGNIIDRDFQASINLKGYGERFAS

SEQ ID NO: 56662 - protein, 174 aa, unknown
  TnpB Polypeptide
MYRALGRIRRFQREHGSAQTQGRWTYTKRLNTELGEKDCRCDRKICGSKNHADVIVFEYLEMQGKIPGKKKQKLHLWRKRDIQRRCEHQAHRKGMRVSRICAWNTSRLAYDGSGAVTRDWEDYSLCTFQTGKRYNCDLSASYNIGARYFIRELLKPPSGNGKVFAGGKSPSCKA

SEQ ID NO: 56663 - protein, 504 aa, unknown
  TnpB Polypeptide
MSNPMRTIIRYSAEVNKNKFDSLVDTIGSYCWQKDDFLIAYAHIDKLDKLSGYKVRNGLVKAGFVSRHGLKARAWKWALTDALNTIKMYWEAMLVDVRSDIGRNRNFDKDDRIEAFKTLKYLRNIKKLFDRELDISVKVQNYLIRRIRRSIGKRPRVNLYRGACFDADMYSVFVNNKVQYISLMTKGKRIKIPLKGKSKIDGNVRVILNREDRVIEVHGSEEVKVKSVNDGPDNGIDWGMSELFADADGDFWYTNFWKDTEELAEGIDKKMKERNKIEAIKRKHMGKSNVGKVNKIIKNNLGKKKFDRKKQKFKGRIKTEINTAFNKFLDDKRLGRLGVENLSHYKPPLGSGKFSRHASYWMRGLMEDRLRFKMQVRGSSYVGINSAYGSQTCQCCGYVDRKNRSGDRFKCLKCDFIGHADTNSAVIYRERIDDDEIQLWMKPYRVKSILQRRLEDSGERCSKESTVSGKTLEPKYESTCTGSIKERNWGCVFYGVPLYGGAYI

SEQ ID NO: 56664 - protein, 353 aa, unknown
  TnpB Polypeptide
LRSRQRRPPAADRSLPPTTQDVGLLRPIKRVEGSAGRRRALGPLSYSAAQQVLRRLDKAFAAFFRRLKTKAKAGFPRFQAKHRFDSAAFRVGDGLTIRKSKRLGITGVPGEIKVKWHRDLPASAKLGAAVLSRSAGKWFVCFQVTVPDGDVQHRDGASVGIDVGLSSLIATSDGETVATPPWTTHAAKKQRRLQRALARCKRGSKRRLKAKQRLARHSAHTATQRRDFLHKLSRSLVGRYAVIALEDLDVDRLARSMLAKAVHNAAWGQLRRFLAYKAASADTRVEAVDPRGTSQTCPACGAGVAKTLAERTHTCPCGCVMDRAVAAATVILQRAQAMGPGTGLRSSSQRVAA

SEQ ID NO: 56665 - protein, 392 aa, unknown
  TnpB Polypeptide
MKKAFKYRIYPNKAQQALLQSTFGCCRFVYNKTLDIKKTAYETDKTKLSKFDLIKKIKPLKDEYPWLRDVPHVCLPQAVSNMDAAYQNFFKSGKGYPKFKSKHRSCKSCKFPYPFCDVLQDTSRLKLSKIGLVKYKKDREFVGTLRHIVVTQESDGKYYASCLVETDIEVPKPQPVEASTTVGIDLGLKDFIITSDGRKIPNPRFYATIDRRIARLQKHEARKTKGSKRRARIRLKINKLYIKKRNLVKNFIYHVAKTLLRESQTLLMEDLNIVGMVKNHKLAKSIQNICWGELRRVLEYKSKWLGHNLIFIDRWAPSTKTCSCCGYKNDTLTLSDRSWTCPGCGTHHDRDINAALNIKRMGLAKVLPAVSGFDGRGEGSYTFDEASICVSY

SEQ ID NO: 56666 - protein, 259 aa, unknown
  TnpB Polypeptide
MIYNRSINISFDKKDQYILDGQSKICNWLYNQLLDLSVKDYKENNNDNKYLTGRNLRDQVPKFKIDSPFLETVHSSPLKNSAIRLKESFNRFFKGNAKYPNFRPWKKKWFSLLYDESNKGFKVNGREIEISLGKNESGKHFRIIGALCESLKINDGEKINTFRLCKRQNTFYGVFTIEKADIKIPRAKPKKWVAIDPNHKNFFMSIDNDGVSVEFGKLELIKYWDKVIDDLKSQRDICKKKGDSSRKNVLCAERSMGEN

SEQ ID NO: 56667 - protein, 378 aa, unknown
  TnpB Polypeptide
MQIHKAFKFEITPNGEQIRKMKQFCGCSRFVFNRALAYQNEQYEADKSFKFSYTKITNLLPEWKRELTWLKDCNAQVLQQSLKDLERAFKNFFAKRSEFPKLKHKGEKESFRFPQSCKLEQHNNRIYLPKIGWVRYRNNRNVVGTIKNVTVSQKCGKWYASIQTEFVIETPTPNGGEIGIDMGIARFATLSNGEYFEPVNAFKTHKGKLAKLQRRFKNKTKFSKNWQKLKVKIAKLHHKISNIRKNHLHQISSRISKNHAIVYVEDLQVSNMTKSAKGTVEEPGKNVKQKSGLNRAILDQSWYEFRRQLDYKLAWNGGFLIAVPPQNTSRICPCCGHTAKENRQSQADFECVECGYLENADVVGAINILKRGQALQAA

SEQ ID NO: 56668 - protein, 441 aa, unknown
  TnpB Polypeptide
MFGCQQVLVDDTKVLPYLEFVCSEANKLINCGTYYGRQIYFKTGKIISKFDLNYEYKNHLHYQFLCAQAAQQVLLSVAEAFSSFLKLQMAYRNGEIADKPGLPKYRKKGGLALIAFPKQAISLIDDRVRFPLGKKVKSIFGIDSFNVPMPSNLKFEAIREVRILPRNGCFYAEFVYRQQVFKPQIDSSRVLGIDPGLNNLLTCVSNIGKSFVVDGRKVKSQNQWYNKQIANLKTGKPQGFWTAELANIAERRNRQMRDAVNKAARYVINWCIYNQVGTIVFGWNQRHKDSINIGKKNNQEFVQIPTAKLKQRIDQLCQQYGIDFVETEESYTSKSSFLDNDILPTYDERLKEQEYRFSGKRGERKRGKHHNLGRGGYRTKAGIRINSDCNGAANILKKVATQLGLDLAKVGRAVLILPRRINVFRHVFRLPKNILCESLSL

SEQ ID NO: 56669 - protein, 672 aa, unknown
  TnpB Polypeptide
MGSMTSPPTDTLAATSGDAVMGAPRRRGKSKDPNFTYDGPVAVIRLELDGCDDRVRRRLERQWEAVFRLRRALQRDAAARCRAYWAARQERVADPKALRARLGLFRKGIEAAAKRHIEDSGWMRDHLTKAVGLHVADEVWETIQRHLFADSSGRRHGAPRVGSWWDFTRIPGRARSHTKDRPTWETYRLAGTVEGHLATYRHRQLPAGVRTAQQAAEQPAGTSILTQPTRLRVASRPASKSWWHHDGALAVVFTGLPAGDLVLPVRLPHGAGRWAHLTHFLADPRVWHKIDLVRVRDRKAPGGWRYYAHLLIHRGGYQSPSTRTRRAGVPADRRGGVDANVSNVSVASFPADTPEQWVTGQVICTPQQRKTAARAATQTRARQRALDRSRRNTNASQYGPSPRQAARAARRDVKRLAARQVTNPGGGRASRADGVPLRAYRHDKLSGGYQRTRTDHAAQSRRTSQAKLARARDIAARIVAIHGNTLTVEDCRISTWARLWGKRIALFSPGMLISALQDECAATGGQLYRAGTRSTAMSQHCLCGQRVAKTLDQRTHHCGHCGLRGDRDTVSAMLAACVDLTDPQDPRTARVDYTLAHALRDGLASQQEWEGSVNRYQPPPSPDEGSARTGSHHPVASAEHAALGAPPNRPGPVPGRRGTSRKRQPPKLPGAA

SEQ ID NO: 56670 - protein, 398 aa, unknown
  TnpB Polypeptide
LTKRKIHQLADTYSAFHTIASNTLETIKSSKPRTYTQLHHLVYASNRLTSIASQLIEEAQRYAWQRRSICEGINNPTIRFDKRLFSFKATERGHPILSVRANCERLGLPIGQDGAYRRICEHLGDGWKVTSILMTRRYRFLALLQKQAPTPRAGEKVLGIDQNSNGIGVTVMSEKGRILKQLYLGRNISLRQIRFENRRAKLQEYRDGTGHAGRAGLKLRRLSGKQRNYVRTNTWLLAKTIAELAGRYNAKIAIEHLRNLKQRRSQFSRKSRRKINRIPYGFFRHTLSHKSELLGIPLVEVPAKYTSQTCPRCGHTSRSNRKQWRQFKCVRCGFEANADRVASVNICRRAAYATYPVVKDQFSAAGAPVSVPVRQGEEASWQQSRLQVASSRLQSRRS

SEQ ID NO: 56671 - protein, 460 aa, Kribbella sp.
MSNTPTRKVALSTIRTTAAMMRTSRDASTSTSAVRTCSTCSLTRGPFLRRRKLSVPPGWVIDVTRFRMDPTPAQEAALLEQCRHARYVWNLALEQWSMWSRDKGATPGYIEQARQLTEARAEVGWLRAGSQTVQQQALRDFDRAVRNFYAATHRRPTWRKAGLQEGFRIVGGQATRVVKINRKWAKVSVPKVGWVRFRLSRAVPSAKSYRITRDRVGRWHLAFAVVPEPISAPGTGEVVGVDRGVTVSAALSTGELLSCPGLSVSELARLKQLQRGLARCRRGSNRRRRKKVAIAKVHARARDRRKDWVEKTSTGLAGRFDVIRVEDLRVAQLTRRPTPTADPDRPGAYLPNGRRAKAGLNRGILANAWGVLVRRLEHKAAGRVEKVNPAYTSQTCSVCGHRTPENRESQAVFRCVACGHRANADVNAAVNIAAGRAVSARREVPGRASPKREPQLATST

SEQ ID NO: 56672 - protein, 506 aa, unknown
  TnpB Polypeptide
MKESILKRSVRHYSYGYTKTKEWRLKAVAKKYRAFRNELFKKYGGLEGLPHINKHRFTLSKKWAEDGLCKKYGLQGRQWKVVVDEVFNTLSAKIEQIKKTVRIDISKNKKFSNEEHHYLMYLLCFNELLYNICNGRSMETEKKFNISTERKFYLQRYLHSRMRKRCGGKPISRSLSFTIDQDMYNVEMDEKGRNWIAISSLVPRDMIKIMLTDKNPIRGSLKVKMMKDRIEIIETEIVPCKKLAENKSESIIGIDKGLKNLLNVSSDNKYGVGFGKTFTVFSDRKTKKNANRNKLRALYKKFVDKKFFKKASNVLKYNLGIQKYNRVKEVERKELERQINQALNEFFALDNPHTLIVEDLKFKSRTKRLSRVQKRHFSEWLKGYLRRRIEFKCQQNGVLLAEVNAAYTSQTCPFCGFVHSDNRKGGTFHCLNCGREGDADYFASLNILSRLDDPDIGRYTPYREVRKILVERFEARHESGGTVETVQPVLQIQEQEDTHFLQSACS

SEQ ID NO: 56673 - protein, 309 aa, unknown
  TnpB Polypeptide
MIKGIKLQLYPNREQKAALFQMFENSNFVWNTMLGMIMERYNNNPNLKTLNNYALNNLLPCLKQEYPFLKKSDSSSLQIDNENLAKAWRSFFTNPKHFQRPRFKSSKYTKQSYTGKSSLTILKRRYIKILKLGVVKCSDTRQIEGKIKRYTVSCNRGKYYLSLQVEVPDRLPLPKTGKNIGIALSGGELAVLSDGTVLENFKNKYHKQGRYEDKAENRHKDYLHKLTTRMVKDYDVIVMEDFKTIKENPRLNNPSWQLFKSMLTYKCSWAGKELILITPLHSNQARLEGAYDLNEIAIRVLKRGMAKMN

SEQ ID NO: 56674 - protein, 273 aa, unknown
  TnpB Polypeptide
MSYTTNNQTMHCKDGSSKDTIFVVGNLVHLPKVGNLKIKKHCLPEASWTLKAATVSCTRTGKYFISLLYEFEKDIQPVAATKEKSLGLDYSSHDFYVDSNGDAANYPRFYRRAEAKLAKEQRKLSHMKFGSNNYNQQLHKVRLLQEHTANQRKNFCHTLSTAIAKQYDAVFVEDINLRGMAGSLKLGKSTNDNGFGMFRTMLEYKLTSQGKTFAKIDKWYPSSKTCSVCGLIKDDLTLADRSWTCSGCGTTHNRDHNAAINIRNVGLLGLYPT

SEQ ID NO: 56675 - protein, 479 aa, unknown
  TnpB Polypeptide
MLIGYVYKLDPSRNQAATMEKHLEMLRLQYNFRIRERIEAYSQVSHPVMGNYCNLVSKAECCPLACSVSKSALYGHPWTIDKKTGGAKLRSAKAQQDADLPNLKAARPWYQQIQHHVLQQMLKRVNDAFQRFFNGEAKYPKTKRRGRFRSFSYPPGDVRFDGNRVRLPGIGWMRFFQSRPFPSGFVVRTVTVRRKADGWYISVRLQDDSVPSLTCLNEIKSAIGVDLGIAKLASLSTGEIIPNPRFGQKTERRRRILHAKASRKVKGSSKRRKAYQRLARLENTVVNQRSDHQWKLAKKLTGMADLLVFEDLNIKGMCARCKPKRDELTGRYIENGQAAKSGLNKAILDAAWGELKQKVKIVSEKAGVIFLEINPRHSSQECSECGYISPTNRDKERFLCEACGYLADADVDAAVVIRERGLKELGINLPKLPGVPRKVTPKKPVERPGKPLGLPDGSGKPMQYLQLSLWDLLSSGEGA

SEQ ID NO: 56676 - protein, 437 aa, Clostridioides sp.
MSSRVYSKGGEFMPNRIKNIHYGTQRQQLKNLTKKEYQALREMCFLAKNLYNVGTYNVRQHYFNQGEHLNYEANYHVCKENENYKLLNSNIAQQILKEVDSSFRSFFGLIKLAKEGKYDFRGIKSPKYLDKEGFFSIIIGQIRIKEDGTLNVPMSPAFKKLYGKVSIKVPQNILEKKIKEIRIIPKHKARFFEIQYCYEIPKSEEVSNQKNALAIDLGLENLCTCVTNLGDSFIIDGKRLKSVNQWANKQNDKIEALKLKKNITAITRKQFKVWNKRNNQVKDYVNKTCFYIIDYCVKNNIGNLIVGYNAKLEKSDNMERKIYRNFIRIPFGEIKGKLEYLCKIKNINFIRQEESYTSKSDFFADDFLPDINVDNVKKYDFKGERITRGQYKSSVGIVINADVNASLNILKKSQVVNLSNLQNNPQILKQPQRVRIS

SEQ ID NO: 56677 - protein, 398 aa, unknown
  TnpB Polypeptide
MKVILKTYKYRMYPNKEQEQMLAKYFGSVRFVYNHFLAERKQQYTENGKSDNYYAQASTLTKLKKQEEYLWLKEINSQTLQFALRNLETAYTNFFRGNARFPRFKAKKNGGSFHIPQHCSVENSRIYIPKFKDGIKIVEHRPFKGGDVRNMTISVTPSGKYYVSILTQVTYEPLQKTNAKVGIDLGLKDLVITSDGKKYSSNKFIKRYSKELAKAQKHLSRKQKGSNSWNRQRIKVARIQEKIHNCRFDKLHKISTDLIRNYDVICCEDLNVKGMQRNHRLAQSILDASWGAFLSMLTYKAVMNDKQVVKIGRYYPSSKTCHHCGWVKEDLSLKDREWTCPNCGEVLDRDVNAAMNILAEGLRNISAGTVDYTDGADVRPFQGQSAKKSEAHKSLVCG

SEQ ID NO: 56678 - protein, 401 aa, unknown
  TnpB Polypeptide
MLRAIKIRLYPNKEQELKLNKVLGCYRFVYNQMLALKQKEYNDNKKSLGLTDLSKYFHGTLLKDEQYEWLKEQNTKVMKQSIRQMLSAYDKFFKQHNGFPKFKSKKNKQSALFPLEAISKGNKFNERKITLTQPLKDIRFRCSDLYFKRLQTYKEGIRSATLSKTKSGNYFLSILIELPQEEIVRFGQTNEHVGIDLGVKDFVITSDGEVFENKHFFKSQENKIAKLQRQLSKKQKDSNNRNKQRVKVAKAFEKLTNQKDAYIHSVINELLTYYDTVFMEDLNVQGMIKNHKLAKAIQEVGFYKFKQILEDKARNNYKEVVFVGRFYPSSKTCHKCGYVNKELTLNDREWTCPVCGEHHDRDLNAAINILMEGERIIGVRSTEFTLVDYPPMDERGLPPKE

SEQ ID NO: 56679 - protein, 416 aa, Synechococcus sp.
MINLTYEYRVYPTADQAIKMDEWLDTCKRVYNYALAERRDWIQSRKCPINACSIQREFIYPMDSEKPTYYSQKRNLTAARKTNSFLQAVHSQVLQDVMGRLEKAFNALWNSGFGFPRFKKRFRSFNFPQLGKNPIGDNQIKLPVFGWVKTVMHRPLPDGFEVKQARVVKRASGWYIQLVIQSDVKIPDPPIGGYAIGIDVGLTDFVATSEGELIGRPRFFVEAQHRLKVLNRAVARKQKGSKNQQKARQRVARFYERIVNRRKDFHRKLAHHLCDQAGMIFAEELNLKGLAKGMLGKHCLDAGWGQFLETLRWVCFKRGVHFQKVAANGTSQECPSCGVAVKKDLSMRRHECPECGYTTNRDVASGQVIRNRGLASTEHVAELVEACRSVAVGQTVQSCGATPSREALKQEFLKAI

SEQ ID NO: 56680 - protein, 417 aa, Synechococcus sp.
MLNMTWEFKLEPTAEQIAEIERILTVCRNVWNFALAERKDWLSSRKSPVNACAISREYIIPTDAPFPNYVKQAKALTKAKKQVPELASVNAQVLQQTLRKLEVAWESWRLKRSGLPRFKNQARMRSFVFPQMLKNCLSSEGIKLPQLGFVKVRWSREIPELFQVKQSRVVRRASGYFVLLSLQADIDIPDVPAHGHPIGIDVGIEYFLSTSDREQVKRPRFFNKLHRKLKLLQRRLKKKQKGSSNSLELQRKIGRVHQRIADTRKDWHFKLAHHLCDHAGMIFVEDLDFRGLAKGMLGKHVLDAGLGQFVNQILPWVCWKRDVYYGKVDPRRTSQECPDCGVEVRKDLSVRIHHCHNCGSIKPRDVAAGQVICTRGQRGVENACGVEAAGAGVTRSSWLAVKQEIFGVTQRLSLRTH

SEQ ID NO: 56681 - protein, 397 aa, unknown
  TnpB Polypeptide
MGIIITMPGNLSSIRCRLYPTVEQEKRLLDTLDICRNLYNHFIFESRLAYREGYIVKFDELQRIIPVLTNGKNIYSKVAQVVIHQFYRNLSVLKSLKVGRKGQLRFKAKDRFKSFTYNQSGFSLLHNTLKLSKIGKIKIVLHRTVTGIVKEIHIKRESSGKWFAIIVTATRTANNTTNKIDKPIGLDMGIKNFVYDSDGHVVEHPSILKKSARKLGKAQRIFSRRIKGSNNRNKQRFKVARLHEKIGNQRKDFLHKLSSHYVSKYNTIFVEDLRIDNMIRNNTLSKAIADSSWSTFFNMLEYKAAYAGILFRKVVASGTSQRCSGCGEIVKKTLAIRMHCCPICKLNIDRDLNASINILQNGLDNLPQELREVTPVEIEPIQTSLQVRSMNQEATSL

SEQ ID NO: 56682 - protein, 378 aa, unknown
  TnpB Polypeptide
VKGCVVLEITVTAKIKINPKPEEISLLQETLNAYKKACNFVSTVVFDTKNLSQASLHKVTYQALRSDYAMRSQMAQSVMKTVIARYRSTISNGHNWTRIKFQKPEYDLVWNRDYSLTAGLFSVNTLDGRIKVLFEIEAMEQYFDGTWFFGTAKLVNKYGKFFLHIPMTKEVKEAELADIRQVVGVDMGVNFLATTYDSQGKTTFFNGRDIKHKRAKYKRLRKQLQQKQTSSARQRLKKIGQRETRWMTNVNHQISKALVDRYGQNTLLVVENLTGIRAETEKVRVKDRYVTVSWAFYQLRQMLEYKAALHEAKVIAVDPKHTSQACPKCGHTEKANRNKKKHLFCCKTCGYTSNDDRIGAMNLQQKGIEYIVAAATGA

SEQ ID NO: 56683 - protein, 377 aa, unknown
  TnpB Polypeptide
MHKMFQYRIFPTKKQVHKLNETLNECRWLYNHFLEKRTMTYEQEGQSLSCYHQIDTLGLLKQERPTLKQVHSQVVQNVAIRIDLAFKAFFRRCKAGEQPGFPRFRGRDRYDSFTFPQSGFSLTHDDRVTLSKIGSVKMVYHRPVKGTIKTCTIQRRSTGKWYVSFSVECEPQRLPEIALQVGIDVGLKTFATLSTGEEIANPRFFRKEEKALARVQRKHSTLAKGTPERRKQREVVARVHERIAFRRDNFTHQESRQIVDRFGVICVEDLQVNRMTHNHCLAKSIGDASWSGFFDKLFSKAEEAGRTAIKVNPAYTSQTCSQCGHRQKMPLDVRLFDCPCCHVQRDRDLNAALNILALGLQGIGTQSIEAPGLSRGE

SEQ ID NO: 56684 - protein, 416 aa, Streptomyces sp.
VKLVVQVKLLPTPEQAAAFEATLHACNEAATWVSEVAFERGEFKNFTLRKHAYDTVKSRWRLGAQAAQHTIKKTCDAYTTLKANLKAGNLGKPGSKRYRRATEKPIVFRPQGAQPYDDRMLSWQIAERRVSIWTVAGRVKDVAFTASAEQLATLALYRRGESDLVCRDGMWFLLATCEVPEAPLNADPVDFLGIDLGIVNIATTSDGEIMAGRELNRTRLRERNLRTKLQKKNTPSAKRRLKKRRRKESRRAKDINHKIAKHVVAEAERTGRGIALEDLTGIRERVRLRKPQRATHSSWSFAQLGDFIAYRARKAGVPVVHVDPAYTSRTCAECGHIDKANRVSQAWFACRSCGLVDHADRWGHLPLERSREWGRLPQHPGSCLGVVAKRGPVNGPCPAPAIPPERSWTQTQHHRQ

SEQ ID NO: 56685 - protein, 360 aa, unknown
  TnpB Polypeptide
MLRECCFVWNHALALQRRYYKLFRKYIPVSKMKSHFSKRIKRNLLHSQTTQEIIERLDVSYVRFFKKLAKRPPKFKRAECFNSFVFKQGGYTLNGNVFTINKGKKRFKFSFSRPYEGKIKQVRITKETCSRYSLIIVTDHNPSLSYRKTHNGASIGLDFGLKTYLTASDGNNVVSPLFFKTFQNKIKKQNKRLSKAKKGSNNRKRRLFELQQTYRKIRNLRNDFQWKLAHELCKEYDFIFLETLNIESMKRLWGKKISDLSHSEFISKLMYVATKYGVTIHCIDRWYPSSKTCECGFVNKNLSLRDRTWCCPKCESINDRDFLASKNILRKGISELESMSNSNDSNIGVSYDCIQESHTI

SEQ ID NO: 56686 - protein, 402 aa, Escherichia sp.
VKRLQAFKFQLRPGGQQEREMRRFAGACRFVFNRALARQNENHEAGNKYIPYGKMASWLVEWKNATETQWLKDAPSQPLQQSLKDLEWAYKNFFQKRAAFPRFKKRGQNDAFRYPQGVKLDQENSRIFLPKLGWMRYRNSRQVTGVVKNVTVSQSCGKWYISIQTESEVSTPAHPSASMVGLDAGVAKLATLSDGTVFEPVNSFQKNQKTLARLQRQLSRKVKFSNNWQKQKRKIQRLHSCIANIRRDYLHKVTTAVSKNHAMIVIEDLKVSNMSKSAAGTVSQPGRNVRAKSGLNRSILDQGWYEMHRQLEYKQIWRGGQVLAVPPAYTSQRCAYCGHTAKENRLSQSKFRCQVCGYTANADVNGARNILAAGHAVLACGEMVQSGRPLKQEPTEMIQATA

SEQ ID NO: 56687 - protein, 375 aa, unknown
  TnpB Polypeptide
MQEKVKIKKTIKCKIHNLTNIKKQTLIAEYNEYQNICQEVSETINNDYLPERPFKIFKNKKRHKSFVNGAIRTIKNKKQFQNLNEQPLYLVNDSFKIIKNQTKISKYWLKLPTKQKYGGIWLPIIIPYKYENLLSEKICDSMIIKKKHDWFLLLTIKKDIPMKKSYSNILAIDLGERVMATVCGSFDNQRPTFYGRDVREIRRHYAWLRKRLGEKKAFKTIKKIGNTENRKVNDVLHKISRQIVDRAKETNSIIILGNLKGIRESAKGKGKRFSRIVHNMPHYKLSEYIKYKAGWEGIMTIAVNERGTSHTCSHCGNKGKRPYQGLFICDSCNYQVNADYNGAKNIAQRGLESISSLDGVRLTEPITLGAWQHGR

SEQ ID NO: 56688 - protein, 438 aa, unknown
  TnpB Polypeptide
MKINKAYRFRLEPNAEQQVILNHLVGSARFVWNQLLAISFEMLSKNEFINATVLVNKIIDLKRNPDFGFLKTHANAVTLQQKARDLAAAWSRFFDPKTHSRYKQAKAKKPRKPKFFKLANGTDMPLKPLMPRFKRKNDGRDSIRLVQFAKYCRLEANRVKLPSGLGLVKFRKSQDIKGTIKNVTISKQGGHWFVSFGTEQELSQKPVHPSKSAVGIDLGVSKLVTTSNGEVIKPKNSFKTNQKKLAKLQRQLSKKVLFSQNWKKQNRKIQKLHHHIANIRRDYLHQISTSLSKNHAMIVCEDLKVANMSKSASGTIANQGRNVKAKSGLNRSILDQGFSMLVDMLEYKQQWRGGLLVKVNPKFTSQTCFKCKHVAKENRQTQAKFECINCGHQANADINASCNILAVGHTVLSVEDRCSKDRPMKQKTCDAARPSPKS

SEQ ID NO: 56689 - protein, 458 aa, Micromonospora sp.
VKALQAYRFALDLTPLQERAVLAHAGAARVAYNWGLARVKAVMDQRAAERSYGTPEELLTAAVGWNLAALRKAWNQAKADVAPWWAECSKEAFNTGLDNLARGLKNWSDSRAGKRAGPRVGFPRFKSRRRSTPSVRFTTGAIRVEPDRRHVVLPRLGRLKLHESARKLARRLEAGTARILSATVRRDGGRWHVAFCVEVERAERTPTRPRAVVGVDVGITHLAVLSTGEMVPNPRHLDEAAQRMRRLARQMSRRVGPDRRTGQQPSRRWERARRQVARAHARVANLRRDGLHKLTTRLAREYGTIVVEDLNVAGMLRNRRLARQVADAGFGEIRRQVAYKAEWNGGRRIVANRWYPSSKTCSDCGAVKAKLPLRVRTYICDSCGLTLDRDVNAARNLAALAREATTAGSGPVAGRGADHKTRPGGPVAVKRQPGTAQADKTGTVPPQGGTCRSVARAH

SEQ ID NO: 56690 - protein, 394 aa, unknown
  TnpB Polypeptide
MIAHRFRLYPNKNQEVKLLENFELCRQTYNTLLGELNKQKVIDKSQIQGILPDMKICEPELKKVYSKTLQYECHRLFSNLKALSESKKKNRKVGRLRFKGKGWFKTITYNQSGFKLINNGKRCQVLHLSKIGDISIRCHRNINGKIKQITIKKEASGKWFASIIEERKDVIKQKPIKKLVGIDLGLTDIVYDSDGNKIVNPKQSKKHAEKLALLQRKMSKKKKGSNNRDKWRIRLARQYEKLVNTRDDFLHKLSRYYVNNYDAIGMENMKITNMVHNKHLSKSILDASWGKLRQMISYKAERAGKRFMSVNYRGTTQRCSQCINKVEKKIQEREHKCPHCGFETSRDHNSALDIKRLTLIEIGKGLAESTLVEMEALPIIRQLPSMKQEAPCES

SEQ ID NO: 56691 - protein, 343 aa, unknown
  TnpB Polypeptide
VEVLNKDKEWEERDFQAISSQMKQGLGRRLIDSITGLSQLKKKGHKVGRLKFKSQINSIPLVQSGVTYKIINDKYIKLQGFKKPFRVKGLHQIPIGAELANANLVRKAGDLYLKITCFVEKDKKVKTGNMLGLDFGIETNVTTSYGEKLNFYLPETKAIKKASRKFNKLKKGSRNKFKAKINLQKKYSKLDNQKKDIKNKVVSKLIKENDVVAIQDESLAEWHKNKLCSKKVQHSIMGGIISGLKKHPETLVVVDKYFPSTQLCPECGKKNKHTLDKRTYNCSCGYSCDRDIHAAKNILTEGMKQVGTERINPILVESPASISKPVAKIQARLCEARSLYVLA

SEQ ID NO: 56692 - protein, 389 aa, Cohnella sp.
MIRCIKTAFQTTKFDLERLFACNRLSAQIWNKCLVIAKNYSLAHEGKWIGQTELQAALKNQFPLHSQSVQAVSHKYLFARESAKQAKKQGLNSKYPYKNKRHYNTKWVDKSFKIEGNTILLSLGIQDGKRQQPIKIIVPDMPDAEIKEIELVFDRRLMVSMSYDDGKAAAVNHGNEVAAVDLGEIHSIAATTTENKAIIITGRKARSIHRLRNKKLAELQKLMSKCKKGSRQWKKYNQAKRFILSKSERQLNDVIHKSTKHFVKWCKEHEVKEVVIGEVEGVQRNTKKKKRKLLNQKLSNWSFGKMKKQLKYKLEAHGTNLTSIDESYSSQQCPCCGRRNKTSTRNYKCSCGYKEHRDVHGSKGILSKYLHGDIRYLGETESFKYLRIA

SEQ ID NO: 56693 - protein, 536 aa, Anaerostipes sp.
MSDEEYKKLLKQYHKLSDRHILVVETDMPYPDVLKVVALSDKIRKAGNELVSLMRKNYDQLMRTKKYRKLLKLYGNTEDKDKRKALADQLNDMQKSYNVTWDLCRTSMIPIGKKYSIDAVFALTKAEDIWRGMEKCLYDNGKTTHFSKYGELPCIRAKQINRGIPMFVEDGKLRFKLRKMQFGIQVNDRFQSDEVNAILSYLENPDKMDADAVNTLIEEACCIDTYRPCYATLVPRLIRGKYRVYLHLTIEGKAKPKYDRSGNPRHKYGKGMIGADIGTQTVAYTSDTEVGLKNLSERGNSIQTSERKERLYYRAMDRSRRATNPQNYNPDGTIKKGKKTWKYSDRYKKLKAKHTELCRINAVNRQLAINEDANYLRSLGDTFVTEPKNASKLMKRAKKTTVNSKGKFNKKKHFGKSIKNRCPSGFQTTIEKKFKVTGGAYIEVPNNYRASQYDHTADDYIKKKLSDRLYRLRDGTLVQRDWYSSFLLYCYDYRTQDIDKDKCITDFGRCYDKEKALIAWIKANHIKILNSGIKVA

SEQ ID NO: 56694 - protein, 526 aa, Streptomyces sp.
MLRARRRQPQHERRALPHLREQPHLTPVRLHDLPHDRQSQPRVPVPMPSVAPRSPEAVEDAGLVVGEDAGALVLYGRPEPGSGATRGDRDHRAGHTSPAAAPRSVSARAGALRRPWSLPALRKEFNRIKTADPRFAEWWQENSKEAYSTGLANAAAAFDNYAKSKQGKRKGRRVGMPRRKTKHKARLACRFTTGIIRVEPDGRHVTLPRLSTIRTHESAHTLLARLQAGTARILSATIRHERGRWFVSFQAEVEREITRVTRPDATVGVDLGVKHLAVMADSTGEIRYESNPKHLDGSLKLLRFHSRRVSRRQGPDKRTGQKPSKRWEKADAQRNRVHHRVANLRTDALHKLTTAVRGEYGTVVVEDLNVAGMLKNRRLARKIADAGFGEIRRQLTYKGRRNACRTVVADRWYPSSKTCSGCGAVKAKLPLHVRIFHCDACGLVMDRDENSARNLAALAAAATTGTGVAGDQGATTAPKPRGADRKTRTSRRSRKAKAARAGGATLPQPRQTEARDRRQAEALTLW

SEQ ID NO: 56695 - protein, 410 aa, unknown
  TnpB Polypeptide
MIVEKAPRMKATKAVRFQYYPNEELIALFNTFKQMTNDAIGTAIQHKITSRFKLIKTAYQDLKRYQLHTHYILSACEVACAVIRNRKRRKTPYIQNPFLKLDNQAYKLEGKTIRIPKKPRQFIHIQLEMGDYQKKLLSDPNIKFGSVTITPRNVVIAVSKDAASYEPEGLIGFDTNEASIDGAEICSNKVSFKSYSLSAVKTLKHTYYAKRRRVQRRFCNDRRKLRELQGKYRQNEKNRTEAVLHRVSKRIIDEVKSKKRGIVLEDLTNIRKEVNRKKNGINLFNGKEQKISVNTKNMKRRLNTWTFKKLQHFIEYKAKWEGIPVSYVDPYYTSRRCPVCGCTVESNGHLTECKNCGLKMNRHLLAALNILKTKDDTLRFRVDSSPSEAVIRSLSKAVSRRKEVHSTPEE

SEQ ID NO: 56696 - protein, 354 aa, Natronomonas sp.
MEVIRTVKVKLNVPEKRRDALHQTADQFRYCANQTSEWAWRDSSNEYCVTSKAKAEDALYDRLREETDLTANLVQKGIRRAVEAIKSGVKAWKRGDRTSQPHFDSWSVVYDKRSATFYRDHVSLSTVNGRVECEYVLPDDTDGTPIGDYLLNKDFEFRMSTLQYDRFEDVYYLHARMKRTIADSEEERSSSDTHSENLTVLGVDLNVDGYFAVTSTGAFIESADYLNHRRREFEKTRGSLQDTGTRSAHLTIQQMSDREHRWIQDVLHSVANDILREACRVDATHVAFENLTGIRDRMADARRFHAWAFRQLYEYVEYKGEAEGVAVEQVSPAYTSQRCSKCGCTLEENRPSKY

SEQ ID NO: 56697 - protein, 406 aa, unknown
  TnpB Polypeptide
MTTCTRILYAQCAVPADMKRLKATCRNVGKMRAAIWQRWGGLGTVGKSVNEVRREITAANLFEKIDIDGTVRAESTKDIVNDIFAYRKAAEAAVVKKIYKRYKDDAECKVMCGKLRNGEWLKDPYLHRQMRTHFRHGKGKCSRQFVVRSDKYLIGHSGGFLTITLLFNRKSGGPVTLVTTTNGTNVKIANRNLRIIIENDEIQVHYAFEKICKRPHGEETVGVDKGLTEAFATTTNELLGQGLGKLVFEYSDAITEIWRGRNKLRALAERYEKEGRTEKANNIRLNNLGTKKLDNMRRRFRTKVRNLLCKAAHKLMDRACVIVVEDLSGFIKGKSLGRKTNRRLRTWVKGVMQEILEEIAALRDVRIVIVNGAYTSQTDSQTGAFTGERKGDRFYRENGGYRARRS

SEQ ID NO: 56698 - protein, 379 aa, Vagococcus sp.
MLRHKAYKFRLYPNVEQEILIAKTIGSSRFVYNHMLNAWNISYQETGKGLSYGKCSAMLPAMKKSDDTSWLREVDSIALQSSIKNLAESFDRFFKKQNRSPNFKSKKNPVQSYITKNTHNNLAIVDNKLKLPKLGLVKFSKSREVNGRILSAIVRKNASGKFFVSLLCEEEITELPKNNNSVGIDLGITDFAILSNGQKIDNHKFTSKMEKKLKYEQRKLSRRAILAKQNGLDLFGAKNYQKQRRKVAKLYEKVANQRTDFLNKLSTDIIKNHDIICIEDLNTKGMLRNHKLAKSISDVSWSSFVTKLQYKADWYGRKIIKVDKWFPSSQICSECGHKGGKKPLEIREWTCPVCHTHHDRDVNASLNILIEGLRLQELA

SEQ ID NO: 56699 - protein, 546 aa, unknown
  TnpB Polypeptide
MRPIGAPFVVVPPSGARIRTRLRVDAADEQVLVRVGEHLGRLAGGDLAALCRSGRFPDQQEGQRTARKRALTTAASSRWAGAITRTSGDQWERGYANLLDARVGLRRAIQRLQSRLRVTVGQRQGRVSGYATQAERFGKQRRLQHLQARLAKVEKRIAAGQVSVCRGGRRLAKLRHRVGRDAGALTEVEWRAHWQAERWFLTADGEADKRWGNETIRVHPDLRWLELRLPTPLAHLSNTPGRAVTYRLGCPVVFNHRRDEWAAQASSGAVRYDLWYDSTRGRWYVDASWRLVRPAMPRLEELRQDHMLAVDLNAAHLDCWVLDPSGNPIRAPHTIPLELDGLPASVRDGRLRAAITAIVRLAIAHGCRSVTVEDLDFADVRQAGRETLGRGKRGKSFRRTVSEIPTRQFRDLLVGMAANAGLWIVAVDPGWTSRWGRRYWQTPLDHSTRQAITITAHHAAAVVIGRRALGLGARRRPGVTRPHQRMGKGELPARPSVEPWAVRTPGLLEANGQRHRRTRPVGANGSTPGDQVVQDRPVPPVRVDKR

SEQ ID NO: 56700 - protein, 419 aa, Nostoc sp.
MLTMNYRYRIYPNITQEQSLIEWMDVCRVAYNYGLREIKDWCNSRKCMVDRCSISHEYIMAADAPFPSEVLQLNALPSAKKAFSRLGEVPSQVLQQAIKQLHRAWEGFQKVGHGFPRFKKFGQFKSLLFPQFKENPVVGLNIKLPKLGIIPINLHRPIPNGFVVKQVRIINKADIWYASINIQCNVNVPSPMPYGHPIGVDVGLEKFLATSDGVLVKSPKFLKVMQSKLKLLQRRLSRKKKRSLNYKKQRIKIARLHHTIDNTRKDFHFKQAHALCDTGDMVFMEDLDYRTLAKGMLGKQILDAGFGQFRTIAKYVCWKRGKFFGEVSARGTSLECPECGAEVRKDLSIRVHYCLSCGYKTDRDVASGQVMRNRGIALISTAGHVGTQNAYADGLPGTEISRSRSKSKTRKGATRKTKK

SEQ ID NO: 56701 - protein, 424 aa, Nostoc sp.
MLLTQTNRLDLSPAESDILKQLCHLSKNMFNVGLYNVRQYFFQERRYLRYEGNYHHAKGNENYGMLATDIAQQTLKIVDRSFGSFFKLLQMKQRGEYMAQVSMPHYLPKDGHFLLVIPVRERDLTTRLPKKNWLFTVPSSRAFRREHGEVSFEIPEMLRGRTIKEIRIRPKLGARFFDVSYVYESVPEPQVEQTGAMLGIDFGLENLATCVSSTDKSFIIDGRRLKSLNHWYNKENARLQSEKDRHCSKGLTHRQAALLDNRNHRVNDYLNKAARYIVNWCRDNRISKIVVGYNPDLKQRVNLGKRNNQNFTQIPIYTLNRKLQSLCERYGIAVAQQEESYTSIASFLDGDTVPVWNADNPAKYMFSGKRIKRGLYRTAHGWLVNADCNGAGNILVKHLKSSLDELRFGLGRSVLAAPLRVKIS

SEQ ID NO: 56702 - protein, 459 aa, unknown
  TnpB Polypeptide
MKRASIVRLIVDKDAEERLKLLCSLSSKLWNEVNYARRRAFFEKRGVDLKATYKEYYEKYKTLIGSTTTQQILNKNNEAWKSFFKMLKLKKGGKLPPFITKVNPPGYKKKNNKRVLWTVLRKDQYRVEGDKIVLKGLGAIGRIEVRYKGLIHLRGEQGRLEIHYDSDRKKWYAHISFEASEKAIRGVWASVPRRPRGNLVVGIDIGINNLMAIYVENGLAKFVNGRPLKAISHYWRMRIAKYQSTLNKHNLKTSRRLRSMYSKWRRQVKAYIDSRVRQAIEWLYSVGVSVIKVGYPKYIAQENGNFNNVHIWAYGYLLRRIHEVAEEYGITVVYVDEAYTSSKCPIHGEGCGERIKRGLFKCTKLNKVFNADLVGAYNILITPSPERDRGNGPETRPGIKPSGKRGCNPKPPRSRGTLALQGGEEVSNPRKVSLYTPPSSTRYNLIGYLGRGKFTSPRS

SEQ ID NO: 56703 - protein, 408 aa, Natrialbaceae sp.
VNYNYRYRLRPSDALEEQLAWTVDTCRQVYNHFLHRLNRTDGTSAYSEQKLLPTLKKWWNDLKNVHSKVLQKVVQRLYDNLSALRGRKENGYRVGTLKWKAPGEYRSFTYSQSGFKLKNTSGRTRLWLSKLGDIPLTFHRDLPDDAEIKTVTVKQEPTGRWFAIFGVETPDDPPAKPENPEKCVGIDVGIFKYAHDTDGTAIESLDLSDERERLERAQRDLSRKENGSMNWKKQRRVVAERHADLKRKRRDFLHKLSNHYAREYDLVAVEDLDAAGLVELPGNSRNRAGAAWGTFLRMLDYKCGREGTHFVAVNPRGTTKECASCGVETDKPLWVREHSCPACGFEADRDANAAINILSRGLEDVGVGYSESTPVETALPVDTPVSAKRIIEAGSPTLKERMASVVSE

SEQ ID NO: 56704 - protein, 361 aa, unknown
  TnpB Polypeptide
MHRAHKIRIDCTKEQHSLLIQTAGCARYAYNWGLEKWCKMYEDWKADASKEKPSAFKLMSLWTIEKPEWASKTARSAVTCSLNNLGTSFKSFFRHKTKYPKKHKRSQGISFQIANDKAAIVGNQLRLPTIGYVKLREQPRFQGKITGYTVRLIASHWYVTVAFDCPTVQFEAPESVVGIDVGLQHPAVASDGTILQLPIEKLQKLEAKRRRAQRALSRSKRNSNARERKRTKLQRIQQRITNIRQDASHKFTTTVCKNHATVVTEDLDISELQKKAPARSVRRAYNSSLMGIILFQISYKAVRHIKAPRFFPSTKQCSTCGHIKEAMPPNVRTYHCDHCGAHLDRDENAARNLMLQPWVTR

SEQ ID NO: 56705 - protein, 394 aa, Bacterium sp.
MKQIRTVKIQLKVANNVFKPTLEAYTNAFNQVCKTAWDNQEFNGVRLHHLTYKRLREETKLKSQLAISARVKATEALSSVLLRKKKGKKVSCPQSRCCSIRYDDRSLTVDFKKGVVNILTVNGRVKIPISVPKFFEQYLSWKRCSADLFQTKGKTFLHIVFEREAEDVEPSGEFVGVDRGIRNLAVTSDNRFFGGNRIKRLSERYERLRGELQSKGTRSARTHLKKINRCERLMRKDINHRIAKKIVEGLKPGTTIVLEKLTGIRGGARKLNAEERKEGKKTLRKAQRKEVNKWNFFQLEQFLAYKALAKGCNVEYVDARYTSQGCSKCGHVARGNRQCQSLFKCKKCGFQLNADLNASRNIVLKHLDATCHPNKANVNLPNGGCETANVRLRV

SEQ ID NO: 56706 - protein, 334 aa, Scytonema sp.
LAACRWSYNAAIAYQRDCFIKGEKQPSKYKLREIILKSCPLWVKECPYSPREEAVFDAKTAFSKTATKNKLNPRFQSCRQPVKSLRISAKYWGAFYSEKGKTKKVQGFTHYASSKVVVNGRTFIIKDLQLNAVEPLCEKMPSEFTILLDKGKWFICFAIPFEVQANQRKNCIGLDPGVRTFLTGFDGENVLEVGNGSISKVAILCQRLDRLQSLITKSKGKKNKRLRWKLRKQSEAIRARIRNLTDEVHKKASVLLTKTYKHIFLPTFETSQMVVKKKRKLRSKTARNMLTWSHYRFKQTLKFHAIKRDCVVHDVTEEYTKLALAQSVVMFMKD

SEQ ID NO: 56707 - protein, 417 aa, unknown
  TnpB Polypeptide
LYNAAVNNRFNQYKTYNHKVDYFEQQNCLPAFKEVWIEYSYLPSHALQATLKRVDFAFERWFKGLAKRPRFKSIRHYSGWTYPDCAGFKVESDGGNGYLSLSKIGRIQMRGQAKYWGKPTTCTILHRNGKWYASITVNVLNQVLKPEILPVGAIGIDLGCKSALSITDGENHQQIDAPKFLRNAEYLIKKASIGKRRKRAPNRKKKILASRRFKKAQLKVSKLNRKVANQRQNWVHQIATQITSSNSMVATEKLEVKNMTSKAKIGKRKKQKAGLNKSILDVGFGMLRSAIKYKVEQMGGVFIEVPTRRVLPSQTCPKCGNQHKKTLDVRVHECCVCNYRQDRDIAAAEVMLYWAKGTLPGLGTSLVDADLPSSTSRTRKQAGSMRQLGEKKRQKSQSNFAKNKLEDVETSNSGEAS

SEQ ID NO: 56708 - protein, 229 aa, unknown
  TnpB Polypeptide
MYKETLHVNAQAIIQRNETTWNQFFKLPDLKKQDRLPSFTKKLSLIGYWSDKDSGEKRIHILIRSDRYHYITATRFLAGELYNRGVRKLYIGYPYMLSHDNGNEYNTNTWWFRKIVLWIVDIFMEYGIDVELVLEEYTSQICSMCENKHKKGRIYRGLYVCRKTGEKINIDIDAAINIARRLGYRMRIKRKIKGRMVAYNSVKRITPAWSGYARDHAIEILVSRVGRWS

SEQ ID NO: 56709 - protein, 374 aa, Veillonellaceae sp.
METYTLGYKFRIYPNKTQEGLINRTLGCARFVFNHFLAVRRDEWKANHNSLTYVKTSKLLTDLKKREETAWLSEVDSMALQESLRNLDRAYENFFKRRARYPRFKSKHNHSQSYRTRNQSNGIRIVENRIKLPKIGLVKIKQSRAFEGKIQSATVSRTASGKYFVSLCVETDKTMLFRPNGGKQIGIDVGLKAFCLDSDGNVIQSPRPLKKLQRKLRRAQRRLSRKLPKSMNRDKARVRVARVHERIANIRRDFLHKLSTRLARENQTVAVEHLNVKGMLRNHRLAKSISDASWSEIFRQLTYKTELHGGELLKVDTFYPSSQTCSVCGYRNPLTKNLSVREWDCPGCGTHHDRDVNAAKNILRKALEDKSKTA

SEQ ID NO: 56710 - protein, 404 aa, Massilia sp.
MLLAHRIKLDPTLEQHDYFARAAGTARRVWNWALAEWQRQVAAGIRPKAIDIKRQFNRIKYLDPDWLDAEGQPWLRNIHRDAHAQPFANLAKAWRRYFEQRRAGKPAHPPRFKKRGRCRDAFYVANDKFRLVGAKVVLPKVGAVALCESLRWTGKIQGASVVREADHWFLSIQVDVSEIDARLRRTGDGVIGIDLGVSCAATLSTGEKVQAPRPLKAALRSLRIRSRRQSRKLEAAETIAGINGRIPKATRLPVSKNRTKGAKGLARLHARIVRVRQDFTHKLTTRLCRENQTVVIEDLNVSGMLANHKLARAISDVGFHEIRRQLRYKAARYDTKIVLADRWYPSSRLCSGCGVRKGELALGERVWTCGSCDAFHDRDVNAAINLQRLATGALAARTALPVAG

SEQ ID NO: 56711 - protein, 186 aa, Microcystis sp.
MIIFIKLVVRDLRFDNVPSGWSGSSTERFSGWDIIPTQVPYLVKLLVEQQITTLVIGNNPGWKQEVNLGKVNNQKLVTIPHRRLIEMISYQCQLAGIKVIIQEESYTSVANFLNDDPLPVYGETTEKPVFSGKRIKRGLYRTDRRFLCQSDVIGSYNILRKAFPNAFNRYGIERCVVHPRRINLSK

SEQ ID NO: 56712 - protein, 295 aa, Vibrio sp.
  misc_feature (173)..(173): Xaa can be any naturally occurring amino acid
  misc_feature (177)..(177): Xaa can be any naturally occurring amino acid
  misc_feature (242)..(242): Xaa can be any naturally occurring amino acid
MKEIAIKQRFYPTDEQAELLARTFGCVRTVYNRILRWRTDAYRNDKIKVNYSAASSRLTELKKDPELSWLNDVSCVPLQQSLRHQQAAFKNFFEGRAKYPVEKKKRHKQSAEFTKSAFKFRDGQLFIAKSKQPLNIRWSRELPSEPTTVTISKDTAGRYFVSMLCRFEPKPMXVTAXTVGIDLGLNNLFITDSGEKVDNPRHFKRYQSKLAYLQRQLAKKKKGSNNRAKVRQKVARLHAKIXDSRLDHLHKLSRKLINENQVVCVESLQVKNMLRNPKLAKHIADASWGEFEAAT

SEQ ID NO: 56713 - protein, 359 aa, unknown
  TnpB Polypeptide
MKQTMLLKLATTEEQHQALLETMHAFNEAANYAATLAYSEHISNKFALQKRTYADLRATYKLPAQLAIRCISKVTEAYKRDKSIQPTFRPEGAVVYDERVMSFKGLTHVSLLALSGRVLVPFLIGDYQKSRMDAIKGQADLILRNGVFYLAVTLDVPEPPVDIAQETLGVDLGIVNLATDSTGETFSGQAVENNRKRHQALRQRLQKRGTRSAKRHLKKLSGREARFKRNTNHVISKHIVQKAKKNTYRIAIEDLRHIRQRTDSTVRKSQRNRHTSWTFGQLRQFLSYKAALVGVSLHIVDPRNTSRTCSMCGHCEKANRKSQSDFECKQCGYRCNADYNAAINISRAAVKQPTVAGCA

SEQ ID NO: 56714 - protein, 199 aa, Thermoanaerobacterales sp.
VEMELEAKAHSGPKVGIDVGIEKFAACSDGKTVANPRHLHKTEKRLKHAQKELSRKQKNSNNSRKQKLKLAKLHARIRNQRRDFLHKQSRKIANTCSLIAVEDLNVRGMVRNHHLAKSISDASWSEFLAMLCYKAEEAGGRVVKVNPRETSQQCSGCGTKVSKDLSARIHRCPSCGLVLDRDVNAARNILLRALASEVA

SEQ ID NO: 56715 - protein, 410 aa, Nitrosomonas sp.
MKQIIRKAFKSRLNPNSDQVQKMVEFAGANRFVWNKALAMNLFRLEQKQPLLWYNELSFWLKLWKSSEDYGFLKTVHSQPLQQALKNLEKAFKDGFDKKQPLKRIPKFKKKGLSDSFRYPQGFKLKQESNKVFLPKIGWVKYRNSRQVIGDVKNMTISRKGGYWYVSIQTEYETELKRHSSTSMIGVDMGVTRFATLSDGSYVEPLNSFRKLSKKLAFEQRKLSKKVRFSANWKKQKQIITRLHERIANARLDFLHKTSTEISKNHAMVVVENLKIGNMSKSAKGSVEKHGKNVKAKSGLNKSILDQGWGMFVSFLEYKQACSGGDVLKVNPQYTSQTCPGCQHVSRDNRKSQSAFECTECGFKANADLVGALNVLERGHRLLACGVETLVSSKKREPVGSSNTNLLLTA

SEQ ID NO: 56716 - protein, 377 aa, Nitrosomonas sp.
MEIKRAYKFRFYPTFEQETILAQTFGCVRFVYNRMLRVRSDAWYTEKKRIGYHATSSLLTELKKEPEFEWLNKVSSVPVQQSLRHLQTAFGNFFAKRAKYPSFKSKHEKQSAEYTSSAFKWDGKSLKLAKMKDPLNIRWSRTLPKATKLTIATVSKDSAGRYHVSMLCDDSVARKPMVSGKVGIDLGLTHFAILSTGEKIASPNTLRKNETRLAKLQRKLSKKRKGSANRQKARLKVARLHAGIADARKDFLHKLSTRLVNENQVIAVESLAVSNMKKNRCLAKSISDAGWGEFVRQLEYKSLWYGRELVGIDRWHPSSKRCSGCGHTVNKMPLNVREWTCPECGSIHDRDINAARNVLAAGLAVSALGESISPVCI

SEQ ID NO: 56717 - protein, 267 aa, Nitrosomonas sp.
MEIKRAYKFRFYPTFEQATMLAQTFGCAGFVYNRMLLVRSDAGYTEKKRIGCHATSSLLTKLKKEPEFEWLNKAPSVPVQQSLRHLQTAFGNFFAKRAKYPSFKRKYGRHSAEYTSSAFKWDGKSLKLEKMKDPLNIRWSCTLPKAAKLTTAMISKDLTGRYRVSMLCDDSVALKPKVSGKVGIGLGLTHFAILSTGEIVGIERWYPSSKRCLGCGHTVNKMPLNAREWTCPECGSIHDRDINAARNVLAAGLAVPVLGESISPVCI

SEQ ID NO: 56718 - protein, 238 aa, Nitrosomonas sp.
MEMKRAYKFRFYPTFEQETILAQTFGCARFVYNRMLRVRSDAWYTEKKGIGYHATSSLLTELKKEPEFEWLNKVSSVPVQQSLRHLQTAFGNFFAKRAKYPSFKSKHEKQSAEYTSSAFKWDGKSLKLAKMKDPLNIRWSRTLPKATKLTIATVSKDSASRYHVSMLCDDSVARKPRVSGKVGIDLGLTHFAILSTGEKIASPNTLRKNETRLAKLQRKLSKKRKGSANRQKARLKVA

SEQ ID NO: 56719 - protein, 320 aa, Nitrosomonas sp.
LLTELKKEPEFEWLNKVSSVPVQQSLRHLQTAFGNFFAKRAKYPSFKSKHEKQSAEYMSSAFKWDGKSLKLAKMKDPLNIRWSRTLPKATKLTIATVSKDSAGRYHVSMLCDDSVARKPRVSGKVGIDLGLTHFAILSTGEKIASPNTLRKNETRLAKLQRKLSKKRKGSANRQKARLKVARLHAGIADARKDFLHKLSTRLVNENQVIAVESLAVSNMKKNRCLAKSISDAGWGEFVRQLEYKSLWYGRELVGIDRWYPSSKRCSGCGHTVNKMPLNVREWTCPECGSIHDRDINAARNVLAAGLAVSALGESISPVCI

SEQ ID NO: 56720 - protein, 394 aa, Mycobacterium sp.
VARYRLLPTDEQVAVLAGHCRHARYVWNLAVEQQQHWQPGRRAPGYNDQCAQLTEARAEHDWLTAGSQTVQQQALRDFAQAMQNFFTGSHRRPTWRKAGVHEGFRQIAVKPHHVERINRRFGRVWVPKVGWVRFRLSRPVPKGVKSYRVTCDRAGRWHIAFARVPAPIPGPQDSSVVGIDRGIAVSAALSTGELLHAPGLRPREAKRLKVLQQRLARSQRGSNRRARTKRAIAKMRAREADRRKDWVEKVTTDIARRFDTIRIEALDVRAMTRRALGTVEQPGRGVAQKRGLNRGISRSGWGLLASRLQHKACGRVEQIPAAYTSQRCSACGHVAPGNRKSQAVFECQACTTGPCNADVNAARNIAAGRAVTARGGLGTSRSENREPQHCSPAA

SEQ ID NO: 56721 - protein, 474 aa, unknown
  TnpB Polypeptide
LLENVACKGVERKTKNLTTLKISYSTDEESLKYIYHVQNDFNKVLRVTYNRICENSEYSTKELTAIQANLNNIDGCKSHLKNSAIYKSREIYTINKASNPQKVIFGGRKSFIDRCKHKISKDEFSKKRMFPIYAIGQCNCHGNRLFKIVDTHTIIFKSDMEHHIKLTLKNVGKNREKQLLKLIELQKANSISLTYELDLDHVYIIFDNSIFENHRYQIKKDRTMQIDVNPNYVGWSVTDWKQDYNFHLVASGMFSLKPLNDYENHLAVSSISNESKYITNKRKHEVIEIAKELFKLCKHYRCEVFAIEDLCMKSSSLNKGKKLNRLINGQWCRNLLFQQIRNRVLSSSTTLVEVQPQYSSIIGNLVNRHLELPDPVLTSIEIGRRGHEFSCQYIFKRRQPEKTVVFPKLETVKKSITQSLEELGIDVPEFINWNELLSVVKKSKVKYRFPLLSKYESTPFSKNHKWRYLTIYEF

SEQ ID NO: 56722 - protein, 332 aa, unknown
  TnpB Polypeptide
LANVQLQQEKAFRNHFKNPKHFGIPKFKRKKDKQSYTTNNQEGTIKVDFENGLLYLPKIKDGIRTVFHRRFEGNIKSAMVVKTKAGDYYVSILVDVENPSNNKKEPKYSVCGIDLGLESFAVITNDEKTYKVEYPKYLIKSEKKLKRMQRQLSRKVKGSKNWEEAKIKLAREHNYIKNAREDFLHKLSKSIIDENQVVVVESLNVKGLSQSILAKHILDSSWSKFLQFLKYKAEWYGRTVIEADMMFPSSKMCSQCGYVNKELQLKDRLWKCPVCGAIHDRDVNASINLRNYGVGLGRPEFTPVETEPLPLVPKPVASSVVEAGSSHFYKWG

SEQ ID NO: 56723 - protein, 550 aa, Burkholderia sp.
LADEFDGRTAAASGEVGRGPQCATPQLPANARIAFLTDHPAGYAFQAVHQRRDGHLRRVVHQQVNVIVLTVEFHKLRLKVRADAGEDVAQVVDDFLGEHLAAVFGYEDQVNMHQEDAMSTVPDVVVVAHRPNYTVSMQRLQAFKYELMPTGEQQRDMRRFAGSCRFVYNKALALQKARYERGEKKLGYAGLCKQLTAWRNGTETPWLADAPTHPLQQAMKDLERAYTHFFAKRAGFPRFKKKGQSDSFRYPDPKQIKLDQPNRRIFLPKLGWLRYRHSRDVLGAVKNVTVSLSCGKWFISVQTEREVEKAVPNGEAVGIDMGVTRFATLSDGTFYAPLNSFKRQEAALRKAQQAMSRKTKFSHNWKKAKARVQRLHGRIGNARRDYLHKSSTAISQNHAMVCIEDLQVRNMSKSAAGNTEAPGKKVRAKSGLNKSILDQGWFEFRRQLDYKLAWRGGYLIAVPPQNTSRTCPCCGHVSKDNRKTQALFACVECGYEENADVVGAINVLRAGHAQFACEVSGAVMPPAAGPHRSDSSRLDAEMNAVGILRL

SEQ ID NO: 56724 - protein, 423 aa, Okeania sp.
MKSRFKYRIYPTPGQKYRLAKLFGCVRVVWNDSLTCCQEKYKSGEKKPVNSELQKQFITQAKKTEDREWLSEVSAIPLQQSLNDLNQAYQNFFNSTKGKRKGRPVKPPKFKTRKSKQTARFTKGGFKVGQHKVYLAKIGKLKIVWSRELLAAPSSVTVIKDSANRYFLSFVVETSSEVLPKTDNSVGIDLGIKTFATLSNGQKINAPLPLKKRIKKYRKLSKSLSNKTRGSKRYERARLKIAKFHAKLKDTRTDFLHKLSTEIIRENQTIVLEDLNVSGMVKKRCDPATTKVASGQTPRRQQAQGNADQEREGAPRDHKLSRAISDLGWRQFRTLLEGKAEKCGRDFRVISRWEATSQICSSCGFKGGKLDLSIREWECLNCGIKHDRDENAAINILVAGGQSETLNGCGGKPKTTASGSSSL

SEQ ID NO: 56725 - protein, 422 aa, unknown
  TnpB Polypeptide
MYEERNRKIRENGKATRERRSNMGCCVISVKIQENRLSKAKLEKLKRCFPEAKWLYNAVVATETLTLEDTSTVQVKVKDDFETREIKCLSAQMKQSVIESVKTNASNLSKAKRKGLKVGRLQFKKECNEINLKQFGQTYAIKGKNKIRVEKIGVLVVNGLEQINIDEVEFANARLIKKPSGFYIHLTVYTKRQPQEQTEKEVLGLDMGIKDQLTFSNGVKVNFYLEESEQLKGLMRKLSRQTKGSNQYKQTLARIKRIYEHLNNKKNDIVNKLNSVLKQNYIICFQDELLNQWKQKKSKRRFSFGRKVQHGILGRVKDKLKKNSTNVMLESSVPTTQTCPVCGCLTKHGLDKRKYHCNHCGFENPDRDAHSANMMVLLSGYGTYRSLNTDAVSTERMVGLLDNLSELGVVVKTTDSMQAYCL

SEQ ID NO: 56726 - protein, 383 aa, unknown
  TnpB Polypeptide
VILAHKIALDANDAQTSYFYRMVGTARFVYNWGLEAWNAAYNAGEKVNGMELRKRFNQTKYEEFPWLGEMPRDAHSQPFLNLDRAFKSFFKGKSKHPVFHKRGENDSCYLSADRIDFDGEYVRLPRIGLVRMHESLRFAGHILGAVLNREADRWFVSVQVEMGEYHRERVADGVIGIDLGITHAVTTSTGETYDSPKSLARHEKQLRRAQRVIARRVRGSANRAKAKNRLARLYRLIRNVRKDFLHKTSHRLCSENQAIGMESLNVKGMMANHCVARCLGDAALGELARQIEYKAVIFRDDLRKVDQWFASSKLCSECGAKKDDLSLSDRVYRCGVCGAVKDRDRNASENIRTASFAGTYACGHGDAAVVEAGTMQVLSVSTC

SEQ ID NO: 56727 - protein, 298 aa, Mycoplasmataceae sp.
MRKSYKYRLYPNKQQREVIDKTLETCRWLYNHFLAERRDKYEKEQKKVSYTQQQNSLPSLKENNPSLQGIYSQVLQDVAQRVKKAFKGFFLRLRNKKEKAGYPRFKSFGRYDSFTYSQNNGSYKIEEGKLDKNNFLKLRLASIGKVKIKLHRELEGEVKTCSIIVKNGKYYACFSSEVESKLLSKTNKKVGIDLGLTSFLATSEGKLYQAPKTYRKSEKQLAKAQRKVSRRIKKSKRRKKAVILLAKQHEKVSNQRKDLAHRLAKELVEKYDGIAYEKLAIKNMVKNKYLAKSINDAG

SEQ ID NO: 56728 - protein, 376 aa, unknown
  TnpB Polypeptide
METKRAYKFRVYPTPEQAEMLAKTFGCARFAYNYMLRQRTNAWFQRQEKVGYHETSAMLTALKKQPDFLWLNEVSSVPVQQSLRHLQTAFGNFFARRNKYPTFKKKDGAQSAEYTTSAFKWDGKQLKIAKAGVLNIRFSRTIPKAAIVTTVTVSKDTAGRYFVSMLCTDQVQAKPTVESKVGIDLGLTHFAILSTGEKIASPKAFVTNEKKLAKAQRVLAKKQKGSANRKKAKLKVARLHAKIADTRKDFLHKLSTRLVNENQVIAIETLAVSNMQKNHCLAKSISDASWGEFVRQLEYKSLWYGRTLVGIDRWFPSSKRCNDCGYTVKKMPLNVREWVCPECGAIHDRDINAARNVMAAGLAVSALGESVIPVCM

SEQ ID NO: 56729 - protein, 369 aa, unknown
  TnpB Polypeptide
MLKAYKYRLYPNKEQEIQIQKTFSCCRFVYNQTLAYRRNLYETKKESLSKIDCNNWKNKTLKTEYLWLKEVDKFALDNAVINMDSAYQKFFKEHAGYPKFKSKRDNKKSYKTNFTNGNIEVSFENNRIKLPKLKWVKAKVHREFVGKIKSATISQVPSGKYFVSVLVETDHEVLPETSSIVGIDLGIKDLLITSDGEKFNNIRTIKKYENKLAKEQRKLSHKTKGSKNYQKQRIKLARVHEKIRNTRIDNLHKISHRLISENQVIVSEDLAVSNMVKNHNLAKAITDCGWYELTRQLTYKAEWNGRTYIKIGRYVPSSQLCNICGYVNKNTKDLSVREWICPKCGTKHDRDINAAKNILNEGLRLLEAA

SEQ ID NO: 56730 - protein, 408 aa, unknown
  TnpB Polypeptide
MKREVQITVVGKVFRPNKKKVLALNKTLQKYFRLVNWYLSFNSTSKTFLHRNTYEKAKQLFNLNTALIQTARDKAVEILKSFNKKKKEGKTKREKPKLKGISIRFDKRCYSFAKTTNKLTPYWLTLSLNRKKKVTLPIAFGERQRKFIEEALQGKWKFCTVEMVKKNGEWYAKFVLNKEVELIDEPETFIGVDLGEWNVATAISISKQNPKPIKGKFWSGAKIRKIRGKYAHIRRNLQRKKRLDLVKQVGHKEKRMVNQQLHIIANEIIAYAKQFEKPVIAMEKLNGIRENMNGSAKLNRRLHTWSFRKLQQYIEYKANLEGISVVYISPKDTSKRCHRCGHVAQVNGREFRCPKCGLIYNRDLNSAINIAHALTRGMGWGSCGPPKLPDEALAVKAGGTEEAICFSR

SEQ ID NO: 56731 - protein, 459 aa, Clostridium sp.
MIKTVKQYSYKLDNNILQELLFIGNKYKSVKNYVYSRFSGINSILLIDRHRKIRDEWVKTKFAEQWKLPARYWKLALSEAMGNIKTEWTNIKKRIKEQCKANNNLSNEDKHYINYILKFNDDYYEVLTNKSFEIPKIFKEKNLNYKYLNSLIKRYTRRYKGQIPYSKIGRTFSIDTGLYRYKDGYINITSTKKGRRLSIKLTDNNKYDRTMIVKRIDNKIEIHCPLKIKTKVNHNKENIIGIDKGYKYLFAVSSDEFYGEGLNNILSKETERLNKINSQRNRFWALYNQYLEQNNIKKANAIKENNLGKVKYNHNKKKHDQTVKSYINCSLNQLINIEKPTEIVMENLDFVNWNDRYPKSVKRKLSRWIKGYIRERLEYKCNYNSIKYTYINPAYTSKVCNVCGSFGKRDGDLFTCPKCGEIHSDTNASKNILKRKYDKEITLYTNYKKVKEILENRIN

SEQ ID NO: 56732 - protein, 599 aa, Microcoleus sp.
MYHQGSLFNDSAYAPEPLRGGKKKGKSKRTERLQVSDGTTSLQLSIFPLLNQLSCTPESAVEIKKPTFCDRLSFLSLVIPDVKSSKTSAADSISKGKVLSPYWNEFTQVTSEWLSLPQKIDCVDSASILSHGSHSEAGVKFWFSTIQHLVQKEKWLKICSPLFTFSVADCTAWANTKSRSLKTLTYRVYPKKETKKVWMLRIHANRKVYNNAIAYLNQHQGKFAYHTVDKKTNRPVVKTSGKQAFRSFCKTLGSEIIPEWCQNLGIAHALDNALFEAYTAWKQTEKQPTQVGKGNKAKPNPLAGLKLAKFRSIRDQKQTIQFDPGDYKNGHIMINASKKLDQPLWTGQDYCLINYDRAVEVTYNKGRWFVSMPVELELPEPKNGGKTIALDPGLRCFLTGFDGNSFTEFGKYDFGKIARLCQHLDKMQSKRDRLKGAKFSRLRYRLKQAMERVRTKIKNLRSEAHKQIGSYLARHYDVIYLPTFETSQMVVRGSRKLNSQSARAMMTWAFYQFSQTLEHLCNRYGSRLVRVTEEYTSKTCTKCGRVHQKLGGAKTFKCPSCGYEIPRDFNGALGIFLKALWDTTMLLDVSDERALFGLS

SEQ ID NO: 56733 - protein, 236 aa, unknown
  TnpB Polypeptide
MNNLMTVTSNVFSPILYNGRTAKAINQLYNKDRANIQSRLPFRKPAVDAPSYKHVNAVLRPYQTKTSKLLQGITKNRNLRIHDLFHKITTHLVNQLVENDVKVLIFGHNIGQKQDINLGSKTNQNFVSLPFTKLILMLQYKCERLGIRFIVTEESHTSKCSFLDLESIEHHDNYVGRRVKRGLFQSANGTCINADINGSLNIGRKYLTSMNQYSDQLHSELVAHMSNPRRVNIVLN

SEQ ID NO: 56734 - protein, 370 aa, unknown
  TnpB Polypeptide
MEYSYKFRIYPRPTQEVLIQKTFGCCRYVYNHFLAQRMAEYKSTGKAPTRFQQDKELTSMKKEILWLREVDATALQSSVQTLDAAYRNFFRQVKSGEKPGYPKFKSKKDHRRSYKSKCVGTNIKVVGNCIQLPKLGLVKCRVSKEVRGRILSATVSQNPSGKYFVAICCSDVDMKPLPSTGAVVGLDMGLKSFAINSDGVEYPNYKYLTKNLRKLACLQRQLSRKTKGSKRREKARVKVARLQEHIASQRQDTLHKLSAQIVRDYDLIAIEDLAPKNMVKSRSLARSISDASWGEFRRQLEYKAQWYEKQVVTVDRFYPSSQLCSACGTQWSGTKDLSVREWVCPVCGKLHDRDINAAKNILNEGLRLLA

SEQ ID NO: 56735 - protein, 209 aa, unknown
  TnpB Polypeptide
MSNGDFVEPLNPFKQEREKLAKLQRKLARQKKGSRNSRKTKRKIARLHRYIADSRRDFLHKTSTKIAKNHSIVYVEDLKVSNMSASAGGTKESPGKNVRQKSGLNRSILDQGWYSFFQMLSYKLERGGGKLIKVDPRNTSRTCPRCGFVSAENRKSQATFACIGCGYRSNADEVGAINILRAGRARLACGMSGAVRPLSAGTQRDLLQH

SEQ ID NO: 56736 - protein, 365 aa, Firmicutes sp.
MHRAYKYRIYPTIEQAELINKNIGCSRFIYNHFLALSISDKYLSYNEYAKRLTILKKAYPFLKEVESTSLQQTLRDLDSAYSRFFKKLAGFPKFKDKRCPKQSYRSQMVNGNIQIRENHIKLPKLSFVKFANSREVKGKILNVTISRTNTYKYYISICVDTEIEMIPRATGEIGIDLGLKDYLVTSDGLPVPNPKYFRKYEKQLGKAQRRLSKKNKGSKNYNKEKLKVALLHEKIAHTRRDFLHKLSTAIVAENQTIVVEGLKPGNMIKNKRLSKSIADASWGIFLDMLEYKSLWHDRKYIKIHTFFPSSQLCSSCGYQNKNMKKLHIRTWECPLCGEFHHRDENAAKNIKAEGLRVAFKTIADI

SEQ ID NO: 56737 - protein, 480 aa, Caldivirga sp.
VPRVVPFSSLDEPVGRYPTLFTTLGTPSSSTPKLKGSRKLRDENMRTVRLRLLPNGSQERRLRRIADAAARLWNELNYVRLVQFRVSGKIDFKGTEHEFYHRYKSVLGVNAGQVIRLNNSAWKSYFETLRLYKQGKLPRFYGKPSPPGFWKDKLLGKRALRILVRNDRYYIEPINGGEGYLVLKDWNLRVRYAGKIKWAGKQGTLIIKYEDNRWFAYVPIEVGSKPVKTNPKGYVKGIYEKVQIENLKGSNKAFIDIGLNNLFAVVFSHTDTAILIKGSTIKAEYYWWKREIGTYQSIRDWLKNHGFESWRKYHMFYLHAEYKQHERLRHYYRTAIRFLARIMHEMGVDEVFIGYPYLVNQDNGNEFNTNVWWFNKIVNWLKDVLQEYGIRLNVVNEYGTSKQCSICSMKHESGRVKRGLYVCESTEIKINADLNAARNIAKRIGYNTPIPRKILSYIVTTNGVKPLTPMEGVTVETPQD

SEQ ID NO: 56738 - protein, 408 aa, unknown
  TnpB Polypeptide
MNGYTNNMDSTRAYKFRIYPDTKRQNEIDERLILAQQFYNRILEKSIESYKNGEAKASMAQFNRFVKEVIQDDKRYLKLYSQTRCEIEYRLLKAYQNFFRRIKEGNKEAGFPRFKSITYPQDNGSFSIKRGRLRVSRIGTMRIELHRKIEGTIKTLSIKREGKDYYAIFTTANEIKIPQLDDTNPVGIDMGLHSFIAMSSGMKMEKPRFVRKRAKHLARWQRRIAKREKGSKRRENAKNHLQKEWEHVTEQSDDFSHKLSNKLVNSGYTSFAVEDLHIQKMAKNHNLAQAIYNASWNKFIQMLSYKAESAGMKVIKVDSRDTTQECSNCHHIKEGSERLTLGDRLYRCNVCGLTIDRDINASINILKRATLGQRGSHAQGESVRPQREAVLEELRTDKTHPLQDAVIA

SEQ ID NO: 56739 - protein, 403 aa, unknown
  TnpB Polypeptide
MKTAYKYRAYPSKEQKGTLNRQMYLSKELYNLLLEKSKSYYKETGKTLTEFRMNGWITKLKKEKPEFAEIHSQVLQNISKRVSDAYKHFFLRCKEKKQGKKVKAGFPRYKKFVSSLTYPQTNGFKIEKKKVELSKIGRINFVNHRNIEGGIKTLNIKKTKSQEWYITIAVEKEDKPFISNGKPRIGIDLGIMQYAALSDNTILQNAKITKHERKHSRALQQNISRKEKGSSNRRKAVTRFARYSEHISRIRLDCINNLSNELVNSYSFIAYEDLEINNMVKNHRYAKSINESSWGNFTQLLQYKAESAGCVAMKVNPQYTSMTCSKCGNVQSISISQRTFVCEKCGMSMDRDVNAAQNILKRALDSISPTTEGHSGSQARGDDIRPSAGEAVAYEAGTTWVAS

SEQ ID NO: 56740 - protein, 415 aa, unknown
  TnpB Polypeptide
MEMIRAYKFRIYPDAKRQKEIDLQLLLSKEFYNLLLEKSIKSYKGGNKKLSMSTLNKFAKEIEKDKRFLQIYSQVRCEIKYRVLKAYKNFFRRINEKKQGKKVKAGFPRFKSKDRYYSITYPQDNGSFSIKKKGKKHMLRVSKLSGRIEIESHRPIEGKIKTLTIKKKAEEYFAIFTTITETEPPKIEDTDPVGIDMGLHSFVTTSDGMKTEKPKFVRKPVKHIARWQRKIARREKGSERREKAKQHLQNEWEHVAEQSNDFARKLSSKLVNSGYTSFAVEGLHIQNMVKNHNLAQSIYNASWNRFIQMLSYKAESAGMKVIKVDAKDTTQECSNCHHIKEGNERLTLGDRIYHCNVCGLTIDRDINASINILKRATLGQRGSHAQREGVRPQREAVLEELRTDKTHPLQDAVTA

SEQ ID NO: 56741 - protein, 415 aa, unknown
  TnpB Polypeptide
MNGYTNNMDSTRAYKFRIYPDTKRQNEIDERLILAQQFYNKILEKSIESYKNGKAKASMAQFNRFVKEIIQDDKKYLKLYSQTRCEIEYRLLKAYQNFFRRIKEENRKAGFPRFKSRNRYKSITYPQYNGSFSIKRGRLRVSRIGTMRIELHRKIEGTIKTLAIKREGRNYYAVLTTINEIKTPQVEDTNPIGIDMGLNSFVAMSDGTKIEKPKFMQQERKRIAHWQRIVARRNKGSKRREKAKTHLQKTYEYSTNQSDDYLHKLSDRLVDSGYTSFAVEDLHIQNMVKNHRLAGSIQNASWNRFIQMLSYKAESAGMKVIKVDSRDTTQECSNCHHIKEGSERLTLGDRSYRCNVCGLEIDRDINASINILNRATTLGQRESHAQGESVRPQREAVLAELRTDKTHPLRDAVIA

SEQ ID NO: 56742 - protein, 418 aa, unknown
  TnpB Polypeptide
MNGYTNNMDSTRAYKFRIYPDTKRQNEIDERLILAQQFYNKILEKSIESYKNGKAKASMAQFNRFVKEIIQDDKKYLKLYSQTRCEIEYRLLKAYQNFFRRIKEGNRKAGFPRFRSRDRYKSITYPQYNGSFSIKRGRLRVSRIGTMRIELHRKIEGTIKTLAIKREGKDYYAIFTTANEIKIPQLKDTNPVGIDMGLHSFIGMSSRMKIEKPRFVRKRAKHLARWQRRIAKREKGSKRRENAKNHLQKEWEHVTEQSDDFSHKLSNKLVNSGYTSFAVEDLHIQNMAKNHNFAQAIYNASWNRFIQMLSYKAESAGMKVIRVDARNTTQECSNYHCIKEGGERLALKDRVYNCNRCGMQLDRDINASINILHRATTLGQRGSHAQGDMASAVQQELKSRIAELRTDKTHPLRDAVFA

SEQ ID NO: 56743 - protein, 370 aa, Paracoccus sp.
MIHLPVKSHGRFRSRSGDLAKTIQLIERPAGPRSIKLGRWTHRLADGRPGELVIGLVSDMKAAFREGRKAYAPRCKELCVDFGLRTMLATDQGDLLGRAWIEQLMWHDARISGLAAELQARSIRPNRSPRYRAMVESLRGYIETSVGQALNRLVAIRAPAHLVLERLDFRGADLSRRMNRLLTNCDRSVLRAKLKDLKERFGITSAEVNPAWSSQTCSCCGYVSKANCKAQDRFVCGACGTTIHADVNGSRNLGGGRSAFDRAARMTRAESLQATVIRHLERLGAAREGVVLDPALWRARTRARVIPERSAYVSNRYFGEALGSVIPDPGRIVERETPLARRLKSNRGASEPETVAAQPTQHLAADVSKG

SEQ ID NO: 56744 - protein, 406 aa, Nocardia sp.
VRTAYRCRAYPTDEQAVNLARTFGCVRKVWNEILEWRTKRYRVDAVRTNYAEADRHLTELKRRPELAFLNEVSAVPLQQTLRHQYKALTSFFARRSRYPRFKSRNSRQAATYTRAAFRWRGGTLWLAKQSEPLRFVWSWPDIDPATLSPSLVTVSRDADGCWYVTLQLDTDAPGELPATGAAVGLDVGINSFATTSDGDKIPNPRLMERKQRNLARYQRRMARTEKGSRNREKARRRVARAHARVRRARANFLHVTSTELIRRYDVVVVEDLNVSGMMRNHRVARAIGDCGWSTFRAMLGYKAEKWGRRFVVVDRYFPSSKTCSNCGHLLAQLSLKTRSWTCPSCRTRHDRDVNAAKNILAEGLSATACGADVRPGGLPSGDRPRSRKPDSRGLESGSVRAEGKSR

SEQ ID NO: 56745 - protein, 419 aa, Okeania sp.
MRTAYQYKLRPKKEQIATIEMWLELLRRQYNYRLGERFSWWEENRCPVNACPLVMPIPQLRDHPNYYSQKKDLVNTKDKFPEYKLIHSQVLQDCIKRVKFAFDRWLKTDKNGQKSGKPRFKGKGRYRSFTYPQIKLDCIEGHKINLPKIGKVKLIQHRPIPEGFIIKTVTITRKADGYYITLSLEDKSVPALSCEVEPTLKNTLGIDMGLKEFLVTSEGESVPIPQYYRKSQKRLKTLQKRLSRKKKGSKRWLKAVKAIAKQHKKVADKRKDFHFKTANSLLSKAEVIAHENLNIKGLAKTRLSKSINDAGWGQFLSILTVKAGNAGQKTIAVNPKNTSQDCSNCGEKVPKELNIRTHSCPHCGIVIDRDWNAAINIKNRAAGHSVLKARGARCSGRATKREAHTMRASERVGVCHHLT

SEQ ID NO: 56746 - protein, 417 aa, unknown
  TnpB Polypeptide
MKHMSDYKYHFGLKVRIYPNTTQKKIITASSNASRFVYNKMVEYSKEISAFGKPSIYIKVVEERIARLRQLKKYTTALKDTFPWLCAKEIDNLAIENAKQNYQKAWNLYWKVHGIAPPNYHKKSYEEKYQTSAQYDCNRIDIPNMINGRCKFSKKQIKIPFLGIIRYKGSSERIKKLMEMPEVRIGTITIIKDGCDDYYASFQLASDDMFVEELPKTGSQVGIDLNIRNFLADNEGNIVDNPHYFRRARKRLAKVKRKLGKRAARAKKENRALVTAKNYQKQRKIVAKITRSVMNRRRNFLHIQSRALINNNDLVVAEELRSKNMVKNHALASSIYDSSWRTFLNMMTYKSELYGRTFKTVNPRNTTQTCSNCGHILKGKDKLTLNDDDWTCPICREYHHRDVNAAKNILAKGLNVV

SEQ ID NO: 56747 - protein, 424 aa, Natrinema sp.
MTGAQALVKTLDFQLDIQSDNEGLLYDATLEARRVYNETIRLAKEGVDWDAIPDRVADDADLVKNTTQRVVAKALGAMENYYEYDDFGHPSHTKDGAYPLRANYEEGYNLSLTDDGDVAFRISAKPYKHIKGVLEGSDTHLGILKTALESDEWKIGTAEALFHNENAELHVNVTNTEQTVRDKQDSQTVVGLDVNEDNVALTALSADSVEDTLVIDFPEIKFERHRYFTMRKRVQNAGKDSIHDALEGREERFVRDRLHKVSRHIVEWSQQFERPCIVFEDLKEMRDSIDYGTRMNRRLHHLPFRALQFYTSYKAAFEGIPTAWINPGYTSQRCPLCGHTERANRNKKRFKCRSCSHQDHSDRGASINIAVKGMKKLDWNVPVLNSLPQVRKVRRQASGAVDAPTVTHDAVRGYQTDGVAGVSD

SEQ ID NO: 56748 - protein, 413 aa, unknown
  TnpB Polypeptide
MKQILKTYKFRLYPNEKQKILINKTFGCTRYIYNQMLFERKNVYENLKDNKEELKKYKYQTEKEFKQELEWLKEVDSIALQQSRIDLEMAYKNFFASQSGKRKGKKIGFPKFKSKKENRKTYRTTSTNNNIDIVFENKRLKLPKLKWVTYLDDRQFNGIIKNVTIEKTPTGKYFASILVEEYIEVNIHQVNSNSKCIGLDYDSKNLFTTNENKVGEYPRFYRMYEKKLAKQQRRLSRKQKGSNNRNKQRVKVAKVHEKIFNSRRDFHNKLSTMLVQNYDVIGIETLNMQAMSQCLNLAKSTLDNSWGYFVNMLEYKCGWYGKHLVFADKWYASTKTCNHCGYKNAELTLADREWDCPICHSHLNRDENAAINLMKYAQNTVGITEINASGDGVRLEEIQAVVCEGRSYKSKDL

SEQ ID NO: 56749 - protein, 438 aa, unknown
  TnpB Polypeptide
LNRKSSDITQRAIQFVFKPGKREAVILGCLTYAASKLWNVANYERASWTAESGEKYPDWFEQKSRLKGSFWYRNLPSQSAQEVLKQLDEAWRSYYTLKETGGVRNPGRPGYKHSNFNVRYLNNGFAVMGGRIRLSIPKQQKAYLQQHGIEADFMYIPIPDEYRGYQGNTKVVEIMPANGAYRVNIIVELPEQGMKQDNGIYMGIDLGVNNLITCYISTGKSFIISGRQLLSMNRYYEKTIGHYRSITYADQSARGVKYPKDSRRIKRLYEKRRKQTAHLLHTATKHVMGVAEQENVSRIIIGDITHIRDNRDMGRKNNQKFHQWPYARIQDMLVYKAEDRGIAADRQEESYTSQCSPYASEVSEAAADKSNRRHRGLYITDKMAFNADCVGAYNILKKYLCRTGRPSPAVVGLDTPDAYRWDYHKFIGSSKLTISMAM

SEQ ID NO: 56750 - protein, 464 aa, unknown
  TnpB Polypeptide
MVRTYLLQSGMNKGKRDKVLSVLEEYRILCGKIAKLQWYNFFKKGEKFNRNIDLKPLQSTLSERYKRNSAYQVVGCLNSFLSNVQNKFKEIVYGSKLSEETRKHLFQINKRQIWLSKEHELFSSEELFLAKKIFKQILGWRRKPNFEHQNMLLNSNVAKIFPVDKTKTTEFDFWVQLSTLQSGKPIMLPLKSNKYFDEKAGEICEAIQINVNKRGELTTSLMKEMQQQETEFKEEKIAIDIGLRTLFALNNGELYGRNFIDRLKHYDNIITKLAKNRQQQGFKTRSKRYDLLVFRFRAWIKNEVNRTLNRIWRKHKPKGIVIENLNFSHPDLSKQMNRLLRNFGKSIIEEKLKSLEENYGTKITKINPAYTSQTCADCGYVSKENRKAQDKFECENCNKKVHADVGGARNHFHRSSMKNITLHTHKNSVLRKLVMGFVERIPRPNSWADGLLSENPYFKEVWKI

SEQ ID NO: 56751 - protein, 444 aa, Hyellaceae sp.
MILNYVYRIYADSNQIDLLNEWLETCRLSYNYALRELKDWIASRKCPIDRCSLESEYIMSADYPFPSYHQQQNNLPKAKKQFPRLKVVPSQVLQTNIRRLHDAWDFFQKRGYGFPRFKKYGQMKSILFPQFKTNPLTCSGEHRRCKATSARSSVRQIQLPKLGKVQINLHRPIPDGFAIKQVRVVKKAVGWFAVVAIESDIALASPVPHGHDLGVDVGLLSYVATSDGFIESRPKFFKTAYSRLKVLQKRLSRKIKRGRNYEKARIKVAKQHNHIAFKRTDYQFKLAHKLCNIANTIFVEDCDFRIMAKGMLGKHTIDASFGQFRTILEYVAKKRDVFVGRVDHRGTSQTCPNCRTEVRKDLSVRLHECHECGYVVDRDIASAQEICNRGQETYRGTPEKQEIASQVVLSGNFVLDKWRNPAFAGRGGMPNSDIGKPTLYCASN

SEQ ID NO: 56752 - protein, 354 aa, unknown
  TnpB Polypeptide
MTRSLKLTLKFANPGKQKQLDDLWSAYKQTVKGFLDCLFAGQGLSEDYLKSYESPLSYRYKQCAKRQAFKIFKTWCRNKNKRKSKPQLRVPAMTLDYRFIDVQPSENSSFDYWIKIATLFKGKPILIPVKSYNYLNQYLTDWQLLNGGKLIKQNGQWVLILSFKKSTPELKQSGKTVGLDIGYRKLGVTSEGQVIGQNLRELINKADRKQQGSKGYDKAKLEIKNYINREIKMVFNDDLQCLVVEDLKNLKQDKHGVWSKTVNRKFNFWLYGHTLSRVTQLSEISGVLNPKINPRNTSRGCAKCHFISELNRKGEYFKCLQCGHEDDADHNASLNILSRFTQANIAPVSSKPFL

SEQ ID NO: 56753 - protein, 227 aa, Crocosphaera sp.
MEVPDAETVKNWIGVDRGQNQIAVASLPNGFGKFWNGRQIKHLRRRYQKLRKQLQKANKRKVIKRLESKERRIITYINHCISKQLVQLAKDYGMGLRFEDLSKIRHTSKQSKRVRSDAGNSRHTWSYFQLETLTRYKAIKNGVPFELIPAPYTSKSDHRNGVIGKRNGHFFRGFDGYQCNSDWNASQNIGHPNFSQNLRSPNTEALQEVGLNRAIADFPNQQSVVRF

SEQ ID NO: 56754 - protein, 388 aa, unknown
  TnpB Polypeptide
MLKHKTFKYRIYPNKEQQVLISKTIGRSRFEFNYLLNSWQVLYETTGSGLSYHKCSTILTGLKKQEDTVWMNEVDSIALQTSVRNLADGFDRFFKKQNGKPRFKSKKNPVQSYTTKFVNNNIRLEDHRLKLPKLGWVSISQSRKLEGRIINATISRKSSGKYFVAILCETDIEELPKTGSSVGVDVGIKDFAVLSDGEAFPNMKYYEKSQEKLKKEQQILSRRQRLALSKGIELSEAKNYQKQRIKVARIHETIENQRSDFLHKLSTKIVKNHDIIGMESLDIAQMLQNKELSKQIGDVSWAKFKEQIRYKADWYGKTLVEVEKSFPASQLCHVCGHKNTQVKDLSVRQWTCPDCHTSHDRDVNASINIKKEALRIVASETAGTAGIA

SEQ ID NO: 56755 - protein, 493 aa, unknown
  TnpB Polypeptide
MKKEATPNIIFAVKYRINANKSGTHFLNKSFAASRKYWNWQVARQMENWNTRNERTEEWKKSGGEKYLQDLKDKMKKDLADGVYEEKSDEHKAIQKEIRCSGFPLLDVAQADKDFRKMRSGDDEEYNWIGETPSRLIGGQYKRMAVAFREGFKKRKVKGFWKSKKDFAKKPNKGFPRFRSYVDNQYFDCEANQMKWDWETNRLKLPLCDTWIKFKQHIDMKGLLEEYPNAKLGTCVFTRTPTNKLYVFIPVDTGVPMPEKKEYDESNTVGIDVGIRNYITLSDESKIENSTFLEKFGLDFSDEKLSPYKTDPKLTRQKKIRQRRLGRKKFKSKNYAKQKTACAKVDEKIKNKRDDFTHELSRSLANMPFDAFGVEDLDINQMKAKKAPVKGKKKGSYERNGQAQKRNLNRRINDVAWGSFFTKFKYKLDHCGKSMIRIDQYEPSSKKCTCGYINRDLKLSQSFWDCPDCGSKNDRDKLAAFNIKNYALGGLND

SEQ ID NO: 56756 - protein, 384 aa, unknown
  TnpB Polypeptide
VHGTTKNPNPKYPQINRAFHKFPSYLRRAAIMFAVGQVSSYMTRYRDWQSGQSRNKRDAKPPILNPDAGCYPALYKGQCFKLHGLDPVEIKVFTGTDWIWITIPIISLRERHNVSTNQIKSPSLIVNDKSCHLSVPFECHPERVKGAGVVVAVDLGINTTATVSVVSRDGTVIHREFIHPGRDIDRRDKRLKSVSQRAKKTMGACGKLGKGFCKNTYRKCRNINQQIGHIVSKRITQIAQNYSADAIVFEDLKGWKPKGGKKRSNLKQRFHGWLKSLIAELTQRKWAELGGKTITVIAAYTSKLAYDGSGQVKRDNKNYALATFSSGKRYNCDLNGSYNIAARGWLKLDSRKDYEKRPSKNSGRLPGSWACLCDLWAVGSLRLA

SEQ ID NO: 56757 - protein, 412 aa, unknown
  TnpB Polypeptide
MNLTFEYKLEPTIAQAAEMDEWLEICRQVYNYSLAERRDWMKSRKCDINACSINREYIILADAPKITYASQCKSLTQAKKSYPELTTVYSQVLQQVLNTVEKAFVGMWEQGRGFPRFKKPGRMRSFLFPQFAASPVKALEIELPKLGRIRIRLHRPIPEGFVVKQARVVKRASGWYVMLSLLCEVAVPDVSPHGHSLGLDVGLDAFVATSDGELIDRPRFFVDAQHKLKLLNRDVAKKQKGSKNQQKARHKVARLYEKIANQRKAFHIRTAHHLCDIAQTIYAENLNLKGLAAGMLAKHCLDAGWGMFLNILKWVSYKRGVYFEKVDARGTSQLCPACDVEVPKDLSDRIHECPECNYKTNRDVASAQVVLKRGIAAAGHAVKKSVEQGEETKPALKQKRSVAKSRSPRRPV

SEQ ID NO: 56758 - protein, 554 aa, unknown
  TnpB Polypeptide
MPRKTTPSFITELPLIVTSQDEKELKARFNAGMRLLNACLNEANIRMKLVRNSEAFKQALKLTKIVQGKDRNPVANPERIKAFAQARAAARFTEYELHSFATVVANESKWIAEKLDANTQREFGGESTLSPDTRQKLATRAFNAVEKVLLGKAKSFRYKVHSRFRSMEGKTNKQGLRWKDECLVWGQLKLKPLIERNDPVILHGLNHRVKYVRLIRKELGGGTRWYIQLINEGTPYQKPKNPVGDELVGIDLNISNLAVVGDTHAELMPFACGVPTYQKEIAALQRQMQRSQRMNNPDNYELDFLARVGRKIIKKKGKSKKGNKGLKRGDKRLWNHSRRYKQLKKRKRNLERRKTAYAKSQNRQLVNIVLKIGKFIKAENVCVKGWQKRYGKAIGAKSPGFVQSELKRKAEKADGKFETFSTTKTALSQTHLDGSRQKKSLSQRIHYDVTGIVMHRDLFSAYLARYVQEDQLDADTARERYAGLEPILVGAFQRYESKSASTAASPRSGVKPLEQIPRKDELLCQIAGFPCGSLGEKLKLKSSVSPFLEEPPGF

SEQ ID NO: 56759 - protein, 454 aa, Moorea sp.
MQLGYVYKLIPSSQQEVVMNQWLAMLLAQYNYLLRDRTESYEQVKSPKMGDYCDLKTHREACPLTCSVNKSTSIGYPWKKSQNNPRRSTYEVQSSTLPTLKKERPWYNKINSTVLQQMLRQLDTAFSKFFKGEAQYPKPKRRSRYRSFKYAPGQVKIDGNKIYLPGIGWMRFHNSRPIPEGFTMKSVTVRRKSRGWFVSIQIEDKSVPLLPVKSANEIRPNRVKGCDLGIRKLVSTSDGKTIQNPANTKKYKRQARRLKLRQRSASRKLKGSNNRKKSFNKVASLHERIANSRSAYHWETAKNLVDSADALVFEDLNIKGMKSRCKPKPNENGGYVRNGQSAKRGLNRVISDAAWGELVKKVEVVAAKSGIPVIKVNPRHTSQQCPKCHHTSADNRSGEKFVCTECGYHDDADINGGVNIRNRGLKKLGIDPTQLPSVRSRSVAYGQGKSRPWR

SEQ ID NO: 56760 - protein, 388 aa, Moorea sp.
VSGSQVVHSGELLDFTRVPANTLQDVCKRADLAFSRFIKGDCNGSRSGKPRFKNQARYRTLKIDGKDCFSVARIERKWIWLKISKLKGWLKVRLHRPLPDGFKIKNILITKKTDGWYTTLCLEDSTVPAFTPESVIPTWDNSIGLDAVLYGDDYLATSENTKLPSLKSYRNNHSDLEKVQTKKNAKTKGSKARRKLQSREARIHQRIARSRKDHAYKTAHVLVRTGKKVFYYENLNLTGLNKRNKPKPDGKGGYLPNGQSAKSGLNKSWLDAGFGQFFEVLDYIAGKAGAVTKKCNPAYTSQLLSYRDEFVFTDCDLREYWDEQEMLLVDRDVNAAINLKRVGLGVFPTIKRRKGNPVINSSITNSTSKEVLVALRSARSLHLTDSEV

SEQ ID NO: 56761 - protein, 411 aa, Moorea sp.
MLTLTYEYKLVPTKKQIAIIEEMLVVCRKVWNYALRERKDWYNSRKCSINYCSLQQEFIISANAPYPGYKEQSANLTKAKKSNPELKSVNAQVLQQVLKTLDKAFTSMKSKGYGFPRFKNKYRMRSFVFPQFKANPVVNDWIKLPQIGWVKMRLSRPILEGVKIKQVRVVRRASGYFAMLSLQSEVSVPDIPARGHPIGIDVGLDKFLATSDNELIERPRFLTKLHSKLKLLQRRLKLKKKGSKNRHKLNRKIARLHQKISDTRKDFHFKLAHHFCDQAGMIFVEDLDFRTWAKGMLGKHTLDAGFGQFFIILAWVCWKRGVYFGKVDYRYTSQICPNCGMHTGKKDLSERIHKCSECSFEINRDVAAAQVICQRGIAAVGQIVEKIDCVGGLSGVGNNLDKCHKSSKPRS

SEQ ID NO: 56762 - protein, 404 aa, Moorea sp.
MKARYRYRIYPIPGQQMALAKLFGCVRVVFNDALAFCINQYKSGEKKPKNSELQKQFITEAKRTAEREWLSDVSCVPLQQSLNDLEQAYQNFFKSCNRQRKGKPVKPPKFKKRHAKQSARFTQRGFSLRGDCLKIAKVGKLKVVWSRPLPAEPSSVTIVKDAANRYFASFVVETAPEALPKIQTSVGIDLGIKIFATFDDGIHIDAPKPLKKKINRLRRLSKNLSRKNRGSKRYELARKRKARLQAKLKDTRTDFLHKLSTQIIRENQTIVLEDLNVAGMLRNRKLSRAISDLGWRQFRTYLQGKAEKYGREFRVISRWEPTSQTCSCCGFRGGKLDLSVREWTCLNCGTKHDRDVNAAKNILVAGGHSETKNGRGDRRKTSVKGAAVKEASTRREYVQLSLFD

SEQ ID NO: 56763 - protein, 272 aa, unknown
  TnpB Polypeptide
MAQQILKEVDGSFKSFFGLLKEAKQGKHALKDCRLPRYLPKDGYTTLVIGFVRLKGNKLILPYSNSFKKTHKAVEITIPPILLDKKVKEIRIIPKADARFFEIQYIYEAECIQRNLNTTNALALDLGINNLVTGVSSKGETFIIDGRRLKSINQWFNKKNARLQSIKDKQHFGKKTTNRQKAIARRRNNRINDYMNKTARRVIDYCIDHDIGTLVVGYNETFQKDSNIGKRNNQIFINIPYGKLIDKLKYLCELNDIILVMQEESYTSKASF

SEQ ID NO: 56764 - protein, 400 aa, unknown
  TnpB Polypeptide
MRKGVNQIIKSIKVRLSPNNKQLTKLFQYAGSARFAYNWAIAREQDNYKQGNKFLSEGELRKEFTQLKKQFEYQWLNEVSNNVTKQAIKDACEAYKRFFRGQCKYPKFKSKKRSTPSFYQSNDRIQFTSTHVKVEGFPMSKKSNKQKLNWIKLCEKGRIPTDYKYLNPRFTYDGLYWYVSVSIEVEDNNTFSPSNEGIGIDLGIKDLAICSDGNTYKNINKARKVKKLEKKKRRLQRSVSRRYEKNKKGESYCKTSNIIKREKELLRITKRLTNIRQNYLHQITSEIVKREPSFICIEDLNVSGMMKNKHLSKAVQQQKFYDFRRQIEYKAKWNNIQVIIADRFFPSSKLCSCCGNIKKDLKLSDRIYKCECGNVIDRDYQAALNLKIYGENVLKAQSVT

SEQ ID NO: 56765 - protein, 171 aa, Roseburia sp.
PTNKQKANTRNRNNKINDYMNKTARTIIDYCINNDIGTLVVGYNETFQKNSNIGQANNQTFVNIPYGQLRFKLEYLCEINGIVFVKQEESYTSKASFWDKDDIPIYNNDNPQSYTFSGKRIHRGMYQCLNGKCLNADVNGALNILRKSNVVSLVELYSRGEVDTPVRIRIA

SEQ ID NO: 56766 - protein, 333 aa, Streptomyces sp.
VHAVSWASDASPKKKVLAGSSMPSWALRRSSSACRVRFRWTKDLPVGKRAGSEHRITGARLVRDALGWHIAFRVQTLEAAPEPHQGPEVGIDAGVNLPLALSDGNHHDHGRPPRLPDGTVDRDKWLTLREKAKLLGLERRAAQRKQHRGRGEKTSRRLQHTYDQIKQLRAKATRRAVDWQHKTTTAIAKQYGTIVVEALTITNMVKSAKGTIDKPGQNVAQKSGLNRSISQEAWGRTVTMLTYKTARQGGTLHKVPAPGTSLRCSACGITTPGSRQDQATFVCKNPDCGWSGNADHNAARNVLHLYRIGHALIPAAGRAVVRRPRGVKPATAR

SEQ ID NO: 56767 - protein, 393 aa, unknown
  TnpB Polypeptide
MYFVGMLINKTYEFRIYPTKEQATLLAVHFGQARFVYNYFLRKRIDFYAANAGSEKQGLNYYDTANMLTELKKQPDTAWLQESNAQVLQQSLRHLDVAYNNFFNKHAQFPSFKRKQARQSLTVPQGFKFNPCQGTLTIPKITPFKIVAHRNIEEMIKHVIIKKNPSGKYFASILCETQKDIKPKETGGQIGIDLGLKSFLVTSENEKVSTPQFLRASEDKLKLAQRRLSRKQKGSANRAKAQHKVTLIHEKISNQRNDFLHKLSHRLISENQALFAEDLNVKEIMANHHLAKSVADAGWSEFIRQVKYKSEWNGVHFCQIDRFFPSSKRCHTCGWINQSLTLKDREWTCQGCGHVLDRDCNAAQNILLFGAKQIGSERPESTLSEKRRTKALH

SEQ ID NO: 56768 - protein, 429 aa, unknown
  TnpB Polypeptide
MQRLQAFKFELMPNGQQARQMRRFAGSCRFVYNKALALQKERYERGEKKLGYAGLCKLLTEWRNSAEMAWLADAPIHPLQQTLKDLERAYSNFFAKRADFPCFKKKCRSDSFRYPDPKQIKLDQANGRLFLPKLGWLRVRFSRVVLGTVKNVTVSQSCGKWFVSIQTEREVEQPIPQGGAVGIDMGIARFVTLSDGTFYAPLNSFKRHEDRLRKAQRAMSRKQKFSNNWKKAKARVQRIHSRIANARRDYLHKISTAISQNHAMVCIEDLQVRSMSKSAAGTADAPGRNVRAKSGLNKSILDQGWFEFRRQLEYKLVWNGGYLIAVPPQNTSRTCPCCGHISADNRQTQAKFECVECGFDENADVIGAINILSRGMRMLRDEGTDTTDASVGMRAGCLPVSARMACESNRTGGRKQEPTETTTHGVIPA

SEQ ID NO: 56769 - protein, 394 aa, unknown
  TnpB Polypeptide
LFADNRRCSYRDNSEIHRKSRQVIIVNKAYRYRLYPTTEQKIMFAKTFGCARFIYNKMLGDRLDHYKETGKKLNNTPAQYKSEFPWLKEVDSLALANAQLNLNKAYNNFGANRKHFGKPRFKSKKTGHFSYSTNNQKGSVRLEGNTVKLPKIGWVKLCLHRPLMENSTIKTVTIRKTPSGKYYISILVEYEKQILPIIPKKFLGLDFAMHGLYVASDEDDADYPNFLRKAEKRLAKAQRWLSKRHKGSHNRDKQRLRVAILHEKTANQRRDFLYKKARYLADRYDAVGIEDICVKAMSKRKKGGKFSFGKSVADNGWNKFVNILEYKLTWQGKQLIKIDKWYPSSQLCHVCGYRNNETKDLSIRKWDCPNCGSHHNRDKNAAINIREEAKRMFA

SEQ ID NO: 56770 - protein, 303 aa, Leptolyngbya sp.
MKQRGYGFPRFKKFGQFKSVLFPQIDNDAIQGNEIKLPKLGKVAINLHRSIPDGFKVKTARVIRKASGWYVALLIQADVSVPEPMPHGHASGIDVGLEYFLSTSDGEQVKRPRFFNQLQRKLKSLQRRLKNKQKGSSNRRNLIQKIGRVHERIANCRSDFHFKLAHHLCDHAGMILVEDLDFRIMAKGMLAQHTLDAGLGQFVNHVLPWVCWKRDVYYGKVDPNGTSQECPDCGAVVKKDLSVRMHHCPECGSVKPRDVASGQVIRNRGLSAAVGYAAKENVCGVEVAGALPSQLAMKQKLES

SEQ ID NO: 56771 - protein, 210 aa, Leptolyngbya sp.
MDSVLTVACKLEVKEEQVAKLDATLVSFAEACNYINQSVDPRLTNKPRIQGLVYNHIRRDYRLSANLAVRAIARVASNRKTAKQKGKPVKAFKPTSVDYDARIFSFREKDWTASLTLVTGRERFKLLIGNYQRSLLKGRVPTSATLCKRKDGTYYINIQIKDDVPDAPIRDDVIGVDFGRRDIAVTSEGDRWTCSLSYDATGLLKARPVA

SEQ ID NO: 56772 - protein, 415 aa, Pantoea sp.
MQRLQAFKYELRPDGQQARQMARFAGSCRFVFNKALALQKTNHEAGGKFIGYVAMAKELTAWRNSSETPWLKDAPVHPLQHAIKNLERAYKNFFAKRAGFPRFAKKGQRDSLRYPDAKQIKLDQANARIFLPKLGWLRYRNSRDVLGTVRNATVSLSGSRWFVSIQTEREVEQPTSHSTSAVGIDMGLARFATMSDGSYLEPLWSFKKHEIRLRRYQRAMSRKTKFSNNWKKAKAKVQRLHTRIGNCRRDYLHKATTTISQNHAMVCIEDLQVRNMSKSAAGNADKPGKSVRAKSGLNKAILDQGWFEFRRQLDYKLAWAGGWLIAVPPHNTSRTCPACGHIHADNRKTQAKFACVECGHEDHADVVGAINILARGHRVAACGEDVSRAKPARAKRAASAKQEPTEAIQAGFVHA

SEQ ID NO: 56773 - protein, 391 aa, Microcoleus sp.
MANKGYKFRLYPTPEQESYLAKCFGCSRFVYNHFLRLTTDTYAESKQHLKYGDTAKLLTTLKKDEHFSWLTEVNSQSLQQSLKDLESAFVRFFKKLGNFPVFKKKRNRQSFRVPQHWSITSDGMLKLPKMQPIKMVQHREMEGTPSSVTISKTPTGKYYASIWVEYEPHEAPLNGGKIGADLGLKDFLITSEGKKYPNPRFYKRALKRLKRLQRSFSRKVKGSNNRNKQRHLVARAHEKVANQRLDMQHKLSLQLTCDNQVVAVEDLHIKGMVKNHKLAQALFDASWGQFLTMLEYKGKLYGCEIRKLDRFFPSSKRCSKCGYIHENLTLHVREWICPECDTHHDRDINASTNILIFSDPQIRQELPKSTPKEPVERRGHQGGYSLGLGSP

SEQ ID NO: 56774 - protein, 384 aa, Microcoleus sp.
MHGIIKDMKTLKFKLYSHKRNKYLKRTISAAGVIYNHCIALHRRYYRMWGQHLPSRQLQKHIAKLRKRNPLWQLVGSQAVQDICQRIDKAYHLFFKHHKKGVKPPSFKKVKKYKSFTLKQAGYKFLGGNRVKIGSRVYQYWNSREIEGTVKTLTIKRTALGELFMVVVVDGYSTAEVTFETGKIAGFDFGLKAFLTCSEGFKVESPEFLKSSLNVLQKASKQHSKKQKGSNNRRLARKHLVRCHEAISNRRRDWFWKLAHKLTDQFDLLCFETLNLKGMQRLWGRKVSDLALGDFLQILEWVAKNKGKRVIYIDRWYPSSKTCSCCGHILDELDLSVRRWRCLSCHSVNDRDENAALNIKRVGSSTLGLGDVRQELLLQSLLDA

SEQ ID NO: 56775 - protein, 295 aa, unknown
  TnpB Polypeptide
MSGKDHIAVRFRAYPTEEQARQIDRTIGCARLVYNLMLETRIAHYQTFWESCRPTPAQYKDAFPFLREVDSMALCNAQLALEKAYKRFFEDRNTGFPKYKSKHHGKKSYITNRIGNNIRLDDNARRLKLPKLGWLAIRQHKRIPDSWNLKSVTMEHCPSGRYTATILFERETQTPEQVEPVRIVGLDYASHGLYVSSDGKKAEYPGYYRKTQDKLAREQRRLSRMVEGSANGTGRNNEWQTIGEDRRPAARLAAQEGQRDCGSLRHRWPSETAEPRKALPQNPSRNPTPTIPDIS

SEQ ID NO: 56776 - protein, 410 aa, unknown
  TnpB Polypeptide
MSTKTVKRAYRFRFYPTTEQENMLRRTLGCCRKVYNMALDARSTAWTLHREKVGYADTSRMLTAWKKTEEHSYLKEVSSVPLQQSLRHLQAAFKRFFDKTGSYPRFKAKHEGGSATYTVSAFTWDWERRALTLAKMHDPLPVRWSRTLPRKSRPSSVTVSLDAAGRWHVSILVEDEIRQHTKNGNMVGIDMGLEHFAILSNGEKIDNPRYLRKHLRKLGLAQRKLARKKKGSSNYRKARLKAAKAYAKVKDSRIDFLHKLSTRIIRENQTVVIEDLAVKNMSRRCKPKTDPDNPGQYLHNGQKAKSGLNKSIRDSKLETITHHARIQGRMVRTPTHGHRPMVSQQPNLPHVRQKHRQEDIGRQNMGMPILPYHARPRPERRRKHTIRRTGGSSLRGFTPHRSDTPVNKKT

SEQ ID NO: 56777 - protein, 282 aa, Leptolyngbya sp.
MSSKAFKYRFYPTAEQENLLRRTLGCARLVYNKALSVRTEAWYGEQKRVSYSDTSKLLTSWKKEAELSFLNEVSSVALQQGLRHLQGAFTHFFAGRAKYPNFRQKRNGGSAEFTKSAFKYTGGQVYLAKCAQPLPIRWSRFLPANAEPSTITVKLSPAGRWTVSLLVDVDIEPLPKSDNQIGIDLGITSLMTLSTGEKVANPKGFKAKFCKLRKAQKALSRKVKGSNNRHKARLRVARVHAEIADARKDLLHKLTTRLPIDCRRGLGCEEPDEKPQASSGDQ

SEQ ID NO: 56778 - protein, 417 aa, Pseudomonas sp.
MMKRLQAYKFRLEPTFQQRILLRKFAGCVRVVWNKGLALQQARYQAGEKKLGYAGLCKELTAWRNDPETPWLAEASVDVEQQILRDLETAYKRFFDKLSDFPRFKKKGARDSFRFPQPKSIRLDQAGERILLPKLGWLNYRRSRKVQGLVRNVTVSLKAGHWYVSIQTERKVAEPCHPATTVAGIDLGVVRFATLWDGQKETVIQPLSSFKRHEVRLAKAQRQMSRKVKFSSNWKRAKARVQRIHSQIANARNDFLHKTSHIISKNHAMIVVEDLQVKNMSRSASGNLVEPGRNVRAKSGLNKSILDQGWGEFGRQLDYKSAWKGGWLVAVPPANTSRECPVCGHTCAENRKSQSVFLCVACGHTENADLVASKNIRGRGLNSPKARTIGRIACEVRGVSVPPAAGTHRSEQPAHAD

SEQ ID NO: 56779 - protein, 555 aa, Streptomyces sp.
VGGLRSLAKPFVATGPSGASVRTRLKHLTPQDEKVLELVGAHLGALASKDLKARCAHGLEHSADTWAARKRELTAMSSSRWAGSITKATHDQWALARRCQSAHIQGLQAGIATITHRLSLPVGQKGSKKTPGGYRSRQQWHAKTRRLHVLEDRLAAEQSDREAGIVHVVRGGKRLARTRHHLDTAQLTEHQWRRQWKAERWFLTADGESGKRYGNETIRVSPQGEVSIRLPAPLADMANAKHGRYVLAARVSFPHRGQEWADRVEANRAVAYRILPHSRLRSSGGTPIDVTRARWYLTASWQYPPTQTIPLQAALAEGVIGVDTNADHLAAWRLDVHGNPIGTPRRFFYDLSGTAQHRDAQVRHALTRLLNWAKTCGVTAIAVEDLDFGAEKTREKHGRKKRFRQLISGMPTGKLRARLTSMADHTGIAIIAVDPAYTSRWGAQHWQRPLTSKNRTTTRHDAAAVAIGRRAQGHPIRRRTAPPHPDRSDRRGHRTVQARPEVPGREETRPRIPGPRTRCVPPGCGANAGDQNAQHRSGRSAEHASWQQDSLPLSL

SEQ ID NO: 56780 - protein, 376 aa, Orenia sp.
MIKSIKIRLKPTKEQEILMFKSVGCARFAYNWGLARWRDMNKQGIKPSKLKISKEFTKMKKKEEYKWLYEVSAQVTAQAFEDLNVAYQNFFKGKANKPKFKTKRKSKKSFYVRYDAVYFKNSKVNMEKIGKVEYSTNYDIPDLDKYINPRCYFDGKYWYLTLGFEHGENQVKLSKDLSVGIDLGIKELAVVSCLKKPIKNINKSSKIRKLKKKLKRLQKQVSRKYEMNKQGNEFVKTKNIIKLEKQIKLVYRKLANIRLNYIHQATNKIVKLKPYRVVMEDINITGMMKNKHLSKAIQEQKLYEFIRQMKYKCEFNGIEFIQVDRFYPSSKTCSECGSVKKDLKLSDRVYKCSKCGLEIDRDKNASINLANYEELA

SEQ ID NO: 56781 - protein, 364 aa, Orenia sp.
VIDLNEKHHITIHHIKLYKLSKIKQKQLEYFLKNWNKAIRSALKIVKHWGFTSYTKSHKHTYRVSRNNFNLPSQVAVEANRKAIETYKSAENAEFHRQVEVSLVNNKGFELVNKDGRYIAKIPIEGRKSIYCPLAFGEYQLNKIENPNYKLKTAKLYKYNDEWYLDLIMEYNQPKRETDTILGIDLGIVKLATFSIIDSKENILHQECMSGQELRFKRMRYKHKRKAKARSSGSKATSLIAENRLCKELNFKIANRIVELADKHNSLIVFEDLKNIRKNVTNDNNLNNYEKNSWAFYQLKQLIKHKADLLGIPYQDINPKDTSQICSVCGKKGFRLSQNRFLCDNLHLQNADFNASINIAKRAI

SEQ ID NO: 56782 - protein, 265 aa, Bacillus sp.
MNAKGNRMAMSFSDNGKLFNTKLGEIDILLHRPLEGRIKQLIIKRQGKRWYSIFCVERQVIPANINANNAVGMDVGLNKYAVLSNGTEYDNPRFLRKKEKQLKKAQRKISEKKKGSANYIGQVQRVRQLHVKVANQRKDFLHKLSYNLAIDYSVIAVENLNIRNMIRNRKISKSISDAGWGMFRNMLAYKCEKNGGVLIKVEQKFTSQDCSYCNNRVKKSLSIRTHICQKCGVVLDRDYNAAKNILQKAIEELLVTVGQGCVRTV

SEQ ID NO: 56783 - protein, 437 aa, unknown
  TnpB Polypeptide
MPIVAGAAQSTWPPPPVPLSRTGTHSLQPTGAGAPALYPQGESRAECALTKYNRAMTQVLTVSCKLKVSQSQAAKLDATLAALSLRDANANVQALNWVNQNTPEKVVNAVKLQSLCYREIRARFGLSSNLARTTSRLHDQQVCRQLAGARKVARQKNRPVKEFKGGFATYDARIFSFREKDWTVSLTTVEGRERFELAIGRYQREQLAGSNPKKTSGPLTRTATLVKRKDGSYFIQICVETEPSPPQRPDRVLGVDLGRTDIAHTSEGDNWHGQQLSQVRERYSRLRATLQRKASKGTRSSRRRCRGLLQRLSGREKRFQSRQRCVAKTWVNHRISKAIVSRAKATNSAIALEDLTGIRERINQQPRSKAERRRANSWAFYQLRQFLEYKALRAGVALILVPPAYTSQTCHRCLRIHPDLEQSYRVFASALRSNSVA

SEQ ID NO: 56784 - protein, 176 aa, Streptomyces sp.
VAGKVKTISVKREGKRWYVVLTAEQAQPEPLPKTGSMVGIDLGIANFLTTSNGEHVPNPRHGRKAAAKLEATQQALARYPRVGRDKRSANHQRAVIKVADLHRKVRRQRLDHAHKTALGLVRAHGLIAHEDLKIRNMSKALARKPDPEQPGTFLPNGAAAKAGLNKSINDAGWGCS

SEQ ID NO: 56785 - protein, 446 aa, Chloroflexus sp.
MQRTHTIARCPTPEQVDSFKRACGTARRVWNWALNEWNRQYAAGGRPNAMALKKQFNAITYTDPQWLDESGRPWVQDMHRDAHAQPFRNLANAWERFFADLREGKEAHEPRLKKKGRCRDSLYVANDTFTLMGKTIRLPRIGDVAMTEELRFAGTMLGATVSRTADRWFVAIQVEVPDAQCYRRRTSHEVNGVDLGIKAAATISSGEVVEAPKPLKAALRRLNIRSRRLSRKLQAAKKAAGCERRARLPKGTRLPVSNNRRTSAATLARLHARLANLRADFTHKLTTRLCRENQAFVIEDGNVKGMLANEKLARAIADVGFGMLRSQLEYKAKRYGTRLVIADRWYPRSRLCSICGWKNEALTLRDREWVCAQCGAHHDRDLNAARNLKRLATVTALPVASPTSNGGAAAGTVPAAAGKVTLVRDDGGHQDTSGQEENRAHLCALS

SEQ ID NO: 56786 - protein, 378 aa, unknown
  TnpB Polypeptide
MIVKKTFRFRLRPTKCQEETFFQFAGACRFIYNRGLERRSETWEKEKRSITLFDQNKELTELKHQEDTSWLKTIHSQVLQQSLDDLDKAFQNFFRRLKNKEVPGYPKFKCRGDKDSFRYPQGVKLENNQVFLPKIGWVRFRKSRDIHGMHKQTTVILEGGKWYVCFSCEWEVAVPPFSLPTDALGIDLGLEHFATLATQETINEVTNPRFLKQGLTHLRYLSRQLSKKQYKSKNWQKAKAALQIFAAKIQRKRQDFLHKLSTHLVESQDAIVVESLKIKELLMKVPKALARSISDAGWGKFLEMLKYKCEYAGKKLIEASAYFPSTQLCSRCQTKNAIDLSTREYRCNCGLVLHRDHNAALNLRAAGMTVLKACGAAL

SEQ ID NO: 56787 - protein, 542 aa, unknown
  TnpB Polypeptide
MDKEVLKMLTEKKSESNFVTVECLLAFDKDDDKKRVLNTMRKFSSMVRFAYKRLMVGAERKELKRLLSQKYGINTRYSDDAILLAKQNLESCIEREQNPKKLVFGSRKLFEQLKKKHLTGKIRDELRQKWEERRYGILCSRGDKSREGNLNIRLVNLNNQWHLRINLGNGEYVWARVIRSAKRKTDKWVDFISSIEHAEKTGEWFPYTVRLKFRNGKIYAQFSKEEKLPEVTITKDNGVIGIDINAYPFHLALVHTTKDGNLEKYEQISLDKLLEVSSEKRAYLSWQAAHQVVEIAKRERKAIVVENLEKLPKGKRGDGLPKLRQKLQKWVYKALLQKIEIVARRSGIQVIKVNPAYTSIIGKLKYAPLYKIDKDTAGAYVIARRGLGFKERLPKNYRGLLKDAEFLSYTIAKIEGKIAKLKQEIREEKNEYKRNRLKSVLWKTRKELDLLLRCLQGSGGSESATQQTVNRKMERLRGLTHVRQKSWQVLSVALALSCLESLRDFSPLKRILISMDWVGVAKRASPSLPGQGTTVQNMYSFV

SEQ ID NO: 56788 - protein, 545 aa, unknown
  TnpB Polypeptide
METKAPSKKEYMGMSGGSGKNDSGFITVECLLAFDTDEDKKKVLDLMHKFSSMVRFAYKRLLEKTEEKDLRKLLPIRYGLNVRYSHAAIVLAKQTLESRLESQQNPKKLIFGSRSLFEQLKNKHLTDVRREKIRQKWEEKRYGVLYAIGQKAVKGNLNLRLVNLNGQWHLRINLGNGEYVWAKVIRSAKRKTDKWVSFISGIEQAEKTNDWFPYTVRLKLRNGKIYAQFSRSEKFPELTVTKDNGVIGIDINAYPFHLAVVHTAKDGNLEKYERISLDKLLEGSSDKRAYLSWQTAHQVVEIAKRERKALVVENLEKLPKGKRGDGLPKLRQKLHKWVYKGLLQKIEIVARRNGIQVIKVNPAYTSIIGKLKYAPLHNIDKDTAGAYVIARRGLGFKERLPKNYKELLKDKDFLFYAIAKTEDKIAKLKQEVRNEKNEYKRNRLKSALWKTRKELDLLLRYLQESGESESATQQAVNRELKPMRGRVQTLQKSWQVLSVAFAFSCLESLRDFSPLKGILISRDWAGVANKASPSHLGQGTTLRVL

SEQ ID NO: 56789 - protein, 416 aa, Halolamina sp.
MAIEVTRTYVGSIKNHRQVCDGLDSLGGSASKIWNVARWTAGRIWNATGQIPDEGTLKAYMKNQSCWKDLNAQSSQKVIEQLSDAFQSWFDLRQTDPEANPPGYRKHGDERPRSTVTFKTDGFNHDPENNRVRLSKGKNLKDHRSDFILCEYQTRPDIDLSEVSRVQNVRAVWNGEEWELHFVCKVKLETNDSAGDEVAGIDLGIKNIATVAFPDEYVLYPGNSLKQDKHYFKHTEYDTEGENGPSEKSMWARQKLTDRKTHFYHTLTDTIITECVERGVGTLAVSWPEDVRESDWGKTGNKKLHSWAFDRIYQYLEYKGERRGVEVLKENEWNTSKTCSSCGDDTESNRVERGLYVCSSCGLVGNADCNGAENMRQKITPSPQGEDRSNGCVAQPSTHLFDRESGMFRTREQIVS

SEQ ID NO: 56790 - protein, 431 aa, Sulfurisphaera sp.
  misc_feature (371)..(425): Xaa can be any naturally occurring amino acid
LRVKVDYETYRKLKEVEEEYRGILANAIEYGLRNNTTSFTKIKAGIYKAEREKHKDIPSHYIYTACEDASERLSSFEKMKRKGRAYSDRPEVRRVTVHLDDHLWKFSLDRISISTKRGRVSLSPIFPKIFWRYYNNGWRVASEARFKLLKGNVVELYIVFKKDEPKPYEPKAFIPVDLNENSVSVLVDGKPILLETNTKKITLGYEYKRKWITAGKSTKDRDTRRKLRKLRERDKKVDIRRKLAKLVVMEALESRSAIVLEDLPKRAPEHMIKDVRDSQLRLRIYRSAFSSTKNAIMEKAKEFGVPIILVDPAYTSSTCPVHGSKIIYRPDGGSAPRVGVCVVGKERWHRDVVSLYNLMRRAGDVSPMPLXXXXXXXXXXXXXXXXXXXXXXXXXXXXXXXXXXXXXXXXXXXXXXXXXXXXXXXWYRDKR

SEQ ID NO: 56791 - protein, 500 aa, unknown
  TnpB Polypeptide
VSRTYPRTPYAAFSKTGEPLNLKEVLDGIRQDAELVAEYALLEMTEQNLALVTYFDRFKPDEAGRQMNLKLPAEMKRQFRSGSSRLERMFREQVVTNLRSWATRAGVVNQTHTNYVSAGWKRTARDSKPISMQPRLSLSATDRQYGEMTVTPERIELKVIVQGQWVILHFPTPPQLLEDGCEPGVPDIWIDKNNRVMFGFHGKTDPGRPEFSSRYVIGVDVGVTNPAAYVVWDAEKKEIAEKSLLGQRARSLNNKIKRTQTQVSALQRKGKDEEATPHREHLSHRRCELSILIAQEVADAAWRHGNALVVFEDLSHISNTMRFGRWFRGEVYRRTRDMVEADGGRVLKVNAAYTSRKCHVCHSDLDMSDYSSPVCDTCGITHHRDLNAAANIAQRANVKKACQTRKRHATKTKRVRRSKCCIKPLRHPGTKNRPTPKAPQNRPKTHTPATPSREVSKGMCPADVRVSAVDHTEWFQTTSGTTNPKENLSANTVDWVYIKE

SEQ ID NO: 56792 - protein, 638 aa, unknown
  TnpB Polypeptide
MKKRKKRKKKPKDKIQKSVFEPKTRGNFIVVKTSLKSVLKDYETNFTIINNLVLECNEIVIRTYQFIRLFILHKYYMNETIPQLDKDTILYFIRAGGIRDKRGKTATNKVFEKELNDFYDKEYQPCINKPKYNLKNKSYITPYLAQQIQTSFNNNLKEHFITRMRRFMNVMKPIDDMDKNDFNKIKNLILLDKMDKIPENYKRWGENIKSNYLPKEYEKCYGYDVKVKPEKYLFYTIKMNETIEKLNNAIRNNKDLTEEDKRCKIKKLFQPISLRNTIIPSYITIDTNVILSLFKSKGESQMNKKTKKYKNHIWDKIFKTNKKVMKMNGYEYKTILTDGIGVSICFQKSGKRYKENKNIDEDNDVYIAELCNEDLEMCKSKKIISIDPGKNSLVYMLDENKNKLRYSCCQRRRESLRKRCNKIILREKQKNKIIEEETKLSSYNCKSVNYNKFKKYITEKSKLNDKVRDFYEKELYRKLKWRNWIYQRKSEDKFLNRIEETYGNKEDLLLCYGNWSNNKQMKYIMPTKGVGLRRVIQKKFSVVLVDEFRTSKLCSHCNCELEHYNNLHRVLVCRGCKSSGSESKNTTFMNRDMNACMNMLHISKSWIQSKIRPKQFCRTSNPDFSFEEVKRGSSVVFT

SEQ ID NO: 56793 - protein, 797 aa, unknown
  TnpB Polypeptide
MGRSVIKRKVDETGKPITETVSVKFPITFKVKKDIDWLKSLHAVYVDNVNFVLGKLKECFFEPFTVKTSDGKSVKLTLFDIFDKKFKVDLPFTYKGAECNKSLRLYPCREIFNNKCPLAGVTKDDVIAQFKDTLDRYTGKYTVVPSYFVNETVFTKVDGIMTSYVMRKLGRISGGKDKTWFESCREIADRNTGNDIEKAVLTAQLVRTGVNINGYVNGKIETAYKWSAKDTCKVAGESFPVHAPDYTSRKFRKCYFDAVGLFIEKFVDKFPTMKKITVLPLPSSVLDLKHRNLHNYYDTPGTLTNVPSVKGEKSKIEFFMHTVSGHSFDYYPDDIQAALKKEPKLQVSFAGDIRNCPVDKPVNTGLFATMPVTREITETTLAETLKENDGIGIDLNVSTYLMNTTLPFAETAGAVDWTEAIHAFREEHPDDFVFTNAPSRVVTKMNELADKGRSDTLNIGLLVGLRDYKLISEKHDWEPSADPLAHLFKWMLDRKSGKKYFYGENQRIIIGYTKLFRKYVRKETANRYRYFAEQSKWDKAHGKDEAFADTATAKKLMEERAAISGNIDITLSHLLVNGMFNACKKPERLSYVSMEDINLNEIRITRRVVPAYVMAKRNWGMTGGKLAVNGDIVSFDYSGTYDSSCISGNEYWDVRAIKHGPEHGHIEVSVEPTEKNIERSFQDWADHYTNKALHLSSIKHTVETLCRKRAIHFATVKPEYTSSVCSACRVKKFKAEKSNKLSLEKTLAKPMNYRQDRVFVCGNPDCTMHGKVQDADGNAAKNILLKTVLGKNYYVKV

SEQ ID NO: 56794 - protein, 445 aa, unknown
  TnpB Polypeptide
MVVRVLKIRIKDNKIVKELKDKMYETREFYNSCLYITRFRYFEFIKRTNNLNYEERETFNLEDWFKDETVWLGKMESYGQDFIDKITIKTNSKLKAKEKQTILRKVCSDWKSYFKGKQESKKYKRRVNLARYKDSLYMTTEFNKQMIKFKSYKKDNCIGLTGLNSKIKMPEWLKRESIQAVRLKYRNSYIYLEVVYNKELKSKNNKRDKNKIVAIDPGLNAITTLTFNWKKKPILISGKHLKSVNQYYHKQLSVLNKEISNIKDNYIKNLLINRKERITEKRNLKVEHELHVISSYIVNLLNEYNVKTLIFGHNNKQKDSINLSKKVNQSFVSIPYYRLMNLLKYKCEDNNIEFIIQEESYTSKASFLSNDVIPNYEENTNYTFSGRRIKIGLYKDKNLNQYIHSDVNGSYNIMRKFGINLNELIEEYKKYSNIIEPFGIKLTMN

SEQ ID NO: 56795 - protein, 397 aa, Actinobacteria sp.
VHLRYNYRLYPTPGQRAALAKAFGCARFVFNDALRARQEAHAAGLPYLTDAELSARLTATKATPQRAWLSEVSSVVLQQALADLNTASRNFFASIKGTRMGPKIGPPRFRSRKDGRQAVRFTANARFQVTLGGKLRLPKIGEVPVRWSRALPSAPSSVTVIKDSAGRYFASFVVESEPVTLPETQPVIGLDLGLSHFAVLSDGRKIASPQFLRRAEKKLRRTQRSLSRKQDGSQNRDKARLRVARVHAQVADARREFHHQLSTALIRENQAVAVEDLAVRGLARTRLAKAVHDAGWSAFLLMLEYKARRYGREFRRIGRFEPTSQVCSACGVKDGPKPLHVRAWQCRECGAWLDRDVNAAVNVARAAGLAVSACGAQVRPGVIPAQRGEAGTLRGAA

SEQ ID NO: 56796 - protein, 456 aa, Lactobacillus sp.
  misc_feature (303)..(441): Xaa can be any naturally occurring amino acid
LDQSVVIKAQLLNIGNETARAFSITMLKYRDACNYISQYIFDHNFVLKQSKLNQALYHDLRDKFNLKSQMAQSAIKTVIARYKTVRTQLFQHPFRYDTGKKDSRGRAIWAQIYRNLTWLWQPIRFKRPQLDLQRSRDWSYKAANHQLSLNTLQGRKVVNFVCKGFDKYLDQTKWKFGSLKLLKLRNKWYVHLSATASLPEYQVSQAEHVVGIDRGLRFLTACYDEKGKTLLYSGQQILRKRRKYKRLRAQLQAKGTKSAKRRLKKIGQRENRWMSDVNHRLTKTLIDHYGSNTIYALEDLTDXXXXXXXXXXXXXXXXXXXXXXXXXXXXXXXXXXXXXXXXXXXXXXXXXXXXXXXXXXXXXXXXXXXXXXXXXXXXXXXXXXXXXXXXXXXXXXXXXXXXXXXXXXXXXXXXXXXXXXXXXXXXXXXXXXXXXXXXXXXKKHLNLTNKHLSSST

SEQ ID NO: 56797 - protein, 533 aa, unknown
  TnpB Polypeptide
MKLAYKINFPDNLKEIYEFLQSEFDRVLSNNKIRAKILSIDSKLLSGKYWKDLRNLIGKETQYKWKKDNRFPSPSWYFCAFAEQIRQIHVSQSEQIALYNALQKFGNLDTVLFYQYCIDNNIPFSKAKVQNLKQCKTAPDLPTNAKFVLDFAFINTQAAKMDNLIFNYAILDENKKTTWYELPIIFHRSSKYQPGSRVSKPKFSKDSDGNYYGVVTFDFEENKTLGENIGAIDLGKIHSYTFGYVNSNGIMGDDFYTPSKLTERLSNKLEQLKNERETLLKKNLVVDKLFMSANYIPENAIQKWIERRGHIEGITKKITRIKDAINAEMSVEIVELCKKHNCSSLFMEDLSWLGSLGGKWNHSEQQSVITKACSQESIEVYKVNAKNTSTAHPLTGEIGRPIGRDIIWSNGDIMDRDIVSTMNQVQREGKRKIKSGKFSKTEKKSGIKLVSLRDKHKPTIKRVKRKDSRRKENLKLLESMRNKNLSRASQMVVVLPRTSESATWSCVEKSSTQVIDYMKSKKVYKRKFLYIYN

SEQ ID NO: 56798 - protein, 394 aa, unknown
  TnpB Polypeptide
MRIGFMLAIKTVQQFYSPDQNILRLLEQFRQMMNRCIQIGIAENVSSLKALSLKAYRQLAAYDVMSYYKMCAVSAAVGVLRNYRKVARQGETRMPYVRRLRVTTCYGFKVQDGRLLLPHRPRETIKIPLTPHVRATIAGNLIRSVTLTPDKLSLAYAKHVSEVRPQGFMGIDSNLDNVTLATTDGSVLKHNLCKATRVKSTYSRVRSHIKRNDVRIRRHIANKYGRKQREKVKQILHHASKQIVDEAKRRHFGVVMENLTGMRRLYVRGNGQGRAYRGRMNSWSYAELQRQIEYKAHWEGLPVIYVHPHGTSAKCSVCGSRLARIPEENRQLRCPSCGVTVDRDVNAARNILARGVRFAPIALPTEAMVQEPATDGNPESRWERVNLKAYAPKS

SEQ ID NO: 56799 - protein, 441 aa, unknown
  TnpB Polypeptide
MKAATASRLRGLVFRLEPDRGQEAFLGRIGDCCRYVFNWALGYREDVWLAARSAGATGVKGSLGYSHLAGYLGGLREEHPFLKEAPYHCLQHALRDLDAAFERFFGGEARHPNFRRKGRWTPSFRFPDPKQFEVNGQAVKLPKLGWVRFRRHGRPIPGNIRQITVKSVAGRWQCSVLVEEEYAVPPAPTGPAIGLDAGVAHSAAFAAADGRTGLVSLPVATSSEERTLRRMARTISRRRRGSNRYLEAVLRRQRYQRHILSRVMDTRHKLTTELAKNHGLIAYEALALKSMTRSARGTVEVPGQNVRRKAGLNRVLLEQGIGETGRQLRYKALWNGGRTVEVEPAFSSQRCSCCDHVSPENRPSRDWFACIACGHAEHADINAARNHLRAGLEITQRGGTAVPARGGPPKRGRQSENLPGRRTGSLVPPDLGIPAKIALAI

SEQ ID NO: 56800 - protein, 307 aa, unknown
  TnpB Polypeptide
LRYANKGWRLASEAKFKLDRGERRLVLYLTFRKEMSEYRPKDYITVDVNENAEAVLIDGLVYLLETGLSKVTLGYHYRRKSVQERYDKVYGPGSRPARKVFKRLSNNERVLKKEIKWKLAALIVREAVKRQAAIVLERLGKETAKRMIEHIKNPQLRYRISQAAFNGVQRAIEEKAKEYGVPVIYVNPRNTSKVCPIHGTEIIYDGRNRHGVCSKGGETWHRDVVACYNLLLRALGGDGGSAPSRVRALVAVDGGPVPLGPTAAHEPTPIARGAWARWKSLGATSGGGKYEEKRLGTNGNPLSSHKV

SEQ ID NO: 56801 - protein, 459 aa, Cyanobacterium sp.
MYYKTVKTLLTNNIDDECHAYLKFACEQSNKLYNVAVYVVRQAHFEQCLVKTFFDKNDLYRTSLKLSKVKVSYPQLCKELQNNSHYQAIGGSQAQQTIKSSVEGFKAYNKLLPMWFKGELLNKPKLPTYRKNGMYPVVFTGQNLRFTADGKHCYISIPKSQKDELITGRLSIPCGKGITKDNIAELRIIPSNGKLWAEFVYKSPEQKATGLDYSQAMGIDSGVSNLLTVVSTEGKSFILCGKRLKFTNQKYNKFVAKYKEGKSEFYWDENLDEVIHKRNCQIRDTVNKYARFLINYCLAHKIGNIVFGWGQGVKTEANLGKRNNQNFVQLPTARLKNRIKELAGEVGILFTETEESYTSKSSFLDGDLLPKYGEKPKEYKFSGKRVERGLYRISNGKTINADCNGAINILKKVSTQLGLDLAKVRRGALTLPKRYDVNNLAKSYRKHSEQVLTCVATSA

SEQ ID NO: 56802 - protein, 414 aa, Cyanobacterium sp.
MYGCQQNRINPDPELKAVLEFVCGESNKLHNCGTYLARQMYFKTGHAPSKFELHRKMSSNRHYQAMYSQVAQQCLTTVAESFKSFFGLLKGIKKGTVTQRPRLPNYRKQGLNLVTYPKQAVRLKEQGLRFPLGKQVKAWFGIDCFRVPMPSNLKYGDIREYRILPRNGEFYLEFVYKTESIVVDVDENNVLAIDHGLNNWMTCVSNVGTSFIVDGKHLKSLNQWYNKRVSVLKEGRPQGFWSKQLAQRTEKRNRQMRDAINKAARLVVNHCLEHRIGTVVFGWNQGQTQGINLGAKTNQSFLQIPTAKLKDRIAQLCEQYGLRFVETEESYTSKASFVDADFLPTIGEKPEGWTASGKRVERGLYKTKDGIRINADCNGCGNILRKVAAKLGLSLDGVSRGALIAPLKVRLWAI

SEQ ID NO: 56803 - protein, 240 aa, Cyanobacterium sp.
VKKATGYYLMIAFQSKESCYDAPVGKTSLGIDAGIESFIATDRGELIKAPKFLLQAQSKLKLLQRCLKHKIKGSNNWLKLQNKIAKIHEKVANTRRDWHFKLANYLCNLTDNIFVEDINFVSWSRGIVRKQSLDSGIGQFINEILPYVCWKRSKFYLKVDKNGTSQECSNCGNHTGKKHLTQRIHSCQFCGYTAPRDVVSAKVIRNRGLIAVGHTVSQNACGDVLTGFSQSNLTKLVKCL

SEQ ID NO: 56804 - protein, 257 aa, Cyanobacterium sp.
LVGSRDIYFYNASDIKRVRLVKRADGYYCQFSVKVNMQIETQPTNKVVGLDVGLKEFLTDSEGNKVENPRFLRKAEKAINRANRQKSKKFVKGKKPQSNNYHKAKVRYARKHLKVSRQRKEFAKSVAYCVIKSNDLVAYEDLNVKGMVRNRKLAKSISDAGWTIFRQWLEYFGYKYGKITVAVPPHNTSQDCSNCGQKVQKSLSTRTHVCPHCGHIEDRDWNADKKYPDKSITYRRAYGNIRLGRSALLGDWCKPVV

SEQ ID NO: 56805 - protein, 407 aa, Cyanobacterium sp.
VITLTYQFRLKLNRQQTQEVEHILTVCKSVYNYALAERKAWYNSRKSLVDRCSLFAEYIIPANAPYPSYNNQAKNLTIAKKTNPDLKSVNAQVLQQTLKTLDKAFSDMKSKGYGFPRFKKQMKSFVFPAMLKNCLGEGKVKLPQLGWLRIKQSRDYPTGFEPKQARIVKKASGYYLMIAFQSKESCYDAPVGKTSLGIDAGIESFIATDRGELIKAPKFLLQAQSKLKLLQRRLKHKIKGSNNWLKLQNKIAKIHEKIANTRRDWHFKLANYLCDLTDNIFVEDINFVSWSRGIVRKQSLDSGIGQFINEILPYICWKRSKFYLKVDKNGTSQECSSCGNHTGKKHLTQRIHSCQFCGHTAPRDVVSAEVIRNRGLIAVGHTVNQIAYRDVLTGIRQGNLLNLVKCL

SEQ ID NO: 56806 - protein, 395 aa, Cyanobacterium sp.
MLHLTFNYKLKPTAKQIEIIEHNLAVCKSVWNHALYERKLWYNSRSCPIDRCSLNGEYIVKPFEYPNYHAQSAELTQAKKTNDFLKSGNAQAMQQTLRKLDRAFNDMKSKGLGFPRYKKIMKSFNVLGKPTLEGNHLKMPLLKSVKLIKSRDIPEGFVIKQVQIIKKASGYYANLMIELDVDVVQPIAHGHAMGIDVGIGSMIATSDGLVIPRPSFLDKTLRKIQLLQRKLRNKIIGSGKWKKLHHRISLLHEAVANSRKDYHFKLAHQLCDGVGMIFVEDINFNSWSRGLFSKQSLDMGIGQFFNILEYVCSQTDTYFERVDKDYSSQICPNCGTHTGKKPLNLRVHKCPECGYEKDRDIAAAEVIRNRGLQNMAVGTIVMKQPSNGVLTGTKV

SEQ ID NO: 56807 - protein, 383 aa, Cyanobacterium sp.
LPTLKKLRPWYKSIHSTVLQQNLRRLDRAFQNFFDGRGYPKFKKRHQFKSFSYPPNQVKIDNNKIYLPSIGWMRLFLSRPIKEGFTIRSVTVRQKADGFYVAIGLEDKTIPDIEPIDLSQVKSVMGCDCGARPHKLLALSNGENIPNPQYEKRLAKRKTRRQRRASRKKRGSNNQRQAFRELARLDQKIVNQREDYQWKVAHKLNRIADVIVMEDLNIQGMVRQCKPKQDENGNYTKNGQSAKRALNSLIRDCSWGELKDKIRQVAEKFGRIFLEVDPKYSSQTCSHCGFKDKKNRHKESFLCLNCDTPADADTNAGMILAQRGIDILGISLNTLLAVSQEVTGTSESTDAKNRDISEVLASEPTNPLQLTLFEWMNGRAIGC

SEQ ID NO: 56808 - protein, 394 aa, Cyanobacterium sp.
MIVLEFKIKGKQSQYQSIDEAIRTAQFVRNKCLSYWMDGQKVSRAELYRYNTQLRAEFDFVKDLNSHACQASVERCWSAIARFFDNCKKKVSGKKGYPRFKKNCRSVEYKTSGWKLLDPKHIEFTDKKGIGKLKLVGTWDLAFYSNDQIKRVRLVRKADGYYCQFCISVDVKEEIPPTNKTVGLDVGLKEFYTDSNGNTEPNPRFYKKGEEKLKRHQRLVSRKVKGSANRKKAINRLSRQHLKISRQREEHAKRLARCVIQSNDLVAYEDLRIKNLVKNHCLAKSIQDAGWYQFRKWLEYFGQKMGRVTIAVNPSHTSQQCSNCGAIVKKSLSTRTHVCACGCRLDRDHNASINILNRALGTTGHVGTWILSPNASGDLSSTIAGSSCNSKIGQ

SEQ ID NO: 56809 - protein, 243 aa, Cyanobacterium sp.
MGIDSGVSNLLTVVSTEGKSFILCGKRLKFTNQKYNKFVAKYKEGKSEFYWDENLDEVIHKRNCQIRDTVNKYARFLINYCLAHKIGNIVFGWGQGVKTEANLGKRNNQNFVQLPTARLKNRIKELAGEVGILFTETEESYTSKSSFLDGDLLPKYGEKPKEYKFSGKRVERGLYKIANGKIINADCLGAINILKKVSTQLGLDLAKVRRGALTLPKRYDVNNLAKSYRKHSEQVLTCVATSA

SEQ ID NO: 56810 - protein, 370 aa, Cyanobacterium sp.
MKLRYKYRVYPDDQQKIALAQLFGCCRYVFNVSLAFCKEQYLETKKKPSSGILSKRLTNLKKQKDTLWLKEVSAIPLQQSLRDLEVAYSNFFNSVTGKRKGKKVKPPKFKKRSSKQSAKFTSNGFKILSPSGKLYLPKIGNVDVVWSRELPDTPSSVTIIKDSANRYFVSFVVEFDPPALAQSENSVGLDLGITDFVTTSSGEKVKAPKPLKKKLTRLRRLQKNLSGKKKGSKRYESARLKLAKLHAKISDVRTDFLHKLSSRIVNENQVIVLEDLNVSGMVKNRKLSRAISDLGWRTFRSMLEAKCVIYGRDFRVIDRWTPTSQICSACGFRGGKKELKVRAWTCVNCGEVHERDLNAAKNILVAGGHS

SEQ ID NO: 56811 - protein, 447 aa, Cyanobacterium sp.
MNGDQQKNRTTVSPYFPRFQTSKNKYCANIFGISKKTEQMIVLEYRLKGKQYQYQAIDDAIRTAQFIRNKALRLWMDGDKVNKYDLNKYCAVLAKEYPFASELNSTARQASAERAWSSISRFFDNCKKGVKGKKGYPKFKKNSRSVEYKASGWKLDEKTKKHITFTDKKGIGRLKLVGSRDIYFYNASDIKRVRLVKRADGYYCQFSVKVNMQIETQPTNKVVGLDVGLKEFLTDSEGNKVENPRFLRKAEKAINRANRQKSKKFVKGKKPQSNNYHKAKVRYARKHLKVSRQRKEFAKSVAYCVIKSNDLVAYEDLNVKGMVRNRKLAKSISDAGWTIFRQWLEYFGYKYGKITVAVPPHNTSQDCSNCGQKVQKSLSTRTHVCPHCGHIEDRDWNAAKNILIKALRTVGHTGTYAWGDLPSWAIGVNLSSNGESVNQESPPSTDR

SEQ ID NO: 56812 - protein, 477 aa, Cyanobacterium sp.
MIVTHKYKIKPSGSQQQVIKDWINMLRSHYNFCLRDRIEAYEQVKYPKLGEYCDLKTKAHCYPLACSISKNSSLGEPFKKSGKKRSAYEQQSSELPTLKKLRPWYKSIHSTVLQQNLRRLDRAFQNFFDGRGYPKFKKRHQFKSFSYPPNQVKIDNNKIYLPSIGWMRLFLSRPIKEGFTIRSVTVRQKADGFYVAIGLEDKTIPDIEPIDLSQVKSLMGCDCGARPHKLLALSNGENIPNPQYEKRLAKRKTLRQRRASRKKRGSNNQRQTFRELARLDQKIVNQREDYQWKVAHKLNRIADVIVMEDLNIQGMVRQCKPKQDENGNYTKNGQSVKRALNRLIRDCSWGELKDKIRQVAEKFGRIFLEVDPKYSSQTCSHCGFKDKKNRHKESFLCLNCGTPADADTNASITLAKRGIKILGIGLDTLLAVSQEVTGTSESTDARNRDISEVLASEPTNPLQLSLFEWMNGRAIGC

SEQ ID NO: 56813 - protein, 419 aa, Cyanobacterium sp.
MYQTQKNQIRGLSKSEFVALQTLCRLTKNLYNVGLYQIRQFFFLENGFLRYESNYHQCKTNENYKLLNTDIAQQTLKVVDRSFRSFFNLIKKAKSGNYQFNQIALPRYLKKDGYFPLIMPRIIVKDGYFKVPMSREFKKEYGEVKIPFPQRLNPEKLKEVRIYPKYNCQFFEVEFITKEEPQIVEFKSDNALAVDLGLNNLATCVSTNGASFIIDGRRLKSYNHWYNKVNAKLQSIKDKQGLKAITKRQGRLLLKRNNQVRDYLSKTARYIVETCLRLDIGTLIVGVTKGWKQNAHMGKRNNQNFIQIPHYSLREKLKALCENYGIQYLEQEESYTSKASALDNDNIPVYSPDNIVKHIFSGKRVKRGLYQSKDGTRVNADCNGAFNIGRKSKHEGFAQVCSGLLTSPLRITNLNVSLN

SEQ ID NO: 56814 - protein, 416 aa, Cyanobacterium sp.
MLLYLLFSANQRKMFILEYKLRGKTQQFKAIDEGIRTVQFVRNKCVSLWMNSKNVGKAEVYRYTTTLRKEFPFVKCLNSTACQQAGERAWSAISKFYDNCKKQVKGKKGYPKFSKRTRSIEYKQSGWKLDRDHKRITFTDGNNIGTLKLIGSRDLYYFQEFQIQRVRLVKRADGYFCQFCLKLDVRDITPILPQTKKMVGIDVGLKYFYADSDGNFVENPRFYRYSEARLNRLNHRKSRKLKKGKPVSNNYIKARQRYSKAHLKVSRQREEFGKVTALRLIQSNDLIAYEDLKVKNLVRNSKLSKSINDAGWSQFRKWLEYFGVKYGKLTIAVNPAYTSQDCFQCGKRIKKSLSTRTHVCSCGYIEDRDTQASLNILRKATMGHIGSKSDLLDLNAWGDLSSILFGGNTCQGKMNQ

SEQ ID NO: 56815 - protein, 478 aa, Cyanobacterium sp.
MIVTHKYKLKPSESQEKKFLNWISMLRSHYNYCLRDRIEAYEEVKAPRLGEYCDLRTRASCTPLTCSISKNSSLGEPFKNNGKKRNAYEQQSSELPSLKKSHPWYKTIHSTVLQQNLRRLDKAFQNFFDGGKGYPKFKKRHQFKSFSYPPNQVKVEGDKIYLPSIGWMRMYLSCPLREGFEMRSVTIRQKADGFYVAIQLEDKTIPQTQPIDLVQVKSVLGVDCGARPHKLLALSNGENIPNPQYEKRLAKRKTLRQRRASRKKRGSNNQRQTFKELARLDQKIVNQREDYQWKVAHKLNRISDVIVMEKLNIQGMIRKCQPKQNEKGHFLKNGQSAKKALNRLIRDCSWGELKDKIRQVAEKFGRIFLEVDPKYSSQTCSHCGFKDKKNRHKESFLCLNCGTSADADTNASITLAKRGIKILGISLDTLLGVTQKVTGKPETTGSRNRDTSEALASEPTNPLQLSLFEWMNGRVIVR

SEQ ID NO: 56816 - protein, 459 aa, Cyanobacterium sp.
MDYKTVKVLLTNNINDECNDYLQFACEQSNKLYNSTVYALRQAHFANCSIRTFFDKEDLYRASFKLGKVKVSYPQLCKDLKINDHYQAIGGNQGQQTIKSVVESFKSYNKLLSMWFQGELSNKPKLPNYRKNGLYQISFVGRDIKFAKDGLSCYLPIPRSQKDELITGKLNIPCAKGVTADNIAELRIVPSLGKLWAEYVYKAPEKKATELDYSQAIGIDSGINNFITAVSNTGKSFILCGKHLKFINQKYNKTVAQYKEGKSDFYWDDYLNEITHKRNCQIKDSVNKYARFVINYCLNHRIGNIVFGWGQGVKSEVNLGKRNNQNFVQLPTARLKNRIKELAHEVGIKFAETEESYTSKSSFLDEDLLPKYGEKPKECKFSGKRVQRGLYRTSNGQTINADCLGAINILKKVSIQLGLNLAEVCRGALTLPKRYRVNDLTKVYRKRSEQVLTCVATSA

SEQ ID NO: 56817 - protein, 411 aa, Cyanobacterium sp.
VINLNFEYRIYPEPLQEQTLLDWLFVCKKVYNYCLAERKDWIKSRKSWVDRCSLNREYIIPADAKYPDYYHQKRQLTEAKKTNPELKAVQSQVLQEVVGKVDKAFRAFHQRGVGYPRFRKKIRSMVFPQFKTCPIVDDKIKLPKIGSVKIILHRPIPQGFVVKQVVVVQKASGWYAICTIQSEGNIPNPIADLSYSSLGIDLGFKKIIHTSKNESIDRPRFLLDLQGQLKSLQRKLKNKEKGSANWLKVSRKIALLHEKIHRKRKQYHYELSHHLCNQAKMIFIEDISPKAWGKGLLRKHSLDFAFGAFMEILAHVAKKRDVYLLKVNKDYTSQTCPNCGTLTGKKPLNERIHHCSECGFTCDRDYASSLVIEQRGLIAVGQTVLQSVEDNGIGGAEQSTPRSTRRSRKSK

SEQ ID NO: 56818 - protein, 397 aa, Acidimicrobiaceae sp.
MTRCRTFRFRLHPTFRQTESLARQLDYRRELYNAALEERRGAWAWERRSVSYVDQCRTLTGLVDVRPEVVASGVTLCRGTLKRLDRAFAGFYRRVKRGGTPGYPRFKSAQRFNSLEWEDRSGWKVKESDRRLYLLGIGEVKTNYHRALAGMPKAITVKREGTRWWLSVRCVDVPAQPLEPTGRDVGVDLGVTNVVALSNGELVVGEHFGSHARARLTEAQRSLATKQPGSNRRRRQVESVAQLHRRVTQQRHNAAHQLSRRLVNDYDLIVLEKLVITNMVRAPRARPDPERPEAFLVNGAAAKAGLNRSIHDAGSGNLTSLLSYKAESAGRIVVTVDPRHTSQRCAECGHVEAGNRVTQAVFRCLVCGHEDHADVNAARNILRAGRALLALASDGRI

SEQ ID NO: 56819 - protein, 154 aa, unknown
  TnpB Polypeptide
VRASRSICDAGRDRGWVNSVCSPASRCAACCCGMVKNHHLARAVSDVGIGIAIRLLFEKAERSGKTVVKIDRWYPSSKMCSHCGHVVEKLPLSIRDWTCAQCSTHHDRDENAAQNILAAGQAVSAHGDGVRAKRTTVRGACCRRSASLQGAAYA

SEQ ID NO: 56820 - protein, 372 aa, unknown
  TnpB Polypeptide
MLPNSFVTHTVQVRSFSYFPSTKNKEERAATFTKICAEHRFTSASLSAFVTICKTEADWSNRLGAHETQKIADRAFAAVGIYCCGKRGRPRFNGASRPLHSIVSKANAAGIRWKAGTGSIKWNGLVIPTMLAPESKYYYQLEALTHPTKYCRFLWRIFNGKRRWYVQLVQEGHSPVRHEIARGNEVGLDVGPSTIAVVSEQTAELVAFCPTIKQPWKKIRKIQRALNRSRRATNPDSYNDLGTWKKGRRQTVFSTWYVKLKAKLADAKRRLAAERKRSHSQRLTRFFPMAPSSKARSFHNNRFRRTSACLGGSGTCAATVGMEPYHMSGNAKVFNTVYPLERVVRRRKLAICHGPDVVAETREPGDPDGFCF

SEQ ID NO: 56821 - protein, 442 aa, unknown
  TnpB Polypeptide
MASTVRLTHEASIQNYSQVSPALDSHGFAASKLWNVARWTCDRIWSETGTIPEDDVLKAYLKRHERYGDLHSQSSQRVLEELAEAFNGWYAKRRNGDERANPPKYRKHGDDHPRSTVTWKGNGIRLDAKNNRVRLSKGRNQKEHRSDYILCEYELPPEISLSDEHLQQVRAVYKHGEWRLQFVCKYDLGDVDAPGEETAGVDLGITNLAAVSYSTGNTELYPGHALKEDEYYFLKQIAKCNKSWSNKATRLHEKRGSRRSHYLHAVTNDIIEKCIEHNVGELFVGSVRGIRDDEDENGETVSVDWGSHGNLDLHSWPFDKAVTLLKYKGALNGITVTEQEERDTSRTCSVCSYCDDSQRVERGLYVCGECDSVANSDVGGAENIRLKGIGEFESTSNSPASMVCDRSNGCLAQPVVNLFRRGEHVPSSGQGTLCESKSIGKP

SEQ ID NO: 56822 - protein, 208 aa, unknown
  TnpB Polypeptide
MEYSHRYAAYPTQTVAAELERHIDIHRQAYNYTRYEYEHVDADNIGSAYKHHYRLPDWKDEFPVFSEVNSKALQRTVTRFYQNISNLSEQKKNGNKVGRLKWKSPREFQSMTFSQSGFELKNTSGRTATLWLSKIGDVRIRYHRDIPDEADIKEVTVKKETTDEWFVSFGLETEGEYLPEKPGVDSLDTSNSIGIDLGILNYIHTTDV

SEQ ID NO: 56823 - protein, 386 aa, Chamaesiphon sp.
MRISFKTELKLNNYQRTQLARHAGVARHAWNWGLDLCKKILDYNRENPTEKLRFPSAIDLHKFLVKWVKVENPWYYEVSKTSPQYALRYLASAFSDFFRKKTANGRRVGFPRFKRKGQHDSFTLEGTIKVEHRWLQLPKIGVVKTYERLPQGLTPKTAIISRTADRWFVSFSYEVEPNTTAKLVGVCGVDLGIKTLATLSTGATFPNPQPYRQSQSRLARLQKAASRKVKGSNNRQKANLKVAKQHAKTANIRKDTLNKLTTHLAKNHSQVVIEDLNVSGMLSNHCLAKSIADLGMYEFRRQLTYKCELYGSELITVGRFFPSSKTCSCCGHIQDMLLKERVFNCQQCNITIDRDLNAARNLEHQALSCRTQTGGNLPFDAPLIVA

SEQ ID NO: 56824 - protein, 288 aa, Chamaesiphon sp.
MRISFKTELKLNNYQRTQLARHAGVARHAWNWGLDLCKKILDYNRENPTEKLRFPSAIDLHKFLVKWVKVENPWYYEVSKTSPQYALRYLASAFSDFFRKKTANGRRVGFPRFKRKGQHDSFTLEGTIKVEHRWLQLPKIGVVKTYERLPQGLTPKTAIISRTADRWFVSFSYEVEPNTTAKLVGVCGVDLGIKTLATLSTGATFPNPQPYRQSQSRLARLQKAASRKVKGSNNRQKANLKVAKQHAKTANIRKDTLNKLTTHLAKNHSQVVIVRFECIGNVIQSLFG

SEQ ID NO: 56825 - protein, 383 aa, Oceanobacillus sp.
MSILKAYKFRIYPTASQEVFIGKTIGCSRFVFNHFLNQWNEAYTKTGKGLTYKACSAQLTQLKKQLAWLQEVDSIAVQSALKHLADSYNRFFKKQNKAPRFKSKKNPVQSYTTKCTNHNIAVVGNKLKLPKLGLVRFAKSREIDGRILSATIRRNPSGKYFISILAEIEGKPLAKTGSAVGIDVGLKDFAVLSDGTVYKNPKHFRTLESRLAKEQRILSRRKELALKQKRALQDAMNYQKQKRKVARLHERISNARQDYLHKISTVIVKNHDIIGIEDLQVSNMLKNHKLAKAISEASWSQFRQMLEYKAAWYGKRVIAVARNFPSSQLCSTPDCGYQNKAVKDLGLRQWVSPHCGAHHDRDKNASLNLKNEALRLLTAGTQG

SEQ ID NO: 56826 - protein, 326 aa, Oceanobacillus sp.
VKNISIRKAYKFRLYPNASQEVFIAKTIGCSRFVFNHFLNQWNEAYTKTGKGLTYKACSAQLTQLKKQLAWLQEVDSIAMQSALKHLADSYNRFFQKQNKAPRFKSKKNPVQSYTTKYTNHNIAVVGTKLKLPKLGLVRFAKSREIEGRILSATIRRNSSGKYFVSVLAEMEVQPLTQTGSTVGIDVGLKDFAVLSDGTVYKNPKHFRTLASRLAKEQRILSRRKELAIKQKRALQDAKNYQKQKRKVARLHERISNARQDYLHKISTAIVKNHDIIGIEDLQVSNMLKNHKLAKAINEVSCSPDAGIQSGLVWEARDNRCQKFSV

SEQ ID NO: 56827 - protein, 377 aa, Oceanobacillus sp.
MPVNKAYKFRIYPTKEQEILIAKTVGCCRYVFNRFLGQWNDTYKETGKGLTYNSCSAELTLLKKEFVWLKEVDSTALQFSLKNLSNSYTRFFKKQNKAPRFKSKKNPVQSYTTKHTNGNIEVVNNKIKLPKLGFVRFAKSREVEGRILHATIRRNPTGKYFVSILAETEVQALEKTESSIGIDLGITAFAILSNGRMMDNNKFTSKMEKKLKREQRKLSKRALNAKNKGVSLLDAKNYQKQKCKVARLHEKVRNQRDDFLNKLSTEIIKNHDIICIEDLNTKGMLRNHKLAKSISDVSWSAFVTKLEYKAKWYGKTIVKISRWFPSSQICSDCGHQDGKKSLEIRDWTCSVCHEHHDRDINASKNILAEGLKSFVLA

SEQ ID NO: 56828 - protein, 465 aa, unknown
  TnpB Polypeptide
MFASAAPGLVPRTAHIPLRVTHRQTKRCYGLLRSAGDVWAWLLDTNRQRRQQGQRPVTGYQALCRQLTSTGPFGELSMVGARSVLRRYSDAWFQAAKRRKAGQLDAGFPRRKRALVPVRFYNGTFTIQGQRVRLPVARGQPELRVRLARPPPYPTEQVRAVTLLADGGRLWLAVTAAVPIQQHDLDPDRVAGVDLGIIHPYAVVTEQAGLLVSGRKIRADSYLQLEDQKARHAKAARRAPKPGQRGSRRWRRHRARLRRAEVHHRRRVQQAQHEAAKQVVAFVVQHRVGTLVVGDPTGITDRNVGRVQNLRLRRWRRTHLLQALRDKAERAGIVVRLVDERGTSSTCPSCRRRVPKPRGREFRCPHCKFQGHRDLVGARNIAAKAGGGQSSVDLPTLVEHRRAGIVPARRDRRRHLHDQRRRRSCLASGHPDEPACSLGCRSPDTGLRSPVRRGSSNAAERANVA

SEQ ID NO: 56829 - protein, 385 aa, Streptomyces sp.
MKIVTQVKLMPEADHAAALRSTLRTANDLACWVSEVAFVNDVPREYELRKHTYAHLKASGLGAQAAQHVIKKVRDAYTTLRANIHAGNLGKSTSKRRIKAQSKPIMFRPDAAQPYDDRCLSWQYDQQTVSIWTMRGRIKKVRFVCSADALKVLQRYRKGESDLIERDGAFYLIATCEIPEAAPYEPDHFIGVDLGIVNIATTSTGYQATGRQLTRYRKRQLALRAKLQKKRTKSTKRRLKERSRREQRHVKNTNHIIAKTIVTEAARTSAGICLEELKGIRQRVRLRKPQRVALHSWAFAQLGEFIVYKARRAGVPVVYVDPAYSSKECADCGHVDRLNRISQATFVCRSCGVVAHADRNASRVLARRGENVWTAGRESRVPATP

SEQ ID NO: 56830 - protein, 211 aa, Streptomyces sp.
VVGVDMGIAHFLADSDGGFVPNPRHGAKAAAMLEDAQQALSRCKRGSKRRRKAVQTVARLHRKVRRRRLNHAHKTALALVREHDFIAHEDLKIRNMSKAPAPKPDPEQPGSFLPNGAVAKAGLNRSIADAGWGVFLAILAAKAEGAGRQVMAVDPRNTSRRCPACGHTAKENWPTQEKCHCASCGHTAHADTVGALNVLRAGLVHRKAASA

SEQ ID NO: 56831 - protein, 449 aa, unknown
  TnpB Polypeptide
VKEEGIRVETHQIKEGHPFYNWAVQECSLNTSLYNRTLYILRQAFTGKHDNIPEYADLIKKERFISKFDLISRMLRLNDSDFRALLKAQEAVQTVKKCAESFSTWFKSLNAYKKNPKKFTGKPRMPRYKKEANSDKLFSVAFTYMDARIQKDGTINIRRDFKLPIKTKLATLQELRLVPKQGCIEIQIFYKANFLKTDLDYNKAAGIDIGIDNLMAVTSNEGFISHLVNGRPLKAINQFYNKTKAEIVSKLAERNADTSKRLRKLTLRRNNKIKDYMHKASRSVVDLMAENKIGNCFIGHNDGWKQEVNIGKRNNQNFVSIPHSQLIWMMEYKAKEAGINVETHNESHTSKCSFLDNEDICHHDEYMGKRKKRGLFVSSVGCMLNADINGAANILRRGLNKTFQPHRIMFNPVKIDIEKKHPMLVSDQGVEGEGFTHCLSNPNTLSLTA

SEQ ID NO: 56832 - protein, 381 aa, unknown
  TnpB Polypeptide
MFSRVECMVSDAIVTKSRRIRIYPTPQQKQLFKQWFGVGRKVYNTCINHFNEKDIIFKGWMNMSTIVLAELTEDYIKAVPYQIKKIAVKDAYTSRKTNCKETKKNGKAFKLRYKTRKNPVQSCYIPKSAVSESGVYHTISGKLNFSEREFLKNDICDCRLINDHGRWYLSVPQKITIMPSENQGGVVALDPGVRNFLTYFSEDGRFGWLGIHAFDRILTLNLKRDKLLSRLALTKDKKKKGKLKRTLNRTYHRIQDLVDELHWQCINYLVHNFSVIVFPPFEVKSMTKKGRKLRKSVVRSMLSLRFYEFKERLKQKCKECGVMYVEQNESYTSKTNSFTGKLMINLGSKEWFMYDGIKVHRDLNGARNILIRAMRDSSAVG

SEQ ID NO: 56833 - protein, 308 aa, Herbidospora sp.
LQQALRHLQAAFTNFFAKRAGYPVFRSRKGSRASAEYTRSAFRWREGRLTLAKIDGPLDIVWSRPLPEGADPSTVTVSRDAAGRWHVSIRVEEKIAPLPQVEAMIGLDAGVAALASLSTGEKIPNPKYEQVDRRKLARALRAMARKARGSSNREKARRVVARIHSRIADRRRDHLHKVTTRLVRENQVIVVEDLAVRNMVKNRSLARAVSDASWREMRSMLTYKAAWYGRDLLVVDRWLPSSKLCSACGAVAAAMPLSVRDWVCVCGASHDRDVNAAKNILAAGLAERLNACGAGVRPEEVPLAGDRS

SEQ ID NO: 56834 - protein, 391 aa, unknown
  TnpB Polypeptide
MRAYKFRIYPSKKQEELLNNHLWLAKELWNELLDCCKQMYKDFGYFPTKNTLQFMVKNYGLYSQTQQEIAHRVFNATFRVFKLRKQGKECGFPRFKSIDRMKSLHYPQYGVGFSLVEKLKVTPFGEIAIKRHREIKGKIKTLTLKRESSGKWFAVFCVHVHKEIQKENKGEVVGIDLGLMSFATLSDGIKIKNPRYLEQYEDRLAFVQRKFSNKKKGSTSRKRAKLKLARLHEKVANTRADFLHKISTQLVNDYSIIALEKLASKDMAQQKYGKQIYDAAWNMFANVLAYKAESAGCKVVFVDPRDTSKMCNRCGNIRDDLTLWDRTYSCPKCGLSTDRDLNSAVNILMKATAGHAGSNACNSLLERDVAIATSVKQEAYSKMGMSHIPMV

SEQ ID NO: 56835 - protein, 392 aa, unknown
  TnpB Polypeptide
MRAYKFRIYPSKRQEKQMQQHLRLAKNLWNELLEECKQMYKDFDHFPTKNTLQLMVKNYGLYSQTQQEIAHRVYNSVIRVFKLRKKGIKCGFPRFKSIDRMKSLHYPQYEFGFSLDKKLKVTPFGEIAIKKHRAINGRIKTLTLKRESSGRWFAVFTAEEERLPPKENKGDAVGIDLGLKTFATLSNGMKIENPRHSKKHEERLAFIQRKFSKKKKGGNNRKRAKVKVAKLYEKISDCRRDFLHKISTELVNDYSIVALEKLASQEMAEENYGKQINDAGWNMFANMLAYKAESAGCRVVFVDPKDTSKMCSRCGNIRRDLSLWDRVYTCPNCGLSTDRDLNSAVNILIKATEGHSGSNASGNAAKAASMKEEAHACSWVGMSQMNEQIKMG

SEQ ID NO: 56836 - protein, 434 aa, Cyanobacteria sp.
MGRRRDEQNPRLTAILSALIIKEDSYKSIVVQHQAVKVRIYPSPSQEQQLAQVFGCSRWWWNYALNKSIETYKETGKSLGQIALNALLPQLKKQEETVWLADCYSQVLQATTLNLVTAYKNFFAGRARFPRFKSKKGKQSVQYPQNVKLLANAIKIPGGIGEVKAKIHRPIEGEIKTVTISKTPTGKYLASILIETEGNNPKVSTEGTVLGIDLGVKDFAVTYNGIKTSKYSNPKHLAKHEKNLKRKQQKLARKQDGSSSRLRAKKLTAKVYERVSNARQDFLHKLSHKLSNENQVVVIENLHVKGMVQNHNLAKAISDCGWGMFTNFLAYKLERKGGKLVEINRFFPSSKLCSKCFYQIDEMPLDVREWTCHSCKTHHDRDGNAAANIRAEGIRMLQTDGIAVSAGGEEVRPKKGRKSVLRHSSAKPEAPPCS

SEQ ID NO: 56837 - protein, 420 aa, Cyanobacteria sp.
MHSLKLELKLNNFERSFLAGCAGFSRLVYNFGLSLLTSSWGFEDVKASDSKRLTEIEKVFTNYVKTLPQYAWMKQYPSAIYSSALRNLAKGVDRWRQGTSGFPKFKSKKRGDSFTVLKKAGVYPRKGEPMVAFTNRQVLCPGKKINIPSLGQFRLKQPIPFLCSSQTFTISRVADRWFVSFALDVDKLPPVVHPVRAVGIDLGVKCFATLSDGSKIVAPPSLKKAKTKLSKDVWRNRNKLSGNRTQGIKSSKNALRYYQRLANKHARIANIRRDFLQKVTTDISLKYYSIRIEDLNIQGMIANHKLAEAISSLGFYDFRRMLVYKASFFGTKVELVDRWFPSSKTCSCCGNVQPMPLKDRVYRCNKCGVSIDRDLNAAQNLENAPKDRVRAASAEFTPVDKKEPTPLVEAGSKRQIKPNA

SEQ ID NO: 56838 - protein, 402 aa, Cyanobacteria sp.
MLVIEYKVKGKANQYQAIEETIQTVQFIRNKCLHYWMDSPKDAKIDRFALNRYSTVLRNEFLFVKKLHSNAVQASAERGWLAISRFYDNCKSKKPGKKGYPRFQKDNRSVEYKVGGWKLHPTKRRITFTDKKGIGELKLLGKWNIHTYPVKSIKRVRLVRRADGYYCQFVVDVEVKEQLEATGNAIGLDVGLEYFYTDSNGYQEENPRFLRKASAKIKHAQRRIYKKEKGKNGRSHARKRFAKKHLKVSRQRNEHAKRLARCVVKSNDLVAYEDLVVRNMVKNHCLAKSINDASWTQFREWLEYNAGKFNREAVAVAPHYTSQKCSKCGNIVKKSLSVRTHICKCGCKLNRDENAAINILNLALQARGGHPQSNAVGVGVTTLVGATLLEQTLTLSTESPAL

SEQ ID NO: 56839 - protein, 369 aa, unknown
  TnpB Polypeptide
MMQTLMVKVETTLEQAEVLHKTMHQFNAACNDIANTAFDMHLANKIELQKTVYYPIRERYSLSAQMAVRAISKTVEAYKRDKSIKPTFDIDGAMPYDQRILSWKGLDRVSLLTLEGRLILPVRICKYHAPKMIQPRGQVDLIFKDNAFYLAVVVDAPKEYPINPIDVLGIDLGVKNIAVDSTGEVFSGNAIEKTRIKIDVIKADLQSCGTPNAKRHLKKIGTRESRFRRDTNHCISKKMVAKAKDTSSIIALEDLKGIRKSMTVKRAERRKNYSWGFDQLRQFISYKAAIAGVPVAYIDPAYTSQECSSCHHISKSNRPTREDFVCSSCGFSLPADYNAALNIRARVAVNMPIAARLFAEPQATSFRAW

SEQ ID NO: 56840 - protein, 411 aa, unknown
  TnpB Polypeptide
MDRTITVQLKPTPEQARGLKTTLEQHTACFNAVAHEGFTTACSNGVELHKRTYYPLRAHYPDLPAQLVCAARVKATEAVKSALTWKGKKEQAHPKKVEKAKKQGKPIPAFKPVRCPHSECACIRYDQRSSWVKWGTMTCSLATVNGRIELPFTVPTHLQHYVGYHVCSADLCYRKGRYTLHIVVSIPEPAIAPTMTVVGVDLGLNRPAVTSARQFLGEKRWKEQERRTLRLKRKLQAKGTRSAKRHLKKLSGKQFRRRRDHDHVLSKRLVQNTLPGATIVLENLKNIRDTSKMGRGKKDSKKRDNKRRLHSWSFAQLYCFVEYKAQAHGIRVVKIDPRHTSQTCSKCGHQARNNRRSQSVFHCCSCGYQLNADLNAAQNIREKYLASLAQDGTPVLSGFAVKEPIASIGNG

SEQ ID NO: 56841 - protein, 543 aa, unknown
  TnpB Polypeptide
LSRDAPGGETPGTGGTGHDVPQESPQLAANTRATGGGPASTHPADGGLPRDISISGGVRRDELGDEASPRTERSGSPGTRAGGTGCLVQGNRVEHQAISAGTRGGGTGAFRIGRLQKGLGATAGGCKRASKRQTHTFRLSAVHHAITHQVEYLERLISSPELFDLQEAFSALNPPFYTRINHWLDQADLQRWLCRSARYPGLAAQSIQAVADQLYDALDSWRQQRDRGDARPPHRQKTWNKVVWKSQSIRLQDGTLKLSRGRGCEPLTFEWPHAKPTRVEMVFQDGEYVLCCQYEVEPQDRTKGEQVAGIDLGEIHLAAVDDGDETLLFNGRQLRSKRRYQNKIKAKLDRRIDRKQKGSRRWSRLVQSKNEQLATIRNQIDDLLHKMSRKLVEMLLERRVSTLVIGDVREIRDDLDYGSKANQTLHQWVHGRFRRMITYKARLAGMEVELIDESYTSQTCPRCNERHKPTNRNYQCPACGFEGHRDAVGACNIRRKYLREVAEKPSTGVVEDRVSSSGVRFHANASCSSRSSHKTFPTREAGT

SEQ ID NO: 56842 - protein, 404 aa, Akkermansiaceae sp.
METVNRRVTYRMYPTRKQQLALERMHDLHRHLYNACLEERISAWRKCAISIGFVDQCKSLTQVRAENPEYCAINAQSLQVTLKRVHKAYDAFFRRCKAGKKGGFPRFKSKKRFTGWGYKAHGDGFKFAPGRNWKHGVLRISGVGDVKVRGEARTPGQIVSCDIMRKDAGEWHVSLVVACQPHRERTSDKESGLDWGTETYITLGSDLDTVEQLPNERLWRAQRDALKESQRDLSKRLRGKRTKSAERKRRHLAKQHRKLANRRKNRNHQASARLTKTHSLLVTEALSVANMTRSAKGTEEAPGKNVAQKAGLNREILDTAPADLLKMIQYKAEEADCDLIVLNTRKSKPSQRDPVDLNRVVKKTLAQRTHTLPDGRVIGRDHAAALVMLRLGLNSLGREPSWVG

SEQ ID NO: 56843 - protein, 408 aa, unknown
  TnpB Polypeptide
VLKPYKYRIYPNKEQREIINSHIGVSRFVYNLALETKINAYDAGLKLSEFDLNNQLTELKQDYTWIKEVNAQTLQQAVKNLNSAYQSFFKGGGFPKFKSKTKSTKSYRVMSQGVKVDFGNGTIKLPKIKQPIRCKFDRTFKSDIRNVTISCSKTGKYFVSVLIKNKNEMLLKYKAKKENSIGIDVGLNHFLVTSTGEFIDNPRYLRGALDRIKVLQRRLRNKKKGSSNLRKAWLEIAKLYDKVSNQRKDFLHKLTTQIVADNQGAIIVEDLNIKGMSKNHKLALSIADASWSEFFRQLEYKCKWYGRVFIKIDRWYPSTKLCNGCGTKNTKLELKDREWTCVGCEKVLNRDLNASLNILDEGLKKYNEMCGNIYLTGLGKPVVPVEMSSIDESMKQECSLSAYKAPLF

SEQ ID NO: 56844 - protein, 478 aa, Hapalosiphonaceae sp.
MLTLIYRQQVETMLVLEAKLKGKQSQYNSIDDAIRTALFIRNKALRHWMDNKDVGNGAKERKRGEVSIEDPIGPQINQGALNLPSFSQAKCGKNDLQKLCAVLAREFGFANKLNSMARQASADRAWLAIARFYEGLPRTKNRQASEKDNSLGQLNKPDTSLPVFRGDNANDNCKKKKPGKKGFPRFKKRGHSVEYKTSGWKLSADKKYIIFSDGFNIGKLKLIGTRDLSFYSIKQIKRVRLVKRADGYYCQFCVDVERKEQHQHNGSQIGIDVGLEFFYTDSEGRTLENPRLLRKSEKSLKRKQRQVSNSKKGSSNRRKAVKKLAKKHLKVSRQRKDFVVKTARALVQSSDLVVYEDLQVKNMVKNHRLAKSISDASWSLFTDWVDYYAKVFDTWAIAVAPHYTSQDCSVCGTRVKKSLSTRTHKCHSCGTVMHRDHNAAIMILNKGLKSTVGHTEFFACGQNDLCLGGETPLDKLSG

SEQ ID NO: 56845 - protein, 398 aa, unknown
  TnpB Polypeptide
VHLRYCYRLYPTQDQRTALAKAFGCARVAFNDALAVREAAHAAGEPYVSNAELSRRLTESKAHPARAWLCEVSSVVLQQALADLNAAYRNFFASAAGKRKGPKAAPPRFRSRKDRRQAIRFTANSRFAVLDNGRLRLPKIGDVKVRWSRGLPSAPSSVTVIRDAAGRFFASFVVEADPESLPETDAECGIDLGLGHFAVLDDGTKISAPRFLRRAEKKLRKAQRDLSRKQKGSEKREKARVKVARAHAKVADARRDFHHKLSTKIIRENQAVCVEDLAVKGLARTRLAKSVHDTAWSAFVSMLEYKAVLHVREFRRVGRFEPTSQVCSACGVKDGPKLLHVRRWECKACGTFHDRDVNAARNIAALGRREARNARGGQVRPPLAAAQASEAGSRRGAA

SEQ ID NO: 56846 - protein, 429 aa, unknown
  TnpB Polypeptide
VIRTVKVKLNVPDKRWDDLHQTKDQFLHCANTTAEWAWRYPNDYCVTSKQKAENALYDRLRSETELTANLVQKGIRRAIEATKSGVARLKKGDNTSQPHFDAWSVVYDKRSATFHRDHVSLSTVNGRVECEYVIPDVPEGTPIGKYLLNEDYEFRMSTLQYDRHSESFYLHARMRRTENDSQSTTDSSNAKHRTVLGVDLNVDGSLAVTSTGAFIGKAGEMNHQRREFEKTRGSMQRTGTRSAHLSIQSMQDREHRWMKDELHGVSNQILEETREHECTHIAFENLTDIRKRMAGAKRFHVWAFRRLYQYVEYKAEMFGIEVEQVSPAYTSQRCSSCGFTHELNRPSKHQFACQKCEYELNADYNASKNIARKLLKKLHSGQKSSGGGAPCQCALKSGTLNLNGDYTASVKSTAEGESTDKPTTSVVGN

SEQ ID NO: 56847 - protein, 380 aa, unknown
  TnpB Polypeptide
MRKAFRYRLYLSDTQAAVAQAQLDIARELYNACLEERRACYKTTGKSLTYYDQANQLKEIRQIRPDVATANYSMLQAVCRRAHRAFETFYRRRKAGLKGGYPRFKGYYRFDSITFPAYGDGCKITDARLKLQGVGIVKVKLHRPVEGTIKTVTLKREVDKWYVVFSCDVGDPVPLPATGQDVGIDVGLTHFLTTDTGATVENPRPFKAAQRRLRIAQRALSRKKKAGKRTGCKGGRRGKARRRVALLHQKVANTRKDFHHKTARALVDANDTIYHEDLAIANMVRNHSLAKAISDAAWGQFLMILASKAEGAARQDIGVDPRGSSQTCVCGEPVPKTLGDRWHLCPACGLSLPRDQVSAQVIKQRGHRCQAVTTPMGVVA

SEQ ID NO: 56848 - protein, 388 aa, unknown
  TnpB Polypeptide
MSEKLVRTVVVKLDVKANAPALMETARRFNAAATWIARVCWNEGITNTNTAHHRVYGQTRADYGVGAQLAVCARAKAMEALKAARRKGGNTCPAWRADAAVRYDARTYRLLPLDGVSLNTVNGRVTVKMLPGQRQRDMLLNTGWLIGGADLVQRRGVWYLHLTQHKPAPPSDEPTGYIGVDLGVARIATTDDGATYDGAQVKAVRERRFQHRQRLQKKNTRRSRARLRRVAQREKLFAKDVNHRISKRLVATAKDSCKALALEDLTGINQRTAGTVRHEKRRERLSWSFYQLRLCIAYKALAAGVSVVYVDPRNTSRECARCGFTDKRNRRDQAHFLCLSCGHEANADVNAAKNIAARAEVTQPTVLPLAGLGLGMASTSPRAVAVGC

SEQ ID NO: 56849 - protein, 285 aa, unknown
  TnpB Polypeptide
MHGHPRTRRQMVRIAGLRGGRAPWEPNSAPRPSRGTISPIGIDLGLLSLVTKSNGEQVEHPGFLRKADKRLKGLQHALSHKRKGSKNRNKARQRVASQHSRVKRQRLDFNHKLSTKLVRAHDFIAFEDLRIKNMVKNHKLATSIQDAAWGQLVRLTEYEALKVGSRVVKVPAAYSTQECFHCGIRNKIDIDIREFVCIGCCRTLQRDPNAARIVLKRGLAIAGLTATMVGQDMPELKPVETRPLPLQRTGEESHVEEAGTICPRGLEAHGLQPWEDVTSVLCRSP

SEQ ID NO: 56850 - protein, 350 aa, Moorea sp.
SSISRFFENCKKKVPGKKGFPRFQKHCRSVEYKQSGWKLSPDKKSITFSDKKGIGKLKLKGKWDLWRFDNKQIKRVRIVKRSDGYYVQFCISIDVKEQLDPADATVGLDVGLKEFYTDSRGNTEPNPRFYRAGERRLKFYQRRVSRKKKGSSNRKKAVNRLGRHHLKISRQREEHAKRLARCVIRSNDLVAYEDLRVKNLVKNHCLAKSINDAGWYQFRKWLEHFGQKFGRVTVAVNPAYTSQNCSECGEVVKKSLSTRTHVCECGCELDRDHNAAINILKRALGTVGHTGTWIDRRSRYANVDPNASGDLTSTVLGSGQVWQVGSLSEESPRLKTGECQGPNSTPTPVA

SEQ ID NO: 56851 - protein, 533 aa, Sutterellaceae sp.
MKSRTPSFVIELGLKTGEDQESALETYFSDACQLFNAVLGTAKKRVRAMKSTEAWKLTAAMPKGKDRNKRFKEIQKSALLSEYALHDVVKEHRAKGGFTKRIGINEAQKIATRVWQGIERWLLHQGGQPRFKSAKRGLHSVEGKSNKTGLRWKAKTWTLEVLDLVIKAEAPDAWQKEALLSATDPSGFKRVKYCRLVRRMIRGRMRYFVQLIVEGVPPVKHVYAPKDLKVAVDPGPRTMTFYSPEWQQKILVSAGTVSQEKEIARLLRAMDRSRRDTNRECYNADGTVKAAGKKIVWKESKTYKATKAKLADLYRRQAQTRRCLHGEVINQVFGRAGTVIVEKNSYKAFQRAGYGKSLGKSGIAGLITRMTSKAESAGCCVVKVSPRKLRPSQHDPETGTYRKKALWERSHQLGDTGWYMDRDLAAAMNLYFADPDTDSYDLKAEQSALARLKQVSGNAGSIVQYKPANRQDEAVLRRNRRIELMKPVPVERLRFKCSCGAGDARADKASKTLAVTGKPAPCQETPRFQARVV

SEQ ID NO: 56852 - protein, 310 aa, unknown
  TnpB Polypeptide
MAAYELTDETWALVADLFDPPVRRGPRATVPRRQVVEAILWLARTGAQWRELPERYGSWSAVWSQWRRWRDKGIWDEAMRRLNAAVRVSEGRDAQPSVASIDTQTARGRRAGPGCHEKGGAGGRTRGTKRSIPATKSLDRASRRLRRANKNLARATRDSKEWRRRKRRVPRIHGQVHFARRDALHKLTTQLATELAQLTVEDLNAAGMMRTRLARHLSDAALGEIGRQLEYKASWYGLELLKADRWYASSKTCSSCGLKNEQFGREPKFWCADDACGYRQDRDENAAINLARWTAPVENQEETLPLTAAA

SEQ ID NO: 56853 - protein, 399 aa, Cyanobacteria sp.
MTEKAYRYRFYPTLEQEDLLRRTLGCVRLVYNKALHIRTQGWYEKQERIDYKQTSAMLTNWKKQEDLQFLNVVSSVPLQQGLRNLQKAFTNFWAGRTKYPNFKKKRSGGSAEFTRAAFRWKDGQLWLAKCSQPLPICWSRAIPAGCEPSTVTVRLDASGRWFVSLLVNDYTKPLPQVTQVVGIDAGITSVVVTSDGEKIANPKHFKRLRYKLRQAQKALSRKIKGSNNREKARHAVARIHAKIADARTDFLHKLTTRLVRENQTIAVEDLAVKNLMKNHKLAGAIADASWSQLVRQLEYKCLWAGRTLVKIDRWFPSSKRCGYCGHIVDKLPLDVREWDCPECGTHHDRDINAAQNILAAGLAVIVCGANVRPDRHEPEGQLRNSPERSRRGKKQKPKL

SEQ ID NO: 56854 - protein, 395 aa, unknown
  TnpB Polypeptide
VLVRYRYRLYPSAGQRQALARVFGCARVVYNDCLRLREECHAAGEKISDSEVQRRVVTLAKLTAEREWLAQVSSVALVQACNDARRAYRNWFDSRSGKRKGRKIGHPVFRRKHRRQSIRLTRGGFCLRGPRLYVAKVGEIRVRWSRSLPSEPSSVTVIREPDGRYYASFVVERQTVPLPACGREIGIDVGLNRLAVTSTGEIIVNPRFLRRQQRRLARAQRALSRTAKGSANRAKARRRVAVLHRKVRETRLDHAHKTALRLVRDNQAVYAEDLAVSGLARTRLAKSVHDAGWTQLLRLIGEKAEQHGRGFHRIGRFVPTSQTCSACGANDGPKPLSVRTWTCAACGAVHDRDINAARNILAAGRADRLNACGGTVRPPPAVAGPAEAGTHRSVA

SEQ ID NO: 56855 - protein, 301 aa, unknown
  TnpB Polypeptide
MLCRAVAVELEVAKELNKLFYSVESMYLSIVRDVVEYAVTNNVTSATQLHRLFYSKYRGEYPGLHSHLVIQAIKQASEIAKSFIERRRKGLADKPYPEVKAVSIRFDETTWSYDQFVGSIAPVRIAVSPISTGRRGRGGRRFEVWLRPHKRFWLYWWRVLSGEAELASTLIVKRRANKWYAIFVFEIKPRREVPQSVVAFDINENTVAVGKIDLASTVSMVASWNRQHVTPELYTIRTDFGRLARRYGRIRNTIIERLKPGFALPSGKYVNVANTREFRKRAKHLRERGGRLVVSSKSLMS

SEQ ID NO: 56856 - protein, 269 aa, Streptomyces sp.
MQLRYSFRLYPDIGQRTALARTFGCARVVFNDALRAREDARKAGEAFPAAGELSRKLITEAKRRVERSWLREASAVVLQQSLRDAELAYRNFFASLKGSRKGPKVGSPRFKSRKNSRQSIRFTANARWSIIDDGRLNLPKIGAVKVKWSRSLPARPSSVTGVKDSAGRYFASFVVDTDPAADAARMPDTDHTIGIDLGLAHFAVLSDGTKIDSPRFLRRAEKKLKKAQRELSRKQKGSNNREKARLRVARAHAKVTNARHDSTTNSPLS

SEQ ID NO: 56857 - protein, 563 aa, Streptomyces sp.
VTRKRAKKRELRTLAAPFTVAAPPGARIRERLRLPAADAEALRLVGRHLGHHAWADLAERVRLGDVKAKDNQRAARKKALTAVSSSRWAGAMTRASEDQYQLSKRALYDERAMLRRAIRVINNRLAVPCGQRRNGVRGYPDQAERFQKQRRLQALTARLARVEQRIATGRPGIVVGGRRLAKLRHHLADSGLTEAEWRERWDAERLFLTADGESGALYGNYTITVDPADGAVTIVLPEPLRHLANSPRGRYRLACSVGFSHRREEWMDRATAHQAVRYDIVHDPARDRWYLDASWSTTPTALPTPEDLAATGTRMLAVDLNADHLAACVTDAHGNPVGGPITITTDLTGPTSRRDGRLRAAISSLICLAHEHNCAGIAIENLGFDDARSIGRETMGRGRRGKKFRRTVAGMPTAKFRERLRGMAFHAGLVVIAVDPAYTSRWGGQHWQRPLQSQTRTTVTRHHGAAVAIGRRAFGHGIRRRPGVTTHHQSDGARRATGQTVFVPRTRGTARPPRTTGTSIGGDKTCWSQSGQLALLPDLEDRSRGHRITNPVYSDPANTGQHH

SEQ ID NO: 56858 - protein, 414 aa, Streptomyces sp.
VIVKLVVQVKLEPTLQQAAALEATLHACNEAATWVSEIAFERGEFKNFALRKHTYDAVKSRWNLGAQAAQHSIKKVCDAYTTLKANLKAGNLGRPGSRRYRKTAEKPIVFRPWGAQPYDDRMLSWQIAERTVSIWTTSGRVKNVAFTASPEQLATLALYRKGESDLLQRDGMWFLNATCEVPEAPLNTDPVDFLGIDLGIVNIATTSDGEIMAGRELNRTRLRERGLRTKLQKKNTPSAKRRLRRRRRKEARRARDINHKIAKHVVAEAERTGRGIALEDLTGIRERVRLRKPQRATHSGWAFAQLGAFIAYKARRAGVAVVHVDPAYTSRTCAECGHIDRANRVSQAWFACRNCGFVDHADRNSSRNIRARAWELRRRGAQSTAPAPSRKHPDGAGRKRSITASDARCASPSL

SEQ ID NO: 56859 - protein, 280 aa, unknown
  TnpB Polypeptide
LIPKTVYQLNNFFRAIHKTLMVKLNPSEEQYQMLLDTMHRFNEACNAIAETAFAIHKANKVEIHKLVYYDIRERFGLSSQLAVRAISKVAEAYKIDKSIKPEFRLDVAIVYDQRILTWKGLEAVSLITLKGRQLIPVRIGDYQKTRMDRVRGQADLIFVKGIFYLCVVVEVAEESPYDPKGGLGVDLGIKYLAVDSDGEVHSGEQVNQTRDKLDSLKARLQSKGTKSAKRHLKKLSARMHRFSKDINHCISKRIVTKSKDTLRSITLEDLKGIRARTTVR

SEQ ID NO: 56860 - protein, 369 aa, unknown
  TnpB Polypeptide
MVMNRAMKFRIYPNQEQRILFAKTFGCTRFIWNHLFADRIQHFEETGEVLNNTPAQYKDQYPWLREIDSLALANTQLDLNQAFQNHKKNPAHFGFPTFKAKHRTKKSYTTNNQKGSIRIEGKKIRLPKVGFVPIAQHRVIPDDWSIKSVTITETPTGKYFVSILFAFESQEIEKKEPKKFVGLDFSMHELYMSSEGKIPSFPHFCRLAEEKLAWEQRKLSHCVLGSKNYRKQRRKVALCHEKVANQRRDFLHKRSRELVDNFDMVAIEDLNMQGMSRALHFGKSVHDNGWGMFTTFLSYKLEEQGKCLVRVDKFFPSSQLCHVCGYKNPDTKNLDVREWTCPSCHVHHDRDCNAAINIREEGKRILFSA

SEQ ID NO: 56861 - protein, 390 aa, unknown
  TnpB Polypeptide
MTQKAFKYRFYPTPEQETLLRRTMGCTRLVYNRALALRTDAWYKDQKRVGYSETSASLTEWKKDESLSFLNEVSCVPLQQGLRHLQTAFSNFFAGRAQYPNFKKKRNGGNAEFTKSAFKWRNGQLFLAKCLEPLNIRWSRTLPEDVEPSTVTVKLSPSGRWTVSLLTDVEIEPLPESPQRVGVDLGITSLIALSTGEKVANPKGFAAKRRKLRKVQKALSRKQKGSNNRYKARLKVAKVHAEISDARLDFLHKLTTRLVRENQTIAVEDLAVKNMVKNRKLSLAISDASWGELVRQLEYKCEWYGRTLVRIDRWFPSSKRCGNCGHIVEKLPLNIREWDCPKCSAYHDRDVNAAKNILAAGLAVKVCGANVRPDRHKSDGSCDEAERSKK

SEQ ID NO: 56862 - protein, 412 aa, unknown
  TnpB Polypeptide
MSAIVKNYMLVKGVVFYLDSDLPSEARSLLEDFRLAVNNAVRAGLLTRVTSRNALVKIAYKDFREQHPRMYAQHLVSAFEVAGGILKNHRKRFRKGITGRIPYVKRLMMKAENQAYKLNRKSGVVDLPIRAGCHVQLMLIVSQYHRKYLDDTALSLGSLTVLPDRVVVAFRKDSPKPFMPESVLSLDTNERSLDGVFVEGDAARAVKANFPEVAIIQQRHHDRRRRLQKKKAHDRRTSRNLCRREGAREHHRIDYRLHQVADSVLKFAEVRKSAIVLEDLKGFKSKRSKGLNRRLSIWPRRRLHQIIEYKAQWKGIPLIKVDPRNSSRTCPICGKIQYSRMGAKFKCVCGWHMDRHINASINLLQTATSKGMAGGLWFNPGAFQHDVMMILYEPAMAARSELNGTSGIAGVS

SEQ ID NO: 56863 - protein, 407 aa, Streptomyces sp.
MQLRYSFRLYPDTAQAAALARAFGCARVVFNDAVRAREDARKTGAAFPTPGELSKQLITRAKQTVERHWLREVSAVVLQQALRDAEAAYRNFFASLQGTRKGPKVGAPRFKFRKDARQSIRFTANARWSVNGSGRLNLPKIGAVKVKWSRALPATPSSVTVVRDAAGRYFASFVIDTDPAADLAVMPASDQSIGIDLGLTHFAVLSNGTRIDSPRFLRRAEKKLKKAQRDLSRKQKGSKNRDKARLKVARAHAQVADVRREFHHQLSTRLIRENQAIGVEDLAVTALARTRMAKSVHDAGWAQFTAMLEYKALRYGRTLVKIGRFEPTSQTCSACGVQDGLKPLHIREWTCAACGTVHDRDHNAAKNVKTAAGLAVTACGAQVRPGPVPAQRDEAGSHGFSPEPHAA

SEQ ID NO: 56864 - protein, 410 aa, Acidobacteria sp.
MSEQKRGIKGRVYLSDEQVLAAGHQFGCGRFVYNRLLGFSQERYFTDKTKTSPKDRSLELTRLKTELPWLREVNAQSLQQTGRALDSAYKNWIDSITGKRPDQVKPPKFKKKSQRQSARFTRGSFSFRNGVLHLSKIGDMHIPWYRRVKGAPSSLVLSMTPSGRYYVSFQVEQPLRAIGSATNRCVSVDSNTKTFHFFNGRTWSRVELPRPLLAALSRLRTAQKHLSRCTKGSQNREKARIKIAKIHQRVIDIRTDFLQKLSTQLVHENQVIFVETLRIKNMLKNRRLAPAISDAGFGDFIRMLEYKCKWYGRTLIKVDTFFPSSKLCCVCRQKNAELKLQDRWKCPNPECQTEHQRDENAVVNIFVEGLRILAEGRSVSACGGTARLGGELKRVPVKQETSLETSSNAA

SEQ ID NO: 56865 - protein, 444 aa, Bacillus sp.
MKKVKESFRKGKPTFPKNTSFLIQSSGIVSLSLPKKTMIWLTFYSFEHSYLDRKIKNTKAKIGRLKHRFDRLQQKKEKLQKSVPSAVFGTKKLFRSQFTKEEFVTHHEGWKTLFSAARNKQMMISGRKDARCGNFVFQYNIEKQELSFSSIHGNVWTFPFLMFPYGQDIVNHVVDAQIACKQKKKYGQPISWSIEDHGVYYLIKCMVDVEPNPYINFSKSDGVIGVDCNYDHLAWVNVSKDGNYLESGSLSFSLEGKCSGAITKILEAEAIRLVELAVRKNKPIVLEKLDTTLSKTGNKYDSKKRNRRKSMFAYRKMIDAIQNRANKMGVDVKQVNPAYTSISGKMKYMRKFGVSIHQAAAFTIGRRGLGYQEKVPNVFKTYMDLTNMHHWKQWNIWNKQLAVRTHVLYTLIDVNRPHDGINGSHMELTEEERKGMRKLLAYKG

SEQ ID NO: 56866 - protein, 400 aa, unknown
  TnpB Polypeptide
MLMPIVGFRFRAYTDRRALRALKAQLELACEVYNTLRWADTYFHQRDGRGLTLTELRQLALDLRKQDEEYQQLYSQVVQQVADRYYEARQRFFDGLARFPREKKLHKYYSLVYPQSGWRILAREVRTSGNKRLVLRLSSLGVFKLIVHRDFPLEKVKRVVVKLTRSERVFISFIVEDYGFPKLPNTGKAVGIDVGVEKLLVTSDGEFLPNLRPYERALKKVRRLHKALSRKKYLSRNWFKAKMRLARAYEHLADLRRDLYMKLGRYFAEHYDAVVMEDIHVKQLIGKSSRGLRMRLHDVAFHELRGIVKYQLGKYGKGFILVDPRNSSKTCAKCGYVKMDLTLSDRVFECPKCGWRANRDYNSALNHLKHAGWEPPVVPMELRPLPLLEGQGGAGKREAP

SEQ ID NO: 56867 - protein, 379 aa, unknown
  TnpB Polypeptide
MRGFKFRIYPTADQIRQIQVNCSCSRFVYNRMLDLHEQAYRKDGRSLSYSMMANMLPSLKKEEATYFLRKADSMCLQEAVRDLDRAFQNFFTHRARYPRFKKRKTMYGMTYRTRNQSNGIRITDRNHIHLPVLGNVKIKLSREPDGKILNATVSATPTGKYFVSLCVSGWHPYKKDAPHTEIGIDVGLTEFYTDSGGRSVRAPKPLPKYQKRLARAQRRLSRMKEHARKENIPLWQCRNYQKQKTVVAGIHEKIASIRNDFLHKTSTQLCDENQIICVEHLNVRGMKNNHHLAKAISDAAWSKFFTMLEYKQNERHGYLVKVDTFYPSSQTCHCCGCINPKVKNLRIREWDCPKCGVHNGRDHNAAVNILNEGLRLLAS

SEQ ID NO: 56868 - protein, 129 aa, Thermosipho sp.
VVEDININGMMKNSKLSKYIHMQSWGKFITILTYKAKNLGIEVIKANRFFPSSQTCSVCGYVNKEVKDLKIRKWVCPICKAEHDRDINAAKNLAKYGLTIRVGREPSEFTPVDSALAAEPAKGLRAITG

SEQ ID NO: 56869 - protein, 417 aa, unknown
  TnpB Polypeptide
VDEWVRRTAITRLSVDDEQRKLLEQTISAYTRGCQIATELAWERCDKKREIQSIAYEPIREQTALGAQHTILATHQAAEAITGCITRRSTGKQTTKPTFTAPTVTYDTRSMTLFDDDTVSLATTENRVRCPLVLPDDEDGYQRRYLDSDEWQVTESTLTARDGKYFLHLGFRRHKNETERDTAEDGTVLGIDLGLENLAVTSTAHFVGGRELTHNLREFENVRAGLQQTGTRSAHRTLMRSSGRELRYIRDVLHRASNSIVEEALRYDCDVIAFENLTHIRARTRASWGHRWAFRTLYEQVEYKAEAVGLTVKQVPARNTSKRCAECGFTATENRPTRSAFCCQECGARANADYNAAKNIGLRYVRRGHQSSRRTGDSQLALKSGSVTPKGGFTAYPDGFEAEFTDKPPLPRANPSE

SEQ ID NO: 56870 - protein, 424 aa, unknown
  TnpB Polypeptide
MAGTQALVKTLDFQLDIQSDNEGLLYDSCLEARSAYNETIRLAKDGVDWDAIPDRVADNATLVKNTTQRVVAKALGAMENYYEYDDFGQPSHTKDDTYPLRANYEEGYNLSLTDDGDVAFRISAKPYKHVTGVLNGSAAHLAVLKTALKSDEWRIGTAETLFHNDTPELHVTVTNTERSVRDKQDSQTVVGVDVNEDNVALTALSESGVEDTLVIDFPEIKFERHRYFTMRKRVQSAGKSGMHDTLEGREERFVRDRLHKVSRHIVEWSQQFERPCIVFEDLKEMRDSIDYGTRMNRRLHHLPFRALQFYTSYKASFEGIPIGWINPEYTSQRCPMCGHTERANRNKKRFKCKVCSHQDHSDRGASVNIAVKGSKKLDWNVPALNNLPQVKKVRRQASGAVDAPTVTHDAVRGYQADGRVGVSD

SEQ ID NO: 56871 - protein, 538 aa, Streptomyces sp.
VAASFVVPGPAGVAIRDRLRVSNADAAVLTEVGVHLGSLAAGDLAERSRQGLGHDAASWAVRKRSLTGRSSARWAGSITKATHDQWALARRGQAAQTAWLRRQIASIEARLARPLGAKADKRAGLVRGYATRVEWHAKSRRLQTLKARLAVVEADQAAGRVHVVRGGKRLANGRHHLRAASLDEHAWRQRWQAERMFLTADGESGKRVGNETIRVTETGQLSLKVPAPLTHLANAPHGRYVLDATVRFQYRGQEWRDRITANRAVAYRIHHDVLRGRWYVTASWQRAAAPALPLQAALARGVVGVDMNDDHLAAWHLDVHGNPIGEPQRYFHDLTGTAQHRDAQIRHALTRLLHHTRRCGAAAIAIEDLDFSDGTSREKHGRNKRFRRLISRFPTAKLKARLVSMAAEQNIAIVAVDPAYTSRWGAQHWQKPLSTTTRKISRHDAASIAVGRRALGHPIRRRTAPPPHHRSDGAGHRTVQARPEIRRRDEPRPHLPGPRTGCAPPGIGAKAGDQGAQHRSGHPAEQESWQQDSLPLSL

SEQ ID NO: 56872 - protein, 460 aa, unknown
  TnpB Polypeptide
MNLSKTPAVGLTSDEKDLTPYWNSSCLDMSQKLLSHTKTGYVGSDLNSLNPLPKNTIATSWFSTKANCHHKPSLSTIYSQLSTSSLVDCTDLESTVVRSKKIRIYPTNPQQARRYLGLSRWWFNRTIAYLKQPDTKASLYDVRKVVQKGDDIPDWAMDCPQRIREHAMADACNAVKNAKAKYLKTDKVQQVSFRARRDPIQSFGFDKSSLNQDFVFGSKKFKMEFESSEPFHTEGDNCVDLEGTRIVQEGSRYFVIIPQKRLYQVPENQRLDAVALDPGVRTFMTFYSEVLHGKIGEGDFQRIYRLCLNLDKLMSKISKAKCKQKRRLKQAAERMRWKIWDLIDELHKKTANFLVRNFDRIFIPTFETSHMVIKLASSTARNMMTFRHYGFKEYLKARGQQAMCEVVEVSEAYTSKTCSYRGTIHKIGSKKRLKCQCGAKVDRDLNGARGIFLRALSVTI

SEQ ID NO: 56873 - protein, 444 aa, Acidimicrobiaceae sp.
VTTTEPSPGELTTVTQAYVFALDPTHSQVSLLRSHIGGTRFVYNALLGLVKTNWDENRAKVHAGEAVTREDYLGTRHLDLQKTWYANRDEVATWWSENGSSTYNYACLNLSKAFANHRAGRAKFPTFKKRGSSGSVSFLASAIKLSDSHHVRVSRVGENKTYESTRKLYRHLERGTGRIMAATVTERGGMYTISFTVAVTRVVPATRSPEKIIGIDVGLTTLYTGAGADGEQLLNVENPRHLITVQKELSHAQRVASRRNGPKPGVAPSNRWKKANSRVQKIHTSTANVRRNLIHETTSMLAKNYDVIVIEDLNVKGMVKNHSLAKHISDAAWGEFSRQLEYKTTWYGSTLVKADRFYPSSKTCAQCGAVKAKLSLTERTFACDSCGHQVDRDLNAAINLARLGLPGTSSGTGRGGEVRPQPQTLVATAHPGEASTETPRALGA

SEQ ID NO: 56874 - protein, 431 aa, unknown
  TnpB Polypeptide
MKTAHKIRMNPTAEQVDYLKRACGTRRFIYNWGREHWEAEYQAYKLEQETVPEAERTLKPPNAMGLKKQFNAIRETAYPWSYNVTKCVVEGAFDDLEKAYANFFAGRAEYPKYKKKGKSHESFYLSNDKFAVGSHWISIPGLGRFLLDSRKTQKDRGKLRRKLGTVNLSEKLRFVEEGKAPVPSKHRNRRKQVLCQQVKILGATVACEAGHWYVSIQVDIKKPLPTTPEPVVGVDVGLKTAAVVSDGRRLENQKPLSLHRKRLGTLQRRLSRKQKIKDPETGKTKFSKNYEKQRVKVARKHQQIASIRADVQHKFTTELARTAGAIGIEDLHILGMMANRKLARAVADAAMGQLLTFLKNKVASAGGQIFLASRWFPSTKRCSGCGHIKKRMPLKHRTYQCLACGLVIDRDLNASLNLAQFAHDMLRHLSA

SEQ ID NO: 56875 - protein, 536 aa, Rhodococcus sp.
MLVSRCAFVLFQVELLRRSAVGRTGDPLSEGLRLGGERRHRRLRHLRGEVNDRCVRSSPVQRVSAFLGRSGRESGTVIEHQFGLRCGLGGGAVIRAYLFALDSTIEQEHQFRSHCGAQRFAYNWALAQVTANWNQRSAEESYGIAEADRTPWINTSAYSLRKTWNQVKDVVAPWWGENSKEAYASGCTNLAVALKNRRDGRTRMPRFKSKRSRPSCGFTTGAFGLGRDRRHIRLPRIGEVRTYESTRKLARRIEAGTARIISATLSFQRGRWHVSFAVELADTDTDAAPRGGQPVAGIDLGITALATLSTGETIANPRHLDKAQRQLRRAQRVTARRQGPDRRSGQAPSNRWRKANDRVSRLHTCVANQRRDGLHQLTTRLVGEFDTIVIEDLHVAGMVRNRRLARRIADAGWGEFRRQLTYKADTAGVRLVVADRWFASSKTCSGCGAAKTKLALSERTYVCAVCGLILDRDHNAALNLAALAGGGTGELLREQPAGTRVRPDHVSGSEIATGRPRCGQRHVREDVAHGAELHAS

SEQ ID NO: 56876 - protein, 421 aa, unknown
  TnpB Polypeptide
MICKSYELKIDKSHLSKELANHLRQLFLEAKWFTNYAIANGIFEVDYKIKTVQIKVKDTFEERQIKHLSSQMKQAIIDKLKQDVKNLSILKNNGHKVGKIKFKRFVKTIPLKQFGVTYAICDKNHVRIQGIGKKVRVRGIKQIPTGAEFSNAYLIQDYGDYYLRVITYQNPENTVLQGNSKNNAVGIDFGLRNQITLSNGISIQYRIPVVTKKLRRLYKKFTRTQKGSNNRLKLNLKIQKQFAKSNNIKKDIKNKIVHCIRENFSIVCFQNDDIRQWQRIWGSKVLDTAIGKFKDILKERIPISIVVNKTFPSTYLCSHCGTINKISLAEEIYKCPVCGFTMHRDLKAARDIFSEGLKRLPMEHREAALLYQGRYACGEETSTRMLEYLNSIPYIRASFLYETGSLTALARGSSLLSPISI

SEQ ID NO: 56877 - protein, 393 aa, unknown
  TnpB Polypeptide
VLALKSVTQPYSPSPLIKDLMKRYIDAINLCIDIAIEKNITSKNSLSNEAYKIISRYNLPSYYYVEIINKAIALVKTYRKRLRKGQKASKPRVSKLTLSSYYGFKIDGEYLFIPIPNKKYRNSYEKIELNNYVRGKISNVEVRSFTISDGRLSLTIRKKAPLIECNNTVGIDRNIRNITVGNEYHYKRYDTSEVVKIKNRYRKKESHFKRNDRRIKKKIKAKYGRRSSNRVNQILHKISKDIVMDAIKNNEAIVLENIKGIRNITKKGDYKGKDYRFLFNNAFPYGKLEFQIKYKCAWEGLPVIELSREDTRNTSRTCSVCGSLTRIEHGRILHCDKCGLTIDRDINASINISKRGRTWLKRSQPNEGLKGPSSEAMIQSKDGEQMMVSRILK

SEQ ID NO: 56878 - protein, 167 aa, Photorhabdus sp.
VRGYQAKSPKGFERGEDPEIVNATRNLRRKQKSLSRKQKGRANRSNARLRLAAVHERIAHARAIGDAGWHGFLMKLEYKAAAAGVHLVKLDQWFASSKTCHCCGHKVSEMPLRKRIWQCPFCRVEHDRDINAAINIQRKGITALQAAGLVFSAHGGQRKSVIKTVAA

SEQ ID NO: 56879 - protein, 420 aa, unknown
  TnpB Polypeptide
VTFKLYPNDREAERLTAWVRLHCELYNAALQERIEAYRKAGKTISYYDQQNVLPEIKAARPEFVELGSHALQQTLRRLDLAYQAFFRRVKAGQTPGFPRFKSSKRFSGFCYPDPAGWKVFQQGPRGATLRLGSGKDAMMIRARGQHRFGAQAAPNDLTIIRKNGEWFASVTLRVPQSACARERSDHQHRGVDFGLTDWATFDDGETVANPRWTRNELPRLAQLQRQRAKKKKGSVRHKRLTQQAARLHERIGNLRREFLHQTTTEWVRTCALIATEELQTQNMSRSAKGTLDKPGRRVKQKAGLNREILSAGLGMAHQMLAYKAVEAGTRLHVSNTRQLKPSQRCAGCWEIVPKTLAQREHQCPHCGHTMQRDQNSALVVLIDAHTPGTGVAARPKPLARQRAKSKSVTRETPATTTQEV

SEQ ID NO: 56880 - protein, 450 aa, Mycobacterium sp.
MAPTPAAAPVRKPRARKRPKGAPTHVRSWPLRPLPTQCREIGIRFFTGVRVYNAVLGEFIARSRAVKSDLAWAAARELPHRSPGERQIRRTAVRTVEQAHGFTLDAAQSFASSLRKSWVREHLPAQETQSLGARAFDAVRQWHVGTKGKPRFKSVKRGLHSLAAKDGNGALRPKTDEAGALVGLQWGAGLVVPIAPAAVSGRRGREQQAELAEIEALIAAGKVRSTRIVRTVINGRDTYRMQLVCDGRPSRRYPVGEGRVSFDLGPSQIAVAVERSDGSWSGWVEPLADAIRLDTLRLRRTQRHLDRQHRAGSPDCFRSDGTHTWVRCGWRRSAAAMRTTRQVAELHRRLAEHRKTLHGALGNRLMGHGADIACERLDYVSWQKNFPRSVRDRAPGSLVEMVRRKAESAGGQQLYEYNPRTTALSQRSRPVEWCKSGRVSACGSVVATMP

SEQ ID NO: 56881 - protein, 435 aa, Lactobacillus sp.
MARKQLMISMSDLPYHLGIKMRIYPSSQQKRIIAINCGVSRAVYNKLIAINSELLHLRKTGIYIQTVAERIETLELRKKKLSKYYSYMSVNDVDSLAVAQAKLNYNAAWNVFKKIHSSGVPKYHKKGVSDSYQTSCTYTTENKKKGNCTPFSGSVRFLDTKHVQLPKLGRIRISGSSYRKILAHNPNFRIGTATIKYDTSGYYLSLQIGDVAPFIDPKPKTGKITGIDLNTDNFLTDSSGNVIDNPRYYRKSLKRLKSLQRRMSRRQVRAKKEGRKLAESRNYQKSRLQAARLHQHVKNQREDFLQKLSTAYINNHDVVVLEDLRGKNLMKNHALAMSIADVGWYSFQRMLEYKADLYGKKYIEIDKRNTTQRCSNCGSIMGHNGYPKLTLKDREWDCPICKAHHIRDYNAAKNILEKGIAKLEEEEYSIIPYKS

SEQ ID NO: 56882 - protein, 389 aa, unknown
  TnpB Polypeptide
MNKTIRKSFKFQIKVTPEVSLQLANFAGASRFVWNKALALNLERLEQNAPLMWYQELNFWSSLWKKSDEYGFLKELPSQVIQQKLIDLEKAFKDAFDKKQPLKRIPVFKKKGQHDSFRYPQSFKINQQKNKVFLPKIGWVSYRNSRNIVGNAKNVTLSRKGKHWYIAIQTEYEAELLPHKSTSMVGIDMGIKQFATLSDGTVYFPLSSFKAKSDKLAKLQRKLKHKKKFSNNWKKVIAKITQCHEDIGNARKDYLHKVSTEISESQAVIVIEDLRIKNMSKSAKGNNEKQGKKVAQKSGLNKFILDQGWGMFAIMLEYKQNWNNGVVLRVPAQYTSQTCPRCRHVAKENRLTQSSFVCVECGFSENADIVGAINILAKGHVILAGRTAG

SEQ ID NO: 56883 - protein, 403 aa, Oscillatoriales sp.
MFALEFKAKGKPNQYAAIDEAIRTAQFVRNKCIRFWMDNRGVGQKELYRHSTVLREEFPFVKSLNSSACQASVERAYSAIARFYDNCKKAIPGKKCYPQFKKNCRSVEYKVSGWKLSETRKQITLTDKKGIGKLKLKGTWDLNFYQLDQIKRVRLIRRADGYYVQFLIGAENKVDSAPTGKTIGLDVGLKEFYTDSDGYSELSPKFYRQSEKRLKFKQRLVSRKKKCSANRKKAINRLGRVHLKISRQREEHAKRLARCVIQSHDLVAYEDLRIKNLVKNHCLAKSINDTGWYQFRKWLEYFGVKFNRVTVAVNPAYTSQECSNCAAIVKKSLSVRTHVCECGFVLDRDWNAAINILKRALSTVGHTGTWILDPNALGDSTSTLAGEILSEQVESMNKESSRL

SEQ ID NO: 56884 - protein, 369 aa, unknown
  TnpB Polypeptide
VRLLKITKGLKFRIYPSKQQQSMINKTLGCSRFVYNHFLHIRMDEWKLNHNSIRYEDTATMLKDLKKYSEYSWLKEVDSTALQQSLRDLQKAYDNFFAKRTGYPYFKSKHNHCLSYRSQCVNNNIRVVGDKIQLPKIGRVKAKFSREVLGKISNVTVTRTASGKYFVSLCVTYEADKLTNAGGQLGIDVGLKEFYSDSNGNTVANPRILRKWSRKLAKEQRKLSRKMPRSHRRNKQRIRVARIHEHIANIRQDFLHKLSTKLVRENQTIAIEDLKVKNMMKNHKLAKAIADISWSEFFRMLEYKAPLYDSEVIRVPTFYPSSQTCHECGYQNPITKDLSVREWDCPECGCHHNRDVNAAQNILSVALAG

SEQ ID NO: 56885 - protein, 306 aa, unknown
  TnpB Polypeptide
MDSSRIERAYKFRLYPTPEQESLLRRTLGCVRLVYNKALDARRTAWHEREEKIGYADTSRMLTAWKKTDDYAFLNEVSAVPLQQGLRHLQSAYMNFFNGIGAYPRYKQKRHGGSMEFTRSAFDYQWPYTLRLAKMMDTRLNVKWSRTLPKGAEPTTVTVSLDPAGRWFVSLLVRDDAVEHLPAVDRAIGIDMGLDAFAILSDGTKIENPRYGKRQCKRLRKAQRALARKQKGSCNYEKQRQRIARIHAHKADQRRDFLHKLSTRIIRENQTVCVETLNVKGLSARCKPKPDATAGTRRMGKAASAP

SEQ ID NO: 56886 - protein, 521 aa, unknown
  TnpB Polypeptide
MKRAKTPTFLIELPLQVDWSQERQLRAHLEAARCLYNALLGETMKRLRCMRSDPAWNKARAIPRSHKQERAQAFSALRKQYHFSEYDLHEYAKRARTSWIADHIDSTMAQTLATRAYHAANRVCIGKAKRVRFRSRGRGIDSVEGKRNDVGMRFVLDPNAGDGGFVVWNEQVIPAIIDWRDPVVQHGMRHQIKYVRLLRRKASSEHAQGADKDGNRYAVQLVLEGHAFIKPKHEKTGRDTIGLDIGPSTLAMVPRQAKADLVTFCEELAPDTRKKRRLQRKMDRQRRVNNPDNYDEQGRIKKGRLHWKESKRYKATRRQHANTERKLAAHRKSLHGHLAHRIAQRGTTITIEKTSFKAWQKQYGRSIGLRAPGMFLAHLRRLVAKTGGTLREVSAYQTKLSQYCHQCRQYHMKPRSERWHTCPCGFGPVQRDLYSAFLLAYLEPQQTHPSVNQHTWEGAEPRLRAVMEGLQQRANEGQHLPRSMGVSASRKAARAGARRLESPAYPYQEPVAPSGTTGNGG

SEQ ID NO: 56887 - protein, 431 aa, unknown
  TnpB Polypeptide
MKISQYYQFRLFPHQEQEILLNQAIGSVRFVWNQILAQSFELFIKEEYIRYEVLEKHLLPLKKNPDFSFLNDTFSASLQQKILDLASAWSRFFNPKAHARLKENKRKPKKPKFFKLADGSEIQLRPLMPRFKKKSSGDQSFRIPFQGCKIDNNRISLPKKIGWIKFKKSQEILGTITSITIKKLCGHWYISFCTNRTVEKPVHPSKTAIGVDLGIKKLITTSEGEVISPKNSFKQNQIKIAKLQRKLAKKVKFSENWKKLNLKIQKLHHHIANIRHDYLHKVTTTLSKNHAMIVVEDLKVANMSKSAKGTIENKGKNVKAKSGLNKSILDQGWSMLVNMLEYKQQWRGGLLVKVDPKYTSQTCSSCGHVAKENRLTQASFSCVECSFSENADMNASRNILAVGHTVLSVEGGRGKGHPAIQKTSEIRKEVA

SEQ ID NO: 56888 - protein, 396 aa, unknown
  TnpB Polypeptide
MIVVEFKLAGAARQYAAFDEAIRTTQFIRNKCVRKWRDERGVKPYDLNRYCAVLAREYDFASKLNSQARQAAAERAAAAIVRFYDNCRQKKPGKKGYPQFQKDGRSIEYKTTGWKLDEARRAITFMDGFKAGTFRLKGTRDLRGYALDQVKRVRVVKKADGYYSQFCIDAERRVSVEASGKAVGIDLGLTHFYTDSEGVAVENPRHLRQSERALKRLQRRVSSKAKGSKNRAKARGKLARKQLKVSRQRRDFAVKTARALIMSNDVIAYEDLKVRNMVKNRHLAKSIADAGWRAFVSWLDYLAHVYGKVVVAVPPAYTSQNCAGCGERVKKALSERTHVCPRCGTVLDRDHNAARNILALGLRRLEETTAGHAERNAWGQSALYPLEETQVDKAAG

SEQ ID NO: 56889 - protein, 200 aa, unknown
  TnpB Polypeptide
MVKAIKVMLIPNNVQKTKMFQYAGASRFAYNWALAREKENYEKGGKFISDSELRKEFTKLRHSDEYAWLLDISNNVTKQAIKDACTAYKNFFKGLQKFPRFKSKKRSMPKFYQDNVKIQFSHTHVKFEGFSSSRKANKQKMNWVRLAEHGRIPTDVKYMNPRISFDGLNWCISVCVEFPDCKETLNDDGVGIDFGIKDLE

SEQ ID NO: 56890 - protein, 418 aa, unknown
  TnpB Polypeptide
MRLSCKTACRINEPYANIIGHMCYAAFKLWNVCNYERMHYKELNLPVPYPDWYYQKSAHKDDIWYKSLPAQTAQEVCKQLDKSWQSFYALHKSKGIENPRPPRFKQENMAITYMQMGIVHDPGSDVVRLSISKNLKDFMQKQYGIHEDYLYLENKIFKNMDAIKQIKLYPPENGSMEIIIIYEVPDTNLVPDNGHYLSIDLGLHNLMTCYDNSGKAMIVGRRYLTICWKYDKEISKVQSAWYSSQVNAGIQYPKSSKHIRRLYEKKRNTVTDYLHKVTRYIADYCKEHGISKVIIGDITHIRKDKDLGHINNQKLHALPFARIYQMLSYKLARYGIDFVKQTEAYTSQCSPFSVDVSKASASKKQRVKRGLYRENGQIWNADAVGAYNIMRAYLKEANLNSIPLCKGLSNPKIIKVAV

SEQ ID NO: 56891 - protein, 377 aa, unknown
  TnpB Polypeptide
MRVYKSYRFRLYPDEEQTEKLARQFGACRFVYNYFLEARSGCYDATGEDMTYQYMASELAKLKAMPGQLWLRESNAQSLQVALRNLDTAFLRYRNHLASHPNFKSKKGHQSFSVPQGFKLYSNHLKIPKMLPMKIERHRRMEGKPRKVVISKTTSGNYYASFLCLVEPCEQKTTGGIANAKKGTNSLIEISGKKVEHQEKDEEVSGKLRCAKKHRKRCAAHSRGREDAELIIARLKEHIANKQLDYLHKLSRQVIDENQAIYLAVRNMAGSPGCGVWGELIRQLKYKGAWYGCSIIVTDKYVDSGAYVLPLPGNFQENHITYLAPGSTVGVTGNMLGEGMTADADMPDDPGSLKQPTKVSKPLYKRCKQRWWDRNPL

SEQ ID NO: 56892 - protein, 409 aa, unknown
  TnpB Polypeptide
MNLILRSYRLRAYPNGAQRRLLDRWFGAIRWLWNTALEIRSEAYRTCGLSLTGNDLSRWLTQWKHTSGHEWLGEVPATALAQCLRDQDRAFSGFFAKRVRYPRFKAKGGRQSLRFQGVGAAWRTGVLSLPKLGVLKLAEDLPEIERPDMVTLSRDATGAYYVSFSAELPCTSLPGTGDLVGVDLGLTHLATLSTGEKITNPKHYQRRLRYLRQQQRCLARRQKGSHRREKQRLRVARAHAQVREARQYALHALTTRLVKEFSVIAIEDLNVKALARGRGARAIQDAAFGELRRQLQYKSEWYDRLLLVVDRWYASSKHCSMCRFTLDELRLDQRQWTCPKCGTCHDRDINAAQNLLTQGMRQLAGRDDRDLRVDAGGSCPEEHILVQVLAEEARSGHRNPTGMEPARLG

SEQ ID NO: 56893 - protein, 404 aa, Parcubacteria sp.
MLNTYQFRAYPNTGHKDFFAQHFGCTRKVYNHFLGEHEQDYKDSQKPWNFYEYKRELPALKEQFPFLKEVNSQSLQAAVQNLDRAYKSFFARRTKHPRFKSKHHKQSFCVPQNTKVDFERGLVFIPKLKTGIKCKFHRRFEGTIKQATIAKTQNGEYYISITVEEPDMAQKMQHTLDEAKAIGIDVGLLSFLTLSDGTKVDNPRWLKQSEKKLARLHRKLSKKIKGSKNRNKQRLKVAKQHQKVSNQRKDFQHKLSRKIVDDNQVGMIFVEDLNVRGLLKNRKLAKHISSVAWGQFLRFLEYKAHRAGKFFGKIGRFEPSSKMCHVCGHINHDLDLSERTWQCPHCLSVLDRDINAAINIRNIGLHTAGIAEIHACREETPTVEPSVLQQVTSLKQEARHFNGE

SEQ ID NO: 56894 - protein, 408 aa, unknown
  TnpB Polypeptide
MKVRRTEQIWLEPNDTVGNLSHISKNLYNESNYAIRQEFINNGKYISYYDLMPEKKLSENAKQLPAQTVQQILRNLDKNWKSFFRSIKDWKKHPGKYRGMPRLPKYKKKDGQHILIFTNQQCSINDRVLKFPKKCNFDLEVRTRINNEDMQQVRIVPRGVGYILEIVYWKHVNPEELSKKRRLNIDPGLKNLVTLTNNIGQQPIVIKGNIPKSINQYFNKKYAKILRQFDMQGIKSSKRFYKLINKRNRKIKNFFHVVTKHIIDYCKDNDIGVIVIGHNNDQKQKIKIGKKQNQHFVQIPFSMLIQQLQYKGEEAGIDIILQEESHTSKCSVLDMEPIEHHTKYLGKRFTRGLFRSAMGKIINADVQGSYNIGFKAFPKTFTKVEVDRIEGVGLHPLKHSFIKRWTSC

SEQ ID NO: 56895 - protein, 569 aa, Firmicutes sp.
MKKRKKNKKKSGRPDGEISYTVCGEFFPEAYPAVRSQKWSRGTEDPLDAEMRLFCSCTRWAFNRLLEGDSREALKKQGQGTFGLNSRYCDDAILKAKAVIESQKELLTLEIEETGTKLARTKKKLGWAEKDLDKAIEKNDPVKIEKFKRAIHGRRARVKKLADKFGELKVHQDNGAIPKVVFGGRALWKRVCKGKATREEWRQARQDRLYARGDESKGGNPNIKIIWRNGEFTLSATISHLSEQKGVDSKGRPLMTRAPRAEGRLWLPEKYRLKVLELLLSGTPYTVELIKDRDSRYRAHITFTVAVPEAATNSNRGYLGMDANPDGVALANVSYTGQPEAWPEGFDMPYPKALHKFAGEFQVTVHPNGFLYIKIPELAYSRGYRRTYLIGVLAKAVADTAKALGKPIALEKLNFGKDRLDTNKKFNRMAANFPFKKMVEAVIRKAFKEGAGVKQVWPAHTSTIGYWKYMQKYGVIIHHAAALVITRRAIGFRERITKELKRKIQVIREKLSQKVNSLPGEGKGMIRKVKRLFNRLDGKVLVHNGLARFKQESFYSVWRDLKQLVLLSR

SEQ ID NO: 56896 - protein, 378 aa, unknown
  TnpB Polypeptide
MLKSSKYFMKKAFEFRLYPTIDQSNQLNQHIGSCRFVYNWALDQKVKTYEQIGKSISRFDLNKLIPNLKKQNPWLEEVNSQSLQSMTKQVESAFTRFFREKNGFPKFKSKKNPIQSFPIPQHYTVDFENNTVKIPKIGEIKAVLHKTFEGELKTASISKSCTGKYYISILVEDGKEFPVKQVFSESTTIGVDVGITDFAVMSTGEKVENPKYLKNSLKRLKVLQKRVSRKQSGSKNREKAKQKLAVLKEKITNQRNDFQHKLSFKLVSENQAIAVETLNVKGMIKNHHLAQVIFDSAWSNFVTKLEYKSEWLGKTILMIGKFEPSSKICHVCGYHNSELTLKDREWECHDCKTKHDRDINTAINIKKFSLIDQNLIGI

SEQ ID NO: 56897 - protein, 470 aa, Microcoleus sp.
LETIRALAKGGKRVSRIYPAISLYDSSSSEMMVMYLTQKNQLRELNKSEFLALRELCRMSKNLYNVGLYTVRQYFFQERKHLRYESNYHQCKGNENYQLLNTDIAQQTLKVVDRTFKSFYGLISAVKGGSYQQRVKLPHYLPADGYFLLIIPRIVVRDGKFRVPMSKAFKKQYGEIWIPFPKRLDINQVKEVRIHPKYNARYFEVEFISETEPEPVEVNPSRAISIDLGVDNLAACVDTSGASFLVDGKPIKSINQGYNKRNAHLQSIKDKQGIKGFTNQQVKLVARRNNQVRDYLNKTARFIANHCIKNQIAQMIVGYNPGIKQEINIGKRNNQNFVQIPFHSLRFKLKALCERYGLIYTEQEESYTSKASAVDGDEIPVYNADNPKTYQFSGKRIKRGLYRTRDGHLVNSDLNGSLNIGRKCKHNGFAGVSRGSLTAPRRINLLKLEKNVEQRGFNPLRNNFLESPVL

SEQ ID NO: 56898 - protein, 381 aa, Microcoleus sp.
MTQSLSVKCKLIVPVEYRPKIDETLRGFADACNQILAVAKRDNCWNTTKLHHKVYKPVREATGLKANHVCQAIRRVINNAKAVKQIHKFRPTSISLDIRTFKYVESAQTVGVTLKCGRVDFNLSIGGYQVALLRGQNLTSATLKKSNKGDYYINFVVEIDTPPTGKTPKVIGVDLGRRDIATTSTGKSWSGEQIQSARDRFSRVRANVQRKRTRNSRRLLRRLSGRERRFQEWLNHNISKQLVQEALVAEAALAFEDLTGIRDSLNEKPRSKTQRRRTNNWAFYQLRLFVNYKAAIAGVLVVFVPPAYTSQTCSRCRHVHPEKGKSYRNGKQFKCGHCRFEHDADINAACNIADLGKSVSLPESPGIACLLEGQLPLFRLA

SEQ ID NO: 56899 - protein, 509 aa, unknown
  TnpB Polypeptide
MRSTTPSFIVEVPLRVNDQQNRFLEKAFDFGRTVYNATLGTALGRLQRMRESKEWRDARNMPKGKERTDAFNKLHKQYSLTEYGLVTVANNHRKASGRNDIGAHEAQNIGKTVFKALNAYMFKGAGRPRFKSFRRGLNSIEGTSNTEIIFKPERGVVVWRKRAMKCLIPDTPYMKEALAPGRRVKYCRIVRRRLNGVQRWFAQIVVEGLPPVRKVYAPQCEVVGIDPGPSRIAYFHERHAGIADLAPTVDPQEAKVRTLQRAVDRSQRANNPDNYNADGTVKKGPKVWKTSNRGQKLYAKLAEHHRCLAATRKRDHGELANLLLQIGGTVKIEKNSYRSYQRNFGRSSNRRGAGAFVEHLKRKAESAGCRVVELNAYALKMSQYDPATDTYRKKPLKEREHRWGETDVYVQRDVMSAYLARYATENGHDRALLLEKWPTAEALLSGSGLCRHKPRNDPGASQDDSGLTKPCCASDGERRRGLPQTPCAENCLRAICDVRSTDGESRPAR

SEQ ID NO: 56900 - protein, 182 aa, unknown
  TnpB Polypeptide
VQSVWYAQQSERGIKYPKTSEHIQRLYRKKQNAVKDYLHKVTRWIAEYCRKEDIRCVVVGDIRNIRKEKDMGHKTNQKLHSLPYNRLYIMLEYKLKRYGIQLIKQEESYTSQCSPLSPEVSKRYAEASNRKARGMYMTDGERYNADAVGAFNILRKYLSVSGKHKKLSVAGLKNPEIVKVAA

SEQ ID NO: 56901 - protein, 436 aa, unknown
  TnpB Polypeptide
MIRSSVYRLYPGTLRRAQLLSGIAGANRYVWNWAVGQNRDAMKAYEEGQGEKPSPTFFTLGPEFTRLRNSEGHEWLKALPYTEVRYVLKRYADAMKEARKGQRGFPKFKHKEDGDSFTIPQNVRIENSRLYVTKVGWVPISRRGGDPWAHGKAKQAVVVKPPNGKWYVSLFWEVPDAEREDNGQAVGVDMGKWNVATTEPDRVFMPDVSRLETKLKRHQRKMHRRKRVPLLDADGEPRRTRRGKAIMVNSHRREKERRTVAKLYRRTAHVRDNWKHHVSHSLAERFGTVCVEGLKIRNMMKSARGTVEKPGKNVKAKSSLNRGISESGWGRLRWMLDYKAHRVETVNPAYTSQTCHQCGHVAEENRRGERFKCVSCGYAGNADINAAFNILALGTGAAGQGGAFASVRAGPSGRVLSSDPDDLSMDIQGLLADYCI

SEQ ID NO: 56902 - protein, 471 aa, unknown
  TnpB Polypeptide
MPIMHRASRYRLYPNQTQERQFVQLCGAGRFVYNELLAEQKREYARFEAGEREKPGASPFEFGKRFARLKAKEGNAWLGGLSATVVRGTGAFPLGAAFAHFSRRVREGKKGKEAGFPRFKVKGRSRESFTIPEAVKIQAKRLWVPKVGWIRMNRKAQSRTRGADPWDGGEARVAVVYRELDKWYVSVLWEVEAPEWRWHGGVCGIDRNSENFAAGWIGGRRLIEIPYDRIGKYEARARHYQWRASHRERIELKDAAGEPVRTKSGKAVKVASNRRRLLQQRAAKAKRKAAEIRKDFSHQSSANLARLFGHIVLEELDVQAMRRSARGTREKPGRRVGAKAALNRKMAQFSCMGMVERFLQYKAWDLIRVPARNTSRTCAECGHVDEDNRKEQAYFRCLACGHTDNADANAARNILNLGLEKLLAGGAPVTGRGEDNEAGAFFMECLVETASDPSTMSWNYRGSPPDFHTQS

SEQ ID NO: 56903 - protein, 409 aa, Arachidicoccus sp.
LKPPPLGGGLSSRIGLKIIVVFCTKYLCILKDLSIFVKDMVVVAQIKLVPDREQFGLLMETLTAMNLACNQISAVAFDNQCFNRIRLHKLTYYAIREDFGLKSQMTIRAIGKVADAYKVKAKKATGPIDTQRTFRLKGAVAFDCRMISFDLSSDSLSILTLEGRQIMKFEVGDNARNLLAFQKGESDLFFRNGHFFLNVSCDIPEPELIDHENVIGVDLGINQLATLSTGESFDGQQTEKVHKKNQAKRAGLQKKKTRSAKRKLKKNSGKEKRFKRDENHKISKRIVDEAKRTGSAIALEDLTGIRRRQRVRKSQRSRFSGWAFHQLRQFIIYKAKLAGVPVFLVPPAYTSQRCHKCGHIEKANRKTQSEFVCCSCGHGDHADKNAALNIAELGCSQSAHGRVVGFIRQ

SEQ ID NO: 56904 - protein, 152 aa, Arachidicoccus sp.
LKKNSGKEKRFKRNENHIISKRIVDEAKRTGSPIALEDLTGIRRRQRVRKSRRSRFSGWAFHQLRQFIIYKAKLAGVPVFLVPPAYTSQRCHKCGHIEKANRKTQSEFVCCSCGHGDHADKNAALNIAELGCSQSAHGRIVGFIRQWQALAF

SEQ ID NO: 56905 - protein, 418 aa, Arachidicoccus sp.
MHFKSYKVRLEPNNRQRSQFAQHAGVARHAYNAGLNYCIASYDKEKKTPSAITMHKWLVAEVKSKFPWYYKASKFSSQQALRNLEVSFKNFHRYQKKYGYKNYRFKIVNGKKTIVGLKGLPKFKKKGSNDRFYLEGKILIEKNKIKLPKIGRVKLSEAVPVDEIKNCTISKIADHWYLAFKTEVQTNHTEKKHQAVGVDLGVKQLAVLSNGETFENLKPYKNAKLKIRRDQKAVARKFMKGAENQSANYKKSCLKLAKTHNRVANIRINNIHKITSYLAKNFESVTIENLRVQNMSKNHKLASAILDGGFYEFKRQLLYKKSWYGGKVIIANSFFASSKTCSNCGAIKKELTLDQRVYNCNYCHYRQDRDLNAAINLENLEVSSTLTAFGDESSADSFKPTAQLVDELGRKHQVFNFE

SEQ ID NO: 56906 - protein, 246 aa, Arachidicoccus sp.
LKDCSRTPTDKYYVSLTVAGTKKTFEKTGKQAGIDLGIKEAVILSDGTIYKNIKAFKSLEKKLAYEQRQLAKKQKGSNSRQRQRKKVALLHERIANMRKDFISKITTEIVKNHDILCAEDLAVANLIKNHNLAKSLADVSLGRIRTELKYKCAWHDRVYIEIDRFYPSSKTCSGCGWIKQDLTLADRSWTCQSCGAHHDRDINAAKNILAEGLKIMSGCGTQSEGKPKQVEASSLEESVKPDKPKG

SEQ ID NO: 56907 - protein, 357 aa, Arachidicoccus sp.
MTKPYIKGYKFRIYPNKEQMRFLANVFGCNRFVYNYMLEWHNKVYKNEKRCLHLKEMNAMLPVLKKQEETKWLGAVIAQSLQMSVKDLESAFNRYFKKVSAHPTFKSKYDRQCFKIPQNFKFKDGKIKIPKLDSWIKVHVSREIEGKILYMHISKTPTDKYYVSLTVAGTKKTFEKTGKQAGIDLGIKEAVILSDGTIYKNIKAFKSLEKKLAYEQRQLAKKQKGSNSRQRQRKKVALLHERIESMRKDFISKITTEIVKNHDTLCVEDLAVANLIKNHKLAKSLADVSLGRIRTELKYKCAWHDRVYIEIDRYYPSSKTCSGCGWIKQDLTLADRSWTCQSCGAHHDRDINAAKIY

SEQ ID NO: 56908 - protein, 394 aa, Arachidicoccus sp.
MKQSKTYLKAFKFRIYPKGDQVTHLANNFGCCRYVFNKVLELRQKAFKEEGKSLSYFDTTKILPVLKRQEETKWLGKAMSQPLQMAAKNVDSAFKNFFSKKAKYPKFKCKNSRQCIKIQQGFRVEEDLLYIPKLKTGIKINLSREIKGKILYLHISKSTTGKYYASFTCEVPREQYDKTGNAVGVDVGIKESCILSSGKKYANIHALKKLENKVKYEQRRLSIKQKGSNSSRKQRLKIARLHERIRQLRETCLHNISSDIIKNNDIIITEDLSVKNLMQNHCIAKALSDASLGKLLTQLEYKSEWYGRTFAKVDRFFPSSKTCSACGAIKQDLKLSDRNWTCTTCHHQHDRDVNAAINILNEGLKKLSGLVTKPDIKQKWDEASSLEESENPDA

SEQ ID NO: 56909 - protein, 202 aa, Arachidicoccus sp.
IRWDHIQNIKAFKSLEKKLAYEQRQLAKKQKGSNSRQRQRKKVALLHERIANMRKDFISKITTEIVKNHDILCVEDLAVANLIKNHKLAKSLADVSLGRIRTELKYKCAWHDRVYIEIDRFYPSSKTCSGCGWIKQDLTLADRSWTCQSCGAHHDRDINAAKNILAEGLKIMSGCGTQSEGKPKQVEASSLEESVKPDKPKG

SEQ ID NO: 56910 - protein, 236 aa, Arachidicoccus sp.
MPVICWHFKRENQICFFATVTFFLNVSCDIPEPELIDHENVIGVDLGINQLATLSTGESFDGQQTEKVHKKNQAKRTGLQKKKTRSAKRKLKKNSGKEKRFKRNENHIISKRIVDEAKRTGSAIALEDLTGIRRRQRVRKSQRSRFSGWAFHQLRQFIIYKAKLAGVPVFLVPPAYTSQRCHKCGHIEKANRKTQSEFVCCSCGHGDHADKNAALNIAELGCSQSAHGRIVGFIRQ

SEQ ID NO: 56911 - protein, 195 aa, Arachidicoccus sp.
IQNNLGINQLATLSTGESFDGQQTEKVHKKNQAKRTGLQKKKTRSAKRKLKKNSGKEKRFKRDENHKISKRIVDEAKRTGSAIALEDLTGIRRRQRVRKSQRSRFSGWAFHQLRQFIIYKAKLAGVPVFLVPPAYTSQRCHKCGHIEKANRKTQSEFVCCSCGHGDHADKNAALNIAELGCSQSAHGRVVGFIRQ

SEQ ID NO: 56912 - protein, 516 aa, unknown
  TnpB Polypeptide
MRANKPTFILELPLVTGDQERRPLKRKFALARTLYNATLGQALGRLKRMREDARWRHARTLPKGRERNALFNSLQREYQLTENGLRTLANNHRGASGRTDFGAHEAQCIGRTVYRALERYMFKGAGKPRFKSFRQGINSIEGTDNHEIMFKPEQRAVVWRKHVYPVIIPETHYVREALADPHDASKPRRVKYCRVIRRTIHGKEAWYVQLALEGLAPVRHVYAPPSEPVGIDPGPSQIAVYSPLGAGLFRLAPGVENLSRDMRRLQRKLDRSRRANNPENFNADGTCKKGPKRWKESNNYLKLKTQISEIYRRQAQTRKRDHGTLVNAILQMGGTVKIEKNSYLSYQKNFGRSTQRSGMGEFVQHLKRSAESANLYVQELDAYQFKLSQYDPVMDAYTKKPLKQRWHRHGMTDTIVQRDIHSAFLACYATEKGHDPILLCEKWTTAEPLLRDAGLCLTYQPRNDQDWAQALLRLTRVVKPIGLTPTGKRCILNTVCAGQCCAVSQETTQSVPYRSL

SEQ ID NO: 56913 - protein, 395 aa, unknown
  TnpB Polypeptide
MQNLKYKFRLYPNKEQLAALSQVAGNCRFIWNHFLASEHKTYSDTKKFNFFNKNSSDLTVLKKELDWLSLAPAVALQQTLKNLDLSMKTFFKNKTKRGFPRFKVKKNFQTSFTLTMVSIQKNVKDNTFYIPKVGDVRCVYTRALPSDFASCQIKQEAGKWFVVLTVKKQVEHIFKTGRQVGIDLNSHSYVLSDGTEIVIPKYLRDSQAKLRFLQKSLSRKKKGSSNRKKAQFKLSRHHWNVKQKRLDFCHKLTTSLIRKYDTIFLEDLNVVGIQKFNGHIIKDNIFALFRSQLEYKGLLYGKTVFCIDRWFPSSKTCNSCGAIKDDLKLSERLYVCEHCGAVEDRDLNAAKNILTAGQAGLVCGDHVSRDVKISQLVDEAENFGSDSGNHRPLGR

SEQ ID NO: 56914 - protein, 337 aa, Lactobacillus sp.
MVESVFRTVSARYKTVQKQMKQHPYRYKNKENKWIQVSRDLTWLVKPIQFHRPQADLIRQSNYSFVDKMKQISMTTLGERTKLGFTNKGFEKYFAEDWKLGTAKLVHNRGKWFLHIGITKEVGDFDTKNNPQIVGIDRGLRFLATVFDSKGKTLFFDGQMILRKRKKFLEIRRQLQAKGSKSAKEKLKQLAQRENRWMTDMNHRIAKTLVVAYGSHTLFVLEDLTNVTFSTNDLPKSLRNSHRSWSFFQLESFLTYKAQAIQSAVVKVNPAFTSQRCPKCGIIKKANRHHETHEYWCEQCQYRCNDDRLGAMNIEILGQEWLSGVKHPKIKNLTTIG

SEQ ID NO: 56915 - protein, 409 aa, Halococcus sp.
VVELRRTVVTKLDLPEGADESLQDTVDQFKHCANTASEWCWHGDDGYHVTSKAKAERALYADLKDETDLTANLVQKGIRRAVEAVKSGVSRLKDGERTSRPTFRKTSVVYDKRSATFNEDHATLSTVDGRIRADYVLPDDPEGTPHGRYLLNDDYEPRMATLQYDADADEWFLHISLRSYDGDGEPETDSSTEHTTVLGVDLGIDTIAATSTGKMWSGGYLNHRREQYERVRGSLQQRGTQSAHRTIESIGERETRWADDYLHCISKALVQEADAYGCDVIAFEELTHIRDRMPKAKKFHAWAFRRLYEYVEYKAEEYDIDVVQVNPAYTSQRCSKCGTTLEENRPNGDHRFECQKCGYAVHADYNAAKNIGMKHVRRRQKSIGGRPRVNVALKSGTVNANGRYSSTVA

SEQ ID NO: 56916 - protein, 408 aa, Halococcus sp.
VLNYRYRLNPTPAQKERLAWTVDTCRQVYNHFLHRLNRIDDTSSYSEQERLPKLKEWWTDLREVHSKVLQKVVQRLYDNLQTLRGLKENGHRVGQLRWKGAGYYHSFTYSQSGFKLDKKGDRDELWLSKIGRIPVVAHRDLPTDATVKAVTIKREPTGRWYAVLSVETPDDPPEKPTNPENVVGIDVGIVKFAHDTDGTAVGSLNLSHERERLEHEQRVLSRKEHGSANWEKQRRKVARRHADLKRKRRDFLHKLSNYYAEEYDLVAVEDLDAKELMQLDGNSRNRASAAWGTFRRMLAYKCEREGAHFAEVRPHGTTKECARCGAETDKPLWVREHSCPTCGFTADRDENAAWNVLQRGLTKVGMGNAELTPAETVVPTATAFQPVAANHVAETGSPALKREPQGER

SEQ ID NO: 56917 - protein, 431 aa, Halococcus sp.
MDLTLRCRAYPDEETASVAWEHIDILRQIRNQAIRHYYRSPHDDRPTEYDQHAKLPEWKRRWPVFKKPSAHAAQQAVSQIHKDHETQKGRRESGYKTGRLKWQGRGEFRSVSYNQPSRYDVDHNTGEDGWLRLRLEKIGWIQVRAHRAVPETDDVKRVVLKKERTGEWFVTFVVEADEPEKPDLSNLTADECVGIDLGILSYIHTSDDLAVGCLDLTDSYDRYARAQRSLDRKGHGSANWEKQRQKVARAKRHIKRKVLDFQHKLSTWLVTEYDFIAVEDLDVKPMLETSQSAKNKQDAAWSRFIRLLDYKAKLHGVHVISVEPRNTTKACNQCGVKTSKPLWVREHSCPACGHEEDRDLNAAKNVLDKALAESGVPFVRTTNTLHVGPGRSESTPVQTALPPFTDGGSGVCRHSHRVDAKRVVEAGSPDP

SEQ ID NO: 56918 - protein, 373 aa, unknown
  TnpB Polypeptide
MKIVRGYKTELDLNNTQRTACLKHAGAARYAYNWGLKRYQEEYAALRKTPNAISLHKELNSLKKTDFPWMYEVSKCAPQEALRDLEKAFKNFFKKCKLKKAGAWKQKCGYPRFKSKKKGIGSFRLTGSIHVFEKQIQLPRLGLLKLKEAGYLPTSGVNILSATVSEKAGRWYISVQVEEEVADPVPTTGKAIGVDLGVKTLATTSEAVAYENPKALRKNLKKLARLGRKHSRKKKGSKNRQQAARRLARMHARIANIRQNAIHQATSAIAKTKPCMIVLEDLNVRGMMANKRMARAVGDVGMHEFKRQITYKAEREGVSILTVSRWFPSSKTCSCCGWVDKDQELDDRVFVCLDCGYVADRDYNAAKNLAASA

SEQ ID NO: 56919 - protein, 358 aa, unknown
  TnpB Polypeptide
MILARKLKLIVSDEQHKVLIETLDQYKKCVDRVFEYGFQNHLISGSTLHKATYYELRNEYPNLPSALVCCARVKATEALKAIKKQTKNKWNTNCPKAGKFPAIRYNTTCCSIGKDTFAVATIKNRIKLGIINNPFVKEDVKQFSTTCELFYRRGNWYLTVFVETHCEDLIPTKNILGIDRGIKNIAVCSNNQFFNSKKLKNVKGKYRYLRKKLQAKGTYSAKRLLKKLSGKENRFVKDTNHCISKQIVSLPFDTFVLEDLNIRTKKSNGRKFNTLLSGWSWFQLEQFITYKALLKGKKVTYVDARYTSQKCSVCGYVYRGNRKTQSGFLCRKCGFQVHADLNASRNIKNNYIAMLGNT

SEQ ID NO: 56920 - protein, 403 aa, unknown
  TnpB Polypeptide
MAYRCRAYPDEVQQQMLMRTFGCVRVVWNRTLAARHARYQAEGKGISYAESDRALTELKKDPDLAFLAEVSSVPLQQALRHQQAAFTAFFAGRARYPRFKSRCSKQSATYTRSAFRMKDGRLWLAKMATSLRFVWTWPDVGVTSLEPTSVTVARDPAGRWFVTFHVDVAHPVPLPARSESVGVDVGLTHFAVLSTGEKVAHPRDWERHEKRLKRYQRRLARCQRGSANRAKTRVKVARTHARIGDARRDFLHKITTDLVRRFDVIAVEDLNVSGMVRNRSLARAISCTGWAEFRDMLDYKAQRYRRQVITVDRWYPSSKTCSACGHLLAAMSLGTRRWTCPSCGARHDRDINAAKNILAAGLAAGACNGADACGGTVRRTGATRARVPVKQEPRPVREGIPVS

SEQ ID NO: 56921 - protein, 341 aa, unknown
  TnpB Polypeptide
MQHIHACRFVYNSSLEQKIRAYEQEGQKLSCFDLNARLPALKEEHPWLKEVNSQSLQSANKNLDNAFTRFFREKKGFPRFKSKKNPVQSFQVPQHYAVDFERNRIKLPKLGEIKAVFHRTFTGTMKYATVSVTSTGKWFVNILVDDGAATPKPAPFTSDTTLGIDVGLTDFATLSTGEKVENPRYLKKSLKRLKVLQRRVSRKKKGSKNRKKAIQKLARCHEKVTNQRNDFLHNLSFRVVSENQAIAVESLNVAGMQKNHCLAQSISDVSWGTFFTILECFRSFNFDPLGSSKTDPPYYPFCLLADESFGDPRWRKLVPVMFRTSARCVIRSSKAAVSALS

SEQ ID NO: 56922 - protein, 402 aa, unknown
  TnpB Polypeptide
MLKAYEYRIYPTPQQEEIFNQTLGLCRLYWNIVVFNKNQDHNMQIEGYKQVFTKYKPEALQWSKDAACSIPLAQMWSDVRAAYTNFFKSCKGQRKGKFSKPPRFKSKKNPKDSFRYSCSNCTPKIASNGLYLTKKLGYIKGSFQCRFAEGKWKNITFRRTATGKWFVKICVEKKDEPKNNNKKIVAIDWNCRDEDFIVRSDGMKVKCPRYFRNSLKQLQHWQKIMSKRYVKGAIEQSQGYEKAKRKVTLIHEHIAWQRKDFLHKESRKLVNQYETVVVEDINLQNMAKMNHGKVISDQGFGMFRQMIAYKGHLEKVSPRNTSKTCHVCGYVNPAIKVGVNYWKCPICGENHDRDINAALNILSKYVTSQSIVGWELTEIRNACGEPRSSVKQENELTSSVSL

SEQ ID NO: 56923 - protein, 379 aa, unknown
  TnpB Polypeptide
MQCNKYSAIIWNTCVDADQKSRKDTNKSLTRSELQFLMKKSVPHILANSINIVILKYVTARDAMFCSIKAKHENSSKVKLPYKIKKFYNTGWTYQNIRFYKDKGYLTLAKPVLADSEGILRKQKPIKCHLKFIPDNIVEIELVYRNGLYLLIKTKQENDNVLIQSENEASIDLGEIHSITSIDNNENAIIITGRKLREIKQLRNKHLSKLRSRRSKCTKYSKQYKKYSRAIYNLKHKTDKKILDVVHKITKLYLDYCIKNNIRKVYYGDLDSCTRNTKIENRTSRKVRQKLSQWCYGLLTLELTNKLTRYGIELVKVKEYYTSKKCPRCGLLNTPKGRNYTCECGYSMHRDVNGAINILNDNSVYKVIRYKELKYLQIA

SEQ ID NO: 56924 - protein, 672 aa, unknown
  TnpB Polypeptide
LAARSRCTAPRWLARAASPSNVSVGYTTSPPRRSVRTARESPSPINLEVFLADLRIGEELFRGEVERQLPRGRFGRVGGVDQIRSEPQREVAAHRPRRGGLGIRRSDEEADDRDGAAPFERERDHRSRGDVLNERRVERLSLMFGVVALRELGRDSEHFRGDQLETLVFEARNDLSDQAPAHAVRLHEYQGPLDVPFRHRARRARREGKGFVWLPLGILFSHNGSLSRPFHYASPMILPPSSAVSSGGSRLILSYRYRLYPSPGQLAGFNHVLTELNYLWNYALAERRDAWFGKRRHVSYIDQQTNLKKWRAYDVLGLGAISYDHARDCLQRLDLAYSAAFRRIRERKWAGFPRFRRDTNSFTGVPDFDPWVQTPTGSWRLKIPKIGEVQIRRHRPPPPARVSSVTVSCEGREWYAILQYNVPDPPLPSATQPISPVGVDLGLAHLATLSTGETVETSRFFLQSQRPLKRLQRALSRKQRGSNRYERQRERIVRCHAKIRRRRRYWAHRWTSRWAEDHDLVVFEDFNIASFAEGNRLAKGMLDAGWGLLRQMTAYKEQLRSGRYLEVAAPGTSQTCSVCGQVANPRLRLSTRIFVCPCGLKEDRDVNAARNILNKGLDQLRRNTAEGRRVDGTPPLTKQGRRAYQRKRELKCGEIGPAAVNRSVGVQDPQAL

SEQ ID NO: 56925 - protein, 416 aa, Anabaena sp.
MLKVVKVKLYPDTQQQQSLAQAFGSCRWLWNYCLNLINQTYKETGKGLSGYEVKKIIPQLKKEYEWLTLTYSQCLQQVCLNLGVAFNNFFEKRAKYPRFKFKHGKQSIQYPQNVKVADNHLILPKIGEVSAIIHRPIEGKVKTVTISKNCSNQYFAAILLDDGKDKPLASKNGKSVGIDLGLTHFAVTSDGSKFDNPRILTKHEKNLKLRQQQLSRKQKGSNNRVKARKKVAIVHRKITNCREDFLHKLSRRIVNENQVIVVENLNVKGMMQNHKLAKSIHQVGWGMFCTMLKYKAEMSGKIYQEVDRFFPSSKTCHVCLNQVGSLPLNVRFWTCDNCQTRHDRDVNAAINLRDEGLRILTSQSPQVGKPAHGAGSSGTGDKACRPDVSRSKGGRKKSTTELSVGQEAYTLTVRSV

SEQ ID NO: 56926 - protein, 243 aa, Bifidobacterium sp.
MGVDLGMRFLAVSYDSYGVTRFFNGKEVIQKRAQYQALRTSLQKRGTRSARKRLNAIGHRENRWMRDLNHQVAKALVNQCKQPTLIVLEDLTGIRETTERVRKSRRYVQVSWAFHQLRQLIEYKARLNGHTVVLIDPAYTSQACPICGQVRKANRKKTRHEYVCANCGYQSNDDRIAAMNIRQRGYMTVLESISGKPDMEGSSQRSHDVPSASNRGTKGRRHPKGESTMTTAGQGQASSVRAR

SEQ ID NO: 56927 - protein, 377 aa, Burkholderia sp.
MDIKRAYRFRFYPVPEQEAILARTFGCARFAYNHMLRMRADAWQQRQARVGYHETSAALTALKKTPEHAWLNDVSSVPLQQALRHLQTAFTNFFAKRAKYPNFRRKDGAQSVEYTASAFRWDGTSLKLAKMDTPLAIRWSRTIPKGAKVTTVTVSRDTAGRYHVSMLCDDVASAKSESTSKVGIDFGLTDFVVLSTGEKIAAPNTFRKNEAKLATLQRRLARKQPGSANRKKARLKVARMHARIADCRRDFLHKLSTRLINENQVIAVESLAVSHMLKNRRLAKSISDAGWWEFARQLTYKAAWYGRVLISIDRWYPSSKQCSGCGHTVAKLPLKVRAWVCPGCSASHDRDVNAARNVLAAGLAVSAHGESANPMSR

SEQ ID NO: 56928 - protein, 313 aa, unknown
  TnpB Polypeptide
MSVLSYKFRIYPSKTVESKLNEQLELCRWLYNRLLFELNKAKEEGRKLKPKDTQSLIIKLKKEEKPELNKVYSKVLQMVNYQLWSNIKALHRLKQNGKKVGWLRYKTSPNSFKTLNFNQSGFKIDFERKRLVLSKVGEIPIKLHRPIEGKIKGVIVKRTKTGKWFAIVQAEVDEEPLPKTGRAVGIDVGIHHFCVDSDGLAFENPKFIDRTLEKIKKVQKELSRKKKKSKRREKARQKLAKLYEKLNNQRLDFLHKLSRYYVNNYDVIVVEDLDVKDMVENSKSSTLNRHIHDSAWSKFLSLLAYKAESVNYL

SEQ ID NO: 56929 - protein, 378 aa, Firmicutes sp.
MIKKAYKYRLHPNKTQEQKLNQTFGCTRLVWNNCVYMFNNHSNIKSIPELKTEYEFLKDVSAATLQQKQRDFVEFKKQFFSKNRKKKINKPRFKKKGVNDSFRLPNQKFKLIDNKIQLEKIGKIKIVIDRLIPENAKLLSVTVSRNSCGQYFASVLVEQETIKLKKTNKSIGCDLGIKSFLVTNDEVFENPKYFRESQAKLKKAQQKLSKKQKGSNRYNKFKLRVAKIHNKVKNQRSHYIHQITNKLVTNYDVISIEDLNVSGMIKNKKLSKSISDASFSIFKNQLTYKCNWYGKELFVVDRFFASSKTCSNCGAIKKDLKLKDRIYKCGECGLQIDRDLNAAINLKNKAIGVNVAQRTQSNSKTSSEANCNEVSKMN

SEQ ID NO: 56930 - protein, 190 aa, unknown
  TnpB Polypeptide
MRYGAYQAAHLDRARGQADLILREGTFYLYVTVDLPSAPPCEPTDVLGVDLGIAQLAVDSDGEAHTGEGVRQCRRKHSRLRAGLQKAGTKSAKKHLRRLRRRESRYQRDINHVISRHLVQKALLGQKALAIENLSGIRERTQATVRKTQRYERLSWAFAQLRGFIAYKCEAAGIPLIIIRVVVQISLLAL

SEQ ID NO: 56931 - protein, 567 aa, Desulfofundulus sp.
MTKPKIKKTVNPEDGLKYTVCGEFFPEVYPDIRSQKWGRGDEDPLTTEMRLFCACTRWAFNRILEGRFRKELKKEGQKLFGINSRFCDDAILKAKAVIESQRELLVLEVEETEKKLARARKKLDRAEKDLAIAIKTGNPVKIEKAERIVHGRKARVKKLKTKLDELKTHQNNGTIPTVVFGGRSLWKRVCRGRAAKEEWRQARQNRLFARSDETKGGNPNIKISYRNGDFSLSVTISHLSEQKGMDKKGRPVMTKAPRVTGKLWLPEKHRLKVWELLLSGAPYTVELIRGRDGRYRVHISFAITAPEPVTNPNRGYLGMDTNPDGVALANVHYFGQPEPWPEGFTVPHPKALHKFAGEFQVTVHPNGFLYIKIPELAYSRGYRRTYLIGVLAKVVVDIAKALGKPIALEDLDFGKDRLDTNKKFNRMAANFPFKKIIESVMRRASREGVGVKPVRPAHTSTIGYYKYMERYGVIIHHAAALVIARRAIGFRERITSELKQKIRVIKEKLNQRVNSLPGEGKGMTRKVKRLFNRLEGKIPVHNGLTRFKQESFYSVWHDLKQLALSSR

SEQ ID NO: 56932 - protein, 507 aa, Desulfofundulus sp.
MKVKRAIRIRVSSKRKRGARELAYDLAQFRNLLLIFQSRYYALFGQVILNQSVIYSLLADQTTKKKPEQEEALREASERIIQHPDLQELIQRMKEQKARVDNNYVLQTTIRQVIKDYKSFLASLAEYRVNPGKYKERPQPPKPKKLGKLTQVTAEFNSNVFEVEGNTLFLRLRMNGKKRIKIKLPRDVESVSSVRLVYHLSDVWVDVIYEKELKEPEAGLIHLAGIDMGMDNLISLISTNPDVKSLIISGREIKSFNCWFNKKKAAVQSAMDTLSNKIAQEEDEPRKNAMSKELLKLKFYLHNLYNYRDRWIESHFHKVARVLADFLYETGHKAVYLGKGATESKDGIDLGKVTNQNFVSIPFRKLINILKYKLEELGMKAEEKEESYTSKASSLSDDILEIQRKYADVKEKQGEIKVKCSGKRIERGLYRDNVLNKVFNADLNGALNILKVGAKLRRLTLSLKVLLCKLCNPLRLNLYDFIYRFKSKAESPPGIGDSRLAAAGLTR

SEQ ID NO: 56933 - protein, 389 aa, Thermicanus sp.
MLCATKVYNGLLWHLREEFKNTGTTKVTRQRLNAILKTLPRAKGYYSLSVQATRDEVIQAYRSFFALRKAERTRHQMPGFRRKGMYSPLRYFDGYGFSLEGDRLTLSLGTGRSDGVRQVTVTLQVGRNVPILRVRNVLLTYDAKTGLRAHLVVEVKAKEPLGHRKVAVDLGETQAITAVFDDGTALMYNGRLIKSIRRYWQKVRAKVKPPTAENPRKSRRYRRIERKESRQVNHLLHIMTADFVRRCWEAGVDTIAIGDLKAIRERIDYGPVLNQRLHAWPYGKIIKMIEYKAGLYGIEVIKVSETYSSQRCHGCGEIRKSNRVFRGLYRCDCGWRTHADANGAANLFLAAYKVSPVAERRSSGDVATPVVVPIRLGWHTVHEPTSPAA

SEQ ID NO: 56934 - protein, 354 aa, unknown
  TnpB Polypeptide
VYPNVEQKVFFAKTFGCSRLVYNKMLELKSKHYSETGKALNITPAMLKPEFPFLKEVDSLALANAQLNLQSAFSEFFKGKAGYPNFKKKQTAQKYTTNNQKGTIALIDNYIKLPKAGLVKIKLHRQIPNDWHIKSATVSRNSCGKFYVSILFEFEHQVEPNTINNIVGLDFSMHELYLSSDGEMANYPKFYRKAQNKLAKEQRKLSKCVYRSNNYYKQKRKVAKIHEKITNQRKDFLHKLSRKITNSYDVVCIEDLNMKAMSQALNFGKSVSDNGWGMFTTFLDYKLPYEGKYLVKVDKWFPSSQTCNVCGYKNPQTKDLSIRKWICPQCNTFHDRDINAAMNIKNEGMRLLLS

SEQ ID NO: 56935 - protein, 409 aa, unknown
  TnpB Polypeptide
MIWWRHDLAALFRLYPTAVQEVQMAQIAGACRFVYNLALEQRRDWWRSYKASTGSNISFASQSRELTELRHELGWLKAAPVHALQQALRDLDRAYQNFFAGRADYPTTRKRGLNDSFRFPDPVSLKLERTGQSCGRIKLPKLGWVSLRGWYPLPGDICTITVSRRVGHWFAAVQCAREIAEPIRSILPPVGIDMGVAIFAALSDGTSVAPANLGKKALGALAKAQRALARKKRGSANRLKAIGRVAKIQQRVVNARKDFLHKHSTIIAKNHGLVVVEALKVRNMSASAKGTIEAPGRKVRQKAGLNRAILDQGWGMFRSMLAYKLADRGGTLVEVSAVYTSQTCACCGHVDPANRQNQAAFVCVHCGHTANADTNAAINILRRTDTALKPVEGHRTKRPDEAGTILRAA

SEQ ID NO: 56936 - protein, 409 aa, unknown; identical to SEQ ID NO: 56935
  TnpB Polypeptide

SEQ ID NO: 56937 - protein, 503 aa, Oxobacter sp.
MGLKTIVLKLYKPGREKRRIINEAIINYNHAFGFLLEKAYSSLKKEPVGDIGDISERRSPYFASTLSKNLVREYTSQLNNFDIQPFKDSLEMDLSMTLAGYLKLKTIKHNTGFPLVSVRQSAAEGKLRPVYFCRYDVKRNYCLLYDCAKDRYYVKLYLMNNKNARAVNPEGKSKQRLVYVYKTFEAVNISKRKEPYIIVPLSFGKYQEKILKEAMKNPAILRTAKLKVKGDEYYLAVSVDTGEKEKVYTDTFLGVSRGLKDNLSYAVTDLKGSILSSGSIPVKVSHRKGPLPLNELHILSNAIVKIAKEYKSQVILQNLLDKGDRLEWNKEELSSNRVFSFKAYIKIIRLLEYKLPEEGLPQPVKVSPVDIFYRCHMCNSYSIKNRLNQETFICVRCGASIEIERLGSLNLSRKLTDYSASTIKIKVASNAEGVWLTNNLIGLKLFVPHTKNPMEELKAEIENIIENFKGSNKNFTGKERLKRLSIIKKFTNSKDFMEIIEFV

SEQ ID NO: 56938 - protein, 390 aa, unknown
  TnpB Polypeptide
MGICTYIVKLKTTEENNNFWKSRLQNAASAHDLCIQIIKLNNVKLGLKEVHDAVYETLRINFPDLPAQAVIKIYKSVMSELRSIISNKHEDAKAPVRKGLALVLDKRLYSNLSINGISLSDANHGKRTHYDFEVYDKLKEMFSKYIPSDPTLFMRRGSLYLAIPFNVEDKPVTNDRCVGVDLGVRRLFVTSDGIAFRDKKYLGNRRKVRYLKRSLKSKGTKSAYRHLRKLRRKERNMSKDMQNRAVNALIKSTNAGTLVLEDLKKIKNNTSKFANGAKRKKHNNMLSQVPFAEFKERLTHKAHLCGMKVKTVNPANTSKTDSRTGEKNGVRKGCRYYCKDKVILDADWNAAVNIAKKSKLPCSNEVPKDGTLSFLCGRPLPVGHTYVNPS

SEQ ID NO: 56939 - protein, 372 aa, unknown
  TnpB Polypeptide
MISYEYKLYRSKKNKHLTNMLREACFVWNHALALQKRYYSMYGKYIDSTRLQKHFSKRIKRTYMHSQSVQEVLQRLDASYKRFFKGKAKRPPKFKKHSDFKSFVFKGGFSLCGNVFHVNSVKKDYRFSMSRKYEGNVKQVRLKLSPKGDWHLYIITDGVSKPLSKTHDGARIGIDFGLKVYLTLSDGEKIQNPQFLKHELSALRKLSKNLSKKVKGSNNRKKARLQLARFHERIRNKRIDYQCKLAHELCKKYDYIFIEDLNLTGMTRLWGRKVNDLAHAQFVDILMNIASKYGCVVHKIDRWYASSKLCDCGYKNNDLTLSDRQWTCPVCGKVHDRDVHAAEMIQRRGIYELESGSKTNETSVEGFSTKTS

SEQ ID NO: 56940 - protein, 449 aa, Scytonema sp.
MALKRKKGYSIESKTARFTLLRDGIDLDETKVAFNELVSFYFAVVATHPEGTVMVNEYYKVYEGFTLGEKAKYPLPFDAPCDFRRAAIKKAIGAYKSWKTNYDKWKARPPRHFFHRPPVQPRSFNFNPVFYAGMWKEDTGDSIMLKVRRDNAWIWIKFQYLGYDFGAGWEKASPTVTLKDGKAYLDFTVEKYVPATGGLKNVIQQSDLRICSVDLDLDGHIATCSILESDDNGVVHEVSRMTVKGHVSHVSRRKRDLGRIARRMNQTGRVEKGFASTRFAKISRRERNEGFRIASEIIEFAHRHGCKVIVFEHLGNLRPKRGKYSKRSNQKRAYWLKGKIVDNVRRIAYQRYAILTARVNPKNTSRHCAVDGVEVWRGNHYQPSLLEFCQPYQCGGKCFATILGRRGSSALNAARNIGLRFLSRRFVQPALAVEKAGTRRKSQTLKGGV

SEQ ID NO: 56941 - protein, 388 aa, Enterobacteriaceae sp.
MKRATKVRIYPTDEQAAFLNAQFGAVRFAYNKALYISRHMYKRHGVSLRPIRDIKPLLAVAKKSRRYSWLKEFDSLALQQAVINLDKAFANFFNKKLKARFPVFKSKHGKQSSYHPNGKILTDAIQLPKIPPVRANIHREIVGKVSSITISRNATGKYYASILADDGQEAAAKPACITAVTGYDLGLSHYLIGNDGGKVANPRHLVNAYRRLRRDSKALSRKKLGSANCRKARLRLAAQHERVANARADFQHKLSRRIIDENQAVIVETLKPANMMKNRRLARYIGDAAWSGFVAKLAYKAESAGVHLVKLDQWFASSKTCHCCGHRMPEMPLKVREWRCPGCSANHDRDINAAINIQHQGVIELMAAGHVVKAHRGLRKSGSVPVAA

SEQ ID NO: 56942 - protein, 444 aa, unknown
  TnpB Polypeptide
MYCNQEEVKEKLKEKGLTLIKWFSNPTIGTEAYIIQLNGRSPGRTTKSSLKQVHNYVKIHRASKTRFYPTTKQQLNHEQHFNNTRYVYNHYLDLKTKQYKETKKSYSFIETAKDLTNHKKEKPWLNNSSRPAYTNKLKDLDTAFKNFYKKKAKYPKFKSKRDRQSYRISHPFFKIKPEGILITKIGLICCNLNLPKQIKPLSVTISKDTLNRYYISCSYETEIPEPTIDTTKPIIGCDYGLKTFMTTWNGSHEEKIQHPLPYKKSEKRLKRLSRRLSRRKKGSRRRTKARHNIAILHSRVASRRNDFLHKLSSKMVRENQAIIIEDLNTRGIITRWGKKASDQGWHEFTRQLQYKGTWYGCNIIKIPRFYPSSKTCSNCGVINDELILKDRSWTCPVCGVDHDRDVNAACNIFNYGRADRKLRTETGGLVKTLVEPSRQKKAEP

SEQ ID NO: 56943 - protein, 422 aa, Natronomonas sp.
MEYSPRYRLFPTEEQREAMDWQRDTVRQVYNHALREFNKIPEDAGTLRQRVWSVRDTLPALKDWWSDLNKVYSTVLQKAVERIRTNINNLGKLKDNGYNVGSLNWKKPREYRSFTYRQSGFKLDTKSGPDNRAVLILKKLKGETRKIPVRLHRNLPDHDSIKEVTLKKEPTGAWYASFCISTDHPKKPKPEDIDAEDTVSIDLGVLNFIHDSDGCSVGRLDLSADRVCLEREQRSLSRKERGSNNWVKQRRRVARVHAQMSNKKHDYKHKLAHFYATEYDAVFVEDLNVKTMLEGPQNARNKAEVGWRDFITILKHHGDKHGCHVVEVEARGTTKECAECGVETRKPLWVREHSCPSCGFELNRDWNAALNVQKRGFERLGVVHSKDTPAETATAVDTRSVSASRVVETGSPCLKEAAPAAE

SEQ ID NO: 56944 - protein, 346 aa, unknown
  TnpB Polypeptide
MQLTYKFRLRDTADAELRRQARAVNFVWNYCNERQKEAVSKGRKWLSKYDLQKLTAGASKELGIHAHTIQGVCHKYDDSRKTHKKASLRWRSNKKSLGWVPFNQGHVKYSNGSFWFRGREYKAWISREIQEGQTFGAGSFNQDALGRWYINLPVEIECVASAGTDAIGIDLGIKELATISNGSKLEHPRWYRNMQERIATAQRANKKKQAKKLHAKAKAQRNDFLHKASTALVRQHGAIFVGNVKPSAIAKTRMSKSSLDAGWAMFKQQLQYKAIRHGVLFAEVNEAYSTQTCSQCGSIEGPKGLSGLGIRRWTCGCGAEHDRDTNAAQNIARRGLASLVEGASHG

SEQ ID NO: 56945 - protein, 467 aa, Symploca sp.
VIFSLYRTIPIRAIFSEDEKLFWEDQCRNANSLINSAIYHTKQTHFARLIEKGDAFTTYWRGDELRSGWKSYQCLTTYPELCSIFKENEHYRAMAAQSAQQTLKSVGESITSYNGLVKTYYKGEVDKPRLPRYRKKGGLAAVTFPKQALSYKDGCFKPSISKKTKPELITDIKLELPAFIDSDWVKEVTVRPCLGEFWIDWVIDDLQQPVEVNPNLDYSQAWGFDHGGGNWLTGVSTKGQSLVINGKHLRSLNQGYCRLVAKYKQGKSEFYWDSNLDRVQRKRNNQMRDAINKAARFIVNRCLTDGIGNLVMGWNKGMKNCSNMGKKNNQNFVLIPTGRLIKRLKQLCPEYGIVLTVTEEAYTSKASFLDGDSLPKHGEKPKSWNPSGKRVKRGLYQSAKGWLINADCNGAANIIRKVATQLGINLDEVGRAVLALPQRYEVLNNLSKSYRKQALRKAFLNPVATSA

SEQ ID NO: 56946 - protein, 372 aa, unknown
  TnpB Polypeptide
MIKAVKIRLKPTEEQERQLWKSVGTARWVYNWALNKQIENYQNGGKFISDGELRKELTQLKKTEEYAWLKEVSNNITKQAIKDLCKAYKNFFNGKAKHPKFKSKKRSKPSFYNDNNKLKVKKMLVLIEKVGWVKTSEQIPMGVKYKNPRVSYDGKYWYISVGIEFEPIHTDLTDNVIGIDVGIKNLAVCSDGQVFKNINKTSKVKRLEKRLRRLQRKVSRKYEMNKEGNRFVKTCNIIKLEKKIRLMQRKLTNIRKNHIFQSVNAIVKTKPSVIAMEDLNITGMMKNKHLAKAVQDQKLYEFKRVIRYKCEWLGIKFVEVDRWFPSSKLCSNCGQIKKDLKLSDRIYTCDCGNKIDRDLNASINLAKYAIHM

SEQ ID NO: 56947 - protein, 161 aa, Moraxella sp.
MLSKVSKITIIIVHALEVSKKRYGVIINKILDCRLDNLHKLSCKLINDNQVICVETLRVKNMIKNPTLAKHIADASWGRLIQQLEYKADWAGRSLVKIDQFFPSSKRCCNCGYTLPFLSLDTRHWDCPECKTTHDRDVNAAKNILTAGLAGLAFGENVSLV

SEQ ID NO: 56948 - protein, 367 aa, unknown
  TnpB Polypeptide
VLKAYKYRIYPNKEQKIQIAKTFGCCRFVYNQTLAYRKDTYENEKKSVSKTDCNNYCNRELKKEYEWLKDVDKFALTNAIYNMDAAYRKFFKEHAGYPKFKSKRDNHKSYTTNYTNENIVVDFEKGRVKLPKLKMVKAKQPREFEGQIKSATISQMPSGKYFVSILVEEEQVELPKVEKSIGIDLGIKDLVITSDGEKIDNLKLIKKYENKLVRQQRKLAHKQKGSKNREKQRIKVAKIYEKIANTRNDYLHKISHKLINENQVIVSEDLSVSKMVKNSNLAKPISDCGWSELTRQLQYKADWYGRTYVKIGRFVPSSQICHVCGYKNEETKDLSVRKWTCPQCRTEHDRDINAAINIQNEGLKQIA

SEQ ID NO: 56949 - protein, 465 aa, unknown
  TnpB Polypeptide
LVAKTAFKFRLYPDANQEERMAEAVENCRRLWNMALEDRMARWQEERRSTTYWQQCLTLTAEARRNPAMRSMYMQTLQDVLKRVDRAFKRFFSGDGRLPRFKKHRGWGSLTYPQAYNGSVKLDLRRSRLRLSKVGDVKIVVHRQIPAVARLKTCIVKCEPDGKWFACLVYEGVVRLVDVPQARISPLGIDLGLKSLITTSDGEKVEPPKFFRKTERRLARLHRALSNKRLGSSNRDKARLKLAAQYSKVSNQRRDVNHKLSDRLARDHGLIVFEDLRIRNLVRNHSLAKSIKDASWGQLVQFTEYKVVRAGVTLVRVSPEFSTQECWFCGTRNKVSLETREFVCGGCARILDRDRNASRIVLKRGILQVGRDKDRKSLRPVQENPGQAAPKLKPVETEPLPPWTTGDASSAVEAGTRSGNSPAGSPRSYDVGGCHKAAALAYPDMIRDASGQLGELWPLAVRRGC

SEQ ID NO: 56950 - protein, 405 aa, unknown
  TnpB Polypeptide
MLIRSLAFRFKDPLPNEAKFLMEEFRLAVNNAIRLGIHSNSTSRFALTELAYKDFRKEHPNIYSQHLVSTFEVAASILKNHRRRLRKGLPSQVPFVRRLFMKAENQAYKLDRKSGVIDLPIRAGLHIQLELIVSDYHRRYLDDESLSLGSMTLLKDRVVVAIRKHAPKPYAPASVLSLDTNERSLDGVLAKDDKIAAVVRAEFPEISVIQSTHHERRKRLQKKKSHDRRTAKRLCAREGTREHHRIDYRMHEVANAVLSFTEERSSMIVLEDLTGIRPGKGKKLNRRISMWPRRKLHQIIEYKAAWRGIPIIKVDPRYSSRKCPVCGSIQDSRKGAEFVCGCGWRINRHINASINLLQTATSEKAAGGLRFDPSAFQHDVVMVLCSPGKTVRPEPNGTSGIRAVA

SEQ ID NO: 56951 - protein, 197 aa, Aphanizomenon sp.
LINGRPLKSINHFFNKKKAELQAILKNQTSKRLQNLCTKRNLKVDDYLHKASRYLINKLIELNIGTLVIGKNEGWKQELNIGSQNNQNFTQIPHTRFMEQLTYKAKLAGISVIITEESYTSKSSFLDQDVLPKYKKGEKYSFSGNRIKRGLYKSAEGVLINADVNGSLNILRKAIPNAFADGIQGIVVSPVKVTLSK

SEQ ID NO: 56952 - protein, 190 aa, Vibrio sp.
VLIFAVHFIGSARWNKAKSRLNSLHGSIARKRMDFAHKTAHRIANESDIAVFEDLNVAGMQKFNGRMVADNIMGLISDLTKYKVELRGGVHHEIGRFERTTGVCSHCGQHHKLALKDRDFTCVSCGTFSDRDYSSAIAVQRLGESDLMANGTVVRLTNSTSTQQKLDVKTKVFALAKLSLGSEEIEKAVA

SEQ ID NO: 56953 - protein, 407 aa, Nostoc sp.
MIIYEAKAKATKEQLLKVNEALRTALFVRNSCLRYWIDGHAKNGYDLNKYTKVLSDNPAFPWVSKLNSSARQAMAERAWAAIARFFDNCKNKIPGKKGFPRFRKLQTRASVEYKQSGWSLSDCRNYITFTDKLGIGTMKLRGTRDLNYYQVKQIKRVRIVRRSDGIYIQFCIDHERKEQLEPTGKSLALDLGLTHFYTDSDGNKVENPRFLRKSEKALKKAQRRLSHCAKGSKNRAKARNRLGRKHLKLQRQRKDWCVKKALSVIKSADFVAYENLQVRNMLKNHKLAKSISDASWSIFTQWLEYFGKVYGRVVVAVSPAYTSIDCSNCGHQVHKTLSTRTHICPNCSYTACRDLNASINILNKGLELFKNTDGHSGIQHASGEFDPCLEKATSLGKSSRRKRKVSQ

SEQ ID NO: 56954 - protein, 421 aa, Nostoc sp.
MEETPKTTLPHKFLKNILMLDVLKVRIYPNKEQEISLAKSFGCSRFVWNFYLNKTNTQYEETGKGMTYCQMAKDLTQLKKLSDYEWLQEPTAAVLQQSLKNLESAFKNFFSKRAGFPKFKSKHSKQSIRFPESCSIKDSGLKLPKLGIVKVSLSKKINSKIKSVTVSKTSTGKYFAALLFEAKDLTNNKQGKISGIDLGLTSLITVFDGETCYKVDPIKPTRKYAKRLRIRQKALSRKVKGSNNRRKAIKVVAKVHEKISNTRQDFLHKLSRKLVDDNQIIVAENLCVKGLARTKLAKSIHDAGFGMLLNFISYKLEREGGKFVQVDRFFPSSKLCSCCGHKNNLLNLSIREWICPSCQTTHDRDENASRNLRTEGIRILETNTAGHAEIQACGETVRLVGTCAKKRVSEKQESPATLLCG

SEQ ID NO: 56955 - protein, 289 aa, Nostoc sp.
VRISYQYPLKPTKEQALHIDKTLDMLRCQYNYQLAQRFDWYEQNRCSVDRCSLVVCHIPELRDKPNRFSQQATLTQLKKDRPWYKSIHSQTLQEVPKKVEIAFDRWLKGDSNGKRSGKPRFKGKGQYKTFTYPQFKKEHFTKDKITLSKIGTVKVIVHRPIPDGFDIKTVSVTKKADGYYVTLSLEDKTVPTIKTDLDINNIVGIDVGLIDFIVTSDGDRIAAPKFLRKAERKLKLAQRKVSRRKKGSNRRKKAIQQLGKQHKKVADTRKDFHYKTANNCDFTPCMTKF

SEQ ID NO: 56956 - protein, 420 aa, unknown
  TnpB Polypeptide
MRLTFRYPVYPTKTQETTLLRWLDHLCGLQNSARHDRKVAWETEGERVSCNDQQKKLKVAREKYEDFHEVPQDMQVCALERTDKAFDGFYRRCEKGAAKKGYPRHRKQVKSMSWKLRKHKLKTGERVRQNPIRETAWKHDRLKVPKLGEVKIYMHRPLQGDPKEVTLVKKASGWYAHISCELPDTPKIEPTQAIAVDMGTTHYLTTSEGEKEDNPRWYRQTEGLLRKHSKDLSRKKKGSNRRKKQQHKLALHHERTTNKRKDFIGKLVYKLYHHEKNNVLVAEDLSVSNMVKNKHLSKSISDASWSIFFQWSGNIAERDGFHFHQVDPKNTSQTCSSCGQKSPKKLSLAIRTFNCQACGTSLDRDHNAAINILLKAAAAFRGERWVATLYETRNKNEARDTGFKHAEQLMLFNAVTSPSL

SEQ ID NO: 56957 - protein, 405 aa, Burkholderia sp.
MQRFQAFRFELMPTGEQLRKLRRFGGVCRRVYNDALAEQQRLHTEGCQFVPYFGMTKWLTSWRNDVETMWMSEAPYSIQARALKDLDRAYRNFFDGRAGFPRFKRKCDQRDSFCFPDRHKIKLDRDNGRVSLPKLGWLRYRMSRVVLGEVRNATISHRAGKWFVSILTEREVNSPSPTGPAVGIDVGVARFATLSDGSFLAPLARFREHERRLAKYQRRMARKSKGSSNWKKARARVQRIHARIANARADFLHKASTAICKNHSMVAVEDLIIRNITRSARGESDAPGRNVHAKSGLNKAILDQGWGEFRRQIKYKTGWCGGLFVAVSPRNTSRTCPCCGHVAAANRTTQARFACISCGFEANADYVGALNVLAAGHAVLACGEKVQVGRSTKQEPTEATYANPA

SEQ ID NO: 56958 - protein, 270 aa, unknown
  TnpB Polypeptide
MLIDEYKLGCTTKQCAAIDEAIRVVQFIRNMCLRLWMDERGISENDLQCYCAVLAKEYPFAHTLNSQARQVSADRAWFAISRFYDRCKQKKQGKKGYPQFQHDNRSVEYKTTGWKLDPDGGYITFTDGCGIGRLRLVGNPKQHIETFPTRRLKRGRIVHRADGYYVQFSVDAHRTVNHVSKGSMVGIDMGLKVFYTDSHGNTVENPRHYRTSEKKLKRLHRRFSQKKKGSQNRKKARKYLAKVYLKVQRQREDFARKTANALVSSSDLIA

SEQ ID NO: 56959 - protein, 507 aa, unknown
  TnpB Polypeptide
MERNLEQLLRTKRYRALQKLYGKVSDPIHALEKKEVLSDEETQKLNHLKKERAELTNSMNQMRESYQVTWDFCRTKMMELKETYHLQSIFALSRAEDIWAAIETILYSSGRKLHFKKRGDLPEIRAKQSTRGLVIDSSQSGLIVKYGKVTIPCKYKAKDLWLWDEEKAILAYLAEPELQDAHAVDQMSKGIITDTYRPCFASLVCKKIRGRLRVYVHITVEGKAISKRRKDSTPRHYYGKGNIGCDIGTQTIAYTSNTEVGLENLAERGNSIQHVERQEALILRAMERSRRAMNPNHYNENGTVKKGHKQWNFSKRYQKLKQRHQELCRIAAENRALAIREQVNHLRSLGDCFITEPPNAKKLQKRANPENPVDKNGRMKRKKRFGRSIKNRCPGYLQAKAKQLFESTGGMYVEVPILYRASQYDHTSDSYIPKKLSQRMYHLTDGTKVQRDWYSSYLLYCINKTYTQINKLKCRSNFATMYQKEKNMIEEIIHSRKKIMNSGIRTV

SEQ ID NO: 56960 - protein, 420 aa, unknown
  TnpB Polypeptide
MELTRKVALYPNQTMTKVLDNLCNYRRYCWNQGLELWNNLYDQRIKMIPIDLRKKLQLATEDKTITFSKEEQELLTLFPSASHHVVRDILVADKADWQYSLSSRILQLAIKDLANAWSAFRESKKPKKKNSKKKKQKVGKPSFRSKKNPKQGFKTDRASIKNGKLVLDKPRAYKNAWYGISFKGYDLPDGKIKHCAITKIGNSYYASITMDCPKQPLPKTGKKTAIDANINHFDYTDGSFTVFPKKLESLYNQIKHYQRLLARKRHKNGKNATRSKQYIKVRTKLQKCYKRVTAIQNDLLHKFTTTIYQNYDTVVIEDLDVRDMQMQKKAKNLHRSLFGRFRLYMEYKAIKFNKTLILADQFYPSTQRCSRCGHVKTGDDKIGLNGNKKHGTKHNEYICYSCGFVGDRDQNAVLNLLALA

SEQ ID NO: 56961 - protein, 398 aa, Methanothrix sp.
MIISYKYPIFPDKATQQRLGENLDACRWLYNRLLQDLNDAKEKGIKIRTYDTQNLIPLLKPENPMLGKVYSKVLQMVNYTLWANIKGLSASKKNGRKIGHIRFKGYGWYNTLNFNQSGFRIDQDHSLLHLSKIGNIRIKLYRKIEGCIKAVIVKREGMRWFAIVQAYHEPQPLPETDEAIGLDVGLTSFVVDSEGNDIENPRCAKQSADKVAKLQRRLARAERGSNNRRAIKDKVAKLHKRINCQRDDFLHKLSRMYVNNFDIICVEDLDVKGLKEKYSGHGRHRSIHDASWSKFMFMLSYKAQSAGRKLIKVDPRNTSQRCSACGSIVKKDLSVRVHECPYCGFSCNRDYNASRNILLSGMEQPVAPIESKSLHHISVMQVLAMKWEAAPSGRGSSQ

SEQ ID NO: 56962 - protein, 397 aa, Clostridiisalibacter sp.
MIRTYKVMLKPNNKQKTKLFECAGLSRWAYNWTLGKQKENYNNGGKFLKDSVLRKELTKLKKIKEYSWLNQYSNNITKQAIKDACNSYKRFFKGYSSFPRFKSKRKSKPSFYQDNIKIKFTKTHVKLEKLTTSKKKNRQKFNWIRLVEKGRIPTGEDIKYSNPRVGFDGLNWWISVGVKIEEVKEDKPKSEPIGIDLGVKDLAIISNGEKYKNINKSSKMRKLIKRYKRLQRQISRKYDMSKTKIEGGENCYKYHKTKNIIKAENKLKRLYKKIKGLRDNYIHQVTNSLVKAKPNYIVIEDLNISGMLKNKKLSKAIQEQSLREFRRQLEYKCKWNDVKLIVADRYYPSSKLCSLCGYIHKDLKLSDRIYKCPKCGNKIDRDYQASINLREYPKSVA

SEQ ID NO: 56963 - protein, 121 aa, unknown
  TnpB Polypeptide
VAFAGPATTKKPQELVFPSRDALNVKGMLRNHKLARSIASVSWAKFFKMLEYKAVWYGNEICRVPTMYPSSQTCSCCGYQNPLVKNLRIRIWECPECHVVHDRDMNAGINILKKGLQMQYA

SEQ ID NO: 56964 - protein, 398 aa, unknown
  TnpB Polypeptide
MKIVEKHKIYKSHPSYSKLNDMSRKANNLYNQCVYFAKHSENLFEDLKSLDKIMKSFPDKYDNYRSFGYSACAQQVLRLFQQNLRSYFASIKDYKKNPSKYTGRPRFPKFRKSGERFQVIFTNQAAKLVDNDIVIAPRTFESKLSITLRTNSAKKLCQVVFAPRNDYFLVYVIYEVDDLVISQKSNKVASIDIGLKNLATVTFSEKDEPILYRSDLVKINKDFNRVASKYASILKKTQNKDTSKRRTRFSEKRSGLIEDRLHKISRAIINDLSQRGVSAVIVGKNTGQKINNKLKNFVQVPLFRLIEMIKYKAELAGITFIQVNESYTSGTSFLDNELPTKEFYNKDRRKFRGLFFSNSLKRINADVNGSFQIMKKVYEKFTYNDFVKYANPIVKTIC

SEQ ID NO: 56965 - protein, 398 aa, unknown
  TnpB Polypeptide
MHLVEKHKIYKSHPSYSKLDDMSRKANNLYNQCVYFAKNSQNLSEDLKNLDKVMKSFPEEYDNYRSFGYVQCAQQILRLFQQNLRSYFASIKDYKKNPAKYTGRLRFPKFRKSGERFQVIFTNQSAKLVGNTINIAPKTFENKLSITLRTNSAKKLCQVTFAPRDDYFLVYVIYDGVESSVSQKSNKVASIDIGLKNLATVTFSEQDEPILYRSDLVKINKDFNRVTAKYSSILKKTQNKYTSKRRKRFSEKYSGLVEDRLHKISRMIINDLSHRGVSTVVVGKNTGQKINNRFKNFVQVPLFRLIEMIQYKAKLAGITFIQVNESYTSGTSFLDNELPTKEYYNSNRRKFRGLFFSNNLKRINADVNASFQIMKKVYDKFTYDHSVKYANPIVKTIC

SEQ ID NO: 56966 - protein, 398 aa, unknown
  TnpB Polypeptide
MKLVEKHKLYKSHPMYAKIDEMSRKANNLYNQCVYFAKNSNNLSEDLKNLDKVMKSFPDEHDNYRSFGYASCAQQVFRLFHQNLRGYFASIKDYKKNPTKYTGRPRFPKFRKSGDRRQIIFTNQAAKLVGNTIAVAPRTFENKLSITLRTKSAKKLCQVVFAPRNDYFLVYVAYEVDDQTISQKSNKVASIDIGLKNLATVTFSEQDKPILYRSDLVKINKDFNRLDADYKSILKKTQNKYTSKRRKRLSDKRIGLVEDRLHKISREIINDLSHRGVSTVIVGKNTGQKIGNKLKNFVQVPLFRLIEMIKYKAELAGITFIQVNESYTSGTSFLDNELPTKEYYNSNRRKFRGLFFSNNLKRINADVNGSFQIMKKVYENFTCDSFVKYANPIVKTVC

SEQ ID NO: 56967 - protein, 379 aa, unknown
  TnpB Polypeptide
MSKLTNALRNQSIYLMRQHLRHKEDDDPFFICLDKLLKTMPDEYNIYRKLPAQTSQQTIRVVEQSFRGYSSLIKDWHQNKEKYSGKPRMPGFGHRDAQHQVIFTNQQINLVDGKLTFPKCLRPFSLKLRAKNVTKICQVRCLPRLDSFKIEVIYEIDDPIELPHENVAAIDIGLDNFTTLVFSHPVAPCIFKGSKAISYHLQHMKKVSELQSELWRTQKSHHQSKRVRRLREKRQRYFQDVMHKLSHSIVNQLLENNVTTLIVGHNSKQKEGSRLKTFTKIPIFGLLKKLEYKCKKAGITYKEVNESHTSGTSFLDGELPTADYYDKSRRVNRSTFITNSGKKIHADVNAAYQIMRKAFPSLHIDYDSSIFNPRVIHFH

SEQ ID NO: 56968 - protein, 397 aa, unknown
  TnpB Polypeptide
MKLVEKHKIYKSHPTYSKLNDMSRKANNLYNQCVYFAKNSENLFEDLKNLDKAMKSFPEEYDNYRSFGYSVCAQQILRLFQQNLRSYFASIKDYKKNPNKYAGMPRFPKFRKSNDRFQVIFTNQVAKLVGQTIYIAPRTFENKLSIRVRTNSATKLCQVVFSPRNDYFLVYVIYEVGQISSQKPNKVASIDIGLKNLATVTFSEKDEPILYRSDLVKINKDFNRVTKKYSSILKKTQNKYTSKRRKRFSEKYSGLVEDRLHKISRAIINDLSHRGVSTVVVGKNTGQKINNKLKNFVQVPLFRLIEMIKYKAELAGITFIQVNESYTSGTSFLDNELPTKEFYNKDRRKFRGLFFSNNLKRINADVNGSFQIMKKVYEKFTCNSSVKYANPIVKTIC

SEQ ID NO: 56969 - protein, 398 aa, unknown
  TnpB Polypeptide
MKLVEKHKLYKSHPMYSKIDDMSRKANNLYNQCVYFAKNSQNLFEDLKNLDKVMKSFPDKYDNYRSFGYASSAQQITRLFQQNLRSYFASIKDYKKDPAKYSGRPNFPKFRKSNDRFQVIFTNQSAKLVGKTISIAPRTFENKLSITLRTTSAKKLCQVVFAPRNDYFLIHVTYEVDDLTIFQKSNKVASIDIGLKNLATVTFSEQDEPILYRSDLVKINKDFNRLDADYKSILKKTQNKYTSKRRKRLSDKRAGLVEDRLHKISRAIINDLSHRGVSTVIVGKNTGQKINNKLKNFVQVPLFRLIEMIQYKAKLAGITFIQVNESYTSGTSFLDNELPTKEYYNSNRRKFRGLFFSNHLKRINADVNGSFQIMKKVYDKFTCNHSVKYANPIVKTIC

SEQ ID NO: 56970 - protein, 379 aa, unknown
  TnpB Polypeptide
MKVLKGYLFRLYPNVEQKILINKTIGSARLVYNIFLRDRIDTYNNTKKGKSAYDQNIMIPSLLVKYPFLKEVDSCSLRNASNDLECAYDHFFKQGGFPKFKAKGVKDSYKTNNVVSTYKEKVYNSIELDLEKRLIKLPKLKWVKIKGYRNKESINGRIRSAVIRKVAERYYVSILVEEDVYKPMFTPQSIIGIDLGIKNLIVTSHNEKIKNIIKDRSKRLKGLQRALARCKAGSKNRYKIKLKIQRLWQKIRNARKHLIHDITNKLIKEHDIIVCENLDVKSMYKDHNIAKSLSSNPLGEIIRVLKYKAEWNNKKLIQIDRYYPSSQVCSVCEFQNKELKNLSIRKYECPMCHTKHDRDFNASVNIMFEGLKIYMQSLT

SEQ ID NO: 56971 - protein, 340 aa, unknown
  TnpB Polypeptide
VEQRYYRLYGKYAGRYRLQPHLTKLLKRTKKHWAWIPRDTLDAVIIRLDTTYQRFFKGLGGLPKSKRKHRYRSAKFQSGYKLEKGRVRLSFKAWHEFSKSLKFNKHFFSFHQHRDGIGHVRYIQILRDAVGTYWLHILTDDKSSEPYSATGENVGIDFGLDTYLTLSNGEKIQSPQYLKQSLKALRSLHKSLARKVQGSNNWYRCVRQLARLYRHIANQRKDFHWKLATDLCKRFDTLVTETLSLEGMKRLWGRKVSDLAFGQLVEILRFKCFKHNKSFRQVGQWTTTSKPCSQCSYKNKNLSLNDRQWICPECGSHHDRDINAAINILRGGLDPHVEPM

SEQ ID NO: 56972 - protein, 365 aa, unknown
  TnpB Polypeptide
MAITTKTLKVRIKDKHARVLQEWSRAVNFTWNYINELSSRSIREKGKFLSAYDLQKYTDGAGKELGLHSHTIQCVGKEYVTRRKQFKRARLNWRKSSGAKRSLGWVPVNTGMATFKNGQIYHNGQHFGVWDSFGLAHYRFRSASFNEDSRGRWYFNVAVEVPDLVGPVGPGASASVGIDLGLKTCATASNGHKIEGRFYRALEPRLGIAQRAGKKKRVKAIHAKIGNQRKDMLHKFSTQLVRQNAAIFVGDVASAKLVKTKMAKSTLDAGWSSLKTMLEYKSHQAGIVFEVVNESYTTQTCSCCGCKPASSPKGRAGLGIREWVCSACGTAHDRDINAARNILALGHERLAGGIPALTAQAAASR

SEQ ID NO: 56973 - protein, 594 aa, Methylobacterium sp.
LGTPESFHRLENASEHGNGRRSFSTPPLGREPFRRAARVRAPVQFGQAALPDLGGRRAGLREGEGHVADGCRVAGPHGHQRRLAQAQPVLQHRLQPVPVPRVELVVQRARTPAGAELSEPLFHRDQADAVHLAQAHGQARDLRQRLGDELGRGAARQVETDQAMVDDMGGGEAAQVAAVLDDDEADQARVEVDAEAAARQCRDGLPPLGVDGAADVRPAERRRLPALAARPAAGLVPLGGEAGVVVLLERDAGRQAAQVGGVKDHRQPVVTEPELDVDLAGGGGERGDGAEELAALAAHLRQGQDDRVHRRDDRGRGDHAARRRGGGRRPGRGGAADAVHRRAHPERPSRLAARARDPRLPPGAGTLPQGVEPAAQVKARLARQLRAVANTRDQHLHRISARLAREHPLVVLEDLRIRNMTRSAAGTVEEPGTNVAQKRGLNRSILDAGWGKLVQFVRYKAARAGGELVCVDARNSSQECRRCKAVAAKPLSLRRHVCPCGLDEHRDVNSAGVIRDRGLAVKAASEGGSAPRGRRRGPSGRASCRDAPRRLRAALENVRRGHQPRMTNDRNFRVIETPVRPLPGADRPVAVAGR

SEQ ID NO: 56974 - protein, 410 aa, Streptomyces sp.
VIGMQLRYSFRLYPDAGQRTALARAFGCARVVFNDAVRVREDARRAGLVFPAAGELSRKLITEAKRTKERCWLGEVSSVVLQQSLRDAEAAYRNFFASLKGTRKGPRLGAPRFKSRKDTRQSIRFTANARWNITGSGRLNLPKIGAVKVKWSRTLPTTPTSVTVVKDAADRYFASFVIDTDPAADAAQMPYTDRTIGIDLGLAHFAVLSTGEKIDSPRFLRRAEKKLKKAQRELSRKQEGSKNRTKARLKVARAHAKVADARREFHHQLSTRLISENQGIVVEDLSVAGLARTRLAKSVHDAGWAQFIGMLEYKAARYGRTLVRIGRFTPTSQTCHACGVKDGPKPLNVREWTCTACGTLHDRDHNAALNIKQAAGLAVSACGAPVRPGVIPAQREETGSHGFPTGNRSA

SEQ ID NO: 56975 - protein, 373 aa, Xenococcus sp.
MKTYKFKLYQHKRNKHLHRSINAAGNVYNHCIALHKRYYSMFGKHLKNNRLMKHIAKLRRKNEYWQLVGSQAVQDIVQRIDRAYQLFFKHNQRGVRPPNFRKRIKYKSFTLKQSGYKLLENNQLKIGNKIYRYWKSREVQGKVKTVTIKRNPLGELFIFVVTDYVDNQINVMTSKSAGFDFGLKTFLTCSDENNIDSPLFLKQSLRQLRLASRNLSRKQKRSSSREKARKNLVRVHEKVSNRRRDWFWKLAHQLTDKYDYLYFETLNLKGMQRLWGRKIGDLAFSEFLKILECVAEKKGKIVSYIDQWYPSSKTCSSCEHVLKELPLDKRYWNCPSCGCKHGRDSNAALNILRVGASTLRVGDVSQPRVAISV

SEQ ID NO: 56976 - protein, 329 aa, Paenibacillus sp.
MQTVTVQIRIYPSRPELLRKHGAVYVATVNSLTKQAEALGSFPRLTSKNVEAELPSAIRNQVIRDARSIHTKTIDQRVQRLTVSARITEREQRLLSSGKLGLLKVVEKSGKWFVQISVNIPVEKTPVVGTMGVDLGLKVPAVVATSTGKTRFIGNGRQNKYVRRKYQSRRRRLGKLKKLSAIRKQNNKEHRYIKDQNHKISRSIVNMAIEESVSVIKVEKLSNIRQTTRTSRKNAKHLHNWSFYQLQMFIAYKAALAGIRVIEVNPAYTSQTCPKCEKRNHAKDRMYRCTCGFHAHRDRVGAINIMRQPVADGVALSFLRKPLGNSLPA

SEQ ID NO: 56977 - protein, 505 aa, unknown
  TnpB Polypeptide
MEVTHGCGYVYSIQYHIVWCVKYRHKIITEQIENRLIEIFSKIADDNGFQILECNTDKDHIHLLVNCSPQHYIPDMIKALKGVSARLLMKEFGEELKKKLWGGHLWNPSYFVATVSENTEEQIRKYIQNQKKESEVKSVEKAYRYRIYPNKNQKEIITKTFGCCRFVYNTYLAKRIEMYEKNKKTFSYVQCANDMKKLKSELEWLKEVDSTALQSSLKDLDSAYQKFFKEHSGYPKFKSKKTHRFSYKSKCVNGNIQYCDKHIKLPKLGMVKTKNKLIPQGRILNATISQEPSGKYFVSLCCADIDIEPFDKTGNAVGIDLGIKEFCITSDGEVIPNPKYLKKSLDKLAKLQRQLSRKSKGSSNRNKTRIKVARLQEHIANQRKDFLQKLSTGIIKNNDVVCVEDLQVKNMIKNHKLAQSIADVSWSEFVRQLEYKANWYGKQVVKVDKFYASSQTCNVCGYVNKDTKNLSVREWECPCCHTHHDRDVNAAINILNEGLRILEVA

SEQ ID NO: 56978 - protein, 426 aa, Natronococcus sp.
MAKQVVTRTYTASIRNQSRVQDDLDSLGFAASKLWNVGRWTCGRVWSEIGHIPSHAELTAHLKSHERYDDLHSQSSQRVLQELAEAFNGWYGKRRNGDTRANPPGYRKHGDEHPRSTVTFKAAGFKLDTEYDRVRLSKGSNLKDYWSDFILCEYQTRPDVDLSTVENVQQVRAVWTGDEWELQFVCKVETEVADTPGEKTVGVDLGINNFAALAYEDGHAELYPLSCLKQDDYYFSKRIARCDDSDSEQATRLNQKKSRRRTHYFHTVSKHIVQRCVEEGVGTIVVGDLSGVREDEENDEAKNWGKHGNLDLHSWAFDRFTDLLEYKAEREGITLEEVSEQDTSKSCSCCGRKRDSNRVERGLYVCDECGMTANADVNGAENIRQKVSPSPATDGGDRSTGWLAQPSTFLFDKETGAFAPQERVTS

SEQ ID NO: 56979 - protein, 434 aa, Actinokineospora sp.
MIRAYLFALDPIDQQADAMRSHCGAQRVAYNWCLARVLANWAQRSAEQTYGLTGEQLTPWIDTSAYSLRKAWNAAKEQVAPWWAENSKEAYASGCANLSTALGNRKAGRARMPRFKSKRRARLTCRFTTGAFGLGPDCRHIRLPVIGLVRTHESTRELTRHVEAGTARVRSVTLSFQRGRWHGSFSVELPDPVPTERTRGRVVGVDLGIKSLAVLSTGETVPNPRHLDLAQKALRRTQRACARRRGPDRRTRVEPSNRWRKSRARADRIHTRVANLRRDAIHQLTTRLVREFDVIAIEDLAVANMIRNRRLARRIADASWAEIRRQLTYKTQRTGAELIVADRWFASSKTCSGCGAAKAKLALSERTHACVECGIVLDRDVNAAINLAALAADRAQLVREQPEGTGVRRPLADAVGPPREEPPAQPHRREMVSR

SEQ ID NO: 56980 - protein, 295 aa, Chloroflexi sp.
VRQPRAERKLAYQERGETLAFARQCAALPQLKRTWHQLKRVHSQVLQDVLHRLQHAFDGFFRRRNAGRTPGYPRFRGTGWYDNFTYRQWGNGVTLERGRLVLSNIGAVRIVRDRPLQGTPKTRTIVRKADGWYAHIACEVAPEPLPPTGKAVGVDVGLERFATLSDGTHIPNPRLYRAAERRLRRAQRRLSRRVKGSNRRRKARELLAKAHLKARRARLDFAHKTARALVNAYDQIVVEQLNIQGMARNHPLAKSISDAGWGLFVTVLRAKAARERARGRGGQPGRNVADLCAVW

SEQ ID NO: 56981 - protein, 438 aa, Deinococcus sp.
MGKLIPSPTPLRPTTDQAAHLTRLITEARSLHIWLRRYLRLRGAGIPLGLPEALRRVDAGAALPDVDDFQKMQMPNDALAELRGLTFAERPARWQHVPQSVALGIVAANTNRLKRHRSGESARYMFPLLRLDDVPLDAAVQPLDLHHVLLAGLPTPIVTDLWALPADLSTALMIEADDRARAVHARTAAVHERVRSGCPDALLELYPHAELLALQRDRTPTLTRDRERPHRADHVWLTEVTESSGEVVPALRWSIRVPDRHLPAASIDDTIGADVGLRNLVTLADRSQVWHVPRRAQVRSLPSTDPRSAAALLVDAQARRMILEAARPELEAALVRTLSYRRANIEALSYQGMRDHGRVPWAPGAMHLSGAAVWGTWVELLAPVTGTQVRRVNPAGTSTTCPHCGLLCVRPAPYDIVECPTHGAMDADEAGARMIRLV

SEQ ID NO: 56982 - protein, 498 aa, Hassallia sp.
MVLVRSKPVIIYEFKVKGKDRQYKAIDDAIRTSQFIQNKCLRHWMDNKDKKVDKYALNKYCAVLAAEFSFADELNSMARQSAAERAWGAIARFYAAHASSRGTRRQMLHAGDPQDPTLEAVPHLLSETLRERREPLLRGLPHRTASPTQCLDNCRKKVKGKKGFPKFKKHCRSVEYKTSGWKLSNTRKTITFSDKKGIGTLKLKGTYDLNYYDVKQIKRVRLVRRADGYYAQFAIDIDIKIESIPTNQLVGIDLGLKYFIADNKGNVEQSPSFYRTAEKQLNRANRKKSKKYDKARKKAKKPQSTNYHKARNRYARKHLRVSRQRKEYCKRVAHLLIQSNDLVAYEDLNVKGLVRNRHLAKSISDAGWSTFRSWLEYLGHKYGKLELLLLPTIQVRIALTVAKKLKSLCLLELTFALRSGYTEDRDVNAAINILKLGLSTVGHTGTYAWEPVRWGGSAVLGFPQVEHLPSGMPTVTHLAGEICPLGQLVQTCCLMASH

SEQ ID NO: 56983 - protein, 409 aa, Hassallia sp.
MELVERHIISYNHQFYKEASDLCWRGKNLYNYSNYLVRQSFIKSKKYLDNCQIYHLLKQHESYKCLPAKVSNQVLISLHKNWKSFFQAIQEWSKHPEKFLGRPKLPQYKDKQKGRYFVVYEKGAISKRALKLGLVKLSGTNIEFPTKIDVKNLLQVRIIPKCGQYVIEVVYKAEKLLTHLDTSLVASIDIGIDNLAALTSNQLGFKPVLVNGKPLKSINHYYNKRKALGQSCLKSSRQISRKIEELTRKRNNRVDNYLHCCSRFIINKLVEFGIGTLVIGKNDNWKQSCNLGKINNQNFTNIPHARFIDMLEYKAELVGITVLIHEESYTSVASFLDNDPIPVYQANNKHTIKFAGVRTKKWYRSASGTVHADVNGSLNIMRKVVPAAFSLGISGVAVHPYRVTPVKVA

SEQ ID NO: 56984 - protein, 360 aa, Hassallia sp.
LFAIKRKLKLNKAEQALMAQHAGFSRLVYNYGLDLFWQSVKAGCKASDSKRLQQIKKCLTNITKKRPEFAWMNTLSSKVYQSAFQDLHKAFSNWRKGVAKKPVFKRLNDCQSFTVYDGNGVVLVKAGKSIKVPTIGTLRLAESSQESYVSQTFTISQEGDGWYISFALFAERIPPILHEVAQAVGIDLGVKTFATISDGNEIEAPLPYKKATCGRTESSVRANRRAKIKLGKIQYRNRNKKLGNRKTGEKASNNAKKYYKKLARFHKRIADKRKDFLNKTTTSICKKYAHIRIEDLNVAGMIANGKLSSGVSDLGFYEFRRQLEYKASLYGTKLDIVDRWYPSSTDVSPIWAETRFKEAI

SEQ ID NO: 56985 - protein, 403 aa, Hassallia sp.
MIVLEFKARGKTTQYSAVDEAIKTAQFVRNKCLRYWMDNRGVGQKELYRLSTALRTEFPFVKTLNSSACQAAVERAYSSIARFYDNCKKSIPGKKGYPRFKKNCRTVTYKTSGWALSSNRKQITFTDKKGIGKLKLKGTWDLNFYQIEQIKRVRLVRRADGYYVQFLIPAENKVDVQPTGKTIGLDVGLSEFYTDSNGYTEPNPKFYRAGEKRLKFRQRRVSRKKKGSANRKKAVNRLGRVHLKISRQREEHAKRVARCVCQSNDLIAYEDLRIRNLVKNHCLAKSINDAGWYQFRKWLEYFGVKLSRVTVAVNPRLTSQECSKCGNHVKKSLSMRTHVCKCGFVLDRDWNAAINILNLALSTTGHVGTWILDPNASGDSTSTVLGASLSQQAGSMNEESPHF

SEQ ID NO: 56986 - protein, 421 aa, unknown
  TnpB Polypeptide
MDKNERIRESRKATQLRHKSQKCMTFKFKVDRSALSSKQKESLKMFFVETKRFYNYILSHFNNDIFNVNYKDHKKITYLDKNKNEIDYNISYIGSSVMQDTIRLMQESIKALSASKKNGNKIGGLKFKSECNSIRLLQYGITHKIKGSKIKIQGIKEPIRVTGLKQLSKYNNIDLTTANLLYDGYDYYISLTCFYDKENKSINNYKENIIGLDFGCESTITLSNGEKRKILIGESERLKGLQVRLATRERRSNNWYKDVSLIRKEYNRMTNRKNDISNKIVHDLVSNYKTIVIQDDQLNEWHETEYISKTVQHSVLGRIKSKLKCYDNVIILDQWFPTTKHCFDCGSNIKLSLSDRTFKCPICGSQSDRDIHAANNMIGFYERYKQSAGTVDSMPRRPLKVTYESYKQLVGQEAPPSLAAE

SEQ ID NO: 56987 - protein, 466 aa, Streptomyces sp.
MTDTVDKPVRVTGEEAGRIKREALGIADRRTEHGSTRRVPSSRAKEAGTQQRVYRYRFYPSPAQAEQLEKTFGACRWVYNEALTLRVGAWEQHRVSVGFAESCRALTGWRQASGTSWLREVSSTVLQQSLRHLDGAFTRFFKQSAKYPQRKTKRRSRNSATYVRTGFRWAENPELPGTGRLTLAKQSEPLDVRWSRPLPQGADPVKLSVTRDRAGRHFVSVLVEERIQPLPAAFLPGGREPRAVGIDLGLAALVTLDDGTKIDHPRLMRKYEKELARLQRGLHRKKKGSANRDKARERIARLYALISDARKDMLDQLTTRLVRENQVLVVEDLALTNLLRPATGRGRRRKAGLIRSIKDAAWGELLRQLRYKCAWYGRTLVIVDRFFPSTRRCADCHAKGAPLDVSVRAWLCAECGAWHDRDVNAARNLREEGMRLYRLVSCALQSARVPPPVIKASELPAVLPAV

SEQ ID NO: 56988 - protein, 441 aa, Methylococcus sp.
MSQAVQKAYKIRAYLTPEQRRAFAQAEGATRYVRRRVLGEMDAHYKATGTRKSLLAMGREVTQWKQAEETLWLKDIPSDVIIQELRDLKQAFEHFFRALKTKGSGRKVGYPKPKRKSASGAIRFAFDHRHPGKVAGWTGKKVILPKLGMIKLAQPERLPVEMPKLVTLSRDSSGRFFISFSVRQMIEALPVTGVSLGVDLGLIDLAVLSDEARIPAIKGLKKKERYLRRQQRTLSRRQGSKKGEKKSRRYLKQQQKVNRIHCRISDARRDYAQKASRALIKKADVIALEDLNVQGMMKNPRLSKALSDAAFRLLRTCLEYKGKWYGRTVCYADRFVPTTKTCSVCDHRVEEMPLSVRTWTCPCCGTLHDRDINAARNILRFAVTLGEGEGAYPEARGGVNPLREGALAPLLKDSVETRTENRLPRFREGHAPEDHDDSRVS

SEQ ID NO: 56989 - protein, 522 aa, unknown
  TnpB Polypeptide
MEVRTISFTWRTIHVEFPETLVPLYDKMSEVFNTVLCDPSLRVGVVSVDPTLRRGDYRNEMRRVIGNEVRDLLGPDFPNKAWHSRIIFEQLRRMVISLRERQIVFDTLNGGQADSLFWSRIHERGVYPTMGTVSNVQRSSYRPVLPCHAVFVLDYSVSNPQMFTQYGHTFKAKTIDNEWTEFSAILPLSIRDGATGRVAKPRFYKNKDGKYLGDLPYEVEVQPIESTGGVVGVDLGKLKLFSATVLHPDGTTTPEYIASRRIERIGRVVDNLYREKKAIYAKCNRCTPYTQVESVTKDARRQKTMEHLSAKITRLKMERARLIAKSIVHIALTHQCAEIHVENLSWLGSKGGHWEHSLIQQCIAQAAELRGITVVKVNPAHTSRKHPITNEMGTWCGRDVVFDGERLDRDHMASINIAKRGKKARKVTHVCKRSPVRTKPPSRKELKRRMRELLHSRGDQVVSLSPMVPGAACAPYERWSAVSVDANAINMKRSAVSDQQCIVQRQTSRRHWPIYSDITLIR

SEQ ID NO: 56990 - protein, 274 aa, Bacillales sp.
VERTTSLANNLVAAGRPIGLTSRTAREYLDGDLPSAVINQALRDVAAHRDVQKFRVLWPSFNNQNLRLKKVGDFWTAAFPTQAGRVRVPLSVTAKQETILSRLGRGVKQGAAKLYEKRGRWYLPLSVTLPVEEKTAGTKSGKIAGIDMGLRYLAVVNAGGETLFFPSDQAAYIRRRYHALRKRMGKAKALKAIRQMKDKEARWMKDQDHKISRAIVDWCLARGVSIIRMEKLEGIRRRNTRKRDFGRSLHSWSFYRLQQFIAYKAQLAGIRVNG

SEQ ID NO: 56991 - protein, 554 aa, unknown
  TnpB Polypeptide
MRYYLDEGLMTNADSFMDTMKIFNLAKIDLYNQKYKEKYNNNGILTTMKPHQFLKNKYNVNAYYQASINSAADGQISSQKELRKFYKSSFKHDTASRENKIKTVQTELDKKQDIKNSIVNYIKTGRWVKPYPRCRVKICGFNVQAPGIKDKMSIDEYERKTEARIRILKNKLSHLEYGLKRKQQKIDNIDTLPPRRIIFGSRKLFSKKDEAEINKTEWQDEFTFKRMSSMSLPGRHDAKYCNFLCRYIDGSLHLTNIDGSETVFKDFKLSRLNDEYLRFFSASRAERKPLCYNFSLKKDQHGRVYIIVSVTMVLENPYVNYSTEEGCVAIDLNYDHVALADIDAQGNLIDSRVIHFNIHNKSNGAITDAIGRAMSEVGAYIEARCKPLIMENINTSKSKHGMRYGNSLRNQKASMFAYHKMTTCLFNQAYKRGFDILQVNPAYTSQIERFMYMKQYGLSVHQAAAYCIGLKGLDMTDKLKPDNRLLELLPQSLVDSMNQSHYDLCKVWRAISTPFSGVQNRFFYIGIPYDVLNERQRPSIRTLSNEMRSWDGLF

SEQ ID NO: 56992 - protein, 546 aa, Mycobacterium sp.
VSITTRLRTSADDEFVLDQVAAHLGGLRRADLATTAHRPMLDTQLSAEQRRQIRRAELNARKKMLTAQSSARWANAIIAGNDDQYRLARDAQHRHIVGLHAAIATIENRLAAPTVDTLTVSERKARRNTRSARGYTTQAERFTKQQRLQRLRAELARVQADHADRRVRVTEGGKRLAHTRHHLDAAGMSLDGWRQKWAAARYRIVAHGSPDEPFGNLTITVTPAGEVSMRLPKPLEHLANAARSRYVLSCPAVFYHRSDEWQQRIGGRNSISYTITRRPGRAGRYLTAAWAIPALPYWVGRDDTAAGEAMHATGPVVGVDLNDGHLAVRRLDAHGNPIGAATRIDIDLTGSSARRDAQVRHAITQLIVYAQRFRITTIAVEDLDFADARTLGRETMGRGARGKRFRRTVSGIPTAVFRHRLTGMCQRAGIAVFAVNPAYSSIWGAQHWQHPYENVTRHQAAATVIGRRAQGYSARRRKGVTPTRPEDRAVRATNQTEPTSPTAITGNRHQSRMRGTTSRSPCRNERGDPGRATVTPALANNGQLQM

SEQ ID NO: 56993 - protein, 199 aa, unknown
  TnpB Polypeptide
MVRPAAERRHGESSRLPQTRRRTTAQYGHVQRRRVQTRPRQQPRPTLERFQSQGYWSDFLLCEYQTRPDVDLSEVNSVQNVRAVWNGDEWELHFVCKVKLKTNDSTGNEVAGIDLGITNIATVAFPDEYVLYPGNSIKQDKHYFKRSEYDTEGKTAHLTSRRGHVENLLTARHTFPRSLRHHHHRVCRTWCWNAGSELA

SEQ ID NO: 56994 - protein, 365 aa, unknown
  TnpB Polypeptide
LTRRIRPATAKTATNDHVPRSRSKQTASNTTPGNNRVRLSKGSNLKEHFSDFILCEYQTRPDVDLSEVNKVQNVRAVWNGDEWELHFVCKINLKTNDSVGDGVAGIDLGIKNIATVAFPDEYVLYPGNSLKQDKHYFKRAEYDTEGDNGPSEKSMWARGKLADRETHFYHTLTDTIITECVKRGVGTLAVSWPEDVRESDWGKTGNKKLHSWAFDRIYQYLEYKGEISGVEVLKENEWNTSKTCSQCGDDTKSNRKYRGLYVCSSCELVANADCNGAENMRQKITPSPHGEDRSNGCVAQPSTHLFDSESGAFAPRTSRVVDQQISHLRYGKPRRSRRGGCHTSLIYVTSTHEISSVSLIALFTA

SEQ ID NO: 56995 - protein, 131 aa, unknown
  TnpB Polypeptide
MWARRKLSEREIHFYHTLTDAIITECVERGVGTLAVSWPKDVRESDWGKTGNKKLHSWAFDRLYQYLEYKGEMRGVEVLKENEWNTSKTCSRCGDDTKSNRVERGLYVCSSCELVANADCNGSENMRQKIT

SEQ ID NO: 56996 - protein, 412 aa, Scytonema sp.
MYTSTLPQSQLAHLKATKPKYALPDIANSFVLVGSKDESSGNQLAQFDYIENPDSFVLSIRTPYALEERLGGDYIRIDGLNFKHGFHEIVESISERCYQVKTKDGTEKWAIGYNAVTLRFYWQDNCWYVAATTDINLPEITSEYLSGYVGIDLNADSIGWAVCDTQGNLLEYGDYKLDLHSKTSNQRAAIFSDAATFIALKAKQYNFPVASEKLDFSEKKKQIKEKGKKSARMLSSFAYSQWHEALDSACSKYGIYHKKVNPAFSSTIAMLKFMSMYGMNSASAAAFVIARHGRRFSERLPKLHHLLHSKSAYPIGKHVWSQWSRVSRSVKGTPRHKYFTSRFNRARKVTPFCQLTCFVGQHGQLVNPIQLELFEVGAIPTGNDTVTVAVSRSRKPRKRSQSTHMQISLDFN

SEQ ID NO: 56997 - protein, 329 aa, unknown
  TnpB Polypeptide
LKTQLEVACKLYNTLLHAEQEEYEENKHTMNKTELRQLALDLRKKNPEFQVLHSQVTQQVAERFYQARERFLGGLANKPKKKKPHKFLSLVYPQSGWRLSNTRDVGQGKNKKKKARLKQNWVFHFDSTQGVPRKPSVSSVRQTLPFRQNPRFLVKEPESQERHSSEEGEPVKAVGVDLGITRLATLSDGRFLENPKPLERSLDRVRLLQRALSRKRFLSKNWLKTKTRLAKEHEHIKDFRRDLFFKLSALLAKEYDLLVLEDLNIKGLIQSGTRKRRLRLYDSSFSELRAVLEWQFAKLGKTVLAVSSYNTSRECFLCGGINKGLTLED

SEQ ID NO: 56998 - protein, 500 aa, unknown
  TnpB Polypeptide
MNRQKSFENGRPTLYLVATPIGNLDEMTYRSINTLKNVKYIAVEDTRNTVKLLNHFEISTKLISHHEHNIKQSIPKLIQLLEEGNDIALVSDAGYPAISDPGYELVKEAIEHEINVVPISGCNACLDALVVSGIAPQPFMFYGFLDHLDKKKKKELIDLKKYKETIVFYESPHRIKKTLNLMLDILGDRNIALCREITKKHEEIIRGHISEIISIVEELKGEMVIVVEGSQEVEEEITFETTINEDVDMYIEKGMSTKDAIKEVAKQRNLNKNNALALDLGINNFVTAVSSNGKSFIVDGRRLKSINQWFNKENARLQSIKDKQHLGKKITNRQKTIARNHNNKVNDYLNKAARKVVDYCITNDIGTLVVGYNETFQRGSNIGKQNNQNFVNIPYGLLRSKLEYLCELNDIIFVKQEESYTSKASFWDKDDLPVYNADNPTEYPFSGKRVHRGLYKTANGKVFNADINGALNIMRKSSVVDMNILYSRGEVDTPVRIRIA

SEQ ID NO: 56999 - protein, 374 aa, Dethiobacter sp.
MIKAFKYRLYPNKEQDVLLQKTFGCVRFIYNQMLANRMAVYEQYRDNKEALKQQKYALPADYKKEYPWLKEVDSLALANAQLNLNAAYRNFYRDPAIGFPNFKSKHRSKKSYTTNNQRGTIRLIDSKTIRLPKLKNVHIKLHRQLPKNAAIKSATISQKATGKYEISILVEWEAVIKPITPTIESTIGLDYSSRSLFVDSQASSPEYPKFYRLAEARLKKEQRKLSRRKKGSKNREKQRQIVAKLHEKVVNQRKDFLHNVSRKIANNFDAVVIEDLNLQNMAQGLNLAKSTNDNGFGMLKRFLQYKLAEQGKQLITIDKWYPSSKLCHCCGEKNNQLSLSERTWTCQRCETTLDRDVNAAINIKLEGCRILGIA

SEQ ID NO: 57000 - protein, 416 aa, Halobacteriales sp.
MGLLVIDVEVRRTVPVKLDVTDEQADLLHETIDEFLWAANYVVDAAWDGERAETRKSVLHEETYDEVREQTRLHSNHVQSARDRAVDALDSVVSKWSKGEYASLPRFTTPFCEYNQRNATFHDDHASLSTVDGRVTAEYVLPDENRDTPHSKYLRSDEFEQTGATLHYRRGDFYLHVRTKADVDGPEPAENGTVLGVDLGVENIAVTSTGVFWSADKLNHWRQEYVERHKSLQECGSRWAHENVQAVGRKETGRFEQYLHRVANELLEEAVESGCTVIAFEDLTDIRERMPTARKFHEWAFRRLYEYVSYKAEERGIRVEQVNPKNTSRRCSSCGFTHGDNRPSQDTFRCQSCGYENHADYNAAKNIGYRLLRTQTGGEGGAPVGVRLNTGMLNANGVKPLPDSARAGVHGESPRL

SEQ ID NO: 57001 - protein, 331 aa, Micromonospora sp.
VSSVVLQQALADLNTAYRNFFASITGERKGRTVAPPRFRSRKDNRQSIRFTKNSRFRVLDNGRLRLPKVGDVVVRWSRSLPSGPSSVTVVKDAAGRYFASFVVQTTDEPLPASASASEVGIDLGLTHFAVLSDGMKVAAPKFLRRAARTLKRLQQDLSRKQKGSNNRKKAVVKVAKAHARVADTRRDWLHKLSTTIVRDNQAVYVEDLAVAGLARTRLAKSVHDAGWSTFVGMLEYKAARYGRTFGRVDRWFPSTRMCSDCGRVADKLALHVRSWTCPCGSVHDRDVNAARNIRAAGRADLNDRGAQVRPASVPAPRDEAVTHRELAPSGV

SEQ ID NO: 57002 - protein, 490 aa, Streptomyces sp.
MGETAERPEPTAVRGEEAQRIKREVLGIGDRRKHRTREARPLRPHVKEPHTHHRLYRFRFYPTEEQARQLERTFGACRWVYNEGLALRSEAWERHRVRVGFAETCRALTGWKRAEGTAWLREVSSTVLQQSLRHLDQAYKRFFISGARHPQRKRKGRSRDAAVYVRTGFRWVEDPKRPGTGLITLAKQSRPLDVRWSRELPAGVVPVRLSVTRDRAGRYFVSALVEERMAPLPAVFAPGTQEPKAVGVDLGLAALVTLDDGTKYDHPRLLKRYAEKLARCQRELHRKARGSRNRQKVRQRIARLYALISDVRSDMLDQLTTRLVRENQVLVVEDLSIASLLRGAHGTGSRRKARLNRMITDAAWAELLRKLRYKCAWYGRTLVIVGRFFPSTRRCSACHAQGPKMAVSVRQWTCAACGAAHDRDVNAAVNLRDEGLRLYKLVTDALPPGHTVPPVLKASELEAWSPAASSAAGRGARTDGPSAGMPVEPV

SEQ ID NO: 57003 - protein, 412 aa, Halovenus sp.
MKHTLRLRAYLPDDVESEAWNHIDILRQIRNHAVRDYYNSDSNDRPSDYDQHNELTKWADQWPTFAEPSRHAAQQAITQIHNDLETLKERRKKGYNVGRLKWQSTGEFRSVSYNQSSRFNVDHNTGDDRFVRLRLEKIGWFKIRAERDVPPAEDIDEVILKKETTDEWYVSLVTTVEDTPEKQPLSEIEAEDCVGVDLGITSYIHTSENLSVDTLDLSDEYDRYAREQRKLDRKEHGSANWENQRRKVAQAKRKIKRKVRDYQHKLTTWLVTEYDVVAVEDLDVKPMLETSQNAKNKQDAAWSQFIKLLEYKGELHGTHVETVEPRGTTKECWVCGVETAKPIWVREHSCPACGHTEDRDLNAAKNILYRGLKQLGAGRSESTPVQTALPTLTPHREAVSAKRVVEAGSPGA

SEQ ID NO: 57004 - protein, 408 aa, unknown
  TnpB Polypeptide
MKRTNLFNLAPTREQHRILQELGMNCTKLWNEVNYLHRQQYSHYVKLDWNPQAYKKYVPFVGSATAQQIIRKNNEAWRAFLALKRMEKNGELPSTIKQVKSPGYWKRDGRYMLRVLFRCDSYHIREGHLDLPRRLSVPFKGELKWTGKQGRLEVAWDALSRKWRVFQPVNVKSIITPLGSKTCYIDLGVRNLATVWLPEWRQPVAYQSGRLLADWWYWTNRIARHQQRLLTVNGRKKSKQLSKLYRIRKKRFRHAVATFARQFIKDIYREGASTVVIGELTGIRNNSNHGRQGNAMVHNYWSHKYVADRLKWTAEEYGMKIRIISEAYTSQTCPRCGSRHSLRVLRGFRCLDCGLEAHRDAVGVLNIAARCGEYAVRPMAWPMLLHWDGCGWNRNNGMPTQQRIRVEA

SEQ ID NO: 57005 - protein, 298 aa, Nocardiopsis sp.
VLSGAAAFAHRGREWTERVKANRAVAYRVHLGAEQGRWYLTASWQIAAPTQTPLRAALTEGVIGVDMNADHLAAWRLDTHGNPIGDPRRFDYQLSGSASHRDAQVRHALTRLLRWAHGCGVKAIAVEDLDFTTSKTRERHGRRKRFRQLISGMPTAKLRARLTSMADATAVTIIAVDAAYTSRLGAQHWQKPTTTKRRKTSGHDAASIAIGRRAQGHPIRRRTTPPRTHQSDGCGPRIVQAEPGAHGREGIRHPGWEHAHDARTPTLGEDERGGPAHPTPFGTRAVPGAASDASPAHC

SEQ ID NO: 57006 - protein, 413 aa, unknown
  TnpB Polypeptide
MLVRVKRIERIRLYPTSHQTKALVRMLDVTRELYNALLQQRRDAYRLRRIGVTARMQYAELTELRAEDTRVRAVYRECQDAVLHRLDLAMTAFFRRIKRGEAPGFPRFKSYTRWGQLEFPHGDRALRLDQAQRRVSVPGVGAVKLRKGRAVPATYGRAWLVCKSGSWYACFECARPVLPLPATGTVVGVDRGVHVLAALSDGRLIANAAVGEQRKAATARLQRELEAVTERDCAGRMLNRRDSQRQKLQGRLTRAKEREANARRDYAHKVSRQIVNGADVIALEKLSLRAMTRSARGSVERPGRNVRAKAALNRRLLDSGFGLLRQMIVAKAEEAARTVVEVDARFSSQTCSRCAHVASESRRRRRFSCVACGYANHADVNAALVIRWRAQLALKSEPDPAEEVGRRDQDVAA

SEQ ID NO: 57007 - protein, 387 aa, Sporosarcina sp.
MKVLKKAYKTEILLSDQQQQEVNQTIGVCRYVYNLYLHTAQEHYKETKKHLSGYDFSKWLNNVHSKKTDHWIKDVSSKAVKQAIMNGDKAYRNFFKGLSKFPRFKKKKNQDVKAYFPKNNTTDLTVERHRIKIPTIGWVRLKEYGYIPTKAHVKSCTVSCKAGRYFISTLCEEDSSNVVEAPKHDGIGIDLGISTLAVCSHHIQFENINKTQAVAKLEKQLKRQQRKLSRSYEQNRSRERGEFCAKNRQKQLVVVQKLHARLANIRQEYIRYVVSVLVKTKPAYLTIEDLNVKGMMKNRHLSKAIAQQCFYAFRETLTAKCVEKGIELRLVDRWYPSSNLCSNCGAKKTKLSLSERTFTCDNCDTVLDRDFNASLNLKYAKEYTVLI

SEQ ID NO: 57008 - protein, 517 aa, Sporosarcina sp.
MFRTYQTKLKNGMIVLLDYSEIPVYVYFQQYAKEFGRIERRLFVDVYVRKKPTNQLKVEYCANYQLTARQYNSIKNQLDGRVSSKKEVTKLHIEETKEKIYQTRKFLTKKIAQKEKSQNTLVKMRGDEPSFLKKVNSYRKLKMAIHQKKRKLHRLQVKMERLECDEKCGVVRLCFGSKKLFHKQFHLAENDLSFEQWKNNWEKARASQFTFIGSKDETYGNQSCTYDLENQLRIRVNRKNEGKFGKYIVLSNIHFTYGQENIDKAKVPTIGYTKGKGNKVRYYRALTCKFIFKNRHWYLNMSVDVDTPEIKTLQNHGQIGVDFNASFLAVTDVDRFGNHVHSFQVPFKAYHVSTQQAKQSLSDALKRVVDYAVVKQKPIAHEKLDFKKKKQQLKQLSNRQAKMLSGFAYSSYQSMLTSKCRKYGIAVVAVNPAYTSQIGQHKFMKKYGLSSHGSAAMVIARRGLELKKTEQVPTNRLIQGNQDSIMLKKRFEQWKELSKQWKSYTFGQKIELLYHVF

SEQ ID NO: 57009 - protein, 369 aa, unknown
  TnpB Polypeptide
MLQTLLVKLDPSQEQYKILSETMKRFNEACNEIAETVFAIHSANKIEVQKTVYYPIREKFGLSAQLTILAIRKVCEAYKRDKSIKPEFRLDGALVYDQRVLSWKGLDKVSMATLHGRQIVPTKFGDYQSARMDRIRGQADLILVKKIFYLCIVVEASEESPYDAKGVLGVDLGIKNLAVDSDGEVHSGEQTTNTREQLDSLKSRLQSKGTKSAKRHLKKLSGRMARFSKDVNHCVSKKLVTKAKGTLRSIALEDLQGIRDRVTVRKAQRRNLHTWNFGLLRMFVDYKAKIAGVPVVFVDPQNTSRTCPSCRHISKENRPTRDEFRCESCGFAGAADYIAAMNIAFRAVVSQPIVTRFFAQSQAPSFRVG

SEQ ID NO: 57010 - protein, 413 aa, Burkholderia sp.
MQRLQAFRFELMPTGEQVRKMRQFGGLCRRVYNDALAAQQKNREDSGKFVGYAGMAKWLTGWRNSAETPWLKDAPVHAQQHALKDLERAYKNFFEGRAGFPRFKRKSDQRDSFRYPDRKQIKLDRENGRVSVPKLGWLRYRNSRTVLGDVRCTTLSQRAGKWYVSILTAREAEQPVPVGPAVGIDVGVARFATLSDGSYIEPLASFKKHERRLAKYQRSMARKIKGSANWRKTKARIQRIHARIANARADFLHKASNTISKNHAMIAVEDLQVRNMSRSASGTVAAPGRNVRAKSGLNKAILDQGWYEFRRQLEYKTAWRGGFFVAVPAQNTSRTCPCCGHISAGSRKTQALFACVNCGHEANADLVGAINVLRRGEVQLSSEGLELARIACGESVQSGHSMKQEPTQVHCDG

SEQ ID NO: 57011 - protein, 670 aa, unknown
  TnpB Polypeptide
MENPKEKPPEFFKSTKTSLKSILKHPEINTRKINDVVIKAHKIGIHTLQFLKLYMLHHYETNNHILPEIDKVLILNIMKVVCGEKHTNQGRIPKKETLELIENLTSFYTEHYKPHTQPEQLDYEYMSNVLSYLCEDIMTMYENNIQLHYVDYVERFVNVVWKKKMLVEKIRKIFPTKKEKEARIRQLEKELRKIKNDLLNVDNNIEYTSQPHYHNWITQQKKCILPNKRFQKQSIYYDLKCKPMDYFPCMITMMKQVETDEETISNVFPLRSSISPGYIRLDTITLVYLLLRKEQGKKSDYNNQGNTKKHEDKIWKFFFRTENKVFCKNDFVFHHMISTDGVGVSILFIRDDLVGKRLPSAKKGISKELYIDELNDYSALQNKKIIGIDPGKEDLIYCVDDASKYANVFRYSQNQRRKETKMKKYNNIILGMKTNKIQGEGTNKSVIDYETELSLYNRKTLCIDKFKSYITEKNRINHILFDFYSKHLFRKLKFGRHINIKRNEQKMMSDFTKIYGNPDEVVICIGDWEQRQQMKYKEPTLGIGMRSLLRKNKYKVYLVDEFRTSCKCSNCDGGVCEKYMVRKNPRPKPKKNKENSKKERKYDEMRLVHGLLRCKSGCGEWNRDRNGSSNIYKIAYQAIHNLERPSYLCREIKSNQAVLPNCYKQNIHKV

SEQ ID NO: 57012 - protein, 472 aa, Streptomyces sp.
VKVTRIAYSKSLNAGKYAQLADQAALLGAVRTLVWRQYGSIAGVGVKDRTVRDQWMRDGTAAGFGVLANAWKETVRDAFCDITANREAAKVKVRRAIAKLKVAEGEKKRLFTAVKRETWAEDPYLSRMMRKHWRRGRNRTTNQIVVRSDQYKTFTLTKGGNVWLAVPGLERRSLVKIPLNTTIAPTGTLRLILRGGQVEVHYAIEAATMKSSKRPCGSRKIGVDKGYTEALTDSDGQHHGTELGKLLTAESDHRKVKGQRRAKLRALAEKAEQRGDLAKAQRIRDNNLGTIKRQRRSNAWKCRVRDLTFKAVHQVFDKASLVVAEDLTKTFSGRKKRGKNTNRRLTAWTKGITAEALETVSVRRGSAVRLVNAAYTSQAVPFTDILGVRKGDRLHCTQCGAVWQADHAGAINILERDGDPDISLFTPHKRVKQILQERTDRQRSGLPMDQDSSTRLCRCGERNIQPMLNSER

SEQ ID NO: 57013 - protein, 379 aa, Calderihabitans sp.
MKLVKTVKCKLQVNIEQAAVLLETLQRFADACNDILCVSQENHTTNKVKLQHLCYRNIKEKYGLQANLVIRAIARVAEATKKKRKQSKPRKFKPTSMSLDQRTFSFNEKRWEVSISTVAGRLKLPLAIGNFQRGLLAGQKPTSATLCYNRRTKEFYINIVVNREVPFPPKGGNVIGVDRGIYNLATTSNGLKFSGRQAIHVRRHYARLRQVLQTKGTDGAQKLLKRLSGKEHRWMTDLNHKISKAIVNSCKPGDVIVMEDLRYIRERIRAIKGQRLFQHSWAFGQLGRFIEYKAAERGIAVVYVDPRHTSQRCPKCSNTARDNRHGHLFRCTSCGFVGHADIVAATNIRQVYFEALADGSPSVGPEAGSTCKPLALAMG

SEQ ID NO: 57014 - protein, 421 aa, unknown
  TnpB Polypeptide
MRITKTLKIPVHFAITKLKQSILDNTTARITFCIQNISSLITDDTELTRKTIRLLARTNKVAETTKLSAGFVDQCIDKAIWSWKSYKKLHDDWLHGLPKVAAKDDEVYFQKYLQKEPTLPDFNHKTSCRIDERTGRIQKNKRSKLSPLWVHLSTLQKGTTVDIPLNPARYHLKQLHAGDVKDFELIKKDGKYQVHVSIQKEIAEKHVSSVGGIDQGLSHSAGIVLLPSDKDGVPFEGLICDEEKQKILQKYDGLVSVLQNAETFSKLKRLRNKRLNVAKEYDWQIANQIARLSDGVLIGIGDADFRHDMYRGNGNPVLRKRIGKWSYSRQRQFIALRRAENGYDTLLVSEKGSNDCHVCDSHLVTRKWLPSGESYILCHSCGLKKDADINSAYHHAYATSSRCQDERLKAGMTVGETHASL

SEQ ID NO: 57015 - protein, 374 aa, unknown
  TnpB Polypeptide
MRRTYKYKAKISKETETNALSWISLCCALYNSVLEQRQTIYRQYRKSMSCYDQIKQLPDLKKELPEFKQVGSQVLQDVVERCDKAFKAFFRRLKTGEKAGFPRFRSFHRYDSFTLKQTGWKLDGRNLHIANVGRFKLFLSRPIEGTIKTVTITRSTTGEWFVCFSCDNVSEKPLPKTGKEVGLDVGLNHFIVDSDSNFINNPKFFRKSEKQLRVVQRKLSRCKKSSTRRKKVKLQVAKKYKKVKNQRVDFLHKTANYYIENYDMICIEDLKIKNMIRNRHLAKSIADASWGTLGSMLVYKAESAGRTVSKVNPYRTSVNCSLCGMPVQKSLSVRIHNCPHCGLILDRDLNASLNIRAAGQADQTLTRSSRMYVV

SEQ ID NO: 57016 - protein, 337 aa, Actinophytocola sp.
VQRRVITEAKTTEARAWLSEVGSVALVQSVRDAHSALSNFFDSVKGRRRGRKVGKPRFKSRKDNRQSVRFTRNGFTIRPDGRLYLAKVGDVKVRWSRELPSEPSSVTVIAEPDGHYYASFVVEVEPRPLPAIEKEAGVDLGIARLATVADTTGGRTDVANPKHLARKLRKLRRLEREKARRAQGGKNRDKTRRKVAVQHGKVARARRDYQHKQALGLVRENQAVHVEDLNVAGMVRNRKLARAKKAVRFGRIVHKVSRWLPSSRTCSDCGHVVGEMPLKIREWRCPECAAVHDRDHNAARNILAAGRAERRNACGAGVRPSFGKAVGEEAGSAPDAA

SEQ ID NO: 57017 - protein, 465 aa, Hydrococcus sp.
MGRRRTKKKQSSQPIIRTDVWDLAVTADQKHQMILTVAQYRVYLRPLVLIVNAQWINLADLTSKERINAVEKMIHQTADNPNPKHEYFHSSVNKYPSFRKFPSYLRRAAIADAIGIVSSFNTRYREWQSGERKHRFAKSPRLTAMCDTYPALYKGQQIRYGEKYQTVELKVWSGTDWIWITNIGVSGYGLNRHQVQGNEMQSPALVVNKRTCQLSMPVQIKAVKIEESEFVASVDLGVNNAAVASIVGRDGTVKARKFINPARDIDQRDRRRMMIKRKSRQTANITKQRLAGGFCKGLYRKSSNINLEIARSVMRSIIGLAKTHNVKAIVFENLAGWKAKAGRRGSLQKQKFHLWCHCKIVELTQQRWNELGGAVVFINPKYTSAYAFDGSGKVRRSKIDYSLATFKNGKHYHADLSASYNIGARYWYAIIMGDRHFSRVFEGKSSHGTLRTPVTLGTLRSLNVA

SEQ ID NO: 57018 - protein, 362 aa, unknown
  TnpB Polypeptide
MQVTFQFRLYPTPKQEQQMNRTLVLCRKLYNWAKEQRDFTYKQEGKTITYAMQQNELPAIKKESPHYKEVHSQVLQDCLRRLDDAYQRYFRGEAGFPHYKSTDRYVSFTYPQPGAVTKTFANNGFVYLPKIGFVRMKAHRPFDRSNVTQLNVKRYTDGWMINISVRTQSAETGLAVESAVGIDVGLSTFATLSDETKLDNPRFLRKTEKQLKRVQRRLSRKLLGSNNRKKAKQKVGKIHQKVARQRKDFLHKQSHRIVQGHDLIAVEQLKVKNMLRNRRLSKSISDAGWRKFIIYLTYKAERQGKRFVQVPAHGTSQTCICGANVPKTLAVRIHECDRCGLIQDRDIVSAKIILHRALEVSA

SEQ ID NO: 57019 - protein, 569 aa, unknown
  TnpB Polypeptide
MKLYHQGRHVKLWELPVRLLDAGIRKVRLKLLEVMVPKDYTKLVNSFQMAIVMLLLLRKKKVSVTVGYPQLNKKTIWKGKNHLCESNILTTRLFRILVVESIGNEKDYSPFWKKDSMENLKKLLSLTEIGYAGSRSDYSSKCSNSLIPNLWCSTMIQNVREKKNYTQTCLPSSMYTHVAKWEEESTKDASVVRAVKVRIHPNWTQQKTLKKWMGTTRFVYNKALAGILDGADKPNFQMLRNKYVTEKGNMIMPKWSFETPKDIRASAVNEVAMAYKTNFAKNKKNSNKKKFKVKYRTKRCTHQNISIPSSAITRSKNGINIYKKYGIGEILIDEKDKKKDLPIDMEVKIHKSFGNIWHLVIPYTMKIEKNMNPDKRICALDPGLRTFQTGFDTEGNSFKLGVNCYDKIRRRQELIDKLRSKLAKMKQLNDRVGYLKTKSRFNRSSFALSNAIDELHRQSIAWLTKNYDVIFLPSFDVQGMVGDCSWFNRWMLSLGHYKFKQRLIHKCEQRDKKLVIVDEYYTTKTCSGCGILNHTVGSSKVFDCQHCKLSLDRDVNASINILLKSLIQK

SEQ ID NO: 57020 - protein, 340 aa, Oceanobacillus sp.
MRTVFQNWKAFYGSLRAYKKNPIKFKARPNIPSYCRLKEKEVVFSNQDCVVKGNKFLKFPKTKLCLNIGKLGYSEGKLKQVRVVPKYRHYVVELVFQIPIEAEKKESKNRFLAVDLGIDNLATIVMNTGKRAVLVKGKNVKSVNQRYNQLKAYYTGILRQGKKANEGTFTSNRLEKISQKRFLQIKDLFHKASFQIVKIALEEDIDTIIIGKNKDWKQHAAMRKRNNQSFTSLPHTLLTQMITYKAEKQGITVVLTEESYTSKASFLDNDDIPVYGQKNENAVFSGKRIKRGLYLSKNKERINADVNGAANIMRKIFKDAFRHSFSNIEALRSPVSLKVK

SEQ ID NO: 57021 - protein, 572 aa, Salmonella sp.
MKRLQAFKFQLRPDGQQEREMRRFTGSCRFVFNRALALQNENYEAGNKFIPYTNMASWLVEWTNSPEMQWFKDAPSQPLQQSLKDLERAYKNFFQKWAAFPRFKKRGQNDAFRYPQGVKLDQKNSRIFLPKLGWLRYRNSRQVTGIVKNVTVSQSCGKWYISIQTESEVSTPVHPSASMVGLDAGVAKLATLSDGTVFEPVNSFQKKQKKLARLQRQLSRKVKFSNNWQKQKRKIQRLHSRIANIRRDYLHKVTTTISKKHAMIVIEDLKVSNMSRSAAGTVSQPGRNVRAKSGLNRSILDQGWYEMRRQLEYKQLWRGGQVFAVPPAYTSQRCACCGYAAKENRLSQSKFRWLSRDGEAFRDKFFPAIPQASLARKKLTAHPGHLHRAVAVYALAAKVLKRVKVTTRGTEQQVPAKRQNRGSRNSTGDGLKKQRESIMNTQNVSTKIAAQKSSERWGSDPKARLGCVIAEQRSYLAELCQVWNLQLSQKDEAEEVLRLLSLMSDNVHKEGVLCWERSYPLVSFHVVQPWLQAKDHAIRLYGVIGREAWEIARKDLCNNINFAQAMMRLEAR

SEQ ID NO: 57022 - protein, 482 aa, unknown
  TnpB Polypeptide
VEQPFQTRAVVVPLDPTPAQAQLLRSYCGSARFAYNWTVALVKENLDIRTHEREEGVGENDLTQSLSWSAYSMSPLWNSLKDEIAPWHHDVTKHAFRSGVNNATVALKNFSESKRGVRQGRPFGFPNFKNRHSKQSVTFTETSTQSGWFAEDSRHVRLVLPRRPADPRIVRRREQLQWLHTTEFLRRLKKKVASGEWTVQAVTISFTGGRWQASFSVRQLVKPAIVPRKLLGPAVGVDLGVAHLATLSVPVSGVSDEHGHVVNPRHLASELERLAKLNRQVARAVKGSKNRAKLLKRRQLLHGRTSRTRDLYLHRLSATLAGSFETVVLEDLNVTGMVKKAKNTMTHGLSRSILDAGFYELRRQLTYKAIDRGHRVVVVDRFYPSSRMCSHCGETKAKLALSDRVFECSACGVRLDRDVNAARNIHREGLRLLGNEATVAGHQPETLNADSRDQKTRAPRCSGGDRYQSRTTLPIKEFSHLA

SEQ ID NO: 57023 - protein, 450 aa, unknown
  TnpB Polypeptide
VLSRAVTFQFALDPNVEQRILLAKCAGARRFTVNHHLARVKANLDARSTEREASLEVGDPCEPSTPSLSWSAFSFINEFNAWKNGESEDSLVNEDGGCGLAWRHELPHDVFECASVDAARSLENFSTSRRGERSGAAVGFPRFQAKGKVTPSFRLRNRATPGRAPTSQPIRFTDPSHLRLPKFGPVKIFGPTRKVRRMIDAGRFHIYSATLNQRAGRWIVSLTGVAAEFHQAARSRTNRHAVAVGVDRGIISLCVAADANGVPFESFEGVKTLKQAQTSIKAANRALARTTPGSYGRQRARARLAKTHRKVANTRRHLVHQATRTLIDRAQVLVIEDLNVAGMVRNRHLARSIADAAMGELSRQLLYKARWHRVEVRVADRFYPSSKTCSGCGELKGDLDLSTRTYFCATCGLVIDRDLNAAINLARWQPKESPTVTLLDSTRAALLSTA

SEQ ID NO: 57024 - protein, 454 aa, Nocardia sp.
VPSRFTAYPQLSSVCSIQGRVRRMARGCVRHRQGVRFELAPDPEQAVMMGRHAGLSRVVENFCLETVIKKWAQRKAEKSYGVTGEQLTEVPWTAPALEKEWRAAHPVLFPWFGENKLSSRVPKEACRARAAGFANYVKSKTGKRKGPRVGFPAWRKRKDGGRFRYDADRAKPVGVGSVWLPGIGKVATREDMSWLTGRLGDGRARILGATVRERAGRWWVAFQLEVDRADVNTRHHVPEGAQNCGIDLGLKTFAVIANEDGTSEEIHAPKPLAAAQRALARANRKLARCRKESSNWGKSRVRVGRLHLRVVDRRRDFLHKTTTRLARTKSAIAVETLHVKGLVANRRLARAVGDAGFGEFVRLLEYKAAWYGSRVWKADRWYPSSKTCGACRRINRGLVLGDRTWQCPGCGVAHDRDHNAAGNLLAAMQTDLETDNAVLAGKFPGEVKRLAETA

SEQ ID NO: 57025 - protein, 650 aa, unknown
  TnpB Polypeptide
MNKPPDPYKTNKTCLKSIVRSPEIQEKLMEVVLTAHNMMRHTTQFLKLYLLHCYDNKQPIPELTVTFLVNVMKCLCIKTENRGKKPSDATLKQKAPLIAFFKEHYAPLMTETITYTHMANIMSYLAQDILTSYENNIKQNFVSYIERFVNVYHDQKEKIKTMTKEEKHLFMNGLRKIKVAIMDRTNVDIPQELDPHIPFLLPNRKLRECLRYDLMCSPQDYLPCMIYMMRFVEAKENTIFKIFPLRTKMIPNYVPLDTATVIQLFVERGKHFMNKGELLTNGKLVKYQSQIWSWFFQTHKRAFKHKEIEYSFAHRIVTDGEGVSILFETKTPVKESKKVKDTKEAYLTDFTDLSIFHGKNPVAVDPGHSDLIFCNGKNLQGEMQHFRYTQDQRRKETKAKKYRNIHQEMKKKTMVEGKTIEVWETKLSAFNSKTVSFIKFQEYIQLRNAIYQKVHSFYEQRVFLRLKWYSFINRKRTEQRMINRFQSIYGSPEETIVFFGDYEQFKHRKYREPVIGKGLRTIFRKAGYTVILVDEFRTSCTCFACNGECQTFRKCNNPKPWKKETIITRHGLLSCKNCSRLWNRDVNGSLNILRIVTDTLEGKGRPLALTRGTQKGCALISGAASATSGDKTEVSSLSTTSHTTKLYTRM

SEQ ID NO: 57026 - protein, 207 aa, Cyanobacteria sp.
MYALKLELKINNRERAFLAGCAGFSRFVYNFGLSMLTQSWEWADVKAGDSKRLSAIEWKNRHLAHGDRRKGIATSNNAKKFYRRIAKRHSHLANIRKDFLQKVTTNISRKYYRIRIEDLNISGMIANHKLAEAVSSCGFYEFRRMLAYKEVFYGTCVELVDRWYPSSKMCSECGNIQPMPLSERVYRCNQCGCEKDRDFNASINLEQ

SEQ ID NO: 57027 - protein, 209 aa, Cyanobacteria sp.
MLTQSWEWADVKAGDSKRLSAIEWKNRHLAHGDRRKGIATSNNAKKFYRRIAKRHSHLANIRKDFLQKVTTNISRKYYRIRIEDLNISGMIANHKLAEAVSSCGFYEFRRMLAYKEVFYGTCVELVDRWYPSSKMCSECGNIQPMPLSERVYRCNQCGCEKDRDFNASINLEQAPSDRVRRATAELKPVDKKEPTPLAEAGNKQRNVEF

SEQ ID NO: 57028 - protein, 398 aa, Fischerella sp.
MEQVLTLVCKLNPTPKQAEEIELVLKAFADACNYANQKVKTQITSKTTIQNMVYNEIRALFGLSANLAVRACAKVGANRKTAKQKDNPVKRFKPTSADYDARIFSFREKDWTVSLTLMNGREHIKIDAGNYQRGKLKGRKPTSAQLCKHRDGNYYIHIQIKDEPPAPIKSSDVIGVDFGRRDIAVTSNGDKWDGKQINDVRDKFSRVRTSLQKKVTKGTRSTRRRARQILKRLSGKERRFQQWSNHNISKSIIQNALKNNATIAIEDLTGIRERTNQKPRNKTERRRSNSWSFYQLRSFLEYKGVQFGVEVIAVSPAWTSQTCYQCLHIGLRSDKSFKCTNKTCSWSGDADFNGAKNIAAIGVTFVNSPRGSNCLCCTLCVDSSGLLKAYTVPQGQCR

SEQ ID NO: 57029 - protein, 407 aa, unknown
  TnpB Polypeptide
MSDLTKTVKLRINITPEQTELFRQMTEQYRQACNFVSQYIFDNQFDLAYLSLNRVLYAEIRSRFGLKSQMAQSSIKTVIAKYKTVKQQLLQRPYKYKDEKGNWKYITKTLEWLWKSVFFRRPKTDLVRDRDYSFVDKGQTLSINTLGGRVKCSFFGEHFSAYLDGSYSLGTAKLVELNGLWYLHIPVTKTIEDFEKEKVRHVVGIDRGLRFLAVSYDEQGKTEFVSGKKIATKRRKFQEVRRQLQSKGTKSAKRRLKAISGRENRWMSDVNHRISKTLVQKYGKNTLFVLEDLTGISFEETNLSRGAKQNYALRSWSFYQLEQFLSYKAHENKSEVLKVSAKYTSQRCPKCGTIHKENRDHRRHLYSCQCGYKSNDDRIGAMNIQFLGTMWISGDNNPRYERITVLE

SEQ ID NO: 57030 - protein, 348 aa, unknown
  TnpB Polypeptide
MIVVYRYRVKSLNGLLNQLARKVNFVWNYCNDRQKDALRFGRPWLTGFDLNVLTTGSSKELGLHSGSINAVCEQYAKSRSQHRRQYLRYRGRKTLGWVPLKGRDLHREGDAFRFAGSTFRVFHSRPLPEGKIKDGTCFSSDSRGNWFLNIVIEFADPPVRPLEHGVGIDLGLKDLAVLSDANKIPAPGFYRKAEAALALAQRAHKRRRERAIHACTARRRLDFLHKASLHIARTFDHIVVGNVNAGGLAQTSLAKSVLDAGWSSFRKMLAYKAVRHGARYVEVDERFTTQTCSHCGALPDSRPRGIAGLGIREWICSDCGAVHDRDLNAAKNILRRGRATLDAGISAL

SEQ ID NO: 57031 - protein, 597 aa, unknown
  TnpB Polypeptide
MYLQESLLPDWESAPKHSKDGLRTGKSKASLPKGGNEDITSIQLSLFDAAIPQMNELSCYMPGFQVAVRKMTLSNRLSFFNLVTPTQKSLLTSAQDSISNEKVFKPYWTEFSQTLANLLSLPTKIGFVALGSILSHGCVLGSRLKYWFSTKRTSAQNGKWSKISLPSSMSSVVDCMDCENTKNKLLKTVSYRVYPVKELEVIWKRWVAAVRKVYNISIAYLNENQGFIKIGKKGGKMGFRTMLKSAGLIPQWCLDLNVSKILDNASMEAYTAWSETDKNPKTIGKGKDKKLHPQSGLKIAKFRSIRDQKLTIQFDPSAYKNGRWMVSTTKHLPKPEFKGQDFCVLTDGSSELTVNLGRWFAHFPVEFEQSVYVTNKVIALDPGIRTFMTGFDGSDFLEFGNGDFSKIAKLCSHLDKLKSRHDRSVGHKFKRLRYKIRFAMERLRSRIKNLRSECHKQVGSYLAKNYDVIVFPTFETSQMVVKKKRKLRSKTARAMMTWAFYQFSQTLEHLCNRYGSKLVRITEEYTSKTCTKCGHVHRKLGSSKNFRCPNCGYEIPRDFNGAVGIFLKAMWDTTFTDSVGDVVLDVHDISNVGECLG

SEQ ID NO: 57032 - protein, 396 aa, Thermoactinospora sp.
MRRSLKFLLRPTRHQAIALAAMLEDHRVLYNAALEERREAWRRRVSVRYGDQSAQLKEIRAGDPGGQGRWSFTSQQQTLRRLNRAFEAFFRRVRAGRTPGYPRFKGRGWFDTVDLIAADGARWDSQSHHPRATYVRIQGVGHLRVHQHRPVTGRVKTISVKREGSRWYVVLSCDEVPAQPLPSTGRAAGIDLGVASLVTTSDGQHLANPRHLAAGAKRLAAAQQALARKKRGSRRRREAVARVAALHRTIRRQRLDGVHKAALALVRAYDVIAYEDLPIANLTRRAAPTPDGDGGHLPNGAAAKSGLNRSILDAGWGVFLSVLAHKAESAGRELIAVNPAGTSRTCARCGHCARENRLGQAVFECVGCGHAAHADVNAAINILRAGLALRRAVAAA

SEQ ID NO: 57033 - protein, 376 aa, Salmonella sp.
MKRAYKYRFYPTTEQAELLAQTFGCVRFVYNSILRWRTDAYYERKEKIGYLQANARLTALKKEPEFAWLNDVSCVPLQQSLRHQQTAFANFFAGRAAYPAFKSKRHKQAAEFTASAFKYRDGKLYMAKNKIPLDVRWSRPLPSVPSTVTISKDAAGRYFVSCLCEFESASLPITSSMVGIDVGLKDLFVTDTGFRSGNPRHTAKYAARLALFQRRLSKKAKGSKNRAKARLKVARLHAKIADCRLDALHKASRKLINDNQVVCVESLKVKNMIRNPSLSKAIADASWSELVRQLQYKGEWAGRSVVAIDQFFPSSKRCSCCGFTMKKMPLDVRKWQCPECGTDHDRDVNAARNIKAAGLAVLAHGEPVNPESLKAA

SEQ ID NO: 57034 - protein, 395 aa, unknown
  TnpB Polypeptide
MADSFQLAYRYRIYPTKAQVSVLERTLGVCRDVYNSLVHERTVLYKTTGKAPSRVDQCREITAWKAAHSELSDVYSQVLQNITRRVDLAFQAFFRRVKAGDDPGYPRMKGKGQYDSITYPQSGFGFFQGRLRLSKIGDVAIHLHRPIEGVIKTCTVRRTATGKWFVCFSCEVEPEHLESSADEIGIDVGLKVFAALSNGEFIENPRFFRRDEKALAKAQRKFDKVKNKHRTKARRKAKKVVSRIHERIATRRHDFVHQTARRLVNRFGVIGVEALQVENMIRSPKAKPDPENPGQFLPNGASAKAGLNKSIADASWSIFRNVLTMKAENAGRLVVAVPPQYTSQMCSRCGNIAKKSLKERTHKCLSCGLVLDRDTNASVNILAAVGQHSLAALAA

SEQ ID NO: 57035 - protein, 648 aa, unknown
  TnpB Polypeptide
MTTDAYIETLQKRLAYGLSLSVSTGDKSLDERITVALELHRLLPYCQLCSVRYVIRIIYLHLISCQPDKYKIAACTDLYARLMVAMGDHKWPAPNIPNNKHDAIRTKLQQTNALVQSAIDGEPLVGDQRSLLQLATDSDTKQRIKEAEQTAKAAKKNLSKAKEPTGLSDDAFRDLSLDIRSGSCKGVDADKVKKITNGGYKSNKTVASTCQTEHEEEVADEQMSYVTHKVRLSPNNLQKNYLQRCFGVSRFAYNWCYDRWQEARSRGERIFPGELAKQFTDIARNEYPFTYQVTHFAKQSGFDAFAAAMQSLFDGKGFPQRKRRKIGGSFSYVVDGKRKQPILSDHNPDVPGSQPSEKRQYLLIPTFGYIKMQEKLRFRGTLTSVTIKQDGSRRYYACLRVCVTPKEWQRTHRSADIYIDRPTGIDLGIHDFAVLSNGLKIDSRPKDSHLHQQKKQLQQSINQCRKAHPGHTSKRQHKMAQALAAVKGRETRQRIDFLHKVTTVLAYTYKHLAVEHLNVTDMIANGHVRSGSVIDASFFRFRTLLEQKTSIIGHAVHVADRFLPTTRTCSFCGCIGPQVPLKERTFRCPECGGTIDRDLNAAINLAKLIGMDEPESDYAANSATTALLTRSGIATHQAELAEQAGCAP

SEQ ID NO: 57036 - protein, 511 aa, unknown
  TnpB Polypeptide
MTEIENDNIIKTMKLHIKVAKDDVQKLIDVTTVYAEACTYISEYIFNNGFELGFMNLQEKIYHAVRNKFKLKSQMTISAIKTSAARYKSVKEQLFQKPYKYKDENGEWHYITKTLDWLYRPIAFRRPQADLVFNRDYSVVNNSVTGESKLSLNTLKKRIYVDYDLPDNFKEYFDGTWKFGTGKIVSLNGEWYFHIPMTKAADKAFNVDNTEHLIGIDRGLRFLVTTYDEEGKTGFVSGSDIMKKRDKFQQGMSAYCYTGSYQIPVHTLTDSIVKDIMMIQEIIGTGEIAISDHRSSQPTFEEFARVVADTRLGGVLSGKAGIVNVHLGDSPRCLDLIERVVDETEIPTSQILPTHINRNEMLFGKSIEYALKGGAVDFTGNEDIDYWETICDEVRVCNGIKRMLDAGVNPDRMTISSDGQGSLPMYSSDGEFLGMGVGQSSCLLKEVKECVFKTEIPLEIAISTITSNPADILRLKGKGKVEEGYDADLCILDQELQLVEVIAKGNTVYTK

SEQ ID NO: 57037 - protein, 234 aa, unknown
  TnpB Polypeptide
VSLRLEEPVKQLPAATASVGVDLGINRTMTLSDGTRFGNPRYTAKYAAGLRRLQRRLSRKAKGSSNWRQAELKVARLHAKIGDCRRDFAHKATTQVVRENQAIHLEDLSVRNMMANRSLAQAIGDCGWFELTRQFSYKAERYGRRLVKIDRFFPSSKRCSCCGHIVETLPLDVRRWRCPECSTEHDRDENAAKNILAAGQAVAASGGTVRPKRVSIRLGKSRRRRNQPEIFSAS

SEQ ID NO: 57038 - protein, 232 aa, unknown
  TnpB Polypeptide
MRQRAASRKQSRSHNKRKAYDRIGKMQHKIAQQRSGHLWQAASLIVKTADAIAREDLNICNMAKRAKPKRDGNGGYLKNGAAAKAGLNKQIFDASWRTLFQMIAWMAAKAGKPVIAVNSKYSSQECPKCHYIDKSNRDGEKFLCVECGYTEHADTKASKITGKRVGLIFPQKVKKILPADCGKVTPRKISAPGCVESRNYAYEMSNIQMALFDVSDYSSSDSRIFRRYGRNS

SEQ ID NO: 57039 - protein, 440 aa, unknown
  TnpB Polypeptide
MVATGVSASKAMARLKREQDSRIWGLGKFVLAQWYAIALTNHYRQRKTGIFLGSLFAQVVSSFEDACKARARSKFRNRLRLKRTNDPTTCRVQFRRDPFRYAEPRGKHQMNWIDLGALLPLSCRRALRWVPVRQHRPLPLGNKVTQIAITRDRISWHALVTIQCDKALIAKQYPEANGRIAGINPSRNVAFTVVPADSPDFGQSDGRMFTAPSDQKKLLKRSAKLMRKANRQRRAANPDSYRPDGTIIKGCLPVRTSRNLQKTLCQLAELHSRFKAIRAETYQLTADELLSQFDTIRIGSWRGLNPRKKSDAGSNREGKPRAKGKAALERRRNQLDAAHAFSDFKRILREKATKSITPKKIEENEESFTTRICPACGADTGPRGESDLSVRVWTCSECGRKWQRDKAAAWHIAVDKLKDKQYKKEPAAAHAVRAEDSAKG

SEQ ID NO: 57040 - protein, 479 aa, Cenarchaeum sp.
MQTKKNIIYRTHKYRLKTNSNITSYVENLEAENRMWVELGVMARNLNVPFTAGSSPDPYPRSILRCVTVAKDMMAEWENVSPKSISMIRGAILAGIEMKDCKHLKDGKIYPIFFLGAPKQIKHNMIWFTKSNVQFSIVRGRLPDGTTIASHKIVDITNDADRRRGHRQFELHLTIQEYIPDRKITGLTAGVDMGKLTAYVALSDGTTRVLRLYDTEINKHIRKLQSERDRCTHNSNKWNRINNRIRRQRKVLYNWQLNEYRHFCKKLCVDCDLIKFENLNLINITRKGGGRIKGKNRTLKESKAGEVRDWCVKKAPEYNTEIREVRPHNTSKKCHICQSKNTERYGGFKTWHNDKIIYENWSHDRKFKCKNCGNLTHADYNGAFNIMYGHDNNYNNNYDYTKPNSRRAQKASRLCIKSGSDLRDRINLRNRTPPPVVNDWQVVKTALPKRESAPTKHTLNGVDNTQHQRKLSLNEHVFT

SEQ ID NO: 57041 - protein, 347 aa, Cenarchaeum sp.
MVEKLATAVSVGAVTINDKTVSIAYEPQPTTPVQAKGMMGMDVNKVQHVTVDTDGNVKRIPNGALEAAQTRRQKHANLGMTGGKPKSKQAQKPKKGRRTLPKHIKHAGRKPKNKRRDERVSRRERARINTRYNNQKKDWLFKLMYRLAALGFVLVLEEPTIDRMMKKSNKQMSNETRDLLKMGLSQGTIWAVAKSVYGKHGLPVIGVVAKGTSSTCPTCKKALWEPKYDTKIWEEWRRIKGCEICLYHIDRDDVAAINIVWRGILKYCELAADSNRWVAGDWEQCVQRLLDATVLWFPQDGEGRRPKGEVMNSLRVGDDLPSLDDHLDVSNCAAGVALPEETPVALY

SEQ ID NO: 57042 - protein, 426 aa, unknown
  TnpB Polypeptide
MEIFTKNCGFVKNIVLLQKFRLFNNRMKLIHKSYKFRIYPTKEQESLLSKHFGHCRFIFNRFLNERKEKYLNEKTLLNYYDNARTLTDLKKEKDFDWLKEVNSQSLQASIRNLDIAYKNFFNKQNKFPRFKSKYDRQSFKVPQNVLVEDNKLVIPKFKEGIKLNLHRQLEGNTLFATISKSTTGKYYVSITCEVGYKSFEKTNKSVGIDTGIKELAILSDGSSYENIKSLKTKLKKLKYEQRQLSKKTKGSNSRNKQKIKLALVHEQITNIRKDYLHKVSTTIIRENQTICVEDLAVKNMMKNHKLAQAFSDVSLGAFHIMLEYKANWNDRQFVKIDRFFPSSKTCSSCGWIKQDLTLSIREWTCESCGEAHERDINAAKNILKQGINILSGCGIQSDTKQKQGEALPLGESVTLEAQPIAYGVGG

SEQ ID NO: 57043 - protein, 147 aa, unknown
  TnpB Polypeptide
VIAVENLNVLGMVRNHNLAKAISDCGWGQFSTMLKYKAEWEGKTYIEVDRFFASSKICSVCLNKVDSLDLDIRAWTCVRCQAHHDRDINAAMNIRNEALRILRVRNSPSHGEGKTHSRQSLGTSDTSQWRECKTTWQDFGFVGCCSL

SEQ ID NO: 57044 - protein, 367 aa, Agathobacter sp.
VLKAYKFRIYPNMEQKVQIAKTFGCCRFVYNQTLAYRKETYEKEKKSVSKTDCNNYCNRELKKEYEWLKDVDKFALTNAIYNMDAAYQKFFKEHAGYPKFKSKHDNHKSYTTNFTNGNIAVDFETGKIKLPKLRTVKAKLHRQFVGEIKSATISQVPSGKYYVSILVETEHTAMQKEDGQVGIDLGIKDLCITSDGRKYDNPKILEKQERKLKKLQRKLAHKEKRSKNYYKTRKQIALCHEKIRNTRKDYLHKISHEIISENQVIVTENLQIKNMVKNHHLAKSISDVSWYELTRQLEYKAKWNKRKYVKIDIFYASSQLCSACGYQNADTKDLSVRTWICPKCGAEHDRDINAAKNILAEGLRQIA

SEQ ID NO: 57045 - protein, 418 aa, Actinosporangium sp.
MVATLARRAFKYRFYPTDAQAAELSRTFGCVRKVYNLALAARTEAWVRQERVNYNQTSAMLTAWKQTEELAYLNDVSSVPLQQALRHLQAAFSNYFAKRAKHPRFKSRKKAQNSATYTTSAFRLRQSDLTLAKMTEPLAIAWSRPLPAGAKPSSVTVSRDAAGRWFVSLLCEDPRIKPLPSTDGAVGIDLGLTHLLTLSTGEKIGNPRHERKDRSRLALAQRELARKAKGNGSNRAKARRKVARIHARISDRRRDLLHKLTSRLVRDNQTLVIEDLAVRNMVKSRSLARAISDAAWSSFRDMLEYKAAWYGRDVVVVDRFFPSSKLCSTCGALASSMPLNVRTWTCDGCGATHDRDVNAASNLLAAGLAVTVCGAGVRPQRRTPGGQSAMKQKTLWREPQVSSSVAEAEEAKPSRHLG

SEQ ID NO: 57046 - protein, 392 aa, unknown
  TnpB Polypeptide
MKKAFKYRIYPNKAQRALFQATFGCCRFVYNKTLDIRKTAYAMDKTQLSEFDLIKKIKPLKEEFPWLRDVPAVCLPQAVGDMNDAFRDFFKSGKGYPKFKTKHRSRKSCRFPGQSCAVLQDISRLKLPKLGLVKYKKDREFIGTLRHIVITQESNGKYYASCLVDTGVEAPNPKPVEASTTVGIDLGLKDFIVTSDGCKMPNPRFYVTIDHSIARLQKHEARKMKGSKRRARIRLKINKLCVRKRNLIKNYIYHVAKTLLRESQTLVMEDLNIGGMVKNHKLAKSIQNVCWGELRRVLEYKSQWLGHNLIFIDRWAPSTKTCSHCGFHNSTLTLSDRSWTCPGCGTHHDRDINAAINIKRMGLETLLPAVSGFDGRGEVGYGLDEASICASY

SEQ ID NO: 57047 - protein, 263 aa, unknown
  TnpB Polypeptide
MDGAFRLSSLVARVEKGKGSFDYVLKVSGLVKGSPIVIPFKSHARLNHWLSKPGARLLQGCTLSDGWAALWIRVPDPSPRDGRTLAVDIGVNKLLVDSDGNKYGTETRDICSRVRRCKPGSKGRLRASRARQDYINKVAKQLPWNTMGTIGIEDLNNLKRGKQKGRSKNFRKAIAPWTYRQVIARIIHLAQENRVRLIAVDPRNTSRTCPSCGSVARENRRGERFQCVRCNYSADADYVGALNVLARTLGNSGQSMVAQSSYG

SEQ ID NO: 57048 - protein, 369 aa, Streptococcus sp.
MTIRQKSYKFRLYPNLDQRIMFAKTFGSSRAIWNMMLADKIKYYEETGKTLRNTPAQYKKEFPWLKEVDSLALANVQLNLQKAYKSFFNSGFGFPKFKSKRHRQSYRTNNQNGTIAVSDGKVKLPKIGWVRLEQHRQMIGTIKSATISMTETGKYYISILCESDVQPLPKTGTSVGIDLGIENFAILSTGEKIGNERFLKNLSKKLAKEQKILSRRALVAKKAGKNFSESANYQKQRIKVAKIHEKIANKRKDFLNKLSMEIIKNYDIICIEDLSSKNLMTNHKLAKSIGDVSWSEFVRMLEYKAEWYEKQVSKISRWYPSSQLCSDCGHNSGKKPLNIRNWTCEKCGSHHDRDINASINILNEGLRLA

SEQ ID NO: 57049 - protein, 428 aa, Streptomyces sp.
VQLRYNYRSYPDTCQRRALARAFGCARVVWNDCLRDRKEAHAAGLPYVTSAELSRLRITQAKRTEERAWLAEVSAVVLQQSLRDLDAAYKNFFDSIRGKRQGHKVGPPRYKSKKDTRQSIRLTTNAFCLKDNGTVYVAKVGNLKVRWSRRLPAAPTSLTVTQDSCGRYFLSFVVDTAPDILPRAQTDTGIDLGLSAFAVLSDGRKIDSPRFLRRAEKKLKRLQRELSRKAKGSKNRAKARIKVARQHAKVADRRRDWHHKVSTQIIRDSQAVFVEDLAVSGLGRTRLAKSVHDAGWSAFVRMLAYKAARHGRIFAKVHRAFPSSQICSACGFRDGPKPLHIRKWTCGGCGTVHDRDHNAARNILVEGRRIVAAGRAETLNASWSAGKTRAKAPAQRGEAGSPRKGQPTQAGTPEPQTQGARQAWSPLR

SEQ ID NO: 57050 - protein, 419 aa, Tupanvirus sp.
MTKKKNKWIPKLSDNNISIETDSWFDIVQYQRNNNYQSTINCSSDHIFIRAEKIKLYPNPEQTEILQKWFDLSRRMYNKTTLFLRDKVFTNNKINNNNVKKYVNFRQLRSNYLKDEKESLCKHNINKHILDQSIARCVAMYKSCLTKLKKKQIKDFRVRCIKSDKRYKTLIIEGCLFSKKNNGFCTSVLKEMVSSDILENINETCILSYDKYKSTYILSIPKYIEPKEYQTRNLVCGIDPGVRTFLTVYSKEDCHQIGNNINFNKYYYKIDRLNQINSTEEAKQTRKYKRAIGKIYDKINNKVKDMHFKVSKFLCTNYKILKIGNFSTSKIVLNVNSALHEKTKRLLYALSHFRFRERLMSQAEKYGVKVNVVSEYMTTKKCSKCSTKNEVGKNKVYKCNKCGLKVDRDVNAAKNIRYV

SEQ ID NO: 57051 - protein, 438 aa, unknown
  TnpB Polypeptide
MLIVRTVKVPVHYGITKHKLSILDSLTARTTYGVWTWSELFKKHGLKGSYADRRRFYEQVKADAKLGSLTQCCFDTAAWMWRSYREAHKAWRRKVAIARREGDKRWLRKLLRREPQEPFTNGMNGKVPIWFDSRFGAIEQSKHIKLCSYVVRVSTLRRGVKLTIPLNPAKHHLEPLEQGTLKSFQLVKRHEKYFVHVKVESTVPDQPVYAVRGIDLGVKRSIASVMLKPNQPLRSNDFSIQTDGLKRDQLNRLEKRAAELRRAKKWEPLKRIRHKRLHVSEYYDRLAAKQIATTSQNCLVVIGYPKGIKYENFKGNDKAGLRKILARWTYGREIRYIQEECAKVGVPAEAPDEHWSSRTCHRCGSRNTERITQSVFHCWNCELIYNADYNAAINIGSRFLPAATTRQATDDLAYAGNEQAREIVACEPRSPHPFMGGS

SEQ ID NO: 57052 - protein, 414 aa, Propionibacteriales sp.
IRQRLYPATVQVAGLVEHCHHARFVFNIGLEQRSMWRPSKHDRGTHPELGPLDAARVNTATQMRELAQLRAELDWLRAGSSVVQQAALRDLDRAFANFFSGRAKYPTFKRRSEREGSFVVRDLTVRRLNRKWGVVTVPKVGAVRFRISRLWAEIEAASSARVTHRNGRWHIAFTTPAAAKIIAGTAAVVGVDRGVKNTLATSDGRMIQAPAMSAGEQTRFLALQRRLARQQKGSARRAQTLDRLAVLRRRLEDRRTNWVEQVTTDLARTYDVVAVEDLRVRNMVRRPAPKPDPDQPGAFLPNGARAKAALNRAILASVWGRFLTRLEHKMPEGTVLRVDPRNTSRTCAACGHCAPGNRESQAVFECVACGHAAHADTNAAAVILDRALSTQAPGHGVSGRGSPALAGNANQPAA

SEQ ID NO: 57053 - protein, 466 aa, unknown
  TnpB Polypeptide
MELMRLQCSAARSAYQAVHKRGLSGNAVIIYVKRNYMAALNQRYVANACTVASGVKQDHALFGGRRAWEQLRTGALTKAEWRDGRNARLYSRGDRSKYRFGNPNIRIAGDRLLVNDPSGRGHWIEGRLFVPEKWREVLSQTPCYDVRIVRRKNGRFTVAASWEVDPPPIITDRSRGVLGVDANPDVVAVADVSADGNLLGHCSIGAQRLPFALKAKRDNDVRLLAKRVVDEAQRLGKPIALERLKFPAGSRSAGCRKFRRAKANFVYRKILGAVASRAERSGVEAIPVNPAFTSDLGELKYARMYSMNRHAAAALVIGRRGVGFLERQDFTVTPDASGSNRVNLEGRSRSLYLTPKAYSWMRDCFLHDQGCASDPQGLKHSPRPHPKPADLTGPRSAPGSRPGIISDPSGPKSSFAARSGIRPGTPDPAGPESSMAVGPSAGGIPAGEPGAITGRPRGWRSKDDFR

SEQ ID NO: 57054 - protein, 438 aa, unknown
  TnpB Polypeptide
VILAHPIALDPTPRQAAYFSRAAGVARFSYNNALAMWNRAYEVDGKVDHGRLRREFNATRREEFSWMGEVSSHAYDEPWNQLEKAFSAFFRGKARHPKFRTKRRSPESFYVHNREMDFDGRTLRLGPKKFNLGPVKMREELRLEGKVVGATIRKDVDRWFISVQIDVGDLRKERTADGEVGVDLGVLKLAALSTGEMIEGLRPLAKALDKLRRLSRELSRRKKGSKNWEKSRLRLARLHRHIRNVRKDFLHRLTTRLCRENQAVAIEDLSVRWMMMCSRSLARLIADMGWYEFRRQLQYKCPIYGTRLKIAGRFFPSSKTCSSCGAVRDELPRGERMFRCGCGLELDRDLNAALNLLYLLLDHGCASDSKHSPGSLVPANGGEPCPSEPRAKTPAEREALAAHCGETTPRRSRNPSGTLVGGQGRCGAVIEHRDASNV

SEQ ID NO: 57055 - protein, 397 aa, unknown
  TnpB Polypeptide
MIRAFKFRLFTNATQERELDAMLETHRRLYNACLGQRKSSWEADGISISYCDQSAWFKAQRAVNPWFARLNFSSAQATMRRLEKTYRDFYRRCQSGQKPGYPRFKPCDRFNSIEFPAYGSGIRLNGNRLRVQHVGTIRCKVHRPVEGVVKTARLKREVGKWSVILSCDLGDRVIPPNTLPPGGIDVGLERFATTSNGDVVANPRFLKKELPALKRAQRSVSRKKKGGRNRSKAKKELARRHASVANRRRDHHHKTALSLIRRHGFIAVEDLDILGMLGNHRYSRAIADAGWGNFLEILRCKAESAGAAVVDVDPRGTSQMCSVCGAEVRKDLSVRRHECPRCGLSLHRDENASRNVLARGLEDPRGVAWMADHLRRARTGPAGGNGYRPVAREAARL

SEQ ID NO: 57056 - protein, 445 aa, Okeania sp.
MYGCQQVLVSQNNDLKNILTFLCSESHKLTNMGIYYARQLYFKAQKIIGKFDLIEQYKTSYHYKVLHSQGAQQILISVGESFKSYKKLIEAYLKGEATDKPRIPNYTKKGGLATLSYPKQALKLKGNQVRVPLGKTCKGWFGLDSFYIPMPSNLNFADIKELRILPRNICFYFEFVYKKETKKVELNANNVLGIDPGLNNWLTCVSNVETSLIVDGKHIKSMNRWYNKQVSTIKEKKPQRFWNNKLALITEKRNRQMRDGINKAARIVMNHCLENNIGTIVFGWNKGNKDSINIGQKNNSEFVPIPTARLKDRIAQLCEQYGIQFVETEESYTSKASFLDGDYLPTIGEKPQNWKPSGRRTKRGLYRVGYGQWYLNAECNGALNILRKVSRRLGLDLSRLSRGILTSPHRIKLWSVNRKTRKEASLDLLEVSAENPPSFMRRSGQ

SEQ ID NO: 57057 - protein, 397 aa, Tolypothrix sp.
MYKAYKFRIYPTNEQQIALAKAFGCCRWFWNYSLNLCQETYLTTGKGLSRGAIQGLLPSLKKEYSWLTDAYSQCLQYVALNLSTAYKNFFEKRTGFPRFKSKHGKQSISYPSNVKLDGDYLKLPGKVGLIYCKQDRKFDGQIKTVTVSLNPEGKYYASVLVDDGRAIPQFSTEGKAIGIDLGLTHFCITSNGSKFDNPRHTTKYARNLKKKQQSLARKQKSSKNRYKAKSKVSKVHSKIRRVREDFLHKLSRKIVNENQVIAVENLNVKGMVRNHNLAKAISDCGWGQFCTRLKYKSEWSGKTYIEVDRFFASSKTCSVCLNRVDSLSLDIRDWTCSQCNTHHDRDVNAAINIRNEALRILDLGTRSTANGGNVRQPGKTSVLLDAVPCEVGNPIPL

SEQ ID NO: 57058 - protein, 374 aa, unknown
  TnpB Polypeptide
MKPKKTIILPPQAMGVRTLHLPLVLSGEQFSVLAPVFDLYNQVWGKVVLWCNRNKSVNRTRLQKELYHQLRETYPELPSQYVSILLREGASAVKSWNSSNPKRRWGLKAVRRKKTLSLDARLFSVRGGLLTVSTRVKTPRLRLLLPDTPTWFTERYPQGKLKAAKLGVTRRGKPYINLIYRVPQPTQTPAGETLGVDRGLYKIAVTSRGGEYTSNQVRAVRRKYQHTRATLQQKGTRSAKRRLKAMSGREKRFMSDINHCVSKQLVHTPNIGRIVLEDLTGIRRNKRHKITRKWLGQWAFHQLEFNIIYKAHQQGIEVALVDPAYTSQRCSACGYTAKNNRHKGTFACRSCGFIANADVNAAINIRDKFFLPTP

SEQ ID NO: 57059 - protein, 439 aa, Halopenitus sp.
MLEVHRTHQAKILNHGQVEEMLDRHGWGASKLWNVANFHSRQVWEETGKIPDHGDLKDELKSHPTYKGLHSQSSQRVLEELAEAFNSWYEKRKSDSRANPPGYRKKNYYDTQGRRVHEEHPRSTVTWKQNGIKHDTKNNRVRLSKGANHKEHPKAWEYILVEYETRPGVTVENLQQVRAVYDNAKGRWELHLVCKDEVETPDAPGTESAGVDLGICNFATVAYSTEDADLYPGNRLKQDGYYFPKEIAKCDDSSGDRPTRLHNKWSERRAHFFHSLAKHIVQRCVEKNVGQINIGDLEGVREDETGEAKNWGTHGNLDLHGWAFDRFSTILEYKAKVEGIDVLEVSERNTSTTCCVCGRNDESQRVHRGLYVCERCDAAFNADVNGAENIRLDITQSNSESSTNVGEDRSTGWLAQPGVYLYDLSSGFQPQDQVVDCKP

SEQ ID NO: 57060 - protein, 444 aa, unknown
  TnpB Polypeptide
VLKSYSLKHELGDELFPLLKAYRDAVNSVLEELWNSIEWKKRKVNGKKQWRLLPKYKVDIHSREYKKKLRDSLLEDWPYAAHWVDSAIKTAYSIFKSWKKNYVKGERKRNKPTARRLFARAKQTLIKLEGERLRLTIKPGEHVYIDLSKRYFPLPKEVSSAGLGEPIITLEKVHLPVHYKDESQEKPSVAWDFNLLSLDGYSPETGWVRVDTSKLASVHISSFEKRRSVQRKASKSKKAKKILAKYSKRERNRAKKHQLEIARVIQSVAGVVGLEELSKQGMYTRSRLWNKMISRSDWRGISRILMGKMGEAKVKELDPYGSSSYCSRCGWENKDLNGAVFECSRCGLRIDRQLNAALNLYMRLKFGYTTNWDGKKKSVELRMEGASQKEWWDHVVLPSLLGGCVLTGAERKTPDELVRELHEVVKPKLYAYDRYADAYLRAPT

SEQ ID NO: 57061 - protein, 231 aa, Hormoscilla sp.
ARHAWNWGLGLTKQILDHNRNNPEEKIKFPTAIDLHKWLVALIKPEYPWYYEVSFCAPQSALRELADAWKRAFKKTSKPPRFKKKGRADSFTIDGSIKLDHFRIKVPKIGWLRTYERLPVCSSPKSVTRSRTAARWFISFKLEVELVNHPKSHPVVGVDLGIKALAVLSTGEVFEGAKSYRKYEKKLSRLQWLNRHKQIGSANWKKAQVKIARLHRSRSVAPAISLTGAQP

SEQ ID NO: 57062 - protein, 377 aa, unknown
  TnpB Polypeptide
MRKTFQYRMYPTRQQLQALEATLEECRWLYNNTLACRKDAWEQEQRHVSYYESKARLPWLKAERPSLKAVHSQVLQNVTERVELAFQAFFRRVKAGETPGYPRFKGKGRYDSFTYTQSGFSLTHDNRVCLSKIGSIKLVYHRPLKGKIKTLTIHRSSTGKWYASFSVECEPERLPGHPAQVGIDVGLKTFATLSDGTEIDNPRFFRKEEKALAKVQRKHRKLETGTSERRNHRKAVARVHERIKFRRENFTHQASRAIVNSSGLIAVEDLHVNRMTHNHCLAKSISDAAWSRFFDQLSYKAEEAGRTLVKVNPAYTSQDCSSCHHRQKMPLSERVYECPCCGLVIDRDLNASKNILAVGLHRIGTQPVEAPAFTHGE

SEQ ID NO: 57063 - protein, 222 aa, Aneurinibacillus sp.
MQGAIKTCTVIAKNGWYYVCLSCEIETQTRATGKRIGVDLGLKHLAITSDGNFHDAPKYLRKSERQLKKLQRIVSRRKKGSNRRKKVVALLAKKHEYIANQRRNNAHQVSRQLINHYDLIAFEDLKITNMVKNHHLAKSIADVGWSQLVQFTAYKAESAGKRVVLVEPRNTSQQCSNCDEMVKKTLAVRTHRCPSCGIECNRDVNAAKNILKRASQQLSNVS

SEQ ID NO: 57064 - protein, 306 aa, unknown
  TnpB Polypeptide
MQMGIRHEKDSDQLRLSLSKDLKSYMEETYGIHEKFLYLENKIFRNMDRIKQLRIYPPEDGKCDLIVIYEVKEPELISLNGHYLSIDLGIHNLMTCYDSGNGRTFILGRKYLSLERYFHKEISRVQSIWYAQQVENGIKYPRSSKHIQRLYRKKQNAVKDYLHKVTRWLAEYCKEEGISCVIIGDIRNIRKGKEIGHKANQKFHGLPYNKLYIMLEYKLKLYGIPLIKQEESYTSQCSPLSPEVSKRYAEASNRKERGMYITDGVRYNADAVGAFNILRKYLSVSGKQKELSVAGLKNPEIIKVAV

SEQ ID NO: 57065 - protein, 398 aa, unknown
  TnpB Polypeptide
VLLRYSYRLYPDLAQRAALARAFGCARVVFNDALAARQAAYVAGEPYITDTAMSARLTACKDTPGRAWLSEVSSVVLQQALADLNAAYRNFFASATGKRIGARIAPPRFRSRKDSRQAIRFTANARFRVLDNGKLRLPKVGDVPVHWSRALPAAPSSVTVIRDAAGRFFASFVVQARREPLPATGRECGIDLGLGHFAVLDDGTKVTAPRFLRRAEKKLKKAQRDLSRKQKGSANREKARVKVARAHARVKDARRDFHHKLSMRIIRENQAVTVEDLAVKGLARTRMAKPVHDAGWSAFTGMLEYKARLYGREFRRIGRFEPTSQMCSACGVRDGPKPLHVREWECRACGTVHDRDVNAAKNIAALGRRDALKARGGQVRPAATLAPASETGSRRGAA

SEQ ID NO: 57066 - protein, 400 aa, Streptomyces sp.
MDVTGEEDRVDQRAALARAFGCARVVYNDALRARETARQQGLPFPRTGELSKRLITEARQTPERAWLGEVSAVVLQQSLRDLDAAYRNFFDSLKGKRPRMGVPRYKTRRDTRQAVRFTLNARWSITLGGKLRLAKIGDVPVRWSRTLPSVPSTVTVVRDSAGRYFASFVVEVGPKVVLPETAHELGIDLGLEHFAVLSDGTKIDSPRFLRRAEKRLKKAQHALSRKEKSSRSRDKARQKVARAHARVADARREFHHRLSTRLIRENQAIAVEDLAVNGLARTRLAKSVYDAGWSAFVAMVEYKAAQYGRTFVRIGRFEPTSQVCSQCGVKDGPKPLYIRTWTCGACGTVLDRDINAAVNVAKAAGLAVTARGAQVRPGSSIPAQRGEAGTHPKPRPTPAR

SEQ ID NO: 57067 - protein, 422 aa, Saccharolobus sp.
VLKNLRIGKFEPEEEYVHFTYSIKNSEREKSKELIKEYRTLLQKAIDYLWNLTKIQVRKKNGNYKITLPKKKEVYKPLREELEKINHLASHYVDKAINDAFSILKSWRKRAIKGRASIEKPRVKKAYVRIKTTLRKVVGESVRITVRPHEYITFSWSKSWFSRRVKELELGEPIIKEEKVYLSFRYKLPWVTPLNFLAIDSNLYTLDAYDGEKFVTISLKQLYSMKYSMEVKRAKVQSFASKYTKRGRELMRKYSHRERNSVLDFVRKFVNALLDLYPITFFAVEKLNKESMFKDANDSLSRKISRTVWRSIHRVLRYKAPLYGSFVKEVNPHLTSRSCPRCGFVSRKVGKTFECERCGFKLDRQLNASLNIYLKMCGFPHIRDIPRVWVGVIPLMGRRGMNVRDFGEAQGLRIDIEYHEIP

SEQ ID NO: 57068 - protein, 386 aa, unknown
  TnpB Polypeptide
MVFKRIKVKLYPTVKQKEVLEKHLNAYRFCYNLCLQYKTWLWNDYKINITAYQLQKELFEIRKETPFLKECKAECIREVALKLDAAFKFFFSGKGYPRYKSKKQYNSFFAHQSLSSKDSKIKFYGNTIKYKTSDFYMKLLDTNEIRTITFKKDKSGDYWATCLIKTEAVKLPSLTNNVLGIDLGLKNLIITSNGVTFPNNKYLINSEFKLKKIKRKFAKSKKGGKNREKLRIKTAKLYRKSFRQREHYYHQVTNELIRENQTIVIETLKIQNMMKNHKVARSISDASWDILINQLEYKAAWYGRKLIKVGAFFPSSKTCSNCGNIKEILLLSERVYKCDCCGFSIDRDINAAINIRNAGLKIPGVPVEGVGYEPIETGSNSLIINH

SEQ ID NO: 57069 - protein, 528 aa, Streptomyces sp.
VRGGSRQTPRCTCRCGIERGPCVWSFTTGIDGTRIVGWWRRATRGGGRHCGSWDAWFGRVRGSGGSERRGSLEVGLGCGRFCPGRGEVGAGAVRTALPGAARSVPAPCSGTSRRSGSARGGEGGAAVIRAYKFLLRPTVRQAQALQEMLRDHCALYNGALQERRDAWRHSSKTSVKYSDQSAQLKEIRAFDPERQGRWSFSSQQATLRRLDKAFQAFFRRVKADQKAGYPRFKGAGHFDTVVFPKNGDGCRWDSTPHDTQTRVRLQGVGHIRVHQHRPVKGRVKTIAVKREGNRWYMVLSCDEVPAEPMPTTGAVVGIDMGITHFVTTSNGEHIANPRFLDTAAVELAEAQRYLATFPKRTKQRTKAHRAAARKVAKIHSKIRRQRLDHVHKTALTLVRHHDVIAHEKLNTAGMTRTSKQKPDPELPGVLLPNQRAAKAGLNRSILDAGWGVFLTILAGKAESAGRTVIAVDPRNTSRTCPSCGHVAKENRVTQAKFECVTCGFAANADHVGAMNVLNRAGPALCDVA

SEQ ID NO: 57070 - protein, 383 aa, unknown
  TnpB Polypeptide
MTKDRISFMREPAGEFPMHIATKIKIQVTSNQADVLWHLSEKCRLLYNFALAERNQTYQENKDRPDTQYIGYVQQANALPELKTRFPEYRWVYSKVLQTTLKSLDDNFKSFFALRKNGDEDANPPGFKGKDHFCTLRYNQSGFAIRDGRIRFSHFYNDVLLAFVLPEGSQFTNVKQVDLFYDDLKRAYYVSIVHEVQPEQEYVDNGLYQAWDLGVTKRVGVNSHGKFLDVRNARPDRYWNPKIDAVQSRRDHCKKKSRKWKTFNHSKRTMERKRSNQLNDVQHKVSRNLVRNTRAATIVVGDLSVKQMPTSKQATPGLNRSTQNAGHLSRFIGLVTYKATLAGKRVIAIDERDTTKICCVCGAVHDMPLGKRVMDCECGNCID

SEQ ID NO: 57071 - protein, 549 aa, unknown
  TnpB Polypeptide
MRERHSHPDTDRRKVDEVEAIAAAYQSLRREIVQRYWPAEHLSTVIHNPKSVVTRRRHNGESEANPLGSHLQAQAVLDGLDVVRGSWKQTFASVRSAATRRYPDTTREVQDANGQTRVEKVSNPSRHEINWLLRWPEYLTAIYAGQTVIPTDEKGPIAKFKDNDHAKLCHWLSLALRRYRPGQPSLKRKTTFEIDDYRASIRSGGKFPAWLSMAGLTKGKPIRIPMSGDDLEFLDGTANLRVSVEADTHGVKRIVFRRAVELEVEERTGDGVVGLDKGANIAITATDSDPERANFFGKEAGEILGRRSERSYRRGRSRLASYADNLNGRHTPGGRFHGNPNPTEAQRRTARRIRRNNLGTKRRDAEQRRCEAELKNMSGRSARELVEAYPAASEFREEKLDFKGTDQKRPRKTNRKINRWTKKELSDAIDRHVSASGARREFVNAAYTSQSCPRCFWTNRGNRKDQEFRCTHDAYRGHADAVASSNVLKRGSDRTITLFTPVKAVKKILLERHAEWRESAGADARCASRGCGSSLPAVVPAGSSDTITA

SEQ ID NO: 57072 - protein, 549 aa, unknown; identical to SEQ ID NO: 57071
  TnpB Polypeptide

SEQ ID NO: 57073 - protein, 366 aa, Acidobacteria sp.
MLKTYRYRLVPSCKQQAALQHTLDLCRNLYNCALEQRRMQRTTPVAQMREVTELKKEFTDYQGVHVHVLQNVIKKLDRSFENFFRRVKAGQKPGFPRFKGKDRFDSFAFNNTGFSLAGKYLQISKIGAIKLRLSRPLPKDSTIKSLIVRRSSNNWYACLVADYTPQTLPASELCVGLDLGIENFAALSDGSFIPNPRIYEKAQAELRRAQRRVARRKKGSHRRKRAVELLRKVHERIANRRLDILHKESTKLIQKYGTIVVEALNVKGLAQGFLAKQVQDTSWARFIQLLSYKAEEAGRRLVKVDCSYTSQTCPECGVIKKKSLSNREHNCECGCRMRRDTAAAKIILGRIAPLGENVGAFSPCVA

SEQ ID NO: 57074 - protein, 421 aa, unknown
  TnpB Polypeptide
MESVRSESTKARIREGLAATREKRKSQVCRVFELKVSIRHNPKETFNKLAQCFKEAKWVVNDMLALSNKSEDATLFNYKYTEHKDVVHYDKDKNPVTSTITLPSVLHRATVAQKKTDIINLAKAKKKGIKVGALKFKSVVNCIPIITGFTKILDASHITIPGFRKLKVNGIHQLHQFEQFEIADAKLIRKASGYYVKISVMLPKEKRIPTNRNVGLDFGIKDSITTSYGDKYKCNVRETDRLKFLSRKLNKRGKKKNEKGSKRYYKCLRQLKREYEHIANARKDMANKIYHKLVTDYDVIYFQDEQIKGWQRGLFGKQVQSSCLGALKQRLVALEASGRSFKISKWEPTTKLCPVCGTLNHPTLADRIYKCDCGYEMDRDIHSARVVLMIGSSKRAECLEQASAEGFAPAPDSDGGMHANP

SEQ ID NO: 57075 - protein, 631 aa, unknown
  TnpB Polypeptide
LGSSAHPCASATPYSLSSRSARSTSSCRSCTSAPCGECSRTCATTPRLRTTASPAYLAAPSRRSQQWAASAQQCVRASPTSLAAPLTRASRLCNADRTRRRRKRRPKPLQPARARRRSRQHRPKLRCKKSSDAPTSPTRSDATHSQILPSRPRSRLKALPPASTPRSKRALRNSWAARAQRERVSVVLEAVKVALDPSPVQERLLLSHAGAARFAFNAGLAHVKDALDAGAKPEWSFYSLVRWWNANKDTLAVDANGTPWWAENSKEAANTGLRSLASALSNWSKSRRGVRKGRRMGFPRFKAKDRTVPRFAYTTGSFGLIDGDPKALKLPRIGRVHCMENVAARVGGARELRMTVSRRVGRWYAALTVERDDKPVTKPPRGGAVGIDLGIKTLATLSDGTVISNPRCLAASERRLKRAQKALSRKAMGSKRRAKARAKVARLHAHVANQRGDAMHKATTWLASTYSDISVEDLNVVGMVKNHRLAKAVSDAAFGEFRRQLEYKTARTGATLHVVDRWYPSSKTCSRCGRVKAKLSLAERVYRCDGCGLVMDRDLNAAVNIRVAGSAPETQNAHGETGSRGNQHGCATQVPVKCEPSVGGNVVSDLERVPARTPCKLQQSSLQRAKKGEAK

SEQ ID NO: 57076 - protein, 368 aa, Proteobacteria sp.
VALYRSDPLYKLGYAGLCKLLTEWRNSPDTTWLAAAPVHPLQQTLKDLERAYVNFFARRADFPRFKKKDRSDSFRYPDPKQIKLDQANSRLFLPKLGWLRYHNSRAVLGTVKNVTVSQSCGKWYVSIQAEREVEQPIPNGGAVGIDMGVARFATLSDGTFYLPLNSFKRHETALRKAQQAMSRKTKFSNNWKKAKARVQRIHSRIGIARRDYLHKTSTAISQNHAMVCIEDLKVRNMSRSAAGSAETPGKNVRAKSGLNKSILDQGWFEFRRQLDYKLAWRGGWLIAVPPRNTSRTCPCCSHVSAANRQTQARFACVECGFEDNADVVGAINVLRAGHARLACQVSGAVMPPAAGTHRSDSGEALNLS

SEQ ID NO: 57077 - protein, 440 aa, unknown
  TnpB Polypeptide
MAKDMEVATINHLTLNFYKRFLKYLKLKYPLLTSKERYQICKGIYEKQYKGDNQLVIEYRKKLGNIPPYENNIKKDPSYVILMYYEMLKLYTEKGERLFSLLPRKGGFQMSYITIDNSVLRDLILEKKKPNKQKCDKVTAWRKDIEANYQIYWKTIFNVNKYETSTRKFTMLKTDGKTVSIILEIPERVKKVDEKQDFGDYDFSIGIDPGLRYTFVGYDSNQEVVKYSGNQYYHSSGVNETNFKQKRCYERNKGFMDYKANMPSPKTMDIEKLQSYVEYALKGLDNALNLHHENPFRKWKFKTFIKKQKTFQDICKKISKKKHIDDTSIKPIVGFGDWSNPRDCIIRGHKRGPVKEIKKTLHRWCKVVDVDEFRTSMLCSCCHHTTSKVKFDSKEINSVLRCSNNECGITIDRDINGSKNIFMLFSKLLKGEKKPSAFCR

SEQ ID NO: 57078 - protein, 402 aa, unknown
  TnpB Polypeptide
VQKLRGYKFRLKPSGEQAATLAQFAGACRFVFNLALEQRRDWYRPGRRFTYLTQAAELTKLRAEVDWINAVPGHALQQALRDLDRAFVNFFEGRAAYPTPRVKGVHDSFRVPQDKGAIRVRKLNANWSAVKLPKLGWVKYRAHREIEGEICNATVSLKSGHWWVSIQTEREIEVYPSALPPVGIDRGVAVLAALSTGELIEPGSALVKHSRRLKHAQRCMSRRKKGSNRWCRQKARVNRIHTQVANTRKDQLHKLSLNISKRFGTVVVEALKIKNMTASAAGTVDKPGRNVAQKSGLNRSILDKGWHGFEHMLAYKLEERGGTLVRVNPAYTSQTCSRCGTVDRNSRESQADFRCTACGHSENADCNAARNILRAGTRPQSAPSEPRRRSATRTTKRNAAYA

SEQ ID NO: 57079 - protein, 451 aa, unknown
  TnpB Polypeptide
MQQIITAELKLIPTKEQFEALRQTQLAYRDALNAVSRYAFSCDKTSNVTRLHKGMYTELRARYHLPSQLACSVERQVAATYKGLWTKLLKNAAHRRAKITKKRFKGLDQPPHYSSPTVQYTYKRDYTFQKDQQVSIGTLNGRISVPYQGYDKHTAFIQHEACIGDAKLWYDRPKKRFYLLVSLTIDLPDPTPAQLSEVVGVDVGIRYLAVTSTSTGRVSFHSGKRIRHQANHYARLRKRLQKKGTRGAKRRLRRIEQRERRLKLQANHCIAKQIITAHPHALLGLENLTDIRERTKRKKRKRKKNGKGTEPVSPKARKANRVYSQWSFAELQALLSYKAALAGSLAIRVDADYTSKTCPACGHIADANRPRKGLLFVCQHCHYTLHADLIGARNVILRTLLVRQDWIRTVRLSIVPDASDKEAKAERLRRYSELRWSPEVIKSLRSQTGGR

SEQ ID NO: 57080 - protein, 452 aa, unknown
  TnpB Polypeptide
VQQVITAKLKLITEPEQFAALRQTQLAYRDALNAVSRYAFEQGKTSNFTRLHKGMYTELRARYHLPSQLACSVERQVAATYKGLWTKLLKNVEHRRAKITKKRFKGLDQPPTYSSPTVQYTYERNYTFQCENRVSVGTLNGRISVPYQGYDKHTALIREGATIGDAKLWYDRPKKQFYLLVSLTLDLAEPVGDHFKEVVGVDVGIRYLAVTSNETGKASFHPGKQVRHQANHYARLRKRLQRKGTRGSKRRLRRIEHRERRLKQQANHCIAKQIIEQHPHALIGLEYLTDIRERTKRKRRRRKKNSKGTEPVSPKARKANRVYSQWSFAELHNLITYKAALAGSLALKVDADYTSKRCPMCGHIEDANRPGKGLLFVCQNPECGYTLHADLIGARNVTMRTLLVRQDWIRTGFVSMAPDASDKEAKAARLQRYAEVRWSPEVTNKPPASSRR

SEQ ID NO: 57081 - protein, 459 aa, unknown
  TnpB Polypeptide
MIEQGAGQVRQIFTAKLKLLPTPEQHRLLRQTQVAYRDALNAVSEYAFAHGKTSHALALHRALYAEVRARYHLPSQLACSAIRQVAASYKGLWTRLKKNQEHRRLKLTKKRFKGLDQPPKYSASTVQYTYGRDYDFQGEGQVSMRTLAGRIVLPYQGYDKHVALIRQGANIGDAKLWYDASKKQLYLLVSFEIAVAEPTCEQLTEVVGVDVGIRYLAVTSTTTGKATFYPGKQIRHRANHYARLRKRLQRKGTRGSKRRLRRIGQRERRLKLQANHTIATQIVKEHPHALLGLEHLTGIRERTKRRKRRRKQRGNGAKPVSPKAGKANRVYSQWSFAELHALISYKALLAGSRAIKVDANYTSQTCPRCGYTAEQNRPGKGLRFVCQQCHYSLHADLVGARNVTLRTLLVRQDWIRTGCLSIVPDASDREAKAERLRRYSGLRWSPEVIKSFRSETGGR

SEQ ID NO: 57082 - protein, 379 aa, unknown
  TnpB Polypeptide
VEKEIKFRLYPNKQQIELINKTFGCVRYVYNYYLTKRIELYKTEQKVMNYYACSADLTKLKQEKEWLKEPDKCSLSNSLKDLDNAYQNFFKRVRQNIDKVGFPKFKNKHNYKQSYRTTCKYRKNCVPSIDIKNNKIKLPKLGWIKCVKSQEIQGRILNCTIIKTKSDKYFVSICCTDIETQKYERNNNVIGIDLGVKEFATISNGEIIKNPKFLSKLEKKLKREQRKFSKKKKGSKNKNKQRIKVARIYEKIVNQRKDFLQKLSTRLIKENQIICLEDLSVKDMVKNHKLAKSISDVSWYEFTRQLQYKALWYGRIIQKVDKYFPSSQLCSDCGFKNINVKDLSIREWKCPNCSSIHNRDLNAAINIKNEGLRLINCNI

SEQ ID NO: 57083 - protein, 368 aa, Nonomuraea sp.
VAQIVKRAYKYRFYPTAEQAAELARTFGCVRLVYNKALEERTRAYRLEGRGVSYAQSSAALTAWKRTEELGFLAEVSCVPLQQALRHLQAAFAGFFAKRAGYPVFKSRKKSRLSAEYTRSAFRWRDGRLTLAKMDEPLDIVWSRPLPEGARPSTVTVSRDAAGRWFVSILVEEQITPLPRVEQVVGVDAGITALVTLSTGEKIVNPRHERADRRRLARAQRALARKEKGSASRVKARLRVARVYARIADRRRDHLHKVTTRLVRENQVIAVEDLTVRNMVKNHRLARAISDASWRELRGMLEYKSRWYGRRLVVVDRWFPSSRLCSACGAVTAMMPLHVRTWVCACGASHDRDVNAASNILAAGLAES

SEQ ID NO: 57084 - protein, 412 aa, Nonomuraea sp.
  misc_feature (21)..(33): Xaa can be any naturally occurring amino acid
MRVKRADDASALFSRRGSVSXXXXXXXXXXXXXAAALEATLRAANDAATWVSQLAHDRRVFRNYDLRKHVYGQVKDRYGLAAQAAQHVIKKVADAYTTLHAHVRNGHLGRPGSARRERVLARPIVFRPGAAQPFDDRCLSWQLNARTVSIWTTGGRMKGVAFTASPDQLTLLAAHRKGESDLVCRDGRWFLIATCDLPDVPVRAPDGFVGVDLGIANIATTATATATATATGTGTGDGVRHSGKTLNAVRHRHRELRRRLQAKQTKSARRLLKKRRRKEARFAADTNHTIARRIVTEAARTGRGIALEDLQGIRDRVRLRKPQRVTLHSWSFHQLGHFIAYKAARAGVALVWVDPAYTSQACSACGHVAKNNRPDQETFACTSCGFAEHADVNAARNIAARGETGWAVSHAA

SEQ ID NO: 57085 - protein, 467 aa, Nocardia sp.
VRPPTRATVGRPTRGCREGHDQGRSTPGRVMIRAYLFTLEPTDTQAKSMRSHCGAARVAYNWCLAQVRANWAQRRAEQTYGLSSDELTPWIDTSAYSLRRAWNAAKAEYAPWWSENSKEAYASGCANLSTALGNWRSGRAKLPRFKSKHRARQACRFSTGSFGLARDRRHIRLPVIGIVRTAESTRKLARKIEAGQARIRSATLSYQRGRWHVSFSVDLPDHDPVPRTCDRVVGVDLGLKHLATLSTGVQIPHQRRFSADLRKLRRLQRACARKHSPDRRTGTEPSNRWLKANARVARTHTRVANLRRDDIHKLTSGLVRDFDTVVIEDLNVAGMVRNRRLARHISDAGWAEIRRQLTYKAEWAGVRLVVADRWFASSKTCSGCGAVKTKLRLSERTYCCSVCGIVLDRDENAARNLAALAADTAQLVREQPDRTGVRPTASAPSAIGLLREESHATQRHNREVVAR

SEQ ID NO: 57086 - protein, 428 aa, Streptomyces sp.
MPRFRLYPTPVQEQQMLLHCAHARYVWNLAVEQHTYWRPSRRSAPGFVEQCRQLTEARRESAWLAAGNADVQQQALKDFTTAKNARFTSGFGEPTWRRKHVHEGFRVIGTDRVPEFEPDGSAKLNAKGQQVMGRSVAVQRLNRRWARVKVPACGWVRFRLTRAELPAAKTFRVTFRNGQWHIAFAVVPKPIAPPTTGEVLGIDRGVTITAALSDGRKLNCPQLTVKERAQIRKHQRRAARAPKGSEAKAAEYARVARLKAREANRRKDWCEKTSTMLARTCQLVRFEKLNIKNMTRSAKGTVEQPGKNVRPKAGLNRCILAQGWGLLRQRTEQKAPGRVEDVPAPFTSLRCSACGWIEKKSRKSQAYFVCVSCGFTCNADENASINVAAGQGGIPRPRRTAGAGGVTTATSRSSAREPQPAWVGIRLF

SEQ ID NO: 57087 - protein, 409 aa, unknown
  TnpB Polypeptide
MRSRKIRLHLSNEQLQLCHRFSDVSRNYWNLLVEIDRLNNTGEFDDYLEKLGASKYVSNKHGREVYSLTQSLYMKLAKHVATIRQLTWYFQPNQFFIYSSIAREIYTVRRLNRGVLSFRSKSKIKPSFPVRCDKFDNSRGLMSRIYLKDSRHLQIPTLGVVKIGKQNQHLDLSCKKQVSKLRYDGKYWYLIYVEDVKQDDNNMTVKHEDFGIGIDLGIRHLATMSDGTVVDNIKTLRRYKVLNKRLCRLQRKLANKYKHSGSNKNSKTSNIVKLEREIMLVHRSIRHLRENNIRELVSSVIKKNPSFICIEDLNVSGMLKNKYLSRDISNCAFYTIRESLVKKAHDNGIEVRLVNRFYPSSKLCSNCGTRNQNLRLSDRTFKCDCCGLIMDRDLNASINLRESSDYEVI

SEQ ID NO: 57088 - protein, 404 aa, unknown
  TnpB Polypeptide
MKEDKNVSYRTRVHYIVPSQELINEARLSNNLYNQALYILRQAFTNEEKIPSKFDLHKILLHKEYECEEYDNIHKMVSSNAQIICQLAAQNFKAFLMALKAFKKNKSSFTGAPKIPNYNKKDQEFISIIGAQQCAIKDGMMRFPKKLNLDKIYVGDLDIAHVRIFPGKKRYKVEVVYKVESLPKKTKGNIAGIDLGLDNLATVAINKRGIRPLLINGRPLKSMNLYFNNKRDKVQSELKKCNDKYMSHKLETLYRKRNNRFNTYMHKASKEIIDYCLEHNVKQIIIGHNKLQKQESKLKNFVAIPTFRLIELIKYKAEFQGIEVIETEESYTSITSYLDKEDPIKDNANKARRQHRGLFVSNKGKRINADVNSAYQIMKKVIGDKVIKPISKGSIFIPKKVTIA

SEQ ID NO: 57089 - protein, 556 aa, unknown
  TnpB Polypeptide
VCQVPETCSDRSNSGRPQGVVFTHCQRQQFYYRANGSYARPRALICDRHAQPPDCRHGQSPQGRFGQIPVQKAPGAEKATLGRAPLESFLLCGYRRAHLRRDSQEVHRKPKGRRLKMPHLRGFIKTFRYNLLMPASAEEQAACTIMQYRQVVSYYLQVFQEHQEIIGHSQWLKMAENLTHRTEDNPNAEYPFDEEFPNFPSGLRRNAIAEAHGKALAWRTSYEKWEERKRKHEERNARRIAAGKKPIEFTKRPPQYPEDDNCWLSYYGTEYKWEDSHHIMLKMFTGRSYTYRKIALLQPFVVPPGYAAGSPMLVKKPTGWELHVPIVRVAKLNLKKIEKLVKDPSLKICLVDLGMKRHAVMTIQDTKGRVYAAKFISGAKDNHLRKRYLEKIVNLQMQTGVIPKGERFAKDLWNKVSNLNDDIAHRVSREIVDFAEHHGAKIIVFEYLDDLKPEKGTKSHYLNQKFNYWVKGRIFRYTRYKALHEGIVTCRVPAKNTSARCPYCGMLTIRRYNKGRDGKEVKGVDLAKCTNCGVRDINSDFVGSLGIGTAFRLKYC

SEQ ID NO: 57090 - protein, 462 aa, unknown
  TnpB Polypeptide
LGLSTSPNLPEDAPAFTPGRNPVPPQRGGERTKAATRTAWLPQFFDHMCDTIMVRTAYRCRAYPDQEQQAVLNRTFGCVRVVWNRTLAARQARWHQAGTGTSYAETDRALTAMKKDPDLAFLTEVACVPLQQALRHQHQAFGAFFARRARYPRFKSRRSRQSAHYTRSAFTLRGGELRVAKMSAALRFVWSRPEVDVTSLDPAMVIISREPDGRWYVTFTVGAVARQPLPETGRALGVDLGVTHFASTSDEDAIANPRHLERKARRLARYQRRLARCQAGSANREKAKLKVARAHRKVRHARADFLHRASTRLVRENDVIVIEDLNVAGMVRNRHLARAISGCGWGEFRRQLAYKCQRYGRRLVVIDRWYPSSKTCSACGHLLAVLSLSTRQWQCPSCGARHDRDINAAQNILAAGRAVARDSPGDACGADVRHSGTSRVQSAVKQEPQPVRAGIPVLQGGE

SEQ ID NO: 57091 - protein, 397 aa, Crocosphaera sp.
MAILTLTLKLPFYRLNQCKAQEFDRLTELNTGIANQLLEVPKTDRRKYTSKDFNHVEIGSGWINQTIRNSCAATKVKKFKCLPLEVNNQGWRIEKKGDTYSVAFSIIRGVKKRIPLAIHQSNHTNTLDKVIAKEAKKRCDPGDSQSPRECAPRKGSLKLWKSKKNIWYVLLSVSMDVPDAEPVKNWIGVDRGQNQIAVASLPSGFGKFWNGGQIKHLRRRYQKLRKQLQKANKRKVIKRLESKERRIITYINHCISKQLVQFAKDYGMGLRFEDLFNIRQTSKQSRKVRSDAGNNRHTWSYFQLETLTRYKAIKNGVPFELIPAPYTSKSDHRNGVIGKRNGHWFRGFDGYQCNSDWNASQNIGQWLGFSCPLDLKKTVFVMDADGLKDGVNGSPLN

SEQ ID NO: 57092 - protein, 503 aa, unknown
  TnpB Polypeptide
MECVRRAVAVEVENPPSELYAVEEPYRRIVEEVAGYVAERGRLEGEKYKELYRRFRELYPLPAQLIQQAINQGVEIGKSFLALKRDGRVYKPRPEVGQVSIRFAKDSWSYKKAVGSAAPVKLALSLPGGRRKVWIKPHKRFWLYWWKVLRKEAELASTLILKRRRGKWFAIFVFDVKPREEPPAEAVAFDVNENSVAVARVSLLSTVDAVARWNRRYVDPAVYSIKTDFGRLAKRYEAVRDEKPEELKRKNPFAGRDEEERRQNVADTWEYKKFARRLRERRRKEGRIRQISSEITRSPAVIITEELGKNPQEEMIGVEERAKNGVKKKVGKRKLRHRVKQTPFRKLIGTVEDKAAEAGSVVVYVSPYRSSKVCPIHFAFLRDNGGWHALHCPHGHVVDRDVAAVLNMLWKTTPTEWVKAVWWDVKETKKRLKKGIMPKDAAKKRNPLVPWPVVCAVWTSLMALNASGKWPAVLARAAPMTPAQGADEDGARAPPRGAGTPAL

SEQ ID NO: 57093 - protein, 412 aa, Okeania sp.
MLKLIEKHIIKPNHCNYKEIDKLCFLSKNLFNAVNYIVRQEFIFNQKYLNSAQTYHLIKESVDYKAIPRKVSCQIIRLVDRCWSSFFASLKDYSENPHKYLGKPNLPRYKDKLKGRCVTIYPAQAISKRGLKKGFLEPSGTNISIPTKIQGKVNEIRLVPRNGYYIFEAVYEVESGIPIDNNRVAAIDLGLSNLATVSSNVKEFQPFIINGKPLKSINQYYNKKRGELQSKLQKQGVECFNSNKINKLTRKRNLKVETYLHQASRKIINNLRENKIGTLVIGNNQKWKQEINIGKRNNQNFVQIPHHKFIEQLTYKAELVGIKVIINEESYTSKASFLDLDNIPNYQKGVKHKFSGQRIKRGLYKSKNGLLINPDLNGSYNILRKAVPNAYADGIEGLGVVPFRVTPGKVSW

SEQ ID NO: 57094 - protein, 496 aa, Cylindrospermopsis sp.
MATLTYVKGLPTPAEELNSLGLTEFEMFLTAYSPVFHKAACETANQLLTNKNFNKSSWNTHLQTTYGISKRHANGVISHAQGAVDASKEHRKRHIKTLEGTLKSINFWITKSEKKLADSLKFYKNNNWEQSKTGCKFPLSVDIYSHQTNWQSLHFALHQKKRRVHYLQKQIEHLKTAPIHTVIPKNQAFVVGSKDESFGNQVCQWDGDILKFRVPAFLESRFGKYVQTKLGNFDRNINRLPKDGSKTWHFYRKEGKWNAAVQFTPAQVKRVSRHSAYGCIGIDMNPGSIGWAYVDGDGNLKAHGQISLQMGLPSGRQDAQIVDACLQLATLADRFACPVVCEELDFSAKKEQLRERGKKYARMLSGWTYSRFYKLLESILGNRGTYLIKVNPAYTTVIALVKYARQYGLASDEAAAMAIARRGMRLKEKMHDSITAYLSVKDGKHVWSQWNQLNKTLKSRTDIKSRHSFYSISNWGLVVKEPELRSNGTKPKGASS

SEQ ID NO: 57095 - protein, 406 aa, Parvibaculum sp.
MIVNRAYRYRLKPTDEQAAQMRQFSGVVRLVYNLALEQRRDWWRQYAVRTGKSLTYVAQARELTELRRSFDWIAAVSQTSQQQALRDLDRAYANFFAGRSGYPTPRRRGVNDGFRFHGRECRIRRLNRNWGAIHLPKIGEVRFRWTRDVLGDVKNVTVSRDPLGWHVSIACEVESEAPEKRAAEAVGIDRGVAHTLAFSDGTFADLPLERLRVLDRRARKQARSLARCRRGSKRREKAKARLARTKAKTARVRKHWVHERSAGLARRYGTVVTEDLKVANMTASARGTVEAPGTHVRQKAGLNRSILEQGWYQFETCLRYKLEAAGGVLIKVPAAYTSQTCSECGSISKTHRKSQAVFLCSDCGHSAHADTNAARNILRAGTRPSGRAPVAGPTTRESRQNALAAA

SEQ ID NO: 57096 - protein, 345 aa, unknown
  TnpB Polypeptide
LREYRSAINFYCRSLWDERGKLDAATLKRYTGGCLGYRQKSDCLAMALDTVISTRKAAKALGKHWVSCPHVHGSVRVSELCAKIEKFEKLGFDYCLRLSGLIKGHPIVLPLKAHRQLLKWLAVPGAVLKDGCVLHENYVAVYVELPDLPVKEVGNDLGLDTGYRKLAVTSDGKIHGPEFSDVCVHVRRKRPGSKGKRKAQRFRAQYINTVVKSPPWKTTKTFVLEDLTGLKLRTQQKEKSSKKSRKTMAPWTYRQVLNRIEQLAPEHRVRLVFVDPRNTSRRCPCCGWVAKENRVKEDFCCVRCNYTADADFVGATNILARMTGNWQADMVPASSKSRGLSNVAV

SEQ ID NO: 57097 - protein, 442 aa, Clostridiales sp.
MYSRKIRHYNHIFKATIDAYRAAVDFFISVCMEEWGNISMQGSSKARMNLVEGMTHPTSKRPAVRYCFDAYDKRFYKFPSYLRRAACMEAIGKVSSYKTVLALWETTGEGKKPGRPRAGFAYPCLYRGNMYREGEGYCAQIKVYIRNTWDWISVSLRKSDVDYVKKHCSSMKQSSPTLTKRGKEWFLDFLYESDVTLSSKPVAERAVLGVDLGINNSCTCTCLLSDGTVAGRRFLRLPAEEDCLKKAVGRIKKAQQHGNRKTPRLWAAAKGINDNIAVKTAAFIMEAAAFFHADVIAFEHLDRTGRIRGSKKQRLHMWKTAYVQAMVESRAHRAGMRVSRVCAWNTSRLAFDGSGRVKRGKESDRTGGNYSLCEFTTGKMYHCDLNASYNIGARYFVREITKSLPEKERLALEAKVPEAARRSTCTLSTLISLHAVLAAKAA

SEQ ID NO: 57098 - protein, 382 aa, unknown
  TnpB Polypeptide
MLRLWFDAARWCYNQTIELLTIGDNPPKAQWKAVKTGIIHSVPDRLKAAPYQVKSVAVRDACLAMSALKLRNRGLKRGEPGFAEPSWRSRKYDQNCFIPASAVKPHGLYPRILGPLRTAEAIPEGHKDSRLVFSHGQYHLAVPVEEQRRVSETQGRVVALDPGVRSFLTWFSEDDAGHIWKGDFGRVQRLCAHLDDLLSRASRVNHHRRRNMYRAADRLRVRIRNLVDELHHKAARFLVDNYDVILIPRFESSDMVRRGARQLRRKSVRSLLTFAHYRFRSFLEWKAEKEGKTVLVVNEAYTSKTCSWSGEIIENLGGRKVVTGSDGVRMDRDINGARGIFLRALGDTPLLKFGLSRCNTPSGSVSSGLTTTQALADAVSVC

SEQ ID NO: 57099 - protein, 424 aa, unknown
  TnpB Polypeptide
MKGGIYLNKTYKLPVEQYNLSKELSRQAGRIYSKVVSTIFDIKNRKNFWLKEGQVKKIIRIYANGIGLHSQSKQGVVEQYYTALDSYFKALDNHKNPKPPYKTYKFQKVIYKKSAIRLKNGYLRLSNGRGTEPLIVDVPDISQCPKYAELIYNNVKDKYFLHIVVEIENKEIEYDNDNVLAVDLGQIHPMTTYDSKGNCRIYNGGKINSFIRFRNKELGKLQSKMSGCKKYSKRWNKLNSAKRQLLNKSINKINDVLQKYTSFLIGYCIKEEISTIVIGDIKGIRDNIDFGKKNNQNLHSWIFKKLTTIIEYKANSVNIKVEYIDESYTSQICPKCDNKYKPSNRNYKCSNCGFKYHRDGVGAINIFKKYTTGTLEGKPSWLEGDLTSPIGIRYNSNQCYLAGWNTSIFDDAGYSNDIPAKEIA

SEQ ID NO: 57100 - protein, 431 aa, unknown
  TnpB Polypeptide
MKRVISFILNPNKKQQLILGHLTYATSKLWNVANYERRNWNKQSGIKYPDWYEQKKKLKDHFWYKNLPSQTAQELLKQLDESWKSFYKLIQTGGIENPKPPKYKYQPFNIRYLNNGFKLLDNRTLRLSIPKQLKTYLSDNFNITDKYLFIDIPVPISGTLKIVEIIPERSNKYRVNLIVELPDAKIREDNSVYMSIDLGINNLITAYISTGKTYIISGRQLLSINRYFDKKIAYYKSISDSQQVAKGIKYPKQSKRVQQLYAKRQKQITHVLHTATKSIIDIADRNNVCKIIIGDITNIREDNSMGKVNNQKLHKWPFKRIKDCIKYKAENKGITVEMQEESYTSQCSPYTPQVAKEYAKKSNRKYRGLYKDNDNQIFNADCVGAYNILRKYLCRIEKSIPAVVGLDTPKMYQWNSQSFIANPKLSISMEM

SEQ ID NO: 57101 - protein, 135 aa, Crocosphaera sp.
RLRNRLRNLIDELHHKVAKFLTENFDVILLPTFEVSEMVVKNSRKIRSKSVRQMLNWSHYRFKEFLKHKAFETGKLVIDCCEAYTSKTVSWTGELVQNLGGKKVIKSQFDNKAMDRDRSGRTGNFSSCFGRYTLT

SEQ ID NO: 57102 - protein, 383 aa, Acidobacteria sp.
VKVNKAFKYRIFPNDEQKKNLAQTFGCVRLTFNTMLAARTKAWQQNKQHLSYHDTAQMLTTLKKQEDRIFLNDVSSVCLQQTLRNLDCAFRNFFAGRAKYPTFKKANSNQSARYANNAFKFADGKLTLARQTEPLEISWSRPLPDDAKINSLTISKDTTSRYFISIHFETDWSPLEDLQTSVGIDVGTKTLAVLSNGENLENPKFLPLAEKRIKKLQRRVYKKVKGSNNRRKAKLKLARADASVADKRQDYIHQFTTKTIRENQTIIVEGFSVANLLKNHCLAKSIANASWGEMFRQLEYKAEWNGRKYLELDRFFPSSKICSSCSHLLVKLPLSVRVWDCPNCSTHHDRDLNAAKNIEIAGQYLLCSESDARKLTPKRYDSR

SEQ ID NO: 57103 - protein, 372 aa, unknown
  TnpB Polypeptide
MMIRQKAYKFRLYPNQEQKQLFAKTFGCSRAIWNMMLADKIKHYEDTKETLYNTPAQYKNEFPWLKEVDSLALCNVQLNLQTAYKNFFRSGFGFPKFKKKSHHQSYKTNNDKRENGRIALLDGKVKLPKVGWVKLKMHCHVKGVIKSATISMTSAGKYYVSILCETEIAPLPKTDSSVGIDLGLSDFAILSTGEKIGNRRFFNRLSKKLAKEQKILSRRALIAKKEGRKLADSKNYQKQRIKVAKIYEKITNQRKDFLHKLSTSIVKNHDVICIEDLSSKNLMKNHRLAKSISDVSWAEFVRMLEYKANWYEKKVSKISRWYPSSQICSDCGFSSGKKPLSVREWTCTNCGSHHDRDINASINILNEGLRTL

SEQ ID NO: 57104 - protein, 389 aa, unknown
  TnpB Polypeptide
MLRATKVRIYPTPEQAEYLNAQFGVVHFLYNKALHIKKHTYQRYGVNLNPRKDLKPLLSVAKKSRKYAWLKKFDSMALLQAVINFDVAFSNFFNPKLKARFPTFKHKNGKQSSYHCVGIKVLDNAIKIPKLAPIEARLHRELHGKQKSITITRTVTGKYYASLLCDDGLEAPEKPTLISSVTGLDMGPGHYAIMSDGTKVPNPRHFINASRNLRRKQKALSRKQKGSANRKKARIRLAALHERVANTRADFQHKFSRAIVDENQAVIVETLKTANMMKNHNLARAIGDVGWHSFITKLEYKAAEKGVPLVKLDQWFASSKICHCCGHKMPEMPLHKRTWRCPECGAEHDRDINATLNIRQKGIQELKAAGLVVSAYRGQRKSVIQTVAA

SEQ ID NO: 57105 - protein, 391 aa, unknown
  TnpB Polypeptide
MLKATKVRIYPNTEQADFLNQQFGAVRFAYNKSLAVINQAYKRHGVSISAKKDMKPMLAIAKKSRKYDWLKQYDSIALQQACINLDRAFQNFFDPKLKAHFPCFKKRHGKQNSYHCTSIKAENSFIKIPKCSPIKARIHREINGTLKSITLSRTTTGKYYASLLIEDGKALPKPIDYIKESDVIGVDLGLTHLLIESSGRKEANPRLLKRAYANLRRKSKALSRTKKGSAGRTKARLKLAKAHEKVANTRSDFQHKLSRRLIDENQAVIVETLKSSNMMKNGKLAKHIADAAWHSLVIKLEYKAKEQGKYLIKINQWVASSKTCSYCGHKLDELKLDVREWQCPSCQAQHDRDINAAINVRSHGITDLKAAGLTVSAKGCLRKSSDMLVAA

SEQ ID NO: 57106 - protein, 379 aa, unknown
  TnpB Polypeptide
MANKAIKYRLYPTEEQAIMFSKTFGCCRKVYNLMLSDKIASYEATKTFGKQTPAMYKTEYPFLKEIDSLALANVQLNLQSAMKNHFDKIRKKRNGFPKFKSAKRSRKSYTTNNQKGTVAIIDCKYIRLPKIGNVKAVIHRVPDSNWTIKSATVSQSSDGKYYASVLFTFQDSVITYIPDIDNAIGLDYASDGLYVDNNGNVGSNHKYYRESHKKLAKEQRKLSRKKGSLKNEEKSKNYLKQLRKVNKIHTHIANQRLDNLHKISTEIANRYDVVCVETLNMRAMSNKGFGNGKATLDNGYGMFLSMLAYKLADRGKYLVKVDKWYPSSQICHCCGVRHPEMKDLKIRKMKCACGLEMGRDQNAAINILHEGLRMLTSVA

SEQ ID NO: 57107 - protein, 379 aa, unknown
  TnpB Polypeptide
MEYSYRFRIYPTEEQKELMTKTFGSCRYVFNYFLNRRKTTYNETGRGLSFKECCRELTSLKKELPWLKEVDSTALQAAVQNLDKAYTNFFRGLKTGCRVGYPQFKAKKRDIPSFKAKNNRGAVAITGKSIRLPKIGHVDCRISKQVKGEILSATVQQAKSGKYYVAINCKNVDLPSMPATGSVVGIDLGLKDLAITSDGEKFDNPHTYAKNQKKLARLQRQLSRKTKWSHNREKAKLRVARLHEKIANQRNDALHKMTTKLVRENDVICMENLSVKNLVKNRKLAKSIMDASWGEVRRQLAYKTVWYGKELVIVDRFFPSSQICHCCGAKNPATKDLGIRYWVCPNCRAAHDRDINAAENILTEGLGKIGLPAQRVIPW

SEQ ID NO: 57108 - protein, 360 aa, unknown
  TnpB Polypeptide
MSQLNQHIGACRFVYNWGLERKIKSYELEGKSVSRFDLNKEIVHELKPEYPWLKEVNSQSLQGAITNLESAFTKFFREKTGFPNFKSKKNATQSFSVPQHYVVDFDTNRIKLPKIGWVKAILHRRFEGDLKTATVSMTRTGKYFISILVDDGKELPKPEPFDYESTVGIDVGITHFATLSTGEKIENPKHLKNSLGRLKVLQRRLSRTKKGSNNREKARLKLAKQHEKIANQRRDFLHKTSHRLASENQAIATETLNVKGMMKNHHLAMAISDVSWSEFFRQLEYKAAWYGKTMLTIGQFQPSTKICSVCGTVVQGLTLADREWSCQECGTVHDRDINAAINIKKFALQDQNIITLGQRG

SEQ ID NO: 57109 - protein, 366 aa, Nitrososphaerales sp.
MIKLESTEEDKVKLLETIQEYNKACNFVADRAFTLKLSNKFKLQKEVYREIRERFNLTAQFAIRIISKVVEAYKKDKTIKPTFKILGSIQYDQRNSRVCIDEVSLMTLKGRLKLKARVGDYQRVRFDRVKGQCDLIYRNNTFYLIVVVDAPEKSEYDATGILGIDLGIENIATDSDRQIFESKKVEEKRQKYLRLRSTLQRTGTKSAKRKLKRLSGKERRFKKDTNHVISKSIISKAKGTIRAIAIEDLKGIRSKVTVISRGSQRDKYSKWAFGELRNFLTYKSKIEGVPLIVVNPKNTSTQCPECQYTDKQNRKARNEFQCIGCGYNEMSDYVAARNIVIRAAVNQPVVAPVLVVTSHDALAHGS

SEQ ID NO: 57110 - protein, 312 aa, unknown
  TnpB Polypeptide
MRQLRFYIERSFTQMLAYKFRIYPTKLQEKLIVETLETCRRLYNDFLSDRIKNGTDVWDLQKSLPKLKVANKFLRAVHSQVLQDVNFRLERAYQAFIAGIAGHPKFRRRGRYNSFTYPQRGGFRIDGKSRMKLSRIGRMKIRLHRSMEGVVPKTCTIVRDIDQRYACISVEGPIVEKSPASSRLTIGVDLGVTNLVTLSNGTVIPNPRFLGRSVSKLKSIQKDLSRKQPSSKNRAKARIRLEKAWRTVRRQRDDFDHKLSDRLTRENEVVIFEDLRIRSMVKNHSLASAIMIPHGENCAGWPPTRRRGVVDG

SEQ ID NO: 57111 - protein, 502 aa, unknown
  TnpB Polypeptide
MKKKSKLQKVEQETIPVKYRIYPNLKQRKYLDRCFLSSRIVWNWLLGVQKDYDRGLTEWVKEKYAKELQKFCKKEGFELSSPFEHEKIKELKKGEAKKFHTEVIRLKKEEVFPSVLGIELLKAIIPNAEEDEIKKMIVNKKNPSASNKTINIMDLKRQVKNLREDKPILNQVASQGIHHVPLNLAKAWKACYDKNRPDSGEPKFKNKFAKQSFTFDTAKLQGNKLFLPPKSKNIFIKTKVHREMEGEQKTITVTKSKTGEYYASVNFRQDVFFPKPKSFSKSSTVGIDLGIKDDYIIMSNDMGSIKNPKFFKKHERKIAMLNRKLSRSQPNSNSRNKVLHELNREYEKLSKAREDFQHKVTHQIVTNPNIKAVAVEDLNVKGMTAKNKPKEGENGHYLPNNQCAKRGQNKATLDAGFGRVRQMLDYKCKRNGKTFGKVDRFFASSKTCNNCGHINKELKVSDQYWTCEKCGEHHERNFNAANNVRDEFIRASKQKKKTKNSK

SEQ ID NO: 57112 - protein, 281 aa, unknown
  TnpB Polypeptide
VRRSYKYRLYLSDKQAASAQAQLDVARELYNACLEERRACYRATGKSLTYYDQANQLKAIRHECPDVATANYSMLQAVCRRAQRTFENFYRRARAGQKGGFPRFKGDHRFDSITFPAYGDGCKLTDARLKLHGIGAVKVKLHRPVEGTIKTVTLKREVGTWYGVFSCEVEATPLPATEQGVGIDVGLTHFLTTDTGATVENPRPFKATQRRLRVAQRALARCKRGSARRGKVRRRVAALHQKVANTRTDFHHKTARALVDAHDTICHEDLAVANMVKNHSL

SEQ ID NO: 57113 - protein, 383 aa, unknown
  TnpB Polypeptide
MPESTINLQMQIKDLSEKKKKRIKETIKKQKEIAQEISNLMPSIKPNRWSKAKSDGVFYRWVNKYFPENNGLRSHDANQCAYKVADSYDSWKQNGYSGEKPKFKDQNWCRFCNCNKIISYEQNNGKWGVKLPLEPYRPEWFRLGVGEYQEHYLTKEDKRLGDAEIIKKDNGFFLNQALSFEVEKERETLNKLGVDLGLNKVAVYVLLDEEGSYIDSRFFDGARVRHYRKKMSDIRKRLQEADQVKKVEELKDKEKNYIEQRNHFISKKIVDVANESNAEIKLENLSDIREKVNRDASKKHRRELNSWAFGELQSMIQYKAEMVDIPVTKVPARYTSQKCPNCSHTSEDNRKGTKFKCKQCGIEYHADFVGATNIANKKQQKPK

SEQ ID NO: 57114 - protein, 406 aa, Microcoleus sp.
MLNYNFEYKLIPTPEQAETIDLWLEICRKVYNFALAQRKDWVNSRKCSINACSINREYILPADAPRPTFASQCKSLAAAKKSILELKQPHTHVLQQVLRQLEAAFVAMWERGHGFPRFKKRMRSFLFPQLNLEVLRPWDGDNDVNLPKIGWVKLRLSRPIPDGFEVKQIRVVKRASGYYAILTLQCDVTIPLPPIAGHSVGIDLGLISFLATSDGELIARPKFFVDGQRKLKSLQRKLKRKKKGSNAWRKLQHRIARHHETLSNTRKDFHFKTAHHLCDGADSIFAEDLNLKAMSAGMLSKHTLDAGFGQFLNILGHLCFKRGKHFSKVDANGTSQTCPNCQTHTGKKELSERVHECPECGYKTDRDVAAAQVVMQRGYTAVGHIAVNFGEGKVIGLPLSQESPRL

SEQ ID NO: 57115 - protein, 380 aa, unknown
  TnpB Polypeptide
MILTFKIKHQLDFSKQLQQARQVAKFAIANRDKLSSKNVKYIGLKSAIANQILREYGRNLKCKSIKNIKLIIPGQSIKVNNTTKTITLTLLKTTFQYEFKQDFKKINQIEIDNNYFYISVEVQDETLFKPDGWIGIDRNTTGHCAVASCTKTGKVMMLGKQAKHIHQKYSKIRKKLQRQNKLRKLKAIKRRESNITKDLNHKISRKVVNYAKQNNCGIKLEDLTGIRKTTKQAKSFKYALNSWAYYQLEQFIVYKSQLAGVPVVKIEPAYTSQRCQMCGQLGQRNDKHFKCSHCGYTVHADVNASWNIASSEQLLAVPKSKCRPEFDCIHFGMPYNQRLQQEKDCCKGNTDIPLGAMPLKHGQLLNPTPPKADACAASRL

SEQ ID NO: 57116 - protein, 402 aa, Escherichia sp.
VKRLQAFKFQLRPGDQQECEMRRFAGACRFVFNRALALQNENHEAGNKYIPYGKMASWLVEWKNATETQWLKDSPSQPLQQSLKDLERAYKNFFRKRAAFPRFKKRGQNDAFRYPQGVKLDQENSRIFLPKLGWMRYRNSRQVTGVVKNVTVSQSCGKWYISIQTESEVSTPVHPSASMIGLDAGVAKLATLSDGTVFEPVNSFQKNQKTLARLQRQLSRKVKFSNNWQKQKRKIQRLHSRIANIRRDYLHKVTTTVSKNHAMIVIEDLKVSNMSKSAAGTVSLPGRNVRAKSGLNRSILDQGWYEMRRQLEYKQLWRGGQVLAVPPAYTSQRCACCGHTAKENRLSQSQFRCQVCGYTANADVNGARNILAAGHAVLACGEMVQSGRPLKQEPTEMIQATA

SEQ ID NO: 57117 - protein, 402 aa, Synechococcales sp.
MLKATKVRLYPTEVQKQHLAQSFGCCRWYWNHSLALANQTYKETGKGLSRGKIQALLPHLKKELEWLKTPYSQCLQVVALNLSRAFINFFEKRAEYPSFKSRHGKQSISYPQNVKLVENAIKFPGTLGIVKAVIHRPVEGAVKTVTISTNAGGHYYASVLVEDGTQQPRTDTQGQAIGLDVGLNHLVVTSDGSKYNNPKWFRKHAKNLKRKQQSLSRKVKGSISRARARKRVARVHDKISRCRSDFLHKLSRRIVDENQVICVENLAVKNMVRNHCLAKSISDAGWGMFATMLKYKAEWEGKVYLEIDRFFPSSKTCSVCLNQIGRLPLDVRSWTCSGCSTHHDRDINAAINIRNEGLRILALGASATAVGGNVRLASGNTQKHLLLSTEAPSSSNVVARAG

SEQ ID NO: 57118 - protein, 405 aa, Lyngbya sp.
METWGELLRRHYNYALGQRLDCLRRTRCQFDRCSIVSEPIGDIPEKVDYYSQASELKQTKELFPEYKNIYADCQQQNLMRLDKASKRWLIPDKNGKRGGRPRFKKRGDICSFTFPRVNCPKAGAHLIGNILKLSKIGEIKVILHRPIPDGFAIKQVTLVKKADGWYASFSLEDDTIPEPLPVDEVKSAVGIDVGLEKFLATSDGQAVKIPQFYRKSQQQLARQQRQLARMEKGSKNYQRQSNKVARLHLHVARQRKEFHYQVVHWLCEHYDLIAFENLNIKGLARTRLAKSILDAAWGSFLNILQAVAVKRGKWAIGDDPRGTSIECSGCGARVEKTLKDRVHNCPHCKLVIDRDWNSGINILNRVKQTLGLAFAGCGGYLDASPVRQQLSIAKLGSPFYTALRS

SEQ ID NO: 57119 - protein, 409 aa, unknown
  TnpB Polypeptide
MKTYNVRLFPDVNQVTQLLELSAIRNNLWNTLIDIEQNEYEVNKKIVHNYELDKRITELRKNTNVSKLNSKACQRISKEVYSSYQSFFKLIQKDKTARPPRKMENTESFHTIVFNQSGWVVNTNDVITINKIKFKYKSHLDITKLDIKEIRIKFINNKWICDICVNDNIIYDDIIQQDNKVLAIDLGLKTLGTCVDNKGNVIVIKNKGKKISKYYLKQISKVQSKLSKTTKGSKRNKKLKSKVNELYNKKNKQVKQALHAQSKGLLSMNYKSIVIGDLSVKKLMSSGDGKYNGLNKSFHQSNISMFVDMLKYKSYMYKTDIIKINEAYTTQLNCLTGKQFKDKITLDDRTVKLSNDIEIDRDLNASINILERYFNNHLAAMTQPLDKSSVIHRFNLMNKSSLIEKPMVL

SEQ ID NO: 57120 - protein, 466 aa, Desulfurobacterium sp.
MSRAKEESKFLLTYKFRAYPSALQEYKLENWLFALCWLYNHALEERKRVWKEERRTVKYSEQQNNLPKLKKKEPILKLVHSQVLQDTLRRVDKAFQKFFQDLERKKKGEKVKVGYPKKKPIAKYKSLTFSQVWMKQKGKLVPIIKLEKKNNRFAYLHLPKIGKLKIRLHREIDWTRAKTVTVKREPSGNWYVCISVEVDLDQILKEAEERVERKIKTVGIDLGVKHLAVTSKKDYIKHPKFIQKLEKRLKREQKKLSRKEKGSRNFEKQKKKVAKIHEKIKNARRDFLHKLSRKLVGRYHLISFEDLDIPGLVENNPLAKLILDAGWGTLITFTTYKAVMAGVKVVKVDAAYTTQECSYCGLKVPKTLADRMHKCPRCGIELDRDYNASIVIDKRGIEKEGLTHLTGGRVGATRTYACGEGTGGVSSKGEISYPSLKQESPCGSSGWSNSRQRVVFLPEAPSVRAE

SEQ ID NO: 57121 - protein, 388 aa, Alkalibacterium sp.
MKIHKAYKFRLYPNKEQAILINKTIGCSRFIYNHFLNQWNETYKETGKGLSYGKCSAQLPSLEKQEETEWLKEVDSIALQSSLRNLSDSFDRFFKKQNKYPRFKSKNNPLQSYTTKETNGNISVEGNKLKLPKLGLVLFAKSREVEGRILNATIRRNPTGKYFVSLLVETEVEPIEKTDSSVGVDVGLKDFAILSDGTVYKNPKFFRSLETKLAKEQRKLSRRKIQALKDGRKLSESKNYQKQRIKVANIHETIKNKRTDYLHKISTEIVKNHDIIGIEDLLVKNMMLNRKLVKSISEVSWAEFRTMLEYKAKWYGKEIIAVARNFPSSQLCSGCGYQNKAVKNLAVRKWECPECHAHHDRDTNASINLNQEALRILTSRTVGTTELA

SEQ ID NO: 57122 - protein, 350 aa, unknown
  TnpB Polypeptide
MKRSARTKDSETWRVAIVPIRLSGADYRRAHEACHKAASLWNFFLASIQEYWKENETDPTEKEMRHFLYEQRPDLRDGLHAHTVQLILGDLMDAVSTYRSNRDSGDKNARAPHREKNYRPLEFTAGFGWRVTPDGRRIALSFGKGHKRIALPLPEIADPKTGEILPSERWGSMQLCWDRNARKWSLHISVPTPKPPQGNPDIIAAIDEGIINPMTVAIETEDSYDVLVVNGRHARAVKHYRNTRIATLQEKLSRCVKGSKRWRKLNAKRKRIEAMTDSALHNANHQTTRKVADFMQAHAPDASSRETCAASRRAPARTRPSASGTPRTNAAGCPNGHAADKRLCSNTRPA

SEQ ID NO: 57123 - protein, 398 aa, Massilia sp.
MLTAHRIRLDPNRAQASHLARAAGTARFAYNWALAEWRRMYAASLADPALPKPNEAALRRRLNAIKHEQFPWMLEVSKNAPQMAIMQLGRAFENFFAKRARYPRPRRKGRHDRFTLTNDQFRVEEKRICIPKLGWVRMRETLRLAGHIVSTTVSRVAGHWYASITVDMADGLPLPPAENQGAVGVDLGVKTLATLSNGEAVVGPKALRCSLKQLRRLGRALSRKVKGSRNRTKAKLKLARLHARIANLRRDGLHQLTTSITRRFHTIVIEDLNVRGMLGMRSLARAIGDMGFHELRRQLEYKAARRGSHVMVADRWYPSSKLCSCCGYQLEALALSVRQWRCPGCATLHERDLNAAINLKNLAVSSTVSACGGIGSDPARERRVKPVPAKQESNSKQH

SEQ ID NO: 57124 - protein, 455 aa, unknown
  TnpB Polypeptide
MKRTSIVELVVDKNSEERLKLLCSLSSKLWNEVNYARRRAFFEKRGVDLKATYKEYYEKYKALIGSATAQQILNKNDEAWKSFFKMLKLKKESKLPPFITKISPPGYKKKNNKRSLWTVLRKDQYKIEDDKIVLKGLGAIGRIELGYKGLVHLRGEQGRLEIHYDRDKRRWYIHISFEVSEKAVRGVWVSVPRRPRGSLVAGIDIGVNNLMAIYIENGLAKLVNGRSLKALSHYWRMRIAEYQSTLNRYGLKNSRRLRSMHSKWRRQIKAYIDSKVRQAIEWLHSVGVSIIKIGYPKYIAQDNGNFNNVHIWTYGYLLRRIYEVAEEYGITVVYVNEAYTSSKCPVHGPGCGKRIERGLFKCTKINKVFNADLVGAFNILITPSPERDRGNGPETWPGIEPSGRGDVIPNLPALGNPRTLGRGGGQCVGGGLEIALWADIRVADKTAKFGFLELL

SEQ ID NO: 57125 - protein, 375 aa, unknown
  TnpB Polypeptide
MNRAIKYRIYPNEEQNNKFVQTFGCCRKIWNLMLSDKIEYYNKTGKILNTTPAEYKTVYTFLKDVDSLALANVQLHLQQAYKNCFDKKRKKCTGFPKYKSYKHSKRAYTTNNQHGTISIIDKKYIKLPKIGYVKAKIHRFPKSDWKLKSATISQDRDGKFYVSILFEFDKITEPVSNPNKIIGLDYKSDGLYMDSNGKVGTNHKYYRTLHKQLAKQQRKLSKKIGSRKNEVKSNNYLKQLKKVNKIFKHITNQRKDNLHKISTEIANQYDIVCVETLNMKSLANKGFGNGKATLDNGYGLFLNMLEYKLFERGKYFIKVDKWYPSSKMCSNCGCIKELTLQDRVYKCECGLIIDRDLNAAINIKNEGLRLFLQTT

SEQ ID NO: 57126 - protein, 543 aa, unknown
  TnpB Polypeptide
MRSISAPFVVARPAGARIKTRLRLLAADEAVVWAVAEYLGGLAGSDLAWRCRLGCAPDQRAVRKRTLTSPSSSRWAGSITRTANDQWQRGMANLTDRRITLRRACRAIRLRLSVPVGGRQGRVRGYASQAERFAKQGRLQHLQAELAMVEGRLAAGRVSVCRGGRRLAKQRHALDQAKLTEKQWRARWQAERLFLTADGETDKRWGNETIRVQPDEGWLELRLPTPLAHLSNTPGRAPTFRLACPVVFTHRAEEWAAQVATGAVRYDITFDPAKGRWYLHASWRLAVATPPGLEDLRHCRALGVDLNAHHLDAWVLDPTGNPVGPPHTIPLELDGLPASTRDGRLRAAITAVLRLAADRGCESILVENLDFADARHSGRETLGRGRRGKQFRRIVAGIPTRRFRTLLVGMAANHGLWVIAVDPAWTSVWGQRYWQTQLKESTKASATITRHHAAAVVIGRRGLGVGARRRPGVPGHDRRIVAGELPARPDHQRVGREGPGPPGGQRAAEHPRKTRPGERNRLGDQVVQDRSGPPGQDDLPLTL

SEQ ID NO: 57127 - protein, 155 aa, Clostridium sp.
LKIRNKNLKEGRATSQNIQKQVVKVQKLHQRLRNIRTDYINKIVYSIIKQKPSYITIEDLAVSNLMKNKHLSKAIASQKFFKFQTKLTVKCKENNIELKIVDRFYQSSKTYSQCGKVKNDLKLYDRVYKCDCGFTIDRNLNASINLKNAKKYKIA

SEQ ID NO: 57128 - protein, 399 aa, Calothrix sp.
MEKAYRYRFYPTTEQEQILRRTIGCVRLVFNRALAARTEAWYERQERVDYAQTSTMLTQWKKLEELEFLNEVSCVPLQQGLRHLQTAFTNFFAGRARYPNFKTKRSGGSAEFTKSAFRWKDGQVYLAKCSEPLPIKWSRQLPKGCEPSTITVRLEPSGRWFVSLRINDPTDETLQPVDSAVGLDVGVSSLVTLSTGEKIANPKAFDKHYQKLRKAQKSLSRKQKLSRNRDKARLKVARIQAKISDSRKDHTHKLTTRLIRENQTIVVEDLAVKNMVKNPKLARAISDAVWGELVRQLEYKAKWYGRTLVKIDRWFPSSKRCGHCGHVVEKLSLNIREWDCPNCGTHHDRDINAAKNILAVGHTVAVCGANIRPDRHKSKGQLRKSPERSRRGKKQKPES

SEQ ID NO: 57129 - protein, 371 aa, unknown
  TnpB Polypeptide
MRKTFKYRLYLTPAQETILLKTLDECRWLYNHLLEQRKTAWEQDGRSLTLYEQQGDLPTLKRERPRLKMAYSQVLQNVAVRIDLAFQAFFRRAKAGETPGFPRFRGKGRYTSLTYPQLANGCVRLKDDVLHVAHVGGLKIVSHRPLEGTPKTATISVSSTGKWYVCFSCECADPTPLPMTGQEVGIDVGLTTFATLSTGEQIANPRFFRADEKALGKAQKRLSKADKGTPERKKRRKPVSRVYERIAWRRTNFAHQHSRRIVTQHDLIAVEDLSINRMIHNHCLAKSIADAAWRQFASLLSYKAAWAGRKYVAVNPAYTSQDCSACGHRQKMPLSERTYTCPCCGLVRDRDLNASLNILRLGRQSQAAALP

SEQ ID NO: 57130 - protein, 512 aa, unknown
  TnpB Polypeptide
MFVSLQFKLELRKEDKQKLIKLMRKQSSAIRAAYNMLKELEKEKTRNAHAQIYHRLRQLFPELPTKYIDSAIYKAKQYPTDKPVVFGGKRFFEKLCKNHLTGKLRERLKKQWRELRQGTLISIGSKEDKGNRLMRFEDLNGQLCLRITIGNREFIYARVLREPSNSKDKWITFMAMLSESWQTQSYFPYTVELKLRDGEVYGGVSFEIPIPEVKHTKENRVIAIDTNASPIHLAVAEVSKTGELLSYQTISLHHLLGLSQTSKDHQEWILAHKIVDTAIQKRKAIAIENLKKLKKGTRGDGKATLRKRLHQWNAKKFLQKLKRVAMIKRVEIVEVNPAYTSVIGMLKYAPQLSIDKDIAGAYVIGRRALGFKEDTPENYEKLLKDKAYLEFALKRYEEREKELRELLEEETNQYKRNAIKSELKSVENPKNLLVNLIQSLQSESSECEGANGRNPAWQVLKVALLFPILGRIPPRDLSPLKPVLVEGVWDRVRRFNGLVPLEAGGTVPIRDF

SEQ ID NO: 57131 - protein, 167 aa, Bacillus sp.
  misc_feature (120)..(153): Xaa can be any naturally occurring amino acid
MMIKFRFFGNGRQNKFMKRKFRSVRKKLGEAKKLNALRQLDDKEQRWMQDQDHKVSRGIVDFATDSNISVIRLEQLTNIRQTARTSRKNEKNLHTWSFHRLAQFIEYKATLVGIKVEYVXXXXXXXXXXXXXXXXXXXXXXXXXXXXXXXXXXASYRITYTILISSI

SEQ ID NO: 57132 - protein, 253 aa, Bacillus sp.
  misc_feature (182)..(215): Xaa can be any naturally occurring amino acid
VDSIAIQSSVRNIADAYTRFFKKQNSAPRFKSKKNSVQSYTTKQTNENIAVVGNKIKLPKLGLVRFAKSREVEGRIVNATVRRNSSGRYFVSLLVETEVQELPKTHSYIGIDVGLKDFAILSDGTHYENPKFFRSLEDKLAKVQRVLSRRMKGSSRWNKQRIKVARIHEYISNARKDYLDKXXXXXXXXXXXXXXXXXXXXXXXXXXXXXXXXXXGFKHILCKSRTICTTCSWISSTGYIAHFPLPKPFFCFF

SEQ ID NO: 57133 - protein, 315 aa, Cupriavidus sp.
YANFFAKRADFPRFKKKGQHDSFRYPDQRQIKLDQGNSRIFLPKLGWLRYRDSRDVLGEVKQVTVSACGGKWFVSIQTEREVKQSLPNGGAVGIDMGVVRFATLSDGTAYAPLNSFRRHEAALRRAQQAMSRKVKFSNNWKKAKARVQRIHSRIGNARRDFLHKTSAAISQNHAMVCIEDLQVRNMSKSAKGSAEQPGKRVRAKSGLNKSILDQGWFEFRRQLDYKLAWNGGYLIAVPPRNTSRTCPCCGHVSADNRQTQAEFRCMECGFEENADLVGAINILRAGHARLACEVSGAVVPPAAGTHRSDSIGLDA

SEQ ID NO: 57134 - protein, 171 aa, unknown
  TnpB Polypeptide
MYKRDERLRHLYITAIRFLADELYRRGVRKLYIRYPIMLSQDNGNEYNTNIWWYRKIVLWIVDVFREYGIEVELVPEYYTSRECSICGNKHKNGRIYRGLYICRKTGKKINADINAALNIARRLGYRIEISRKIECYSITHNGVRPLNPLQRANTRDPEIRNPALQGGEGS

SEQ ID NO: 57135 - protein, 543 aa, unknown
  TnpB Polypeptide
MLGELSKARAKARRGGGEKWEWVIKPGDKMVVGRTAVIPSKKLSRRDFKVLEEVVNIYGRMLGDVLSHASRNIIESYYRLKDEKYRELRNIYPDIPSHYIHGLCQDAVERISSLRRNRARQYSREIFDELVKYLNLGKKDLRSKRLVRYLRRRSWEIVRHQVDLEMMEGKLAPRINSVSLWLVDDHVWKPIDATKININGVENIFFTRVAINTHRGWVYFDLEPSKELYKLLVRGFKPTSHAKIKLDRRSRRVLFHLSLEKEVEIYKPGDIKPVDVNESSVATLYGAFAVILETDLTKTTLGYSYRKESIQRRNGSGSREARKAMKKLKEGKKKRDYRMKTANLIVRDALRTRGVIVVERISGDDIRVMIARYRDKQLRHRIYQSALKGELNAIIDKAREYGVPVLMVDPRNTSKICPIHNTSIEYGEGRIGICSKGGERWHREVVALINIYLKALEALYEGSAQKGFGVSTLDGSPMPLGSTATHEPIEIPRSLWGRWKSLDDHRDAITSLWVKKQSNTNKLIPMTINNHRGTSGYNWEEWV

SEQ ID NO: 57136 - protein, 249 aa, unknown
  TnpB Polypeptide
MLLHQGSGYRIKDGYVEIIGGIRMKIIGWDRRYDQYENGEARLVYRDGKMMLWISKKVPKPKPYKPRDTIAVDINERDTKIGEAHRWKKLAEDLQKRYSSPRYPAWGRRRGILNRIRSYHRKARNILEDWARKTSLRIVGLAKRLGYAVAREDLTGLINSLRKIKNKDHRTKLIIMGYSRLGRWIDWQAEKHGVPLAIVKPNGTSSECPKCDSKLEETGYRRLRCPQCDFEADRDVIGKLNIRKRALKS

SEQ ID NO: 57137 - protein, 417 aa, unknown
  TnpB Polypeptide
VKTKLTERQIVTKSDPRFEQLDDLCFRAKNLYNKSLYLTRHSLFNENFQFASNFESILRDDTEYRDYRNMLDMASAQQVLRQVSSTWKAYFAAHKNWKQNPDKYPGEPKIPKYLKKDGRYPFTITTGPNGRDYSAYLLPDGSFKLPKKFNGLKIYTACFHKEGFQRVNEIKIISKKYQIEIFIAYTVEVPDTKPDNSRYLSIDLGLDNLAACVTNDQSLHPFVINGKSLKSINQYYNKKQSELRSEAKIRHNLDWTHRLDRLTEKRRRKIEDYLHCASKYLIEYCVQNDINTIIIGKNDSWKGSINLGSRTNQNFVYIPHTRFIDMVKYKGQVNGIDTICTEESYTSGTSFLDGEEPNKDYYNKSRRVHRGLFKSNEGLLINADINGAYQIMKKVVPNAFEQWDRGHVVSPLRISFS

SEQ ID NO: 57138 - protein, 405 aa, Halorubrum sp.
VADEYLRRTAITRLTLTSEQRTLLDTTISEWKRACNISSRIGWRANEARKTRLQKLAYDEVREETRLGSQHTILATHQAAGALSGIDDIEALEDDYATSRPEFTADTVKYDTRTMTLFDDGTVSLSTVGDRIRCELVLPDDENGYQYQYLDSEAWEITESTLSRRDGGYYIHLGFRKPKPKKRAEIRDDTEDRTVLGVDLGIANIATTSTAYFASGDELRHRHREFERIRGRLQRTGTQSAHRTIQQMSGRESRHVRNTLHEVANDIIDEALEHDCEYIAFENLRHIRDRAPRVKEFHQWAHRQLVDMVESKADAEGLRVVYVSPENTSRRCPECGHTSEGNRIVRSEFECQSCGETGNADYVGAKNVGWRYVRRGLQSSRRTGDSQLALKSGTVTPNRGFVPSD

SEQ ID NO: 57139 - protein, 432 aa, unknown
  TnpB Polypeptide
MYGCQQVLLSPNKDLKAILDFICAESNKLMNCAIYYGRQVWFKCRKYLGKFDLINEYKTNSHYQVLHSQVAQQALLSVKESFRSFYELDKKYRKGELEDKPKPPKYRKKGGLSVVSYPKQALKLIDNQIQIPLGLTVNRWFSIKNFLITMPSNIKFEDIKELRVLPRNGCFYAEFAYKVKPVTTTLDSKLALGIDPGVNNWLTCVSNLGTSFIVDGRKLKSLNQGYNKLVAKLKQGKPQGFWSNRLAHITEKRNRQMRDAINKAARIVVGHCIDNSIGNIVFGWNKRNKDSINLGSQNNQTFVQIPTTKLKQRIAQLCQLYGINFVETEESYTSQSSFLDNDILPVFGNKPEGWKSLGKRVKRGLFVTAKGIKINADLNGCANILKKVKEQLDINLAKTARGLLTVPQRVFLWKNNCKKRRTTALASFGATV

SEQ ID NO: 57140 - protein, 391 aa, unknown
  TnpB Polypeptide
MRHIMAIKSLTYRIYPTTSQEQMFNQFCGNNRFVWNHMLMRNIKHHFVSGKFLFGYDMCKELPKLKEEHEWLKLSPSQPLQQQCLDLDKALKNCFKSEFGFPKFKKKRKSKESFRVNQNIKISKSKKSIKIPKIGFIRIKPRININLKDIKNVTIKKQGNNWCLYICHQFSIFRTPMSGRKVGLDLGTVRLATLSNGKVIDKFEDEELLKKIKSTQRKLERRTRKNKKHKMKKIQSISRAKTKQSLSRLNKKLRDKRKDYLDKVSKKLVKKYDMIYIEDLKIKNMTRQVNKTDDGSHRSGVSAKSGLNREILNQSWGQLINMLEYKSLWYNKKVIKVNPKNTSRECSECGFTHKRNRRSQSDFRCLKCGFTMNADHNAAINIKRLGLRLAA

SEQ ID NO: 57141 - protein, 390 aa, Shigella sp.
  misc_feature (305)..(388): Xaa can be any naturally occurring amino acid
VKRLQAFKFQLRPGGQQEREMRRFAGACRFVFNRALARQNENHEAGNKYIPYGKMASWLVEWKNATETQWLKDAPSQPLQQSLKDLERAYKNFFQNRAAFPRFKKRGQNDVFRYPQGVKLDQENSRIFLPKLGWMRYRNSRQVTGVVKNVTVSQSCGKWYISIQTESEVSTPVHPSASMVGLDAGVAKLATLSDGTVFEPVNSFQKNQKKLARLQRQLSRKVKFSNNWQKQKRKIQRLHSCIANIRRDYLHKVTTTVSKNHAMIVIEDLKVSNMSKSAAGTVSQPGRNVRAKSGLNRSILDQGWXXXXXXXXXXXXXXXXXXXXXXXXXXXXXXXXXXXXXXXXXXXXXXXXXXXXXXXXXXXXXXXXXXXXXXXXXXXXXXXXXXXXTT

SEQ ID NO: 57142 - protein, 352 aa, Firmicutes sp.
  misc_feature (286)..(351): Xaa can be any naturally occurring amino acid
LRLRLHQPTKAKQAVYRELAGRVTGFANNLVAAGRPKKLTSKTAKPYCPDRIPSAVINQALRDVAAHPKVEKFRVLWPGFNNQNCRLERVGGFWTVGFPTHVGRVRVPLQATDRQAQLLAKLGATVKQGAAKLYEKRGRWYLALSISVQVTPCVGTKVAGVDLGLRNLAVVNCEGETLFFSGDHAAFVRRRFNALRRRMGKAKALGAIRRMKDKEARWMTNQDHEISRKIVDWCIARGVGTIRMEDLTGIRIRGNRNRKDRGRSLHSWSLYRLKQFIIYKANLAGXXXXXXXXXXXXXXXXXXXXXXXXXXXXXXXXXXXXXXXXXXXXXXXXXXXXXXXXXXXXXXXXXXG

SEQ ID NO: 57143 - protein, 437 aa, unknown
  TnpB Polypeptide
MSGVVRRTNKFTVRPLSEDDERLLRDLLNASASLWNELTYERRQQFFDGESVWDTADYRKQYVGVLGSATAQQVIRKNKSAWQSFFAARENGDTAAPPGYWGNEDDGRELRTFIRNDQYTLETGERSRVEIPIGQDLKDQYGLDYHDRLRLEVCGAPKWEGEQGRLEIQYDETDDTFRAFQPVTVSDSRQDLPLASEEAALDVGANNLVACTTTTGQQYLYEGRDLFDRFRETTEEIARLQAKLREGRYSSQRIRRLYRKRTRRRDHAQETLVRDLLERLYAEGVATVFVGDLTDVLSAHWCAEVNEKTHQFWAFRAFIDRLATTAEEYGIAVAVWSEADTTRTCPECGEREETERDGDVFRCPCGHEAHADLCASRTFLKQQAGEPAVGPMARPVRLKWDDHCWSELSDSPERESPNEERTNRSTGDGKLASVGTA

SEQ ID NO: 57144 - protein, 421 aa, unknown
  TnpB Polypeptide
VKKAKDLPYNFGVKMQIYPSSVQKKIIDKNIDFARFYWNKLVWANKEIAKLRHVGFAWPWVDARIAWLQEIANPNARALKQVYPFLNDKDLDINALMQAKSNYTASWNLCKKVKSVQPPKFHKKSDFGSYQTSNSYNSKKCDRATLFNGSIRFFDGSHVNLPKIRCVHIAFSKKRYARLKEMCDLGGELRLTKATISRDACGDYYVSFQIASDMRINAAFAKTSSKIGIDLNLENFLTDSNGNVVDNPRFYRQAKTQLAKAQRKLGKRCARAKKEHRPLRNARNYQKQRKLVAKIQRRILRRRNTFLNELSTTLIKNHDLVVAEELRSKNLLKNHALAMSISDVGWRTFLSMLEYKAEWYDKKFVAVDPKYTTQTCSECGHVMKGEHKLTLKDRTWTCPSCGTFHIRDENSAKNILTKALA

SEQ ID NO: 57145 - protein, 373 aa, unknown
  TnpB Polypeptide
MHKSTFQYRLYPTPAQATALHHALDECRWLYNRLLDERKLAWDETATNVTLYDQINRTVALKAERATLADVHSQVLQNVATRIDLAFAAFFRRVKAGEKPGYPRFRGYGHYDSFCYPGSGHRVEGNRVFLSKIGHVKAVMHRPLEGKVKTCCVRRTATGKWFVTFSCAVEDAPLPARDNAIGIDVGLASFATMSDGSTIANPRFFRRDEQALAKAQRRLAKEPKPEKGQRATPERRRRRRVVARVHERIAHRRKDFAHQESRRLVDDNGVIAVEDLAVNRMVHNHCLAKSISDAAWSLFAHFLSYKAASAGRQFIAVNPAYTSQDCSRCGHRQRLTLADRVYRCPCCGLEIGRDHNAALNIVTLGLQSLGARP

SEQ ID NO: 57146 - protein, 406 aa, unknown
  TnpB Polypeptide
MKLRYRYRIYPTNRQKWQLAKLFGCCRVVWNDALAFCQEQYKKGEKKPSHNELSKMLTQAKKTEEKEWLTSVSSIPLQQILKDLDQAYSNFFNSCKGQRKGQKVKSPRFKKRKSKQSARFTENGFQLRENRQIYLPKIGEIEVIWSKELPATPSSATIIKDSADRYFVSFIFEVNPEQLPKNDNCVGIDLGITVFATLSNGEKITSPKPLKKQMKRLRKLQRHLSRKQKGSKRREIARKKLAKVHAKISDTRTDFIHKLSTKIIRENQTIVLEDLNVSGMMKNRKLSRAISDLGWRSLRTTLEAKSIMYGRDFQVISRWEATSQKCSCCGLNGGKKELSVREWTCLNCGEIHDRDINAAINILVAGGQSETLNGCRRKSKTVPKKIAISSEASTHQKDKFEQLSLF

SEQ ID NO: 57147 - protein, 553 aa, Streptomyces sp.
VARGNGRRNRALRTLADPFTVSAPWGARIRDRLRLSIRDAEVLRIVGEHLGGYARADLAERVRVGRVPVKDNRRAKRKRELTGVSSSRWAGAITRASEDQYQLSLRCLFDELTSLRRAIAKIGKRLAVPCGRRVGGVRGYPSRSERAQKQCRLQVLTARLAEVERRIDAGHPAVVLGGRRLAKARHHLADAGLTETEWRERWKAQRMFLTADGESGAPYGNYTISVDPADGTVTVVLPEPLRHLANAPRGRYRLAGGVTFNHRREEWLDRADANSSVRYDIVSEPERGRWYLDASWSTPKELLPTPAELAATGTRLLAVDLNADHLAACVIDAHGNAVGEPLTVPTDLTGPASQRDGRLRRAISELIRLAHQYGCAGLAIENLGFADARATGRETMGRGKRGKTFRRTVSGLPTAKFRDRLSGMAHHAGLIVVAVDPAYTSRWGAQHWKQPLQQQSKTTIVTGHHAASVAIGRRALGHGIRRRPGVTARDQRIVVRRATGQAVLRPRALGTASPPRTTGAPHPGGKTCRDRSDQLALFPVSQDRSGRQPAIPV

SEQ ID NO: 57148 - protein, 667 aa, Streptomyces sp.
MQDAQMRKFRGKNKAPKWTKPDDGIVSVMVLPLAVTDPAELARLDGLYGAMWSIKRAVQRDARAKVDAYWAAYREREEQGAKAVRQRLGLSRESLERCAYTHLEESGHLKHHASKALAMHMADEVWNGVQRHLFPDATGQRFGRPKGGNWHGFTRIPGRARSHTTDNKWETFRLVGTLHSHSTAHTDGGLHLLMQPRRMPKPTVPEGRVPTGKVTASGKPATRKATWWDHTGPLAVVFAGGPESARGDLVLPVRIPQQPGQWARVQHFLSSPGRWHKVDLVRRRKASAPGGWVYEAHLMVLGPGYTSPSVRAMRDRAAQLDRIGGVDGNVSNLSVVSLPAALTGGKPVSTEITLTEAERTLLEKQAKKRRDRARALERSRRATNAAQYGLSRKQAKRAGRREAQGLKPKTVSVPGGARAARSDGVPKQAFRHDRLSTNYRVTRARQAEQAAGIAEHRRHRARLVAREIIAAHGPVLVVEDCDIRAWYRLWGKRLSQTTPGMLISALTVECEAAGGRLVRASTWSTALSQHCLCGERVSKMLREREHTCTACGLTGKRDLVSAALAAFVRFTDVDDPTTAYLDTAMSRHAQITYAQALEEALRESTTPSPKPLRRPGRVAVPRQQRRETPAPRTAGQRHRATPDEARSRGHAGKPGPRPGRNPQLTLW

SEQ ID NO: 57149 - protein, 458 aa, Streptomyces sp.
LHSHGGGARAAYNWGVAYVTAVWWQRKAEQSYGIPEDELTPWRSWSLPSLRKAFNEDKCTNPRFADWWEENSKEAYNTGLANASAAFGNYTKSKSGKRKGPKMGIPRLKLKGKARLTCRFTTGTIRIEPDGRHITLPRIAAVRLHENRADLRALIDEGNMRILSATACLDRGRWFVSLQVEQKHQLVKVARPDAAVGIDLGIKTLAVLADSDGVLSEEPNPRHLDRAQKQLRRASRIVSRRRGPDRHTGQQSSKRWEKANRARNVIHHRVANLREDTLHKMTTRLACEYGTIVVEDLNVAGMGRNRRLSRRIADAAFGEIRRRLTYKTRRHGTRLVVADRWFPSSKTCSRCGAVKTKLPLSTRVFECDACGLVLDRDANAGHNLVALAARTTGTGVAGDLDNAVEAESKPRGADRKTRATRPRRKAGTGRAGGAIPSPRAGKETGDRQHDTGAQLACW

SEQ ID NO: 57150 - protein, 313 aa, Streptomyces sp.
VPVPRARARGSPLVECEETPHARPPSEPLHALRPFPEVGADGGGSGRRRRGARLVKDALGWHIAFRVQTLEAKPEPHQGPEAGIDVGVTVPIALSNGQTYEHGEWLTGKEKATLLRLELRASQRKQHRKPGERTSRRLHHTYDQIAGLRAKAKSRALDWQHQTTTTIARTYGTVVVEALTITNMVKSAKGTVDQPGRNVAQKSGLNRAIHGEAWGRTVTMLTYKTARHGGTLYKVPAPGTSQRCSACGFTTPGSRESQAVFVCKNPDCGWSGNADHNAARNVLHLYRMGLALIPAAGRAVVRRAKRVKPAAAR

SEQ ID NO: 57151 - protein, 427 aa, Streptomyces sp.
LSGWGHTARALWNVALEQRVYLWEQRRYTLRSTEQCKQLTAARADLDWIGDFPAQAGQQVLRRLDQAYDNFWNPAHSAGFPARKKRGHRLSIPFPGQAVEVRKLNRKWAEVRLPKLGWLRFRLSRAIGGTIRNATVSRDGNGWHISFGVHTGRKPDAPNGKPSCGVDFGVAASAFVSTETQPRLMPPTLTANEKKRLKVLEQRKARQIAYAKKHSGGKYSRRLRTTITQIAKLTIRRANRRQDFTHKFTTDLAKNHGLIGIEDLRVKNMTKSAKGSAEAQGKNVRAKAGLNRSILDNTPGERRRQLEYKACMYGSVLVAVPPFHTSQTCGNPACGKVDPESRKGCGRLFACIHCGHEDHADHNASVEIEARARRTGGSDIDSTRSTPRVRVPATSRRRMREARPRELGGIARFHRGEDRQNVLLFVT

SEQ ID NO: 57152 - protein, 232 aa, Streptomyces sp.
VHRHRSVVGKVKTVSVKREGKRWYVVLTAVQPRPEPLPATGSVVGIDVGIANFLADSNGEFVPNPRHGRANAEALAEAQRRVAVFPRVRRDKRTKKHRAAVAKVAALHGKVRRQRLDHAHKAALRLVRVHDAIAHEKLSIANMVRAPKPKPDPDEAGSFLPNGAAAKAGLNRSIHDAGWGVFLAILTSKAESAGRRIIAVDPRNTSRECPECGHTAKENRPTQDTFHCQACG

SEQ ID NO: 57153 - protein, 637 aa, Streptomyces sp.
MTPGSNLPLNTVRVTVDVAAPVRLDVSGLLLAGDGKVRSDADFIFFNQPTGPGVNYRSGGGTAPDSITVDTGSVPPGIERIVITASPDAAGQTFQGIEPTATVRDAASGAVIASFTPPQLGAETALVVVEVYQRGGVWKVRAVGQGYSNGLAGIATDFGVSVEEEAAPAAAAPAPVVHRHRSVVGKVKTVSVKREGKRWYVVLTAVQPRPEPLPATGSVVGIDVGIANFLADSNGEFVPNPRHGRANAEALAEAQRRVAVFPRVRRDKRTKKHRAAVAKVAALHGKVRRQRLDHAHKAALRLVRVHDAIAHEKLSIANMVRAPKPKPDPDEAGSFLPNGAAAKAGLNRSIHDAGWGVFLAILTSKAESAGRRIIAVDPRNTSRECPECGHTAKENRPTQDTFHCQACGQGPISTPTHQPRPAPIPARPAGGRSAPAARTTSKSGRCQRPRTPVELDESQGGRRSPGFTPGLLIPPTNPSPPREWLTHAPGMPRPPLSPSEGQSVSNAVIRRIAASKKTLAGTVLALGVAGSMLAAVPAQAAPMNAKAIAQQMIKDPAQFAAFNNIVSRESGWNHTATNASSGAYGLVQALPASKMASAGSDWKTNPATQIKWGLDYMNSRYGSPTGAWSFWQTHHWY

SEQ ID NO: 57154 - protein, 490 aa, Hydrogenothermus sp.
MPIRAYKHKHDANKGKIETVKQILKEYRKTAQDISKLQWQIFFKEGKFNKNQNIKHISSKLSERYKQTCQYQVVSILNSYISNRQNDFVEIVYNSNLDENTKFILLTINKSKAWFNEKLKEAKLKDKKTKKVVKTLPIEKHHYKLVRKIIKQTFKKNKFPTFKHISMQLDQKVAKIEKKKEGKAKEFDYWIKLSTLEKGKPIYLPVYKNSYFESKEGKHLNFLQINEKENDIEVVFLKDLPKKTNYTPQKEKISIDIGLKALFAVNTGDLYGRQFHKYLKHYDRIITQLQANLQKQGIKPSESKRYKELNRKIKEYIKNEINRLLNRIFKIYQPKEIVIENLNFQNSELSPQLNRLLNRFGMKIIKQKLKDFEERFEIKITYVNPEYTSQTCSSCGYVDKRNRKTQDKFECLMCGKKINADVNASRNIGVRSSNPMKFLKRRTVLRMLIRAYLSGAKNYACSSRACEVILSNRFFIGYYEPLKITSKEKS

SEQ ID NO: 57155 - protein, 376 aa, unknown
  TnpB Polypeptide
VRKAFKYRLYPTRQQSEAMSKMLETHRRLYNDALAERKNAWEQEKRSVSYNEQSAHLKDDRMTNPYLAETNFSSTQATLRRLDKAFKAFFRRLKAGETPGYPRFKGQHRFDTVEFPSYGDGCKLEGNRVYFQHIGKVKIKLHRPVEGRIKTISFKREPDGWYVILSCDLGDVTVGPSVNPPVGIDLGLKAFLVTSEEQAIEPPKFYRQAEAALRRAQRRLSRRKKGGNRRRKAAQQVAKLHQHVANQRRDFHHKTAFVLVRQYGAIIHEDLNVKGIARTRLAKSTHDVGWAGFLAILQHKAEEAGVKVIAVPPRNTTQACAECGALPDVPKTLADRVHVCPHCGYVADRDFNAARNILRLGLSRQALTQRVAVSVA

SEQ ID NO: 57156 - protein, 370 aa, Clostridium sp.
MILAKKVRIIPSIEQEQKLWQSAGTVRFIYNWTLARQEENYKNGGKFICDNNLRKEITILKKNNLSWLNEVSNNVAKQAIKDGCLAYKRFFKGYSDKPRFKSKRKTKPSFYNDNVKLKVKRNMVLIEKVGWVKTSEQIPMSVNYANPRVSFDGKYWYISIGIEKEQPVVKLTDESIGIDVGIKDLAICSNRMIFKNINKTSLVKKLEKRLRRLQRKISTKYELNKEGRMFVKTSNIIKLEKQIRLLHRKLSNIRNNHLHQATTKIVKTKPSRVVMETLNIKGMMKNKHLSKAIAKQGLYEFKRQLQYKCEFYGIEFVEADKWYPSSKICSECGHVKAKLSLSERTYICEECGAVIDRDFNASINLSRYSA

SEQ ID NO: 57157 - protein, 375 aa, unknown
  TnpB Polypeptide
MQQTVTAKLQIVINPSDKRIICDTMKAYSYACNYVSEYIYKTHNLSRYSVQENTYYHVREIYKLRSQMAVSCVRTVIAKYKTILENQNEWIKPVFRLPQLDLVWNRDYSLNTKNNTFSVNTLNGRIKVRFYANGYEHYFSENCKFGTAKMVFKHGKFFLHIPVTYEINELTMSEVSNVVGIDRGIRFIATTYDSNGKTNFYDGNIIKQKRGHYKALRKELQQVRTPSSRRRIKAIGHRENRWMQDVNHCVSKALVENNPNGTLFVIEDLTGIRSATEKVLVKNRYVSVSWPYFDLEQKLTYKALKHHQLVEKVNPAYTSQTCPKCGHTEKANRNKKIHLFCCRNCGYKSNDDRIGAMNLYRMGINLLVPNTVAME

SEQ ID NO: 57158 - protein, 360 aa, Okeania sp.
MKSIRTKLKLNNQQKTLMAQHAGYSRWCYNWGLSLWNAAYRNGYKPNARKLREVFTNHTKPLYPWMKNLSSKVYQYAFINLGEAFKRFFKGLGKYPKLKKKGKHDSFTIDNCGKPIELNGWNHKLPFIGMVKTYEPIEATTKKITVSRQAGDWYLSCSYEFHSHTTPKKTDVIGVDLGVKTLATLSDGQVFESVKPLQKFEAKLSRLQYLNRHKEVGSANWKKAQQKIARLHRKVANIRKDALHKLTTYLAKNHGSVSIEDLNVSGMLRNHKLAKSIADQGFYEFRRQLGYKCQWYGSELVVIDRFFPSSKTCSNCGHVQDMPLDLRTYDCPECGLSIDRDLNASINLRDAVGLTVNACG

SEQ ID NO: 57159 - protein, 280 aa, Marinithermofilum sp.
VQHGEKPGYPRFQGKNRYDSFTYPQLGFKIEGKFLKLSKIGNVRMKLHRQIKGKIKTCTIRRKNGKYYACFSCEVEAKPASTDKRVGVYLGVKHLAVTSDEEYFDHPKYLRKSERKLKWLQRMVSRRKMGSNRWRKAALMLAKCHEYIANQRKDAAHKISRYLVDNYDWIVFEDLNIRGMVKNHQLAKSIADAGWRMLVQFTAYKAEWAGKQVIAVDPRNTSQVCSECGRIVKKTLKERTHRCSCGYVADRDVNAARNILHKAIGYVPELRYGQLELNLF

SEQ ID NO: 57160 - protein, 324 aa, unknown
  TnpB Polypeptide
MGKNLSVTPARYKSEFPWLKEVDSLALCNAQMHHFFHDVSVGFPKFRSKKKPVKSYTTNCVNGNTVLQNGRLKLPKAGWVRIRQHRKIEEGYQLKGATITQEADERYYVALLYSCEEPVNEIRKAESAIGLDFSMKAKGKHHACDACPGYHTYCHSHPPCRYTIGVFARPAPRRGAGSFNIQLRRQVDLIGDVPAVLFALTHTLGEEILDLPVHRAEIVLSPCGKGLVELCVQAQGDLLFGLCHQYRLPLFTIGCASRLPQSTTSRLETMAAFRSSSNSTTLFSLSRSSAISTMPTAPSTIILRASMMALACWRWSITAAISGA

SEQ ID NO: 57161 - protein, 397 aa, Coleofasciculus sp.
MIVLEFKLKGRHEQYRVIDDMIRTAQFIRNKALRYWMDNQGIKLSDLYKQCAVLAKEFDWAGKLNSMARQASAERALIAIQRFFANCKANSPGKKGFPQFKKCTRSVEYKTSGWKLSSDKRHLTFTDGFKAGTFKLVGSRDLYFYASEEIKRVRVIRRADGYYSQFCINVERVEEIVPTGKTVGLDVGLAHFYTDSTGETVPNPRHLQKSEKALKRLQRRVSKKKKGSANRRKAINRLGRKHLKVSRQRKDFAVKTALCVVKSSDFVAYEDLQVKNMVKNHKLAKSISDAAWSQFAQWLQYLGKVYGKTVVAVAPQYTSQDCSNCGATVKKSLSVRTHVCGCGTVLDRDHNAALNILAKALRQTGIDLNTAGHAGINAFGQTDLYSRVVTSTSKSTG

SEQ ID NO: 57162 - protein, 360 aa, unknown
  TnpB Polypeptide
MSDLNKHIVSLKNDTSPWLKEVNSKVQQQSIINLLNAYNNYFKNKKHFKEPVFKSKYGKQACRFPVDGISRQCFENGNLDLVTSLKGIKYRCSDEYHELLKDFRQNIKSITVSKSKSGKYHASVLIHIEEYIKPCGTGEVGIDLGIKTFIVTSDGEEIDQPKWIRDNQKKLSRLQRSHSKKKKGSKNKEKARLKLARFHERLTNQKEFFMHKTVNKLIDDNQIICLETLNIVGMMKNHKLARAIQEKNIGRFNGLIMEKAEKRGTEIIKVDRWFASSKLCSVCGHKHDKLELKDRVWTCEKCESVHDRDFNASMNILNEGLRIKNLVPKGPNVGMSKPELEREIVLKDCGDVGLPVSVKQ

SEQ ID NO: 57163 - protein, 381 aa, Microtetraspora sp.
MVVQVKLLPDTATQAALRETLALCNQAANHTSRRAFTTGVNGKTSLQRLVYGELKAMGLSAQPAIHVVRKVAGAYVTLKANVKAGNYGPEGAKRRAKVESNPVRFRKDAAQPFDDRCLSWQVDAKTVSIWTARGRSGRIPFVCSPAQLEMLRAHRRGESDLVFRGGTWYLYATCEVPEAETFEPEGFLGVDLGIANIATTSDGDRRVGRQLNQVRHRNRRLRSRLQKKGTKSAKRLLRKLSGREARFASDTNHRIAKSIVTEAERTCRGIALEDLGGIRERVRLRKPQRVTLHSWAFHQLGTFIAYKAQRCGVPVVYVDPAYTSQGCSSCGHIDKRNRPDQATFACTSCGFAEHADVNAARNIAARGVTGWAVSHAADDAA

SEQ ID NO: 57164 - protein, 369 aa, unknown
  TnpB Polypeptide
MIRAHKIRLNPTPEQETYLKKACGISRFVFNWGLARWKAAKEQGVVAYGPMAIKKDFNALKREEFPWVMEVTKNASEDGFRRLNAALANYFDSKSGKRKGEKVHFPGFKSKKKAKRSFTLDYQRFSVDGHWLHISKLDDPINMAEVLRFAGRLKWATISNTAGKWYASVQVEIEPVLPASDVKKPSVGVDVGIKTLATLSDGKQFENQKLLRSDLNRLRRLSRSLSRRKQGSNRWWRAKNKLARFHARIADQRGDVIHKMTTEIAQDYRIVIVEDLNVKGLLRNRRLALALSDASLGEILRQLGYKADRRVKVGRFFASSKTCSACGFINQALVLSDRQWNCQGCGSLHERDWNAAKNIETEGLRLIAA

SEQ ID NO: 57165 - protein, 402 aa, Escherichia sp.
MKRLQAFKFQLRPGGQQEREMRRFAGACRFVFNRALARQNENHEAGNKYIPYGKMASWLVEWKNATETQWLKDAPSQPLQQSLKDLERAYKNFFQKRAAFPRFKKRGQSDAFRYPQGVKLDQENSRIFLPKLGWMHYRNSRQVTGIVKNVTVSQSCGKWYISIQTESEVSTPVHPSASMVGLDAGVAKLATLSDGTVFRPVNSFQKNQKKLARLQRQLSRRVKFSNNWQKQKRKIQRLHSHIANTRKDYLHKVTATISKNHAMIVIEDLKVSNMSKSAAGTISQPGRNVRAKSGLNRSILDQGWYEMRRQLEYKQLWRGGQVLAVPPAYTSQRCACCGHTAKENRLSQSKFRCQVCGYTANADVNGARNILAAGHAVLACGGMVQSGHPLKQEPTEMIQATA

SEQ ID NO: 57166 - protein, 478 aa, Streptomyces sp.
VLKTWPADPARRTPQEWDAVREAVPGGRFLPSSVIKSRTRQVAAFVRKHRRLPADVFKLEPSPRIARMLLLSACGGQQASIERADDPGRALLRLQLPTRPDPASYKDWTSVACPITLAPTVPAGAVLHLPTLRIHQGRVRADLAYTHAVPQTRRSGHTVALGVDWRLNTLLSAGAARLDDDGRITGLGSGAQFRAAGVVAKQHRLRRLSEYLHAKADRYRRLIDENEQHPLIAKHRVLTDEIRHVCDRRSDLNDALARAAARWAVDQAFAAGASVIYLEDLRSMEAKGMGRTMNTRLSQQVRGQIVDRLQHLAAEVGIAVVIVPAHNTSKRCPKCLTPLRHRKAPDRPTTTGWTWAICPDRSGCGWQGDRDQGAWRRIAARGLTHQATAITDRASGAMVIRSVVKETESKAVITAAPKTSRNDRSKTGPTRHHPHAPRPGDAGHPPPPAPQDRRASVRRDTHQRAGTGCPAQPTGTRT

SEQ ID NO: 57167 - protein, 438 aa, unknown
  TnpB Polypeptide
MSEEKNLKIKDTLRATKEKRSQMDCCVISVKVQENRLSNAKREKLQCCFLEAKWLSNAVIASETLTLEDTSLVQIKVKDSFETREIKNLSAQMKQSVVDNIKTDVLNLSKAKKKGLKVGKLQFKSECNEINLKQFGHTYVIKGKNKIRIEKIGILVVNGLEQINLDEVEFANAKLIQKPSGFYIHLTVYSNKQPQEQTEKEILGLDMGIKDQLTFSNGVKVNFYLEESEQLKGLMRKLSRQVKGSNQYKRTLNRIKRIYEHLNNKKNDVVNKLNSVLKQNYIICFQDELLNQWKRKKSKRRFSFGRKVQHGILGRVKDKLKKNSSNVMLESSVPTTQTCPVCGCLTKHGLDKRQYHCNHCGFENLDRDVHSANMMILLSGYGTYRSLNTDTVSTERMVGFLNNLSHLGVVVSSANSMQANCFYVVGSSHQNRLNHDFG

SEQ ID NO: 57168 - protein, 406 aa, unknown
  TnpB Polypeptide
MAERRRFCTLRLYPTPEQEDLFVRTLGCCRKVWNLSLDRHNLLQGEKDPSFDVNDAMRQMTVWKRDPKYTYLSEAVAQALQQSVRDLGQAFVNRRKRPDHFGMPRFRRKGGAEGFRLPQGWRLDSSSRRLYVPKAGWVRYRGNVHLAGECKSLTVKRDAMGHWSSFVQVKIEEPEPTLDLHDPVGLDRGVVYLAALSDGTVYPGVHALRDLEARIAREQRRLSRKVGSKKGEPKSRNWRKQRKKVARLQAKAAAVRRDTLHKVSANIAKNHGYVAVEDLRVASMTARAHGKGRSAKASLNRAVLDQGWSAFAAMLSYKLADRGGLLVEVPAAYTSQGCSVCGHVDAASRKDRSHFLCTRCGHTENADVNAAKNILRRAGQARIACEVSGERIPPAAGTAKYPQVAA

SEQ ID NO: 57169 - protein, 238 aa, unknown
  TnpB Polypeptide
VTRSGLSNQSPCLILDWIHHWLLTKPPSTLARTISSPVPRLLGTSTSTTVGSCSDGSVRRPTDRSPPQSKLREGRYSSKRIRRLYRQRTKRRDHAQNALVRDLVERLYDEGLATVYVGDLTDVLDTHWSVRVNEKTHNFWAFKEVHPPSRVVCEEYGISLEAEPEAWTSQTCPECGDHETTVRHRDTLTCPCGFEGHADLTASETFLRENSDTEVRPMARPVQFEWDDHEWSGETIPS

SEQ ID NO: 57170 - protein, 417 aa, Bacterium sp.
MSEEDKKKKFDKQRKTLLKTKEKRKSQRPLVFELKIDTSHLNKEEQIKLKMFFVEAKWIYNHVLAMENAFEYDSKSPLVKVLNKDREIEERKLKYLPAKNRQDVHNTLKWNIKGLHSTKKIGKKVGKLKFKSEYTAIELSQYGVTHKITGRNRIKINGIKRYLIVRGLQQIKSQYELANGKLIKKPSGYYIKLTCYINITSDHIPRIKNPSTGLDFGIKTTITTSVGEKYNISIGKSERLRRIQRKLHRRRKSSKNRYKMQMLLRREYEYLNNCRKDKANKIVSKLLRENQLVIMQDENIKGWHKGLFGKEVQYSALGTIKSKLQKSKQVLIIDKYVPTTKRCYTCGNMVEIGLSERVYHCDKCGLTEDRDIKTAKTVLYEGLSSVNYIPIPTEHREITPVETKPLLQTSGCGASIV

SEQ ID NO: 57171 - protein, 304 aa, Streptomyces sp.
VVPHPAHHAHLGHRRQGRAGRYFASFVIDTDPAADATRMPDTDQTIGIDLGLTHFAVLSDGTKIDSPRFLRRAEKKLKKAQQELSRKQKGSKNREKARLKVARAHAKVADARRQFHHQLSTKLIFENQGIAVEDLSVAGLARTKLAKSVHDAGWSSFISMLEYKAARYGRILVKIGRFEPTSQTCSTCGVKDGPKPLKVREWTCTACGSVHDRDHNAAINVKTAAGLAVSACGAPVRPGAIPAQREETGSHGFPTEPRASQSTLNNVRWNQIMAASLVVSVPVVAGFLLLQRYLVAGLTAGAVK

SEQ ID NO: 57172 - protein, 486 aa, Neobacillus sp.
MSKKENEQAITYTGIILNPCMNESMILDEIMRKFQSAKRFLRERIFDGLNRKQAVAKAKPLFLNNSRYMRDAFLEAESSISSQKELLPLYIEQYKTSIKKIEKKIEKLQKSTLSNKEDLILNKQSRIKKLSKKMNYYQYHIENGSVPKVVDGTKKRLALLNKHKITKQEWMDSRTNALFSRGEVSKGGNENIKLSYLQDRSVEMDVLNPLSSKRNDRLCFIVQFPEKYIMSIHTNLSSGKAYSVRILREDGKYYVHLTFIQKLNTSYNFSNGCAGIDINPDNLAVTIVHPNGNFRKSKVFWMNDVNSVPATKRDWILGNAVTSAIKWVKSNGIETLAIEDLHFKNDLSKNTTFNRRSSNFVYRKIITTLISKGIKEEVFLVHVPAYYTSLIGRVKYQKSYGLSIHQSAALVLARRSMGFKEKIPHQLMSVLFAEEAKKGHQISDLFKHWKKVQAWFSTVKNQAYQNHDKYLHWYIDDFIYYAWIQG

SEQ ID NO: 57173 - protein, 442 aa, Neobacillus sp.
MQLDGKVSSFIEKRKLELRELESKTVYLQKILAKKTTQKDQLHQKLKEIPQTHSSFSKKIKKFRNLKFYLHQKKRRLRNLQHKIEKLKLDESNNKIRICFGSKKLFHKQFYLKENQYKDHQEWRTDWLEARSGQFLVIGSKDETLGNQTATYDLKNTLRLRVANYFVDKYGKYVEFPEVNFPYGQEWLDKAKVPHMGHTRSGRPQKYYSSITYRFIKQKKGWYVNATVERETPNVGTSNINGLIGIDVNAGFLSVCEIDRFGNPIKHWNIQVPMYSRRKEQILASISNALKEILDYAVLVQKDVQIEKLDFSKKKTQLREKGTAYARMLSGFAYSSFQQLIKGKAKKTGVKIKRVNPAYTSQIGQMKFMARYGLSSHEAAACMIARKGYYFKTEKPKYDTILSFPKNFDKHQSNFSNWRSLTNHIKKHYLFKDKIELLKADR

SEQ ID NO: 57174 - protein, 379 aa, unknown
  TnpB Polypeptide
VHVGKTAQLDELSHECGVLYSQTLVFFWRTVRHKGIWLKEKHLKGLFTSHKLHAHTSDACVEAFFASLKSWRERKKADDPDAHPPRRRKWYFRIEYKRSAMSLKDGKLRLSNGRGNAPLILDWAWDLPQTVVIHWTGTQYEAIATYKQEQPVAQPQGEKVAGIDLGEVHMAVSHDGEHTHILNGRLLRSKRQYRNKLQAKLDSRIDGLMKKGSRRRKKLIASKKRRLKKIEHQIKDIEHKQTTRFISTLRENGVKTVVIGDVRDIRQDNDIGHTNNQKIHQWSHGSVRFKLTYKAERLGMQVALQEEHYTSRTCPCCGYVRSKVKGRVFACPKCKWTYHRDGVGAINIRQKYLGQFPVVGAMAPPTGIRFRPHACVARS

SEQ ID NO: 57175 - protein, 639 aa, Streptomyces sp.
LPSPAAPPRWPRRGTATDWPSGRSSDRRCGRGRSGRESSSYFPCVEAPGFSRVRKRSSGSEPGCGGVPQREAVTCACVRIVTDRSLRGMGFPSVKRSFKYRFYPTDAQAVELSRTFGCVRKVYNLALAARAEAWKASGERMGYGQTSAMLTAWKKTEELAFLAAVSSVPLQQALRHLQSAFVGFWEKRSQHPRFKSKRKSRACAEYTRSGFRYAEGRVRLAKMDEPLDIVWSRPLPEGVAPSTVTVSCDSAGRWYVSLLCEDTVAPMPATTNAVGIDAGLTALLTLSTGEKISNPRHERKDRERVTRAQRALARKEKGSSNRIKARTRVARIHARIADRRRDFLHQLTTRLVRENQTLVIEDLTVANMLRNHTLARSISDAAWRELRSMLEYKTAWYGRELIVVDRWFPSSRLCSACGVIADAMPLSVREWTCETCGTAHDRDGNAAVNLLAAGLAVAACGADVRPHRESSSRSGRSVAKQESPRVSVGTPLLGRGGSQVVHLNEGRVRVRHGWTVRQSGELGPRSLPLRSRRCQPGGRSNRRCNCLRSPRRMRGSISGVCGERCARLLRPAQKIQASPGGASGSIGAPGCSAHPEALRGRESSRATMKARWRSSAMRTKSSAGEDRPRWNRWSSTVRR

SEQ ID NO: 57176 - protein, 406 aa, Nostoc sp.
VFIYEYKVNPKPQQITAIDEAIRTSQFVRNKVLRYWMDNRGVGKTEMFRYNTLLRKEFKFVEELNSHACQTAVERVLKAVNRFYDNCKKQIPGKKGYPRFKKNTRSVEYKVSGWKLSENKKNITFTDKKGIGTLRMIGTRDLNFYQLEEIKRVRIVRRADGYYVQFSVQLDPRDTVKPITPSQKAVGIDVGIKYFLADSQGNIEPNPQFYRQGEKQLNQLNRKKSKKYRKGQPQSNNYRKARERYARKHLRVSRQREEFVKRVALRLIKSNDLVAYEDLNVKGMVKNQHLAKSISDAGWSKFRSWLDYFGYKYGKITIAVSAHNTSQNCSNCGKKVQKSLSTRTHICNHCGFVEDRDINAAINILQKGLSYEVQLGGNLRSDFALSTVGHTESYKLGEFDPLASLE

SEQ ID NO: 57177 - protein, 368 aa, Hymenobacter sp.
MISYRAEIKPNKQQTDEINKTIDACRSVYNKFIEVNKFRYDNGLKFLNHKKFSVWYNNEFIPNNKDKKWTKEVNTKATKQAMANAENAYVRFWKYNNGYPNFKKKQSNGAYYLIGTIKVERHRIQLPNLKWVKLKEKGYIPKSNVKSATVIKESNRYFVSVLVDEEPKPILKKYQTEGIGIDLGLKDTLFTPKGVHITDLRKNKRLIKLNKSLKRQQRNLSRKQKKSNNWLRQLLKVRRLYRKIANIKKDIKQKKVLEIVRENPQFITIENLNIKGMMKNRKLSNSFQQIGLGYIIEWLKWKCYQYGIELRQVDRFYPSSQICNCCGHKQKMPLNKRIYKCENCGMIEDRDINASINLKQAKDYTVIV

SEQ ID NO: 57178 - protein, 372 aa, unknown
  TnpB Polypeptide
VKLLKSYLYRIYLTSIQKKKFGELYAKNVFLFNELVDEKKKRIVNHEDEAIYVKDFVARFEELNNGNLVSYISTYKQVNRLFSKFKETELDMAHKNPNKLPRKIHFDIHLNNIKWDKNHLFIPRLGNFHARIHREIPQNSEILSAIIEEHNHNEFYINLLVERDVMIKKVFPKRAVGLDYSSPRLFYSSESEVGDSYKVVNFHQNKINRIKRMMSKCILNSANYTKLKDKEEKLYDHVTRKRCLSLQRAANECLAKYDVVGVETLDMTEIASHYHLGKNTYLNSYSRFLKYLEYKAFEKGKYFIKVPKYFPSSRLCSHCGLIKEKLELSERVYKCDCGLQIDRDLNAAINIKEKALEMLEEKFKKTKLIKTM

SEQ ID NO: 57179 - protein, 422 aa, unknown
  TnpB Polypeptide
LVYNTKQNTFTHVESNANVEKHVINRQHRFWKECDHLALQSKHLYNSANYVQRQYFFANNKYYNSINIYHQTKNLEAYRYLPTKVSKQIVRRVAEAWKGWLSALKDWSKHPEKYLSKPKIPGYKRKEHGRNVVIYPIDAISKPALNKGNVKLSQTNIELETQAQNVDQVRIVPKLDHYVIEVVYTVNDIPLSHGKYLAGVDLGLNNLMAITSNHPGIKPLLINGRPLKSINQFFNKRVAAAQSIEASRQIKELNSKRNRRIDNYLHTASRRVIDWCHLNEIGQLIIGKNPGWKQSINIGKKNNQAFTNIPHAKLINLLTYKAKLAGIAVTLTEESYTSKASALDDDNLPTYNKKTETKPVFSGKRVQRGLYRASTGKTINADTNGSINIARKVIPDFMKGIEGLPFIPVVLGLWTKITNVDV

SEQ ID NO: 57180 - protein, 341 aa, Mycobacterium sp.
VIRSPASAVRSASSTSSKADWSRAIAMFLSVVILGRFTTETHAMALLRQGPTRRHHLHHSPGRSRGQDAARPRARSPHGVVGVDVGVKADALLVVATPDGVQVDRIPAPKSLTAAQSRLRVLQRRAARQHGPYDFQTGTRRQPSRRWRTTQARIGRTHAHAAAVRRDVLHKATTALAQQHQVIVVETLNAAGMRSAGGRKRGLNRALADAALAEVRRMLGYKTRWYGSHLEEADRYFPSSKTCTGCGRRKPNLTLADRVFDCEHCGTRIDRDLGAAINLARLGEPSWGEQSPAGSGPVAGRGATHETEPAPAGDAAGDEASTPHHHPVDQTGTASPQGEAA

SEQ ID NO: 57181 - protein, 229 aa, Mycobacterium sp.
MARFEVPEGWTAQAYRFALDPTPTQLRGLASHAGAARFAHNHMLALVKATMDQRAAERSYGVPESELTPVLGWSLPALRRVWNQRKAGCAPWWGENSKEAYNTGLDALARGLEAWSTSRRGQRKGRAVGFPRFKSARAGKSVRFTTGTIRIEADRRHVTLPRLGAIRTHESTRKLARRIEAGTARILSATVRQDSAGRWHCALQVIVEAKGHVPWSGVRAVACPRVALW

SEQ ID NO: 57182 - protein, 146 aa, Lactobacillus sp.
MDEVKVVSVFKEKDNYYAALPYEEEIELKAKTQQKTAVDVNVGHFNYTEGQINILPVKLQKLYKRIKHYQRMLARKREVNGKLATKSNNYFAVRTKLQRDYRKAANIQNDLLQKFTTKLVNNYDQIVIEDLAVKEMMMTHVASKGM

SEQ ID NO: 57183 - protein, 372 aa, unknown
  TnpB Polypeptide
MHKMFQYRLYPTKKHVTKLNNTLDECRWLYNHLLEKRKDAYEQRGESLTCYGQITTFSILKEEHPSLAIVHSQVLQNVAVRIDLAFKAFFRRCKAGEKPGFPRFRGKDRYDSFTFPQSGFSITHDDRVTLSKIGSVKMVYHRPLKGKIKTCTVQRSSTGKWYVCFSVECEPQRLPEIATQVGIDVGLKTFATLSNAEEIPNPRFFRKEEKALVRVQRTHSKLAKGTPESRKHRKVIARVHERIAFRRDNFTHQESRQIVDRFGVICVEDLQVNRMAHNHCLAKSIHDASWTGFFEKLSSKAEEAGRQFIKVNPTYTSQDCSRCHHRHKMPLRERVYHCPCCLLVLDRDLNAAYNIKALGLQSVGLPLEAPRL

SEQ ID NO: 57184 - protein, 480 aa, Calothrix sp.
MSFKSKEQKELDKEKNKNTYVSTVVQHLKLSNLGYAVISDILEHANSLYNTLTYNLRQGFFVYNTLNFQSIAYDLQTDFKENYHYKMLQSQAAQSVCHKVAENFKSFKQLLDKHYVDGSKKPNLPGYRISGGMFEVTYPGQTIKIEVEHGIRFAIISTGIQFRKQRKEDVVGTKLNEYIKLRVPDSVDTTTLVELTITSKHRQIYAHWVCRKKNVHVRSKFVTTLDKSNVLGIDIGLNNFVTCIPNTGEQGFIINGRPLKAINQFYNKTVSKLKKGKDVNFWSGSLASSTQTRNNQVRDFIKKSARTIINKCLESGIGKIIFGWNEGIKNEIDNGRVNNQNFVQVPFTALRDTLKYLCERYGIDFIVVEESYTSKMSFFDGDELPVFGKETEAQKKLKPSGRRTRRGEYKTATGIVINADAQGASNILRKAKIDTSKITYKVCQVLKTINIWIGKKLPSRKGTVASLSSSTAIGLTEPSQ

SEQ ID NO: 57185 - protein, 510 aa, Calothrix sp.
VLAGYVYKLRPDDEQATKMDNWLDMLRSSYNWCLNDRIEQYYQQYICGDYCDLRTKAEACALTCFVSKNGASGEPWKLDNSEVEIIGECCLLPYDLNNLPYSGKTPRRSAGDIQITTLPVLKKARPWFKDIDSTVLQQNIKRLDTAYKNFFEGKGFANFKNKSNFRSFTYASGVRVEGNKIYLPKLGWMRFYNSRPIPDGFTIKSVTVRKKSNGYYVSIRIEDKSVPDYIPLPIEQVNTAVGCDVGIKKLVSLSDGSQVKNPKFSTNKKMRRRMKIRQRRLARKKKRSKNRKKAANVVGRLHQKISNQRTDYQWKVAHQIVNKADLVVFEDLKVSNMKKRCKPKFDSDTGKYLNNGQSRKVGLNRSISDAAWFELRLKTEYVAAKSGKRFEVVPPHHTSQLCPECHHVDSSNRDEEKFLCSVCGYAADADNNAARNIKQRCLDKFNIKLTLKPHIKKEKAVRRDLPEPEQLTLGLILFETPTCEVTRVQRSYVRARNSKRSQRTEPLEAA

SEQ ID NO: 57186 - protein, 220 aa, unknown
  TnpB Polypeptide
VCFSCADVPIQPLPPTGQETGIDLGLEVFATLSDGTRIFHPGWYRKAERALKTAQRRVSHRKRGSNRRRKAVALLAKAHQRVRRQRQDVHRKTALALVRENDTIYHEDLQTANMLKNHHLAKSIQDAGWSAFLTLLSYKAACAGRSVIAVPPAYTSQTCSGCGAMVQNGLSVRWHASPECGTSLHRDHNAALNILALGKQQSAVGQTAQASTWPDGASVA

SEQ ID NO: 57187 - protein, 496 aa, unknown
  TnpB Polypeptide
MRAQTTSFVVQTKLKLPTSVENYLEKSFNIAASAYNEALSFGLRRFEAIKQNPLYQELLEKRRDAGVQKECDKALFELRKSYELTEYDLQTYLSCRRKTLNSPYQKLNSGELQVIASQAYKTLEKVLFYKIKAHSLRFRSKYDLNVSYRNRVNTTGTRLVKSDRQGVTYRLYLHKMSTFVDIPIKAFNRYQQESLLRSEKIKYVQIIRKTIRGKRVYILQIVCQGYPPAKITRGNEIIGIDPGISTIAYASNSEVALVDLVPKNINQKEKLMKLLDRKIERSRRVNNPDCYHGDGTIEKGARFKRPSNRQLRLQVRRLKAYRSLSEERQKLQGQLVNRIVSQARIIKIEDLSVKGLQRRSREIRINPKTNRPFSRKRFGKSIFRAAPSAFRNALRTRAQQLGIEFEVISPKDVKPSQYNHITQTFEKKPLSTRIYDLSEEWIGVQRDLYSAFLIGHIENGHYEQEQLTQDFPKFYRQMKKFLHQPPKTRRLVWYLN

SEQ ID NO: 57188 - protein, 370 aa, unknown
  TnpB Polypeptide
MKKVLDDLCDYRRYCWNKGLALWNDMYDSYLVLNDEKLKPTMNKVRNEMTVDKEDWQYLLSSRCLYQAIEDLGKAWDNFFNKSMKDWGKPKFKSKKDARQGFKTDRAKIVDGKLRLDKPYGTKDWYDIKFKGAKSLDGELKVISIYCENGKYWASLPFEVEIDKKDKTGKKTAVDVNVGHFDYTDGQINTLPNHLNKLYERINFYQRQLARKRIVNGKNATKSNNYVKTRAKLQRDYRKVANIQYDIVHKFTTKLVNDCDKIVIEDLDVKKMQMTHVASKGLQRSLFGLFRKVLTYKVNWYGKELIIADRYYPSTQRCSNCGNVKTGEDKVGLYGNQKHKTKHNEYICYECGFEVDRDKNAVKNLLDLIC

SEQ ID NO: 57189 - protein, 392 aa, unknown
  TnpB Polypeptide
MKRTIRVLLHTTPAQYAALTETTRLFTAAFNAVCTYGWEHREKNGVALHHATYYDTKAASVPLVSDLIIQARVKATEAIKSALALLAKGRRVSGPHAHDCPPRYNLHTFTCDWAGRTVRLSTTQGRQTVPFDVPAYASTYVGCPTDTADLLSRKGRWWLHVVVTVEAPDATPTDAVMGVDLGIVRPAVTSTARFLGERRWRELEARTFRLRRKLQAKGTTSARRHLKRLSGKTRRRRRDHDHVLSKRIVQATPAGGTIVLENLTNIRSRTKIKKGTPTSRRIHGWSFDQLQGFVRYKAEERGLTVALVDPRHTSQTCSACGYQARNNRRSQGDFWCRQCGYRLNADLNGARNIAAKYLAIRGTPPGGGLPVMQPLVSDVSHQAVLPDASRLL

SEQ ID NO: 57190 - protein, 378 aa, Lactobacillus sp.
MVLKGIKLRIYPNQEQQTQIKMNFGYNRFVWNKMLNMMIKRYENNPEAPFLNAFTLNNLLPSLKIEYPWLKKAESTSLQATNHDLVESYKKFFKEHSGFPKFKSRKFPKQSYTSKMGIRLINEHQIKLPKLGLMRFKCGQIKFGKIKNVTIRLSSAGKFYAILLVDTDIAELVKTNHFVGIDMGVADLMITSDGVKYPTIRFDKALSRKKHYWEKRLARRRLQAMKEIAWDHHNKVAEPRELSDFSNYLKAKHMVAKYSEKITNQRNNYLHNLTKQLVEQYDVIKIEDLKTKNLLRNHKLARAIANQSWRELRSQLEYKCEWYGKQLVTVNPRKTSQICSDCGYDDGKHTLDIRQWTCPKCGVQHDRDINAAKNILSA

SEQ ID NO: 57191 - protein, 469 aa, Glycomyces sp.
VKVTRIAYSAGLNPGKYAQLVEQARRLGVVRAKVWREYGSVQGVGVGGRAIRDRWMRDGTADGFGVLANAWKETVRDAVADITAHCEAAKTRARQAIHRRTGDEAERKRLYTALKCDTWTTDPFLRRVMRRCWRRSRTRITNQIIVRSDQFKTYTLTDGGNVWLAIPGLERRSTVKIPLGTTVAPTGTLRVILRDGRLEVHYAIDAAEIPSSRRPVGAATIGVDKGYTEVLTDSDGHHLGTSLGKLLSAESDYLRVKNARRAKIHSVAKRAADDGDRAKAERIRRSNLGIVKRRRRRTRFEHQVRTETFNAVHAVTDKAHTIVAEDLTRTFAARHRFGKHTNRRLAAWTKGVTAEALANVSERRGSALRLVNAAYTSQVAPCCGVLGRRAGDRLHCTECGAVWHADHAGAINVLERDGDPDISLWTPHARVRQIIQERADRRRTRLPVQDSSPPRAESETSDSISNDHE

SEQ ID NO: 57192 - protein, 212 aa, Bacillus sp.
VSLLVETEVQEFPKTHSYTGMDVGLKDFAISSDGTTYKNPKFFRLLEEKLAKAQCVLSRRMKGSSRWNKQQVKVARIHEYMKSARKDYLDKISTEIIKNHDVIGMEDLQVSNMLKNHKLAKAISEVSWSQFRTMLEYTAKWYGKQVIVVSKTFASSQLCSYCGYQNKDVKNLNLRKWECPSCRTHHDRDINASINLKNKAIRLLTARTAEIA

SEQ ID NO: 57193 - protein, 391 aa, unknown
  TnpB Polypeptide
MKLTYKFRLYPTKDQEKKLLHALDRCRFVYNKLLEELNKQEKIDRKILQHLIVELKEKYKELKEVYSKVLQYEHYRLFSNLRALARLKKNGKKVGKLRFKGKGWFKTFTYNQSGFKLIETNKRLDLLHLSKIGNIKIRIHRAVKGKIKQITIKHCSSKKWYACITAEVKEKITKSSNSKKVGIDLGLIDFIYDSDGNKIKHPKILDKSLKKLTKEQRRLSRKKKKSKNKKKQRIKVARVYERTVNQRNDFLHKLSRCYVKGYGFIALEKLNIKGMVKNRYLSKSIIDASWSKFIQLIQYKAENAGVDIIKIDPKNTTINCSNCKSKVYKKLYNRIHKCECGLEIERDYNSAINILNIGQGLSKFTPVKIEPLRELTEVSASSVVEAGSSLR

SEQ ID NO: 57194 - protein, 240 aa, Bacterium sp.
MEKAEKIKKSIEETKQVRKNQVIRVFELKLQNLSKRDIEKFERLFLEAKWLYNFIIADIENRLNDNAWKLKEVEIKTPDGLEKREIITLSSQMRQGIVERIRDSLKALKKAKEKGIKVGSLKFKSEVRSIPLKQYGITYKIIKDKNKVKIQGIKKKFRILGLHQISENAEITYGVLIKKPDGFYLHITCCLFKDELLKKIKEKQRNSAVGIDLGVKYQITLSNGEKFEWFIPETKRVKKL

SEQ ID NO: 57195 - protein, 372 aa, Gemmatimonadetes sp.
MFKSLKYRLRPTKKQEKILTTHIEECRLLYNQLVCARVQAWQQKHKSLSCYDQIKTMPLMKKQRPEFTQVYSQVLQQVAVRVDLAFKAFFRRVKERTKTGEKAGFPRYKGQNRYDSITYPQFSYGCRLDDKGLRLSKIGCIRIVQHRPLEGMPKSCSLRRTATGKWFVTISCDIGDTSKKIDIDSAVGIDVGLDNFAMFSDKEKIANPRFFRKEEKALAKAQRKWDKVKKASPKKREKARKTVARVHERIRNRRNDFVHQEARKIVNKYGFVVVEKLKPKEMQKNRRLSKSISDAAWSLFRRCLEYKAEEAGIGFKAVDPEYTSQDCSACGHREKKDLSNRVHQCRQCGYTTDRDHNAAINILTLGLQSQAV

SEQ ID NO: 57196 - protein, 379 aa, Gemmatimonadetes sp.
MYIFIMVKSFKYRLRPTKKQEKVLLAQIDECRILYNQLLCARIQAWKNNKQSLSRYEQNKTLPMLKNQYKPFSLVHSQVLQQVCQRVDWAFKGFFRRFKQKSKTGEKAGFPRYKNENRYDSITYPQFANGCRLDEKGLRLSKIGCIRIVQHRPLEGIPKSCTVTRTATGKWFASISCDIGDISKKADTNSAVGIDVGLNSFAVTSDGQKIANQRFFRKEQKSLAKAQRKWDAEKKRPKTDAVREKRRKVIGRVHERIRNKRHNFAHQESRKMVNRHGFIAVEKLDVKEMQKNRRLAKSIADVAWSLFRHCLEYKAEEAGIGFKAVKPDYTSQDCSACGHREKKTLSDRVHHCKACGYKTDRDHNAAINILTLGLQRQAD

SEQ ID NO: 57197 - protein, 368 aa, Gemmatimonadetes sp.
MEYLTYKYKMYSLCDRNKYLHYEIDAFAEVYNHFIALHKRYYRRFGKYPSKFTMINHLAKLKRTTRFAHWRLLPSQALQNVVERIDFGYQKFFARDNKRPPTFRSRFRYQSYTLKQAGYKFLERNKVRIGKRIFRYHKSRKFDVERIKMVTIKRDRVGDLWLCVVAKAEGIKPFIIKNGKTAGFDFGLQTYLTASDSTRTQSPLFFNRNSRKVKKANRYLSRKKKGSHNRHRARVSLARAYRRVANQRRDYHWQLAYQLCKEYDVMYFETLNIDAMKALWGRKISDLGFSDFLNILKYVAKKTGKVVKQIDKWLPTSKTCSACDTVKENLELRERTFHCCTCGLEMDRDLNAAINIHRWGRPPMAEVA

SEQ ID NO: 57198 - protein, 720 aa, unknown
  TnpB Polypeptide
MSRFRQAVYDRLNFSRVKSPQFQSIELKERAKQCAFYDAYLAVREWVKRTENLKTIIGALIDKFKHDKGFALSFLRGKRFSSKELSEIRSALSKDCFKKRQSLSVFFINNFILQLRNLFLAQNDFESKDLFSDISLTNPLQALVRETFKSLKLDDYLLEEVANSFSRTKKKKEIAVLPSQLAEYVLDGYFRKIRWLTGRKARQIISLRNKLKKEKGKSNSNKFVKLTKSLRSLEDSLSTFMGDAEFSCENEFKKKRKLVLAGPKRALLEKITCLDLSPLITKAYQKELLAFQQNPNHYVLKRIFKPYFPRIKIGAINFDSFLQYFETKLQYKVRDLLKERFISEQFVSLTIKQFQKIQLDIYDLIKKPEHKTLSISIANRDVYKEKFTASQSGEQRKYYKIKIGLISHQFQTFKVRDRKERIKKLKESSFEPALPSITLKNRKLLLNLPFNKLKKDSSKPFKVEGNSDVEMGIDLGLKHFAVVCVRDKRQDVELARYFLGPRQLFDMNFSLEDGKLYDRNRFGNERKEEALSNVKLKLIRLREQIVFLQQKKNNYEQRLLQRGITSYRAKLKWNRTRRSLSFCWDRLNRINLQIVNHLNNYVVKIACFWKVSAIKVEDLRWATHAKKRDAGKFMAFWQTHWFYSQVQDAVKLQCDLQSISFQKVPARNTSRRCSRCGELGSRAGKRFSCSSCGLKLDSDLNASRNVAKYRNSNPGYIDSN

SEQ ID NO: 57199 - protein, 396 aa, unknown
  TnpB Polypeptide
MLVLEFKTYGKLNQFNAIDDAIRTAQFIRNKCIRLWMDEKGTGKNDLQKYCAVLAKEFPFADELNSMARQASSERAWSSINRFFENCKKGIPSKKGFPKFQKDCRSVEYKTSGWKLAEERNCITFTDKKGIGRLKLKGTRDLHFYQPDQIKRVRLVKRADGYYVQFCVSVDRVESIEPSGTAIGLDVGLNDFYTDSNNQTVENPRFLRKSERRLKMAQRRVSKRVKGSNNRRKARQVLGKRHLKISRQRKDHAVKLARCVITSNDVVAYEDLRIKNMARNHCLAKSINDASWYQFRVWVEYFGKVFGKITIAVTPNGTSQECSQCGEVVKKGLSTRTHICLCGCVLDRDHNAARNILSRGLSTQGHCGTFGLDPSNAWGEDTATHVGASLHEQVTS

SEQ ID NO: 57200 - protein, 203 aa, unknown
  TnpB Polypeptide
MFSFGAAGRGVIFFIDCNNIRSKRDKCKKGSRRYRHLSQVYQRVSQQKRNKQHDSLHKASHLIAHKLDERTVVVGDLSQRQMVMNEHRERNKYLNRAVFNDWGLYPFTQMLIYKCQLYGKDLHFLDERETSKTCSGCGHKQAMPLWKRTYCCTECGLVMDRDDNSAVNILMRFLARLGPHTGDPVRCAVVFPAIDNVNTFEHI

SEQ ID NO: 57201 - protein, 345 aa, unknown
  TnpB Polypeptide
MGTRRFVYNKALESIKKGEKINFYALRNKLVTAKNNSDIKDWELETPKDIRAGAIRDMVKNYKTVFSQLKNRQIRRFKLGFCTRKDTPSIELPKSAIKLNNGLFIYKSYISDSIRVGKREKLNFNIDYDCRLQLKNNQWFLLVPIKTQVTKEDNRASYCSLDPGVRTFQTVYSEEMVMQIKIRKELIKKLQTKLDTFQSLRARKIISSCSYKRRMRKVYCRVNNLIDDLHHKTANFLTKTFKHIILPSFESQEMARKNKFNSLNRNLLQLKHFLFQQRLRSKCELRSTTLDICTEEYTSQTCGVCGKLTKVKGEDIFSCSHCNLVIDRDVNGARNIAIKRLNELF

SEQ ID NO: 57202 - protein, 532 aa, unknown
  TnpB Polypeptide
LRVSTQDEAVLWAVGRHLGALAGRDLAARCAQGQLDAKARNESRAARKQALTAECSSRWAGAITRTSEDQYQRAEKNLRDEQASLQARTRRIGARLAVPAGGKQGRTRGYATPAERHSKTIRLKSLKARLARVERRLDGGAVSVVRGGKDLLRKRNSLAAAALTGDQWHREWESARLFLTADGEACKEWGNETIRFNPDEGWLEIKLPAPLAHLANQHHGRYRLSCPVGFSYRADEVAAQASSGAVRYDISYEPGRGRWYIDASWTIASLPMPSLDELRQHPVVSVDVNHGHLAMAVAAPDGNVLSTPATIDLDLAGLPAATRDGRLRAALSTIIDTARQYGGRAIVIENLDFAEARAEGRERHGHRPARGKRGKGFRHAVSGIPTGKFRDRLTQMACNAGLSVIVIDPAYTSCWAAEHWLSPLREHHPKTTGHHAAALVIGRRGLGHRARRRVTGNQTAPEEAARPAQTRPRTKPVTKPAPRKPAAPRGPRQPPGTKTGRPHRTTVGNQAAQDRPGPPAEQHLPALSDQER

SEQ ID NO: 57203 - protein, 367 aa, unknown
  TnpB Polypeptide
MLKAYKYRIYPNTEQRIQIAKTLGCCRFVYNCTLAYRKEMYEEKKKSVSKTECNNYCNRELKKENEWLREVDKFALTNAIYNMDAAYQKFFKEHTGYPKFKSKHDSHKSYTTNFTNDNITVDFERNKIKLPKLREVKAKLHRNFSGQIKSATVSLTPSGKYYVSLLVETEHEELPHINHNTGLDLGIKDLCITSDGKKYINPKIIKKHEKKLVRLQRQLAHKEKRSQNYYKTRKKIALCHEKITNTRKDYLHKISHEIISENQVIVSEDLQIKNMVKNHHLARSISDVSWYELTRQLEYKAKWNGREYVKIDTFYASSQLCSICGYQNTGTKDLSVREWVCPVCGTKHDRDINAAKNILAEGLRKTA

SEQ ID NO: 57204 - protein, 436 aa, Nocardia sp.
LWSSPQCPPSSCTALVRKQNWMPSATGWGCELMLRSHKVRLRPNNVQARGLARAAGCARFAWNWGLAWWQTEYARYKAGERDQAPGQMEARRILNSLKREQFPWMVESTKCAPQEALINLGRAFGNFFAKRAKYPTFKKKGVRDSFRLSSGQFAVTENRLRVPNIGWITMSETPRFTGIIKAVTISRRAGEWFAALTIETTEPEKLPATGRTVGVDVGVREFATQHGVLSETPRALRKAQRRLKRAQQALSRKQKGSANRAKARLKVAAIHAKVADTRGDWLHKVTTGLVEKYDAIAIEDLNVRGMVRNRRLAKSVLEAGFGEFRRQLEYKTALAGRTLLVANRWFASSKTCSACDAKTKQRMSLDVREWRCEHCGTHHHRDINAATNLDKLNTPGVPWYQPVESSPPLLASACADQQAASVKQEPDSGTCVNKIA

SEQ ID NO: 57205 - protein, 110 aa, unknown
  TnpB Polypeptide
LNGAVFECGGCGLRINRQLNAAINLYMRMRFGYTEKWVGGRKRVELRMEGASQRDWWDTVVLPSLLGGCVLTGAERKGTSELARSLNDALKPKLYYAYDRYADAYLCTPT

SEQ ID NO: 57206 - protein, 413 aa, unknown
  TnpB Polypeptide
MRVRAYRFRAYASKTTARVLKTQLEAACELYNALLHAEQGEYEKNKHTMNKTELRQLALDLRKQNQEFQVLHSQVAQQVADRFYQARERFFEGLANKPKKKKPYRYLSLVYPQSGWRLSNAGEVGLGKNKKKKARLYLSKIGFLPLIIHRELPESQVSQVCVKAYPSCRIHVIFLVEEPETKELASKEPKRAVGVDLGITRLATLSDGRFLENPRPLERSLDRIRVLQRTLSRKRFLSKNWLKTKTRLAKQHEHVKDFRRDLFFKLGALLSQEYDVLVLEHLNVQDLIRNGTKKRRLRLHDSSFSELRAVLEWGFRKRGKLVLPVPAYNTSRECFLCGGINKGLTLEDRVFHCPHCGFTLDRDLNASLVLLKRAGWVPPSVPVELRPIPPLPSLGLRRQGGVMMQEAPPFMAG

SEQ ID NO: 57207 - protein, 388 aa, unknown
  TnpB Polypeptide
MKRNIWYMRQKRIMPDFCLTVNFPKMPSYLRRAAIQHALGAVSSYQTRLGLWEKGELRGRPKLVCENHAMPVFYRDVMYKEAEPGEDAAHLKLFDGREWKWFQVKLLHTDMEYLRKKWSGKKASAPTLERKHHKYFLRFSYTEEVSLSKTDVKEQVICSVDLGINTDAVCSIMRADGTILGRKFINFSSDKDHLYHVLGRIRRFQREHSSRQVQSRWDYAKRLNMELSRKIAAEITKYAAEYQADVIVFEYLEMQGKISGKKKQKLHLWRKRDIQKLCEHQAHRNRIRVSRVSARNTSRLACDGSGAVVRNQENHSLCTFRTGKQYNCDLSASYNIGARYFIREFLKPLPETERSSLEAKVPAVKRRTSCVYADLRKLYVEVNNLKAA

SEQ ID NO: 57208 - protein, 443 aa, unknown
  TnpB Polypeptide
MITIKLPYTCNDENFTEILFNLRRLQSSYLRSAYQLFNEGLKQKEVQQNETLHLKFELSSWFKQSALMEAKGLFAKSKGIKFIFGGKFNLLKRLKNEITKDEWKAKRLSNLKVQGETLKKGNRHFSLKIEDNVLIFKPSRNEKFTLHLPNLKPNYKKKLELLQLKCSLKEQPFQVELNESFIYISFDEVKEPTPKVIENRYLGIDLNPSNIGCSIIETLKDGSIKVIAVREYYVKVLIDKIKVLNVASSDPKFKHLNNKLNFETIEIAKSVNELAKEYHCKGIFIEDLKFKDKTDKVHSTSFNRLTKNLWKRETFSSNLKKRATLSGLTFYEVSPIYSSVIGNLMYNFTDPINASIEIARRGAQVIFEKEKMKRKFYPEFKISSLKDQWKEQFSECKDWRAIFLNLKNSKMKYRVSLSSESLGRVFSLNCVKSFTFYHNCSFS

SEQ ID NO: 57209 - protein, 356 aa, Algoriphagus sp.
MPNQEQQILLSKHFGCVRWAYNHFLNERKEQYELSKKSDNYYAQAKTLTEIKKKEETIWLKEVNSQTLQFALRCLDTAYLNFFRGNAKFPRFKSRRDKNTFTVPQFVTVEKDLLYIPKFKDGIKVNLHREIKGEVKHCTISKTPTGNYFVSILCETQYEPKQKTGKEVGIDLGLKDFVITSDGIKFKNNRYTKHHERALAKAQKHLSRKTKGSNRYENQRLKVAMLHEKTANSRLDNLHKVSSQIISDNDVICLEDLHIKGMIKNHKLAKHIADASWGNFVRLLEYKAEWNDKQIVKINRFFPSSKTCNSCGWINQNLNLSEREWTCKCGVIHDRDDNAAINILKEGENNRGGTLR

SEQ ID NO: 57210 - protein, 407 aa, Thermoplasmata sp.
MPRRTLKLRLYPNQDQRYQLGRTLGLCRRLYNLCKEQRELAWTMFDQSITWYNQSRQLPGLKGDHPEFRTVHSQVLQNVAKRVHSAFEAFFEGRCGYPNWKSRADYRSFTYPQPGGEHGYGGFRYQDGRVYLSKIGWVRAFHEDKPHWYDEQACTPKICTVKEDRHGNWWAMIVFTVPEANLKREPALGGLVGLDAGLSHLATLSTGETITNPNHLKEAQTRLKRAQRDLSRKQKGSNNWHKQRKKLAKLHRSVRRKRRDHLHKVSRRLAQAHRVVAVEGNLAGLTEEGGLCQEVQDAAWGTLFEMLESKLAEHGGHLVRVDQKDTSKTCHACEHVLDGMPLHARSWFCHGCVRIHDRDVNAARVIENRARKKLQQVDEAVPTGRGDSTPLDTRGCKPSAVEVGARG

SEQ ID NO: 57211 - protein, 415 aa, unknown
  TnpB Polypeptide
VEKEVHYKAYKFRLLPTEEQCVLLSKHFGCVRFVYNHFLKEKQDHYLLNKKTLNYNTCAGNLVKMKREGFEWLKEVNSQALQSSLEHLETAYGNFFKKKSKFPKFKSKKSNYDSFSVPQHVSLKNDKIQIPKFKEGIKFINHREIKGKICSATVSRTPTGKYYISILTEQEPTKHLKKTGKSIGIDLGIKDFAITSEGQRYTNPKFLYKFQRKLKQAQQHLSRKQKGSKQRVQARMKVAKIHEKITNSRNDMQHKVSMSLIKKYDMIALEDLNVNGMVKNHKLAKSISDSSWSSFVTKLTYKAQWYGKTVLKIDRFFPSSKTCSDCGYIKESLDLSERSWTCVCGSKHDRDVNASKNILKRALVIQSSGTDDYRNGAKVRPKEISKVSRGSGNEVSKKRVYVLRRPEADGSLVHR

SEQ ID NO: 57212 - protein, 298 aa, unknown
  TnpB Polypeptide
MSRRTFKYRLYPNRQQREKLQETLDVCRELYNAALQERREAWASHRKGIGYVAQANQLGSIKEVRPDVAAVHSQVLQDALRRIDKTFKSFFLRVRRKQTPGFPRFRSKSRYDSFTYPQAGFSLNGRLSLSKIGNLKIKLHRPIQGKVKTLTIKRENGHWYACFSVVAEPQPLPLNDQAIGIDVGLSSFAVLSDGTEIENPRLLKKQQRRLRRAQRRAARRKKFSKRWKKAVRMVAKIHRKVVNQRNDFQHKLSREIVNNYGLIAVEDLNVKGLSRGILAKAVHDAGWAAFFSEAVVQS

SEQ ID NO: 57213 - protein, 397 aa, unknown
  TnpB Polypeptide
VKIIKYTYKFKLKPTKKQEILLNKHFGSVRFVYNYFLNQRKEEYLNNKKSITYNKQSSYLTQLKKENKTKWLMEINSQSLQFSLKCIDTAYQNFFNKRTQFPNFKSRKSRNSFTCPQFVRNEDKLLFIPKFKGGIEMIMERKIKGKIKKATLSKTPTGKYFVSILTEKEYTPSVKTNQSVGIDLGIKDFLVLSNGTKIKNHRFLKHYERELKLNQQHLSRKIKGSSRYEKQRIKVAKIHEKITNSRMDLIHKITLNLVNQFDTIYLEDLNVKRMMKNHKLSKSIGDVSWGKFIDVLTYKSEWNDKEIIHIDRFFPSSKTCSKCGWINNSLTLRDRTWTCKECGEIHDRDLNAAINIINEGYRKNISGGTSDYKRRAKIRPSSFDGVSNEALKEKELI

SEQ ID NO: 57214 - protein, 414 aa, unknown
  TnpB Polypeptide
MQLVEQHVIGRDDPRYAVLDEAAFKAKNLYNAALYVVRQSFIFEKKYLNYKKMDKRMQQHEAYQALPRKVSQQVLKKLHGNWVSFFKQYEAYRKDPSKFRGRPKLPRYKHKIEGRFLLTYTTQALSRPALRQGIIQLSQLPTQVQTRQRPESICEIRIAPRNGHYVVEVVYEKEPVQANIDPSFCVGIDLGVTNLAAIASNRAGFVPRLVNGRPLKAWNQWYNKRMKELKAQLPKKDRDRVTQQMERITNKRNRRVNHYLHAASRRIVDLLVEQEVGTIIIGKNPLWKQEVNTGRRNNQNFVSIPHARFIDMLTYKAALVGIQVEIQEESYTSQASFLDLDFIPAYDPECKDKPIFSGKRLGKRNRLYRTREGRIICADVNGAYNTLRKRRPDAFNAEGIAAYVVQPLRLKIAV

SEQ ID NO: 57215 - protein, 394 aa, unknown
  TnpB Polypeptide
MIKAHKIRLNPTPEQAHYFAKAAGTARYTFNWALAEWKRQYEAGEKPSALKLRTQFHALRREQLPWTYDVTKCAIEGAFMDVAAAFKNFFEGRKAGRKTGYPKFKSKKRSRQSFYLANDKFAVGDHWIDVPKLGRVNMAESLRFKGKILCARISKNASWWFVSITVEMPDEMVYKQKPPVGIDVGLNRLATLSDGRWYENQRPLTHQLKKLRRLNKELARRTEGSKNWQKTKEKLGRLHAEIACMRLDWLHKLTTEIAKTSGIVAIEDLHVKGLIRNRCLSRSFSDAAVGKLLDLLESKVSCQGGLLLKVDRFFPSSQLCHCCGARKADLTLADRVFVCPHPDCGYVGDRDENASWNIVCEALRMFGLNLNMPSRVVATTRRKTAWGPGVRPKK

SEQ ID NO: 57216 - protein, 392 aa, unknown
  TnpB Polypeptide
MSSYQVRRVNIGKTTQLDELAHECGLLYSQTLVFFWRTVRHKGIWLKSKHLMRLFTSPKLHAHTADACVQAFFASLTSWRKRKKSGDPDAHPPRRRKWYFRVEYKRSAMSLKNGQLRLSNGKGNDPLVLEWPWDLPQTVVIHWTGTQYEAIATYRMEETEARPMGGEIAGIDLGEVHMAVSHDGTSTHILNGRLLRATRQYQNKLKEHLSKKIDRKKKGSKRRKQLMRSKQKQLSKLRNQIKEIEHQQTSRLVSMLYQEGVQTVVIGDVRDIRHDNDRGSTTNQKIHQWSHGAVRHLLTYKAERLGMAVELQEERDTSRTCPKCGHRRKSKPKGRVFHCTNKACRFTWHRDGVGAYNIRQKYRGEFGVPHVVAEMAPATGIRYMPHTCVARS

SEQ ID NO: 57217 - protein, 272 aa, unknown
  TnpB Polypeptide
  misc_feature (158)..(176): Xaa can be any naturally occurring amino acid
VINLDKAFANFFNKELKARFPVFKSKHGRQSSYHPNGKVLTDAIQLPKIPAIRANIHREIVGKVSSITITRNAAGKYFASILADDGQEAAAKPTCITTVAGYDLGLSHYLIGNDGDKVANPRHLVNAYRRLRRDSKALFRKKPGSANRRKARLRLAAXXXXXXXXXXXXXXXXXXXADFQHKLSRRIIDENQAVIVETLKSANMMKNRRLARHIADAAWSGFVAKLAYKAESAGGSPGQTGSVVRQLENVPLLRPQNAGNAAQGAGMEMPRL

SEQ ID NO: 57218 - protein, 395 aa, Moorea sp.
LYRTIPVKSTFSEEERAFWVFQCEQANSLFNCAVYYAKQKHYQWLKDQEAYTTFWRGDEFRCGWKTYKCATKYPEMDKALKMSPHYKGMAAQSAQQTLKTVGEAISSYNQLVGLYYKGEVDRPRLPRYRKRGGLAAVTFPRQALTYKQGLFYPSVSKESKPELLTKIVLEPPEFIDPDWVREVTVRPCYGQLWIDWVIDDGKEPIIDNPELDYSQALGIDHGGDNWLTCVTTLGKSFIIDGKKLKSMNQGYSRLVAKHKAGKPELYWDSHLDKIQLKRNNQMRDAINKAARFLVNRCLSDGIGNIVFGWNKGQKQRSNMGNKGNQKHVIIPTNRLIERLKQLCPEYGIKLIVTEESYTSKASFLDGDSLPNYGEKPTCDSFSLNLETGGQLATVE

SEQ ID NO: 57219 - protein, 405 aa, unknown
  TnpB Polypeptide
MNPDLTNLFCPSRRGKEYFRRNVKEVHRKSRLKRWCQQMLKAYKYRIYPNDEQKTQIAKTFGGCRFVYNQTLAYRKETYEQDKKSVSKTDCNNYCNRELKKKYEWLRKVDKFALTNAIYNMDAAYQKFFKEHAGYPKFKSKHDSHKSYTTNFTNGNIAVDFESRKIKVPKLKAVKAKLHRKFCGQIKSATVSQVPSGKYYISILAETEHEELPHTKQKTGLDLGIKDLCITSSGKKYENPKTIKKYERKLAKLQRQLAHKEKGSSNYCKKKKQVALYHEKITNTRKDYLHKISHEIISENQVIVSENLQIKNMVKNHHLAKAINDVSWYELTRQLEYKAKWNGREYVKVDTFYASSQICSECKYQNADTKDLLVREWECPVCGARHDRDINAAKNILAEGLRKIA

SEQ ID NO: 57220 - protein, 436 aa, Streptomyces sp.
MMRAYKFLLRPTVRQEQALAGMLRDHCSLYNGALQERRDAYRHTPKTTVRYGDRSAQLKEIRAFDPERQGRWSFSSQQATLRRLDKAFQAFFRRVKAGLTPGYPRFKGVGYFDTVTFPKDGDGCRWDSTPHDGQTRVRLQGVGHVRVHRHRPVRGRVKTISVKREGRRWYVVLACDDVPAEPLPATGSTVGIDMGVRHFLTTSDGEHVQNPRFLQTMAKELATAQQHLSTFPERTRQRTKRHRAAVRKVAAIHAKIRRQRLDHRHKAANTLVAGHDVIVHEKLNTAGMTKSPATRPDPERPGAFLPNGAAAKAGLNRSILDVGWGLFFGILAQKAESAARRVIPVDARNTSRTCPECGHVAKENRVTQAKFECTACGFLANADHVGALNVLSRAGLVLCDGAWPPTQETRRFSGGWSHVSPPRVAARAAEGQAAAP

SEQ ID NO: 57221 - protein, 412 aa, unknown
  TnpB Polypeptide
MKSVRTQRLKIESQSIFSEINTASAAVWNQCCDLMTMYQWHRGYLHAHHDFYIGKDCEGWIDKKLSKSHPLHSQSRQAVRESYFKSWKSYAVLKKTGGIQKPKPPNKRKTYRTTRWKTSAITFVEGSLFGKRLHLSMGKDRPVLDIPLPSSFNLSNSHHIATIDLVYHHGHWELHFTYNQSIEPPERNSGVVGVDIGEIHPIVSHDGQHTEIYNGRYIRSLYRHRNKVLAEFNQAISRCKRHSKRWWKLIRRKWKRIRKIDAQIKDALHKHTTKFISLCQERGIGTIVLGDLTGIRKNIDYGKRANQKLHQWAFGKVTELITYKAKCVGITVKQIDEAYTSQTCPQCGNRKKPTNRNYTCPCGFKYHRDGVGAINIRQKYLGHFGVPVVAEMGVTRMTPPLGFRLKVPVASS

SEQ ID NO: 57222 - protein, 405 aa, unknown
  TnpB Polypeptide
MLNLTYEFQIKPTRQQEADMLSWLKTCRKVYNYALAERKAWVESRKCAVNACSLRHEYIMPADAPKPNFASQCKSLAAAKKTIPELALPHTHVLQQALRTLEAAFVSMWERGHGFPRFKKLGRMRSFLFPQMGVNPIQGNKLKLPKLGVVKMRLSRPIPEGFELKQVRIVKRASGWYAMLNLQMDIEVPDRMPHGEPIGIDLGLISFLATSSGETIARPRFFVDLQGKLKLLQRRLKHKKKGSRNWHKLQMRIAKLHEHISNTRKDFHFKTAHHLCDSAGMIFAEDLNVKGLARGMLGKHCLDAAWGQFLNILKWVCWKRDVYFAQVDHRGTSQSCPQCLTVTGFKELSERIHQCPQYGYTTDRDVAASQVVLTRGIAAVGHPVVKLLADGLGSGDRMMQESPAF

SEQ ID NO: 57223 - protein, 438 aa, unknown
  TnpB Polypeptide
MPLLAHKIALAATPAQNEDFARAAGTARFVWNWGLHEWNQQSAQGRTPTANALKKQFNAQKYTAFPWLAEIHRDAHAEPFAHLGAAWKRFFAEVKAGKPAPPPRFKKKGRCVDSVSVANDKFTLDGTRLRRPKVGWVEMTEALRFSGKIMGATVSRRAQRWSVAIQVDVPEAAARRRRTGDGVEGVDLGLRNAAILSTGETVPAPKPLASALRRLRLRSRRVSRKVEAAKALGGTSQPPAKGERRRKSHNQVKQEQAVARLHARVYHLRSDFTHKLTTRLCRENQTVVIESLNVKGMGKNRRLARPLSDVGFGRIREQLRYKAALYGTQLILADPWFPSSKLCSTPGCDFKHQELTLSERTWLCPRCGVRHDRDVNSACNLKRLATATALPVAKLAGNGAAGEGKVPSPVGKVTSVKHERGSMRSGQKKNRAHLCALS

SEQ ID NO: 57224 - protein, 539 aa, unknown
  TnpB Polypeptide
MLVSVGQSLREIAAPFVVAPPAGRRIRTRLRPTAGEERALWALGAHLGSLAGRDLTERCRLGRGDAQRARRKQELTAESSSRWAGAITRTSNDQWQRAWLNLLDRRRGLRRALATIDRRLSAPVGGRNEKTGVHGYASRADRFHKQQRRQILAARLAAVDARIAEGRVSVVRGGRRLASTRHHLKDARLTEREWRERWHAERMFITADGERCKRHGNETIRIDPTTGIVEVKLPGVFAEHASVKDGRLRLAVPVAFRHRADKWAAQAQTGAVRYDIVHDPDRKRWYLDASWRIAVGEPVTVAQATRHGVLALDLNAGHLACCALESAGNPTGQPFTVPIVDEGATGLRDASIRHAISTLIHHAKTAGVQAIAVENLNFVDARDTGRETMGRGKRGKRFRKTVAGLPTARFRDRLAHMCASAGLRVIAVDPAYTSRWGAQHWQRPISTKTFKASRHHAASVTIGRRARGLGVRRGRRRDLLASGASPRESCPGRTPSTTCAPAPRHDGKATARHPKVRKTRLGDPATVRGSPPSTVRSGR

SEQ ID NO: 57225 - protein, 447 aa, Bacillus sp.
MLRKKPVKVLRKKKKTENIQRFTQVQNLGGKSLTAKEFKILKRMTHSTKALRNVGLYTIKKSFRENNRNATTKEIDEAMQADVNYWGAQSNSVQAIRRSLLEEVNSFFKSLKSWKDNPEKFTGRPKFPKYLHKEAKRVIEIYQIPKVDKNGYWTIPMNTNFKKKFGSIKIRMPKNLLNKKITYIEIVPKQKGRFFEVHYTYEVQVAQMKKQPTTTKNALSIDLGVDVLMSCATNNGETFLLDGLALKSLNRYFNKELSKLQEKNRENGISKRVVTNNQAKLWMKRERQIKGYISQAVGLLFKKGKELGIDTFVVGYNVGWKQESDMGKKNNQHFVQIPFARLISAIENKCSKEGIRFVKQEESYTSKASFLERDEIPVWSKGDKKTYHFNGKRITRGLYQSKTGQCIHADINGALNTLRKSKVAELDERLKVKTPILLKVQKRKAVA

SEQ ID NO: 57226 - protein, 202 aa, Halolactibacillus sp.
LLFQKNLVHAFHHPSVTVICKPNNNYYISVLVETESQALPKTEKSVGVDLGLTDLAITSDGVKYPSLYLHKKYKKQLHTWEKRLARRHIQAKKDGKDLRSAKNYQKTRIQVAKLHQKVKDNRKDYLHKITTELVETYDVIYIEELKTSNMIKNHNLAQSIASQSWRMLRNMLAYKCLTYGKELVVVNPYKTSQVCLSCGTQT

SEQ ID NO: 57227 - protein, 312 aa, unknown
  TnpB Polypeptide
LHGDKSVPLYSATRQQADRLLKRIGKPKEGKEYPLILRRDVYRAETKLTQYWLKIPIYGVRGGVNVPIRPHTSITPNMVCREAKIIRRKGEWFAYITVQAEIPEKHPNSALAVDLGIHNIATTVNSVDRKPKFYGKKLRAVRGHYFHLRRILPNRKAIRKVGNHEKRLVTHELHKISKAIVQEAVENNSVIVLGKLEGIRRNHRGRIGNRKLDSFPYFKLVSFIKYKANWQGIPVLKINEAYTSQICSRCGKRGLRVRGLFQCPHCGLNLNADYNGARNILKRALGKLHDEPLSSAGACLTMPELLAEAKSQ

SEQ ID NO: 57228 - protein, 613 aa, unknown
  TnpB Polypeptide
MGTNIMPPVVRSYRVGLHFKGNKPREEEKKASQYVRGHQQIVQDKIIDNNLVDLAYDLLDTNPDFSGNMGAAHLAAKSGDRSNIGQVSSTYAIAAVNGAIDREHKLEYLFKLFEEHPKEAISWMVFLRTPFLESSLSKILDVKFDYTRNLVYSASKNMISAFADIIVPQLSENNLSKALDEVIIEVEQRIVEMKGEGKSVKKSQTFLNKLYFLRKNFDFLNMCLFHWLTYEISNPGNSRWKSLKKLSNEFSLMLGYKYRKYLFSAIRSVVVHALSFHLDETVKKLCETVSSRDLVAKPYKKQRKQLAPVNLIMGYKFVVIRPGNGEDMTRLALRDKKFSIGIRNPENGRLIINAEIRIHKRLYRMLERGAKITSLSIRSGDAPAHKILVNINLEGKKKAFITTRFLKNYENLGLKKDDIIGLDVNRLGPHILAFSQEFKLPKILLTLCERYRKLGGDISRLSAIISRNDTIKNRGELNRVYNRRKNILKSIKEECKLLSAAVLVQTNAKDFNVEDLNFSARGKRGALAKAILSMPDEIDIFRKSTELASIYTNKKVKLNTINPYKTSSQHYNCGGKLKREKGNWDICLCTKCDIEVNTHRNAALHIRDGGVMV

SEQ ID NO: 57229 - protein, 199 aa, unknown
  TnpB Polypeptide
MFKVSEIQKPKIFYTIFYQDNVKIQFSDTHVKIEGFAASKKKNKQKINWIRLAEKNRIPTDCNYSNPRIRYDGINWWITVGIEYEDSVTVPSNDGIGIDLGIKDLAICSDGNKYKNINKTKKVKKLEKQKRRLQRSISRSYENNKQGKEYCKTKNVIKKEKLLLILNHRLTNIRHDHLHHITSEIVKREPSFICIEDLM

SEQ ID NO: 57230 - protein, 378 aa, Bifidobacterium sp.
  misc_feature (274)..(352): Xaa can be any naturally occurring amino acid
MSMYRRYNYRAYPTRGQREALSRLYGACRYAYNWTLDQRELMRRRHGRMQSCTQLSNMFTQWKTNPGMEWLLAVSSTPLQQSIRHADVAYRNFLRLYKAGRTHIVTNHRTGKRHRTGLPRYKSRRDGEQSAEFTKSARFKVGHADGCKWGFLTLPKIGRVKLRWTRELPSTPNTVNIMLHADGSYEASFTVQVDDESDAPRPLHEACGIDMGLDSLMSIVYTDGTREKIPHPRTLKRKARRLRRLDKQLAREKKGSANHAKTRILKAKTYGRIXXXXXXXXXXXXXXXXXXXXXXXXXXXXXXXXXXXXXXXXXXXXXXXXXXXXXXXXXXXXXXXXXXXXXXXXXXXXXXXGTSAGTWRTSWRPRWRARTKPSPWRP

SEQ ID NO: 57231 - protein, 344 aa, Methanomassiliicoccus sp.
MKTNQMLLTYKVKHDRDLSTELEKARKVAEYAIEHRSRSSADVKHIGLKSVIANQILRKYGSDRKARAVTNVVLIVPGQSIRYHSQSRIISVSCLKMNLDARFLPPFEKVNQIELNEEYAFVTVTINEPPLREVDHWIGVDRNTTGHVAVMGNPETGKVWKLGKQCHHVHNKYKNIRRKLQKQGCYKEVKELKNRENRIVRDINHKISKKIVDIAVQNACGIKMEQLDGIRNNRKQTSSFRYSLHSWSFYQLQRMIEYKAKLLGVPIAYVAPQFTSQMCSRCGLLGVRNGKGFTCPHCGHVDHADANASFNIALRPSIEEGVGRLYADRDACKGRIDTPQEATS

SEQ ID NO: 57232 - protein, 427 aa, Escherichia sp.
MHQENTMLPRRISVSLFIDQSIIWPVKRLQAFKFQLRPGGQQEREMRRFAGACRFVFNHALALQNENHEAGNKYIPYGKMASWLVEWKNATETQWLKDSPSQPLQQSLKDLERAYKNFFRKRAAFPRFKKRGQNDAFRYPQGVKLDQENSRIFLPKLGWMRYRNSRQVTGVVKNVTVSQSCGKWYISIQTESEVSTPVHPSASMVGLDAGVAKLATLSDGTVFEPVNSFQKNQKTLARLQRQLSRKVKFSNNWQKQKRKIQRLHSRIAYIRRDYLHKVTTTVSKNHAMIVIEDLKVSNMSKSAAGTVSQPGRNVRAKSGLNRSILDQGWYEMRRQLAYKQLWRGGQVLAVPPAYTSQRCACCGHTAKENRLSQSKFRCQVCGYTANADVNGARNILAAGDAVLACGGMVQSGRPLKQEPTEMIQATA

SEQ ID NO: 57233 - protein, 455 aa, Acinetobacter sp.
VYPTEHQKLILSQWMGCARFIWNAKCDEDKYYRGFARKFTPYNHYYETQDQKYSHFKSNELSSWLANCPSTIQKNSTVNWYNTLKKSIKGVCGRPKRKKKTDKGSIHLTSDLFEFRTERNKRKLYIGGKKFNIGSLSFKAHANFKEPKSLYIRKERGQYFVSFCYEDGVEIQEFDGKKFDAKKYAKRQLDHLQGMDEEQLQKIVVGIDRGVTIPVHAGYEEFDFSKEQKNHLTKADRYIKRLQRKLARQIKGSNRRAKTKHRIAVHHSKKANIRKDFAHKTSRSLANGFGQVFIFEKLNTKQMTKKPNPKKDKFGRFIPNKAKAKAGLNKAILNVGWHRISEFLTYKSVKLGKAVFTVHASYTSQECASCGHTHPDNRKSQDRFKCVSCGHADNADHNASIVIKNRAIKLVLDCGTQLDGNYLSSSGRGGVRKTTRGVKASFRSTVEASKEMCAT

SEQ ID NO: 57234 - protein, 430 aa, Sulfolobus sp.
VLKNLKLKSFRPKEEYIYLTYSLKNDKKEESKVLLENYKNLLHKALDWLWDRTKVERKQVKKGKKIFTKVKITLPKKKEVYKTLRDELERINVLASHYVDRAINDAYSILKSWRRRAEKGQTSLRKPRLKKVYVRVKSTLRKVDGESVRITVRPYEYITFSWSHTWFSRRVKGLELGEPIIKEEKVYLPFRYKLPWFTPLDYLAIDSNLYTLDAYDGEKFITFSIKELYSLKYGMQLKRGRIQSFASKHGRKGKELMRKYSRHERNRVLDYVYKFVNKLLEMYPITMLAVEKLNKQEMFKDANDSLSRKISRTVWRSIHRVLKYKAPFYGSFVKEVNPHLTSRSCPRCGFVSRKVGRTFECERCGFKLDRQLNASLNIYLKMCGFPHIREIPRVWVGVIPLMGRRGMNGFPRDFGEAQGLRIRYKFMKIQ

SEQ ID NO: 57235 - protein, 395 aa, Sulfolobus sp.
MQQFKKGERVDFSKTEKDVYEKYKQILKVNTQQVARKNAENWRSFFSLIEEKKKGKLPRWFKPRPPGYWKDKIGKYKLIIIIRKDRYEVNEKERVIFLKDFKLSLKFKGELKWHGKQGRLEVIYNEARRSWYAHIPMEVENNVKVEGNLRASVDLGIVNLATVYVEDGSWYIFKGGSVLSHYEYYSKRISEIQKVLARHGQRRSRKLKLLYDKRKRFLKHALNSMVRKIMEELKGISEVVVGYPKEITQNHGNKLTVNFWNYGYIIKRFEEIGEELGIRVIKVDESYTSTTCSLCGEAHEGGRVKRGLFKCPRMGKVINADLNGAINILHIPESRGSEGNFHRGIGVIGLKTQPVVYRWTNRVGWVSKALTSYEVMRMKAVNRKPMNRSKGTIAL

SEQ ID NO: 57236 - protein, 277 aa, Sulfolobus sp.
MNEELVEAKIIDYGTLRELYKEVQFIRQYSKILKMKGQDVGPPPHNIPKELYYLALNSNEVKYGPIEIIGNNPYKLKGINAIVKSEREEIPLYAVIDFTNNIKVYLAYEKPRSIVGVDIGVRHLITIVALRNGKLWKTRFWGKELITDEMIKILGDPQGVSEIKNIRSKVRKVINDIVNFIDELNPKIVALEDLRIFENKVGNTLRNIEIELEQQLYSRGIKYKLVDPYNTSKICSNCGFKKGEVLGPLFVCPACGFKADRDFNAAYNLALKCYYTC

SEQ ID NO: 57237 - protein, 419 aa, Sulfolobus sp.
LKRTVRLESDPLNRWKYHVLREIEEYQKMIVNEMIEAILSEGLPTTRKKLHERFYNHYKEKYPFLPSRVIEGSYIVAGRIIKSFRERRKKGLTRKDKPEYKRVVIIIPNMVNWRFNRVSVSVLTHKGWVEIPLKFTKQFIHYLYEGWRVSQELKLRLVGRKILVWLTFEKDVEIETKEGNYVSIDVNENNVTLAVFEDFRLRELRRYETGLGRIVVNYSLRREEITKGHSTKDELIKKKLRRLRERERKLDVLRKTVKRIVDLARDLNAKIVVGKFSSKAKERMESNKSSKLRHRVHQWSVVKFVELLRAQPIDVEEISEAYTSSINPFTGEKLKKRRQVEEKVVKVLNPYLMTGTAHEGRGIKVFKVNARYLESGEILLERDSIAPLNLVKKVDGRVVAFSNKSFGQTSSIVSTKIAT

SEQ ID NO: 57238 - protein, 439 aa, unknown
  TnpB Polypeptide
MESNNNLGNICWSNVKMKINKGIKVRIYPNKQQQEILNKIFGCCRFLYNQMLEERQTVYNILKEDKNQLYAYKYKTEKQYKQEFLFLSEVDSKALQSETRNLIQAFQNFFRGIREGKKIGYPKFKSKKKKQAYTTYNINNNIRINQKAKRIRLPKVGWVKYRDDRELIHPIKHVTVSKTRTNNYFVAIIIEVDIDVKPLNTIPLNRIEAFDMSAPHFLVNQNVELTNPRFYRDQERKLKRLHKRLSRKQKRSKNREKARFRLAKGYEKIKNRKTDWTHKVTHQLSDQHDAVLLEDLNIQGMQQFNSGLSKSVTLDFSWHQFLSYLRYKLEWRGKHLVLVDQFFPSSKRCSVCGQINNDLQLSERTWTCQCGVTHDRDVNASTNIKEEGLKILQEQGITIIKDNGTTVGTTGSHASGDRVSPALAGSGQGTRNPSAFRQW

SEQ ID NO: 57239 - protein, 432 aa, unknown
  TnpB Polypeptide
LLEAVKVALDPSLAQERLLASHAGAARFAFNAGLAHVKAGLDAGEKPEWHFFSIVNWWNASKNELAVDADGKPWWSENSKEAYCSGLRSLASALSNWSKSRKGDRKGRKVGFPKFKSKAGSAPRFAYTTGFKLIDGDPKALKLPRIGRVHCMEDVAKRVGDGRVLRMTVSQRAGRWYASLTVERDDPEAQHKPKGGSVGVDLGVKALATLSDGTVIENPRYLEKSERKLKKAQQELSRKTKGSNRRAKARSKVARLHARVANQRQDAMHKLTTWLTEKYSDISIEDLHVAGMVKNRRLAKHIADAAFGEFRRQLEYKATRTGARLHIVDRWYASSKTCSKCGSVKAKLSLSERTYRCDSCGLTIDRDLNAAINIQVAGSAPETLNAHGATVRRGSLSGCGTRVAAKCEPSVGANHVSLGAGDRKGALQTNVK

SEQ ID NO: 57240 - protein, 261 aa, unknown
  TnpB Polypeptide
VIIKRTRTGKWLAIVQAEVEPEPLLKTGRIVGIDVGIQHFCVDSDGLAFENPHFIDKTLDKIKRVQKQLSRKKKSSKNREKVKLRLAKLYEKLKNQRMDFLHKLSRYYVNNYDIIVVEDLDIRDLVENGNSSTLNRHIHDSAWSKFLSLLAYKAERDGRWMVRVDPENTSKKCSRCGYVVKDLKLSDRWFTSPECGWEADRDYNASLNILDVGLGRSLTVEGEPLPLVISCREVIEGQVLSVKQEALPGGGVVHMLSVNCQ

SEQ ID NO: 57241 - protein, 320 aa, Okeania sp.
LARFKSCQIIIFSNQHLNRQKSYFLTIKKSPYEVQQINLQRLDKAWKRWLIPDKTGKRGGRPRFKKSGKLRSFCFSRVNHPKAVIKFDGKQIITRRFGAIRVIVHRPIPDRFVIKTATITKKADGYYISFSLEDKSVPSLIPTDNIKNSVGIDVGLKEFLTTNTGETVSVPNFYRKAQSNLARKQSKAARKEIGSNNWKKAQNRIARLHQHIARQREDFHYKTAHKLVKEYDLIAVEDLNIKGLAKNTKLSKSIYDVAWGAFIEKLNAVAVKRGVHVSRGEWPFARTPSQYITCIVVIVVKKYLKLYQSELILVLSVKRF

SEQ ID NO: 57242 - protein, 382 aa, unknown
  TnpB Polypeptide
VIKAHKIKLNPTPEQQDYFKRAAGCARLAYNWALAEWNREYEAGGKPSALELKKRFNEIKAEQFPFVKEVSKCATEQAFADVGTAFANFFRRLKEGVEAGYPKFKAKNRSTPSFYLANDKIAFEGRTVYIPKLGWVNLAEELRFDGKVMGARVRYRAGQWWIAVAVELEKPPSQEKNRTVGVDVGIRNLGVTSDGRVFENQEYLRQSLSRLGGLNAALARKQAGSRNFEKAKVKLQRAHYRVACQRDDAIHKMTTELCRNSAVIGIEDLNVKGMVRNPHLSRSLSDAAFGEIHRQLNYKAEWFGSVIQPVDRFFPSSQMCSACGERKTNLTLAEREWRCEVCGAHHDRDLNAAINIRNEALRRLGSGYVESLNSPVEQRALA

SEQ ID NO: 57243 - protein, 340 aa, Natrinema sp.
MLEVHRTHRAKIRNHSQVADSLDRHGWSVSKLWNVANYHSREVWEETGKIPDHKELKDELKGHDKYKGLHSQSSQRVLEELAEAFHSWYSSDDDRDNPPGYRKENYYDSQGRRVHEEHPRSTVTWKQNGIRHDTKNNRVRLSKGANHKEHPRAWEYILVEYETRPGVTVENLQQVRAVYDQQNERWELHLVCKDEIETPNAPGEETAGIDLGISNFAAVAYSTNEADLYPGNRLKQDGYYFLKEIANCDDSGGERAARLHHKWSERRTHFFHSLAKHIIQRCVENGVCRINVGDLEGVREDEHGESKNWGKHGNLDLHGWHSIASPRFSRTRRRSRVSKS

SEQ ID NO: 57244 - protein, 450 aa, Natrinema sp.
MMRRVNTFEIRPLSERDEILLFEILDASASLWNELTYRRRQAFYAGEDIWQGDTGRYRSKYKGTIGAAAVQQVIRRNDEAWRGFFGLLEEGSDANPPGYWKDDEQRKLRTLVRNDQYTLEWGKRSRLEIPVGLDLKEKYGLGYNERLRLEARGDPRWTGKGGRLGLVYDRDTDSFRARQPVENATRRRRESLATVSSDDDAVAALDIGANNLVAVTTTRGDQLLYHGRPQFHRFRRTTERIATLQSRLGPEKWTSRRIRRHYQQRSDRRNHLQDALIRDLREWLRDRNVSSVIVGDLGAFSSHWCARVNEKVHLFWAYGRFQRRLREVLQGEYGIDVREVDESGSSSQCPRCGGQNINRCKDTFQCRECGFEGHSDVVGSENLLFEHTDCGSMARPAAPDQNRSGEGHREVPRLEWDDHRWQRRDRSTKENPVNRSTWNGKFAAGESGTA

SEQ ID NO: 57245 - protein, 439 aa, Natrinema sp.
MSEECKTLEAYLAPPTQHKQRKLHDEHDRYEKLLRRSFNNECDTMTAVNEVVTGEDLNWHSKNALKQYVPNLLDEDTYDAKQLADTHPIRYANTASVFDHDEDRHHEICWEVPLPGRGTNFWIPLQLNPEQEDWWHSLINDEDESVWAGELRLQRDGDRWVLHVTANYEVEPDHSYSCESDDMTPVGFDVGESKLLVGCALRDNTPVDPLFVDGGRVRHLRQKQSSAEDRLKPRYASKLLDDLVWGRWQDAIEDEIEKASARAVEYAAQFENPVIVFEYLDGITDEDIGKYWNRRLGKWLFSQLQSRIEDKAAEHGIPVEYVYPHHTSKTCHACQHIGYRPHQGTFKCTNEECWVSEYQADLNAAANIANRLNPWGESLPVKWVGDDSPRSGGQWQAHQDTLPIEGLPSERRASDDKVSSSSPTVGAGAKPETGDANTS

SEQ ID NO: 57246 - protein, 438 aa, Natrinema sp.
MLEVHRTHRAKIRNHSQVADSLDRHGWSVSKLWNVANYHSREVWEETGKIPDHKELKDELKGHDKYKGLHSQSSQRVLEELAEAFHSWYSSDDDRDNPPGYRKENYYDSQGRRVHEEHPRSTVTWKQNGIRHDTKNNRVRLSKGANHKEHPRAWEYILVEYETRPGVTVENLQQVRAVYDQQNERWELHLVCKDEIETPNAPGEETAGIDLGISNFAAVAYSTNEADLYPGNRLKQDGYYFLKEIANCDDSGGERAARLHHKWSERRTHFFHSLAKHIIQRCVENGVCRINVGDLEGVREDEHGESKNWGKHGNLDLHGWAFDRFTKILTYKAKVEGIEVVEVSERDTSKTCCICGREDDSQRVQRGLYVCEACDAAFNADVNGAENIRLNINDESNSESAPSLGGDRSTGWLAQPEVYLHSLSCGFQPQTEVVDCKP

SEQ ID NO: 57247 - protein, 425 aa, unknown
  TnpB Polypeptide
MPTGKGGTVLYLTVCQQLKHLSKDEFLILRELCRTAKNLTNQSIYQIRQYYFEHSQYLPYEKNYAILKTSENYRLLNSNMAQQILKEVDGAFKSFFGLLKLAKQGKYPFSSCRLPKYLPKDGYATLIVGFVRLNGNRFVLPYSAAYKKHHKPVTITIPPVLADKTIKEIRIIPKADARFFEIQYTYQVEAAQRNLNPTHALAIDFGIDNLMTAVSNRGESFLIDGKRLKSINQWFNKRNTCLQSVKDKQHYGKKTTRRQAVLQRKRNNQVRDYMGKAAKQVVTYCIRNDIGTLIVGYNTTFQRSSDLGRRMNQVFVGIPFGILRRKLKYLCEMNGIRYVEQEESYTSMASFWDLDEMPVYGEAGLVPPLFSGRRICRGLYQDRSGRRINADVNGALNIMRKCNIVSLMALYARGDVDTPVRIRIA

SEQ ID NO: 57248 - protein, 422 aa, unknown
  TnpB Polypeptide
MILTHEYRILPSDDQAALMTEWLELLRRQWNDALGQRLDWLTATRCPIDRCSLVSCPLPVSEPPLEPNYYRQAGSLKPIKQLFPAYRGIYAEVLQQNLMRLDKAWKAWREPDSTGKRRGRPRFKKAGELRSFTFPRINCPKAGAHLEGETLRLSRLARCLWCCTAPCRRGLCPKPAQWCARPMGGMSASPWKTKAFLSQSLCRSKRRWALMWDWIGFSPPAMGRWCYPAVLPPSPKHLARQQRQLSRKVKGSANWKKQATKVACLQLHVARQRKAFHYQVAHWLVGQYDLLVVEDLNVRGLARTRLAKSILDAAWGRFLDILTAVAVKRGKQVLRVDPRGTSQNCCVCEERVPKALSERVHDCPRCGSWDRDLNAAIEILKRGLRAVGLPLSGCGGSWFTSPLKQQLREVILGSSRLQPVRA

SEQ ID NO: 57249 - protein, 436 aa, Candidate division WPS-2 bacterium
MHGRRIFLRGVCQGVGTLTCFTWSVKHRLVVRLYPSARQAAACEHILTVTRRLWNALLAQRRDAWKTRRLKISSKRQYHELTELRHEDPWFASAYRECEDAVLHRLDLAYQKFFSGGGHPRFKPDARWNQFEFPHGNRALLWDREQDRITIPGVGLVKVRKKRKRVIPPHGRAMVFRRCGRWYALFECEVAPKPLPATGKMVGIDRGIRALAATSDSELIANPRHGAALALKVARAQRTLERRTVRDQRGRVQNGDGKNRARAVEALRKVWDKLKRARRGYLHEVAHALVNRYDAIAFEKLALNGMTRSAKRTREAPGRNVRAKTRLNFALLDASLAMLRTLVGEKAECAARLVIDVPAAYSSQTCSECGFVAAEARSGERYECVNADCGYVGDADVNAARVIAQRAFGRPAGRGAGLPDPDDLRSVLTPGDTRLT

SEQ ID NO: 57250 - protein, 420 aa, unknown
  TnpB Polypeptide
VSHPWKSRGEKRTVTWAYAPPGEVTVYLEDMQQAITHALQAAYEMTIRDPKRRIPSPIDLRRGIKEWFCSNYGYARHHINPICRATVAMLRSYRKNHHGKLRIPDVKRLAMRIDSELFKIVNDKIRLTLQPNQYAWLPINTTNKHYAEYSRERPSELLITDRKVCLTFIAGDEIKPLGDQFVGSDLNFSTIDTTTVTLHSSPSLEGVNTAPITNIARIQNDFSRRRRQIQLHVKNPQKREKKLRETRGRQKNRIVDALHKLSTETVKASPNTSNVFENLKGIRKGGKKKGKRFRTRLNRWPYRLYQSMIDYKSRNRTLYVNPRGTSSECPVCGDKLEHPAWEISRCRTCGVDYARNRLSSLEIVRRGLRLCGQPFAVSADTSWLALKNEYLHTPNQPKNGGTGWTEPTNIPNERLMHNNA

SEQ ID NO: 57251 - protein, 372 aa, unknown
  TnpB Polypeptide
MLRAYKYRIYPNKTQKEQIEKQFGACRFVYNWALEQKIKYYETEKKTLSCFDLINRMVQLKKVEGYDWLKESNSQALQMSIRNLDNAFKRFFREKKGFPKFKSKKNPVQSFQIPQHYTVDFERNRVKLPKIGLVKASFSREFEGTCKTATISRSATHKYYISILVDDGKDIPIKEPFNCNTTVGVDVGIECFAVLSTGEKFDNPKYYKNSLQKLKVLSKRLSRKQKGSNNWKKAKLRLSKLHEKISNQRNDFHHKLSKKLISENQAVALETLKVCNMVKNKNLAQSIYDAGWSAFVKKLEYKAEWYGKTILRIGQFEPSSKFCNVCGYHNKELTLAVREWTCPSCNTSHDRDVNAAINIKKFALQDQNLIVI

SEQ ID NO: 57252 - protein, 461 aa, Mycobacterium sp.
MPRFEIPDGWCVQAFRFTLDPTEDQARALARHFGARRKAYNWTVAVLKADIQTWRETGVETAKPSLRELRKRWNTVKNDVCVNAETGAVWWPECSKEAYADGIDGAVDAYWNWQTSRAGTRAGKRVGFPRFKKKGRDSDRVTFTTGAMRVEPDRRHLTLPVIGTVRTHENTRRIERLITKRRARVLAISVRRNGTRLDASLRVLVQRPVQPNVSLPDSHVGVDVGVRRLATVADADGTVIEQVENPQPLAAALRGLRRVSRARSRCTTGSRQYRERTTELSRLYCRVNDVRTHHLHVLTTRWAKTHGRIVVEGLDAAGMMRQKGLPGARARRRGLSDSALGTPRRHLSYKTGWYGSQLVVADRWFASSRTCHGCGHVQDIGWDQKWQCGSCSVTHQRDDNAAINLARYEEPLASSAQLGPPSSVEPTVRPGLARRVAVKRGREPATRPGNNPETGCKSRDH

SEQ ID NO: 57253 - protein, 391 aa, unknown
  TnpB Polypeptide
MKKQVHKAYKFRLYPTEFQEILLEKHFGCNRFVYNHFLDERNQNYLKNKEQSNCNKDCLKLTQLKKQEEFKWLREVSSQSLQFSLNNLDLAFNSFFKKKTKFPNFKSKFGKNSFTILQDTKIISNKLKIHKFKEGIKINLHRGIEGKIRFCTITKTSTGKYFVSLNCLVEHEILPSTNKTIGLDLGIKTFVKTSDEDEFENIRTTKKYSKKLKRSQQHLSKKIKGSNRYNKQKIKVAKIHEKIVNTRLDNIHKVTTQLIKENQFIAVEDLNVNGMMKMRSLSKHIQDVSWYEFIRQLTYKADWNNRILVKVDRFYPSSKTCNECGYIHKNLNLSERTWTCKNGHILDRDINAAKNILSEGVRQYSEGTSENTNGETKSSNTKVVSEKLVEL

SEQ ID NO: 57254 - protein, 397 aa, unknown
  TnpB Polypeptide
MKQRKKPKDPNKVQRRYNIRLYPTGEQKQMFFKHIHTCRFIWNYMLTIQKKQYGLYKRIYTYCATSKILTELKEREEYSWLNEVSRQSLGIILNDLDTAYERYFKGTNEGLPKFKIKKRSKKSFPVKYDRVYFENDHVHIEKIGMVKFKSSKHVPEGKGRVNDTRIFLSKNGKWILSVVMECDRQTPKEPLYGNMGIDMGIRKLATYSYSHMSDYIPNINKSRRIRCLRSKLKHLQRRVNRIYYVHGNYHKTKHIKRLNNQIRRIYHRIHNIVYDYNHKQTRMLVNLYPRKVIMEDLEIKKITKKMPKWLRREIYYASWYDFRCKMEYKCNELGIEFVLAKKSFPSTQMCSECGKIKTGKHKLTLSDHVYVCKKCGLKLDRDVNAARNLEWYDNYLS

SEQ ID NO: 57255 - protein, 139 aa, unknown
  TnpB Polypeptide
  misc_feature (91)..(91): Xaa can be any naturally occurring amino acid
MKYSSNNYYKQKLKVAKLHEHISNQRKDWIHKLSTELANKYDYICVEDINMQNMAQSLKLGKSTNDNGFGMFRTILGYKLSERGKKLIKIXSSKMCRFCGNINKDLTLADRIWTCICGEVINRDENAAINIMNVGLSMV

SEQ ID NO: 57256 - protein, 435 aa, unknown
  TnpB Polypeptide
MKVIQAYRFALDPAPGQERALRSHAGASRFAWNWGLAKCTERYEAEKRWYSAAEMHRMWNAEKKADPALAWWGENSKCAYQEAFRDLDRALRDFITAQKGQRKGKRLGFPKFKKRGKCRDSFRFGTGVMRCDRSAVTLPRLGTIRTHESTRKLARRLENGTARILSATVSRTAQRWFVSFTVEAERAIPAWHLRPGSAVGIDLGVKTLLTGADSEGNAIKVPGRKPLKTALRTLKRVSRGHSRRQPGSANRRKSAARLARVHARVAHVRADALHKATTDLARRYETVVIEDLNITGMVRNRRLARAVSDQGFGQARRMLGYKTAWNGGQLIVAGRWYPSSKTCSACGWRKPSLTLAERTFTCQACGLVLDRDINAARNLLTLAASGAERVNACGAAVRPGLTGHVAVNQEPGTARCGSDRDRPEATRDCEDDQHH

SEQ ID NO: 57257 - protein, 397 aa, Sporolactobacillus sp.
VKRGETMTLKGLKVRIYPNKKQKLFVQCNFGCTRFVWNQMLGMMIERHKNNLDAPFLNAFALNNLLPALKKEYPWLKEAESTSLQNTNHDLVEAFKKFFNQKHGFPKFKSKKQFKQSYQSKCVNQNIKQAALHYLKLPKLGVLRFRSGKPIPETIKSVTIRKTFTDHYFAVLLVEDESQVFRKTNACIGLDFGVSDLLIGSDEQKIPRVRFDKRQSQKMHDWQKRLARRRLQAQKEMAWDRHNKVLQPRKLSDFKNVQKAQLMVAKIHEKIANQRQNYLHQITTKLVKSDDLIVIEDLKAKNMMRNHKLARAIANQAWGEIRRMLTYKCAWYGKKLVRVNPYKTSQICSHCGHDDGKHELAVREWSCPQCETHHDRDFNAAKNILTLGLGQALVKEL

SEQ ID NO: 57258 - protein, 392 aa, unknown
  TnpB Polypeptide
MSNLTYNIRLHTQSEEDYNLLLNTLLEHQKVWNHMSQHTFQTKQVDKKLIHDANYYNCRKLFPDAPSQVIIRAKDSVYATYKALKTLKMLNSLEEACEQTNLSIRLDKRLYTFLEGNRIKLTTTGKRIICSYNPYPKFAELFSSYSVCDPLIFMRDNQFWLSVSFEVPEPTYVENSCLGVDLGIRRLAVTSEGKAFTDKDFLKQKRQLRYLKRILNSKKKTTNSHSSRRKLKKLRRQERNKNKNLCHHIANKILESSASTIVLEDLSSLKKKNLKKDNFSKSKSSKNRLSQVPFGMVRDILTYKAPLQGKRVKTVDPAYTSQRDHRGLSDGIRKGCRYYASDGLVFDADWNASINIAQRYLNKLSEEHPISLKAPPLDGGLNLIGRLLSTSQ

SEQ ID NO: 57259 - protein, 493 aa, unknown
  TnpB Polypeptide
LSGAEPILSNASSATGDLRADRSVRGVWEHPGMPRVRPDEGHRVVYRTARVLLRVTPAQARRCYGLLRAGGDAWAALIDMNRYRFSRGGRPLLGYQELCREVAGVRVGELSAPALRSVVCRYADATMETARRKRRGQAARYPRRKRALMPLRWYAGTFVLDGLHCKLSTARGTTELWVRLSRPVPYPAAAVRSVTLVAEGGRLALDVTAEVACAKPTGGRRAGCDLGIIHPFALAAGGACLLVSGRATRAEERLHLADTKARVRAMARKVPAGKGQRGSRRWRQLRAAQRRAEAHHLRRVRQMHHQAARQAVAWAKAQQVGTIITGDLRGIARRDAGRRHNWRVANTWRRTHLLAALCDKAEVAGIQILLVDERGTSSTCPQCGNKTAKPRGRNFACPHCGYTGHRDLAGARNIAARGGGITTALAVVTHRRAGTVSARRDRRRHLMDQRRSCPAPGRPPRRGVARQNPPRASEPGSALKGHWRGSANVANVA

SEQ ID NO: 57260 - protein, 419 aa, Streptomyces sp.
MDDQAHAARTMWNCLHSWWQMMPKDKRSLAAADAAIRQARKDLDYLGKLPAQAAQAVLKTYFQAWKNCWGGRADAPNFKGRFRSVMSVDIPQGRDLQIKRVHRRWGMVNIPKVGRVRFRWTKDLPVGKTANTDHRITGARLVKDGLGWHIAFRITTLERTPQPHPGPEVGIDMGVSIPLALSDGNHHDHGRPPRLSDGTSDRDKWLSPDEKAKLLRLEQRAAYRKTFRKPKEKTSRRLHRTYDQIRALRAKATRRSIDWQHKTTTALAEQYGVIVVEDLHITNMAKTPAPKPDPENNGAYLRNGAKAKAGLNRSSLQEAWGRTVTMLTYKTARQGGTLVKVPAPYTSQRCSACGFLTPGSRETQALFVCKNPDCGWTGNADHNGARNVLHLYRIGHVAIPAAGRAVVRRTRGVKPVTAR

SEQ ID NO: 57261 - protein, 394 aa, unknown
  TnpB Polypeptide
VPRKSKIPCGDGQVVQYNTIKARLYPTEVQAELFENTFGCCRYIWNHMLADQQRFYLETDKHFIPTPAKYKKEAPFLKEVDNQALIQEHNKLSQAFRVFFKDPSHFGYPNFKRKKTDRDSFTACNHVFESGPTIYITKDGIRMTKAGIVRAKFPRRPRNGWKLRRITVEKTRSGKYYCYILYECCVKAPETVIPMAETTLGLKYSMPHFYVADNGAMADAPHWLKQSQEKLAKVQRQLNRMQPGSQNYQEAVQKYRELHEHIANQRRDFIHKESRRIANAWDAVCVRGDSMSEISQLVKRGNALEAGFGTFRECLRYKLARQGKPLIVVDRYTPTTRTCAVCGLVRDDEVSYRHRSWRCPKCGTVHNREVNAAKNVKAQGLDQYFGYQEWRESA

SEQ ID NO: 57262 - protein, 695 aa, unknown
  TnpB Polypeptide
MDGDTNIVVCKNKLSNVIKFFPDESIIKPEYLKFRRNELLGIINDTVVRTNKIVFHTYNFLKLYILYLHKQNLKFPTIDEDFVYIIMNLLTERKEKRGAKPSADKLSTISDLTYFYNKFYVDLLAGDDIVSNDKLSYVLKYECIDIVKNINVNIREHFTDHMRKYVNLLFKIKEKKQIILDDTKLTSAQKKELIRNISERYNNIKYDILSTDVECKSDKKFLNKINLIRDTILPYGDFINDNIYYDVKARPQNYLKSMIILNELIQDLNNRRGTEYKLFQVLPLRTSIVPKYITLDTASIVSLFIGKAECFQNLSDLSYKIWRCVFNLDDKCFIRKNHKFIHMIKTDGVACSILLEKITKAERDAPRIIKTTVFENSTHTRFFTEEEKKMRLDRKRQIKEDSSGIVAVKPKIKRKIHNREKNDEKKYDHEYVEDVKLSDEQKKMNFVFIDPGHNDLIKCLLGNFNEPIDDITFRYTRKQRNRESKKIRNRKILSKIKTDKITEKETNMSNCNSKTCDFEKFREYLKEKIKLNRELFDHYAQKIYRKLKLNAYTNTRKSESKMINAFKEKMGMPDETIIIFGDYDKQETMKGSEPHISKRIKKLFVQNNYKLFLINEYNTSKLCNKCSCVTENVEINQKKIWKLLRCTSEKCLTYHDRDLNATRNMKKIVGLLIEGKERPIKYTNPKKITAGLLNS

SEQ ID NO: 57263 - protein, 335 aa, Escherichia sp.
VKRLQAFEFQLRPGGQQEREMRRFAGACRFVFNRALALQNENHEAGNKYIPYGKMASWLVEWKNATETQWLKDSPSQPLQQSLKGLERAYKNFFQKRAAFPRFKKRGQNDAFRYPQGVKLDQENSRIFLPKLGWMRYRNSRQVTGVVKNVTVSQSCGKWYISIQTESEVSTPAHPSASMVGLDAGVAKLATLSDGTVFEPVNSFQKNQKTLARLQRQLSRKVKFSNNWQKQKRKIQRLHSCIANIRRDYLHKVTTAVSKNHAMIVIEDLKVSNMSKSAAGTVSQPGRNVRAKSGLNRSILDQGWYEMHRQLEYKQLWRGGQVLAVPPAYTSQRCA

SEQ ID NO: 57264 - protein, 416 aa, unknown
  TnpB Polypeptide
LFAAQIRITEIIRKNTRKSQKLMKTGYSIRTWRMRLVCPEPIWLDRTEEYFQNVVEFYYHLLRQHEELWNSSLFDIQRSLELLTLTGRDGRQPTNPLPMGKVPVYLRRAAINKASATVKSTQELQSGFPEKLEAKVTFFKGMYSDLTDRSICLKLWNGEKWIWTDCKLKGRPFPQDGQLMSPTLVKEGRRYLLNIPVKQENSDARTAKERMAEGTNLCSVRFTNTDTFAVCCILDEQGKQLAVHTCRGGDAYRHRCKLLETRIQKSRPNTVGDNSPQPNRKYYMHLKNLSEHYAHQVSREILNFCKENQAGIIVLPDYDQNFTRMAMVKSGNFSPLHLSSKIRTNLQYKAWAEGILVLETRTDGLKDKCAICGGKVRRKGNEFLCENGHQGNRFLNDARNLGRKCQDSFFRGSRTK

SEQ ID NO: 57265 - protein, 426 aa, unknown
  TnpB Polypeptide
MTRMQATSIAYGFGAVNPRPSAILNRMQCQRKVEYRLYPSPNQAAELARMSDTCRKVYNWALAERRDYYEATGKTLSFAEECRRLTVARRTDFAWKAVHTHALQLALKRVDLAFGHFFRRVKSGEKPGYPRFKSQDRFSGFGFKEHGNGWRLEKKEVRITGIGRVKLRGKASFDTINPKTCELIQRSGKWYMSVTFVLEALPERERTGEMISGLDWGVETFATLANSDGTSEEIANPRHLRKQLDRLAVEQQAFARRKRGSKRRHLAKQRVARLHEKVRRQRQNFLHQTTAKLAASRRVIAVEKLSPLVMSAAGGAAKAGLNREILAAAAGAFHSMLAYKAEEAGSTIIEIDPRLHRPSQTCSGGGPARKKSLAEREHVLPDGSVISRDLNAARNLLNLALGREPAQHSGPGIGPDTGCETATIAA

SEQ ID NO: 57266 - protein, 426 aa, unknown; identical to SEQ ID NO: 57265
  TnpB Polypeptide

SEQ ID NO: 57267 - protein, 388 aa, unknown
  TnpB Polypeptide
MLRGYKTEIHPTEEQKIIIHKTLGVCRFIYNFYLSHNKEIYEKEKRFVSGMDFSKWLNNEFIPNNPEYQWIKKAGSKAVKKSIMNGEKAFKRFFKKQSKFPRFKKKKNQDIKAYFPKNNKSDWTVERHRVKIPTLGFVRLKEKGYIPNNGIVKSGNISFKAGRYYVSVLVKDKKDYTFDGFSEGIGIDLGIKDLAIVSNIESPFKNINKTKEVKRLEKQLKREQRKLSRKYESLKKQNKNKEGVATRQNIEKQIAKVQGIHKRLSNIRENHINQTVNKIVKTKPSYITIEDLNVRAMMKNRHLAKTVSQQCFNQFKINLEWKCKIYGIELRIVDRFYPSSKRCSECGFIKKDLKLSDRTYICSECEMIMDRDRNASINLANAKIYKLA

SEQ ID NO: 57268 - protein, 472 aa, unknown
  TnpB Polypeptide
VNKTQDELRCILIQPRLSKEQEIVLGNLTYNAGKVWNAANYELMNGKASFNLFDLYNKLRNNFFVRNIQSRSAQILMGQLIEAWKTYFDYLKHPDNYKFPVRKPGFSDKRKPHRTVIYDKTGFKVFGTKLRLSIPKQLREYLREEYGYNDKYLWIDTGIDLTAYDVRNVQLTPLKYSGRIFYQIGIVYAIEPEQYQTDKERLMGIDFNKANFAVIVIQNHPTAYIIDGRGLLSLLRKYLKKIYRLQSLKDNLKNKGLPYNKLEERIAKLWKRIKNLLRDFSHKASNLIVELAKKFKVTKIIVGNVYSSKNEESDLPDLVNQMFKLLPHGKVVNHLRYKFKGEVVEIGEEHTSGVDSVKHEYPSKDNYEPLRRIKRGLFKSVIGLINADVNAARNIIKKHLVNGGRTDHSFLRDTASGLKRVVRLRVFRRLRGSSKSVPVLEQIGVARSCVPLGAVRGLTPQTRPEAPCTSEG

SEQ ID NO: 57269 - protein, 587 aa, unknown
  TnpB Polypeptide
MFVTGVNMRAGRNFQPLSYDLRLPDAAQADALRLLDASRLVVNAALVQLWPYLDDFMTEHPGPAWKQVGEFIGSPAPHGDRQWRCESETAGRILRAQAKRKQVFELIQPILSDGFMRPKTEQRPAGKNRQSIKEAIEALQKTLEEDDTAFVTMQNVVEQACNYFLEHGMFPHTYEDMQVIPLLKVGMLTYAGDDGSKKGQSYRLSFDVQAGTASLRFRFPDETGSWQWRKDPIILQLPACLVERLKAGVHMAPTLRELVTADGNRVAVLDVIVQVKQAELAPWKAIERVLGFDWGVHGLITAVVLSTNPADPEQPTQISRPLFVNTGGLDGHQARTRRQIDQLQAARAQLAEGDAKRAFYEQELRRCWQVYEARNRELAHLAANLLLLFASVWGCALISGEALSTLKSTGRGKGVRGKWRNWRNNTTIRAEIWHILRYKSHLLGIRFRSEKPRGTSHTCPRCGKPAHTYRSPRIHHRADPVKWGRWLVCAHCSYNADRDYCAAVNIARLGVAFLTQMQATGKAQACSVTDASVKPCPYIAHGAVLLFPPQTDLHRLMDSGKLYLNGWKRSCTIRSSYATPLLLRLCS

SEQ ID NO: 57270 - protein, 432 aa, unknown
  TnpB Polypeptide
MTKNIALKVRLYPTSEQIVLINKTLGCCRQIYNTMLASRLKFYDENIKYKELSKSEKIEIYKSYKAPTEKELKTKFEYLKEVSSVALQQSRRDQETAFFKFFKGLAKFPKFHSKKKKNSYREVMNIHFDWNHRTVKLPKIGEVKFKNRSLPKWLNLQNYKLCNSNFLRSITVSKNPCNQYYASILFEVEVPEVKKSFDDENQVIGLDFSPAEMYVDSFGFNGIDNGYKPQKQNHLKQLRKLQRRFARTKKDSKNREKIRIKFARLEKHIADSRKDWIEKETLRLLRKYQAIGVEDLTIKGLMRACKNARNYVDTSWSGFVQKMIDKSSRFNSQVVKADRFFASSKLCSVCGWKFKNLTLNIRKWTCPECGTSHIRDVNAAINLKNNAIESCRSNLHILLEEQKFKSVENTESKAEEISVLAGVLDETEREVS

SEQ ID NO: 57271 - protein, 376 aa, unknown
  TnpB Polypeptide
MISALSGTISRHKNKIVKITLKFRLRDKHAAELNRQAHAVNFVWNYCNETQQKAVAYQRRWLSGYDLWKLVAGCAKQGLDLQAHSAMRVCMQYDKSRRQHKKRWLRWRGKKSLGWVPFNTDAVKFRGGAFVFRKTRYETMHLREMKDGIKIGAGSFNQDSRGRRYLNCPVDIAEANSAPNARVGIDLGLHSFATTSDGEKIKAPQFYRKNEAFLATAQRAKKTKRVKAIHAKIANRRKDFLHKESAKLTKQYGLIVVGDVSPSKLAKTLMAKSVLDAGWADFKNTLRYKSIRNGGSTIEVSEAYSSQVCSACGSLPASRPKGIANLGIREWTCDCCGTVHDRDCNAAKNILRSGLATLVEGARQNGSSHDERKQMN

SEQ ID NO: 57272 - protein, 480 aa, Desulfosporosinus sp.
MKAILTDLTVEQKGLIDNMMIVFGTAIRYSFKRQLEGQTIGHLEKVVANKYKLNIRQAKDAVESARQTIASQHELVKLYCGNYRKKVDALVKKLKYPDLNERKRKALTSKLAKRQHKLDYWTAFLTTKTFPPVTFGTKAMFIKRCKGLITKQEWQDFRNDRFYSRGDKSKGGNPNLRVVFKEGISFLQISTFEKTATNRAVKVLMPIYLPQKLSKKTGKVNGFNYRQMFIDSLERGDAYQVELLKRDGKYYAHITFEELEAKVIYTAHLSMIGVDTNPDGFGITKVSRQGNYQGHAYLKQPELTCCCSNRRLNLCGELVKDAVNKAERHQCGMVAEDLKFKDDRDVTTKLARASSQFVYATLLRMLERRCLRRGVELSKVKPQYTSKIGLYKYCHQYGLDVHNGAALVIARRGYGYREAVPKLLLDKLIPKKMLTVFIAKQEWGQWSEITKQVNKLFKQRKEVNTPGLWLVRRKLLLGNC

SEQ ID NO: 57273 - protein, 373 aa, unknown
  TnpB Polypeptide
MILKRTVKVKLTIKPESLFSTVKSYTYAYNYICSVGWNDNDCNSISLHHKTYQQCKEWLPSQLAISARMKAVESLKSVRARKRKKLKVSCPKSKQCSIRYDRNSYNVWFDKKLVSISTVEGRKKVEFRVPPNFEQYINWKRKSAELFIRKNKVFLGIVFETEITDTQRNKKVLGIDRGISKIAVTSNNQFFEGGKVKKVSKRYKSLRKNLQSKGTKSAKRHLRKLREKENGFRRDVNHCISKQIVDSISPGTVIVLEDLKNIRDSSKKFRKEQRYWINSWSFYQLEVFLRYKAEEKGCLVDYVDARYTSQKCSKCGYTSRGNRVKQSLFKCKHCGFQLNADLNASRNIKSNYKDAKRYLCRAAVNQPIVTSST

SEQ ID NO: 57274 - protein, 422 aa, Synechococcus sp.
MLIREAKLAGTPEQFAQLDAAIRTAQCVHNRCLRYWRDNAGVSKNDLQKFCAVLAKDAEQPWMGLLNSQARQAAAERTWQSIQSFYRRCKEGAKHKGYPKFKKHSRSVEYKTSGWKLSDDGMSITFTDGFKAGQLELWLDGSARQLILSSKINRVRVVRRADGYYAQFCLDVERQEAGVYSGNVIGLDLGLKYFTKDSNGAEVACPKFFRKGEKRLRRAQRRLSKRFKKGAKPQSKNYHKQRQRIGKVHLKIQRQRKSWAIEQARRVMVSNDIVVYEDLRVPNLVRSRHLAKSIHDAGWTQFTHWLDYYGKLWRKVVVAVNPAYTSQDCSGCGYRVQKSLSTRTHDCPHCGLTICRDQNAALNILKRGLEVVGAEWNNGTAGHAETGSQEQTTGEISTSAEVGQPTSVSAVAEPVRTSREAV

SEQ ID NO: 57275 - protein, 302 aa, unknown
  TnpB Polypeptide
MRKTYKYKIQSQKNTIKLGNMLDDMHAIHVHIMRLQKRYYRVFGKNISAYRMNAHVAKLKNRTKLHWKHLPSQVVQDVVLRMGKAYDAFFRNIEARQAGQTTQKVGKPHIKPQHKYNSMTFTQAGYKLEGNRIKINCIDTWFSFHKHREISGGIKTITIKRDRCGDYWICFSCDNVNTPKSFAKTGESAGFDFGLKTFLTTSDGDKIVSPQFLKKSLSKLGTLNKSLSRKIKGSGNYYRAKRALSRHYRKVARQRADWHWKLATDLCRRFDTLCFETLNIDGMKRLWGRKVSDLASISSFNR

SEQ ID NO: 57276 - protein, 360 aa, Galliscardovia sp.
MQETQLLTDTCTAFLSCCNTVSDTAYQQRTISQKKLNKLTYHKLREEYHVGAQMAQSAIIRVIGNYRTIAELHGSSWHGKHPHYHTMGYDLVYNRDYSVLKDGRISINTLQGRVKFTVDWSHMPQPYRHGKFGTARILQRNNKWLLLIPSTITISEPKQPQQIVGIDMGLRFLATAYDSDGHTTFFSGKEVSNKRAHYKTLRAQLQKKGTRSARRKLQAIGKRENRWMRDINHQVSQALISQQAEPTLFVLENLTGIRQATQKVRKRDRYVQVSWAYYQLRTMIEYKAKQHGHTCIAIDPKYTSQTCPRCGMVCKTNRNKRMHEYRCANCSYQSNDDRVAAMNIQRIGYMQLVESQSDKL

SEQ ID NO: 57277 - protein, 356 aa, Streptomyces sp.
VNCWEGRADEPNYKGRFRSSMSVDIPQGRDLNIVRVHRRWGMVSIPRVGRVRFRWTKDLPVGKRADKENRITGARLVKDALGWHIAFRVQSLPRAPEPHQGPKVGIDAGVNIPLALSNEDHQDHGRRPRLLDGTADWDKWLTSKEKAKLLQLERQAAHRRTFRKRGEKTSRRLQHTYDQIKQLRAKATRRALDWQHQTTTYLARTYGVLVVEQLNIPGMTKSPAPKPDPAGEGAFLRNGARAKAGLNRSIAQEAWGRTVTMLTYKSARYGGRLVKVPAPHTSQRCSACQCTTPYSRESQGLFSCKNPDCGWAANADWNAARNILHLYRIGHVIVEVPAAGRRGRRAGKTVKPVAAR

SEQ ID NO: 57278 - protein, 426 aa, unknown
  TnpB Polypeptide
MADNAPRRTAPIKLDVPEQRRDDLHQTKHQFLHCANRTSDWAWRHDELCITSKNKADDALYDDLRDETDLTANLVQKAINRGIHAVDAGVEKLKTGDKTSQPEFKSWSVVYDKRSGTFNADHATLSTPNGRVKTDYVLPPADERERTPFGRYYESDDWDASSATLQYDEQEDTFYLHVTLKNPDYEVDTTECQEAESPDDHEKNGTVLGVDLNVTGAFAVTSTGAFIGSADYLNHKRDQYEQRRGKLQKTGTRSAHLTIKSIGNTFSEWSLNWLHNRANELIEEANNADVGVDGIIFETLDHIRENIANGSKFQQWAYAKFVKLVEYKVESTELFVDFVNPAYTSLRCSHCGFTHEDNRSDKQFVCQKCEYEANADYNAAKNIANRYCGYIHRGQKSHGGWATSQLALKSGTMNVNGDYTPSELLG

SEQ ID NO: 57279 - protein, 382 aa, Gloeocapsopsis sp.
MGCENINLKSRKIRIYPNPELNKVWRRWLAACRYCFNQAIDYQRKNGRIGKRKLRNVIMQSNLPQWVKDSPCHIRQNAIFDAHQAFSASRDAKFRSCRDRQQPIKFNDCNFSQGMWYPKLVKGLKFIASELIPTSCEYCTQLTFSKGQWFAIFPIHTETTKLDLDGVIALDPGVRTFLTGFDGHRFIEFGRGDIGRITRLCQHLDDLISRVRLALSRQRKRMRQAANRLRLKIRNLIDEAHWQIAHYLTHNYRIIFLPTFETSQMVSRARRKIRSKTVRAILGWAHYRFELFLDHQARTTGSTVIKGSEAYSSKTCTHCGHIHQSLGGSKIFKCKSCGNTLPRDFNGALGFMLRALRDSSFTVSDDGVAIAALSSDYPYCVA

SEQ ID NO: 57280 - protein, 392 aa, Gloeocapsopsis sp.
MGNKAYKFRIYPNTEQAAFLAKCFGCSRFVYNHFLRVTTDVYAEFKKSLRYKEWAKLLVTLKSEFEWLSEVNSQSLQQTLKDLESAFTRFFKKLGGFPNFKKKSNRQSFRVPQHFSIDENEFLKLPKMTPIKMVIHREILGTPKNVTISKTPFGKYYASIVTELDIPHAPLNGNKIGLDLGLKEFVITSKGEKFENPRYFQKSLRRLKIRQRRLSRKTSCSSNRNKARLTVAKIHEKVANQRLDYQHKISLKLTSENQRISAESLNIKGMVKNRKLAKQISDVAWGNFLTMLEYKGDIYGCEIHYVDRFFPSSKRCSNCGYIKQDLRLSIREWECPECKSFWDRDINAALNLILFSESKIPLEEGKFTPDQLVERLGMSRSSGSGQEALSEA

SEQ ID NO: 57281 - protein, 515 aa, unknown
  TnpB Polypeptide
MSNPTNQEQPLTSKDPLSSMLGSAVGHSNQTSKGKLQPSQVSTPKRKLSKKSEVVSTSKERNFFSYWDESCLETSQWLSLPIKIDSQGLDLTSSNGSVTRITANSWFSTSQTLVQNEKWLKIFSPYSTALAADSTDSESTKLKSKKIKVYPSRELNQVWRKWLAAVRFCYNQAISHQRLNGKTSKLSLRNAIMQSDLPDWVKDTPCHIRQNAVFDAHLAFSASKDAKFRSVRSYSQSIKFNASNFSKGTWYSTLTKGLTFNSSETIPECHSGTQLVFCKGRWFAVFPVESAVKDNYSSSVIALDPGIRTFMTGFDSQKFLEFGNGDMGRITRLCQHLDGLMGKIVKAPNGKKRPMRKAAQRLRNKIKNLVNECHKKVACFLTKNYRVIFLPKFETSQMVARAGRKLSSKTARKMLTWAHYRFKMELKHQASLRNCQVVDVTEEYTSKTCTKCGKIHPTLGGSKIFSCKSCGNTLPRDFNGALGIMLKALRDTSSVVFNGDSAIVKLSGNALESPA

SEQ ID NO: 57282 - protein, 526 aa, Serpentinicella sp.
LLDFNWRSHYRGNRAVHRKSGRKVIVGNQKILKGGEIMEKKKDEDKILRTQSIRIKKGHRLYTYCDSMCFLSKNLYNTTNFYIRQIFSGLKKDKVSRQDNEVKVIKEINDVIQTLNDIKIAYVEKRRLKELQKPENQKKKIADAKLFESLTEENSYPSYGLLDGVFKTRNQVDYISLPSHSNQHVIKLVFQDWKSFFEASKDYKKNPDKYKGKPKPPRYAKKNGRKIAFFSNQTCVIQDNKYLKFPKTKEKINLGKLGQIEGSLKQVRIVPGHTYYTIEVVFELQEKRVPLKETPERILGIDLGIDNFATIVNNVGQQPIIIKGKVLKSINQYYNKMRAHYYGILRQGKTEKQGPFTSSRLDKLDSKRRDKVKDFLHKASFNIIQYAVGLNIDTIIIGKNKDFKENVNLRKDIKLNFKGIPYSMFIEILIYKANMKCIKVIITEESYTSKASFLDNDHIPSYKDKKEEKLQFSGKRIKRGMYKTKNDILINADVNGAANIIRKVVPDAFGKGNRGVVSTPLVLSVA

SEQ ID NO: 57283 - protein, 438 aa, unknown
  TnpB Polypeptide
MAEKLLKRAYKYRLYPTKKQHATLQWTLDRARELYNAALQERRDAYTSKVKRHPGFYDEETRQQLTKEHALTYTRQAAELPEIKQVRPEYEDIYSQVLQDVLRRVDKAFKAFFRRVKKGQKPGYPRFKGEGHYDSFTYPQSGFSLTADNRVCLSKIGSIKVKFPTGKKAHPPQGTLKTCTIKREGEHWFVVVICEREPERVYHPSEEAVGLDLGLMHFATLSTGERIENPRHLRRAEAKLKQRQQVLARKKRGSARRHKAGQQIGKLHRHIRNQRRDFHHKQARKLVTRYGLICFEDLKPANMSRRPKPKQEEATGQYLPNGASAKAGLNKSIRDAGWGQFVRICEGKAESAGTRVLKVNPKNTSQRCSQCGAMVPKDLEERWHSCPSCGAELDRDHNSALDVLRLGLEALAFPPPPKKRNKAQARTEPSGDALLRSP

SEQ ID NO: 57284 - protein, 396 aa, unknown
  TnpB Polypeptide
MFRAYKMRIFPTEEQKVLIAKTFGCCRWYWNQALHDNIEYYKENGKGKITTPAKYKTENAWLKEVDSMALCNTQMDLQSAFSKFFAQSNVGFPKYKSKKRPKNSYKTTSSIGYEVSVEYIKLPKLKRMRLINHRHKTGKCKSATISLTPSGKYYVSCLFEEDIEILPKTDTELGVDLGLIDLAICSDGTKFPNLKALRKNLTKLKREQRRLSKMTFGSNCYLRQKQRVAKLHEHIANQRKDYLHKVSHKLINENQVVCLEDLNVKGLLKNHHMALSISDVGWSEFVSMLQYKADWYGRTIQKIDRFYPSSQICSCCGYKSGKKPLHIREWTCPECGTHHDRDVNAAKNILQEGKRLMAASTCRDRQFMLSDKLPQPKNEIVKLNRVASSDLLGRSG

SEQ ID NO: 57285 - protein, 533 aa, unknown
  TnpB Polypeptide
MKTTLPSNRPIACSFLAVPQVRHQVTCSSQRAESHLIRLISNPISLKRMAPMTSLTGNPDPNPVPSGRVSRARLSGRALRADVLAMMLSGAPVKCGNHMPALSVATFECHGSALGCGVVAVRNRMYPGARAEVVMRDLHCAHARFVWNLAVEQQSWWRPGRGSAPGNAERMRQLAEARGAEPWLHAGSSSVQQQALRDFDQAMAAFFDPENPARHSKFRSKRGPQAFVIRDTKVRRISRKWGEVFVPKCGWVRFRWTRPVPAKPGMARVTLDRAGWWHVSFPAPQPAVERESSGTAIGIDRGVRTALVTSDGEHYRVPRISDRDAARYLGLQRRMSRQQKGSRRREKTRLAMAKITARVTGQRRDWAEKISTRLVRGHDLIVLERLNIPGMVRRPAPKPDPERAGTFLPNRARAKAGLNQGILASCWGVLSRCLEQKAAASGVTVISVNPRFTSQQCRACGHIAAGNRESQAVFRCQQCGHEDHADANAARNILARGLSLANDGPVSAHARGPAGVRPHRTGKPAAGTTRSAA

SEQ ID NO: 57286 - protein, 415 aa, Rhodococcus sp.
MARFEIPPGSTAQAYKFALDPTPAQVRAFRSHAGAARKAHNTMLAAVKAVLDQRTAERSYGLAEDELTPSLGWSLPALRKAWNARKEDLAPWWRENSKEAYNTGLDALARGLDAWSTSRTGQRAGKTVGFPRFKTARSRRSVRFTTGTIRVETDRHHVTLPRIGRVTTHESTRKLARRIEAGTARILSATLSEDSSGRWHVALQVLVQRPVKVPAHVGFGEPVVGVDVGVKADALLVVATPDGREVDRVPAPKSLSAAQARLQALQRRAARQHGPYNVATQTKQKPSKRWRKTQRRIGRTHAHAAAVRRDVLHKTTTALAQWHQVIVVETVNAAGMRSAGGAYKRGLNRALADAALAQIRRMLVLQDPLVRLDAGGGRPLLPIIENVFGMWQATTKPDPRGPDVRVCTLRPDDRS

SEQ ID NO: 57287 - protein, 388 aa, Kurthia sp.
MPYKAYKFRLYPNKKQQALIHQTYGHCRFVYNHFLEFWNTSYKAEGKGLNRSLMSKLLTKMKQQDDTAWLRNVDSVALQASYENLFAAFEQFFKKQNNYPRFKSKKNPVQSYTTKNINNNIAIVSKRIKLPKLGLVKFKQTCRLEGRIMRATIKYNASGTFYVSVQCEVPDFKPLPQTKEAVGIDLGITDFAILSNGRKVDNQRFTKKMEQKLKREQRKLSRRYEQAKKDNRDLKKSKNYQKQRMKVARLRERVAFQREDFLNKLSTELIRQYDIICLEDLHIKGLLKNHKLAKAISDVSWSSFVQKLMYKAKWYGREVVKVSRFYPSSQICHACGHYDCKKSLDIRAWTCPSCFTTLDRDINASRNILGEGLRILNNPTVGTTGIAY

SEQ ID NO: 57288 - protein, 244 aa, Hydrogenibacillus sp.
VRVPLAVTRKQAAILERLGRDVKQRAAKLYEKRGRWYIALSVTLPVEEKKTLPADKIAGIDMGLRYLAVVNAGGETLFFPGDQAAYIRRRYHALRRRMGKAKALKAIRRMKDKEARWMKDRDHKISRAIVDWCLARGVGTIQMEKLEGIRRRKTRKRDFGRSLHSWSFYRLQQFIAYKARLAGIRVEWVNPKNTSRTCPRCGHCASENRSGIRFRCRKCGYEAHADAVGAWNVSFAISGLAETA

SEQ ID NO: 57289 - protein, 521 aa, Oscillatoriales sp.
LSRLAGCDGTGQVRSPGHWVQTHQNSTLGVDVVRPVIKCPKPLGCGSVRVACILHPLLPKGAGGARIAPFPGLEAGLRMRVRFRARIWIDAGKPLTKRKGTSPALLGRLFRSPPLIMLVMKARFRHRIYPNRPQRLMLAKTFGCARVVYNDAIRLRQDLYQQGEKVSDTELQKRVITQAKLTVEREWLSEVASVPLVQSLQDAHLAFRNFFNSLKGERKGRKVGFPKFKKKHSTQSIRFTTNGFSVKTNSVYLAKIGCVRVKWSRELPSDPSSVTIIKDAANRYFASFVCEVDSVVLKAINDGVGIDLGLTTFATLSTGEKVLSPKPLVRSLKRLRRAQKQFSRKVKGSNRRELARRKVARIHARIKDQRTDFLHKLSTRIVRENQAIILEDLNVSGMIKNRKLSRAISDAGWYSFRQMLEGKSIRYGRDFQVISRWEPTSQRCSACGQLGGKKPLNVREWTCLHCGAVHDRDINAAINIQVAGGQSETLNGRGGQRQSSSLVAANEASTRGLVEQLRLFA

SEQ ID NO: 57290 - protein, 376 aa, Anabaena sp.
MGDMKTLKFKLYQHKRNRHLKRTINAAGVIYNHCIALHRRYYRMYGKYLSCAKLQSHIAKLRKRNSFWQQVGSQAVQDICQRIDKAYQLFFKHNKKGVRPPGFKKVKKYKSFTLKQAGYKFLSGNRVKIGSKVYQFWKSREIEGTVKTLTIKRTTLGELFMVVVVDDGSSEVEVKTGRIAGFDFGLKTFLTCSDGTKIESPQFFKQSLNAMTKAARQHSKKLKGSSHRERARKNLVRKYEDISNRRRDWFWKLAHELTDKFDVLCFETLNLKGMQRLWGRKISDLAFGEFLQILEWVAKKKNNLVIFIDQWYPSSKTCSSCSHVLENLDLSLREWRCPSCQSVNGRDENAALNIQMVGASSIRLGDVRQAMPAIAV

SEQ ID NO: 57291 - protein, 444 aa, unknown
  TnpB Polypeptide
MSYNIHEVVILVIMSVRIRLLPNNKQRTKLFQFAGAARFAYNWALNKQMENFREGRKLQSDYDLRKEFTVMRNSGEKLWLLDVSNNVTKQAIKDLCTAYKNFFRKQKQAGYARYSPKKIGHYARIGRKLTVYDMNGHPKFRSKKNGDFRFYQDNIKIQFTDTHVKLENIAGSKKKNRQKLNWIRLAEKGRIPAEAKYTNPRITFDGENWWLSVGIRTSRKLKPVRGLRFVRKQQGQSRTEGVGIDLGIKDLAIISDTTRVKNINKTLTVRKLKKTRRRLQRQVSRKYQMNKEGDSYCKTGNLIKSEKRLLRINHRLANIRTNHAHQATAAIIKRNPSFICLEDLNVQGMMKNKHLSEKVQEQNLYEFRRQIEYKAYWASIAVVIADRWYPSSKTCIECGHIKKGLKLSDRTYVCPYCGNVIDRDFQAALNLKRYGEAELSPSAS

SEQ ID NO: 57292 - protein, 759 aa, Prevotellaceae sp.
MTYRGYKYRLYPNAEQRAYFARCFGATRYCYNYCVRQYDAACAAGVQLSGFDIGSRLREHLQDVKWMADVDSEIKDSAPHRFDIGLMKFKRHEANRPHEHKKGDRPDISYTTYGDSIKIDFKHDLVQLPKIGILRARLHRSFDGEICSATVKREGDGRYYISLNVNVGETAAPKKPHTAEGTVGVDVGLSHLATLSTGDFKDMPDTTRTVNRLQFLKERHSRQHPGSRQYNRTARQIASLHRHLASITKDRHHKIAAELCAAYDTICMETLDVQGMRRGQPGARTTGEKAFNLKLHEMALASLVDRIRQKADDTGTNFVAIDRFEPTSKTCHVCGYVSPKMDLDTREWTCPECGTHHDRDLNAAINIRNKGIELLQTHSPQPTHTLPPAEGNVKTAKETATGCDLRTVKRKVVTGRPPKAKIAVGSAPPRIFNRHPIAPDHPFRLFNMNELARLADIPNQTVKRIINEGRFVEPTPENKETVIKLLTTIKSVSANLRLMRSDMTHAPCDTLGRINKIIRISRIMQPKFHFKSTFTNWRAQPFDDFSISLINEVTVELANKLDIQADKYLLPILPKPVVEPIKKMKPLRRERKTDTLIVASDDPNILTYEDQILTTLRVCFIRKYCHAYQDTINNAIGNGTMFRPENCTRTRMATFVGALYGVAEVLECLGTTAEGMRERLDQLYYINENYLELRRIAMRYIKYDIADFFLYFKRAGMVTTAFYDENYPEIMQVITHDFPILIRECAAYLTSVYQLKDVA

SEQ ID NO: 57293 - protein, 415 aa, Bacteroidetes sp.
MQLVEKHIIKKSDSRYKILDEHAFLSKNLYNASLYAIQEHYKQTQSFLNYNALCKKFQDDNNPDYRALNSKIGQWVLKQACTAYESYFKALRDYQKHPHKYKACPRPPFYKPKIRGRNVLICTIQTIGRKKFAEKTLALLGGLVELRTQILPTFQPKKEDQPEKSNIAQVRIVPRKGAYHLEVVYEKCPEKYDLDVNKVAGIDLGVTNLATVAFNDNTIKPFYINGRPLQQINHYYHKLKAQLQTALPTGRHTSHKIQQLTLKRNNKIKDYLHKASKKIISYLIQNQIGTLVVGYNPLWKQNVNLGSLFNLKFTQIPFAEFLHQLKYKAELAGIVVKVQEESYTSKCSFLDGEKIAKQTAYKGKRIKRGLFKSAKGLLIHADLNGAYNIIKKAIPSAFAKGIQGVVVHPYRDKIL

SEQ ID NO: 57294 - protein, 545 aa, unknown
  TnpB Polypeptide
MMPERPIFTYQTRLALDAAQAQVLDDYACLHGRAERSLFAALRAGRALNDLKREFLPRFGITARQFNAVRVGLEGKIDSIKARRPELIAETRQRIKKAQTVIAKLEVRAAGTHKLHQKKRRLANLKSRCAALEADHATGVARLCFGSKRLFRAQFDLVANGYASHADWQAHWQRERSNQFFVLGSQDETAGNQTCQALLDEDGSLTLRLRLPDTLATQTGTQTLELHGVRFAYGHDQLAAALNTSRRISTTTKAGKPTIKRIGAAISYRFVRDDKGWRVFASVEARPVEQVSRSEMGAIGVDINAGHLAVSETDRFGNLIGAKRIDLLLYGKTPAQARALIGDAAVSIAAQARNAGKPVVMEALDFQKKKAELEAVEPRQARMLSSFACRQITSHLRAACFRAGVEVIEVNPAYTSVIGAVNHAQRLGISVHQGAAYAIARRGLGLSERPPKRPAIVPVRNGGHVTFALPARNRAKHVWSYWADVRRKLKAAHVAHFRSGEASAPPAPLLSATRAVCSHRNFVAKSHDANRSQHCSASVIEDIPW

SEQ ID NO: 57295 - protein, 346 aa, Streptomyces sp.
VIVMQLRYAFRLYPDAAQQAALARAFGCARVVFNDAVRAREDARKAEQPFPTAGQLSRKLITEAKQTKERSWLGEVSAVVLQQSLRDAEKAYRNFFASLKGTRKGPRVGAPRFKSRKDTRQSIRFTANARWNITDSGRLNLPKIGAVKVKWSRTLPAVPTSVTVIKDAAGRYFASFVIDTDPAADQARMPETDRTIGIDLGLTHFAVLSDGTKIDSPRFLRRAEKKLKKAQKELSRKQKGSKNRAKARLQVARAHAGVADARREFHHQLSTRLICENQGIAVEDLSVAGLARTKLAKSVHDAGWALFVSMLEYKAERYGRTLVRIGRFTPTSQTCSTCGVKDGPNP

SEQ ID NO: 57296 - protein, 397 aa, Burkholderiales sp.
MLTAHKIALDPNDVQATYFMKACGVARFSYNWALAEWQKQYEEHTKDPSRSKPTEGALRRQLNSIKREQFPWMLEVTKNAPQMAIMQLGKAFINFFAGRAKYPQFRKKGIHDRFTLTNDQFTIEDRHIHIPNLGKVRMRETLRFTGKILSATISRIADRWFVSIAMDTPDLPKPLPHPKTVGVDVGLSTMATLSTGEKIEGPKPHKILLCRLKRLSKALSRKVKGSRNRVKAKTKLARLHARISNIRLDATHKFTTTLVRQFGTICIEDLSVRKMIKNRRLARSIADMGFYEISRQLDYKASRNGVGLIKADRFFASSKICSSCGYMLATIELSIRQWTCPDCHEVHDRDVNAAKNLKKYAVSSTVKACGGSSSGRMGIPFGETAPMKQEVNINSYL

SEQ ID NO: 57297 - protein, 374 aa, unknown
  TnpB Polypeptide
MKRHLDQLLRTKKYRGLRKSYGKISKSIKSLQQIKELSNVQKRHLKDQKKNLQTVSDQMNEMQETYHVTWEYCRNTMKTLRLKYEQTSVIALSRAEDIWTAVSKVLYSDGERLHFKKRGDLPELRAKQFHKEIIGRVKNGSLEFRYGKVSLPVIRKETDLWLMDELEAVESYLKDPSFHDAYAIDQMKHGEIVSTYRPCYASIVCKTIRGKLRVYLHLTVEGLPFPKRTKDGVIKHLCGDGIVGCDIGTQTIAYTSDHVVGLENLAERGNSIRCVERQQRLVQRAMDRSRRAMNPDNYNADGTIRKGKKTWIKSKRYQKLQLSYRELCRVSAENRKLAIHEQVHKNAEPWRCLCHGSKECEKVTETGKSRRSVK

SEQ ID NO: 57298 - protein, 461 aa, Methanocaldococcus sp.
MLIILIHKLKEQLGYYPNNEALLYSLLAEKLNLKRTKDKNKIEKLNKLLEIIKSDNFLSELLNSMKKLKNELNNNPALQSIIRQVCKDFKSYRKAYEEYLANSNKFTGKPKPPKAKKLKNIDKFTIELNKMSFKVNNKILHVKLHKNKQIRIKLPEFIKKPSSIRITYYLGFAYVDIVHDKYIGELKPLSNYKAGIDLGVENFATIVSTNDNIPSIVIKSSHLKAFNQWYNKLLAKLRSRIDKVKNLLKENSEDKNLLSELEVLTRRIRKLHLYRKKWMENVAHQVSKAIALYLHKTGHDKVFIGKNILEAKNGSNLSKRVNQNFVQIPFRLFIDKLAYKLKWFGIKLVEVDESFTSKSSCVSDDIIEIQKSKGKVSMSGDRICRGLYFDKVINLIFHADVNGAFNILRVGLKRKRLFKKIDRIAKVKLCRPKTVRLFEFCRVVLGNLCPPNWAVEVGLSR

SEQ ID NO: 57299 - protein, 408 aa, Methanocaldococcus sp.
VSKLEVTRVLTINLTRKLTKEQWIILNHLTYSASKLWNVANYQIIQGNVKLSELEKKLKDNFWYKNLHSQSAQAVLQKLKIAWINFFKQHAKRPRFQPKDGHFPVKWKKDGFRIIGNMLRLSLSKQTRNYLKERHGIESKYLWVGLPKALPLDAVQVKEVEIVPHDIYGERFYVLHLIYKKEVNPHKPKEEKVMAIDLGVRNLATVVVEGEKQPVIFDGRILLSKLRWFAKETARIKSIIAEQGLKSCKRLARLAVKERNYVKDYIHKISRWIVDLANNNGVSRIVIGDLSKSITKIDIGDRVNQQLHKIPFGKLINMIMYKAEELGIKVEQIDESYTSQKCSICGMIRKSNRKYRGLYVCSKCGTVINADVNGARNILFKVVPNPERGRDSGLGNPWRVRVLNPLLS

SEQ ID NO: 57300 - protein, 428 aa, Methanocaldococcus sp.
MPNKTKSKDNQELSYQIVLSYKVSHNHPIKTFLIECRDKLNTAISIIWNNIEYSKENKPKLPKSKEFKRELRNKLLEDWNYASHYIDGIIKTAYSILESWASNYKRGYRTKTKPIVKRLFVRVKTTLIKYDKGNGIIRITIKPREEYLTLNIKNEWFFDKVRNLTVGEVILKENEAFLTFKDNLNYSDREIIVGVDSNLKSLDLFHPIEGWIRIDLSELHRIKEVYDRKIDFLKKLLKKCPLRALRKIKRLFERRRNRVNDYLHKLTIQLSRLFPNAIFVFEDLNKRKMYKNKHHNRRIDRANWMGIIEKLSYKSIIILVNPAYTSTTCPVCGSKMKSQEGQVVYCYNCMNSFNRQLVGCFNIFKRGFKRFKEFMGGVGVPTTGAEVSLGKLMTPNPNVEAKLPIRKIEDFPLMVYGVDLNRKYLKRL

SEQ ID NO: 57301 - protein, 414 aa, Methanocaldococcus sp.
MPNKTKSKNSQELSYQIVLSYKVRHNHLLKTFLIECRNKLNTAIDIIWNNIEYSKERKPKIPKSNKFKRDLRNKLLKDWNYASHYIDGVIKTAYSILESWASNYKKGYRTKTKPIVKRLFVRVKTTLIKYDKEKGEVRITIKPRKEYLILNIKDEWFFDKVKDLTIGEIILKENEAFLTFKDNLNYSDKEIIVGVDSNLKSLDLYHPIKGWIRIDLSELHRLKEVYDRKIDFLKKLLKKCPLRSLRKIKRLFERRRNRVNDFLHKLTIQLSQLFPNAIFVFEDLDKRRMYKHKTFNRKLDRVNWNGIIEKLSYKTIVILVNPAYTSTTCPVCGSRMESQEGQVMYCYNCLSSFNRQLVGCFNIFRRGLGKIKELMGGSGVTTTGAEVSFGKLMTPNPNVVYKVDYNGKYLMRIT

SEQ ID NO: 57302 - protein, 421 aa, Methanocaldococcus sp.
MSEIIKLTKTIVLKSKPLTKTKIKIIENIIEMYKDVLSIALNFGLKNKRKSHRKIREVIYEEIKIKYPKLPTHYIYTASQDASTRIKSFISMKKKNKACTSKPEVRNVSLWLDDILFNYKNFKTNIERLFSINKEGKKTLHLRLSTPNGRIVIPLKPHKQFFKLLNEGWKIKAGFKLRLNKEDGTIAVLIPLENEITINDNFKEVYALDFNLDNITYGNFENIKMIKTDLGKLTEKYSNIMANIQEKFSFKVIHRQDKPLKKKGFVLLKKFGRRLKNIREDKLKKLANKIAKELRDKNAVLIIEDLSPYFNQNIAKKSFKNLKHKLHNISAKKFLGYLKNKCLEFGVKVVEVNPAYTSVLCPNCGNRLSQLYKLVDERALPSRPMYCFECGFYADRDAVAVFNLIKRFWGLSVVPKSPMRP

SEQ ID NO: 57303 - protein, 405 aa, Methanocaldococcus sp.
MERLLKMSNEYLETIKLTARFKIKQTPNEIVGLFSTYKTIVNELLNYAFENNITSFKRLKSEKYKELREKYQKLPSHYLYTACQITTSIFKSWRKRHRKGRASKKPDFKGSVIMLDDHLFRLDLDNGLARISTPKGRVEVELFVSEYHKKFKDWKVGQAWIVRRKDAYYLNVVFSKNVLIKEGESVVGVDLNENNVTIATTNGIIQIITNERTVRTSYYVKRRKIQKKVENEDKKKELLEKYGNRERNKITDIYHKVVNKIIEIAKSVNGVIALEDLKEIRNKIKYSKKLNGRLHRWSFRRLQEVIKYKAKLNGIKVIFVNPHYTSSRCPICGGKMSPNGHRVLKCEDCGCILDRDVVGSLNIMLRGFKLLFNKPKDVGSPVPPESPLLGEDSPLQIIQQIIQMF

SEQ ID NO: 57304 - protein, 390 aa, unknown
  TnpB Polypeptide
MIKTIRVMLLPNNKQKTKLFQYADTSRFAYNWALEREQENYKNGGKFMSDTDLRKEFTQLKKNPKYTWLNEVSNNVAKQAIKDACNAYQRFFKGLAQFPKFKSRKHSSPSFYQDNVKIQFTSTYVKVEGFAASRKKNKQKLNDIRLAEHGRIPADGKYLNPRIKYNGLNWYITVGVEEGNHDLVPSKDGIGIDLGIKELAVCSDQQRYPNKNKTQEVKKLEKRKRRLQRSISRKYEKNKRGGRYGKTSNIVKSEKQLLRLNHRLTNIRQNYLHQTTSEIIKREPKFICIEDLNVSGMMKNKHLSKAVQQQGFYEFRQQIGYKSAWNNIQLIIANRFFPSSKLCCCCGKIKKELKLSDRIYRCECGNVIDRDYQAALNLKQYGERALPSAS

SEQ ID NO: 57305 - protein, 354 aa, Moorea sp.
ITMLLAEDWMLTQVNNLRLDEQQILALKQMCHLSKNMFNVGLYNVRQYFFQERKHLRYESNYYHSKENDNYKLLPTDIAQQTLKIVDRSFKSFFGLLKLKSSGGYQEKIRLPQYLPKDGHFLLVIPIRKRDWEKLPGKDWLFTVPMSCKFKREHGAVQFAVPERLRTKTVKEIRIIPKYGARYFDVCYCYEDESEEQVEQTGEILGIDLGLENFATCVSTTQKSFIIDGKRIKSDNQYNKRNSKLQSIKDLQGIKALTNRQAKLLRKRNHKVRDFTNKAARYVVDWCRNNKISKIVIGYNPDLKQKVNLGKRNNQKFTQIPIYTFKDKLESLCQRYGIEMIEQEESYTSKACAI

SEQ ID NO: 57306 - protein, 507 aa, unknown
  TnpB Polypeptide
VGRLLRAQAERKKAFLLVALILTDGFIRPKTESRPAGKNRPAIKEAITALQRSLQDDDISFVALQNVIEQACNFFFLQDRFPTSYQELQPIPLLKVGMLTYAGDDGREKGQAYRLALDKDASVARFRFRYPDENGVWRWRKGDTIIPLPACLQERLRDGELMAPTLREEQRTDGERFAVLDFIVEVKNTEMVEWQSVERVLGVDWGTHTLLTATAVDDQSEQVGRPFFLDTGGFDGKQARTRRQIDELKKKIARFEQERDQLAASHPKRAWYQERLALYRRELDRGFLKYERRNRSLAHLASNILLLLCAIHGCSLLSMESLKTLKSTGRGKGVRGRWRNYRNNSTIREEIWRLLRYKCRLIGLRFHTEYPRGTSHACPRCGKPAKTYRSPDERTTDVKWGRWLWCEHCSYNGDRDYCASVNIARLCVAYLLQMKHTGRERACSIFDPLIKPASYTGAGSALLLPPTSSHARPPHAGKLCYCPGWYASVFLQSSQLRAVFPRLHRIA

SEQ ID NO: 57307 - protein, 413 aa, unknown
  TnpB Polypeptide
MRYRYRIEPEPRQQQMFARIFGCTRVVFNDALAAREDAYRAGTKLSDSAIQRIVITDAKKTDERRWLAEVPSVALIQSVNDSRRAWRNFFDSRTGKNKGRKVGRPRMKSRKTQRQSFRLTRNGFSVRPNGRLYLAKVGNVRVRWSRNLPSDPSSVTINREPDGHYYASFVVNVEAVSLPAVNREAGVDVGITRLATIAATDGSRIDIQNPRYLERKLRKLRRLQREKAQRQKGSANRNKTRRKVAVAHTKVARERRDYHHKQALALVRENQVIHVEDLNIPGMLRNHRLARAISDAGWGQFVELINEKADRHGRTVHTVSRWLASSKTCSFCGHCVDALNLKIRTWICPTCQATHDRDYNAAKVILAAGRAERRNASQEAGPDRSSGPGGVLLSPSTSRKAWSDETGSSPSAA

SEQ ID NO: 57308 - protein, 274 aa, Mycobacterium sp.
  misc_feature (151)..(151): Xaa can be any naturally occurring amino acid
  misc_feature (153)..(153): Xaa can be any naturally occurring amino acid
  misc_feature (158)..(158): Xaa can be any naturally occurring amino acid
  misc_feature (164)..(164): Xaa can be any naturally occurring amino acid
  misc_feature (169)..(169): Xaa can be any naturally occurring amino acid
  misc_feature (256)..(256): Xaa can be any naturally occurring amino acid
  misc_feature (258)..(258): Xaa can be any naturally occurring amino acid
MARLKVPEGWCVQAFRFTLNPTQTQAASLARHFGARRKAFNWTVTALKADIKAWRADGTESAKPSLRVLRKRWNTVKDQVCVNAQTGQVWWPECSKEAYADGIAGAVDAYWNWQSCRAGKRAGKTVGVPRFKKKGRDADRVCFTTGAMRVXPXRRHLXLPVIGXIRTYXNTRRVERLIAKGRARVLAITVRRNGTRLDASVRVLVQRPQQRRVALPDSRVGVDVGVRRLATVADAEGTVLEQVPNPRPLDAALRGXRXGQPRTLTLHERLTPLL

SEQ ID NO: 57309 - protein, 440 aa, unknown
  TnpB Polypeptide
MSRKEVSLEERQKIKDSLNATRERRKTQTIRVFELKVNCHHTSKETYKKFDECFKQAKWVYNDMLNFGEENDIFKYEYKDHKEITRLDKDGNKINEKLNFHSIYHRSIIKQLKTNISNLHKAKEKGIQIGKLKYVSEINSLPIITGFIKIKDKKHITIPNFSNLCVYGLEQLDKFKDYEVADGRLIRKPSGIYVKISICINKDYFKSKKNNKTVGLDFGIRKNITTSDGEIFNCNVPESEQLKFLQRKLHKKKEGSKRYYRLRNQIRREYEHLSNKKTDESNKLIHHLKTNYDIIYFQDEQLVNWKKKKKKKSKKGKKNNLSFGRKIQGSYLGRVKGKLVSLEKEQKSFKISKWLPTTKFCPQCGNLNNIGDNETYICECGYTMDRDIHASKNVKLFGSTKRAEWLEQPSAEMSTSTKSVASRLVMQVSSLKRKQEATTF

SEQ ID NO: 57310 - protein, 359 aa, Paenibacillus sp.
MLISYKYRLYPNREQRKTIDFTTERCRLLYNRLLDERIHAYREEGKSLTYYDQANTFSERKAAIPALKQVHSQLLQDVAKRIDKAFQAFFRRVKAGEKPGFPRFKPATQYNSFTYPQGGYKLELNKLTLSKIGDVKIKLHRPVEGKIKTCTIIQKNGNYYACLSAEVEPKQLPQCTDAVGVDLGVKMLAVTSDGEYFESPAYLRKSEKRLKRLQRSVSRKKKGGNRRKKAIRVLARLHEHVANQRKDYAHKVSRQFVNRYGLIAFEDLNVLGMVKNHHLAKSIIDSGWSQLVAFTSYKAESAGRVVKQVDPRHTSQLCSNCGQIVNKQLKDREHHCPYCGFVADRDENAAVNILKRATA

SEQ ID NO: 57311 - protein, 508 aa, unknown
  TnpB Polypeptide
MDRQQRTYQTRLSLTESQEAIFSGYASLYGKVERSLFARLQAGDGIKPLKRALQKRFGITARQFNAAHAGLTGKISSIKELQPELIKDLKGRIMKTRLVIKRVTEPAVRHQKKRRLAILEQKLQHLQQDRKDGTVRLCFGSKNLFHAQFSLKDNGYGCHEQWQSDWQSVRNSQFFVLGSKDETAGCQGCVATVTEDGSISLRLRLPNALKEKYTVISGLRFEHGHEAIAACIGRNLSDDKKQWQAISYRFLKDDKGCRVFATVSVAMVKKISDITSGVIGVDINENHLALTETDRFGNPIEFFSVSCVTYGKTAEQRKAIIGDAVKEAMAFVNERKKPLVIEKLDFRKKKSAFEKESPKYARMLSSLAYTQIQIIIRARAFDTGIEVMEVNPAYTSVIGQYKFSGRYGMSGHNAAALVIGRRSMGFGESLPGQLHGTLPLPARNRGRHVWSKWAAASRKASAAHAAHGRSGSTARSSPSPAFRQGTACDQSVWTGEIPACESSLELFE

SEQ ID NO: 57312 - protein, 463 aa, Phormidium sp.
MVQTTSIIRTDRWTLNPTASQPVLLSQTVEVYRRVCRHLMGILFTHWPSLAELSSQKRVLAVEKLIHQTAKNPNPKYQQFDQTFYKFPSYYRRAAIVFAAGQVSSYMTRYREWQSGTRQRRDAKPPVLNPNSGCYPTLYKGGCYKLHGYDRIEIKVFNGTDWVWTTVGITSLRERHTVDSNKLRSPSLIFDEPTRACHLSVPFECHPHKREGEGRVVSVDLGINTTATVAVVNFDGTVIHREFIHPGRDIDEVAAAAGTCVQRNGDCRDKRLKSVSKRASKTMGNGGSLQKGFCSHTYRKCRHINRQIGQIVSKRIVQIAQQFNADAIVFENLKGWKAKGGRKRSNLRQRFHGWLKGMIRDLTEMKWQEIGGKVIDVVAAYTSKLAYDGSGVVRRDSNNYALAKFSSGKRYNADLNGALNIAARGILQLTRRKDSEERSSQCSRRSPRSWACLCDLWTSTVRG

SEQ ID NO: 57313 - protein, 408 aa, unknown
  TnpB Polypeptide
MLIYEYKVAGNKQQYQAIDEAIRIVQFIRNKCLRKWMDGRGVSKNDLQCSCAVLAQEYSFAAPLNSQARQASADRAWAAIARFYENCKNKKPGKKGYPRFQHDNRSVEYKQTGWRIEPDGKHITFTDGCGIGRLRLVGNKKQSVETFPIKEIKRVRIVRRADGYYCQFAVHAERKIEHRSTGKQVGIDVGLKAYCTDSDGNTVENPRYYRKAEKRLKRQHHRLSRKKKGSANRKKARKQLARAYLKVQRQREDFARKRANALVTSCDLIAYEDLKIANMVKNRRLSKSISDAAWGRFLTWVKYYASLHQIELIAVAPNFTSQDCSACGTRVKKSLSVRTHICHGCGMVLDRDHNAAKNILHAALLILLLRAFAGTVGQTGTSSEEENASGQPASTRLSRRRKMGKRAG

SEQ ID NO: 57314 - protein, 558 aa, unknown
  TnpB Polypeptide
MRPLSSPVLVNATPHITVEAPLYLSEADERVLKALGGQFEHWAGVALRERCRYGSTFDKDAWMAIHHQVRAAGAPTVYANAVVADAKALWRTTRKAQRRQLQDVIRALRVLDQKLSLPPGDPKGYRDRKTWDGKFRRRQHLRSKQARLQRKYDEGRLSITRGGKHLLRNRHSLEESRFGSVDEWRVHWEARRRSIFGAGSSGPHSSLWCRVDPDSGEIFILLPETLRAYANVNPPHTTLPWYRLDAALDLSHYRGRQAWRADGFRRARQQGRPVTYSFSYDPAIRQSRGGWLVRATFEVPLPSAPIKKVGDVRGLRVAAVDLNADHLAVQLLDQSGNPTRARATLALELEGLTTAQRDGLLRRTVEDLAEFCRRHQATVVAIEDLGFSDGTAGRETIDAKKLRHVRSQFPTTIFRHRLVQMLSRRGISVVAVDPAYSSVNGARWWEDTVPEAKKPLSRHLAAAVVIGRRSQRYPDARSSRCAPATYQRIGDGNANGQHRGAGGGQPRSHAPPGSQNRSRGQVGVWHGEGQPVGGRPVTDNPFWDTPEPESVDHSVRSA

SEQ ID NO: 57315 - protein, 166 aa, Okeania sp.
LIKDSRLDYTHKLTYVANPTAPLQLIRENQTIVVEDLAVRNIVKKRCDPATTPVARERAPRDHKLARAISDANWGELVRQLEYKADWYGRKLVKIDRYFPSSKRCSNCGHVVEKLPLNIREWDCPECATHHDRDINASINILRMGTRVGVRRKRSDPAPPTGARER

SEQ ID NO: 57316 - protein, 421 aa, Okeania sp.
MFIVMRTAYQYKLKPNKEQVSTIELWLDLLRRQYNYRLGERFSWWSENRCPVNACPLIMPIAQLRNNPDYYSQKKDLVNTKNKFPDYKLIHSQVSQDCIKQVKLAFERWLKADKNGERLGKPRFKGKDRYRSFTYPKIKQECLEGNKINLPTFGKVKLIQHRPLPSGFQIKTVTISRKADGYYVTLSLEDKSVPYFPDVEPTTENTLLIDMGLKNFLVTSERELVPIPQYYRSSQKRLKTLQKRLSRKNKGSKRWLKAILAIAKQHKKVADKRKYFHFKTANELLSKAEVIAHENLNITGLTKTRLSKSINDAGWGQFLSILAVKAGNSGQKTIAVNPQNTSQDCSNCSEKVPKELKIRTHSCPHCGIVIDRDLFAQHDLGNAAINIKNRAVGHSVLKARGVRCSSRTTKREAHTIAIASA

SEQ ID NO: 57317 - protein, 269 aa, Okeania sp.
VKGSRGGQKTVVQLTSVPRCMPIPQLRDNPDYYSQKRDLVNTKDKFPDYRLIHSQVLQDCIKRVKLAFDRWFKADKNGQRLGKPRFKGKGRYRSFTYPQIKLDCIEENQINLPKIGKVKLIQHRPIPEGFIIKTVTISRKADGYYVTLSLEDKSVPALSCEVEPTLKNTLGIDMGLKEFLVTSVGESVPIPQYYRSSQKRLKTLQKRLSRKKKGSKRWLKAVKALAKQHKKVADQRKDFHFKTANELLSKANVIAHVDAERRAGGKLKH

SEQ ID NO: 57318 - protein, 418 aa, Chloroflexi sp.
MPRSRKARKKRTSSCPKGWLPAGASVPVRLTKRQEGYCRRAIGIARFCYNLAVATHRFCRTNRLRPPSWMDISKEFNAVKRTEYPFATEVASRVAEGAFMDFGKALANWSNRDLKARAPAFKRKKATGTGTFRAASGVDQLGYNGKRRIQLPGLGSVKLACTLPQGILYEARIKRENGRWMLSILCWKEPEPKPKPDHRRRGAVDTGINPLGTDSDGEVFPNPKAYYSQERKLRRWQRAQSRRRKGSRGWWEAQRKIDKCHRRIKGLRRNAIHQMTNTLTRKFKHLVIEDLNVAGMMQGPTPKAQADSAMGEIRRQLEYKCRWRYTSLIKAHRLFPSSKICHVCQHPNAKLKRERWWTCPKCGAGNERNHNAAVNLGRLTLPPGRGPMLRDGKALAGAPRAGETGPVERRTAQLTLWG

SEQ ID NO: 57319 - protein, 389 aa, Lachnospiraceae sp.
MMGEKTHGFNREDDSPPIYYKTVGVSMNKGVKFRAYPNKEQQNLINRTLGCCRLIYNKGLAMRNVSYSNGEKIGYNQTSAMLTDLKKQADFAFLKEVDSIALQQSLRDLDRGFTNFFQKRARHPQFKSKHNNHQSYRTINQGDNIRIVGKYIKLPKLGYVKIKQSMEVGHINNATVERTPTGKYFVVLNVDFEPEFRPNAGCMIGIDVGIKEFYSDSNGNVVNNPKYLEKSMRKLVREQRRLSRKQKGSNNRNRQRVKVAKVHEKITNQRNDFLQKQSTILVSENQTICIEDLNVKGMIRNHKLAQHIASCSWSKFFAMLEYKATWYGNDIIKVPTMYPSSQTCSCCGYRNPFVKDLSIREWECPNCHAKHDRDTNASINILNKGLSIA

SEQ ID NO: 57320 - protein, 379 aa, Thermus sp.
VHILDLTRELYNAALQERREAWKKAGKSVTLYEQMRLLGEVKAVRPEYREVYAQVLQETLKRLDRAFQGFFSRVKRGEKAGYPRFRGRGWWDSFTFPQVWRNGNWVGPGKPLGNGKVKIPGVGHVRMKQHRPLEGVPKTFTIKRSAGCWYAVYVCEVQAQPLPPSEKAVGIDLGLSHFVATSEGETFAPPRAYRKAEAKLARTQRALSRKRRGSHRHRKLKMRLARQHRKVANQRKDFHHKLARKLVNRYGTIVHEDLNTSGLARTRLSKGVLDAGWSSFISILSAKAESAGRRVVAVKPHHTSQICPECGSIKKKELSERIHSCECGCVLDRDVAAAKVILALGLGQPRRGYLAGAFGNGYGMGRPMRPEVTGVARIL

SEQ ID NO: 57321 - protein, 417 aa, unknown
  TnpB Polypeptide
MWDELPIPSVKFKYEFPYIKLMVVQRMYKYRLYPSAKQKIRLLKIFKHCKFVYNELLGLNEKLWVTKKFDFDSLVKDIKICHPEISDEVHSQVLQNVGDRLSKAFDNFFRRIKERKKGKKVNAGFPRFKSRIQSIIYPQSGFKFVSDGKLFCSKIGNIPIILHRIPRGKAKTLAIKVNNAGQWFAVFSCEVEMPVVEHPNKDKSVGIDVGLTNFATLTNGTSIPNPHHLVRAERKLKRLQRRLSRKVKGSKNRGKARFRLARQHLKVANQRSDFLHKLSRSLALRYGKISVEDLNIKGMVRNHCVAKHISDASWGSFKQMLSYKEVALGGQLIEKNPRGTSQTCSGCGNIMEMPLKKKLFTCSRCGLSLHRDINASFNIQGRAGLARTNSPVDIEPLSPISGRASSMVEAGTIPNSR

SEQ ID NO: 57322 - protein, 369 aa, unknown
  TnpB Polypeptide
MELESNHHSVFLLHYHLVLVVKYRRKVFDDIVSARAREIFEYIAPKYGITVEEWNHDMDHVHVLFRAQPKSELSKFINAYKSASSRLLKQEFPQIRQKLWKEYFWSRSFCLLTTGGAPIEWYDATSRIRDAGRRRVMQVTRHCAVTYRIYPDKAQAGLIDRTIGCARLVYNLMLETRIDTYNRTGKSCNPTPAQYKDEYPFLREVDSLALCNAQLNVAKAYNNFFRDPKHVGFPKYKAKHRSAWRYTTNNNNRNIRLIEGGRYLKLPKVGVMRARQHKTIPDDWKLKSATVEHLKSGGYTATILFEYETQAPEPVRPVHIVGLDYASHGLYVSSDGEQADYPRFYRQMEPRLMREQRRLSTWSRGPVIG

SEQ ID NO: 57323 - protein, 445 aa, unknown
  TnpB Polypeptide
MPDFLASGRTGRSRKERLVQHNVVTAYRSYQERVKAANGESSKYVSRGWKRTVDASAPSYGGDYINLGAVNKAYASIENNPFVDGEIVLKMVIQGAWYRLIFGFDNKRFTEGKVSLPLIKIEDGRPVFIFTVVTDNPVVQFSGSYTIGVDVGINNYATVVVRNSSTGQIVHTSTLSQRVHSLWNSVRASERQVRQLRQKAKRLLGDRQAHMSALDEAQLHREAASRKKRELAILAAQEIAYLSHVWGNAVVAVEDLGWVRNTAQHGRWNRGEFVKWLTHYVTQNGGWVVSVNPANTSQLCHKCGSKVTHPTHEVSVCAEHGAMDRDVNAAANIAARAVPKVAKARGTRAKNRKLRPQAALKTPVARNSLKYPGRDRTKSAPTPKRKNRPRTVREVILPSSPARAQTRCLEARVLADCGAQGVTGTCQAAIKQGNMTDEWRLCRLD

SEQ ID NO: 57324 - protein, 385 aa, unknown
  TnpB Polypeptide
MRRNYKYMLKVSAEQAQTIDEWSESLRLLYNFSLAERREAFKQDRKLTYYDQCKTLKETKKQFPRYKEVNAQALQQCLGQLDKAFLSFFKKKSRYPRFKAHDRAPSICFPQGTSIDGSFVKFSKLGKIRVKLHRPIPDGAVIKQSRIVKEVDRYYVVLSIELADPTWSVPPVNVVGCDVGVKHLATLSDGTVIDGEQPLKGSFARLARAQQKLSKKKTGSNNKKKQKVRVQKVYRKITNQRSDFLHKVTAKLADSYDAIVFEKMNLGFINQDTDKRYMMSRKSYDIGIGTFRKFCEYKFAERGKSVFHVNPKNTTKECSQCHRLVSKKLDDRIHDCPFCGFKMDRDLNASINILERVSLGQELPDSKPVESDVSVPAFAGVSVAH

SEQ ID NO: 57325 - protein, 184 aa, unknown
  TnpB Polypeptide
LTVSIKTLNGRPRLELSIGNYQRHLLKEAKPTSATLVKRKSGDYYIHIQIDLDTPEVAKNKDALGVDLGRTDIATTSEGDSWSGKQVTAKRNHHTKMRAILQKKATKGTRSSRRRCRQLQKRLSGKEKRFQSWINHNISRKLVDNAATNKKAIAIEDLTGIRERTNQKPRSKKDKRLGNNWAFY

SEQ ID NO: 57326 - protein, 374 aa, unknown
  TnpB Polypeptide
MVKVVNEVEKAYRFRAYPNKAQKNLMDKTFGCVRFVYNFFLGKTMQAYADYKESPSYKKCSKELTGLKQELEWLREVDKFALQNSLINLDKAYQNFFDKNAKFPKFKSKKKAKCSYRTSFTNNNIRFENTHIVLPKLGNVKVRDKHMPQGRILNATITKESDGAYYISLCYTDVEVEPLPSSDLSVGIDLGIKNFCVTSDCEVIENHRYLAKSLNKLAKLQRELSRKPIGSNNRYKAKIKVAKLHAKIRHQREDFLNKLSNYFIKRYGIICIEDLDVEEMLENSGLARDIIDVSWSGFVSRLTYKSKWHNRKLVKIDRFYPSSQLCHVCNYQNSDVQNLDVRQWKCPECSTNHDRDINAAINILKEGLRCLTYI

SEQ ID NO: 57327 - protein, 414 aa, Desulfovibrio sp.
MILRKAFQFKLKPNGANIRAFARFCGCARFVYNQGIEWNNEQGKLKSDFRFSYVALANLLPQWKQKWPWLAQCHSQVLQQALKDLERAFINFFEGRTNFPKFHKKFKSKDSFRYPQGFKIDEGNRLIYLPKIGWVKYRRSRFISGKAKNVTVSRQADGWYVSIQTEQEVDEPRHPASGIEVGLDAGVVNTVTLSDGTIWPPVNALKNNLEKIAKLQGKLKRKTKFSKNWKKVQAKIARLWKRVADIRRDHLCKISSDVCKNHAVIYREDLKIANMSASAAGTIEEPGVNVAQKRGLNRAILDQGWGMFFCMIEARQRELGGEVYAVPPQYTSQTCPECGCTDAKNRPKQAVFKCVNCGFEGNADCVAAMNILGRGQRLRACGVLENTASHTEVSRRRPSSSRNPSKRLTVMSAQ

SEQ ID NO: 57328 - protein, 409 aa, unknown
  TnpB Polypeptide
MSTDLTLMGGGAMAELTYKYRIYPTKQQVSDIQNICGAARFLYNKLLEDRTRHYRETRQWKRLNNKPFIEFFPFLAQTDQGALAWTVNRLERAYQHFFFIEKTETDRYKPESLERAEIDKKYALLETDLVSYPRFKRKKDTKVSYTTILKNVDVQNKRILLPVLGRVKIAYHRQIPENAQLIDCTILKNKAGKYFILLRLSLPKPEKIELHTALGMVFVPGQTAVRSDGEPVLIRHQSKEQGERIQKAYKTLKRRKYGSRRYEAQRQYLASLYEKRVNQRRDDLHKTARQITNAADVLYLQQPNVRERAAEQKTARARAAIWDEAWFTLFSFVKYKAVLDGKNFWGVPIGYPAYYFCSNCGSYDKEPGNYAWVCPYCSKRMDKHLNAAINLQLMAEKHIREWNKQQQKK

SEQ ID NO: 57329 - protein, 392 aa, unknown
  TnpB Polypeptide
MFVLEAKLRGSDQQFAIIDEMIRTSSFVRNMCIRHWMDNRGVGQYELSALCAVLAKEFEWANKLNSQARQAAAERAWASIKRFYDNCKHPSVKKKGYPKFKKSRSVEYKTSGWKLSSDRMSITFTDKFATGTFRMIGTAALNFYQLEQIKRVRVVRRADGYYVQFCIKHDRTEEVLPSQKVVGIDVGLLHFYTDSNGEKIANPRHLRKSEKALKHQQRRISKKKKGSNNRKKAIKRLGRKHLKVSRQRKDFAVKLARCVVHSNDVVAYEDLKVRNMVRNRKLAKSISDAGWSQFFEWLQYFGLVFGKIVIPVPPQYTSQECSQCGKIVKKALSERTHICQCGCVLDRDENAALNILAKGLRIASTAGHAGINASGHINLCQLSESLVDKLGG

SEQ ID NO: 57330 - protein, 522 aa, Christensenella sp.
MVIRTLVLKLHRPTAAKRLLLDQAIMRYNRALSYLFEHTQDNMETVLKEMQGGRAHLTRRIMGLLKKELMDKLNVFGVQPFKDALKMDYAMMMVAWLSLRRTQRKARYPQVLDEELFERRFWETIREFDDGMIGRDGLKARVNRLYNGYGISKPLFFGRYAKNRDYCLLYDEEHDRFYAKLYLLNVKAPERRGGIARGSCRLRYVTADRALLEEDNRRERYIVAPLSFGKEQEAVLKEGLQNPGIFKTARLLRKNGAYYLSVNIACECRQKERSETYMGIVRSLKEAVRYAVVDRKGIPVAEGGLPYGEKITTKNGMHAAANELVRVAQEYKSHIVSYRMGNIGDKLTYGAERARLTAGTFNQLMAMVNYKAELKGLKKPVFVSPRGIFTTCPRCGTNTQRNRFPGGRMICVKCGCAGDIEKNGPLNAARRLLKYRGTTLLFYAKKTEAGLLIHNDVLRLAYLAEPTQEGIKGFFKFVEEKVREMKRQQDRLCGGTAREVSYRKRFMNIQSARDEISIVDEE

SEQ ID NO: 57331 - protein, 467 aa, unknown
  TnpB Polypeptide
MLEEELTVTQFHDIIQTANFVKLLMLQVITAKLKLEASSEQKKLLGEVSLAYRDALNFTSQLNFENGKSSNGTKIQKLVYRDLRSRFNLPSQMACNVPRQVGATYKGLLTKLRQNREAIEKGWTKKKFKGLDKAPKYISRICNLNYLRDFSFRPDNQISIITLKGRIIVGYSGYSKHLELIKSGTKIGGAKIYYSKPTKTYYLLVSLELELPEIESSSLKRVVGADVGRRFLTVTTDVENKTQFFSGKETLHKANRYQRARITLQQKGTRSATRRLKLVSGRERRFTADVNHQISKQIVTPNTLFGLEDLTHIRERTKLKKKGKKASKKQRKANRKQAKWSFAELHSFIDYKAVFVGSLAIKVDAYNTSKGCPKCGHVSDNNRPNKGLTFHCECCHFELHADLVGARNITLRTLLSRQDWERTGALSVRPNASNDETKAERLFRYSELRWSSDASRDCIAEQSIVGY

SEQ ID NO: 57332 - protein, 410 aa, unknown
  TnpB Polypeptide
MSLPVRATVTAKVEAVTPKGDEGLLVEFLRVYRDSVQLVVDEIWGLSEVPSWMELHTMFYSRLIRMGFRAHHVSEIYKRAKEVVESTRKNSGSKPILRKLTARIHTLDYKIDLGKKTLRVAVLHGKWIELRLKWYSYLNKYLDGSWRPGEILVSYRCGRFYVYITLHRDVVFREPRVVMGVDLNFNNITYTIIDLNSELVSIGVIPFRGLKRALHLRKLAEDLQRRHPRNWRFLKWARRIRARWLSRARNILVDSAHRVSKKLVEVAREYNAVIVFEDLEEIRENSNGGKKLSWEKTLWCYRRIQEYTEYKALIDGIKTIHVNPAKTSKKSPNGKKIKFINYRFLQLGEVVTTRDVLASWNLALRGLKRMRGSRVTWSPNSPRSEAMKPRAKRGNPEAKKYLKTTTAIHK

SEQ ID NO: 57333 - protein, 385 aa, Streptomyces sp.
MQLRYNFRVYPTPGQRTALARTFGCARVVYNDALRIRQDAHKQDLPFPKTGDLSKTLITQAKRTPERAWLSNAPVGVMQQALRDLDTAYRNFFDSLSGKRKGPKIGAPRFKSKRDNRQVARYTKSDSFRVLPNGKLRLPKVGEISVRWSRKLPSDPSSVTVIKDAAGRYFASFVVTTDPSEALPETTGEVGIDLGLTHFAVMSDGRKISSPKFLRRAERKLRKAQQALSRKAKGSNNRKKAVARVARLHAQVADTRRDHHHKLSTTLIRENQAVYVEDLSVKGLARTRLAKSVHDAGWAQFTTMLEYKATRYGRTFGKIDRWLPSSQTCHVCMVIDGPKPLNVREWTCGACQATHDRDVNAARIVLAAGRADKENACGGTVSPPV

SEQ ID NO: 57334 - protein, 311 aa, unknown
  TnpB Polypeptide
VSAQIAQSSIIRVIGNYRTIKTIHGSPWATSQPKYHSPGYDLIWNRDYSILKDGRLSISTIDGRIKTSVDWTHMPQPYRHGKFGTARLLNRGGKWFLIIPSTIELPEPARPQQVVGVDLGIRFLATSYDGDGHTNFYDGKEVKSKREHYKRLRASLQKRGTRSARRRLKNIGRRENRWMRDVNHQVSKALVSRQSKPTLFALENLKGIHHATEKARKRDRYVHVSWAFFQLRQMIEYKAKKAGHSVIMVDPRYTSQTCPKCGTVRKANRDKRLHEYQCSNCGYRSNDDRVAAMNIQRLGYQSLVESQSDKV

SEQ ID NO: 57335 - protein, 406 aa, unknown
  TnpB Polypeptide
MRQMLTHNLAHTIRLYPTESQETFFKKACGCARVAYNYGLGEYQKQRKEGGKPKISDIKKKFNQEKKTLYPWMYETNKDANQQPFVNLQSAFSRFFKRRSGYPKFKKKGIKDSFYISNDKFDTKDKKFKIPKLGWVKGAEKLRFHGKILSATVRRKANYWFVVVSVETDKAFTTCENQAVVGVDLGIKTLATLSDGKVIEAVSPLRARLRQLKRLQRWSSRKVKGSSNRHKANQRVAKVHYEVACLRKDVLDKLTTYLCESYQVICIEDLNVKGMLRNHCLALAISDVGWGEFRRQLDYKSLLHGNTIVVADKWFPSSKKCSGCGHVKETLLLSEREYVCEHCGLVIDRDLNAAINLRNYALEKLGMACPEVTPVDKKALVYSSSIGINETILDEAGIYRCSEMST

SEQ ID NO: 57336 - protein, 374 aa, Tolypothrix sp.
MKTLKFKLYQHKRNRYIKRSINAAGVIYNKCIALHKRYYRMWGKHLNCAKLQAHIAKLRKRNSFWQLLGSQAVQDICQRIDRGYQLFFKHHKKGVRPPGFKKVKKYKSFTLKQAGYKFLAGNRVKIGSRVYQYWNSREIEGTVKTLTIKRTPLGELFMVVVVDSAEKPEVKFETGRTAGFDFGLKTFLTCSEGFKIDSPLFLKQSLNAIRKASREHSKKQKGSANRERARKNLVRKHEDVANRRRDWFWKLGHDLTDKFDLLCFETLNLQGMQRLWGRKVTDLALGEFLQILEWVAKKKGKQVVYIDPWYPSSKTCSSCGDALESLELSVRRWRCPSCGLENDRDENASINIKRVGASTCSGGDVRQVQPAVAV

SEQ ID NO: 57337 - protein, 377 aa, unknown
  TnpB Polypeptide
MKTAYKFRMYPNKQQEASLGLTLDTCRYLYNLALADRKNAYESEGVSRSYEDQAAMLVAEKKDGNFKAVFSQVLQDVLRRLDKSFKAFFRRVKGGEKPGYPRFKGQGWYKSFTYPQVGFKLDGSKLTLSKIGSIRIFKHREVEGQIKTCTIKKDNLGHWYAILVSEVGDVSPIDPKTAIGVDVGLKSLVALSTGETVEYPRYYVQAENKLAVAQRNLSRKKSGSSNRRKAKARVARISQDVKNHRDEFLHQVSRMLVDSADLIVFENLNISGMLKNHHLAKHIQDHAWGKLIRFTQSKAAKAGKIVELVDARYTSQKCSQCCIIVPKTLADRTHLCPNCGLVMDRDINASLNICTLGLRGRAYQDPTPTLSKRFKAS

SEQ ID NO: 57338 - protein, 382 aa, Nocardia sp.
VQLRYQYRVYPTPGQAGRLAQAFGCARVVFNDSLRVRRDAYAAGERIGDTEVQRRVVTEAKRTPERAWLAEVSSVVLVQACQDARMAYRNWFDSISGKRKGRKVGAPRLRSRKDNRQAIRLTRNGFSVRDNRKLYVAKVGELAVRWSRELPSVPSSVTIIKDAAGRYFASFVVETTDEALPPIGSEVGIDLGLTTFAVLSSGKIIDSPKFLRRAERKLRKAQQAMSRKEKGSNNRAKARVRIAKAHATVADTRRDWAHKQSTAIIRENQAVFVEDLCVAGLARTRLAKSVHDAGWAMFTRMLEEKAARYGRTFAKVDRFYPSSQLCSACGMLDGPKPLSVREWQCRACGAVHDRDLNAAKNIHAAGRAEWLNACGGTVSLSA

SEQ ID NO: 57339 - protein, 407 aa, Streptomyces sp.
MHLRYSFRLYPDTAQRIALAKAFGCARVVYNDAVRAREDARKAQQPFPRAGELSKKLITRAKLTEARSWLGEVSAVVLQQSLRDAETAYKNFFASLTGARKGPRTGPPRFKSRKDTRQSIRFTANARWHLTDSGRLNLPKIGAVKVKWSRPLPATPTSVTVIKDSAGRYFASFVLTTDPAADRARMPDTSQTIGIDLGLAYFAVLSDGTKIDSPRFLRRAEKKLKKAQRNLSRKQKGSRNREKARRKVARAHAKVTDARHEFHHQLSTKLISENQGIAVEDLSVAGLARTKLAKSVHDAGWASFVHMLEYKAERYGRTLVRIGRFEPTSQTCSACGVKDGPKPLNVREWTCTACGTTHDRDTNAAINVKTAAGLAASACGAPVRPGAIPAQREETGSHGFPTEPRAA

SEQ ID NO: 57340 - protein, 385 aa, unknown
  TnpB Polypeptide
VVTAVPAQKLNRAIKYRAYPTSEQQVLLAKTFGCVRFIWNHMLIDAQQFLNEAGTFFVPTPAKYKKEFPFLKEVDSLALANTQLDLKDANKRHLKSPKAVGVPRLKSKHRSGMSYTTNNQKAQSKDGKIKNTVYVVGNLVHLPKVGNVKVKVHRQPDADWVLKGATVSCTRSGRYFISLLYEFEKDIQPVVPTKEKSLGLDYSSHDFYVDSNGKAANYPQFYRQSEEKLAKEQRKLSRMEAGSKNYNEQLHKVQLLHEHIANQRKNFCHTVSAVIAKQYDAVFVEDINLRGLAGSLKLGKSTNDNGFGMFRAMLEYKLTSQGKTFAKIDKWYPSSKTCSVCGFIKDDLTLADRVWTCSACGTTHNRDHNAAINIRNVGLLGLYPA

SEQ ID NO: 57341 - protein, 413 aa, Streptomyces sp.
VGNSAVKRAFKFRFYPDDAQATELSKTFGCVRKVYNLALSARSEARAHREHLGYAQTSALLTAWKQSPELAFLNEVSCVPLQQALRHLQRAFVAFWDGRSRHPRFKSKRKSRASAEYTRSAFRFRGGRPTLAKMAAPLPVVWSRRLPADAEPTTVTVSRDPAGRWFVSLLFEDSPEPFPPVAHAVGIDAGLTALVTLSTGERVINPKHERKDRARLARAQRALSRKERGSKNRAKARIRVAKVHARIADRRRDHLHKLTTRLVRENQTLVIEDLDVRTMQQHPGLARAISDASWREMRSMLEYKTTWYGRELITIDRWHPSSKLCSVCGALARDMPLSIRAWRCADCGTEHDRDENAAINLLAAGLAVSACGAGVGPRRASATPGQRAMKQEGLSARAGKPPLGKATRPSNPM

SEQ ID NO: 57342 - protein, 446 aa, Calothrix sp.
MSKPKKSMGVQQVLLYPDEGTKVILEYLCQQSGKLYNNAVYFARQYFFKTNKLLTGKFDLIYEESVSKSMVAQSLPSIPAQQCLMSVTEAFKSFKGLRDLFFKGQLHFKPKAPNYLTGSKLFKVAYPNSGGQKPTLVDSRLRFSLGLTIKRWFGVSEFFLSVPTNLDMSKVKEFTILPKNGAFYLEMSYEVEKQQHDLDINQALSIDLGTADNLVACVDTLGNSLLIDARDMKAFNQLWNKKVSTRKEGKEQAYWDIWLDRVTRKRNHQMRDGINKAAKLIVDHCLKYGIGTLVIGWSESFKNNANMGRVNNQKFVQMPLGKLKDRLSQLCDLHGIRFQETEESYTSKASYLDGDSLPVYGSKPEGWKASGKRVNRGLYRTKTGLIVNADLNGSANILRKVASNLGVDLSLLGRRTLTSAARIKLWNVSPKKPLLENVLSAESQSL

SEQ ID NO: 57343 - protein, 393 aa, unknown
  TnpB Polypeptide
MTLKDSSTVTPTQARDDEGWFKEIYEDCKNKSLPVILIEQVLNRYASYMKRNKSSKKKSSPRYVEFKKNTVNIKKNYFKYDDTKNEITVRNLQNENIKLNIDDHLSVLVHKDVFLNKLKGKLNKPDSALSTVAWAANMMFDHKLIIPTVFLSQEEPYIAKNFFAADINLTRGDWLHFNMPLNGKEHYAKPAHIAAAEDRVAAIQKKIDESLKIAPDQRKYHTVLFEDVTYKATHVGRTRLRKMWHEEHKKLGALVSELPILKEIEEFVIANKLGYAHDNVKTGDRNGTFCQDHLKNHWVGRARNGAFPFEIVPPAYTSQECPECGHRSKENRKGDEFKCTKCKYENQSHKVGAINIGRRAMQIYSLKQEGKDSLPRRVSTKSTDSLEQVRKGS

SEQ ID NO: 57344 - protein, 306 aa, Bacillus sp.
MLIHKAYQFQIYPSLEQKIAITKTIGCSRFVFNYFLEKWNDRYKETGKGLSYGTCSSQLPTLKKEFVWLKEVDSIALQSSLHNLADSYARFFKKQNKAPRFKSKNNKIQSYTTKHTNGNIAIIDNKLKLPKLGLVKFIKSREVEGRILSATVRRNPSGKYFVSILAEAEVQELPKTDSAVGIDVGVKNFAILSTGEVFGNPKWSRVLEKKLAHAQRILSRRTKGGANWHKQRMKVARIHERIKNARTDYLQKLSTRIIKNHDVIGIEDLQVSNMLQNHKLAKAIQEVSWSQFKAMLLYKARWYGKK

SEQ ID NO: 57345 - protein, 340 aa, Duganella sp.
VKSFTGLLNKQARAVNFVWNYCNDRQKDALRFNRRWHSGFDLIRLTTGCSKELGLHSGTVNDVCQQYARSRRQSHRPYLRYRGRKSLGWVPIKGRELKREGNAFRFSGNTFRVFFSRPLPEGKITDGTNFSRDRRGNWFLNIVIEIAEPSARMPIRGVGIDLGLKDLATMSNGCKIAAPRIYRDAEAALAVAQRARKQRRVKVIHRRIANHRQDFIHKWTTAIVHEYDYIAVGNANVTKLARTSMAKSVLDAGWSSFRTQLAYKAVKHGAWFEEVDERFTTQVCSNCGNLPDTRPKGIADLGIREWRCSNCGAVHDRDLNAALNILRRGRATLAVGISAL

SEQ ID NO: 57346 - protein, 402 aa, Escherichia sp.
VKRLQAFKFQLRPGDQQECEMRRFAGACRFVFNRALARQNENHEAGNKYIPYGKMASWLVEWKNATETQWLKDSPSQPLQQSLKDLERAYKNFFRKRAAFPRFKKRGQNDAFRYPQGVKLDQENSRIFLPKLGWMRYRNSRQVTGVVKNVTVSQSCGKWYISIQTESEVSTPVHPSASMVGLDAGVAKLATLSDGTVFEPVNSFQKNQKTLARLQRQLSRKVKFSNNWQKQKRKIQRLHSRIANIRRDYLHKVTTTVSKNHAMIVIEDLKVSNMSKSAAGTVSQPGRNVRAKSGLNRSILDQGWYEMRRQLEYKQLWSGGQVLAVPPAYTSQRCACCGHTAKENRLSQSKFRCQVCGYTANADVNGARNILAAGHAVLACGEMVQSGRSLKQEPTEMIQATA

SEQ ID NO: 57347 - protein, 374 aa, unknown
  TnpB Polypeptide
MRTYKFRIYPSKMQETEMCKHLWIEKELWNNLLEANKRNYLEEKKFLTKKELQKMVKDKGIYSQVAQTLSHRLHKAIWRMVKLRKQGKECGFPRFKNIDRMKSLNYPQFGFSLGNKLKVTPFGEINIKKHREIKGKIKTLSLKKEASGKWFATFCVEQEPKKTMQNKGEKVGIDLGLITFATLSDGTAIKNPRHLKKYEDRLAWQQRILSRKKRGSTNRKNAKLKVARLHEKVSNARADFLHKLSTQLVRSYSLIALEKLASRNMAEQNFGKFINDAGWNMFANMLRYKAEETGCEVVFVNPKNTTQECSSCGIIVPKDLSCRVHNCSCGLTIDRDLNAARNILIKATEGHSESNACGDETIVSPLKQEARAYL

SEQ ID NO: 57348 - protein, 464 aa, Mycolicibacterium sp.
VSTPAAAIDASPTVRAYRFALDPTPAQEQQLRSHCGAARFAYNHMLALVKANLEQRAAERTYDIPDQELTPPVSWSFYSLRNQWNQIKSDVAPWWSENSKEAYANGIANLAAALSNWSTSRAGQRRGRTVRFPRFKTKRARPSCRFTTGGLGLVERDRRHIRLPKIGIIRTHESTRKLARRVEAGTARIRSAAISFERGRWHVAFSVELLAGSTQRHSRHLRAVVGVDLGITHLAVLSTPVQGLSDEHGMVANPDHLERAQKQLRRLQRQVARRRGRDKHTGATPSAHWLQTQTQINRLHAHIANARADGLHKLSTALAARFETIVVEDLNVTGMLANHRLARRIGGAGWGELRRQLTYKTNDRGGTLIVADRFYPSSKTCSNCGAVKAKLSLSQRIYHCESCSIRIDRDRNAAANLAALAANVTGTSSPSCGATQNEPTGNPHKTSTAGSRYRHGKSHEDNVA

SEQ ID NO: 57349 - protein, 322 aa, Actinomadura sp.
MPSGSVMDRYGAGVQLRYNYRMYPTPGQQIELARAFGCARVVFNDGLRARQQAREQGLPYISDAELSKRIITQAKATPERAWLGEVSSVAPPRYRSRKDNRQAIRFTRNSRFKVLDNGRLRLPKIGDLAVRWSRGPAPGPSSVVIIKDAAGRYFASFVVQVTDEPLPTVESEVGIDLGLRHFAVLSDGTKVAAPKFLRRAARKLKRLQQALARKQRGSQNRKKAVVKVARAHARVADTRRDWQHKLSTQIIRENQAVYAEDLCVTGLGRTRLARNIRAAGQEDLNARGAHVRPGLVPAAHNEAGTHPDAVHSTRSVEGISVP

SEQ ID NO: 57350 - protein, 407 aa, Micromonospora sp.
MAGVGEAVRRAFKYRFYPTPDQAEQLSRTFGCVRVVYNKSLEERTRFYKTERRAMSFAETSAALTRWKKTDEYPFLNEVSSVPLQQAVRHLQTAFDSFFAKRSGYPRFKTRRRSRASAEFTRSAFTWRDGQLTLAKMRRPLRIAWSRPLPPGSDPSTVTVSRDAAGRWFVSLRVEDRSVRPLPATDRVVGVDVGLSALVTLSTGEKVANPRHAVPERRRLRKAQRSLCRKERGSANREKARLHVAKIHARIADRRRDELHKLTTRLVRENQTVVIEDLSVKNMLQNHSLARAISDAGWSELRSMLEYKAQWYGRSVIVVSRWFPSSKRCSSCGHYAERMPLNIRSWTCRCGATHDRDVNAAKNILAAGLAERQNACGGPVRPEPRTRGRRGPMKQEARRAIAGSASE

SEQ ID NO: 57351 - protein, 398 aa, Tepidibacter sp.
MKKLLKAYKTEIKPTKEQIQKINQSIGICRWLYNQYLAKNQELYKQFKEGLIDKKQAFISANDFDKYINNEVKVQDEYSWINKCSSKARNKSICNAETAYKRFFNGKSGFPRFKKKNKQEVKLYFPKNNKTDFRIERHRINIPTLKWVRFKEKGYIPTDKKVVNGTVSQKGNRYFISIIIEEDVYSELNPTKNEGIGIDVGVKNLAVCSNGMTFKNINKTHQVKKLEKKLKREQRKLSRKYESLKLRNKKEKGGTATRQNIQKQIAKVQKLHQKLTNIRTDYINKVINSIVKQNPSYITIEDLAISNMMKNRHLSKAISQQKLYEFRVKLTYKCMIHNIELRVVDRWYPSSKMCSSCGNINKNLKLKDRIYKCECGVVLDRDINASYNLKNAKIYKVA

SEQ ID NO: 57352 - protein, 393 aa, unknown
  TnpB Polypeptide
MRAYKTEISPTKSQIELIHKTFGCTRYIYNQFVGENLENLATHKPLVSVYEYSKRINNDPNRPLWLKEVPSKALKQALFYAEQAFKDYFSKRGGKPKFKKKGSNESFYLIGTIKVERHRIFVPKLKWLRLKEFGYIPKNISSVTISMKNGRYYISCLCKDEQDESIPLSDYVMGIDFGLKDQFITEDKIVPSINHSLRVRKLEQRLRREQRKLSRKYEANMIDKVYYQSGAKKGQLKSFKWLKPLYECKNIQKQKLKVAYIYERLSRIRTEYNRKALHSLVIERKPSAIAIEDLAIRNLMKNRHLSKTISKAQWYQSRLYLETLCKKLGIELRLVDRFYPSSKLCSDCGFKYKDLKLHERFWTCSNCGSEHNRDTNAAINLGQCKDYTVLTAG

SEQ ID NO: 57353 - protein, 446 aa, unknown
  TnpB Polypeptide
MKRTNTFVVRPLSDDGEQVLRDLLDASAALWNEINYQRLMRYNNEDDFEGDVWDADTGRLEGKYKDVLGASTAQTVRRANSEAWRGFFENKKAYHDESNTSVTEHPEPPGFRGNEDDGRVLKGVVRKDAYSVEWGNRSRLEMVVGKDLRDGHNSAKSRLRLEIVGDPNWPDYDKQGRLDLWYDETDCTFRASQPVTVTDARDTPLATEKAALDIGANNLVACTTTTGEQYLYEGRALFQRFRETTREIARLQSKLEEGQYSSKRIRRLYRKRTRRRDHAQEALCRDLLDRLYAAGVDTVYIGGLTDVLDTHWSVEANAKTHNFWAFKQFTERLACTAEEYGISVEVRSEVWTSQECLQCGSTGRTTRHQDTLTCQCGFEGHADLTASETFLKRQTEKAVGPMARPVRFEWNDHEWSGRPHPHESPKEQRTDPSTVHRNGNVAFGVS

SEQ ID NO: 57354 - protein, 399 aa, unknown
  TnpB Polypeptide
MKLCVRYRINPDSEQEELLRKLGFYATKLYNTDNYTRREQWDKTGEIPNWYEQKKELKENHWFKLLPSQTAQQICKNLQENYNSWFKLRKTDKDARPPQFRKKSVLSPLSFYQQFKIEGDVITFSMSRKFRKETGIDRLSFELNKWKEIEGSPKMANILLQDGKWMVHIVYEIPEKPLNNYSEVMTVDLGVINLATTADTAGNSTIYTGGQALAVQHYFNKEIAKVQSKTMEQYDKKGSKAVTKMHKRKKRQVNQIIHTVTKEVIEEAKRNNVGTIVVGDIKNIRKDKHWNKKASQKLHSWEFAKLTSQLEYKAKQAGIRFETVSERDTSKTCSVCGMVKPSNRKHRGLYVCKCGNKMNADVNGARNILKKYLQESGNSRSIGVVDTPLTWGCVNVVPA

SEQ ID NO: 57355 - protein, 364 aa, Methanosarcina sp.
MKRGNRYRIYPTNEQKVLLEKHFGCTRFIYNKLLEIKSILYKRCKISVSEFDLNKHLLVLKEVYPWLKEVNSGALQQASRNLNSAFNHFFKDGFGYPQKKRKKDHHFSFQLPQHYELDSSRILLPKLGWIKVKMHRDIKGEMKTLTVSRTPTGKYYISILTDDGEKSPEPEPFSHATLIGIDVGLTTFATLSTGEKIDNPKFLNNSLERLKCLQRRVSKKVIGSKNRRKAVHKLAKLHEKIANQRHDFQHKVSNRLVSENQAIAVETLNIKGMMKNHYRAQSTGDSGWYSFVLKLQYKAEWLGKTVIKISQWLPSSKTCSVCGYKHLNLTEDIREWICPVCGNIHDRDINAAINIKNFAVGTTV

SEQ ID NO: 57356 - protein, 440 aa, Nonomuraea sp.
VWFVELEKRNRAHVARLDLDSRQSAILDGQAHNTRALWNLLHEYYTFRQGRFATLKDCDEAIRQARRDIDWLKDLPAQASQAVLKTYRQAWANFFNPDHPAERPKFKGRFRSRMAVDVPQGRDLHITRVNRRWGEVNIPKLGRVRFRWTKDLPGVTRSSPDGKITGARLVKESDGWHIIFRTQTMEMPPAPHEGPVTAIDRGITVALALASGEKIRHREQWLSHKEAERLLRLERKAARQKRAAKPGQPTSNRLKRTYDQIASLRARAKRRVIDWQHQTTAKLTDRYSVIVLEDLKVKNMMASASGTVEEPGTNLAQKRGLNRAIAGEAWSRTAEFLAYKALDKGGKVAYISAANTSRECHQCHTIIEGSRESQARFVCKNPACGWIGNADTNAARTQVYRYNSAVGQAVNGRGGPAVLGPVKRQATHSGTTPAPQGVAA

SEQ ID NO: 57357 - protein, 411 aa, unknown
  TnpB Polypeptide
MTILSGVKLKLYPNKAQKQTIEQTFGNSRFVWNQFRNMQENRYNAMIDDYNSYKEKAKENGEKIVNPIYIWDYDMQKMLTELKKEHSWLQLSDATVLQKTLSNLDKAYKNFFKKPGQFEKPKFKSRKHRSQTSKTTRINGQIKEYTVIRESSGDYYISFQIEEPDRELLVKTKQVMGGDLGLAHLLTLSNGLKFPKFSSGQALALGLKAQSKASKSIDRNSKILNTKELIYLIEKGIFDENKYEASELSEFKNHEKRMQKSAKAQRKVTNKRHDYLHKLTTELVKTYDVIVLEDLKVKNMLKNHKLAKAISNASWATFVRFLRYKCEWYGKLFILVPPHYTSRICHQCGWDSGKKPLDIREWTCPHCHETHDRDINAAINILYRGLETYLQSQLLLLNEQIKNGYFSTVFF

SEQ ID NO: 57358 - protein, 418 aa, unknown
  TnpB Polypeptide
MRKSKDMPYHIGLKVKLYLSYQQKHVVAVNDGAKRSVYNLLVSASNEKYRLSKTAPYCPTDRNRLDYISSVISSTAGIKNALPYLNEEDVDSLAVDNAVRNYRTAWKNQKERHTGVPTFKKRSYEQSYQTNAHYYKNSLGHEVSNVRFEDTSHVILPKLGRVRIGGSPKLIRSLINRDADTRIGTITISRDSAGEYWASFQIASEKPFRNELKKTGSKIGIDLNLLELINDSSGDSAANMRYYKNSADKLTKAQHKLSRMQEHAKKDGRSLRTSKNYQKQRLKVAKIHRTVSRQREDYLHNLSKQKVESQDFIAAEDLKVRNLLKNRCLAGAIADAGWRKFLTMLQYKAELYGKTVILVPPRNTTQTCSVCGYTLKGDEKLTLSDREWICPSCGTHHDRDTNAAKNILERGLQIASQS

SEQ ID NO: 57359 - protein, 371 aa, unknown
  TnpB Polypeptide
MRKTFEYRLSPTAKQEHILSQMLEECRWVFNQTLALRKDAWEQKQESISLYQSNTLLPKWKQDRPSLTMVYSQTLQDVQERVDLAFKAFFRRVKAGEKPGYPRFRGRGRYDSLTYPQFGFSLEDYSVKAAKIGEIKATIHRPLKGKTKTLTLRRHSTGKWYACFSCEVKSEPLPPSEKAVGIDVGLESFATLSTGDKIANPRFFKTDEKALAKAQRKLSKEEKGTSERAHRRKAVSHIHERIANRRKDFAHQLSRSIVNDYGIIVFEKLNSKTMMRNHCLAKSIADASWQQLVFFAAYKAECAGRSVILVDPRNTSKRCSRCGSLVNKDLSIRIHSCPICGLVLDRDLNASYNILALGLQGMGRIPRSPGL

SEQ ID NO: 57360 - protein, 305 aa, unknown
  TnpB Polypeptide
MKERIFTTKEQGRVLVEAGLPISTAIGFRDKYLDSLHSMEDDAGRIGLIEAVTPDISNPVWDVGTLLNLLPYEIEGSTFECYKLENAWFALYRDINDIPIYWGKEKHLIDTLFSLSDGIAVENPHFLCENQAKLKRMQRHLSRKKLGSNRRNKCRLKVSRLHRDIANKRSWYMHNLTTMLVNNYDVICIENLNASGMLQNHKLAGSVYDASFSMFRNQLEYKCRWYGKELIVIDRFYPSSKTCSRCGWKNKDLKLSDRTFVCKDCGMEIDRDLNAAINIQAVGVDAAIRTQSSRVASCVEASKME

SEQ ID NO: 57361 - protein, 403 aa, unknown
  TnpB Polypeptide
VKIRRAYKLRLYPTKEQSTALRQHSGNTRFLWNTLLRLNQDKYESEKKFVFAHDMVTSLPKLKKEHNFLQLSFSQSLQQVARQLDRALKDCFNKTKRFPVFKKKGKQNDSFTVPQKFRIEKHYVFIPKIGEVQWVKHRPIKGKIKHLTISQDGEQWYCSVNVELKCKENFVTTTSDLVGIDVGIKTYATMSDGSVIENPKILKKYGQQLSKAQRRLSQKQKSNNRSKQCNKVQRLYRKVRNTRRDFQHKATAHMIAKYEGFAMEDLNIKGIMSNHCLSRAVSDCGWFEFKRQLRYKSEWCGKPLVEIGRFEPSSKTCSGCGWINKNLTLKDREFVCLECGQSIDRDLNAAVNIRNIGLKILRDTQELTPVEIGGCSPANAGQCQSKKQEKEVLGLELHSCSLN

SEQ ID NO: 57362 - protein, 244 aa, Fischerella sp.
DYPASSGEGKIIGIDLGIKDFAITYDGEKTSKYPNPKHLSKYEKKLAVKQRIAARKNKGSNRRQKANKIVARVYEQISNVRQDYLHKLSRKIVDNNQVVVVENLNVKGMVRNHKLAKAISDTGWGTFVNFLSYKLERSGGKLVEINRWFPSSKLCSNCHYQISELPLDVRTWTCPSCGTHHDRDGNAAMNIRAEGIRMLSSPGTGEANANGEDVRPTRGRKSKMRQSSVKLEANTVLGTPSQCG

SEQ ID NO: 57363 - protein, 357 aa, Paenibacillus sp.
VLKAYKYRIHPTYEQEQYFTKVFGAVRFIYNRMLADKLEHYKQTETMLQTTPAPYKKDFAWLKEVDSLALANAQLHLEKAYQNFFREPNAGFPKFKSKKKNSHSFTTNNQKGTIAITEGRIKIPKLKTKIKIKLHRPFEGRIKSCTISKTPTGKYYASVLVETDIIPLPPLETKIGVDLGLKDFAIPSHGEIIPNPKYLRKSEQRLAKLQKDLSRKKKGSRNRYKARLKVARLHEKIANQRKDFLHKTSTQMINENQVIVMEDLRVKNMMQNHKLAKAISEVSWSLFRDMLTYKAKWYGRELIIAPKHFASSQLCSCCGYKNAEVKNLAVREWSCPACHTEHDRDRNAALNLLQLAM

SEQ ID NO: 57364 - protein, 361 aa, Gracilibacillus sp.
VNDVSQTITIKVKLIPTKEQASILSEMSKTYISVINTLVSEMVDEKKSTKKSSKDISVSLPSAVKNQAIKDAKSVFKKGKKSKYKVIPILKKTVCVWNNQNYSFDSTHISMPIMMDGKAKKIPIRALFMDKDNRNMDLLKHKLGTLRITKKANKWMAQISVTIPTVQGTGLKVMGVDLGLKVPAVAVTDDEKVRFFGNGRQNKYVKRKFRSERKALGKRKKLNAIRNSKDKEQRWMKDQDHQVSRAIVNFAKDHRVSVIRLEQLANIRQTARTSRKNEKNLHSWSFYRLSQFIEYKANLEGIKVEYVNPAYTSQTCPTCFEKNKAQDRKYTCKCGFKKHRDLVGAMNIRYAPVIDGNSQSA

SEQ ID NO: 57365 - protein, 373 aa, Gracilibacillus sp.
MKAYKIKLNPNNKQRTLLERSAGVSRWAYNWALEQKKKRYEETGKTVSQADLRKRLTKLKQTDDYQWLFQFSNNITKQAIKDSDEAFKRFFKGQARYPRFKSKRKSKWSFYNDNHKVKRSDTHIRLEKIGWIRFAETGYLPIEFKPLSYRVSREGLHWFVSITVEIPDSSDYSTPVNEPIGIDLGIKTLATVSDGSVYVNINKKHEVRQMEKRLRRLQRQISRKYKMNKEGSRYRKTCNIIKTEKEIARLQTRLNHIRTNYIHQMTSEIVRTKPSHIVMEDLNVRGMMKNKHLADHIAKCHFREIRRQLTYKANQSGVSLVVADRWYPSSRICCECGVMDKTLKLSDRKMKCECGNRIDRDMNASINLSRLAV

SEQ ID NO: 57366 - protein, 278 aa, Erysipelotrichaceae sp.
  misc_feature (258)..(273): Xaa can be any naturally occurring amino acid
MEALNQTLGACRWLYNRMLYDRSACYQQTGEALNLTPAWYKHLSCCPWLKDADSLALANVQLHLNRAFDNFFNGRSAYPKFKRKADHYDSYTTNIASKGAANLRFRMGKRKTGLLTLPKIDGEIRLKAHRKVPVNGILKSVTVTHEPDGKYYFSLLYEVPHEEICHDIDPDNVIGLDMSMHSFYVDSNGKHIDYGKPYHDMQSRIAREQRKLSHMKKGSSNYRKQRVKVAKLCAKAKHQRSDALHKLSRQLVDTYDIXXXXXXXXXXXXXXXXQPDVP

SEQ ID NO: 57367 - protein, 265 aa, Methylococcaceae sp.
LNWRCSGGAKKALGWIPFKSGAAKWINGQVRYAGLFFKVWDSYGLSKFDFRSGCFSQDSRGRWYFNIAVQVEVVTRQAAGGQVGIDLGLKTTATCSNGDSLARQDCYRNLELKLGKAQRAKNKKRVKAIRAKIKNTRKDAIHKFTSKIVKENSLIIVGNVSSQKLAKTKMAKSVLDAGWFMLKTQLEYKSITTQGVFLEVNESYTTQTCSCCGCISLSSPKGRAGLRIREWTCAECGTTHDRDINAAKNILALGHKRLAVGISVL

SEQ ID NO: 57368 - protein, 604 aa, Rhodococcus sp.
MTVAGFTVPRQFSFTTRPYAAIDDATDASLGLDDIDVRVRWMLDLIGAAQSELMARLWQPATFDVLAAGRDGQGRKLPMQGHVAAARLGWNPFYPTDVYVPSRVTRVVTSQTIGTLRTLAYRDHAIGSLSARFDPVTGRLTPPTTAGEYVPSGFARGVARQLAARSRSAASAGGPTPRLRITDVQGPPQTCVMARLSAADRQLAHITVTDAVLTLTVKLPTHEAPTGRAQWQRVRLTAAIPPHLHTRAITDWHLPTLVLDHRGLLLACAATEHVPTADLSAGATAVGVDWSPSTLGAAAIVTERPDGLVSDYRGWTYDDRGLGIKLARLQAEGQHLHRKAARLTRLAATAPPEVRAELEEKIAVLDAHRTAIGVKRGKINRELAFHFARHTVDYAAAAGAAVIGVEDLTTLETRGHGRVNNNRAAQSARRKAVDALAHTAAGVGVTVVSVPARGTSALCPGCNDKLSRPGGYHRAWCARCNVGGNRDHVAGVNLAKRALLGRRKAIRQRGQNPQIRIAEHAPVRQCRAKTSPTPSRPRHRRVRRSVPTATPPVGVNQIRIVPAPQASVWDTVKPAAASHVVTGSRDVPTSPASAASVADSMRFK

SEQ ID NO: 57369 - protein, 400 aa, Extensimonas sp.
MLIAHRVALDPNNTQATYLARAAGTARFAYNWALAEWKRQYEAWKADNTLPKPSQAALRRQLNAVKREQFPWMLEVTKNAPQMAIIQLGQAFQNFFAGRARYPQFRKKGVHDRFTLTNDQFDIDGSRIRIPNLGWVRMRETLRFAGKIMSATISRVADRWFVSIAVETQDDSHLPKAENQGVVGVDLGVKALATLSTGETIPGPKPHKALLGRRQRLSRSLSRKQKGSANRHKAKAKLARLHARIAAIRSDALHKFTTDLTRRFHTIGIEDLNVRGMMKNRHLARSIADMGFFEFRRQLAYKAAMRGGQVVVADRFYASSKTCSACGHKLDDLPLSVREWTCPSCGTVHDRDVNAAVNLKNMAVSSTVAACGEEGSGLGRKTQVKPASAKQEVSGRFAQQ

SEQ ID NO: 57370 - protein, 380 aa, Methanogenium sp.
MLKAYKYRMYMLKAYKYRMYPNKEQEKLFFQHFGACRFIYNWGLENKIRTYESGDKSISRFTLNKMLPDLKSEHVWLKDINSQSLQGATLNLENAFTRFFREKKGFPKFKSRKNPLQSFSVPQGYDVNFETHKIRLPKIGWVKTKLHRRYEGISKTATVSVTPTGQFYISILVDDGQEQPVAQHFDENTTVGVDVGIKDFAILSNGEKIGNPRYLKESLLRMKVLQRRLSRKQKGSNNKNKAKRAVAKLHEKIHNQRNDFQHKLSFRLVCENQAIALETLNVVGMLKNHKLAQHIADASWSSFVTQLEYKAQRHGKTILRIGQFEPSSKICSKCGYYNRKLSLADRDWVCPDCGTHHDRDINAAINIWKFALDKQNLIGI

SEQ ID NO: 57371 - protein, 324 aa, Exiguobacterium sp.
VNILLKHKAYKFRIYPTTEQEILIAKTIGCARFVFNHFLAKWEATYKATGKGLSYGSCSKEIPVLKQELDWLKEVDSTSVQNSVKHLAEAYDRFFKKQNERPRFKSKRNPVQSYKTNIQGTSQLPEVSIIGNKLKLPKLKWVRFANSKKVEGRILSATIRRNATGKYFVSLQVEQKVDELPKTGSTIGVDVRLKHFAVLSDGTVYQNDRYFRTLEKRLAREQRKLSRRRLIALNRNIKLSEAKNYQKQKRKVARIHEKIANKRTDFLHKVSTEIVKNHDVIGIETLQVKNMQKDRKLSKSISDVSWSAFFRMSHTRRTGTARPS

SEQ ID NO: 57372 - protein, 435 aa, unknown
  TnpB Polypeptide
VLSIKSHTNLFNKEGSVNLLGACQMSVNTRSMPDASNSFNARMHTICPLPIRSVKQRFKPNAELFQMMEIFRQMVNDCMRIGLEHNCSTIRKLSPLAYYQLENHSIMSYYKLTAISQACGRLSQMKKDIKKGRKPKSPYVQKPYLVSCYGFKINGMLLSIPIRNRDYANILLNDHTTKTISDKSLKIKSFTITPTSLSLSMQKEIEMINPEKTIGIDRNERNITFGNDEKVVYVDTTKLSKMKEKYSSIKSTFKRNDHRIRKKIYGKFGKRQSNRERQALHIASKCIVEYAKKQKAMIIFEDIKGIRKLYKKGNGQGKKFRRKMNSWSFYELERQVKYKADWEGVPVKFIDPKRTSTLCPICGGRLQEDRQRSRDLWCSSCKRWRNRDVIASMNIAYKGWVRFIHPCDTCEAMKGNPKEPVILRVDVSKCLEVCL

SEQ ID NO: 57373 - protein, 571 aa, Escherichia sp.
  misc_feature (16)..(49): Xaa can be any naturally occurring amino acid
  misc_feature (153)..(314): Xaa can be any naturally occurring amino acid
  misc_feature (420)..(453): Xaa can be any naturally occurring amino acid
MRIMRPVINTSLTGKXXXXXXXXXXXXXXXXXXXXXXXXXXXXXXXXXXRFVFNRALARQNENHEAGNKYIPYGKMASWLVEWKNATETQWLKDSPSQPLQQSLKDLERAYKNFFQKRAAFPRFKKRGQNDAFRYPQGVKLDQENSRIFLPKXXXXXXXXXXXXXXXXXXXXXXXXXXXXXXXXXXXXXXXXXXXXXXXXXXXXXXXXXXXXXXXXXXXXXXXXXXXXXXXXXXXXXXXXXXXXXXXXXXXXXXXXXXXXXXXXXXXXXXXXXXXXXXXXXXXXXXXXXXXXXXXXXXXXXXXXXXXXXXXXXXGLNRSILDQGWYEMRRQLEYKQLWRGGQVLAVPPAYTSQRCAYCGHTAKENRLSQSKFRCHVCGYTANADVNGARNILAAGHAVLACGEMVQSGRPLKQEPTEMIXXXXXXXXXXXXXXXXXXXXXXXXXXXXXXXXXXDGAVRPPVEAGTHRNDSGDSLNVAGIHVLQGVEDVNIGFCQRLNSTPRNKRLRQLIPRTLNQSRPALIHLPLPEMPPPPRRAHAHYAAPDTNCRQWYLTAPDLPASGSNLRAGQPSSR

SEQ ID NO: 57374 - protein, 362 aa, Bacillaceae sp.
MSEKTEIVTQALTIKIRLKPNPSQNDLLKRSSTLYIATINRLVSEMVESKAITKKTSKHVDVELNSAVKNQAIRDAKSVFQKAKKMKFSVIPILKKPVITFNNQNFSTTQEGISFPLMVDGKSTRMFIKAIVNEREWELLQDASKVGSLRITKKGEDWVAQIAIEKISSPSSSRKVMGVDLGVKVPAVCVTDVDEVRFFGKGRQNKYVRRYHYCRRKRLGKQKKIDAIRASKHKEQRYMQNQDHKISRQIVDFAVRMDVGVIHVEKLANIRKTTRTSRKNNRSLHAWSFYRLIQCIEYKAALVGINVQHVDPKYTSQSCPACGERNKTITRSFYCKQCQYKDHRDVVGAKNIRFAPVSGGNS

SEQ ID NO: 57375 - protein, 427 aa, Mycobacterium sp.
  misc_feature (322)..(381): Xaa can be any naturally occurring amino acid
MARFEVPEGWCVQAFRFTLDPTEDQARALARHFGARRKAYNWAVATLKADIEAWRVTGIGTVKPSLRVLRKRWNTVKDEVCVNAETGAVWWPECSKEAYADGIGGAVDAYWNWQNSRSGKREGKTMGFPRFKKKGRDQDRVTFTTGAMRVEPDRRHLTLPVVGTVRTHENTRRIERLIATGRARVLAISVRRNGTRLDASVRVLVQRPQQPNVAQPGSRVGVDVGVRRLATVANEAGAVLEEVPNPRPLDAALKELRYASRARSRCTKGSRRYRERTTEISRLHRRVNDVRTHHLHVLTTRLAQTHGHIVVEGLDAAGMLRXXXXXXXXXXXXXXXXXXXXXXXXXXXXXXXXXXXXXXXXXXXXXXXXXXXXXXXXXXXXDRWFPSLSVEPTVRPGLARLVAVKRGREAAAWLPNNPETGCKSRDH

SEQ ID NO: 57376 - protein, 522 aa, Aquificae sp.
MITLSCKLELSSEDKEKLLYLMRRFSGAVRYAYNRLLEGKNQNEVQKLLQETFSLNARYSASAYFKAQAILSSCKERKQNPKKLVFGGRELFEKLCKKHINGKARAKLYKEWKEKRQGTLYSVGQANSKGNQNTRFVKVGNQWFLRISVGNREWLYAKVIRSVKRETDKWIDFVWRLTQAEQTGSWFPYTVEIKLRDGELYAFMSFEEVLPEITITKDFGVIGIDLNASPLHIAWAEVSRDGGLISYGQFSMHELLEKKTTEQREDYLWKLAHQIVDLAYQKGKAIAIEKLRKVSKGQRGDGKGKLRRRLHNWVYKDLLDKLKKTARRKGIEVIEVNPAFTSVIATLKYCPNYLIDKDTASAYVIGRRALGFKEDIPENYLKLLSDKNYMLYSIARLEKRKQELKIKLKQEANIYKRKAIKQELSKLNKDIELLDKHLQSLESEPSSQYQGSLRKEPVRGRSFDLQKAWQVLKVALVFPTLGKSFVRDFSPLRPVLVLGDWDRAVSKARPLSEWEVAQSGVK

SEQ ID NO: 57377 - protein, 355 aa, unknown
  TnpB Polypeptide
MDESTRLEKNRRIAKSQKETRERRKNKDILVRTVKIQRNKLSHSQLEALERLFLEGKWLYNTALAHNQFDEEFRRSLDNTVEVKLPTGEIERRPLTALGGQMQQGILARIRANLKGLEVLKDHGRKIGGLRFISEMTSIPLKQFGGTHKIHGSKVRVSNVPGWMRVNGLNQFDMERDDFANAVLIKRGHNFFVAFTVYREKTEHSSLATKKFVPDTTIGLDMGVSTHITFSDGSTVNARVEESDRLKRLSRKLGRQEKGSKAFAETKQHIRDEHEKAVNRRNDAANKVASWILEHEHVFMQDENISSWRRRSSVARGSRDSRESESKAHWSSASHGSQEERSDDRDVRLWRKNAA

SEQ ID NO: 57378 - protein, 433 aa, unknown
  TnpB Polypeptide
MQLTEQHVINRQDPRFAVLDAASFASKNLYNAALYEIRQAFFADGTWLRYAEMDKRMQSHEAYKALPAKVAQQVLKQLDAAWTSFFEACKAYNKDPSKFLGRPKPPKYKHKTEGRNLLVYTEQAVSKRGLKKGLIQPSQMAIAVQTKHKQVDQVRIVPRKGFYVVEVVYEHEQPKSAVDPAYYAGIDIGMDNLAALTSNQPGYVPVLVNGRPVKSVNQFYNKRKAELQSKLGHTGTTKRMERMTNKRNRRMDHYLHTASRWIVDDLVAHGIGTLVIGKNEGWKQEANMGKRTNQNFVSIPHARFVSMLTYKAELAGITVIVTEESYTSKASFLDRDQMPIYDPNQPEKPKFSGKRIKRGLYRAADGTLINADCNGSSNIIRKVAPDAFQQAEGVEDGKGHKLVVHPVRLSFPSPSQKASNGGSKRSRERYKTL

SEQ ID NO: 57379 - protein, 303 aa, unknown
  TnpB Polypeptide
VYPQSGWKLSDIREVGQGKNKKKRKARLYLSKIGFFTLILHRVFPESRVSQVCVKLHPSGKIHVILVVEEAETLGQSSKEPKNAVGVDLGITRLATLSDGRYLENPKPLERSLERIRVLQRTSRKKFLSKNWLKTKIRLAKQHEHVKHFRRDLFFKLGFLLTQEYDVLVLEDLNVQDLIQKGVTKRRRLRLYDSSFSELRAVLEWEFVKRGKLVLPVPAYNTSRECFKCSRINQNLSLEDRIFNCPYCGFTLDATLNACLVLLKRAGWVPPSVPAVAPPTTSSTLLRVKEEARRGDDSGSSRS

SEQ ID NO: 57380 - protein, 286 aa, unknown
  TnpB Polypeptide
LDLRRQNPEFQALHSQVTQQVADRFYQARQRFFEGLANKPKKKKTHRYLSLVYPQSGWKLSDTREVGQGKNKKRKARLYLSKIGFFTLVMHRELPENQVSQVCVKLNPSGRIHVIFLVEEPESQELSSKEPKKAVGVDLGITRLATLSDGRYLENPKPLERSLERIRLLQRRLSRKKFLSNNWFKAKRRLAKQYEHVKDLRRDLFFKLGVLLAQEYDVLVLEDLNVQGLIQSGTKKRGGCGSTTPLFQSSERCLSGSFEKEKNLFYLFQRTTLHVSASCAVESTRV

SEQ ID NO: 57381 - protein, 286 aa, Okeania sp.
MYCCQQVLVGKNPELIPILTFLCEQSHKLTNMGIYYARQLYFKSQKTLGKYDLEKVYKKNNHYKVLHSQAAQQILRTVAESFRSYYGLIIAYNEGKITDRPKIPNYRKKGGMATVSYPKQALKLKGNQIRVPLGNTCKRWFGLDCFYIHKPSNLDFLSIKELRILPRNKCFYWEFIHEKEIVVKPQLNQDNVLGIDHGLNNWLTCVSNVGTSLIVDGKHLKSMNRWYNKQVSTIKENKPTGFWSNKLAAITEKRNRQIRDGINKAAKIVINHCAQKFYWYNCFWLE

SEQ ID NO: 57382 - protein, 370 aa, unknown
  TnpB Polypeptide
MTITKAYKVRLYPTKEQQELMIKTFGCTRFVYNKALHICQETYRASKRLVFYDELSKMLTFWKTTEELCFLKEVDKFALQNSLRNLKKAFTNMKGGSGYPNYKSKHDHYDSYTTQPTNNNISVDNTYIKLPKLGHVRYRDKKTPRGKICNVTISRTPSGRFYASVCVETDDIKVLQMTDGRIGIDLGIKDFCAMSNHEKIENPHFLENALQKIKKTQRELSRKTKGSSNWEKNRIRLARLYEKAANQKRDFLEKLSTRIVSENDFICIEDLNVSGMVKNHNFAQSILSTSWSEFTAMLTYKARWYGKTVTRIDRFYPSSQVCSVCGHKNPLIKDLAIREWKCPVCGTRHDRDINASINILNEGLRQPTVV

SEQ ID NO: 57383 - protein, 450 aa, unknown
  TnpB Polypeptide
MLLARKLKIEVTEEQHCYFSHMSYAASKLWNLCNYEKYNWKELGLEEFPNWYYQKKKWKNNFWYKLLPSQTAQEVCKVLDKSWKSYNTLTKKKRIKNCKPPSNKKTPMPITYMQNGMKHNGDTVRLSLPITLKQMVKESNGIDKNFIYLQHKVFSQVDNIKQLMIFPPQNGRCDVVLNYEIEEPKLFPDNGKYLAIDLGIHNLATCYDSANSKTFIVGREYLAINHYFHKEIAKAQSALAKKSISQDYILDGRGVSLDQGSAVTVSAESGLSSDHVSVLAKQPQYTSKRLKNLYKKRNNSIQDYLHKLTKFITNYCVENEINTVIMGDLTGIKNRITNGDKKYNQKLHELPYEKIRILLEYKLACKGINFVLQNECYTSQCAPNTPSVERKYANKSNRVQRGLYVSEGNIYNADAVGAYNILRKYCDEHEIKKTFSIKGLTSVKVFKIKR

SEQ ID NO: 57384 - protein, 402 aa, Streptomyces sp.
VTQQVKRAFKYRFYPTDEQAAELSRTFGCVRLVYNKALEERTRAWYGEQRRISYVQSSAALTEWKKTEELAFLSEVSSVPLQQALRHLQTAFGSFFAKRAKYPHFKSRKKSKASAEYTRSAFKWRDGKLMLAKMADPLDIRWSRPLPEGAEPTTVTVSRDAAGRWFVSLLCEDTITAVPAATAAVGIDAGITSLVTLSTGEKIANPRHERRDRARLARAQRELSRKAKGSANREKARRKVAEVHARIADRRRDFLHKLSTRLVRENQTVVIEDLTVRNLLKNGKLARAVSDASWTELRSMLEYKCVWYGRELVVIDRWFPSSKLCGDCGAVREKLPLNVREWTCGCGAVHDRDVNAARNILAAGLAASACGDGVRPQRESSRTGQPSVKQETQRATAGIPRL

SEQ ID NO: 57385 - protein, 645 aa, unknown
  TnpB Polypeptide
MPPASDGIRTVGCRLSKLVTDEVHLLNIQDAVLRCHKATIYASELVNIHLRRCLEGEADTELALFFNKTWLLNVFNEVTLGKSTKVIQSLRDTHLKYMPPFESPSRIGIQQCLLYAAENLSTVASTGVWMHFQKRILSHVRRHHTLGLNEYNLLSKDEKRRRKLILLHVANDICKQPEIPYESPPEWHDWVHFERRRLGIDEAVGEWKNRPILYHLKARPHCFLECMFKMSKESQDAGFKAFSLYPLRRNLVPKHVRFDQKALRDLLHLGTSEYTKQRDKERRLSKKRTIDEVEHTKEVPKRRAKEDMVEEKAALFAQVLDLKAAGVQRRHLFDFGFTTDGVCARLQMQTKKPPNTTLPLNAMPRRGQWAIDEMKHLGRLDNMHVIGVDPGKRELFVGVDMDDTKSSSIRYTQQQRLKDMRSRQYKDEVDRSKPFHVQDAEADVAGYNSRSANMHSFCEYCKKRHEKLNVCIDFYSQLEHRHRRWKTVIKEQQSEERLYTKLRNVEKGDHRQLVLAYGSWGLIAGKPGAICNRGNPPCIGVGLMRKLARRFVVVPTPEAYTSKTCCHCLGECGAWIELEGERGKRIRGLRRCTQRDCMAPLNRDKNGATNIGLNFMRLMCDQNPIRSMTEEDIKLHQASLCMECD

SEQ ID NO: 57386 - protein, 386 aa, unknown
  TnpB Polypeptide
VSEGENGMKGLKFRIYPTETQIRQIQTNCSCSRFVYNRMLDLHTQAYKTEKKSLSYNTMANMLPALKKEEATLFLKEADSMCLQEAVRDLDRGFQNFFAHRAKYPRFKKRKTMYSMTYRTRNQNNGIRMTDRNHIHLPVLGNVKIRLSRELDGKILNATVTATPTGKYFVSLCVSEWQPYKKKAPHTEIGLDVGLAEFYTDSSGRSVYAPKPLAKYQKCLARAQRRLSRMKEHARRENIPLWQCRNYQKQKAAVAKIHEKIVNVRNDFLHKMSTQLCDENQIICVEHLNVRGMKKNHHLAKAISDAAWSKFFTMLEYKQNERHGYLVKVDTFYPSSQTCHCCGCINPKVKNLRIREWDCPKCGVHNGRDHNAAVNILNEGLRLLAS

SEQ ID NO: 57387 - protein, 436 aa, unknown
  TnpB Polypeptide
MQMVTSYTIAFKDGCDAVKRTTVIFNNAIRYITDVAFENWESISSFKGLLSRKQHIEHLIHSTKNRKAVYNFDQKFYKFPCYLMRAAIAEALGNVQAYMSNIDNWVKNECRGTRPKLDRGGHVLPCLYRGNMYKEVFGNEACIKVFRNNDWVWQKIRLNHSDRKYLEKKANGAAVSAPTIVKKHGKYELRFALAKEVELSSKEIYEQKACAVDLGITTDATCSVMDAHGTVLSRRFISCGREKDQVNRALHRVSEFQREHGSHDSGRLWSIAKRRNLNLAHLVAHKIVDYAIENGCDVIVFEHLETKGRKRGGKKQKLAMWKHADIQNTVTSLAHQNGIRISRICAWNTSRLAYDGSGEVLRGNKVSDTTPYDMCKFQNGKMYNCDLSASYNIGARYFVRELIKELPDIMAEVPDIGSGTTRTLSTLWKINSAMPI

SEQ ID NO: 57388 - protein, 429 aa, unknown
  TnpB Polypeptide
MLVQHRVVTEFRSYQERVKAANGESSKYVSQGWKRTANPAAPSYGVDYVNLGAVNKQYAAIENDPFADGEIVLKMVIQGEWHRLIFNFDNKRFTEGKVTLPVIKVEGGQPVFIFTVVTDNPVVQFSGDYTIGVDVGITDYATVVVRETKTGRLVYEATLSQRVHSLWNSVRSSERQVRDLRNKAATLLCNRQARMAALDEAQLHREAASRKKRELAILAAQEITDLSHLWGNAAVAVEDLGWIANTMQNGRWNRGELVRWLTHYVTQNGGWVVSVNPANTSQQCHMCGAKVSHPTRKDSVCPEHGLMDRDVNAAANIAARAVPRVAKARVTRAKNRKLRPQTALRTPPARDSLKYPGRDRTKNKPTPKRKNRYRASKGVILPVCPARAQTYSLAATVLADQSTRGYLGTNVAALKQGNVAYKCRLCNLI

SEQ ID NO: 57389 - protein, 459 aa, Crocosphaera sp.
MLVVEAKLKNGTPEQYQKLDEAIRTSQFVRNTCVRYWMDNKGITRNDLQKLCSTLAKNKDTPWVTLLNSQARQSAADRAWQSINRFYQNCGAPTRHLMAHVAAPSSRAKISGKKGFPKFKKYSRSVEYKLTGYKLSDDRRKIKFSDGFKAGEFDLWCSRRTLVYYSEQQIRRVRVVRRADGCYCQFLIDVERQENHEPTGQVTGIDLGLKEFYTDAQGNTVDNLRYLRRSEKRLKKAQRRLSKRFRKGKKQSNNYHKQRVKVAKLHLKVSRQREDKAIKDALALVQSNDLVVYEALKVRNLVKNRKLSKSISDASWYQFTEWLNYFAKIYRIVCIAVPPHCTSQDCSVCGTRVQKSLSTRTHQCPNCKTVLDRDHNAAINILKKGLKYLGEHLNGTVGHTETGASAVLGSPQVEQLAYPNALGESDLWVLNGNVENLSRLVEQGISNSDVERIPRYNAV

SEQ ID NO: 57390 - protein, 374 aa, unknown
  TnpB Polypeptide
MRTFQYRLYPTKEQQVKLWEHANKLNWLYNYFLNQRIENYKNGIKIGQKEQQAELVSLKEKDIILKEMHSQVLQQVPLRLDRSYQSFFRRVKLKQVSGFPKFRSCRDFFGICYPQSGYSIQNNIFKTKIYGGISFIQHRNLQGNIKQVSISNKNNKWFINIVTDYIEINTKSNVEIGIDIGLKDLVVATNGLKIKNCTHAKYFDKQISTIQSRKDKKKKGSNKYNYLNQVKQRLYEAKVRKLNDFQHKVSKSLSRQYDTIFAEDLSVKSMSEGNWTRLNKAIRNAKLAQFVSFLCYKVNHLVLVNPAYTSKMCNNCGKIHDLKLSDRTISCSCGKTYDRDENAAKNVLCLGQAIVAKRCTQSTTIVEASGFSQK

SEQ ID NO: 57391 - protein, 374 aa, unknown; identical to SEQ ID NO: 57390
  TnpB Polypeptide

SEQ ID NO: 57392 - protein, 393 aa, unknown
  TnpB Polypeptide
MKRAYKYRIYPNFSQREALAKIFGFCRFLYNSALEERISFYKKFKKSLNYYDQEKSLKEIKNIFGCETENIHSQTLQQVLKQLDTSFKNFFRRIKNKKIAPGFPRFKNTDRFRGILFPQCDLNSGGAKRLPNSKLKIKGVPGEIKAVWHRPFQGRCKQVRIVKNNDKYFIILFCDDVPNIETRELTGKTVAIDLGISNFITTDDGLKIHHPKPYKTAKEKLKYLQRRAAKQRGSNNSHRMRIRIANQFEKIVNIRNEFQHKTVNFLIKNYDVITIEKLNIKKMLENINFAVSKINISEVSWGNFINILKYKAENAGVLIKEVNPANTSQTCSQCGKLRKIKLDLKDRIFKCEFCNFEMDRDQNAALNIKKLGTSFVTMAASPPVSEAHAFRRG

SEQ ID NO: 57393 - protein, 393 aa, unknown; identical to SEQ ID NO: 57392
  TnpB Polypeptide

SEQ ID NO: 57394 - protein, 297 aa, Moorea sp.
VLVMEFKAVVKEPQKIAINEAIRTAKFVRNKVLRYWMDNRGVGKKELYRYNTQLRDEFSFVKELNSHACQASVENVERAIKRFYDNCMGEVPGKKGYPRFRKHCRSVEYKQSGWKLSPDKKSIKFSDKKGIDLRSRYANGRVKLKGTWDLWQFDQKQIKRVRIVQRADGYYVQFCVKVDNHEELEPTGNAIGLDVGLKEFYTDSNGHAEPNPRFYRTGEKRLKFYQRRVSRKKKGSANCQKAINKLGRTHLKISRQRVGEACAKRIEHAKRLARCVIRSNDLVAYVRAACRKARVEG

SEQ ID NO: 57395 - protein, 328 aa, Synechococcales sp.
MYQIVYPGQALKPVEGGFLVPLGHGGKAHFGVANFFVPCPQRLLDKVIREFRIIPSQGEFQIEFVTESLEEARCERCELIPEQWLAFDPGMNNLVTGVSTTGESFILDGLALKSYNHFYNKQKAHYQSILELQEPGRKVSAKLQTLNRNRANFVRDYINKAARYIIDFALERGIKGIAWGVNQEQKNGIKLGKRINQQFVQIPQARLRKRVEQLAFLHGLRFVETEESYTSKTCYLSGQLLPSFGEKPEGWVPMGKRVKRGLYKTFNGMFINADCNGAANILQKVAAKLGFEPSRVSIGALTAPYRVRHQHGKFLPGCPTIEAQSLQG

SEQ ID NO: 57396 - protein, 402 aa, Actinomadura sp.
MVFDVQLRYQYRLYPTAGQRQALARAFGCARTVFNDGLRARQNAHAAGLPYIRDGELSKRVITEAKKTSERAWLGEVSAVVLQQALADLNSAYRNFFASLTGKRNGPKAAAPRFRSRRDNRQAIRFTRNARFRITAGGRLRLPKIGDVRVRWSRELPAEPSSLTVVKDAAGRYFASFVIQAREEPLPDATSEIGIDLGLTHFAVTSDGRKIANPRFLRRAERRLRKARRTLLRKVKGSSNREKAVVKVARAHARVADARRDWAHKLSTALIRENQAVYVEDLAVSGLGRTRLAKSVHDAGWSQFVSMLAYKAARSGRHFAKIDRWSPSSKLCSACGALAESMPLNIRSWTCPCGVAHDRDVNAAINILAAGRADRPNACGAQVRPGPAPAQRREAGSLRGAA

SEQ ID NO: 57397 - protein, 274 aa, Bacillus sp.
  misc_feature (235)..(263): Xaa can be any naturally occurring amino acid
MEVNQMIINKAFKFRIYPNQAQAILINKTIGCSRFVFNHFLSLWDHAYKETGKGLTYGTCSAKLPAMKKEFVWLKEVDSIAIQSSVRNLADAYTRFFKKQNSAPRFKSKKNNVQSYITKQTNENIAVIGNKIKLPKLGLVRFAKSREITGRIVNATVRRNPSGRYFVSLLVETEVQELPKTHSYIGIDVGLKDFAILSDGTPYENPKFFRSLEDKLAKAQRVLSRRMKGSSRWNXXXXXXXXXXXXXXXXXXXXXXXXXXXXXMNTYQMLEKIT

SEQ ID NO: 57398 - protein, 327 aa, unknown
  TnpB Polypeptide
MQKGIKFRIYPNREQKNFIHQTLGCCRFIYNRGLAMRKEGYEKGKKIGYGQTSAMLTELKKQEEFAFLKEVDSIALQQSLRDLDRGFVNFFQKRASHPTFKSKHNHFQSYRTVNQKDNIRIVGRYIKLPKLGYVKVRQSMEVGNIRHVTIEHTPSGKYFAVLNVEFEPEPRPNQGGTIGIDVGIKTFYSDSNGNTVANPKYLERSMRKLVREQRRLSRREKGSHNRDKQRIRVAKVHEKVTNQRNDFLQKQSTMLVCENQTICIEDLHVKGMIRNHKLAKSIASVSWAKFSRCWNIKLCGMEMKSAKYQRCIRAARPAVPVAIGIRW

SEQ ID NO: 57399 - protein, 402 aa, Escherichia sp.
VKRLQAFKFQLRPGGQQECEMRRFAGACRFVFNRALARQNENHEAGNKYIPYGKMASWLVEWKNATETQWLKDAPSQPLQQSLKDLERAYKNFFQKRAAFPRFKKRGQNDAFRYPQGVKLDQENSRIFLPKLGWMRYRNSRQVTGVVKNVTVSQSCGKWYISIQTESEVSTPAHPSASMVGLDAGVAKLATLSDGTVFEPVNSFQKNQKTLARLQRQLSRKVKFSNNWQKQKRKIQRLHSCIANIRRDYLHKVTTAVSKNHAMIVIEDLKVSNMSKSAAGTVSQPGRNVRAKSGLNRSILDQGWYEMRRQLEYKQLWRGGQVLAVPPAYTSQRCACCGHTAKENRLSQSKFRCQVCGYTANADVNGARNILAAGHAVLACGEMVQSGRPLKQEPTEMIQATA

SEQ ID NO: 57400 - protein, 440 aa, unknown
  TnpB Polypeptide
MSALSTTTPPTVINPSALATRPVVLTYRFRLEPLPAQEQRFWQYAGARRWSYNWALRRRQEHVNVTGKTLSFADLCAELTTLKSQPETGWLRTVNAQLLQQGVNDLCRAFTNFFEKRANYPKLRKKFRHTPTFRIPQGIGLPSSNHITLPGIGDVLMRQSREIVGVVKSATCKWECGHWSVALVAHQEIENKPKAVLTEDNTIGIDLGLKDACVTSAGESIPALRSYRKTQGKRRTAGRVVSRRTGAKKGEKASARFKKAKAVAARIDRKAANQRADVLHKLSTRLVRDHDGLVIEDLAVRGLAKTKLAKSVFDAGMGAFRRMVEYKSDRASKTVVVIDRWFPSSQLCSADGCGYRNWALTLGDREWTCPQCGAVHHRDENAARTIKAEGLRVYRTWTQNQDRAQSPLDGDLVAAGQVETVNARGCRVSLPLGAVAATPA

SEQ ID NO: 57401 - protein, 422 aa, unknown
  TnpB Polypeptide
MKAESFAIDYFRAALKLYKKGQRHYKSKMISYKYPIFPDKTTQQKLAEALDACRWLHNKLLERMNEAGEKGIKLKTYDTQNMIPSLKLENPKLNLVYSKVLQMVNYTLWSNIKGLSASKKNDRRIGHVRFKGYGWYKTMNYNQSGFKLDQDHGLLHLSKIGDIRIKMHRKIQGCIKAILIKREGWQWFAIVQADQDPEPLPETGKSIGLDVGLKSFIVDTDANSIENPRFAEKSADKLAKIQRRLARAERGSNNRQKIKEQIEKIHAKVNHQRDDFLHKLSRLYVNNYDNICVEDLDVKGLKEKGHRKSMHRSIHDASWSKFLFMLSYKAESAGRKLIKVDPRDTTQRCSVCGSIVKKELSDRVHECPYCGFSCDRDYNASRNILLTGMEQPAAPIESKPLHHVSVMQVLATKWEAAPFRTR

SEQ ID NO: 57402 - protein, 288 aa, unknown
  TnpB Polypeptide
MRKAFTYRLYPNRLQADAMAARLEAHRALNNAALDHRRWSWQRGIAISSVDQSAELKDIRRADEGLAACNFSSCQATLRRLDRAFRAFFRRVKAGESPGSPRFKGRDRFDTVDFPSHGDGCRCHGPRVTVQGVGSVKVTCHRPTAGTIKTVSFTREAGRWFVVVSCDLGDAPPLVTDRPAVGIDLGLSAFLVTSDGETVDLPRFARRNQTRLRRAQRSLSRCQRGSKRRRTVRMRVARCHAKVADQRHDVHHTTAKTLTDRSGVVCVEDVNVRGIARSRLAKSAHDAG

SEQ ID NO: 57403 - protein, 394 aa, unknown
  TnpB Polypeptide
MGMNRAWQYRLYPSKAQEKELQNYLYECKNLWNSLLEHTKSYYKKTEKFPSRKQLSLMTKETSLFSQVAQNVADRLTKSLKGMIARKKAGQKAGFPRFKPIERVKSFTYPQFGFKLNEKLELSGIGSIAIKKHRDIQGEMKTLTIKKTPAGRWFAIFTTEIEKEIPKRKQGAAAGIDLGIEHFAYLSDETIIENPRHLKQAEEKLEQRQKQLSKKKKGSKNRRRARLRVAMAHEKLTNKRTDFLHKVSRKLTDKYSFIAMENLNIAGLAKGFLAKSVLDCSWAEFLSMLRYKAEEAGCEVVLVDPAQTTSECSNCGLVQKKSLAERKHTCICGAAMHRDLNAAINILNRATLRTTNRSQDSREHKLTPTAGQAGSNAWGEDSNSFLIEPRSPVL

SEQ ID NO: 57404 - protein, 459 aa, Cyanobacteria sp.
MMSIIKYQRKMAEAITRIIWLYYIVNAIKIPITGSSRLLEPCAVKVACTVLRGGGDSDASSLPDKVLLVMLRATKVRIDPTAEQRQHLAKSFGCCRFAWNYALNLTNETYKATGKGLSRFAIQKEITNLKKEYEWMKEPYSQCLQVVALDLSRAFINFFEGRASFPNFKTKHRKQSITYPQNVSIVDNGIKFPKMGVVYAKIHREIKGSIKSVTVSQNCQGHYYASILTEDGEETPEKSADGKAIGIDLGINHFAITSDGSKFDNPKWIEKHERNLRAKQKRLARREKGSNNRNKTRKQVARVHKKISDCRLDFQHKLSRRIINENQVVCVENLAVKNMVKNHNLAKAISQVGWGQFTTMLKYKAEWEGKVYQEINRFFPSSKICNVCLNQVRSLTLDVRSWQCEKCDTRHDRDVNAAKNIRDEGLRILSSGAGEIAYCPDVRRDGRGRKTSTISQFDG

SEQ ID NO: 57405 - protein, 393 aa, unknown
  TnpB Polypeptide
LSNSVIFVIFVFMIAYRFKLYRNDKTRHLDRMLGEAAWVWNLALAIQKRYYRMTGKYVSTVDMQKHFAKRHKPIRLHSQSVQEILQRQDEAYMRFFKHLSTRPPKFRKAKDFSSIVFKLSGGYRLSDNRFTINKIHKTFKFSKSREIEGNVKRLTVKRNRLGEYFMVVTTDAESKSCIKSRKGASVGMDFGLKHYLTLSDGGVVDCPLFLKDSLTEYRRLSRNLSNCQRGSSNRERRRKQLDRLLLDIKHKREDFQWKLSHSLCRRYDEIFLEDLNLTGMCRRWGRKMSDMSFGDFVLKLEYVASKYGVKVHKIDRFYPSSKTCSCCGHIYKELRLSERSWVCPECHSVLDRDLNASINIYRKGVSDLGSDGKTLVGFPLSAVAPATQESHCL

SEQ ID NO: 57406 - protein, 159 aa, unknown
  TnpB Polypeptide
LQKFLGLDFSMHELYRDSNGKEPAYPGYYRNAEKKLAREQRKLSRMQKGSNNRNKQRFKVAKLHEKISNQRKNFLHKQSRQITNAYDCVCIEDLDMKAMSRSLNFGKSVSDNGWGMFTTFLRYKLEEQGKKLVKVGRFFASSQTCSVCGYKNAKTKILR

SEQ ID NO: 57407 - protein, 372 aa, Streptomyces sp.
MQCRPVLIFCISSMTQIYSVPRMQLRYGFRLYPDYRQRGALAKAFGCARVVFNDAVRARESARQEGEPFPTAGELSKTLITEAKATIERSWLSEVSAVVLQQSLRDAEAAYKNFFASLKGTRKGAKMGAPRFKSRKDTRQSIRFTANARWNLDHAGRLNLPKIGAVKVKWSRVLHATPTSVTVIKDSAGRYFASFVIDTDPEADAAVMPPADQEIGIDLGLKHFAVLSTGEKIDNPRFLRRAEKRLKKAQRNLDRKEKGSKNREKARLKVARAHASVADARKKFHHQLSTRLIRDNQAIGVESLAVKGLARTRLAKSVHDAGWSQFVSMLEYKAQRYGRRLIKIGRFVQTSQTCHVCGRIDGPKPLHVRTRR

SEQ ID NO: 57408 - protein, 412 aa, unknown
  TnpB Polypeptide
MTVIQQVEKHVIKKSHPYYNMFCEYTHLAKNLYNHANYLVRNEFVENRKWLRYQELDKLLRQDLDFQDYANMPASQSAQQVLRLLETNWKSFFNSIKDWSKNKDKYSGQPKLPKYKPKEGKMVLPLTNQQVRQKGDLLHFPKTFCGFTVKPRCVTLDNFEKINQVRVVPKGQSFCLEIVYSILVDVELRSDNGRYMSIDLGLDNFATVVTNTGLNPIIVNGKGLKSDNQYYNKKKAHYQSVAKQMNNQHYTNRLYRLTQKRNLKVEDYLHKASRYIVDFALENQINTIVIGNNKNWKQSSSLGKVTNQAFVSIPHQKLIDKICYKADLCGIQVILTEESYTSGTSFLDNELPEKFYYNKKRRVKRGLFISNKGLKINADVNAAFQIMKKVFPNVFADGIKDVVLHPVRVSIV

SEQ ID NO: 57409 - protein, 409 aa, unknown
  TnpB Polypeptide
MEITLSVPFKYVPNKYIRKMLEDFRDMVNWCIEKAIENNVTSYYSLRKLIYNEWKQRWDYSTHFCHSACRVATSMLKSWRRLKRKGLAKGDRPVARKLFIQLDHQLVKYEGDRIRISVKPRKFLYIKLKYGKYQRKFIDEWKTGRLRVGEISINETKVLIPFRKVVDLTDPEDWIAIDINESNITGVSSNPHILRIEHDLRTIHTTYFEIRRRIQKLSKYKPITSKRLMRKYSGREKRKAHDLCHKIARIVVDFAKKHGFGIIMEDLRGIRKSINKGRNLNRRLHSWNFRKLQFFIEYKAKLNGIPVVYVNPRNTSSLCPICGGKLAPNGRRLMKCRSCGYENDRDVIACLNMLRMRGVSVPPECLSMKPFWWRGEGSPHTYVTKVIKVAENQNGRVPRLRNSVWVRAT

SEQ ID NO: 57410 - protein, 126 aa, Paenibacillus sp.
MLQSSKLGLLSVLQKSNKWFVQISLERPTEQVTGGATMGIDLRLKVPAVVVTSNGKTKFVGNGRKNKFIRRKYNANRRKLGKLNKLSAIRKQCHKESRYIKDQNHKISRQIISWCNQHHVSTCGRW

SEQ ID NO: 57411 - protein, 438 aa, unknown
  TnpB Polypeptide
MIVSRVYRYRLEPTPQQKKYLLRVGMGCRYIYNLGLQQRSLARNDKLPSLYELHQQRLSEFQQQKDESEEKQSLAKQFSLGSDSSTRPIKHMITGQKQSKELTALRRQTDWMKEIPFSCLQNALVVDLHQAFQHFYRRVRNGKKISEASKNSFGYPVPRRKSHLSILWKPNDVSIKSLSKACGGKDYFSEIRMPKCPGLMRMRQDRPIPEAAKIGQKRVIQESDAHWYIGFTVEENIDWHSAAEEIGFVTLSGSTVSLQDGTVYPLAGKQDRTWTLVRVVDQKIAKKRRQLARKDKFSENWRKQSQQISKLQHKRAEALKSLRHEITNQLASRFRSLVVTDLSALSGPVDSAEPLLGVADFLKQLDYKMNWHGGELTLAMVPELAQGCSQCGRVKSFVQRNLNSFCCNVCGFETLILANVTQIPLSAKHSKSELSRYT

SEQ ID NO: 57412 - protein, 362 aa, Clostridiaceae sp.
VLKAYKYRIYPNKEQKLYFAGTFGCVRFIYNKMLADRIKSYKENKDLDIKKIKYPTPAQYKKEFEWLKEVDSLALANAQMDLNKAYKNFFRDKSIGFPKFKSKKSNYNSYTTNNQNGTVYIKDEHIKLPKLKSMIKIKQHREFNGIIKSCTVSQVPSGKYFISILVNCEIKKMPEVSKKIGIDMGLKEFAICSDGYREANPKYLTKSERRLVKLQRDLSRKKKGSNNRKKARLKLSKLHEKIVNQRADFLNKLSIKLIRENQSIVIEDLKVKNMQQNHRLAKAISEASWSEFRRMLEYKAGWYGRKIIVAPSNYASSQLCSVCGYKNREVKNLALREWTCPKCDTHHDRDINASKNLLKLAI

SEQ ID NO: 57413 - protein, 402 aa, Streptomyces sp.
VTRQVKRAFRYRFYPTDKQAAELSRTFGCVRLVYNKALEERTRAWYGEQRRISYVQSSAALTEWKKTEELAFLSEVSSVPLQQALRHLQTAFANFFAQRVKYPRFKSKKRSRASAEYTRSGFTFRDGKLTLAKMAAPLDIRWSRPLPEGAVPTTVTVSRDSAGRWFVSMLCDDRVTRAPATTNAVGIDAGITSLVTLSSGEKVTNPRHERRDRARLARAQRELSRKAKGSNNRAKARRRVAEVHARIADRRRDFLHKLSTRLVRENQTVVIEDLTVRNLIKNGKLARGISDAAWGELRSMLEYKCAWYGRELVVIDRWFPSSKLCGACGRVREKLPLNVREWTCDCGAVHDRDVNAARNILTAGLAVSACGDGVRPQRESSRTGRSSVKQEPPRATVGIPRL

SEQ ID NO: 57414 - protein, 405 aa, Streptomyces sp.
VCGVTRQVRRAFRYRFYPTSEQAVELSRTFGCVRLVYNRALEERTRAWHGERRRVSYAESSAMLTGWKRTEELAFLAEVSCVPLQQALRHLQTAFTNFFGKRAKYPRFKSRKRSRASAEYTRSAFTFRDGQLTLAKMVGPLDIRWSRPLPEGVSPSTVTVSRDGAGRWFVSMLCEDTIAPAPATTNAVGVDVGIASLVTLSTGEKIANPKHECRDRARLARAQRELSRKAKGSNNRAKARRRVAKVHARIVDRRRDHLHKLSTRLVRENQTVVIEDLSVRNLLKNHSLARAISDAAWSELRSMLEYKCSWYGRELVVIDRYFPSAKLCGACGTIREKLPLHVRTWTCECGTTHDRDGNAARTILAAGLAASACGDGVRPQRESSRTGQSSMKQETQRATTGIPCL

SEQ ID NO: 57415 - protein, 402 aa, Escherichia sp.
VKRLQAFKFQLRPGGQQEREMRRFAGACRFVFNRALALQNENHEAGNKYIPYGKMASWLVEWKNATETQWLKDAPSQPLQQSLKELERAYKNFFRKRAAFPRFKKRGQNDAFRYPQGVKLDQENSRIFLPKLGWMRYLNSRQVTGVVKNVTVSQSCGKWYISIQTENEVSTPVHPSALMVGLDAGVAKLATLSDGTVFEPVNSFQKNQKKLARLQRQLSRKVKFSNNWQKQKRKIQRLHSCTANIRRDYLHKVTTTVSKNHAMIVIEDLKVSNMSKSAAGTVSQPGRNVRAKSGLNRSILDQGWYEMRRQLEYKQLWRGGQVLAVPPAYTSQRCACCGHTAKENRLSQSKFRCQACGYTANADVNGARNILAAGHAVLACGEMVQSGRSLKQEPTEMIQATA

SEQ ID NO: 57416 - protein, 225 aa, unknown
  TnpB Polypeptide
MKIASAYSVRLRNFCRVFDDTVEVYRKAVDFFIEIMLRHRDPKFTELKHDNDCIRLAEGLNLVNKDIAIKTANFIVKLANEFKVDVIVMEYCDLTGRKRGSKRQRLHHWRAKYVQKMVEHKAHRCGIRIRRVCAWNTSKLAYGGSGPVARDTENYSMCTFKTGKRHECDLSASYNIGSHYFLREYEKSIPATEWRRISAKVPECAHRITRTLSTLIRVCAELHSK

SEQ ID NO: 57417 - protein, 365 aa, unknown
  TnpB Polypeptide
MNKSFKVRIYPTKEQQSLLEKTFGASRFVYNYFLKLKSYLYQEFKIQISYNHTSKILTGLKKQKSWLKFFDSRALKNALKDLDNAYGKFYKGSGYPKFKRKDGKNSYRTNSVAIRVDNSFIKIPKVGIIKFRDNYNLEDKNILKIYNITISKTPSGKYFASISAEVYIPCFERTNQNIGIDLGLKDFAIFSTGDKIDNPRILKHLEVKYRRLAKSLSRKVKGSANYQKAKLRLARFHEHVTNIRKDFLHKLSTNIVRSYDIICIESLNIKGLMKSKLSKSFQDVSLYEFVRQLEYKASWYGKTISKVDRFYPSSQLCSSCGHKNKEVKNLNIREWACANCGTHHGRDINASTNILNEGLRLLESI

SEQ ID NO: 57418 - protein, 396 aa, unknown
  TnpB Polypeptide
MKQCDMIETLKVQLSPNNKQLTKLFQYANCSRFAYNWTLAKEQENYKQGNKFLSDNELRKEFTRLKKQENYKWLNKISNNVTKQAIKDACNSYKRFFKGKSKHPKFKSKKNSKPSFYQDNVKIQFTDTHVKIEGFSTSRKKNKQKLNWIKLCEKGKIPTNCKYMNPRITFDGLHWWVSVSVEVDDNTNAPPKSEGVGIDLGLKELAVCSNGNTYENINKTKIVRKIEKKKRRLQRSISRKYNMNKRGESYKKTSNIIKREKELLKLIKRLTNIRQNHLHQITSEIVKRKPSFICIEDLNVSGMMKNKHLSKSIQQQGFYEFRRQIEYKSTWNNILVIIVDRFFPSSKLCSCCGGIKKDLKLSDRVYKCDCGNIIDRDFQASLNLKQYGENVLKQNL

SEQ ID NO: 57419 - protein, 374 aa, unknown
  TnpB Polypeptide
MHKAFKYRLFLNDRQAAAAQAQLDIARELYNACLEERRACYKVTGKSLTYYDQANQLKAIRQERPDVATANYSMLQAICRRAHRSFENFYRRRKAGLPGGFPRFKGYHRFDSITFPSYGDGCKLTDARLKVQGIGSLKVKMHRPIGGAIKTVTLKREGRKWYVVFSCDVGTPAPLPATGQSVGLDVGLSSFLTTDTGETVDNPRFFKAAQRRLRLAQRALARCTRGSARRGKVRRRVAALHQKVGNTRRDFHHKTARALVQANDVLCHEALQVANMVKNRSLAKAMHDAAWSQFIAILTSKAEEAGRDTIAVDPRGTSQTCPCGATVPKTLSDRWHDCPGCGLSLPRDQVSAMLIKRLGHSRQAPTQRVAAYVA

SEQ ID NO: 57420 - protein, 418 aa, unknown
  TnpB Polypeptide
MYLTIKQQVKHLTKEEYNILRELCRTAKNLTNQAIYNIRQHYFQEKQYLRYEANYHELKSCQNYKLLNSNMAQQTLKNVDSMFKSFFALIKLAKHGKYNFRYIKLPKYLPKNGYANLIIGVINIKDSIITLPVSNAFKKKLDRRLKVQIKIPKVLEDKKIKQIQIIPKFNARFFEVQYTYEVQEENIKLNTNNALAIDLGVNNLCTCVTNVGKSFIVDGRKLKSINQLFNKQNARLQSIRDKQNILRQTKQQFLISRKRKSRVDDYINKTCRYIINYCLSNDIGTLVVGYNQSFQNKANLGKRNNQVFTQLPFGKIREKLEYLCKRYNINYILQEESYTSKASFFDNDELPIYNADNPQTYEFSGKRIKRGLYQTKNNYLFNADCNGALNILRKSKAVDLTILGCRGELDTPKRIRVS

SEQ ID NO: 57421 - protein, 366 aa, unknown
  TnpB Polypeptide
LNKSFKVRIYPNQEQKDIIDNTFNSTRYLYNYMLNLREKLYKFFGVSLCYNQSSKVLTELKKHKVWLKFVDSKSLQQTLKDLDNAYVNFFNGKSKYPKFKSKKQSKNSYRTTQRVRLNTENRTIKIPKVGSIRFRDKSKFKGITKIYNVTISKTSSGKYYASISAEVNIEHFEKTNQNVGIDLGLKDFAIFSNGDRVDNPKFFIHAQKKLAKMQRKLSKKIFGSNNYLKYKIKVARFHEKIKNKRKDFLHKLSLRLVKEYDIICVETLRVKNMMKNHKLAKSFQDVAHSGFIRQLEYKAEWYGKMVSKVNTFYPSSQLCSNCGYKNKDVKNLSIRDWTCAICGTYHDRDVNSAINILNEGLRILNS

SEQ ID NO: 57422 - protein, 386 aa, unknown
  TnpB Polypeptide
VSLVQIQLGSPFIVRKGVYLVNKSYKVRIYPSKEQQILIDKTFGCTRYIYNYMLNLKKRLYTNFNLNLSFYSMCKVLTELKRHREWLKDADAVALVQCLKDLDFACRRFYKGDGYPKFKSKKRGKNSYRTYKNIHLDIDSRRVKIPKVGWVRFRDKSNFKGLTKINNITISKSSSGKYFASISSEVCINTFEKTNQNVGIDLGLKDFCVLNDGTKFENPKFLVSNEKRLKMLQKSLSRKVYGSKNYMKAKVKLARFHEYIVNSRKDYLHKISTFLVRTYDVICAETLRVKNMIKNHKLAKAIQDVSWYEFCRQLEYKCLWYGKKFVQIDTYFASSQICSNCGYKNSNVKNLSIREWVCLECGTIHDRDINASTNILNEGLRILELI

SEQ ID NO: 57423 - protein, 412 aa, Sulfolobales sp.
VERAVKLRVKVDYKTYQKLREVEEEYREVLEDAMNYGLSNKTTSFTRIKAGVYRTEREKHKDLPSHYIYTACEDASERLDSFEKLKKRGKAYTDKPSVRKVTVHLDDHLWRFSLDKISISTKKGRVSISPAFPKVFWRYYNTGWRIASEARFRLLKGNVVEFYVVFKRDEPKPYEPKAFIPVDLNEDSISVLVDGKPTLLETNTRKITLGYEYRRKAITAGKSTKVREVRRKFMRLRERDKKADIRRKLAKLIVKEAYESRSAIILEDLPRRAPEHMVKDIKDKQLRLRIYRSAFSSMKNAIIEKAREFGVPILLVNPSYTSSTCPVHGAKVVYRPDGGDAPRVGVCEKGKERWHRDVIALYNLAKRAGDVSPVPLGSKESHDPPTVKFGRWLRAKSLHSIMNERKMIEMRV

SEQ ID NO: 57424 - protein, 301 aa, Burkholderia sp.
LNVLTTGSSKELGLHSGTINATCEQYAKSRSQHRRPYLRYRGRKSLGWVPLKGRDLKREGDAFRFAGHTFRVFSSRPLPDGKIKDGTNFAQDARGNWFLNIVIEIPDVKARPIRSGVGLDLGLKDFATLSTGEKLPNDRFGQRAAEKLAKAQRARKHKRHIAKLHAKVANARADFQHKLALDLVRRFDYIAVGNVSAAKLAKTRMAKSVYDASWSSFRNRLRYKAMAHGATFEEVDESGSTQSCSACGSTDSTTRPKGIAGLRIREWKCSNCGVEHDRDINAALNILRCGRASPGVGITSL

SEQ ID NO: 57425 - protein, 404 aa, Nostoc sp.
VFNLTYEFKLKPTDAQAQMFKDWLEINRRVYNYALAERKDWYLSRSCRINACSLNREYIIPVDTPRPTYASQCKALTTAKREFLELKKVQSQVLQQTLKRLEVAFVAMWERNHGFPRFKKFGRMRSFIFPQMQGGRLKPGMVNLPVIGWVKFRESRGIPDGGVVKQARVARKVSGWYVMLTVQWDVSVPSPIPHGEALGIDVGLTSFIATSNGLTLKRPRFFVDAEHKLKLLQQRVSRKRIGSNNWHRATKKVASLHEYVANCRKDWHRKLSHQICNNTGMVFVEDLNLVGLSRGMLGKHCLDAGFGQFFNILEQTCFKRGVYFQKVDSRKTSQICPSCGVETGKKELSQRTHICSNCGYTTDRDVAAAQVVLNRGLAAVGQTVKMLAEGKFIGIPVKQESPNF

SEQ ID NO: 57426 - protein, 371 aa, unknown
  TnpB Polypeptide
MIKAYKYKLDLTVKQKKQLAQNFGCVRFIYNWGLNIKKTKYEEEKVTVSYNELAKMMAQLKKQDEYKWLNDTYSVCLQQALRHLDAAYNKFFKEKHGFPKFKSKKNPCNSITYLDCKFDFENNRLYIPKIGKVKFYNNRTFDVNNCKLGTVTISKDNCGEYWACAVVEDYKDLRDKTPIKDNDRCVGIDLGVKNLCILDNGTKYDNPKYYKKYCDKLARLQQILSGKTKDSNNYNKLKLRIAKLSKKIQNMRNDYLHKTSTELINNYDTICLETLNVKGMMKNHHLAQAIGDVSLGEFNRQLTYKGEWYGKNIIHIGRWEPSSKTCNKCGYVNKDLELKDREWVCPVCGEYHDRDINAAINIRKIGLEISK

SEQ ID NO: 57427 - protein, 392 aa, Nonomuraea sp.
MFLPSGIDQRKDHGVLLRYTFRLYPTASQHVALARTFGCARTVFNDGLRMRREAHINGLPYVSDGDLSKRVITQAKKAPERAWLCEVSAVVLQQALADLNTAYRNFFASLSGKRKGPKMAAPRFRSRKDSRQAIRFTRNARFAVTTGGKLRLPKIGDVPVRWSRPLPSEPSSVTVIKDAAGRYFASFVVETAAAPLPQTTGEVGIDLGLTRFAVLSDGRKIGSPRFLRRAEKKLKKAQKALSRTTKGSNNRSKARVKVARAHARVADARRDFTHKLSTQIIRENQTVVMEDLCVRGLARTRLAKSVHDAGWAMFTGMLESKAKRYGRTLVRVDRWFPSSKLCSACGALAEAMPLDVRSWACLCGAVHDRDVNAAINILAAGRADSLNACGGL

SEQ ID NO: 57428 - protein, 1258 aa, unknown
  TnpB Polypeptide
MRKLLKSFKTEINPTEEQKVKIRKTIGTCRYIYNFYLTHNKELYDKGEKFMSGKSFSVWLNNEYLPRNPDKLWIKEVSSKSVKRSIENGCVAFTRFFKHQSAFPNFKKKGKSDVKMYFVKNNPKDCRCERHRINIPSLGWIRIKEKGYIPTTKDGYVIKSGHVSIRADKYYVSVLIEILNNKIVNNFNEGIGIDLGLKDFAIVSNGKNYKNINKSAKLKKLEKQLIREQRSLSRKYENLKKGWSTQKTNIQSIHDEIVSNVRENLQYLDVSIFNYIFEWQNIGKFMSVKDLTTYEVLKDEDLKGIKAKGKLLKHKKSGARVLLVENDDNNKVFSIAFRTPPSDSTGVPHIMEHSVLCGSKNFPAKDPFVELVKGSLNTFLNAMTYPDKTVYPVASCNDKDFQNLMHVYMDAVLYPNIYNHDKTFRQEGWSYKLDEKDGELSYNGVVYNEMKGAFSSPEGVLDRVVLNTLFPDNCYANESGGDPEVIPQLTYEQFLDFHRTYYHPSNSYIYLYGDMDMEEKLRWLDKEYLCHYDKKDVNSEIHLQKPFDEVQEKTFEYSIASDESTEENTFLSYNKVIGTTLDRELYQAFEILDYALLSAPGAPLKKALTDAGIGKDIMGSYDNGVYQPIFSVVAKNAEESQKDEFVKVIEDVLRDQVKNGINQKALLAGINYNEFRYREADFGNYPKGLMYGLQVMDSWLYDENQPFIHIEALETFEFLKNKVGTGYYEELIQKYLLDNTHGAIVVVRPEQGRTARLDAQLQDKLQKYKESLSEAEVEKLVADTKALEEYQSEPESIENLEKIPVLRREDISREIAPFFNEEMKLADVPVVYHEIETNGIGYVNVMFDLSGVSAEELADVGILQSVLGIIDTENYEYSELFNEINVNTGGIGTSLELYNNVTRVKEKEFKATFEIKGKALYSQLEKTFAMMAEILTASKLDDTKRIREILAMLKSRLIMKFQSSGHTTAALRALSYASPSAKFKDMTSGIDFYKRVAYIEEHFDEEKEALSQRLYALTKKIFRPDNMMISYTAAREGLEGMEPRIAELAGKLNHENVTETPCIIHCEKKNEGFKTASKVQYVARTGNFIDRGVEYTGALQILKVILSYDYLWQNIRVKGGAYGCMSSFNRIGEGYFVSYRDPNLKRTIDVYEGVVDYLENFTVSDRDMTKYIIGTISNIDQPMTPATKGERSMNLYMNKVSAEMIKKERAQILDAAQEDIRALAKVAKAVLAADQLCVIGGEEKIEEDKELFGEVTSF

SEQ ID NO: 57429 - protein, 259 aa, Okeania sp.
ISMKSIRTKLKFNNKQKTLFAQHAGYSRWCYNWGLSLWNAAYKDGFKPNTRKLRDVFTNHTKPLYPWMKNLSSKVYQYAFPTECYANINLGEAFKRFFSCGMLRKQGLGKPPRFKKKGKHDSFPTECYANTIDNCGKPIELNGWNHKIPFIGWVKTYEPIEATTQKITISRQAGDWYLSLSYDKRATPTPKTTDVVGVDLGVKTLATLSTGQVFPSIKPYRTAQDQLAKLQRQLSRKVKHSNNWHKAVIKLAIAAQTSS

SEQ ID NO: 57430 - protein, 538 aa, unknown
  TnpB Polypeptide
MVASARNNFPADIGAIGLLSSPVRGSAIAGLVPPNSGTILQDRLLLCAASFPHTKLCKTWVVDLTGSERDCAPYWSESVAARSARLWLPTVTDYAASASSLWSGFAHDTVANSWFSTQISVHPSRKWLKTCSPLSTSSPAVFTAGESTHRCKRIRLFPTSEQRRTLKMWCGAARWFYNQAVEKQVSNRISVQVAMLTACPGWAKSVPYKIKQMAIEDETIARKNGFKFAKKTAQAFHLSFRSKKMRRDSLYIPKQSVGPNGIYPRLLGNMKSAEPIVQSVYDCRLLHNNGKFYLLVPYDKPKRENQAQGEVAVDPGVRTFLTFFSPDVVGKIGDLAINRIQRLCAWMDKLVSRTKWRAARRMRERIQNLISDLHHKAALWLVKNFRTIVIPKFDAREMTIRKARKINSKTARKMLTLAHGRFRTILLDKAEEWGRTIVHVSEAYTSKTCSVCGKQHVIGGKKVMNCCEKYDRDINGARGIFLRALVDTPSGGNVGALKETVAACPQLSTQKGIGDASFSVTVTKTDVSAGSQFSWIAV

SEQ ID NO: 57431 - protein, 434 aa, unknown
  TnpB Polypeptide
VTLEAVKVALDPSPAQESLLLSHAGGARFAYNAGLARVKEALDAGERPDLSFYSLRKWWNSVKDELAVGEDGVIWWAENSKESYSYGLESLSKGLSNWWKSRKGDRKGRRVGFPKFKSKDKATPRFAYTTGFRLIEGNPKALSLPKVGRVHCMESVAKRVGDGRVLRMTISRRAGRWYASLTVERDDKPVKRKPKGGAVGVDLGVKTLATLSDGTVVDNQRHLAASERKLKRAQQALSRKTKGSNRRAKARAKVARLHARVANQRLDGLHKLTTWLVETYSDISIENLNVSGMVKNRHLAKAVSDAAFGEFRRQLGYKAARTGARLHVVDRWYGSSKTCSGCGSVKAKLSLSERTYKCDNCGMKMDRDLNASINIHVAGSAPETLNAHGATVRRSDRSGHATLVAVKCEPSVRRTGAVSLGAGDRKGALQTAVW

SEQ ID NO: 57432 - protein, 424 aa, Lactobacillus sp.
  misc_feature (404)..(406): Xaa can be any naturally occurring amino acid
MTDERKQAIKVRMKAVKATFTYSFGFQIRVYPSAQQADIMLFNCHTARYIYNAKVFRDWGSKQHAKWLNTDSRLDTNMPSMAIRNYQASWNMWRKVNSAGTPKPKRKDQYRFSYQTKNSYPAKSRKAGEDIFNGAKVKVTDSHHIQIPKVGRLKASANNIKHLPHEKGVRIGVTTIKQEPDGAWYVSFQIKADHPLKQALPKTGSEIGIDLNLSNFLTDDQGNQVPNPRYYRKMLTKLAKQDRKVARRRRRAKKEHRRLLDSRNYQTARHQRANLHSHIAHQRNDFLHRTSTVLIQNHDLIVSEELRGKNMLKNHALAMSISDVGWRTFISQLEYKAELYGRTYITVNPAYTTKRCHCCLVINHQVKLGQEEWRCPNCHVFHIRDHNAAINIKNKGLAPLQEVXXXLTNNPSVPWQLRIPTPNG

SEQ ID NO: 57433 - protein, 374 aa, unknown
  TnpB Polypeptide
MLKSIIYELKPTAEQRSHIRRACGSARYVYNKALALKKEKYEKEEVNLSKYDIDKMLTIWKQTDTFLSECPSQSLQQKVHDMCDAFANMRKTNAGFPKFKKKGRCRETFRIPDPCKIDFDNWVVTIAKIGKVKIFKGHNKKITNIHSYTVEYKPRLDRYFISVLYDDFTPRSTPDESTHCGIDVGIKAFATLSSGEVFENQKYLKADIRKLRVLQRSASRKYKHGAKSEEQSHRWNNVQKRIAKLHLHIANQRKDYAHKVSRYIADKYFHVSAEDLSVKNMMRNHRLAQAIADVAWSNFLNMLQYKCCDFVKVDRYFASSQTCCECGCKNEGVKDLNVRKWKCPQCGAVHDRDLNAAKNIDREGQSLRERKVVR

SEQ ID NO: 57434 - protein, 430 aa, unknown
  TnpB Polypeptide
MSDGFFNPIVNVLLIFQVYFIAKLNKILVLSKFIFNLCLVLKGFKYRIYPNNSQKELIAKHIGSSRFVYNLALETKNSAYLGYKHKFSPFDLIKQLPELKKECLWLKEVNSQSLQQSIQNMDIAFKKFFKGSGFPKFKSKHKGSQSFAVPQNVTVKNDLLIIPKFQEGINIVLHRPIKGTIKSATISISPTGKYFASILIDTNIEKPTKVLIEENTCIGVDLGIKDFAITSNGDIFSNPKNLIKAQLKLKYLQRKFSKHKGKRTKQKLALLHEKVVNKRKDFLHKTSIKLIRENQTIALEDLAVNNMVKNHNLAQSISDASWSMFVTMLEYKADWYGKNILKIGRFAPSSKTCSCCGYINKELTLKDRKWICIKCNSIHDRDINAATNIKSFALKNNTSGEHTLKNQNELPTLVGVMTSENKLYSFAESK

SEQ ID NO: 57435 - protein, 404 aa, unknown
  TnpB Polypeptide
MKENKNTVYRTRVYYIIPSQELINEARLSNNLYNQALYILRQAFINEEKIPSKFDLINMLRHKEYEYEKYNNFSKMISDNAEQIIILAAQNFKAFLMSLKIFKNNKSNFTGVPKIPNYNKKEQEFMIIVRNISCTVKEGMMRFPKKLNLDKIYIGDLDIAHVRIFPGKKKYKVEVVYKVEALPKKKKGNIAGIDLGLDNLATVAINKRGIRPLLINGRPLKSMNLYFDNKRNKIQSELKKCNDRYMSHKLETLYRKRNNRFNTYMHKASKEIIDYCLEHNVSQIIIGHNKLQKQESKLKNFVAIPTFRLIELIKYKAEYQGIEVIETEESYTSITSYLDKEEPVKDNADRFRRIHRGLFVSSKGKRINADVNSAYQIMKKVIGDKVIKPIGKGSVFIPKKVTMV

SEQ ID NO: 57436 - protein, 468 aa, Acidimicrobiaceae sp.
VTVVHQRFRFELDPNDKSSSKLSSHTGASRFAYNFGLALVKQRLAERAKLRAWATDYGLCADQAEVFARSVEVPWNLYSLRREWNSAKSTIAPWWSENSKEAYSSGLDGLARALDNFSKARSGERAGQSGFPSFKNKSARKFYRFTTGAIKVVDGRHVQLPRIGVLRTKEPATKLRAMLDSGRARILSATISELAGRWFVSFACEVERSDREAKCPSEIIAVDLGVKRLATLSNGEIIENPRVLSRYRRRMATLQRKIARQQSGSRRRAHSKAKLARCHKRVADARRDVLHKLTTELAETYGTVVIEDLAVKNMTKSASGTVESPGTNVAQKSGLNRAILDVAPAEFRRQLTYKMAWHSGCLIVAARCYPSSKTCSSCGEVRAKLSLHERTYTCEHCGLAIDRDLNAAINLAAYGRRELNVAGSGLETVNARRGGQPRLRSQSPVKREDGTGSPDRTVTASSQGQAAK

SEQ ID NO: 57437 - protein, 401 aa, unknown
  TnpB Polypeptide
MIVNRAYKVEIKPNNVQKTFLNKSIGIARLAYNWGLNLCIERYEQCKKYLGSIGLHKELCSIKKNRFPFMYEVSKLAPQNALKDLDVAFKNFFKRKDVGFPKFKSKKNDKQTFRIDGANIKVNNNSIKLPNISSIRLKEHNYIPFGEVKYMNATISKEIDRYYVSVIVREEVDIYDKPVEEVIGIDVGIKELATCSNGEVYHNPKFTKKYENKLKREQKKLSRKKKGSQNRNKAKIKVAKVHRKIRNSRVDNLHKTTSSITKIKCRMIVLEDLNTKGMMKNHCLSKAVADSSFYEFRRQLEYKTKFYGGSTYLIDRWFPSSKTCSCCGTIKEDLTLSDRIYKCDCGFEMDRDLNASINIQNYYTVSSTGIKAFGENVRLGSDLIAPSSLVELGSKHETQLC

SEQ ID NO: 57438 - protein, 498 aa, unknown
  TnpB Polypeptide
MNINSQPRQLTFWEYIQSPLEGAEEKRKSHRTERQVDSAVSSKGRLKDLQASSCQLQLFVMEGSQVIPNVMILSDNLNTCASTTRAQNLFQKLESGSILSGENLSTFWNELSSRISSSLSLPTATDSVDLDGNWLSGIAYTMQSNSWFKMFSSSVGNKSLFRICCPASTVSVVGSAVCESTEKKKALQYGKNPLRQSNKPKPNSVLKIPLFPDRQQHLIWKHWLAAYRWVYNQCVEFYNQGRSLAPKQSLYQYIQQLQSLPLNEWTKCLGNTRQEDVCEALSASRKSRKTNGGKDKLRFRSCQNKSQAIQFNPGAYQNVKWFSTKVKGTTFAVEKGHELPMNCEYGTKLVYQHGQWFGCFPQHLPITETGSERVIALAPGNRTFLTGYDGENVLEIGKGDIGRLTRLCLHLDKLIGRKVKASRKVNKRLRYKLNKAIAWLRFKIRSLVDDLHRKAASLLVNSYKLIFLPTYQTSQIAPKAQFLTVRSITLSGMILLDI

SEQ ID NO: 57439 - protein, 330 aa, unknown
  TnpB Polypeptide
MRTVSSYGVEIRKQNIPVRQTMEIYRQAVSYLTEIYAQVWEELREIPETKKRFNTAEHMVHMTKKNTARFDFDLRFPKMPSYLRRSAIQHALGSVSSYETRLGQWKETGVLSGRPKLTCRNHAMPVFYRDVMYREGAEGTDEAYLKLYDGHDWKWFRVYLKRTDMEYLRRNWKGKKASAPALEKRHRRYFLRFSYTEEVTLTQTPVKEQIICSVDLGINTDAVCTIMRSDGTVLGRRFIDHPSEKDRMYRTLGRIRRSQREHGSAQTQGRWAYTKRLPTVRARSYTYCWLVLSCLSWLQSSCHGAKSNWLSLQLLPTNHRHYYVNRLPMK

SEQ ID NO: 57440 - protein, 360 aa, Giesbergeria sp.
MDCTKTLRLRIKDKHAKVLRQMAREVNQVWNFCNETSHRAIRERHQFLSGYDLQKLTNGFSKCDGVQIGSPTVQQVCEDYAKARKQFKKAKLRWRVSNPQSSKYSLGWIPFKARALQYKAGQISFAGQKFCLWDSYGLADYELRAGSFSQDNRGRWYLNIVVKVQAKDNQATTSVGIDLGLKEAAVASNGERIEGRFYRKLEMDLAIAQRAHKKRRVKAIHAKIANQRKDALHKFSTAMVQQNAAIFVGDVVSSKLVKTKMAKSTLDAGWAMLKTMLEYKSHQAGVVFMEVNEAYSTQTCSCCGSIPASSPKGRAGLGIREWRCSDCGTNHDRDVNAARNILALGLERLAGGIQGTIPKG

SEQ ID NO: 57441 - protein, 307 aa, unknown
  TnpB Polypeptide
LSLDILKDVKLTAQIKLLPDKSQAEALLVTLRPANDACNFVSQAAWQEKTFRQFDLHHLCYKDVRSKFNLSAQAAIRVISKVADSYKLDRKTERKFKSTGSIAYDDRIMSWRIPESMVSIWTTSGRIRVPFVCGDRQRDLLLSRKGETDLIFRKGKFYLSAACDVKSPDKTDTTDVLDIDLGIKNIAVDSDGTVHSSGKVNNVRHRHRLRRVALSSWSFNQLRTFIAYKAEREGIPTVLVDPRNTSRTCPECGTIDKRNRKSQRLFSCVSCGFAGLADHIAAENIRRAAVNQPIVARVDAKAATQKA

SEQ ID NO: 57442 - protein, 471 aa, unknown
  TnpB Polypeptide
VWLNRRAHQQAHDATYACGLRWNELNAWLRAEWDAGRRSGKRDLRSHGDRLGLPGVYSQTRQAIADDLWEAVKSSRSNKRNGRSEMRAPWREKKYRHLAFSTQAWRVRSEKLILPFGKGHPDITIPAPRVFDSVTGEIVQPDRWREISLGWDRQERSWFLSIPYLTLRIPIPQADKDDTDAVVVAVDEGVINSMTLATITLEGDVSALVVNGREIRSIKQGHNKRIATISSLKSRCKPGSKRHKRLARVERRQKAKTARRLRNADHHVAKKVSDWIRDEAIDKTTGEIRPVRLVIGDVAGIEQKTRQQRRASRSQRQQLSQWSRGRQERYLSEKTGLALEYVNEAHTSQTCPACGARKKPSGRVYACRNSVCGLVLHRDVVGAVNIHHRGRSGEDELSSYIRSGTKVVVKYQRALPYRRVVVASNRATTSCGVAEKDATRVMDSPRRRPALACNSKPTTQGRVTTSRKPRP

SEQ ID NO: 57443 - protein, 285 aa, unknown
  TnpB Polypeptide
MDAAYQKFFKEHTGYPKFKSKHDGHKSYTTNFTNGNITADFDGGKVKLPKLKEVKAKLHRNFSGQIKSATVSQMSSGKYYVSILVETEHVELTHTDQNTGIDLGIKDLCITSKGKKYENPKTIRKYEKKLAKLQRQLAHKEKRSQNYNKIKKKIALCHEKITNSRKDYLHKISHEIISENQVIVSENLQIQNMVKDHHLAKAISDVSWYELTRQLEYKAKWNGRKYIKIDTFYASSQLCSVCGYQNTEIKDLSIREWSCPVCGAKHDRDINAAKNILAEGLRQIA

SEQ ID NO: 57444 - protein, 293 aa, Okeania sp.
MKARFKYRIYPTLGQKYRLARLFGCVRVVWNDSLACCQEKYKLGEKKPTNSELQKQFITQAKKTEDREWLSEVSAIPLQQSLNDLNQAYQNFFKSTQGNRKGKPIRPPKFKSRKSKQTARFTKGGFKVSQHKVYLAKIGKLKIVWSRELPAIPSSVTVIKDCRGDSRIAPTRYFLSFVVEVLPEVLPKTDNSVGIDLGIKTFATLSNGQTIDAPKPLKKRIKKYRKLSKSLSKKTKGSKRYEKARLKIAKFSYGMLRKHAKLKDTRIDFLHKLSTEIIRENQTIVLEDLFAFA

SEQ ID NO: 57445 - protein, 375 aa, Crenarchaeota sp.
VELPRYITISLEFHTDDEEARAVLTTAWFSKLVAHRALRLVKENEVLADLSEYKFLKVMRSKCYDILPNRRYVDGMLKLIYSTLKSARALRVDIEKVELKQWLLFQSDGERGYARGNMNIRLINTHHVRVLTLDYDRKTRYVELKLAIPKGWRKLVEVLVEKATKGLIGYPARIIVKDYGIGKRGLHIHGELQIMIPYSLYLEVMRRYDKPRGNNVAGVDVNVDRLDAVVIDIYGNLLSYKTFWLKNSTFMGVRRKRSWSLIGEQIHALLKWLYSQGVSVIGLENPEIIGYLRYYWIRNGERKGRKWNWKVSMFRNSIIEKITWKAPLYSMKTIYVNPRNTSKEGEKIGKRLGLDRHLGSAYIIAKRALKYLQRP

SEQ ID NO: 57446 - protein, 407 aa, unknown
  TnpB Polypeptide
MIVRQACRFRLYPASEQRHQSAAQFGHAHYTYNWCLARRQAHYKATGTTLSYYDHKREVTALKSDPDHLWLKEADSQVLQAKAEDLEKAYKGFFARGIGFPHFKSKKDQQSVRYPQRFRFKDGRIYFPKVGWVPCVFHREMVGTPKNVTVSKTPAGNYYVSVQCEREMEPLVHAGPAVGVDVGLKDLAVLSTGEKITHPRHLRKAKKRLAHLQRSLSCKVRGSGNRQKTRLLVARQHEHVANCRHDTLHKLSDRLTREYSTIRMENLNIRGMLKNHTLAKGIADSGWGMLVSFCQYKAQWRGGVVEQIDRFYPSTKMCHICGHKNNTLTLKDREWVCAECGTVHDRDVNAAKVILSAPVGMPRALIRQKLPPERRNVKLVERLSDATAIGRSAGLGEAGSTHASSCG

SEQ ID NO: 57447 - protein, 367 aa, unknown
  TnpB Polypeptide
LLILINRAYKFRLYPNDEQKIMFAKTFGCVRFIYNKMLEDKIKHYQATKQKLNNTPAQYKQEFEWLKEVDSLALANAQINLQAAYNNFFRNPKSGFPKFKNKKDGRFSYTTNNIHGNFIIINNHIKLPKVGFVKVKQHRQIPPEHKIKSATISKTPSGKYFVSILVEYEYEIPIKQLDKTKALGLDYSSHNFYVDNQGREANYPKFYRNAQNVLSKEQRKLSLMKFGSNNYNKQKIKVTKIQEHIANQRKDWLHKLSNKLVNEYDYICVEDINMQGLSQSLTLGKSTNDNGFGMFRDFLNYKLFERGKKLIKIDKWFPSSKMCHVCGYINKNLKLSDRVWECECGKILSRDENAAINILNEGLRQIV

SEQ ID NO: 57448 - protein, 452 aa, Thermicanus sp.
MKAKKREHVLWFFRVFCIIKIEDRKEQGAMARKKNSGNHTPMQTITSRAKIVYLADQDALLLGLLGFFATKLWNTANHHRRVVWGETGKIPNFVEQCRDLKTNRWYKLIPSQSAQEILGELDDSYRSWFSHRKNGDLSARPPRFRKKEPLSTITFKQKAFEILPGNHVKVRLPKTYARREMVLEYHLPPDTTLGKVQQVKLSCDPTSGDWYVHIVHKVPIKYRETGQVMSLDLGIVNTVAGLITDGFSFLVPGGELLALDRYFQKEKAKCTKSTSRKCIRINAKWGRQRSHYLHALTKWLVDLAVAHNVSTILVGELKGIRADKDWGDAGNQKLHTWPFSKIISLLTYKAALAGIRVIKVSEKSTSTTCPVCSRRTKKARVYRGLFVHCGLALNADLVGAYNILQRYLRETGQAWPDPVGVVGALARPAVNLFVWRKTTPLGRGQGTFRRAA

SEQ ID NO: 57449 - protein, 475 aa, Thermicanus sp.
VQQTVKQKSLPLNKDKWIKIAQTIEAYARQKDTFLVKYGHVQYLHHLGAKRRLRDELVAAGFTSPFGLQARQWKLALDDALFTLERQWEAAIVGVKERLYRHEGLSDEEKHYAFWLLYRDEKRGRDWKRLQAIFTHEDVVNQKISLDSGGRAKVRNYLKRAFRRILGTRPCVKKARSFVVDQQMYRVFNTGKRQYIAVATLTPGERAVIPLTGIHAMRGNLRVVLLPDEQAVEIHLSREPRIRPSGEEEAGIDLGVTEVFTDDTGKKYRPEYGEALQEMSDHILDKSRKRGKLWALRRKFLEQDPNKARRILRHNLGLIKQTKRNKRYRTRCENEINRAFNELYKERWPQIIAYEDLAHLRGKAKSKGLSRKVSGWQRNIIKERREYKNYVYSVTDPGPQNAAYSSQECPQCGWVDAKNRNGDIFKCRQCGFTADADQVAAMNLKKRLHDEEITRYTPYKRVKEILLQRYYQQAN

SEQ ID NO: 57450 - protein, 380 aa, Thermicanus sp.
MYIVRKLKIGKTKELDNLARNAGETYTKVLVGFWRVVRKKGIWLSPNAMMKMVKNRNLHSQSTQAIVQTFFASLKSWRERRKTDLKAKPPKRRRRYFRIQWKEDAIRIKDGLLYLSNGKGNNPLVLPWQFEKPKLVEIGWDGKQYELRATYLNEPNLKQTQGDKTAGIDLGEIHIAAVYNGEQSYIFNGRLLRSKRRYQNKLKAFLQSKIDKKKKGSRRWRRLIRSKAKQLAKIRNQIHDILHKETTKLVSILYREGIQTVVIGDVRDIRKDIDYGSVANQKLHQWAFGKTRYFIQYKAERLGLKTVLQDESYTSQECPVCGVRHKPKGREFKCTCGFSYHRDGVGAINIRRKYLGLGPVVGVMASPIGVRYQPHMWCSS

SEQ ID NO: 57451 - protein, 255 aa, unknown
  TnpB Polypeptide
VGQVKVKQHRGMEGAIKTVTLKREADKWYAIFSCDLGDVPMASSANPPVGIDVGIESFLTTSEGEQEPNPAYLKAQLPALRRAGRAVSRKQKGSQNLRKAVGVLRAWHVRVKNLRREHRHQVALKLCRRYGLIAVESLNIKGMLRNRRLSRAIVDAAWGGFLATLRCKAERAGVVVVEVNARGTSQRCSNCGQVAEKSLRQRQHVCSCGLALHRDVNAARNILALARNGPAEPNVGVNSHVLRSRHREHSCRYGT

SEQ ID NO: 57452 - protein, 217 aa, unknown
  TnpB Polypeptide
VTSAAPRLHPSSGTTKASKSDNSVRRTSRRLDAFSNAEANESLNPTVTSCGGIDHIIHSITSEVVAYADRFENPVCWFWKTDTHPREHGLRRVPEPPPSGWGFAKMHAQIRYKAAERVRVETVNPAYTSKTCHCCGEQGYRPDQATFKCSTRRVGFRSTKQTLMPRSILQTATSAESHSREHTSGDDSAEEGDVLTVPQDSQADAETQQETLGTYAS

SEQ ID NO: 57453 - protein, 396 aa, unknown
  TnpB Polypeptide
MKLVEQHTIKKSDSRFKELDNICFLSKNLYNAGLYAVRQHFFESEKFLNYSELAGEFVKEKNVDYYALPTKVSQQTLKMVEQNFRSFFGLLKSKKKDEKVSIPKYLPKTDGRFPTYYTIQAISKKKFNQGVVKLSGTNVEIETNKENIKQARIIHKGSHINIEIVYEVEDTKKLPNNERYCAIDLGVNNLAAVGSNVLKPIIINGKPLKSINQYYNRRLGKLKSKIELNHGRKTSKKIKSLTRKRNDKVKDYLHKTSRYIINHLVSSQINTLVIGKNKGWKQEINIGKKNNQKFVQIPHARYIEMLKYKADIAGINVVIQQESHTSKCSFLDNEPVKHQKKYLGRRVKRGLFKSATGRLINADLNGALNILKKAIGEFEYSIEVCSTPSVSNCEMF

SEQ ID NO: 57454 - protein, 395 aa, Gemmatimonadetes sp.
MNGEASMASGTQSIVRTRSFKGYLSPAGHRNLGDCLDQLTWLWNLALDQRKTAWTEREESVSYYDQCKQLTALRRRDPAKWDRFAVYAQRSALQRLDRAYKRFFAQGGYPRFKGERGVRSFELTQFGMVRTNGRWSWLKVKGIGRIRFRGDPPGGDIRAVRVVRTARRVRVQFVVEQEVPAVTDDRPMVGIDLGIKSRVALSTGETAPGVKLDRRELKRRQRRLAKAKRGGRNRGKRRAELAREHQRVAERERGALHELTANLVKRVSASFAVEDLQIGNMVRNRRLSRSIHEQQWGALIGMLAYKAESAGGRVVRVAPHHTSQECSGCGQRQAVSLSVRVYRCGCGLVMDRDVNAARNVLQRGVASLPGGADPGRAEQADQAGEVVTQVLRKAG

SEQ ID NO: 57455 - protein, 337 aa, Moorella sp.
LAWRENYRRWQRAKSSAEERNERRAAVGKKPIRFTERPPQFPETSRSWLTYYGTEFKVLDERHLLFKVATGTTYIYRKVALASPWEIPAGYAAGSPTLVQKKNGWEVHIPLFLQERRDLRPAAALMQDKDIRILAVDLGLNHHAVMTIQDAEGRVLATEFISGAKDSHLRKQYLERIVRLQKETGIIPEGERFAKDLWDKVKNLVGDIAHQVSRRIVDLAAQHGAKIIVFEHLKNLRPEKGTRSHRMNQKLGYWVKGRIFQYTQYKALHQGIIVCRVNPRDTSRRCPNCGLLSIERYLPGKPHGVTLAQCSNCGLHGVHADWLATRNIGQKFRLRYA

SEQ ID NO: 57456 - protein, 231 aa, Moorea sp.
MDYFAQKWSFILRDFLLEWDKGTQLNKKEALSIDFGTADNLAACVDTLGNSFLVDSRAIKAYNQLWNKQVSTRKEGKSQDYWDEWLDRVTRKRNHRIRDGINKAAKLIVDHCLKNSIGTIVVGWNEGFKSRAKMGIINNQKFVQIPLGKLKDRLEQLCQIHPIQLEITEEAYTSKASYLDGDSLPEFGQKPNGWKASGKRLKRGLYKSGDGSIVNADLNGSANILRKCGSF

SEQ ID NO: 57457 - protein, 391 aa, unknown
  TnpB Polypeptide
MNKGYKYRIYLNKKQRESLAKAFGCCRYVYNKALELCNQNYEKTGKHIFYNELSNTFLKEEKKNNIWLKEPYSQSLQQSLMHLDQGFKRLFRHLSKPPVFHSKNGRQSVHYPQNVQFLNNCFIIPKLGHIRPVLHRPIVGRIKSAVISKTPTGEYYISVLTEDDKPAPDKVPIVERSTIGIDLGIKNYIAFSNGENIDNPKYLNESIEKIKRQSKIVSKKKKGSKNRVRANLRLARTHRKVTRQRNDFLHKLSHRIVSDNQTIILESLDIKGMMQNHKLARAIGDCSWARLDTFITYKAEWQGKNVIHIPQFEPTTKVCSECGFINNNLTLADREWQCPECGIVHSRDTNAAIVIKDVGLKMIFGSDWQPKRLRALPARRVTPKEPVEREH

SEQ ID NO: 57458 - protein, 315 aa, Proteocatella sp.
MKTVIKGFKYRIYPNPEQEVMLAKTFGSCRFVYNHILAMRIEEHKNDSKSMSKTDCNNFCNREMKKEFEWLKEVDKFALTNAIFNLDSAYQNFFREIKKGNKNQGFPKFKSKRTNYYSYTTNFTNNNIKVLFNDGLVQLPKVGKIKAKLHRKFDGRILFATVSKVPSGKYFVSFNVECEHSELPINDSSVGIDLGVKEFAIDTNGIHIDNPKYLKQYEDKLAKLQRQHAKKVKGSNNFKKHSKKVAKLHERIVNLRTDFQHKLSSKIINDNQVVVTEDLFIKGMVQNSRLAKSISDVAWGEFTRQLGYKFLWKRC

SEQ ID NO: 57459 - protein, 430 aa, unknown
  TnpB Polypeptide
VNNVQLVEQHCIRKSDPRYAIIDDAAFKSKNLYNAGLYEMRQAFIHEGKYLNYTEMDKRMQSSDAYKALPAKVAQKVLDQLDQAWQSFFEARAAYNEDPSKFTGRPRLPKYKHKTEGRNLLIYTMQAVSRGKRSLQRGIIKPSMLPIEVKTQQDPKQIDQVRIIPRNGHYVVEVIYSKEPVQAQVDPSFCVAIDLGVTNLAAITANREGFVPRLVNGRTLKAMNQWYNKRMKELKLCLPKADRERVTRQMEQITNTRNRQVNHYLHAASKRMIDFLVKEGVGTIIVGKNPLWKQEAGMGKRNNQNFVAIPHARFIDMLTYKASLVGIQVEVQEESYTSQASFLDLDPIPTYKPNDDTEYTFSGKRIGRRNRLYRTKDGKIICADVNGSYNILRKRRPDAFSKAKGVAGYVVHPVRLAVSTGHIKQKVRCP

SEQ ID NO: 57460 - protein, 335 aa, Virgibacillus sp.
MSQTYISIINTLVSEMVKEKKNTKKSSKDIIIPLPSAVKNQAIKDAKSVFKKAKRNKYEVVPILKKPVCIWNNQNYSFDSTHISMPIMVDGKVKKTPIRALLIDKENRNLDLLKHKLGTLRITKKSGKWIAQISITLPTLEKKGAKTMGVDLGLKVPAVAVTDNEKVRFFGNGRQNKYIKRKFRSERKILGKNKKLSAIRSSKDKEQRWMKDQDHKVSRAIINFAKENNISVIRLEQLANIRQTTRNSRKNEKNLHAWSFYRLSQFIEYKAKLEGIKVEYVNPAYTSQTCPKCSEKNKAQDRKYKCKCGFEKHRDLVGAMNIRYAPVIDGSSQSA

SEQ ID NO: 57461 - protein, 375 aa, unknown
  TnpB Polypeptide
MQQTVTAKLQILVNPSDKQILCDTMKAYSDACNYVSEYIYKTHNLSRYSVQEDTYHQIREIYGLRSQMAVSCVRTVIAKYKTILENQNDWIKPVFRIPQLDLVWNRDYSLNIKNDIFSVNTLNGRIKVNFYKNGYEKYFADTCKFGTAKIVFKHDRFFLHIPVTYEIEKLNMSDVSNVVGIDRGIRFIATAYNSKGKTKFYSGKTIKQKRGHCKALRKELQQVGTPSSRRRIKAIGQRENRWMQDVNHCISKALVESNPAGTLFVLEDLTGIRSATEKILVKNRYVSVSWSYYDLEQKLTYKALKNHQLVEKVNPAYTSQTCPKCGHTEKASRDKHKHVFCCKNCGYKSNDDRIGAMNLYRMGIELLVPDTVAAE

SEQ ID NO: 57462 - protein, 536 aa, unknown
  TnpB Polypeptide
MSVMRTTTIDIKKRVRNKTAYEHLSGLLRNSKALYNHAQFYIRNTQAGLRKSPENRTANETEVLHDVFTGIQKANITKELNFRKRLKRSSGCHWKMASLFKKSAPLQYPSSDSPYLDYSRLDVVFRENDDPVYYSLPAQANQQVLKKACLAWKSYFKAVGAYHKNPSAFTGFPKRPGYNRDLYATAYLTNQICRYRSINGRGYILLPGTKQFICTGPACSGRYVKTEIRFAHGHFRILVTFEQNAIMPELPKHPSRILGIDTGLDNFMSCTPNTGRHPFIYDGSYLKSMNAYYNKRMARLRSAYTEGTDNPCRTVTKRMMAISDRRESCFRDYFYKLAHHICRICQEDHIGVIVCGHNEKWKQDVDTGKRNNQNFVCIPYSKFFQILRTVAVKYKIHVVETEESYTSKASLIDLDDIPVYQKNDGTVYQFSGCRVKRGLYQTGNTYINADINAAGNIIRKLYPYAFDGFDFHALTATVDRYTAEDILHGLAYTKRSGYAHKRSGCRMDRHNGRAARKKVYLELFRQKKSTQYELSA

SEQ ID NO: 57463 - protein, 420 aa, Halolamina sp.
MEVRRTAPVKLIVPEDRRDDLHESAQQFLHCANRASEFCWSDTSHTECVTTNTTARDALYDELRDETDLTANLVQEAIRRAVQAVKACVERWKDGKRVSQPEFTSWSMLYDKRSATFYRNKVSLSTVSGRVECDFELPSDSPTPYERYVLSEEFEFRASTLQYDAVDDEFYFHITTRKSDSEGDSNDAEVSADTEHPDQTVLGIDLGVNSLAVSSTGTFWQGDDYDHWCREFEKRRGEMQQRGTQAAHNALLRLGKREEAWRKQYIHTVANELVTEAVEHDCNVIVFEELTDIRERLPHAKWHHVWAFRRLYEYVSYKAPEQGISVEQVEPNHTSQRCSRTDCGFTHEDNRHGEHFECQKCGYEVNADYNGAKNIGLRYARKRTHRLRSSPKSGGGDAEVDLRVNGGTVNGKSHQPIAGD

SEQ ID NO: 57464 - protein, 441 aa, Halolamina sp.
MKRVNEFEVHPRTPEQREALLELLDASAALWNELTYNRRQAFFDGNSVWRATNPSDRYKDVLGSATAQQIPRKNSEAWRSFFALNEKYYDGNRGGKPSPPGYWGNEDDGRELRTYIRNDQYTLQWGNRSRLEIPVGKALKDEYDITGRLRLEACGDPKWRGEQGRLELVYDEARDRFRALQPVTVPDSRRDSPLASHEAALDVGANNLVACTTTAGQQFLYEGRSLFERFRDTTEEIAHYQSKLDDQRRTSKRIDRLYRQRTERRNHAQDALVRDLVERLYKEGVCRVYVGDLEDVLETHWKCVVNEKTHNFWAFSRFTDRLECVCEEYGIEVVERSESWTTRECPECGEREETHRNGDVFRCTACGFEGHSDLKASRVFLDRETGSEGGPMARPVRFEWDNHEWRPATTAPPVRRANPKEERTDRSTHHEVGKVASWSSA

SEQ ID NO: 57465 - protein, 455 aa, Halolamina sp.
MRRVNTFRVSPLQERDKLILYEVLDASAALWNELTYHRRQAFFQDQDVWSVDADEYRVKYKGVLGSATAQQIIRRNDEAWRSFFKLLENGERPSPPGYWKDEDSGERTLQTLVRNDMYSVEWGERSRLEIPVGHDLKERYGLGYHERLRLEAQGDPRWRGEQGRLELVYDKSAEAFRARQPVKDAVLRRDDESLATTSGDDGAVAALDIGANNLVAVTTTTGHQRLYHARPQFKRFRQTTQQIAALQQDLAYGTWSSRRIRKLYGRRTERVYHLQDALVRDLAEWLAELGVSEVIAGDLGDVLQKHWSAVVNEKTHQFWSHGRFRRRLREVLEGEYDISVREVSESGSSSRCPECGAGNVHREGDLLTCYDCSFEGHSDLAASENLLVEHADDGSMARPAVSRENTTERAHGDVARLEWDDHRWRRRDQQTKEEPADRSTLHRGKLASGAGSGTA

SEQ ID NO: 57466 - protein, 388 aa, unknown
  TnpB Polypeptide
MKKTFRFRLYPNKNQEVTLNRTLSTCRHLYNEALAERKRQAELNRLKREFHVFPWGKPEWISYYEQKRELTATKTSYQKEVYSQVLQDVIKRIERSFKNFYNGFSYPRFQGRNRYNSFTYPQSGFELKGGKLKLSKIGAIKIILHREIRGKIKTCTIKKDIDQWYVTFSCKIEEPIIPVEIKTETGIDVGLGSLITMSNGMQIKPPKFLRESEVKLTREQKRLSRKKKGSQNRRKQAVKVAKVHRKIRNQRKDFAHKTSRKLVDTYDRIVFEDLQIQSMVQNHHLAKSISDAGWYQLMNLTKSKAECAGKIVEFVNPKNTSQNCSCCHNPVPKDLSVRVHSCPFCGLVLDRDHNAAINILNSTVGITGIYARQGLSSREPMQRDAKAL

SEQ ID NO: 57467 - protein, 415 aa, Terrilactibacillus sp.
MSSDEKYGVQKQMLKNLTKKEYIALKTLCRLSKNMYNVGLYNVRQHFFETKTYLSYQKNYPISKTNENYQKMGTAAAQQTLKKVEENFKSFFGLLKKKGQKPRIPHYLEKDGYFELSYPQFKMQNDGTFNVPMSPSFKKEYGKVNICFPKNLRPEDVIEIRVIPKYKAKYFEMDYVYKIKEIEAYHLDPNHALSIDIGVNNFASCISTYGTSFLIDGKRIKSINQWYNKENKRLQSIKDRQKIKHLTKKQARLLVKRNHILHDFLNKTTRYVINHCLSNGIGKIVIGHNKEWKQEVKFSKKDKQTFVQIPHSIWMKKLESMCNRYGINFIRQEESYTSKASFLDQDEISVYGQSNTKKKFSGRRIKRGLYRTAKNLLINADLNGAANILRKSKHNIHMDKVSRGLLAVPTRIQLV

SEQ ID NO: 57468 - protein, 483 aa, Limnothrix sp.
MGKPKPIYRTAKISLKVSRRQQNQLRRLMSAQRWCYNVVIAALRAANSPVYPIVPGVGPVRACSLKSAPKHRKQYLADGELAEGYIVREWRDWQQFKPWDALKGHCDLYPYHDRDKRGSKYGIDSSTATLLTEEIKGSIRGYWTKRKGGDFAAQMPNQFRSAQNESGWIWGVKGNGLKWDGDRLLLGSRTQIGGVVSIPVPKCYVGRSFNKASITRDGAGDFWLHLTYVAAGEHGFAPDPDLTRSAGIDMGQIRAMVLTLDSGKSVSLSGRQICGLKRERDRRFRGIQRARARVFRAQVRQYLTDEQKSTMAAMEAKSPGQGTKYARRMVGAARKELGLKKRSRRDHHLWQTQKRVATQVNRNLKYANHSITRRAVDWLRGNKVGKVYLGDIGSIPKGRKKGSKRLKQVKRNAQWEYGNQEKMMVEKLEEYGATLHKAHEHFTSQTCPNCGARHKPRGRLYRCRACGWQGDRDAVGSANILAR

SEQ ID NO: 57469 - protein, 369 aa, Micromonospora sp.
MGEVVKRAYKYRFYPTFEQADVLNRTFGCVRLVYNRALVERTRVYANERRSMAYVQSSAALTEWKKSEELAFLNEVSSVPLQQALRHLQAAFGAFFAKRARYPRFKSKRKSRPSAEYTRSAFRWRDGRLTLAKMTQPLNIVWSRPLPDGAQPSTVTVSRDGVGRWFISLLVEDPTVQSLPPSDQAVGIDAGITSLVTLSTGKKITNPRHERADRRRLAKAQRDLCRKEKGSNNRAKARLRVARVHARIADRRRDHLHKLTTRLVRENQTVVIEDLNVRTMLQNHSLARAISDAAWSELRGMLEYKAQWYGRTVITVDRWFPSSKLCSACGALQQSLPLSVRQWTCPCGAVHDRDINAARNILAAGLAER

SEQ ID NO: 57470 - protein, 526 aa, unknown
  TnpB Polypeptide
VARPSRILDLDGEVLDTEPIMAELSSEVRNLSAYATYVVRNDEVLGAELSRITATAPAEAGRQAGVVMPDFLVPDKRDENGEPLKDKNGEPIKLKTGKSRKERLFRYNVVTSYRSWQERIAAASGESSKYVSQGWKRTVNASAPSYGDGDFINLGAVDKRYAVIENNPLIDGEIVLKLVIQGKWHRLIFPFDNQRFTEGKVTLPLIKIQGGAPVFIFTVVTDNPVVQFSGDYTIGVDVGINDYATVVVRNSTTGRIVQQTTLSQRAHSLWNSVRASERQVRALNKKADKHLYDRQAHMSAVDEGQLHRDAASRKKRELAILAAQEIAYLSHAYGNAVVAVEDLGWISNTMQNGRWNRGAFVQWLTHYVAQNGGWVVAVNAANTSQVCHVCNEQVAHPVHQLSVCRKHGMMDRDVNAAANIAARAVPKVEKARKTRTKNRKLQKQAALRTPVARETLKYPGRDRTKNVPTPQRKNHTSKEVNLPLSPARVVMTSVLADCGTCGAVETCKAAINQGNITCKCRLCNLN

SEQ ID NO: 57471 - protein, 369 aa, unknown
  TnpB Polypeptide
MLKAYKYRLYPNKQQQKLIQKTFGCCRFVYNQTLSHRKELYETKKKSMSKIDCNNYVNRILKKQYEWLKEVDKFSLTNSVYNMDSAYQKFFKEHAGYPKFKSKHDNKKSYSTNFTTGNIEVSFEDDKIKLPKLKWTKAKIHREFIGQIKSATISQVPSGKYFVSILVETECVPMASTGCMVGIDLGIKDLLITSDGEKFDNIRTTQKYEKKLAKEQRKLSHKVKSGKNWNKQRVKVARIYEKIHNTRIDNLHKISHKLINENQVIVSEDLSVSNMVKNHNLAKSILDCGWYELTRQLIYKSDWNNRQYIKIGRFAKSSQPCNICGYINAETKDLSVRQWTCPQCGTVHDRDINAAINILNEGLKILEAT

SEQ ID NO: 57472 - protein, 387 aa, Clostridioides sp.
MIKTHRVKLKLTKSQFELVREKQMESANCWNYIINLSKNYYFQHKQWISNYDIQKLIKGKFNLSGQTIQAISTKFCANRKTISELRKKGNSKAKYPYKIKKFYIIPLKNQDIRTNKQGNLKLTLSAGRYLELDFNVENIKTAEIVWRNGYYLYYTFDDGIINPTPKGNNTVGVDLGEIHSIASITNEGIGFIISNREGRSIKQFRNKMYAYISKRLSRCKKGSRQYKRLWKLKNTIRTKTDNQLINLYHQTTRKFIDFCVEQQVCEIVLGDIKGIEKNTKKKKRLNRINRQKISQMEYGRIKDYIKYKAKEQGIEVKLVKENYTSQTCPKCSKKHKPQGRTYSCTCGYKTHRDIVGAWNILNKKHKYNLVDFKINHNQPINLKVSTI

SEQ ID NO: 57473 - protein, 398 aa, Kribbella sp.
MSRFRMYPTPAQQAALLEQCRHARYVWNLALEQWSMWTRDRGLTPGYVEQARQLTEARAAFGWLRAGSQTVQQQALRDFDQAIKNFYAGTHRRPTWRKAGLHEGFRIVGPQASRIVKLNRGWAAVNVPKVGRVRFRLSRAVPEAKSYRITRDRAGRWHLAFAAIPPPIPAPGTGEVVGVDRGVIVSAALSTGELVTCPGLSAREQERLKQLQRRLARCRRGSSRSHRVKAAIAKLHARAGDRRKDWVEKTSTDLARRFDVIRVEDLRVAQMTRRTKVKFDPGRPGAYLPNRRRAKAGLNRGILANGWGLLVQRLEHKAAGRVEKVNPAYTSQTCSVCGHCAPDNRESQAVFRCVACGHEANADVNAAVNIAAGRAVSARRATPPRVSPKREPQHATSA

SEQ ID NO: 57474 - protein, 395 aa, unknown
  TnpB Polypeptide
LDEFNYNLILHRIKTGIFVESKTKMISYKYNIYKSKNTKHIDHMLRECCFVWNHALALQKRYYRIFGKYISYNKMSSHFTKRIKRNILHSQTRQEILQRLDSAYNRFFKRLAKRPPKFKRHNQFNSFVFKQGGFTLNGNVLTINKINKRFKFSYSRPYEGKVKLIKVKRETCNRYSIIITTDKEVNTIGKTHDGASVGIDFGLKTYLMLSNGIEYKSPLFFNKYNKEIRNLNRRLSRAIRGSNNRKRRLFELQLIFRKISNLRNDYQWKLCHDLCRAYDYIFIETLNIDGMRRLWGKKISDLSHYSFIEKLKYVSRKYNVIVHQIDKWYPSSKTCECGHINKSLSLKDRTWICPECGLVNNRDLLAARNILRKGISELESQSNSSKKLEVSDVCI

SEQ ID NO: 57475 - protein, 512 aa, unknown
  TnpB Polypeptide
VPKLTRQAFRYELAPTAAQREFLTSCAGASRFWFNQGLALVKTRLDERASGQDVSVPWSYKSLCSEIGQEVRAELAPWQREVVSGSYQAGFEALGKALQSFSAGRRKGRTVGFPRFRRKGACTESVIFQRPAVLDSRHVGLDKKRLGPVRTKESLHKLTRLLARDEDARILRSTVMRSGTHWHISFTVERSAEPKAASRQPRRAAAVVGVDVGLSRLATLSTGETFENAQPLGHSLQKLRRLQRQLNRQRRSNNPTNYDERGRAKPGRTWTKSHRQTRTEVLLQRLHERVADVRREQAHQLTTALTREYGVIGIETLTVMNLMANRRLARHIADVGWGTIFNQLRYKTSWAGSTLVAADRFYPSSKTCSACGTVRAKLSLTERVLACEACGRVQDRDLNAALNLARVAQRFAQAEGSQCYVAAAGAETGNSRGGHVSPAPRSRQTPVETRRPFGVIPAPQDAGGAYQYSPGRRQEQLGLRVAPNGTPATYSDAGSGRCHGGGEWFGGLAHLG

SEQ ID NO: 57476 - protein, 395 aa, Chlamydiae sp.
MLIKRAFKFKLKPTSFQRKTFSRFAGARRFIFNLGLDQRQKAFETTGKSPTYFDQNKELTTLKQEPKTSWFKEIHSQVLQQGLKDLDRAFQNFFRRVKKEEKPGFPKFKKKGIRESFRYPQGVTIEGSQVFLPKIGWVKFRKSREIQGTLKETTITQEGSDWHISFSCERKKTPPKPAPIDENKAIGIDVGLKHFGVTASGKQNHQKIIENPRFLKKHLNHLRYLSRQLSKKNKKSQNRLKARIRLSKLHARIKNLRNDFVQQLSTKMIKTHDIFCIESLDISSLLKKSPKSLSRAIADVGWRSFLHCLKYKAEERGKHLIEAGKYFASSQICANCGSRQKMPLFVREYDCQNCGMKSDRDYNSAIVLKAAGMSVIKACGAALVGGSVEAGISRL

SEQ ID NO: 57477 - protein, 414 aa, unknown
  TnpB Polypeptide
MELRKAYKFELDPNNRVRTFLAKHAGTARFAWNWSLQRRIERFRTQEGKEKFTNAIAEHRDLNARKGPDFPWMYEVSKCAPQEALRDLDKAFKAFWSRRSEGVGFPKFKKKHKSKDSFRLYGSIEPQTRYIKLPRLGTIRTKEKINGRISGEILSATISRVADRWFVSVNTVEVVTDPIPIQGPKAGVDLGILTFATVSSDGACTKIHAPNPLKQALSRLRRAQRSHSRKRKGSSNRRKSAQRLARIHSRVANVRRDFLHKFTTGLAKTKSAIVVEDLGIRGMSKNPHLSRSILDQGWFESKRLLSYKTTWYGSKLEVADRWFPSSKICTSCGLKRPQLALSVREWVCEGCGAIHDRDENAAKNLERYSEFPRNLGAFGAKKPVESPLAAERRRTLRPTSHVSLKQEVNIGVLL

SEQ ID NO: 57478 - protein, 229 aa, Halorhabdus sp.
LFQRFRETTREIARLQSKLEEGRYSSERIRRLYRKRTRRRDHAQEALCRDLLERLYAEGVDTVYIGGLTDVLETHWSVETNAKTHNFWAFKQFTERLACTAEEYGISVEVRSEVWTSQECPQCGSTGRTTRHQDTLTCQCGFEGHADLTASETFLKRQIEQAVRPMARPVSSETDGFRDAENAQRFQARFEWDDHEWSELPRSHESPKEQRTDPSTVHRDGNIASGESA

SEQ ID NO: 57479 - protein, 396 aa, unknown
  TnpB Polypeptide
MESEQGHRITATTYRLYPNATSERRMLATLEHCRSLYNRLLADCKANAIEGICQKSMFEMDAEVKRVADGDPGMKRTVYSTCLRDVGRRVFNAMRGCGWNRNGNLEHLPRFKSGHRYRSFTYRTNQGFGFEGDAIVLSKIGRMRCRGRRPPKNAEPRMCTVKLDARGHWHATVVYRIPDIKRGWTGFEGPAYAVGYDLGLRDVVTSSEGEHVVCPEFLRGPRDEVERLQRVMSEEERGSPRWERARRRLAVIHHDVHLRRKGFFDRLAHDMTDGRTVIVMEDLSPKRMKERDGTPAAVRDKYTEANWGYLTRRIGFKAEEAGSRLVLVDPRYTSRTCCRCGHVVQSLPLSQRTFSCGSCGNVMDRDWNAAINILNRGLGVEAVRKENGRRGRQHGC

SEQ ID NO: 57480 - protein, 282 aa, unknown
  TnpB Polypeptide
LSVHQFFAGRAKYPRFKSKRAPRESCQTNYTKSRIQVKGNKLKLPKVGWVRFAADGRAIPRSIVNVTVTRTSTGKYFASILCDVQVAMIPTASKQIGLNLGLKMFAIPSTGEPIENPKYFIKAQKKLAKLQRRLSKKKMGSKNRENARLKVARHYEKIANQRQDFLHEESKSVVVENQVIVLEDLAVQNMVKNRRLAKSISDAGWSEFGRMVEYKAAWYGRTVIIVDRFFASSKLCHVCNEKNAMLTLSDREWKCQVCGTVHDRDRNAAVNLLAKGLRILAQ

SEQ ID NO: 57481 - protein, 307 aa, unknown
  TnpB Polypeptide
LRIRYIGRIRWEGKQGRLEIIYVNGRWFALVPIEVGREPPKSNKRGYVKPNYRDKKGRIINPRSIKQRDPIGDKEAFMDMGLNNLFAVAISDGSVMLIKGGSIKSEYYWWKGEIATYQSIGDVLKRLGILTWIYYHEKYLDAMYKKNERLRHLYITAIRFLADDLYRRGVRKLYIGYPIMLSQNNGNKYNTNIWWYRKIVLWIVDIFREYGIEVEIVPEDYTSKECSICGNKHKNGRIYRGLYICRKTGKKINADVNAALNIARRLGYRLRIAKRIESNLVTHNGVKPLIPLQGASTRDPSIETPPL

SEQ ID NO: 57482 - protein, 475 aa, unknown
  TnpB Polypeptide
VKLGEFLCTEISQLFIVSAVPKGGLFGPKSGCLNFFRKGLNFSKKRPIKLVKSSRRKINSAVPKGPPFGTGYGFSKQDRPEVIGVGIKRSANTCQSQTAVQYNTIKVRLYPNAEQAELFQKTFGCCRYIWNQMLSDHEEFYYATDKHFIPTPAKYKNEAPFLKEVDNQALIQEHNRLSQAFRNFFRNPAAFGYPRFKRKKDDRDSFSACNHIMGNSATIYITQNAVRMTKAGFVRATFPRRPRSGWKLTRITVERTKTGKYYGYLLFACPVRKPEPVEPTAERTIGLKYDLAHFYVTDDGVTADPPRWLKQSKETAAAIQKKLCRLKPGSKNYQELVQKYRLLHEHIANQRRDFLHKESRRIANAWDAVCIRDDDLKVISEELGGIAVRDTGFGMFRELLRYKLERQGKQLIEVNRFVPTTKVCSVCGAVNESLSPKVRRWVCPVCGAEHRRGQNAAVNIKAQGLVQCREAAEAS

SEQ ID NO: 57483 - protein, 484 aa, unknown
  TnpB Polypeptide
MELSSGVRFRCYPTNEQAEILSQWIGCQRFIYNAKVGEDRYFRKFLNHSLSLAGTQTTVDQQYAQFKNKELTPFLYDVPSQVLRNGATRFMGAYQRYFKGLAERPTFKRRAGRQTVWLTNDLFMFKVTGTKYKEQGKTIYEHRLVLGTTTKSLGELKFKAHSEYGMPSTITIVRHAGKWFVSFSYEKASACMSQEELIAYYSAMTATELDQITLGVDRGVVVPVAASVKDISHDFTDEQKHNLSRREIRLKRYERQMARRIKGSRRQRKASQKIAGCHSYAANVRHDFAHKASRKIVDSEAEVFVFEDLKIKNMTRAPKPRRAGNGKCIPNGATAKAGLNRSILESAWGKVRQFTTYKARKINKLVIAIPPNGTSQECLKCSHTHPDNRKSQSEFVCQNCGFTENADYNASLVIKKTGVRMLLAGEISVKQKKRVMRLKKKHQLGREPAEVTHGEKEIRRFVASAYETLPSLNCETPATIASAI

SEQ ID NO: 57484 - protein, 203 aa, unknown
  TnpB Polypeptide
LVETQVHQINSESKCIGLDYGSKNLFTKNKGGVAGYPRFFRLYEKKLARAQRKLSRKKIGSNNRNKQRIKVAKIHEKITNSRKDFQQKLSTQLVRDYDIIGVESLNMQAMSQCLNLGKSTMDNAWGYFVSMLEYKCEWYGKHLVFADKWYASSKMCNVCGYKNINLTLADREWDCTICGAHHNRDTNAAINLMNNAKEVLSLN

SEQ ID NO: 57485 - protein, 431 aa, unknown
  TnpB Polypeptide
MTQRLKNESSQRIFSLSSTSIVADKWEEEGTRARKIRIFPTKSQIEALDSWIYTAREVYNKALEYAKKHSCYNFMFLRNRFVTKKVNKEILARVPGAKYTKTASTEKVLNPYVEEWECETPKDIRAESVKDIATAYKAAVSNVKRCNIKRFDLGFKSRKLGGHITLDSSSIKRDTDTTFTVYRRYIKTPIRAAETLPSTIKTSKLIKTKDGFWYICIPIKIHVEDRTDKNKGACALDPGVRTFQTLYSEEEVAEFTIDPSRLQTHDRRVCSIRNANLSFIGDKYYCGRKHASGKLNRMRKKARRLETKLTNQIKELHSKTINYITKKYKTIFLPSFESQELARKGKNRTLHRDILRLSHYKFKQALIDKCNLIKGCSVKIVSEAWTTKTCTKCGTINDPGSSKHYACSNCSLSMDRDVNAARNIFIRSITV

SEQ ID NO: 57486 - protein, 226 aa, Escherichia sp.
MHQENTMLPRRISVSLFIDQSIIWPVKRLQAFKFQLRPGGQQEHEMRRFAGACRFVFNRALALQNENHEAGNKYIPYGKMASWLVEWKNATGTQWLKDSPSQPLQQSLKDLERAYKNFFQKRAAFPRFKKRGQNDAFRYPQGVKLDQENSRIFLPKLGWMRYRNSRQVTGVVKNVTVSQSCGKWYISIQTESEVSTPVHPSASMVGLDAGMAELATLSDGAQSLSL

SEQ ID NO: 57487 - protein, 462 aa, unknown
  TnpB Polypeptide
MGQTTRTTKLPLDLSTRDQGGANQGKRRYLEETGAILDTARAFYLDFFLAHPDKLMERVDVISKQTGEVSQRLVSADKLLTWAEFQTVQTREHPDPLPEWNFSQVFPDFPNRYRRSVIKDCIGKARGYLTTLLKWNTSEQKKGKPGRPTATNHPTLYAGTFSLDLDAFDLRKSFVRLKVYDGETWVWVHYPTRYNRYFERRRAEAGWEMESPKLILKKQGAEIHFLQTKTMEAKKIVESKRDPDLVTVAVDLNVKQLAVITVRQHGIIKATRFVSDHGLDQHRYRHLRRVAKKQWQCGKAVKGERSNQDLWTHIRRQNQDTAHKTARAIVEVCEQYPGCVLVFERLRVIKPKGGSKSRRLNRKQANHLKGKINQLAKEKAYAIGVVSVEVNPHGTSQYCARCGSQGVRFTQEADHRVPGKGGNLFFCPVCSYECHADFNASVNVHHSFFREFHWQPRLQRSG

SEQ ID NO: 57488 - protein, 548 aa, unknown
  TnpB Polypeptide
  misc_feature (459)..(459): Xaa can be any naturally occurring amino acid
  misc_feature (478)..(478): Xaa can be any naturally occurring amino acid
MALVNYEKEGAIKALTEKKSEGNFITVECLLAFDKDEDKGRVLSLMRKFSSMVRFAYKRLMEGAVRKELKKLLARKYEINTRYSDDAILLAKQNLESCIEREQNPKKLVFGSRELFEQLKKKHLTGKRRETLRQKWEERRYGILQSRGDKSKEGNLNIRLVNLNNKWNLRINLGNGEYVWAKVLRSAKRKTDKWIDFISSLEHAEKTGDWFPYTVRLKLRNGKIYAQFSKEEKLPEVSITKDNGVIGIDINAYPFHLALVHVAKDGNLEKYERISLDNLLKGSLEKREYLSWQTAHQVVEIAKRERKGIVVENLEKIPKGKRGDGLPKLRQRLQKWIYKALLQKIEIVARRNGIQVIRVNPAYTSIVGKLKYAPLHNIDKDTAGAYVIARRGLCFKERLPKNYKDLLKDAEFLSYAIARIEDKIANLKQEIREEKNEYKRNRLKSVLWKTRKELDLLLXYLRESGESESAAQQTVNRXMERVRGRAQTLQKSWQVLTVALAFSCLESLRDLSPLKRVIFARDWVGAAKRDSPSLPGQGTTVLNMYSFV

SEQ ID NO: 57489 - protein, 190 aa, Burkholderia sp.
VKSLNGRLDKQSRAVSYVWNWLLNIVIVMPDVPARPIRSGVGIDLGLKDFAILSTGEKLPNDRFSQRAADKLAKAQRARKHKRHIAKLHANVANAHADFHHELEFYLARCFDCIVAGKVSATKPDKIRMAKSVSDVSWSSFRSRLRYKAIAHGARYEEVDESGFTQSCSACGSKACTTRPRGIAGLRIRE

SEQ ID NO: 57490 - protein, 395 aa, unknown
  TnpB Polypeptide
VFTKLKKLLMKYTRSSKCHYLKWLTAEKQSAIKGLLGETHRVTSWAIDKFHLSIAHLGMQKKELLLASNLHQCDSWLTERAKKNCFAEAHALVLGTKRSADELKVEYTKPTHSPHRVMLSSTNATINLNPGLNGFDLLVEVRCFDSRGRAKQIALPLKRNKRFNYWASQGKLATSVLLTDRSVQFSFEMTTEKKQTGTIVGIDPGAKTLLTTDTGEKYGDEIWPLLQKLKRKKRLSHAWHKCREEILEYIDKSCKLIPFEALKYLVLEDNRKIKNKMKRRKGKRPSKTNRSVLTGWAIGRVNLRLQLLSEENGVLFRRVPAWNNSRTCPDCGCCEEANRVSQEVFVCRKCGHIWHADVVGATNTLARFALGPYGAECKPEFMERHPGYYQLRATG

SEQ ID NO: 57491 - protein, 427 aa, unknown
  TnpB Polypeptide
MILSRKVEIQPTAAQRQRLLQHAGCARWAWNWGLQRKREAWAARKAAIESGVLKEDAPKIPSAIDLHRELTSLKVLPQHQGGIPWMYHSSKCAPQMALRNLDLAYAAFFRRCKIGQTPGFPKFKSRSSRVGGFQLSSATHVIQHTIKLPKIGWVRMKPGERNSIQRGTYKSVSVTEHVGRWFVSVMLHVDATEISTNSLSSVGVDLGVTKLAVLSNGVVYENPQATNKNKRRLRRAQKSLSRKKKGSNRRIRARARAARIHCRIANLRKDATHKATTEIAKNHGVICIEDLKVVSMTRKRSGRGRAAKAGLNRCILDANFYEFRRQLEYKAKLHGAKVVIVSPAYTSQKCSTCGYTDTRNRLLQAVFQCLDCGHTENADLNAAKNILVAGSCPETLNARGVGRRPRHRKMATQLTVNRESARVVECV

SEQ ID NO: 57492 - protein, 516 aa, Cenarchaeum sp.
VLDDVKYTIEPYCIVSSVKNSRAVTRPYAKNLDMWHVFGHVRKVAEVAYIIANNTGKDTYGVNALMYSTMRDPDPKVRSSITQTAIRDGVAAHKTYNTKTAQGMKVSEPVFRNPVVKLKNQDWRLNPIAGGYMAVANVGSSKYPHMIAIPVSSDVVRRIGQNELGELWITPTIYTITYYNKVPKVEKPHPYGKSEIIELLTDVGYVGGTPKDVIGVDINEKNITVGDKNTMVRFDLSNTIQAIEEAKTEDANNTYTRIHDNITYAARTGRRVVHKKEERRERQQVTHGGPKLYGKLKRRYKKLKREGKHKKAAEIKWQMNKCILNIQHNHTKSKKNDKKHRVTKAMRRHEHVLNVIALCIAQWAAQSGCLVMLEDLTHISYNWQKGGKFGRSLRRRLYSAMMRKASNLIYEKSQFLGAEALHMRPHNTSKFCAACRTPLTGTYHKKDCTHCRTVGVDRDVNAVENIRRTSAVSRYGRKVSTSLGEVRRGVDVILDPTPLIQGCWSNWADRLSRVVM

SEQ ID NO: 57493 - protein, 423 aa, Paraburkholderia sp.
HGISARMFNATAVELQGLLDGTRELLDTERKELLKAIHRQQRQLDARRERLAEIAADRLRMHPQREAKLRHTAHRNGVALARLQGKLGRVERRLAAKVPGICFGTRKLFAQQHHLSLAGFRDRDAWRQAWRDSRSHQVFFVGSKDEKGGNQLCQLRKVEGDGYELKVRVPDRLRTKGEHKYLIIRDVTFNRDRMALAEALDSNVALTWRLHWDGQHWRAFVSFNHAPARRVTLDAQHGVVGLDFNVDHLAVTETDPFGNLLRTKRFALLREDATSGQRQAVLSDALSAAVAWAKDELKPVVAEDLDFAAKKKAMAQLSPKGARMLSGLLYAKYRQLLEAKCFRAGVELILIDPAYTSTIAAVKYASRRGWSVHAAAAGVIARRGQKLTERLPRTDAVIRVPVRGGHHALELPARKDGDSRVAA

SEQ ID NO: 57494 - protein, 520 aa, unknown
  TnpB Polypeptide
MFVSLQFKLELNKEDKEKLIKLMRKQSSAIRVAYNMLKDLEKEKTKKPHIQIYHRLRQLFPDLPTKYIDSAIYKAKQYPKDKIVVFGGKRLFEKLCKNHLTGKAKEKLKKQWRELRQGTLISIGSRHETAQGNLLLRFVELDGKLHLRITTGNREFIYAKVLREPSNSKDKWITFMIMLLESWQTKNYFAYTVELKLRNGEVYGSVSFEIPKPKVRYTKENGVIAIDTNASPIHLAIVEVSKTGELLSYQTISLHHLLGLSKNAKDHQEWILAHKIVDLAIQKGKAIAVENLKKLKRGKRGDGKAELRKRLHHWNAKKFLQKLKRVAMLKGVEIVEVHPAYTSVIGMLKYAPQLSIDKDIAGAYVIGRRALGFKEDTPENYEKLLKDKEYLEFALKKYEEREKELKELLEKESNEYKRNALKSELRNVEYARKVLTHLIQSLQSESSSCEGADGRNPEQGETKKVSQVAWQVLKVALLFPILGKVLPRDLSPLKPVLVEGVWDRVRRSNGLVPLEAGGTS

SEQ ID NO: 57495 - protein, 131 aa, Okeania sp.
VVEEIAVKNMVKNHNPPPSPPGRGARGVGSDANWGELVRQLEYKAEWYGRELIKIDRYFPSASFRGAASCRGASLTLTKRCSNCGYVVKKLPLNIREWDCPECAALHDRDINASINILRMGTRVGVSVCAA

SEQ ID NO: 57496 - protein, 399 aa, Mycobacterium sp.
MGRGGLMRRSYVFRLRPTARQHVALAACLDAHRELYNAALQERRDAWSHSKARINYGDQSAQLTEIRAVRPDQAVWSFSSQQATLRRLKKAFDGFFRRVKRGDKPGYPRFKGKRRFDSVEWPKDGDGARWLPESKRVYLQGIGQVKVRLHRQVQGRVKTIQIKRQGRHWVLVLSCDEVPTNPLPATGAQAGIDVGVVTYATLSDGTEVANPRWARQEADRLEAAQQRLQRAKRGSNNRVARRETVAARHRKIANRRKDFHHKQARELVARYDLLAVEDLTISNMVRRTKPKPDPDNPGQFLPNGARAKSGLNRSINDAGWGQFVSILRAKAEDAGRTWIEVNPRHTSDGCECCGHAAPENRVSQAEFVCQRCGHTAPADAHAARNILRAGLALHTATVA

SEQ ID NO: 57497 - protein, 394 aa, unknown
  TnpB Polypeptide
MKKLLKSYKTEINPTFEQKQTINRTIGVCRYVYNFYLAHNQEIYKTEKRFVSGMDFSKWINNEFILNNPDFHWIKEVSSKSVKQSIMNAERTFKNFFKGKSRFPKFKKKAKSDVKMYFVKTNAKTIIQCGRHRIKIPTLGWVRLKEKGYIPTNPKTHIIKSGAVSCKAGRYYVSVLVEEQEHQKPVLNDFGIGIDLGLKDFAVCSSGKVYKNDNKSSKIRKLEKKLRREQRSLSRKYESYKKLNKNMKGVATRQNIQKQKLKVQKIHQRLDNIRTDYINKVISELVKTKPMWITIEDLNISGMMKNRHLSKSIAQQKFFEFRTKLLAKCNEYGIELRVVDRFYPSSKTCHNCGCIKSDLKLSDRTYHCCECGYTEDRDYNASLNLRDCQTYKIA

SEQ ID NO: 57498 - protein, 461 aa, Clostridiales sp.
MGEFITLRENTRNLQSWDESLFFLENNNGKWKTYVRFGNIILREVENMEKQFGVQKEILKLRTRKEYLALRKLSHLSKNMYNVGLYSVRQHFFETKKYLRYKENYHVCKSNENYKLMGSAAAQQTLKKVEENFKSFFGLLKAEGQKARIPRYLDKEAHFELSYPQFKLQKDGTFNLPVSPAFKREYGTINVHFPSNLDSSEIAEIRILPKYNAHYFEIEYVYKKQVEQQKLNKEEALSLDLGIDNFVAGIDTLGHSFLVSGKRVKSLNQWYNKENKRLQSIKDKQKISHLTNRQVCLLRKRNNVLRDFLNKTTRYVIKHCLDNGIGKLVVGLNKGWKQSINIGKKNNQKFVQIPHSQFIRKLERISQRYGIELIVQEESYTSKASFLDNDKLPVYHKNSKENPIFSGKRAFRGLYKTSMSIFVNADLNGAANILRKCNHTSEFSDKVARGLLAVPMRVKLV

SEQ ID NO: 57499 - protein, 384 aa, unknown
  TnpB Polypeptide
MLRAIKYELNPTNTQKDAIKQICGCCRLVYNTMLDRKISAYKENGTTISAIELINQLPKLKSEKDFLKEVPSQSLQQAIRNLDTAYTNFFRKGGSGFPKFKKKGVRDSFKIPVACIIDYDNWAIKVAKLGTIKFYKGHNKQINGKIKSYTISRTSTDRYFISVLYETEDRANLNNNKSVGIDVGIKDFAVLSDGKVFENQKYLKSNLKKLRVLQRSASRKYQQGKKREEQSNNWRKAVKQVAKLQEHIAFQRYDYLHKVSTWISNNYSTVCVETLNVKGMQKNHHLAQSISDCGWSMFLNMLGYKCDNLVKIDKWFASSQTCFECGHKEEKVKNLKIREWTCPNCGAHHNRDLNAARNIEREGLSLCGLKVIGCDMLAPRTPLL

SEQ ID NO: 57500 - protein, 388 aa, unknown
  TnpB Polypeptide
MPIKSFKTEIKPTITQKVEINQTIGVCRYLYNLYISINKERYTNKLPFLSGNEFDKWINNVHSQEEGFSWIKNVSSKARKKAIKNAEMAYKRFFNKLSAFPRFKKKRDQNVKLYFVKNNSTDCSVKRHRIKVPLLGWVRLKEFGYIPSNIVIKSGTISYKAGRHYISVITETECISNSSVSHSEGIGIDLGIKTFVTTSNGIKFGNINKTTKLKNLEKRLKRQQRKLSNKNYMRKQKGGTATTTLSSVNIDKQCLKVQKLYQHISNIRTDYVNKVVNTLAITKPLFITVEDLNIRGMMKNRHLAKAITQQKFYEFIIKLKNKARKYNIEFRTVSRFYPSSKLCSDCGFIKKDLTLKDRIYKCDNCGLIEDRDINASINLKNAKEYKVA

SEQ ID NO: 57501 - protein, 279 aa, Scytonema sp.
LTIVLYISRLIYSRYEEVESMLLGFKTELKLNKAQRIALTKHCGVARHAWNWGLGLTKQILDHNKTNPDSKIKFPSAIDLHKWLVVLVKSENEWYYECSKSTPQQALIALREAWKRCFNKTAGVPKFKKKGRRDSFTLEGTIKILGNNKIQVPVIGVLKTYERLPQVLTKSCTISRQADRWFISFRFDVEIQESHNTDVVGVDLGVKALATISTGEVILGAKFYKKYEEKLSKMQWLNRHKIIGSANWKKAQMQIARLHMKIASIRKDTLHKLTTLREP

SEQ ID NO: 57502 - protein, 309 aa, unknown
  TnpB Polypeptide
MRQVERHIIKDNRYEEICHKSGLLYNYCLYVFRQGIFTENYVKEYELSTKLGKENQPDFRNLPCHVSQNVVKQVGKSIKSWIRSKKEYENHPEKFQGKPKLPKYKKGKKLNTVVFDELSCRVKEDGYVHFVKNIIEPIKTKVKPDELIQVRIIPQATCFVVEVIYERKEVDLNLDKDNFLSIDLGLNNLCSCVSNVVNPFIINGKVMKSVNQWYNKTKAELMSYVGDERISNRIRRITLFRNCWIEDKLHKISRYVVDFCKFHNIGTIIIGLNKEWKQGINIGRRNNQNFVSIPHSKLIDKIIYKSKLL

SEQ ID NO: 57503 - protein, 437 aa, unknown
  TnpB Polypeptide
MKTISSYAVELRHVNKIFYPTIKIYKRAVSFCVSIFNSEWSAISLLTGKNRNSYAETLIHSTKSNQAKYSEFDKQFFKLPSYLRRSVISVALGYLQSYYSNLENWLNSKRTTKKPTLQVNLNQLPTFYKDNTYDGSLMDDDSVRLKLFVNNDWIWVPFKLKHTDMNYIRKQSVGSKMSMPTLEKKHKKWFLRFSFEDNVKLTNSKDVVLAVDLGLNTDATCCVMNKEGTVLKRKFINFKSDKDSLYHTLNKIKKVSRLQGPKNTCKLWRIAKFRNDELARHVANAILEFALAYQVDVIVFEYLDIRGKIRGAKKQKLHMWKKNTIQQLVMHNAHRHGIRISRVCPYNTSKLAYDGSGYVLRGDKANLSTYELCRFVNGKIYNCDLSASYNIAARYFIREIEKSISAMKWSQAVANVKSLAKRTLSTYSTYLELLSIT

SEQ ID NO: 57504 - protein, 604 aa, unknown
  TnpB Polypeptide
MSHQKKQENIIQSMIVQLEDGQEKELLSVKEQKEVITDIVFQSLTMKNLKSKKISDSTLFMQESLLKNKKKILKDKPDISNQCLKTIPLLKTLDQDLIIKERGFKPFWNNFSKEISKELWLPTKIGLQDLDLTSSNGYLNNSEQYWNQLTEQQNPEKKNCSEMLWKCSQFLQQDITEVENTKIRTMKIRIYPNKEQKQHFKHCFGVSRYFYNKSIDEINKRYKDRKDQFNNKNTCIHCNNKKEENSWSCSKHLKKEIKWNLKITLPSIRPIVMSSDENVSNNMLWQKEVAFDTRQMAINDAVKSYVSSVSLLKMNKIKKFDLKYKTKKNKYQIFWVNYKAITKDYKLFTRRLKSKSKLRIRKKQRVLLSKLIPNGIDSFCKIQKSGKNIYHLIISYEKKDIINKNKKDSFISLDPGERIFQSGYSSDNKCYQFGIKQMEQIKRIHKKIDNLKSLRSTNFCSKTKNKNYKNKIDQYDYKVLNIVNNLHNQVSSFLSKKYKTIIIGKLNTHKILKSCGLNNKINRLLQVQSHYKFRTKLNLLCKDNKSNLIVQEEQFTTKTCGNCGCINENVGSNKIFRCDKCNLIADRDFHAARNILIKFLTLNQ

SEQ ID NO: 57505 - protein, 294 aa, unknown
  TnpB Polypeptide
VIITNVQFKILDGYIRFSWQPLKSLNKMFKTNIKDKLMQIRFIPKGIDYIMEIVYEINLPETNQYNQRIAGIDIGVNNLATVSNNICLKSFIINGKPLKSMNQYYNKKKAKFQSDLKTKHNKNWSNKLDKLTMKRNNKIKDYIHKSSKYIVNWCMENNINTVIIGYNSKWKQNSDLSKKVNQNFVQIPYKIFINQLKYKCQNNAINFILTEESYTSGTSFLDSEEPVKKNYDKSRRKYRGLFISNKGIKINADLNGSYQIIKKAMPNAFSNGIEGVCLHPIRVNFNSNKSNRNI

SEQ ID NO: 57506 - protein, 522 aa, unknown
  TnpB Polypeptide
MFVSLQFKLELKKEDREKIIKLIRKQSSAIRVAYNMLKELEKEKTRNPHAQIYQRLRQLFPDLPTKYIDSAIYKAKQYPTDKPVVFGGKRLFEKLCKNHLTGKAREVLKKQWKELRQGTLISIGSKSDRGNRLTRFEDLNGQLYLRITIGNREFICAKVLREPSNSRDKWITLIAMLLESWQTKNYFAYTVELKLRDGEVYGNVSFELPTPELRYTKEKGVIAIDTNASPIHSAIAEVSKTGELVSYQTISLHYLLGLSQNSKDHQEWILAHQIIDLAIRKGKAIAVENLKKLKKGMRGDGKAELRKRLHNWNAKKFLQKLKRVAMLKGVEVIEVNPAYTSVIGMLKYAPQLNIDKDIAGTYVIGRRALGFKEDMPENYEKLLKDKAYLEFALKRYEEREKELRELIEKESNEYKRNALKSELRSVENSKKLLANLIQSLQSESSSCEGANGRNPEQGRVAKTTLQSVWQVLKVALLFPILIRVLPRDLSPLKPVLVEGVWDRVRSRLVPLEAGGTVPIRDF

SEQ ID NO: 57507 - protein, 245 aa, Streptomyces sp.
VVFNDAVRAREDARAAGLPFPNAGELSKRLITRARHTPERCWLGEVSSVVLQQSLRDVEAAYKSFFASLKGERKGKRVGAPRLKSRKDARQSIRFTANARWKITGRGRLLLPKIGEVRVKWSRILPAVPSSVTVILDSAGRYFASFLIDTGPDTGRARWDDPDPGSAVGIDLGLTHFAVLSDGTKIDSPRFLRRAEKKLKRVQRELSRKRKGSRNRAKARLKVARAHAAVADARKRSSTISCPRS

SEQ ID NO: 57508 - protein, 325 aa, Streptomyces sp.
MLVGRRYWHLWLRTAPSHILQQTLRDLDRACRTHGTFGVRWRARQRWQPSFRFPDRHLSVERLGRKRGRARLPKLGWMIFRWSRPLGGTLKSATVSRDGKHWYVSFLVETGTTGPAVSVERGRVGIDRGVAVLAATSDGRFFDRSFITPGEAQRYRRLQQRHARMTATARGTSAELGTHIGQKAGLNRAILDKGWHSFELAVRNRARHTGTAVRTVNPAFSSTTCPACGHVHPDNRESQARFVCTACGHREHADTVGAKNVLARGHTGHRAWRPRRQPVCEAPTSAKPQGISAPTSEVGIPAASAAGRIAKSVMWDVTRVSLHET

SEQ ID NO: 57509 - protein, 406 aa, Streptomyces sp.
VIRAYKFLLRPTKGQAAALTDMLRDHCSLYNGALQERRDAYRHVSKTSIKYGDQSAQLKEIRAFDPECQGRWSFSSQQATLRRLDRAFAAFFRRVKDGQAPGYPRFKGIGHFDTVNFPKDGDRCRWDSTPHDPQTRVRLQGVGHIRVHQHRPVRGRVKTISVKREGRRWYVILSCDEVPQEPLATTGSVVGIDMGTVHFFTDSGGVHVENPGFLDTMADELTAAQAHLSMFPKRTRCRTKKHRAAARKVAKIHAKIRRQRLDHHHKTALALVREHDVIGHEKLNTAGMTRKPAPRPDPGQPGGFLPNGAAAKAGLNRSILDAGWGLFLGVLADKAESAGRRVIPMNARNTSRTCPPAAGGCGHIAEENRVTQAKFKCVKCGFVENADTVGALNILDRAGLVLCDVA

SEQ ID NO: 57510 - protein, 120 aa, Acinetobacter sp.
  misc_feature (98)..(98): Xaa can be any naturally occurring amino acid
LHAKIANCRKDHLHKASTMLIKNNALIVVGDLSAKKLVKTKMAKSVLDTGFSALKTMLKYKCENAGVLFEEVNEAYTTQMCSYCGEITASSPKGRADXSCTCRIRLGKVFTHNLVNQLEM

SEQ ID NO: 57511 - protein, 149 aa, Acinetobacter sp.
  misc_feature (80)..(80): Xaa can be any naturally occurring amino acid
MLIKNNALIVVGDLSAKKLVKTKMAKSVLDTGFSALKTMLKYKCENAGVLFEEVNEAYTTQMCSYCGEITASSPKGRADXSCTCRIRLGKVFTHNLVNQLEMRKVSQVNIELGNICQRAASCFANCFQVVKYTTNLSLDAFNQFHAVWI

SEQ ID NO: 57512 - protein, 227 aa, Proteobacteria sp.
LRYCEPKPLQGTLKTGSFTQDARRHWYVNYQCEVDVPGIPLGSAEIGIDLGLKNQIACSDMDTPYSRANLTRRYAATLGMAQRGHKTKRVKALHARIANTRKDWAHKTTTAIVRRARLTVVGNVSSTPLRKTRLAKSVYDAGWSQLRTLLEYKAQRLGVSYREVNESGSSVTCAIYLARRGPTWTELPGGAEHGRVPSVSLRMIEIGTNSWPSDVLPKTRWNRRHHQ

SEQ ID NO: 57513 - protein, 257 aa, Streptomyces sp.
VGRPHRSQPGGGLPHPPPRGARPLVPDRIHHFAAYRLDRHGNPIGEPHRFGYDLSGTAGHRDAQIRHALTRLINWAVRAGVAAIGIEDLDFTTEKTREKHGGRKRFRQLISGMPTAKLKARLISMAAEHGLAIVAVDAAYTSTWGAQHWQKPLATPRRKMSRHDAAGIAIGRRALGHAIRRRATPPPHDRSDRAGHRTVQAGSGDQGSDGTRPPATDHAPGGVPPSGKRKRKPSASKTVRDVPSMRQWVQDSLMHTG

SEQ ID NO: 57514 - protein, 424 aa, Cyanobacteria sp.
MQLAERHIIKSDDARFDELDNLAWQSKNLYNAANYIIRQNFLYGWGYLTYNKMASLMKSHPAYQALPAKVSQQILMILDKNWQSFFEVIKAYNNEPTKFTARPKLPKYKDKVKGRNLLVYTLQAISSRQLKKGIIKLSGTEISIKTTVNPDKICQVRVVQKCDCYIIEVIYNEPESTINQENFTSVASIDLGLNNLVALTSNQPGFIPLLINGRPLKSINQFYNKRKSQLQSQLKGNLKTSSIIQRLTRCRNQKVDNYLHHTSRLIIDILRELEIGILVIGKNPQWKNSINLGKQNNQNFVSIPHARLIQMLEYKALLVGIKVIIQEESYTSVSNFLNLDPIPVYGDSDGDSVEFTGKRIHRGLYKTAEGLLINADVNGSYNIMRKALPKALSNGIESCVVQPVVNPLKVKAKGEGLGASHVMQ

SEQ ID NO: 57515 - protein, 366 aa, unknown
  TnpB Polypeptide
VKLTAKIKLQPTPEQADALRRTLTQANAACDYISQVAWQERTFKQFAIHSKVYRVVKEQFGLSAQMTVRAIAKVADSYKLDKATCRTFKPTGGIAYDSRILRYKPASVSIWTVDGRFEIPFTCGDRQRAQLANQKGESDLLLIDGEFYLYATCEVTEDAPYQASEYLGCDLGIKNILTDSTGETYAGNHLNSLRKRHAKLRARLQSKGTKSARRLLKKRRRKEKRMANHVNHVIAKRVVKKAKRHSMGIALEELTGIRQRVTVRKGQRRQHHAWAFHDLRQKIEYKARLAGVPVVCVDPRYTSKACQVCGCVDKKNRPNQETFLCVSCGFSAHADKNAAINIGRRASVNTPYASTTPLTHLVGLAQ

SEQ ID NO: 57516 - protein, 323 aa, unknown
  TnpB Polypeptide
MSLQPGKRISLRLKGRSKIRGTLQLIRDTAGTYSLRVYVPQQCEEKRKTGTVIGIDLGYTEMMATSEQELLGTDLGQYFSAISDKRRKNSEGRNRMHSLFRNLLKKPNKDNLAKAERIRKNNLGRKKQRARYIRDIGVIKTIVNRELNLLFTRRKNPIKEIVVEDLSARMKVHFGKKWNRRLSGWMRGYLQERIRYKAKKFGIEVSEVNPAYSSRECPRCHCTDKENRQGNSFKCSRCGYHGHADLVAALNILGRLGDKEIRIGMPPSRVKAVLDGRYVGWKSLNHTVSDKTSGVARVVNESPRSASSKSELRSNVQVCIASR

SEQ ID NO: 57517 - protein, 446 aa, unknown
  TnpB Polypeptide
MTTPEIRTDMARTVAHYRRVVRALATLMLTHWSDIASAKSKCGAVEALCHATAKRPSVRYAMFARLFGQMPSYLRRAAIEAAFGVVSSYLSNYDNWLDDAERDRGTRPPRLGFSNVYPSLYGGNMILEDSKLKSVKIKLLGADGQWRFSAPLKVKGRMKRLPHRLALSPSLVLKGAKAMLVCPVAVTPPRYCKAKGVGRVCAVDVGINTALTAVVVSFTGTVIARTFLTCGRHDGQRDALRERIQEKQSASGRAGRGFCRDLYRRIAGLSLDAARQLSSQLVAFARAHGAQAFVFEALKGWKPKGKNKAQRKRFHRFQHRALFKAVGLRADELGMRMLEVFAGGTSRWAYDGSGKVVRDTQNAQLATFATGKQYNADLNAANNIAARGLALLYGIKNPRPAKAPVGGVRMPLVLADVWAYARALGASLTASGALSDAPSKSPAAIY

SEQ ID NO: 57518 - protein, 406 aa, Micromonospora sp.
VSATAYFASVWTVGRVVKRAYKFRFYPTPEQAGLLNRTFGCVRKVYNLALAARIEAWQQRQERVSYSDTSAMLTAWKKTEELAFLNEVSSVPLQQTLRHLQAGFVAFWDKRAHYPRFKSKRRSRASAEFTSRAFRYRDGRLTLAKLAEPLDIVWSRPLPDGVSPSTVTVSRDSAGRWFVSLLCEDTITLAPATTVAVGVDAGLDSLLTLSTGEKIPNPRHERADRAHLAKAQRALARKEKGSANRAKARVKVARIYARIADRRRDHLHKLTTRLVRDNQTLVIEDLAVRNMVKNHSLARAISDAAWRQFRDLLTYKCAWYGRDLVVIDRWYPSSKTCSACGVVAETMPLSVRTWTCRCGTTHDRDVNAARNILAAGLAVTACGAGVRPQRDTPERGSRRRSRKPSG

SEQ ID NO: 57519 - protein, 459 aa, Micromonospora sp.
VGCSVINRFLSWILRPSDGGGNGTCGAGRGQPARRPGRSVCPRVTADVTARLASMWTVGRAVKRAYKYRFYPTPEQASLLNRTFGCVRKVYNLALAARTEAWQQRRERITYNATSGMLTAWKKTEKFAFLNEVSSVPLQQTLRHLQGGFVAFWDKRARYPRFKSKRGSRASAEFTSSAFRYRDHRLTLAKMAEPLDIVWSRPLPDGATPSTVTVSRDSAGRWFVSLLCIDTITPAPATNTAVGIDAGLDSLITLSTGQKITNPRHERADRTRLARAQRELARKEKDSANQAKARLTVARIHARIADRRRDHLHKLTTRLVRDTQTLVIEDLTVRNMLKNHRLARAISDASWRQFRELLTYKCAWYGRDLVVINRWYPSSKTCSACGAVAETMPLSVRTWTCRCGTTHDRDVNAARNILAAGLAVTACGADVRPQRDTSRTGQSAVKQETPRATKGIPRL

SEQ ID NO: 57520 - protein, 289 aa, Thermocladium sp.
MPIVGFRFRAYADRQTLRALKAQLRLASEIYNTLRWADKYFYQRDGKGLTLTELRQLALDLRKQDEEYQQLYSQVLQQIADRYYEARQRFFDGLSRFPREKKPHKYYSLVYPQSGWRILAREVRTSGNKRLVLRLSSLGTFKLIVHRDFPLEKVKRVVVKMTRSGKVHVSFIVEDYEFPKLLNTGRAVGIDVGIEKLLVTSDGEFLPNLRPYERALKKVRRLHKALSRKKFLSKNWFKAKMELARAYEHMESLRRDLYMKLGRYFAEHYDAVVMEVSPLSNLSASLPEG

SEQ ID NO: 57521 - protein, 403 aa, Moorea sp.
MIILEFKAYGKKHQCQAIDEAIRTAKFIRNSCIRYWMDNKGVNKYDLSRYSTVLGKQFPFANELNSTARQASAERAWSSIARFFDNCQKKVPGKKGFPRFKKHCRSVEYKQSGWKLCPDKKSIIFSDKKGIGKIKLKGTWDLWRFDKKQIKRVRIVRRADGYYVQFCVQADNCEELEPTGTAIGLDVGLKDFYTDSNGKTEPNPRFYRNGEKRIKFYQRRVSRKNKGSANRKKAINKLGRTHLKISRQREEHAKRLARCVVRSNDLIAYEDLRVKNMVKNHCLAKSINDAGWYQFRKWMEHFATKFGKVTVAVNPGYTSQNCSNCGEIVKKSLSTRTHVCQCGCQLDRDHNAAINILRRVLSTVGHTGTWVVDPNACGDLASTLPGSGLVEQVESVSQESPRL

SEQ ID NO: 57522 - protein, 387 aa, unknown
  TnpB Polypeptide
MLLVERHHIQGNHEIVKLCEISKELYNKCNYYMRKAWFGKELLPDINTLVQFVKNEPSFKNLHNTKTAKQTIRKCLTDWTNFKKSLKAWKKDKSKFLRMPKPPKYKDKMAQVIFYKETIKGGQGKKKLNTITPTNGCFGIKSDRDYKQVVITPKKFGFIVDVQYEQNVPNKSTNKGVACVDIGLNNLCAITSDQTTPILVNGRIIKAINQKFNKHRTKRESRKRYFRIENYFHHVSKFIVNWCQEHKIGTIIIGKNDGWKQRQNHGKRNNQNFQSVPFFKLIQKIEYKAMLAGIKVVFTEEAYTSKASFLDRDAIPTYDKGNNLEFSGSRVKRGLYRSSDGTLVNADCNGSANIGRKVIQNSEFLGRLDRSLAARPVRINPLKVSCV

SEQ ID NO: 57523 - protein, 381 aa, unknown
  TnpB Polypeptide
MSTAIKTLKLPFLRLNRAKAEEFAQLQTLNTTVANDILAMPKAQRRNLTSRSFAHIVIGSAWINQTIRNAKARTKVKKFQCLPLETNNQNWTLHKVGSTYSLGFGLLRGSKKRIPLAVHHASHSKVLDAMLDGRAAPGSLKLWRSRRGIWYACLSVSMEVPDADVTGRWIGLDRGQNVPIAAATPDGPVLFWKAARLRHVRRVYAARRKKLQAAGKHRAVKKLERRERRIVTHINHCMAKEVVALAQRLHAGIRLEDLTDIRRGAQQRRTTKSDAGQNRDYWPFYQLEQFIVYKARWAGIPIEKIPAAYTTQTCHRCGQLNPRKKHTYHCTRCGRQAHADANAAQNIRDWYGMCCPLVLEAPVDGPHGTALNTVRETAGSC

SEQ ID NO: 57524 - protein, 403 aa, Photobacterium sp.
  misc_feature (350)..(400): Xaa can be any naturally occurring amino acid
VSLDQLLICCLSLSIIRHLIRKDQMTLVAYKYRFKPSKEQAEMLEHTFGCVRFVYNNALAFSKEQYEQGNKTNFSDWNKNLTTLKKHADFSWLKNVSSVPLQQSLRHLDKAFKAFFKSGFGYPKFKNKRGKQSACYMANAFKFNAETKQITLAKMKNPLKVKLSRPFNGSPSSVYVSKTKTGKYFISMLVETEIQPLPIASKTVGIDVGIKSLAACSDGVVFNNPKYTKKYEKKLAKAQRKLSKKTKGSNNFNKQRIIVAKIHEKIANCRVNFTHKMTTKLINENQVICTESLRVKNMVKNKKLAKAISDANFGEIVRQLEYKAAWYGRTVSKIDQWFPSSKLCACCGAXXXXXXXXXXXXXXXXXXXXXXXXXXXXXXXXXXXXXXXXXXXXXXXXXXXISG

SEQ ID NO: 57525 - protein, 519 aa, unknown
  TnpB Polypeptide
MFVSLQFKLELKKEDKEKLIKLMRMQSSAIRVAYNMLKDLEKEKTRNPHAQIYHRLRQLFPDLPTKYIDSAIYKAKQYPTDKPVVFGSKRLFEKLCKNHLTGKAREKLKKQWRELRQGTLISIGSRHEAVKGNLLLRFMELDGKLHLRITTGNREFIYAKVLREPSNSKDKWLTFMAMLLESWQTKNYFAYTIELKLRDGEVYGSVSFEIPTPEVKYTKENGVIAIDTNASPIHLAIAEVSKAGELVSYQTISLHHLLGLSQNSKNYQEWILAHQLIDLAIQRNKAIAIENLKKLKKGTRGDGKAELRKILHQWNAKKFLQKLKRVAMLKGVEVIEVHPAYTSVIGMLKYAPQLSIDKDIAGAYVIGRRALGFKEDMPENYEKLLKDKAYLEFALKRYEEKEKELTELIEKESNEYKRNALNSELRNVENSKKLLTNFIQNLQSESSSCEGANGRNPEQGRGNLASSVAWQVLKVALLFPILGKVLPRDLSPLKPVLVEGVWDRVRSRLVPLEAGGTSR

SEQ ID NO: 57526 - protein, 407 aa, unknown
  TnpB Polypeptide
MLIYEYKLDARKEQYVAIDNALRVVQFIRNKCIRLWMDEHGVSANDLQVYCSTLASQYDFAMCLNSQARQASADRAWFSISRFYDNCRNHVPGKKGYPKFQHDNRSVEYKQTGWKLESDGRHITFTDGCGIGRVRMIGSRDLESCPLPQIRRVRIVKRADGYYVQFGVHAYREVEHVPTGKHIGIDMGLNAYYTDSEGNTVDNPRYLRKAEKRLKRLSRKHSKCAKKSQNRKKAQKKLAKLHLKVQRQREDFARKQASTLIISSDLIAYEKLSIRNMVKNHHLAKSISDAAWGVFLRWVTYYGGIHNVPVIAVAPNFTSQDCSVCGTRVKKSLSVRTHVCHGCGLVMDRDHNAAVNILDKASRTVGQTATATADVAVENASGHTASTRVSRGTSGKSSGRKKNSPSL

SEQ ID NO: 57527 - protein, 422 aa, Lachnospiraceae sp.
MKGNSYVYLTVKQQVKHLSKEDYRSIKELCHAAKNLANEAIYNVRQYYFTESKFLKYEKNYALLKNSHNYKTLNSNMAQQILKEVDGSFKSFFGLLKLAKQGKYAFKDCKLPNYLPKDGYTTLVIGFVRLNGNKLILPFSNSFKKTHKPVEIKIPPILLDKKVKEIRIIPKAHARFFEIQYTYEAECIQRNLNKNNALALDLGINNLVTAVSNTGKSFIIDGKRLKSINQWFNKENARLQSIKDKQHFCRKTTNRQKAIARDRNNKINDYMSKVARKVIDYCITNDIGTLVAGYNVTFQRSSHMGKQRNQNFVNIPYGLLRDKLSYLCELNGITYVEQEESYTSKASFWDKDYIPVYNNDNPKEYQFSGKRIHRGMYKTASGFCFNADVNGALNIMRKSSVVDLSILYGRGDVDTPIRIRVA

SEQ ID NO: 57528 - protein, 418 aa, Lachnospiraceae sp.
MLLSHKTRIKLNSDHSNIIGHMCYAAYKLWNVCNYERLHYKELNLSVDYPDWYYQKKAHKDDMWFKQLPSQTAQEVCKLLDKSWKSFFALKKSKGIENPKPPRFKHDGIAITYMQNAIVHEPGSHMIRLSLPRQLMSYMSENYGISDKYLFLENKIFKDTDAIKQIKIYPPENGLCEVIVIYEIADVQALDDNGKYLSIDMGLHNLMTCYDTDGNTFIAGRKYLSLCHYYNKEIARVQGQWAMIQVKKDVKYPKPSKHVLRLYKKKNDAILDYLHKVTRSIVNYCISNSINTVVIGDITNIRKDKNFGAVTNQKLHSLPYRKIYIMLKYKLALEGITLAGQCEAYSSQTSPLMPKVDKIHAVKSNRVCRGLYRDGINTWNADCVGAYNILRLYLDKNKIDMELDPMSIKIPYVIKVAA

SEQ ID NO: 57529 - protein, 395 aa, unknown
  TnpB Polypeptide
MITSIKVRLKPNNKQLTKLFRYADCARFAYNWTIAREQENYKQGNKFLSDCDLRKEFTQLKKLPEHKWLSEVSNDVTKQAIKDACNTYKKFFKGKCKYPKFKSKKRSPPSFYQDNVKIQFTETHVKVEKISMSQKRNKRKLNWIKLCEKGKIPTDCKYMNPRFTYDGIYWYVSVGVEIEDNDNDNANPQSNEGVGIDLGIKDLAICSDGNTYGNINKTQRVKKIEKRKRRLQRSISRRYEKNKKGASYCKTSNIIKRKKELLIVTKRLTNIRQNYLHQTTSEIVKRKPSFICMEDLNVSGMMKNKHLSKALQEQKLYEFRRQIKYKSELNNIPVIIADRFFPSSKLCSCCGNVKRDLKLSDRVYKCECGNVIDRDFQASLNLKVYGENVIKQSVA

SEQ ID NO: 57530 - protein, 398 aa, unknown
  TnpB Polypeptide
MNPYLVDRKRGESYIGISIEYRMYPNQAQEKWLVSTGNKLRGAYNLLVATHVKDKDFKDIIRKNAQTQKEVYDLITTTEWLKDVPTDLTMGVMSHFWVALDNFRKHKNRVPKFKKKSNLLALTSNNSNIGKVIKFDWSGNTFTLFPKILAKAGVSSNFKTILHRKFEGSIVKNISINRKSDGNWYVSFSFDTNGTMGLPQPVQSTKKLGIDVGIKDMAITSEADKFQVNLKKIKELEEKINKINKGISRKQRINKGNFMSRNYKDLLNRKGRLQTDINNLRKQTHQYATNVITSGEYGTINVEDLKLAFMLKNKHLSKSVSRIGISSFTTHLESVSKSKGIEFNKVNPKNTSRKCNCCGYINQNLKLKDRNWVCPKCGEVHDRDINAAINIRDLEISK

SEQ ID NO: 57531 - protein, 379 aa, unknown
  TnpB Polypeptide
MSTATKTFKLPFLRLNRAKAEEFARLQALNTSVANAILVLSKAERRTLTSKAFTHVEIGSAWINQTIRNANARTKVKQFQCLPLETNKQNWTLHKVGDTYSVTFGLHRGIKKRVPLAVHHASHQQWLDAVLAGRAQPGSLKLWCSRKGIWYACLSVSMDVPDAEPTGRWLGIDRGQNVPLAAATPAGPVIFWKAKQVQQIHRIYARRRKRLQAAGKHRAMKQLEQRERRMVTHINHCLSKDAVALAQRCYAGIRLEDLWGVRQRSRQRQAIKTDAGHNRDYWPFFQLEQFITYKAHLAGVAVEKVPAVYTSKSCHRCGTLGQRKKHRFVCPRCYYHAHADANAAQNIRDWQGLCCPLVLEAPADGAHGMPLNTVRKAAG

SEQ ID NO: 57532 - protein, 391 aa, unknown
  TnpB Polypeptide
MLVLEAKLKGKTEQYNLIDEAIRTALFVRNKALRLWMDVKDSDKYDLNKYCAVLAKEFEFAKKLNSQARQASAERAWSAINRFFENCKKKVSGKKGYPKFKKRGHSVEYKTSGWKLSEDRKHLTLTDGFKIGRLKLIGSRDLNFYQIEQIKRIRLVRRADGYYAQFCVDVDRREEIEPTQTTIGLDVGLNHFYTDSKGEVVENPRYLRKSERQLKKLQRKVSKRKKGSANRRKAIKRLAKKHLQVSRQRKDFAVKTARCVVRSNDLIAYEDLQIRNMVKNHKLAKSISDASWSMFCQWVEYFGKVFGKVTVAVPPQYTSQNCSNCGKQVVKTLSQRTHHCGLCGTVLDRDHNAALNILAIGLNRVGHTQIHACGEFDLYQLDASLSGKLSR

SEQ ID NO: 57533 - protein, 401 aa, unknown
  TnpB Polypeptide
MNPILERRCVGMRGFKLRLFPTEEQVVKLWQAVGTARWVWNWGVAYNRDLYASEKRIALEYELKKEFTKVRGSGKYPWLKEVASKVPAMTLMTLGQSYRQCFAKRKKGLEARLPRFKAKGAGKDSFGLDVSTVRFYKDGVSVSKIGRIRFKSGIPLEVLRNAKVYNPRITFTAGKWILSLAMPTNQFSVISSQLKEQLSTGNLQLATDRYAPPAGIDLGVKTTAVVSCGGKIYKAKNINRSHRMVRRTKQLKHQQRALARKKKGSKNRKKALHAVQQCHRKLTNIRSDYTHKVTRKIINLNPKVIVLEDLNVQGMLKNRHLARAVAEQNFYKFREFIEYKAEERGIEVRFADRFYPSSKTCSCCGHILKELKLSDRVYRCPQCGLVMDRDENAARNLEKAV

SEQ ID NO: 57534 - protein, 401 aa, unknown
  TnpB Polypeptide
VTQEFVKTYRFRLQPTQEQTTLLRQFAGACRFVYNHAVAKLHLDAAPEHVVYNSLSKWLTALKRESDLSWLSEAPSQPLQCALQDLAQACRKVSTERRRGRNVHLRFRSRSDGLGSIRFPQNVRLEEAWGTSKLRSYVVLPKLGVVEYRRSRSIPKTAKIAQATVREECGKWYISIVVRETLDVPNVNDTSAFGVDLGVRHFAVLYDGVNTLFCDIPETMKQKLHRLDERIRRLQSVRSAKIERKAFGSAYHKLCKKIRKLWLKVRCIRQDFLHKLTMWMAKSQHHITVEALKVQRMTSAEGERKRSLNRSILEQGWYLFRTFLRYKLERAGRYLTEVNPAFTSRTCSMCGNCSKSNRDGEQFKCSACGHEDHADANASKNIWAAGQAVLRGLLVPMLADR

SEQ ID NO: 57535 - protein, 418 aa, unknown
  TnpB Polypeptide
MADDYVRRTAITRLEVTDEQRDLLEETISEWKRGCQLATDMAWGKCNAKSDVQPLAYDDVREHTDLGSQHAILATHQAAQAITGCLERRSNSKKASKPTFSAPTVKYDTRTMTLFDDDTVSLSTTESRVRCPLALPDADDGYQRQYLDSDEWRVTESTLTARDGDYFLHIGFRRPKNDTERNTAEDGTVLGVDLGIEHLAVTSTASFFSGRELTHDLREFEKVRAGLQQTGTRSAHRTLEQSSGRELRYVRDVLHRASNAIVDEALQYDCDVVAFEDLTHIRERTGAAWGHKWAFRTLYEQVEYKAEAEGISVKQVGSAYTSQRCAECGFTADENRPTRNDFQCQKCESEANADYNAAKNIGMRYVRRGQQSSRRTGNSQLALKSGTVTPSGGFTAHPDGFEAELTDKPHPPRANPSG

SEQ ID NO: 57536 - protein, 277 aa, Streptomyces sp.
VIAETPGYPRFRGVNWFDTVDFPKDGDGCRWNPTPHDSVTRVRFQGFGHVKVNQHRAVAGKVKTVSVKREGRKWFVVLTAEQDRPEPLPPTGSVAGIDLGIASFLTDSNGVHVPNPRHGRKAAAKLETAQQALSRFPRRKAEDRTKNHQRAVEKVATLHGKVRRQRLDHAHKTALALVREHDFIAHEDLEIRNMSKAPTPKPDPGMPGIFLPNGAAAKAGLNRCIADAGWGVFLTILYVKTESAGREVIAVDPRNTSRTCPECGHTAKENRPTQGCR

SEQ ID NO: 57537 - protein, 629 aa, unknown
  TnpB Polypeptide
MSQSTTQDSKIPKKETSTTPDTTRFEPTKEDTTPQKIMKSKEVMPSEEIRAEITRIFTEKQWTVIQQPDKTMKNNTHIDIIAITITLTAAMKYCYHILPIKLVPLRGTLVYGTQRFSYLGHEQKWTDQKIVDEYISEFLLDVEQLKSFVNSNSAEFRALSDTRPIHLTETKDEKGTISYHYEKRPAVIAIKPIIIYTGSLEIEKCADHLPIKYIENLGLYVCEPKKITMLIEYIMTKRDRASVSPVLSQIRQDIEHIRTQIWGRKKKLLLGVLCFQFLTLFLSVGQILSDATYLTLTIIPIVPVVGFWLYVNHSNREIPIIRGERDLIRPQNERYLQPHIEWMISSQSDDFIAQYLMGRVVCENLKGFKGRGADLFSQRVSGSSSWSLTGQFRSRIKLLCERFGLGLSFVSPHYTSKIGYFADDNEPEAVAGYYASCKIVNGIPVLKLFDSPRVEVAAGSITSYLQSARSVVYEYRDGRFVGKDGAPFPGKKLSRALLRVFKVGRGFQPGDQYVEVSSGKWVRYKRTSDIYYLDRDYNSSINLAAYNEFGFTIKRLVVMRNRVSSGVREDESKRRLSSFGVHFLSLCKSLEKKNIRYLIDYAGVGANVKGFFQSSYKSLGIDSIPDSFK

SEQ ID NO: 57538 - protein, 491 aa, Caldivirga sp.
VPGVVPPGGGFLALDEPVGRYPTFFTTLGTISSSTPKSKGRKSRDGDEEIRTVRLRLLPNGAQEGKLQRIADATAKLWNELNYARLVQFRASGKVDFKGTGHEFYYKYNVVLSVNAGVVIQLNNQAWMSFFKLLKLHRQGKLPRFYGKPSPPGFWKDKLLGKRTLRILVRNDRYYLEPINGGEGYVILKDWGLRVRYAGRVKWSGKQGMLVIKLEGNRWFAYVPIEVGSKSAKSNPKGYVRGVYERIQIEKPRGNNKAFIDVGLNNLFAVVFNHTDTAILIKGSTIKAEYYWWKREVKTYQAVRDWLRNRGFNAWRKYHAFYLHAVFKRKERLRHYYRTAIRFLARTMHEMGVNEVFIGYPYLVSQDDGNEYNTNVWWFSKVINWLNDVLEEYGIKLRVVNEYGTSKHCSICDMKHENGRVKRGLYICPVTGIKINADLNAARNIAKRVGYNTPIPRKILTYMVTTNGVKPLTPKEGETTKTPKINPTSPR

SEQ ID NO: 57539 - protein, 380 aa, unknown
  TnpB Polypeptide
MDRTLRLPLNPTTEQAEALLETMRQFTQSFNLVCAEGWRLREGNAYTLHKLTYRDSKAICPKLVSDLHVQARQKASEAVKSALTWSKKKSNVGCPQSTLCPPRYNCNSFSIDWQKGLANLATVAGRQKVSFTVSAYALALIGNRVATADLMYRKGRFTLHVVLKLDDVLFADTSTALGVDLGVCRPAVTSDNRFHGKKHWREVEKRRFRLRRKLQSNGSKSAKRHLRSLAGRSQRFRRDCDHVLSRSILHGIAAGTTVVVENLTNIRTRVKATRGEAKRRLHAWSFAQLKGFLEYKAEALGARVIGIDPRHTSQRCAECGFTYRGNRKSQSDFCCRSCGHKQNADLNAAKNIRDKHLVGWVSDPSDGPPSIGLLSQSLLA

SEQ ID NO: 57540 - protein, 427 aa, Metallosphaera sp.
MKRSNVVRLVVDKQTAMTLRKLADVFRACWNSVNWLRMQQYKARERVDFNSTEKEVYHKFKDALKVNASQVIRKNAEAWRSFFSLSREKRDGRLRRWFRPRPPGYQKQGMILIRNDRYVVDEDNTTIYLKDFKLSLRFKGMLKWKGKQGRLEIFERNGRWYAVIPVDADFTPSQPRGDLRASVDLGIVNLATVYVEDGSWFLFKGGSALSRFEYYSKKIARVQKLLSIHKQRKSKRLSRLYEKRSRFLRHALNSMVRKLIKTVHDKGVSEIVVGYPKDIARTKGRKLTVNFWNYSYVIRRFNEVAEEYGIKVVEVDEAWTSKTCSLCGEIHESGRVKRGLFKCPHTGVINADLNGAINILHIPESQRGGEGGFLPPRDRGNGHKTVPVVYRWTNGAEWRGSSSTSDEMMRVKAVNHKPMIPKGTFVL

SEQ ID NO: 57541 - protein, 345 aa, Chloroflexaceae sp.
MSYCASLAWEQAVTNKNKLHTLVYHATREQFGLGAQLACCARDKAAEAVRAARSNGSDTCPTFTTDRSIRYDARTYRLMSLDRVSLNTMQGRVVGQLVLGEYQRTRLYDTTWKIGGAELIRRDGVWYLHITQTKANPTPSEPTGVLGVDLGIVNLVSDSDGEQYSGEQVKRVRERRFKHRQRLQKRNTRRARYRLRQLARKEARFAKDTNHVISKSLVEKARRERKALALEDLTNIRKRGTVRKAQRREHSSWAFAQLRAFIVYKAALAGVPVQFVCPRNTSRTCSVCGHCDKHNRRSQGHFQCGVCGHTANADTNAAINISRAAVIQPLVLRPTGEERAQAAAL

SEQ ID NO: 57542 - protein, 401 aa, Rhizobiales sp.
MLIAHRIALDPTDKQRSYFARASGVARFAWNWALAEWQRQYAARRDDPSLPQPSDAALRRQLNSLKREQFPWMFDVTKCAVQEAIIDLGAGFRSFFEQRGRYPRFKKKGVRDSFCAANEAGTFRVDSQRIKLPVVGWVRMREAMRFTGKLKRVTVSREADRWFASIMVETNDIKPVEQPHDAVGVDLGVTTLATLSQGDPIPGPKAHTALLGRLRRTSRALSRKRKGSANRRKAKAKLARLHSRIAAIRRDATHKATTLLAKTYRLIGIEDLNVRGMVRNRHLARSIMDGGFFEFRRQLDYKARFYGATVVVADRWFPSSKTCSCCGSVKAELALSQRTYHCDTCGHEVDRDRNAARNLEHLAASSAVSACGEERSGVVRKPRVKRASAKQEPNSNLAASL

SEQ ID NO: 57543 - protein, 576 aa, unknown
  TnpB Polypeptide
VRTTGGPGTGPPEWGGRRPRSRGVRPWLTWSSRCGRGRSWTCDRPVRPRRALPRGSWKRWPPRPGSRRRRSAFPRPLRGCRSCRTDERSSVPKKEMSSGIRAARGISFWDFIPRGEGGPLRLGSSFTFHQERKRLPLSVHSVLVDPRRSLVFRLPPEPESPPPSVRLLMDDFRLLLNQCLRHALSTRLTSRGAISRFARTQAAEARVTGTMGVAAAEIAASLASGHRSRVRKGVASRIPYVRTPFVRIPKESFHFDPETGKLRLSLRRGEWTSLTVPVSNYHRQVLAHPGRRVTQVHIGLHRVVLVYAQVPPEPYAPKSIVALDSNEASMDGVQVDSDGAFYVRVHFPEIPRIQWRHMGRRQYLGRKKSHDRRLSRWLLGREGRREHDRVRSRLHELTRTLIDRLASTESALVLEDLKSLQTPRRRGSLSGRRPPFRSRRLRRRLSSWPRGELHRQLTYKAQDRGVPIIWVDPYRTSRTCPRCGEVSEHRRRVGTRFDCAKCGWSCDRQLNAGLNLGITALRTHAGLGGLRLDPDALPEDVVRPLYGSANDRPARVERMGREGRGSNVSRNREASE

SEQ ID NO: 57544 - protein, 401 aa, unknown
  TnpB Polypeptide
MLVFEAKLEGKNEQYERLDEAIRTARFIRNSCIRYWMDNKGTGRYELSAYCAVLAKEFPWANKLNSMARQASAERAWSSIARFYDNCKKTKPGKKGFPRFKKHETHGSVEYKTCGWKLSEDRRTINFSDGFKAGSFKLWGTRDLHFYELSQIKRVRVVRRADGYYVQFCLDAERVEKRKPTGKTIGLDVGLAHFYMDSDGQTIENPRHLRKSEKALKKLSRRLSRAPKGSKNRAKSRNRLSRKHLKVSRQRKDFAVKLARCVVQSNDLVAYEDLQVRNMLKNRKLSKSISDAAWTAFRDWVEYFGKVFGVVTVAVPPHYSSQNCSSCGKVAKKSLSQRTHQCPHCGFVLDRDWNAAINILELGLRTVGHTGTLNASGDIDLCLSEETPSSKLSRRKRKPKQ

SEQ ID NO: 57545 - protein, 261 aa, unknown
  TnpB Polypeptide
LSPALRKRGKKWYLDFSFEEKVILDKVSLDTQRVLGVDLGINNACVCSVMDSKGTIIGRRFKKLPVEQDSLERALRRIRKAQSNGAKRMPRLWARAKGVNKDIAVKTAGFIMTVANEFKVDVIVMEHLDLAGRKRGSKRQRLHHWRAKYVQQIVEHQAHRCGTRIRRVCSWNTSKLAFDGTGDVTRDTDNYSMCTFQTGKRYSCDLSASYNIGARYFLREYEKSISATRWRRIAAKVPSCATRITRTLNTLIRVNAELRSM

SEQ ID NO: 57546 - protein, 493 aa, unknown
  TnpB Polypeptide
MEDKIKLTVRAVIPPRDLGLRKLMREYKAYKKALIPRVREAVREVIKDRSIRVYAQQKWMIEKKLLEYLKNLPFHPMPFHNQSVWIENKDGDFWIHFKTKEGEAICYLLVPAKYRSLIEKACGVDNPVLGQVELIEDRKYGWVNCHICLRLPKPEPYEPKGWVGVDVGWNKLATSILCTANPHVKFSNPTFHGKQFKTRIIQLRYLLKQYARKGKSWKKWNHRLKNTIKYAIGVTAKEIVSKAKKFKAGVAMEKLTFKSTTKGYLVPRYKLMIAVKTLCEREGVPFKLVPAQYTSVTCPYCGYRDKKNRNGKWFKCLKCGYQTDADLAAAMNIALRAFDSSPDGGEIGTGHAPCLKARGLHAPERGDVATPLRAMRDVPLERAANTTMYCNCSQNVHTVTMPHTVDCKLQHAAQRALAYIGPVTMPHTVNCELQHVPHSHRSHGSQGVTMPYTVGCELQPPNACSTMYLTAPLIDNPRFTANFSTRSYSFRGM

SEQ ID NO: 57547 - protein, 389 aa, unknown
  TnpB Polypeptide
  misc_feature (362)..(369): Xaa can be any naturally occurring amino acid
LFEWLAAHAPLWNQINYRRRQQYFDEDGDVWDAKYTDLYDKYAPIIGKATCQQLARKNSETWRSHFRLLELYHDDSNTMVTEKPSPPGYWGTRDEGYELHGLVRNDLYTFDWDEDQSTLEFGVGDVLEDRYDFEHNESVTLEVKGNPQWNGTDSRLELVFDEHADRLRVQHPVRIQPAKLTEQRQEAFTHTLDSENTTQAAAIDVGANNTLAVVTETGDTAVYHARPEFKRFQKYSKRIATLQSELPDDVYTSHRIQRLYDDRSQTRDHSRDAAVKHAAEWLLERNVDTVYVGDLTGVLEAHWSTSVNEKTHAFWSHQQLVDRIELTLGDGGITVQEVSEADSSSECPECGSPNVTRDGDSXXXXXXXXSISGFRSDRSPRDKIALSSN

SEQ ID NO: 57548 - protein, 356 aa, unknown
  TnpB Polypeptide
MRRKSISVSSQMVQLKAIRTLRPDQGVWSFTSQQQTLRRLDKAFGAFFGRVKAGETPGYPRFRAASRFDCVDFRHGDGIKFLPASKRLKVQGVGHVQVRLHRNLPENATLGQVSVKREGSGRATRWFVVIPVQVAPEPLPMTGVVTGIDMGVASFLTTSEGVHIPNPRHLKAAASKLAVAQKDLAAKKRGSNRRKAAVSRVAALHGRVRRQRLDHAHKTALRLVREHDLICHEALQILNMTRRAEPVPDPDQPGAFLPNGQAAKTGLNKSILDAGWGVFLSVLTAKAEKAGREIISVNPANTSRTCPQCGHCAKGNRPCQAVFTCQRCQFTGHADTVGAINILRAGTALRTTAQAA

SEQ ID NO: 57549 - protein, 514 aa, unknown
  TnpB Polypeptide
MRAQTPSYVVSTKIQLPESIANLLEKSFRISNSAYNEALSFGLKRFEALKRNSTYQELLEARRLALKGIAKLKKAEKTTKGLTQQVKCYNKVLFELRKAYGLTEFGLSAHLSQQRRKSSSSYRQMSAGEIQVIAGQAMKTLEKVLFYQIKPDKVRFRSKFDLDVSYRNRVNTEATRLVPSDRKGITYRLYIHKASTFVDIPVKAFNHYQQMSLMRSEKIKYVQIIRKTIRGKRVYYLQIVCQGFPSSKVTKGEGVVGIDPGISTVAFASPSEVALVDLVPKNIAQKEKLLKQLDRKIERSRRVNNPECYDECGKIKKGARFKRPSNRQMRLRNRRRKVYRSLSEERKKLQGQLVNRLVSQASIIKMEELGVKGLQKRSRDIRINPKTNRPFSKKRFGKAIFRAAPSSFRTALETRAFQLGIDVEVISPKDVKPSQYNHITQTFEKKSLSTRVYDLSDEYTGVQRDLYSAFLIGHIENGHYQQEQLEQDFSSFYEQMKDFLQQPIETERLAWYLN

SEQ ID NO: 57550 - protein, 388 aa, Firmicutes sp.
MARKSRAAEGQVIQYTTLKVRLYPTPAQAELFEKTFGCCRYIWNQMLSDQQMFYAETGAHFIPTPAKYKKGAPFLTEVDNQALIQEHNKLSQAFRVFFKRPEAFGHPNFKKKKTDRDSFTACNHVFESGPTIYTTRDGIRMTKAGVVKARFSRRAQAWWRLKRITVEKTKTQKYYCYILYEHSGKQPEPVIPTPETTVGLKYSMRHFYVADDGTTADPPRWLKQSQEKLVRVQQKLARMEPGSRNYEEAVQKYRLLHERIANQRRDFLHKESSRIANGWDAVCMRDDALAEMSKGPLRKDAASSGFRMLRELLQYKLERQGKRLILLDRYAPTTRVCSVCGQLQDSVDYGARTWTCPKCGTVHDREVNAAKNIKLEGLAQFLPTASPA

SEQ ID NO: 57551 - protein, 393 aa, Burkholderia sp.
MCAFEADDLLMLCADAMPIPVFGKLSESSVTLRNPSIYGRDDTSTVDKRHANVGMIDMILVYRYRVKSLNGLLNKQSRAVNYVCNFCNDTQKHTLKWNKKWPTGFDLNVLTTGSSKELGIHSGTVNATCEQYAKSRNQYRRPYLRYRGRKSLGWLPLKGRDPKREGGAFRFTGNTFRAFRSRTLPKGKIKDGTNFARDARGNWLLNIVIEMPDVQARRIRSGVGIDLGLNDFATLSRGENLPNDRLGRRAADCLVKAQRACKHKRHIAKLHAKSANSQADFQHKLALDLMRRFGYIAVSNVSAARLARTRMAKSVYDASWSSFRNKLRYKAMAHGVTHEEMDESGSTRSCSACGSRDSTTRPKGIAGLRIREWVCRDCGVVQDRDTNAALTIL

SEQ ID NO: 57552 - protein, 412 aa, unknown
  TnpB Polypeptide
MSKVTIPGYICEISEGDREELEKLMFKFGKARRRAYSLKQKKYTKSEIVKILQDEIGLNARYISSAYDSIKSLPPHVTFGGLKNQRLREKGKISKEEYHRRRNSIVISRGEKSKNGNLNMRLTERMELRINTGEDRKWIYPKIYIPKKYLEKYGRLLDGSAPYTVLIKRRNDGGYDVRITVEVQTEVKEGKRVMALDINAGHIDFAVVEKDEPEVIATGRIEVYETQYVRRSKREYQIHQAVDKIGNVAKHYDADVIVGKLNTGSFNSNNKKANREVKNMPQHKFRQALKKLEQRGIKVEEKSEKNTTKVGEMLSPLIGLDIHKCSAIAFALKSISYNLFRHFITLLSVVSPDEGDGSQRGRRRRGKRANCPCPAHSWAAPQSGYPAMPGSWGLSFLERLKAGLPCLRVKVC

SEQ ID NO: 57553 - protein, 403 aa, Nostoc sp.
MLVFEAKLEGTKQQYQSLDEAIRTARFVRNACLRYWMDNRDIGRYELSAYCAVLAADENLPWVDKLNSMARQASAERAWSAIARFFDNCKKSKPLKKGYPRFKKEQTHGSVEYKTSGWKLSVDRRYITFSDGFKAGTFKLWGTRYLHFYQLKQFKRVRVVRRADGYYCQFCIDQERIEKREPTGKTIGLDVGLNHFYTDSEGNTVENPRHLRKSEKSLKRLQRRFSKTKKGSKNRAKFRNKLARKHLKVSRQRKDFAVKLARCVVRSSDLVAYEDLKVPNMVRNRHLAKSISDAAWTQFRQWIEYFGKVFGVVTVAVSPHGTSQDCSNCGEVVKKSLSTRTHICNHCGHIQDRDWNAALNILEIGLRTVGHTGTLIASGDIDLCMGGEIPPSKSSRGKRKSKK

SEQ ID NO: 57554 - protein, 910 aa, unknown
  TnpB Polypeptide
VEESASGREVAGSRLETVDAPPAAPAHEVADTRLGDHPRVEVVVGREHGVHRMPGDEGFDQVLEGDLGHAAVAEAHEAVLGGGGMWRVVHGQHLPPGARRAEGAIQPLDLDPVGAERVLALRTRERIGVEDEDLQQGRRAGVAHDRVVAVLGRVPEGPVTEVLLHVAAAPVDAVRAGGGGQRVGAGPLAFLDVVVAERRMDHHSPQQERPVDLVEAGADVGAPAVAVDVVAEQEQVTGQEAQDLVADRRLVGVAGAAVADEDHAHVGLLGPGAHDQDTRHREQAGGHGEASPGRQERDQGSAHPPSSPSPAPRGKGGARTGGSTGGACGAAICPTICGHSWTIASFHDVERLVRPAGDLPYGLAVVPSGHAFGPGGADGERGHPGEQGAAAPSAAGLYARPSPSRTTSRTLTGRSARSSPMPKRAGWLSPPRCPRSAPVSRAADRSPSRLALADPSVQTMVIEHRDKLTRFGGGRSWPPCRCSARSRASKGLGHDQGEVIAQQAFRYELAPKVGQRLLLAKHAGCARFAWNWALGERIQRYRERESKQRFTNAIEQHRELNARKGREWPWMYEVSKCAPQEALRDLDRAFRNFVRARRSGRHCGFPRFKRKGADDAFRLTGSIRVVARAIQLPRLGAIRTKEGTERFRGRIHSATVRREADRWYVSLTVEVERPEPAPILGPVVGVDLGLNSFAAISDGERELAVAAPKPLSRCLRRLRRRSRVHSRKTRGSANRRRSAVQLARLHRRIRNMRTDFLHKLSTTLAKTKSVVVLEDLNVSGMVRNGHLARHIADAGWGAFRRMLEYKSRWYGSMVVVAPRFLPSSKTCSECGHVLESLALSVRQWVCPACGVEHDRDGNAARNLVAWYRLSTGSSPGSDACGEPSGGAEAEASVSHGSAKQESAVEGLSIG

SEQ ID NO: 57555 - protein, 411 aa, unknown
  TnpB Polypeptide
MEVRRTVPVKLEVTDSDADSLRETIQQFLGAANYVVDAAYDGEWVETRKSVLHDETYADIRDRTELHSNHVQSARDRAVDALKSTVAKWQRGKTASLPTFTSPFCEYNRRNATFHDDHATLSTVGGRITAEYVLPDEDRDTPHSQYLCSDDYETTGATLHYREAADEFYLHVRTKADVDDPDPPENGTVLGVDIGVENIAVTSTGVFWSADELDHWHREYEKRRVSMQQRGTRDAHDAIQRVGETETGRVEQLLHCVANELVDEADERGCSHIAFEDLTDIRDRMSGGKRLHAWAFRRLFEYVEYKAEECGIAVERVDPENTSRRCSSCGHTAKTNRPSQETFECQRCGYENHADYNAAKNVGYRLLRDQTGSGGGAPVGVRLNTGMMNANGVMPVPESVRAGVHGESPRR

SEQ ID NO: 57556 - protein, 374 aa, unknown
  TnpB Polypeptide
MLKSLKYRLRPTKKQENILLAHIDQCRILYNQFLCARIQAWKNENKSLSEYDQTNTIPMMKEQHPEFKQVYSQVLQQVSARVDLAFKGFFRRLKEKSKTGEKAGFPRYKNQGRYDSITYPQFPNGCRLDNKGLRLGSIGCIRVVQHRPLEGIPKSCTITRTATGKWFASIPCDIGEKDKKPNAGSAVGIDVGLNSFAVTSDGQKIENQRFFRKEEKTLAKAQRKWDAVKKSSKTDPTREKRRKVIGRVHERIRNKRHNFAHQESRKMVNRHGFIAVEKLDVKEMQQNRRLSKSIADVAWSLFRRCLEYKAEEAGIGFKAVKPDYTSQDCSACGHREKKSLSQRVHQCKVCGYTTDRDHNAAMNILTLGLQRQAD

SEQ ID NO: 57557 - protein, 385 aa, unknown
  TnpB Polypeptide
MILRAIKIRLYPNKTQEQTLNKVLGCYRFVYNKMLALKQEGYNRDKSNLGLCELSKFFHGELLKKSEYSWLKEQNTKVMKQAIRQMLSAYDGFFKLGKGFPKFKSKHDNNSALFPCEAISKSNTFETKHISLTKSLKNIKFRCSNLYFERLQRYKGNIKSATLSKTKSGKFYLSVLMSMNEEEFKQFSHTNNSVGIDLGVKDFVITSDGEVFKNKHFFKESENRIKKLQRQLSKKVKGSNNRDKARTKITKEFEHLTNQRIDYIHNVVNSLLRTYDYIFMEDLNVQGMLKNHKLSKAIQELGFYAFKNTLKNKAMLNDKFVIEVDRWFSSSKTCHKCGYVYKGLTLGEREWTCPICGEHHDMDLNAAMNILLEGQRMLNNKANEI

SEQ ID NO: 57558 - protein, 508 aa, unknown
  TnpB Polypeptide
MKLTSRCLLFNISDEHFQIVTNMMRHFCPAKHFAYKRLEENISNNEFKIHNLDASVSKLYNLNSRQAKDSIEQARQTIISQVKLLDLRIAEYEGKVESVLRIFKKGVTPKQRIGLISKLDKRLRKLCGYLNHKRNGTLPSVIFGSKENFYKRCKNQITKEEYQQRRNNQFVAHGDKSKKGNPNLRIIIKDELSFLEITTLESTSSQPRLKPDGTMTKSKATYKKILTPLYIPQKLSKKTGKINGFNYKAALLTQVLKEAPYQVELLLKDGKIYAHVTFDIDEAEITCTGHNNTIGVDTNPDGLALTMIDNTGNYKWHYYLKNAELLTAKGNRRNNLCGEMIKTLILIAKSYGCAVSIEDLKFINDRDVHSKIARKTAQFCYRILLNMIESACLKNGIELIKVKPQYTSKIGLYKYCQQFGLDVHNGVAMVIARRSYGFKEKIPRLYTKLYKSIPVIKKGELTYENISYSNEWSNWANVSKIMEMVLRKDCYPRFFIENRKDIKNFILA

SEQ ID NO: 57559 - protein, 252 aa, unknown
  TnpB Polypeptide
LRFSYTEEVSLSKKEVNEQIICSVDLGINTDAVCTIMRADGTVLGRKFINFPSEKDQMYRVVGRIRRFQREHGSGQVQSRWNYARRLNMELSRKVASAITTYAQNNRVDVIVFEYLEMKGKAAGKKKQKLHLWRKRDIQKLCEHQAHRIGVRVSRVCAWNTSRLAYDGTGEVIRDSENHSLCTFTTGKRYHCDLSAAYNIGARYFIRERLKPLSATVRSSLEAKVPSVKRRTSCVYADLLLLSAELGSMQAA

SEQ ID NO: 57560 - protein, 444 aa, unknown
  TnpB Polypeptide
MAKSAVKRTFKYRFHPTHAQAAELPRTFGCVRLVYNRALAERTAAWFIEQRRIDYIESSAALTAWKKDPDHEFLNEVSSVPLRQGLRHPQTAFRNFFDKRTRYPKFKSKKKSKVSAEYTRSAFTYRNGQITLAKMADPLHIVWSRPLPKGAEPSTVTVSKDSAGRWCVSILCQDTISHHAPTHSVVGVDAGITALMTLSTGEKITNPRHERRDRARSAKAQRSLSRKQKGSANREKARKRVARVHARIADRRKDFPHKLSTRLVRENPVVVLEDLTVRTMVKNRGLARAILDTAWTRPRSMLEYKTAWYGREPVTIDRFFPSSRLCSACGALQEKLSLDVREWTCACGITHDRDVNAAINIRAAGLAASACGAGVRPQRESSRTGRSVSKQEPPRATAGIPSLEGREEVKSTSCPKREVAESTRALRTKGTTFRVRVSTAVPSR

SEQ ID NO: 57561 - protein, 269 aa, unknown
  TnpB Polypeptide
  misc_feature (235)..(242): Xaa can be any naturally occurring amino acid
MHQENTMLPRRISVSLFIDQSIIWPVKRLQAFKFQLRPGGQQEHEMRRFAGACRFVFNRALALQNENHEAGNKYIPYGKMASWLVEWKNATETQWLKDSPSQPLQQSLKGLERAYKNFFRKRAAFPRFKKRGQNDAFRYPQGVKLDQENSRIFLPKLGWMRYRNSRQVTGVVKNVTVSQSCGKWYISIQTESEVSTPVHPSASMVGLDAGVAKLATLSDGTVFEPVNSFQKNQKXXXXXXXXTLQHQWSGWMLAWLNSPRCQMAQSLSL

SEQ ID NO: 57562 - protein, 405 aa, unknown
  TnpB Polypeptide
MKIRGLTKKQFEHLKALCHASKNLYNQALYAVRQEFRNTGKYLSYGETDRLMKETLNLEGEINYRKMKAGVSQQILRRLDKNYRSFFKLVKNPPANMRPRPPKYIKEKFHNLIFDCQRFQIKDGRAVLDKVLSVKIPGCLTGKKIVQVEIIPKFRQFNACFVYEDDTIYKQVDPTGEVAGIDLGLNNLAAVATTEGDLLLINGRPLKSINQFYNKKIAGVKSELKTRNNQEWSEKAQQLTDKRNNKIADYQHKASRAVVNFCLEKNVSEVVIGNVSESVNGISLGKRTNQNFVNIALGQFVSKLKYKLEAHGIKVVMSDESYTSRASFADNDPLPEKYEPEKEHRFSGKRIERGLYRTAKGILINADLNGAFNIIRKAVPEFDFQKLKDGIEGLFNPHCRLLTCK

SEQ ID NO: 57563 - protein, 428 aa, unknown
  TnpB Polypeptide
MAKAAKLMGVQQCLITPDKDLKAILEYICSESNKLHNCAVYYARQIWFKTKRFVTDFDLVNELGSNRHFSALPSEAAVQTCLSVGESVKSFSALLKKSIKGELQQKPKIPNYRKQGFQLVAFPKRALRLVGDKIRFPLGLQVKAWFGLKEFFLTMPSNLDFASLKEVRILPRNGVFYAEFVYPVEVVQTELDHCKCLGIDHGMNNWLTCVSNVGTSLIVDGLHLKSLNRWYNKRVSVLKEGKPNTYWTKRLANITEKRNRQMRDAVNKAAKTMVNHCLANGIGTIVFGWNKGQKDSANMGAKTNQKFVQIPTAKLKDRIKQLCDIYGIQFFETEESYTSKASFLDADTIPIYGEKPELWKESGKRVKRGLYRSANGFLINADCNGAANILSKVAVTLGLDLSGISRGALTTPLKSKLWASQESQSLQR

SEQ ID NO: 57564 - protein, 444 aa, unknown
  TnpB Polypeptide
MQQIITAKLKLLTTTAQFQALRAAQLAYRDALNAVSSYAFEQGKTSSTVALHQGMYAELRTRYHLPSQLACSVERQVAATYKGLWTKFKKNAEHRRKNITKKRFQGLDKPPKYSSPTVQYTYERDYTFQRDSRVNLGTLNGRITIPYQGYDKHIALIRHGASIGDAKLWYEKARNTFYLLVSLEISVPEPTCEQLSEVVGVDVGIRYLAVTSTATGQVTFHPGKRVRHQANHYARLRKRLQKKGTRGAKRRLKRIEQRERRLKLQANHSIAKQIIKQHPYALIGLEQLTDIRERKRRRKRKRKKHGTGYERVSPKARKANRVYSQWSFAELHALISYKATLSGSQAIKVDADYTSKACPRCGHTADENRPHKGLLFVCQQCHYTLHADLVGARNITMRTLVLRQDWSTTGHLSLAPDASDNEAKAVRLKRYAELRWSPDASSRL

SEQ ID NO: 57565 - protein, 527 aa, Azospirillum sp.
MRAATPSFIAEFLLRTNAVDERVLAVRFEAAHHIYNACLGEALRRLDLMRQSKDWQSARAMLKGKQRTALFKATMLRFGFFSASVQKHAEACRDACWIGQHLGSHDTQTTSLRAFKAVQMHAFGKRGRPRFKGKNRLHSIEGKGDAVIRLRWQDDRPIMLWDGLALPLKLDPCDRDGWQRQALSCRTKYVRVLRRSVRGKTRWYAQLVQEGLAPRKERLPVGAGIVGLDLGPSTIAAVSDTDATLEPFCPGVADMDRVIRRLQRAMDRSRRATNPDAFNADGTYRRGARIAVRSRRYRVLAAKKAEVERCLAAERKRAHGELANRVLAQGNTIKTEKVSYRSFQRNFGRSVKRRAPSLFVSILKRKAASAGASVVEFATRTTRLSQVSHDTGECVKKPLSQRWHVLADGSRVQRDLYSAWLARFVEQDRLDAFQCALHWAAAEPLLKRAASSFNQSASGAGFALPHVRPGNRGGVGADRPLQGEGRWTEAADAVAQAGAAERSGTDTPRTPGVSYGEVQRTWRDYLC

SEQ ID NO: 57566 - protein, 288 aa, Bacillus sp.
MMINKAYKFRIYPNKAQATLINKTIGCSRFVFNHFLSLWNNAYKETGKGLTYGTCSAKLPAMKKEFVWLKEVDSIAIQSSVRNLVDAYTRLLKKQNNAPRFKSKKNNVQSYTTKQTNENIAVVGNKMKLPKLGLVRFAKSREVKGRILNATVRRNPSGRYFVSLLVETEVQELPKTNSYIGMDVGLKDFAILSDGTIYKNPMFFRLLEEKLAKEQRVLSRRTKGSSRWNKQRVKVARIHEYMTKARKDYLDKISTEIIKNHDVIGIEDLQVSKMLKNHNLAKAISEVS

SEQ ID NO: 57567 - protein, 414 aa, Natronomonas sp.
MEKRRTVPVKLDVDSADAALLEDTIDEFLWAANCVTRHAFEGEYVTTSKTTLHDDTYNDVRDATALHSNHVQAARNKAADACKSVVKKWKGGKKASMPYFTSPHLVYDHRTATFHDDYVSLATVDGRIEADYVLPDEDSETPHADYLFSDEYETTGAELHRKHGEWQLHTHCKRDVEPDTLEQASTENGTVLGVDLGVTNLAVTSTGQFWTGDEFDHWRKEYEKRRGDLQQCGTRWAHENMEAVGRKEDGRFKQTLHRIANELVAESREYRCSVIAFEDLTDIRERTGASWGHKWAFNRLYEYVEYKAAEYGIDVEQVDPEDTSRRCSHCGFTHPENRESESFECLKCGYENHADYNAAKNIGLRYLRCNQTGGDGGASVGIALNSGMLNANGAYTSPAEDSARAGVHAESPPL

SEQ ID NO: 57568 - protein, 270 aa, Bacillus sp.
MEVNEMMINKAYKFRIYPNQAQAILINKTIGCSRFVFNHFLSLWDHAYKETGKGLTYGTCSAKLPAMKKEFVWLKEVDSIAIQSSVRNLTDAYTRFFKKQNSTPRFKSKKNNVQSYTTKQTNENIAVVGNKIKLPKLGLVRFAKSREVKGRILNATVRRNPSGRYFVSLLVETEVQELPKTNSYIGIDVGLKDFAILSDGTPYENPKFFRSLEEKLAKAQRVLSRRMKGSSRWNKQRVKVARIHEYMEMLEKITWTKSRLKSSKTTMLLV

SEQ ID NO: 57569 - protein, 462 aa, Oribacterium sp.
MCYHIHTGIIRVFRKEAHSMKIYSTYSVKIKHYNSIFKNTISVYRHAVDYLITVCLNEWKILSLIDGSLLRQQFVERLCHSTKDNPSPRYPDFDMKFYKMPSYMRRSAINEAIGKVSSYMGNLSNWMKNPVGSRPSYPKAGFIYPAMYRTVMYDQTGKYTAKIKVYIRNTWDWINIELKKSDMDYICRRCNERKQCAPTLQKRGKEWFLDFPFEEKVKLSNTSVHDQTFVAVDLGINTAATVSVMRPDGTILGRHFCSLKRETDHLRHSINRIKKAQQHGNRKMPRLWAKAKGINRDIATKTANFIIETAVLYNADAVVFEHLDRKGKARGSKKQRLKLWRSQEVQSIVTNKAHRLGMHISIVNAWGTSKLAYDGSGYVLRGRDGGFNTYELCKFQNGKTYNCDLSASYNIGARYFIREILKSLDVNSRLLIEAKVPQCSKRSTSTLSTLINLNAELMSLAA

SEQ ID NO: 57570 - protein, 415 aa, unknown
  TnpB Polypeptide
VADDYVRRTAITRLEVTDEQRDLLEDTISEWKRGCQIATEMAWGECNAKSDVQPLAYDEIREETDLGSQHTVLATHQAAQAITGCIERRSKGEKVSKPTFTAPTVKYDTRTMTLFDDDTVSLSTTESRVRCPLALPNAADGYQRKYLNSEKWSITESTLTTHDGEYFLHIGFRRLKNDTERNTAEDGTVLGVDLGIENLAVTSTAYFFSGRELNHELREFEKVRAGLQQTGTRSAHRTLEQSSGRELRYVRDVLHRASNAIVDEALRYDCDVIAFENLTHIRDRTGGSWGHKWAFRTLYEQVEYKAESVGVSVKQVGSAYTSTRCAECGFTTDGNRPTRNDFCCQKCESEANADYNAAKNIGMRYVRRGQQSSRRTGNSQLALKSGTVTPSGGFTAHPEGFEAEFMDKPQPPRAK

SEQ ID NO: 57571 - protein, 422 aa, unknown
  TnpB Polypeptide
MKAMKDYKYHAGIVLRIYPSDCQKHLIAVNSGCQRYVYNHLVAINNEIYCLSKTADYVPCDRERIDYLKSVRHHSDIANQAPFLYGSEVDKYVIDNAILNYQTAWKNQKERHLGVPVFHKKGYAQSYQTNCHYSKNGTGSVRFLDESHLMLPILKRIRFAGSRKRIWQILDRSHDTTDNFIRIGTVTISRDACGDYFVSLALASDEPFRECRSVDKDSLHDPIGIDMNLSNFCTMSDSMVIPNPKYRKSLQPKIAKAQRKASRRMERAKADGKALKDAQNYQKARRQLALLHRHYTRQRDDFIGCTSNDVVKNHDFIAVEHLNIKGLLKNHKLAMAISDAGWYKFQMAVSQKAAAEGIPFIRVPAKNTTQRCNCCGHICHGDEKIVLGQDEWDCPECGTHNLRDVNAAINILRLGLQILSET

SEQ ID NO: 57572 - protein, 372 aa, unknown
  TnpB Polypeptide
MKLTAQLKLQPTPDQADVLRRTLAAANAACNYISGVAWDTRTFGTFALQKLCYQDVRDTFGLSAQMAVRSLAKVGDAYKRGKQTRRTFRPRASIAYDDRILSFALPDSSISIWTLDGRQSIPFVCGERQRRMLHMRRGESDLLFHRGAWYLLVTCEVEEADPQDVDDVLGIDLGVTNIATDSDGTIRSGSTITNVRYRHRRLRTKLQKNGTKAARRRLKQLAGQERRFATDVNHTISKRIVETAERTKRAISLEDLTGMRTRVRARRQQRAHLHSWSFAQLRSFIGYKAQRAGIPVVLVDPRNTSRRCPACGHTDKANRPSQSTFCCTSCGCAGHADVIAAENIRVLGRAVVMQPHVSETASPSRQGQAHQL

SEQ ID NO: 57573 - protein, 415 aa, unknown
  TnpB Polypeptide
MTQRTEQIRIGKPHSYYKLLDRFCFASKNLYNQALYRVRQDFCAEKGYLNYNAIDASFKADNELNNSDYRNMPTAASAQQTLMLLHRNWMSFFNATKVYKANPEAFTGRPRLPKYLDKDKGRQVVVLPGQTISAKNGVVSFPKAFNGFELKFRHKDVSIRQVRFIPEANHIMAEIIYQVEEANILSDNGRYFGIDLGISNFATIASNVIPPVIINGGQLKAINQYYNKQNAQMRTVETAINPIVTPKGSTYCKQTNRLRTLAVKRNTRIKDGLHKISKHVVDLAVEHDITRIIVGKNDSWKQEVNLGKKTNQSFTQLPHAQFIVMLTYKAKAVGIEVITCEESYTSKTSHLDGEQPVKYEIYSGKRVQRGLFRTADGTTVNADVNGAAQIMRKVVPLVKAYGIEGGVNPVKVVIA

SEQ ID NO: 57574 - protein, 374 aa, unknown
  TnpB Polypeptide
MRKAFKYRLFLNDAQAAAAQAQLDSARELYNACLEERRACYRATGKSLTYDDQANQLREIRHLCPDIATTNYSMLQAVCRRAHRAFENFYRRRKAGLPGGFPRFKGCHRFDSITFPAYGDGCKLTATRLKVQGIGSVKVKMHRPIKGTIKTVTVKREVGKWYVVFSCDGGTPVPLPATGQSVGIDVGLTHFLTTDTGTTVENPHPFKAAQRKLRVAQRVLARRKRGSARRGKARQRVAALHQKVAHARADFHHKTAHALVQNNDVICHEDLQVANMVKNHNLAKAISDAAWSQFIAILTSKAEEAGRDVIAVDPRGTSQTCICGAHVPKALRDRWHDCPSCGLSLPRDQVSAMLIKRLGHSRQAPTQRSAAYVA

SEQ ID NO: 57575 - protein, 375 aa, Scytonema sp.
MKTLKFKLYSHKRNRYLKRMINASGVIYNHCIALPSRYYKMWGKHLSCTKLQSHIAKLRKRNPSWQSVGSQAVQDICQRIEKAYQLFFKHNKKGVRPPGFKKVKKYKSFTLKQAGYKFLGGNRVKIGNRVYQFWKSTQIEGTVKTLTIKRTPLGELFMVVVVDDVVKREIKFETGKIAGFDFGLKTFLTCSDSSSIESPQFLKQSLNTIKKASKQHSKKLKGSSNRERARKNLVRKHEDVSLRRRDWFWKLAHELTNKFDVLCFETLNLKGMQRLWGRKISDLAFGEFLQILEWIAKKKGKQVIFIDQWYPSSKTCFNCEHVLESLDLSVREWRCPSCQSVNGRDENAAREYLCSWGNKNAGLGDVRRAVPAIAV

SEQ ID NO: 57576 - protein, 496 aa, Microcoleus sp.
MTTITYCKGLPTPADELNPIGFTDLEMFLTSLSDIFYQATVETVNHLLNKEIKFNQSSWNSHIQEKYGLSKRYANGVIALARGKTSSAKECRKRQIKQLESRVKSAKDWVAKATKKIKLAGKFYRKKNWQSSPKGCNFPLSSNLKTKKTNWYHLRQGRHHKKRYIHRLHNQIKHLLRAKIRVKVSRGSVFIVGSKDESYGNQTCQWSGDTLKLRVPDCLEAKFGKYVTSKIGSFSRKINRLPNSGAKTWHFYRKDNRWVVAVQFTPASVEKVSREIKYGALGIDLNPSSIGWAYVDGQGNLRAQGTLPFQTGLPTGKQDAQLVDVCLKLAALARSFACPVLCENLDFSRKKAQLRERTKKYARMLSAWAYSRFYQILSSILSNRGITLVFVNPAYTSLIGCVKYSRMYGLSSDVAAALAIARRGMNLSERLPRSVSAYLGVNPRKHVWSALYQFNNFIGRCPVVNRRHDYYSVSNWEPLVKADIEQQCRVSAKRKR

SEQ ID NO: 57577 - protein, 675 aa, Escherichia sp.
  misc_feature (287)..(287): Xaa can be any naturally occurring amino acid
  misc_feature (544)..(610): Xaa can be any naturally occurring amino acid
VKRLQAFKFQLRPGGQQEHEMRRFAGACRFVFNRALALQNENHEAGNKYIPYGKMASWLVEWKNATGTQWLKDSPSQPLQQSLKDLERAYKNFFQKRAAFPRFKKRGQNDAFRYPQGVKLDQENSRIFLPKLGWMRYRNSRQVTGVVKNVTVSQSCGKWYISIQTESEVSTPVHPSASMVGLDAGVAKLATLSDGTVFEPVNSFQKNQKTLARLQRQLSRKVEFSNNWQKQKRKIQRLHSRIANIRRDYLHKVTTTVSKNHAMIVIEDLKVSNMSKSAAGTVSQPGXKDLHTAWKRCFDKKLAAKAPVWKRKNEGRDSIRFVNFEKYCCLENRRVKLPSGLGWVKFRQSQRVNGKIKNATISQLAGQWYISFQVEIETAEPNHTSTTIVGLDAGVAKLATLSDGTVFEPVNSFQKNQKKLARLQRQLSRKVKFSNNWQKQKRKIQRLHSRIANIRRDYLHKVTTTVSKNHAMIVIEDLKVSNMSKSAAGTVSQPGRNVRAKSGLNRSVLDQGWYEMRRQLEYKQLWRGGQVLAVPPAYTSQRCXXXXXXXXXXXXXXXXXXXXXXXXXXXXXXXXXXXXXXXXXXXXXXXXXXXXXXXXXXXXXXXXXXXYWIRAGMKCAASLSTSSSGVAVRCLLFRQRTQASVARAVVIQRKKIACHKVNSDARYVDIQRTPM

SEQ ID NO: 57578 - protein, 286 aa, Escherichia sp.
VKRLQAFKFQLRPGGQQEHEMRRFAGACRFVFNRALALQNENHEAGNKYIPYGKMASWLVEWKNATGTQWLKDSPSQPLQQSLKDLERAYKNFFQKRAAFPRFKKRGQNDAFRYPQGVKLDQENSRIFLPKLGWMRYRNSRQVTGVVKNVTVSQSCGKWYISIQTESEVSTPVHPSASMVGLDAGVAKLATLSDGTVFEPVNSFQKNQKTLARLQRQLSRKVEFSNNWQKQKRKIQRLHSRIANIRRDYLHKVTTTVSKNHAMIVIEDLKVSNMSKSAAGTVSQPG

SEQ ID NO: 57579 - protein, 523 aa, Escherichia sp.
MRRFAGACRFVFNRALALQNENHEAGNKYIPYGKMASWLVEWKNATGTQWLKDSPSQPLQQSLKDLERAYKNFFQKRAAFPRFKKRGQNDAFRYPQGVKLDQENSRIFLPKLGWMRYRNSRQVTGVVKNVTVSQSCGKWYISIQTESEVSTPVHPSASMVGLDAGVAKLATLSDGTVFEPVNSFQKNQKTLARLQRQLSRKVEFSNNWQKQKRKIQRLHSRIANIRRDYLHKVTTTVSKNHAMIVIEDLKVSNMSKSAAGTVSQPGRKDLHTAWKRCFDKKLAAKAPVWKRKNEGRDSIRFVNFEKYCCLENRRVKLPSGLGWVKFRQSQRVNGKIKNATISQLAGQWYISFQVEIETAEPNHTSTTIVGLDAGVAKLATLSDGTVFEPVNSFQKNQKKLARLQRQLSRKVKFSNNWQKQKRKIQRLHSRIANIRRDYLHKVTTTVSKNHAMIVIEDLKVSNMSKSAAGTVSQPGRNVRAKSGLNRSVLDQGWYEMRRQLEYKQLWRGGQVLAVPPAYTSQRC

SEQ ID NO: 57580 - protein, 351 aa, Butyrivibrio sp.
VYNPIFDSLNARKPVNRGNPRMPGYVCRGKYKTAILTNQICRIKEDSFIRFPGTAKTLILGRDFPRGKLKEVRIKPHGKDFVMDVVIDVLTVGIEPLDDREVLKFLSSKDDISDIRVMSIDPGTNNIVAVANNFGAAPFVVKGGLIKSVNQFYNKEMGRLSSCAMKCNNRYRTRKMSILTEKRNRRIKDEFHKISRKLADYARDNHVDVVVMGHNVFQKQEAGMGHINNQNFVQIPMLIFADMLRYKLAEYGIRFALTEENYTSKADFLAMDEIPVYKKGSKAEYVFSGKRIKRGLYRHYDGTITNADINGAANILRKVFPKVTQWDRGIVDMPCSLGCTKHPKGSCRSAA

SEQ ID NO: 57581 - protein, 349 aa, unknown
  TnpB Polypeptide
MAGKREEVRATIKGKLAFDSDFDRALLFYTMRLFKDAVEMAHNLIRKQLKKNEIVKLLTSRILNNKWYSVSAYMRAKLYENQPHLKLRKPLLYSLGSSDENGNRNIKLIKTSLVKIKIPSADGKHKWIECKVKFSKKHLPVIQDLIEEKTSYSVGISLNDMNFILYINVPVEVYVDKAKKTIKSKSIPKHFVGFDFNPDRINMVIIDENGEIRDIKNAHFHEVISHGFSKDKAKQIRQEFLVKLVKYAREHGVRYFVVEQLKKPEPRGSKKAKRKISKMALMEYLNQMKILVRKVGGKLIKVNPAYTSIDAIPISKKLGIDIHTASAYLIALRGLRLIKTHKIPKSYLF

SEQ ID NO: 57582 - protein, 349 aa, unknown
  TnpB Polypeptide
MVMGELKLLHPEWADVPYQVKRTAVRDACRAMSNVKRFNQQLAEDHRAGLRQDEELAELHFRSRKNPRQSCYIPDDAVTEHGVYHTILGPLRTAEAVPAGQKECRLVKERGLYWLVVPHPAQCDIETPSGDGVVALDPGVRTFLTYFSETDCGKIGHRAFGRIQRLCHHLDDLISRTDTEPNHQRRRRMRKAQARVRQRIINLVDELHWQVARWLTSTYRVILLPTFETQDMTARAGRKIRSKTARMMLSFRHYEFKRRLRWKAWQRGALVIDVNEAYTSKTRSWDGAVDARLGDAQVIRDGSGFGMDRDVNGARGIFLRALGDSPFLRGLTTQVASQPTGARRTLVSV

SEQ ID NO: 57583 - protein, 386 aa, unknown
  TnpB Polypeptide
MPGRQKMPCKNDKAIQYSTIKVRLYPDAAQAELFEKTFGCCRYIWNNMLADQQRFYLETGAHFIPTPAKYKNGAPFLREVDNQALIQEHNKLSQAFRVFFKSPDSFGYPNFKKKKTDRDSFTACNHVFESGPTIYTTRDGIRMTKAGIVRAKFHRRPQAWWKLKRITVEKTRSGKYYCYILYEYAARQPEPVTPTPETTIGLKYSLSHFYVADDGSMADPPRWLRQAQEKLAKIQRRLCRMQSGSKNYQEAVQQYRLLHEHIANQRRDFIHKESRRIANAWDAVCVRADAFEDLTKAMTHGTMMDSGYGMFRECLRYKLERQGKTLIVVDRYQPTTRTCAACGLVMDCEVSYKKARWTCPKCGAIHNREINAAKNIKTAGLAQICA

SEQ ID NO: 57584 - protein, 473 aa, Lachnospiraceae sp.
  misc_feature (10)..(23): Xaa can be any naturally occurring amino acid
LHCRICWSAXXXXXXXXXXXXXXAPLWGGFNISAFDVSAAYIHMLLCYIIFSECEAGLMSDIVKTMKLHIHVSKSDAEAFARLTEAYRMACNAVSDYVFTHDMNLAFLSLNNAVYHDLRNTYGLKSQFAQSVSKTVIARYKTVSEQMKRLPYRYQDENGSWQTIQKTLDWLQKPVHFSRPQADFVRGRDYSFVTDKKTGQQLLSVNTLQGRVLAAYDVPECFADYFTDSAWSFGTAKLVSLNGEWYFHIPMSKAAGAEFNSTAPSHVVGIDRGLRFLAVTYDENGRTFFFDGKAIMEKRAAFQHVRDELQAKGTKSAKRALKRISGRENRWMSDVNHQLSKTLVDRYGANTLFVIEDLAGVGFSGETLSSRNSRQRKDLRSWTFYQLKQYLTYKAHAAGSDVLKVDAHYTSQRCPKCGRILKENRHHDTHEYVCDCCGYRSNDDRIGAMNIQMLGTMYVSGDMHPRFGVRKEK

SEQ ID NO: 57585 - protein, 322 aa, Lachnospiraceae sp.
LSKIDCNNYVNQVLKKEYIWLKEVDKFALTNSVYNLDNAYQKLFKEHTGYPKFKSKRNNKKSYTTNITGTNIEVSFDNNKIKLPKLKWVKASIHREFTGKIKSATISQVPSGKYFVSILIEAEHIPTESIGRMIGIDLGIKDLLITSDGEKFDNIRTTKKHENKLAKEQRKLSHKQKGSKNRNKQRIKVARIHEKIRNTRIDNLHKISHKLISENQVIVSEDLAVSNMVKNHSLAKAIQDCGWYELTRQLSYKADWNNRDYIKIGKFVPSSQLCSNCGYQNPDTKDLSVREWVCPVCGVIHDRDINAAKNILNEGLRLLSVA

SEQ ID NO: 57586 - protein, 408 aa, Orenia sp.
LNKTYILPIEQQNLAHRLSRLSGRIYSKTVSTIFKLKKNKDMWLSKNDMEKLIKLYASEFSMHSQSKQGVVQQYYTNLKSFFKSMDKADNPKPPYRTRKFNKVIYKKSAIRLKNGILKLSNGRGTTPLKIKAKSLNQKPKYVEIIYHHREQVYKLHIVVKIENKQIDYDNDKTLAIDLGQIHPMVTFDGKQSLIYNGGKLNSFIRFRNKELAKLQTKMSRCKKYSNLWNKLNRAKKKLMLKSRNKIMDVLQKYTSHLISYCIKNKVSTIVIGDIKGIRENISFGAKTNQKLHQWVYKRLTDMIEYKAKSVGIKVDYQEESYTSQTCCQCGNRHKPTNRNYICKCGFSFHRDSIGAINILKKYTIGTLEDKTDWLEGELTSSYGIRYKSNSISCQTEWNIRPFGRDISA

SEQ ID NO: 57587 - protein, 151 aa, Bacillus sp.
  misc_feature (141)..(144): Xaa can be any naturally occurring amino acid
VDSLALANAQMNLNKAYANFFRDKSAGFPKFKSKKDNHRSYTTNNQKGTVYIEGGYIKLPKIKTLVKIKQHRQFFGLIKSTTVSQTPTGKYFVSVLVEENEQLFPKVDIKVGIDVGLKDFAILSNGKKYENPKWLRKAERXXXXSAALFVA

SEQ ID NO: 57588 - protein, 436 aa, unknown
  TnpB Polypeptide
MEQIITAKLKLHANADQAAALRRTQLAYRDALNHVSERAFEDGKTSSAARLQKATYADIRVRYGLPAQMACNVPRQVGTTYAALWTKAKAHAARVAAGATKKRFTGLDKPPMYGQPTLTYNEGRDYGFKRDGRVSIMTLNGRAVMAYSGYDTHTALIRDGARIGAAKLWYDKPKKRYYLLVSLAVEAPDSTPTSLTGVAGVDVGQRYLAVTSDTTGKAAFHSGKEPRQKANHLARVRKRLQRKGTRGAKRRLVAIGQRERRQQAATNHTIARRIVDANPAALIGIEDLTHVRERTGPRTRGKRATKKQRTANRVASRWSFAEMQAMLAYKATLAGGQVIWVDAHYTSQACPRCGHTSRDNRPNKGLLFMCQACHYTLHADLIGAKNIALRTLLIRQDWVGTGGLSVRPDASDDEAKAARLSRYAELRWSPEASPAL

SEQ ID NO: 57589 - protein, 251 aa, Streptomyces sp.
VAADKVKRAFKYRFHPTDAQAAELSRTFGCVRKVYNMALAARTEAWTRQERVNYNETSAMLTVWKKTGELAYLSEMSSVPLQQCLRHLQTAFTNFFGKRAKYPRFKSKRTSRKSAEYTTSGFRFRDGKLTLAKMREPLDIVRSRPLPEGANPSTVTVSQDAAGRWFVSMLCDDASVKPLPKADTAVGIDVGLTHLLTLSTGEKITNPRHERKDRARLAKAQRNLAKKAEGSNNRAKARRKVAARPRRGPPP

SEQ ID NO: 57590 - protein, 332 aa, unknown
  TnpB Polypeptide
LSESPAQTLQQTLKDLDRGLMCFKQRKGDMVRYKARGDCDSFRLPQLLDGDFDEANARIRIPKIGFVRYRKSRDIQGKVKNLTISIEAGRWYVSVCTEIENFQPQATRDGEVGIDLGIVRTVQLSDGTVYRLDVNEIKKLEDRIAVYQKQLERNKTSRQKLAKLGKAADFGKKVPSRKRRRLKEKIANLYRRIRNIRKDFMFKTARAIAQKYGWVAIEDLQVRNMTKSARGTIEEPGTNVKAKSGLNRSLQRVAPGAFRRILEWQVFKAGGYVDAVAPQYTSQTCPHCGHVASENRPTQALFCCVKCGLTSNADVVAAENILRKSRAGSDRL

SEQ ID NO: 57591 - protein, 422 aa, Deltaproteobacteria sp.
MNDSQRLSEGDLYEVLRCRIYPTSEQSNSMEEWLETLRWLFNRSLAERKDAYKTDKQNITYRQQRDALPALKKKYPQLRNVPSQVTQDCLQRLQEAFKHFFRRVKEKKAGAHIKVGYPKFKKYGRYHSLTFTQVWLRQTKDPNKPEFRDVIRLELDEKKRASLQGENPRTVTGALHLPKLGALKIRVHRNFNWRRAKRVTLKKEADGHWYACICFQLEASEKKGAVTSSGVKKVGVDLGLKYLAVSSDGYYHEHPKWLEKSEQKLKKEQRKLSKKKQGSKNRERQRKKVAKIHQKIANQRKDFLHKLSHWLVSNYDEIIFEDLNIPAMVQDKRFAKSILDAGWGSLIKFVSNKSVKLDHRVVKVDARYTSQDCSSCGKRVPKTLRERIHRCSRCGLVMCRDQNAAVNIKNRAGVGHSEPSVE

SEQ ID NO: 57592 - protein, 411 aa, Natrinema sp.
VTATATKTLEATLAPPTTGKEQRLERTVATYRRALSDAFESGADTQTAVNDVVTPYTLTSYAKDALKNYVPKLRDTYNASELADDHPVRFTNRGFRIDHSDERAYEFCWRVPQAGRGNAFWIPLRINPEQESLWHDLLDESATVGEFRLQQYRTSWMLHVTVEYDVAEPETPDDPTRIGFDVGESKLLTGCACQSDTPIQPYIYDGGRARALRKEMYTTLKRLQERDTAEWRVDGRFDYFQNALTDIVEKASHEAVEYADSFDDPVIVLEDLTYIRENLDYGKYMNRRLHSWAFARLTDRIEDKALEAGIPVEFVNPSYTSQTCHACGHIGRRGSQAEFKCTNAECHISTFQADINAAANIADRFDPWGESVPWKPERDDSPRNGSRCDTATGYRTLSRQSRQTTLAAFES

SEQ ID NO: 57593 - protein, 392 aa, unknown
  TnpB Polypeptide
MASGSEGALTISIGMRVSPEPGAIELLRRYNTALNYAINKILRLDLRSIGRVHSALYRELREWFDLPSRVAIDCYRDALANAKSWRNSPKKGRKPRVRKLSMLLHPGSGYRVKEGYVEIIGGVKLKIIGWDRRYDQYENGEARLVYRDGKMILWISKKVPKPKANKPRDVIAVDINEKKIVYGDHVINGEKDIKIDEVHRWKKLAENLQKRYSSPRYPAWRRRRGILSRIRSYHRKARNILENWARKTSLEIVRLAKRLGYAVAREDLTGLINSLRKIRNKNHRTKLIIMGYSRLGRWIDRQAMKHGVPLAIVNPNGTSSECPKCNSKLEENGYRRLRCPQCNFEANRDIVGKLNIRKKALKKLRINPPGGSLTTPTAPQMTDVNPNRWGNR

SEQ ID NO: 57594 - protein, 392 aa, unknown
  TnpB Polypeptide
MQLVEQHIINNNHKYFNECNKLSSLSKNLYNSALYFVRQHFFKNNQYINYYGVNRNFIDNNQIDYIELPRKVSNQTLMLVDKSFKSFFSLLKKKNIGKYNKKIKIPQYLPKDGKMVVIYEKGAISRRKLKNGKIKLSGTDIIVTTKKENINQVRIVPKLGYFIIEIIYTIKSNKNIIENNKIASIDLGVNNLMSVTSNVFDPFIINGKPVKSINQYYNKLKAKYQTKKITNKIKKLGLKRRNKIHDYLHKSSRQLVNHLVSNNITKLIIGYNKEWKQDINIGKVNNQKFVSIPYSNLIYMLTYKCEIEGISVIINEESYTSKCSFLDMEDICKHVKYLGKRIKRGLFKASDGRLINSDINGSYNILRKVVPNVFSDGIEGLAVNPIVYTIKG

SEQ ID NO: 57595 - protein, 435 aa, unknown
  TnpB Polypeptide
VPCAQRKDEMTARTAWLLQFFAHTCDPGGMRTAYRCRAYPDQAQQAMLNRTFGCVRVVWNRTLAARQARYAADGTGTSYAQADRSLTAMKKDPALAFLNVVSCVPLQQALRHQHQAFAAFFARRARYPRFKSRRSRQSAHYTRSAFTLRGGELRLAKMPAPILFVWSWPDVDLTVLDPAMVIISRESDGRWYVTFTADTIASNTPLTATGRAVGVDLGVTDFAVTSDGERIANPRHLERKARSLARYQRRMARRQKGSANRAKAAAKAARAHRKVRHARADFLHRASTRLVRTADLIVIEDLAVASMIRNRHLARAISNCGWGEFRRQLEYKCQRYGRRLVVIDRWYPSSKMCSVCGHLLAELSLGTRHWKCASCGTRHDRDINAAKNILAAGRAVARGSPGDACGVGVRHSGSSRVQPAVKQESRPVTAGIPVL

SEQ ID NO: 57596 - protein, 427 aa, Escherichia sp.
MHQENTMLPRRISVSLFIDQSIIWPVKRLQAFKFQLRPGGQQEREMRRFAGACRFVFNRALALQNENHEAGNKYIPYGKMASWLVEWKNATETQWLKDSPSQPLQQSLKGLERAYKNFFQKRAAFPRFKKRGQNDAFRYPQGVKLDQENSRIFLPKLGWMRYRNSRQVTGVVKNVTVSQSCGKWYISIQTESEVSTPVHPSASMIGLDAGVAKLATLSDGTVFEPVNSFQKNQKTLARLQRQLSRKVKFSNNWQKQKRKIQRLHSCIANIRRDYLHKVTTTVSKNHAMIVIEDLKVSNMSKSAAGTVSLLGRNVRAKSGLNRSILDQGWYEIRRQLAYKQLWRGGQVLAVPPAYTSQRCVCCGHTAKENRLSQSKFRCQVCGYTANADVNGARNILAAGHAVLACGEMVQSGRSLKQEPTEMIQATA

SEQ ID NO: 57597 - protein, 402 aa, unknown
  TnpB Polypeptide
LKAYKFRLYPSAEQEEKLIRQMELCRDLYNSFLLERRYAYRGQKKSLAYSHQQNEIPELKNTFEEYKYIHSQVLQDVARRVDRAYQNFFRRIKEKKQGVRQKAGFPRLKGKGRYRSLTYPQSGFTLMDNGHLKLSKIGKIRMFMHREIEGEIKTLNISHDCAGKWYASFSVKQENISIVLEPTGNTVGIDAGLLHLVTMSDGTLIDPPQFLKKGEKRIKKAQRSLSRKEKGSNNRRKAKILLTREHQKVKNQRNDFAHKLSNQIVKNNDLIIFENLNVTRMMKNHHLAKSIADASWSTIVQYTTYKAGSAGRKVVMVDPGNTSRTCSDCGYKKETLKLSERTFHCDSCGHEIDRDLNAAINIHNLGIKKVGRGTPEVTPAETGVQPSLRMVQPVSETGSPVR

SEQ ID NO: 57598 - protein, 440 aa, Mastigocladus sp.
  misc_feature (370)..(437): Xaa can be any naturally occurring amino acid
VLVLEYKVKSKRQQYQAIDEAIRTTQFIRNKAIRYWMDASKEAKINKIALNNYSTALRKEFKFVEELNSMACQSATERAWSAIDRFYSNCKAKKSGRKGFPRFQKDNRSVEYKTSGWSLHPIKRRITFTDKKGIGEVKLLGKWDIHRYPVKSIKRVRLVRKADGYYCQFCLDVPKEVIDPDCLTNWREIGLDVGLEYFYSDSNGHHEPNPRFLRKAEKSIKHAQRQIYKKEKGKNQRRKARQRYAKKHLKVSRQRNEHALVLARNVCKVNALVAYEDLKVKNMVKNHCLAKSINDAAWSNFRRWLEYFAVEFEVELIAIPPHYTSQKCSSCGAIVKKSLSTRTHKCSCGCELQRDVNAAKNILNLAKARXXXXXXXXXXXXXXXXXXXXXXXXXXXXXXXXXXXXXXXXXXXXXXXXXXXXXXXXXXXXXXXXXXXXRKH

SEQ ID NO: 57599 - protein, 441 aa, Merismopedia sp.
MYSCQQVLISKDSEVIPILEFICSEANKLSNCAIYYARQLWFKKNRFCSKYDLDLEMKSNIHFNALRSAVAQQTIHEVVESFTSYRKRLALYKKGELKDKPKPPKYKKKGGMNIVSYPARWLKLKDDRLVFSLGKQVKAWFGIDSFCLPMPSNLDFKLVKEVRILPRNGCFYAEFVSLAPQYVTQLDKSKFVSVDTGLNNWLTCVSNVGKSFIIDGRKVKSQNQWYNKQVAKLKKNKPQGFWDEQLADITEKRNRQMRDNINKAARFIINWCLNKNVGTVILGWNQRNKNGINIGKKNNQEFVHLPTAKLKNRIAQLCQQYGIEFVETEESYTSKSSFLSNDELPVFGAKSERVAFSGKRGQKVKGKLNNLGRGGYICPFGWVNSDLNGAANIARKVATQLGLNLAEVVRGVLTRPHRYSLDDLSKSYRKRSVESCLQTDS

SEQ ID NO: 57600 - protein, 417 aa, Lactobacillus sp.
MYMLLSLTVKVKLKLENAMDGTKFQETAEQYRLACNYVSEYIFMNNCFDLSPYQIQRQIYTDLRQLFSLKAQLAISAIKTTFARYKAVQTQLRRKPMTYPTGKQDKKGKEIYLKVPRDLRWLWKPIDFKRPQADLVRNRDWSIIEDGEKLSINTLQGRVKARFVLKTGFEQYLDGTWEFGGAKLIKSGANWFLHIAVNKEFSELISTDMQHIVGLDRGIRQLVTAYDDQRKTTFFNGQAINRKRRHYKALRDRLQNHNTRNSKRRSRKLRNKENRWMTDINHQLSKTLVAKYGANTLFVLENIGDICFAKIKIAKDTYHGRMSWPFYQLEQLLTYKAIQAGAAVISVNAAYTSQRCPACGEINKTNRKHQLHAYQCSNCGYQSNDDRIGAMNIQYLGKQYVNGVKHPKLKNKQSANG

SEQ ID NO: 57601 - protein, 363 aa, Parachlamydiales sp.
MKYTISIFLETSKEDKLKFVALQDAYHRACNQIIPSVVEERCWNRVALHHLVYKEIRKNSPLGSQMVCNAIFSVCKAYKAKTIGRNEPVPVIQFRKNRSVHFDKRTYSIKGNILSLYTLEGRIRIPMRMGSFQEKYFSEGMPAEAELICRKGKWYFNLVLDLPDPPKTENTKMIGIDLGENVLAAVSTGKMYGGGKIRHERNQYLAKRQRLQSNGTQSSKQLLKKISGKEARRIKHINHQVSKEIVKEALEQEAGILILEDLTHIRTRIKAGKKIRSRLHRWAFRELQTMIHYKAESRGLQIIYVNPAYSSQECSHCGCLGVRERHHFKCLCGNQQHSDLNASRNLCRFAQSIDRATCDVNRM

SEQ ID NO: 57602 - protein, 375 aa, unknown
  TnpB Polypeptide
VKCVGIPYQPSQDVLRLLETFRGMVNYCIHIGLEKGITSRFRLTRETYHRLMGYGYHSWYVLSAIEVATTILKNYRKAKRKKLRVKVPRARRLMAKIGNQAIKVADGMLRIPLKPRRYLYIQLYERARDLLEEYKVCSATLTSKAVYVAFSKTVTVRRPRGWIAIDVNEDNVTAVSSDGEGKVFDLSKLKKASYGYFERKRRLQRKYRKDRRVLRKALSKLSENYRNKVSTMLHQASTAIVKWCREKNYGLIHENLKGLRKTVNAKIKRFNKFNGKIQQISKRPKKLKRRLNNWWFRKFLNQISYKCTWGGVETIESKHTRGSSSTCPICGSKLIKYPKGLVECKKHGLMNRHVVACLNLLRWEGVGSPSTAPRM

SEQ ID NO: 57603 - protein, 414 aa, Roseibium sp.
MIQRGYRYKLGPTPEQEDLLAQFAGVCRLIYNIALEQRRDHWQRFRSRTGQNISYPSQARELTLLRDEFDWIAAVSQTCQQQTLRDLDRAYQNWFKGIAKYPTPRKKGRNDTFRYQGREVQTRKLNGKWSEVRLPKIGWVGYRDTRALRGKINNATISLDAKGWHISFAVAIEHEAPANIAPSVGVDRGVANTLALSTGERLCVPERLIKLEKRQRRAQKMLSRRKRGSRRYAKARKRVATLSALRSRIRKDWHHRASLDLSRRFGTVVLEDLKTRNMTASAKGSADEPGRMVRQKAGLNRSILNQGWHIFETLLEYKLEERGGYLCKVPAHYTSQTCAECGTVDRESRQSQASFSCKHCGHTDHADTNAAKVILRRNTASMDMEEGHWLSCEVSTRKSRKALENPPPSGGGRC

SEQ ID NO: 57604 - protein, 374 aa, Anaerolineales sp.
MEIYRAYKTELDLTKAQITACSRNAGAARFAYNWGLSRKLEAYRLGQKTPTAIDLHKELIALKKTQFGWMYEVSKCAPQEALRDLDNAFRRFFQRVKQKRAGKNIKVGFPQFKTKNRSPARFRLTGKIHVFEKRIQLPRLGLLQMKEHGYLPTHNIHILSATISEKADRWYVSLKVKMEIPYPENSNKPVAGVDLGIHRMAQVSDGLYFENPHSLGQALRKIKHLQRTVSRRKKGSANRQKAVRKLAKAHAHVANIRKASIHQATTRLAKSKSIIMIENLNIMGLMKNHRLAQAISDVSWHEFQRQLTYKGIWYGCDVRMADPYFPSTKRCSRCGQVKASISLGERIYHCDICGFEIDRDLNAAINLEQLIYMA

SEQ ID NO: 57605 - protein, 370 aa, Agathobaculum sp.
MHVNLHSTVFRTYQHRIYPTLEQKNELDVRFAIEDDFFNQLISQANVWHGLGKTEAEVKHQIQSYPLETNNNADRYAAEKVRKRVSQLAAKLFCGETDKLKPRQSNRAHRNAHFAYAGVSEQHVAVPVLGTIEMEQHRMPPKGAYIFGATICSDCYGAKYYIELHVRMEPQMVEAVPLRYGRVVGLDYAQDGLYVDSVGNRAGYPAYRQRAKSKLERCKRAVSRFHTGSHRSRKFKRRLAKIRRHICNQRKDWQFKKANELAKVYDGICVENLDFAAMQRSQPALAGKMNDNAPKAFYHKLEQKMNENGKPMVKVDLYYPSSQICSACGYRVGRVPIGQRFVCPHCGTEMDRNHNAARNIREEGIRLLDQ

SEQ ID NO: 57606 - protein, 340 aa, Escherichia sp.
  misc_feature (301)..(334): Xaa can be any naturally occurring amino acid
VKRLQAFKFQLRLGGQQECEMRRFAGACRFVFNRALARQNENHEAGNKYIPYGKMASWLVEWKNATETQWLKDSPSQPLQQSLKDLERAYKNFFRKRAAFPRFKKRGQNDAFRYPQGVKLDQENSRIFLPKLGWMRYRNSRQVTGVVKNVTVSQSCGKWYISIQTESEVSTPVHPSASMIGLDAGVAKLATLSDGTVFEPVNSFQKNQKTLARLQRQLSRKVKFSNNWQKQKRKIQRLHSCIANIRRDYLHKVTTAVSKNHAMIVIEDLKVSNMSKSAAGTVSQPGRNVRAKSGLNRSILXXXXXXXXXXXXXXXXXXXXXXXXXXXXXXXXXXTGSGLV

SEQ ID NO: 57607 - protein, 260 aa, unknown
  TnpB Polypeptide
MHFRKAGENISDLTKTIKLRIHVTPEQEVLLRQMTEQYRQACNFVSQYIFDNQFDLTYQSLNKKLYSDLRGLFGLKSQLAQSSIKTTIARYKTVKQQLFQNPYRYKDEDGRWQRIPKTLEWLWNSVFFRRPQADLVRNRDYSFVDDGQVLSINTLGKRTKCTFEGEHFAGYLNVSYQLGTAKLVELKGRWYLHIPVTKAVEDFQKECVRHVVGIDRGLRFLAVSYDEQGKTKFVSGKKIATKRHKFQEVRKQLQAKGQNQ

SEQ ID NO: 57608 - protein, 459 aa, unknown
  TnpB Polypeptide
MQNVISTYSEEIKLHSKAFSRSVEIYRMAVDFFIKVIDTEWGSISAVGTVKGRLTETEKYTVATSKRSVVPYDFAKADRHFYKMPCYLRRAAINEAVGKVSSYRSNLARWEASESKKDIRKPGYPKAGYVYPVLYRSNMYKGEVGSYTAQVKVFIRNTWDWITVTLRKSDVDYINRRCRPFEDGEGVMKSRSIGAPTLQKRYKKWYLDFPVTEVVTLTDVPAEEQTIAAVDLGINNACTLCIMRSDGTVLGREFLSLPRENDCLKHALNRIKKAQQCGNRKTPRLWAYAKGINNDIAVKTAQFITEKAIAYNADVIVFEHLETKGKKRGSRKQRLHLWKGQYVQAMVMQKAHRCGIRISRVCAWGTSRLAFDGSGRVLRGKESEKTQGNYSLCEFRSGKLYHCDLNASYNIGARYFVREITKSLPATVRLRLEAKDPSVYRRSTCTLSTLINLNAVLAA

SEQ ID NO: 57609 - protein, 167 aa, Clostridium sp.
MLKAYKYRIYPDKEQKLYLSKTFGCTRFIYNQMLANRIDVYETHKDNLTSKEMSKLYLTPAKFKKEFEFLKEVDSLALANAQMNLDKAYKNFFRDKSVGFPKFKSKKSNYHSYTTNNQNGTIFIDNGRIKIPKLKSMIKIKFHRQFNGIIKIVLFLRLQAINTIYQF

SEQ ID NO: 57610 - protein, 432 aa, Pyrococcus sp.
MKRSVTVKLQPSKEQEKILFELAQATAIIWNKINYERLKQFKEFGKIDFNGTEKEAYYYFKDWIGGSTVQQLARKNAEAWRSFFSLNKKKKAGELLEWFKPKPPKFIKEEKRFIIPLRNDQYRIDGNVIELRRLGKFGRLRIQFKGRIHWKGKQGRLEIVYDDVKRKWYAHISYTVEEKFWKEWVRVPRQPLGSLTAGIDLGVNNLMAVYVENGKSFLVNGRPLKSIAFYWQKQIADYQSKLNKSSAKKSRKLKRMYQKAKLQAKHYINTAVRQTVEKLYQLGVSRIVVGYPKEIARNSDKGRKQNFLLSHVWRFNYVIKRLKEVAEEYGIKVVIVDEAFTSKTCPLCGQRHPNGRFVRGLFKCHREGVVMNADLVGAFNILKKVVRTITPSLPGLTAGRGNGGKAVPEGFREPLKGFLMETPQTSPSMARG

SEQ ID NO: 57611 - protein, 405 aa, Pyrococcus sp.
VNYLRRQQYFQEQIVDFNSTEKTVYEEFKREIGSATVQQICRKNAEAWRSFFSLLRKKRNGELPSWLKPKPPNYLKEDGKRKPIIILRNDQYRIEGNKLILKGLGKFKKLEVQFKGRIHLNGKQGRLEITFDPVKRKWYAHVSFTVEEKLEGGEWVKIPKEPLGNLSAGIDLGVNNLMAVYVENGESFLVNGRPLKSIDFYWRRKIANYQSKLNKSGVKMSRKLKRMHQKAKLQAKHYINTAVRQTVRRLYELGVSRIVVGYPKGIARNSDKGRKRNFLLSHVWRFNYVIKRLKEVAEEYGISVVVVNEAFTSKTCPVCGKPHDGARFVRGLFACPATGLVFNADLVGAFNILKKVARTITPNLGGLYAQGRGNGGKTLPEGFEEPVLVGPLMRPPQTFPPMARG

SEQ ID NO: 57612 - protein, 401 aa, Pyrococcus sp.
VNFLITHAFENNVTSFYRLKKETYKGLRKEYPELPSHYLYTACQMATAIFKSFRKRRKKGKAKGKPVFKKEVIMLDDHLFKLDLENKTVKLSTLKGRIQLEFYPARYHEKFKGWKVGQAWLVRTPKGAFLNVVFSKEVEIREPTTFVGVDLNENNVTLSLPNGEFVQIITHEREIRTGYFVKRRRIQRKIRGGKKRKELLEKYGRRERNRLNDLYHKLANKIVELAEKYGGLALEDLTEIRESIRYSAEMNGRLHRWSFRKLQSIIEYKAKLRGIKVVFVDPAHTSSLCPVCGGKLSPNGHRVLSCKCGFEADRDVVGSWNIRLRALKMWGVTVPPKSHPMSRGWKVSRNDVLHTSHKLRLTRTVPAHRREDFDPEEVSLNEVIETIEKYGYEVEIGDEGC

SEQ ID NO: 57613 - protein, 400 aa, unknown
  TnpB Polypeptide
MLLPLVIDQPYHQLVKRLQSFKFELRPTASLRQQMRCFAGSCRFVYNKGLALQKARFDAGEKKLNYAELCKLLTQWRSETQTSWLRDAPTHPLQQALKDLERAYTNFFARRADLPRFKKKGQHNSFRYPDPKQIKLDQMNSRLFLPKLGWLRYRNSREVLGGVKNVTVSLSCGKWFVSIQTEREVQQPRPHGGAVGIDLGVVRFATLSDGTFYAPLNSSKRHATALRKGQQAMCRKQKFSNSWKKAKGRIQRIHARIGSARHDYLHKTSSAISQNHAIVCLENLQVRNMCRSAAGSIEVPGKHVRAKAGLNKSILDQGWFEFRRQLQYKLSWNGGELITVPPQNTSRRCPQCDHVSAQNRRTQERFTCIECGFEENADRVGAINILRAGHVRCACEVSDI

SEQ ID NO: 57614 - protein, 379 aa, unknown
  TnpB Polypeptide
MLRLSYKFRLYPNKTHLQKLESTLELCRELYNSALLHRISAWQKARYHVTYTEQANSLVEIKQVRPEFEEVHSQVLQDVLRRLDKNFRAFFRRLKMGEKPGFPRFKGRNWYKSFCYPQSGWQFLSDRKIQISKIGIIRVKRHRNFPEGARLKTLTLKKEIDRWYAIVSFEIPDRKDKVPIRNAVGIDVGIDAFATLSDGAKIENPRYLGRTESKLAEAQRVFSRKRKGTKAREKAMVRVAKIHRKIVNQRRDFLHKVSRYLVDTYDLIAFEDLKIKNMMQNGNLAKSIGDCSWGRFLQYIAYKAESAGKHAIGVAPRGTSQNCSNCGARVPKLLSDRVHICNKCHIVLDRDINASRNILRLGTSLLGLSPGEAPCVSWE

SEQ ID NO: 57615 - protein, 367 aa, Deltaproteobacteria sp.
MLRVYRFRLYPTPAQRRAMNRSLEACRWVYNKVLEVRKRAWEEGGESLSRFETIKMLPGWKQEQPSLNDAYSQVLQEVCTRVDLVFQAFLRRVKGGENPVYPRFKGEGGYRSFVYPQSGFKVSEDGKRLYLSKIGHVKIRLHRPLEGQVKRLRVWCDLLGRWYAAFVCDVEPRRLPSTIGIVGVALGSSHFATLSNGECIDTPPFFRRDARDLAKAECRLSRLEKGTSQYRRQERVVRHIRKRMFDRRTDFVHKLSRDLVEGFQIIVFGKLGMEGGERRDPLWRISDAAWSQLVHFTTYKAESAGRCVVVADPHDTAQECSRCHTGVSRDFCGPIHACPWCGLEIDRDLNAAINILARGLAHIASKS

SEQ ID NO: 57616 - protein, 392 aa, unknown
  TnpB Polypeptide
MSIRTIALTLRPTAAEKTALLRLQAAFNVACNYISGVAWEAQEFNKARLQRLVYAGVRRDYGLMAQHTVRAIAVVADAYKADRDTKRTFRADAAVVLDTPRLYRVKHNRARITTLDGRLHMELGIGGHQRRMLTDAVKLAEADLIRDRKGRWRLMVSAHYADSPTMGTAGVLGVDLGRTDIAVTSEGATFSGATVTATRDRYARVRRSIQHKASQGTRSTRRRARAVGKRIAGRESRFQRDINHVVSKSIVGQAVASEQAIACEDLTGIRERANRQPRGKTERRRSNSWAFHQLRLFLAYKCVAAGVPFVLINPAYTSQMCHCCFVLGDRFGKRFACVNPACAWRGDADVNGAQNIALLGRSVITPGGPALCCLYQPDARATTSPGAVALSL

SEQ ID NO: 57617 - protein, 372 aa, Chloroflexia sp.
MKLTAQLKLQPTPDQERALRRTLETANAACNFISAFAWQTRTFGKFALQKSCYEQVREQFGLSAQMTIRALAKVGDAYKLDKKVQRTFRPLASVAYDDRILSFALPKSEVSIWTLDGRQAIPFVCGEQQRRMLQTRQGESDLLYHRGEWYLLVTCDVEEPDPLDVDDVLGIDLGVTNIATDSDGTIHSGSTIKNVRYRHRRLRNKLQKKGTLSAKRRLRKLAGQEARFAKDTNHTISKRLVREAQRTKRAIALENLKHIRTRVRARKSQRTVLHSWSFFQLLAFVTYKARLAGVPVALVDPRNTSRTCPTCGHIDKANRPSQAVFRCTSCGCAGHADVIAAENIRVLGRAAVMQPHVSETALPSRQRQAVGL

SEQ ID NO: 57618 - protein, 385 aa, Thiocystis sp.
MGGEVTKAKRIRIYPTTAQKSLFRQWLGTSRYVYNETVKHLDLPKEERAGHWMGAAKIVLPSLPSLPDWAGAIPYQIKKIAIEDAYTAFSNGVRKWKQTGEPFDLRFRSRKNPKQSCFIPSSALKDAGLYPRIAGSLKRAEDFPDNPRDSRLVCEQGRWFVIVPYRVPVMPTENQGRVVALDPGIRTFLTGFAEDQAFKIGEGDFARIARLCVHLDRLMSRLSQAKCRQKARIKQAIQRLRWKIRDLVDELHFQAIRFLLDRFDLILLPTFETKEMAARTTRKIRSKTVRSMLGYAFFRFGQRLESAAKQAGKAVLRVNEAYTSKTASWTGEMKQIGGAKTITSGGITVDRDINGARGIFLRALVDTPSLRHERACVGACEQALA

SEQ ID NO: 57619 - protein, 297 aa, unknown
  TnpB Polypeptide
VDKFALTNAIYNMDAAYQKFFKEHAGYPKFKSKHDNHKSYTTNFTNGNITVDFGCNRVKLPKLKGIKAKLHRNFSGQIKSATISQVPSGKYYVSILVETEHVELPHINQNTGIDLGIKELCITSAGKKYENPKIIRKYEKKLVKLQRQLAHKEKRSQNYYKTKKKIALCHEKITNTRKDYLHKMSHEIISENQVIVSEDLQIKNMVKNHHLAKSISDVSWHELTRQLEYKAKWNGRKYVKIDTFYASSQLCSVCGYQNTETKNLSVREWICPVCGTNHDRDINAAKNILEEGLRQIA

SEQ ID NO: 57620 - protein, 425 aa, unknown
  TnpB Polypeptide
MKLLCGFKFELYVDKPLRAALSRNAGCRRFVFNKALALQNERREAGEKLFTYSELAAELVQWKKAAETSFLKEAMSQPLQQALRDLDRAIRDSFRPKDDPARKEWPRFKAKDVGDGFRIPQFKPSDIDDANGRVKLPKIGWVRYRKTRPIAFRNADGTFTKGTVRQIHVNKDCGHWFVVFTTEFEIEPPQMKLAEIGIDIGVVHAVALSDGRFFDLDTRKLKEIENRIAVLQRRLSLNLSARKKLAEKGLAEPFDKTKPGRKRRRLKARIQKLHRRMRCIRLDFYRKTAHALAQEYGCVYAEDLKTKNMTKSAKGTVENPGKKVKQKSGLNRAILRTGFYGLTQAIAWQLEKTGGILEKVNPAYTSCLCPTCGCCDKRNRPKQSVFHCIACGHHQNADTVGAVNVLRKGRTGPSAHVKKSASPVQ

SEQ ID NO: 57621 - protein, 402 aa, unknown
  TnpB Polypeptide
MSKLVCSSALSENGPESPALFYEYKIEGSKAQYQAIEEAIRITQFIRNKCLRKWMDGRGVDKNDLQCYCAVLAQEYSFAYLLNSQARQAAADRAWCAISRFYENCRNHKPGKKGYPQFQHDNRSVEYKNSGWKLEPDGKHITFTDGCNIGRVRLIGSRNLATRPIPDIKRVRLIRRADGYYCQFGITAERHVQHEATGRQVGIDVGLKVYYTDSEGNTVENPRYLRKAEKRLKRLHRQVSRKQKKSKNRKKARKQLAKAYLKVQRQREDFARKSANALVTSSDLIAYEDLRIANMVKNRHLSKSISDASWGKFLHWVKYYGAIHDIPVIAVPPKYTTQDCSVCGTRVKKSLSVRTHICPNCGAILDRDHNAAINVRDAGLKMWRKQKQAGSVGHTRTGSQTL

SEQ ID NO: 57622 - protein, 472 aa, unknown
  TnpB Polypeptide
MKKSRFLYLHPEANLGKIASLETLQTEYVVYLRICVSKMLAAHKFSLALRNKQEFFPPCKGLSSQIVKNVRDHAIQIISGWAASKYTTKLKSLIKAKFKAGEIDESQRSSFYIIGKCLVDRPGGKVTQEALDLYWSWLLDEAIVGKTPSISNRVGMRMSEMTAVLAMSEEMKLTCWWLGFSHLESGKARIQLPLVASPYVKSLLEVSKGILARKTKQGRWRFEVVERKEWLVPEPKEDAPRLGVDVGLNVMVATSEGELLGSTLKPKFNNLYSKVRDIRANRQRQDFKDNSPRLDKLEGKLTGFVKTMAGEVANKLVEAHPETIFVIEDLDLRGCKGAKRFAYRALHHSLETKTSCEVVNPAYSSQTCPSCGYVSRANRSGIKFTCHSCGRKSHADVVGGLNLLGRSEDKQIQLDDHPFEVKVLLRERFRARCRTSSLGGIYNAPVPSGQRLTTEGSPRDIGIASNQVEAHV

SEQ ID NO: 57623 - protein, 392 aa, Okeania sp.
MYCCQQVLVGKNPELIAILTFLCEQSHKLTNMGIYYARQLYFKSQKGISKYDLEKVYKKNYHYKVLHSQAAQQILRTVAESFRSYYGLIKAYNKGKITNRPRIPNYRKKGGMATVSYPKQALKLKDNLLRVPLGNTCKRWFGLDCFYIPMPSNLNFASLKELRILPRNRYFYWEFVYEKEIVVKPLLNQENVLGIDHGVNNWLTCVSNVGTSLIVDGKHPLLSPPGRGTKGVGWYNKQVSTIKENQPTGFWSNKLAAITEKRNRQIRDGINKAARIVINHCLKNHIGTIVFGWNKGQKNQIELGKKSNSEFVPIPIARLKERIAQLCIEYGILFIESEESYTSIASFLDGDNLPNYGEKPNDWKPSGKRIKRCSAVLGVSPMSDCIKTAWFV

SEQ ID NO: 57624 - protein, 356 aa, Okeania sp.
MQSIKTKLKVNNKQKTILAKHAGVARHAYNWGLATCIAEYEETKKRPSSITLHKRLVAEVKSENSWYYEVSKCAPQQALRDLERALKNFLTIPKCGFPVFKKKGKKDSFYLEGSIKILRGNYIKLPRIGIVKTYEILPSVPVKNVRISKGAGDWYISFKYDECQPKPMTKKRAIIGVDVGINALVTCSDGTTYANVKAYKQTKKRLTRYQRRVQKKEPGSKNRAKAVKRLAKAHKKVADIRADVLHKLTTWLAKNHSTIVIEDLNVNGMLKNHKLASAIADCGFYEFKRQLTYKCEWYGSQLVIAPRFYPSSQICSHCGHKQKMPLSVRTYNCANCGFQADRDFNAAVNLENYVNK

SEQ ID NO: 57625 - protein, 380 aa, unknown
  TnpB Polypeptide
MFRAIKVRLYPNKTQEQTLNKALGCYRFVYNHMLARKQNAYKTDKTSLSVTELSKWFHGTLLKDEQYAWLKEQNTKVMKQAIRQMDVAYQKFFKQHNGFPKFKTKKDKQTALFPIDAISRKNTFETRHISLVTSLKDIKFRCSDLYFRRLQTYKDRIRSATLSKTKSGNYFLSILIDLPQEDVVKFGVTNKHVGIDLGIKDFVITSDGEVFENKHFFKKQEVKIAKLQRQLSKKQKGSNNRNKQLVRIAKVFERLTNQKDAYIHSVVNELLTYYDTVFMEDLNVKGMLKNHYLAKAIQEVGFYKFKEILINKALTNNKKVVFIDRFYPSSKTCSQCGYKKRDLKLSDRFWTCPVCGENHDRDINAATNILLEGQRMLAAV

SEQ ID NO: 57626 - protein, 466 aa, Candidate division AD3 bacterium
MCDNRHVRLHHAYGFALDPTAAQQRALASHVGAARFASNWGLEQVRASMALREFELCMFGEVRTPLLGWNLYALRREWNAQKDVQAPWWRENSKEAYSSGLAALALALHNWSESRQGKRAGARMGFPRFRKRGHPMGCRFTTGAIRIDDERHLTLPRIGRMRTCEATTALLRRVSAGTARILSATVSCEAGRWCVSFGCEVERRVPESNGHQDTVGVDLGVLALATLSTGETVPGPRALRAGLRKLRRLSRHHSRCQRGSHNRRKAAQRLARHHARVANLRRDHLHELTTRLAKSHGRIVVEDLNVAGMSRSSRGTAEAPGRNVRAKSGLNRSLADASFGEVRRMLEYKCRWYGSELVVADRFFPSSKTCSRCGTVRSQLGLGDRFFTCPACGLSIDRDLNAAINLAGWAHPDVAVSASETENACPRGGQPGLGPARPVDAGTGIAPEPAGTTGGRRQPHVPYVCC

SEQ ID NO: 57627 - protein, 434 aa, Haloterrigena sp.
MGEEATKTIQTRLHIASGDRSWLHDARLASREIFNQTIRLKQQGYTRTEIQKEVDRDDFLRHNKCAVVGKALQTWDSCQSLLDWWHEQDDPDGGKPTPPSTDKSGAYPLVMAHTEGYRLTVDDNTNRVQFRISPKPYKKVKGNLRGESDAMDELRDALTSNEVDVGQAELLYRDGVYYLHVTVTRVFNIPEPDTSDTVVGVDINERNVALTALDRETMQTKGTLVLDYGRVKQERQRYHTITTRCQEHGKTTIHRQFGEREERFIEWVLHRLSRAVVKFAEQFSNPVIVFEDMSGIRNEMQYGSYMNRRLHKLPFHQFERFVSYKATWREIPTDTVDAYYNSRTCSCCGERGSRQGRRFRCPNDECDVAQDHADRNASVNIAWREKAKLGDTDTNYRTHKTQPQVRLVRLSGSGRVSRPPSSRSLAEQGVLAHG

SEQ ID NO: 57628 - protein, 374 aa, Moorea sp.
VFPSKELHKVWKTWLNAYRWIYNWSIAAIKNGYQGSAYDLQKLARSADRPEWVKTLPGHQLQEAVADAIDASKQGLANNGFAKFKSCRETRQVIKFKAGNFKKGSWYLTKVKGLSFRSPQGFPEECIYGTQLVWIKGKWYGVFPQYIDPTPTTVDKVIALDPGIRTFLTGFDGVSYVEIGTGDIGRIQRLCQRLDRLISRIDLSSAKRQRRSRSVRQSAAIRKAAHRLRQKIQDLIKDCHNKSASFLVKNYKLIFIPTFETSQMVVKSARKLNKKTARNLLTWSHYKFRQHLTQMADRNDVKVVIVNESYTSKTCPECGHIHERLGGNKKFQCPKCGFSLPRDWNGARNIMIRALSATTTRFSPGAIQVIPADK

SEQ ID NO: 57629 - protein, 208 aa, Nakamurella sp.
VRGVPTSRPDATVGLDAGITTLVTLSTGEKITNPKHEKKDRAKLAKAQRNLSRKQKGSNNRAKARLKVAKVYARIADRRRHHLHELTTRIVRENQTIVIEDLAVRNMVKNRSLARAISDASWSELRSMLEYKADWYGREVIAIDRWYPSSKTCSDCGHLLRSLPLNIREWVCAECGAVHDRDVNAARTILAAGLAVSACGDGVRPPRS

SEQ ID NO: 57630 - protein, 366 aa, Sporosarcina sp.
LAMITYKFKISAKQTQKDKIIETISLCRWLYNTALEQRILLYREKKQSLSFYTQKKELPLLKKEFPIFKTVHSQVLQNVLERLDKAYKGFFGRIRKEQKAGFPRFKGTNRFHSFTYPQSGFELKGNVLKLSKIGDVRIRRHRKIAGKIKTCTIIHKNGNFFVCFACETTKVAVPALPKKSVGVDLGVQHLAITSDGEIFENPKHLRKNERKLKRLQRSVSKKKKGSNRRKKAVRLLAKLHEHIANKRRDTSHKVSRKLVNEYDLIVFENLNVQGMVKNHHLAKSITDSAWRNLIDLTLYKAENAGKRVVLVNPYNTSQMCSECGTIVKKTLKERVHSCSCGYIEDRDINAAKNILQLGLSTIKTVI

SEQ ID NO: 57631 - protein, 398 aa, Kribbella sp.
MSRFRLYPTPMQRVALLEQCKHARYVWNLALEQWSMWTRDKGSTPGYVEQARQLTDARAVFGWLRAGSQTVQQQALRDFAQAVKNFHERTHARPTWRKAGLHEGFRVVGPQASRLEQTSRKWARVMVPKVGWVRLRVSRAIPDAKSYRVTRDRSGRWHLAFAAIPPPIPALGTGEVVGIDRGVIVAAALSTGELLACPGLTESEQDRLEQLQRRLTRCRRGSKRRRRTQAAIAKLHARASDRRKDWVEKTSTGLARRFDVIRVEDLRITQMTKRPKPRPDPQRLGNYGPNRRRAKAGLNRGILTNGWGALVRRLEHKAAGRVEKVNPAYTSQTCSNCGHRAPESRKNQAVFQCVACRHQVNADVNAAINIAAGRAVSVRRETPRRVSPKREPQLATSA

SEQ ID NO: 57632 - protein, 398 aa, Kribbella sp.
VSRFRLYPTRSQHALLLEQCGHARYVWNLALEQWSMWSSDKGPTPGFVPQCRQLTDARAAFTWLRAGSQTVQQQALRDFDQAVRNFYAGTHRRPTWRRRGRHEGFRVVGRQAARVVKHNRKWGSVRIPKVGWVRFRLSRTVPAAKSYRVVRDRVGRWYIAFAAIPSPVPAPGTGEVVGADRGVIVSLALSNGELLTCPGLSNREQERLRRLQRRLARCRRGSQRSRRVRAAIAKLDARAGDRRKDWVEKTSTDLARRFDVIRVEDLRIDQMTKRPKPRPDDEHPGRFLPNRRRAKAGLNRAILANGWGAPVRRLEHKAAGRLQKVNPSYTSQTCSVCGHCAPENRESQAVFQCVACGHQTHADVNAAINIAAGRAVSARGETQVPVSLKREPQPAASA

SEQ ID NO: 57633 - protein, 409 aa, Brasilonema sp.
VIKVLKAIKVRLYPTTEQEISLAKSFGCARWYWNYALNACIQHYEETGKSLKLSVYKAYLPQLKVEHPWLKEDCYSAVLQCVAINLNKAYSNFFEGRAKFPRFKSKHHKQSIQYPQNVKVVGNYLEIPKIGVVKAVFHRLIEGKVKTVTISKTSTDKYFASILLEVEGGVGQPSGDQTLGIDLGIKDFAIVHDGEQVTKHSNPKHLKRHEKNLARKQKKFARKVKGSNSRNKYRKLVAKVYERVSNSRQDFLHKLSRKLVDDSQVIVVENLNVKGMVRNRKLSKSISDVGWGMFVNFLDYKLKSKEGQLVEIGRFFPSSKTCSCCGHVLDELTLDIREWDCPSCNAHHERDGNAALNITNEGIRILSLDGGNPVLAAPRRSKTTYPKGKGASVNDAGSPHRTCTQVGVG

SEQ ID NO: 57634 - protein, 497 aa, Thermus sp.
MRRFSAAYRYGYNRLLEGEEREKLKRKDGPLCTLFRLNTRYADDALLKAQTLLASLEEQGENPRKVVFGGRKDFEDFPRLKRSNRPLYERRYARWWERRKGLLYSRGDRSKGGNLNLRLVVRDGALWLRIHLGEEGCYAWALVRTSHPRLGELLVRAYAEELYHVEFTLREGRVYAVFTWEEAPPPLVVDAKSGVLALDVNADPYHLALAIVNPDGSLRKHLTLSLEGVDRAPNRGAKELLLWQIAHQIVSLAWEEGVAIATERLKYLPKGRRGDGSGRYFRRKAHRFAYRSLLKKVHALAQRRGIQGLEVNPSDTSTVGMLKYAPLLSLSKDTAAAYVIGRRALGFQEEVPKPLKALLQDADFHEHTRRFYEAKIAELKEKRRSEENPYLKRRLGRELSQMRKALATLSSLQGKPGSSEGSTEGRNPRGANPWRALRAGTFLPLLGRSVPRDLSPLKPILLGSWEGWKGGLDPHPGGGSAITKTPLRVGVGSGGWS

SEQ ID NO: 57635 - protein, 379 aa, unknown
  TnpB Polypeptide
MIIHKAFKFELIPDGEQVRKMRQFSGCSRFVYNRALACQSEQYKVDKSCKFSFFKLCSLLPEWKRELPWLKGCNAQVLQQSLKDLECAFKNFFQKRSYFPKFKCKGSKESFRFVQCFKIEQQNSRIYLPKIGWVRYRNSRNIVGKIKNITVSQKCDKWYASIQTEFKADSPTPNGGEIGIDMGIVRFATLSNGEYFEPVNAFKTHKGKLAKLQRQLKHKTKFSKNWQKLNAKIAKLHHRISNISKDHLHKISNKISKNHAIVYVEDLQVKNMSKSAKGNVEQPGKNVKQKSGLNRAILDQSWYEFRRQLDYKLAWNGGHLIPVPPQNTSRCCPACGHTSKENRQTQAEFECVECGYQNNADVVGAINILKRGQETLATQ

SEQ ID NO: 57636 - protein, 378 aa, unknown
  TnpB Polypeptide
MILRRVYRFKLEPNAEQIQKLYQLAGARRFVCNWALARRNKFYKAEGKTLPAAQLSRELTQLKQQEDRLWLQEADSQLLQQALKDVDKAFQNFFARRGKFPKFKSRSRGHFAFGIPQRVKVEAGRVYCPKIGWVRIRQSQDVEGVTKSATFKRDACGDWFVTLTAEFEMPDTALAAPQNPVGVDLGLKDFVTLSNGESVAAPKFFRKSAKKLKKAQRVLSRRKPGSKRRGKAKQQVARVHRKVANQRGDFVHKVTARLAREYDAVCIEDLNVRGMAKNHSLALSISDVAFGEFRRQLAYKLQWAGKHLSVVSRWFPSSKLCGACGVLNDALTLGDREWECCCGVVHPRDANAAGNILKEGLGYWLSGRQTIQTLVDRM

SEQ ID NO: 57637 - protein, 401 aa, Lentzea sp.
MFVDVAGQVKRAFKFRFYPSEAQAVELSRTFGCVRKVYNLALQARSEAWTQRRERVGYEATSALLTVWKRTEELAFLAEVSSVPLQQALRHLQTAFGNFWAKRARFPRFKSRKKSHASAEYTRSAFRWCDGRLTLAKMAEPLDIRWSRPLPEGVVPSTVRVSRDAAGRWFVSLLCEDPGVTPLPATDAVVGIDVGLDHLLVLSTGEKIGNPRHERRDRTALAKAQRVLCRKQKGSSNRVKARVKVARVHARVVDRRTDFLHKITTRLVRENQTLVIEDLAVSNMVGNHRLARAINDAGWRQFRQQLQYKADWYGRQVVVVDRWFPSSKLCSACGALAAAMPLHVRTWTCGCAVTHDRDVNAARNILAAGLAVTVCGAGVRPQRNPPGGQSVTKQKTPRREP

SEQ ID NO: 57638 - protein, 364 aa, Shewanella sp.
MSIQTKTLSVRVKDKHAKLLRQMAYEVNQCFNLANELTMKASRNYSDAGAIRPVWMSAYDVQKPILSFRNESGFIIPSHTAQEVCAKHAQARKQFKRAKLRWRISSGSKHSLGFVPFKKGSAKWKSGQVLFAKQHFKVWDTYGLSQYEFTSGSFSEDSRGRWYFNVCVHVGASAPTSGKTAIGIDLGLKDTATCSDGAKLERGNFYRDLEADLGVAQRANKKKRVKAIHAKIKNRRKDALHKFSTRLVNENAAIFVGDVSSSKLAKTKMAKSVLDAGWSMLKTQLEYKAIARSVVFEIVNESYSTQTCSSCGAIPVSSPKGRTGLGIREWVCSECGAEHDRDINAATNILAAGHRRLAVGIPVL

SEQ ID NO: 57639 - protein, 384 aa, unknown
  TnpB Polypeptide
MIKTHKIALDPNCDQIAWFYQQCGYAKFAYNSALSDFKTELAADNFLSMYDLNKRFNKKKKAFDWTKAQDQRAAMYAVHNLGCAIDNWKAKRAKFPRLKKRGCKHSYTTDEQAVRMEGKRIKLPKIGWIKTFEELRFRGKIVSVTISRTAHRWFASISVEVQPPLHRCPAPPEFVDWFASQVEVGTPHQMERSIYPIIGIDVGISTLATLDDGTKYENPKPLKRYERKLAREQRKLSRRVFLSKNWYKQKRKVERLHYRIACIRREAHHQATTDVLKCASKIGIETLQVTNLLKNRKLAKALSDAALGGMLEKLKTKAKALGIPIVQADRFFASSKNCSTCGHKKGDLTLSDRQYHCNHCGMSIDRDVNAAINLRTLAAGHAES

SEQ ID NO: 57640 - protein, 384 aa, unknown
  TnpB Polypeptide
MIKTHKIALNPNRDQIAWFYQQCGYAKFAYNSALSDFKGELASDTFLSKNRLANRFNQKKKTFDWTEAQDQRAAKYAIDNLGQAVDNWVAKRVGFPKFKKRGCKHSYTTDEQSVRMEGKRIKLPKMGWVKTFEALRFHGKIVSVTISRTAHRWFASISVEVQPPIHRCPASSDFVEWFASQVDIGTPQQMERSIYPIIGIDVGISTLATLDNGRKYENPKPLRRYERKLAREQRKLSRKVFLSQNWYKQKRKVERLHYRITCIRGNAHHQATTDILKCASKISIETLQVTNLLKNRKLSKALSDAALGGFLEKLKTKAKSLGIPIVQADRFFASSKNCSRCGVKKEALTLSDRQYRCDPCGMSIDRDVNAAINLRNLAAGHAEN

SEQ ID NO: 57641 - protein, 378 aa, unknown
  TnpB Polypeptide
MQLLETVKLYMTKKQKSLVVMTMKEYIHTVNSLVFIAINGTSIRKYTTADINSGLPSALANQCIRDAKSIMNKYNKECRKAAFKNKKVMKQNSAVTAKEPAVSVLRKPCCYINNQNFKIKGNFIEFPVMVDGKSKRLSICTSMTDRQKTAFAHAKLGTMRIVQKGNKIVVQIVYDVQEPEYCDSGNVMGVDLGMKCPAVSYISDGNVRFYGNGRKNKYMRRHYAYLRRKLQTSKKEEAVKRISDKEQRIMRDIDHKISHDIVETAAAHNVKVIKLEQLSNIRSTTRTSRKNNHSLHNWSSYRLAQYIEYKARLAGIKVEYVNPAYTSQRCPVCGHIHHANDRKYLCKCGFHIHRDLLGAVNICSSTEYVGGNNTRHTA

SEQ ID NO: 57642 - protein, 406 aa, unknown
  TnpB Polypeptide
MTKILDNLCDYRRYCWNQGLNLWNELYAQRIKNVPAELRKKSQLAINDKTIVFSEEEQELLHLFPSPSNRVIRNNLVANKADWQYTLSARILQLAIKDLANGWSAFFENKKPKKKDSKKKKRKVGKPSFRSKKSPKQSFKTDRASIKNGKLILDKPHKYKDAWYGISFRGYDLPNGKIKHYAITKIGNSYYASIVMNCPEQSLPKTSKKTAIDANVNHFDYTDGSFVVSPKQLEQLYAQIKYYQRLLSRKRHRNGKKAKRSKQYFKVKTKLQKCYQRITATQNDLLHKFTTMIYQTYDTVVIEDLDVQAMQMQKKAKNLHRSLFGRFRRYMEYKAIKFNKTLILADQYYPSTQRCSYCGHVKTGDDKIGLDGNKKHGTKHNEYICYSCGFVADRDQNAVANLLALA

SEQ ID NO: 57643 - protein, 362 aa, unknown
  TnpB Polypeptide
MHLLADEVGSKRLLDTMEQFNAACNEIADTCFAENTASKYTIQQLVYHNIREKYGLSAQLTIRAIAKTCEAYKVNKAVKPEFKKHGSITYDSRILTFKGLDTDFPQVSLTTLDGRRYFNLKVCAYFAGRTNRVQGQVDLVYRKGKFFLYATCDMPEDTPLEPDDVLGVDLGVKNIAVDNTGTVFSNEKVEQVRRRIHKHRADLQRKGTKNAKRRLKKVSGRESRFRTDTNHRISKYLVAKAKDSKCAIALEDLSGINTRTTVRREQRAERLSWAFYQLRSFITYKAALAGVPVILVDPRHTSQKCNKCGYTEKANRKNQSEFCCKSCGHVDHADCNGAKNIRDKGLLSTSLSASAKRLLKVA

SEQ ID NO: 57644 - protein, 397 aa, unknown
  TnpB Polypeptide
MLEALFSSFLNNERIFMNKIKRTYQFRIYPNSYQKALIEKTLGCSRQVYNDFLSMCIESYNADHNRIINKHELIKLLPEYKETFPYLKEVDSVALQQTVIHLYDAYINFFRHNAEQPKFKKKKDDYGYTTMNINHSIRFIGNDIQIPKLGLVSVIKHRQLPESFKYSMVSVSRLGRHYYVSLLGEEEYFDYAEYIRDKLDPNKSIGLDFSLAHLYVDSNGNHLDMPKYYQDSLTKLAKEQRKLAHMKKDSSHYQKQLMKIKNLHSHIANQRKDFLHKVSRKLANTYDYVFVENLDLKSMAERKDKLKLGISIFDLGYGTFLNYLSYKLEWLNKKIIKVDRYFPSSQLCSACNYRKSDLTLNQRSWVCPECGIKHDRDYNAANNIKKEGIRMILNPSN

SEQ ID NO: 57645 - protein, 383 aa, unknown
  TnpB Polypeptide
MKLKGIKIKLHPTENQKAFIDKNLSLNRFVWNKLLGMQQDRFENGGDYVNAYGMHYLMKALKIEFPFLKEAESTSLEYTSDDLDDAFTRFFTKQNNHPRFKSRKHPKNTYKSKCINHNIMIVDTHYLKLPKLGLVKFFGGHRIQDKIKSATIRRELNGSYTATIHVEHEPKVFEKTGNVIGIDLGLTDLVIQSDGFKLKNKQFERSLAKNRRQWERKFARRHTQALAKIEEAKAQGINLKLSDFKNLHKAKEHIARISKKIANQRANYLQQYTTSLVRKYDLIAMEDLSTKNLMQNHHLARSIADASWAKIKSMLTYKCDWYGKKLILVDARYTSQICSHCGEKTGKKPLHIRRFDCPHCHSLDIDRDVNAAINILNKALAER

SEQ ID NO: 57646 - protein, 489 aa, Scytonema sp.
MQVSYQYKLRPKQSQSKVMDSWLDMQRSLFNWFLADRIDGYYQTFIMGEYCDIRTKTERCPLTCSLNKNSNLHNPWKNPDKNGVIKKRSCSLMQDAYLAEIKQARPWYKAIHSNVLQMLVKRLDTAMEGFFKHGRGFPSFKNRSNFRSFQYKPGDVKLDGNKIYLPSIGWMRFYNSRPIPQGFQIRTVTLRKKADGWYTSILIRDDSVPDFPTPREINTLVGLDMGLTKLVHCSDGSDFANPRPSASKENRRTLKIRQRRLSRKNIGSANRKKEAQRVARLHKKHADKRSAYQWFVANKIVSKADAISVEHLNIKGTKAKCKPKPDDVKQGRFLKNGQSAKRGLNRSISDASWGSLIEKIQYAAAKSGKRFFKVDPKNTSRTCSKCGVVDALSRFGEKFVCTSCGHEAQADKQAALNVKIRAIKDNQLVIKKFKKVRRDSAEPKQLTLFETPNPELTGIKRRYRARNSKRGVPGNPPTQLSLWDIGDLA

SEQ ID NO: 57647 - protein, 316 aa, Scytonema sp.
MQDHCRKSHCVLLTFRLYPNKQIEQSLRYHRKLHKDLYNAAINNRFVQYQKFNHKVDYFEQQNSLPAFKKVWTEYKEVGCHALQATLKRVDFAFERWFKGLGKRPRFKSIRHYSGWTYPDSAGFKVESNSENGYLNLSKIGRIQMRGKAKYWGKPTTCTIVYRNEKWYASITVDVLEQVLKPEVLPVGAIGIDLGCKSALSITDGTNHQHSCAPKFLRNAERKIKQASKEKRRSRAPNRKKKVKASRRWKKAQSKVSKLVRKVANQRQNWVHQVAAEIVSGNSFVATEKLEVKNMISIAKKGKRKKLLCWAKQVNT

SEQ ID NO: 57648 - protein, 367 aa, Paenibacillaceae sp.
MKGSVEGQKINGVNNVQPITIQIRMYPSDPALLKQMGNEYINTVNRLTEQAELNGSFPRLTSRTVQANLPSAIKNQLIRDAKSIYQKSKKDKKRPVLKKRVYYVNNQNYSIRDDGVAFPVVREGKVQRITIPAPLTDRDKALLASGKLGLLRVVQKSSKWYVQVAIERPATCQDGTETMGIDLGLKVPAVVVTSTGKTKFVGNGRKNKYIRRKYNSNRRKLGKLKKLPAIRKARDKESRYMRDQNHKISRQIVNMAIAERVGVIKLENLAGIRKTTRTSRKNATNLHNWSFYQLQSFIRYKAALAGISVQEVDPAYTSQTCPSCEQRNKAKDRTYRCSQCGYEAHRDRVGAINIMRQPVFDGHSRTA

SEQ ID NO: 57649 - protein, 283 aa, Paenibacillaceae sp.
LLITTKIKLILEQKHHEKLLETMKRYNAACNYISGFAFEQSQYNRIRLQKLVYFVVRDQFQLSSQMTILAVRKVAAAYIADKAKKNEYKKSKGKNVRGQADLVWHDGVFYLLPGVELPENEPYIPNDALGVDLDIKNIAADSMGESLSGDAVQAVRHHCISKHLVEKAKRHRSRLALEDLTGIRERITVRRAQRRNQHAWAFAQLRSYIKYKALLAGVPVVLADPRNTSRECPQCEHTAKENRKTRDWFRCQACEYAAPADNVAALNIRSRAIVSVPNVGVAI

SEQ ID NO: 57650 - protein, 516 aa, unknown
  TnpB Polypeptide
MATKKKKKKKNTIFVSNEDVGVPEWVPSIKKNNNKSIDTNSWFKMNFNKNPNQIKLTKRKIIFPTIPKESYKQQKATINRTKSGKTPGFIYTIKNRIYPTISQQLVLQEWFNAFIKMYNITVNFVNHGMYINKKIDLTIASKLCNFILLRELLYEEKEKIKQSLKYTIYTHLLDEAIKHAVSNFKGCITKFEKGNIKKFRVREMSYNKSRKILIIEPSFFGKSNSFHETLGTIFSTIFGKETMESEYSLEGINKTTTLQFNTHTKKYILLVPKIMEPNEKLINKIDCGGDGGGRTFFTFYSKNGTHSIGTNMNSELKPIHKKIERIQKKLYPKKEPINDNPIGNISMEDKMAKRKKKRKLKKALEKHRTFLKNKVKDMHYKVAYFLVNNFDNIYIGKLNTSQILRKSNKLPKNAKKIIKSLKHYAFRSILSHMGHKYGATVYLVSEYLTTQTCSNCGVLNHVGDSEIFHCKSCKMKTGRDENSAKNHLKIGYEDGTYIYNNRICKKVKLLTEINGI

SEQ ID NO: 57651 - protein, 379 aa, unknown
  TnpB Polypeptide
VYNTVLYIQRQNYQEGKPYISYFGMTKLLREQKNFDYYAIKPKVSEYVVRQLDESYDSYFSKLQNKKEGNYDKKVNPPSYKDKVKGRNVATFPNECLLKMTYKKEGLIHLSRTSIKFKSKIPFDQILHVKVVPKNGYYELHVVYEVEDAKPVVSENYAAIDLGLNNLATVVTTNSSPFIINGKPLKSINHHWNKRKAKHQSKLRKGVRTSKKIKSETNKRNRRVNDYLHKASRALVNEFVKQSISKVVIGYNDGWKENINLGKRNNQNFVQIPYNRFIKMVIYKCKLVGIEVITGKEPYTSKCSFLDDESVEKHDIYKGKRIKRGLFMSSNETLINADVNGAYNIMKMHLGITVKQLDLVQVCSAPKVLKVNKIPSDKF

SEQ ID NO: 57652 - protein, 412 aa, unknown
  TnpB Polypeptide
LIYLTSITKIKRGHEAFKAIDTYCLLSKKLRNKVLWLQREEWNNNKGYISFSKMLKNLAANDDVDYRALPAQVSQQTVMDVDDDFQSFFTRKERGEKCNAPSFSPKGEKGRFKVTFTNQSISLPSFRNGFIKPSGIDFEFPIPKYIPLKDIKDIREVRFTPKQHYYQMEIVYRVPTCEYQDTGNYAAVDIGISNFLTIVSNCSSPLLIKGGKFISTNSFWIKKRSKSQSKLKKGFYSSNKIKWLDEKRNNKIRNDINCLTNQLVSYFIGLQVSDVYIGWNTGIKHGINIGKSNNQKFVYLPHKRVIDNLSYKCERFGIKVHTANEAYTSKCSFIDDEEIGKHETYLGKRVTTKFFVSKEDKKINADVNAAYNILKLSRGIKFIELDPRQVFGTPRVLKVNYGLNRKRPSHEL

SEQ ID NO: 57653 - protein, 456 aa, unknown
  TnpB Polypeptide
VTLRAYKYALNPTPRQARLLDGHCGAARKAFNWGLGRVKAVMDQRTAEASYGISDELSTPVISWSMYSLRKAWNQAKDEVAPWWAEYSKEAYASGLTQLAAALKGWRDSRNGKRAGRSVGFPRFKSKRRAVRSCRFTTGAIGCDERYAVLPRIGRIRLQETPASELLDGTARIVAATIRHERGRWFVSFTVEQQTPARSPERPDAVVGVDLGIKSLAILADPDGEPQTVPNPKHLDASLRKLGKLSRRVSRRVGPDRRTGRLPSKRWQRANARRNRVHHAVAYQRADALHKFTTAIAAEYGTVVIEDLNVAGMLKNRRLARRIADAGFGEIRRQLAYKTQWNGGRLIVADRWFPSSKTCSVCGVVKAKLLLSERGYRCESCGLVMDRDENAARNLAALAVDVSGTETLNGCGADQKTRSAGQVAVKRLPGSSVRETGTALPEAVSVEPMTTHLQRR

SEQ ID NO: 57654 - protein, 406 aa, Xanthomonas sp.
MQRLQAFKFELMPTGEQQRQMRRFAGSCRFVFNKALALQKERYERGEKKLGYAGLCKELTGWRNGAETPWLCDAPIHPLQQTLKDLERAYSNFFAKRADFPRFKKKGQFDSFRYPDPKQIKLDQANSRVYLPKLGWLRYRNSREVWGTVKNITVSQSSGKWFVSIQTEREVAQPIPQGDAVGIDMGVARFATLSDGTFVAPLGSFKRHQDRLRKAQQSMSRKVKFSSNWRRAKARVQRLHSRIGNARRDFLHKTSTAISQNHAMVCIEDLQVRNMSKSAAGSTEKPGRNVRAKSGLNKSILDQGWFEFRRQLDYKLAWQGGWLVAVPPQNTSRTCPCCGHVSADNRKTQAQFLCVECGFEENADLVGAINVLRAGHARFACEVSGAVMPPAAGTHRSDSGAAQCRA

SEQ ID NO: 57655 - protein, 419 aa, Halobacteriales sp.
MDDAPRRTVPIKLDVPRERRGDLHQTKKQFLHCANRTSEWAWRYDDYCVTSKNKAENSLYVELREEANLVQKGIRRAVEAVKGGVEKLKKGEKTSQPEFDSWSVVYDKRSATFNDDHATLSTPNGRVTTAYVLPPEEERKDTPFGRYYESEAWDTSSATLQYDEQDDTFYLHVTLKNPDYGVDGTERQEAKSPDDHEKNGVVLGVDLNVTGAFAVTSTGAFIGSADYLTHKRDQYEQHRAKLQQTGTRSAHLTIQSIGSTFSDWSLDWLRNRANDLIAEAQGADVDGIMFENLDHIRENIANGSKFQQWTYAKFMELVKYKVESTELFVDTVNPAYTSQRCSRCGFTHEDNRDDKEFECVDWGYAVNADYNAEKNVANRYCGYIHRGQKSRGGWATSQLALKSGVLNVNGDYTPAELLG

SEQ ID NO: 57656 - protein, 472 aa, unknown
  TnpB Polypeptide
MENNKITAIIPTGVKLTGVELSPEFMEYKQEFDSLQRKFCALFGGWVLAGKVKSIDNKYVKFNEEMWDGKFGRKEQHPKDEASLRHIKALPEIKSLLASELPKEKLDNLLGAAVDDMLWYVVERFKSFVKRNSTKSKKKFPKNGITLKQNKAMNFKDGKIKVNAKEKTFTIKTIQKKQEITLSFKDSYYNNLDLVDGEWRGGNIVFNSLEVNADNELVLKVEEEREMSFPKIMIGVDVNKAKENWFTISEAMENGKVTVPKPNNIASLESKRDEMNAKVRPSNKKKEESEYRLNSAQKRIMYRRIHKIMANRHTAIEEAVVPVLNYFFEKYGDDLGVAIDGVATGARGGNSFGQEDVRDVMWRWCVKNNVPFIIVPPNYTSQKCPECGHIHKQDRKKNMNAFMCPSCGYFNESCDHVGALNIRDHGKFLLEKFKLTSTSLSTNVDKTPLAKTFKNALYEEFNFPQFKRIPHL

SEQ ID NO: 57657 - protein, 416 aa, unknown
  TnpB Polypeptide
MQVAKSITVKVSKKINRDKFLSLRNFFKTYQTIARIYYSYILENSLEEKLCSGEITTKDLKNLLHKKLYKQIRERFDIGSQTVQEIRDVVVEAINSYAQLIKKGEEASLPKVEEFTVRLNYPRVVSVFEQGKEFDFFFKVKVNGNKRIAIPIECGEMQKKLLKDALNGKYKIGAFQLVRRDDWFYFVIPIKKEVEIKQSYDGIVGVDLGLRYNAVITLLHKNGEITKVEFVKYRNLMHKIRMLWHRIDELKSMLPEGQRTSKRIQRLWKRIRRINNWIAHNISKKIVEVAKENNAMIAMENLKRLRPIRGKNSRKNNRRISNWVRGKVVKYTIYKARWEGIRVRLVSAKNTSKTCHICGSQGLRAGANFFCEHCRHTYNADFNASVNIGIRATLPNAKGCVNHPVWLKPYKATRGW

SEQ ID NO: 57658 - protein, 419 aa, Calothrix sp.
MLLSFKTALIPNNKQQTSFKKACGVARHAYNWANAHIKEVLELRACDKSIKIPSAIDLHKKLIAEVKSVNYWYYETNKNVPQKALTDLRQAWDRCFKKVSKQPLFKKKGQRDSFYLEAGTKAKPLIKNDGKRVKLPSIGWVKLAEPLPCTLIHNCVISRQADRWFISIKYEIEKPSVDADRPIVGVDIGIKELAVTSNGKVFKNPKAYKRMNKRMKRLQRSVSRKVKGSKNRRLAVKKLSKIHAKISNIRKDAIHKLTHFLAKNHSEIKIEDLSIKAFLKNHKLAGAIADCGMYELKRQLEYKTEKFFSKLTLVDRLFPSSQICSNCGQHRHKMPLKNRVYVCPECNHIEDRDLNASKNLERWFDGIYIPKCSDLAVSSTVSACGVEKPLRSHPKTTMKQEVNTKTTIVQLSLDLGNFG

SEQ ID NO: 57659 - protein, 221 aa, Microbacterium sp.
LNLANFDQDIRVNWHRPLPGYPSAVTVHEEPDGTFSASFVVRTPIAPAKTPTRGPRIAGADVGLNDYAAIAYSDGSREKVVNPRHFRTAEDSLRRADKNLARKKSGSNNYAKAKRARARAHRRVRNLRENHARQLASKLSRENQTVVVETLNISGMARTNMAKSMNDAGWGQFLKFPEEACIRKGMASTKAPRFLPSSQICSSRGTNGGKKTLAVRIWQCD

SEQ ID NO: 57660 - protein, 456 aa, Streptomyces sp.
MTVGRMTCCVRDAAGVTPGSLGRVTRGERSWWCRSGCCRRLCRRRRLSRPCVRHAQGQSEGRESGQAGLEALAEGHGEAGRLPPGERAALRRPDAFLADRRAQGLDLDGERPGEGACEVPEAPLNDDPVDFLGVDLGIVSIATTSDGEIMAGRELNRVRIRERKPRTKLQKKNTPSARRRLKKRRRKGRGGRGTSITRSRSMWWPRQNAPVAESPWKTSRASVSGYGFASPNGAPTPAGPSPSCGSSSRTRPAGQGCRWCKSIRRAATSTRHPGSRAGTADSLITQTGTAPATSARERGSCGDAGPRQRPPPQPRDSGAVLDANAASPPVMSVVQTQDFGPGSLTYDARQDAHRHPLNAGDQCARRRLRVAARWRHRPGGLPGEKVTIVCLPYGESPEQAHTPRRICARTRRSRGCWHERRHRHQPAARPRRGRQGHSLTLTAHRTSWRSPMWLSS

SEQ ID NO: 57661 - protein, 298 aa, unknown
  TnpB Polypeptide
LSSSFRFPQGCKLDQTNNRIFLPKLGWIHYRNSRAVLGEIKNVTVSHSCGQWTVSIQTEREVSDAIHPSTTAVGIDMGIAQFATLSNGQVFATVNSFKQKQNRLARYQRALSRKIKFSQNWKKQKSKIRMLHQTIANIRKDYLHKTTTIISQNHALIVIEDLQVKNMSKSASGDLNQPGRNVKAKSGLNRSILDQGWFEFRRQLEFKQNWAGGEVIAVPPQYTSQRCSCCGSESKENRKTQAKFACIVCGYQANADVNAAMNILAAGHAVIACGEVAQSGASVKQEPAESTKHELAHT

SEQ ID NO: 57662 - protein, 412 aa, unknown
  TnpB Polypeptide
MRSQKLRLKLTKEQERLAWWYSKVSRNFWNLLVDIDKRNNKGEFDEILNENGNNTYYSKFFDRDIYKLNQSDYRKLAKVVVAKNYDEDQEGWSWYYQPNQSFIYNFLSRELVKIRKQNKGRLNFRSIDKVQPNFNVTCCLSSNKKRPSRIYLKENGKLQIPTLGDVRFGSVREGFDLSCKKQVANVSFDGKHWYLSYTEDAEPQVANLPDYTDGVGIDLGIKTLATVSDGTVVPNIKTFRRVRILNKRLKRLQRKVSRKYLINKCNKHNKTKNILKLERQIKLIYRSIKNIRINHIRKFVSKLVKKQPEYIAIEDLNVKGMMRNKHLAKDIANCSFYTIREHLIRKATERCIAVRLVDRFYPSSKICSNCGSYKKDLKLSQRVYHCSNCQEKIDRDFNASLNIAKTDRYVLA

SEQ ID NO: 57663 - protein, 97 aa, unknown
  TnpB Polypeptide
MKAMSRLLNFGKSVSDNGWGMFTTFLRYKLEEQGKKLVKVGRFFTSSQTCSVCGYKNAKTKDLAIREWDCPQCGTHHDRDVNAAVNIRNEGMRLVNT

SEQ ID NO: 57664 - protein, 256 aa, unknown
  TnpB Polypeptide
MVANRAYKFRIYPNDEQKILFAKTFGCVRMVYNHWLDRKIRQYEENKTNVTYTICAKEMAAMKKTEEYGFLKEADSIALQQSLRHLDTAFQNFFKQPKTGFPKFKSKKRNKNSYSTVCINGNITLSNGYLKLPKIGQVRLKQHRSVPSEYRLKSVTVSQTPSGKYYASILFEYEDQVQEKELQKFLGLDFSMHELYRDSNGKEPAYPRYYRNAEKKLAREQRKLSKMQKGSNNRNKQRLKVARLHEKTFYISSQDR

SEQ ID NO: 57665 - protein, 426 aa, unknown
  TnpB Polypeptide
MIRHKSFVFKLKPDGATRRSLAKACGCVRFVYNKGLDWNKEQREKDQTFRVNYPKLCALLPEWKEKFPWLGECHSQVLQQGMKDLMTSMVNFFEGRSQFPRFHKKFKDEDSIRYPQGFKVDEARRQIYLPKIGWLGYARSRFLSLCRSRFINGKLRSVTVMRKADGWYVSILTEREIEAPVHPKAGREIGLDAGVKKTAALSNGKIYLPVDAFRSSKDKLAKMQRRLKRMVPHSENWKKQQQKIAVLHKEIADTRRDHLQKLANDICKNHAVVYREDLKIKNMTASAKGTLEEPGTNVRQKSGLNAAILDQGWGILFGLLDQKMKELGGEVFAVPPANTSRTCPKCEDVSPLNRLTQARFCCRKCGFEGNADVVAANNILRRGQRLRACGELQSTAAVQVNRPSRKRSAGQQQEPIRRDPQAPENA

SEQ ID NO: 57666 - protein, 363 aa, unknown
  TnpB Polypeptide
MQVTRCYEIKLKPNQKQKIQLNSYFYEAKVLYNYLLNCSNIFAVHSCKIKHIWKFDKNKQKVDVELIFLPSKLKQNVHRQMMNSISALSASKKKGNIVGSLKFKSEIKTIDIDNQSYQIADSHHIKLSGFGRQKIRCLGLHQFDESVIKFRNAKLMKRDDEYFLKICILKEVMDHTSCNQNVGIDFGIESNLTLSNGEKFNCKIEETVRVKRLQRKLARSHLINNRRTNNQQKLVKQIHKEYQKVTNRKNDFVNKLLHQLDSYDHIVLQDEQIRGWKNLKSCRKTIQHSCLGSIKQKLIMKSQEEPDRCIMLDKWIPTTQLCPNCGQKNRHELDERVYQCSCGYTEDRDIHAAKNMLRFAQLQ

SEQ ID NO: 57667 - protein, 423 aa, unknown
  TnpB Polypeptide
MNEGGDKVKSWKQNLKHLTSKQYQMLREMCHLSKNVYNESLYNIRQHYFSEGSYLRYEANYPLMKTSENYKRLGANVAQQTMRNADYSFKSFFGLLKLAKSGKYESWRIRLPHYLPKDGLFKLCLTQAQIKDGKFKIPVSPEFRKEHPEKIMIGIPQYLRDKKIHQIHIVPKHDGRFFEVVYMFDDEQPEQIKLDGSKFLGIDFGVNNLATCATNSGESFIIDGKKLKSINQWYNKGLARLSSIKDKQRIKGFTNRQYLITRKRNNRVQNYLYCAAKKIIQYCLDNHIGNLVVGYNDGFQENPNLGKVNNQNFVMIPLGKLKFRFEYLCKQYGINFVLQEESYTSKASFFDNDEMPKWNPQNPKQGNFSGRRVYRGLYKTSTGYTFNADVNGALNILRKSKLTDLSVLQRRGDVNPPLRIRVI

SEQ ID NO: 57668 - protein, 374 aa, unknown
  TnpB Polypeptide
MTYCRKIRIYPTTKQKEYFETFFGASRYIYNKTIEWKKNNKDQKSLIFHKIRPHIIIANKDLDDNHKEAWLKNIPYDTRQLSLKNALSSIKSSIQLLKNKNIQYFNHKFKSKKDKKQTFYIDHRALKNLNLFPSLLKKDKKLKVKKKYKKYENYIPSSDSIILKDGKNYYLLFTKEKEKINITEKKNNIISLDPGIKKFQSFYDTNGYVGEFGNIELKKKLFKTEKKIDKLMSISTKQKKLRLRNKCYKLRTKAKNIISDFHWKLSSFLCKNYKVILLPIFKSKKMRKNLDNISNRVLNLYSHYKFKEKMIYQSKKYNCQLIIVDESYTTKTCGCCGMINNFIGNSNIFWCSSCKIELERDYQAARNILIKNTK

SEQ ID NO: 57669 - protein, 297 aa, Filamentous sp.
LKTKSSRSYKSNPRHKKEKKSPNKTLKIRVYPELVLHQKWKSWLSASRYCYNKAIAALKAGEKITSAYSLRDYVLGLDLPDWVKSAPSHPKENAIFDAWDAWKQAKFVKGEANFRSCRQPSQSIKFHKVNFNGETWFPSLVKGLSFRSTEPIQKTEFATQLIRDKKRWFACIPVTEEVRTKELDQVIALDPGVRTFLTGYDGDSFQEFGKADIGRIQRLCSHLDKLMGRVSKASRKQKRRMLEAASKLRIRIRDLVDECHKQVVNYLTSQYKVILLPTFETSQMVVKSKRKLRTPDC

SEQ ID NO: 57670 - protein, 461 aa, Acidimicrobiaceae sp.
MEQPYRTRAVLVPLDPSPTQVQLLRSYCGASRKAFNWTVATVKANLETRADERDAGVPESELTTSISWTPYSMTPLWNSVKDEVAPWHRDVTTHAFRSGVTNASIALKNFDEARKGVRRGGPIGFPKFKDRHSKQSITFTELKRLGNWFSDDSRHVRLILPRFATDPRIVRRRDQLQWLHTTESLRRLKSKVTSGEWSVQSLTISFAGGRWQASFSVRQSVECASKAVQLRGTVVGVDLGVAYLATLSVPIPGLSDANGHVSNPRHLDGELERLAKLNRQLSRCVKGSKNRAKLIRRRQRLYGRITRTRDLYLHRLTTTLAGSFETVVLEDLRVTTMVKKSKDTTTHRLSRSILDAGFFELRRQLTYKTDDRGHRVIVVGSFYPSSKMCSHCGVTRAKLALSDRNFECSDCGVSLDRDVNAARNIHREGLRLLGNEASTVAGHQPETLNADSRERETEPLR

SEQ ID NO: 57671 - protein, 379 aa, unknown
  TnpB Polypeptide
MLKTFKYRLYPTRKQIQAIDEMLETHRRIYNNALAERKDSWEESQESVSYGNQSASYKIARETNEYYQRTNFSSVQRTLKRLDKAFSAFFRRVKSGEAKAGYPRFKGRNRFDSIEFTYSDGVKTRDNGKLYVQHIGEVKVKWHRPVVGNIKTTIIQRKARRYYVCFSAESEAQPLEPTGAVVGLDMGISNLVTTSESEFFEPPKYLRQSEHKLRRQQRKVARRKKGSNRRHKAVRVLQRTHEHIANQRKDTAHKIARKLVNEYDIIAVEDLNTIGLLKNHHLAKSIADAAWNTFILILTSKAEYAGRRVVKVDPRYTSQICSQCGEIVKKALSVRVHSCPHCNLVLDRDVNAAVNILNKAIARTGHSGANVEVVNSCVF

SEQ ID NO: 57672 - protein, 384 aa, unknown
  TnpB Polypeptide
MRPTVRQHLALATCLESHRELYNAALQERKDAWRHSRTAIDYRTQSGQLKDIRRDRPDVAIWSFSSQQATLRRLNRAFDGFFRRVKDGAAPGYPRFKGRGRFDSVEWPKDGDGARWHPDTNRVYLRGIGQVKVTAHRQVVGLVKTIQIRREGRRWALILSCDDVPVDPLPGTGRQVGVDLGIASFATTSDGVHISNPRWERRAAARLTRAQVRLARAKRASNNRRNRRETAAARHRKIANQRRDFHHKTARALVARYDLIVVEDLAITNMRRRAKPLPDPDKPGAFLQNRAAAKTGLNRSISDAAWGQFVSILRAKAEDAGRRWIEVDPKHTSDGCENCGYAARGNRVNQAVFACQACGHTAQADEHAARNILRAGLALHAHAA

SEQ ID NO: 57673 - protein, 415 aa, Oscillatoriales sp.
MLVFEFKAYGKKEQYTAIDEAIRTGQFIRNKCLRYWMKNRGVGKKELYKYCTQLRAEFNFVKDLYSHACQAAVENVERAINRFYSNCKKKVAGKKGYPKFKKHGRSIEYKVGGWKLSECRKRITFTDSKGIGLLKLKGSRDLHFYQVEQIKRVRIVRRADGYYVQFCIDSPQIDLGEQQPKNRAVGIDVGIKYFLADSDGGIVENPKFYRKSEKQLNRANRQKSKKFKKGKPQSNNYQKAKNRYARKHLRVSRQREEFVKTVALRYIQSNDLVACEDLNVKGMVKNRKLSKSISDAGWSKFRMWLDYFGKVYGTKVVAVAPHNTSQNCSNCGKKVSKSLSIRTHLCSHCGYVADRDTNAAINILKRAINTAGHAEINAWGETPSSSVGATLLGYGDSANQESSRLPWPGSVNSHH

SEQ ID NO: 57674 - protein, 405 aa, unknown
  TnpB Polypeptide
MITVNYEYKLKPTAQQKQTFETWLNVCKKVYNFALRERKDWVNSRKSPVNACSLVSEYILPPDTPRPTYYSQCKSLTTAKQIYPELQLPHIHVLQQTLRNLEAAFVAMWERGSGFPRFKKRMRSFVYPDVKPNAVEPGRVKLPKIGWVRMRMSRSLPEGFILKQIRVVSRASGFFVMLTYQLGVAVPDVPFSGHPLGIDIGLDKYLATSDGELVSRPRFFNALHRELKLLQRRLKHKKKGSSSWLKLQKRIARVHQRINDTRKDWHFKLAHRLCDKAQAIFVEDINFKAWAKGLFRKHTLDAAYGQFFNILSYICWKRGIFFLKVDKDYTSQTCPNCQTLTGKKDLSVRIHQCKNCGYTTHRDVAASQVIVQRGISAVGQPVEFQIASGGVLSGINGNISLDKCP

SEQ ID NO: 57675 - protein, 474 aa, unknown
  TnpB Polypeptide
LFGSVRRVDEHVFVWVYQAYRFALAPTPRQERKLASHAGAARFAYNFGLALVKERLDLRAAGEEVEVPWTLPALRREWNRSKGGVAPWWAENSKEAASSGLFDLAGGLKAFSDSRRGQRAGARVGFPKFKRRGRGRESYRYATGRFGVSGRTRVQLPRIGHIRTHEPTTKLLGKTKSGRARILSMTVSRENGRWYCSLCCEVERDEPRATRSERSVGVDVGVRHLAVLSTGERIPNPRALKRTWRRLRRLQRRLDRQRRQNNPGCFDERGRAVRGARFVNSSRRMRTTQRRARSLHARATNVRRDAIHKLTSRLACEFPLVVIEHLNVHGLCRSGHAGLRRALHDAALAEIRRQLEYKTAWRGGTLIQAPTFYPSSKLCSACGAAKAKLPLSERTFHCEWCGLVLDRDENAARNLEILGQRVAASGAETENARSPTQVRPGSVGHRVDREAGSALAAHQTGAACEQPQAARNTH

SEQ ID NO: 57676 - protein, 397 aa, Methylophilaceae sp.
MKRLQAYKFQLLPNGAQQRSMTCYAGHARKVWNLSLAEQERRYKAGEKFASEFDMNQWLVEWKKQYPYLAHSPSQTLQQVMKHLAQAYKAFFKGDASHPVMKKKGRCAASFRFPQGFRIEQDNHRIFLPKLGWIRYRCSRKIEGDVKNITVSFSSGHWYASIQTEREVDEPIPQATSAVGIDMGIARLATLSDGSFLEPLNSFRKHEQRLARYQRAMSRKKKFSKNWMKAKARVQKIQARIGNVRRDYLHKATTIISKNHALVVVEDLKIRNMSKSAAGTIEYPGRNVSAKSGLNKAILDQGWFEFRRQLEYKLAWNGGQLIAVPPQYTSQSCPCCGHVSRDNRQTQAKFKCVDCGFAEHADLVGAINIKAAGLAVLACGEAGQSGASVKQEPAEVT

SEQ ID NO: 57677 - protein, 427 aa, unknown
  TnpB Polypeptide
MKLSKTLKVKLGKLSNNKTTILDRVINKNIKSINFCLDKAKNGEAITHNLVYKDLRKLNLPSTIIAGARNKSIEIIKTYNKKKGKKTFPILKNGAIRYDNQVVKIRKTDNKLYKYFISLLYKATIKGKSDNRIELPLIINSEYQTEIIQQIGEIYKLGSTELLKKNNEFFIHISYSKEIDIPIPDKSFSPIGIDIGINNLSVSVARSGVKFHNGQKVKWKNEFFRRQRTKLQENFAIQEVKRLRERQTKYNDFEIDNISKNIIEQAKKELKPVIVMENLKGIQQAKANKKQRIRLHNWFFNRLQNSIEYKANWEGIPVEYIDPKYTSQICSKCGELNKRTRHTYKCESCGYEANADYNAGKNIQQVFLAKCQEEQATINLASNDTISEPKAKKNGSSFNEQSVRNFKRKGVSIPHTDKSVCILEKIL

SEQ ID NO: 57678 - protein, 408 aa, Alphaproteobacteria sp.
MASKTGPGTKPQRAYRQVTYRLLPQTRGNWRRLERVLENQRQLYNAALQERSDAWRLAGVSITWQDQFKSLTACRREIPEMAAVPVAIQRGTLKRVDKAFQGFFRRARAGQKPGYPRFRGRRRFDSISIVSGVRLEAGRLRLPGFGWMTVRRRGGTPYPDARPVSAVLKREAGRWYAVVCHPLAVAPPEDDGTAIGIDMNAGQVAASDGRLFHAPDMRRLEARKRRYQRIVARRRRASRRRARARARLARTTRRIAMARRDWHHQVSRRIAEGAHTVAIEDLKVKAMTASARGTAKEPGSGVKQKAGLNRVVLDTGWAALRAMLDYKAARVIAVDPRHTSRTCAACGHVDAASRRSQAVFHCVACGHADNADANAARNIRRRGLAQLHGEAAGVPGRGTVNTRGRMAA

SEQ ID NO: 57679 - protein, 400 aa, Gloeocapsopsis sp.
VFVYEYKVNPKPQQIAAINEAIRTSQFVRNKVLRYWMDNRGVGKTEMFRYNTNLRKEYKFVDDLNSHACQTAVERVLRAVNRFYDNCKKQIPGKKGYPQFKRSSRSVEYKVSGWKLSQNRKRITFTDKKGIGNLKLIGSRDLNFYQIEQIKRVRIIRRADGYYVQFSVHLDPRDTVEPIIPSQKAVGIDVGIKYFLADSQGNVEPNPQFYRRGEKQLNRLNRRKSKKFRKGTHQSRNYHRARCLYALKHLKVSRQREEFVKRVALRLIKSNDLVAYEDLNVKGMVKNKHLSKSISDAGWSTFKRWLDYFGYKYGKITIAVSPYNTSQNCSNCGEKVQKSLSTRTHICSHCNYVEDRDVNAAINILQKGLLSTVGQTESSKLGEIEPLARLEQSCLTKLCL

SEQ ID NO: 57680 - protein, 372 aa, Catellatospora sp.
VTRTVKRAFKFRFYPSDAQAAQLSRTFGCVRLVYNMALAARTEAWTQRQERVGYNATSALLTGWKKTEDLAFLNEVSSVPLQQALRHLQTAFTNFQARRAKHPTFRSKKRSRRSAELPDGCAPSTVTVSCDAAGRWFVSLLCDDAITQTSATGQVGVDAGIDSLLTLSTGEKITNPRHERADRQRLARAQRNLARKQKGSANLAKARINVARIHARIADRRRDHLHKLTTRLVRENQSIVIEDLAVRNMLKNHRLARAISDAAWRQLRTMLEYKAAWHGRDLIVVDRWFPSTRLCSACGALAQKMPLDVREWTCPCGAVHDRDVNAARNILAAGLAVTACGDDVRPQRESSRTRQSSRKQETPRVTKGTPVH

SEQ ID NO: 57681 - protein, 415 aa, Gammaproteobacteria sp.
MQRLQAYKYQILPNGEQQRRMRRFAGSCRFVFNKALALQRERYERGEKKLSYAGLCQLLTRWRNGTETPWLADAPTHPMQQALKDLERAYQNFFARRARFPRFKRKGQRERFRYPDARQFKVDQGNSRLFLPKLGWLRYRNSREMLGVAKNISLSESGGRWYASIQTERAVERPVPSSTREVGIDLGITRFATLSDGSHVEPLDSFRRHEARLRRYQRAMSRKVKFSRNWHKAKRRVQAVHARIGNARRDFLHKATTKISQNHTMVSIEDLQVRNMSKSSKGSIEAPGKNVRAKSGLNKAILDQGWFEFRRQLEYKLNWAGGRLVAVPPHHTSLTCPDCDYVAAQNRTSQAKFACIQCGYENHADVVGAMNVLARGYRVAACGERGSGSGHETRTKPSSVKQEPTEATMRELDHA

SEQ ID NO: 57682 - protein, 422 aa, Lentzea sp.
VNGLVKRAFRYRFHPGEAQAAELSRTFGCVRKVYNLALQARAEARTKRGERVGHEATSALLTEWKRTEEPAFLAEVSSVPLQQALRHLQIAFGNFFAKRARFPRFKSRKKSRASAEYTRSAFHWRDGVLTLAKMAEPLDIRWSRPLPEGAAPSTVTVSRDLAGRWFVSLLCEDPGVTPLPATDAVVGIDVGLDHLLVLSTGEKIGDPRHERRDRTALAKAQRVLCREHKGSGNRDKARVKVARVHARIADRRTDFLHKITTRLVRDTRTLVIEDLAVSNMAGNHRLARAISDAGWRQFRQQLQYKANWYGRDVIVVDRWFPSSKLCSVCGALAAAMPLQVRTWTCDCGTNHDRDVNAARNILAAGPAATVCGAGVRPQRNPPGGQSATKQKTPRREPWESPSITRERKSTGDLPACVGVRRA

SEQ ID NO: 57683 - protein, 290 aa, Methanolobus sp.
  misc_feature (118)..(118): Xaa can be any naturally occurring amino acid
  misc_feature (280)..(280): Xaa can be any naturally occurring amino acid
MYPNEHQKKALLETMERFNEACNFISKTASYTHTFGKIGLQKIVYYDVREKYNLSAQMVVRAIGKVAESYRVDNSCCHEFKKHGAIVYDQRILTFKTSDEISILTLEGRERITIKYGXHNNTFYLMVVVDVPDADPIDPNGVIGVDMGIVNIATTSDGEIFSGKKCTEIRQRYSTLKAKLQSVGTHSSKKHLKKISGKERRFKKDTNHCIAKAIVQIAKDTNRAIAIENLKGIRTNGTVNKAVRTAIGKWAFDELGNFLKYKAALAGIPVFEIDPKNTSXEGQATLFIGW

SEQ ID NO: 57684 - protein, 320 aa, unknown
  TnpB Polypeptide
LQSSLVQSARNLAATALGNCKDRLIEDGEKASKPEFKGTVVVYNGRTITYNDDHVSLAPVDDRVTAEYVTPVNKEGTPSEEYWTDEWKKGEATLHKRDGTYYLHVAVKKEVEPDSTDEASENGVVLGVDLNVDGYLAVTSTGAFFGNADSLNHKRNEYERRREDLQQTGTRSAHLIIKSIGSRFARWSADYLHRVSKALVQEAVENDCTAIAFENLTIRKRISNGSKLQQWAFRELQRHVEYKAEECGIDVDGVKPQYTSQRCSHSECGFTHEDNRDGDEFECLKCGKELHADDNAARDVGWRLSTGSRLVLSEPPVNWL

SEQ ID NO: 57685 - protein, 416 aa, Halopenitus sp.
MDVRRTSVVKLAVSDEQRDALHRTADQYLYCANRTADYCWSEATYTECKTNKREVRDTLYSELREETELQAQLVQAAIRRAVEAIKGVVERWKKGQRVSCPTFTAETMDYDARSATISRNRVSLATVEGRVEPSFVLPAESPTPYERYVLSEDYEFRESTLRYDEATDEFYLNISTRRTDGDDAEGPADTEHPDQTVLGIDLGVNNLAVSSTGTFWQGDDYDHWCREFEKRRGEMQQRGTQAAHNALLRLGKREEAWRTQYIHTIANELVSEAVEHDCDVIAFEELSDIRERLPHAKWHHVWAFRRLFEYVSYKAPEQDISVEKVEPNHTSQRCSRTDCGFTHEDNRQGEQFECQKCGYEVNADYNAGKNIGVRYARKRTHKLRSSPTSGGGDALVDVRVNGGIVNGKSHQSIAGD

SEQ ID NO: 57686 - protein, 438 aa, Halopenitus sp.
MLEVHRTHRAKIRNHSQVADSFDRHGWSASKLWNVANYYSREVWEGTGEIPDHEELKDELKTHTKYKGLHSQSSQRVLEELAEAFNSWYNSDDDRDNPPGYRKQNYYDDQDRRVHEEHPRSTVTWKQNGIRHDTKNNRVRLSKGANHKEHPRAWEYILVEYKTRPGVEVDNLQQVRAVYDQQNERWELHLVCKDEIETPTAPGNETAGVDLGICNFAAVAYSTEEADLYLGNRLKQDGYYFPKEIANCDDSSGERATRLHAKWSERRTHFFHSLAKHIVQRCIEKDVGRINVGDLEGVREDENGDSKNWGQHGNLDLHGWAFDRFTNILEYKAKVEGIEVVEVSERDTSKTCCVCGREDESQRVERGLYVCEECDAAFNADVNGAENIRLNINDESNSESWDNLDEDRSTGWLAQPGVYLYDLSCGFQPQREVVDCKP

SEQ ID NO: 57687 - protein, 376 aa, unknown
  TnpB Polypeptide
MIKSIKIRLIPTQEQEELMLKSVGVARFTYNWGLSKWEEMYKKGLKPSKAKIKKEFNNSVKKADEFKWLYEVSGQITSQAFADLEVAYKNFFNKISEKPKFKTKKKSKKSFYVRYDAIKFKNNKVNIEKIGKVKYSSNYKIPQLDKYFNPRCCFDGKYWYLTIGFEHGESKARVNNDLSIGIDLGIKELAYVNCLEKPIKNINKSMKVRKLKKKLKRMQRQVSRKYEMNKSSNKFVKTNNIIKLEKQIKLIHRKLAHIRTNHIHQATSMIVNLNPYRVVLEDLNVSGMMKNRHLSKAISEQKLSDFIRQMKYKCEFKGIEFVQANRFYPSSKICSCCGSIKKDLKLKDRIYKCDKCSLVIDRDKNASINLGKYKSA

SEQ ID NO: 57688 - protein, 366 aa, unknown
  TnpB Polypeptide
MLRSTKHILKYQTGTKSKQLDQLFQDYKVDLQFYVDQIWDKKLPLKKFLSTKDCPSNILTHSTWKSALYKQASGIIRSNKEKNKKSKPEIKSVSISLNEYLFDIEFQSSGHFDEFIRIRLPYFQDGKHRAVTINLPIKYHKHYLKYADWKRKKNIKLVKDSDGKYFVFLTFEKEAPVIKTVGKSLGIDIGYKKLLSTSDGQFLGTDIEKVCTDISKKVRNSKNFKQNLRFRDNEINRVVNELDLSNVNSLVIEDLKNVKRNTKKDHRVLTKFMNKLQYWVYLAAIGKLVRACEENGVLLTKVNPAYTSQTCSVCGSIHKESRVGERYKCIDCKVEMDADYNAAINILHRVAKEPCQKSLSTINCGG

SEQ ID NO: 57689 - protein, 431 aa, unknown
  TnpB Polypeptide
MITIKLKYKSNTDFQDFLSNLQRQFSNVYRYSYNRFYDGLSKKEIYHLIPSLNNVELIKGRLINDCIDFAYRLYEKDKKSNHKSIFGGKKNFILKCKEKLTNEQFSQKRLISLYFQGETARSGNRNFNLDILNNTITFKYNKQFHFDLSVKPSKNQLKQLIELQDLCNQKKSKFTITLSHEFINISFEPTKHEVIDLIDDRFVGIDLNPTNIGMSICNSKMEVIDSYDFEFSEIINKIKKSKVASNSKEMKYLNNKLDYEILNISKKISGISKHYKCKFIFIEDLEFKSKNEWNNRLLKNLWKRNIFIQNLEKRCGIANQRLFKVNPAYSSFIGNCMYDIVDPVNSSMEISRRGYEIIINKSKKFYPVVWLKESLKHQWKEKVSDIPDSWKELFDLVKNLKLSYRVSLKEDVNDFNVFSKKVRMYDIYQFS

SEQ ID NO: 57690 - protein, 407 aa, unknown
  TnpB Polypeptide
MASGDGGLLTISIGMRVSPEPEVVELLRRYNVALNYAINKILRLNLRSIGSVHNALYRELREWFGLPSRVAIDCYRDALANANAWRNNPKKGRRPRVRKLSMLLHPGSGYRVKEGYVEIIEGIRMKIIGWDRRYDQYENGEARLVYRGDKMILWISKKIPKSEPYQPRDVIAVDINERKSVYGDHVINGERDTKIDKAHRWKKLAEDLQKKYSFTRYPTWRRRKAILNRIRSYHRKARNILEDWARKTSLEIVRLAKKLRYAVAREDLTGLINSLRRIKNKDHRTKLIIMGYSRLGKWIDWHAKKQGVLLAIVKPNGTSSKCPKCDSKELEETGYRRPRYPRCGFEADRDVIGKLNIRKRALKMLRIKADSGGSLTPLTAPQMTDVVQSRWGEPMIRLKGMMIKMTT

SEQ ID NO: 57691 - protein, 442 aa, unknown
  TnpB Polypeptide
MKIISSYGVELRKQNIPIRQTLEIYRSAVRYLVEVYESVWEELAQIEESKKRFNAAEHLVHTTKRNPARFDFDFCFPKMPSYFRRAAVQHALGSVSSYRTRLEQWKAEGQKTGKPYLKSEQYAMPVFYHDVMYRENTEEKDAAFLKLYDGHDWKWFAVRLKHTDMEYLRKHWSGKKASAPTLEKKHDKYFLRFTYAEEVALNRTPVKEQTICSVDLGINTDAVCTIMRPDGTILGRKFINFPSDKDRMYRVLGRIRRFQREHGSRQVQGRWAYAKRLNTELGKKIAREIVFYASENRADVIVFEYLEMKGKLSGKKKQKLQMWRKRDIQKRCGQQAHRKGIRISRICAWNTSRLAFDGSGKIDRDIQDHRLCTFQNGKRYNCDLSASYNIGARYFIREILKPLPATERSLLEAKVPAVKRRTSCVYADLRDLISEMELRKAA

SEQ ID NO: 57692 - protein, 210 aa, unknown
  TnpB Polypeptide
LGAECGVKPPKFFKKLQSELKLLQRRLKRKQKRSKNYEKQRLNVARLHHKIDNTRKDFHYKQAHALCDAGDMVFMEDLNYRTSAKGMFGKHMLDAAFGQFRTIVKYVCWKRGKFFGEVDARGTSQQCPECGGEVKKDLSVRVHDCPHCGYKTDRDVAAGQNIRNRGIKLISTVGQTGTETACADDLPGIEVTQSRSVSQPRKGKTRKSKK

SEQ ID NO: 57693 - protein, 394 aa, unknown
  TnpB Polypeptide
MKTAYKFRMYPNKQQEALLDVTLEACRHLYNTALADRKNSYELEGISRSYEDQAAILTLEKKDNPCLNGVFSQVTQDVLRRLDKAFKAFFRRVKARENPGYPRFRGRGWYKSFTYPQVGFKLDGSRLTLAKIGSIRIFKHRQVEGKIKTCTLKKDHLGHWYAVLVSQIEDVAQVELKTVLGVDVGLKSLMTLSNGEAIQYPRYYVQVEQKLAVAQRNLSRKEIGSSNRRKARIKVARQHQRVQYLRDEFLHQVSRKIVDSADLIVFENLNISGMLKNHHLAKHIQDHAWGKLIQFTQSKAAKAGKIVELVDARYTSQKCSQCGIMVPKTLAERTHACPNCGLEVDRDLNASMNIRTLGLKGRAYRDMAKNQPVSEVGSSANWVERKSPQVDYGI

SEQ ID NO: 57694 - protein, 241 aa, unknown
  TnpB Polypeptide
VDVGIARFATLSNRQVFEAVNSFKQKQTRLARYQRALSRKVKFSSNWKKQKGKITQLHSTIANIRKDYLHKTTSTISQNHAMIVIEDLQISNMSKSAKGTVEAKGRNVKAKSGLNRSILDQGWFEFRRQLEYKQVWAGGQVIAVNPRNTSRTCPCCKHVSAGNRQTQAKFECVECGYTENADLVGAINILAAGHAVLACGVTVQQGRTVKHEPTEGIRKSSRQPVGIPPALAGGGCQLNLA

SEQ ID NO: 57695 - protein, 363 aa, Limnoraphis sp.
MQRAYHTKLKLNNKQKTLMAQHAGYSRWVWNWALGMWNEAYKQGLKPSTNKLKKFYTNHVKPQYSWQSTLSSRVYQFAFMHLGEAFSRLFQGIAEYPKFKKKGKNDSFTLDNCGKVMRFSGRRLKLPFIGWVFTYEPLPEINTKRVTISRVADCWYISVGYEFEPEQTVKSREYLGVDVGVKVLATCSDGTVFANPRAYKKAQKNLARLQRELSRKQKGSNNRNKARLKLAKAHQRVANIRKVSIHKLTSWLCKNHAVIGLEDLNVSGMLKNHKLAGAIADSALYEIRRQVEYKSSWYGSVVVFADRFYPSTKTCSSCGHVQEIALKERVFHCKNCGEVKERDYNASLNLLHYAEGFSADLPV

SEQ ID NO: 57696 - protein, 411 aa, Nostoc sp.
VPAIQKAFKVTLIPTHNQEVLINKTIGCARYVYNRFLALRKELYNTEQKTLSYNACSQQLTVLKKENEWLKEVDKFALQNSLKNLETAYKNFFADLKKVKSKKVVGVPKFKKKHGCKQSYKTNLTNGNIQIIENRLKLPKLGWIKFHQSQDINGKLVNVTITRTSSGKYIASILCETEIEKHFQVTQNIGLDLGIKSYLVTSNGEVVDNPKYYRTQKRKLRKAHKKLSRTVKGSSNRAKAKIKLARTYERITNLRDDFLHKLSTRLIKENSIICIEDLRVANMVKNHKLALSLADASWTKFVTMLEYKALWHDRIVQKVGTFYPSSQTCNHCGFINPLVKDLKLREWSCPSCNSYNLRDKNAALNILSEGLRLLTAVGTPEVIKNACGELVSPEVIQAQIVEAGIKPLLVV

SEQ ID NO: 57697 - protein, 268 aa, Clostridioides sp.
MKNSLKKRQDFLNLNQRKLIDFHIKLPKLGMVKIRDKQVPKGRILNATISKEPSGRYYVSLCCTDVDIEAFENTNNQIGLDLGIKEFCISSCGEFIENPKYLKKSLNKLAKLQRELSRKTIGSLNRNKARLKVARLQEHIANQRNDFLQKLSTKLIKENDIICIEDLQVKNMIRNHKLSRLISDVSWSEFIRQLEYKANWYDRQIVKVGKFFASSQICNKCGYKNEEVKNLNIREWICPSCNETHDRDINASINILKEGLRLITIQNK

SEQ ID NO: 57698 - protein, 351 aa, Brevibacillus sp.
MQALTVKIRIFPNQPDVLRQLGQEYIQIVNKLTEQAEQHGTFPKVTTKDVETLLPSAVCNQAIRDAKNIYRKIKKLSTRPILKKPVYFVNNQNYTISENIVAFPIVVDGKTKKTAFHAITTSRDMVLLGKAKTGLMRVVEKSGKWYAQISLEVPTAESNNENVMGIDLGLKVPAVSVTSTGKTRFFGNGRQNKYTRRKYQQRRRKLGKLKKMSAILKFGNKEQRWMKDQNHKISRQIVNTAIQENVSLIKLERLTNIRKTARTSRKNAKNLYSWTFYQLQQFISYKANLVGIRVSEVNPAYTSQICPACGGKNKVRDRKYECSCGFNAHRDLVGAINILNQPLVDGNSLPA

SEQ ID NO: 57699 - protein, 382 aa, Lactobacillus sp.
MTLKGVKLRIYPSLEQQDKIVANFGYNRFVWNQMLDMMIKRYENNPKAPFLNAFALNNLLKQLKVENPFLKDAESTSLQNTNHDLVEAYRKFFKDHKGFPKFKSRKFPKQSYQSNIVGKNIEVQGNKIKLPKLGLVTFKCGKKIEGKIKKSTLHISATGKFYAILLVDTEITKLSKANNSVGIDMGVADLMITSDGVKYPTIRFDKILAKKKHYWEKRLARRRLQAKKEIAWDKHNKVLEPRELSDFKNYLKAKYMVAKYNEKIANQHNNYIHNLTKYLVEHYDVIKIEDLKAKNLMKNHKLARAIANQAWREIRRQLEYKCEWYGKQLVIVNPRKTSQICSNCGYDDGKHTLGIRQWTCPNCGISHDRDINAAVNILQATK

SEQ ID NO: 57700 - protein, 467 aa, unknown
  TnpB Polypeptide
MSKSSNEITLKFAYTCVTQEDSNRILEYIKNYNCVLRYVYNRLYDIPNHSMSTKDIFEYIRNMENVFIDTYFENGAVYEAKALIKNTKDKKVIFGGKKLFIERCQNKISKEEFKLKRLHPLQVVGASYNHGNCKFQIIDETTVLFKPTKDEHFNLNLLSTGKNYNEYLKLLIQAQKDNKLPITYKLDMNYVYITFDINILKPPTKHSYISDRILAIDMNPNYIGWSVNDWHNADDFKVIKSGVISLKPLNDYENSLSLASNDPEMIHITNKRHYETIQIAHTLVKLAKHYKCEIFAVEDLTMFTKDNGYGTGYNKLLNKQWNRNLLFNILYKDCSQNSIYFHTVTPDYSSVVGNLAYRYLQLPDMVLASIEISRRAYEFYHQYILEDKPKVKNIIFNNSKKVLNSIEKSAEELGFTGTFKNIKDLYNKLKKMSCNIRFPLECALKVHSQSLFSKNYIKKYTIFYEFT

SEQ ID NO: 57701 - protein, 438 aa, unknown
  TnpB Polypeptide
MKTKQIKPSNRWLNLVEKTIIKQNDKLFPILDNLCFLSKNIYNCTIYQFRQAFIHEHKYLSYNEVDKYFKDTNNVDYTALPRKVAQKSIQLASQMFTAFYGSLKSKKENKSTKKVGLPRYLDSVTGRQTILYTNQAVSTKKLKKEGYYTLSQVTDATNNLIKFKTSVKNIQFVRISHHGNHIIIEVGYRVYKPFPKTTENIAAIDLGVNNIVTLTTNFDSPYIINGKPLKFINHEYNSKIAKIQSTNSHCNNIKDNVWTKRMYDINLRRYCQLNDYMHKISRFIVNYLVSNHVSVLIVGKNNGWKQNTNMSKTNNQNFVQIPFNNLIHMLTYKCELVGIKCVTICESHTSKCSFIDNEKICHHDNYVGKRKSRDLFYTKNNLCINADVNGSYNIMRRWCISNNKEHYLKFNKYLVCKNPTIITLKLNGKKCNIEEYIN

SEQ ID NO: 57702 - protein, 258 aa, Salmonella sp.
MKRAYKYRFCPTPEQVELLAQTFGCVLFVYNNILRWCTDAYCDRQEKLGYTQADKCPTAAGIFMARQCFRRTAPESDPSPTNRLCQFLCRTDEIPDIQKQAATFMNTAFKYRDGRLYMAKSKTPSDVRWRRERPSAPSPITISKDAAGRYFVSCLCESEPASLPVTTKTVGTDVGLKNLFVTDTGFKTGNPRHTAKYAKRLALLQRRLSRTQKGSKNRARGRLKVARLHAKLPAAGWTTGTGCPANGLTGTRLFASNP

SEQ ID NO: 57703 - protein, 464 aa, unknown
  TnpB Polypeptide
LSTGRYRNWSVRSLRSSCDSRSRLAITDLSLSSASNASFSLSKRYWAAALRKPLRIHPRRLGAGCSPCISCIPDEAHDRFWSREKEDIQVSNYQVRRVKIGTSEHLNELARECGRLYTQALVSFWRTVRRKGIWLKPKHLMRWHTSKHLHAHTANACVQAFFAALSSWRQRRKDDPDAKPPHKRKWYFRIEYKRSAMKLVQGTLRLSNGQGNAPLVLPWPWDLPNTVVIRWTGTQYEAIATYQAHIIASPQGERVAGIDLGEVHMAAAHDGSDTHILNGRILRSKVQYRNKLQATLNSRIDGKMKKGSQRRKRVIRSKKKQLKKIEHQIREIEHKQTSTLITTLHQAGVRTLVIGDVRDIRQATDVGSTNNQKIHQWSHGRVRFLLTYKSQRLGMEVVLQEEAYTSRTCPKCGHRRSKVTGRVFRCTNQRCKFSWHRDGVGAVNIRYKYRGEFGVPHVVGTRMV

SEQ ID NO: 57704 - protein, 402 aa, unknown
  TnpB Polypeptide
VYNSGQFLSPQPGKPVRRRGGYGGQQTTLKVRLYPNEAQADLFEKTFGCCRCIWNQMLADQERFYLETGKFFIPTPAKYKAGAPFLKEVDNQALIQEHNRLNQAFRLFFKHPENFGYPKFKRKKEDRDSFTACNHDFPSGPTIYTTKDGIRMTKAGIVRAKFHRRPQAWWKLRRITVDKTRTGKYYACILYECPAAEREPVPPTPEKTVGLKYSIPHFYVTDGGETADPPHWVKRSQEKLANIQRSLGRMQPGSKRYRETVQKLRLTHEHIANQRRDFIHKESRRIANVWDAVCMRDDHMEDLGKAVSLANARDWGYGMFRECLRYKLEREGKQLILIDRYVPSTRTCSVCGFLREAVHYKERTWACPKCGAVHKRETNAAKNIKAQGLRQYFSMQERRESA

SEQ ID NO: 57705 - protein, 517 aa, unknown
  TnpB Polypeptide
VQIRWNFKLKPGSRQRQQMSRWLVTLRKHRNYALCERENGYNTNNQDAMEPVAYAWGSWCDLDTRTEYGVCCPLTCPVLKHGVVPIDIKMALKTTKSKVDKITGEVVKPSVTVWDSASGIQSKVTSQLRSKWKSYTEIDSCVLQRNLAKLDAAYANFWKHGRGFPQYKRALNSFEYKPDRVKIVSRKDNYAIVYLPGIGNLKMHNSRDLIRIEQIKTCTVTQKGGEFYLSMLVEIPDILPEVKPLTEAKSVVGIDVGVNKLVSLSDNSFVENIRLTTNNKTARRLKMRQRAASRKAKGSKNKSKAYKRLAKMHHQLTQKRDGYNWQAASKIVKTADVIAREDLNIKNMVKRAKPKHDGKGGYKLNGASQKTGLNKVILDCGWGDLFGKIAWLALKAGKPVVEVPAKYSSQECPKCGHVDNKNRDGEKFICTNCQYTEHADTKASRTIAAKVGLVFPKKIKKTLPRDSGKVTPIRYQSLRVEGRNHASGVIGTQLSLFDIADYQSSDSRVSRKYGRKS

SEQ ID NO: 57706 - protein, 440 aa, unknown
  TnpB Polypeptide
MLRAYKYRIYPTDEQKEMLAKTFGCCRAAYNWALEQNEKAYLERGESISEFDMKSRVIHDYRDVQAPWIREVSAKAIEFSVADLYAGYKNFFEGRASKPNFRSKHHRQHFHDRGNILADIKRGTISIPKIKDIPCVYHRRFSGRIKQVGVELLPSGRYYVSILVDNGLALPEKAPIDPKLTIGIDVGLKHFAQLSDGQTYEPTHEAKREKRKLKLLSRRLAKKEKGSRQFRTLKRRIARLHERVANRRHDHLHKITHYLACENQATTICVEDLNVKGMQRNKHLAYNIADAGIHEFYRQLEYKCAWAGKNLVKIDRFAPSSKRCSHCGYIYKQLTLKEREWTCPECGTHHDRDLNAAVNIKHFGLSDQKTLPSVRRKVTPVEQPLVDDRSSEPKKLHCCYTARRARADEAGKVKVNEHPMPENFSSQPPKSHSSAETYTQ

SEQ ID NO: 57707 - protein, 411 aa, Halobacteriales sp.
MDVTLRFRAYPDEDTASEAWRHIDIHRQIRNHAVRDYYRAPRDDRPSAYDQHRKLTEWKRQWPVFAEVSAHAAQQTVSQIQKDQTVLKTHREDGRKTGRLKWQGAGEFRSVAYQSEGFNVNHTTGQEVGTLTLSKIGDVPIRAHRDLPDTENVKRAILKKERTGAWYACFVVEANAAEKPDPADIDPADCIGVDLGVLSYIHTSDDLAVDCLDLSDEYDRYAHAQRSLDRKEHASGNWENQRQAVARAKRRIKRKVLDFQHKLSTWLVKEYDVVAVEDLDVKPMLETSQSAKNKQDAAWSQFLDLLKYKGELYGTHVVRVDARGTTKACNECGVETSKPLWVREHSCPACGHTEDRDLNAAKNVLDRGLNSLHVGAGRSESTPVQTVLPAFACQSRRADAKDVVEAGSPAA

SEQ ID NO: 57708 - protein, 417 aa, unknown
  TnpB Polypeptide
MLRAYKYRIYPTDEQKVLFAKTFGCCRFVYNWALNLKITAYKERKETLGNVYLTNLMKSELKAEHEWLSEVNSQSLQSALRNLDTAYTNFFRNTKAVGFPRFKSRKDRQSFLCPQHCRVDFEKETITIPKAKDIPAVLHRNFKGTVKTVTVSMTPSGKYFASVLVDTAIQVLPPIRVQVDTALGIDLGIKSLAVCSDGRTFDNPKNLQKSLGRLKLLQKRLSRKQKGSSNRNKARIRVARLQEYIANSRKDNLHKITHALTHDSQVRTICMEDLNVKGMQRNHHLAQAVGDASFGMFLTLLEYKCSWYGVNLIKTGRFAPSSKTCGKCGHVYKGLKLNERSWICPKCGTHHDRDFNAACNIKEFGLKALPTERGKVKPVDCPLVDDRPRVLKSNGRKKQEKRGGIGISEAAKSLVLR

SEQ ID NO: 57709 - protein, 258 aa, Escherichia sp.
LPIEARLHREITGMLKSITLSRSATGKYYASLLCDDGMEAPAKPALISNVTGLDMGLAHFVIKSDGNKIASPRHLINASRNLRRKQKALSRKKKGNANRRKARIQLAAVHERVASARADFQHKLSRAIVDENQAVIVETLKTANMMKNHHLARAIGDAGWSGFITKLEYKATEKGVHLVKLDQWFASSKTCHCCGHKMSEMPLHKRIWQCPECGVEHDRDINAALNIKRKGILELQAAGLVVSAHGGQHKSVTQTVAA

SEQ ID NO: 57710 - protein, 402 aa, Escherichia sp.
VERLQAFKFQLRPGGQQEREMRRFAGACRFVFNRALARQNENHEAGNKYIPYGKMASWLVEWKNATETQWLKDSPSQPLQQSLKDLERAYKNFFQNRAAFPRFKKRGQNDAFRYPQGVKLDQENSRIFLPKLGWMRYRNSRQVTGVVKNVTVSQSCGKWYISIQTESEVSTPVHPSASMVGLDAGVAKLATLSDGTVFEPVNSFQKNQKTLARLQRQLSRKVKFSNNWQKQKRKIQRLHSRIANIRRDYLHKVTTTVSKNHAMIVIEDLKVSNMSKSAAGTVSQPGRNVRAKSGLNRSILDQGWYEMRRQLEYKQLWRGGQVLAVPPAYTSQRCACCGHTAKENRLSQSKFRCQVCGYTANADVNGARNILAAGHAVLACGEMVQSGRPLKQEPTEMIQATA

SEQ ID NO: 57711 - protein, 420 aa, Haloarcula sp.
VSNQVVTRTLKASVTNHSQVSDDLDSHGFAASKLWNIGRWTISRVWDAIDHIPSADELCSYLKNHERYADLHSQSSQRVLQELGEAFVSWYEQDDPDANPPGYRKHGDEHPRSTVTWKNKGFKLDTEYNRVRLSKGTNMKESRYAADYILCEYTIQADDQTLSDVETVQTVRSVWTGNQWELHFVCEMQIETSESPGEKTAGVDLGICNTAAVSIGDETLLYPGNALKEDTHYFRHEEYNTEGENGPSNEAQRLRQKKSRRQDHFLHALSKDIVEQCATRNVGTIAIGHPKKIRDDSDWGRHGNKRLHDWAFETLLSHIEYKAEERGISIERVPEGGLKTSKTCCECGTEADSNRVERGLYVCSECDLVANSDLNAAENMRATVTPSPSQDRSNGCLAQPSVRLFDKSTGRLRPQEQVVP

SEQ ID NO: 57712 - protein, 363 aa, unknown
  TnpB Polypeptide
MKKTFKYRIESNNNTVQAAVKVVDLCRILYNLCLEQRIFAWKHYQKSLSKFEQIRQLVGLKKVFPEFSDVPSQSLQDVIDRLDKAYESFFRRVKNGETPSFPRFKGYDRYHSFTLKQAGWNINGKYLSINKIGKFKTRFSRPIEGDIKTVSIAKNCSGKWFVCFSCDNVPDRPLPKTGKEIAIDVGCESFLTDSDGSKIENPRFLNKSAAALVKLQQSLSGKVKGSNNRKKAKLLLSKTYEKIKNQRRDFHFKTANQLVKNNDKIYIEKLNVWKTFRKLNRSMRDAAWFNFFDILRFKAAEAGKEVLEVLAKGTSQICSGCGAEVPKALSVREHSCPHCGLVIDRDYNAALNILRLGQSLCPA

SEQ ID NO: 57713 - protein, 585 aa, unknown
  TnpB Polypeptide
LRTTASPACSAAPYRRSQQWAASAQQCVRASPTSLAAPSTRASRSRNADRTRRRRPRRTKPLQPARARRRSRQHRPKPRCKKSSDAPTSPTRSDATHSPIHPSRPRSRPKVLPPASTPRSRQALRNSWAARAQRERVSVVLEAVKVALDPSPVQERLLLSHAGAARFAFNAGLAHVKDALDAGVKPEWSFYSLRKWWNSSKDTLAVDADGTPWWAENSKEAANTGLRSLAAALSNWSKSRRGERRGRKVGFPKFKAKSKAALRFAYTTGAFGLIQGDPKALRLPKVGRVHCLENVAERVGDARVLRMAVSRRAGRWYASLTVERDDKPVTKPPQGGVVGIDLGIKTLATLSDGTVIENPRCLAASERRLKKAQKALSRKTMGSNRRAKARAKVARIHARVANQRIDAIHKATTWLAGTYSHISIEDLNTAGMVKNHHLAKAVSDAAFGEFRRQLEYKTARNGAALHVVDRWYPSSKTCSKCGAVKAKLSLSERVFHCDGCGLVMDRDLNAAINIRVAGSAPETQNAHGETRSRGNQHGCATQVPLKCEPSGRGGNVVSDLEREPARTPCKLQQSSLQRAKKGDQK

SEQ ID NO: 57714 - protein, 502 aa, unknown
  TnpB Polypeptide
MGGELQENALIMGQLVSEIRDISAYATYVVRNDVVLGAELAQVTAIAPSEAGRQAGVTMPDFLASGRTGKSRKEKLVQHNVVAAYRSWQERINAANGETSRYVSQGWKRTVNASAPSYGGDYVNLGAVDKNYAVIENNPFTDGEIILKMVIQGAWYRLIFMFDNARFMESKVTLPLIKVENGRPVFVFAVVTDNPIVQFSGDYTIGVDVGINNYATVVVHSSSTGRVVYETTLSQRVHSLWNSVRASERQVRTLKKKADTLLSQRQARMAALDEAQLHREAASRKKRELAILAAQEIAHLSHMYDNAVVATEDLGWVSDTMSHGRWNRGAFTQWLTHYVSQNGGWVVAVNAADTSQLCHLCGSKVTHPVHEVSVCPTHGAMDRDVNAAANIAARAVPKVVKARKTRAKNRRLQSRAALKTPMTRRSLKYPGRDRTKTAPTPKRAKRKNHPRTVREVILPSSPARAIPASVLADCGTHGATGTSQAAIKQGNMTDECRLCSLN

SEQ ID NO: 57715 - protein, 373 aa, unknown
  TnpB Polypeptide
VHKATFRYRLYPTPAQETALHATLGECRWLYNRLLEERKLAWEETETNVRLYDQVNRIPALKPERPTLDRVHSQVLQNVTTRIDLAFKAFFRRVKAGEKPGYPRFRGAGWYDSFCYPGSGHKVEGQRVFLSRIGHVKAIIHRPLEGKIKTCCVKRTGTGKWYATFACEIEDAPLPASESAVGIDVGLASFATLSDGTKIANPRFFRTDERALAKAQRRLAKEPKPEKGQRATPERRKAKKVVARVHERIANRRADFAHQRSRKIANQHGAIAIEDLSVNRMVHNHCLAKSISDAAWSMFASMLAYKAASAGRRFIAVNPAYTSQDCSRCGHRQKMPLVERVYRCPCCGLEIGRDHNAAINILTLGLQSLGANP

SEQ ID NO: 57716 - protein, 439 aa, unknown
  TnpB Polypeptide
LSIAVSVRALKWCHTVGTIDDDNLHVAAASRFDGQLRWFHKVRLYPTCAQERALIEVLRVTRELYNAMLQQRHDAWTMRRMAIPSKRQYAEITELRGCDPRFAAVYRECEDAALRRLDLAFAAFFRRLKAGEDPGYPRFKPARRWNQIEFPHGDRALRFDAPQRRMYVPGAGFVRLRKGRPVPEFGRAFIVMKNGRWYAIFEAHRKAEPLERTGRNVGVDRGIRILAALSDGTKIPNLRPGSARAAVVEWHARRLDALTEKDAAGRVLNRHDWQRTAAARRLARAREREANARRDWLHKQSRTLVDRYDLIALDDLQLRSMTRSAKGTVEKPGSNVRAKAGLNRAMLDAGFGILGTLIREKAAHAARTVVSVDPRFTSQTCAACGYVARESRKEEQFACVRCGHEADADVNAASVILQRAESPPTRALGTARGRLHDAA

SEQ ID NO: 57717 - protein, 246 aa, unknown
  TnpB Polypeptide
VTVIQEPDGRYYASFVVDRDPTPLPPVSRTAGIDLGLVSFATVAGSDGTIETFANPRHLRVAERRLAIAQRQLSGKRKGSKNRAKARLRVAVAHRRVRDQRADHHHKLALRLIRENQTIAVEDLAVAGLARTRLAKSVHDAGWTMFVRLLEAKAAQHGRQVVKIGRWTPTSQICSACGHRDGPKPLSARAWACPGCGTVHDRDTNAARNILVAAGLAETLTACGGHVRPRVILALASEAGTHRGAV

SEQ ID NO: 57718 - protein, 472 aa, unknown
  TnpB Polypeptide
MAGVGRFVIPDGWVARGWRFEVETTTSVQQSLIQQHFGARRFAYNWALAQVKANLDAREADPSVPALAWTLPTLRKAWNQAKTEVAPWWRDCSKEAYGSGIADLVAALHAWSTSKHGRRAGVRIGFPRFKARHRDRGRVRFHTGTMRLEPDRRHLTLPVIGRLRCKENTRRLERVVAKGRARVLSMTLSEQGGRLFVSVTTIVVQVPRTPREPNGRCGIDLGIGSEWAVIAHADDTIERVAHPAPWAATKQQRRRVARQASRRIVGSRGHRQAKAKLAALDRRAANLRRESIHTLTATLARRYGTIVVEDLDVAAMGRGMGRRAFRRSVYQAGVGRVRPILSYKTSWAGGRLVVVDRWFASSKTHHGCGGYRDDLALKERRWVCPRCGVGVDRNANAARNLRDWTGPVADQAVQRGRVAAPVPFVGDHGGQAHAAAWACEASQDHREVAEANDTRTKPDPRVRNPGQGYQAE

SEQ ID NO: 57719 - protein, 386 aa, unknown
  TnpB Polypeptide
VSILTRTLRVQVYPDKQIKKELGRTFEEYSKAAQTAYNYAYTNDTSNRIKIHHAIYKSVREKSSLNSQLVINAKNKAVDVIKSLKAKRIKRLVNFSHKIPIRYDYRCSTIFHESRYVTLSTTKKRVTLQYSLPKCYQQYTDWEFRSFELLKRGDRYFLHFAVRKYSKVEGKHSGKFIGIDRGIKHIAVTSQNKFYNGIRLREIKNRYFRLKRGLQKKGTPSAKRRLKQIAGRERRFQRDQNHCITKTVIQNMKLNSTIILEDLSKIRKTAKYRKRSRHSRELNSWAFYQFQIFLEYKAKEKNIEIIYVDPAYTSQRCNNCAFISRKNRNGAHFLCTSCGFNLNSDLNASRNIEDKYFNDEYVLNKLAQKAIGFLRGAPVIIPIVAS

SEQ ID NO: 57720 - protein, 393 aa, Halobacteriales sp.
VSATATKTLEATLAPPTAHKERRLQRTVATYRRALEDAFESGADTQTAVNDIVTDYTLTSYAKDALKSYVPQLRDAYNALNVDDDHPVRFTNRGWQLDHSEEREYQFCWRVPQAGRGNAFWIPLRINPAQQDLWDKLLDGEVMVGEFRLQEHRTNWVLHVTIEYPVPQTERSDGPTPIGFDIGESKLLTGCALTDDGTPTQPFLVDGGRARHLRKEMFTTLSRLQERDADWRMDERFDHYQNALTDIVEKTSRQAVEYANEFEDPVIVLEDLSYFREGLDYGKFMNRRLHGWAFARLQSRIEDKATDAGIPVEFIPPAYTSQTCHECDHVGTRKTQAEFRCTNDDCWVTEYHTDINAVARLRLAGSQKSPISGDGVVIRVHFVPAWNLNKFPL

SEQ ID NO: 57721 - protein, 438 aa, unknown
  TnpB Polypeptide
LRREVPFLQGGDESRPNTFGDLSLRKSGIKGLARIRSESKPVQLTYRYRLYPSRAQEQKLLVTLDQCRWLYNHFLERLNRKRDGKTPRRYELQATLPSLKRERPALKHVHSKVLQMVLHQLYSNLRALAELKRNGRKVGRLRFKGRGWFKSFAYNQSGFKIIEGHGKRRELWLSKIGAIPIVLHRELDDKAKQVHVKREHSGKWFACFSIEVDDAQKVGKLSKPVGIDLGITHYIADTAGNFVEHPHNIIKSEWRLRREQRRLSRKKKGSRNRAKQCIKLALVHERIRNQRLDFLHKLSRRYVNKYDFIVVEDLGVKELIEMARNGKNRADAAWATFLRMLTYKAERAGGWVVRVEPRGTTNRCSRCGEIVEKPLWVRVHKCPNCGLELDRDLNAARNILRDGLKKIGREPAEFAPVEIGPLSHSGTSLVAEAGSSAI

SEQ ID NO: 57722 - protein, 367 aa, Bacillus sp.
MANKAYKFRLYPTDAQKHLIAKTFGCVRFVYNQILSTCKERYELHKEDKESLKKLKFPTPAQYKTSFPWLKEVDSLSLANAQLHVQKAYKNFFAKRASFPRFKSKRAKQSYTTNVVNGNIMLFHSYIKLPKLKMVKIKQHREIPSHHKIKSCTISQSKSGKYYISILVEFEQHVTKKEVQHIVGLDFSMHDLYVASDGEKANYPRFYRHALEKLVKEQRSFSRKKVQSNRWYKQKRKIAILHERIANQRKDFLHKKSRKLATMYDAVVIEDLHMKGMSQALNFGKSVHDNGWGMFTTFLHYKLEEQGKQLVRIDKWFPSSKQCSSCGQIKESLSLSERIYHCECGLSIDRDYNASLNIKKEGISYIS

SEQ ID NO: 57723 - protein, 273 aa, unknown
  TnpB Polypeptide
MANRALVYTIYPNEKQNIQCQKTFGCCRFVYNQMLDVQKERHENGEKHLSKTKANTYCNQHLKKKYPFLKEVDKFALTNAIYHLEDGYDRFFKHLSRFPKYKCKHKAKRSYTTNITNGNIEISDNSIKLPKLGWVKAKIHHRPKEDWKLKSATVTQNRDDSYQVSILFAYEESISPAVVTKETTIGLDYKSDGLYVSSEGDTCGMPHYFRQSADKLAKAQRKLRHKTIGSKNYNKQQKRTAKIHRHIANQRKDFLQKKSTEIATVFFCLCGRP

SEQ ID NO: 57724 - protein, 365 aa, unknown
  TnpB Polypeptide
MHEFGITNRMAKAIIKTAKNQLKLLKESSYYKYSRLYKRRRSLQKKIEKLKLSLNSKRLKRRKLAKVRLFWTQMKLNKVNQLISNGVKINLTFGTKHLLQTNKQKFLSKRDNQVVYIGSKHETCGNQQFQIVFDSKYNHFNYKLRLDNKWVSGSNKYISGSFVLKNKEAKANILQTLSTKLSNPLTYRILKRDGTLYLQIMYRREALNITQSNNGVLGVDFNKGFISVSEINQNGRLQSLTRYDYLHKGKATKTKTSMLDLVSKLVAQAVGVGKDIVIEDLVSLDLNKKQDKTTSKTYNHMINSLKFGLFKRCLFSKAAKEGVSIHIVNPYNTSKIAKRSYTNKMKLNVHDAASYVIARRFYQYD

SEQ ID NO: 57725 - protein, 379 aa, unknown
  TnpB Polypeptide
MSVVNRAIKYRLYPTEEQKVFFTRTFGCVRKVYNLMLSDKVKSYQDTGAFCNVTPAMYKERYPFLKEVDSLALANAGMNLQAAFNNAFSRKRKKKNGFPKFKSFKRSRRTYTTNNQRGGITILKDSIKLPKIKAVKAEIHRIPDESWILKSATISQDRDGKYYASVLFAFEKEKPIYKIDTNNAIGLDYASDGLYVDNNGNIGTNHKYYRESHAKLAKAQRKLSRMKGSKKHEKKSSNYLKQLRKVNKIHRHIANQRKDNLHKLSTEIANRYDVVCVEDLNMKAMSNKGFGNGKATLDNGYGMFLPMLKYKLNDRGKYLIKVDKWYPSSQLCHACGTLHPEMKDLKIRTMRCDCGLVIGRDQNAAINILNEGLRILAAQ

SEQ ID NO: 57726 - protein, 447 aa, unknown
  TnpB Polypeptide
MRKHKFTVVTQLHEKNNQDIIAYIESSRHTYAKAVRKTFYAIRALENFDNSSFNTYLQRSYGITKRTAGSIISDAQGRFNSLKELKRYEVRQLEHKIDHLETQLIPKLVEKRNNNSKLLQDGIIVSLTKQRNLRLKIVAKKAKLNRMKQKLNNLNYQIESGRLKLCFGTKKLLKQNYDKFVERRDSQMTFIGAKEEVCCNQNLQLTYNRKDNQFSIKLRKDFGKYKSANIRDKFIYGKVYFDHHKNRIISILKNKDSPLFYRIIKRNGRYYLCCIFEIQADTNNFITCSDYGTIGLDFNKGFITLSETNQYGHLIQTKFLPYRFKAGNKTKTDLQKIANRVTVLACQTGKNICIENLDFKATKSRTEAKRSKQYNDMIHSLAYRQFTDIIESAAYRNNVNLIKVNPAWTSWLAKKLFCPTMKLNVHVGASYVIARRGQGYKDTVKSL

SEQ ID NO: 57727 - protein, 377 aa, unknown
  TnpB Polypeptide
VKVKLTLQIQLLPDTETAKRLRETVVRFNEAASWLAGKAFAARVANKIKLQQMHYQDLREKFGLSAQMAVRCIAQTCEAYKRDKDRQPRFRKHAAMPYDYRMMSFKGVDSVSLLTLQGRVIVPFIMGKYQRERFTNAKGQCDLVLRKDGRSFLLVTVELPDKTTLPVTDFIGVDLGITNLATSSDGEVFSGAEIERGRQKHTALRQTLQHKATKQSQAGKRPRSIHKLIKRKSGQEARFRLQTNHFISKKLVATATGTQRGIALEDLKGIRNRVEKRFRKSQRAKVSGWSFYQLRQFIAYKSQLAGIPVVLVDPRHTSRTCSACGHCCAENRRSQAEFVCVNCHYCINADWNAAINIRRRALKVSALQASESASQAA

SEQ ID NO: 57728 - protein, 485 aa, unknown
  TnpB Polypeptide
VKTFQPQPGFVVQAYQFALDPNVTQEAALRSHCGAARAAYNWAVGWVTAAWWQRKAEESYGIPEAELTPWRPWSLPALRKTFNEVKKTDPRFADWWQENSKEAYNTGLANAAAAFDNYAKSNNGKRKGARMGMPRRKSKHRARLACRFTTGTIRVEPDRRHVTLPRLGTIRTHEKTRKLQRRIVNGTARVLSATVRHHRGRWFVSFQVEVKRETTKVARCDVTVGVDLGVKVLAVMADSAGEIRYIPNPAHYDSALKVIKRLSRRVCRRQGPDRRTGQKPSNRWLKANAERTRTHHRVANLRADALHKLTTTIGSEYGTVVMEDLNVAGMLKNRRLARKIADAGFGEIRRQLTYKSQWNRYRTVVASRWYPSSKTCSNCGAVKAKLPLHIRVFRCDGLDCGLVMDRDENAARNLAALAAACSTGTGVAGDLGTRVPKPRGADQKTRTTRQARKDPAGRAGGAKPTHSRTETRDLHQDTTTQLRLW

SEQ ID NO: 57729 - protein, 420 aa, unknown
  TnpB Polypeptide
MKKGLEIRLYPSKEQRVLIDRTLGCSRFVYNHVLALKKELWEDYKLSFNPTLKSFKEEWKFLTKVPSQALANSYMDCMTAFNNFFNSLKGNSKSKQKFPKFHKKGEKNSFRIAATKTSKGYDIRIENYEHIKVPKLGLIKFRNYNNSDWSKIHIYNITIKKTSTNKYFASLCCELPEPDYIEPKFDACGFDLGLKDFAIFDSGEVIENPKYYRNTEYKIKKTQRILSKCKKFSKNYKKVQLKLAKLHKKIKNQRKDFQHKWSRKIVNENQVIVSEDLNVKGMLKNHKLAKSIQDASFSSFCNMIAYKANEQHRQYVKIGTFYPSSKLCHHCGYKYTGLKLEERFWTCPACGTYLDRDENAAINILNEGLRILSRNTVGSVGMDKSIKPVDTVNDNSLEQEPVIANKKIICHAEKSSALAE

SEQ ID NO: 57730 - protein, 381 aa, Herpetosiphonaceae sp.
VLKAYQYRLYPSNVQERKLEATRETCRRWYNDLLSERKTAYEERGATIGKYAQLRRVKDHKAASPWAKVVHSHVLQVVVSDLDTAFQAFFRRLKAGQTPGYPRLRVFHRFDSFGFKEYGNGFKLDGRRLRVTGIGRIAVRWHRQIEGRIKTLRLIKKAGKWFASFAVEYEPTALPATGKDVGVDVGIASLLTTSDGDKTPTQGWYRNEQAKLRVLQRRVARRTKGGKNRRKAVALLQRQHERIENRRKDFLNKQAHTLIAQYDRIAVEDLKITNMVQNRHLAKSIMDAGWGYFVARLHAKAEEAGRVVVEVNPAYTSKDCSRCGYRFEDLTLKDRWIDCPRCGLSLDRDHNAARNILKRGGQLRWGISSSVDGLLQEAAGL

SEQ ID NO: 57731 - protein, 402 aa, unknown
  TnpB Polypeptide
VETVRKTYQEKLRPTPTQERELEAVLWRCRTLYNTALEQRISLWKQRGVSLTRYQQEAELKALRADLPEYAALHSHILQDVLARLDKTYQAFFRRLAHGEKPGFPRFQGKDRYHSFTYKEVGNGARLDNGYLVLSKIGRIAVRWSRPIEGTSKTVTVSKEADGWYVSFSCAEVPTQPLPETGRETGIDVGLKVFLITAEGEAVENPRHYRTAEREMKKAQQRVSKRKKGRRRRKKAVKLLAKKHQHVRRQRADFHHTTALALVREYDVIYVEAIQPANLSRRPAPKQDENGSYEHNGASRKAGLNKSIQDAGWRHFLAILAYKAACAGKRVEAVSPAYTSQDCSGCGARIQKSLSVRTHVCTHCGLILDRDENAARNILWRGQRLRGVAGLPAAMNREPVGL

SEQ ID NO: 57732 - protein, 407 aa, unknown
  TnpB Polypeptide
MKKDVQVTVVGKVFKPNRNKVSALNRCLREYFRLVKWYLRFNSTSKKFLHENGYEKAKRFFGLNTALIQNARDKAVEVLKSFERNRRDDSILRLKRVSIRFDKRCYSFSKTTNILTPYWLTLSLNRRERVSLPIVFGEKQKERIEEAFRGEWQFSTVEMVKRNGEWYAHFVITKTIDLPDEPETVVAIDRGEHNLAVAVAISKSNPDKPMKGKFWRGEEIKRIRGLYSHIRRNLQEKKLLKKVKEIGAKEKRKVNQQLHIIANQIIQYAKQFPKPVIVMENLNGIRRNFKKSKKLNRRLHSLPFRKIQTIIEYKANLEGIRVEYLTKKETRNTSKTCHKCGYVTQVKERIFKCPRCGLTYNRDLNAAINIAHALMRRMGWGSCEPPKPANEAGGVKPQLNAGSPLLQ

SEQ ID NO: 57733 - protein, 358 aa, Brevibacillus sp.
MAQTITVKVKLLPTAKQASILNAMGKEYISTINALISEMVAEKKTTKKTTKDVPANLPSAVKNQAIKDAKSVFQKVKKSKYAMIPILKKPVCVWNNQNYSFDFTHIHLPLMIDGKAKKVPVRALLVDKHNRNLNLLKHKLGTLRVTQKANKWMVQISVTIPTSEKTGTKVMGVDLGLKVPAVAVTDDGSTRFFGNGRQHKNVRRRFKSKRKKLGKQKKWNAICNLDNKEQRYMKDQDHKVSRAIVQFAVDHNVSVIRLEQLTNIRQTTRTSRKNEKNLHTWSFYRLSQFIAYKANMFGIKVEYVNPAYTSQTCPSCSERNKAQDRTYKCTCGFHTHRDRVGAMNIRYAPVIDGNSQSA

SEQ ID NO: 57734 - protein, 297 aa, unknown
  TnpB Polypeptide
LRRTFETANAACDWISEQAWHHQTFRQLALHKLVYYQVRQRFGLSAQMAVRGIAKVVDAYALDKRTKRKFRTDGAFPYDARILSWDLESETVSLWTVAGRRRMPFECGDGQRKLLERQQGESDLIYRRQAFYKRRLKKMAGRESRFARHVNHCISKQIVATAKGTGRGIRMEDLKGIRTRVKVRPGQRGVLHSWGFRQLRQMIAYKAALAGVLVELVDPRNTSRTCSKCGHCEKGNRGNQSEFRCRSCGREAHADINAAENIRQGRRKEAERDVVANRLSHSFRFRRLSAVLTSPRL

SEQ ID NO: 57735 - protein, 247 aa, unknown
  TnpB Polypeptide
VQAARNRAAEAVKGVVERWKQGEKASKPHFTSRFASYDARTVTVNDDHCTLATIEGRVTAEFVLPDEQRDTPHSAYLFNDDYDLKGATLHYDEVEDCFYLHVRTKPTVENDDAEQGDAEHVSVLGVDLGITNIATTSTGRFWSGAELNHWHREYEKRRSDLQQTGTRWAHENVQRVGRKQTGRFEQMLHTIRTSWLRKLSKTTVRISCSSNSTASANAYLTRRRFTSGRSTDSTSTSRTKPSRKGLW

SEQ ID NO: 57736 - protein, 407 aa, unknown
  TnpB Polypeptide
VNYNYRYRLRPSDALEQQLAWTVDTCRQVYNHFLHRLNRTDDTSAYSEQKLLPSLKKWWNDLKHVHSKVLQKVVQRLYDNLSTLRGRKENGYHVGTLKWKAPSEYRSFTYGQSGFKLKNTSGRTRLWLSKLGEIPLTFHRALPDDAEIKTVTVKQEPTGKWYAILGVETPDDPPAKPETPEKCVGIDVGILKYAHDTDGTAVESFDLSDERERLERAQRDLSRKEHGSTNWEKQRRVVAERHAELKNKRRDFLHKLELLRPRIRLRGRGGLGRKGLDRTAWQLAEPSGSGVGNVPTDARIQVRTGRNVFYRGGESSWDDEKCASCDASTEKPLWVREHSCPACGFEADRDANAAWNILSRGITKRLGAGRSESTPVETALPVDTSVSAKRVVETGSPTLKREPSGER

SEQ ID NO: 57737 - protein, 551 aa, Microcoleus sp.
MAYIPLRKAVKFLGLHANTLRKYADEGKIKSIKNEAGQRLYDVESYQHGAIGTAVICYCRVSSTKQRDDLARQVEFMQQQYPDAEIIQDIGSGINFQRKGLQALLVRLMRGEQLTIAVACRDRLCRFGFELFEFMAQQNGGKIVVLSNPVHCPETELTADLLAIFTSSVAECTVSGATERKSRKIRLFLNPEQKALIKQWFGVSRFVYNTTIKYLQEPGTKASWLTIKTGILNNLPEWAKTVPFQIKSIAIKDACSAVKAAKQGFGKDGQIRRCKFRNRKDTKQSIYVPKSAIKGCGVYHSILGKCLLKESLPIAFSDGRLTLAYGEYYLIVSEEVQQVKTDNQGQLVALDPGVRTFMTFFSEDAYGWLGVDSNLHIQKLCFRLDKLVSKISRATSRQKRRFKKAASRLRSKIKNLVKELHHKVAKFLADNFDVILLPTFETSQMVSKSRRKLRNKTVRQMLTLSHYDFKTFLKWKAWEKSKLVIDCNEAYTSKTVSWTGEIVQNLGGARIIKSQATGLKMDRDLNGARGIFLRALVDTPLLRDSLNLSVC

SEQ ID NO: 57738 - protein, 260 aa, unknown
  TnpB Polypeptide
MAVCAIFSICCPTVVIGRNRVKLPKLKGIKAKLHRNFIGQIKSATISQVPSGKYYVSILVETEHVELPHINQNTGIDLGIKELCITSAGKKYENPKIIRKYEKKLVKLQRQLAHKEKRSQNYYKTKKKIALCHEKITNTRKDYLHKMSHEIISENQVIVSEDLQIKNMVKNHRLAKSISDVSWYELTRQLEYKAKWNGRKYVKIDRFYASSQLCSVCGYQNTETKNLSVREWTCPVCGTNHDRDINAAKNILEEGLRQIA

SEQ ID NO: 57739 - protein, 392 aa, unknown
  TnpB Polypeptide
MKAYKTEIRPTKSQIELIHQTCGNVRYIYNQYISYNFKRLKNNEPIISGYDYSKMINHDPTVPSWLKAVSSKALKQAIMNASTALSSYLKGNKGKPHFKKKTNDNSFYLIGTIKVERHRIFLPKLKWVRLKEYGYIPDQITSVTVSIKNGRYYISCLSKAEADERITTSGEGIGIDFGLKDQFITKDQVIPSVNKSKRVRKLEKKLRQKQRSLSRRYENNMTNKVYYKSGKKKGQLKSFKWKQPLHECKNLNKQVLVINKLRERLSRIRTDYNRKALQSILKRKPSFIVIEDLNVKGLMKNKHLSKAIFHAQWYHSRIFLQQQCKKLGIELRLVSRFYPSSKLCSHCGYKKVDLKLNDRSWECPDCHTIHDRDQNAAINLERCTNYTVLTTV

SEQ ID NO: 57740 - protein, 508 aa, unknown
  TnpB Polypeptide
MVMNLDGELLEAPSILKRLASEIRDISSYATFVVRNDAVLGERLEAVTVTQPAVAGNRAGVTMPDFLSTGRTGRSRKERLMQHNVVTSYRSLQERIKAANGESSKYISRGWKRTVSTTAPTYGGEYVNLGAVDSAYARIENNPFADGEIVLKMVIQGQWYRLIFNFDNKRFTEGKVTLPIIKTQDDQPIFIFTVVTDNPVVQFSGDYTIGVDVGVTDYATVVVCDTRTGRIVHETTLSQRVHSLWNGVRASEQQVRDLRRKAATLLHNRQARMSALDEAQLHRKAASRKKRELAILAAQEIADLSHFWGNAVVAVEDLSWISNTRQNGRWNRGALVQWITHYVSHNGGWVVSVNPFNTSQECHICGSRVTHPTRKLSVCPEHGSMDRDVNAAANVAARAVPRVAKARVTRAKNRKLRPQQPLRTPPARASLKYPGRDRTKSRPTPKRKNLCQAAREVILPICPARAQAQRLEASVLADQGARGTLGTNMAALKQGTSVDYERRLRSPI

SEQ ID NO: 57741 - protein, 431 aa, unknown
  TnpB Polypeptide
MFEAVKVALDPSPVQESLLLSHAGGARFAYNVGLAHVKESIDAGEKPGWSFYTLRKWWNANKDELAVGEDGVIWWQENSKESYSYGLESLAKGLSNWSKSRKGDRKGRKVGFPKFKSKDRDTPRFAYTAGCFGLVKGDPKALKLPRIGRVHCMEDVAKRVGDGRVLRMTVSQRAGRWYASLTVEREDKPVERKPNGGAVGVDLGVKTLATLSDGTVIENPRHLAASERKLKHAQQALGRKVKGSNRRAKARSKVARLHARVVNQRQDGLHKLTTWLTEKFSDISIEDLNVSGMVKNRHLAKSVSDAAFGEFRRQLEYKTARTGSRLHVVDRWYRSSKTCSGCGSVKAKLSLSERTYTCEGCGLVLDRDLNAAINIMVAGSAPETLNAHGETVSRNRPSGHVALDSVKCEPSVRESAVRLGADSRKAVLQTN

SEQ ID NO: 57742 - protein, 421 aa, unknown
  TnpB Polypeptide
MLTLTYAYKINPTPDQAVLIEQTLDLCRKVWNYALLQRKDWINSRKCRVDACSLHSEYIIPADAPYPSKSFQEKSLRVAKKTNEELRSVNAQVLQQVLRKLDTAFEDMKRKGHGFPRFKKFGQMRYAVYPQMLTDPIGQGWVKLPQLGKVEVIMHRPILSGFELKQARIVKKASGYYVMLSLQLDVNVPDTPPSGHPLGIDVGLEKFLATSDGELIKRPRFFNALARKLKLLQRRLKHKHVGSKNKAKLARKIARVHEQIHDTRKDFHLRIAHHLCDQAGMIFAEQLNLKSMAKGMLGKHTLDAGWGQFLQLLSWVCWKRGVYFALVEAAGTSQTCPECDAHVSKDLSVRVHECPECGYKTDRDVAAAQVVRNRGISAVGQTVDEIACGRDASGAGNPSLDGTGRDRKFLEAILASPSHNL

SEQ ID NO: 57743 - protein, 366 aa, unknown
  TnpB Polypeptide
LNKSFKVRIYPAKEQQVLLEKTFGANRFVYNYFLNLKSKLYEFYKIRLNYNRCSKALTELKRQKTWLKEVDSVSLQQTLRDLDSAYQNFFSGQSKYPKFKRKDDKNSYRTNHHIKIDNRYITIPKIGMLCFRDSYKLDDKNILKIYNITISKMSSGKYYASISAEVYTPCFEKTNQSVGIDLGLKDYLILNTGERIHNPRILKHLEKKYKRLAKSLSRKVYNSSNYQKARIKLARFHEKIVNIRKDFLHKLSTNLVKAYDIICVENLRVSNMMKNHKLAKSFQDVSLCEFIRMLEYKAKWYGKIVSKVDRFYPSSQLCSNCGYKNKEVKNLNIREWICPECGTHHDRDVNSAINILNEGLRLLESI

SEQ ID NO: 57744 - protein, 422 aa, unknown
  TnpB Polypeptide
MNISHQYKLLPTQAQKIQMSRWLDMLRHQYNYLLSDRFDWWEQNRCDINACPLICHLPELRDNPEYYGHKRSLVPLKVSRPWYKEIYSQVLQDLVMRVKLAFDRFIKGDCNGKRSGRPRFKSKSRYRSFTYTQMSNEDLQGNKINLPKIGLVKLVLHRSIPEGFKIKTAIISKKPDGWYVTLSLEDTTVPESILAVQPTQSNSIGIDVGLEKFLADSDGGFEEIPQYFRKSEEKLAKLQQKVSARKKGSRAKKLLNRKVAKLHQKVARQRKQFHFETASKILKKADVVFVEELKVKNMSKRCKPKQDETGSFLPNGQSAKSGLNKSIADAGWAQFIDILTFKAERAGLKVVKVNPKGTSQHCSICLNGVPKTLSDRWHSCSKCGLEVDRDTNSAVLIKKVGLGVVLTIKRSRRNPREAHAVT

SEQ ID NO: 57745 - protein, 461 aa, unknown
  TnpB Polypeptide
MLTGRRYRLYPTPGQAKTLAQWIGCVRWVYNAKVEEERYLAWLRRCSIFSASWTGVPAGRNPWSVDQSFGHLKGGKGDRPWLHLVPSQLYRNAIVQWKQAWASHWQNPEHFGRPRERRRGEDDSIWLTRELFAIAEKGRIRIGTKTRAVGVVSFRQHRRFRDPASVTIACGPDGRWWLSLAFEDALGAKDEVTVLGEIAAVPAEERAATVVGFDRGIVRAVQSSEGACFALCEKKRLKMARWRRRIKALNKKLARQKSKASRRRKKTRAKLALTNGRLTDLRRDHAHQVSRRLVDGSQGRVLAFEDLRLANMTRRPKPLTDRAGFVPNGARAKARLNRCLLDQALGRILLFTRYKAARAGRIVLTVPAHHSSQECSCCGHTSPANRKSQAQFHCEACGFTENADANASAVIQKRGLAALNRLLSAPGRGAAELPVEATRPRRSSPSQGADEAGFRSTHLAA

SEQ ID NO: 57746 - protein, 307 aa, Gemmataceae sp.
VFKVFRYRLYPTSSQRAGLESTLETARRFYNDCLLERKAVYETEGRTLGKTEQLRRVKIHKVNNPFATDIHSHILQGVVADLDKAFQAFFRRVKAGEKPGYPRFKGRNRFHSFGLKELGNGFKIDGRRLRISGIGRVAIRWHRPLEGTVKTVRIVRKAGKWFAAFSCEVEATPLPPVETEVGIDAGLSTLFALSNGEQVQNPRWYRSSQAKLRVLQRSVARKKKGGSNRRKAIRRLATHAEHVANQRKDYLNKVVCDLVGRFALIAIEDLSITRMVHGHFAKSILDAGWGYFKQRLQSKAPGIVFVD

SEQ ID NO: 57747 - protein, 386 aa, Nocardia sp.
MLSSGVQLRYNFRLYPTVGQQVSLAKAFGCARVVFNDALSARREAFAAGGRISDSELSKRLTEAKRAPERVWLGEVSSVVLQQALADLNTAYRNFFASVTGNRKGAKVAAPRFRSRRDHRQSIRFTRNARFAVTPGAKLRLPKIGDVAVRWSRDLPSEPSSVTIVKDAAGRYFASFVVQVNDEPLAPVASEVGIDLGLTTFAVLSNGTTITSPRFLRRAERRLRKAQQSLSRKDKGSANRAKARIKVAKAHARVADTRRDWAHKQSTMIIGDNQAIYVEDLCVKGLARTRLAKSVHDAGWGMFTRMLEEKAHRYGRTFAKINRWFPSTQMCSVCGAVGGRKPLHVREWTCACGTTHDRDLNAAINILAAGQAERLNACGGTVSLPA

SEQ ID NO: 57748 - protein, 392 aa, Lyngbya sp.
MLVLEFKVRAKKHQYTAIDEAIRTAQFVQNKCLRFWMDNEKVNKYDLNKYCRVLAHDFDFANKLNSQARQSSAERTWSAISRFYENCKRKITGKKGFPKFKKNCRSVEYKTTGWKLDLTTRKAITFTDKNNIGRLKLVGTYDLNFYPISSIKRIRLVRRADGYYCQFILSVDVKIDTSPANSVIGLDVGLESFYTDQNGNKINNPRFLRKGEKQLQRLQRRLSRKKKGSSNRKKARARLAKAHLKISRQRKDFAVKLARCVIHSNDVIAYEDLKIKNLVKNHCLAKSINDAAWYQFRHWLEYLGEKHGKITIAVPPQFTSQNCSNCGEKVKKSLSTRTHFCACGCQLDRDENAARNILKLGLSTVGHSGTRLQDSLNALGEDTSTFSEEILS

SEQ ID NO: 57749 - protein, 364 aa, Halorubrum sp.
VNSKCLQMAVRRIFSSLSVLKSLKSKGYNVGKLKWKSPREYRSIVFNQSGFDVDSNTGRTEHATLELSKIGPMDVDYHRPLPEDGNIKEVRLKEEKSGKWYASVVVDHDPEHPEKPAVEDIRLEDTAGIDLGILKFVHDSDGNAVTPLDESEDRERIEKRHRALSRKQHGSNNWEKARVKLAEAYERLANKRKDFIEKLAHSYTTQYDAVFLEKLNVREMLEQDSNGRNIASMSWSEAIKTFERHGNKNGCHVVTVPPEGTPKRCARCDVESDKALWVCEHSCPGCGFEADRDENASYNVQKLGMDKLGVDYEVDAVVGLGEAESTPAETALPSGADVNDELSFRLVPAKRVVETGSHESPDPW

SEQ ID NO: 57750 - protein, 402 aa, Escherichia sp.
VKRLQAFKFQLRPGGQQEREMRRFAGACRFVFNRALARQNENHEAGNKYIPYGKMASWLVEWKNATETQWLKDAPSQPLQQSLKDLERAYKNFFQKRAAFPRFKKRGQNDAFRYPQGVKLDQENSRIFLPKLGWMRYRNSRQVTGVVKNVTVSQSCGKWYISIQTENEVSTPVHPSALMVGLDAGVAKLATLSDGTVFGPVNSFQKNQKTLARLQRQLSRKVKFSNNWQKQKRKIQRLHSCIANIRRDYLHKVTTTVSKNHAMIVIEDLKVSNMSKSAAGTVSQPGRNVRAKSGLNRSILDQGWYEMRRQLEYKQLWRGGQVLAVPPAYTSQRCACCGHTAKENRLSQSKFRCQACGYTANADVNGARNILAAGHAVLACGEMVQSGRPLKQEPTEMIQATA

SEQ ID NO: 57751 - protein, 443 aa, unknown
  TnpB Polypeptide
MKFNKTKDTVFRMYKTKGPDLLLPLYNILQRELDRILATPTYVEALSKIEFKYKNENGKEQSKLNGMLWSEIHEIIGESLKGKVPDAWYLRILYHNIISLLKSRQEQIKIYEILKANQYKIDSTLRDKLVQEKLYPTNSYLETLAAAKDMPVLPKRKTFILDFSVSDKQMFRVGKNSNAYEIKIHSKKEVKAYNLETGWISFEMFLPTYIRESFTGKTAKPQFYWDHNKEEFVCAIPCEIKKLPNEYENVMGVDLGKIKVYSATVVRKDGSISDEYVPTEELQNLVNKLKRMNQHIKSVYEKKKRSSKYDNFTERQARRKLDYKRSKNKRTKLQLAIARLVAVEVVNIAIKEQCKEIHLENLSWVKSSGGKWNFAQMQARIEEVAELFSIKIVKVNTKNSSKTNPVSLEVGKISNRDVLFKDGQKVDRDQLAGLNLALREPKK

SEQ ID NO: 57752 - protein, 498 aa, unknown
  TnpB Polypeptide
MKKKQVQWKSFNINMPSELIPIYDFLQNELNFILSNDETRVLLDKIDLSKLRGDVWRDMRDSLKFRIKDWPLHNKTWHSYILFENIRREIKSKQEAIIIWNELVKNDFNINEELFDSLHKLNIYPTRSRISNIKRSNSVPELARNAIFSLDYTVSSSQFFRMKNTNICEIKVGKKDWIEYEIIFPSSIDERFTGVISKPRFIKRKRDGKYIGICSYIYEVGDYELEDKILGVDIGKIKLFSSVVMDKKGNFSEELINTKYSQETEYKINRLYENKQILYNKIKSYEELRLTNQPKYEIWKNLYSNITNKITNTKDYQAKLLSSEIVKLALEQKCKTIHIENLSWLNSQGGKWNHSQIHSKIIEKASMYGIEVKKVSAFNTSKEHPITKEVGIIQDRIVKFTTGKIDRDLLAAINIALRSTNIKLKKSLPKKAKTKRVKTKSNKKEIKEKVNKLKGNGQIVSFLTNVLDSTIQVELGVRPLSEVLPYNSLIDYYNKLHL

SEQ ID NO: 57753 - protein, 408 aa, unknown
  TnpB Polypeptide
MIVDITRTIRLSLCPDATTCVLLLGATTAHAQSFNAIVRYGWDRSISNGVELHKATYREHRSQFSLPSQLACAARVKATEVLKAAKTAVKAAAKLNKERAEKAKRHGKPAPQPRVISCPYSSFSPIRYDVRSYKIRFNKSEVSLLTLSGRVFIPFLLPAYYTDLATWSIGSADLIRDRKGRWSLHVSVSKEVDPVAPTGEVVGIDLGIVKPATDSNGKHYGKDRWKEIEQRTLTLRRALQVKGTKSAKRHLMRLRGRTGRFHRDCDHVVSKQIVSSVCPGATLVFEDLTGILDRVKVRRAHRQRLHFWSFDQLLTFTQYKAAARGVSVVNVDARYTSQKCSRCAHVSRSNRTTQADFKCCDCGFVANADVNAAINIRANYIKSQGLPINQPIVSSVSHSCASGTNRQL

SEQ ID NO: 57754 - protein, 521 aa, unknown
  TnpB Polypeptide
MKTFKVKLYPTESQSRRMEQWLITLQRHYNRVLAITLWTQRRYNLPVSKSICGGLKTPKKDGDKRPYIYGIYVAAKRRNQFLNDIPADTVNQTIQSRIEAAFDKWAAACKGKKGEDFFKGQPKFANRDRFTSFQFRTRPPRPLFTYDHKGRRYLNIPNAQGADKIGPILCSLSPDTPSDFTKSFCAIQREPDGWYACIVINLENQVRWDKAPHGVVGIDVNIGSIDLSDGTRIPMPFFADRYRDEVLRLTQKLARTRRENKDWRSSKRYADAKKRKAVLEARITRERKAWHANVVAWLVSRYDRIYVENLEPKNMVKNKHLAKAISSQAWGHFFEMLEMKCAEHGRIFGRVPPSYTSKTCSSCGWVNKAKPGEKGYMGLHVRQWVCPECQTHHNRDVNAAKNICAKGEEAFATGNYEKQELGKRKAKSNSKVLLTERTEAKAGTIIIPCPTLDLPTPPNLPAHKRRSKAEWSAKQRAERARRRNKNAKKEKLTSVDLNGQKKNFNGRKEKLANSTQLSLFC

SEQ ID NO: 57755 - protein, 385 aa, unknown
  TnpB Polypeptide
MRKKSKKAESDQEPEGLKNTIQIRLYPTRAQAQMLREHCAEYIDCVNVIVQAHDADMLPKGFSTKDFVAPLPSAVKNQVIRDAQSVYSRSFELGRIPVLKKPFAQWNNQNWKLEMSETRSHKKGGLKGMLIIPLWNGTRTRQIKIACCGEMPVGEKGILRIKRKDEKWVADATTTLPDAQPEQGEIVMGVDTGIKVPAVAYIAGKSARFYGNGRHMRYKRRKFYARRKKLQHFKKKKSVKGTNNKESRWMKDVNHKISRKIVNHAHAQGVATIRVESLKGIRFGTTRTSRGASAQKNNRAQNSWTFYQLTAFITYKAARLGIKVEMVDPAHTSQECPACKHRNKADDRMYACRDCGWKGHRDSVGAINISRRTGLDGQSQGAMGA

SEQ ID NO: 57756 - protein, 391 aa, Microcoleus sp.
MKQVLTLVVKFQASTEQQQLFSQMADAFASACNWINQNVNPNLTNKNSIQAVCYKDVKDQFGLTANHVVRACARVGANRLTALQKGKKVKSFKPTSFDCDARTFRFIEENWTVSISTTGKRLISPIRASNYHRGKLAGQNPTSAQVCLHKDGCWYVHIQLKSETPNTQKTTNAIGVDFGRRDIAVTSTGKSWSGRGIQQTRDKYSRVRASLQKKASQGTRSTRRRARQILKRLGGRERRYQTWINHNISKAIVLEAKETQSFVSIEDLIGIRERTNSKPRNKTERRRSNSWAFYQLRTFLEYKGICEGIEVVAVNPAYTSQSCHCCLHIGVRTEKKFKCSNQVCGWVGDADVNGSKMIALVGLSVSQPRGSELLSCAVTQGLPKAHTIALA

SEQ ID NO: 57757 - protein, 478 aa, Microcoleus sp.
MQLTYKYRLKPTKPQLATIVAHLELCRRQYNYRLGERFRWWEATRTPINACPLVVSIVPLDEIYRNIPLTRVQTRDGRKKDESGNPLTKKGDVFSNIEGGYVQWQTIQLADLKNTKKLFPDYKVLDSQVLQDVVNRVKTSFSNFTTPDKNGNRRGKPKFKGRPYYKSFTYPQLDNLNIVKDEQNRICISLAKIGQVPMVFHRPIPTGFKVKTGTVVREADGWYISLTLEDKTVPVTVAEIQPTEESTLGIDLGITNYAYLSNGERVENPRFLRKSADKLARLQARLVSRIKSSKPWQIIKDRISKLHQFVARARLDFQFKIAHELFGKCEILVAEDLSIKNLTRRTKTKTDIDSDGNLVYLPNGQSAKSGLNKSMLDAAHGQFASVLKYVAWKLGKNVLFVDPKGTSQHCWHCLNKVPKELSERWHSCQCGESLDRDENSAKLIRKIGLLHQSGGGTPSLKKAFAKKEKEACGLTVLS

SEQ ID NO: 57758 - protein, 278 aa, Calothrix sp.
IFTDKKGIGEVKLLGKWDIQAYPVKQIKRVRLLKKADGYYCQFCIDTDVKTESRIADGEIGLDVGLEFFYSDSNGNHEENPRFLRKAEKAIKHAQRQIYKKEKGKNQSRKARDRYARKHLKVSRQRKEHALELARNVCKLNSLVAYEDLNVKGMVKNHCLAKSINDASWSLFRRWLEYFAAKFNSTVVAVNPKMTSQKCSDCGTIVKKSLSTRSHVCSCGCSLQRDVNAAKNILNLAKASLGHKQSNASGVGISTLIGVSLLEQILTVNEESPAFTTK

SEQ ID NO: 57759 - protein, 367 aa, unknown
  TnpB Polypeptide
MLKAYKYKVYPNNEQKVQIAKTFGCCRFVYNQTLAYRKETYEKEKKSVSKTECNNYCNRELKRTYEWLKEVDKFALTNAIYNMDSAYQKFFKEHAGYPKFKRKHDSHKSYTTNFTNGNIEVDFENGKVKLPKLKEVKAKLHRNFSGQIKSATVSQMPSGKYYVSILVETDHEELEHVKKNVGLDLGIKDLCITSDGKKYKNLQIIKKYEKKLVRLQRQLAHKEKRSNNYYKTKKKIAICHEKLRNARKDYLHKISHEIVSENQVIVSENLQIKNLVKNHHLAKSIEDVSWYELTRQLEYKAKWNGRKYIKIDVFYASSQLCCVCGYQNTDTKDLAVREWECPVCGVKHDRDINAAKNILAEGLRQIA

SEQ ID NO: 57760 - protein, 357 aa, unknown
  TnpB Polypeptide
MIRSSRHILKYQNQGKTDWLDKLFEDYLKELRYYINSIQTVKLPLDKNLSSKQLEGKHIFHSQWKQNIYKQASEIIRSCRKKHKKVKKIQNISIILDERLFDVEYQEIGEFDEFIRIKLPYFEESKKRAITINVPIKHHKHSLKYSSWIRKKSVRLKKIDGKYFLDIIYEKQAPDKKTQGNQIGIDQGYNKLYITSENQQSKTDFKSLYLDISKKKQGSKNFKQILIERDKLINQEVNQLIKENDIKTIVIEDLKNVKKKSKFSKSLNNKMQRWSYRKFTRKLQSICEEQGIDLKKVSPAYTSQRCSKCGEIHEESRNGEKFICISCGYSEDADLNAAKNILHRGVYNPSITRNQKQ

SEQ ID NO: 57761 - protein, 433 aa, unknown
  TnpB Polypeptide
MKTIKLPYKSSEDLIPILKQYSSVVRYSYNRFLEGKTEKEVRNLTKSLKNINLLNSWLVQCAIKDGKAIHARSGNKKVIFGEKKNFILRCRGKISKEEYQLKRLSPINIQGEELKQGNRSFKLDMIENNQIIFKLNRKKHIELKLPNLRNNIKNELFKLQQLNEVKSNQRGYTYSIRFDLKNVYISFEEFKNEKEVKLNENRYLGIDLNPDTIGISVLENENVIYTQEFSLKPIFNKILNEKLSSNSDRMKYFQNKLKFETYEISKSITNLAKYFNCKSVFIEDLHFKGSSAIKISNRKNKNLWKRELFINNLNKRLNVEGIKLYSVNPAYSSFIGNLQHNYTDAVNASIEIARRGFEYKIKKNKKAFYPDLLVKHQWKEMATKYKDWKEFFLEIKNLKLKYRVSLNECLHKFNVFQQNSSHKSMVLNYIFYD

SEQ ID NO: 57762 - protein, 376 aa, Halococcus sp.
LNRVEGTSRYDELGVLTDLKEWWDALGDVYSRTLQNVVERLYDNLETLHRLKEEGHRVGHLRWKSPREYRSFTYRQSGFKLHETGGRTVLSLSKIGDVPITLHREIPDDAALKQVTVKREPTGEWFASISIETGDDPPAKPDDPEKCVGIDVGILKFAHDTDGFALGSLDLSDERNRLDREHRKLSRKEHGSNNWEQQRKVVAKRHADLKRKRRDFLHRVSAYYAREYDLVAVEDLNISGMLESPSNSRNTASAAWGEFRRMLEYKCEREGTHFAAVRPGGTTKECSRCGVETDKPLWVREHSCPACGFQADRDANAARNILSRGFDDVGVVHPERTPSETATAVGTTVSPVPARRVMEQGSPALNECPQGASRAG

SEQ ID NO: 57763 - protein, 452 aa, Halococcus sp.
  misc_feature (78)..(78): Xaa can be any naturally occurring amino acid
MANRTVIRTHRASIRNQRQVRDGLDTLGFAAAKLWNVARYTVGRVWDACGQIPDDSVLKSYLKSHERYADLNAQSSQXCGQIPDDSVLKSYLKSHERYADLNAQSSQATLEELAEAFKGWYGHRRNGNTKANPPGYRKNGDDHPRSTVTFKEDGFKHDARNGYIRLSKGRNTKAHWSDFILCAYDADPDIAIENVQQVRAVYEHGEWRLHIVCHHEVEVEPPGDGTAGVDLGICNVAAVSFGDESLLYPGGSLKEDDYYFAKKRAKCDDSFSREARRLDRKRTDRRAHFLHALSKHIVAECVEREVGTLVVGDLGGIREDENGPRDWGDHGNLDLHGWAFDRFTTMLDYKAEAEGIEVEPVPERDTSKSCSVCGRCDDSQRVERGLYVCDDCGLVANADTNGAENIRQKVLPNLATDGDDRDNGWMAQPAVRLFDRREGVFAPREQVVDHEP

SEQ ID NO: 57764 - protein, 386 aa, unknown
  TnpB Polypeptide
MKLIVNLKLKPLESQRTALLQTLEKANEAANWISEQAFQHKIFKQFHLHKIVYKETKERFNLTAQMVVRLISKVADSYKIQTKKQTFFKKHGSIAYDDRIIRFKPNDLVNLWTVEGRLNIPFVMGEYQRKLFEHRKGEVDLIYRKGQFFLNCVCDVPEDSPLIPNDVIGVDFGIVNLATDSTGETFTGSEVERVRQKYSKLRQTLQHKASKQSQSGKRPRSIHKLLKRLGGREKNFRNLENHRIAKNLVNKAKAQNCALALEDLSGIRKRTEKRLRKSQKARHSGWSFFELRSFVEYKAKLQGVPVYPVDPRNTSRTCSACGHCEKANRKSQSEFVCVNCHYSTNADYNASKVIRSRAIVNLLQSSESVDFQKVNVSTGLKPSAYS

SEQ ID NO: 57765 - protein, 442 aa, Escherichia sp.
MVKNLTSVFSDKDQVNMHQENTVPSASDISFFHRPKYNLPCETTTAFTFRLRPGGQQEREMRRFAGACRFVFNRALALQNENHEAGNKYIPYGKMASWLVGWKNATETQWLKDSPSQPLQQSLKDLERAYKNFFQKRAAFPRFKKRGQNDAFRYPQGVKLDQENSRIFLPKLGWMRYRNSRQVTGVVKNVTVSQSCGKWYISIQTESEVSTPVHPSASMVGLDAGVAKLATLSDGTVFEPVNSFQKNQKTLARLQRQLSRKVKFSNNWQKQKRKIQRLHSCIANIRRDYLHKVTTTVSKNHAMIVIEDLKVSNMSKSAAGTVSQPGRNVRAKSGLNRSILDQGWYEMRRQLEYKQLWSGGQVLAVPPAYTSQCCACCGHTAKENRLSQSQFRCQVCGYTANADVNGARNILAAGHAVLACGEMVQSGRPLKQEPTEMIQATS

SEQ ID NO: 57766 - protein, 521 aa, unknown
  TnpB Polypeptide
MMRRAFGTRLPRDATRERLLDAYAALYGRAERTLFARVLTRRPLAATKREFLVRFGLTARQFNALAASVRGKITAIHARWPGRIKTLTQRIARAQQVLGTIPAGTNVYHQKQRRLGRLQRHLEVLTADETAGRVRLCFGSRALFRTQFALAANGYATHDAWRRAWRAARANQFFVLGSKDETAGCQGCVATVAPDGTITLRLRLPNMCARRGKHLVLAGLRFRYGHEAVVAALGRHLSPNTPPGEALSWRFVRDRKGWRVLATVSVPGGPRRSVDHLGVVGVDLNTDHLAVTDLDRFGNPLAAFRVPCPTRGKTHHQALAVIGDAVGQVVTYACLRQKPIVAERLRFDEKKAALEQRGARYARLLSGFAYAAFHAILAARCYDAGIALRRVNPAFTSVIGAHTVADRYGLSRHHAAACAIGRRGMHLAERPPRRLGDHVTVPLPVRNRGTHVWSFWRQVARREAALRAHGRPGPPGARSSLAPAPGSRRSAARPGIHRTSGSSAPSAGGTPARESPAALFG

SEQ ID NO: 57767 - protein, 402 aa, Escherichia sp.
VKRLQAFKFQLRLGGQQECEMRRFAGACRFVFNRALARQNENHEAGNKYIPYGKMASWLVEWKNATETQWLKDSPSQPLQQSLKDLERAYKNFFRKRAAFPRFKKRGQNDAFRYPQGVKLDQENSRIFLPKLGWMRYRNSRQVTGVVKNVTVSQSCGKWYISIQTESEVSTPVHPSASMVGLDAGVAKLATLSDGTVFEPVNSFQKNQKTLARLQRQLSRKVKFSNNWQKQKRKIQRLHSRIANIRRDYLHKVTTTVSKNHAMIVIEDLKVSNMSKSAAGTVSQPGRNVRAKSGLNRSILDQGWYEMRRQLEYKQLWRGGQVLAVPPAYTSQRCACCGHTAKENRLSQSQFRCQVCGYTANADVNGARNILAAGHAVLACGEMVQSGRSLKQEPTEMIQATA

SEQ ID NO: 57768 - protein, 681 aa, unknown
  TnpB Polypeptide
LVAKYRLSPSPEQIATLLRWEGVLRLVWNLAHEQRLAGLARLGNAKRYVRYQEQAADLTALRAEVPWINAVPCNACQQTLRHLDEAWQDCFQKTKGRPRFKRRGRDAMGIAEPDAKKSWRLTHEDGNPVLRFPKIGAIPVVLHRPMPEGKRGTATITRDVDAWFVSLVVEVGDALTPEDRAVQAQKPAVGIDRGVTHPLADSHGTLTKRPGFLDQGATTMAHLSRALARKEKGSQNRQKARVKLARAHRKIRRQRENFLRTLACRYAKNHGVVVMEDLKVRNMTRSAAGTVEEPGHQVAQKRSLNRAILAIGWSLFRVYVEQACRRFGTRLVLVNPAYSSQECAECHHVDGASRVGERFGCTTCGHRAHADVNAAKVILRRRTDGVEVCGGDGEVRPAKQKPKTVRSRTTSKKDKAKSRVLQGADGLQRIVGAAPERGFEILIARLDGCPEQAQFEGPGVRVFFFGVLAALGDRGPQVPEQLGEPYSLEIPGRLVGKGVAIVKGQQHRPGAPLALACGPQRAPRNRAREARRRRGLVGQREIGLQQVGHALGLDRLIKEKISEVHLIVVGEHPQRVGIEPEFALDIEVLLEQRPERRERAGRGQFLLARGLEERRKAIDLPIQLAFDEGVGVGGLPGRGPQALEPTEHRAVVGKAHDALRQRASVVISINECDRHIFSALS

SEQ ID NO: 57769 - protein, 426 aa, unknown
  TnpB Polypeptide
MIRSDLPQAGRNVRRIMTVHRIRLDPTPAQDALFAQCAGIARFSWNWALAEWRRAYSARKEDPSRPAPSEASLRRALNAVKADEFPWMLQAPKAVPQQAIKNLGTAFASFFSGRARYPAFKAKDRCRESFRPDNGPGTFRVEGVRVKLPRIGWVRMREAFRFGPELKPVLKSVTVSREAGRWFAAIAAEIDLPPQDRSGDSVCGGDLGVTHLLTKSDGTKIEGPKALRRHLPRLARLQRQHARKRKGGKNRAKSRRRIARLHARIRNIRQDALHKLTTGLAREHSVVVIEDLNVRGMMANRRLARAIADMGFHEFHRQLAYKLDRAGGRLVVADRFFASSRICHVCGAKAEAMPLSVRTWTCAGCGTSHDRDINAAINLRNLAGSEGIACPVTACGVEGAGAGREPGVKPATVKQELERDHERSHP

SEQ ID NO: 57770 - protein, 437 aa, Fervidobacterium sp.
LVELVLLGGGNMTKAERIRQAIQQTKQRHKEQVPVVYELKVNLNSLSKADRKNLIALFSEAKWLYNHIVADIDNRLKYESYKLSEVEVKVGDKFETRPIINLSSQMKQSIVERIQRNLYALHSSKEKGNKVGALKFKREVNSIPLKQYGKTFKFTNEQKTKVKLQGFNKPIRVLGGHQIPEDAEIAKAELVRKASGIYLHVTCYIGKEDFLKVWQNRVNRKQIVKRREWKTFNQAAAIDFKPTGVVLSNGLKIEWKIEETPRLKRLQRTLSCKKKGSRNRQKVKQKVRKEYEHIVNVRQDVVNKVISLLYRYDTLIYQDDNIQAWHKGSFGKSIQTSAVGMIKRGLRDSLRVSTVLIDRFQPTTKTCSRCGNVQSLELSDRVYKCPACGSELDRDLNATYNMLKFVGLDRSEVKPVEHETAVKIFGANPKVLISFVQ

SEQ ID NO: 57771 - protein, 553 aa, unknown
  TnpB Polypeptide
VFGVNKPLRKIADPVVAAGPSGCRFRTRLHLSDAEAAALSEIGVFLGGCYRRELAGRVGLGRMGRDEHKRWRATRKQALTAVSSSRWAGAITRAVEDQYQLGMRGLAAHVAGMHSAVDVLERRCSLRPGEQQADYGDDSRRGKRRREYATASERFVKTRRLAILRQRLVAAEDDLAAGRPSITVGGKRLWRNRTNLASAGMHEQQWRHCWDAARMFLTADGETGKACGNETIRVDGQGRLRVKVPAALAGKYGTHLQFATPVAFRHGGAEVAARIVGNRAVRYDISVDPAKGRWYLDASWAITPEPTPELEELRSGRVLGVDLNADHLAACVLDSSGNPVAEPVTIPLDVHGLRASRRDGHVRAAITTLLDTAEQQGCAAIAVENLDFADSRATGRETMGRGPRGKAFRRTVAGIPTAKFRDRLTAMAGRRGIAVIGVDPAYTSRWGDQHWRKPLQQQTSDQVTRHHGAAAAIGRRGLGKPIRRRPAGPRTQQRMGAGTPPARPVTLPRAQGSRTAPIHRHTHEVCRSIGQRRPPAAKTVRAATGQNSLLLTD

SEQ ID NO: 57772 - protein, 357 aa, Clostridium sp.
MILNRAIRMRIYPDDEQRHKIDVTLSHCRYIYNKMLERNTVIYNRRKEHLNYYAMQNLLPEMKNYLPWLKEADSKALQYACRQLNAAFDRFFHKQGSYPRFHSKRGKQSYTTTHASVICVEPHRVKLPCLGWVRTPETRIPDGSICYVTVSLEADNRYYVSITYKKEVPDITPVVLKPENVLGLDYKSDGLYTDSNGHTEDIPHFYREAQRKRTKLQRRLSKKQGSRKGERKSKNFMKQLRLVNRQESHIANQRKDCMHKLSTEIANRYDAVCVEDLDMRAMSNKGFGKGHWKGKEACTGYFCSLQWRSNASGNRRLYLEVRICGEDPGVTADRLHNGGRCKLRAGKRSRHKNKLLR

SEQ ID NO: 57773 - protein, 507 aa, unknown
  TnpB Polypeptide
MSPKTVISRTYPRVPYAAFDKNGEPLDVDEVLDGIRADAELVAHYALQEMTEQNMALSTYFDRLKPSGAGYMMGLKLPIEVKKQSGSSRLERMFREQVVTNLRSWVARSEVVNQTSTRHVSAGWKRTASDSKPSSMQPRLALSAADKQYREMTVIPDRIELKMVVQGSWVTLHFPTPPQLLEAGCESGVPDIWVDKNNRVIFGFHRKTDPGLPKFSDRYVVGVDVGITNPAAYVVWDKKNMEIVEQSLLGQRARSLHNKIKRTQTQVSSLKRQGRDEEAASHREHLSNRRKELSILIAKEITDASWRYDNAIVSFEDLSHIKNTMKFGRWFRGEVHRRTRDMVEADGGRVFKVDCAYTSKRCHICQTDLDMSDYSQPRCTVCGITHHRDVNAAANIAQRVNVKKACQTRKRHTTKTKRVRKSKCHSKPLKHPGTKNRPTPKAPQNRPKTKNQSHPPLASKEVSKGMCPADTRVSAVDHDTWFQTTSGTTNSKENLSINDVDWVYPQE

SEQ ID NO: 57774 - protein, 414 aa, Lactobacillus sp.
MQQTLTAKIRLYPTYEQIALFKAVTKEYQRLCNIVSQWYFDGHFNANQKVFQKDMYRYLRNESPKLNSQMVQSTYRTVKARYDTVRTQLYQHPYRYDTGLIDEKTGKHVWKSVPRTLEWLWKPIHFKRPQADYVHGSNYSFVKERTMISLNVLAKRIKVPFKADYLEDLFTTNAKLGTAKLVQLKKHWFLHVPVTIEVNEWEKLRNQHIVGIDRGLRQIMTIYDEQGKTKFFNGKRVAYQRKKYAHLRKQLQATGTKSAKRHLKRLARRENRWMEDVNHRLSKTLVQHYGENTLFVLEDLTNVSFDEKNQSTRDHNRDLHSWPFYDLQVKLTYKAQANQSQVLMASAKYTSQRCPKCGQIRKENRNHALHRYDCANRGFRTNDDRVGAMNLYELGKQYLTGNERPKFELNNVAD

SEQ ID NO: 57775 - protein, 558 aa, Metallosphaera sp.
  misc_feature (373)..(406): Xaa can be any naturally occurring amino acid
VKLRVKVDHETYSALKEVEGEYREVLEEAINYGLSNETTSFTRIKAGIYKTEREKYKDLPSHFIYTACEDASERLDSFEKLKKRGRAYTEKPSVRRVTVHLDDHLWKFSLDTISISTKRSRVFISPTFPKIFWRYYNKGWSIASEARFRLLKGNVVEFYVIFKRDVKPYEPKGFIPVDLNEDSVSVLVDGKPTLLETNTKKITLGYEYRRKAITTGRSTKDREVRGKLKRLRERDKKVDVRRKLAKLIVKEAFESRSVIVLEDLPGRTPEHMIKDVKDKQLRLRIYRAAFSSMKNAIIEKAREFGVPVLLVNPSHTSTVCPVHGTKIVYQPDGGDAPRVGVCGKGKERWHRDVVALYNLKKRAGDVSPVPLGXXXXXXXXXXXXXXXXXXXXXXXXXXXXXXXXXXLLSLNPRIVSLYKALKICDKKLEILNKFTNYLENNILNPKLVDLLREKINGEGFDKAHLELLILLEFALKLRNEGYHVKLNDFYGDLLLDTNASFEEQMKIRDQIIEEYKRKYDVDVSAEVGDVFGMVDSVDKIKEYMRKVLDVGGGRKQSI

SEQ ID NO: 57776 - protein, 258 aa, Streptomyces sp.
MIRAYKFLMRPTARQEQALGEMLRDHCSLYNGALQERRDAYRHVSKTSVKYGMQSAQLKDIRAFDPERQGRWSFSSQQATLRRLDKAMQAFFRRVKSGDTPGYPRFRGVNWFGTVEFPKDGDGCRWDSTPHDPVTRVRLQGVGHVKVNQHRPVAGRIKTVSVKREGRKWFVVLTAEQARPEPLPPTGSVVGIDLGIVGFLADSNGEFMTNPRYGRRAAAKIKAAQQALSRFPRRKAKERGQLPAQRVRREGWAQPQYF

SEQ ID NO: 57777 - protein, 508 aa, unknown
  TnpB Polypeptide
LKGGSPGVSVSRTYPRVPYAAFSKSGEPLDLDEVLDGIRKDAELVSHYALRELTDQNLALVTYFERFKPAEAGRQMGLKLPSEVKKQFRSGASRLEKMFQEQAVSNLRSWAARSGVVSGGHTGYVSAGWRRTVKDFKPSSMQPRLALSATDDHYRSMDVTPEHISLEMVVQGRWVTLHFPTPPQLLEAGCEPGVPDIWVDKNNRVMFGFHGKTKPGRPSFSERYVIGVDVGVTNPAAYVVWDKKNKEIVEQSLLGQRARSLSNKIKRTKTQVASLKCQGREEEAASHRKHLSNRKRELSILIAQEITDTAWRYGNAIVSFEDLSHIRNTMMFGRWFRGEVYRRARDMVEADGGRVMKVNAAYTSKRCHVCQMDLDMSNYSQPYCTTCGITHHRDVNAAANIAQRVNLEKACRTRKKHATKKRVRRSRCHVKPLKHPGTKNRPTPKAPQNRPKTRTSTAPAREVSVRMCPADTRVSVVDHIEWFQTTSGTTNPKENQFADAVDWVYPKE

SEQ ID NO: 57778 - protein, 458 aa, unknown
  TnpB Polypeptide
MTEQNLALVTYFDRLKPSGAGYMMGLKLPVEVKKQFRSGSSRLERMFREQVVTNLRSWAARVEVMTQTCTKYISAGWRRTVRDSKPSSMQPRLSLSAADRQYREMTVKSDRIELMMVVQGHKRVLHFLTPPQLLERGCEPGVPDIWVDKNNRVMFGFHGTVDPGRPEFSERYVVGVDVGVTNPAAYVVWDTDKQEVVEKSLLGQRARSLNNKIKRTQTQVSALQRKNRSEEAVSHREHLSNRRKELSILIAQEVADAAWRYGNALVVFEDLSHIRNTMRFGRWFRGEVYRRTRDMVEADGGRVLKVNAVYTSRRCHVCQSDLDMSDYSQPRCTTCGITHHRDLNAAANIAQRANAKKACQTRKRHATKTKRVRRSKCHARPLKHPGTKNKPTPKAPQNQPKTHAHPSLPKMEVSKGMCPAESRVSAVDYDTWFQTISGTTVPKENLPINTVGWVYIKE

SEQ ID NO: 57779 - protein, 506 aa, unknown
  TnpB Polypeptide
VKHYDTVTRHRFTTDDVEQVERDLAQMITWMAQAEREVLASQEFHNLALKALKGDRPAGSLNSWGRKRLPRYNFEFQKHNMNEMLVSNMVGALELYAMSVGLFQVMGTHPKETKPERILFHYRNTYPDAPQPTSGMVRAHLLRYHKKSERKVSLPGVSAKLNLAVCDTYFAPKASRDDNDSLSIIVQMKTPNHKLTKLYLRLPDNIERFGKGKVCRPTIRLNNKGQVVFDIAIEHEVKQRDTNRDVGVDLGKVEPFVATVIDPRTKHRSAPYHTDYKRRLGLLVKKEQQRRDLASHLCERADLCDRHNRIDHADVLRTEAKRVRAKATRINHEISQCIASQVVSIADQNNARIAVENLSWLDAKGGRWPHAEIQSRIKNTAKRYGLKVSKVSARDTSRTCSRCGGRVSNNSRTRVGTCSVCGFELNRDVSASREIALRAVSNVRNRERMRCLLRQRALERSSAVTRQSKPVTALGGIQGHTGTSSTSLEATLMMVRENLDSRGSPT

SEQ ID NO: 57780 - protein, 393 aa, unknown
  TnpB Polypeptide
VILTFRYRLLPAKTQHRALERILESQRELYNAALEERIGAYRKAGRAISYIDQTKSLTEWRHQDAEASGLPTNLQRATLKRLDSAYQGFFRRLKAGAKPGFPRFRGKGWFDSFGFRQFLGITLRNRRLRFKGMPGTLRIHWHRDLPEAPIKSCTFKRDTQGWCVAFAVEVPAADPRNTKRAVGVDLGITTFAALSDGGLIPSLRSARRAERRLRVAQRALSRKKRGSCGRHAARTAVARCHADIARRRREHLHQASARLVREYDQIVIEKLQVKGLARTALAKDVHDASWAKFISMLRYKAEWAGARVIEVDPQHTTQECSGCGTLVPKDLSARQHDCPICGLSIDRDLNAARNILNRAGVGPGLPNVVGCDMRAGENLGSTNSRNKSGCVRI

SEQ ID NO: 57781 - protein, 372 aa, Natronococcus sp.
MVRDTIPDLKDWWTDLNKVYSTVLQKAVERIRDNINNLGKLKAQGHKVGSLNWKNPRDFRSFTYRQSGFELDKKSGPDGHALLTLKKLKGETREVPIRLHRDLPEHDAIKEVTLKKDTTGAWYASFTIETTTPEKPEPEAIDPEDTVGLDLGVLTFIHDSDGRSVDRLDLSDDRERLEREQRSLSRKREGSNNWEKQRLRVAAIHQRMSNKKSDFKHKLAHFYTTEYDAVLVENLKVKSMLEGQQNARNKAEIGWRDFLTILEHHGDKNGCHVVEVEARGTTKECTECGVETAKPLWMREHSCPSCGFEIDRDWNAAFNVQKRGWNRLGVVHSEDTPAETATAVDTLTVSASRVVETGSPCLKERTAQAVSE

SEQ ID NO: 57782 - protein, 386 aa, Meiothermus sp.
MTRKAFKYRLYPTQPQQKDLERTLSLCRHLYNAALQERRDAYKKAGRTVGFYEQKRYLPEIRAELPEYKHIHSQVLQNVIERVDKAFQGFFRRVKAGQKAGYPRFKGQGRYDSFTFPQAGTTGVKLQEGGKRALLHGIGSVKMKLHRPLEGRLKTATLKREGDDWYIVFVCEVEPQPLPENQEAIGIDMGTNPHFLVTSEGEMVEAPRYFQKAQAKLARTQRSVTKKQRGSNRRRKLKMRLARQHRKIANQRKDFHHKVARRLVNNYGTIVHEDLNILGLARSRTAKGVQDAGWAQFLQILAYKAEEAGRRVVGVDPKHTSQDCPVCGHREKKPLWVREFTCPACGASLHRDVAAAINVLARSGRVPDRRWARTEPSGMGTAWAVP

SEQ ID NO: 57783 - protein, 404 aa, Halorubrum sp.
MAEVRRTVVVKLDVDDSDATLLHETIEEYLWACNYVVKDAWKDDYKPTSKTKLHDRTYSDVREQTRLQANLVQSARSKAAEAIKGVVARWKRGKKASQPHFTTPSIRYDKRSATFHDDHVSLSTVNGRIEAEYVLPPEGDNPHTKYLRNDEYELTGATLQYRDATDTFFLHIGTKADVESEIPDQGDAENSTVLGVDLGIEQIAVTSTGQFWSGDYLAHRRREHERVRGDLQRTGTESAHRTIDQMGNRETRWVEDYLHRISKAIVQEAVAHGCDKIAFEELTGIRDRMPGAKKFHAWAFRRLYDYTAYKAEAEDIDAMQVDPAYTSKRCSKCGTTLDENRPSQTRFCCQKCGYEVNADYNAAKNIGFRLLRAGQKSPHGGAITHLALKSGTLNVNGGYSPATQ

SEQ ID NO: 57784 - protein, 379 aa, Paenibacillus sp.
VLKAFKYRLYPSDQQAEFFAKSFGCVRKVYNLMLNDRIESYKKNRGTGEKIKFPTPAQYKNEFPFLKEVDSLALCNAQLHLNAAYNNFFSKPSSGFPKWKSRKNPVQSYTTNNQNGTIAIVAGRYLKLPKMEPVRIKLHRQLQGLIKTATISRTATGKYFVSILCETEVEAKKKTGSVIGMDLGVTSFAAFSDGKKVQNLNHLAKTSDPLAKAQRKLSRRAGQAKKEGRLLADSRNYQKQLILVAKLHQKISNQRNDFQNKLSTYLVNNHDVICVETLNVKGLVRNHRLARTLHDVSWSTFLSKLTYKAEWYGKQVIQVGRWFPSSQICSSCGHRDGKKGLHIREWSCPSCGTTHDRDVNASINIRAEGLRQLHGTVRV

SEQ ID NO: 57785 - protein, 381 aa, Lachnospiraceae sp.
MANKAIKYRLYPTTEQAVMFAKTFGCCRKVYNLMLADKIESYKTTGKFVTVTPAKYKKDYPYLKEVDSLALANKQMNLQAAFRNCFSKKRKKKNGFPKYKSAKHSRKSYTTNNQKGTVAIFDNNIKLPKIGKVKAVIHRMPEENWLIKSATISQESDGKYYASVLFEFDNPVNTYVADRTNAIGLDYASDGLYVDNNGNVGTNHKYYRESYNKLAKAQRKLSRMQGSKKHETKSNNYIKQLRKVNKIHRHISNQRLDNLHKISTKIANLYDVVCVESLNMKSMSNKDFGNGKATLDNGYGMFLSMLEYKLSERNKYLVKVDKWFPSSQICHCCGEVHPEMKNLTIRTIKCDCGLTISRDQNAAINIMREGLRILNESFAVA

SEQ ID NO: 57786 - protein, 455 aa, unknown
  TnpB Polypeptide
VKVNAASKTRLLVPKALESKLFQYLGCQRFIYNKALEQRIEYYQDTGKSLTYNMQAATLKAWKEECPWLKDPPAPSLQQTLLNLDQGYQNFFNGTAEKPTFKKKFRKEASLCFPQASHFSIQRLNKRYGEVDLPKIGKLRFYWASNLPNEIKSCVVSHDGKHFHVSFQGYKYLTKTADPFNSIGIDMGINVSIATSKPVAGTGLQLFNLDIKKIKSLETRIANKQRLQATKIKRSTRWRKLQDQIRTLHRKIRNIRQEFAHQLTAKIAKNHGLVFVEDLDVKQMMESASGTKENPGTDVAKKRGLNRAIGRQGWGRYRTFLTYKVGWYGDGIFPQNPAYSSQKCSRCKHISEGNRDTGTIEFQCQRCGFVAHADVNAAANLEEDGLTSLVAKYGPITTVVGALRNSDKTKILGKRSNLGASRRKSSSNLPTRGQASNGDKAGKNLGSSGDSTKNE

SEQ ID NO: 57787 - protein, 536 aa, Thermaerobacter sp.
MIGPMQATFQTKIHDRSVYPALDALAALYGRLLRRLFVDLYVRKRPLVECKRESIARDGITARYFNALATELKAKVKAAEEAHRHHLAHLRGQIQSTERAIAKLHKQAKALASGKGRWATLAPQERAARRRRVRFRLHQKKRRLAMLRARLEAAEARTGSPPICFGSRRLFHRQFHLEANGFASHDAWRKAWRDARSQSFFCLGSKDERSGNQTCSLLGDRLRLRLPNALAGRFGRHVWLQGVRFPYGQDVILAALASGQAISYRFVRKNGAWYVFATTERPAAPITTSRRAGALGADLNPDRLAVAEVDRFGNPVAARDIRLPLQGKRREQVKAILGDAVADLVAWAKGAGKPIVVEHLDFREKKTRLREKDKRYARKLSAFAYGKFSALLMARAAREGVEVLRVNPAFTSVIGKVKFMARYGLSPYAAAAVAIARRGLGLGERLRSGTARPLPARNRGRHVWSDWRRIAPSVRGQRAHRLYQRSSEDAPGRGEPRSTRAPAASRPHGPGCDGLAWGPGCDPPARIVGSTVRPAS

SEQ ID NO: 57788 - protein, 404 aa, unknown
  TnpB Polypeptide
MLIKGVVFRLEGELTHEVKSLFEDFRLAVNSAIRAGLQARITSRNALTRLAYKDFRAEHPRMYAQHLVSAFEVAGSVLKNHRRRVRKGKGNYVPYVRRLFMKAENQAYKLDRKSGVIDLPVRAGCHVELRLIVSQYHREYLDDTTLTLGSLTVLPNRVIVAFRKDAPKPFVPESALSLDTNERSLDGVFIEGDVAKAVKADFPEVAIIQQRHHDRRKRLQKKKAHDRRISRELCRREGTREHHRIDYRLHQVANSVLKFAEERRSAIVLEDLNGIRPKMSKELNRRLSMWPRRKLHQIIEYKAHWKGIPVVKVDPRNSSRTCPICGRIQYSRMGAEFVCECGWRLEGHINASMNLLQTAISKRMAGGLRFNPGAFQHDVMMILYNPVTGARSEPNGTSGIFGVT

SEQ ID NO: 57789 - protein, 408 aa, unknown
  TnpB Polypeptide
MQLVEKHIIKRTHKLFNELDELSFLSKNLYNRANYIIRQEFIKDEDNKYLNYYDINRMMIDNNNIDYRTFPAKVSNGILRLLDKNWKSFFKSIKDYSKNPNKYLGRPKIPRYKDTKTGRNIIPFEKGAISKTELRKNSLISLSKTNIKIPTKISFDELQAVRIVPRYDHYVIEVIYNKEIEDYELNQDNILGIDIGVNNLASISTTIGYTFIINGKPLKSINQYYNKVKSNLQSKLERNRFKSNRINKLTNKRNNKVNDYLHKSSRYIIDYCLTHNIGKIVIGNNKNWKQNIKIGKRNNQNFVAIPFVKFIDMIKYKARLVSIEVIITEESYTSKCSFVDNEDVKKHQDYLGKRIKRGLFKSFNGSLINADINGSFNIIRKVVPLFNFNSLKYGIEDVAVHPLRISFS

SEQ ID NO: 57790 - protein, 477 aa, Streptomyces sp.
MLLRPVLTRRLERTVCLMYWWSPPVGISPSSTPCWCGHGFELICSQRAQLQLNVIFRREQPRSIPTVVAVQLRYNYRAYPDATQRRALASAFGCARVVWNDCLRDRKGAHAVGLPYVKSADLSRLRITHAKRTEERAWLADVSAVVLQQSLRDLDTAYQNFFDSLKGKRHGRKVGPPRYKSKKDTRQSIRLTTNAFSLQGDGTVYLAKVGNLKVKWSRRLPAAPTSLTVTKDSSGRYFLSFVVDTEPDILPELDTDTGIDLGLSDGTKISAPRFLRRAEKKLKRLQRELCRKAKGSKNRAKARIKVARQHAEVADRRRDFHHKASTQIIRDSQAVYVEDLAVSGLGRTRLAKSVHDAGWSAFVGMLEYKAVRHGRTFAKVDRAFPSSQVCSACGFRDGPKPLHIREWTCAECGTVHDRDHNAARNVLFEGRRIVAAGRAETLNACGAPVRRARVPAQRGEAGSPRKGQQTQTGIPGF

SEQ ID NO: 57791 - protein, 402 aa, Streptomyces sp.
VIRAYKFLLRPTARQTAALRQMLADHCALYNGALQERRDAWRHSSKTSINYGNQSAQLKEVRAFDAERQGRWSFSSQQATLRRLDKAFQAFFRRVKNGEKPGYPRFKGVGHFDTVVFPKDGDGCRWDSTPHDRHTRVRLQGVGHVRVHQHRPVKGGVKTISVKREGSRWYVVLSCDDVAAEPLPPTGVVAGIDMGIAHFLTTSEGQHVANPRFLDAAAAELAEAQRHLATFPRRTRQRTKKHRAVARKVAKLYAKVCRRRLDFHHKTALALVRAHDAIAHEQLNTAGMTRGVNPQPTPEAPGTFLPNGAAAKAGLNRSILDAGWAQFLGILANKAESAGRLVIPVDPRNTSRTCPACGHVAKENRATQAKFECVTCGFTANADHVGAKNVLNRAGLVLCEGA

SEQ ID NO: 57792 - protein, 409 aa, Streptomyces sp.
MQLRYAFRLYPEPGQRVALARAFGCARVVFNDAVRAREDARAAKDPLPTASALSRKLITEAKYRPERSWLGEVSSVVLQQSLRDVEAAYRNFFASLKGERKGPKVGAPRFRSRKDARQAIRFTANARWKITSSGRLSLPKIGEVKVTWSRVLPVTPSSVTVIKDAAGRYFASFVIDTDPDTDRARWGDPDPSSAIGIDLGLTYFAVLSDGTKIGSPRFLRRAEKKLKKAQRELARKQKGSKNRAKARLKVARAHAAVADARKEFHHQLSTQLIRESQAVAVEDLAVSGLARTRLAKSVHDAGWSQFVGMLAYKAQRYGRTFVKIGRFEPTSQVCSTCGHRDGPKPLHVREWTCPACNTLHDRDHNAAINVKQAAGLAASACGAPIRPGHVPARREETGSQGIPAGSRAA

SEQ ID NO: 57793 - protein, 539 aa, Streptomyces sp.
MFFHRMRDLGESWSLALLESSSTVRGDEVSGLRDVAAPFVVSGPCGVAIRDRLKRLTVEDEKVLRLVGDLLGTLASRDLKARCAAGLEHDNEGWAERKRALTQESSSRWAGSITKASHEQWALARRGQLAHIHSLQAGIASIRHRLSLPLGEKGSKRAPGGYRSRQEWFAKSRRLHVLEDRLDTVRTEREAGSVHVARGGKRLLNTRHHLPAARLTEAEWRARWEATRRFLQADGEAGKRFGNETIRVTPYGEVSLKLPAPLAHLANAPHGRYVLTARVSFAHRGEQWRDRVTANRAVVQAGGLVGVDTNADHLAAWRLDIHGNPVGEPRRFDYDLSGTADRRDAQVRHTLIRLLHWAKRHHLAIAVEDLDFQAETTREKHGRKKRFRKIISGMPVSRLRARLVSMAAELGITVVAVEPAYTSKWGAQHWQKPLTGKNRNISRHDAAAVAIGRRALGHPIRRRTAPPPHDRSDRVGHRTVQAEPVAPEREGNRPRIPGPRTRSVPPGCGVKAVDQNAQHRSVRSAEHGPWQQDSLPLSL

SEQ ID NO: 57794 - protein, 424 aa, Fervidobacterium sp.
LIVTYRYRIYPNKQQKLQLSKTFGCTRFVWNYFLAWREERYKEQKLATTEAECRKHLNSVLKEQYPWLREVDKFALEDALIRLDNAYNRFFKGLSGKPHFKKKKSHRFSYTTYSTNNNIQIDFGVMAKDKTKNRCWGKIRLPKLGWIKARIHRTFNGKIKTATVTLLPSGHYYVSIAVEVDKVNNKNQTPEPINYAVALDLGLKSFHVDSNGNRVEAPKVLAKYEKKLKKLQKDLSRKKVKSKNFEKARIKLAKLYQKISNIRNDFLEKLSLQVINENQVIICEDLRVKNLVKNRRLAKSIHDASWSKFLRMLKYKAERRSRIFIQVSPNFPSSQTCSDCGYKNEEVKDLSVRIWECPRCGSVHDRDFNAARNILAEGLKLLSEINKPVGLGRSEPEGDACGGKTSTIGGTSLVASLVCEAGSS

SEQ ID NO: 57795 - protein, 414 aa, unknown
  TnpB Polypeptide
VAADLDKAFQAFFRRLRTGDKPGYPRFRGAHRWTSFGLKEVGNGFKIDGRRLKVHGVGRIPVRWHRPIEGDIKTVRISKKAGKWYAAFSCVLPDKEPLPATGTSIGIDVGLTHLLTTSDGETIENPRWYRTEQAKLRIIQRRIARRQKGGSNRKKAVVQVQRQHERIGNRRKDYLNKPVAGLVRSHDLIAIEDLRITNMTHNHHLSTSILDAGWGYLANHLTRKAACAGRQVSVVDPSYTSKTCSRCGERFTQEITLSVRWVTCQACGLSLDRDHNAAINILVRAQTVMHDEPARRQPAGTPPLGANVAGVPACVAQEAAPLLRTAECHRPITNASDRGKGGRTTWRNSSSPRRVPWPSGCLVCRWRDTLATATRTNRPVWRKGPRSIVGSRRGVSSICAICMDARPSAPGCWR

SEQ ID NO: 57796 - protein, 301 aa, unknown
  TnpB Polypeptide
LVLSEKKPIKRICGINSSHPRLPRKSAGCWTRHGSLFYALKRTGGIETPRPPRFKQESIPITYMQMGIVHERDTDRVRLSLPKTLKKYMEETYQIHENFLYLENKIFRGMDQIKQLRIYPPEKGSCKIIVVYEVPDQEELPQNGHELSIDLGLHNLMTCYDSGNGKTFILGRKYLELERYFHKEIARVQAQWYGQQSGKGVKHPVTSKHIRKLYKRKQDSVTDYLHKITRYLAEYCREQEITCVVTGDIRNIRREKDLGHRTNQKFHSLPYNRIYIMLEYKLKRYGIRFIKQPANKKSRLN

SEQ ID NO: 57797 - protein, 382 aa, unknown
  TnpB Polypeptide
MLLSHKTDIQLNTTESNIVGHMCYAASKLWNVCNYERRNFKELGMVHYPDWYDQKARLKGNMWFKSLPSQTAQEVCKLVDKAWKSFYALIKSKGIQNPKPPRFKQSGMTITYMQNAIVHVSGSKRVRLSLPKQLKEYLKHAYDICDNYLYLENKIFQNTDVIKQIKIYPPDQKNVCQVIVIYDVKDVEKMQDNGHYLSIDLGLHNLMTCYDSAGTSFILGRKYLEISRKYDKEIARLGHQWNSCQSAGGIKYPKPSKHMLKVYKKKRNCIHDYLHKVTRAVVDYCKANDIHTVIIGDITNIRRNKNLGKVTNQKLHAPQVTKEYAKKCNRTNRGLYKDQMSVYNADAVGAYNIMRKYFAGCGKEKKISVTGLSSPLIIKVAV

SEQ ID NO: 57798 - protein, 400 aa, Pediococcus sp.
MTYTAIKIKLYPTEKQKELIDINFSCCRKVWNTLLAELTERNDNGRLVLKDEYDFKRGGKLPSRFDLQKKIPPMKKEFPYLKKADSTALQSGVTNLRRAFDNWKNPNTKSSFPRFKRWQVNDNTYTTSAVYKKGIGSIRILSRNYIMIPKLKAVNFRCDVPINDHIVNLTVNLTNTNEYFASVIVDRDITKFDKTQQSIGIDLGVADMAILSNGKKYKTVDYGNQYNKRLRIWERKLARRRAEMKKEIAFNKKNDIEGGRLWFSEFPNYQKARIQVAKYKKKAMLQRQYRLQWISTETVKQYDVIVIEDLSTKNMLENHRLAKAISKQGWRVFRDMLQYKCDQYGKQLVVINPYKTSQICPNCGYDDGKHSLNIREWICPSCGITHDRDVAGAQMILKKD

SEQ ID NO: 57799 - protein, 187 aa, Pediococcus sp.
LSDGYKEPIHHFEDKYRKKLHHWKKLHSRRYLLAKQAIAWDYHNKVSAPRQLDDFKNYQKARVMVAKYHQKIANQRLDQLQKLTTKLVKQYDIIVLEKLNIKGMLKNHKLVSILQYKCDWYGKKLIQVNPSYTSQICINCGQNNHRLDLNKSKWLDVREWDCPNCGSHLDRDINAVKVILNKGLAIQ

SEQ ID NO: 57800 - protein, 413 aa, unknown
  TnpB Polypeptide
MAEMTKTMKLHIHPDEAGVALLKELTVKYSCACNYVSEYVFDHGFILNFMELQKALYNDVRRECGLKSQFTISSLKTVTARYKTIRTQLAKKPYKYQNGNGDWQFIPRTLEWLTKPVSFRRPQADLVRGRDYSFVNGASGEKLLSLNTLGGRIKVTFDIPDCFEEYFDGSWSFGTGKIVSLLGEWYFHIPVTKTTDEELTPDNVKHVVGLDRGLRFIVTGYDEGGNTTFISGKDVMAKRDRFQKVRDELQAKGTKSAKRALKRISGRENRWIFDVNHQISKTLVDRYGSGTLFAVEDLAGVSFSEENLSNRTKKQRKDLRTWSFYQLEQFLTYKAEAVGSEVLEVKPDYTSQRCPKCGRILKANRHHEIHEYICDCCGYRSNDDRVGAMNIQLLGTMYLSRDMHPRFGARKEK

SEQ ID NO: 57801 - protein, 464 aa, unknown
  TnpB Polypeptide
MDCENTIQKSKKNLKPETYIKTLKIILKPNELQKNILNQWFDVFRYFYNITNEFVKKYKIFNFRKVRNILRKLNYIPLFNYNNKLTGYKFTTKQIPNKFIVKNKKIKNNIVKYKKIKNNIVKYKKIKNTTDLRKFNLPEWVNENIPPRIITGAINDCCKSYKTCFTLLKTKQINKFDIKYKSKKKDNILSLEKSCFGVNNHLLPRFIKEPINGCYCIKNKVRKNKKYKINRRHKIELKKIKITKDCRLNLVNGKYILYVPVNDIKKVNNNTNEIALDSGIRTFQTGYSTNNVVINYGTNIETKINYLFEKTNKLQRYYSKTKNPKLLVKIKRTNLTLRNKISDLHWQIINELVKTHKNIILGDFKTQEILRKLSSRNNRLLNIMRHYDFKDKLKYKCDVNNCNLYIVNESYTSKTCSNCGILNNTLGISKVFNCGCCKKTIDRDANGAMNILIKHKMKLSVKLK

SEQ ID NO: 57802 - protein, 388 aa, unknown
  TnpB Polypeptide
MRTVKAVQQNYTPGPQILRMLEQFRQMMNDCVRIGLAENATSLKSLSTKAYNQLATYDAMSYYKLCAISKATGILRNYRKARRKNPKTREPYARRLQLTTCYGFKIKTIEKVLLLPFKPKQPLSIPLNAHVLRVLSEPNIQIRSVTLTNEKLSVSYSKEVELIQPRGLIAIDRNLDNLTAADSDGQMTRRNLSKATEVKAMYSEIRSHMRRNDMRIRERVTEKYGRKQREKVKQILHHASKEIVLDAKRREFGVVMEKLTGIRKLYRKGNWQGRSFRGRMNAWSFAELQRQIEYKARWEGIPVIYVNPYGTSVKCSICGSRMKPEENRQLKCPRCGFAVDRDVNAARNILAGGVRFAPFASASEAMVQEPQRRVILRVDADELTKSES

SEQ ID NO: 57803 - protein, 417 aa, Streptomyces sp.
MEQAEELFRTFGCVRKVYNMALDARSRAWTDESRRISYAETSAMLTEWKKTEALAYLTEVSSVPLQQTLRHLHSAFTNFFAKRAQYPRFKSKKKTRAAAEYTKSAFKWRDGRLTLAKMRAPLDVRWSRPLPDGAEPSTVTVSCDAAGRWFVSLLVEDTTVRPLPADNSAVGIDVGISSLVTLSTGEKVANPKCERRDSARLAVAQRDLARKEKGSKNQAKARVKVAKIHARIADRRRDFLHKLSTRLVQENQLVVIEDLSVHNLLGNRTLARSISDASWTELRSMLEYKCAWYGRELVAIDRFFPSSKTCSTCGLIRDELLLSVREWACEGCGTWHDRDHNAAQNILAAGQAVSACGADVRPQRSSSGRAVGDEAGKTMARAVGVPAPKRRGDVKRRTPGTRWPSRRGSTRSRAARG

SEQ ID NO: 57804 - protein, 384 aa, Streptomyces sp.
VKLVVQVKLLPTREQASALEATLHACNRAATYASAVAFVKDLTDRNGLQKEVYTDLKATFGLSAQPAVRAVKKVVDAYATLKANLRAGNLGPPTSRRYRKAVSTPIAFRPEAAQPFDDRCLSWQYDARTVSIWTVDGRMKWLRFACSPNQLKMLGAHRRGESDLVQRGGTWFLIATCDVPDPEVRDPVDWIGVDRGIVNLATTSDGINHQGRRLSRYRRWQARKRAELQAKQTRSATRRLAHRTQKERRHATQVNHTISKEIVSVAQRTGRGIAVEALDGIRERVRLRGDQRGILSSWPFHQLGQHLAYKARRAGVPFLEVDAAYTSQRCPRCGHTERANRPARDHFRCRRCGLAGPADVVAGVNVRNRARSAWVFVTAPAPSP

SEQ ID NO: 57805 - protein, 192 aa, Photorhabdus sp.
APEKPGVITRVTGCDMELSHYLIESNGEKVNNPRYLINATRNLRRKQKSLSRKQKGSANRGKARLRLAAVHKRVANARADFQHKLSRTMIDENQAVIVGTLKSANMMKDHHLARAIGDAGWHGFLMKLEYKAAAAGGKLDQWFASSKTCHGCGYKVSEMPLNKRIWQCPFCRVEHDRDINAAINIQRKGTTA

SEQ ID NO: 57806 - protein, 475 aa, Nocardia sp.
VRSGVDASCVSGLCHGGGVTGDMTVLQGYRFALDPSPEQEAMLRSHCGAQRKAFNWRLGLVKANLDQRAAERSYGLGEDELTPLVGWSAYGLRHGWNQTKDIVAPWWRENSNEAYSSGLANLAAGLSNWAKSRSGNRGGARVRFPRFKSKRSAMSCRFTTGAFGLVDTDRRHVQLPRIGQIRTHESTRKPARHLERGTGRIRSATVSFTRGRWFVSFSVEVQRHEVRPPEHCEVVGVDLGITHLAVLSQPVPGISDCHGMVANPRHLEHAQRALRRLQREAARRRGPDRRTGTKPSKRWQQSNAKITKLHAKVANCRADGLHKLTTALADRFGTVVVEDLNVAGMLRNRRLARGIADAGWAELRRQLEYKMGWRSGVVAVADRWYPSSKTCNACGVVKAKLRLSDRLFCCDACGYRTDRDLNAARNLAALASRIPHSASSPSCGATKNEPDGRPGKTSFVGNGHRHGNTPEVNVA

SEQ ID NO: 57807 - protein, 607 aa, unknown
  TnpB Polypeptide
MITITRVSPAVISPAMTRAASVYGRARPTSVSRIRIVSSGPPKNPASRPTVAPTVMLVMLAMIATISDVLIPYASRASSLRPSVSVPSGWARLIPSGRPVLVRPPSRSWCSGLPNSGAAIAIITKNSSSALPAISVGGQRPVRRARAPAPGWRLRQSPKLTGGSPVLQGGGEARTARLPGSYNHVQSPVKVRTAYRCRAYPDQAQQAVLVRTFGCARVVWNCTLAARHERYMLAREGTSYAEPDRALTAMKRDPELAFLNKVSSVPLQQALRHQHAAFQAFFARRSRYPRFKSRRGRQAVTYTRSAFSMRGGTLRLAKMSGPVSFVWTWPDVDVTALDPTSVTVAKDPADRWFVTFQVDAPGPAPLPVAGQSVGVDVGLADLVTLSTGEKIPHPRNWERHERNLKRWQRRLARCQKGSRNRAKARVKVARAHARVADARRDFLHRASTDLIRRFDVIAIEDLQVANMVRNHHLARAISCTGWAQLRAMLEYKAGRYGRQVAVVDRWYPSSKTCSACGHLLGQLSLSTRMWRCPSCGTRHDRDINAARNILAAGLAAGAENGTDACGGTVRRAGTPRAHVPAKQEPQPARAGIPPFSGGGGCQTHIRS

SEQ ID NO: 57808 - protein, 403 aa, Mycobacteroides sp.
VLTGRRYRLELTTEQEAQCREFSDVCRAVWNVGLEQRRAYRQRRTWVGYHDQARELAEAKCDHEWLKAAPSHVLQQTLMDLDQACRRHGALKVRWRSSRHWRPSLRFPDSNQISVQKLNRSHGRLKLPKLGWIKFRMSRPLQGVIRSCTLQRRGNHWFAAFLIDDGVETPQGHAVPGSSVGIDRGVAAAVAMSDGQLLNRETLTSGERRRALALQRRLSRTSRRSRNRDKARVALAQIHRRERSRRLDFCSKVANKTASAYAVVVLEDLHIGQMTRSAKGTVDNPGRNVKAKSGLNRAILSKGWNQFELALRSAARYSGSEIVKVPAAHTSQRCSSCGRIDPKSRKSQAVFRCTSCLHHEHADVNAAKNILAAGLAVTACQGRARPMKQELAGNRKELLLQSA

SEQ ID NO: 57809 - protein, 445 aa, unknown
  TnpB Polypeptide
MPIFTMLVLLTVVMSGKQTKNLYLILTTQNCLPAFKKEWVEFTYMHSQSLQATVKCVDLAYGSFFQGLRCQPRFKSIRDYSGWAYPALSGWKVNSSGKHGTVTLNDLGLTLRMRGQFLQWGSPTTLTIVYKPGRNQWFASITVDVPTVEAKFGSKSDNSYESIVAFDLGTETALTLYDGENFTELENPRFAKNSEVKIKQKSKALRRKRAPNRNKKIKASRRWKKSKKQIANLQSKVANQRKDWQHKVTSDIASRHDIGVTEQLNTKGMTRKAKKRTSLRSGSACRRTRARAGSKRKQQKAGLNKSILSVGFGSLNKMIAYKIEQKGGLMLMLPTKQIKPSQRCPKCGKVHKAWAELSNRYHICDGCGFETPRDRGSVMVMYNVATNQQPGLGMSLADCGCSSSTDSTKKRKHTGSMKQLGQMKRQKPNRKVDEGLETPSACAVG

SEQ ID NO: 57810 - protein, 634 aa, Euzebya sp.
LALDTTDPVQRRRVEKLFSACFQLRRAVQSDARHRIDAYWAARHERATDRDGPKQVRERVGLSKKGLEAAAKAHLDAAPHLLHWSSKALGLHLADTVWEPTSRHLFGDSSGKRAGRPRIASWWDFRRVPGRSRSRTAKGNKWETFRLHGTLDATKDTMGRQAAGWRHHQPIPSPSAPSHVDSWWAYDGPLMVVMAGVGDGDLVLPVRLPPAPSAQAHLDHFLMDPSVWHKIDLVRHRDPHVAGGWSYEAHLLCLVDPYVSQSTIDRRARVPVGRRAGGDVNVSNISVASHTDGTDLRVMTVERTADQKEREQQRRVKERRRQKALDRSRRNSNPDQYHLSKRQERAAQRRADNGLPAKTQFPKGPRRARSDGKPQQAYRKDQLSNSYRQNRAAAAKEARAAAIARRDTARQVAGELVAIHGADLTIEHGSLTAWAKAWGRAVHAFTPGLLIAAIEAVIAAVATDKTVKRAGTRHTALSQHCLCGRRAKKPLSQRVHLCVECGLIGGRDAVSAVLAACVDMVDPDQPTTATVDYGLAGRLAADPATIPTLRKTLGVQEHPEASTDPPNPGLLPGEGDPATSLTAGSAPRTGTVPTPTPNETAAGAADHVGARSMTNPNAPPDDRRLAAAGLRDIS

SEQ ID NO: 57811 - protein, 235 aa, unknown
  TnpB Polypeptide
MEIGESKLFKRNGEFYIHITVQKDLEVPKPELTDEAVVIACDIGESNPLVSVELWDQGKKRKNAQFLGRNVRSVKAHYNNLKKLAGRKKIKHATNWIKKHVENKEKRKVNDILHKTTTKIVDRAKILKRLGYEPIIVLGDLKKVRHSRVKGKTRCRKNNRKIHTMPSYKIKHMLTYKASWEEVPVIPLNEAYTSKLCWRCRSLNTEIRKRSFRCKDCRLEYNRDLNGSINIGNRS

SEQ ID NO: 57812 - protein, 414 aa, Escherichia sp.
  misc_feature (123)..(123): Xaa can be any naturally occurring amino acid
  misc_feature (151)..(151): Xaa can be any naturally occurring amino acid
  misc_feature (162)..(162): Xaa can be any naturally occurring amino acid
  misc_feature (164)..(164): Xaa can be any naturally occurring amino acid
  misc_feature (183)..(183): Xaa can be any naturally occurring amino acid
  misc_feature (194)..(194): Xaa can be any naturally occurring amino acid
  misc_feature (225)..(225): Xaa can be any naturally occurring amino acid
  misc_feature (240)..(240): Xaa can be any naturally occurring amino acid
  misc_feature (341)..(341): Xaa can be any naturally occurring amino acid
  misc_feature (348)..(348): Xaa can be any naturally occurring amino acid
  misc_feature (355)..(355): Xaa can be any naturally occurring amino acid
  misc_feature (408)..(408): Xaa can be any naturally occurring amino acid
VKRLQAFKFQLRPGGQQECEMRRFAGACRFVFNRALARQNENHEAGNKYIPYGKMASWLVEWKNATETQWLKDSPSQPLQQSLKDLERAYKNFFLFRYPQGVKLDQENSRIFLPKLGWMRYRXSRQVTGVVKNVTVSQSCGKWYISIQTEXEVSTPVHPSAXMXGLDAGVAKLATLSDGTVFXPVNSFQKNQKXLARLQRQLSRKVKFSNNWQKQKRKIQRLHSXIANIRRDYLHKVTTXVSKNHAMIVIEDLKVSNMSKSAAGTVSQPGRNVRAKSGLNRSILDQGWYEMRRQLEYKQHVRAKSGLNRSILDQGWYEMRRQLEYKQLWRGGQVLAVPPAXTSQRCAXCGHTAKXNRLSQSKFRCQVCGYTANADVNGARNILAAGHAVLACGEMVQSGRPLKQEPTXMIQATA

SEQ ID NO: 57813 - protein, 398 aa, unknown
  TnpB Polypeptide
MHKLAHSIRLNPTNTQETFFKKACGVARVAYNYGLSEYQKKRASGGKPDILEIKKQSNREKKTLFPWMSETNKDANQQPFAHLQDAFSRFFNHQNRYPKFKKKGKKDSFYISNDKFDVEGNKFWVPKLGWVKGTEELRFKGKITSAVIRRKANYWFVVVSVETDQAFTTCENQAVVGVDLGIKTLAMLSDGKFVESVGPLRARLKRLKRLQRWASRKLLGSSNQRKANQKVAKIHYEVACLRKDILDKLTKYLCENYQVIVIEDLNVSDMIKNHNLALSISDLGFGEFRRQLEYKSVLHGNTLIITDRWFPSSKICSGCGHTKKTLLLSEREYICENCGQVIDRDLNAAINLRNYGLKQIGMACPELTPVDMEALAYSSAIGISETSVNETGIVSAHI

SEQ ID NO: 57814 - protein, 514 aa, unknown
  TnpB Polypeptide
MRAQTPSFVVSIKLHLPKQIENHLEKSFRISNSAYNEALSFGLKRFEALKRNSHYQELLDARRLALKGIAKLKKAEKTAKGLTQQVKCYNKILFELRKAYGLTEFGLSARLSQQRQKPGSPYRQISAGEIQVIAGQAMKTLEKVLFYQIKSHKVRFRSKFDLDVSYRNRVNTEATRLVKSDRKGFAYRLYIHKASTFVDIPVKAFNKYQQMSLMRSEKIKYVQIIRKTIRGKKVYTLQIVCQGFPPSKVTKGEGVVGIDPGISTVAYASPNEVALVDLVPKNITRKEKLMKQLDRKIERSRRVNNPECYEANGKIKKGTQFKRPSKRQVRLHNRRRQVYRSLSEERKKLQGRLVNRIVSQARIIKIEDLNVKGLQRRSQEIRINPKTNRPYSKKRYGKAVFRAAPSGFRVALETRASQLGIDVEVISPKDVKPSQYNHITQTFEKKSLSIRVYDLSDKYPDVQRDLYSAFLIGHIENGHYQQAQLEQDFPDFYQQMKDFLQQPIETERLAWYLN

SEQ ID NO: 57815 - protein, 354 aa, unknown
  TnpB Polypeptide
LEQRVLFEKIFGCSRFIWNQMLADKIAHYKKTGEILKNTPAQYKNEFPWLKEVDSLALANVQLNLNKAYKSFFQSKFGFPKFKSKKAAQSYKTNSQKGSIALLDGKVKLPKIGWVKVKAHRQVKGLIKSATISKTATGKYFISILCEEEILPLPKTNSNLGIDLGLENFAILSSGEKVSNPRFLTSLSKKLAREQKVLSRRTLLAKKKGQKLSDCRNYQKQKLKVARIHETISNQRKDFLNKLSTELIKNHDVICIEDLVSQNLMKNHHLARAIGDVSWYEFVRQLSYKADWYGKKIVTISRWFPSSQLCSACGVSSGKKPLSIREWTCEYCGTHHDRDINASINILHEGLRLA

SEQ ID NO: 57816 - protein, 413 aa, unknown
  TnpB Polypeptide
METIEISRTIKLRIIFQNSKDISKMVDSQEAFKQGCNFVSEYIFNNDFPMNTTTLVKLLYKDLRSKFGLKSQMAQSCVRTVIARYRSVQTQLRKQRVWDGYKKDNHGKQVKNYVSKDLDFLWKPIEFKRPQLDLVRNRDYSHKDDNTMSLNTIYGRVIVKSIFNGWDQYFDGSWKLGTAKVLKSGKHWYLHIAVTKEVKKSEFKLSHVVGIDRGLRQLLTIYDEKGQTTFVNGNAILQKRRHYKRLRAQLQKKNTRSAKRRLEAIGQRESRWMNDVNHCLSKTLVNHYGGGTIFTLEDLTNVTFATVKKRVKKNRYEHYSWSFYDFEQKLIYKAFENGSQVVSCDAHYTSQRCPKCGYIDAKNRNKDKHEFCCKACSYRTNDDRAAAMNIQFLGTLYNSGNPKPAFEKLEIVN

SEQ ID NO: 57817 - protein, 496 aa, unknown
  TnpB Polypeptide
MRAKTPSFVVSVKLKLSKSIENHLEKSFRIANSAYNEALSFGLKRFDALKQNPLYQELLEKRRNANLQKECNKALFELQKSYGLTEYGLSAHLTKQRRVLNSSYQHLSFSEIQIVASYAYKALEKVLFYKIKPHKVRFRSKYDLTASYRNRVNTEATRLVKSNKKGIAYRLYIHKKSTFVDIPNKAFNSYQQLSLLRSEKIKYVQMVRKTIRGKKIYYLQIVCPGFPPSKVTKGDGIVGIDPGISTIAFASPTDIALIDLVPKNITQKEKLIKQLDRSIEHSRRMNNPECYKADGTIKKGARFKRPSKQQLRLRNRQLKAYRSLSEERKKLQGQLINRIVSQASTIKIEDLNVKALQRRSRNIRINPKTDRPFSKKRFGKTIFRAAPSAFRNALQTRAHQLGIDFEAISPKDTKPSQYNHLTQTFEKKSLSTRMYNLSNEYTNVQRDLYSAFLIGHIENGHYNQEQIEQDFPTFYKLMKNFLQQTPKTKRLAWYLK

SEQ ID NO: 57818 - protein, 418 aa, unknown
  TnpB Polypeptide
MGMRGYKTEVDLTHVQRTLCLKHAGVRRFAYNWGLARKQEARAAGNRMPSAMELHKALNALKATDYPWMYECSKCAPQEALNDLDDAFTHFFRKVKLKKQGQHRGKCGYPKFKSRKKGIGSFRLTGAIHVFEKSIQLPRLGKLRLKEHGYLPVGAKVAQATVSECAGRWYVSIQVEQAGAEPLPATGPVMGVDLGIKTLAVVSDGREIPNPKALRIRLKKLQRLSRWHSRKQKGSANRKKAQKKLARMHAKIAHTREDALHKATTSLVAKTKPAEKRPAVIGIEDLGVSGMLKNRKLARAIADVGLSEFRRQLTYKAEQAGVQVHVVSRWEPSSKTCSSCGWYHADLQLADRVFVCQECGLVIDRDLNAARNLELLAYLELMSTASYAGFYACGQGSSGLMETEGETALVEARTEPGR

SEQ ID NO: 57819 - protein, 376 aa, Chloroflexi sp.
MNETLTRTICIKLDVNGHDAVLHETQQRFNAAASWIATVCWDERITNTNTAHHRVYRETRSRFGLGSQLACCARAKAVEAVKAARTQALQRKPHQKPLTCPQFGPHGSVRYDARTYRLLSLDRLSLNTVQGRVTCRLILGKRQHDLLIDPSWALGSADLVWRQGTYYLHLTQSKGAPPVTETVDTIGVDLGMVNVATDSTGESFTGAKVHQVRARYHKRRQALQRVGTRSAKRRLKQLAGREKRFQKDVNQKISRTLVHKAVVSRKALALEDLTGIRERTTVRRENRYERHCWAFSQLRMYITYKAAWASVPVRFVDPRNTSRTCSQCGHCEQANRQTQASFRCKQCGFCLNADINAAINISRAEVKQPLVAPVRG

SEQ ID NO: 57820 - protein, 301 aa, Frankia sp.
VSRFRLSPDATQAEALLAQCGYARFVWNLGQEQRAAYRAGRGPTPGYHEQARQLTEARRTFGWLAAGAQTVQQQALRDLDQAWRNFFAGTHRRPGFRRQGVHEGFRIVGQAAGRVRVESRRWSSVLVPKVGWVRFRRSRPVPAAAKSYRVTRDRTGRWHISFAVVPEPIEAPGTGGVVGVDRGVAVSAALSTGALLVCPGLRSKEAERLRRLQRRQAKAKRGSHRRDRLRGQIARLKAREADRRKDWVEKTSTDLARRFDLIRVEDLNIRGMTRSARGTVEAPGRQVRQKAGLNRGILGAG

SEQ ID NO: 57821 - protein, 473 aa, unknown
  TnpB Polypeptide
MEITSSYGVKLLNTGSILRPTVDIYRKAVAYLVDVANKEWANIGPAYKIHKQQGQRVFELLIHASKENPAPKYDFDARFYKFPSYFRRAALSAALGAVSSYRSNLRNWEEGGKQGCEPTLTYDRSIMPVFYKGNMGEYDDMLHGRSDTVVLKLVVKNDWVWVPIQCRHQDVKYLAKWWSNVKASAPVLEMERRKGRRHNVFHLRFAFEEKRDLSLRDENLDTRTILAVDLGINNDAVCSVMCADGTVLARKFINFPREKDRLQHLLNRIRRQQRENGPTGGRRIWDRINRINDQLTANISNGIISMAAEYAVNVIVLETLNFQGKIRGSKKQRLHLWRKRAIQDMVERKAHLNLIRVSRVCAWGTSKLAFDGSGEILRGRINLSKEELANLLSMPQGERKTNKGRPKTHCGQELCTFQSGKEYNCDLSASYNIGARYFLREWCKVTPGLEEKLPKASQRTYADLKNLKLRLAA

SEQ ID NO: 57822 - protein, 158 aa, unknown
  TnpB Polypeptide
MSVYREACNYVSDYVFRTQDLKQLSLNKVLYSDLRERFGLKSQMTQSVLKTVIARYKTILENQNEWLKPSFKKPQYDLVWNRDYSLTQSQFSVNTLNGRVKLPHFAEGMSKYFDHTIYKFGTAKLVNKHAKYYLHIPVTFNVEESNLSESRGNHLSCR

SEQ ID NO: 57823 - protein, 406 aa, Gluconacetobacter sp.
MIVRKANTYRLYPDTKQREALGQIAGACRMVYNLALEQRRDWWQRYKAITGKSISYNMQSGELTALKREVSWLRDAPSQVLQQALRDLDRAYQNFFSGRSGYPSPRRKGLHDSFRFPDPASLRVDRTGKSAGRLKLPKLGWVAFRGWYALPGAIRNVTISRRAGQWFASVQWEREVEEPGPPALPAVGIDLGVSVFAAMSNGKTIAPGNFGKKALRALRKAQRALDRKKKGSANRRKAVWRVQTLHARVANARKDFLHKISTTIAKNHGMVVVEALQVRSMSASAKGTAEEPGRNVRQKAGLNRSILDQGWRTFRSLLGYKLAERGGSLIEVPAAYTSQTCSVCGAVDPASRATQARFVCTNCGYTENADVNAAKNILRRADCSLKSVEGHRIQRPDEAESTRRAA

SEQ ID NO: 57824 - protein, 411 aa, Hydrogenobacter sp.
MLKAYRYRIYPNKEQEEFFAKTFGACRFVWNKMLEGKLNALNNKEKLPKITPAKYKKQYQFLREVDSLALANVQLNQEKAFRDYFKNKKHFGLPKFKKKKDKQSYTTNNQGNTIRIDFEKQLLYLPKVKTGIKIKLHRIFEGKIKSATITKTKSGNYYVSILVETDKVQNKIKQPKSKICGIDLGLKDFAIITNDNGSCKIENPKYLVRAEKRLKRLQRQLSRKQKGSNNYKKTREKIAKLHEYISNARNDFLHKTSKAIIDENQVIVVEGLSVKALQQSMLSKLVSDVSWGTFLRYLEYKANWYGRELIIVDRFYPSSKTCSVCGYINTQLRLSNRYWECPECNTFHDRDINASKNLYKVGLSRVGTTRTQACGECSDGGTMIYHRSTSQHSMKQEATTSVSGSSSLSSL

SEQ ID NO: 57825 - protein, 439 aa, unknown
  TnpB Polypeptide
MTVTLSHKIELKANNKFKTYCRKAFGVSRFTWNWALERVNDKRERKEKIDVLELKKEFNHIKRRQYPFVMEVTKYASQQPFIFLKRALSQFFDDLKSDKSSSKRKGFPVFKKKRYSSGSFYIGGDLAVVKKGSEIKDKRFEASDDKTYLYIPKFGWVMLREEIRFPGKINSVTISQDGDKFFASFSIETSEIVYEGTHKENAQEALCGCDWGVKDLLTLSNGIKIKGSKHLKRRQRQLARQQKTLAKKQHPRTKGDKTPTSKNYIKQSRKVGKLYRRIKAQRLDENEKLSTVLVRHFRVICLETLNVKGMMSNHRLAKAVADNSPYALKEMIKRKSSLRERTVVEADQFYASSKTCRRCGEVNKDLKLSDRIFVCPKCGFTEDRDVQAAKNLTEVYINRVGLASPELLISGTPTIVKQFRSSLSSVLRSKTLFHSFLIV

SEQ ID NO: 57826 - protein, 458 aa, unknown
  TnpB Polypeptide
MFFKGQIVIQKSVKGKVVNLSKGISSTIDFMLRDQKRLWNWFHNLNVENFTQIGKFIFYNESAALLTQQRRSGIFADGSIVAQQQCLRSYEKALKDSFPSAKVRRGFPKPKKRATDCSLRFPSANAGTVRAGDNITHVKLPKIGLIRVRNLQVPVGGEINNFCLKKEADGYWLSVQFEITIDQPINNNSSVIGIDAGLSVMTSFSDGEQIQALKPLKKSLKKLRTQQRSFSRKKKGSVNRRRQAKKVARVHAKVRHSRRNAQHQLSRRLVNDYGLIAIETLSLSGLKRLRHQGFAWSDIGLGELYRQIRYKAKWDSVEIYEHPRFSRSTGCCPDCGHIGERIPLGISSWTCKQCGAQHDRDIAAAKWLELCAIQNRTRVGAACPKPVKVSKPQSPKRGCLGSAPQTIADMRSEPSGLPVHDGPPANIPSDVMCHAHASMEKRLIPRSRVRVSPPQPTY

SEQ ID NO: 57827 - protein, 221 aa, Leptotrichia sp.
  misc_feature (111)..(144): Xaa can be any naturally occurring amino acid
LKSINQYYNKTNAKLQSIKDKQKIEHTTLRQKRIARRRNNRINDYLSKAARIIINYCLNNDIGKVVLGHNEDFQRNSNIGSINNQNFVNISYGKLRDKLIYLCKLYGIEFXXXXXXXXXXXXXXXXXXXXXXXXXXXXXXXXXXASFFDGDEIPVYDKENPQEYKFSGKRIKRGLYQTSTGKLINADCNGALNILRKSKVVDLSVLYNRGELNTPKRIRVV

SEQ ID NO: 57828 - protein, 382 aa, Acidithiobacillus sp.
MDIKRAYRFRFYPTSEQATILARTFGCARFIYNHMLRLRSDAWMKRHESISYHETSAALTIMKQMPDYEWLNDVSSVPLQQAIRHLQTAFGNFFAKHSGYPTFKRKNDKQSAAYTDAAFRWDGKTLKLAKMNEPLAMRFSRTIPKAAKITTVTVSKDTAGRYFVSFLCEDAVSQKAPVNSQIGIDLGLTHFAILSNGEKIAPPKILRQNETKLVKLQRRLSKKQKGSSNRAKAKLKVARLHAKIADTRRDYLHKLSTRLIDENQVIAVESLAVSNMQKNHCLAKSISDSGWSEFVRQLEYKAKWYGRTLIGIDRFYPSSKRCSDCGHTVSKMPMNIRKWTCPECGSNHDRDINAARNVLTAGLAELVCGENISPAVPYGITG

SEQ ID NO: 57829 - protein, 452 aa, Streptomyces sp.
MGGAMADRVTGEEARRIKRELLGVGDRTKHRTRTATPLKGLAREPGTQQRVYRFRFYPTPDQAAQLTQTFGACRWVYNEGLALRAKAWAEHRVSLGFAESCRALTGWKRVPETAWLREASSTVLQQSLRHLDAAFSRFFKGAAKYPQRKSKHRSQDSATYVRTGFRWIEDPERPGTASVMLAKQSTPLDVRWSRALPPGQLPVKLTVARDRSGRFFLSVLVEEVIAPLPEVFIPGGREPKAVGLDLGLATLVTLDDGEKLPHPRPVEPVQDRPGATPRAAPGRQQAQKQEPWSKERCSASQAKRLAVALPAAESEVTPVRVLTGVGSRGSVGRKSTLVDRTILPSTRIVRHVPAGRRDTSPWLPSPSTRRPGCTPAATSPPSTNSTCTSRTASSSSSSAPPAAASPPRCACSPAWRTSTGAPSASATATSRTCRPRTGTSRWCSRTTRSTRT

SEQ ID NO: 57830 - protein, 436 aa, Moorea sp.
MNQWLDMLLAQYNYLLRDRNESYEQVKSPKLGNYCDLKTRGEACPLTCSVLKSSSIGYPWKKSQKNPQRSAYEAQSSTLPTLKKERPWYKSINSTVLQQMLRQLDTAFSKFFKGEAKYPKPKRRTRFRSFKYAPGQVKLDGNRIYLPGIGWMKFHNSRPIPDGFTMKSVTVRRKSRGWFVSIQIEDKSVPASPAKTAKEINPGRVKGCDLGIRKLVSVSNGKTVQNPANTKKYKRQARRLKLRQRAANRKKKGSNNRKKSFSKVALLHERVANKRSAYHWETARNLVDGADALVFEDLNIKGMKSRCKPKPNENGGYDRNGQSAKRGLNRAISDAAWGELVKKVEVVAVKSGIPVIKINPKHTSVECPKCHHTSADNRKGEKFVCTECGYHDDADVNGAVNIKMRGLKKLGINPIQLPSGRSRSVAYGQGKLRPWS

SEQ ID NO: 57831 - protein, 405 aa, Duganella sp.
MIRLQAFKYELMPTGEQARDMRRFAGSCRFVYNKALAMQKDNHAQGNKFIGYVAMAANLPVWKREAGMKWLKAAPSQALQHALKDLEKAYKNFFEKRAGFPCFKRKGCGDSFRYPDPKQIRLDEANNRIFLPKLGWLRYRNSRRVQGELRNVTVSRSGGKWYVAVQTQCEVEQPLPTVTTAIGIDVGIARFVTMSDGAFIAPLNSFKKHQRRLARYQRRMSRKVKFSSNWKKAKARVQKMHTRIANARKDFLHKTSTTISKNHALVCIEDVQVKNMSRSAKGTVEQPGSKVRQKSGLNRAILDQGWGELRRQLGYKLAWNGGMLLAVPSHHTSQTCPACGHVSPDNRRTQAQFLCVDCGYKNHADVVGAINVLARGHRVLACGELAQSGCSMKQEPTVATTQMTA

SEQ ID NO: 57832 - protein, 395 aa, Caloramator sp.
MIKTYKVMLLPNNKQRTKLFECAGVARWAYNWALEQQQNNYKNGGKFLDDKTLRKRLTQLKQTEEYKWLNDYSNNITKQAIKDACQAYKNFFEGRAKFPKFKSKKRSKPSFYQDTDKIVMTDTHVKLEKLTTSKKKNKQKFNWIKLAEKGRIPIGKNIKYSNPRITFDGLNWWLSIGVEEETQQGNTQYSEGIGIDLGVKDLAVVSTGQKFKNINKSSKVKKLEKRLKRLQRKLSKKYELNKIKIEGGEYRYRKTKNIKKLEFLVLKTRRRLKNIRHNYIHQITTSLVRAKPKYVVMESLNTCGMLKNRKLSKAIQEQAFHEFKRQMEYKCALNGIKFILADRFYPSSKICSRCSSVKDNLSLSERVFVCDNCGYEIDRDLNASINLKNYGKSIA

SEQ ID NO: 57833 - protein, 464 aa, unknown
  TnpB Polypeptide
MKKHRKRAKKGDPQTITKAVTHIGLEAINPGKLTALDALAEGYLELTQQYVTLFCIDEVPNSFRAPCFLTTLSERWHRVAIQHAAGIAKSWRSNRANASQDYLDQLSDSQEQQAHDTLEEGGKEPAWREWQVPTLRQRCIQANENVIKLEEATDSTFDYWLTISTLAFRQQLKVPVKLADYHKEQLTDPETGKRRKINSSVTLNKRDEGWWLTLTYDETIAVQTKPNAPVIGIDVGISNFLTTSDGKTYGSFNRNLRERQKRDREKRRRKAKLRKCLEKQGVPKEKLPSTRSATGQRLTRHVRQEINRAVNRCFEEHEGCQFAYEQLSVSSMRFKARAMNAYMRASNLAHIPDQIAWNATKRGMEATRVESAYSSQQCHVCHYVDRKNRPNQQTFCCRVCGHTAHADINAAENIASRFGDLEVHACQNRQEVKTLLMRRHEQWKQNFSLVVVQAPVQLSLWASS

SEQ ID NO: 57834 - protein, 379 aa, unknown
  TnpB Polypeptide
MRDHFAHARFVWNLAVEQQSHWHQGKAGAPGYLEQCRQLTEARLEYPWLAAGVQMVQQQALRDFSQAMAAFFDPRNPARRPTWRKAGRAEGFRIVAVKPRDIRRLSRHVGAIRVPKVGWVHFRWSRMVPHDVKSYRVTLDRAGRWHIAFATLPARVPPPGNCEVVGIDRGVAVSAALSTGELLRVPGLTAGERMRRIRLQRRLSRAKRGSNRRSRSKIALARLTARETDRRKDWAEKTSTDIAKRFDVIRLENLHIMQMTRSAKGSVRNPGRNVRAKAGLNREILRSGWGLLVRRLEQKAPGRVQKVSAAFTSQRCSACGHVDAKSRKSQADFSCTVCSFACNADVNAARNIAAGHAVTARGGVGDARPVNREPQLLLQ

SEQ ID NO: 57835 - protein, 384 aa, unknown
  TnpB Polypeptide
LKLIRTVKLKLDIPISDILPTFEVYTQAYNFVCNIGWEDKDSNGVSLHHKTYYTTRNYLPSQLAISARMKATESLISCLNRRRKNKKCKKPQSKLCSIRYDACSYNVWFEKNLISISTVNGRIKIPVLVPKYFKQYLDWRRGSAELFIRKNKVFFNITFNKEIEASRPASLDPYVIGIDRGIINLAVVSNNKFYKGNKVAKISSKYKHLRSLLQKCGSKSAKRHLRKLSMKENRFRTDMNHVVSKQIVESLPPNSIIVLEDLKYIRENIKTWSKELNRKLNTWTFGQLENFLTYKAQSKEILVDYVSAYYTSQKCSKCSHTEKQNRLSQPIFKCQKCGFSLNADLNASRVIELNYRDSKRYPKRLSVNQPIVSTVSLLDTSLVP

SEQ ID NO: 57836 - protein, 527 aa, unknown
  TnpB Polypeptide
VTYFNGKDGVLVKNQTYRAFMTSLTHILDLNGELLDSAPVLDQLVSEIRSISAYATFVARNDTVLGTELARATAVQAATAGRRAGVTMPDFLITGRSGRSRKEWLVRYNAVTAYRSWQERINAANRESGKYVSQGWRRTVDASAPSYGEDFINLGSVDRQYAVIENNPFDDGEIVLKMVVQGAWYRLIFNFDNARFREGKVTLPLVKVENDHPIFIFSVVTDNPVVQFSGDYTVGVDVGINNYATVVVRNTATEQVVYKYTLSQRVHSLWNSVRASENQVRSLRKKAASLLYDRQARMCALDEAQLHREAAARKKRELAILAAQEIAYLSHFYGNAVVAVEDLSWISNTMQNGRWNRGDFMQWLTHYVTQNGGWVVSVNAAKTSQLCHVCGEKVAHPEHKLSVCSEHGTMGRDVNAAANIAARAVSRVEKARKTRAKNRKLQEQAPRKTPVARDSLKYPSRDRTKSAPTPKRKKKGVKTLMSPARVQASCLDASVLADCGAHGATETRKAALKQGNVAYKCRLCSLI

SEQ ID NO: 57837 - protein, 459 aa, Lachnospiraceae sp.
MLTAWPTIVDHDSFPQIYDFAEKNSALAKNLYNAALFRIRQVFCGWDKTSRTDNEKEAFEEIETVRQAYPKFNVRRVLSYTALEKIMRITCNPDFFSGLPMQTAQAVVRKACDDFHNWLKASKDYKKNPSKYLGKPRMPKYCKSTRKSFEVTNQDAVLYRGSVTSSSAVIKLPSIPKKDKVMISGLPPYEDLRQVTIKPYYGKYILTFVFENGAPPCYPDLPEMAGVDFGTGNIATLACTDGSSVVFNGGVVKSRNQLFAKKRAAAVSSITKGTYRKHTQSQHLDLLSRKHDCQTNDSLHKISTAIVRWCIAHRVGTLVLGVNKLWKQESDMGKRNNQTYVSIPHARLRWMINYKALTAGINVIEQEESYTSKADVTMADPMPVYGEEKGKPVFSGKRIERGRYKTASGLIINADCNGAANILRKAVPDAWKNTKDFKFLAYPETYGYWNLNPKYKLTA

SEQ ID NO: 57838 - protein, 501 aa, unknown
  TnpB Polypeptide
VQIRWKFKLQPNIGQQALMSEWLVTLRKHRNYCLAERQRGFETNNQKSDESVMYYYGAFSDLDSRIEYGSYCPLTCPVVKHGVMSSGLTKNSKKHGLIWGNANDIQSKRTTELRSESEWYSRINSDVLQGNLGKLDIAYNGFFQHKRGFPAFRKAANFKTFQFKPGQVKLTVNRESNQPRCYSHAYFPGLGTMRYFDSRTIPVDADIRTVTVIKEADGWYMSVLLNLPESLPEVTEIETVKSAVAIDVGINKLISLSDGSFIENPKFATNKKVRRQLRIRQRRVNRKVKGSNNRKKAGKRVAKLHKKIADKRNDHQWKAANKVVNTAEAIVQEDLNVKAMKSRCKPKRQKGRFMPNGQSAKRGLNRSISDASWGDLFSKIAWLALKSGKPVLSVNPKFTSQECSACHHISKANRDGEKFICENCGHIDHADTQASRTILRRANLNFVSKDIKNLPGDSRKVTLVRDDSASNGKQDQGKNRTSKVIPEKRILFEQLSLQLFD

SEQ ID NO: 57839 - protein, 236 aa, Mycolicibacterium sp.
VDRGLSAFLVAATADGSEVARIDDAPKALATGLKQQRRLSKSLSRKKKGSRNRKDAAARLGRHHHRVANVRRHFLHQVSGQLVKTHDRIVIENLNVTGMLRNHRLARAISDASWSEFARLLRYKQAWRAGQLIEADRWYPSTRLCPECGDIDSSMTLADRVFTCGCGHTADRDANAARNLARWGQGQHDTSTDPRTPKQRGRATKARRRDGAGQHPRVGETSPNDAGTDVHTAPAA

SEQ ID NO: 57840 - protein, 288 aa, unknown
  TnpB Polypeptide
VNHNDHAQGGAAHTVHAVQDSGCVAGTVLRGQAFRLQPAGRGVQRVRQGDEPEPRVSGRDRHEERERMAQGQSDPVECVEQRHHGFPQGTSAYFRKAQYGKHRPRFASRNDNIQSFRNAMPIRRMDGNRYPLSRKLGSVRIRKRDRLRHPIESLSSWTVKRENRTYCLVLLFDVDIQPKTRAEGRVGIDLGVKDLLTLSTGEKIDYPNRLRRLEEDVKREQRKLSRRTTGSNNYRRQRAIVAKAYAKLRRYRDNFQHQLSHRLIEENQFIRRRRTLKAYAAASLANAR

SEQ ID NO: 57841 - protein, 334 aa, Nostocaceae sp.
MWSKHLNCAKLQAHIAKLRKRNRLWQSVGSQAVQDICQRIEKAYQLFFKHSKKGVKPPGFKKVRKYKSFTIKQAGYKFLGGNRVKIGSRVYRFWKSREIEGTVKTLTIKRTPLGELFMVVVVDEGSNPEVEVKTGKIAGFDFGLKTFLTCSDGTTIESPQFFQQSLNSITTASRQHSKKLKGSSNRERARKNLVRKYEDISHRRRDWFWKLAHQLTNKFDVLCFETLNLKGMQRLWGRKISDLAFGEFIQILEWVAKNKNKLVVFIDQWYPSSKTCSACGHVLESLDLSIRQWRCPSCQSVNGRDENASRNICAVGASTVGLGNVRQAMLAIAV

SEQ ID NO: 57842 - protein, 412 aa, unknown
  TnpB Polypeptide
MTSSTSEIYTTRVLRVRDKDRHTAWLAQLACEVNTVWNYCNELQIRVFERERKFITGFGFWPYLKGCTRGETALSLPIQTVQETAEQYARSRRQHRRVRLAWRKSKGVRKSLGWLPFKIRTIKYAHGQIYYAGKWLSVWDSWGLGAHELRAGSFSEDSRGLWYLNVTVNVKRSEKVPVDGGAIGLDLGLKELVALSDGTKVAAERFYRDMEPALARAQRAGKSKRAKAIHTKVANRRKDFLHKITTKLVRQHSVICVGDVNASALARGPHAKSVLDAGWSAMRTMLQYKCDDAGAWFVKVPEAGTTRMCNDCGAVSGPKGIADLPVRQWVCAACGASHDRDTNAARNILDRGLAILEEQFAAAGEAKAVEAAVNEIGQHARSVGVGHDPLEVGILALKGREDVKRSQKWRWG

SEQ ID NO: 57843 - protein, 521 aa, unknown
  TnpB Polypeptide
MGTAYRTLVLKYDLQRLPPEAVEKIPALLKVQEEFRRWTAEWVKSGGALPPPQHNPLKHFGTRLLHGLKMLDWFEGLKKNGIKVEKAEMPLVFDVQLRLNGERDVGRGVFIDMPKKEVRVRKWGGGTLQLPLGRKAAEWILARAKEGGRPVLAAVWIGASRRNRAVKLYVALTFRREAASMKPKRLLAVDINALHNGLAWAVVEGERIVAKGVLRPDASKILHLQKIASGLDRTCAERDVACESAVAARKRIWRILRSWEDEAVKKLVRLAIQHRAAIAADAPIDESIRELKEGYVAERKIFLNFGRFRRRLKGAAAWHGVPYCEERLYSTLCPRCGGKMMALPNRRVKCICGFEARRDDVPIFWAIKLYPQLISFSSSASGNCLERFSGGAAASVMPSEGAPAAGCPCSAALTSDKPAAWSWKKKNKGGKRGQQARHPHFSASPSYCGLAAPERLADAFLHHLMRLPLLRAGLLPAPAHGPRSLLETSSNTSPCASTSAASTRAKRKPGGCSASSDALVP

SEQ ID NO: 57844 - protein, 405 aa, unknown
  TnpB Polypeptide
MLVRSLTFRLKDPLPNEAKFLMEDFRLAVNNAIRLGIRSNVTSRFTLTKLAYKDFRKEHPGIYAQHLVSAFEVAGSILKNHRRRLRKKLPTQVPFVRRLFMKAENQAYKLDRENGIIDLPIKAGLHIQLELIISDYHRKYLDDESLSLGSMTLLSDRVVVTIRKHAPKPYAPASVLSLDTNERSLDGVLVKEDMIAAVVRAEFPEVSIIQSVHHDRRKRLQKKKSHDRRTAKRLCAREGKREHNRIDYRMHEVANAVLSFAEERRSIIVLEDLTGIRPSKGKKLNRRISFWPRRRLHQIIEYKAAWKGIPVVKVDPRYSSRKCPVCGSIQDSRKGAEFVCGCGWHMDRHLNASINLLQTAASEKAAGGLRFDPGAFQHDVVMVLCGPGRAVRPEPNGTSGIRAVA

SEQ ID NO: 57845 - protein, 394 aa, Cyanothece sp.
MIVYEFKIKGKKHQYQAIDEAIKTGQFVRNKCLRYWIDGQKVSRAELYRYNTKLRSEYPFVKDLNSHACQASVERCWSSIARFLDNCKKQIPGKKGYPRFKKNARSVEYKTSGWKLLDPKHIEFTDKKGIGKLKLIGTWDLAFYSEDKIKRVRLIRKADGYYCQFCISVDVKDELPPTHQTIGLDVGLKEFYTDSMGRTEPNPRFYRQGEERLKFYQRRVSRKKKGSINRKKAINKLGRKHLKISRQREEHAKRLARCVIQSNDLVAYEDLRIKHLVKNHCLAKSINDAGWYQFRKWLEYFGVKMNRVTVAVNPAYTSQNCSNCGAVVKKSLSTRTHICACGCQLDRDKNAAINILNRALGTTGHVGTWILDPNASGDLSSTIAGSPCDSKIGL

SEQ ID NO: 57846 - protein, 212 aa, Okeania sp.
LSEVSNIPLQQSLNDLNQAYQNFFKSTKGQRKGKPIKPPQFKRRKSRQTARFTKGGFKVGQHKVYLAKIGKLKIVWSRELPAPPSSVTVIKDSANRYFLSFVVEIQPETLPQTDNSVGIDLGIKTFATFSDGTKVDAPKPLKKRIKKYRKLSKSLSKKTTGTNRYEKARLRVAKFSYGMLRKHAKLKDTRDNFLHKLSTEIINENQVIVLEV

SEQ ID NO: 57847 - protein, 309 aa, Streptomyces sp.
VYLANAPHGRYVLACRVAFAHRGGDWADRVEADRAIAYRIHLDTGRGRWYVTASWQIPPTPTVPIEAALAHGVIGVDMNADHLAAWRLDIHGNPADSPRRFFYDLTGIAEHRDAQVRHALTRLLHWARTCGVKAIAVEDLDFAAEKTREKHGRRKRFRQLVSGMPTGRLRARLASMADATGITVIAVDPAYTSRWGAQHWQKPLTTTTRKTTRHEAAAVAIGRRAQQHPVRRRTAPPPRHRRDVVGHRTVQAGSGVAGREGTRPRIPGPRTRSVPPGRGANAGNQNAQHRPGRSAEHETWQQDSLPLGL

SEQ ID NO: 57848 - protein, 384 aa, Escherichia sp.
VKRLQAFKFQLRPGDQQECEMRRFAGACRFVFNRALALQNENHEAGNKYIPYGKMASWLVEWKNATETQWLKDSPSQPLQQSLKDLERAYKNFFRKRAAFPRFKKRGQNDAFRYPQGVKLDQENSRIFLPKLGWMRYRNSRQVTGVVKNVTVSQSCGKWYISIQTESEVSTPVHPSASMVGLDAGVAKLATLSDGTVFEPVNSFQKNQKTLARLQRQLSRKVKFSNNWQKQKRKIQRLHSRIANIRRDYLHKVTTTVSKNHAMIVIEDLKVSNMSKSAAGTVSQPGRNVRAKSGLNRSILDQGWYEMRRQLEYKQLWRGGQVLAVPPAYTSQRCACCGHTAKENRLSQSQFRCQVCGYTANADVNGARNILAAGHAVLACGEMV

SEQ ID NO: 57849 - protein, 256 aa, Bacillus sp.
KYKAEFEWLKEVDSLALANVQLNLQTAYKNFFSGQNDFPTFKSKKDRKSYTTNVVNGSIMLLTSHIKLPKLKIVRIKHHREIPLGHIIKSCTISMTPTGKYYVSILTEYEKEIVQKEVETVVGLDFAMDGLYVSSEDKKANYPQFYREMLDRLAKVQRVLARRTKGSQRWNKQRIRVAKLHEKVANQRKNFLHHDSKELATNFDVVAIEGLNMKGMSQALHFGKSVADNSWGMFTSFLAYKLYDQGKQLVKKYVIV

SEQ ID NO: 57850 - protein, 379 aa, unknown
  TnpB Polypeptide
VLLTVKLKLILDKEQQALLLEFMEQFNEACNFVSAEAFNSMNWNRIKLQKQCYYGVRSNFGLSAQTSILVIRKVADTYQSDIENIRIRNMRRPGYQFKEELRQHDFKKRGAVQYDARCMSWKGNGRVSLLTLRGRIIVTFVLSGKYANIDLSHVRSESDLIYQNKIFYLAVKYDVEEAEVITQSDFIGVDFGIKNIVATSDGKLFCGDECERVRKYYVDLRRRYQKIGTKSAKRHLARLSNREHNYKSNENHRISKDLVSEAKGTGRGLAIEDLTYIPRQRTAKEAQDATSKWAFRQLREFIEYKAKLSGIPVVQVNPTFTSQRCSICGYTDKLNRRTQSSFVCLACSYEENADVNAAINIKQRAAISQPIVVRHATEA

SEQ ID NO: 57851 - protein, 441 aa, unknown
  TnpB Polypeptide
MKVKRTGRFKVKASHPDYELIKVHTIEAKEIYNYANYIIRQIYFKNSENHEYSMEFIHEYPELNKDFEIYLKESKKFTSTFYRIICNFSRIKGHSLNSKMVQGIVNILKRDWKSYWKLLKLKTVGKYDKPVNIPRYKRKYSTVEYNPQVISKTKLKSGYIGTAGMKEGFKIPKFYKEYDLKSARALWKNNELYMEIIYEKEVPETKLNEKVASIDLGGKILMAVAYNFNRRGICISANMLRSINHYYNKIIGIMTSLLPKGKKISKAIVNLWRKREEQIRNLLGYYTNRLIEELVSLNVSKLIIGKNKEQKQEIDLHSKLENRNFCMIPFNKLIEILKYKCEENGIECIEQEESYTSKASFLDNDFIPVYGTEDKEYEFSGWRNGRIYKIKGKDQKIHADLNGAFNIMRKAGHELLEKVNFLNNNWIFPIGKFKAKNLNYI

SEQ ID NO: 57852 - protein, 846 aa, unknown
  TnpB Polypeptide
MDAKGKAADSRHRDKHKARVISSSLQPESVGHSLLQTQLLSDGQKQNESLTDRCQEVNGSIPKKTSGRSSKVKPQPQLRKRNPVQAQPIQKIKPRPKRSKSVTPVSRVRTKQETSKDKSLTSKKRTQRTPSSKTSDPASISKERDLLPFWNKYTQELSKKWSFNTKTDSVVTDLKWSNGSSAKLAQNSWFTVRCRKEVRPGQSSMETMETMQKQLIQQQTTPLVTPGMNLQMTSSLLSPSLLRDIMADAQRRTDSRDASFKTAEMKAQERKLNMRCAMELKMQAKKQAEQDQAQEQQMEMEPEIEPEIPSNQNQQVPNANACQQKTTKKRKQRPLPSSPDLINDTKSKPLSNDVIEQEDIKRSKTEHKSTKEGAVKLSKPKIVYNPDKPIAARMTKYKLRPTNEQMQLLKQVLGVTTWTYNQSLLAVREQRAQPVIKSLRDTILNSKAPLLSDKPWVTAVPYDLRDEAAKDFAQAWKANETKKKKGDVYAVHAAFRFQHKFRKSRKIVIHAKHYWGAGIFHPAFFGKQPFRCGEQLPERLMYDATLTVNWLGEVHLYIPAPLDPHSMVGDQPVAPNPIAAIDPGVRTPGTVYDPTNQQYIEWGGNDIGHIYRLAHHMDDLQSRMCSTPEKPIGHHTRWRMKRAWRRMSKRVQNLVKDFHYKFAKWLCLNYQVILLPTYDTRQMIRRGQRRIRSKTVRAMVTWSSATFRDRLIGMSRRYPGCHIVQLSEAYTSKTCRSCGFLHNKLGGNKVFKCPSCQARYPRDDGGASNIFLRHLTMIQLDKEALNSAKENAVSLPCSEEEECVLLTDMDIDVDATMSQEYLSLTAPGLISEDLASEREPLDPFAD

SEQ ID NO: 57853 - protein, 378 aa, unknown
  TnpB Polypeptide
MYKSFKFRLYPNKEQKELLNKSFGCSRFIYNYYLSNTKNNGYQNVYSNISDYVNNLKYEYPFLEEIDSAIIRKTLFHLDDNMKKYHNNGFGYPKYKNKFDRHSYTTSAVYSEYKGRKYSNIELDLVNRLIKLPKLKWISIRGYRNIDSINGKIVNVTISREKNGKHYVSVLYNLIDVNNNLIPRSIVGIDLGIKKLLTLSDGLTYENNKYIEKYEKRIKRLQRELSRKVKRSNNYNKCKKKLAILYSKLKNARNYYLHNITKKITDEYDIITCEKLTIQKMLKEKNLSKKISDASFNEIIRQLEYKCKYKNKLFYKIDTYYPSSQECSICGHIDKRYKDINKREYRCLKCHNEIDRDLNASINIMYEGLKLYMKEVRI

SEQ ID NO: 57854 - protein, 440 aa, Burkholderia sp.
LPKSPVTIPKRPVTFVRNTHFGQMIRHQVVGTLDSFISNRQNDFREMVNRSSVDEKVRHQLHFINRWRAWQTLTVPLVMRDGSTIPDDIRRLARSIFRAVMKRHRLPALRRLNMVVDQRMVSVTPSDKATHFGMWVRLSTLVKGKPVNLPLQTYPHFTTRAGNRALTVQVNQRQDGSFGVGILTDVTDAFAASRAAYRPRCEAIALDLGLNTLFATDQGDLIGRQWRSKLEDHDRRITGLARDLQKRGIRPNHSERYRARVSALRGWLKSEVNRCLSRLVASRAPAEIAVEQLDFRAPGLSRRLNRLISNMGRGFIEAKLKDLEERFGIRSTKIIAAYSSQTDSACGYVDTKNRKQQTFRCLWCGHRTHADVNAARNLVRRRSLGVTGFARTSRDALLGALVRQHIERFTRPRGGPADPRLSNPYFRSWTDATRLIGAYK

SEQ ID NO: 57855 - protein, 139 aa, unknown
  TnpB Polypeptide
MNKAFKVRIYPNKEQKVLIDKTFGCTRFIYNYMLNLKQKLYEYHNISLSYNHISKILTEIKRNKIWLRVIDAVALKECLKDLDVAYQKFFKGNGFPRFKSKKRGTLSYRTISCLHLDKDTKTVKIPKVGWIKFRDKSNF

SEQ ID NO: 57856 - protein, 138 aa, unknown
  TnpB Polypeptide
MKKARLKLARFHEYIVNCRKDYLHKISIFLVKDYDIICAETLRVKNMLKNHKLAKSISDVSWYEFCQQLEYKSKWYGKKFVQIGTNFASSQICSNCGYKNSDVKNINIREWVCQKCNTYHDRDINASINILNEGLRLI

SEQ ID NO: 57857 - protein, 129 aa, Clostridium sp.
MLADRIESYKENKDLDIKQIKYPTPAQYKKEFEWLKEVDSLALANAQLNLDKAYKNFFRDKSVGFPKFKKKTSANSYTTNNQNGTVSLENGYIKVPKLKSKIKVKQHRQFTGLIKSCTISQVPSGKYYI

SEQ ID NO: 57858 - protein, 426 aa, Halobacteriales sp.
VSGQRRTNEYTAEPVSDRYRHCLFDWLAAHAPLWNRLTYRRRQQYFSNDGNVWEVNFADLYNDYAPILGKATCQQVARKNSDAWRSFFQLLEKYRDDGDSTVTEKPRPPGYWGTRDDGYELHGLVHNDLYTVDWDETQSTLEFGVGDVLQDRYDFAHQERITLEVNGNPQWNGDDGRVELVYDEAANRIRVTHPVRIQPAHLREQRRDGFTHTLDSENATQAAAIDVGANNTLAIVTDHGETAVYHARPEFDRFRRLSDRIAKLQSELPDNRYSSSRIERLYDERGRKRDHARDAAVKHAAEWLLARNVDTVYVGDLTDVLDAHWSTSVNEKTHSFWSHRQLLDRLGLTFGDVGIDVVEVSEADSSSSCPTCESKTVSRQGDEFRCQDCELEAHSDVIGAWNMLQAEAGPMARPAALRAGRHRDAP

SEQ ID NO: 57859 - protein, 518 aa, Acrocarpospora sp.
MAEPDKRPRPIAPSFVAPGPSGVSIRDRLKGLTAQDEKVLRLLGAHLGSLASRDLKARCADGLEHSADAWAVRKRELTADSSSRWAGSLTKATHDQWALARRGQAAHIQGLEAGIKTITHRLSLPLGDKGGTRAPGGYRSKGEWFQKTRRLTTLEDRLAGVRADRDAGRVRVTRGGKALMNNRHNLTRAQLTEPQWRERWESARWFLSADGESGKRYGNETIRVTPDGEVSIKLPAVLAEHANARHGRYVLAAKVSFRHRGTEWADRVEANRAVAYRIHLDVPRQRWYVDASWTFPLTQTIPMQTALAHGVIGVDTNADHLAAWRLDRHGNPIGRPRRFSYDLSGTAGHRDAQVRHALSGLLNWAKTCGVAAIAVEDLDFTDSKTRERHGRKRRFRQLISGMPTGKLRARLTSMADATGIAIIAVDPAYTSMWGAQHWQKPMAAPRRKTSRHDAASIAIGRRAQGHPIRRRTAPPHDDRSDRRGHRTVQARPETLGREETRRPVTDRGQEPPARTGRK

SEQ ID NO: 57860 - protein, 590 aa, Dictyobacter sp.
MSKKSTSQSLSYPLRLPDDVQVDALRLLDVSRSVTNQVITTLWPRLDECSVRTNKYAYKQIEAMIAPPVSHGSRLFRCEAEQAGRILRAQAERKQQFALIHPILTEGMIVSRSEAPRPHKHRPTIKQALDALKQNDEDGGSHVALLSLVEQACNFYFKNGCFPASYEEMQNVPVMQAAQLPYAGDDGGSMGQAYRMAVDFKQKQIVLAFRTPDAQGNWSRDWRDHLIRLTIPDAVLDKCKQGNLQAPVLREVKEPDGTRYVVLDVIVEVPIREVPEPKDMSNVLGYDWGVRTLITATVVDLDGHQLTRPFFLDTGCFDGEQARTRRQIDVLKAKVAKLEAHCDRLQGGDARGERCLKKLTVLRKEISLCWRKYEARNHDLAHMAANVLLLLAVASGCSLIAGEALKSMKSQGRGRDAKGKWRNWRNNTQVRGEIWRILKYKCFLTGIHLEWQQPRGTSHTCPHCGKPADTYKSSEHLGKAIDWGAWLCCEHCGWNGSRDYAASLNIARLGAAWLKEAQRRKRMVGISHPKLQEKNVKPVCYMLAGSPLRFPASSPRACLLYAGKIYVNGWTYSVTLHSSYPSSLMLDACG

SEQ ID NO: 57861 - protein, 381 aa, unknown
  TnpB Polypeptide
MPVQKLNRAIMYRAYPTPEQQVLLSKTFGCVRFVWNHMLMDAQQFWDEAGVFFIPTPAKYKNEFPFLKEIDSGALCNAQLDLKEARKRHREDPKNVGVPTLKSKRKSKMSYTTNVHSYVKKDGQLVKTLELTEDAVHLPKVGFVKIKKHRSPGNGWQLKAATVSCTRSGKYFISLLYEFEKDIHSIKPTKENSLGLDYSSHDFYVDSNGNVANYPRFYRRSEEKLARAQRRLSRMQFGSHHYDKQLYKVRILQEHIANQRKNFCHTVSTAIAKQYDAVFVEDINLRGLAGSLKLGKSTNDNGFGMFRTMLEYKLTSQGKTFAKIDKWYPSSKTCSVCGFIKDDLTLADRFWTCSACGTTHNRDHNAAINIRNVGLLGLYPA

SEQ ID NO: 57862 - protein, 356 aa, unknown
  TnpB Polypeptide
MLKAYKYRLYPNKKQQEYFAKCFGCARFIYNKMLNDKIEHYKFTGKMLKNTPAQYKKDYPWLKEVDSLALANAQLDLEAAYRKFFKEGAGFPKFKSRKRSKHSYTTNNQNGTIYIEDGYIKLPKLKSKVKLKQHRKFEGKIKSCTISKTKTGKYYISVFVEENIKPLPKTNTKVGIDVGISSFAICSNGDVVKNPKHLRKSEARLKKLQKSLSRKQKDSNNREKARLKVAKLHEKIRNQRNDFIHKLTSKIISENQVIVIEDLRVSNMLKNHKLAKSIQEASWYEFRRQLEYKAKWYGRELIIAPSNYASSQLCSNCGYKNADVKNLRLREWICPVCGAHHDRDINASKNLLKLAM

SEQ ID NO: 57863 - protein, 374 aa, Brasilonema sp.
MLLSIKTKLKLTPAQKTIMAKHAGIARFTYNWGLATWKSLYQDGFKPNKFLLKKFFNNEVKTQLEWIKEKGICQKITQYAFDQLGDAFGRFFKGQGGYPKSKKKGINDSFTIDAGGKTISVGGVRVKLPTIGWVKTFEGLPHTTTTKLTISRIAGDWYIAFAYEVETESTPKSVDVVGVDLGIKELATLSTGAKFPNPKAYKKNIQKLKRLSKAHSRKKKGSSNRCKSKIKLAKHHNRVANIRKDSLHKVTHYLCKNHAVIVVEDLNVSGMMSNHKLAKSIADCGFYEFKRQLEYKTKKFESKLVVVDRWYPSSKTCSNCGCKKETLTLKERVFECSECGFVIDRDLNAAINLSHCVGGVPPLVACGVSRLAKA

SEQ ID NO: 57864 - protein, 430 aa, unknown
  TnpB Polypeptide
  misc_feature (278)..(278): Xaa can be any naturally occurring amino acid
  misc_feature (337)..(337): Xaa can be any naturally occurring amino acid
MAKTKKLWGCQQVLLHPDSEQKAVLEYLCGEANKVYNCATYYARQVYFKTKRFPSKAEICSVMQWNRHFSALYVSAAQQVCNGVAEAFKGFKELLKLFYAGGLKERPKAPNYRDKGLFTASYPVRWLKLANEGIRIPLGLKVKTWFGLDSIHVPMPSNLDWKTIKEVRILPRNGCFYAEFVYPVERPAVELDPGKALGIDPGIDNWLTCVSTVGTSFIVDGRHLKSVNQFYNKRVATLKEGQSQGFWSKQLAAITEKRNRQMRDAVNKAARLVVNHCXEHGIGTIVFGWNQGQKSGSHMGRKTNQKFVQIPTARLKQRISQLCQQYGVQFIETEESXTSQASFVDDDVLPTYGEKPDQWKSSGKRVKRGLFRTAMNQYVNADANGAANVIRKVAGTAGIIWQNSVEAVLTSPARVRFWSACESPCLQTGE

SEQ ID NO: 57865 - protein, 418 aa, unknown
  TnpB Polypeptide
MRRKKKETENPIPTITKTHKIRIYPNKHNQEVFQKYYDYQRSVWNRAIDERNAQYKIYKEMKATGLYTQKELNKNYFPHTNNLRKMAKFDWEDNFYCRVREIQFDNLCQTWDNYFNPNMPNHKKPKYKKKKDVESHKTLSLRNVRTKGKWLFLPKSHKSKPEYRFTKIKMAESLKFNGRVADDFTVSVKNNKWYVTITVEMPLEEKQSTFKQSTGIDVNVGSIDYLKKDGENKDYDKFYLLPKSLFRQYDKIKYYSRLISKKRNKNPYYIHSKSYKEAITKLNNAYTKAYNIQEANLNNIVKYFFDNYNRIIIEDLDVNSMKMNKRLCKSLHRNAFGRFKQKMINKAKEYDTEFILADRYFPSTQTCSECGNVKTGDEKLFLWGDKYGNDHNTYVCYNCGTIQDRTENAILNLVNYKE

SEQ ID NO: 57866 - protein, 406 aa, unknown
  TnpB Polypeptide
MYLSEKEIIYSTDERFSLIKELCHLSKNLYNASLYDVRQYYFETKLYRTWQSQVPIFTKTKNPDYYALQSHIASEVIKQVGRQFISFFNNKSNKKKRIPKYKDKNGYNVVTFNNRAISRKIKFNEDEQLYTYTLCKKSYNLKVQSTKSNVKMIKFVYDEINDLIKCFKIYEVEEPKLKKDNSRYFSIDPGLNNIVSIYNNIGIRPLLYNGRPIKSINQYYNKTNAKLRSELPTNVKSSKRLKQLSFKRNNKIDYEMHKISTHIINEAVKNNISKIFIGNNIGWKNEINIGRKNNQNFVNIPHTKLFNQLLYKGLLNGVEVIFTEENYTSKASFFDKDKLPVYGENDNHKFSGRRISRGLYKDSKGNLWNADLNGGGNIMRKISDKAAYKNIRKTKELMKRPILITL

SEQ ID NO: 57867 - protein, 377 aa, Burkholderia sp.
MDIKRAYRFRVYPTPEQAAIFARTFGCARFAYNHMLRMRTDAWQQHQKSIGYHETSTALTALKKTPEHAWLNEVSSVPLQQALRHLQTAFANFFAKRAKYPNFRRKDGTQSAEYTASAFKWDGTSLKLAKMDVPLAIRWSRTIPKGAKVATVTVSKDTAGRYHVSMLCDDVVSAKSGATAMVGIDFGLTDFVVLSTGEKIAAPNVFRKNEAKLAKLQRRLAKKQMGSANRKKARLKVARMLARIADCRRDFLQKLSARLINENQVIAIESLAVRHMLKNRKLAKSISDASWSEFVRQLTYKAEWYGRTLIRIDRWYPSSKRCADCGYTVAKLPLKVRAWVCPGCAASHDRDINAARNVLAAGLAVSAHGESVSPMSL

SEQ ID NO: 57868 - protein, 390 aa, Synechococcus sp.
MSYNKPMSQIISVRCKLIVPQELRQEIDRTLQGFANACNQILDTAKQKNCWNTAKLHHLVYRPVRAATGLKANHVCQALRRVISNAKAVKQVHKFRPTSLTLDVRTFKYRESDQAVGVTLMSGRVWLKLKIGGYQIALLRGQTPTSATLSKTKQGDYYINIAVELDTPPTGKTPKVIGVDLGRRDIATASNGRSWSGEHIQAVRDRFSRVRAKVQSKRTRSSRRLLRRLSGRERRYQTWLNHNISKTLVRDAQAIGAALAFEDLTDIRERLNQKPRSKAERRRTNNWAFYQLRMFVTYKAAIAGVPVVLVPPAYTSQTCHKCLHIHPEQGKSYRSGKLFKCGHCGWEGDADYNAAQVISLLGATVNSPEIPKLSCPLGQLGIGIKPAPCA

SEQ ID NO: 57869 - protein, 217 aa, Synechococcus sp.
  misc_feature (37)..(114): Xaa can be any naturally occurring amino acid
LAGWGIGGETKGFNAPESHNLGVACCSTYFFNSSTVXXXXXXXXXXXXXXXXXXXXXXXXXXXXXXXXXXXXXXXXXXXXXXXXXXXXXXXXXXXXXXXXXXXXXXXXXXXXXXDILTAVAVKRGKQVLRVDPPGTSQNCCVCEERVPKALSERVHDCPRCGSWDRDLNAAIEILKRGLRAVGLPLSGCGGSWFTSPLKQQLREVILGNSRLQPVRA

SEQ ID NO: 57870 - protein, 419 aa, Actinomadura sp.
VIVSVPTATVVRVKIVVQVKLLPTPEQASALAATVAAVNAAADRVSRVAFAEFGLKGRVFELRRLAYGELRARGLGAQAAQHVSKRVADAYATLRGQIGAGLLGREGSPRRAKADSKPIRFRADAAHTYDDRCVSWRMDARTVSIWTVHGRLKGVAFTGEPSRLKTLAGHRRGESDLLCRGGKWFLVATCDVPEAPLNTDPVDWIGVDRGIVNLATTSDGTNHQGRGLEKYRRRMARVRAELQAKGTKSAKRKLKRRARREARHAAHVNHRIAKTVVADAERTGRGIALEDLSGIRDRTRVLRHRRATLSSWPFHRLGTFIAYKALRAGVPMIEVDARYTSQGCPRCGHTTRRNRPTRDDFCCVVCGLAGPADHIAAVNVRRRARTAWAFVNMPHAAVSPSPRSGTVTSCKPGPSGPGC

SEQ ID NO: 57871 - protein, 217 aa, unknown
  TnpB Polypeptide
VQRKASRSKKAKRVLSKYSNRERNRARKHQLEIARVIQSLCGSVGLEELKKHGMYTRSRLWNRMISRSDWRSVARILEERLGEAKVKELDPYGSSFYCSRCGWENKDLNGAVFECGGCGLRIDRQLNAAINLYMRLRFGYTTNWEDGRKRVELRMEGASQREWWDTVVLPSLLGGCVLTGAELKGTSELVRFLNDALKPKLYYAYDRYNDMYLRIPT

SEQ ID NO: 57872 - protein, 426 aa, Moorea sp.
MIIAYQYRLKPRKNQQAKIDHWLSMLCAQYNYLLADSAKPTLRERFRWYEENRCSINACPLVCHLPELRDNPDYYSQKKTLPNLKKTHPWYKDIYSQVLQDVVKRVKLVFDRFIKGDSNGKRSGRPRFKKQHRYRTFTYPQMKEGCLEGNLINLPKIGKVKVVLHRPIPDGFKIKTASITKKCDRYYLVLSLEDKTVPEIKPDINLDSIVGIDVGLKEFLTTSEGETIKIPQYYRKTQKRLRVIQKRISRRNKRGSNRLKAIKQLGKQHKKVADKRKDFHFKTANYLLSKYDVVAHEKLNVKGLVLSRLAKSVLDAGWSSFLTILTSKAVRVAWPTALNAGLLAIPVSAQNTSQNCSNCGKKVPKKLHVRWHDCPYCGCSLDSPKATLRERDHNAAINIRNRAAGQSVLKAQRLLRDARIGACCLR

SEQ ID NO: 57873 - protein, 297 aa, Geobacillus sp.
MTVTREQVKSMWEKFVFHNELDPDLPPMIRDSWLRSKKAMVDPFRPYGWIKEIDNEKYRSLIDWSLPLMEGLYSIVKGSGFLVILCNENGQLLLSIGDRDLTFEVKPWHETKVMGVDVGLRYIAVASVGTKSWFFKGNQCTFVRRRYAALRRTLGQAKKLHMIRKIGDKESRWMKDMNHKISRQIVRFALANGVGVIRMEILTGIRKRAASAKEAGRNLHSWAFHQLQTMIAYKAEMAGIRVEWVNATYTSQTCRCGHREKANRNGIHFRCQKCGYTIHADLNGAINIAKAISGFAA

SEQ ID NO: 57874 - protein, 284 aa, unknown
  TnpB Polypeptide
MSHNNIKLEDGSLVLPKVPGKIEVRTHRPVAAGGKLKNVTVTLEPDGSWQFSIVYAYPKQEELEFTWESVKDLNDLEILGLDMSLPHMYVDSNGNFPQYELDGVVVEFEKWYTKQQGRIAKAQKKLSHMVKGSSNYAKQCRKIAKLHAKTKHRRSDFLHQMACRLARCYDVIAVEDLNLSAMKKALKFGKSVSDNAWGTFLTILEAQCRKCGHMLLFVDKWFPSTKTCSCCGYIHKEIKLKDRTYVCPECGNTMDRDKQAAINLKNEAVRILQSNRETMKKQAA

SEQ ID NO: 57875 - protein, 443 aa, Streptomyces sp.
MAELRPIAAPFVASGPSGVAVRTRLKQLTPGDEKVLRLVGAHLGSLASKDLKARCRDGLEHSGNTWAVRKRELTPASSSRWAGSIAKATHGQWALASRCRLAHLHNLEAGIRIIEARLALPVGQKGTKKVPGGYRSAREWHAKSRRLRVLEDRLAAGRADREAGIVHVVRGGKRLARTRHNLEAAQLTESAWRGRWEAERWFCQADGESGKRYGNETIRVSPHGEVSIKLPAPLGYLANGPHGRYVLACKVTFAHRGGEWADRVVANRAIAYRIHYDTGRERWYVTASWQIAPTPTIPIEAALAHGVIGVDMNADHLAAWRLDTDGNPTGAPRRFIYDLSGTAEHRDAQVRHALTRLLHWARTCGVKAIAVEDLDFATEKTREKHGRRKGFRRLISGMPTGKLRARLSSMADATGITVIAVDPAYTSKWGAQHWQKPLTSTTR

SEQ ID NO: 57876 - protein, 372 aa, Clostridioides sp.
VIAVKKAYKFRIYPNKKQQELINKTFGCCRFVYNKYLAKRIDVYKNDKETFTYKQCSSDLTNLKKELNWLKEPDKFSLQNALKDLDNAYKKFFKEKAGFPKFKSKNINRFSYKTNFTNGNIMYCGQHIKLPKLGMVKVRDKQVPKGRILNATISKEPSGRYYVSLCCTDVDIEVFENTNNHIGLDLGIKEFCISSCGDFIENPKYLKKSLNKLAKLQRELSRKTIGSLNRNKARLKVAGLQEHIANQRNDFLQKLSTKLIKENDIICIEDLQVKNMIRNRKLSRLISDVSWSEFIRQLEYKANWYGRKIVKVGKFFASSQICNKCGYKNEEVKDLNIREWICPSCNETHDRDINASINILKEGLRLITIQNK

SEQ ID NO: 57877 - protein, 399 aa, unknown
  TnpB Polypeptide
MLGVVQVRYRYRIYPAPGQQQALARVFGCARVVYNDCLRLRDACQAAGERISDTEVQRRVITVAKRTPERAWLGEVASVALVQACQDARRAYKNWFDSLTGRRKGPKIRHPKPRRKHGRQSIRLTRNGFALHGERLYVAKVGDITVEWSRSLPSVPSSVTVIREPDGRYYASFVVEREATPLPACDREIGIDLGLASLVVTSDGEVIANPRFLRAEERKLARAQRMLSRRQEGSANRARARHRVAVLHRKVRETRLDHAHKTALRLVRDNQAVYAEDLAVNGLMRTRLARSVADAAWSQLLRCVEEKAARYGRTFARIGRFEPTSQVCSACGARDGPKPLSVRAWTCPACGTVHDRDVNAARNILAAGRADNPNACRGDVRPGHVLAVAGEAGTHRSAA

SEQ ID NO: 57878 - protein, 376 aa, unknown
  TnpB Polypeptide
MRKTYKFKAKLSKSAEENAVVWLGLNQKLYNLALEQRIIAHKCFDISLSAYDQSKELPDLKRDFPEFKQVNSQVLQDTVERVGKAFQGFFSRLKKMGEKAGFPRFKSYHRYDSFTLKTSGWKLDGRHLKIKGIGILKLFLSREIEGRIKTINVRRDSCGDWWVSFSCDGVPERSFPEPRAELVGIDVGIAHFSTDTEGLHVANPKYYRKAQEELRRKQRKVSRRKKGSNRRKKAVNELAKAHRKVANMRLDFLHKTANYYITNFQMICIEALKVKNMVKNRHLSKSIADAGWSTFFELLTYLCPLGCKAAEAGRELVKVNPKNTSQNCSGCGEKARKSLATRVHHCPYCGLSLDRDVNAARNIAATGHGLCLQALT

SEQ ID NO: 57879 - protein, 437 aa, unknown
  TnpB Polypeptide
MLNIGQPNSYCIFSTHTTPVAPLRQSPRPHWLTIVSYNVGMKIAYQFKLKPTKQQVLEIDRWLSMLCAQYNYLLADRFDWYEQNRSSINACPLICHLPQLRDNPDYYSQKKTLPALKKSHPWYSEIYSQVLQDIVKRVKLTFNRFLKSDVKGKRSGKPRFKVRSRYRTFSYPQMKEGCLQGNLINLPMFGQIKVILHRPIPDGFKVKTASVTKKADGYYLTLSLEDATVPTIKPDFNPESITGIDVGLKEFLTTSEGESVAIPQYYRKAQKHLRTIQKRVSRSQKGSNRRSKAVKQLGKQHKKVADKRKDFHFKTSKYLLTKYDIIAHEDLNVKGLARTRLAKSIHDASWSSFLSILTNKAENAGLLVIPVSAYNTSQDCSNCGVKVPKELHERWHDCPSCGCSLDRDHNAALNILNRAEGHPVLKAQRLLCDSRIG

SEQ ID NO: 57880 - protein, 457 aa, Actinoplanes sp.
VLVVRLRYQFRVYPTPGQRTELAKAFGCARVVFNDGLRLRRQARRAGEKYITDGDLSKRVITEAKLTAERAWLGEVSAVVLQQALTDLNTAYRNFFDSLSGKRKGPKIAPPRFRSRKDNRQAIRFTRNSRFKILGNGRLRLPKIGDLQVRWSRTLPCDPSSVAVIKDAAGRYFASFVVTTTDDETLPQVDTEVGIDLGLTHFAVLSDGTKVAAPKFLRRAARKLKRLQRALSRKQEGSANRRKAAVKVARAHARVADTRRDWQHKLSTAIIRDNQAVYVEDLCVAGLGRTRLAKSIYDAGWSGFTGMLEYKAARYGRTFSRVDRFFPSTRMCSACGRVADKMALNVRSWDCSCGAAHDRDVNAAINILAAGQADRLNDRRVRVRPGLVPAPRGEAVTHPDAARSTRSVEGISVLQGGEDVNQSISPGLSTSNRWVATEAHGEYSGRVRRVSRSHEPS

SEQ ID NO: 57881 - protein, 525 aa, unknown
  TnpB Polypeptide
MKQTKNYLKEIPMSNAVPKDVKYHSDTLDKQVFAQLIETCDSREGCRNYFYSRFSGIEYMDNLKFRDIRDYLLANEKDEMKKFHVPSRTWKMELSETITNIKSMWSNTANKIKTYIRDNENLSDEDRHYLYYILKSNELWAQTLKTQTVNETRKLAAIQVSSDKKYLLKLLCRYTRKAKPKISHSTELKSMQLDTQMYSLEHGHLSIQTNKSRKRVHVDLKTKVFLTHGNIRIVLDKQNKRLTVHRCIYIPPNTTLITIKNELGFDKGYTVMLSCSSEREYGECLGDLLSSASKFVNEKNKKRNQYHSELRKLKKKLENKHLTNKERNAINEKIAHIKQINLSNKSYNRKRNRDKEIIRSYVNHEIKRMILTEKPSTIALEDLTFQSDSPKDKGKNFNRKMSTWIKGYIDERINYYAQLYDIKIVYVSAAYTSQFCAKCGARLEKRIGEHHEIGLCPNCGYINANTNAAKQVESRIHDKEITRYTNYKKVEQIMIDRYNKKLKKQQKSKKLKKKTSKKTTTATSC

SEQ ID NO: 57882 - protein, 444 aa, unknown
  TnpB Polypeptide
VPTAPQTGAGRASGRTLPGADRGQVHGEGVAHPRPRHSARSYPPVCTGVAERQRRGGGEGVQGHHLLPFAHGVPAPAQTALHVDAQLLCEHGRHGEPRNHQAVYCRTDEALGVSEMVETVRKTYKEKLRPTPAQVRALGEVLWHCRTLYNTALEQRITAWERCHVTVSRFAQEAELKAIRAEMPEYAAIHSHVLQDVLARLDKTYQAFFRRLQCGEKAGFPRFKGRTRYRSFTFKEYGNGARLDNGSLVLSKIGRIGVHWSRPLEGTPKTVTISREADGWYVAISCADVPVRPLPPTGQETGIDLGLEAFATLATGERIHAPSAYRRAERHLAKCQRRVSRRKRGSHRRRKAVNVLARAHQQVQRQRRDFHHKAALALVQQYNVIYHEDLRVANMTRNHHLAKSIADAGWSAFLAILSFKAASAGREVVAETQRSRARRAQGAA

SEQ ID NO: 57883 - protein, 380 aa, unknown
  TnpB Polypeptide
MQTPISKLCNKDNMVNQEKLTMCLTFKVCVPHNLFSILDGFYKESLIAVTQMLKDRTKSSSKYYNTIPCVLSKGLISKYQKNKKLKLISNLVLPICGDKGKQVKIVEGGLRIPAIFKKVIIPVTFPKPTNGFIRQVEFFKRNKKWYMSYSYDVLITPQYQVKSYLGVDRNSVGNVATVADASTGKVLKLGIDTAGLTKNFRNRRANLQKKGAKNALVKIKHKQERRIKEVNHKVSRTIVDYAKLHCSAIVLEDLGKISKKGKAKRYVQKSQWSFYQLETFIKYKATLLGVPIIYISPRYTSRICSKCGSLNIANGKNYSCSSCGHFEHRDVNASFNISAMACFLYSKTEADRGATVGLIGNPLNQRLVKASQLESSDGVR

SEQ ID NO: 57884 - protein, 302 aa, Cyanobacteria sp.
LRSLDKAFKRVWKVKGTGFPKFKKKNVKDSFYLEGSIRISGDWIKLPKIGWVRSHETLPSVKPKNVTISKRAGDWFIAFKVDFEPEVTLKKRERIGVDIGLNALATLSDGEQYPNPRAYRKAKHRLIKLQKELSRREKGSRNREKTKHKLAKAHLAVANARVDHLHKITTYLAKNHSEVLIEDLNVSGMLKNHKLAGAIADGGFYEFRRQLEYKCQWYGSKLTTVDQWFPSSQICHECGHGQKMPLTQRQFDCLECGISLDRDWNAALNLEQARVAQPCKPSDGSVWRRSKLGTKHQTIKFE

SEQ ID NO: 57885 - protein, 636 aa, Escherichia sp.
MSTGLRFTLEVDGLPPDAFAVVSFHLNQSLSSLFSLDLSLVSQQFLSLEFAQVLDKMAYLTIWQGDEVQRRVKGVVTWFELGENDKNQMLYSMKVHPPLWRAGLRQNFRIFQNEDIKSILGTMLQENGVTEWSPLFSEPHPSREFCVQYGETDYDFLCRMAAEEGIFFYEEHAYKSTDQSLVLCDTVRHLPESFEIPWNPNTRTEVSTLCISQFRYSAQIRPSSVVTKDYTFKRPGWPGRFDQEGQYQDYQRTQYEVYDYPGRFKGAHGQNFARWQMDGWRNNAEVARGTSRSPEIWPGRRIVLTGHPQANLNREWQVVASELHGEQPQAVPGRQGAGTALENHFAVIPADRTWRPQPLLKPLVDGPQSAVVTGPAGEEIFCDEHGRVRVKFNWDRYNPADQDSSCWIRVAQAWAGTGFGHLAIPRVGQEVIVPVNSFQKNQKTLARLQRQLSRKVKFSNNWQKQKRKIQRLHSRIANIRRDYLHKVTTAVSKNHAMIVIEDLKVSNMSKSAAGTVSQPGRNVRAKSGLNRSILDQGWYEMRRQLEYKQLWRGGQVLAVPPAYTSQRCACCGHTAKENRLSQSKFRCQVCGYTANADVNGARNILAAGHAVLACGEMVQSGRPLKQEPTEMIQATA

SEQ ID NO: 57886 - protein, 371 aa, unknown
  TnpB Polypeptide
MEAYQMGVKFRIYPNKTQQRLINHTLGCCRFVFNHFLTLRRDEWTANHKSIGYVQTAALLTDLKKYEEYSWLKEADSMALQEALRNLDTAYQNFFQRRAKYPRFKSKHNHNQSYRTRNQKSGIRIVGGKLKLPKIGEVKAKLSRSFEGRILNATVRRAASGKYFVSLCVELDKATLLRSNNGGKIGLDVGLSEFLTDSNGNTVDNPRPLERLTRKLIRAQRRLSRKMPKSKNRGKARIRFARVHEHIVNIRKDFLHKLSTRLVIENQVIAVEHLEVKNMMRNHHLAKAIADVSWSTFFRMLEYKADLHGGTVLKVETFYLSSQTCSACGYQNEKTKNLAVRAWTCPKCGAEYNRDENAAKNILRKALGNAS

SEQ ID NO: 57887 - protein, 427 aa, unknown
  TnpB Polypeptide
MDYVLKYRLFPDSQQREQLDWVRDTVRQLYNHALHRFNRIPESAGTVKQRVTQVRDEIPDLKDWWTDLNNVYSTVLQQAVEQIATNIENLGKLKQNGFDVGSLNWKAPHEYRSFTYRQRGFELDEKSGPNGRGLLTLKKVNGETIDVPIRVHRPIPDETEVKHAIIKKDKTGAWYACLNVEEDASEKPVPREIATEDTVGLDLGILKFIHDSDGREIERLDLSADRDRLEREQRSLSRKEHGSNNWERQRRRVAEVHQRMSNKKDDFKHKLAAFYSRTYEAVFVENLTVKSLLEDEGNARNTHEVGWRDFITILKHHGRKRGCHVVEVDPADTTKECSQCGVKTEKPLWVREHSCPSCGYTVDRDYNAALNVWERGLSKLGVGHSEASTPAETATAVEQAQRESVSASRVVEPGSPCLKEATQSVAE

SEQ ID NO: 57888 - protein, 381 aa, unknown
  TnpB Polypeptide
MTTIQKSVKARLYPTEEQEILINKTIGCCRFVHNQTLADCKQSYEQTQHFPSKNERITNLVPLKEENDFLKEVDSTALQQSVRDLNSAFDNFFKNRNHFDFPKFKSKHNLKQSYRTPYNGGKADVLDNKHLKLPKVGKIRTKKFSMPDVYKIFNITVERTKTGKYYASICIETEAQSLPKTGRQVGFDLGLIDLLIGSDGTRYERPKFAYAFKDKLAQEQCKLSKMRTKLERADANLDECKNYQKQKRKVAKLHEHISNCAKDFNHKLSIDLVRNYDFLAFEDLNVSGLIKNHKLAYSISDVRWSQLLNFIRYKCQWYGKEFKQVDRFYASSKICSECGTYHKDIVNSLSVREWICPDCGTHHDRDVNAARNILIKALSVA

SEQ ID NO: 57889 - protein, 319 aa, Cyanobacteria sp.
  misc_feature (282)..(282): Xaa can be any naturally occurring amino acid
LQKHIAKLRKRNSFWQLVGSQAVQDICQRIDKAYKLFFKHQGSASLTNHGKGFRPPGFKKIKKYKSFTLKQVGYKFLGGNRVKIGSKVYQFWKSREIEGKIKTLTVKRTPLGELFIAVVVDSSEKPIAPQSGKTAGFDFGLKDFLTCSEGFKIKSPLFLKQSIKDVREASRAVSSKKKGSRNWNKARLNLARKHEKIVNRRRDWQWKLAHELTDRFDVLYFETLNLKGMQRLWCRKINDLALAEFLSILECVAAQKSKHVVYIDRWFPSSKTCSECGHVLNXPDCYCCLSGESPYLQVGEYVNLSRNREVIPCSKFYSA

SEQ ID NO: 57890 - protein, 279 aa, Lyngbya sp.
LWRYDHKLIKRVRLVRRADGYYVQFCVKVDIKESLDPSHTNVGLDVGLKEFYTDSKGNTEPNPRFYRKGEKRLKFYQRRVSRKKKGKAVGHASRTANRKRAINRLGRTHLKISRQREEHAKRLARCVIHSNDVVAYVREACRRQDLRVKNLVKNHCLAKSINDAGWYQFRRWLEYFGQKFTRQTVAVNPAYTSQNCSNCGEVVKKSLSTRTHACSCGCVLDSPKATLRERDHNAAINILKRALGTVGHTGTWIIDPNALGDPTSTLPDSGLEEPRWVVD

SEQ ID NO: 57891 - protein, 498 aa, Vulcanisaeta sp.
VAVELEVPKELNKLLCSVESAYLNIVREVATYAVVNNVLSATQLHKLFYHKYRLEYPDLHAHLIIQAIRQAAQIAKSFMERKKRGLVSKPYPEVRSVSLRFTEKAWGYNQFAGSIAPVRLAISPISTGKRGRGGRRFEVWLRPHKRFWLYWWRVLSGEAELASTLLIKRRLNKWYAVFIFEIKPKEEEPKSVVAFDINENTVAISRIDIETTVDKVIDWNRQYMVPGLYTIKTDFGRLARRYEMVRNAIIEKLKPRFALPSGNYVNVTNTREFRKRVKHLRERNRRVGRVRHVASELTKNPSIIITEELGENPQESMISDVGKGELRHRIKQTPFKSIEEAVEDKALERGSKLFHVSSYRNSRVCPVHFTRLWETNDWHVLYCPLGHYVDRDYASVMNMTWKTTPEAWTKAFWWNMKNLNKNMDWRKHEGKSNPIIPKYIIQHLYAVLKTFKTSKESPAVLARGKPMNPTGEANEGRARKPPTPFQGREEVRQSQVLG

SEQ ID NO: 57892 - protein, 376 aa, unknown
  TnpB Polypeptide
MGIRVRLYPTERQEVLINKTFGCCRFVHNQTLADCNQSYEQTKHFPSKNERIKDLVPLKETHEFLKEVDSTALQQAIRDLNSAFDNFFKDRTHFGFPKFKSKHDLKQSYRTPYNGGKADVLDNKHLKLPKLGEVKTKRFDTPDVYKIFNITVEKTNAGKYYASICIETEVEPLPKTGKQVGFDLGLKDLLIGSDGARFERPKYAYVYKDKLAQEQRKLSKMRTKLEREHANLIECKNYQKQKHKVAKLYEHIANCAKDFNHKLSRKLVEEYDFLAFEDLNVSGLVKNHKLAYSLLDVRWSQLLNFIQYKCLWYEKEFIQVDRFYASSKICSCCGTYHKDIVNSLKVREWTCPDCGTHHDRDVNVATNILNQALSVA

SEQ ID NO: 57893 - protein, 447 aa, unknown
  TnpB Polypeptide
MTYSVKIKRLNHILMDTVHLYRQAVSFFMDVCLQEWDTVSSGKGQKERVNLVESLTVISKKNPSVSYDFGADFYKFPSYLRRAAIAEALGKVSSYRSNLARWEAADPASRGEKPGLPQAGIVYPAMYRENMFLRTGTYQAALKVFIRNTWDWILVDLRKSDVDYILRHCGSYKECVPTLQKRGKEWFLDFVFQTTVKLSENPVERILAVDLGLNSACTCSVMDAEGTVLGREFLSLPREYDSLSHAISHIKHAQKLCAGRTPRLWAQAKGINDDIAVKTAQFIVDTAVKYDVDCIVMERLDLTGKKRGSKKMRLHLWKAKYVQSMVMEKAHRNLTRVARVCAWNTSRLAFDGSGRVSRGKEADLPSYSLCRFASGKQYNCDLNASYNIGARYLIRERLKTLPATVGQAVTAKVPELAHRSTNTLSTLIRLIAELQGLTPAADGVTAG

SEQ ID NO: 57894 - protein, 323 aa, unknown
  TnpB Polypeptide
MTRIPIKTKSSKTKKESVLRAVTCEIKGVEFPYGQNFVNCAMNNKSRQAVAWRFEDAGNRILIKCIVSVEQEPPRQNEYYADGCISFDTNVDHLAMTELDRHGNLIHHEVIHFDITGKTNGQREQILSNSLEKIFKYARQKCKPIAMENLKDIKNKSMYKNEELNRKLSEFAYTKITQLAESKSYKYGIGLYKAAPAFTSQIGKIKYMRHYGVSIHVAAAMVIGRRAMGFKERPPKELHHLIPQDNKNRHHWSQWRFLARYLKKQPAYKFYHMIPYDKFECITDMNKYMKEEFYNYQNREYFLKKLMSIFNQLARTMPGVTTV

SEQ ID NO: 57895 - protein, 379 aa, unknown
  TnpB Polypeptide
MKGGAFMEYSYRFRIYPTEKQKELITKTLGCCRYVFNYFLDRRKAVYKATGKGLPLKDCTRELTALKKGLPWLQEVDATSLQAAVQNLDRAYVNFFRGLKNGHHIGYPQFKSKKDGSRSFKSKNNHGTVAIVGRSIRLPKIGFVDCRISKQVEGEILSATVLQTKSGKYYVAVNCKNVELPTPPSTGAVVGIDLGIKDLAITSDGVKYDNLHSYQRNLKKLARLQRQLSRKSKGSRNREKARIAVARLHEHITNQRNDAIHKMTTQLVRSNDIICMENLSSKNMMRNHKLALHIADAAWGEIRRQLAYKADWYGKKLVIIDRFFPSSQTCGCCGYRNKEVKDLSIRFWTCPQCGTFHDRDINAAQNILAEGLKTMGLSA

SEQ ID NO: 57896 - protein, 503 aa, unknown
  TnpB Polypeptide
MAKATTTLRQVLTYQPHHAAWFAATQDLFNRVAAFYFEVISAHEGVLDLSNQEALTALEMLTHATKEHPTPVMPLAERAEHVPAMFRRAAIHAALGSARSFSTHLSKWRAKQEKAQAKGKKFSEHPPVPPRTWNKSPTLYAGQWKDRTPTSILLKLWTGTCWSWLKVRITGREVPADVEMGSPSLMRRGNHWWLQTPLEKHFRSPPTIEKQVTTRETTKICAVDLNINEHLAVCTIQTVEGTILATAFIGGGRRIAGFRKKQLGRIARNRRKTGIIAEGEQDNVHLWRKINTIDDSIAHLVSARIVQFAKQHEATIVVFEHLGNLQPHKGTYSHRGNSKRAFWMKGRIFTYAKYKAYNQGMLTSRVSPRNTSRECARCHRLVARYEACQPAEGYTSGAPLVLCPACGMKGHADRNASLVIGQRLITRYQQPSQGKPQAPLRAERVSKGTGVAVCQEAKSKEEPSSLQARHADRDEHGTAQDVLLGMEKRTSDIPCQLRLPYES

SEQ ID NO: 57897 - protein, 295 aa, unknown
  TnpB Polypeptide
MRPAKRSERLGFRLQNFFRAVKSGRKAGFPRFKSKRNMRKSYKTNSNIAISDSRVRLPKLGLVKCRVSKEVRGRILSATISQNASGKYFVSICCTDVEIKPMPPTGAAVGIDVGIKAFAVTSDGVSYPNHKYLAKSEKKLARLQRQLSRKSKGSRRREKARIKGAMLHEHIANQRQDAAHKLSTQLIRENDIICIEDLAPKNMVRNHRLAKSISDAGWGEFRRQLQYKAEWYGKTVVAIDRFYPSSQICSCCGAQWSGTKDLSVRGWTCPECGAQHDRDINAAKNILHEGLRLLA

SEQ ID NO: 57898 - protein, 414 aa, unknown
  TnpB Polypeptide
VIRSSKHSLKYTNQNKRDNLSIFLTEYRRLLQVIIDDLWENGLESFFNIQKNQLKIPSFLPNDYLKKHDSWLTARMKQAVGKQVCSMLRAAVKKRSKQLYVLKKLQRKSEPTPSLQKAIDTQPLVKPNSSNAKPELDSRFVDFKESSSFDLFIRVKTIGKKISLLIPINQTRVGNKWTKRGISKTSIRLSEENLYLFYDCKKAKKKTHGSVVGADQGITTALTLSDTQVTKSCPHGHTLSSIQKKLARRRKGSFGFQRAVSHRLNYVNWSLNQLDFSSVKELRFEKVKHIRRNRRSSRFLSHWTYPLIKQKLTSISETEGFRIVEVDSQYRSQRCSNCGWVRKANRRQKLFSCDQCGNSLDADLNASLNLRLDLFEIPKKVRLQKLNRTGFYWNSDGLFLVNQERIVPDIPVQT

SEQ ID NO: 57899 - protein, 355 aa, unknown
  TnpB Polypeptide
MMSNFIRFQRKENVKLPRYLNKYGYYPLYTDQIRVVLHNNKKCIKLPLSNLLRTNKFYKIKYDDILLNAFIKELHNMKINAFHLPIPKVIENNKIHQVRIVPLYNATYFSIEFSYEVEDKEEIELNANAYAGIDIGINNLAMICINNGNSFIIDGKRLKSINQLHNKNKKRLQSKLAKNLKNSKRLIRMDIHYKNLINDYINKAVKQTVDKIINEKVSHVVIGYNKGLKKNGITNEMLKGKDKKKVNQSFCMIPLAKYINKLKFKLNEVNIDVKIINESYTSKSSFIDNEEIEKKDNYLGKRIYRGLYQASNGRVINADLNAACNILKKSKPNDEIISNLRDSGLTIPYRVQVRL

SEQ ID NO: 57900 - protein, 445 aa, Cyanobacteria sp.
MVQSIVRTDRWFLKPSRQTTEHLAATVTQYRAFCKALTYVVYGHWVEIKSAKSQCVAVERLIHKTKSNPSPKYQYFGKRFYKFPSYLRRAAIEFVCGQVSSFVTRYQEWQSGIRKKRDARPPKLNPEAGCYPALYRGQCILFGNDLEAVQIKVWNGSDWVWSEPTTIKTKRDRHLLSHSKTLSPYLMVNHKGVYLSVPFGLKPEKLKGDRVCAVDVGINTLATASIVGSDGTVTARKFLHPAADIDHRDRLFKRISRMARLTKKLHKGFCNSLYRKARHINQNLAQQVSRQIVNFARGNGASVIVFEQLKNWKPKGGRKRSTLKQKFHGWLHRKLVELVEQKFEEVGGITEYVYPRGTSSWAYDGSGQVSRDKSNYSNATFKTGKQYNCDLSASYNIAARYWAYKLKLTRRKDGRLLDGKSSSNKQRMPVTLSLLWEPRSSIVVD

SEQ ID NO: 57901 - protein, 157 aa, Okeania sp.
MVKNHKLARAISGANWAEIVRQLEYKAQWYGRELIKIDRYFPSSKGCSNCGHVVEKLPLSIREWDCPECGTQHDRDINAAINILRMGTRGVRKTQGNAHARRLRDSQRQSVERAFRPEGIKSQKAGAMRQKAPNSDGAGIPRCLAYSSVGRMSMVQI

SEQ ID NO: 57902 - protein, 411 aa, unknown
  TnpB Polypeptide
MKILQGFKFRLRPDREQEESMRCFAGCCRFVWNKALALKKEAWQDEKKSLSYCALAGLLKEWKGDPSTSFLKDAHSQILQQALKDLDRAYKNFFQGRAGYPRFHKKGVRDSFRYPQGYKLDEENARIYLPKIGWMRYRKSREVLGKIRNVTVSLKNDRWYVSIQTGREIPEPVHPSSSSVGIDMGIARFATLSDGSFVLPMSSFKKHETALRKAQKALSRKQKFSQNWYKAKKRVSRIHERIASARKDFLHKTSTEVSKNHATVVLENLQVRNMSGSAKGTLEDPGKCVAAKSGLNKSILDQGWYEFRRQLEYKLRWRGGYLILVPPQNTSRRCPVCGYISKENRPSQAQFRCLSCGHEANADGNAARNILAAGLAVSACGEGIRPGRNIFPAASMKQEPAEISQTGLVSA

SEQ ID NO: 57903 - protein, 396 aa, unknown
  TnpB Polypeptide
MVDFKGTEHEFYHKYKDKLGVNAGQVINLNNWMWNSFFELSKLYKQGKLPRFYRKPSPPGFWKDRLLGKRLLRILVRNDRYYLEPINNGEGYLVLKDWGLRIKYAGKIKWSGKQGTLVIKYEDGRWFAYVPITVGEKPAKSNPKGYVHGIYEKIQIEKTKDSNKAFIDVGLNNLFAVVFNHTDVAILIKGSTIKSEHYYWKREVKTYQSVRDWLKNHGFESWHKYYTYYLHAVYKKRERLRHYYRTAIRFIAKTLHGMGVDEVFIGYPYLVSQDNSNEYNTNVWWYAKVINWLGEVLQEYGIKLNVVNEYGTSKQCSICNMEHENGRVKRGLYVCELTGIKINADINAARNIAKRAGYNTPIPRKILSYIITTNGVKPLTPIEGVTVETPKVKPRP

SEQ ID NO: 57904 - protein, 386 aa, unknown
  TnpB Polypeptide
MQVLTTYKYKLKPTKTQAIMFEQWLGTCRYVYNIGMEVKKTAYKTAGKNIGKYELMKQLTNAKKEIGWLNNTHSQVLQNVLDRLDRSYQNFFEKRAKYPKWAKKNKYKSFTFKQGVKIHSNTFSVSLPKIGKIKFFKDRIADMDIATATIIKEVDGWFISISGTINKEPMPTANKNIGIDLGIKSFAVTSDGKSFDSPNCLRKAEKKLKHLQKEVSRKKNGSNNRKKAVAQLAKAHKKVSETRKDFLHKLSTKLIRENQSICVEKLQIWNMLKNHKLAKSISDAGWGMFRVMLKYKAEQNNRTFFEVNPRNTSKQCSVCGNIYDDMNLSIREWACSLCGTKHGRDENAAKNILNKGFGLNLSTCGENVNPVVIDGLFSMKQEPHSL

SEQ ID NO: 57905 - protein, 314 aa, unknown
  TnpB Polypeptide
VKKEFRKPDETGCRWTLSIHVRVSQPVRDYTSVAVNWTERTLAFTNEPSPIRRNTTGKQTGIDRGCVHTLALSNGTMLDMPQPSEREKREYLRLQRKLARQDTTNSRRGGKTAKFQSKRRKLTLKRMSSIRRHINNRKDDWVAKTTTRLVEDYDLIALEALSPRQMTRKPKPKQDTSHKGRYLRNGSAAKAGLNRSILSNRWTDILNKLEYKTRLAGTQLILVNPAYTSQTCNRCGHVAKENRESQAVFQCVNCGFKDNADINAAKNILDRAIHTTGMDDAEGVEGHASRETCVSREGSIETPTPATHVGRLSE

SEQ ID NO: 57906 - protein, 210 aa, Arthrospira sp.
VFTKGRWLAIFPEPVAVTPTEANGVIALDPGVRTFMTGFDGSRFLELGSGDIGRITRLCQHLDDLMSRIAKEPCRSRRRRMRQAAQRMRTKIRNLVDEAHKQIAHYLTNDYSIIFLPTFETSNMVAKAKRKIKSKTARAMLTWAHYRFKLTLRHQGEITGTTVVDVTEEYTSKTCTHCGHVHSQLGGSKVFRCPECGFNPGTGTVLLESF

SEQ ID NO: 57907 - protein, 434 aa, Microbispora sp.
VEVARQARAHVARLDLTAAHMAVLDGQAHTARALWNLLHEYCTFRQGRLASVKDCDTAIRQTRREIDWMGRLPAQAAQAVLRTYRQAWANFFDPAHPAGRPGFKSRSRSRMAVDVPQGRDLNIARLNRRWGAVNLPKVGRVRFRWTRDLPGVTRGGPAGRITGARLVKDAHGWQIVFRTERQVPAPAARPGPVVGIDLRRPRDLAVHHVHGAHGRELAAGRRGRDGQGADGLGLLRHLHRDHGVLRPQPPHRRDRLGDGGGGQRRAVGGGPGAGAGAAHGGDERDPGAEREDRPACGRPARLRRPRSRGPRRRSSGGLRRRRSRRARHRARGRGPWRPTGGGALLLPSGPVTRAGPGPIQASRAGLHACRGSSNVIDTCSAVTVSRARRGSPSSLSSLAIGWLPSRTSAPPGRHRIPLARAAQETRRVTPSRWV

SEQ ID NO: 57908 - protein, 399 aa, Nocardia sp.
VQLRYNFRLYPTPGQQEQLAKTFGCARVVFNDALRARREAFERGERVSDGELSRQLTEAKKTPERAWLGDVSSVALQQALADLNTAYRNFFQSVTGRRRGAEVRPPRFRSRKDSRQTIRFTKNSRFAVTSGGKLRLPKIGELTVRWSRELPSEPSSVTVIKDAAGRYFASFVLETTDAPLPPSDSEVGIDLGLSTFAVLSDGRTIVSPRFLRQAERRLRKLQKALSRKKKGSANRLKARIRVAKAHARVADTRRDWINKHSTKIIRENQVVFVEDLCIRGLARTRLAKSVHDAGWGMFTRKLEEKASRYGRAFGRIDRFFPSTRLCSACGTQSGRKPLYVREWTCTCGVTHDRDANAAKNILAAGLADKSNACGGDVSPGFARQSPVKQEPAEGTTRCW

SEQ ID NO: 57909 - protein, 296 aa, Burkholderia sp.
MDIKRAYRFRFYPTPEQAAMLARTFGCTRFTYNCMLRMRTDSWHQDQVHVGYHETSAALTELKKTPEHAWLNEVSSVPLRQALRHLQTAFANFFAKRAKYPNVRRKDDTQSAEYTASAFKWDGSSLKLAKMKAPLAIRWSRTIPKGVRVTTVTVSKDTAGRYHISMLCDDAVSGKSASTGKVGVDFGLTDFVVLSTGEKITAPNVFRKNEAKLAKLQRRLARKQKGSANRRKARLKVARMHARIADCRRDFLHKLSTRLINENQVIAIESLAIRHMQKSRRRAKSIADAGWSEFVR

SEQ ID NO: 57910 - protein, 385 aa, Anoxybacillus sp.
MTIKLPLFEPTKLKQEMYQTMRNEFSRLLNRALDIKRTNPKIAVTDIDKLLKQDSILPTTTQQEARKLALSRYDDWKKNQKTKSFPRFKEKQTILFNNQNWHFRYDNGYLKLGIPTIEGRLTLEKYVPVRTNEYTSFWVHFLLNGEMDKTNKYYDSSFEQIIGIKKGNGQLYEKKKRWYFAFSITLTVKEKENTDETEKSVGVDRGLRMIAVAGCGQTGEYKIFNGRYLGHIRRKYHRLRKQLQKAKNMKALKRLENKEQRIIDYWNHVISKKIIRFAEQIGAKTIKLEDLSGIRKMKKHWKQSNRNIHSWAFYDLEIKIQYKAKLKGLKVEYVDPYKTSQECFQCGKVKKTNRRGPLYTCSCGYKKQADVNASFVISTRPSIAG

SEQ ID NO: 57911 - protein, 447 aa, unknown
  TnpB Polypeptide
MAENKSQEILALTLKLKLLPESQAQIASFKQTMIAYKDACNIVSQYIFDNIPKAAETKSMSLLLSAVNLQKTATINDERVYNILTKQLRLPSQIACEVFKTVVGNYKATQTMLKKQTVTNDYQYGADGAILFHKKGKYKGKPKSVYVHKDLTFLQKPLCYKKPQLVLPVTRSYSFVSDFSKASISVMNDRIKLPFKLTVKQKELFTNSDWKRGNARLIRTGEKWFLYISFTKKVPKLDISKFDNIIGVDVGLRQIMTIYNPKTGQTLFENGRAIKKKRQNYVKKRQSLQSKNTKSAKRRLKRLSGRENRWMTDVNHCLSKTLVFENPNTLIVVEDLTNITFDTVGDRRKENRYVHHSWAFYQLQQDIAYKARERDSYLIKVNPAYTSQRCPKCGTICKENCDRAKHIYRCNYCYYQSNDDRVAAMNIAQLGQLKQQGVKRPSFKIYT

SEQ ID NO: 57912 - protein, 367 aa, unknown
  TnpB Polypeptide
MLKAYKYRIYPNDGQKVQIAKTFGCCRFVYNQTLAYRKEAYEKEKRSISKTDCNNYCNRNLKKEHEWLKEVDKFALTNAVYHMDSAYQKFFKEHAGYPKFKSRHASRRSYTTNFTNGNITVDFDGNKIKLPKLKHVKAKLHRQFRGKIKSATVSQTPGGKYYVSLLVETEHEELQHTDHNTGLDLGIRDLCITSDGKKYENPKTIRKYEKNLVKLQRQLAHKEKRSQNYYKTRQKIALCHEKITNTRKDHLHKISHEIISENQVIVSEDLQIKNMVKNHHLAKSISDASWYELTRQLEYKAEWNGREYIKIDTFYASSQLCSACGYQNADTKDLSIREWICPVCGTKHDRDINAAKNILAEGLRKTA

SEQ ID NO: 57913 - protein, 563 aa, unknown
  TnpB Polypeptide
LINLNNFNDINKKFTSLLEKYFNFHNLNKKYYFKNNKIIYDYICYKGYLVTHSNIYDLIKEIKNKLCNWKSIKFTNNKVFFDDIIENILISFYRKNFRYIKDCLINKKPYNNITNENFINHVKTGQMLERKFISFKNFKEKFKKLKTHQNLIQSFAYNLLKKNNGIILSSNLTQAVMRKAYNAISSFYSLKDKGIKANFPKYLSKEHKYVLPFLGQQCAYVIDKIKHKTKIKLPLGIYFTKYFINNINEILGKNYKIKEKQYYKEENPKILHPIKYLEFTLCDRLTNILGIDYGKKNNDFSSLRSIEIIPVYNGYKFKLNYIYEKNIEIDDINKKGDISIDLGMINLMTIYDPKGKQRIIKGGKIIWINNKYNYHMKNLQSKISKNKEDERLKRIYYNSIINRENRINYEFNRIVYKLFEMYKNKKRIIIGYNENWKTKVSMGKKNNERFYKIPYYKLINKIKDKGEEYGIEVKITEESYTSKCDALNLEKIERHEIYSGERIKRGLYSSGKDKEIKKNGKIRRVHLINADLNGAINIMRKVNKDIKKIKGKKLYNPQIIKIN

SEQ ID NO: 57914 - protein, 398 aa, Cyanobacteria sp.
MKARYRYRIYPTPSQKVSLAKLFGCTRAVWNDALAYCIEQYRAGNKKPKNGELQKTFVTQAKKTFDRHWLKEVSNIPLQQSLNDLEQAYQNFFKSCKGERKGEPVKPLRFKKRKHKQSARFRKGRFQVNERTVYLAKIGKLKIVWSRPLPCEPSSVTVIKDSAGRYFLSFIVEVEHEPLKVNDQSVGVDLGISTFATLSTGEKIDTPKPLKRRINRLRKLDKQLSNKSKGSNRYERARKRRAKLHAKLADTRTDFLHKLSTRLISENQTIVLEDLNVSGMVRNRRLSRAISDLGWRQFRTLCEGKLEKYGRDFRVINRWEPSSQKCSCCGFKGGKLDLSVREWKCINCGASHDRDVNAAKNIVAGGQSETQNGRGDHVSLSQKRAMVDETSTRQNLSE

SEQ ID NO: 57915 - protein, 337 aa, Cyanobacteria sp.
LLFPQFTSNSITGWQIQLPKLGKVEINLHRQVPDGFTVKQIRIVRKAKEWFAVITLYSDIEIPSPSPHGRAIGVEVGLLSYLATSDGFVESGRKFFNTEQGRLKVLQRRLAKKRRDPASPKGARECSPKRRSKNYEKARQKVEKQHNHIAFKRKDYQFKLAHQLWDMADTIFVEDIDFRTMAKGFLGKHSLDAGFGQFRTILKFVGQKRNVFVREVDHRGTSKTCPNCRITVRKELSDRFHCCPECLYRTDRDVASAQEICNRGIETYRGTPEKQKIGSQVKGLWGECIRKCLAAEVPSAFRKARPLVSPVEVSGAMCLDNWRRGAMPNREVGKPTA

SEQ ID NO: 57916 - protein, 418 aa, unknown
  TnpB Polypeptide
MGEVTKTLELKLVDPTVHKRQKLRETRDVYQQALHESFAAGCDTQSAANDIVVEYDLSGCAKNALKQYVPQLHNSYDADELRDDHPVRFTNEGVQLDHQPQNAIEWYVKIPHHEDYHLWIPARVNPDQGEWIEAVYADDAEMGACRLFERDGTWYLHVTAIRTVEDQSAASAEEQTPIGVDIGESSLVTVCHRDERGSPVRPQLWADDGKTARRLRKSYFTAKRRLQRRGSDRIVDSFGDVLWDQIDDLFHRVTREVVEYAESVENPVLVLEDLTYIRENMDYGAYMNRRLHGWGFAKLHTQIRYKAAEEGIPVETVNPRNTSKACHACGEHGYRPRQATFRCSNDACWVGEYQADVNGAINIADRYRSGESHRRSDRTSRQKAGDDDSTTDGASLTGPQDSHADAEIQQETRGTYAS

SEQ ID NO: 57917 - protein, 257 aa, unknown
  TnpB Polypeptide
MLETTRTYVARITNHSQVRDDLDQCGFAASKLWNVGRYYIQQRWDDDGEIPDEKELKSELKDHERYSDLHSQSSQRVLEALAEAFNGWYNSDDGNNPPGYRKRGDRHPRTTVTWKQKGIKHDDKHGQVRLSKGFNLKDGRSDFILAEYETRPDVQLENIQQVRAVWNGDRWELHLVCKKKIPVKDASGEKTAGIDLGISNYLAIDYEDAPSELYPGNVLKEDKHYFTREEYQTEGENGPSKRARKARQRLSGSVQIS

SEQ ID NO: 57918 - protein, 413 aa, unknown
  TnpB Polypeptide
MEYSHRYRAYPTQEVADRLEHHLDVHRQLYNHVRWDYENSPKDDKPSKYDQNNKLPEWKRKWSVFAELHSKAAQATVARFHHNLTVLSELKEKGYNVGQLKRQAPSDYRSVTYNQSGFDLDEKRGHDKYAYVRFSKIGWVKIRYSRPIPDHATIKEVTFKKERTGEWFVSFGLETDDENLPEKPDVDSLDASNSVGIDLGIQNYIHTSDGTTVDWLDLEDDYERLRREQPKLSRKEHSSNNWEKQRGEVAKINRRIQRKVLDYQHKLTTWLVKEHDAVFVEDLDVKGMLQGDSNARNKQDAAWRQFIQILEYKADLYGTHVVQVEPEGTTKECARCGVETAKPIWVREHSCPSCGFETDRDANAAMNVLQRGFEEFGLGWPEDTPVETVTATDADDVREVSASHVVETGSLSS

SEQ ID NO: 57919 - protein, 382 aa, unknown
  TnpB Polypeptide
LDVSGVVKRAYRYRFYPTEGQAAELSRTFGCVRLVYNRALEARTTAWRQERRRVGYADTSALLTAWKQTDELGFLNEVSAVPMQQCLRHQQKAFTNFYAKRASHPKFKSRKRSRASAEYTRSGFRWRDGELTLAKMDQPLAIVWSRPLPEGAEPSTVTVSRDPAGRWHVSILVETTIDRLAPLTAEVGVDAGLTSLLTLSTGEKIANPRNEHRERVALARAQRNLARKAKGSNNRAKARARVARAYARIADRRRDLLHKLSTRLVRENQTIVIEDLAVRNMVRNRSLARAISDASWSEFRSMLTYKADWYGRTVVAVDRWYPSSKTCSRCGHLLDTLPLHLREWTCPGCGEVHDRDVNAARNILAAGRAVTACGDGVRPNQR

SEQ ID NO: 57920 - protein, 386 aa, unknown
  TnpB Polypeptide
MESALLRKFLGCSRFVWNAILAENQARFEMGDPLPIKYNAFCERLDILKARHGFLRECNSQSLQQTLRGLMGAYQKAFNPKISAELPTFKKKHLDHGMRIPQAFKMERNSVYLPKIGWVAFRLSKRGSKRKILGIVKNVTVRLEVGKWYVSFQTEREILQPTHQHPESAVGIDVGVVRFAALSDETFCDGANAFQKHQRRVAIAQRRMDRKVTFSANWRKAKKRVGIVVSHVANIRKDQLHKASATISKKHAIVVMEDIRIPNMTASAKGTADDPGRNVAAKTAINRRILDQGWGEFRRQIGYKLDWLGGRLLLVNPRNTSRGCNQCGHISAENRLTQAAFECVKCGHASNADTNAAKNILGRAGCARIACGVSQDIVKQEALFVA

SEQ ID NO: 57921 - protein, 386 aa, unknown; identical to SEQ ID NO: 57920
  TnpB Polypeptide

SEQ ID NO: 57922 - protein, 446 aa, unknown
  TnpB Polypeptide
MRIMKHKTDQEKAMQLVEQHVIKRSDPRFAVVDEAAFKAKNLYNAANYEYRQAFIHQGRYLTYNEIEKRMQSHEAYKALPAKVSQQILMVLDRNWKAFREGLAAYNEDPSKFLGRPKPPKYKHKTQGRNLLVYTIQAISKRGLKHGLIRPSMLPIEIKTRHREVNQLRIIPRSGFYVVEVVYEHEQPKSAVDPAFYAGIDMGMDNLAALTSNQPGYVPVLVNGRPVKAINQYYNKRRAELQSKLGKTGTTKRMERLTTTRNRRIDHYLHTASRWIIDDLVAHGIGTLVIGKNDGWKQEANMGKRNNQQFVPIPHARFIAMLSYKAELAGIRVILTEESYTSKASFLDRDAMPVYDPNQKAQPRFSGKRIKRGLYRAANGTLINADCNGSGNIIRKVAPDAFQQAEGVEDGKGHKPVVHPVRVSFPLRSQKASNGVSKRSIERYKTL

SEQ ID NO: 57923 - protein, 392 aa, Firmicutes sp.
VNAKMIEGDDVKILKGYVFRMYPNKKQEELINKTIGCCRFIYNYFLDDKIKEYKIAGKSKSAYEQIKLIPSLSKEYPFLKEVDSCALRNSLFNLEDAYKRFYDGSGYPRFKVKGVHESYKTNNIKNSYKGNNYNSIKLDLKNTTITLPKLKEVKIRGYRNKEVILGEVKSAVIKKDAGRYYVSVLIEEELIKPAFVPTSIIGLDLGIKDLIVTSFNEKIENNIKINTKRMIGLQRGLARCKKGSKNRYKMKLKIQRLYQKIRNARKHMIHGITNKLINENDIIVTEDLDVKSMQKNHYVAKGLNENPISEIIRVLKYKANWNNKKLIQIHRYYPSSQICSVCDYKNKEIKDLSIRKWECPVCHTEHERDYNAAVNIMFKGLEKYMLYLEQGI

SEQ ID NO: 57924 - protein, 363 aa, unknown
  TnpB Polypeptide
MAFKAHKIALRPTDAQVTWFQQQCGYARFAFNSALADFKAGLSEGVFRSFIDLNNRRNQRKKALDWAGEQDQRAALHGVKNLSDAVSRWRKKQNHFPKFKKRGSRQSYTVEGYQCSVDGKRIKLPKIGTVKMFSELRFEGKLKRVTVSRAAHRWFVSILVDTGIPNVPRDTRGLPVVGIDVGINALATLDDSAKYENPRPLKRYERKLAREQRKLSRKVFLSENWYKQKRKIERLHYRIACIRKDAHHKATTDIVKKASHIGIETLSVTSLLKNRNIAKALSDSALGGFLEKLKSKAESLGIPIVQADRFFASSKTCSNCGHKKTDLTLSDRQYHCEACGFSEDRDVNAAINLKRLAAGYTES

SEQ ID NO: 57925 - protein, 316 aa, Peptococcaceae sp.
MSLDQRTFSFNEKRWEVSISTVAGRLKLPLAIGNFQRGLLAGQKPTSAVLCYNRRKKEFYINIVVNREVPFPPKNGNIVGVDRGIYNLAATSNGLKFSGRQAMHVRRHYARLRQALQAKGTKGAKRLLKRLAGKERRWMADLNHRIAKAIVSSCRPGDVIVMENLRYIRERIRGAKEQRLLQHSWAFGQLGAFIEYKAAERGIAVVYVDPRHTSQRCPRCGFVAKSNRKGHVFCCNSCGFVGHADIVAATNIRQVYLEALAKRKEKFETGFVYAVHNIKQLVKSVKRRPRSAGSQRFLRSFAVRFIFEFGVLAFNF

SEQ ID NO: 57926 - protein, 397 aa, unknown
  TnpB Polypeptide
MLRLWKNRVVSIRTIALTLAPTEAQHAAFVTLRRVFVAACNHVSAVAWEAHEFNRARLHALTYYDLQAEYGLMAQHAIRVIGVVVDAYKADRHARRIFRLEGAAVLDSRLYGLKGNHAYVTTLNERVKIKLNIGGIQRTQLGAATKMLEADLVCDRKGRWRLMVSARYSDPPTMDAEDAIGVDLGRRDIAVTSDGDAPSGAHITAVRDRYSRTRRMIQWNVSKGTRSSRRRGRTTLARLSGREHRFQAQVNHTISKRLVTNAAQTVRAIALEDLTGIRERTNTQSRDKTERRRSNSWAFYQLRAFLAYKCVAAGVPLVLVRPAFTSQTCHCCLHIGERLGKRFTCINPSCLWSGDADFNGACVIASLGASVTRPRGSWLCCSYQPGRRAPESLTPRE

SEQ ID NO: 57927 - protein, 590 aa, unknown
  TnpB Polypeptide
MRVGQTVQPVSYELRLPDAVQAAAQRLLDASREVINATVAALWERLDDFGERETKYAYKQVTALIGPSEPHGDRQWRCEAEQAGRILRGQARRKQHFSQILPLLKQGMILPKGEHTRAGKNRTAIKAALACLRDEHSDGGSAVELQSLIEQACNFYLSHGCFPETYEDMQAVPLLKVGILPYAADDGGLAGQAYRFRMDLEGRCCYLAFRSPDEQGVWKASWTEPQIRLPLPDPVVQRLQAGERLAPTLREIAEPDGTRYAVLDLNIEFPVAPLPDLQQVQRVLGWDWGVRTLVTATVLDLEGNRLSPPLFLDTGGFDGRQAHTRRHIDRLKSKVAALSARRDQFAVGDKRREPSERKLAILRREIARCWRKYEARNNDLAHLAANMLILLASVWGADLIAGESLKSMKSEGRGRGAKGRWVHWRNNSQVRGALWKCLRYKCHLSGLHLAWQHASGTTHTCPHCGKPANTYACPALDAPVRDAGAWLRCFACGWNGARDYAAAINIALLGVASLVQDMAHTEQRNPPKRPTMITKNLNSESYTGSGLALRLPPTPLRGCLERGKLFVNGWSKSVTLHSALSQETMLRLCG

SEQ ID NO: 57928 - protein, 556 aa, unknown
  TnpB Polypeptide
MHFCRGLKELTIYQAQKKNTRIESTEGIRETMAKTTITIRQRLQYQPHQASWFAATAALFNRIAAFYFEVIQAHEQVLELSSKEALTALEQLTHRTRANPHPVMPLSEIAHEVPAMFRRAAIHAALGSAHSFTTHLKQWRARKAKAEAKAKKFTERPPVPPRSWNKSATLYAGMWKGRTASSLVIKVWTGTSWCWLKVRFTGRDLPAGGVMGSPSLVQHGNRWCLHTPVEKQFTTPQNIAQQVTANPETKLCAVDLNLDGPIAVCTVQTAEGTILSTRFIGGGREIAGFRKRQLGRIAGNRNRTGLIAEGEQDNVALWRKISTRDEAFAHLVSRRIVDFAHEQGATILVFEHLSKLRPEKGRYSRRGNSKRAFWMKGRIFRYAKYKAWHEGIITSRVSPRNTSRECARCHAPIVRYAQGQPEEGYTPGAPLMLCPQCDLRGHADRNASGVIGQRLITRYQEQQTQEKPLAPLATERESKDSGVGGSHEPETEAVGHSSLSERHGTSNGHGTAHGRTEMDGSPRSDMPPPLRCSPSWGYAPSTPNSAYGSVSEAVGL

SEQ ID NO: 57929 - protein, 375 aa, Paenibacillaceae sp.
MHKAYRFRIYPTREQETMIRKTFGCVRFIYNQLLAERQTKYDQFKDDKEQLKQQCYRTPAGFKMEFDWLREVDSLALCNAELNLKTAFRNFFRDKKIGYPKFKGRKNPVQSYTTNNQKGTIRITEDGKHVRIPKLGLIRIKLHRKIPQGHVIKSATISRSASGTYAISILTAYTVSVEPNIPCPEMVLGLDYSSPALYIDHTNTSADYPKYLRQMEIRLKGEQRVLSRRKKGGANWKKQKLRLARLHEKVSNQRKDFLHKESRRLAETWDAIAVEDLNMKAMSQTLSLGKTTMDNGYGIFRAFLDYKLAERGKRLLVIDKWFPSSKLCRACGAINTELTLKDRIWLCEGCGITHHRDVNAAGNIQAEGIRMLTHA

SEQ ID NO: 57930 - protein, 410 aa, Micromonospora sp.
VQLRYNYRVYPTPAQQASLARAFGCARVVFNDGLRARQQAREAGEAYLSDGDLSKRVITQAKQTPEREWLGEVSAVVLQQALADLNVAYRNFFTSISGKRQGRKVAPPRFRSRKDNRQAIRFTANARFKVLDNGRLRLPKIGDLAVRWSRHLPAAPTSVTVIRDAAGRYFASFVVVAADDPLPPVDAEVGIDLGLTHFAVLSNGKKVAAPKFLRRAARKLRRLQQDLSRKQRGSNNRKKAVVKVARAHARVADSRRDWQHRLSTRIIRDNQAVYVEDLCVVGLGRTRLAKSVHDAGWAQFVQMLEYKAARRGRTFAKTNRFLPTSQTCSTCGRIDGPKPLSVRSWTCPCGAVHDRDVNAARNILAAGRAESLNACGAQVRPAPLPAPRREAGIRPDAVRSTRSVEGISVP

SEQ ID NO: 57931 - protein, 534 aa, Micromonospora sp.
LVTRPGDHGFDDPRRHRVRGQVDEGELGESGPERRRQPFAVRHAVHGRRVAARRACAVTGGRGPSSRRPRTAASGPWCRRHGRAHRQPAASGQTRSRMPTTTSGTETNREMPIPVSTRPPPASSRSGASPNVDRAPSMPIRLRVRSPVTASRRPTTTSAMPSRCRKSPPLTATQIPTPTAATATAITKSTSASPRPLSTVIRRHPSRRGRPKGILPGRSARRCPARRRRADRQPPSGAVRQLTVVGRGGAAGAVTTSDATPSISMWFLPRVRCRPSHHPRSSERAAASRTRTKDNRQAIRFTTNARFKVLDNGRLRLPKIGDVPVRWPRPLPAPASSVTVIEGAAGRYFASFVVQTTDEPLTPNDAEVGIDLGLTHFAVLSDGTGVTAPRYLRRAARKLKRSQQGLCRKKRGSAHRKKAVIKVARASKGGRHAADWQHEFPTRNMCDVRPNRWSETAVCPLVRLPLWRRPRPGRQRGSQHPRPGALGEAERLWSGPGRWAQLVRPVAAGTGRDAAAASGPGSAGVSALPAASAA

SEQ ID NO: 57932 - protein, 378 aa, Micromonospora sp.
MARAETRLRVRTLAVSVIVHCQTVRCAAPVQLPRLPDTRPAAIAGAGVRLPVGKRKGRKVAPPRCRSRKDNRQAIRFTANARFKVLDNGRLRLPKIGDLAVRWSRALPAPPSSVTVVKDAAGRYFASFVVQAADEPLPPADAEVGIDLGLTHFAVLSDGTKVAAPRFLRRAARKLRRLQQDLSRKQRGSNNRKKAVVKVAKAHARVADTRRDWQHKLSTEIIRDNQAVYVEDLCVTGLARTRLAKSVHDAGWAGFTAMLEYKAARYGRTFAKIDRFAPTSQTCSVCSRLDGPKPLNVRSWTCPCGAVHDRDVNAAINVLAAGRAESLNACGAQVRPAPVPAPREEAGIRPPAARCSTRSGEGIPVLQGGENVNGTGTP

SEQ ID NO: 57933 - protein, 366 aa, Micromonospora sp.
VKRAYKYRFYPSPQQAEQLNRTFGCVRLVYNRALDARTSAWTTDRQRTTYVQTSGWLTEWKRTEELAFLNDVSSVPLQQTLRHLQAGFVAFWDKRARYPRFKSKRKSRASAEYTRSAFRWRDGLLTLAKMDEPLAIVWSRALPKDAQPSTVTVSRDAAGRWFVSLLIEDPTVTSLPATDAAVGLDAGITSLVTLSNGEKVTNPRHEGADRRKLAKAQRELSRKARDSRNRAKARLKVARIHARIADRRRDLLHKLSTRLVRENQTVVIEDLSVRNMLRNHSLARAISDAAWADLRRMIEYKSGWYGRRVISVSRWYPSSKTCSTCAQVNASISLSVRAWTCPGCGTSHDRDVNAARNILAAGLAER

SEQ ID NO: 57934 - protein, 458 aa, Micromonospora sp.
VYRTARVALRLTAGQRRRCFGLLRSAGDVWACVLEANGWRRRRGDAPLVGYQELCRELAASGPGTFAELDSTGARSVVRRFSDAWFAAAKRRRDGDLSARFPRRRRGLVPVRWYHGTFTLNGRRLRIPTAKGSPALWLRLARDLPYPSEQVRAVTLLCEGGRLFLDVTAEVPVATYPAGEGPDPSRVAGVDLGVIHPYAVAGPAGEGLLVSGRAIRAEHRMHLADSKARRRAVARRAPKPGQRGSRRWRQHRRRARLVEGRHRRRVRQAQHEAAATVVSWAVRRRVGVLHVGDPRGVLDIAAGRRHNLRLRQWQIGRLLQILTDKATLAGITVRLVDERGTSSTCPVCHRRVPKPRGRSLSCPHCQFSGHRDLVAAASIATRSPGGGPTTAAAVALPEVVTHRRAGRHLPGAGRSRRDPRRPAMTARGSVGPRRPAPPHSWGVARSKGEDPQRPPETR

SEQ ID NO: 57935 - protein, 435 aa, Micromonospora sp.
VLEVNAWHRRRRDTALVGYQELCRELAASGPGTFGELDSAGARSVLRRFSDAWFAAAKRRNDGDLSARFPRRRRGLMPVRWYHGTFTLDGRRVRIPTARGTAPLWVRLAREVPYPAQQVRSITLLCDGSRLFLEVTAEVPVTTYRPGEEPDAGRVAGVDLGIIHPYAVAGPDGDGLLVSGRAIRAEHRMHLADTKARRRAVAGRAPKPGERGSRRWRQYRRRARRVEGRHRRRVRQAQHEAARTAVSWAARQRVGVLHVGDPRGVLDLPAGRRHNLRLRHWQIGRLIQVLTDKAVLAGITVRLVDKRGTSSTCPACRKRVPKPRGRTLSCPHCAFSGHRDLVAAAIIATRTPGGGTTTSAAPVLPQVVTHRRAGRHLPGAGRSRRDPRRPPHHRRRAGPVGPRRPAPPPGEESLAPRRGSTTPNRKPGKRQWTPH

SEQ ID NO: 57936 - protein, 238 aa, Helicobacter sp.
VSYPKFKKKREFQGSFYIGGDQIKIIQTANTDYLKIPNLPPIKLTEKLRFQGKIHNATITQKGDHFYVSISCDIDESEYKRTHKLQESHNKLGIDIGIKSFVSLSNGLNIYAPKPLDKLTRKLVRISRQLSKKIHPKTKGDKTKKSNNYLKHSKKLTHLHEKIANIRLDFLHKLTSSLVRHSNSFCLESLKVKNMFKNHRLAKSLSDVSMSMFNTLLEYKAKYSNKEILRADTYYPSF

SEQ ID NO: 57937 - protein, 406 aa, unknown
  TnpB Polypeptide
VQLRYNFRLHPTPGQRQSLARAFGCARTVFNDGLRARTDAHEAGLPYISDGDLSKRVITQAKPTPDRAWLGEVSAVILQQALADLNTAYRNFFASISGRRKGRKVAAPRFRSRKDSRQAIRFTGNARFAVTPGGKLRLPKIGDVPVRWSRSLPSDPSSVTVVKDSAGRYFASFVVETSHQPLPETDSEIGIDLGLTHFAITSDGRKVANPRLLRRAAKKLRKAQKALSRKEKGSANRQKAKLKVAKAYAKVTDTRRDWAHKLSTSLIRDNQAVYVENLAVSGMARTKLAKSVHDAGWSQFVGMLEYKAARYGRYLGKIDRWFPSSKLCSACGTIAESMPLNVRSWTCPCGTTHDRDVNAAINILAAGQAERPNDCGARVRPGLVPAQRGEAVTHPKPTRQAGISAL

SEQ ID NO: 57938 - protein, 445 aa, unknown
  TnpB Polypeptide
MQEEAIRVETHQIKEGTSFYGWAVQECSLNTSLYNRTLYILRQAFSGKHENIPEYTDIIRKEKFISVFDLITRMRKLNDKDFRSLLKDNEAAQTVKKCAESFSTWFRSLNSYKKNPQKFTGKPRMPRYKKEANGDKLFSVAFSYNDAKIQKDGTINIRKDFKLSIKTKLTSLQELRLVPKQGCIEIQIFYKTKISPVDLDYNKAVGIDIGIDNLMAVTSNEGSISHLVNGRPLKSINQYYNKTYAEIVSKLAERDMNTSKKLRRLTRKRNNKTKDYMHKASRSVVDLMVENKIGNCFIGHNDGWKQEVNIGKRNNQNFVSIPHSQLIWMLSYKASEAGINVETHNESHTSKCSFLDDEDICHYDEYMGKRKKRGLFVSSVGCMLNADINGAANILRRGLGKTFSPHKSMFNPIKIDIEKKHPMSVSDQGVEGGASPIVLMVTSTH

SEQ ID NO: 57939 - protein, 392 aa, unknown
  TnpB Polypeptide
MAWKKRDTVDGNAIQYTTIKVRLYPNEAQAELFEKTFGCCRYIWNHMLADQQRFYLETDKHFIPTPAKYKKEAPFLTEVDNQALIQEHNKLSQAFRAFFKSPEHFGRPNFKKKKTDRDSFTVCNHVFESGPTIYITKDGIRMTKAGIVKAKFPRRPRNGWKLRRVTVEKTKTGKYFACILYEYAVKERSAVTPAPETTLGLKYSMAHFYVADSGEPADAPHWLKQSQEKLAKLQKQLNRMQPGSRNYQEGVQKYRLLHEHIVNQRRDFIHKESSRIANGWDAVCVRDDDLQEMAREIKLGNMSDAGFGLFREFLRYKLARQGKALIMVDRYAPTSRTCSACGLILDDAIHYKKRSWTCPRCGAVHSREVNAAKNIKAQGLAQYFSMQKREAA

SEQ ID NO: 57940 - protein, 424 aa, unknown
  TnpB Polypeptide
VDYRRTAVIKLDIPDGADISLRETVEQFKYCANTASEWCWHGRRQIPQESGCQPETRRVSGDDDGFHVTSKAKAETALYDQLKTETDLTANLVQKGIRRAVEAVKSGVERLKRGDDTSKPYFSADSVVYDKRSATFHRDHVSLSTVDGRIECDYILPDNSETPPTKYVTDEDFEFRMGHLQYRDGDWYLHASMQKETAEKTPESTAEHSTVLGVDLGVNNLAVTSTGTFWSADEFNHWRREYEKRRADLQQCGSRYAHENIDSVGRKETGRFEVYLHRVANELITEAIENDCSYIVFEDLTHIRTDLPEASWQHIWAFRRLYEYVEYKTEEHGVEVVQVDPRNTSNRCSTCGFTHPDNRHGEQFVCQQCSYENHADYNAAKNVGLQYLRRRQSADDGGAPVDVRLNRGTLNVSGEYNPPATTQA

SEQ ID NO: 57941 - protein, 400 aa, unknown
  TnpB Polypeptide
MINVMAESVKTGVKTKVHHVRKMKVGLGKLHDALAVDSGRIYTLAVVWFWRHVRRHGVWLSQYAMQHRLNNGQPTILHSQSAQKAVECFYAALKTWRSERKTNPSVRAPYKTKRFFKVIWKKAAISLKGGRLRLSNAQGTKPLVLDWKHPKPVQVELGWDGTQYEIRATYESEPAREAGENVASCDLGEVHPAVIGTRDFHLILNGGELRSKRRYREKLKAALSARIDRKKKGGSRRKRLIESKKRKLARIDNQIRDVEHKLTTAGINTLKERGVGTLAIGDLRNIRTGYEKGAVQNQRIHQAPIGRFRQYLTYKAERLGWLVPPPVNEAWTSQECPRCGKRNVAKGRVYRCAGCGFVGHRDVVGQVNILEKYLGEGRRVVGAMASPIGVRYVPHLRCRS

SEQ ID NO: 57942 - protein, 415 aa, Bordetella sp.
MQTKRAYRFRFYPTPAQAITLARTFGCVRVVYNHMLSLRSTAWAEQQERLGYHATSAALTALKKLPDYVWLNEVSSVPLQQTLRHLQTAFTGFFAKRAGYPRFKRKDGPQSAEYTASAFRWDGRSLKLAKMTEALPIRWSRQIPKAAKVTTVTVSKDPAGRYFVSLLCDDVVAQKAPTSTCVGIDLGLSHFAVLSTGEKVDAPQIFRKHEVKLATLQRRLARKQKGSARRAKAKLKVAKLHAKIADTRRDFLHQLSTRLIHENQVIAVESLSVSNMQKNRCLAKSIADAGWTEFVRQLEYKARWYGREFVRVDRWYPSSKRCHVCGYVSPRLPLSVRRWSCPQCNAGHDRDINAAHNVLAAGLAVLAHGETVRPECMSDDVRRLGSVKWESLSPLGKGAVNARCLAGQARAGASR

SEQ ID NO: 57943 - protein, 466 aa, unknown
  TnpB Polypeptide
MLVNRAFKVRLYPNDKQRKLIDRTFGCARKVYNALLADRKDTYERLRKECIQNPNEYQRLQDELSTLYKSTQSGKKPLIKEKWKEIREFEKANLDKAALKEKLKIAAKSYKTWKQIKDESVNDSGEKYMYAVDSLALSAASQNLQTAFTNFYNGIGGRRKGQSGYPKFKSKTGNASYTTYQQQQSFSDIIDIGNKTIKIAKLGKIKFVGNIPDLSGLVMWNKAWSETVSRDAAGHYFVSILLDFDVVEVAPKPIDCDSKIIGLDMALEKCYVDSDGNSPDFTGHYRANEKKLKRIGKLLSHKLGSKKGEEKSRRFKKLQKTIARTQFHIQKSRREFVELETNRLIENNDVIAIENLTMRGMANKKAHHGKSVADVSWGLFTNRLTQKMQNSGKILHKVGRFFPSSKQCRFCGNKNDNLKLKDRKWKCPHCGAMIENRDHNAALNIKEEATRELAGLTCSPVLLKNR

SEQ ID NO: 57944 - protein, 359 aa, unknown
  TnpB Polypeptide
MRRACKVTLKYITARKQRQVNALIQSYRSAVNFYIKSFWDVRGKLDKETLARLRDSRLSERYKQAALKQAFDIVIATKKSAKVLGKHCEVPIFNGKIILDQRHIATEDGNGSFDLVLKLAALAKGHRITLPTKHTAMTRKWLSVPNAKFIQGCALSETGITLWVSIPEQPLKQEGRVLGIDLGVNKLISDSDGNHYGRDFKAIRDKIRRKKPCSKAKHRALKERENYICRIVNQLPWQDLKVIGFEDLIGIKTGKQKNRGKDFRKAMAPWIVRRVAGRIECKAQENRVRPVKNNPANTSRTCPQCSLVSKENRKGEKFQCVSCGYKGDADTVGALNILAKTLVTLGSLQSPRQKQKKVA

SEQ ID NO: 57945 - protein, 380 aa, Enterococcaceae sp.
MERLKAYKFRIYPTEEQKVFFAKSFGCVRKVYNLMLDDRIKAYEEVKNDPSKKMVFPTPAKYKNEYPFLKEVDSLALANAQLNLDKAYKNFFRDKSVGFPRFKSKKNPVQSYTTNNQKGTVTLIDNKFIKVPKLKSLLRIKLHRQPQGIIKSATISCHASGKYYVSLLCKEEIVELPKTNSVIGIDLGITDFAILSDGQKIDNNKFTSKMEKTLKREQRKLSRRALLAKKKGINLFEAKNYQKQKRKVARLHEKVLNQRTDFLNKLSTEIIKNNGIICIEDLNTKGMLRNHKLAKSISDVSWSSFVTKLQYKADWYGREIIKVGQWFASTQICSGCGHKDGVKPLRIREWTCPICHAHHDRDINASVNILTEGLRIKRLA

SEQ ID NO: 57946 - protein, 414 aa, Blautia sp.
  misc_feature (204)..(204): Xaa can be any naturally occurring amino acid
  misc_feature (408)..(408): Xaa can be any naturally occurring amino acid
VRKINRAVKIRIYPNKEQITQIEKTIGCSRFLYNRMLADKIRYYQEEKKMLKNTPAGYKKEYPWLKEVDSLALANVQLNLEGAFRKFFREPGVGFPHYKSKKHSRKSYTTNMVNGNICLQDRFLKLPKMQPVKIKLHRMIPEGWKLKSVTVSREPSGKYFASLLFDCENQTAEKRQAEKFLGMDFAMHGMCVFSTGERAGYPMXANVQLNLEGAFRKFFREPGVGFPHYKSKKHSRKSYTTNMVNGNICLQDGFLKLPKMQPVKIKLHRIIPEGWKLKSVTMSREPSGKYFASLLFDCENQTVEKRQAEKFLGIDFAMHGMCVFSTGERAGYPMFYRNAEKKLAREQRKLSRCEKGSRNYQKQKKKVALYHEKIKNQRKDFQHKLSHSLAEDYDAVCVEDLNLKGIAXVCRTGS

SEQ ID NO: 57947 - protein, 319 aa, Moorea sp.
MLAKPNRENVERAVARFFDNCNNKVPGKKGYPRFKKHSRSVEYKQSGWKLSPDKKSIKFTDKKGIGKVKLKGTWDLWRFDQKLIKRVRIVQRADGFYVQFCVKADNSVREAWPTAFQLEATGFTVGLDVGLKEFYTDSDGYSEPNPRFYRKGEKRLKFYQRRVSRKKKGSSNRKKAINRLGRTHLKISRQRSEHAKRLARCVIRSNDLVAYEKLRVKNLVKNHCLAKSINDAGWYQFREWLEYFGQKFGRVTVAVNPARPRQNCSNCGEVVKKSLSTRTHVCQCGCQLDSPKATLRERDHNAAKNILTRALSTVGHTGI

SEQ ID NO: 57948 - protein, 327 aa, Brasilonema sp.
MQSNLPEWVKKTPCHIRQNAIFDAHLAYSASREAKFRSIRDIQQCIKFNNSNFTKGKWYSQITKNLNYTTSEPIPVNCEYGTQLVYRRGKWFAIFPEVMQISTSVCDKVIALDPGVRTFLTGYDGDKVIEIGCNDMGRITRLCQYLDNLMSRSSKVNAKRRRAMKRAANSMRERIQNLINEVHKKAAHYLTSNYRIIFLPTFESSQMVAKAKRKIRSKTVRSMLCWAHYRFKLTLKHQALKRGCIVIDVSEAHTSKTCGVCGHRHAKLGGNKVHKCPNCGVQVPRDANGARNILLRALRDTSYSVSQDGIAIVSFSALSTNVHECSA

SEQ ID NO: 57949 - protein, 496 aa, unknown
  TnpB Polypeptide
MAARTRPAADPPKRTPSFVCEVPLRVTRPQERILLARLEAARQVYNACLGQARIRARLVRESKAFQRARTLPREDPQRKRLFAQARGQHAFSAYELHAYAQPLGQSWLGEHLDSLTIQKLASRAYDAANRLLLGKAKRVRFKGKHQLDTVEGKVNTSGIRWCADRIEWKGLVLPARLDARDVVLAHGLACPVKYVRLVRRKLGAKNRFYAQLVCEGVPFQKPQHALGQGVVGLDLGPSAIAVVAAQEALLQPFCPEVAPDAKALRRLDRKLDRQRRANNPENYDERGRVRKGKKRWHVSKRQCQTQARRRAVYRKLAATRKRSHGQLAHRLMMLGTTFQLEHLSYRAWQRSYGKSVQLCAPGMFVERLSRLAGSAGGTIVDINPWRARLSQTCHCGRVKKKARSKRWHTCPCGASAQRDLFSAYLARFVDPDTSLLDVGQAQTAWPGWEPTLQAAYEQAINNQPARGRRLPAAFGRPPGVAPSQSGSLAEGSPSRT

SEQ ID NO: 57950 - protein, 391 aa, unknown
  TnpB Polypeptide
MRRTNVVKLAVDEETHEKLRELGIITAKCWNEVNWLRMQQFKKGERVDFAKTEKEAYEKYKHVLKVNAQQVARKNAEAWRSFFSLIKAKKEGNLPKWFKPRPPGYWRDERGKYKLIIVIRNDRYEVDENKRIIHLKDFNLTLRFKGKLKWHGKKGRLEIIYNDARRSWYAHIPVKVEILAKAKGSLRASVDLGIVNLATVYAEDGTWYIFKGGSVLSQYECYSKKISKVHKVLARHGQRKSRRLKLLYDKRKRFLRHALNSMVRKTMEELKEKGVRKVVVGYPKGVARNHGNKLTVNFWNYSYIIKRFKEVGEELGIKVTDVGEPNTSRNCSLCGESHESGRIKRGLYKCPRMGKVMNADLNGAVNILHIPESLGSRSRGQLLARTNRAGG

SEQ ID NO: 57951 - protein, 396 aa, Acidilobales sp.
MAFGDEGELTLSIAVRFSPEPGAVELLKRYRLALNYAINRILSLNLKTIKEVHRELYRELREWFGFPSRIALDCYRDALANAKAWRRNPHKGKRPRVKKLSMLLHPGSGYKIKDGYVEIIGGIRMKIIGWDRRYDEYENREARLVYREGRMILWISKRMPRPEQYKPRDVIAIDINERKIVYGDDEINKGIDTAVDRAYRWKLLAESLQRRYSSPRYPAWRRRKAIHNRIRSFHRKARNVLEDWARKAPLKPVRLAVKLQHAVAREDLTGLINSLRKIKNKDHRTKLIIMGYSRLVKWIDWQAMKHGAPIVIVDPRNTSSECPQCESKIEENGYRRLRCPRCGFEADRDVIGKLNTRKRALKMLGIKVIPGGVLAPLTAPQMTDVNTNRWGEQMNS

SEQ ID NO: 57952 - protein, 481 aa, Catellatospora sp.
VKGFEPRAGFVVQAYRFALDPNVGQEQGLRSHCGAARAAYNWAVSWVTAVWWQRRAEQSYGIADEKLTPWRPTSLPALRKAFNEVKHTDARFAAWWADNSKEAYSTGLANAAAAFDNYTKSKQGVRAGRPMGRPRRKSKRRARLSCRFTTGTIRVETDRRHVTLPRLGTIRTHENTRKLQRRIATGTARILSATVTHQRGRWLVSFQVEIIRDAPRPARQPDTVVGVDLGVKHLAVLADTTGKITYVPNPAHYDAALGRLRRLSRRVSRRRGPDRRTGRTPSRRWLKADAERNRVHHRVTNLRTDALHKLTTQIRAEYATVVVEDLNVAGMLSNRRLARKVADAGFGTIRRQIEYKGQWVGGVTVKADRWYPSSKTCSECGAVRDKLPLHVRVFACEQCPMVMDRDANAARNLAALAAAVKAGTGVAGDQDAKASKPRRADRQTRTTTRPRKRPGGRAGGATPRQRTETGDPRLTEAATPR

SEQ ID NO: 57953 - protein, 309 aa, Escherichia sp.
  misc_feature (270)..(273): Xaa can be any naturally occurring amino acid
VKRLQAFKFQLRPGGQQEREMRRFAGACRFVFNRALALQNENHEAGNKYIPYGKMASWLVEWKNATETQWLKDAPSQPLQQSLKDLERAYKNFFQKRAAFPRFKKRGQNDAFRYQQGVKLDQENSRIFLPKLGWMRYRNSRQVTGVVKNVTVSQSCGKWYISIQTENEVSTPVHPSALMVGLDAGVAKLATLSDGTVFEPVNSFQKNQKTLARLQRQLSRKVKFSNNWQKQKRKIQRLHSRIANIRRDYLHKVTTTVSKNHAMIVIEDLXXXXTGRSRNAKYSDCIPVPQISAETTFTKSQRPSAKTTQ

SEQ ID NO: 57954 - protein, 211 aa, unknown
  TnpB Polypeptide
MQGGDFMEHSYRFRIYPTKEQTIQIQRTFGCCRFVYNYYLAKRIDAYKSDKTTLGYKACSADMTALKKQLLWLCEVDATALQSSLRDLDTAYQNFFRRVKQGEKPGFPCFKSKRKQAQKPPQLQKQMRRHQYQGAGRCDAAPEARQCQVPRQPQGGGPSALCYCVTGSQRQILCFSLLYRRGHQAAAKDRSRCRHRPRHQGLGYHIGWREV

SEQ ID NO: 57955 - protein, 387 aa, unknown
  TnpB Polypeptide
MLKATKVRLYPTKEQQRFLCGQFGAVRFCYNKSIDIWQHRYKVHGQSVSIFKDVKPLLAVAKKSRKYGWLGKYDSIALQEAVRHAHGATVKFLTHKAGYPRFKSRRNEQSSYHCTGISVGDTWIRVPKVGKIKVVIHRQTEGKLKSITLRKDCCGDYYASLLYETDEQLPEPEKTLYEDDILGTDLGLKSYAAYSNGKKKPNPKPLKRALKKLRRAQKSLSRKKKGSANREKARKVLVKAHRLVARRRADFIHKLSRQLIDDNQAVVVESLQIKNMMKNHHLARAIGDAAWGEFVRCLEYKAKKQGKWLIDIDTWFPSSKTCSACGHVLEKLKLSTRSWTCPHCGKVHDRDINAAINIKRQGIVQLKAAGLTVLRTKKQPVVARGSL

SEQ ID NO: 57956 - protein, 383 aa, Chromatiaceae sp.
MASLAGKTDEPITRAKRIQMRPTRQQEKRLNAWIGTYRFVYNETIWLLNLRIVHPNFMAIKKYLIPHLAEEYPWTKNCPRAIRDGAVAEACQTIKQAIATFKRTGEFSRCRFKSRKDAQQSFFLRNDQWSKDRRGFNVSALGEVKFAEALPMNLRDGRVIKFANKWYVSLPVLKESDAAENQGRLVALDPGVRTFQTFFSDHHVGHLGQDDFQRIVRLAHHLDRLLSRRDKAEGTRKRLSFTKAADAIRRKIKHLIDELHWKVARFLTDNFDVILLPTFETKQMTSKAGRKLRRKSVRSLLSFAHYKFGQRLEQKCIERGKKLVHVCEAYTSKTASWTGEIINIGSAKVIRSNGIEMERDENGARGIFLRALVDSPILLEGAR

SEQ ID NO: 57957 - protein, 370 aa, unknown
  TnpB Polypeptide
MIRSFRYPLRLNQQEETGLEEIRLACQRLYNAALEQRIDAYRKQGKTISKYEQYKELTELKGVISPRILRSSVDRLDRAYKAFFRRVRSGHKPGFPRFKGIDRYDSFSFPNPVVKGNLLTVPSFGKIRLKLYRPLKGKPLEAHVRKTCRGWEASVVCDLGAAPEKVEAKTSTGIDVGLSSFATFSDGSEVENPRFFRRSEALLAKHQKALSSKKKRRNSSSRKRSKLLVAKTHQHIKNQRLDFARKLAKEVFSKYDLVVIEDLNIRGMVRTLNLGKSVSDASWGLFAACLNFKAEEAGKTIVAVDPRNTTQNCSRCGKRVVKLLSERQHNCPYCSLSMGRDHNAALNILALGLRAVSRIGAKAPILAEAS

SEQ ID NO: 57958 - protein, 385 aa, unknown
  TnpB Polypeptide
MFEVVDRYCFYSKNVYNEANYILRQEFVKNNRILGAYDIQKLMQNMDCYKECGSQAAQKTIQMLDKAWKSFLVSIKDYSKNPIKYLGKPKIPKYLKKNGRQVFSLKNIQCTLKDGLFRISFKPFKGYTVRTHAKGRLIQCRFVPKGLYYVMEIVYEIEVPDIPKNSDRIVAIDIGVNNFITMVNNISENPIAVKGGIIKSINQFYNKKKANIQSELKKVNDKDWSKKLQKLTNKRYEMIKYQMHCISKYVVDWCVLYGIDTLVVGHNNEWKQKKQGMQNFTYIPYGLFIKMLTYKCENNGIKFIESEESYTSGTSFLDNEDPIKENYRKERRVYRGLFIADCGKKINADVNGAYQIMKKVFPKIFINGIEGAGLHPTILNLTCVK

SEQ ID NO: 57959 - protein, 190 aa, Clostridioides sp.
VIAVEKAYKFRMYPNKNDKETFTYKQCSSDLTNLKKELNWLKEPDKFSLQNALKDLDNAYKKFFKEKAGFPKFKSKKINRFSYKTNFTNGNIMYCGQHIKLPKLGMVKVMDKQVPQGRILNATISKEPSGRYYVSLCCTDVDIEAFKNTNNQIGLDLGIKEFCISSCGEFIENPKYLKKSLNKLAKLQRE

SEQ ID NO: 57960 - protein, 413 aa, Crocosphaera sp.
VLRYISHLKDGSFALPVFFCKSPINACSLNCEYIISPDAPFPNYHRQAKQLTDAKKQYPQLKTVHSQVLQQTLRTLDRAWDDMRARGFGFPRFKNKYRLRSFVFPQLGKDPIRNDALKLPKLGWVKWRLSRPIPEGFEVKQARVVRKASGYFVGLSLQLDVDIPSPLTPLSKGGMKGGIGHPRGLDLGFEKFVATSDGEEIKRPRFLTTLQRKVELLQRRLKNKQKGSNNRHKLNQKIARLHQRITDTRKDWHFKLAHHLCDGVGMIFVEDINFVSWQRGMLSKHSADAGFGQFFNILEWVWLSRDVYFAKVNKDGTSQTCPNCGAHTGKKTLDVRVHHCHECGYTTTRDVAASQEIRNRGITSVGQMVAGRLTSFEETSQALGPKNVCGLRATGRITRDALVGGGRSRKLAS

SEQ ID NO: 57961 - protein, 431 aa, unknown
  TnpB Polypeptide
MKTAHRIRMNPTPEQVEYLKRACGTRRFVYNWGRAEWEKQYQAYRLEQETTPEEQRVLTPPNAFALKKQFNAIREECYPWTYHVTKCVVEGAFDDLGKAYSNFFAGKAHYPKYKKKGKSHESFYLSNDKFTIGSHWIAIPGLGGFILDQRKQVKHRGKLKRKLGTVNLSEKLRFVEAEKASVPLKKRNRRKQVLCQNVKILGATVSCEAGHWYVSIQVDITKTMPPTPEAVVGVDVGLKQAAVVSDGRVLENQKPLALHLKKLGKLQRQLSRKQKTKDPETGKTTLSKNYQKQRVKVARKHQQIANIRRDVQHKFTTELARTCGTIGIEDLNIVWMMANRKLSRAVADAAMGQLLQFLKTKVATSGGNLFVASRWFPSTKRCSGCGHVKKRMPLKHRTYHCLACELVIDRDLNAAINLAQFAQTQLRHSSA

SEQ ID NO: 57962 - protein, 558 aa, Rhizobacter sp.
MAKASANPSADSASGVLRGYRYRLEPDAAMAEGLARCAGAARWVWNKALERQKERIQSGLRPAGYAEMARWLTEWKAEPSTAWLSCAIAQALQQRLRDLSLAIQASQTADAKSQSLPVFKAKRARTSFRLPQRVRVLTDTDGWAYLQVPKLGRCKMRLSRPLPATPRNCTVSFDGEHWFASFQVQVPGRRPTSGGALGLDVGVNVSVAASDGSLWNRESGQRKMQAKLAELQRSLARKQRRSRNWHRCRARLARLCASLAGARNDWTHKLTSHLACSARYIAIEDLRVKNMLSSARTSTGRPGGSHAQKRGLNRAIWEEGWSRFRYQLTYKVAEAGGTVIAVPPANTSRRCFACGTVDAASRRSTRFACVACGHEDHADVNAAKNILRAAGHAVLACGDPADGRVNEAGTEASASQVGAKSRPKGGRMPIRTRMCSSILSIAISAIFVAPAAEAQKARLPVEDFRPLLVNAIESAEGRAFGILIGPMAEALTTRMKATSPILIDVTTLRRYKQAGCSRLNVRFSQDGVVLPGTDKPRKQTFDLGLNYCRDGQPPRSLA

SEQ ID NO: 57963 - protein, 465 aa, unknown
  TnpB Polypeptide
MTILSGVKLKLYPNKTQKQTIEQTFGNSRFVWNQFRNMQENRYNAMIDNYKSYKEQAKENGDKIINPIYIGEYDMQKMLTELKKEQSWLYFSDATVLQKTLSNLDKAYKNFFKKPDQFEKPKFKSRKHRSQSFTGRVIMMKSGKTCVYVSGLHYIYVPKLGFIKVSKTDRINGQIKEYTITRESFGDYYISFQIEEPDRELLVKTKQLMGGDLGLTHLLTLSNGLKFPKFSPGQALAFSLKAQSKASKSRNHNSKILTTNELIYLIEKGIFDNGKYDASDLFDFKNHEKRMKKSAKAQRKVANKRHDYLHKLTKKLVETYDVIVLEDLKVKNMLKNHKLAKAISNASWATFVRFLRYKCEWYGKLFILVPPHYTSRICHQCGWDSGKKPLNVREWTCPHCHKTHDRDINAAINILYRGLETYLQSQLMLLNEQIKNNYFSTIFFKVASQWLKQTISYFNQTLEIV

SEQ ID NO: 57964 - protein, 337 aa, Dolichospermum sp.
LQKPETKANWKGIKTGIIQELPEWCKDAPYQIKSIAIKDACQAVKNAKKKYIDGGGISKCKFRTKKDPVQSCYIPKSAVKDAGIYHTVLGKLEYKESLPDGFGDCRLVSFYGDYYICLPIESPRHRTENQGRVVALDPGIRNFLTFFSDNCFGWLGENANLKIQKLCFKLDKLVSKISKAKSKQKKRLKNAATRLRGKIKYLVDELHKKTARFLVDNFDVILLPTFETSIMSRKAHRRIRSKSVRQMLTLSHYKFKKFIKHKANEFHKIVVDVNEAYTSKTVSWTGEIINNLGGSKIIKSRIDSQSMNRDLNGARGIYLRALVDTPWLRDNLNLSIC

SEQ ID NO: 57965 - protein, 394 aa, unknown
  TnpB Polypeptide
MEKGYRFRAYPNKAQENLIKMTFGCKRFIWNQFLDMQMKRSEAGEKLLTYNQCSKKLTELKCEKEWLREPDKDALQRALKELSKDFARYREKQKKKKYAPKKLEHLKRIGKEPTEYDRYGHPKFKAKKDRYQSYSTGSNIKFLGRKVQLPKLGKIRIKDSKKYQEIEGRIYNATVSREPDGRYYISLCFTDVPAPATLPTENAVGIDLGLKEFAITSDGLKAENPKFLKKSLNRLKFLQRALSRKTMGSANWEKNRLKVARLQKRIACQRQDFLQKFSTELIRHNAVIAIEDLQVSNMLKNHKMAMGIADVSWAEFTRQLAYKAQWYGRKLVRIDKFYPSSQLCSCCGHKNEAVKDLAIRSWTCPKCNSVHDRDVNAAKNILNEGLRLLAEEAI

SEQ ID NO: 57966 - protein, 488 aa, unknown
  TnpB Polypeptide
MQESRAIKFYLDESINQVKKDRIIRFLTECQTIENKLLKYYWNNFDLVLSTHTWIDFYSNRYMIKEPRLKFHHYMQVLKQVYEQLESLQTKIINRIYFKFDDKEKQSIYNYCSGFCFNWSNLEKYIPKQLSKYKKKDMNYYNFLLEIQDIINNSEEYIQLKNDIENRFWENKAKYHCPVKKELQVRCNTSHTVDINKLNYYQWIFTIDNNDLIGGSEKRGVFDTIVIPVKFSKYHKDILKDYELAKTFNLKLNKYGKVEIIGTYKIEVNYPKSKVKSTIGIDIGLNKLITSSDGEIIEQNSKIVKITKRLRKKQINRDNLQGHLRKKYNNEEFILNDKCFNNLQNRLSTFVKCDNRYKIKQFLNGRENTQIVMEDLKLSSAATYNKEVNSLLKKMHIQQIKNDIMKYSKERGIKVSLVNPAYTSQQCPICGHVSRENRKTQEKFCCVNCEHTDNADHNASINIMNRKDNKNIKLNMPLWRIKEILKVN

SEQ ID NO: 57967 - protein, 420 aa, unknown
  TnpB Polypeptide
MEQYNLLERQVKKVSTLTKTVKLRINVTPEQETLFRQATEQYRQACNFVSQYIFDNAFDLAYLSLNRALYAEIRSRFGLKSQMAQSCIKTVIAKYKTVKEQLFQNPYRYKDENGDWKRITKTLEWLWKPIFFGRPQADLVRDRDYSFVDGGKTLSINTLGGRVKRPFFSEHFAAYLDGSYVLGTAKLVELNGLWYLHIPVTKEVEDFEKENVRHVVGIDRGLRFLAVSYDEQGKTAFVSGKKIATKRRKFQEVRQRLQSKGTKSAKRRLKAISGRENRWMSDVNHQISKTLVRKYGENTLFVLEDLTGVSFEELNLSRRKKQNYALRNWSFYQLEQFLSYKAHENKSEVLKVSAKYTSQRCPKCGTIHKENRDHNKHFYACQCGYRSNDDRVGAINIQLLGTMWVLGDNHPRYERMTVSE

SEQ ID NO: 57968 - protein, 405 aa, unknown
  TnpB Polypeptide
MAQESVKRAFKFRFYPTDEQAAELCRTFGCVRLVYNKALEARTAAWFRESRRVNYVESSALLTAWKKQEDLAFLNEVSSVPLQQALRHLQGAFSSFWEKRARYPRFKSRKKSRASAEYTRSAFAYRDGKLTLAKLREPLLIVWSRPLPKGVEPTTVTVSRDSVGRWFVSMLCEDPGVTALPAAPNPVVGIDAGITSLLTLSTGEKIANPKQEQRERVALARAQRELARKEKASKNRDKARAKVARVHARIADRRQDHLHKLTTRLVRENQAIVIEDLNVRNMVGNRRMARAISDAAWSQLREQLAYKCAWYGRELVVIDRFYPSSKTCSACGHVVLALPLNVREWTCSKCGTAHDRDVNAARNIEAAGLAVLACGAGVRPQRKPPGGRSAVKQETQRATAGIPFL

SEQ ID NO: 57969 - protein, 308 aa, Haloferax sp.
VGRQTGRLELEYDEVSDTFRAFQPVTIPRTATRFSWANQKPLASDDVPASRLDSPLASEEAALDVGANNLVACSTTTGDQYLYDGRKLFGRFRETTDEIARLQSKLPERRSLSESRKTESSGRLREGRYSSKRIRRLYRQRTKRRDHAQNALVRDLVERLYDEGVATVYVGDLTDVLETHWSVRVNEKTHNFWAFKKFIHRLACVCEEYVISLEAESEAWTSQTCPECGDHEETVRHGDTLTCPCGFEGHADLTASETFLRENSDCEVRPMARPVRFEWDDHDWSGKPHPHESPKEVRTNPQVASVGR

SEQ ID NO: 57970 - protein, 411 aa, unknown
  TnpB Polypeptide
MNQLEKNERIKNSTLATRERHSAMLCKVFEMKIDKSHISKTQSDFLHRLFSEAKWLYNHQLSNDNIFNISDKIKEVSVLNKDKVLETRELANLSAQMKQELIERTKQNVVALNRSKKKGNKVGSLKFKSQVNSIPLKQVNQTYRVVNTKTIKIEKCKKPFRVIGLEQLPKDCDITGAVLIHRLCDYYIMITCFVDKIPKAITNKSIGLDFGIKDNVVTSNRERFNFSFPESKQIKKASRRFNKSKKGSKNRYKRRLELSKAYLKLSNKKKDTINKFVSKLIKENDHICIQDENIHEWQSSKMKGWGRKIQYSIMGGIISKLKMSSETIIIDKFVPTTQLCPLCGTLHKHNLDQRTYACLCGYAEDRDIHSAKNILHLGLSKIPTEHRNLIPAEEIVNTSSGTNETLEVNFF

SEQ ID NO: 57971 - protein, 367 aa, unknown
  TnpB Polypeptide
LNIAYRFRIYPTEEQKILLGKTFGCCRFLYNQMLDDKIREYEKTKKMLKNTPAMYKREYLFLKEVDSLALANVQLHLEKAYKNFFRDPKIGFPRFKSKHHSRNSYTTNVVNGNILVESKKIRLPKLKWIAMKKHREPAEGLRLKSVTVSMEPSGKYFASLLYEGYRCENQAAVSDYSTAKILGIDYAMQGMAVFSEKIETEEAGFFRKNEKRLAREQRKLSRCVRGSHNYELQKKKVARCHEKIRNRRRDHLHKLSRKIADSYDAVAVEDIDMKAMGQCLHFGKSVQDNGYGLFRKMLDYKLAWQGKKMVKVDRFFPSSKKCCKCGRIKKELKLSERVYHCECGNEMDRDRNAAINLREEARRMLTA

SEQ ID NO: 57972 - protein, 362 aa, unknown
  TnpB Polypeptide
MNILTVKCKIDPSEEQIEILDRTLIAFTQGCNFALDQGRETKTSSNIRIHHLSYHLIRKEFGLPANLAVRAIARASGILKVKSRINSTIKPSSIDLDQRIFSFHEKEEKVGITTIDGRIKIPLILGEYQRNLLSGKCPTSAVLGKTRNGQWYINIQIKLPDPPLSSPEGGCLGVDMGIRRIASTSDGKTWDGEKLTKTRNKFQRTRESLQKAKAQRKTRSISRLLKRLSGRERRFQTHVNHEISRSLVDQALETKRMIALEDLTGIRSGMKVCRKQRRTHHCWAFHQLRSFIAYKALLEGIEVFLVDPAYTSQTCSCCGERGQRKSLLFTCKTCGMLDADINAAKNIAFLGLRRQARKSVAS

SEQ ID NO: 57973 - protein, 293 aa, Escherichia sp.
LQKTLRDLERACTNIFARRADFPRFKKKAQSDSFRYPDPKQIKLAQAHNRLFLPKLGWLRYRNSRNVPGTVKNVTVSQSCGKWFVSIQAEREVAQSVPQSTSTIGIYMGVARFATLSDGMFYAPLNSFKRHEKALRRTQQAMSRKVKFSNNWKKSKTHVQKIHSPQATSAVTSSTKSHPRSAKNTRWCASRAYRYGICPSRRWAQQMHREETFEPPQNLSRTCPCCGHVSAAPQTQVRFLCVECGFGENADLVDAINVLRAGHARLACKVSGAVMPPTVGVHRSDSCVAQYHA

SEQ ID NO: 57974 - protein, 426 aa, unknown
  TnpB Polypeptide
MGIIHKALKVRIYPTQKQQEVLNKTLGSCRALYNMMLFERIQTYDAWKASGDDVRVLYEHEYKTEKQYKEEYEWLKDSVDSQALQQSRINLSMAYQNFFKSLKGQRKGTKSGFPKFKKKRTGSSYRTMMTNNNIAIDFEKHKVKLPKVGYVNFKDLRTKIEGVIKSATVSRSSTGKYFVSFLIEQELILNGVEIADELKAKTIGLDMSLEKLFVDNEGNSPAYERLYRKYEPLLKKAQRKMSKKKKGSKNWYKALHKVNLIHELITNKRKDFTHKLSTELVKNNEVIVVEHLSLKGMSQALHLGKSVMDLGYSEFVRQLSYKSLWNNKTFIQADKWFASSKTCSICGYKNKDLQLSDRDWKCLNCGTDHDRDQNAGVNLKNYGLKELGLVPEGLGEYKPVESKTSVSTSVELSLDAEAGRSPVFSG

SEQ ID NO: 57975 - protein, 439 aa, unknown
  TnpB Polypeptide
MGAIYRALKVRLYPNEEQQILINKTLGCSRFIYNIMLEERIQVYSELKDEKRELFEYKHKTEKEYKSEFEWLSEVDSDALQQSRLNLTRAYTNFFNSLKGIRKGQRIGFPHFKKKSGHASYKTLNRKGTIRFDISNRKLKIPKLGWVTFRNEKEIFGIIKSAVISKTPTGKYFAFVLFEQELDLDGVEIREDMKIIGLDMSMQNFYVDNLGNSPDYQKPFRSNQKKLAHYQRKLVKKSRVKHFTGEKTKTGKDQYYCTFSKNYEKTRLKVAKVHEKIANSRKDFVHKLSTKLVKENDVIVVENLSLKGMAQGLKLGKSVMDLGYSDFIRQLEYKALWANKTFLRADRWFASSKTCNFCGFKKKDLLLQEREWDCPNCGEHHLRDVNAGINLKNYGMKEIGLKQPEFKSVEIKSSDCQLAMIGNQDLSVKQKARKSLVSG

SEQ ID NO: 57976 - protein, 390 aa, Staphylococcus sp.
VYNSIEGGVIMYRGIECKIYPNKAQQLKIEQTFGCTRFVWNEMLNMINQRYQNNNELKMLSYPKLSALLPALKLEYPWLKDIDSVAIQCAVKTLSETFDRFFKGYSRYPKFKSKKITRQSYLSTIRGNNIRFNDNQRYIKLPKLGWVKCKSSVQHIENSRIKSVTVTRKSTGYYYISLLVESDNQALPKTGKSVGIDLGLTHLAITSDGKKYASQRLHLKYKKQLHYWEKRVARRRLNAIKNGMPLKDAKNYQKAKRQVARIHEKIVNTRKDYIHKITTDLVERYDLIVLEDLKTSNLMKNHKLSRSIASQSWRIFRTFIEYKCVMYSKTSMTVNPYKSSQYCSSCGFDSGKKTLDVRCWICSECSTEHDRDINASKNILNFGLEQALVK

SEQ ID NO: 57977 - protein, 359 aa, unknown
  TnpB Polypeptide
LKEVCHDVQMKITCAFQYELYVDETRRAALSRNAGCRRFVFNKALGIQNERKSKGEKLLTYKELAHELVLWKKQPETAFLREAMAQPLQQALLDLDRAISDSFRPKSDPAHKGWPKFKAKDIGDGFRVPQFAPEHIDDANGRVKLPKIGWIRYRRTRPIAFECADGMLVPGVVKQIHVKKDCGRWFVIFTVEFEVQAPDMKALDVGIDVGVVHAVATSDGRFYDLDTEKIRSIEKRIAGLKRKLSLNQESRKKLAKLGLAEPFDKKQPSRKRRQLKERIQNLYRKIRCIRQDFHRKTAHALAQEYGCVYVEDLKVKNMTASAKGTVANPGKNVKQKSGLNRAILRTGFYVFAKQSNGNF

SEQ ID NO: 57978 - protein, 345 aa, unknown
  TnpB Polypeptide
LYNSALEERIKAYKVFGKSPSYFDQCKSLTVVRSEDEEYDALDAWMTRLTSLKRLDLAYQAFFRRASLGEDPGFPRFKSRERFTTLVFGTQGWKLSCGKLRIPSLGLVLRYSGHIHRQGKHLGLRITKAGNGRWYASVLIDIGEAPPKIDATNPVGIDVGLTTFATMSDGSEIANPRFANAAGEKLKGLQQTLSTKKRWSRRRQRAKVDLARASFKVANQRKNFMYNTVAGLLEKYDGFSVEDLDVRGLLAKDGKKAKGLHRSVSDASWATFVNILTYKAEEAGVAVMKVNPRGTSQRCSGCQTIVKKTLRDRVHNCSHCGLKLGRDHNAAINILDLGLRSADSP

SEQ ID NO: 57979 - protein, 345 aa, unknown; identical to SEQ ID NO: 57978
  TnpB Polypeptide

SEQ ID NO: 57980 - protein, 174 aa, unknown
  TnpB Polypeptide
MEKRLKREQRKLSRMLLCAKKKGISLSDAKNYQKQKRKVTRLHEKVANQRNEYLNRLSTEIIKNHDIICIEDLNTKGMMRNHKLAKSISDVSWSGFVSKLQYKAAWYGREVIKVGRWFPSSQICSECGRSDGKKPLDIREWTCPVCHAHHDRDVNAARNILAEGLRLRALSLES

SEQ ID NO: 57981 - protein, 379 aa, Salinivibrio sp.
  misc_feature (34)..(34): Xaa can be any naturally occurring amino acid
LYIITSCTTGLYVIASKHTVILITDLTFQSNAKXNTLWRNNRKAHGIFNANAQSEQFTLKRVALAFDGFFRRLKKGDKKAGFPRFKPFQRFKGWGYKAHGDGWKLHLKEKKHGAVYLANVGIVKIRGKARNAGGKPKTAEIIRKNDEWFISVSMEYDSIERQCGTKAIGLDWGVSHYFSTIDQDGHFEQVENARYLRNSKEQLASLQRDLALAKKGTRAHRKLKHQIAKLHQKIARQRLDFTHKETAKLVEVAALIATEKLTVKSMTRSAKGTAEKNGKMVKQKAGLNREILNTAPAMILNLLQYKAAEAGSEFVEVPTKQVKPSQTCPDCGAKKKKTLAERWHSCECGCEKPRDVASAQVNLNWALGIQAGNQPKKAA

SEQ ID NO: 57982 - protein, 395 aa, Leptolyngbya sp.
MEQAFKYRFYPTPEQESLLRRTLGCVRLVYNRALNARTEAWYERQETIDYVKTSALLTGWKQQEDLQFLNEVSCVPLQQGLRHLQKAFSNFFAGRTKYPNFKKKRNGGSAEFTKSAFKWKDGKVVLAKCAEPLSIRWSRQLPQGCEPSTITVGLSPSGRWHISVLVDNPSIKPLPAVQKSVGLDLGITSLIATSDDEKIANPKPFERLRKKLKRVQKALSRKQKGSNNRDKARIQVARILAKIADSRKDFLHKLTTQLIRENQTIAVEDLAVKNMVKNPKLARQIADAAWGELVRQLSYKAKWYGRTLVKIDRWFPSSKRCGNCGHIVASLPLNVREWDCPTCGAHHDRDTNAARNILAVGHTVAVCGANVRPDSHEVKGQLRKTSNGKKQKPKS

SEQ ID NO: 57983 - protein, 425 aa, unknown
  TnpB Polypeptide
LAHDGSIPVFHFYALAADLRVALLVWKTILIEVSDSSEGMGPPKVSIRTLRFKVRSDSYSWLDAAAIEANQVWNYFNATSFKAARPDHGKSRWMSGFDLCNLSAGASKYFDHIGADTIQRIATEYVNKRAQFKKARLRWRVSSGSRRSLGWIPFKAASIRRHHRYLRFCGKVVRIFEDKRFAAIDKWRSGCFSQDSVGDWYLCLPVGIPDETPAPRQAAVGIDLGLKHTAVTSDGERLPAGQFYRGLEAKIALAQRRGHKQQAKRLHRRASRRRHNALHQFSRWIVNRYHIILIGDVSSPKLAKTRMAKSVLDSGWGQLKTQLQYKGEYAGRGVRIVSERNTSRTCSSCGSVSGPTGVNGLRVRSWICPGCGTAHDRDVNAAQNILAAERLPPSVYGNETLPRHAPPSRAHRPRNARKARGAATS

SEQ ID NO: 57984 - protein, 228 aa, unknown
  TnpB Polypeptide
LKEDKISLSKIGKLKIIWSKPLPNPPSSVTVIKDAANRYFLSFVIEVNQQLLPESPNSVGIDLGIKTFAVLSTGEKIDAPKPLKHKIKRLRKLNRNLSRKQKGSNRYERARVRKAKLYARMKDTRKDFLHKLSTRIIHENQVIVLEDLNVAGMVKNRKLSKAISDLGWRQFRTFIEGKAEKYGRDFRVISRWEPTTHALFVLRFCWWQIRPFCQGMDLFKLRDSSRQR

SEQ ID NO: 57985 - protein, 463 aa, unknown
  TnpB Polypeptide
MRVLLNYQYRIYPYMGQIQKLNEWLRICRYLYNHWIGQCLDWWKQNCCPVNACPLICYLPELADNPYFTDLKKQLPVLKKDLVKVKWSGEILDLSSVYSTVLQDVYTSRLKKAMDRFIQGDSNGKRSGRPRFKTKASYKSFKFPQASSNWIDTENHVLKLPFIGGIQIQLHRPLPDGFTLKTVQVIKKADGWYVNLCIEDPTIPVFSPEQIIPTWDNSVGLDAVLQGSDYFATSEGEKLPSVKNYRKAESKLNKVKSRRSKAKRGSIARRRLAKRVAKSEQQIARARKDHAYKMSHRLILTGKKVFFHEDLNLKSLTKRNKAKLDETGKFLPNGQSAKSGLNKSWQDAAFGQTFQILEYIAAKAGARTIAVNPAYTSHLLSYRDEFVFTDCSIREYWDIVEQLLVDRDINSGINIKRVGLDVFLTINRRSGKITSSKTHSTAMQVLRSLRGFEKPTLYRLRSV

SEQ ID NO: 57986 - protein, 336 aa, Escherichia sp.
VKRLQAFKFQLRPGGQQEREMRRFAGACRFVFNRALARQNENHEAGNKYIPYGKMASWLVEWKNATETQWLKDSPSQPLQQSLKDLERAYKNFFQKRAAFPRFKKRGQNDAFRYPQGVKLDQENSRIFLPKLGWMRYRNSRQVTSVVKNVTVSQSCGKWYISIQTENEVSTPVHPSASMVGLDAGVAKLATLSDGTVFEPENAITGPDPGLFADITGISKVQLLLADDAGIMFAEIKHAGGIIRRPFEAKRRLFVAKFKVLLLPAVRAGNMKTHKMRGFTGCTLNLTGASHFGRGATDGLWPDRAFNTLVTQERRRAFLFNILIKGSKFIITRHIH

SEQ ID NO: 57987 - protein, 662 aa, unknown
  TnpB Polypeptide
MVLKGKPKDKQKKKKEDNYDFMKTVKDNIKNIIKDDSTTSIINVLATKTNKIVIHSYQFIKLYCLDLFKNNKPFPKIDKEFICDVFKVITIRKCGSGGYTDEKMPQQLKDLTLFYKDHYKSTCDEKEILYYDKMSYILAYEAIDMITNIENNIREHFIQHLNKFVNISFKLKDSMDKITKETKDKELRKQQKKELYNEIKKVKDDILSFDELKSDIKYHNWIKEQKKFLLPNKTKFDKNSIMYDIKSNPIDYLKSMIYIGTELEKVYDLEIEYHILHLFNVLPLRTNIVPKNITIDTCGLIQNFLGDESTTEHLKNYKTDNKQFLLWNRLFKLDKKIFIKNKYEFNYMIKSDGVSVSVLFIRIGLDGKPLKKCNKNNSEEENMDYIEKVEFTDEMKKKRVVVADPNYSDLIYCGSKDNNGNLETFRYTQNQRRLETRVKKYSKIIDEISKETKINDKNIKEIETVLSNFNSHTNNYDKFKEYIIQKNKTNLILFNHYEQSFYRKFKLNRYINTQKSESKMIHNFEEKYGSSKEVMFVMGDFDKGDNMKGKEPVICKKFRKIFKNAGYETYLVNEFRTSKLCNCCHKEIEPFLEKNSNKPKDIKNNKKIICHGLLRHTDVKPQCEIIHNRDKNAVQNMLFIVDTIKKTGKRPLAFSRLLQEAI

SEQ ID NO: 57988 - protein, 662 aa, Streptomyces sp.
MRGEGAVVGRKLPLSEGETARTACARGLLRAAIDEKTGEVLSAGVLVERVGWAADLVSGMVAALLAEHWNAADVDVLAGGEDAGGRKLPSNAWMALRRLGWTVVPAEGIRVNDRIVRMAQETAGRTLRSAKGRADLTAGVLATWPADSARRTAQEWDAVREAVPGGPSLPSSVINSRTRQIVAFVNKHGRMPVDVFEVEAVPRIARMLLLSACDGQQATLERADDPGRALLRLQLPSRPDPRSYADWTWVACPLALPPTVPANAVVHLPTLRIRQGRVRADLAYTHAVPKPRRSGHTVALGVDWGLNTLLSAGAARLHNDGTITTLGGGGMFRAAGVLAKQHRLRRLSEHLHTKTDHYHQLISGTEQHALTGKHAVLADEIRHVSARRSNLNDALARAAARWAVDQAITAGASVIYVEDLRSMEARGMGRTHNTRMSQAVRGRIVDRMRHLAAEAGIAVVTVPARNTSKHCPQCLVPLRHRKAPDRPTTPGWKWALCGSCGWQGDRDQGAWRRIAARGLTHQTKTVTDRTSADMTIRSVTEKLETGAVITPPAPKTSRDRSKTGPTRPRSTRPTPRRRRTPSPTRPIRPAGQRPEGHAPTDWTRLPRAAHRHQGVTTISTPTTGHRPQGAALGAGFHLHAHATPPRWADPMPDTTSGMGSLS

SEQ ID NO: 57989 - protein, 277 aa, Gloeocapsopsis sp.
MGWFAVVFISSDVEIPQTSPYGHCIGVDVGLLNYLATSDGFIEPGRKFFKAEHRRLKVLQRRLAKKVKRSANYEKARIKVEKLHNHIHFKRKDYQFKLAHKLCDMADSIFVEDIDFRTMAKGFLGKQTIDAAFGQFRSLLKYVGWRRGKFVAEVDHKGSSQICPNCRIEVRKELGDRIHYCPECHYETDRDIASAQELCNRGIEKLVCAESVRHSKLRTYPGTLEKQEIGSQVVLSGAMSLDKWRRGAMPTSDSRKPTLYQGELVLGECHTNIERPE

SEQ ID NO: 57990 - protein, 365 aa, unknown
  TnpB Polypeptide
MQKGIKFRIYPNKEQKNLIHQTLGCCRLIYNKGLALREEAYKNGEKIGYTKTSAMLTELKKMEEYSFLKVADSIALQQSLRDLDRGYVNFFQKRAAHPTFKSKHNRHQCYRTINQKDNIRIVGKYLKLPKLGFVKVRQSMEVGKIHNVTIEHAPTGKYFAILNVEFEPEPRQNKGSIIGIDVGIKEFYYASNGNPVPNPKHLEKAMRKLVREQRKLSRKQVGSNNRNKQRIRVALVHEKITNQRNDFLQKESTKLICENQTICIEDLKVKNMMRNHKLAKAIVSVSWSKFFDMLEYKATWYGNEIIRIPTMYPSSQTCSCCGYQNPIVKNLAVRKWVCPECHTAHDRDANASINILAKGLQMQSV

SEQ ID NO: 57991 - protein, 381 aa, unknown
  TnpB Polypeptide
MFRGHRIRLDPNNVQATYLARAAGTARFSYNWALTEWQRQYEACKTDPDLPKPNERALRRQLNAIKRVQYPWMLAVTKNAPQMAIMELDRAFTNFFKGRARYPTCRRKGRDDRFTLTNDQFRIKEKRIWIPRLGWVRMWESLRFAGRCVSASISRVADHWYASITVDTSEPLLPSAENQGVVGVDLGVTTLATLSNGETFVGPKALAMLLDRVRRLSRDLSRKVKGSRNRGKAKKKLAKLYARIASLRRDSLHKLSTNITHRFHTIGIEDLHVKGMLANRCLSRAIADMGFGELRRQLEYKAAQRGGQVVVVDRWYPSSKTCSCCGYLLAVLDLGTRRWVCPGCGTNHDRDVNAAINLKNLAASSAVAACGGEGAGLAHQV

SEQ ID NO: 57992 - protein, 302 aa, unknown
  TnpB Polypeptide
MKVPVYDPDKGQGNSIWCPAHVPRKDEQLVRNGNLRDRDSELVCCDGDWDVHLVVKRSVTVQDESDVLAIDMGHVGRYLLPATCDLRVPLRPQNDVLRRRSPLHPRTLQATPQIGKAKPRQGQQVVERIGDAEARKVDDHLHKIARHIVEDADERNAVIVVGDLGGIRRDNDKGRYVTDKTHKMPFACLLDYIEYKAHNAGIDVQLVEEYDTSKTCNRCACEDVRATQGRFECPECGLDDNADKNGALNIGKRALGKFSKPLSKAGAGLAQPDTQVIVPRDDEPASLSLFVDSTPSGRTPRL

SEQ ID NO: 57993 - protein, 376 aa, unknown
  TnpB Polypeptide
VLQSLEIRLETNGREKELLLETTRRYNSATNFLAEKAFELKLANKYALQKLLYREIRERFLLSAQFTVRAISKVVEAYKRDRSRQPRFRMTGAIQYDQRNLSWKGVDCVSLLTLNGRIQLPTRVGEYQRTKASFGLRGQADLIYRNRVFYLIAVVEAPESPQYQAKETLGMDLGVHNLATDSDGELFSGKQVERTRQRYSELRASLQRAKRASQHRSAQRKLKIISGRERRFKRDTNHVISKRIVLKAKGTNRRIALEDLKGLRSRTTVRHTHRDKHSKWAFGELRFFLEYKAKREGVPIAIVDPRNTSRECPECHCVDKKNRPSRDIFRCIRCGLEAMADYIAAINIASRARFNEPIVAPLFSAVTISLSSDGRS

SEQ ID NO: 57994 - protein, 363 aa, unknown
  TnpB Polypeptide
MLKHKAYKFRIYPTQAQKVLLNKTFGCVRFVWNYNVECFNNNTDNTSSIKDLRVEHSFLKEVSAAALHQKERDFSEFKKQYFNKSRKKQIGKPSFKKKRLYNQYRLPNQKFSLSATHIKIEKIGNIKVVVDRQIPKEVKYLSVTISKKPCGHFYVSVCVEEDVLPKHKTYRKVGIDLGIKTFATQSDKVEISNPKFLVKSQDKLRRLQRIFSKKLKGSRRQIKFRYKIARLYEKITNQRLHFLHSYTTELVTKYDTVVIEDLSVEAMLKNKNLSKNISDASWSLFRFLLTYKADWYGKELIVVDRYFASSKTCRCGYKNKDLKLDDRQWVCPSCKARNDRDLLASINILEEGLRITSVGVDAD

SEQ ID NO: 57995 - protein, 503 aa, unknown
  TnpB Polypeptide
MGGGGMECVRRAVAVEIENPPSELYAVEEPYRRIVEEVAAYVAERGTLEKEKYNELYHRFRELYHLPSQLIQQAMNQGVETGKSFLELKRDGRIHKPRPEVRRVAIRFAKDSWSYKKAISTAAPVKIAVSLPGGRREVWIKPHRRFWLYWWKALRREAELASTLMLKRRRGRWYAVFVFDVKPGKEPPAEAIALDVNENSVAVARVSLLSTVDAVARWNRQYVDPAVYFIKTDFGRLAKRYEAVRNAKLEELKRKYPYAGRDDEEKVQNITDTREFRKFAKRLRERRRKEGRVRQVAREMTKSPAVIITEELGKNPQEEMIGLEEKKVEKRELRHRIKQTPFRKILRAVEDKAAEGGSVVFYVSSFKNSKVCPIHFVLLKNGGGWHDLHCLHGHVVDRDAAAVLNMLWKTTPTGWVKGVWWDVKDVKRRLEKGRGLVPKEAVRRRNPLVTWPVVYAVWASLKSLKASPQWPAVLARAAPMTPAQGADEGGTRAPPRRAGTPAL

SEQ ID NO: 57996 - protein, 357 aa, unknown
  TnpB Polypeptide
MMIKTFSYRLRNDPLLNQLAHRVNLIWNFCNDTQKFALKHKKKWPTNFDLINLTSGTSKELHINSQTVQLICDQYYKSRTQSKKPYLRYRGDRSLGWIPFKAQSITELSDGFLFMKQKYHIWKDRELPDEYILKSGSFSQNSMGHWFINITVEIQPKNEYGNGTKSIGIDLGLHTLATCSDGTKIDTIKFYQDNEKKLAKFQRAKKKKQVRNLNKKIQNRRKDYIHKQTTRLVNENAMIVVGDVSCKFSISQNAKSTLNVGWGLFRSLLTYKAIARKCEYIEINERYTTQTCSSCGVIPKSSPRGAKGLEIREWTCDECGIRHDRDVNAAKNILRLGLQSLAEGISEIDVRSKELTS

SEQ ID NO: 57997 - protein, 359 aa, Marinobacter sp.
MTNHTTATKTLKVRVRDKHAKALRRQAAAVNLVWNYVNELSRRYIRERHQFLSAYDLQKYTNGAGKLLGLHSQTVQRVSAEYVTRRKQFRKQRLAWRKTHGVRRSLGWVPVNTGAATWLSGQVRFNGQHFKVWDSHGLSQYRFRSGCFVEDARGRWYFCVAVTVKSEQRCGTGSVGVDLGLKTTATLSDGEPLEAGRFYRDMEKKLAIAQRARKQNRVQAIHAKIRNRRHDALHKYSRELVNKNGLIVVGNVSSSGLVKNNQAKSVLDAGWSTLRMLLVYKCEHAGSVFLEVDERYTTQTCSCCGSLSPNSPKGRAGLGIRAWTCECGVTHDRDINAARNILALGHQRLAGGITVSLGR

SEQ ID NO: 57998 - protein, 397 aa, unknown
  TnpB Polypeptide
LKELNISKGAGKLKAPAKLTTTVCIKLQMDCLSAQKLMKTRLLYRDACNFLVQYVCRDPSERNWQRYNLHHAAYYDLRSALPSLGSQLACNAIRSVSSVYKTQLTNHPRKNKTDPLKEIVFKNPSIHLDKNTIAYQENMTEATVFTIDGRVKVRLCPGDFQKRLLQFGQRKESNLVYRKTKKGESWFLHISLELDTIPADLSDQLKKEEVIGVDVGENNIAAASTGQIWKAGALKHKRDKYLGLRARLQSNGSQSARQHLRKASGKERRHVTHVNHVVSKSIVEEAVKQQAKVIVLEDLTHIRDRVKAGKRVRSRLHRWSFRELQQQIEYKAQRRGINVIYVDPRYTSQTCSGCWQLGKRTKHRFVCPHCGLRAHSDLNASRNLQGLGYQLIAQGLV

SEQ ID NO: 57999 - protein, 402 aa, unknown
  TnpB Polypeptide
MILKAFKFRIYPNDTQQVLLNKHFGCARFIYNWGLEQKIQKYQQENKSLSCNNLVKGIVELKKEHEWLTEVNSQSLQMSLRNLDNAYTRFFREKKGFPKFKNRRGKQSFQCPQKVKIDFENKTISLPKVPDIKTVFHREFEGKVKTVTVSRVPSGKYFVSILVESPEELVEKQDITEEATVGIDLGIKDFAILSNGEKVENPKYLKKSQSRLKSVQQKHSHRTRVSKKQGFKYSKRREKSRKRLAKQHEKVTNQRNDFLHKLTHKLVHENQVNTYCIEDLNVSGMLKNHCLAKSISDVSWNKFVTLLEYKCEWYGKHLLRIGRFEPSSKMCSVCGCINKDLTLKDRVWKCDCGVEHDRDVNAAKNIKSFGLHQQNVSYNKYVGKGIPELTLRESVSLETSMN

SEQ ID NO: 58000 - protein, 396 aa, unknown
  TnpB Polypeptide
MDMNMRAYKYRITPTHKQAQTLQWILARCRELYNAALQERRDAYRMAGKSITYYDQCAQLPAVKEVREEYRDIHSQVLQEVLHRVDRAMNAFFRRVREHTEEPGFPRFQGRERYDSFCYPQGGFSLTHDNRVCLSKVGSIKVKLHRPLEGKIKTCTIKREGEYWYVVFACAVEQSEPLPSSDEAVGVDLGLLHFATLSTGKTIENPRYLRHAEKKLKKLQAALSRKKRGSHRRKKAKQAVAKAHRKVSNQRQDFLHKESRQLVNAYGVIVFEELQPVNMSKKPKPKRDETTNEYLPNGASAKGGLNKSINDAGWGLFVAMCSYKAANAGRTVVTVNPRATSQMCSACGTVRKKTLEERWHSCECGCELDRDHNAAINILRLGRSQRGTPRVETSSF

SEQ ID NO: 58001 - protein, 622 aa, unknown
  TnpB Polypeptide
MRNYQVVLQCFDQSQREEINQRIRKLEERQVLLLTPFVVKKAVDLYRTNPKERFFIRKLGKAVGMNPNIAESAFHWLHIAVKGKIDKEKKVQGMLNFLLKNPQQLIEWLIFGRSPYTERSLENYWKLKRRYIINLLTNSRTQVDSFWRKKKKTIYTSATLKLNYLLPTCTQQDVLQAIDDALFYYTHKFSTLQQLNNNQQAFLNKIKLLKKEQTTVVPFLTSWINSPQSSRWKSLKELSEQLAQVLGKPTRKLFSAVRLIVVFTLFDYYMQSVPQLVKVLPITNVVPPPFKRKKKGRLPIILLMNKNYVITRQGNAQEVTAQIQKQGWTELGFPSKGKQKLTAQVHFPPKVVEYLNNGAHIKVFQVTSGQAPRFKPRVDVVLEGVHACFRSTRLLHHYLRNISAKKTSILGVDINRLGQYMITFNAPIPLPQDLLDLAAQYEHLSTKVLDELNKGLLRKRKEYNSRGSCKLKGELNRVYTRRHRILREITRLLPHFLAAVMVKKKCQVLKIERLTVDPTGTKGALAKAIYTMPDSLFIYKKAVWLASLELGYDVQLESVRPYHTSTVHYGCGGVLTRQKGLYDVAPCKKCGQQVNTHDNAAHNIASLPGTLLPNDSFPSPHV

SEQ ID NO: 58002 - protein, 362 aa, unknown
  TnpB Polypeptide
MGRRTFVYRLYPAAPQAVEMQRQLDVARELYNACLEERRACYRSTGKSLNYYDQANQLKEIRQIRPDLASVNFSMLQAVCRRAHRSFENFYRRRKAGLPGGFPRFKGRDRWQSITFPSFNNGCSITGACLRLQGIGQVKVKLHRAVEGTIKTVALRRKAGKWYVCLSCEVADIALPATGQSVGIDVGLTYFLTTDTGDTGDTVANPRPLKTAQRRLRSLQRALARCKRDSARRAKVKRQVVSLHEKVANVRKDAHHKTAHTLVIQNDVIVHEDLRVRNMVKNHRLARAIHDAGWSQFITILTSKAESAGRDVIAVDPRGTSQTCLCGERVPKTLAERWHDCPACGLSLPRDQVSAWTCSGNS

SEQ ID NO: 58003 - protein, 395 aa, unknown
  TnpB Polypeptide
MLKSYKYRIYPNQEQKELMQKIFGQVRFVYNLGLETKITNYLGNKKNITSIDLSNQIKELKDTECPWLKESPSQSLQMSVRNLDNAYTNFFRGKGFPKFKNKYSKQSFQLPQGVWITNDNKQIYLPKLNLVDIDLHRILKGNIKTITVSKTVTNKYYVSILVENHQSIPEKKPIKVETSVGIDLGIKDLVITSDGMKFKNHDFFKSEMKNLRVEQRSLSRKKKGSNHYLKQKMVVALLHEHIRNQRQDYLHKISKYLVDNYDTICMEDLNVSGMVKNHNLSRAILDMGWNELKLMIEYKCEWYGKNISMIGRFDPSSKTCNVCGTINKNLKLSDREWTCMITSRTFFWKCNSHHDRDTNAAINIKNFGLRNKPSVTQSEWLHCVCGVETTPSLVS

SEQ ID NO: 58004 - protein, 483 aa, unknown
  TnpB Polypeptide
MVPFSSSGEPVGRYPTVFTIPGTESSKSSNIRTVRLRLLPNGAQERKLRRIADATARLWNELNYARLVQYRESGRVDFKGTEHEFYRKYKDRLGVNAGQVINLNNWMWNSFFELSRLYKQGELPKFYGKPSPPGFWKDKLLGKRELRILVRNDRYYLEPINGGEGYIVLKDWGLKIKYAGKIKWSGKQGMLVIKLEGNRWFAYVPIEVGEKPAKTNPRGYVRGIHEKIQIEKPKGGNKAFIDVGLNNLFAVVFNHTDVAILIKGSTIKSEYYYWKREVKTYQSIRDWLRNHGFESWRKYHTYYLHAVYKQHERLRHYYRTAIRFLAKTLWQMGIDEVFIGYPYMVSQNNGNEFNTNIWWFNKIIKWLSEVLQEYGIRLNVVNEYGTSKQCSICNMEHEKGRVKRGLYVCELTGIKINADLNAARNIAKKVGYEVPIPRKILSYIVTSNGVKPITPKEGVTPETPKNENLPFTTGRGSSGFLGS

SEQ ID NO: 58005 - protein, 368 aa, Paenibacillus sp.
MMLVNKAYKFRIYPNPEQEVLIAKTIGCCRYVFNHFLAKWKDTFETTGNGLNYLSCSSELPNLKKELPWLKEVDSIAIQSSVKNLADAFTRFFKKQNDAPCFKSKKNKVQAYTTKHTNGNIAVNGNRIKLPKLGVVRFAKSREIEGRIQSATIRRNPSGKYFVSLLVETEVQALPSTNLEVGIDVGLKDFAILSNGEVFVNPKFLRKMEQKLIREQRILSRRSKGSSNWNQQRVKVARIHERIANARTDYLQKISTQLVKNHDLIVIEDLQVSNMMKNHKLAKAISEVSWYQFRTLLEYKAKWYGRQVITVGKTFASSQLCSCCGFKNKDVKDLNLRQWTCTNCGTHHDRDYNASLNILAEGKRLLTV

SEQ ID NO: 58006 - protein, 366 aa, unknown
  TnpB Polypeptide
MEKGYKFRIYPNKTQQKLIAKTFGCVRYVYNYYLAKRIELYKTEKLTFGYSKCSADLTKLKQELFWLKEPDKCSLQNALKDLEIAYKNFFTGSGFPKFKSKKNRHRSYKTNYTNGNIAFLDGRIKLPKIGKVKFRDKQIPQGRIVNATISQTPSGKYYVSLCCTDTEEPVFVRTDKYIGIDLGLKEFAITSDGEKYENPKYLRSSLKKLAKLQRRMSRKTKDSQNWHKARIKVARLQEYIANQRKDSLQKLSSKLIKSCDVICVEDLQVKNMVKNHKLARSISDVSWSEFTRQLAYKAKWYGKELVKIDKFYPSSQMCHVCGYKNTAVKDLSLREWTCPECNTEHDRDINAAKNILNEGLRTLKIA

SEQ ID NO: 58007 - protein, 903 aa, Acidimicrobiaceae sp.
VTHLRSIAEPFVVVHPAAARVRTRLRVEVADEDVLRVVGGHLGSLAGKDLAQRCREGKLSAKERAESRRERKRAITAASSSRWAGAITRTSEDSFKLAWRNLVAERRTLASRIHRIERRLTIPVGERRGYLTRQESYEKRRRLQHLRARLAEVERRLVGGRVSVCRGGSRLAKARHNLDAAGLTEATWRERWEVERLFICVDGEASQLFGNLTVRWHPAQRWLELRLPKALEHLANRPGGRYRLSCPVEFPYRGEEVAAQAESGSVGYDVSFDPGKHRWYLDASWSISEGELRPSIDHLRSGPVIAVDLNHGHLAVCVLDPSGNPIGEPVTVPLELTGLKASTRDGRIRETISKVLALARAHGAGAVVIEDLDFVAWREEGRERSERRPSRGKRGKDFRRLVAGLPTGKFRDRLVQMATNNGVAVIAVDPAYTSRWGAEHWLDALEQISPEASGHHAAALVIGRRGLGHRARRRERCDSTRAVHRDERAADSVVSGDRRPHTEPEDREAGGQPRSRQRTLPGERAPSGDEATEDRSWSPAGQDFSSAQCLGTVALDHPDGVIAFLSEPIPLAAAIAEECNLRFHSRRTADLLTNKYRRRLALARARVPGPEFWPVPADTDPTARSHLAADLSYPVVLKPQAGSGSRSTYRVADAETLLRLLGEAQRRAEDMLVEDVLAEAHPRDAQRFGDVLMVDSLVSEGRIVHFVVAGHFIPAPPFRGTGSYIPSDLGDAETKAVLEATEAAAKALGIDNGFVNTDLILTPDGPRVLEVNGRIGGQIPTLLQLLGTSPLLPEAMRFAVCESDGDVVPLRSEHVAFCAMYQPPMEAQRLVELSGLDAVALLPGVTQVIPARRVGDAVDWRRGTISRLLTVYGVANDHDHLYELYRQIQRSVVTRYEMAEPVS

SEQ ID NO: 58008 - protein, 234 aa, Sporolactobacillus sp.
MRLFPDRQMGSTAILVEEDVKELPKTGKSVGVDLGLLDFAALSNRNKIPNPHFSKPFERRLRREKRKLSRRIVKAKTLVQKDPNKNWRDCSNLEKQRLKVAKLYAKVNNRKTDFLHKRSTELVKSHDLLVVEDLPVKRLVKNHHLAKSIHDVSWSRFTDMLKYKSKWYGKAFIKIDRFFASSQICSACGHKDGKKALAIREWDCPQCGTHHDRDINAAINILNEGRKRVAASKT

SEQ ID NO: 58009 - protein, 414 aa, Sporolactobacillus sp.
MKGKMSDNQKQAIKQRMKAVKEQFKYKSGFKIRVYPTMQQADIMRFNANTSRYIYNALVFREWSTKKHAKWFNNDKRLDTNMPSRAVAAYQSAWSLWRKVNHAGTPKPKRKSDYRLTYQTKNSYVAKARKAGYDIFNGAKVRVVDERHIQIPKVGILKASANNIKHLPHEKGIRIGITTIKQEPNGNWLVSFQVKSDHPFKEKLVKMNKTVGIDLNLSNFLTQSDGKVVENPHFYKRIKGQLAKVQRVVSRRATRAKKEKRALRISKNYQKIRLRLSELQNKIARQRLDFLHNVSTTLIKNHDVVVSEELRGKNMLKNHALALSISDVGWRTLINQLEYKAILYGRTYIKVDPAYTTKTCHVCSSINHEVKLGMEQWICPTCGTFQIRDHNAAINIEQKGLTLLRSGAVATSDS

SEQ ID NO: 58010 - protein, 382 aa, Rhodococcus sp.
VQLRYQYRVYPTPGQQNMLARSFGCARVVFNDALRARQDAYAAGVTLSDTDVQKQVVTAAKKTPQRVWLSEVASVVLIQACQDARRAYRNWFDSLTGKRKGRKVGAPRFRSRKDTRQAIRLTRNGFSIRGNRKLYIAKVGEVEVAWSRELPSVPSSVSIIKDAAGRYFASFVVETTDDPLPECDAEVGIDLGLTTFAVLSDGKVIESPKFFRQAERRLKKAQQALSRKDKGSKNRAKARIRVAKAYAKVTDARKDWAHKQSTAIVRENQAVFVEDLCVTGLARTRLAKSVHDAGWGMFTRMVEEKAARYGRVFVKVDRFYPSSQICSTCGVLDGPKPLSVREWQCAACGAVHDRDVNAAKNIHAAGRAEWLNACGGAVSLSV

SEQ ID NO: 58011 - protein, 204 aa, Streptomyces sp.
VLRPSGRRAGKKLKKAQRDLSRKAKGSANRAKARIKVARAHARTADAWREFHHQLSTKIIRENQAVAVEDLVVKGLARTRMAKSVHAAGWSTFIAMLEYKAARYGRTFIRIGRFEPTSRVCSACGVKDGPKPLSVRVWTCGACGAVLDRDINAAVNVAKTAGLAESACGARVRPGLVPAQREEAGTHPKPQPVTTGRQAGITAL

SEQ ID NO: 58012 - protein, 427 aa, Tolypothrix sp.
MYRAVKLRIYPTDEQESYLAQCFGNTRWLWNYMLNATTTAYKETGKGLSKVVMDKLLPGLKKEYEWLGLAYSQVLQRVTFNLSSAFVNFFEGRAKYPNFKSKHGLQSIQYPQNVKLMPEDSLIKFPGNLGIVKTVFHKELPNAKFTTVTISKNADGRYYASILFNQENQPIVAINEPHLLQAGEPVQHSVSAIGIDLGLKNFAITSDGSKYDLPKKRLAKLEKNRKRKQKKLARKKDKASKKCQKAKRLVAKVSSKIARVREDFLHKLSRQLAYENQVICVEDLAVKNMVRNPNLAKAISDQGWGMFLTMLKYKAERFGHTYQQINRFFPSSQLCSETLIPIPMLQNGYDSLGVRFVDCPHCQKQHDRDINAAVNIRNEGLRLLVLGTSTSAQGGDVRLKTSGRKKSTKSDAIPSELGSLHRTARSV

SEQ ID NO: 58013 - protein, 187 aa, Salmonella sp.
MDRLPLFDSVARPHSMARLVMERGSANRRKSRIQLAGVHERVANARADFQHKLSRTIVDENQAVIVETLKSANMMKNHHLARAIGDAGWCGFISKLEYKAAEKGVHVVKLDQWFASSKTCHCCGHKMPEMPLNKRIWQCPECGVEHDRDINAAINIERKGILELQAAGLVVSAYGGQRKSVTQTVAA

SEQ ID NO: 58014 - protein, 401 aa, Nitrosococcus sp.
MNTDMLKATKIRLYPTREQAEFLNRQFGSVRFCYNTGLRIMSHRYKRHGQSLSAKYDIKKLLPVAKKSRKYGWLKEADSVALAQACINLDKAFQRFFKEKKGYPRFKRKRGKQSSYHCMSVSCGESWVKVPKLGPIKARVHRSVEGKLKSITLSRTVTGKHYASLLYETEQPVPEPMTAIDATKVLGLDMGLSHLAIDSTGRKVANPRFIKQVQKNLKRKQQSLSRKQKGSSKRAKARLLVAKAHERVADARSDFQHKLSRQIVDDNQAVIVETLKVNNMMKNAKLAKHIGDASWHALIAKLAYKAKEQGKHLVKIDPWFASSKTCHVCQHKMDAMPLNIRSWACPTCHTRHDRDINAALNIQHQGILKLKAEGLSVSAHRGLRKSGMPPVAAVEVGSSVR

SEQ ID NO: 58015 - protein, 383 aa, unknown
  TnpB Polypeptide
MRAYKFRIYPSKKQEALLNHHLWLAKNLWNELLEDCKQMYEDFGYFPTKNTLQLMVKDYGLYSQTQQEIAHRIHDSVMRLFKLKKKGIKCGFPRFKSFDRMKSLHYPQHGTGFWLDRKLTVTPFGEISIKKHREIKGKIKTLTVKREASGKWFAVFSVDTPKEIPKENRGEAIGIDLGLKTFATLSNEMKIDNPRHFKRYEDRLAFIQRKFSKKKRRSSSRKRAKIRVAKLHEKIADCRKDFLHKITTKLVNDYSFIASERLASQEMVKENYGKQINDAGWNMFANMLAYKAEGAGCEVVFVDPKDTSKMCSRCGNIRDDLTLWDRTYNCPNCGLSTDRDLNSAVNILTKATPGQGGSNACNSLQKERDVALATSVKQEAHTF

SEQ ID NO: 58016 - protein, 381 aa, unknown
  TnpB Polypeptide
MRAYKFRIYPSKKQEELLNKHLWLTKNLWNELLEHCKQTYNDFGYFPTKNTLQLMVKNYGLYAQTQQEVAHRVYNSVMRVFKLKEKGVKCGFPRFKSFERMKSLSYPQNGFWLDKKLTVTPFGEISIKKHREITGRIKTLILKREPTGKWFAVFSVETQEEIPRENKGDVVGIDLGLKTFATISNGRTIRNPRHLEQYGDRLAFIQRKFSKKKKGSRSRKRAKVRVAKLHEKIVDTRRDFLHKISTQLVNDYSFIALEKLASKEMSEQNYGKQINDAGWNMFADMLAYKAEGAGCRVVFVNPEDTSKMCSRCGNIKNNLTLCDRVYSCPKCGLSTDRDLNAARNILIRATPGQGGSNACNSVMERDVALATSMKQEAHAYL

SEQ ID NO: 58017 - protein, 384 aa, unknown
  TnpB Polypeptide
MRAYNFRIYPSKTQEKEMNRHLWLCKELWNEMLAFTKEIYNNYQRFPTKRTLREIVKQSGLFSQVGQELVDRLIDALHRKIEMKKKGKKGGFPRFKSFDRMKSLHYPQCDKGFWLDKKLKVTPFGEIAIKKHREIKGRIKTLTLKRESSGKWFAIFTVETPKEIPKENRGEAIGIDLGLKTFATLSNGMKIENPRHFKKHEERLAFIERKFSRKKKGSTSRKKAKLKVATLHEKISNTRKDFLHKVTTRLVNNYSLLALEKLASQEMSEENYGKQINDAGWKMFANMLAYKAEGAGCRVVFVNPKDTSKMCSGCGNIRNDLTLGDRTYICPNCGLSVDRDLNAARNILTRATPGQGGSNACNSLHKERDVALATSVKQEALIYS

SEQ ID NO: 58018 - protein, 383 aa, unknown
  TnpB Polypeptide
MRAYKFRIYPSKKQDELLNHHLWLAKNLWNELLEECRQMYEDFGYFSTKNTLQLMVKGYGLYSQTQQEIAHRVYNSVMRVFILKKKGIKCGFPRFKSFERMKSLYYPQYETGFWLDEKLKVTPFGEIAVKKHREMKGKIKTLTLKRETSGKWFAIFTAEEEKQLPKENKGKAVGIDLGLKTFASLSNGMKIDNQRHFKKHEDRLAFIQRKFSFHKKRTKNYKKAKIRVAKLHEKIADCRRDFLHKISTELVNDYSFVALEKLASREMTEQNYGKSINDAGWNTFANMLAYKAEGAGCEVVFVDPKNTTKECSNCGAIVEKTLQDRIHNCPHCGLIIDRDLNAAHNILKRATPGQGGSNACNSLHKERDVAVATSMKQEAHAYS

SEQ ID NO: 58019 - protein, 306 aa, unknown
  TnpB Polypeptide
LNGLSLQQTLKNLDMAYQNFFRKIKKGNKNHGFPKFKSKKDNNKSYRTQCMYRDNSVPSIEIKENKIKLPKIGLVKFVKSREIIGQIKNVTVSQVPSGKYFISILCEIPEPIKLLKTDKGIGIDLGIKDFAITSEAEIIDNPKYYRKYEDKLAKLQRQLSKKQKGSNNRNKTRLKVARLHEKIANTRTDFLQKLSTRLINENQIICLEDLNIEGMVKNHNLAKSIADASWSSFVTMLNYKSIWYGREISVVDRYFPSSKLCNVCGWKYVNLDLSVRNWICPECGSNHNRDVNAAINIFKEGLRLIS

SEQ ID NO: 58020 - protein, 314 aa, unknown
  TnpB Polypeptide
MDQKERMEKSGLVPWKPSRLSGELFSLGLGDGFGIEGIAAGIASFGTMEGRRRESAFLGRRGQRKCGAKMPVLFNRRPAAMSTGKVCKGGKIKDDRDRYLGHRARLQRNGSQSARQHLRKASGRERRHVRHVNHCISRQIVDQARQHGIQVLVLENLAHIRERIMAGKRVRSRLNRWPFRQLQEMIRYKAMLSGISVLEVDPRYTSQTCSGCQAIGKRQKHRFTACEQFGLGAPGALFRFRDEAGDQAIGDGRTDPDFREHVLGVFVDGLQPDVDVVERGDQNIHDADDPEISLGVAAPVLAGIEVGQQAQQQN

SEQ ID NO: 58021 - protein, 401 aa, Nostoc sp.
MRISYQYKIKPTALQAEKIDKTLEMLRCQYNYLLAQRFDWYEMNRCPIDRCPLICHLPELKEQPNYYNQKASLTQLKINRPWYKEIHSQVLQEVPKKVELAFDRWLKGDVNGKKSGKPRFKGKGQYKIFTYTQFKHHHFVNNKITLSKIGEVKVIVHRPIPDGFDIKTVSVTKKSDGYYVTLSLDDKTVPIVKPDFNPANIVGIDVGLINFYVASDGSRIAAPKHIRKAERKLKSAQRKVSRRKKGSNRCKKAIQKLGKQHKKVADSRKDFHFKTAKHLLKKYDVVAIEKLNIKGLVKTRLAKSIHDAGWSQFVTILSNKAENAGLRVIAVNPNGTSQECSSCGHKVKKLLSQRMHNCPVCKTSLCRDLNAAINIKNRGAHGLKAQLMSSREESLRSPHSP

SEQ ID NO: 58022 - protein, 423 aa, Streptomyces sp.
MSRFRMYPTSEQAGIMLGHCAHARYVWNLAVEQHSHWRRGKRAAPGFAEQCRQLTEARRENEWLREGNADVMQQALKDFAQAKNARFASGFGEPTWRKRFQHEGFRVIGTDRVPEFEPDGSAKLNAKTGKQVMGRSVAVQKLNRRWAQVKVPGCGWVRFRLTRTGLPDAKTFRVTFRNNQWHIAFAVIPVPVPAPGTGEVIGIDRGVTITAVLSDGRRLNCPQLTVKERAQIRKHQRRAARAPKGSERKTAEYAKAARLKAREADRRKDWCEKTSTMLARTHGVIRFEKLNIKNMTARAKPKARPGAVRHVPEEWPGCQSRTESGHPRPRLGPAAPAHRTQGPGPGRGRTRPLHQSAVQCLRMDREEVAQEPSRLRLRVLRVHLQRRRERSSQCRGRTGRDPPPPAYCRCRRGDSGHQPFERP

SEQ ID NO: 58023 - protein, 331 aa, Sulfolobus sp.
LNGTWKKYYEKYKKVLGVNAQAVLQKKNNEAWSSFFSLLKNKDKLPLFMNHVSPPGYWKEDGKRKLILVVRQDRYKVDEERHALILKDWKMEIPFSGRLRWSGVQGRLEIHIINNRFYAYIPVDVGRVVAKRSGKLVKDSLIIHGERGKIQISSPKGNKVASVDLGINMLATVIVDDGTVLFYRGSVVKSDYFYFQKKIAELDRLKSEAEKIQEVEAREEVLEERKRLFNKLYRRLLHYYRTLASHLAKALWNLGVSTVYLGYPYFISQDKGNKFTVNIWSYRKLIEAIMNKLHEYGIKTFLVVEYNTSRYCAYHDVEVVRKPRGLTSSPP

SEQ ID NO: 58024 - protein, 409 aa, unknown
  TnpB Polypeptide
MLKAFHYRLMPTQSQEVLLNKHFGCVRFVYNWALETKNKAYVTEKKSLTSFDLITRLPDLKKENEWLGEVNSQALQMSIRNLDNAFTNFFRRVKEKAKEVGFPKFKTRKNRQSFQCPQKVKVDFENNRISLPKIPNIKAVLSRQFVGKVKTVTISKTKANRYFASILIDNGIELPKKAPITEATTVGIDLGLTHFVILSTGKKITNQRFNQRAKDKIANLQRKMAKQKLMNKGEHTRNREKTRVKLARAYEGIENQRTDFLHKLSSKIVRENQTICIEDLAVKNMQKNHCLAGSIASVAWGKFVTFLEYKCDWYGKNFIRIGRFEPSTKICSKCGCHNAWLTLKDREWICPECGAKHDRDINAAVNIKTFALSKQNLLREIGLDKPESTLQEIEPLLSREKLVASSVNE

SEQ ID NO: 58025 - protein, 406 aa, Vulcanisaeta sp.
MVRVVPRGEYMLTLKAQGVLIEGSLEELREELYLTRRAVQYIVDCLWELDKLPTINQAHQMFYRMLRQQGFRAHQAKQIYKYALTIVKSARENNGGKPLLKKLTVRLDEYDARVDLENQLIIVKLRNRVFKIKLLHRREYTEKFVGRKWYEVIISIDRQRRIWISIPFRWGYDPYRPRSIISIDTNLRKIVIYDGGRIRRIDTRFTEALKLKHLAECVQKRHGYAWRRNRKWLDIIRALHGRGSNIVIDWCRKFAKYIVLKARKTRSAIVLELLGKLWFNSSQKSPSLADKLSRFAYRRLQLAIITKAMEYNVPIVFVNPRDTSSTCPRCGAKLEYIHRLAVCRKCGFIADRDTVGAVNIYLKALKTLAPCLGSRGTHPMTDETRAKGGTQKDEPMTTHTHSYTNI

SEQ ID NO: 58026 - protein, 322 aa, unknown
  TnpB Polypeptide
VDFRGTWDKYYKKYKNALGVNAQAVLQKNNEAWSSFFSLLKLKKENKLQPFMKRVNPLKYWKDGETRERKLILVVRQDRYAVDEQNHKPILKDFNMEIRFAGRLKWYGKQGRLEIHYDETRNAWYAFIPVEVGTEETKNGKRSKHIVKGERKNIQVESPKGNKVASIDLGINVLASVVVNDGTCLLYKGVRTKEDYFYFQKKTAQVQSLADNMKNIGEYEAYAGLLGEKRRLFRKLTRRLLHLYRNLASHLLNELHELGVSTIYMGYPFNIAQDRGNKFTVNVWSYRRLMDVIELKAQEYGMRVFEVVEYDASKYCAFTMLK

SEQ ID NO: 58027 - protein, 527 aa, Proteobacteria sp.
MWSGVRSIAVPCWSPEWIPGFKRLSRASVLHAVQSFSNWESCRNTCTCLLKSIHSTVSTAWCVRSRGVLHGCCAWNTPDCVHDCPRCGRTRIASPLLGALLLKWSSSTSKTSNGCRMIQRQLTLRLNNRQEAQLLTWLFQLTGVWNWAIRTIEHDGHDSIYYTPEAFHTLLAEHGTKLGIPSHTLQGMLHMAHTAWQRCDKKLAKKPTLKGRRNTLTSLPFPDPFKAPDGTRLHVPGRGPRRFHSQDIPKGRLKSGRIVRRASGWYLCLFIDAQPQDILHVADGQIGMDPGFSSLLTFSTGKKMPHPHELRQTAHRLAQAQRGHRTRLTARLHERLANQRKDRNHQLSRRLVAEHQTLVWSKDNDQGLARSFGKSVASAAHAQLRTLLAYKCTASGRQYLAVPSRFSTKTCSACGSLSGPTGYAGLSVRQWQCAACGAAHDRDVHAAINTLHAGVGTTHERRRKTTPGIPWLEPWGGSNFHPWSLASARRLPTASLCRGVCRLAVLAAAPNNFCSLLHTVPMRRRGM

SEQ ID NO: 58028 - protein, 510 aa, unknown
  TnpB Polypeptide
MAKATKTIKQALVYKTAHAPYFAATKTLFNQVAAFYFEVIQAHPGILDLSSKEALTALETLTHATKANPFSVMPLSSVITADIPAMFRRAAIHAALGSAHSFYTHLEKWHKQKEKAVARGKKFSIRPPVPPRSWNESVTLYAGQWKERMPKSIMLKVWTGSSWAWIKCGLQGRDLPDEWDQISPTLVQDGSHCKLHTALQKKFAGPAKVEHQLTTNAETRICSIDLNITKHLAVCTILTVEGTVVATRFIGGGKELHGLRKRQLGRVARNRSKTGIIAEGEQDNAALWAKIRALDEDCAHQISHRIIAFAKAHQASILVFEHLGHFKPQKGKYSKRGNEKRSYWLRGKIFKYTKYKAYNEGGLITCRVSPRNTSRECARCGSLVARYDAAKLAEGYTPGAPLVFCAHCNMRGNADRNASIVIGKRLLARYQTPSSQTTSKEKPQAVLATDRPVKTGGDLCSQDAESRGRLSTDPVRHGTGVEQGTAHVSVQRMVRAETGIPQQLRLFNES

SEQ ID NO: 58029 - protein, 416 aa, Streptomyces sp.
MVIEPKRGVGRVIRAYKFLMRPTVRQDQALSEMLRDHCGLYNGALQERRDAYRHPSKTGVKYGMQSAQLKDIRAFDPERHGRWSFSSQQATLRRLDRAFTAFFRRIKSGETPGYPRFRGVSWFDTVDFPKDGDGCRWDSTPHGPVTRVRFQGVGHIRVNQHRAVVGKVKTVSVKREGRKWFVVLTAEQDQPEPLPPAGGSVVGIDMGIANFLADSHGEFVPSPRHGRRAAAKLEAAQRALARFPRVRRDKRTANHRRAVEKVAGLHGKVRRQRLDHAHKTALDLVREHDFIAHEDLKIRNMVKSVEPKPDPENVGVFLPNGAAAKTGLNRSISDAGWGVFLTILTSKAESAGREVIAVDPRNTSRQCPECGHTAKENRPTQDKFHCVSCGHSAHADTVGAVNVLRAGLVRRDANPA

SEQ ID NO: 58030 - protein, 603 aa, unknown
  TnpB Polypeptide
MRTVEFKLSLNQSQQAQVDNWLNVQRWTWNRGLHLLEEFASFMAWDQGAKAWVACCPVPWQYYKLEVKSQRPEVEEGEDQLSVRSSEGQFNPEPQPPASYLVAFTRLAQTKPYRMSCSISQTYRQPELASPTYFGLLYYFAQKNHEDKPWFCEVPSKFVAGTLKALADAWSEYKAGKRKRPRSKRYKDKIKTLINNNSKSVKISGKQILLPKLGKVTVKTLDKRWDSSVPIATLKIVKEPSGYYLHLTGDPPEKRFKSSNKAVGISLGYRNLLTTDGGKVVEPPAYYQKMEKRLVQLQRKLSRQQNLCPITTYNPELGEHLLSCPIHPHKAANKAKTQQKIARQHEKIRRARKAFNQKLSTKLVREYGGIATAKSELQKITRRPKPIVNKEGTGYDKNGALIKSQFNKLLLTKGLGQLTTLIEQKAAVHRREYIEIAPKNLPDEPRQRAEHYSKRLRLPRAVHLASFHQGRYRAWPWELTLGESPVTPNQEATQVAALREAETTFKSSSESTNPRGLAGVPQATSLPGALEHQQTELLSPTRGKSTHADSQRQSETGPSLTASSKSEVAKGQKKARRHRAVQPTSEHTSGRRKRRSGKENDAN

SEQ ID NO: 58031 - protein, 351 aa, unknown
  TnpB Polypeptide
MRTLRVRIKDKHAKALDAMACEVNFVWNFVNELSCKHTQRTGKFFSAYDMAKYTAGASKEGLRVHSQTVQGVTEEYVIRRKQFKKAKLRWRVSRGSRKSLGWIPFKVGAVTYKNGQLRYAGQFFSLWDSYGLADYKLRSGSFSQDARGRWYANLCVEIDEQKSEGTSSVGIDLGLKDFATLSTGEKIEAQRLYRGAEQWLAIAQRANRKQRVKAIHAQIANRRKDFLHKLSTRLVKEHGAIFVGNVNACGLAKTRMAKSVLDAGWSTFRTMLQYKSDHAGVLFEEVNEAYSTQTCSSCGCLPESRPRGIAGLGIREWACMECGDVHDRDTNAAKNILVAGRRHLAAGIPVL

SEQ ID NO: 58032 - protein, 154 aa, unknown
  TnpB Polypeptide
VKKEAAVNKKQQKKVARIHTHIAHQRKDFLHKESRKITNFYDLVCIESLNMKEMSQDSRFGKSVHDNGWGMFTNYLSYKLERAGKKLIRIDPWYPSSKRCSCCGKIKKDLKLDDRIYDCECGNRMNRDENAAVNICREGLRMAGNEMDAERKIS

SEQ ID NO: 58033 - protein, 387 aa, unknown
  TnpB Polypeptide
MERLLKSFKTEINPSEEQRVRICKTIGTCRFIYNFYLSHNKELYDKGEKFLSSNKFRLWLNNEFLPDNPDKMWIKEAYSKAVTQAVNHAQTAFKKFFDHKAAFPRFKKKGRSDVKMYFVRNNPKDCRCERHRINIPSLGWVHIKEKGYIPTTKDGYIIKSGTVSMKVGRFYVSALVEVPDSRVAESFHEGIGIDLGLKEFAVVSNGRSYKNINRSARIRKLEKQLIREQRRLSRKYEDSKRGETTQKVNIQKQKRKVQKLHHRIHNIRTDYMNKIIAEIVKTKPSYITIEDLNVKGMMKNQHLSKAVASQKFYEFRRKLQAKCTEKGIELRIADRWYPSSKKCHCCGCIKKELKLSDRIYRCGCGYVEDRDFNAALNLRDARTYKTA

SEQ ID NO: 58034 - protein, 384 aa, unknown
  TnpB Polypeptide
VQALKSIWQYYVPTRDVLGLLETFKKMVNDSIRVGLANNATSLRRLSLLSYNQLAHYDSPSYYKLCAISRAAGMLAARKKSLKRGFAAREPYAVKPQLLSCYGFKIKNGGLEIPITRGRRLSIPLTKHTQEAISQAIATVRSFTLTRTRLILCIAHDAPKIECVSMVGVDCNLRNLTVGNDDQTRYYDTSETMRIAKVTTRIVSSLKRNDVRIRESVASKYGRRRSAKTRHVLHNATKEIVTVAVQKRTAIVLENIEGIRRLYRKGNGQGRKYRGRMNGWSFGEAQRQIEYKARWAGLPIIRLSRRETRGSSVTCPRCGERLQSDKQLERKLWCGKCRIVMDRDMVAAINLARRGRVRFARSRPPIAEAQGGAGEAMKGTRRLR

SEQ ID NO: 58035 - protein, 514 aa, Clostridiales sp.
MQSLVQEIATEKGFTVHLFEVGEKDHVHCFISAPPKVSVSYMVKMLKGITARKLFMLHPELKKSLWKGALWNHSYYVESIGSVSEENIRRYIEKQQNAYYERRRTHMLLTKKHVFKNDTTNMNILKHMGYSAYKLWNVGNYEKRNYKKLGMEKYPNWYDQKKRLKNNFFYKNLPSQTAQDVLQRLEEGWKSFFKLKKTGGVINPKPPRFKKDVIDITFLKDAIKQDGSTTRLTISKQLKLYLKSIDLDATFIYLETSRFSDIKIKELQIKFINETTFVAIAVYETEDVAQKEDNGRYLSIDLGIKNTFTCYDSTGNSFILKGFLEATHYCDKKISYYQRISASEQIAQGIQYPKPTRRVLSLYKKRKNKVNDYLHKATRYIAEYCHANEINTVVIGDIKGIRKGKNIGRNNQQLHALPYDKVYALLTYKLRRYGITIKKQNEAYSSKCSPNSKDVTKKCASGANRKRRGLYVDGKDIYNADSVGAYNILRLYLKRMKKDSLDYGNLSSPIKVTV

SEQ ID NO: 58036 - protein, 277 aa, Dehalococcoidia sp.
MAKDGKLYLSKVGDIKIKLHRPIKGQIKTLTITKEADGWYACFSVEVTVRKTAPKLVRSAVGVDVGLESFATLSDGTQIENPRWFRKAEKKLALHQRNLSRKQLKSLNRDKQRDKVAKLHKKTANQRKDFQHKVSRQLVEGNDLIAYEDLNVRGMVKNRHLAKSISDAGWRQFIAFVCYKAEEAGSMAVAVNPFSTSIDCSGCGFPVEKTLAQRIHKCPNCGLEIPRDWNAALNIRKLGLLSLPQELRDVKPVETGTSAPCSKLWSGKQEATDFNRW

SEQ ID NO: 58037 - protein, 345 aa, Kocuria sp.
VAHLGLLRTAPAGLDRPGTRLPQLLRLPHRQAQGRPDRRAAVSVTTWATPVGPLHRQCQVPRVRDRARRRSSRPAQGRPGALCALPPLAGEAVVGVGDPGSRRPLLLLLRRGRPSTVTASSVRRAAGVDMGLTDVAAVVRSDGVREKIVNPKWHKCAGDALARAQRALSRKQKGSKNREKARHRVAVLHRRVREARRDHHHKLARRLIDENQVVAVEGLDVAALMRTRVAKSVQDAGWGIFVRLLHEKAVEQHREVVVDRWQPTSQVCAVCGTKDGRKPLHVRVWTCRSCSAVLDRDFNAAVNIMIAAGLAETLNACGGDVRRTLACADPDEAGTHRTDRLRATA

SEQ ID NO: 58038 - protein, 523 aa, Micromonospora sp.
VTRCGVRWRGGGVSGCFRSSRLMTGSVMISLPHRPARARPLTVVASLQWVACMSAAVVMVVVVRVVQAYRFALDLTPVQQRAVLAHAGAARVAHNWALARVKAVMDQRAAERSYGVPDDELTPTVGWTLPALRRAWNASKEGAAPWWRECSKEAFNTGLDALARGLKAWADSRSGKRAGRPVGFPRFKSRRRATPSVRFTTGTIRVEPDRKHVVLPRLGRLKLHESARKLARRLDNGTARIMSATVRRDRTRWHVSFTVEVDRAERTPARPGSTVGVDVGIRHLAVLSSGELVLNPRHLDEAQRRLRILGRRLSRRQGPDRRTGQRPSNRWQHAQARLGRAHARVANLRSDGLHQLTTRMAREHGIIVVEDLHVSGMLRNRRLARRIADAGFAELRRQLAYKTEWNGGRLIVADRWYPSSKTCSRCGTVKTKLALSERTYTCTTCGLSLDRDLNAAYNLAALAATCDTAGSGPVAGRGANHKTPLAGQVAVKRQPGTAPAGQTGTVPSQGGTTQQTLTRASER

SEQ ID NO: 58039 - protein, 300 aa, unknown
  TnpB Polypeptide
LRGFNPLSITKQSMCLTVETEFTKSAFRYKDGQVYLAKCSEPLPIRWSRQLPAYSSPSTITVKLEPSGRWTVSLLVDDQTVKPLPPSNAAIGIDAGITSLITTSAGEKIANPKHWNKRYKKLRRAQKALSRKQKDSRNRDKARLKVAKIHAQIRDSRQDFLHKLTTRLVRENQTIVAESLAVKNMVKNPKLAKAISDAGWGELTRQLAYKALWYGRNFVQLDRWFPGFKTCFKCGHIAEKLPLNVREWDCPKCNTHHDRDENAAINHLAAGLAVLVCGATVRPEESKSRKAGAMKQKPKS

SEQ ID NO: 58040 - protein, 371 aa, Clostridium sp.
MILAKKVRIIPNIEQEQQLWKSVGTARFIYNWTLARQQENYKNGCKFINDGDLRKEITLMKQTEEYCWLNEVSNNVAKQAVKDACNAYKRFFKGLADKPRFKSRRKSKPSFYNDNIKLKVKANMVLIEKVGWVKTAEQISMKVKHTNPRVSFDGKYWYLSAGIEKENPILELTDESIGIDVGIKDLAICSNGMTFKNINKTRLVKKLEKRLRRLQRRVSRKYELNKEGKKFVKTSNIIKLEKQIKLLYRRLANIRNNYLHQATIKIVKAKPSRVVMETLNIKGMMKNRHLSKSIAKQGLYEFKRQLQYKCQFYRIEFVEADKWYPSSKTCSKCGHVKSKLLLSKRTYICEECGAIIDRDFNASINLSRYSA

SEQ ID NO: 58041 - protein, 487 aa, unknown
  TnpB Polypeptide
MIECYDGEISSSFYLQLYTHVFNCYQNKFDAIQRKLRFEVNEFNGFEFYKRDSQNHKKGDLKRVLIKKKQTPLSICLTYLARYGTENIIDYIKDNLDKCDDKKREFYHNILRCCNKFGFERLYKLALSKRKRIIECYSVHPIEFKSLSFGGRSRKKRIVEFNKRFGSKINSFISLSGFNRKSFDIPVKYHKGYHGNMRDYQKSSNNHDYVITFDERNHQVKVNICKGGERHIPEPNGKTVGIDVNCKHNLFSLSDETTYDYNRKLVNDYCKLLRDIDRLKSKDKNYTIGKRKQCRLNKLKEKIVKFEQQTISTMCKNLQTQGFGHIVMENLDNSFGKCYIKDLENENVNYNRKVSFIGLSSLKQLVEHIARKYNIAVSTVHASYTSKMCPICGCIDSGNRLTQETFECVECGHKDNADFNAAKNIRNRVLVTVLRDKLLKQLDNGAYEPKSRKREKVKEVLLSFRIDLQEFVRSECIESSVTTFDYI

SEQ ID NO: 58042 - protein, 415 aa, unknown
  TnpB Polypeptide
MPMLTIKAQIHATPETERVLRDAMFCATKVYNGLMWHLRRQQEQTGRVSVRRSNLNRILKTLPRAKGYYSMSAQLTRDEVRQAWRSFFALRKNGRTKHNAPGFRPRGFLSPLRYVQSGFTVAGDRVTLSLGKWREDGVRQITFRISHRPDLKYERVRELSITYDKSSERLEARLVVEVLPRENHGEGRVAVDVGETVLLAAVFADGVALLYSGRLIKAIRRYWQKVRAKVKPPSRDAPHRSRRYSEIAHKERRQVEHLLHIVTAHFIRECIRRGVKEIAIGDLRNIRQEIAYGDRLNQRLHNWAYRKVINMLRYKAALAGIVVHADVDERGTSRTCHACGSERKSNRIHRGFYRCGCGWTAQADVNGALNIYERAFQVSPTKGSSGRVARPMVLSFQLGWHTVHEPERKHLRASA

SEQ ID NO: 58043 - protein, 719 aa, Streptomyces sp.
MATAPCTAFGGVVEGSGERVGGRLLYQRVSFLAELCGGLTRQLVASRWDEDSLDLLAAGVDGQGESLPSKGWMALRRLGWAQAAAPAEGVYVSDRVRRASQEYAARTLRLALHRRALVAAILATWPGDPHRRSEAEWTALRAALPAGVSKAEIRNRSRQVSAYVREHGRLPAGLCELEGPPEVAGLVVLAAMDRQQVTLVRVGEATARLRVKLPLCPAPASGRDWAWHVIDIRLPGTVGADAVLHTPTLRPTRSGRIAVDLPHSQPAPPVKSTGHRGAVGFDWGVNTLLTGTVGRLSGQGPESRVVTDGRPLIFDATAISAKLHRLRGHREHLAAKRDHCQRLAEGLGAPHLAWAELLDKAAVLEVEHQRVCARIRHLNQALAWSAARWAVDQTAALGASVIYLEDLATLEARGRRRGNARLSGQVRGTVADAIRHLAAKAGIAVATVPARGTSAQCPGCLAPLNHHPAPNRLDERGWSWAHCTRCGLSMDRDHAAARRIVSRGLLAQAHTVTERATGTRTIRTTVDGTVRPVRRPKKTTRRLRRARQAAMAPPRPSGPKTTQSKGRPTPSRPTATHQRRPPHAPGQPATATTAPTTTAVAKAGAVVGAVAVKISRRMPDVRTVPATTPQGVVQRPAGHDTQTPALPGPVSGHGVPTPPCTEEPHPNTAGRLSRGTCRRRTDAAERTGFHHLHATEVHTLTPRFGPHPGDRRPRRARKA

SEQ ID NO: 58044 - protein, 486 aa, Streptomyces sp.
VKKFRPQPGFVVQAFRFALDPNAAQEAALRSHCGGARTAYNWAVGWVEASWWQRKAEESYGIPATELTQWRPWSLPVLRKAFNQAKTTDPRFAARWQGNSKEAYNTGLANASAAFDNYAKSKNGKRRGKRMGTPRFKSKRKARLACRFTTGTIRVDTDGRHVTLPRLGTICVHEPTSALLARVEAGTARILSATVRHERGRWFVSFQAEVKRDLERVARPDVAVGIDLGVKSLAVMADSTGEIRTVANPGHYDAARKQLRRACRTVSRRQGPDRRTGQKPSKRWEKANAQRNKLHHRVANLRQDALHKITTQVAAEYGTIVVEDLNVAGMLRNRRLARRIADAGFGEIRRQLNYKTRRRHATRLVVADRWYPSSKTCSGCGAVKAKLPLHVRTYACDACGLVIDRDDNAALNLAALAAAARTTGTGVAGDQDTPKPVSKPRGADQKTRATRTRRKASAGRAGGATLPHQRQTEARDRTQAEAFTLW

SEQ ID NO: 58045 - protein, 366 aa, Streptomyces sp.
VERLPARPRGSARGGAAVRDVGRAVPPSHHPGQTHRRARLARRGVGGRPAAVPAGPGHRLQELLRQPQGQAAGPQGGAAPVQVEEGHPAVDPPEHQRLLPAQRRHGVRGQGRQPQGQVVAPASGRTHVSDRHQGQLRPVLPQLRRGHRAGHPPRDGSRVRYRPRPVRLRRPVRRQEDRQSPLPARAEKKLRRLQRELSRKARGSKNRAKARIKVARQHARVADRRRDFHHKASTQIIRDNQAVYVEDLAVSGLGAPGSPSRCTTRDGPRSRHAGVQGGQTRPHLRQGGPRLPLLPGLLGLRVQGRPQTPPRPKVDVQGVWHRPRPRPQRSTQRPSRRTPPPRRRTGGDTKRLWSAGKTGTRARTAR

SEQ ID NO: 58046 - protein, 467 aa, Streptomyces sp.
LRLRAPPSGLLSGGPPASAGGGIESLGRSRAAAEHAVLSVGAGSVSTPALVRGNCGGGGVGVRRAYRFLLRPTVRQERALAEMLRDHCSLYNGALQERRDAYRHSSRTSVRYGDQSAQLREIRAFDPERQGRWSFSSQQATLRRLDRAFQAFFRRVKAGDTPGYPRFKGVGHFDTVTFPRDGDGCRWNSTPHDTQTRVRLQGVGHVRVHRHRPVKGRVKTVSVKREGRRWYVILACDEVPAEPLPPTGSRVGIDLGTVHFLTDSDGHHVANPGFLGKAAGELVAARHHLATFPKRTRRRTKKHRAAARKVARLHAKIRRRRLDHHHKQALALVREHDVIGHERLNTAGMTRAPAPRPDPDRDGAFLANGAAAKAGLNRMILDAGWGQFLKILADKAESAGRRVIPVDARNTSRTCPPEIGGCGHVAKENRVTQAKFTCVNCGLVAHADHVGALNVKHRAGLVLCAGA

SEQ ID NO: 58047 - protein, 434 aa, Streptomyces sp.
VQLRYNYWAYPDAAQRRALARAFGCARVVWNDCLRDREEAHAAGLPYVTSAELSRRRITRAKRTAERAWLAEVSAVVLQQSLRDLDTAYKNFFDSLKGKRQGRKVGPPRYKSKKDTRQSIRLNTNAFSLHNDGTVYVAKVGNLKVKWSRRLPAAPTSLTVTKDSCGRCFLSFVVDTEPDILPETEAESGIDLGLSAFAVLSDGRKIDSPRFLRGRRRSSGVFSGSCPARPGDRRTGPRPASKSHASTPGWPTGAGTSTTRHPHRSFATTKRCMWKTSRCPVSAHPARQVGARRGMVRVRGMLEYKAVKHGRTFARVDRAFPSSQVCSACGFRDGPKPLHVRKWTCRACGTVHDRDHNAARNVLREGRRLLAAGRAETPNACGAPVRRAPVPAQRGEAGSPRKGLTTQAGIPGLQARRHVKVTHCSATSDRRAPR

SEQ ID NO: 58048 - protein, 396 aa, Streptomyces sp.
MTQQVKRAFKYRFYPTGKQAAELSRTFGCVRLVYNKALEERTRAWYGEQRRVSYVQSSAALTEWKKTEELAFLTEVSSVPLQQALRHLQTAFGNFFARRAKYPRYKSKKKSRASAEYTRSGFKWRDGQLFLAKMAEPLAIRWSRPLPAGSVPTTVTVSKDAAGRWFVSLLCEDTIEPLPATSSAVGIDAGLTSLVTLSTGEKVTNPKHERKDRVRLAKAQRELSRKAKGSNNREKARRKVARVHARITDRRRDFLHKLTTRLVRENQTVVIEDLTVRNLVKNHSLARAISDAAWTDMRTMLEYKAAWYGRELVVVDRWFPSSKLCGACGTIAEKMPLNVREWTCDCGTTHDRDVNAARNLKAAGLAVSACGGGVRPGRENSRTGQLPAKQEALTAK

SEQ ID NO: 58049 - protein, 565 aa, Streptomyces sp.
VPTALHGRLNGPRPSGRLALSQDVPPEAGVPRDQALDTTDDLGTACGRVRDLPGVRGDHAQFAQVAECRIPVPFGDVVAVRRGEVAVVLNPVAEASAVDLDGDEVPSDLLSRGPPASAGGGIESSGRSRAAAEHAALSVGAGSVSTPALVRGHGGGGVGVRRAYKFLLRPTVRQERALAEMVRDHCSLYNGALQERRDAYRHSSRTSVRYGEQSAQLKEIRAFDPERQGRWSFSSQQATLRRLDRAFQAFFRRVRAGGAPGYPRFKGVGHFDTVTFPRDGDGCRWDSTPHDAQTRVRLQGVGHVRVHRHRSVRGRVKTVSVKREGRRWYVILACDEVPAEPLPPTGSRVGIDLGTVHFLTDSSGRHVENPKFLEASAGELAAAQRHLATFPRRTRRRTKKHRAAARKVAKLHAKIRRRRLDHHHKAALDLVREHDVIGHERLSTAGMTKVPAPRPDPEHEGAFLANGAAAKAGLNRSILDAGWGQFLRILADKAESAGRRVIPVDARNTSRTCPPEIGGCGHVAKENRVTQAKFACVNCGLVAHADHVGALNVKHRAGLVLCAGA

SEQ ID NO: 58050 - protein, 417 aa, Streptomyces sp.
VGVRRAYKFLLRPTIRQERALVEMLRDHCSLYNGALQERRDAWRHRSRTSVRYGDQSAQLREIRAFDPERQGRWSFSSQQATLRRLDRAFQAFFRRVKAGDRPGYPRFKGVGHFDTVTFPRDGDGCRWDSTPHATRTRVRLQGVGHVRVHQHRPVRGRVKTVSVEREGRRWYVVLACEEVPAEPLPPTGSTVGIDLGTVHFYTDSDGHHAPNPGFLDEAAGELAVAQRHLATFPRRTWRRTKKHRAAARKVARLHAKIRRRRLDHHHKAALDLVREHDVIGHERLNTAGMTRAPAPRPDPEHDGAFLANGAAAKAGLNRSILDAGWGQFLRILADKAASAGRRVIPVDARNTPPGFAGGTPTRTCPPAIGGCGHVAKENRVTQAKFTCVNCGLVAHADHVGALNVKHRAGLVLCDGA

SEQ ID NO: 58051 - protein, 396 aa, Streptomyces sp.
VTQQVKRAFKYRFHPTDEQAAELSRTFGCVRLVYNKALEERTRAWYGEQRRVSYVQSSAALTEWKRTEELAFLAEVSSVPLQQALRHLQTAFGSFFAKRAKYPRFKSRKKSRQSAEYTRSGFTWRDGRLTLAKMAAPLDIRWSRPLPEGAAPTTVTVSRDAAGRWFVSLLCDDVITPAPATTAAVGIDAGLTSLVTLSTGEKIANPKHERKDRAKLARAQRELSRKAKGSNNREKARRKVARVHARITDRRRDFLHKLTTRLVRENQTVVIEDLTVRNLARNHSLARAISDASWTELRSMLEYKCAWYGRELVVVDRWFPSSKLCGACGTVAASLPLNVREWTCDCGALHDRDINAARNLKAAGLAVSACGGGVRPQRESSRTGQLPAKQEALTAK

SEQ ID NO: 58052 - protein, 398 aa, Caldanaerobacter sp.
LKIIVKRVEQIQINKNHELWTYCDKICFAAKNLYNYANYITRQEFINNKKWIRYRDLNKMLKEHETYKNLPAQTAQQTLRLLDRNWKSFFRAIKEWEKDKSKFNGKPNLPKYKKKNGRSVAILTNQQCKIKDGYLTFPKTDLRLKTRITGNLREVRIIPKGSIYVIEIVYEKEIAEVKRPPKKIAGMDLGLNNFVTLVNNIGIKPIVINGKVIKSINQYYNKKKAELMNYVGDRGTNNRIKKLSIKRDNKIKDLMHKISRFIVNFCKQYNIDTLVVGYNPKWKQEIELGKINNQNFVSIPYYQFINMLKYKCEEEGINLILVEESYTSGCSFLDGEEVSKENYDPSRRIKRGLFRSNKGILINADVNSAYNIIRKVFPEAFAEGIEGVGLHPVRLNVA

SEQ ID NO: 58053 - protein, 424 aa, Cyanobacteria sp.
MRLAYQYKLLPSTLQLATMNRWLDMLRHQYNWMLADRFDWWEMNWCPVNACPLICSIAEPREQPEYYGQKRSLVTLKQDRPWYKEIHSQVLQDMVKRVKLAFDRYIKGDCNGKRSGKPRFKSANRYRSFTYPQASIDWIDGNKIELPKIGAVKVVWHRELPQGFEVKSAILSRKADGWYITLSLQDDSVPEQTIDVAPTWDNSIGVDMGLEHFAADSEGELIDYPRFLRQAESKLAKLHRKRDARPKGSIARKKLNQRIARLHQKIARQRHQFHCETANQLLSKADVIFVEDLSVSNMTKRCKPKQDEDGTFLPNGQAAKSGLNKSFADAGISQFVNQILPFKAERAGKRTMKVDPTGTSQHCCVCLNRVPKELSDRWHFCLECKAEMPRDTNSGVLIKKVGLGLASLKKAQRTSVRREARAVA

SEQ ID NO: 58054 - protein, 420 aa, unknown
  TnpB Polypeptide
MKINKAFKFRIYSNSQQKQFLAQSFGCARFVYNRFLRQRIDYYVANAKGLNYFDNSAALTQLKKESEFEWLKDVNSQSIQQTLRNLDVAYNNFFNKKAKFPNFKKKSNKQSFNVPQHFSIHDNMLDIPKCKRIKIKLYRDIEGTIKSITISKTPSGKYFASVLCELEIPEPIYSGGEIGIDYGVKAFITTSDVKSIDSPKFLRKSEKRLNQLSRSFSRKQPSVLPLHGGTWNAKNRYKAQKQLARQHEKVSNQRQDFLNKTSKQLVSDNQAIYIESLAIRNMVKLHTLAKSISDSGWNTFVNMLKYKGQWYGCRIIEIDRWFPSSKRCHVCGYIKDNLALSDRSWLCPECNTNHDRDVNTAINILTFGRAGIARTILPSLCSSVARWNVIGETRNACGEGSSFQISSEISPSLKQEAHEL

SEQ ID NO: 58055 - protein, 398 aa, unknown
  TnpB Polypeptide
MLFTVQVRYRYRLYPSPGQQQALARVFGCARVVYNDCLRIRDEAYEAGEKISGAEVQRRVITLAKLTPDREWLSEVSSVALVQACQDARRAYHNWFDSLTGRRKGPKIRHPKPRRKRSRQSIRLTRNGFSFHGERLYVAKVGDIRVEWSRDLPSVPSSVTVIMEADGRYYASFMVQRGATLLPACDHEVGIDLGLASLAVTSDGEVIPNPRFLRKAERRLRKAQRVLSRRQKGSASRAKAGHRVAVLHRKVRETRLDHAHKAALRLVRDNQAVYAEDLAVSGLMRTRLAKSVADAGWSQLMRCIEEKAAHYGRMFRKIGRFEPTSQVCSACGLKDGPKPLSVREWTCAACGTAHDRDVNAARNILAAGRADKSNACGAGVRPQLVAVGAEAGTHRSAT

SEQ ID NO: 58056 - protein, 494 aa, Anaerobacillus sp.
  misc_feature (108)..(108): Xaa can be any naturally occurring amino acid
  misc_feature (132)..(132): Xaa can be any naturally occurring amino acid
  misc_feature (396)..(396): Xaa can be any naturally occurring amino acid
  misc_feature (408)..(408): Xaa can be any naturally occurring amino acid
MARKSTPTYTIEFPLHIPTWQQHRLENKFKIARVLYNSCLGEALKRHKAVKSDKEYRNLLKEPKSKERDSQLSDIRLNYGFSEYGIHSFVKSIQRKFKGHIGSFESQXLATRAFHAVEKLHFGHSKKVHFKXNTDDISVENKSNKTGLRFANGNILWGDKPTKKNTKPKNWLSMPISPKPNDEYAHLALMDKTKYVRILKREVRGKVRYFVQLIQEGYPPTKRNRKISNDETKRVGIDIGTSTIAICSEEKVRFQELAPDCKNDERELKRIQRKMDRSKRSTNPNNFNENGTIKKGRLTWTFSKKYKDLRKKRKELYRKITVQRKMAHENLTNEILSLGSDIRVETMRFQSLQKRAKNTTRNKKNGKINRKKRFGKSIANRAPAMLLTIIDRKLGXQGRSLKKIDTYXTKASQFNHITREYSKKQLSERWNEFGEFLIQRDLYSAFLIGNTNETLNSVDVQLCNTQWDNFVQLHNLEVERLKKSPSKTLRWFVA

SEQ ID NO: 58057 - protein, 388 aa, unknown
  TnpB Polypeptide
VKVVKGVKFGYRPTPQTRDLLAAFKDMVNDAIRICLTEDIRGRLKLRNRIYKELRERYGVVSYFPYSVTEVAWSIVKKHKHWHRKPHAKRLMLKLDSGSYSLNYSILSLPSGKRERLLVPLQYGEYQRSFLMDKTLKRGSVTMTDSLIMITFSKEVPTSEPSRKVGYDLNEKSIVGSDETRHDLSEVARIHTLYGVRRCMFYESHAHDRRLKKKFASSSREKERVSQELHRVSTLIVEKARANKEAIVLERLKGIRYAHQKGNGEGKTSRRRIAQWPFRQLQSYIDYKARWAGVPIEYVSPSYTSKTCHICGAINRNLKLTERSWQCPCGAMLDRDLNAAINIERRGKTRCLVEVRPGARDTDEAVKGNETTMAPILRAEAPKTDSGE

SEQ ID NO: 58058 - protein, 300 aa, Shigella sp.
  misc_feature (291)..(291): Xaa can be any naturally occurring amino acid
MRRFAGACRFVFNRALARQNENHEAGNKYIPYGKMASWLVEWKNATETQWLKDSPSQPLQQSLKDLERAYKNFFRKRAAFPRFKKRGQNDVFRYPQGVKLDQENSRIFLPKLGWMRYRNSRQVTGVVKNVTVSQSCGTWYISIQTESEVSTPAHPSASMVGLDAGVAKLATLSDGTVFEPVNSFQKNQKKLARLQRQLSRKVKFSNNWQKQKRKIQRLHSCIANIRRDYLHKVTTTVSKNHAMIVIEDLKVSNMSKSAAGTVSQPGRNVRAKSGLNRSILDQGWYEMRRQXHHVTNASGN

SEQ ID NO: 58059 - protein, 375 aa, unknown
  TnpB Polypeptide
VKIVTEITLTAKIQVIVNDLNKNSLERTMSVYVDACNFVSKHIFKTHDLVQPSLNRALYQTLRSKFGLRSQMAQSVIKTVIAKYKTIKKNQPNDWIEPNFKHPQYDLVWNKDYSINEGYFSVNSLDGRLKLPYVSKGMEQYFNKDVYKFGTAKLVKKHKKYFLHIPVTFEIEECLDSEIQNIVGVDRGINFIVATYDSKHQSKFISGRFIKRKRANYVAVRRSLQRRKTRSARRRMKLLGQRENRWMQDVNHVVSKALVEQNPTRTMFVLEDLTGIRAVTEKVHHKQRYVSVSWSFYDLEQKLIYKAARRGSKVIKVPAAYTSQTCPKCGHVEKSNRDKKKHRFCCKACGYRSNDDRVAAMNLYRMGIEYRVQLS

SEQ ID NO: 58060 - protein, 396 aa, unknown
  TnpB Polypeptide
MLKGGARVLIYKAYRYRIYPTKEQEKLIVKTFGCARFVFNYFLALTEHTYEETGKSVSHRERSAMLPKLKNGERTNFLKEVDSIALQASIEDLDDGYKRFFTGQNQKPKFKEKADSVQSYTTKVVTKNGKSVNIWIEGDKIRLPKLGFVKIKNTREPLGRIINVTVRRKSSGHFFASVLVEEEVYALPKTGSSVGIDLGVKEFAILSTGEKIENPRFYRVQEEKLAKAQRILKRRERRAKARGVDSETVKNVLKAKQKVAEIHEKIANQRKDFAQKLSTILVKNHDLICVEDLKAKNLLKNHCLAKSIQDAGWRLFVELIEYKCRWYGKELSRISQWFPSSQLCSSCGAHTGKKPLSVREWNCPACGKHHDRDVNAALNILREGTRISLEKARVSS

SEQ ID NO: 58061 - protein, 385 aa, unknown
  TnpB Polypeptide
MKQLKAFKFRIEPNKQQKVLINKTLGCTRFLYNQMLDEKQLKYKSKDKSKCKTEKDYKIDFEWLKEVDSTALQQARIDLKTAYDNFFRKLKAGQPTNLKFKSKHNPKNSYRTINVNNSIRVEENKIRLPKLGFVKFKKSREVSGKIKSVTVSKNILGRCYISVLCEVEIEKLPKLDTQVGIDLGLKEFCITSDSEFVSNPRFLRKSEQELKKAQRILSHRVKKGKNRFKQQKVVFKIHQKIANQRLDFLHKLSTRLIIENQVICLEDLQVRNMVKNHCLAKSISDVSWSKFVELLRYKAEWYGRELVQIGKFFPSSKTCSSCGNIKKDLTLKDREYQCSSCGTKIDRDYNASLNILEEGLRILKKNCRDDKVSLLNIQMKLVCSS

SEQ ID NO: 58062 - protein, 383 aa, unknown
  TnpB Polypeptide
MVVVFVMQRTIKIKIPFNQVLIETIQQYTLIYKTIADIGFTKKTWNKNTLHKLTYKKLRKQYPKFPSAMLQTVRDVASEALKRTKLKIKLNPKQYSSIRLDKRNLRINLIHKIISISSIEGRIKTNFNSNHQIEKYLNWNTKSANLSFRNNQLWLNLIVEKENPQLQAINKVLGIDRGINNIAVCSNNQFFNANHLKAIKGEYQFLKSRLQSVGTRSAKRKLKRLAGRERRFVADINHQLSKTIAQSDYTVFALEKLTKIKQNKGKRFNKKLGGWSFFEFEKFLEYKAQALGKKLIFVNPKYTSQTCNKCGHKERTNRKGNVFKCQSCNYETHSDLNASKNIAKLGIAEISRLYVNQPIVAFNESNQQITENSYKLTNSLVSN

SEQ ID NO: 58063 - protein, 401 aa, unknown
  TnpB Polypeptide
MSRYRLVPTSAQEAVLRGHCADARFVWNLAVEQHAHWRPGRKGAPGYLEQCRQLTAARAENPWLAAGSQMVQQQAIRDFARAMAAFFDPRNPAGRPLWRKAGRDEGFRIVGRRGRQWDVRRLSRKTGEVWVPKAGWVRFRWSRPVPPGVRSYRVSMDRAGRWHVAFAAIPDPIPAPGNGQAVGIDRGIVVSAALSNGELLHSQGLTVRERKRMRRLERKLARARRGSNRRRRVKRSVARLRARESDRRKDWAEKVSTDIARRFDVIRVEDLPISNMTRSAKGTRERPGQNVRAKAGLNRGILRSGWGLLVRRLEDKAPGRVEKISPVFTSQRCSACGQVDGKSRESQAVFRCTACGYVGNADVNAAINIAAGHAVTARGGHRVIRPVNREPQLLGSLTGRV

SEQ ID NO: 58064 - protein, 475 aa, unknown
  TnpB Polypeptide
MRICRGAEGGQVKTYKYRLYPEKEATKRFLVLLELCRRLYNWALAERRSYYKETGCSLTYRQQQNTLPRYKSEHSEHKEVHSQVLQDVLQRVDKTFVNFFERRAKYPRFKRYGNYRSMTYPQADNTWIGRGSILLPKLGRVRMVKHRPIMGRVKTVTVLLTDSSEWYACITVENRPSIVTEKPKVAYRPVGVDTGLINYLYLSDRSQVDNPRLIKVHQQRIVKAQRWLSRKQLSKKTFTTANGESRTVKVPSKNRLRARRILASRWQDYDNAKNDWQWKLAGELVRKHDFIAYEDLPVGNMMRNHSLAGAIQDAAWSSFWSKVEHKAATAADSVITQKVPPQYTTQRCSKCGHIQIVALSERTYRCPSCGYMANRDHNASTNILELGVELSGIQTAVGMGVPEFTPVETRPILAEATRPMMRASLVVEAGNKFCTRRRTPPDSGRDSAYGSPEASAQGERHVSSEIRDAWNRPKR

SEQ ID NO: 58065 - protein, 420 aa, unknown
  TnpB Polypeptide
MYEESEVNLLQQTITIKCKLKLQSSLDESVLTKSLEQYRRACNAVSQYMFDHSFEMAQAKLNKALYRQLRNDYGLKAQMAQSAIRNVVARYRTVKTQLAQKTYRYNTGKQDRYGNDIWKNETRTLDWLWHPINFKRPQLDLQRNRDWSLKDNHIMSINTVNGRIKVPFTCQGFDQYLNGTWEFGMAKILHVGNKWYMHISATKELPDYLKEQSQHVVGIDRGLRFLATAYDEHGKTLFFQGQEVLRKRSKFKRLRQQLQSRGTKSAKRRLKKIGQRENRWMTDINHQLSKTLVNRYGADTLFVLENLANVRFATEKVTKTQRYEQVSWAFYQLAQFLTYKAHLVGSEVVQVSAKYTSQRCPKCGRIYKNNRNHQQHLYVCDRCGYQSNDDRIGAMNIQLLGTQYVSGNERPSFNKLTAGE

SEQ ID NO: 58066 - protein, 396 aa, Cyanobacteria sp.
LYRTIPVKSRFTTEEQVFWVDQCEHANSLINCAIYHAKQAHYSNLERQGNAFTIYWRGDELCYGWKTYKCHTTYPELDKALKDNPHYKAMAAQSAQQTLKSVSESIVSYNGLVNLYYKGEVDRPSLPKYRKKGGLAAVTFPRQALTYKDGFFYPSISRETKPHLITDIALPLPEFIDSDWVKEVTIRPCYGELWVDWVIDDGKEAMVNNPNFDYSQAWSFDHGGTNWLTGVSTRGKSLIIDGRRLKAMNQGYCRLVAKYKQGKSDFYWDFNLDRVQRKRNNQMRDAVNKAARFIINQCLNDRVGNLIIGWNEGQKNGSNMGKRNNQNFVVIPTKRLIDRLKQLCPEYGIVLTITEEAYTSKASFLDGDSLPKYGEKPECDSFSRNLIPGGWLATVE

SEQ ID NO: 58067 - protein, 309 aa, Paraliobacillus sp.
LKRQKTLGIEPTFRDLKGMPKFHSRKGSKSSYTTFNQNGNIYIEDDILYLPSAQKSSVKVVGLKLHTHRPLPHGSKIKNVTVTINTKGQFDVSICVEFPKEIPSIGIPNRILGLDYSQSHFFVDSEGKKANYPHYYRKMKERLAKEQRILSGRVKGSNRWEKQRLLVSRLQNKVVNQRKDWLHKKSYALANQYDMIVVENIDLRAIGQNKHYAKNQQDNGFGTFRLYIKYKLEQQGKYYVKAPKNFASTQLCSTCSHKNTVLKGNVAVREWDCPSCGAHLDRDINAAFNLKQYGKYFTKDEILPQIVVA

SEQ ID NO: 58068 - protein, 391 aa, Thermosporothrix sp.
MSNAVALQKGTYEDIRSRYQLPSQMACSVPRHVGATYKALWTKVKQNAEHRTSGVTSKRYKGLDQAPTFISPTLTYQYKKDYSFKKHQQVSLLTLCGRVVVPYTGYNKHIERIQHGAEIGAAKLWYDRSKKQFYLLVSLEIETPDPDPATQTGIAGVDVGIRYLAVTSSTRGKQSFHSGKQVVARANHYARWRKRLQQKGTRSAKRRLLAISGRERRLKQDANHVVSKRIVTQYPHHLIGLEHLRDIRDRTRRKKGKKASKKQRKANAIFSKWSFAELQHMIAYKAQLSGSLVITVDANNTSKACPMCGHTCDANRPNKGLLFVCQKCHYTLHADLVGARNLAMRTVLIRQDWMSTGTLSECPDVSDKEAKAERLRRYSELRWSLDTSPRS

SEQ ID NO: 58069 - protein, 308 aa, Thermosporothrix sp.
VWCCQWARGALPWSCLSTCLKTVVHVAWFGTMALSCMSVSNSSKQKKLQARCRPPSIWGEIHLAAVTTNTAVAMIVTGRGIRSLKRQRSKHLGQLAKKQSRCKHYSRRWKKLQRAKNKQCRRAERRIRDMRHKATRKVINFCVEQQVGTLFIGNPHGVRNKNNGRHQNQRMALWEYGRDIDYLTHKAKAAHIMSFTGSERGTSSQCPVCGQKHKPKGRQWACRACGFQGHRDLVGSVNMHQLACGSQVEFPRSFTYLRLPGQRPRRSSSRADTPPCCLRESMAQPRIADTVSSETGYPVDVSQKPVTL

SEQ ID NO: 58070 - protein, 354 aa, Thermosporothrix sp.
MICSALALCWPNNFPLLSLSTRRPGKLPLTGRGLPSPVSTSTVASRHPARRAILPFQRDCRSVEDKQTGWKLEADGIHIRFTDGCGIGRLRLIGSRDIMTFPLSQIKRVRLLRRADGYSCQFAMAASRRVEHQPSGKQVGIDLGLRAFFTDSEGNTVAPPQDLRKAEQRLKRLHRRLSKTQKRSRNRRKARQALSKASLKVQRQREDVARKQANALVSSHDVIAYEALQIRHLVKNRHLAKSIADAAWGRFLWWVRYDGTLHRVPVIGVEPAFTTQNCSRCGQRVKKSLRVRTHLCPGCGLLLDRDHNAALNILHKALQGTVGQTGTDEGVSSNASGQPAATRHRTAAPRKQAG

SEQ ID NO: 58071 - protein, 435 aa, unknown
  TnpB Polypeptide
MKINKAYKFRLEPNAEQEIILNNLVGSARFVWNQMLAISFEMFAKNEFINATNLVNKIMDLKNNSDFSFLRIHANAVSLQQKVRDLASAWSRFFDPKVHARLKENKKKLRKPKFFKLSDGTEIQLRQLMPRFKRKSDGCDSIRLVQFDKYCRIEGNRIKLPSGIGFVKFRKSQDIIGTIKNITISKKSGHWYVSFGTERELDQNPIHPSTSAIGIDLGITKLITTSEGQHIQSKNSFKANQIKLAALQRQLSRKVLFSQNWKKQNRKIQKLHHHIANIRHDYLHKITTTISKNHAMIACEDLKVANMSKSASGTLENRGRNVKAKSGLNKSILDQGWGMMVDMLEYKQHWRGGLLVKINPQYTSQTCSQCQHITKENRQTQAKFECVKCGHKANADVNAAKNILAAGHAVLSVEGGRSKGRPMKQKTCDIREKVA

SEQ ID NO: 58072 - protein, 387 aa, unknown
  TnpB Polypeptide
VNESIRIAVREDIRSRARLTRTAYKELSARHTLYKQYIPSAFEVALGVLKVHRRRVRKGKQSSVPFLRRLLLKAENQSYWLDRETGRLRIPIRGTEGVQFHLPLSDWHRAMLSDPSWGLGSLTVVPGKVIVTVRKEAPKPYEPDGAIALDTNEDSLDGVHATGDSAGLLRVPFDGVRLIQEIHFRRRRKLAAKKAYDRRVARRLLNREGQRERRRVRQRLHRVSKGLVRFAMEARAAIVLEDLTLHGAGGRSRRMNRRLSVWPRGELHRQIEYKAVLAGVPVIKVNPQWTSKTCPVCGARRRDRVGKVFVCLMCDWEMDRQINAGLNILKTALASNEALARAVRFQPGALRHDVVSPLYDLFRRGTGAREEPSGVESQNGMIQSPDL

SEQ ID NO: 58073 - protein, 397 aa, Sphaerisporangium sp.
MLTGRRYLLAFTPEQEEFSEKIGDACRAVWNTALEQRREYRRRGVWINYVEQARQMAEAKRDFPWLAEAPSHTLQQTLRDLERACETHGTFKVRWRSKRKSPPSFRFPDPKHISVERVSRRWGRVRLPKLGWVRFRWTRPLAGELRNATVLTDGGRWFISFCVEDGLVESAPNGKPAVGVDRGVRIAVAASDGWTRDREFVTPGEAARLKRLQRNLDRQRKGSNRRAATRKKIGKLNARIRSRRTDFTAWTANRLTRDHGVVVVEDLRVRNMTASPKGSVEAPGKNVRQKAALNRAILAKGWGGLLSTLEHKARYNGSRVVRMPAAHTSQRCSACGTVDAKSRESQAVFACTSCAYTANADVNAAKNILGAGLALTGHGDLGVARSVKCQPPKSEAA

SEQ ID NO: 58074 - protein, 416 aa, Halosimplex sp.
MEYSHRYPACPTQQVAAVLDSHIDIHRQAYNYALYEYENVDTDDIGSAYKHHYRLPDWKDEYPLFSEVNSKALQRTVTRFYQNLNGLSEQKQNGRNVGKLTWKSPTEFQSMTYSQSGFELKNTSGRRATLWLSKIGDIPIRYHREIPDEADIKEVTIKKETTGDWFVSFGLETDDADLTKKPDVNSLNTSNSVGLDLGIRNYVHTSDGTTVDWLNLEDEYDRLRHDQRKLSRKEQGSSNYEKQRRTVAKVKRHIRRKVLDYQHKITTWLVREYDAVFVEDLDVKEMLEQSHNARNKQDAAWHQFITLLEYKADLYGCHVVQVEAAGTTKECAKCDVETAKPIWVREHSCPSCGLECDRDANAAMNVLQRGFSELGLGWPEDTPVETVLPTDTHSVSAKRVIETGSPTLNEAAPAAE

SEQ ID NO: 58075 - protein, 367 aa, unknown
  TnpB Polypeptide
MKTIRTMKIKISGQHKADAILANWLTATNWLSNIVYKIKDVNSNRLHKAYYHIVREKFGLPSQLTCTLFRTVSATYKTQRSSKQWSLANYKRKTIPIVWKRDFAVTKKGVTLWSDIIKLNDPRKIPSNWKDSKLLFVKKQWYLILSYEIEIPDNKETGTIVGVDQGIKRIFVASDSNNNKLFCKANHLNHKIFSIQRTRSKVQAVGSRSAKRLLIRMSKHQASVTEHAIHVASKRLVEWADSVGARKIVIENLSNIRSAGKNKGKQLRSKLNKWPYGMFTFYTTYKAAAKGITVETVSPRNTSRMCNKCGHIDESNRHGLKFSCRACGYTADADWNASKNIASRYISIELNSRDTGSHKSPKKRAVS

SEQ ID NO: 58076 - protein, 383 aa, Thermococcus sp.
MLSETIKLTAKFKLKDVLEGLDNLFSAYREIVNFLITYAYESNITSFKRLKKETYKELREKYPQLPSHYIYTACQMGTSIYKSYRKRKRKGKANGKPVFKKEVIMLDDHLFKPDLERGIIKLSTPKGRLNLKFYPAKYHEKFKDWKVGQAWLVKTPKGVFINVVFSKEVEIRAPKAFVGVDLNENNVTLALPNGEFVQIITHEREIRTGYFVKRRKIQKKIRAGKKREELLQKYGERERNRLNDFYHKIANVIVEFAKRYGGIALEDLTEIRDSIRYSAKMNGRLHRWSFRKLQSIIKYKAKLKGVRVVFVNPAHTSSLCPICGEKLSPNGHRVLKCKKCGFEADRDVVGSWNICLKALKMWGVSVPPESPPMKTGRKETYPL

SEQ ID NO: 58077 - protein, 410 aa, unknown
  TnpB Polypeptide
MIITHRIALDPNARQEALLRRHAGYARFAWNWGVEESRRALKAREKSPTSHYRLRPAFNAAKAKIAPWSRALSQNAAKYALIDLHLTWDRFWRELEAAGKAGRRPGRHGRAPRFRSRKRGMSFRADNGPGTVQTEGHRIHLPKIGAVRMREACRFGGPVRECTVKHDGVRWHAAVVCEVPDPRPKQTGAVVGVDVGQRRLATVYDGETISVFENPEALKRALAKLRRIRRGVARSLEQHGRTRKSNRRERRYAELYRQHVRVANLRLDAAHKATTAIAKRSRLVCVESLHVPGWMQNRRLSRSIADAPPSRFLSLLEWKCRREGTALLEGGRVHPSTRTCSACGAVQTELQIERRRRCLVCGALHDRADRTALSLYRQGLAADVEGVSDGRRVAAPDEASTRRIVPDVSG

SEQ ID NO: 58078 - protein, 276 aa, unknown
  TnpB Polypeptide
LAPEAFLEMQLLWDRAGRHYFWHLMVENYLEPAEPPGDQVAGVDLGEIHPAAVTDGEEVVVFSAREMRSLAQYTHKRLAEIQAKQARKTKGSRSWKRLQRRKGLFLAQQHRRRRDLEHKVSRAVVKWGVERQVGTLAVGDVRDAADGVALGHTTNQKISSWSHGRLRQYLTYKAQAAGITVVLVDEAYTSQECPNCHERHKPRGRNYLCPVCGFVSHRDAVGSANILSRFLYSELGNVSPPAVIKYRHPFDATGKRSPVDTGQVAWAFTTQETDGF

SEQ ID NO: 58079 - protein, 276 aa, unknown; identical to SEQ ID NO: 58078
  TnpB Polypeptide

SEQ ID NO: 58080 - protein, 407 aa, unknown
  TnpB Polypeptide
VVEVVLGVPFGYEKTEALQRLLEDFRDMINFCIEKALENNVTSFAKLRKLVYEEWKRRWDYSTHFCHSACKVASSMLKSWRRKVRRGEADPDRPPKARKLFIRFDPQLTKFEGDRLRVSVKPRQFIYVRLKHGEYQRRFIEEWKRGKLKVGEILMDGEKVFIPFRKEVDLSNPRDWLAIDINESNVTGVSSNPHVLRIEHDLRTIHTTYYEVKRRIQKLSKHKPLTSKKLMEKYSGRERRKTHDLCHKIAKAVVEFAKEHGLGIILEDLRGIRKRINYGRSLNRRLHSWNFRKLQFFIEYKAKLNGLPVIYVNPHKTSSLCPICGGRLAPKGRRLMKCKKCGYENDRDVIACLNMLRMRGVSVPPESPPMKMGGGKVVRYDSSACFKSSGQPERDLILVDTWESQRG

SEQ ID NO: 58081 - protein, 407 aa, unknown
  TnpB Polypeptide
VSQESFIRQNYRIYPTKEQQKFLAQDMGNQRFIWNYFLGKSIERYKLDKKFYFFFEMSKMLPQIKKEESLSFLKLGNSQGLLSTCKDLDVALKGSFKSTKNKVRKGFPKFKKKTGSGAVTYPQHVKLVDGKLRIPKLDTAIKIRDNGMGLPENYNSVTITKSASGQFYASFVVPTALPDKIQINANSKAVGIDLNSHHIMVLDDGSAVVNPKHLLEREKRLKRYQRSFSRKQKGSSNKNKARIKLAKLHEKIANSRKDFVEKLTLDVVRNNDIIVIEDLNVKVMQKWNGRMVQSAPFGMIRSKLTWKANKLGKHLVVIDRFTPTSKVCSECGQIHELSLKTRWLSCDCGAELHRDHNAAINILNAGLRDIEAGTAFKACGETKVHDSSNGVRWVSLKQENTRSLVVC

SEQ ID NO: 58082 - protein, 415 aa, unknown
  TnpB Polypeptide
MCAKIGSVKFHQTPPFSPPLSSDRGGENGRDSALLLDLLIHFCYTSLMNKTLIRTISIKLDIGEHEAALHETQKAFNEAASWIATICWEEGITNTNTAHHRVYGETRARFGLGAQLAVCARAKAVESIKAIRARKSETCPQFGPRGSIRYDARTYRLMSLDRVSLNTLQGRAICHLLLGKRQHDMLIDRTWKIGGADLVWRRGIYYLNVTQNKEAPEEAETGDTLGVDLGIVNLATDSEGESFSGVQVKAVREHYHKRRQILQKVDTRSAKRRLKTMSGREKRFQKDTNHRVAKSLVHKATRTRKAIALEDLTGIRERTTVRRANRYERHSWAFYQLRTFIHYKAAWAGIPVRLIDPRNTSRTCSHCGHCAKANRQSQSSFKCKQCGFCLNADLNAAINISRVPVKVPMVSRLRA

SEQ ID NO: 58083 - protein, 432 aa, unknown
  TnpB Polypeptide
MSVASRFEGQLRWLHKVRLYPTCAQERVLFEMLRVTRELYNALLQQRRDAWTTRHYTVTSHDQYHELTALRAVEPRFAAVYRESQDAVLHRLDLAFAAFFRRLKRGQTPGYPRYKPASRWNQLEFPHGDRALKLDHSQKRVRIPGVGAVRLRKGRLVPEFGRAFVVFKSGRWYAVFESHRSDVPLPKNGRRIGIDRGIYVLAMLSDGTAIENPRVGSRWRTLVQFHQRALDAVTQKGAAGHVVNVKDAARAAAVRRLSRAKEREANARRDWLHKASRFIVNRFDLIALEALNLSAMTRSAKGTIGEPGKNVLAKSRLNRALLDAGFGMLATLIREKAAYAAREVIEVDARYSSQTCAACRHTARGSRQRRRFVCVRCGHAADADLNAARILLKRAESPPTRAPGTARGERHKPACHAHDELGSLDYGKLHCV

SEQ ID NO: 58084 - protein, 539 aa, Streptomyces sp.
MRASAEQGRDDSRYAPWAERRSPSSTARRTSETSQELRERSSAAASALALAYRSSGSRRLSLVMPPVWPYNGAMSRFRMYPTRAQEEQMLEHCAHARYVWNLAVEQHAHWRKDKKPAPGFAEQCRQLTEARRANEWLGSGNADVQQQALKDFAKAKNARFTSGFGEPTWRKKFRHEGFRVIGTDRVPECRPDGTPLVNAKTGKQVMGRSVVVQQLNRRWAQVKVPGCGWVRFRLTRSRLPSAKTFRVTFRDGQWHIAFAIIPEPVDAPGTGEIIGIDRGVKITAALSDGRKLNCPQLTTKERAQIRKHQRRAARAPKGSKQKTAAYTRVAKLKAREANRRKDWCEKTSTMLARTYDLVRFEKLNIKNMTASAKGTVEQPGKKVKQKAGLNRAILAQGWGLLRQRTEHKAPGRVQDVPAPYTSLRCSACGWIEKNSRKSQAEFVCVSCGFTCNADENAAHNVAAGQGGIPRPRRSAGAGGVTTATGRSNAREPQPTWVEIPLFKRGRMSIHGVEVDPDFVARRAEVVDRESGQRGATAPA

SEQ ID NO: 58085 - protein, 403 aa, Planktothrix sp.
VVPDKMLKTVKVRIYPTVQQQELLAQAFGSVRWLWNRFLNLTNETYQQTGKGLSRYDLQKQLPDLKKEYEWLKNTYSQCLQVVCLNLSRAFINFFERRADYPRFKSKHGKQSLSYPQNVKISSDTICFPKLGEIYAKIHRPVEGEIKTVTISKNKCNQYYASILFEDGKEIPNPSSEGKAIGLDMGLNDFCVTSDGSKFTNPRWLKKHERNLKIKQKSLSRKKQDSNNRAKARLKVAKVHNKITRCREDFHHKLSRRIVNENQVIVVENLNIKGMVKNHCLAQAISQVGWGQFQTMLSYKAEQEGKLYLEIERFFPSSKTCNYCLNVVNSLSLEVRQWTCNHCGTKHDRDINAAKNIRDEGLRVLSLGTSESACCPDVRRNSGGRKKSTVVLSVGQEAPTSRA

SEQ ID NO: 58086 - protein, 446 aa, unknown
  TnpB Polypeptide
MPDFLVSGKSGRSRKEMLVQHRVVTEFRSWQERDKAANGESSKYVSQGWKRTVDASAPGYGEDYVNLGAVNKQYAAIENDPFADGEIILRLVIQGEWHRLIFNFDNKRFTEGRVTLPVIKVEDGEPVFIFTVVTDSPVVQFSGDYVVGVDVGINNYATVVVRDVKTGRIVYETALSQRVHSLWNGVRASERQARALRRKAETLLRDRQARMAALDEAQLHREAASRKKRELAILAAQEIADLSHVWGNAVVAVEDLSWVRNTMQNGRWNRGALVRWLTHYVTQNGGWVVAVNPANTSQKCHTCGSKVTHPTHELSVCAEHGVMDRDVNAAANIAARAVPRVVKARVTRAKNRKLQPQTALRTPVARNSLKYPGRDRTKSKPTPKRKNRRRVSREVILPLRPARAQAYRLEATVLADQGTRSTLGTSEAALKQGNMAYKKCRLCSLI

SEQ ID NO: 58087 - protein, 486 aa, Mycolicibacterium sp.
MARFEIPEGWTAQAYRFALDPTPTQLRGLASHAGAARFAHNHMLALVKAVMDQRAAERSYGISESDLTPVVGWSLPALRKVWNQRKAWCAPWWAENSKEAYNTGLDGLARGLDAWSKSRKGQRKGRAVGFPRFRSARAPRSVRFTTGTIRIEADRRHVTLPRLGAVRTHESTRKLARRLEAGTARILSATVGQDSAGRWHCALQTIVAGKSRPAHAPRSPHPVVGVDVGVKADSLLVVATPDGVEIDRIPAPKSLTAAQSRLRALQRRAARQHGPYEAQTRTRQQPSNRWRATQTMIGRMHAHAAAVRRDVLHKATTALAQRHDVVVVETLNAAGMRTKGGAHKRGLNRALADAALAEIRRMLGYKTRWYGSHLVEADQFYPSSKTCTACGRRKPNLILADRVFDCEHCGVQIDRDLGAAINLARLGVPTSVGEQSPAGSGPVAGRGATRETEPAPAGDAAGNETSTPHHQHVDQTGTASPQSEAA

SEQ ID NO: 58088 - protein, 402 aa, Escherichia sp.
VKRLQAFKFQLRPGGQQEREMRRFAGACRFVFNRALALQNENHEAGNKYIPYGKMASWLVEWKNATETQWLKNAPSQPLQQSLKDLERAYKNFFQKRAAFPRFKKRGQNDSFRYPQGVKLDQENSRIFLPKLGWMRYRNSRQVTGVVKNVTVSQSCGKWHISIQTESEVSTPVHPSASMVGLDAGVAKLATLSDGTVFEPVNSFQKNQKTLARLQRQLSRRVKFSNNWQKQKRKIQCLHSRIASIRRDYLHKVTTTISKNHAMTVIENLKVSNMSKSAAGTVSQPGRHVRAKSGLNRPIQEQGWYEMRRQLEYKALWRGGQVLAVPPAYTSQRCACCGHTAKENRLSQSKFRCQVCGYTANADVNGARNILAAGHAVLACGEMVQSGRPLKQEPTEMIQATA

SEQ ID NO: 58089 - protein, 421 aa, unknown
  TnpB Polypeptide
MNVFEKKPDRSSRQVRAIKSVKQNYYEPSEEILSLLETFRMMTNACIRIGLANDVSTLRKLSHLCYKELSRYNVISYYKLHAISRAAGILASRKKSIRRGIPTRDPYAVSPQLVSCYGFKLERGVLGIPLGERKYFDVPLNKHTQELLLSEPGVEVRSFTLTPSTVSLTISREAEEISCVNMGGLDRNLRNLTYGNEERVVQYELSKAVKIAETTKEVVGSFRRDDVRIRKRIASKYGRRRKNRIMHLLHCATKQVVEEAFRSRETIALEDIKGIRRLYARGNGQGGGFRGRMNSWSFGEAQRQVEYKAKWRGVTVIHLTKDETRGTTRECARCRERLQVAQRDDVRHRRQLWCPRCKRWVDRDVNAVMNQSRRGRLRFDRSLPHDEAKGEAGEAMKGNPTTPVILRVGCLEEIAQRVIRT

SEQ ID NO: 58090 - protein, 410 aa, Streptomyces sp.
MDDQAHAARTMWNLLHDWWTMLPKERRNLAAADAAIRRARKDIDWLAVLPAQAAQAVLKTYVQAWKNCWEGRAEKPNFKARFRTAMSVDIPQGRDLNITRVHRRWGMVNIPRIGRVRFRWTKNLPVGKRADSENRITGARLVKDALGWHIAFRIQNLQPKPEPHTGPEVGIDAGIIVPLALSNGERYDHDEWTSSTDKPNAWLTEQEQAKLLRLEQRAAHRKRFRKRAERTSNRLRATYDQIQGLRARAKRRHQDWQHQTTTEIAARYSVIVVEDLTITNMTKSARGTVEAPGRNVAQKSGLNRSISQEAWGRTVTMLTYKAARKGGTLHKVPAPGTSQRCSACGFTTPGSRESQAVFVCKNPDCGWVGNADHNAARNVLHLYRMGLALIPAAGRAVVRRARRVKPATAR

SEQ ID NO: 58091 - protein, 448 aa, unknown
  TnpB Polypeptide
MRKGIKVALDPTPRQEQALWSHAGAARFAFNIALLHIRSQLSGCTPVQGKGRADWSMPALRRWWNEWKREIAPWWNENSKEAYNTGLQSLSDAFSNYFDSRSGTRKGRRMGWPRPRKRSKTTPRFTYTTGSFGVADDHGLKLPRIGRVHCMENVRRLVGDARITRMTIRHEGGRWYASLSVECDEPQPAANLKGSIGIDLGVRTFATLSDGTMIANPHRMKLIARKQRRLSRRLSRRHKGSKRWVEAKRENSKLANRAANQRRDMLDKTTTMLAATYRDISIEDLNVKGMSRRNKPKEDPGRPGEYLPNGQARKSGLNREILDQGFGMFRRMLEYKCAHTGARLHVIDRWYPSSKTCSGCGTVKTKLSLNTRTYVCHTCGLVMDRDLNAAINIQVAGSAPETLNARGGNTRRTPGAHSPNETRTKQPHPKGMRLGANTRKSVLQAKTN

SEQ ID NO: 58092 - protein, 132 aa, unknown
  TnpB Polypeptide
MKNDLCRLYKKTANQRNDFHWNLANKLCGEYAVICIEDLNLKGMQKLYGRKISDLGFAEFLQKLEYVAHKTGTTIIKIDRFFPSSQLCSCCGQQNHQMKDLRIRKWQCSCGAVHQRDKNAAINILNEGLKYL

SEQ ID NO: 58093 - protein, 428 aa, unknown
  TnpB Polypeptide
LKLAKSCVLNATGDVALVLGHLAYATWKLWNVANYERKNWTKESGVAYPNWYDQKKRLKDEFWYNNLPSQSAQELLHTLDGAWKSFYKLKETGGIENPKPPKFKQEPFNVKYLKDGFTVLSGNRIRLAIPKQLRGYLKETFGFEDTFLYVDVPNHLQLKGEKVKTLEFKPLGQGKYELIVVIEIPDIEESAPSAKFMSLDFGINNFLSAVIYDGASFILSGRQLLSLNRYFDKKISYYDSLSDAQQFAKGVKYPKQSKQVTALFEKRRKQVHHLLHTMSRAVINMAIAHGVDTIVIGDLTGIREEKNLGVKTNQRFHKWPFRKMAQQIRYKAALVGITVVSLTEEYTSQTCSVCKDSPSRDNARKANRKHRGLYVCKDCGTVMNADINGASNIAKKYLDAFCDQSQDRPVVGLGRPRMYRFNGSRFVA

SEQ ID NO: 58094 - protein, 388 aa, Domibacillus sp.
MLVNKAYKFRIYPTKEQEILIAKTIGCSRFVFNHFLAKWNDAYKEAGRGLTYNSCSAQLTQLKKEFVWLKEVDSIAIQSSLKNLADSYTRFFKKQNKAPRFKSKKNNVQSYKTNIQGKQQLPENMIHKNKMKLPKLGLVKFAKSREVKGRILNATVRRNPSGKYFVSILVETEVQELPTTNSSVGVDVGLKDFAILSDGTVYKNPKFFRSLEKKLAKEQKILSRRKEWAVNRKCPLHEARNYQKQKVKVARIHEKMTNARTDYLHKISTDIIKNHDMIGIEDLQVSNMLKNHKLAKAISEVSWSQFRTMLEYKAKWYGKQVVVVGKTFASSQLCSCCGYQNKDVKNLNLREWDCPECKTHHDRDMNAGQNLKNEALRLLTAGTAGLAY

SEQ ID NO: 58095 - protein, 536 aa, unknown
  TnpB Polypeptide
MSKTTEKTIKSYSFYSKDLNKGKFNLFVKKAKAIRDYKNAVSLELSSNLLYYMDMSCFDFQKIFGNQKSPLKSSPLLRGNEMQKVSTKVFLSYENMMRRIEQKINFFVQKNIEVEYYKKDTKINKKGDVKNFHIKTKSTPLTKTLSFLARYNFENIQEVIEERINQNLNDKKTFYETIKNHIEKFGLERLLKLALDKRNRIIQIYKKTIIFTSLSYKTAIQSKNNLIQNSKNKNFCNGVFFIPNFIIGKDMTVPVLFNTNYHGHLNQYMSKEYTICIDEYKKRIKFISTKEEKRNISPDGISYLGVDVNIKNNLFSTSENKEIDIDRDLFQGYISFLRKYQEKKNDQTEGEKHQYSVWRERILCMLKKKARELVDFAIASGKNHILMEDLGSFARTYIKSKEFEGFKYSKLARILRLSHLNTIVKGICKKLGVRLTLVPSHYTSQWCFHCGHIDRANRQCQETFSCVCCGHTANADFHSSQAIKLIGSSDVLRSSMLVKDKSSDWIPKKLTKDFIKRQLEEITPKLAFQLNYQKNI

SEQ ID NO: 58096 - protein, 393 aa, unknown
  TnpB Polypeptide
MVRYRLALSSEQESILLRHCAHARFVWNLAVEQHQHWHPGRKSAPSYLEQCRQLTAARADHPWLAEGSQMVQQQALRDFAQARMNFFNGTHGRPTWRKAGRNEGFRIVALKPGDVRRLNRHSGEVRVPKAGWIRFRWSRAVPAGVKSYRVTRDRAGRWHVSFAGMPDPVPAPGNGRAVGIDRGVVVAAALSTGELLHAPGATGNETARLIRLERKLARGRRGSSRRGKVKTAIAKLKARETDRRKDWVEKTSTDLARRFDVIRVEELNIRNMTRSAKGTVDAPGKNVRAKAGLNRGIQSSGWGLLVHRLEDKAPGRVERVNPAYTSQRCSACGRVDAKSRESQAVFACTACGYACNADVNAARNIAAGHAVTARGGDGNARPVNREPQLLTSR

SEQ ID NO: 58097 - protein, 528 aa, unknown
  TnpB Polypeptide
MKEKKVFRMYKTKGSEKLLPIYNKLQKELNLILSNKFYKEELMKIDFTYIDEKAKERTKLSGTIRDEITGIIGKRLVGEVPDSWYVRILIHNIISLLKSRKEQVEIYELLKANAYKIDSELKKKLTEKKLYPSRPYLETLAEAKKIPTLPDKKVFILDFSAADKQMFRIGKNGRSWEIKIYSKEEKEKYDLESQWIEIETYLPIYIREGFKGEAAKPQFYIDRKDNSFVCAIPCKIETIPNEYKNIMGVDIGRIKPYSATVIRKDGSISDEYIPTEELMKMSKKLDRLETHIDCVYKKYSSSKKYGNFTTRQAKRKLDYQYGKRKRTNLKYQIARLIAVEVVNIAIKEECKEIHIENLKWVKNKAGKWNFSAIQQCIEEVAELYDIKVVKVSAKNSSKEHPITGEIGKVNDREVRFSTGQVIDRDQLAGLNLALRKPKGEEARKIKQLNKRKEKKIIRLSRQSNFKRIKKTAIPDKKINKKKNVKTVMFSHDKVTNSYTIVNVFCVSQNNCYKDNNIHFIHIYDNFTQ

SEQ ID NO: 58098 - protein, 246 aa, unknown
  TnpB Polypeptide
VFKIKLLYSKDYIEKFMGRKWYEVIISIDRQGRVRINIPFRWEYNPYKPRSIISLDINLKRIVVYNGRRIRRINTRFTEALYLKHLAENVQRRHRYSWRRNEKWLEIIRVLHRRSRNIVIDWCRKFAKYTVLKAKRTMSVIVLEDLEKLWFNTSRKSRTLADKLSRFAYSRLQLAIITKAVKYNVPVLFIDPKNTSTVCPRCRCKLSYNHRLVICPRCGLIADRDTVGAINIYLKALKHLAPRLGS

SEQ ID NO: 58099 - protein, 390 aa, unknown
  TnpB Polypeptide
VLVQKAFKYRFFPTDEQAEQLARTFGCARFVYNRALELRATAWQQEKKSIDYHTTTARLTEWKQEPEKAFLSEVSSVVLQQALRNLDTAFTNFFEKRAQYPKFKSRRDRQSARYATNAFTFRGGQIMLAKQSEPLDIVWSRPLPDDAKILNLTVSRDTSGRYFVSILVETDLKPLRKINAEVGIDVGIKTLATTSEGEKLENPRPLLRREKRLTRLQRRLSRKVKDSNNRKKARLKVAKLHAKIRDTRRDALQKFTTKIIRENQAIYVEGLNVAGMAQNHNLAKHIVDAAFGEIFRELKYKAEWYERTYLPLDRFFPSSKLCSSCGHLLDELPLSIREWECPTCGAHHDRDINAAINIKRAGQYLLKLQKTPGSDARKVTPTRDERRRSA

SEQ ID NO: 58100 - protein, 314 aa, Helicobacter sp.
MFQITHKVQLSPNNKAKTYFKKAYGCARLAYNWGLARWKENYQNGITTNHLALKKEFNAIKKEQFPFVYEVSKYATQQPFMHLGLAFTKFFRDLKQGKLSYPRFKKKREFQGKFYIGGDQIKIIQGYKRDYLKIPNLSKIKMCEKLRFKGKISGVTISIKGSKFFVSIAMEITKNEFVHTHKPLKNFKTIGIDTGIKSFVSLSNGLQIKAPKPLTKLTRRLTRLQLSKKQHPKAKGDKLKKSRKFLKASLRLNKLHQRISNIRLDFLHKLTSVLVSHFDPFCLESLRVNNMLKNHKLAKSLADVGISAFNTLLE

SEQ ID NO: 58101 - protein, 497 aa, unknown
  TnpB Polypeptide
MTGLRKSPEERSKTETEVLHDVFTGIQKANLHSEERYAKKMDALRQAGGMKSAVACSKMKRITFAYPTRKEWFLPYGALDAIFKEIKHPVYCRMDSQVNQNAIRKTEKAWVGYFHARKEYLVHPEKFQGRLAIPGYIRTTGATAWWTVQTARLSVVQGKAYLRFVHCKEPLCIGKASVFAGMTYVKTEVKPYHGQFCVMVTFDDHVAEIPVPEHPSKILGVDVGLNNLLAVAGNFGNSPFVIKGGPVKAINQWFNKRRAKLLSDLTKGSDSTHSKKDSHALDALSRKREDTLRDIFYKCAWYLLRYARHHQVDVIVVGYNKEQKQEINTGKKNNQAFVSVPFEKLHQCIRVVAAKLQVPVVEQEESYTSQADVTAGDYIPTYGVDDEEKNFSGKRAKRGCYRCHDGKRMNADVNGAANILRKRYPDAFAGMDLSYLQITTNVVEIRDWYVPGNKGTAHKKHHPSPAAKAHHTERKDKRRELLLVFGKSEKTWQEKAA

SEQ ID NO: 58102 - protein, 445 aa, unknown
  TnpB Polypeptide
MKIVSTYGVKIKTYNHIFKETIGIYRHAVDFLIGVCLEEWEQIVPLKGQNRLTYVEALIHVTAKHPDVIYPEFDERFYKLPSYLRRAAINEAIGKVSSYKSNLANWEADDPKTRGRKPSFPKAGYIYPCMYRGNMYQRTGAYEARIKVYVRNTWDWLTIRLRKSDIDYIERRCAERKQCAPTLQKRGHGWHLDFPFMEEAELCATKIQDQTIVAVDLGINTTATVSVMRANGTILGRHFCKLSEETDRLTHSINRIKKAQQHGNRKTPRLWAKAKGINHDISVKTAAFIIDTAVLYNADTIVFEHLEKKGKVLGSKKQRLKLWRSQEVQKIATDKAHRLGMHISRICAWGTSRLAYDGSGTVLRGQKAGFPTYELCQFPNGKIYNCDLSASYNIGARYFIREILKSLDESSRLRMEAKVPPCSKRSTCTLSTLISLNAELMSLAA

SEQ ID NO: 58103 - protein, 526 aa, unknown
  TnpB Polypeptide
MPKARRRKDSSFETSVTKSVFLYGDPNKEKLALLKQMQDVFTALVNEKILMLDAREDLILQLVKNDKKDTVMRSLEKAARRKGLNSAFCQNAFDMAVTCLSNRLDTIRLDLLSEGAGIFARSKVLFAMSIMGKTKTEMVSAMESLKKDFYLDCASELRTMTDAAFALQQTVFQDLYAMKCLEYRIPQLRSVSVPLDSRLMTVETSKQVKAAYVIRITDPFQKNHRIQIPIDTSTHSLHKINSQKMAGTVMMQVRKKKLRIGWAYTRHIEQPKTAETVGVDVGITDSFHTSDGRQIGSMKEVIGFYHGTVEPSFAGQSDLRNKIRKINYYLRSHDLSDDVRRSLIEKMDRLSSMMQTMEAPYRKKRAYYHRLDAGIASAVHGYLQGLSHDTLTVLEKLDMREFKKSRRTNGMFSLFARGKLQHRLMEELNWRGFDFLEVAPDYTSQVCPVCNFLDDRNRDRKEFTCTCCGYHDDADHVGAINIRARASDKEILEICERNKYNHKNLQSALRTLYAKRHQEYNNTESV

SEQ ID NO: 58104 - protein, 418 aa, unknown
  TnpB Polypeptide
MLYKNKSKGGENMDSTEREIIYSTDERFDLIKNLCHLSKNLYNASLYDVRQYYFETKSYRTWQSQAPLFSKNKQPDYYALQSHLAQQVLMQVGRQFLSFFNNKSNKKKRIPKYKDKNGYNVITFNKVTISRQVDFDEDKQIYTYTLCKRSYNLKIQSTKPNVKMVKFVYDEANDLIKCFKIYEVEQPKLKRDNSRYFSIDPGLNNIVSIYNNIGIRPLLYNGRPIKSINQYYNKTNAKLKSELPTNVKSSKRLKQLSLKRNNKIDYEMHKISSHIINEAVKNNISKIIIGNNVGWKNEINIGRRNNQNFVNIPHTKLFNQLLYKGLLNGIEVIFTEESYTSKASFFDKDELPVYGENDNYKFSGKRITRGLYKDSKGNLWNADLNGGGNIMRKVSDKAAYKGIRKTKELMKRPILITL

SEQ ID NO: 58105 - protein, 408 aa, unknown
  TnpB Polypeptide
MKNVKRAYKIEINPTNEQKSKIHQTIGVSRFIYNFYIARNKEIYEREGKFVSGMDFSKWLNNEYIPNNQEMKWIKEVSSKATKQAIMNGDKAFRDFFKKAKGFPKFKKKKNQDVKAYFPKNNKTDWTIERHRVKIPTLGWVRLKEFGYIPINSMVKSGTVSKKADRYYVSILVEERDIKTSNSNIGIKISNSNTGIKISNSNNEGLGIDLGIKEFTVCSDGIKFKNVNKTSTVKKVEKKLKREQRKLSRKYESLKIRNKNIREGRATSQNIQKQIVKVQKLHQRLTNIRTDYINKTVANIVKQKPSYITIEDLNVKGMMKNKHLSKAIASQKFFEFKNKLVFKCKQNDVELRVVDRFYPSSKTCSNCGKVNKDLKLSDRIYRCNCGLAIDRDLNASINLKNAKEYKIA

SEQ ID NO: 58106 - protein, 399 aa, unknown
  TnpB Polypeptide
MSKTKRAYKYRFYPTDEQKRILAQTFGCCRFVYNWGLSTRKTAYSQHGEKLFYNDLSAMLPNLKKEHPWLSDISSVPIQQSLRHLDRAYKNFFEGRAKYPTFKKRHGNQSATYASNAFTWEDGQLTLAKMDEPLAITFHRAFPKGCKPSSVTVSKDCANRYFVSMLVEEEIKPLMPVNAQVGLDLGLKSMVILSTGEAVGNPRYYAKDEKRLAKAQHRHARKKKGSKNREKARRKVARVHARIQDRRRDYQHKLSTRIVNENQVICVESLAVKNMVQNHSLAKAVSDVGWGEFVRQLEYKSQWYGRTLIKIDRWYPSSKTCHDCKHVVEDLPLDVREWVCPECGVWHDRDINAARNILAEGLSVSACGGGVRPARAKARAGNPQRSRNARSRGREAPAL

SEQ ID NO: 58107 - protein, 509 aa, Desulfovirgula sp.
LKLLATYQTRIDDRESYPFFEAVGEYFGRLERKLYVDCHIKGLQVKELKRRYIAEHGITARQFNSLVKDLTALLDSVRESLRWRERDLLGRIESVERAIKKKEKEREKLLKSLSGMVPRSEKWQKKVKRLKWVRFVLHQKRRRLRNLRHKLEAVRRDLESGLCRICFGGRELFKAQHNLEANGFRDHAEWLLAWREARSGNFLVLGSEDETCGNQTCTYARDNTLRIRVPDRFREQFGRHILLRDVVFPYGQEHLDRAKEPVCVVKGRKIYRAVTYRFVRRDGTWYLFATVERDDPAPSTSRWNGAVGIDLNDGFIQAGEVDRFGNPVNEIKVPVAMRDRSRGQIAAALGKAIKEVVLYAKEKGKPVAIEDLDFSAKKQTLRESGSRYARMLSGFVYGKFRAMVESCCSREGVELLKPKGRHVDPFATSAIGQLKFMARYGLSPHGAAACVIARRGLGLGLERAPEVAVLRMPPRGRTPRRSYWRRVCRALKRGPAFGVRVDVLYADGF

SEQ ID NO: 58108 - protein, 300 aa, Desulfovirgula sp.
VVLSGGQGRRERIAIAGARHIPAEIHSLTLSHDRKSDAFYANVTYWAEVRSEQEERPLQVVAFDPGRKVFPTGADDSGLLVEVHSRTNSINAYFNKQIGRVKSLRDRCRRGSRRWKHLNKVLDELYRRRRAQADQELHAISKLLAEGPWDIIVVGKPDKQGMVSKDPAKGKGNAKINRAVQNDWPLVKLLGRLSYKCHLRDRYVKSADERYSTQRCSRCGHRQKLGPSVRVYCCPKCGLIVGRDENSAVNLLNKILAELARPPVRPEGFTVRAVYRRAPWGRWYTETSRVHNNMALASGA

SEQ ID NO: 58109 - protein, 305 aa, unknown
  TnpB Polypeptide
MYLTERHVVKNNKELDELCFNSKNLYNKALYLVRQHYFETKSYLNYYDVNRLMVDSKDVDYYTLPCKISNQTLRLLDRNFKSFFSLLKKKQSGNHNKPVRIPRYLDKQGRTIAVFPKDAVSKKYLKKGMIKLSSLSIQIPTKVTESDLVEVRVLPRNNHHVVEVVYKVEEKESKIDNKRYVSIDLGLNNLATIGSNVVKPFIINGKPLKSINQYWNKEKARLQSLLKGNKKTSKRIERITNKRNNKIKDYLHKSSRLLVNFLVSNDISTLVLGYNEEWKQNINIGKKNNLSFSSEYVGLTFFIVT

SEQ ID NO: 58110 - protein, 211 aa, Okeania sp.
TDCSGNQIENPRFWRKDEHKIKRLQRRLSRTQKGGQNRNKARNKLGRAHLKVSRRRNDWVCKLAQHVIQSNDLVAVENLRIRNMVKNHHLAKSISDAGWYKFREWLEYFGRLYGVPVIAVEPAYTSQNCSNCGEKVVKTLSTRTHKCPHCGYVAGRDQNAAENILKAALKQLANTVGQTEINASGENGLCFVGETQPSKSARTKRKRKPKS

SEQ ID NO: 58111 - protein, 384 aa, unknown
  TnpB Polypeptide
MSADEFEEQMIELCDLYDMVSVQFRIPHVISEAIPFDSRLMKIEPSTDTVMPYVIMLSNPFVKGSRISIPVNTSRHSLHKIQANRMAAAVTVKPEGTKVRIGWSYAKSFRKPDTAVCMGVDTGIKDSFFLSDGRSIGSMKEVIDYYHREVEPAFAQLSRLRNKKRSISYYVRHHKNLPLDVRRSLIQKMDRLEHMIRAADAPYRKKRAYYNMLNHEIKQDVKAYMSCITHDTLTVLELLDIKEFEKSHKLNGDLSTFARGKLQQKLMSELNWHGYDYVEVPPDFTSQTCPTCSYRNAENRSTVNSKLFKCGCCGYEDDADHVGAVNIRNRAADRELLKLCKDAKNHKEMQSRLIRLLDDRHLEWQMQQLKTPILQETGNTVSVL

SEQ ID NO: 58112 - protein, 440 aa, Haloferax sp.
MDWQRNTVRQLYNHALNEFEQIPEDAGTLRQRVWMVRDTLPALKGWWTDLKLVYSTVLQKAVERIRDNIQNLGKLKAKGYDVGSLNWKKPREYRSFTYRQSGFELDKKSGPNGRGLLILKKLKGETREIPIRIHRDLPDHEKVKEVTLKKEPTGAWYASFCIETETPEKPAVEDLKPDDTVGLDLGVLNFVHDSDGRSIGRLDLSDDRELLKREQRSLSRKEYESNNWEKQRRRVAEIHARMSNRKHDYKHKLAHFYTTEYDAVFVEDLNVKGMLESRGNARNKAEVGWRDFITTLEHHGEKNGCHVVQVDPRGTTTECAGCGVETRKPLWVRKHSCPSCGFELDRDWNASLNVLSRGLDKLGVVHSEDTPVETATAVSTDGLSRGLDKLGVVHSEDTPVETATAVSTDGGENSSTVVDASRVTEAGSPALKEATRSVAD

SEQ ID NO: 58113 - protein, 365 aa, Vulcanisaeta sp.
LRPHKRFWQYWWRVLNGEAGLGRTLIIKRKTNKWYAIFIFEIKPKEGTPQSVISFDINENTVAISRIDIETTVDKVADWNRQYLTPELYMIRTDFGRLARRYEKVRNTIIERLKPHFTLPNGNYVNVTNTREFRKHVKRLREGDRKVGRVRHVANELTKTPAIIVTEELGSNPQESMINGIVKSELRHRIKQTPFKALEKAVEDKALERGSKIFRVSSYRNSRVCPIHFTRLVETNDWHILQCPLGHYVHRDYASVMNMAWKLTPEAWTKSVWWDLRKKMDWRGYESESNPLIPQNIAQLLWLLMRNAKASLEQSPAMLARGKPMNHHRIQNEGGGEGTPHALLGQGGGQTNVRTPSNEYLLDIA

SEQ ID NO: 58114 - protein, 367 aa, Vulcanisaeta sp.
MRVRRAILIRLPRDECDAEYIRRLMALTNLAYRRYEVWVPDLLKNIQYQLYGSFKNFKDSLVLGTVPKRWFTRAWVPLKTLRVYGDGSMKGDRNAPVVLDFRGNAIKLRQVCRNESGYSIEAPMPIWVIERVKEGGVIKFAMIGLRDDEPYLALVAERVVEPYKPSEYMLVIDVNAWSNGVAWGLIRDGSIIRWKPERPRLSEIEGLYNISVRLGRKYGRLKRLGLHKTVEGRRLWRNIKKVRRKIYAKLRDYAQKLVHRLVRKALKHRALVIIDDMIEESRRELIEEKIPRGLRKIYLAETRRFVKLLITQLRWYGVPYEFKRLPSTICPICGHGLTQLPGRIMVCTNCGFKAPRDKVPMYWAMKL

SEQ ID NO: 58115 - protein, 389 aa, unknown
  TnpB Polypeptide
LLKNYKTEINPTQEQIQKINKTIGTCRFIYNFYIAHNKELYSKCEKFMTAKSFSVWLNNDFLPNNPDYSWIKEISSKSVKKSMENAYTAFNKFFKKQSGFPRFKKKNKSDMKMYFVKNNPKDCFCERHRINIPTLGWVKLKEKGYIPTTQDGYVIKSGTVSYKAGKYYVSVLIDIPDIEKLQLNDFGLGIDLGVKDFAIISNGTVKKNINKTSKLRKLEKQLKREQRCLSKKYEDLKRRNNKMKGEATRQNIQKQVLKVQKLHHRIDNIRTDYINKCVNEIVKTKPSYITIEDLNVKGIMKNRHLSKAVASQKFYEFRTKLKVKCKELGIELRIVDRWYPSSKLCHECGCIKKDLKLSDREYICECGYHTDRDYNASLNLRDAISYKIA

SEQ ID NO: 58116 - protein, 274 aa, unknown
  TnpB Polypeptide
MPQQVLTIVCQLDPTAEQIVKLDQVLQSFAEACRYINRTICPSLTNKNRIQKGVYRAVRQQFGLTANLAVRACARVAAHRKVGRVKEFRATSVDYDARIFDYREKDQSVSLSTLDGRERIPLVVGDDQIEKLKGKKPTSATLCKRKEGVAEPQTGKGVLGVDLGRTDIAHTSEGDHWNGQQLNRRRDHDSKLRAVLQQKASQGTRSSRRRCREEVRACFVLLQNITGSGLLKSPDFSQGKFTGHSRPAQGLTLESMTCALKTTRADCRLFHLLR

SEQ ID NO: 58117 - protein, 106 aa, Clostridioides sp.
VVVVEKAYKFRMYPNKKQQELINKTFGCCRFVYNKYLAKRIDVYKNDKETFTYKQCSSDLTNLKKELKWLKEPDKFSLQNALKDLDNAYEKFFKEKAGFAKFKSKK

SEQ ID NO: 58118 - protein, 465 aa, Ignisphaera sp.
VGCFLQASLALTNDEEDALIVTRTVIVRSERISKKLFRVFVELEGMYRNTVEQLVIYSAREGITSFIKLKALKYREMRNLYPHLPSHYVHTACQDASTRVKSFIKLKKEESTNKKYPSVKRISIRLDDHLWRFEGLTRIAISTHRGLIKVDLIPHKQLYRYFNSGWRLASEARIKIDKKERRLIAYLTFRKDVRLYKPSGYIAVDVNENNVAVLINRKAYLLETNIERITLGYYYRRKRIQKKYDKICGVKCRAKRKILRKLREEESKEDTRWKVANIIVREAVKHGYGVVLEDLGDKPADNMISRIKDEQLRHRIFQAAFKGIQRAIEEKAKEYGVPVIYINPRNTSKQCPIHRSEIKYNGSRIGVCSTGKEKWHRDVAACYNLLFKALGGDGSSAPSHPGDDLLNLDGSHVPFGSTAAHEPIGIKRSLWARLKSLDETMNEYKMIGMNIQGQTVRLSRMEHYR

SEQ ID NO: 58119 - protein, 460 aa, unknown
  TnpB Polypeptide
MSRKVKRAIVFELSRLTEEQEIILGYLTYHAGRLWNQANYLVRNKLAKPHKFDLYNKLKDTSIHLRSLQSRSAQIVLEELSRGWINFFRFLENPEKFKEKGINVVRPPKFVNPDIPHRVVTWDKTGFSIEGSRVRLSISRSLKKHLLEKFGFSPEFLWIETGYKELEKLRVLNVQIVPYKSYGYVSFKLVVVYEEESPEVKARGNKVLAIDYGKTNFATCVIEGNPISYIIDGKGLKTLLWKKLKKVAKLQSRLDNLKSKGLPTIVLEKKLHRLWKSIKNLLRDYAHKVSNLIKELAIRNGVKTVVIGNIQESKNKESNLPAIVNQMFRLMPHGLVYRYIKYKLEPYGIEVQPPINESYTSQTDSCDERTTVSKKGKGLGRRIKRGLFLSAVKRLINADVNGARNILRKFKKEWFDLVTGLGKVVRVRIYKFSESISESLLYAGIGVCGGVNPPRGIRTG

SEQ ID NO: 58120 - protein, 366 aa, Halococcus sp.
  misc_feature (18)..(18): Xaa can be any naturally occurring amino acid
LATETLGTRKRTRPATAXQRVLAELGEAFSGWFGHRNSGNEKANPPGYRKNGDEHPRSTVTFKQAGFKHDAKNQRIRLSKGRNLKAHRSDFVLCEYDVIGPEGTTVENVQQVRAVYEHGVWRLHIVCRVEVEVAEPPGDRTAGVDLGICNVAAVSFGDESLLYPGGSLKEDEYYFGKKRAETDDSASREARRLDQKHTDRRTHFFHTLSKEIVEQCAERGVGTIFVGDLGGIRDDENGNPKNWGKHGNLDLHGWAFDRFTTMLEYKAEMQGIAVETVSERDTSKTCSVCGTKADSQRVERGLYVCDECGTVANADTNGAENIRQKSTSESSVDEDRSNGWLAQPVVRLFDKTRGSFLPSEQATHEP

SEQ ID NO: 58121 - protein, 402 aa, unknown
  TnpB Polypeptide
MIRTYKFLLRPTARQASAMGEMLRDHCSLYNGALQERRDAYRHASKVTVRYGAQSAQLKDIRAFDPERQGRWSFSSQQATLRRLDKAFAAFFKRVEAGRKPGYPRFKGVGHFDTVTFPKDGDGCRWDSTPHDPQTRVRVQGVGHVRVHRHRTVVGRVRTIGVKREGDRWYVVLSCDQVPALPLPGTGAMVGIDMGVKHFLTTSDGEHIASPRFLGAAADDLAEAQKHLATFPKRTRQRTKKHRAAARRVARIHTKIRRQRLDHAHKTALALVRVHDVIAHERLNTTGMTRAPKPKPDPEQPGAFLPNGAGAKAGLNRSILDAGWGVFLAILANKAESAGRTVIAVDPRNTSRTCPSCGHIAKGNRVTQAKFECMACGFAANADHVGATNVLNRAGPALRGTA

SEQ ID NO: 58122 - protein, 489 aa, Sutterella sp.
MQTGRSFAAHFEDDASREAYLAWSAAQMLVYNAKVDESNYFWKFRCKFWSPEPLPKPDQKYAHLVNPDTVPWVKEVPSAVRGIGAYRFYQAMTRFMRGLSKRPHRKPIRNADRQLTLTRDYFSVKQVSQKWWELTFGSKKKTAGRFRFRAHRRFEMPAMVMITCTNQCLQLGFSYEDELTEFPETEEEILARLRKLTPEELAERTIGGDVGVKVRLQLSNGESLNLSEIEKTRIARKDFGLRRHQRRLARMKPGSRNYKKQTRKIAKTYAYEKNVNNNFCHQTSHKIAVMEGIEVVVLEDLNVAGMVRRPKPKYDNKGRAQPNGAAAKSGLNKAVTKSHFARLRTSILYKCRRNGKVAVFVNAKNSSRECSSCGYTAKKNRPSQAVFCCGREGCGHEENADLNASRVIRKRGVKMILEGLVNKKESKKLLRVPRAKKRNIGVDRPESMPAEPSVCSCVLHGVGIVAALNQEADAARVCESRSSGLQAGE

SEQ ID NO: 58123 - protein, 381 aa, unknown
  TnpB Polypeptide
MQRKEMQEHLQLSKNLWNDMLELTKDTYATYAKFSTAGALNELAKTSGLYSQVAQDVFRRLNKSIFGMMAKRKRGLKAGFPRFRSMERTKSLTYPQSGFSLNGKKLKVTPFGEINIRIHREVIGAVKTLTLKREASGKWYAILATEEKPKPPAENNGSQVGIDLGLVNFAVLSDGTVIKNPKHLRKYEKLLKKKQSELSFKKKGSQNRKKAKRRLAVLHEEVRNTRKDFLHKLSRQLVHAHSFIALEDLDSADMSQQNYGKSINDAGWNEFTNMLSYKAESAGSRIVFVNPANTTKECSGCGGTVKKELWERQHNCHSCGLSIDRDLNAALNILARATNGTTNRSIVSSLRATGGTPGSNACGDVSAETSMKQDATGFIPW

SEQ ID NO: 58124 - protein, 344 aa, unknown
  TnpB Polypeptide
MLAERKDIYEQHKDNKEELHKQKLPTPAKYKSEFEWLKEVDSSALCNAQMNLQTAYNNFFKNKNIGFPKFKSKRKNKNSYTTNNINNFTSIRIKNNKIRLPKLGFVKFVQHRKISNNQTIKSCTISKTSSGKYFISILVEYEQEIKLISPNKDNVLGLDMDMKNLYTDSQGVRAEYPRFYRKMLPKLKKEQRKLSKCKIGSSNRNKQKIRVARIHEKISNCRKDFLHKLSKELTDNYDAIIIEDLNMKEMSQRLNLGKSVMDNGWGMFTTFLKYKLENQGKQLVKVDKWYPSSKICNKCGEINHELQLLDREWVCNNCGNLLDRDYNAAKNIKDEGIKLLGLVA

SEQ ID NO: 58125 - protein, 438 aa, Clostridiales sp.
MKQITTYGVRIHAASLKPVQDMICIYRQAVSFLINVCDEQWNKIAPVFSLLRRKTLVEELVHCTKTRKTVQYNQFDTLFYKLPSYIRRAAISEAIGAVESYRSRLKAWNENPIGKGPGLPQAGFTYPVLYEGNMFEQTGDYSARIKVWIRNTWDWMDVTFRKSDADYILRHCGDRHKLCPSIVKNGRKWELMFAFEEEVSLRSVDVKDQKILAVDLGINNACACSVMKSDGTIVGRRMFRLPVQEDCLNHLMNKVKKAYKQGHKHIPTLWNSIENVNHVIAVETARFIARIAEEYQVDVVVFEKLDLSGSKKGKSRRQRLHLWKGRDVQSMVACKVHRLGIRISRVNARNTSQLAFDGSGYVLRDKNNYSVCQFQTGKIYNCDLNASYNIGARYFVREIIKTLPATTGLGISAKVPECTRRSTCTLSTLISLNVALVV

SEQ ID NO: 58126 - protein, 349 aa, unknown
  TnpB Polypeptide
VEVLAGGDAPTHYKKLVPVVFDQLPDWHIETPRQIKVGAVMDACQAVKNAKIKCKGTGEFQKVSFRSRKRKQTLYLRADSLKEKGFYVRLLGEMKMAEPLPATLQGTGKVSERDTDTEVKDSQLVMENGRYFLCVSYVEKKKTRETSGRIVALDPGVRDFMTFFAEDCFGWLGQQCINRIQRLCQHCDNLYSRATREERPLRRALRKATNKIIVKIRNLIDELHKKIVHFLVTNFDIILLPTFETKQITKRGARKLRRKSVRQMLTLSHYRFKRFLKHKAYEYGVRVIDVCEAYTSKTVSWTGEVVANLGGSKVIKSSEGAMMDRDLNGARGIFIKTVARALTVRPYLA

SEQ ID NO: 58127 - protein, 369 aa, unknown
  TnpB Polypeptide
MKTEKYEFYHQSNLIQIGNLIDDLHGVHVHLLMLQRRYYRIYGKYASFARICNHITKLKQRTKPHWNQLPSQVIQQVAKRIHLGYQKFFDNLKDRKAGKTKRKVGRPKIKPTHKYNSLTFTQAGFKIEGNRLRINCLGKSFTFWKHRDWTGTIKTVTLKRDNVGDYSLYLSCEDCEPSEKLPLTGNVAGADLGCKTFLTLSDGTRITSPEFYKQGLKAIRSANKALSRKQYLSSGWFRAKRHLARVHKDIANRRRDWFFKLALRLVRKYDKIAIETLNLEGMKKLWGRKISDSAFGEFALILQWTCAKYGKTLLKAGRWTPTTKPCSECGHLNENLTLSDRQWTCPDCGSHHDRDVNAAINILQAGVPA

SEQ ID NO: 58128 - protein, 414 aa, unknown
  TnpB Polypeptide
LFDCGVSVEEIWYTYGVKRVVTLSLHPSADQRTALHATMRAFNAACQYISDTAWDAQEFRRVPVHHLTYYETRARFGLPSQLAVRAIGVVTDSYKADKTRKHTFGQRSAVVYDERLCKVGSTTVALRTLDGRESITWAGGGYQKSQLAAALRIGECDLLYRFDKNRWRLAVTIDLPDVPLTPTVDAIGVDQGIVNVAVTSDGDMYGGATVLGVRRRYVHMRQKLQKKGTKSARRLLKRRAKKERRFQQDVSHTITKRIANYARATGRAIGCEDLKGIRSRVQVRRSQRRTHSSWAFGQFTAYLAYKCQERGVPFALVDARYTSQTCSRCGHCEKANRHTQSSFLCRSCGFAANADWNGAENIRVKALDALGAGACSTTRTLGVTRGVACEQAHGLEPWAVDHRLYRSQRLIPTD

SEQ ID NO: 58129 - protein, 307 aa, Streptomyces sp.
VVEALAAHLAVQPGDLRHGTLMVPGAVLGLAAREPGQLLLRGFEPLGGATAVTRTLHEATVGIGEEAGYAQIDTGHAAGRRKRLGLVLFGGEHDEPLTALTLDRDRLDLASHRTVLVHLYVPHTLKADAVHGVMRRAVPAAAVPVLGEVHRVEPVTDARREFHHQLSTKLISENQGIAVEDLSVAGLARTRLAKSVHDAGWSSFVNMLEYKAVRYGRTLVKVGRFTPTSQVCSTCGVKDGPKPLSVREWTCTACHTVHVRDHNAALNVQQAAGLAVSACGAPVRPEPVLAQREETGSHGFSTGNRAA

SEQ ID NO: 58130 - protein, 455 aa, unknown
  TnpB Polypeptide
LEQRLLAMLMGVKKIRIISKHPDPDLLLDLWEMSEYVRTLKIPIHYLTTKRKLSILDRLTARLTYAVRLFCEEVSKTGEIPRSRRDIRQFSGYVAEKTGLSAGFIQQAEDTALWMWRSYKELRREWEFMVKRAKKGTKWYKKLLKREPSPPCTSKRSKLRKVPTWFDNRTGEIQKASIKLTEWVAHISTLKKGETVDILLNPSERHREMLERAERIKSFQIVKKNGKYYVHIVCVYQVSSPELKGVAGVDLGLNRPLSAVLVDEGFRFNILQNGKKEKLKELNNRVGHLRRLEKWNVLKKLRHRRLNIAKEEDRKLAKKYAKTSEGYHTFIGHPRHILYQKFRGNGERLGRKQLQGWSFLRQAHYIIHEKTKVGDKAEIVNEWWTSSRCWKCGAKVQRPKQSRIVCKNGHQYDADFNGCMNILQRGISSLRSKSLASQQALNRAGATVDIALNRR

SEQ ID NO: 58131 - protein, 529 aa, unknown
  TnpB Polypeptide
MRTKDQASRVANVTGGTILLNKDNKLTSKVQVTDFEVYRSDIEKISVLFKLLTDEGTEISPGWAFRGTVFEVEWPREQERQSLIWSHFGARRFAKNWALAKIKDDLDKKKNDPTHVSIPWTFRDLRRVWNQEKATVAPWWVTNSKESYSAGIMDMVSGLKNWSDAKNGKRKGGRVGFPRFETRRKSHNRVRFSAGTMRLERDHRHITIPVIGSLRSKENTRRLERHLTKGNAYILSMTLSERWDRLFISVQYAARTKIISPTKAIPATPSSKAGIDLGMRTLATIADNDNQIFKIENPAPLRDTLAERRRESRKLSRRIPGSRGHRAARAKLARLDRKAVYIRRETYHQLTRQLVNTYGEIHIEDLNIAAMKRSMGHRAFRRSVSDTALGMFRPMLAYKAEDAGTSVVLVDRFFPSSQIHHECGGLLTGKHKLDEKLICQSCNTEVNRDENAAKNIRDWPDSNASSGLVEASVLPVPRPPSGGTDGRSDDRLTGHRTRLRKSSSNRGRGPERREPKSENQTEEPREGCV

SEQ ID NO: 58132 - protein, 539 aa, Streptomyces sp.
MRVLAVPFVVPGPSGVAVRDRLKHLTPEDERVLRAVGGYQGVLASADLKIRCGQGLEHGADTWAARKRGLTKVSSSRIAGAITKASHDQWALGRRGQAAHVRSLEAGIRTLRHRLSLPLGAKGTKREAGGYRSKGEWFRKSRRLADLETRHTAAVTDWRAGRVRVVRGGKRLLNTRHHLAAAGLTVEQWRGRWEAERWFLGADGESGKRFGNETIRVTPTGQVSIKLPAPLAHLANTKHGRYTLASTVMFAHRGVEWADRVQANRAVAYRIHLDTVRGRWYLTAYWQRPLVRTVPWEAARTGGVIGVDTNADHFAAYRLDTHGNPVGEPHRFAYDLSGTTTHRDAQIRHALTRLLHWAKQCGVPAIGIEDLDFSSEKTREKHGRRKRFRQLISGIPTGKLKARLVSMAAEQGLVIVAVDPAYTSMWGGQHWQKPLTTPRRKMSRHDAAGIAIGRRALGHPIRRRTAPPPHDRRDRVGHRTAQAAPGAREREGTRPPATDHAPAGVPPSGTRKRQPSAPKTVRDAPRTHQWVQHPLMHPG

SEQ ID NO: 58133 - protein, 406 aa, unknown
  TnpB Polypeptide
MIVTKGIDVRLYPNKGQANFINKMVGAVRVVYNASLYRRQKYYEETKTTLKMKPTDLYDEFPWMKELDSQGLCNAFMDLNSAYQKWFGSLKGKNKGKFKAPRFKKKSHAGSYRNAMCYKEITKLFQGNKIYLPKLKLVSFKSHVDLSRIRKIYNVTIKKTNTNKYFCSICCDYEVPEYKQTGNCIGLDLGIKDLIITSDGQKFENKKFLKKSEKRIKHLQKEFSKKKKGSKNQEKARLKLAIAHEKLSNKRKVYLHQLTTALVKENSVICIEDLNVKGMMKNHKLAKSIADCSFSMIRNMLNYKCKWYGRQLVVIDRWSPTSKTCSECGHIMQGWNLGIREWDCPNCHTHHDRDINAAKNILSEGMKILDRAETARIEACGEQNSVSEMKCSCSAKQETNRFLVGL

SEQ ID NO: 58134 - protein, 402 aa, Escherichia sp.
VKRLQAFKFQLRPGGQQEREMRRFAGACRFVFNRALARQNENHEAGNKYIPYGKMASWLVEWKNATETQWLKDSPSQPLQQSLKDLERAYKNFFQNRAAFPRFKKRGQNDVFRYPQGVKLDQENSRIFLPKLGWMRYRNSRQVTGVVKNVTVSQSCGKWYISIQTESEVSTPVHPSASMVGLDAGVAKLATLSDGTVFEPVNSFQKNQKTLARLQRQLSRKVKFSNNWQKQKRKIQRLHSRIANIRRDYLHKVTTTVSKNHAMIVIEDLKVSNMSKSAAGTVSQPGRNVRAKSGLNRSILDQGWYEMRRQLEYKQLWRGGQVLAVPPAYTSQRCACCGHTAKENRLSQSKFRCQVCGYTANADVNGARNILAAGHAVLACGEMVQSGRPLKQEPTEMIQATA

SEQ ID NO: 58135 - protein, 312 aa, Bacillus sp.
SLGRTNGKTKSPRIKVPIIIPYRFYHEITNVVMGEQIGVNPKGKPIIDHQKYSVEIIRKQNDFYVNITFDETEIGRVLDFKETPQSDLIAGIDVNPDRIAVSLCTKQGNFKGSKIFYLHNLDTFSTNKRTTVIGQIVQQIKKWLIENNVGGIVLEDLKFQQSHDTDKYSNRKFHQFTYKKMLDSLIRMALRNGFSVKTVNPAYTSVIGKLKYCKKFGISVHETAAFTIVRRGLGFQERLPKEVVLLLKNKITTKLRIFVASMEESEKDTNTKKVYKKWLQTIKTWKDHHNWKLWSILHKTVYMSNQQLLFKI

SEQ ID NO: 58136 - protein, 305 aa, Bacillus sp.
MAQSVMKTVIARYKSAKSNGNEWSLIEFKLPEYDLVWNRDYSLTQNQFSLNTLDGRLRLNYERKAMKKYFNGTWKFGTAKLVNKYNKWFLHIPMTKDFPEPNHINVNNIVGIDLGINFLATTYDSQGKTTFYSGKIVKHKRGAFKATRKQLQKKQTPSARKKLKQIGSRENCYITDVNHRITKALIDKYPRGTIFVLEDLKGVRSATEKVRVKNRYISVSWAFYQFRQMLEYKTKMNGQKVIIVDPKYTSQTCPKCGHVEKANRNKKLHTFKCKNCQYQSNDDRIGAMNLHRKGIEYIGVVTTGV

SEQ ID NO: 58137 - protein, 276 aa, Lactobacillus sp.
MQDKNIDSLAKANAIQNYQKAWKMFRKVHSSGTPKFHKKSYRLNYQTNAQYGKDAKMDIYSASVKFLDKNHISLPKLGRLRVSGSHRRIIDNKDDIRIGTVTISKDTADRYFVSMQLGSDTPFVKKLAKTNSQVGVDLNTENFLTDSFGKVVANPRYYRTIKGKIAKAQKVLSRRQRRAKKEKRSLRDSKNYQKQRVLVAKLHDRVRNQRNNFLNHVTTALINNHDLVVVENLRSKNMLKNHALAMSISDVGWRSFLQKLDYKANLYNRTVISVNP

SEQ ID NO: 58138 - protein, 433 aa, unknown
  TnpB Polypeptide
MKTVISAKLKLNTTLEQFAQLRMTQLAYRDALNFVSKYAFEHGKMSNAVSLQDGTYDEIRSRFGLPSQMACSVPRQVGATYKGLWTKVKQNAEHRKSGRTKKRYKGLDQAPKYISPTVTYQYKKDYSFKTHVRVSVLTLDGRVVIPYSGYDKHIALIRDGAEIGAAKLWYDKSKKQFYLLVSLEIEIPDPTPQTHKGCAGVDVGVRYLAVTSNTRGNHSFHSGKQVVSRANHYARLRKRLQKKGTRAATRRLVVISGRERRLKQDANHVVSKSIVAQYPNHLIGLEHLTNIRERTKRKKGKKASKKQRRANATYSKWSFAELQSMIAYKAQLSGSMAIKVDANYTSKACPMCGHTCDANRPDHGLLFVCQNCHYTLHADLVGARNVTMRTLLIRQDWLSTGTLSECPDVSDKDAKAARLSRFAELRWSLDTSP

SEQ ID NO: 58139 - protein, 688 aa, unknown
  TnpB Polypeptide
MSKNIKLRVSFTQPQYSMFSNALFAGQMFRNHCLKFLKQRYFQKKNWLKTNTNSPEYVAYLEDNSKYIAALKAFKELHPSKAEQKAHKNDAPVKPERFHALLESNAVALNLELTAQLDKAKAWLFNNLPNFKTHLKKYGIEVPLKSPQNICVFYNSLPLPIRKALGKSARNENVLLYVLGSPRSCLVQVLQDLDKTFAKAFKEREKLLKNPSGKNNPNSAGKSNSTSGFPKFKKLSRSGGIRFQLDDRHTSFTQAWSNQQLVSSEFGKLSWRDSGYILPQTPAKMLTLKKEKNGHVYAVFYGTPAYNSKRTQQHDRAVARKTIVSPARSIEEFFNTHSVSIDLNRKSGQIQVVTNIEQADSSHVLSLHDQKAEAKRLKKIKARESYIKRQQQKLARQDAARKKGRGKRKNPNGLHRVAKHSVRRMQTQDKIATACAKDTNQAIQHMRHLAQKLIDGKTIVFAENLGVQSMLESLNKTRQTASTKTKTNRRKRKNNNRSQIRARFSMFMNILEDTCAKNGVVLLQCNRYDPTSQLCSECGYHWGKLDTTVREITCLGCGVNHDRDVNATKNITFLSLYRYAQTLEKESAEMQNVKQLGLNPNHKPLAESVNGRQVGIAHLSEIAHEDLMLYINGNYPIKTVLETIEKLEKNYKASLKKSEQQSAVSVSCVTTHHPRFSKKPGTKFSIAG

SEQ ID NO: 58140 - protein, 599 aa, unknown
  TnpB Polypeptide
MRKTPATTKKNTDDVEDIPTSSCKFRAYVNDQQHSVLGHYLYWVQKFRNEVVAFCEERRKTRGLWLHQHPLLVSGWKALDMDAELLPENISGSDVNAASKWLTNRLEQARLKITSALGWNIKAPKQQLRAAVYNVWVNLSAEERKEIPDAWLLTLPRTILDQCLQDMSKTYSKALKDRSGKKNAKKFGNTNKMAGFPQFQKHSYPYSIRFQISTKQNKTYVDSWKTAYTDKRKEIYIPSLGVVKFRDSQDLPAIPPEMITVSRNSSGQFHISFVNKDPTSKTNARLRNVNDHALPMEQVYDHVLRQYVMVPVTRGGDVGLKTLVTYSQKLAKQQADAEKKEVARIKFFQRQEKRLRLANKSLARKKNGSKRWLKQKIKQGRIHTQTTNQRHDYLKKEARDLVEHTAIVCLEDIFVGVMLKNKHLSKSAADASLGAFKQYIQWEAQKAGHLVIECGRFDATSKTCHNCQYYYKDLTLKERSWVCPDCNIKHDRDENAAINIRQMALLRVVNGLEKGTLVLSFPQKSKAKKGSSASGDGAKMLSPYPLHKDLTAFIERGGLTSLLTRNSVNESQVGANQRLLSDEAFILPKQPSHICKERV

SEQ ID NO: 58141 - protein, 433 aa, Neosynechococcus sp.
VVWSAANGEPWKEDKSSLRSGKQDKPFNPRRSAYEMQSSGLVALKQARPWYKTVSADVLQQALRHLATAFNRFFQGKSGFPQTKSRNDFNSFEFKPKTVKVNGNHIVFPTLGDMRFFKSRDIPQSWEIRTVTVTREVNGWYASLLLRDDSIPDLPKKTIDELQSVNGVDRGIKKIAAMADGTVDPNPNIGKRFQRHLEIRQRRLSRKKKGSKNRFKAHQCVARLHQKIRRVRDDFQWKLARKIAASADVIGFEDLNIKGMKARCKPRKDPETGMFIQNGQAAKSALNKAISDASWYNLRVKTEHQANKLGHWVIDVPAHHTSQECSQCHYVSPGNRDGEKFVCENCGHHEDADVDAAVVIAQRTAQKLGIASLRVVSPKVTPKPELTGCKEISPTLVGEPGNQTGNRERVAVIVQMSLFEDVSGESPSIPLCG

SEQ ID NO: 58142 - protein, 422 aa, unknown
  TnpB Polypeptide
VEYRRTAVIKLDTPAGADSLLQETVEQFKHCANTASEWCWDGRRQILKESGCQPETRRVSGDDDGFHVTSKAKAERALYDRLRDETDLTANLVQKGIRRAVEAIKSGVSRLERGESTSQPHFSADSAVYDKRSATFHRDHVSLSTPDGRVECDYILPDDSETPPTKYVTNEDYEFRMGHLQYRDGDWYLHASMRKVEEGTEPDTEHRTVLGVDLGVNNIAVASTGTFWSADEFNHWNREYEKRRGSLGQCGSRAAHENIERVGRKADGRFSIYLHRVANELIEEAVENECSHIVFEKLTHIRENIPEATWQHRWAFRRLYGYVEYKAEEYGLEVVQVDPRNTSKRCSTCGFTHDENRNQESFECQQCGYENHADYNASKNIGLQYLRRRQNADDGGAPVDVRLNRGTLNVSGEYQPPASVEA

SEQ ID NO: 58143 - protein, 411 aa, unknown
  TnpB Polypeptide
MVKESKAVMKAFKYRLYPTRKQRETLQFTLDRNRELYNAALEERREAWRMSRLTVTYEMQSAELPEIKEIRPEYKEIYSQILQDTLKRVDKAFKAFFKRCKEGKTPGFPRYQGYDRYDSFTYPKIEKLKGKPTVTIENGRVALPKIGHIKIKQHRPMEGKAKTATIKREGEHWYVIFACEIEMQKKLPSTDLAIGIDMGLKHFMTDSNGDVVDNPRFFRTSHGKLKKKQQRLSKRRNKSHRRKHAAQLVGKAHKTVRNQRRDFHQKEAQTLVDTFETIVFEDLSMHHMVKRPKAKQDENGKYLPNGAAAKGGLNKSILDAGWASFIELVKHKAEYAGVTVMQVDPRKTSQICSACQKEDEHKDLSVRTHVCTHCGVVLDRDHNAAINILDRGLGRSLRETASLGTFQEATA

SEQ ID NO: 58144 - protein, 406 aa, Okeania sp.
MLTYEMKMQGTPSQLRKLDSAIRTGRFVRNSIIRAWMDREIKSRNDAYKYCAKLAHNIEFPWAKQLNSMSRQAHAERAWAAIERFYKNCKAKVVGKKGYPKFKKYQVRASVEYKTSGWKLSEDRRYLTFTDGFQAGTFKLWGSRDLHFYQLKQIKRVRVIRKHDGYYAQFLIDHTREEDKNLTGTQVGIDLGLNHFYTNSAGEKVDNPRFLRKGERKIKKLQRRLSRTQKGSQNRSKARNRLGRAYLKVSRRRNDWACKLAQRVIQSHDLVAIENLKVRNMIKNHKLAKSIADAAWYKFREWLEYFGSIYGVPVVAVEPAYTSQNCSNCGEIVVKTLSTRTHKCPHCGYSADRDKNAAINILKSALKQLSTTLGHRESNASGENDLCLNGEIHKSKPTRKKRKLSQ

SEQ ID NO: 58145 - protein, 285 aa, Okeania sp.
MRDSQRLDWLNRTRCQIDRCSIISCPIGEIPCRPDYYFQQSALKETKQLFPEYKEIYSEVQQINLQRLDQAWKRWLVPDKTGKKFGRPRFKKSGKLRSLSFSRVNHPKAAVKFDDKQIMISRFGAIPVIVHRPIPDGFTIKTAIITKKADGYYISFSLEDKSVPSLIPTDNIKTAVGVDVGLKEFLTTNTGETVSVPNFYRKAQSNLARKQSKAARKEIGSNNWQKAQNKIARLHQHIARQREDFHYKTAHKLVKEYDLIAVEDLNIKGLAKNTKLSKSIYDVGK

SEQ ID NO: 58146 - protein, 394 aa, Okeania sp.
MPDNYILSLTKLWVSMTWKKSTKRTITIKFYIRSSAQQILRTVAESFRSYYGLIIAYSEGKISDRPSIPNYRKKGGMATVSYPKQALKLKGNQIRVPLGNTCKRWFGLDSFLIPMPSIREFSSLKELRILPRNRCFTQEFVYEKEVVIKPQLNQGNVLGIDHGVNNWLTCVSNVNTSLIVDGKHLKSMNRWYNKQVSTIKENKPTGFWSNKLAAITEKRNRQIRDGINKAARIVINHCLKKSIGTIVFGWNKGQKNQIELGKKNNSEFVPIPTARLKERIAQLCEEYGIIFIETEESYTSIASFLDGDDLPIYGEKPDDWKPSPKRIKRGLYRTGNNWCVNADCNGAANIIAKVSRKLSLDLSRLCRGTAEIVPRECIFGQLRKNGATWIYPVA

SEQ ID NO: 58147 - protein, 504 aa, Anaerolineae sp.
VAKATRTRRDDIVSRPGLETWHTQTKALYNQAVAFYFELYQAHPGLLDLDQQSALLQAEKLSHRTDRNPSPLWPLPETVNAAIPAMMRRAAINAARGAFKSFHSNYCRWQKQKEKFEAKGKRFHHRPPVPPRVFNFNLPFYKGMFKDRTDTGVMVRLYSGTSWQWVKLWLVKRAEPIPAEWEAGCPVLVQRRGRFRLHTPLEKKFKKPAKAVEQVAVDPQLRVCAIDLNLGDAQAVCTIVQADGTEGATLFIRGGDFLHARRKRLLGKVAIKRSQTGVLAEGEPDNKWLWDKIRAIEEDEAHRVSRRIVDFACEHGASILVFEHLGKLKPVKGRYSKRSNDKRAYWLKGRIVKYARYKAWEHRILTCQVSPAFTSQDCSNCGHRPVARYAEGEAPLEYRPGGPLFLCPTCLKRGHADRNASINIGFRFLIRSLEHLLLKPLSKDKGVGSTQAREIVPQIQHGRPHGLALPPLVFLAQLRLAGCGYAVGTGESVYAGVPEEAAAL

SEQ ID NO: 58148 - protein, 406 aa, Streptomyces sp.
LIRTYKFLLRPTVRQEQALTQMLRDHCSLYNGALQERRDAYRHSSKTSIKYGDQSAQLKEIRAFDPECQGRWSFSSQQTTLRRLDTAFAAFFKRVKAGLTPGYPKFKGVGHFDTVTFPKDGDGCRWDSTPHDTQTRVRLQGIGHVRVHQHRPVKGRVKTISIKREGRRWYVVLACDEVPAESLPQTGSVVGIGMGTVHFFTDSSGGHAPNPKFLDAMAAQLRAAQQHLATFPKHTKRRTKKHRAAARKVAKLHAKIRRQRLDHHHKQALALVREHDVIGHEKLNTAGMTKAPAAKPDPENDGAFLPNGAAAKAGLNRSILDAGWGQFLSILANKAESAGRRVIPVDARNTSRTCPPEIGGCGHVAKENRVTQAKFECVRCGLVENADRVGALNVLHRAGLVPCDDA

SEQ ID NO: 58149 - protein, 428 aa, Planktothrix sp.
MLVVEAKLKGGTPEQYQSVEEAMKTAQFVRNKCVRYWMDNKGTTRNDLQKLCAVLAKDSTTPWVNKLNSQARQSSADRAWQSIARFYGNCRDSSIKKKGFPKFKKFSRSVEYKTTGYKLSDERRQITFTDGFKAGTFDLWCSQRTLVYYSEQQIKRLRVVRRADGYYCQFLIDYNREEKHEFTGSVVGIDLGLKEFYTDSSGKTVENPRFFRQTENRLRKAQRRLSKRYKNGQKQSANYHKQRRKVAKLHLKVSRQRKDRAIKDALALVQSNDLVVYEALKVSNLVKNHKLAKSISDASWYQFTQWVNYFAKIHKITCIAVPPQFTTIDCSVCGAKVYKTLSTRTHQCPHCQTVLDRDWNAAINILKKGLKYLGEYLNGTVGQTETDPNDWGESGLWIFNRDVDDLSRFVEPVIPVGDSGRIPRHSNA

SEQ ID NO: 58150 - protein, 402 aa, unknown
  TnpB Polypeptide
MINVTRFRIYPNKEVEDKLFSNLHICGFVYNWCLDHNIWNDSVLPQLKEVYPDIKEVHSIVLQNVVHQIRDNIKALSEKKKKGRKVGRLRHKPRYSMIYEQSGFRIDGDLLRLSKIGAIPIVLCRPIYGTIKQIIIKHNKTHNWFAIVVSEDKIKEWYEFRRSYQKPGNSMKSVGIDLNVSNFSTDSDGLVVEHPKNVKKAEKKLKRCQRKLSGKSRGSNNRKKQRRIVAKVHEKIENRRSDFLHKTSRYYVNNYDLIALEDLSIAGMVQSGNSGLSKAILDASWGKFANYVLYKAENAGKYAVQVIAKGTTQDCSACGNTVPKDLKDRTHSCPYCGSVMPRDYNASQNIKLRGIEMVGWGTPEPGFLDIEKLNTLAEIRTTILDINNPEQVFVNEPRISQL

SEQ ID NO: 58151 - protein, 188 aa, unknown
  TnpB Polypeptide
MVREIIFSSKTRASLAVMRKPLPKHSASYPSKSAGAVSGAKRVKRRKARKVVSLIHERIRNRRHDFCHQTARRIVNRFGIIAVEKLSVKNMLGNHCLAKSIADASWSQFRWVLTSKAESAGREILAVNPAYTSQDCSECGYRPDGLEGRTKKKLSDRWHLYPMCGLSVDRDTNAAVNILALGQQSLAP

SEQ ID NO: 58152 - protein, 256 aa, unknown
  TnpB Polypeptide
LNSFRYIKTVNRNCLKVRLYPTKTQARALEETLETCRLVYNSLVNDRKFQYDTAQVSVGRYDQQAYLPLWKKSHPELKEVYSQVLQDVVHRVDLAFAAFFNRVEKGETPGFPRLKGSGQCDSITYTQKASLKVGEQSIHLAKIGQVKAKIHRKPWGEVKNCTIRRIGSPGNGKWFASLCQAIEPELLPPSEEAVGIDVGLKTFAAFSNGEGDNFFIENPRFFGRDEKALAKAQRKLSKQKRGSRERRKARKAAQSA

SEQ ID NO: 58153 - protein, 384 aa, Actinoplanes sp.
VKLVVQVKLLPTAEQASALEATLRACNTAATEVAATARTARVYRDYALRKHVYAGIKTDHGLGAQAAQHVIKKVCDAYKTLASNLRAGNYGAPESKRYRRVASEPVTFRWQAAQPYDARMLTWQHDAGTVSIWTVTGRMKNVAYTGSPDQLKAVAELPVGESDLVHRDGMWFLYASVDVAEARLVEPQGFLGVDMGVVQIATDSDGRTYTGEQLNRYRRRQVRLRATLQATKTESARRLLTKRSRRESRHAANVNHVISKSIVAEAERTSRAIAVEELTGIRTRVRLRNKPQRATLHSWSFAQLGEFLIYKARRAGIPLVQVDPRYTSQTCSKCGHRDKRNRPDQATFICRSCGVVAHADVNAAVNIAVRGAAGGGAVNRPYVA

SEQ ID NO: 58154 - protein, 409 aa, unknown
  TnpB Polypeptide
MMVKKSFKFRLNLTAEQEQMCCMFAGCCRFVWNKSLALKKELWEKEKKSLSQFELNNLLIQWKSELPWLTDAPSQALQQVNKDLDQAYKNFFRRCKNGENPGHPKFKKKGIHDSFRLPQGITLLDPLNHKTGVVQLPKLGTTRFILSQPIQGTIKHVTVSRTAGSWYIAFNCDNVPVVLEKAPESSIGIDRGIVVFGKCSDDTDVISPQPLKKRLKKLAKVQRSLSRKKKFSNNWNKQKKKLARFHNHIANIRKDTLHKASTTLAKNHSTIVLEDLQIANMSKSAKGNKENPGKNVKAKAGLNRAILDQGWHMFSVLLDYKIKWHGGKLILVNPKYTSQRCSSCGFVSSENRKTQDVFECLCCGHRENADLNAAKNILAAGLAVSACGEAPVGAPVKQEPEEQKTAQVV

SEQ ID NO: 58155 - protein, 477 aa, Thermoproteus sp.
MEKYRTLVLEYNLLHPEVAERVPVLLRVQEEFRKWAAEWAKSGGSLPPPERRLKYFAKEFLHAGNALDWLKGLKKNGIEVRGARPPLIFDAQLRLSNERDRGRGVLVDIPRREVRTRQYGDDTIVLPLSEEAVEWILERVREGSKLTLAAVWIGRSRRSHAVKLHVALVFRREVVPIEIKRLLVIDVNALHNGLIWAVVEGERIVERGVLKPNISKILHLQKVIARLDSVCAEKDERCDEAMAVKSRIWRILHEWENKAVRELVWTARKRKAAIVVDVPDDKSMRELKEGNYKAERKVFLNFGRLRRRLQGLAEWYGIPFREERLYSTICPICGAKMEELPNRRVKCVCGFEAHRDEVPALWAMKRFPELISFSSSSAVLAPSCGGPLKGRGRGWEKGGGHSPSHIVKNGSMMPRLAYFSTSFSAFFFDHRFLQLLATPLISTATPSLNKIALVTATWSSPNLAAAHAKNNAGSAVA

SEQ ID NO: 58156 - protein, 410 aa, Caldicellulosiruptor sp.
MDKTYILPVPEKYQSLAIELSIESGKIYSKAVSFLKKMNKKGIKISRKTFDRYMEWWIHQKDFVLHSQSKQAAYQQAWTAYQATLQKIKKAKKKGKDTSGIRLPYRNKKYNKVVFKESAIHLKGNALMFSNKKGEQAIVLRDIVIKATLKYAELIYHTSKKRYYLHVVVEVKEREIEKGKGVLAVDVGVIHPMVCFDGKNVLIYNGGILNAKLRYRNKKFAEFQQKLSMCKKGSKRFRKLENAKREVLRKLNNQIRDVLEKYTSHLIGYCVKNGIGTIVLGDLKGIRNGAKHGKVSNQKVHQWMFRKVARRIEEKARFVRIDVVYIKENSTSQVCPVCGSRNKPENRNYECRNCSFRYHRDGVGAINIYRKYTGGRLLVVGQLACPTGVRFEAHLCCPTRWNVHPVGKTA

SEQ ID NO: 58157 - protein, 408 aa, Caldicellulosiruptor sp.
MYKTQKNHIRCDKQTYKLLRMLCHFSKNLYNYALYHIRQHYFKTQEYLPYESVYHLVKENENYRLLPSQVAQQTLISVDEAFKSFLSLLKAKKEGRIDKKISIPTYLPKEGMYQIVFPKDQFKVEGNKLRLSLGRNFYKEFGVRYLYFDLPQNIRGKKIKEVRIVPRFHGKWFEIEYVYEEEEEEEQNYNLDKSRYLSIDLGLDNFAAVVDTIGTAFLIEGRYIKSVNRWYNKQKARLQSIYSKQNIKYGKKLARICLRRQHIIDNFLNQAVNYIIKHCLNNQIGTVVIGEMKDIKQKINLGVVNNQNFVNIPYERFKRKLEAKCEYYGLEYVEVDESYTSQRCNRCGTVKKSNRKHRGLYVCKDCGYVVNADINGALNILAKVAGESAKKQIVSSGCVNHPVRIRVA

SEQ ID NO: 58158 - protein, 524 aa, Caldicellulosiruptor sp.
MITIQAKLIFGSSEDKQKVLDLMRRWTSCMRYAYKRLLEGHKRNELKRQLQGIFNLNSRYVDDAIMKAKSIKKSCEQKGENPKKVIFGGRELFEKLQKRHINGRAYRELQREWQEKRKGTLYSRGDRSKKGNLNTRIEIDGSLTKLRINVGEKEYVYATIKPGWKVKGGTYTDRNQLLQAISTLGEPYSVELKLKNSVVYAYFTVEEIFPKSEITKSNGVIGIDPNAYPKHMAWAETDSSGQLLSYGEIPMPELESGNSSKREYYRWQYAHMIVQMAKDNQKAIVIEKLNIKDKGKRGDFSGRKSRRIRHYFGYRSLLEKVKLLAKREGVEVIEVNPAYTSVIGMLKYAPQFMVSKDIASSYVIARRGLGLKERIPHNYMLLLSSFNVNSLEELKGYVKKAVKNPYVRKRQLREIDWAIKLLQSSGSEPGRLSEPLDGTSKDSHRKLSCNLWRVLRVAVVTPLSPDRVLRDMSVLKSLLVSGQVGKTYKGRKFLFLGTGAMVVPNTACWVWNNLKRRTTNSPAI

SEQ ID NO: 58159 - protein, 377 aa, Caldicellulosiruptor sp.
MTKAEKIKQTWQQTKERRKNQIPVVCQLKINLNSASKETREKLFRLFLEAKWLYNYIVADIGNRLDSNAEKLREVEIKVGENFEKRRIENLSSQMKQALVERIKQNLYSLHIQKENGYKTGKLQFKHYVNSIPLKQFGNTFKFVNQQMTRVKIQGINKPLRVLGGNQIPEDSEIAKALVRKPSGIYLFVTCYIDRDKYTGAWERRKNRKGVVKPRVWQMFDTAAGIDFKPAGLVLSNGLKLEWQIKETKRLKKLQKQLARQQKGSKRWYKTKEKIAREYEKLTNIKYDVINKTCSFLYRYKTVCFQKDNIKGWKDGYFSKSVHYSAVGTIKRRLSTVFGFLLWQSKVLCQQRRHAAVAEVSMMSSCRKEFSDVLFAV

SEQ ID NO: 58160 - protein, 512 aa, Caldicellulosiruptor sp.
MITVQTKLIFEGSEDKQKVLDLMRRWSSCMRYAYKRLLEGHKRNELKKQLQGIFNLNSRYVDDAIMKAKSILTSCKERGENPKKVVFGGRQLFEKLQKRHINGKAYKKLQLKWQEKRKGNLYSRGDRSKKGNLNTRIEIDEDCTRLRINVGEREYVYARIQPGWKIKDGRYIDRNQLLEAISICGQPYSVQLKLKSGVVYAYFAIEEVFPQPAITRANGVIGIDTNAYPRHVAWVETDEHGQLLGYGRIPMPELESGSFEKKEYYRWQYAHMIVQMAKEKQKAIVIESLSIKDRGRREDFSGRRSRRIRHYFGYRSLLEKVKLLAKREGIEVIEVNPAYTSVIGMLKYAPQFMVSKDVASSYVIARRGLGLRDRIPHNYMMFLGRLDVNELEELKEYVRKVVKNTYVRKKQLREIGRVIKFLQSLESETERLSVPLDGTSTGSRGKNHNLWQVLRVAVVTPLSPERVLRDLSVLKSLLVSGQVGKTYKGASSCFLGQGLWLSQIPPAGAGKA

SEQ ID NO: 58161 - protein, 376 aa, Gracilibacillus sp.
MKINDSQQSISISYLSKKKQEVLIAKTIGCSRFVFNHFLAKWKDTYKETGKGLTYNACSAQLTQLKKELVWLKEVDSIAVQSSLKNLADSYTRFFKKQNKAPRFKSKRNKVQSYTTKHTNGNIAIVDNKIKLPKLGFVRFAKSREANGRILHATVRRNPSGKHFVSILVETEVQPLEKTDASVGVDLGLKDFAILSTGEVFPNPKWLRKLEEKLANAQRILSRRIKGSSNWHKQRMKVARIHERIQNSRKDYLHKISTKIIKNHDVIGMEDLQVSIMLKNDKLAKAISEISWSQFRTMLEYKAKWYGKQVVIVAKNFPSSQLCSCCGHKNKDVKNLALREWDCPSCGTYHDRDINASTNLKNEAIRLLTVGATGLA

SEQ ID NO: 58162 - protein, 212 aa, Microcystis sp.
LDVGLKVFYANSDGETVEIPQYYRKAEKRLSRLNRKKSKKFRKGQPQSNNYQRDRKRYARKHLRVSRQRKGFVEKEALRVIKSNDFIAYENLNIQGMVKNSKLAKSINDVAWSTFRQWLEYFGFKYGKATVAVAPHNTSQNCSNCGQKVPKSLSTRTHICPDCGYVEDRDINAAINILKKRLSTVGHTETNTLGERFPLVWLDTSCQVKETL

SEQ ID NO: 58163 - protein, 499 aa, unknown
  TnpB Polypeptide
LNKSVQSTSRSTLESGKLRCKQLHPLVNVAYSLSGSFGASSNSSHGFFSLTTSFFGPILEVLHRLRSSCELFTDFFRFHSPDDSSNLSRQFELVPHLTRYRRSEDSPFGEQLIELFNYLYVVYISHFAVYLRVRITRLLVFTYRYRIRDSSSKVRLKKLASSVNFVWNYVNKLSFENIKQHGRFLSTYDVNYYLNGCSKGLEIGSSSIQEIARFYVQTRQQFKKRKLSWRSAKRSLGWVPLRHDGFKLKNDTVRYCGHDFKLWKHRELPQGAKIKTGSFVQDARDRWYLNVSFEVPDVEVHALPRTEVGIDLGIKNQLTLSTGENFTRGSETKKFAVDLAHAQRARKKKRMKAVSAKAANRRSDWTHKVTTDIVRRFATVFVGDLKTSELVAKSSLSNFSSLYDASIGSIKHCLKYKAKKLGGACYVVNEAYTSVTCYFCEARSGPTGKGGLAIREWTCQSCGAVHHRDVNAARNILRRGHSTLQRSLIGGDATLSTSA

SEQ ID NO: 58164 - protein, 223 aa, Erysipelotrichaceae sp.
MYHNEQPLMQLARGKMMNLELMHIQENWYAFINVDIPIIFSTSRKTMGIDIGMKVPAVATLDNQHYRFFGNGRQRQFYLRKYKRHIQEMQRRKQFKKLRQFRHKLHNVLSDQDHKISKDIISYALENDVGMIYLEKLTSIHDRFNVRQVSNAYLWSYQRLQQFITYKAQLAGIEVRYVNPYNTSKKCPKCGRINKPKDRTYQCKCGYHGHRDVVAAINILHAL

SEQ ID NO: 58165 - protein, 409 aa, Saccharopolyspora sp.
MDQRAAEASYGIADEELTPPLSWSAYSLRKVWNSVKDDVAPWWGENSKEAYASGLANLATGLKNWGDSRREKRKGARVGFPKRKSRRHMMSCRFTTGSFGLADHDRRHIKLPRIGLVRTHESTRKLARHIERGTARIRSATASFRSGRWFVSFSVEIDRHEPTPRDPHGAVGVDLGIKSLAVLSTGDVIPNPRHLELALKELRRLQRQASRRAGPDTGRMPSRRWIKTQTRIEKLHARVAQARLDGLHKLTTRLIRQYGVIIVEDLNVQGMMSNRSLARHVAGVGLSEFRRQVEYKAAWSDVRVIIADRWFASSKTCSGCGVVKAKLRLSERLFHCQVCGLDIDRDLNAALNLAALAERETSSASCAARLNEPDGNPRKTTTGGHGYRHGKAPAHTGRGQRQRGNTLTQ

SEQ ID NO: 58166 - protein, 408 aa, unknown
  TnpB Polypeptide
MEIMMGTIIKKFKELYEFLEKHFIYTKMFKTFKYRIFPDQVQKDLMSNIFGCVRFVYNLGLETKIEAWTSAKKSYSCIDLTNQMKELKDTKAPWLAESPSQALQYSLRNLDNAYTNFFKRGVGFPKFKNKHGKQSFSLPQGVRLSENNKNIFIPKLKWVDIDMHRELCKGEIKTVTVSRTVTDKYFVSILLDTKEELPMKKLIDRLTSVGVDLGIKDFCITSDGEKFDNKDFLKSKMQELRRAQRNLARKKKGSNHYQKQKIIVALLHEKVRNQRRDYLHKISSYLVNKYDTICLEDLAVKNMVKNHCLARAISDQGWSEFRTFTEYKADWKGKNISIIGRFEPSSKICSCCGKLNKELTLADRIWTCIGCKTVHDRDVNAANNINNFGLRDKPGVAQSDGLPCACNV

SEQ ID NO: 58167 - protein, 403 aa, unknown
  TnpB Polypeptide
MLNRRVTYKLYPNSEQYKQMQNIRYLHQQYYNAALEQRITAYNKCGVSLNFYDQCKEHKEVRELEEYAGLNSQSCQVTLKRVHLAMQAFFRRCKAGETPGFPRFKSFSRYPGWGYKTHGDGWRLFIEEKNCYLRLTGMGYVRMRGKARTQGKPKTLDILYKQGKWYASVVFECSPEREQIPITGAIGLDWGVETFATLAHDSGDYTAIHNERHLRCELTKLKQLQRDLSRKKRGSRNWQKAKKKIAALHSKIARKRHEFLHQNSAKFAKENSLIAVEKLNVKNMTASGGRYKKGLNREVLSTAPATFHKMLKYKVEETGTRYIEVPTRKVKPSQTCNGCGKQQKKALHERKHECPCGARLSRDENAARVILNWALDNVKGREPALCGGGTLVLPAKHETLAIA

SEQ ID NO: 58168 - protein, 447 aa, Clostridiales sp.
VRKIKLKKNNSESRQRVIQIQFNPNVEQIIILDCLTYAASKLWNVANYERKRWTKESRVPYPDWYDQKKMLKDNFWYKNLPSQSAQELLKQLHEAWKSFYKLQKTGGIKNPQPPRYKQNNIGIRFLNKGFTISRGIIRLAVPKHQKEYILQKYNQDVDFLYIRIPDEYINFTGNPKIIEIIPLEKNKYRVNIIVELPEVAMNQDNGIYMAVDLGVNNLITCYCSTGKSLIISGRQLLTINRYFDKTISKYQSISDAQQSAKGIKYLKKSKRVLELYEKRRKQVKHLIHTATRQAIDFAVKEDVSKIIIGDITHIRVDNNMGKVNNQKFHRLPYKQIIGQITYKGIDKGILVKMQEESYTSQCSPYSSEVSKDTAEKKNRKYRGLYVVDKKLFNADCVGAYNILRKYLQRIGNQPITAVVGLDTPEMYRWDSIRGFFSNSKLAISMTK

SEQ ID NO: 58169 - protein, 405 aa, Cyanothece sp.
MLKVVKIRLYPDEQQRQSLEQSFGNCRWLWNYCLNLMNETYRDTGKGLSGYEVKKLIPQLKKEYEWLSLAYSACLQQVCLNLGVAFNNFFEKRAKYPRFKSKHGRQSIQYPQNVKVAEQSVTIPKIGEVEAIIHRPVEGKIKTVTVSRNCSGQYFASVLFEDGKEKPSTSSEGKAIGVDLGLAHFCITSDGSKYDNPRFLKKHEKNLKVKQQHLSRKQKGSNNRIKARKKVAKVHTKITNCREDFLHKLSRRIVNESQVVIVENLNVKGMMQNHKLAKAIHQVGWGLFCTMLKYKAEQDGKVYQEVDRFFPSSKTCHICLNQVGSLPLDVRTWTCEYCQAKHDRDVNAAINLRDEGLRILTGRINPGGFLQGQPLTSGTGDKACRPDVRRSNRGRKKSTTALSVG

SEQ ID NO: 58170 - protein, 375 aa, unknown
  TnpB Polypeptide
VSKKAKGLEHTYQVRLYPTHEQSRMLMAHCQEYIDTVNVLVHALDADTIPHDDAFSTKDFRASLPSAVKNQALRDAKSVFSRSLDLGTLPVLKKPICQWNNQNWSIKNGVLLLPVCQEGKIQQIEIACATLELVGLPGMLRIKKKRGKWIVDITMTQAKPAQTDGQNVMGIDLGIKVPAVVYVLGYGAKFFGNGRSQRAKRRMFYSQRKELQKAKKTRALKEREHKESRWMKAINHTLSRQIVNHAIASGVGTIKGEELSGVRQGTTRTSRGAKARKNNRMKNTWSFYQLTMFIAYKATRAGIRVEKVDPAYTSQECPACTQRNKADDRTYVCVACGWYGHRDMVGSVNISRRTGLVGQRQGATRANSSARRRAA

SEQ ID NO: 58171 - protein, 434 aa, unknown
  TnpB Polypeptide
MECVRIFPLKGLTSFQHRQLWQAQQEAARVWNQCKDAHLQARIEHLKWPQRTELQQVTKGLYALHSQSVQMICHAFLSNVEATRELRKSGFKIRYPYKTKLFYPLLWPAQAVKLTANRVILPMGRGREKLVLKLKLPAGAGACKLVYAEGYELHVTYYVEEAQPPEPGYKAAVDLGEIHQAAVSTDTGKALVVSGRGIRTLKRDRAKALGEIAKKRSRCKPGSRRRKKLNRAARKVSQRAKRRIRDLRHKGTRKVIDFCLAEGVDQLYVGNPHGVRQKRAGRKHNQRMSNWEYGKDIQYLKDKSKQAGIHCFTGTERGTSSQCPECQHRQKPKGRQWVCRACGFCGHRDVVGSVNMHPIAFDAKIGFPTNITYLRPGPISRRRSSSLDTGQSCLVRLRQQPQNEPGQQSCLSKAKTSTTSQESFVRSGPTSCIC

SEQ ID NO: 58172 - protein, 409 aa, unknown
  TnpB Polypeptide
MRLNVQVRLYPNKTMKTVLDSLCDYRRYCWNQGLELWNTMYEAHLIGLPVELRAKIKASLTDKSIEFSKEEQVLRTLFPTPSQNLVLNELVAQKANWQFELSSRALQQAIKDLAVAWNLFFNNPKTANKPKFKSRKKPKQGFKTDRARIINGRLVLDRPQKYKGEWMGIHFRGASIPDGNLKLCAVTRTKEKYIATITMDVETVELPKTGKKTAVDANVDHFDTTEGQTSLKPESLDPLYERVRTYQRQLARKRKVNKNYRHSKRYQATRAKLQATYERIRNVQNDLLHKFTTDLYRQNDTVVIEDLDVKGMQMKKKAKNLHRSFFGRFRQFMEYKAEKFGKTLILADRFYPSTQRCSNCGHVKTGDEKITLSGNAKHGTKHHEYVCYHCGYEDDRDHNAVINLLAYAK

SEQ ID NO: 58173 - protein, 430 aa, unknown
  TnpB Polypeptide
MEMKKAFLSGWRREGLCRFLFAACEKEWERMSKIKRAYHYRFVPTDEQKTMLARTFGCCRYIYNWALNLKSASYRETGKSPGFAALCAMLPALKTQPETAWLAEVSSVPLQQSLRHLDRAFVNFFAGRASYPAFKKKHGPQSVTYTAAAFTWKDGQLTLAKTDGPLAIRWSRPLPDGATPSTVTISRDAVGRYFVSLLLEEEITPLPVSPERIGIDLGLTALVSTSGGEKVDNPKYLAQEEKKLARAQKRHAKKRKGSRNREKARRRVARIHARIRDKRRDYQHQLSTRLIRENQVICVESLAVKNMLQHPTLVKAIADVGWGEFLRQLEYKAQWYGRTLIKIDRWYPSSKTCSVCGEVLASLELDVREWTCRQCGTHHDRDLNAARSFLAEGLRVYAAGLAVSACGGDVRPNLDGIREGSLQGSRNPHS

SEQ ID NO: 58174 - protein, 499 aa, Fischerella sp.
LELPLKVDSKQDSQLQAKFDAAMRLYNNVLREAKTRMELVRKSEAYQVARKIPKDNKKERSAAFSKARDAYRFTDYDLQAYANRAAKDSKWIAQNIDAQTQQKLATRAFKAVERVLFGRAKDVRFKVQNRFRSVEGKTNKQGIKWKKDRVVWAELEFKAIADFDNEVIKHGLSCPVKYCRIIRRELNGKRRWFVQLVLEGTPFQKPKNKVAEGLIGLDLNISNIAFVGDNAAGLLPFAEGVPTFTKEITQLQRKMQRSSRGLNPDNYEPNFKARKGRKTVTKKGKVKKGKLQWKKSQNYIRVAQRKRELERRKTAYAKSQNRRVVNEILRHGKDIKTEKVSVKGWQKRYGKAISAKSPGFVQSELKRKAENAGGSFQRFSTSSTALSQTHLDGSRTKKSLSERVHYDVTGIAPHHRDLFSAFLSRHVNQEDMLSLQDAVNEYPRAEPLLLEAWQHSINRKQVGASESRKSDSPLERFSNQPITSSQIANTGEKLAGDVA

SEQ ID NO: 58175 - protein, 329 aa, Clostridioides sp.
VIAVKKAYKFRLYPNKKQQELINKTFGCCRFVYNKYLAKRIDVYKNDKETFTYKQCSSDLTNLKKELKWLKEPDKFSLQNALKDLDNAYKKFFKEKAGFPKFKSKKINRFSYKTNFTNGNIMYCGQHIKLPKLGMVKIRDKQVPQGRILNATISKEPSGRYYVSLCCTDVDIEAFENTNNHIGLDLGIKEFCISSCGEFIENPKYLKKSLNKLAKLQRELSRKTIGSLNRNKARLKVARLQEHIANQRKDFLQKLSTKLIKENDIICIEDLQVKNMIRKRKLSRLISDVSWSEFIRQLEYKANWHGRQIVKVGKFFASSQICNKCGYKN

SEQ ID NO: 58176 - protein, 408 aa, unknown
  TnpB Polypeptide
MLDVTTKLVKRAYKYRFYPTPEQADLLARTFGCVRLVYNKALAERSRLYATEGRNTTYVDTAHWLTEWKQDPDLAFLAEVSNVPLQQALRNQQGAFSAFFAKRAKYPRFKSRHKSRASATFMGNAFTFRDGRLKLAKMTDPLDIVWSRPLPDGATPSSVTVSRDSAGRWHVSMLVEESIQHLPELDTSVGVDVGITSLVTLSTGEKITNPKHERADRRKLAKAQRELARKQRGSANRAKAKLSVARVHARIADRRRDHLHKLSTRLIRENQTVVIEDLAVRNMVRNHSLARAISDAAWFELRRQLEYKAAWYGRTLVAVDRFYPSSKLCSTCGHRAASMPLSVRSWACPACSAVHDRDINAARNIVAAGLAETRNACGGPVRPEPRTRQRRSPTKQETPQATAGIPRL

SEQ ID NO: 58177 - protein, 407 aa, Streptomyces sp.
VREWHAKTRRLAVSEARYAVVVGDRQAGRVRVVRGGKRLANARHHLADAEFTEARWRERWEAERWLLAADGESWKRYGIDTIRVSPDGEISIKLPAPLVGPADARHGRYVLSARGTFPHRGPQWADRVEADRAVAYRIHYDVGRGRWYLTACWQYAPAPAVPLGTALAHGVIGVDINADHLAAWRLERHGNPVGSPRRFSYGLAGRADHRDAQVRHALTRLLNWARTCRVQAIAIEDLDFTAEKTREKHGREKKFRQVISGLPTGRLRARLTSMAEATGIAVIAVDPAYTSKWGAQYWRRPRTSTTRMTSRHDAESIAIGRRAQGHPIRRRTAPPPHDRSDRVGHRTVQAGPGILGHEGTRARVPGPRTRCAGPGHGADAGDQRAQHRSGHAAEPEIWQQDSLPLSL

SEQ ID NO: 58178 - protein, 250 aa, Streptomyces sp.
MADSAGEVREVANPKHYDQALTQLRKASRTVSRRRGPNRRTGQTPSRRREKAKAVRNRVHHRVANLRENHLHQATARIPAEYGTVVVEDLNGKGMVRNRRLSRRISDAAFGELRRQLTYKTQRHGGRLIVADRWMPSSKTCSRCGVVKAKLPLGVRVFECEACGLVLDRDANAGHDLAALAAANGKTGTGVTGDPGPLVVVPKPRGAKQKTRTARTSKGTGTRAAGATPRQGTETRDRRQDTRREQLALW

SEQ ID NO: 58179 - protein, 404 aa, Streptomyces sp.
VCPAVWAASGEEPGRTRCRRGHRPGGGDDRVSGAETAGSGKKKRRGFEARPGFHIVGHRLALDLDASALQALASHCGAARVAHNWAVRHVLASWSQRAAEETYGVPEAERVAWRSWSLPSLRKAFNEVKHNDPFLRERWAQNSKEAYNTGLANAAAAFDNYAKSRRGERKGARMGRPRFKPRRKARPACKFTTGTIRLDDRRHIVLPRLGRIRLHEDVQPLVDAIAEGGTRILSVTVRFERGRWFAVLQTEDRPPSPLPAAPARQSGSTAASRLSSSWRTRPARSARSRTPSTTTRHSRSSGRPPGPSPADAAPTGAPDRPRPVAGRKPKRSVTGCTTGWRTCGRTISTRPRRVSPPSTAPSWSRTSTGKAWSATGVCPAVSPTRRSGNCGASSPTRPSATVDV

SEQ ID NO: 58180 - protein, 359 aa, Peptococcaceae sp.
MKLTAKVKLTPTTEQAESLKQTLETANAACNRISAQAWEHKTFGQFNLHNLTYHATRLEFSLAAQVVVRCISKVTDAYKIDRKKQRVFSPRGSVAFDDRILTWHICKSEVSIWTVGGRQRIPFVCGDRQRELLCGQRGESDLALIDGQFYLFATCDVETPKPTDVAEYLGVDLGIVNIATDSDGNEYSGGQVNGLRKRHAKLRKRLQSKGTKSAKRLLAKRRHKESRFAKDVNHRISKELVLRAKGTGRGIALEELTGIRDRVTVRRAQRRQHNSWSFYDLRQKIEYKAQVAGVTVIAVDPRNTSRTCPVCGCVDKRNRPSQSRFSCISCGFSGHADAIAAGNISRRVAVNQPNAGAAS

SEQ ID NO: 58181 - protein, 423 aa, unknown
  TnpB Polypeptide
MKTVRIYRLHPSPTLFGRLKAAQMEAAAVWNTCCDLHKVARQAHTLWPGQHEMQQVTRNRFALHSQSVQAVFRAFLGAIDTTRQLRLTHPAMHMKYPWRSKRFYPVHWPAQAVSKEQGRVVLPMGRGRKSLVLPLDLPQEAGACTLVWNRGFELHVCVEVPRAQTPPGTGRATVDLGEIHLAAVATNTGHALIVTGRGIRSLKRQRTQQLGRLAKKQARCTRYSRRWKRLQRAKNKVCRRAERRIRDLRHKATRQVINFCVEQKIGRLFIGNPHGVRKPHKGRHHNQRMALWEYGKDIDYLSHKAKAAHISCFTGSERGTSSQCPCCGHKQRPKGRSWACRACGFTGHRDLVGSVNMHPLAFGTHVLFPRSFTYLRPGPSRRSRRADTPQRCLSELHVQPRILDTLSSESGHPCDATQKPVLS

SEQ ID NO: 58182 - protein, 270 aa, unknown
  TnpB Polypeptide
VGAQSGLGAFPPVAAGPRRGEVLPGHPRSGGSLHIAFAHIPDPIAGPGEGSVVGIDRGVAVSAALSTGELLHVPGLSRGEARRLKVLQRRLARAERGSNRRARTKLALARLRARETDRRKDWIEKTSTDIARCFDTIRIEALDVRAMTRSARGTVVRPGQRVAQKRSLNRGIRRSGWGLLAARLQHKAYGRVEQVPAAYTSQRCSACGHIAPGNRKSQAVFECEACTAGPCNADVNAARNIAAGRAVTARGDLGASRSANREPQLCSPAA

SEQ ID NO: 58183 - protein, 288 aa, Escherichia sp.
MKRAYKYRFYPTPDQVELLAQTFGCVRFVYNSILRWRTDAWYERQEKIGYPQADKRLTAIKAMPEYSWLGDVSAVPLQQAIRHQQTAFSNFFAGRAKYPTFKSKRHKQAATFMNTAFKYRDGKLYMAKSKAPLDVRWSRALPSAPSSITISRDAAGRYFVSCLCEFEPVSLPITAKTVGIDVGLKDLFVTDAGFRQSNPRHTAKYAARLALLQRRLSKKAKGSKNRAKARLKVARLHAKIADCRLDALHKTTRKLINENQVVCVESLKVKNMIRNQSLSKAIADASWR

SEQ ID NO: 58184 - protein, 258 aa, unknown
  TnpB Polypeptide
VSRTPTGKYFISILVDTGNKPPKKHEIKEQTAVGVDLGIKDFLITSSGEKVSNPKHLRNHLFRLKKLQRRASKKQKGSNHRKKCNLKVAKLHERIYNLRTDFLHKTSSKLISENQTICLEDLNVQGMLRNHKLAQSISDCSWSKFNEFLEYKAEWYGVNIVRIGRFEPSSKMCSKCGHIKKDLTLKDRKWQCEKCHAKHDRDINAAKNILDFGLHRNNLVGAGRPKLKPLENTTSGSCVSKDKVGSVKEETQGSLALG

SEQ ID NO: 58185 - protein, 379 aa, unknown
  TnpB Polypeptide
LARRIQAYERDGTVLTSIDLHRELNQLKRTNFPWLYDVSKCAPHEALRNLDQAFSFFFRGLGSGRRVGFPTFKKRKQGRASFRLNGVIRVFQRHIQLPRLGRLRLKEEGYLPTSGVHLLSATVVEEGSRWFVSLRVREEIVVPTNVGPIVGADFGLVNLVTTSDGEVFPNVRPRRRQERRIRRLSRSLARKQKGSANRRKAARLLSRVHAKIANARKDHLHKVSSSLAKTKSVLVIEDLSVRAMQRSHRLGSSLPDAGLGELRSLLEYKAEWYGAVLHVASRFYPSSQRCSECGWINSRLPMSARTFVCPSCGYCRDRDVNAALNLKSLVAASSAETQNACGVGSAGRLRSVELPMWNQEPDSDDLENGKVIGVSAAPA

SEQ ID NO: 58186 - protein, 368 aa, Psychrobacter sp.
MKTLKLRVKDKHSKPLNTISHAVNFVWNYVNELSFKHLQRTGLFFSAYDIAAYTKGAGGELGLHSQTIQAIGESHAKARKQFKKAKLKWRTNNPKSCRKSLGWIPFKKSAIKYIGTRQSGKKALKSSIQLSLANHQKLIIEMFDSYNLSLYQINTLELVQDARGRWYACITVKNHPKKHTEHNTGQVGIDLELKEAATTSSGDKLTVKQTQKWAAKLAVAQRAKNRQRAQAIHAKIKNTRQDLIHKFTTQLVKDNALIVVGDVKSRSFTPSSTKLAKTTYDAGWFEIKRQLEYKCKHADSQFEIVNENYTTQTCSRCGSRQNSPKGRAMLGIREWKCECGVTHDRDINAAKNILAAGLCRLAGEIPSL

SEQ ID NO: 58187 - protein, 153 aa, unknown
  TnpB Polypeptide
MHRNFSGQIKSATISQVPSGKYYVSILVETEHTELPHTNQNTGIDLGIKELCITSDGKKYENPKIIRKYEKKLVKLQRQLAHKEKRSQNYNKTKKKIALCHEKITNTRKDYLHKMSHEIISENQVIVSEDLQIKNMVKNHHLAKSIVMYHGMS

SEQ ID NO: 58188 - protein, 227 aa, Paenibacillus sp.
MELLRKAKLGLMRIIEKSGKWYAQISIEVPTSVTNNENIMGIDLGLKVPAVSVTSTGKTRFFGNGRENKYIRRKYQQRRRKLGKLKKLSVIRKPGNKEQRWMKDQNHKISRQIVDTAIQEGASIIKLERLENIRKTARTSRKNAKNLHSWTFYQLQQFISYKANLVGIKIVEVNPAYTSQTCPACGEKNKAKDRWYECSCGFNAHRDRVGAINIMNQPVADGNSLSA

SEQ ID NO: 58189 - protein, 413 aa, Bifidobacterium sp.
MSSKRVRRAYRFRFYPTPQQEELLRRTLGCARLVYNKALALRSESWTRDRRNVTFKDTSRMLTEWKRDENLGFLNDVSCVPLQQALRHLQQAYANFFNHKGDYPTFKRKSRGGSASFTRYAFTWNESKRELKLAKMREPLPIRWSRTLPKGCVPSSATISLDAAQRWHISILVEDAVRELPASNRSVGVDLGLESFAITSDGEKIGNPRFRAKEAKHLRKAQKSLSRKRKGSNNQRKARLKIARIHARIADRRRDFLHKLSTRLIRENQTVVVEDLNVQGMSRRCKPVPDPNHPGRYLKNGQSRKKGMNRSITDTGWRELRTMLEYKADWYGRQLVVIDRWYPSSQTCSTCGKRTGRKALNIREWTCPYCGTHHDRDVNAAKNIQAAGLAVIACGDGRTAERRNMRPADPIRP

SEQ ID NO: 58190 - protein, 418 aa, unknown
  TnpB Polypeptide
MIFILKAYKFRFEPTAIQRKQLAVEFGNARFVWNRCLDLRSTAWEERKERYNYVSLNRQVTEWKRGEFPWLGDSTASCLTQALIDQDKAFKNFFDKRGKYPKFKSRYDRQAVRYQLDQRQIERNYQAGKLLKLLKLGALKIRWSQIPAGIPKMATVSRTPTGRYFVSFACEVEMAQLPLTGKTVGLDLGIKDVVIAWDGETATKSGNPRHLKGQLRYLKRQQRRLSRMQKGSNRRNRQRVKVARIHAHVAAMRADFLHKTTTGIVRSADVIVLEGLNVKGMVKNHCLAGAIADVGMGEFRRQVEYKAAWYGRKVVVVDPWFPSSKTCSACGSYQQNMPLSVRYWICPDCGTRHDRDVNAAKNIRRFAIRQAHVVATGGEPGIARGESMNLLDHASSTLNETRTEEMPLEPVRNRQKAA

SEQ ID NO: 58191 - protein, 379 aa, unknown
  TnpB Polypeptide
MMIAQRTLQIVIERDESLVETLDSFVQICNRISETAWNSGVPLKALDLHRSVYHDVKGTVSSQLTCTSIRLTAGAYAAAKTNGHGIDRPFSWTQPFALFLVGKRGRDASFRKDGLLSISTICGRKHLRYTVPTAFRGVFDNAVEIDSIVVKDVGDKLIGHVAYSIELPDVSGVYPIGIDLNETNAIVAVDADGNQLFVTGLDRKIKNKRTMKTIKRLQRKLGQRKAEGKNTRSVVRALKRLKLKRSRRTKDFCHCASKELVEWAPENSVLVFEDLNFGQGKRGSKAWNRRFSVWPRGMIFDLVSYKIQGKGVVAKVDPRNTSKLCSRCGLPGVRRRHSFTCPHCGFSTHADHNAAVNIRNRFTALRCSGDSSVSPEASI

SEQ ID NO: 58192 - protein, 402 aa, Okeania sp.
MIITYCYKIKPTCEQSVKIDYWLELLRRHWNYANGQRLDWLNRTRCPIDRCSLISCPIGEIPSRPDYYFQQSALKQTKILFPDYKEIYSEVQQINLQRLDKAWKRWLIPDKTGKRGGRPRFKKSGRLRSLGFSRVNHPKAAVKFDGKQIIISRLGAIPVIAHRAIPEGFNIKTATITKKADGYYVSFSLEDKSVPTPISVGNLQNAIGIDVGLKEFLTTNIGETVPVPNFYRKSQSNLARKQRKADRKEIGSNNWKKAQNRVARLHQHIARQREYFHYKTAHKLVKEYDLIAVEDLNIKGLARNTKLSKSIYDVAWGAFIEKLKAVAVKRGVHVIKVNPHNTSQNCSNCGHKVPKTLSVRTHSCPKCGTVLDRDENAARNILNKALCEVGIILPACGGLDVG

SEQ ID NO: 58193 - protein, 382 aa, Sutterellaceae sp.
MFRKGGRPRFKPAHRPLNSVEGTDNHEIIWHPDTETITWRKHVYPVKVDHGNPYIEQALTYKDLDEKIKRKRVKFCRIVRKTFNGRILWYVQLALEGLPPVTHACAPRSEAVALDPGPSHVAVVSEHAAKLYELAPSIRDVSRDIRLISRKMDRSRRATNPENYEANGTCKKGALQWQYSNEYRKDQSRLRELHRKLEQTRDRDHGMLANRVLSLGGTVKIEINSYRSYQRSFLSKSTQKHAPGKFITCLKSKASSAGLEVEEFNPRELRLSQYDPFTEAYVKKPLKQRWHRIGNTNTIVQRDVFSAFLLLHAGKNGHNPKLLRKKWAAVEPLLRDAGLCRDVEPCNDQDWSKILSRLTKEPESIALTPRKSGASRRSRTRQ

SEQ ID NO: 58194 - protein, 386 aa, Erysipelotrichaceae sp.
MRKLLKSFRTEIYPTPEQKVKINKIIGTCRYIYNFYLSHNKALHDQGEAFMSGKAFSVWLNNEYIPDNPDKAWIKEVYSKAVKKSIEDGCLAFTRFFKHQSGFPKFKKKGKSDVKMYFVKNNPKDCICERHRIKIPALGWVRLKEKGYIPTTKDGWKIKSGTVSIKADRYYVSVVVEIPDTKPFCDSGEGIGIDLGLKDFAIVSNGKTYKNINKSAKLKKLEKQLRRAQRCLSRKYENLKKGESTQKNIQKQRLKVQKLYQRIDNIRTDYMNKTIAEIVKTKPSYITIEDLNVKGMMKNRHLSKAVASQKFYEFRTKLKNKCDENGIELRVVDRWYPSSKLCHCCGAIKKDLKLSDRIYRCNCGYIADRDYNASLNLRDAKTYKIA

SEQ ID NO: 58195 - protein, 362 aa, unknown
  TnpB Polypeptide
MFNGKRFVWNHFLALNKKRLKINERILTYYQMSSLLTQFKKEQEWLKQCEKSILQNTLKDLYNAFQEYFKKTRGFPKFKSYKNNHQSIKISFTNNNIEVFEKEIQYTLTNKYKKQNCKIKLPKIKKVKLAYSRQYEGRILSATILQLPSGKYFVSLCCADIENNKFQQTNNKIGIDLGIKEFAIFNTGGKIDNPKYYRKYEQKLKKKQRKLSSKQKGSKNKNKQRIRIARLHEKIYNTRLDFLHKLTTRLVKENDIICIENLKVSEMLQDKKNKNLHKSISDASFYEFKRQLQYKTLCNDKILSIIDQYFPSSKLCSDCGFKYNDLTLDIREWKCKKCGSIHDRDINAAINILNEGLRLLVS

SEQ ID NO: 58196 - protein, 379 aa, unknown
  TnpB Polypeptide
MQCNKYSAIIWNNCVKADQESRKEHSKSLTRSELQFMMKKTVPIILATSINIVILKYVTARDAMFRSIKANHDNSSKVKLPYKIKNYFNTIWSYQNIRIKKDKGYLTLAKPVLADSEGILRKQKPLKCHLRFIPENIVEIELVYRNGLYLLIKTKQQNDNVLIQSNNEASIDLGEIHSITSIDNNENAIIITGRKLREVKQLRNKHMGKLKSKRSKCIKGSKQYKKYSKSIWKLKYKTDKKILDVVHKITKLYLDYCIKNNISKVYYGDLDSCTRNTKKENRGSRKVHQKLNQWNYGQIVLQLTNKLTRYGIELVKVKEYYTSKKCPVCNKLNIPKGRNYTCNCGYIMHRDVNGSINILNDNSQFNIHKYNSLKYLQIA

SEQ ID NO: 58197 - protein, 451 aa, Halovivax sp.
VRRVNTFEVRPLRKRDELLLLELLTAAASLWNEITYARRQALFAGENVWEAGIESRCSRYKGTLGSANSQQIARRSDEAWRSFFALRDGGSNPKPPGYWKEGDQRDLQTLVRNDQYTIEWGTRSRLEIPVGFDLKEKYGLGYYERLRLEARGNPRWDGEQGRLELVYDRCSDSFRARQPVKNARRRRDESLATASSDENAIAALDIGANNLVAVTTTRGDRRLYHGRPQFRRFRRTTEQIAELQSDLESSDRTSRRIRREYRRRTRRRNHVQDALVRDLAEWLRERSVEVVLIGALTGVLSTHWCSRVNEKTHQFWAHKKFRRRLREVLDGEYDIEVREVDESGSSSRCPRCDARDVSRNGDTFRCNECPYEGHSDLVGSENLLRAHANCGSMARPAAPDRNGSGGGYREVPRLEWNDHRWQHRDRSTKVDPANRSIPHREKLASGKSGAT

SEQ ID NO: 58198 - protein, 242 aa, unknown
  TnpB Polypeptide
LPKIGQVHLKQHRIIPEEYSLKSVTVSQTPSGKYYASILFEYENQVQEKEMQNFLGLDFSMHELYRDSNGKEPAYPRYYRNAEKKLAREQRRLSKMQKGSSNRNKQRIKAAKLHEKVSNQRKDFLHKQSRQIANAYDCVCIEDLDMKAMSRSLNFGKSVSDNGWGMFTTFLKYKLEEQGKKLVKVDRFLQAVRPVVFVVTKMQKRKNLALREWDCPQCRTHHDRDVNAAINIRNEGMRLVIA

SEQ ID NO: 58199 - protein, 197 aa, Bifidobacterium sp.
  misc_feature (180)..(183): Xaa can be any naturally occurring amino acid
MPTPLKGGSVGIDLGVKQLATLSDGTIIRNPRALDSNLRRLRREQKNLSRKRKGSNRRREARTRVARLHARVADLRRDLLDKTTTMLARTYADISIEDLNVAGMVRNHRLARSVEDAAFAEFRRQLEYKTTRTGARLHVIDRWYPSSKTCSNCGTVKAKLSLSERVYHCEECGLVIDRDXXXXPGDVKRAWRKRKTG

SEQ ID NO: 58200 - protein, 309 aa, Escherichia sp.
VKRLQAFKFQLRPGGQQEREMRRFAGACRFVFNRALALQNENHEAGNKYIPYGKMASWLVEWKNATETQWLKDAPSQPLQQSLKELERAYKNFFRKRAAFPRFKKRGQNDAFRYPQGVKLDQENSRIFLPKLGWMRYLNSRQVTGVVKNVTVSQSCGKWYISIQTESEVSTPVHPSASMVGLDAGVAKLATLSDGTVFEPVNSFQKNQKKLARLQRQLSRKVKFSNNWQKQKRKIQRLHSCTANIRRDYLHKVTTTVSKNHAMIVIEDLKVSNMSKSAAGTVSQPGRNVRAKSGLNRSILDQGWYESKR

SEQ ID NO: 58201 - protein, 247 aa, Bacillus sp.
MKLPQLGLVRFAKSREVNGRIVNATVRRNPSGRYFVSLLVETEVQEFPKTHSYTGIDVGLKDFAILSDGTTYKNPKFFRSLEEKLAKAQRVLSRRMKGSSRWNKQRVKVASIHEYISNARKDYLDKISTEIIKNHDVIGIEDLQVSNMLKNHTLAKAISEVSWSQFRYMLEYKAKWYGKQVIVVSKTFASSQLCSCCGYQNKDVKNLNLRKWDCPSCHTHHDRDRNASINIKNEAIRLLTARTAGLA

SEQ ID NO: 58202 - protein, 401 aa, unknown
  TnpB Polypeptide
MLKAIKIRLYPNDNQSIYIKKLLGSSRYVYNKCLNYKINEYSLWNNTTGIKDTGKHLTELKQEKEWLKESHSKVLQQSLINLEVAYKNFFKSGSGFPKFKSKHQNQSCRFPVDAISGVNGNRINIINALKDIHYKCSSSDEKYLNKNQSSIKSGTLSKTKTGNYYFSILIDKPNKTIDKTSNHIIGIDLGIKDFIVSSEGTKYENLKSKRLNKVLLARVHRELSRKKKGSNNRNKARLRLAKKYEKLNNIKEYYLHSITNQLLSENQTIVMEDLNVKGMLKNHKLAKSIQELSLNRFKTILRYKAEWYEREVIEVSRWFPSSKLCGACGYKNDELTLKDRTWVCPECGVIHDRDLNAAMNIRDEGIRIKIGLSSPELTPQEGKPEGPRRMRKENVKKLECH

SEQ ID NO: 58203 - protein, 366 aa, unknown
  TnpB Polypeptide
MNLTYVDRFYPNETQKIEIYKLFSSCFRFFATVFNDVFFNRAKKKTDYKNINFCSRFNIGTKYANSLIELAFGRAKLHLAEIKDKIKQAEKRLKQIDKERLNIKDKTKLWELNREEERLNAYLRRKKSITFGSKKLQAKDVQLWQERRNNFAYGIGEGDVSYGNNTIKLKNNEIQIQVCNREVIHIPIKNRYQNKNTRFNQVLGNDDKKTIFLLKKNGKYYIHVSFEPPKTIRFSKKMGLDFNLGFISYYVLHNHRNGNIHYDTGHGANKNKESMLQAVKRVIRVAVANRIGVINIEKLDFTKKKQDLKSNMLHILPYARYTKMMKQECYKAGIKLRLVNPAYTSQNAMKMGLDRHIGAAMLIAKK

SEQ ID NO: 58204 - protein, 445 aa, unknown
  TnpB Polypeptide
MSRTYIIANYFCQRLDEYAFACKNLYNSTLYEYRQMFFNGEGIISAYDMFDVMSTYDSPIPAKVKQQVIMQVARNIKSFYSKKDSKAKLPKYLDSITGRANIILTSQAISKHKFNQENKISFSFKNETFEYDITNLKRKLRLQFGDIKQVRVVYKFKKYQVILIVNKKPKQKTNGSKIMAVDLGLDRIMSVVYGPNKVLFDGKQLKRINHIFNKNLAKLQSERDLLKNQLVKLNHKFNIIDYEALFYYEMEMEFDFNEEKYKKLIRKQLHIINRLRKLEKIIARTYENRNNRLKYCLHWLSRRLIELCVSNRIGTIVIGYNKEWKQDINLGKRTNQNFVQIPHKTLIDYIQYKAAEYGIVVKLQEESYTSKCSFLDHEAVCKHDVYAGRRVKRGLFRSKNGHEIHADINAAYNIAKKAGYDFCLCPKSLCSWPVLKRISFGNKVS

SEQ ID NO: 58205 - protein, 430 aa, Aphanothece sp.
MLVVEAKLKNGTKDQYSKLDDAIRTAQFIRNKCVKFWMENKGTTRNDLQKLCSVLAADKTTPWTNKLNSQARQSSADRAWQAISKFYANCRNPAIKKKGFPKFKKHSRSVEYKLTGYKLSNDRRKITFIDGFKAGTFDLWCSQKTLVYYSEQQIKRVRVVRRADGYYCQFLIDYEREEKHEFTGNITGIDLGLKEFLTESNGNTVENPRYFRKSEKRLKKAQRRLSKRFKKGQKQSENYHKQRRKVAKLHLKVSRQRKDRAIKDALALVQSHDLVVYEALKVSNMVKNHKLSKSISDASWYQFTQWVNYFAKIHKITCIAVAPHFTTIDCSVCGAKVEKTLSTRTHQCPSCKTVLDRDHNAARNILSKGLQQLGAYLNGSGGHPQTDPNACRESDLWVFNGDIENLSRLVEAGISNSDVERIPRHSDIGA

SEQ ID NO: 58206 - protein, 397 aa, Acidimicrobiaceae sp.
MTRCRTFRYRLHPTVRQALALSAQLNYQRELYNAALEERVGTWKWSHRSISYVGQCRTLTGLGDLRPEVLSSGVALCRGTLKRLDRAFAAFYRREKNGDTPGFPRFKSAQRFDSLQWEDRSGWKVKEADRRLYLLGIGEIKVNYHRALRGVPKAITVKREGAKWWVSVRCVDVPAEVLEATGREVGLDLGVANLVATSDGDLILGEHFGSRSRAQLADAQRALATKRPGSNGRRRQVETIAHLHRKVASQRRNTAHQLSRRLVNDYDLIVLEDLAITNMVRTPRAKADPDSVGAFLPNGAAAKAGLNRSIHDAGWATLASLLSYKAESAGRTVVRVSAHHTSQRCGECGHVDAGNRVTQAVFRCLGCGHEDHADLNAARNILRAGRARLALASDGRI

SEQ ID NO: 58207 - protein, 731 aa, unknown
  TnpB Polypeptide
VVIGCSLAKAVLNAQHLEQIRDGVERTHRATVLATELLNLHARRVLEDGEEVPDFFSGNWAKQAWVAVSTISGKVGTSLQASRQAQVDLHGGALAEVDAAKTGQLFKFAADQFASTAATNLQLHLRKRVGAYVNMSFAVDKDAWAAMARTERHAHKLKKRRLHWDVCRIDTEARKLTDAADTAWVDATRTLLGFDGLEWADKPLEYHARADPRRFLRSTWTILGRLGEAGWRGFSLLPLRRGLVPKYATVDTRALRDLLGLGTSDARKRMDKAAQLRKQAASGMNDATPHKRTRRTPEELADEHWEAWDAVFDLSAVLRSGLCGRHPQNRRGLAFGFSMTTDGVGCSLKFTLPKSANVASSADESSTPGKRKRGNASSAEAAAPRLGALPSRGIWPLDAIKHLARADGAGRSEPPSGGAPQDVAAYLDALLEVQVVGVDPGKTELAVATDPALAATRHKIRTVRYTAAQRRMETTPGVFHRKARPAIRGEDHGAERAGLASEYHREFVRKPVSVASMEQTLSSTCASVASSVAFGSYVSARAAVLAPLLAHYAHHHHRRHRWRHRRESERSVARFVSQLKSLQRDPARPVVVAWGAWGAIAGRPGQPVNRGSAPCIGVGLMRRVARDLPVVKTPEYCTSKTCCRCGGACGNHATVEANRLRDHPRWRAREIRGLRLCQNSECRRPLNRDANAAVNIGTNLMCLLYDAPLVAQMSAGDVEMTTMEAAAATAQ

SEQ ID NO: 58208 - protein, 595 aa, unknown
  TnpB Polypeptide
LEKLLKTLTRAVVLECYVDRFVRRALREIEGVYREMLVEMVEYAVKYKASQETLHNVFYEKFRERYPWLPTRVIKGAYRDAVRRAKSFRERVKKGKVHKDKPEVKRVTITYSDSQDWRLEDGIIKLRTHRGWVELHYRNHKQLHRYLCSGWRLASELRFKILGKKVIAYLTFTREFDVNYDPKNVIAVDVNENNVTVAVFKDGSLTDIYRVETGLGRIVVAYSERRKRITQGKSTKTREVRRKLRRLRERERKQDVLRKTAKLIEKLAIENRAVIVVGNINEKAKERMEEDANSKLRHRIHQWSVRKLVELLDEKPIHVVKVSERGTSSKDPFTGRRVRRFKPLMIRTAVKGLKRVKILKIILRIAKVSGRVLERDVVGAVNIGLKYLNTDGSLVALGSTGAHGVWVKLMNLHRGPTPQTYLKLFTNIESGETPEVLGLIRDPTERATWMDSLAIAAAAFARYKAGMSVSQIAEELGRSEAAIRNHLSEKTKAGKLVSETYEKLRRSELKLVIPFIKTPVAPPSEEVKVLREEVEKLKESKKALEEKLKQIQQELEVKTKEIETLQSKLNELVSQVKDVKDLALRIVDTVDKLLK

SEQ ID NO: 58209 - protein, 430 aa, Okeania sp.
LKARYKYRIYPNHIQIKKLNQLFGCCRYVWNQSLAHCNQLYVNGAKRPSYVDLTKQFITQAKKELLWLKEVASTPLQQLLKDLDQAYKNFFNSCTGKRKGVKARPPKFKSRKSKQTARFVGANYQINQDKIYLPKVGKIKIVWSRPLASQPTSLTIIKDSANRYFASFVVEISPESLPKTDNSIGIDLGISKFATLSSGEKILAPKPLKKSLKKLAKFQRKFAKTESGSNLYERRRLKIARLHAKIKDIRTDFLHKLSTNLVRKYDIIVLEDLNVSGMIRNRKLAKAISDLGWRQFRTLTEAKCEKYGREFRVINRWEPTSQKCSCCGFRGGKKELNVREWTCLNCGTFHDRDVNAALNILEVVQPKNKAETLKETVAENPVQLSLFDIVAGGQPETLNKTRSRRNSNRKKVVDGNESSTHPESIQLRLS

SEQ ID NO: 58210 - protein, 402 aa, Okeania sp.
LYRAIKVRIYPSLEQSQKLTQVMGCTRWWWNYALNLCNETYQQTGKGLSQVALNQVLPKLKKSQETAWLKECYSQVLQSTTLNLTKAFKNFFEKRAKYPRFKSYHGRQSAQYPQNTSVVDNGVKIPQVGVIKASIHRLFDGQLKTVTITKTPTRKYYASLLFDTEQQTPEVVLTGKVVGIDLGLKDFCITHDGSKTAKYANPKYHQKHQKNLARKQAKLARKKKGSISRQKARQLVARIHERISNARQDFLHKLSRKIVNDNQVVVVENLNIKGMVCNHKLAKAISDVGWGIFVNFLDYKLQQKGGLLIEIDRWFPSSKTCCNCLYQMSEMPLDVREWTCPSCGTHHDRDENASKNIRTEGIRQLSVLGTRTAAEGGEVRPKGGHKSVLRHSPVSSEAPTSA

SEQ ID NO: 58211 - protein, 405 aa, unknown
  TnpB Polypeptide
MLVRSLVFRLKDPLPNEAKFLMGDFRLAVNSAIRLGIQSNATSRNTLTKLAYKDFRKEHPNMFAQHLVSSFEVAGSVLKNYRRRLRKDLPAQIPFVRRMFMKAENQAYKLDRKSGVLDLPIRAGCHVQLRLILSDYHMRYLDDKSLSLGSLTLLPDRVIIAIRKPPPKPYVPESVISLDTNERSLDGVLAKDDSIERIVKVEYPEVAIIQDRHYNRRRKLQKKKAHDRRTMKRLCNREGKREHHRIDYRLHQTANAVLSFAEENRSSIILEDLTGIKPDKGKAFNRRISMWPMRILHQIIEYKSAWRGIPVIKVDPRYSSRKCPACGKIQQSRKGIEFVCGCGWHIDRHINASINLLRTAAPGWAAGGLRFGPGASQHDVVTVLCGPNRTVSPEPNGTSDMRAVV

SEQ ID NO: 58212 - protein, 382 aa, Nocardia sp.
VQLRYQYRVYPTPSQRGSLARAFGCTRVVYNDCIRLRHEAHAAAVKLTDTEVQKRVVTLAKRTPQRSWLGEVASVVLVQACQDARRAYRNWFDSMTGKRRGRRVGAPRFRSRKDHRQSIRLTRNGFTIRSNKRLYVAKIGELDVRWSRDLPADPSSVTIVKDSAGRYFASFVVEVEPNSMPEVASEVGIDLGLAVFAVLSNGKTISSPKFLRRAERSLRKAQQSLSRKQKGSKNRARQRLRVAKAHARVADARRDWAHKQSTRIIRDNQAVFVEDLCVHGLARTWLAKSVHDAGWSMFTRMLEEKAARYGRVFGKVDRLYPSSQICSMCGAMDGPKPLAIRQWQCMACGAVHDRDLNAAKNIHAAGRAEWQNACGETVSLPA

SEQ ID NO: 58213 - protein, 558 aa, Streptomyces sp.
MVLVGCDERVFERPYGVGGLRELAASFVAVGPSGVAVRTRLKQLTPADEEVLALVGAHLGSLASRDLKARCADGLEHSTDRWAARKKGLTAESSSRWAGAITKATHDQWALARRGQAAHIQSLEAGVRTIAHRLSLPVGHKGTKQEPGGYRSAHEWFNKTRRLHVLEDRLEQVRADRQAGVVRVVRGGKRLLGTRHNLDAAQLTEDQWRKRWEAGRWFLQADGESGRRFGNETIRVTAHGEVSIKLPAPLKELANAKHGRYVLAARVCFPHRGQEWADRIEANRAVAYRIHLDTGRGRWYLTASWQIPPTKTIPLEAALADGVIGVDTNADHLAVWRLDVHGNPTGRPRRFSYDLSGSANHRDAQVRHALSRLLNWAKTCGVKAIAVEDLDFAAEKTREKHGRKCRFRQLISGMPTGRLRARLTSMADATGVAIIAVDPAYTSKWGTQHWQKPLTSRTRKTTRHDAASIAIGRRAQGHPIRRRTTPPPHDRSDRAGHRTVQAGPEAPGREGARPRVAGPRTRSVPPDAASTRATRTPKTVRDVRSGQVWVQDSLLLTD

SEQ ID NO: 58214 - protein, 332 aa, Escherichia sp.
  misc_feature (319)..(319): Xaa can be any naturally occurring amino acid
MHQENTMLPRRISVSLFIDQSIIWPVKRLQAFKFQLRPGGQQEREMRRFAGACRFVFNRALALQNENHEAGNKYIPYGKMASWLVEWKNATETQWLKDSPSQPLQQSLKGLERAYKNFFQKRAAFPRFKKRGQNDAFRYPQGVKLDQENSRIFLPKLGWMRYRNSRQVTGVVKNVTVSQSCGKWYISIQTESEVSTPVHPSASMIGLDAGVAKLATLSDGTVFEPVNSFQKNQKTLARLQRQLSRKVKFSNNWQKQKRKIQRLHSCIANIRRDYLHKVTTTVSKNHAMIVIEDLKVSNMSKSAAGTVSLPGRNVRAKSXHNDRQQKPRNDSH

SEQ ID NO: 58215 - protein, 396 aa, Moorea sp.
MVEKAYRYRFYPNPEQDNLLRRTLGCVRLVYNKALCARTKGWYEHQKRISYKETSSMLTGWKKQDDLFFLNEVSCVPLQQGLRHLQTAFTNFFAGRAKYPNFKKKRNGGSAEFTKSAFKWKDGQIYLAKCQEPLPIRWSRQLPINCEPTTVIVNLDPSNRWHISIRFNDHRDLSLPVTDKQVGFDLGITSLITTSDGDKITNPKHFKKLKKKLAKYQKALSRKQKGSNNRYKARLKVAKIHAKIKDARKDFTHKLTTKLVKENQLIAFEDLAVKNMVKNQKLAQVISDANWGEIIRQVKYKSEWYSRKAISIDRWFPSSKLCSVCLNRVESLPLSIREWDCPSCNTHHDRDINASINILAAGLAVSVCGATVRPQESKSRRAGAKNSKKREKEAET

SEQ ID NO: 58216 - protein, 391 aa, Okeania sp.
MYNAGGRFSMLLKYKYKLKPHKKQAVIISNWLEMARKQYNYRLAERLNWFEATRTPVNACPLNVSVVPVERIYQNIPEFRTQTRDGRKKDGNGNPVTKKGDKHPNIINGYVAWETVQLADLAQTKKLFPEYQSIHSQVLQDVIQRVQTTMDNFTKPDKKGKTSGKPKFKGKHYYNSLSYPQLSNSSIVKNANGRYCVSLPKIGLVPFVYNRSIPEGFKVKTGSVIREVDGWYISFTIEDKTVPVEVVEIQPTLKNSKGIDLGLLYYAVTSDGEFIEVPKFFRFSEDRLSKLQVRLSKKDKHSQSWKILKRKIAKLHQLIARQRLDWQFKLAYHLFSDVSAIFLEDLQIANLVRRCKAKLGDNGQFLPNGQSAKSGLNKSLHDAATINFLMF

SEQ ID NO: 58217 - protein, 419 aa, Streptomyces sp.
VIVKLVVQVKLLPTPLQAAALEATLHACNEAADWVSEVAFARAEFKNFALRQHTYEQIKTQWNLGAQAAQHVIKKTCDAYATLKANLRAGRLGRPGSQRYRRAAGKPVVFRPSGAQPYDDRMLSWQIADRTVSIWTTGGRMKSVAFTASPGQLATLALYRKGESDLVERDGMWFLLATCEIPEAEPNAEPVDFLGVDLGIVNIATTSDGEILAGRELNRIRVRERGLRTKLRKKNTPSAKRRLKKRRRKEARRAKDINHKIAKHVVAEAERTGRGVALENLMGIRERVRLRKPQRATLHSWSFHQLGEFIAYKARKAGVPVVYVDPAYTSRTCAECGHIDKANRVSQARFVCRSCGFVDHADRNGSRNIRARAWALWRRGASSTAPAPPPDPKGGTGRKRHVTTSDARCASPGFRPRCS

SEQ ID NO: 58218 - protein, 294 aa, unknown
  TnpB Polypeptide
MNWINSLDKDFKVHLSLGRWFLLLPQVVNVADRISVFKPPQLHAGLRWVGETRQSLDDADEITALDPGVRKPFVCYSPQGRVDVIGTNVKKVAIKSFRRVDRRKSAFHHAKDAFGVFKSEQLLQKKEWLQHDHSLRECQTQQHNWRKEKRRQAQQLARAHKRYRLAELKQRYIAKNFHYNVSHFLLRRYKTIILPTTSSHQWRRGKHLHKTTKRMIQFLALGSFAMRLKQTASFYPGRKILRCSEAYTSKQCGACGHINDKLGGSEVFRCAKCGEKGDRDVHAARNIALRVLQI

SEQ ID NO: 58219 - protein, 281 aa, Helicobacter sp.
MIKDKNKGVVLLNAVKFRIYPNAQQKELISKHFGCSRVVYNYFLDYRQKQYAKGIKETYFTMQKVLTQIKRQEKYHYLNECNSQSLQMALRQLVSAYDNFFSKRARYPKFKSKKNAKQSFAIPQNIEIKTETQTIALPKFKEGIKAKLHRDLPKDSVIKQAFISCIADQYFCSLSYEAKEPIPKPTLIKKAVGLDMGLRTLIVTSDKIEYPHIRFDQKLEKKLTKAQRRLSKKIKGSNNRKKQAKKVARLHLACKNIREDYLHKISDEITNQYDLIGVETF

SEQ ID NO: 58220 - protein, 298 aa, Mycobacterium sp.
LMAKFEIPEGWMVQAFRFTLDPTAEQARALARHFGARRKAYNWTVATLKADIDAWQATGIQTAKPSLRVLRKRWNTVKNDVCVNIETGVVWWPECSKEAYADGIDGAVDAYWNWQNSRSGKRDGKRMGFPRFKKKGRDPDRVTFTTGAMRVEPDRRHLTLPVIGTVRTHENTRRVERLIAKGRSRVLAITVRRNGTRIDASVRVLVQRPQQPKVTDPGSRVGVDVGVRRLATVATADGAVLERVPNPRPLDAALNELRHVCRARSRCTKGSRRYRERTTEISRLHRRVNDVRTHHCTV

SEQ ID NO: 58221 - protein, 386 aa, unknown
  TnpB Polypeptide
MRKTFKYRLHPTKKQVQKLEQTLDTCRVLYNSCLLDRKRHYEQTGKGLSRIKQQEILKADKERIKTLNDIHSQVLQDVLFRVDRAFQGFFRRLKEKNGKAGYPRFKGEDRYDSITYPQEPGFRLTEQGLKLSKIGTIKLKKHREINGEIKTCTIKREIDKWYTCLSVEYEPIIKPIPAKSIGIDVGIKSFTVLSNGEVIDNPKYLHKSEKKLASKQKQLSKKKKGSSNRKKAKVKVAKLHSQVRNQRSDFHHKTSRSIIDTYGFIAVEDLNIQGMARNRCLAKSISDAGWGQFLNYLTYKAAEAGCKVEKITPHYTSINCSVCGEPVPKTLAQRIHKCPSCNVIMDRDHNAAINILNRAGTARINAWGEAAIAASLNQEASSVKAR

SEQ ID NO: 58222 - protein, 286 aa, Thermus sp.
MLPRFKRKKLTPDNKARLTGSVRVFPRHVQLPRIGKVRSKEPTEKLLQLLEEGKAQILSATVSREADRFYVSLTCEVERPDPKPRGVRSEGDVVGIDLGLSSFAVLSDGTRIEAPKPLTRKLRLLRRRSRQLSRKEKGSNNGKKAALRLARLHRKVKNLRLDFLHKLTTWLAKTKPVIVVEDLNVKGLARGRLSRSVADVGWGAFRRTLAYKAEWYGATLIVAPKSFPSTRLCSRCGHLQGKMPLSQRVFRCEACGLELDRDLNAALNLRLMVWPTSRPYREFPGK

SEQ ID NO: 58223 - protein, 443 aa, unknown
  TnpB Polypeptide
MLKALDIRLYPNNIQIEYLNKIFGCYRKVYNLCLDKAKSEYELGENFSSLIDFSNYFHKVLLKSEEYDYLNEHNTKILKDSLSNLQTAYKNFFRTKKGFPKFKTKSIEQSIGLYKEAFSKKVFDLDNHMFINKTFGQIKYKTSREYKELICKYKNEIIRITIKKTKSNEYHALILIESREVKMLSQTDKIVGIDLGIKDFIITSEGIKFENIKIRNKSEKKLIRLQRQLSKKKLQPTGEFKFNKKYNKDVEIKTPSKNREKARLKLARYNEKLNRIKNDYLHQVCNQLLRENQTIVIEDLNVRGMMKNHHLAKSIQDVSLGRFKEILTYKALWYNKEIVEIDRWFPSSKLCSDCGYKYKELKLSEREWICPECGVIHDRDINAAINILNEGLKIKDKIGKRYPEFKLVEHPTMDDRLGNKVLKSSGVMKQEKDLIKYNKLVYC

SEQ ID NO: 58224 - protein, 442 aa, unknown
  TnpB Polypeptide
MLKAIKIRLYPTKTQTSYINRLCGSYRKVYNMCLEKKINAYNTDKTSLGLTELGCYFHNELTKLEEFSYLNEHNTKVLKQSLINLLDGYKRFFINGNGFPKYKSKHNNQSCRFPIDCISTKNLYSDNRITLVKALKKIKFECSERDKNYLSTHKDKIKSATLARTKSDKYFLSILIENIIEPVQKPINNIIGIDIGIKDFMVCSDGQIYDNLKLKRKNEKTIIKLQGQLSKKQRVKTGEFVFSKKWNKEVEITRLSNNGEKSRLRLARFQEKLNNIKINYIHNITTQLVRENQTIVIEDLNVKGMLKNHCLAKSIQDLSINETFRQLKYKCEWYGRDLIIIDKWFPSSKLCSKCGYKYKNLSLKERSWVCPDCGTHHSRDFNAATNIVNEGKRLIGIRYPEFTLVDNPTKENREILMDDRLSNEVLKSSGWLKQEESNLTRL

SEQ ID NO: 58225 - protein, 402 aa, unknown
  TnpB Polypeptide
LTNSEKWGTIQAVELTVVAKLDLSPQDKQRLNQTLDAFAVACNAISQVAFAERCFNSVALHHLTYYDIRQRFNIHASLVVSARERVAKAYKTSKAKKQPPKLLTFKPQSLDLNAKLFRLFCENDEVWVSLASCDGKRIKCPVKVGQRYLPIIRDSKPTFAVLKRHRDGELYLHIVVSVPVPKPSDPPQNVVGVDLGEIDLLVASNGVKISGVESIERRKRFRARRRILQRKGTRARRARTRLSDKERRWARNYLHTVSRRFVDSLPPNSLVVLEDLGGIRDRCKRRGAEQRAQFHTWAFRQLQWMIAYKARLAGHQVVFVRPAYTSRTCPRCGHVGSSNRLSTRLFRCQQCGFQHNANCVASINIASRAVQAGLVGAGLPSTSLRLRELNSLSKLTTLVVSS

SEQ ID NO: 58226 - protein, 420 aa, unknown
  TnpB Polypeptide
MFGCQQILISPDKDLKATLEFLCGEATKLANCGTYYTRQLYFKNGKIPSKYDLHRELANNPHFGAIYSQVAQQCLTTVAESFKSFIGLLKAVKSGKTDQKPKLPGYRDGGLTFVTFPRQAVKLKPEGLRFPLGSKVKVWFGLAEFYLPMPSNLEYKSIREYRILPRNGEFYLELVYQIPSIQADVDFAKALGIDPGLNNWLTCVSNVGTSLIVDGLHLKSLNQWYNKRVSVLKENQLQGFWSKHLAGITEKRNRQVRDAVNKATRLVINHCLENRIGTVVFGWNKGQRQEINLGAKTNQKFVQIPTARLKNRIAQLCEQYGLKFVETEESYTSKASFLDSDLLPTFGEKPEGWPLSGKRVKRGLYRSANGWLINADCNGAANILRKVAVKLGLNLSGISRGALTAPFRIQLWIAKASPSL

SEQ ID NO: 58227 - protein, 393 aa, Actinomadura sp.
VKVVVQVKLIPDVVQASALERTLHTVNECANQVSAASFATYGLKGSVKDLRSMAYGELKARGLGAQAAQHVIKRVADAYTALRAGVRAGNLGGVGSKRRRKAESKPIAFRADAAHTYDDRCASWNYDAQTVSIWTMDGRLKNVRFACSAGALKQLVQYRKGESDLAFRDGKRFLVATCEVPEAERYESRDWLGVDRGIANLATTSDGENHSGRRLDRYRRWQARKKAEIQACKTRSAAQLLKKRARRESRHATHVNHRISKTVVAVAQRTERGIALEELQGIRERVTVRRDQRARQSSWPFHQLGAFIAYKARRAGVPFIEVDPAYTSQRCPRCGHTAKANRPSRDAFRCRRCGLAGPADVVAGVNVRDRARPAWVFVNMPQPAPASTAGPAM

SEQ ID NO: 58228 - protein, 555 aa, Aphanothece sp.
MSSQEKQQLSLEFISELYPSGNKKAKYKQSKLHQDKDDTILSPTKENLFHQLEIPLFTPVSVVEDNKKISLVKSKQSKKDIQAQKLLARSQEDSTSKEKNFLPYWNELCQELSEQLLSLTKTDWQDLGSIGLTGSVSNLTVQSWFSTRQTFLQKQKWLKTSLLSSTASQADCMDSENIKLRSRKIKIYPTPELKIMWNKWAAACRYCFNQAIAYQKKNGRMGKTKLRNIIMQSNLPEWVKETPCHIRQNAIFDAHQAYTASKDCKFRNCHAPRQTIKFNNSNFAQGKWYPNVTKGLEFESSEPIPLKNAYATQLIKSKSGEWFAVFLNSVEQAENSNNNIISLDPGVRTFLTGFDGQRFIEIGQKDIGKINRLCSYLDDLMSRTSQSKGHQKAIRRKAASKLRTRIKNLVDECHKQTANYLTKNYGMILLPTFETSKMTKKNKRKIRTKTARQMLTWSHYRFKQVLKDKAELNGSKVIDVTEEFTSKTCTKCGHVHQKLGGSKIFKCPECGHTLNRDFNGALGIMLKALSDTTFTIVKDGNAIVAQYSDIPCCTA

SEQ ID NO: 58229 - protein, 362 aa, unknown
  TnpB Polypeptide
LVRQPTKRRYESEPARLPQTRRRAPALNSHLQAERLQTRHSVRPSRLSKGSNLKEYWSDFVLCKYQTRPDVDLSTVENVQQVKIVWTGDEWELHFVCKVEIDVDEAPGEKTVGVDLGINNAAALAYEDGHSVSYPLNCLKQDDYYFSKLIARCDNSDSEQATRLNQKKSARRTHYFHTLSKHIVQRCVDEEIGTIVVGDLSGIREDEENGESKNWGKHGNLDLHSWAFDRFTGLLEYKAEMEGITFEQVSERDTSKSCSCCGRKHEANRVERGLYVCDECGTVANADVNGAENIRQKVSPSSPNLSVNRSNGWLAQPSTLLFDKGNWCVRTARTGNVVNHNIPTQRCSAVGILALQRGRMSR

SEQ ID NO: 58230 - protein, 419 aa, Coleofasciculus sp.
MLTLTHRYRIYPNSAQEQQLIEWMEICRGAFNYALREIKDWCDSRKCAIDRCSLEKEYILPSDLKFPGEIQQLNNLPRAKKEFPKLGEVPSQVLQQAIKQLHKGWEYFQCIGFGFPRFKKYGQVKSLLFPQFKENPVTNLHIKLPKIEAIPINLHRPVPTGFMVKQVRILRKADRWYASISIQCKVCIPDPMPHGHPIGVDIGLEKFLATSDGVLVKPPKFFKQLQSELKLLQRRLSRKRKRSKNYEKQRIKVARLHHKIDNTRKDFHYKQAHALCDAGDMVFMEDLDYRTSAKGMFGKHMLDAAFGQFRAIVKYVCWKRGKFFAEVDAFGTSQQCPECGGEVKKDLSLRIHDCPHCHYKTDRDVAAGQNIRNRGIILVSTLGYSGIESACADDLPGTDESQSRQVSKSRKKVTRKSKK

SEQ ID NO: 58231 - protein, 422 aa, Microcoleus sp.
MRVWEFKAKGKTTQYSAIDEAIRTAQFVRNKCIRFWMDNRGVGQKELYRHNTKLRAEFPFVNALNSHACQVAVERAYSAIARFYENCRKAIPGKKGYPKFKKNCRSVEYKTSGWKLSEDRRSINFIDKKGIGRLKLKGTWDLHFYQLDQIKRVRLVRRADGYYVQFLVRTENETVDVQPTGKTVGLDVGLKEFYTDSNGHTEPNPKFYRTNEKRLKFRHRHVSRKKKGSTNRKKAINRLGRVHLKISRQREEHACRIARCVIQSNDLVAYEDLRIKNLVKNHCLAKSINDAGWYQFRKWLEYFGTKLGRVTVAVNPAYTSQECSSCGAVVKKSLSTRTHVCKCGFVLDRDWNAAINILKLALSTTGHVGTWVTDPNALPRFAHHASQTGDSTSTLAGAILFEQVESVNEESPHFYGGECQPV

SEQ ID NO: 58232 - protein, 368 aa, unknown
  TnpB Polypeptide
LYFTEKKTLNYGGCSQALTQLKKEIDWLREVDKFALQNSLKHLETAYKNFFANVKKPKAKRKFGFPRFKKKHGFKQSYKTNITNGNIQVIANRLKLPKLGWIRFYKSQEITGEIVNVTVTRTATGKYIASVLCETEIEVHPHTTKNIALDLGLKSYLVTSNKDEIANPKYYRTQQRKLRKASKKLSRSQKDSSNRVKAKIKLARVHEHISHQREDFLHKLSTRLIRDNAIICIEDLAVGNMVKNRKLAKSIMDASWSMFVAMLGYKALWHDRVVQKVSRFYPSSQTCSCCGYVNPEIKDLEIREWTCPKCNAHHLRDWNAAINIRNEGLRLIAAVGAPEAQNACGESVRPEEIQAGIEEARITRLQVV

SEQ ID NO: 58233 - protein, 383 aa, unknown
  TnpB Polypeptide
MLEIFRCMVNDSIKIGLETDSSSMKRLSTLSYRQLKKYRCYSAYRLTAISKAAGILASRKKSLRRGRPTKTPFMSNAVLVSCYGFKIEGKKLRVPLGDRDFEHIPLNPHTVRILSDPSLKVRSFTLTESILSLCISKEVAVVEVTGTIGIDRNLRNLTAGNLDRVTQYDLSDTLKIVDATRRVIASFKRDDDRIRERLASKYGSRRHNRTQHILHKATKRIVADALERKEAIVLENIEGIRGLYRRSNGQGPRRRNRMNGWSYGEAQRQLEYKATWAGLPVIHLSKSETRGSSVTCPQCGERLQEDRRLKRKLWCQNCRSIMDRDVVAAINLSRRGRLRFDRSLAHRGLQGGTIEAVKGNPTNAVILRVDVPKSSPSLNQPKT

SEQ ID NO: 58234 - protein, 322 aa, Aulosira sp.
MTSAKQPRSRVRENSHARFCKRGRGSDFPLDSTSLSKTRKQINFTDKKGIGKLKLKGTWDLNFYQLEQIKRVRLVHRADGYYVQFLISADNKVESPPTGKTIGLDVGLKEFYTDSDGHSKPNPRFYRIGEKRLKFRQRRVSCKNKGSINRKKAINKLGRVHLKISRQREEHAKRLARCVIQSHDLVAYEDLRIKNLVKNHCLAKSINDVGWYQFRKWLEYFGVKFGRITVAVNPAYTSQECSNCGAVVKKSLSSRTHVCECSFVMDRDWNAAINILKLALSTVGHTGTWILDPNASGDSTSTHAGEILYGQVESTNEESPHL

SEQ ID NO: 58235 - protein, 418 aa, Aulosira sp.
MFPPRTFKCAEKTRLGYLKIAITCNKINVMEQVLTLVCKLNPTTQQVAQIEATLKAVADACNYANEQVKPQITSKTTIQSLVYQDLRSLFGLSANLAVRACARVGANRKTAKQKNKPVKFFKPTSADYDARIFAFREKDWTVSLTLMEGREHIKLDVGNYQRGKLKGKKPTSAQLCKHRDGSYYIHIQIKNEAPQPLKPTNVIGVDFGRRDIAVTSDGDKWDGKQITEVRDKYAKVRTSLQRKATKGTRSTRRRARQILPRLSGRERRFQQWLNHQISYRIIQQAKSTNAIIAIEDLTGIRERTNQQPRNKIERRRSNSWSFYQLRYFLEYKSIKEGVEVIAVPPAYTSQTCHQCLHIGLRSDQRFNCGNCGWHGDADLNGAKMISLLGQSVSLPGGSGYLCCNLSTDSSGLLKAPSL

SEQ ID NO: 58236 - protein, 445 aa, Aulosira sp.
MTFRLYPNKQIEQSLRYHRKLHKDLYNAAVYNRFTQYQKFNHSVSYFEQQNCLPAFKDVWTEYKEINSQALQATLKRVDFAFERWFKSLGKRPRFKSIRHYSGWTYPAKSGYSVESNGENGYLNLSMIGRIQMRGQAKFWGTPTTCTIVHRNGKWYASITVDLLDQVLKPNILPVGAIGIDLGCNSALSITDGENHQQIEAPLFLRNAEHLIKKASKSKRRKQAPNRNKKIKASRRWKKAQSKVSKITRKVANQRQNWVHQVASEIVSSNSFVATEKLEVKNMASKAKKGKRKKQKAGLNKSILDVGFGMLRSTIKYKVEQIGGVFVEVPTKKVKPSQTCPKCGHQHKKTLDIRVHNCAVCGYQQDRDIAAAEVMLYWAKGTLPGLGTSLVDAESSGSTSCTKARQQAGSMKQLGAKKRQKSVEVSANNELRDVETHSSGGANCG

SEQ ID NO: 58237 - protein, 667 aa, Escherichia sp.
  misc_feature (163)..(434): Xaa can be any naturally occurring amino acid
VKRLQAFKFQLRPGGQQEREMRRFAGACRFVFNRALARQNENHEAGNKYIPYGKMASWLVEWKNATETQWLKDAPSQPLQQSLKDLERAYKNFFQNRAAFPRFKKRGQNDVFRYPQGVKLDQENSRIFLPKLGWMRYRNSRQVTGVVKNVTVSQSCGKWYISXXXXXXXXXXXXXXXXXXXXXXXXXXXXXXXXXXXXXXXXXXXXXXXXXXXXXXXXXXXXXXXXXXXXXXXXXXXXXXXXXXXXXXXXXXXXXXXXXXXXXXXXXXXXXXXXXXXXXXXXXXXXXXXXXXXXXXXXXXXXXXXXXXXXXXXXXXXXXXXXXXXXXXXXXXXXXXXXXXXXXXXXXXXXXXXXXXXXXXXXXXXXXXXXXXXXXXXXXXXXXXXXXXXXXXXXXXXXXXXXXXXXXXXXXXXXXXXXXXXXXXXXXXXXXXXXSCGKWYISIQTESEVSTPVHPSASMVGLDAGVAKLATLSDGTVFEPVNSFQKNQKKLARLQRQLSRKVKFSNNWQKQKRKIQRLHSCIANIRRDYLHKVTTTVSKNHAMIVIEDLKVSNMSKSAAGTVSQPGRNVRAKSGLNRSILDQGWYEMRRQLAYKQLWRGGQVLAVPPAYTSQRCACCGHTAKENRLSQSKFRCQVCGYTANADVNGARNILAAGHAVLACGGCQQTG

SEQ ID NO: 58238 - protein, 390 aa, unknown
  TnpB Polypeptide
MKSAYKFRIYPNKAQIAELDETLEICRNLWNTALADRKSVWEKRGETRSYEDQAYILVREKQRNPELKKVHSHVLQDVLRRQKKAMDNFFRRVREGAKKKGYPRFKKRYTSFTFPESGFKLEGTRLKLSKISGTIRTFVHRPIEGTIKTCTIKRDGTGAWFVIFVTDRDSPTPGLTDSVNVIGVDLGIEHAVTTSDGDVYDYPRYYVQAEKKQRAAQKSLHRKKLGSKNRKKAQKWLSRIGKRVTNMRDEFLHQTSRKLVDSADIIVFEDLNINGMLKNHHLAKHIQDVSWGKLIRLTQSKAERAGKRVVLVDPRNTSQKCSSCGELVPKKLSDRTHICPHCGLELDRDLNAAINIRALGLRGRACGELTSGLGSPPSKRRLNEAGSSAL

SEQ ID NO: 58239 - protein, 260 aa, unknown
  TnpB Polypeptide
LSKKWLRRSRSWIWRINSKSVSSAIPPLGHPMSLSGLILAQPVALGWGTFQNYTLALEPAPLRADFTSHPKLAWIPPLNSSGSRPLAGVGIPPTSEGDNWNGQQLTKVKDRFSRLRAALQRQASKSTRSCRRRCRQLVQRLSGRERGFQAWVNHNISKSIVKTAQSLSARIAIEDLSGIREGTNQHPRSREERRRWHSWGFYQLRRFIEYRAVGAGSLRGIFLNHLLRLFCAGRLVIAAGVVHLLFETPQRFAKGAAQLR

SEQ ID NO: 58240 - protein, 359 aa, unknown
  TnpB Polypeptide
MVNDSIRIGLAENVTSLKTLSMKVYHQLSRYHIPTYYRLTAISKATGILRNYRKTMRKHPNAKKPYASKIMLTDCYAFRIIDGELRLPLKSRCYEYIPLNSYVLRSISGYTVRSVTLTASTVSIAFSKETVVMEPTGLIGIDRNLDNVTIATDKGNTKRFDLSEATKIKATYREVQSHLKRNDVRIRKRIFSKYGRKQRNHVNQCLHLVSRQIISEAKANNQGVVMENLKGIRKLYRKGNRQGKEYRSRLNSWSFYELQRQIEYKAKWEGIPVFYVHPYGTSSHCAVCESRILESTNREVYCPNCKMFVDRDENAALNIVKRGVRFAPVGLARNEAVRGNPERVILRAEASKLTHLTKS

SEQ ID NO: 58241 - protein, 411 aa, unknown
  TnpB Polypeptide
MRRAYRFRLYPKTKQAELLEQTLTLCRRLYNAGLEHRIIAYRNDQSISYLQQQNELPQIKREMPEYGLVHSQVLQETLRRLDRAYQNFFRRVAEKRKGKSVKAGFPRFKGENRYDSVTYPQRGFKLLPNGHLLLSRLGEVRMFMHRVPKGKIKTLNIKRDRCGCWYAVLTVEKPAVRKRVRRAVGVDLGLRNLVALSNGEALPAPKFLRRSEKKLKRLQRWTSRKLKGSGKRGKAVLCLARGHRHVERQRTDFLHKLSHDLAKCDMVFEKLNVAGMLKNHRLAKSIADASWSRLVKMTVYKAEEAGGRVVLVDPKYTSQECSVCHEHVKMLLKDRVFVCPNCGLIICRDVNSARIIQGRVGRGTAEFTPVESAPLLKSASALEETGSPLLQVGEDVTHLLISRKVGGVTDG

SEQ ID NO: 58242 - protein, 402 aa, unknown
  TnpB Polypeptide
VRLTETIQVKYSQEVSKLCHLAKNVYNLANWYVRQDFFNLNNIISYYDLDFILKTKQAYKCLPSQTSQQILKYIARNWKSYFKALNKYHLNFKKFKKKPKIPRYKKKNGESVVIFTNQQCRIKQGYLHFPINININPIKIRITERLKEVRIIPLGLNYKVEIVYEKGAKDLGLDKKHILSIDLGLNNLITAVNNNGCKPFIIKGGIIKSINQYYNKQLAYYRSIENKKGNFMDTKRIQKLHLTRNNKLNTLFHRISKYIIEYCTSNNIGRIVIGYNHGWKQKINIGKQNNQKFVQIPFLKLVKQIEYKAQLKGIDVLTVNENHTSKCSFLDNEPIRKHEKYVGKRISRGQFKSSKGILINADVNGAYNIMRKAFPKTILVDGIEAFGLMPQIIQQNIVDTII

SEQ ID NO: 58243 - protein, 361 aa, unknown
  TnpB Polypeptide
MIRCLTFKLRVSEEDGAKLLGTMQEYTKAFNASAKWGFENHTWNKVENHKATYRAVRESGKLPSSLVQGARDCACEALKAVKCETLPERKPLAAMRYNHRVATVNLLHGIATLATVGGRIKATFRIPEHYKQYLGWPIRSSTLSYRDDFYLHVSIETNNPAAINDVRVLGIDRGIRNIAVCSDNTLFNGKAIKNTRAHYAKLRGELQAKGTRSARRKLKRMGGRERRFVANVNHCIAKAIVAKDYTVYALENLSKIRVQKRRGKELDRKLNNWSFYQLEQFLRYKAEVAGKRVILVDSRYTSQKCSRCGHTYKGNRDGSDFLCRACGFHVHADLNASRNIAQAGISGMGRLPVNQPNVASI

SEQ ID NO: 58244 - protein, 322 aa, Lactobacillus sp.
  misc_feature (169)..(313): Xaa can be any naturally occurring amino acid
MAEQPRWQGEIKQVCIVQDADGYYASLSIEATVMVEKRTIRRVTAVDVNVSKFDYKTPSGYAIQPTLPASLPALYARITHYQKQLARKRTTNPKHFNSATYRATRTKLKRNYQRVERIQMDLLNKFTTKLVVDHDLIGIEDLDNQHMRMNHRLAKKLHRSMFGQLKIMXXXXXXXXXXXXXXXXXXXXXXXXXXXXXXXXXXXXXXXXXXXXXXXXXXXXXXXXXXXXXXXXXXXXXXXXXXXXXXXXXXXXXXXXXXXXXXXXXXXXXXXXXXXXXXXXXXXXXXXXXXXXXXXXXXXXXXXXXXXXXXXXXVLYSRSFSC

SEQ ID NO: 58245 - protein, 350 aa, unknown
  TnpB Polypeptide
MKLTKTVRLFPSAEQAELITSLMQEYINAFNLTLTEMIDYDQHFRFSSKQISGNLPSCIKNEIAGEALAADKKMFKYHMKQPVLKKRYASWNNQNYSIYKEDNNYFISFPVWKDGKSRKITVKASMPNEVFTFLEAHKLGSMRIKKRQRKFVAFIAYEPVIEKCDSFGVMGIDLGLKCPAVAVTDSGKVKFFGNGRKNKRIRRHFSNRRKKLQKKKKLNAIKKINNKEARIMNDIDHKLSRAIVDYAIKNGIKTIKLEDLSGITQRTTSKSRYKTKESASYKWSFYRLKSYITYKARLAGIEVFLIDPHNTSRICPHCGKLNKPEDRIYECECGFKEHRDIVGARNILVA

SEQ ID NO: 58246 - protein, 404 aa, unknown
  TnpB Polypeptide
MHKAYKLRLYPNKTQEVLLNKTFGSVRLVWNTLLAKNLKGYEEQGKSWKQDFNTTVLKTDFDFLKEVSAASLQQKSRDLSETYKQWFNSVSGKRKGKTLGYPRFKKKGLKDSYRLPNQKFKLFQADNKIQLEKIGKVTCRYPSDMSAFNKNDLVSVTITKSKSNKYYASVIVDASVTPMPKTNKMIGIDLGIKDLMTLSNNIVIKRSNYLKENQFKIKKMQQHLSRKKKDSKRYQKQRIKLAKLQDKIVNKRQWFIHNITKALVKDFDVICVESLDVKSMQGSVKNINRTIAEVSLYEVVRQLEYKCLFYDKTFVKVDKYFPSSQLCSCCGEKNKEIKNLKIREWTCSKCGAMHHRDVNAAINILKEGFKDISGEALDYKRGDFVNGFDYVRNIDDFVETLIIL

SEQ ID NO: 58247 - protein, 279 aa, Acidimicrobiaceae sp.
  misc_feature (15)..(19): Xaa can be any naturally occurring amino acid
VVHRERLVDVQLRAXXXXXRGKYTLSFTVEMSRVIPAPRAPERVIGIDVGLTTLYTGATPDGAQVLSVANPRSYQRSEARLARAQRVASRRQGPAPGKAPSNRWKSSNARTQKIHADIANARKNFIHETTTMLTENYDRIVIEDLNVVGMLKNHSLAKHISDASWGEFVRQLEYKAPCYGSTVVKVDRFFASTKTCSSCGAVKAKLPLEIRTYHCETCGLTIDRDLNAAVNLVRWTSQATSAGTRSVAGRRGEVRPRRTRAVKARPDEASTETPALVGA

SEQ ID NO: 58248 - protein, 405 aa, unknown
  TnpB Polypeptide
MEMQVTIKTKLKISNAEIALSFLKTMEQYRQACNYVSEYVFEHNFDMKQSKLNKELYAKLRNRFSLKSQMAQSVIRTVIARYKTIKTQMVRRPYKYQDQNTGEWYREVRDLNWLHKPIAFKRPQVDLQRNRDWSYLSSGQLSINTLDGRVKVIPVCHGFDQYFDGTWKFGMAKLLNSGGKWYLHISATKEVADFDKQTVKHVVGIDRGLRFLATTYDEKGKTTFFNGQSVMRKRAKYQKLRATLQAKGTKSAKRRLKKLSRRENRWMTDINHQLAKTLVQNYGENTLFVLENLSGVSFERDDLPKALRNSNSSWAFYQLEQFLTYKAHLNNSEAIEVSAKYTSQRCPKCGIIKKANRHHEIHEYHCQNCDYCSNDDRIGAMNIQLLGTEYISGQEQPKFELTTNA

SEQ ID NO: 58249 - protein, 378 aa, unknown
  TnpB Polypeptide
MKTVIKGYKYRIYPNEEQKVQINKTFGCCRFVYNHFLTARIELYKTEQKSLPYSKCSSLLTQLKKDNEWLKEPDKFSLQNSLKDLDSAYQNFFREVKKGNNNQGFPRFKSKRNNNKSYKTNFTNNNIEPNFTNNQIKLPKLGWITCKLHREFTGKILSATISQVPSGKYFVSLNVECKHEELPKNNNAIGLDLGISNLLITSDGEAEDNNKLTYKYEEKLAKLQRRLAKKQKGSNNFHKQRIKVARLHEKITNIRKDNLNKISSQIVKENQFIFSEDLNVKGMVKNHNLAKAIHDVSWYELTRQLHYKSEWNNRVYHKVDRFYASSQLCNVCNYKNEDVKNLSIREWVCPECSTEHNRDINASINILNQGLKDLEIAI

SEQ ID NO: 58250 - protein, 388 aa, Rhodococcus sp.
MAGRVVRRAFKYRFYPTAVQAEQLARTFGCTRYVYNRASAERTRAWSQEGRRVSYADTSKMLTGWKRDAETAWLSEPSKGPLQESLRQLQGAYDRFWRKQSRYPQFKRKGQSKDSATYFSNCFTYRGGQIRLAKQSEPLDIRWSRPLPDGATPSQVTVSRNARGQYHISILVEDTIPELEPVDRVVGLDAGITSLYTLSTGEKITNPRHERRDRARLAKAQRVLAKKQKGSRNRAKARLKVAKIHGRIADRRRDYLHKLSTRLVRENQVIAIEDLSVRTMVRNRKLSRAISDAGWSEFRSMLEYKADWYGRRVVAVDRFYPSSKTCSVCGVIVSAMPLNVREWTCGCGAVHDRDVNAARNILAVGLTVAACGDGVRRPAPKVWGGNCR

SEQ ID NO: 58251 - protein, 432 aa, Rhodococcus sp.
LRYKFRIYPTPAQQLSLARAFGCARVVFNDALCARIDARESGLPYPTDGQLSRRIITEAKKTPERAWLSEVSSVVLQQALADLNAAYRNFFASLSGKRKGRKFKPPRFRSRKDNRQSIRFTRSAGFKISDGRKLSLPKIGKIEIRLSRELPAEPSSVTIIKDASDRYFASFVVQTVGEPLTAVDSEVGIDLGLTAFAVLSDGTVIENPRLLRRAQHRIAKAQRAAARKQKGSNNRRKTVRRVARLHTRIADARRDFRHQASTRIIRENQAVYVENLAVNGLARTRLAKSVHDAGWSAFVSMLEYKAIRHERTFHRVDRWFPSTKMCSTCGTVGESLPLNVRDWTCIRGSVHDRDHNAAKNILAAGRAESLNACGARVSPAAMPAQRGEAGTRRDSRQAVVANPGPRVAEDVKTTFSGQQHSAETERSATVVT

SEQ ID NO: 58252 - protein, 405 aa, unknown
  TnpB Polypeptide
MYLTRKFHIEGTEQLRRLSRSSANLWNSICKWYWRTVDRQDHWLSKTATRRWHCKGHDVLPSQTAQEVAEQFYEAIGSWHDNDRKGNPPKRCDKEYNVLRWTYQGVTLRDDGVLRLSTNRGDDSILIDWPVDEEPRTVEVGKTSDGFVVRAQYDREPVDRTTGDKVAGIDLGEKHLAAVFTGDDVFTINGGELRALRHYQNNLKAKLDAKIDRKEPGSNRWKKLAETKQSQLDHIDNKITDLLHKLSRKVVEMCLERDVSAIAIGDVRGIRDRIDHGTKMNQRLHQWAYGEFARMIEYKAKLAGITVERIDEAYTSQQCPQCGHRTKPSGRDYRCSECTFHGHRDVVGAANIRKKYVGDQESKDSSTRLPGVMASPSGVRFHPHLQCNSRSRRKTNGPTGPQQPA

SEQ ID NO: 58253 - protein, 405 aa, unknown
  TnpB Polypeptide
MQAAKGRLYGGGLAGVARTGGQCRAVWNLFVAENADRYKAEGKFVFYAEMSARLPKLLKEDPRLAGLPHRAAQMTVQKLDRALRECGRAHGNRRKGFPRFKKYADRSDAFSFVGRECRFEAGRVRLPKVGWLRVRGLSLPVGADAKVVAVTQEPNGWHVSVQFEAAPKAYAEPTQPMIGIDGGLTYLATLSDGTRIAHPRLARKAAKRLRRLNRQRDRRRKGSVNRRRTVARLGRAHRALGDARKDAMHKATRSLVDTYEGFAVEDLSLRGLMRTRMAGSLADAGLGGFLRTLRYKAEWAGRSWRVHARFKRSTGVCPATGAVGPKLSLSVRSWACDSCGAVHDRDVAAAQVILSGAVPQALREPASDTKPKRGAAVRGGVRVKARTSHGGPPSNVADTLLDEAA

SEQ ID NO: 58254 - protein, 558 aa, unknown
  TnpB Polypeptide
MKKKKKPLINKNITSHYNNLFKQKINYYKIANETSYLLGYLMNTNKQYKLIVNSLIKNNLVSNDQIYPSIVKDFHTNIQIKPFWNNSIQKLSDKLFLPSNDNLCEANDYIKTFNANSWFNVEQYTGFNYKFYKLKTKVNSNDIKKIVKCKQIKLYLNENQRYYMKKIIGTYRYFYNRCVSYLNNYDKTTKTSWFCVEPDNEKTKIAIKVIDNPYNMINMRSQLKSNLPDWLLDKFPSHLIDQAFIEAFNRFKVCLDKCMKTGKPFQFTYKSKKELIHTINLEKVMINSKDNGLFVKWKIDNEYMFKNLNSSEKFNENNIIGSSLSYHKILKTFTLNLNYETLTTTSNSNQICAIDQGIKNPFTIYSPIKVVQIGNGVTRKLYKVCKEIDIIKSRIDKGTYYSKVIVNDIMQKEHYVVNSARKRSLRKALHKKIQYMKNLRNELHNKTIKYLCDTYKTIILPPFKTQEMVGNLTSDIARKMYTLSFYKFKQKLLNKAIEMGVKVHLLNEPFTSKTCGRCGNIKCNLGNADTYVCNKCNLVISRDFNGARNILLRNISQI

SEQ ID NO: 58255 - protein, 394 aa, Microbispora sp.
VRRSFTFLLRPTRHQRIALAACLEDHRQLYNAALEHRRTAYRMAGVSVGYGDQSGELKHIRADDPDGQGRWSFSSQQATLRRLERAFAEFFRRVEAGDRPGFPRFKGRGWFGTVEWPKDGDGCRWDSQPEHPTATYVRLQGVGHVRVHRHRPVRGRVKTIAVKREGDRWYVVVACDEVPPGPLPATDAAVGLDMGVASLVTTSDGEHLANPRHLAASADKLAAAQRDLAREERGSHRRRKTVARVSAQHAKVRRQWLDGAHKVALGLVGANGVIVHEDLRIVNMTRSASGTIEVPGRHVAAKAGLNRGILDAGWGVFLRVLAHKAESAGRELIAVNPADTSRTCARCGHVAKENRHTQAEFTCTACGHTAHADVNAATNILRAGLALRDAVQAA

SEQ ID NO: 58256 - protein, 416 aa, Thermosporothrix sp.
MSKEKKQAQLKKTRKQKSLNLRNKAFKFRIYPTEKQIRTLQWTLRRCKELYNAALEERREAYRMAGVSVSYYTQNKQLPEIKEIREEYRDIHSQVLQDVLTRVDKAMDNFFRRVKNGEKPGYPRFKSADRYDSFTYTQSGFEIMKGKLNLSKIGRVKIKLHREIVGKIKTCTMKREGEQWYVVFTTEYEFDPSMAFHPTTREVGVDLGINSFAALSDGTFIENPRDYRNEEEKIQAAHKKLARRKKGSHRRNRAKKELSRLYRKVRNRRRDFLHKQSRKLVNENAVVVFEDLQVDKMTKRPKPKQDEDGKYLPNGAAAKGGLNKSILDAGWSAFVALCASKAEEAGCTVVKVAPKDTSQVCSSCGCVVKKDLSVRWHSCPHCGCELDRDHNAALNILIRYRKSKGAGSVPQLSPVG

SEQ ID NO: 58257 - protein, 399 aa, Thermosporothrix sp.
MLIYEYKLDGSKAQFAAIEEAIRTTQFIRNTCLRLWMDARGVSRNDLQHSCAVLARQFPFALSLNSQARQAAADRAWAAIARFYENCRLKTPGKKGSPQFQRDCRSVEDKTTGWKLEADGIHIRFTDGCGIGRLRLIGSRDIMTFPLSQIKRVRLLRRADGYSCQFAVSATRRVEHQPSGKQVGIDLGLRAFFTDSEGNAVAPPRYLRKAERRLKRLHRRLSRTQKRSRNRRKARQALSKGYLKVQRQREDFARKQANALISSHDLIAYEALQIRHLVKNRHLAKSIADAAWGRFLSWVRYYGTLHRVPVIGVEPAFTTQNCSRCGQRVKKSLSMRTHLCPGCGLLLDRDHNAALNILHKALQGTVGQTGTDAPQGTSNASGQPAATRRRTAAPRKQAG

SEQ ID NO: 58258 - protein, 240 aa, Thermosporothrix sp.
MAIIANVRWRPPDALSISPQASRWALIWGCVPSSLTPKATPWLLLSISARRNDGSSGCIVGSRRRRSAPPSARKPVKPLAKRISRCNGSARISPESRRTRLSRLTILFAYEALQIRHLVKNRHLAKRIADAAWGRFLFWVRYYGKVHRVPVIGVEPAYTSQDCSRCGQRVKKSLSMRTHLCPGCGLLLDRDHNAALNILHKALSGTVGQTGTDAPQGTSNASGQPAATRRRSAAARKQAG

SEQ ID NO: 58259 - protein, 402 aa, Escherichia sp.
VKRLQAFKFQLRPGGQQECEMRRFAGACRFVFNRALARQNENHEAGNKYIPYGKMASWLVEWKNATETQWLKDSPSQPLHQSLKDLERAYKNFFQNRAAFPRFKKRGQNDVFRYPQGVKLDQENSRIFLPKLGWMRYRNSRQVTGVVKNVTVSQSCGKWYISIQTESEVSTPVHPSASMVGLDAGVAKLATLSDGTVFEPVNSFQKNQKKLARLQRQLSRKVKFSNNWQKQKRKIQRLHSCIANIRRDYLHKVTTAVSKNHAMIVIEDLKVSNMSKSAAGTVSQPGRNVRAKSGLNRSILDQGWYEMRRQLAYKQLWRGGQVLAVPPAYTSQRCAYCGHTAKENRLSQSKFRCQVCGYTANADVNGARNILAAGHAVLACGEMVQSGRPLKQEPTEMIQATA

SEQ ID NO: 58260 - protein, 494 aa, unknown
  TnpB Polypeptide
VPDVPAAGAGGRGRRPVPQPDPGQMRRARVDGPGEGLHLTSVARRVPAPALAAADAVVEVVFRRLGRARVGGDHPPVHRRADHPPREGQAVKRAHKLRAYPTRPQQGRAIRLLADHCDLYNAALQERRDAWCMRKVSVSYTDQSAQLREIRAADPDGQGRHSFTAQQQTLRRLNTVFAAYFRRVRDAETAEQRASRRGEKPKERRVGYPRFKPRQRFDQVLFVAGDGAKWEATDDGRWAHATFQAVGRVKVCQHRAVVGRVKTLQLKREHRRWYVIVVTDAEVDPLPLTGRVVGVDVGVARFLTTSDGEVVGNPRFLDAAQAGIADLQRRKQRARTGSGNHKRIRRQLAQEWRKVRDRRRDFHHKTARALVDTCDMLALEALRVDAMTASASGTLDQPGRNVAQKAGLNRSILDVGWAQFTSILTAKAESAGRRVVRVDPSYTSLTCHTCGARCGRPRQDVVVCPTHGELDADLNGARNIATRAGLGSGQAPAA

SEQ ID NO: 58261 - protein, 363 aa, unknown
  TnpB Polypeptide
MKKGIKFRAYPNKQQQNLINQTLGCCRFIYNKGLAMRSDAFGRGQKIGYNQTSAMLTDLKKQDGFAFLKDVDSIALQQSLRDLDRGFKNFFEKRARHPQFKSKHNNHQSYRTLNQGDNIRIVGKYIKLPKLGYVKIKQSMEAGHINNVTVERTPTGKYFVVLNVDFEPEFRPNAGCMVGIDVGIKEFYSDSNGNTVNNPKYLEKSQRKLIREQRRLSRKQKGSNNRNKQRIKVAKVHEKITNQRNDFLQKQSTMLVSENQTICIEDLNVKGMVRNHKLAKSIASVSWSKFFTMLGYKAAWYGNDIVKVPTMYPSSQTCSCCGYKNPLVRNLAIRKWECPVCHTTHDRDTNASINILKKGLSVA

SEQ ID NO: 58262 - protein, 342 aa, unknown
  TnpB Polypeptide
MILQKTVNAKLFALTRTKEQKISREYWNFQKALHGEDAPLYSATKQQAKRKNAWNGDCEYPLVLRRDCFGVKELGLKFARWWAKIPVFGGSIWCPVQLPYVQEPLLKGNIRETKLVRRKKGWFLRITVQQEIELDVPCASVVGVDFGERHIATSVEWQGRFQNPIFYGAEVRGIRRHYAWLRKRLGNKKALRTIKKVGGKENRKVNAVLHNISRAIVDRAKELSAVILLGAPNGGSMRRKALSKGKRFTRIVYSMPYYRLRQFIEYKAVQEGILVVNANEEWTSKTCSFCGEISDRPRQDLIVCPHGHRLNADINACRNLIKRFIDHWLIDGAILASPKLPH

SEQ ID NO: 58263 - protein, 520 aa, Oceanobacillus sp.
MAKTTSPSFVFSLELEKNPIVFSVIEKELEIARVIYNTVLGKYLKLEEQMKREKRYKKLVLQNRGVSKKLAKDPSNKILIAEKKCIQAAFEELRLKYALTEYASHEWIKPIREHFGNKVNSAIAQKTATRAWNTFKKKLFGESKKVKFISKGDMDSFEGKSNDTGWRFVDGFIVYKDLNTSLVFKEKDAYASEIMTKLYDKTPFSYKTKDSVKSDYYRVKYVRIVRKEIRGKVRYFADLVIAGYPPSKDRNIGKGNVGIDIGTSTVAVSSETKVLLSNLAEQVKEIAREIRLIQRKMDRSRRMMNSSNFNDNGTIKKGKKTWVFSNRYRKLRSRLRELHRKQADIRKTSHRTLANSLLSLGDTFYTETMNFKGLQKRKRETEVSDKTGKYKRKKRFGKTLGNRAPALFLKILEEKVNRFGGIFKRINTRIFKASQYCHVRKDYFRKHLSERWHRIDEKTKIQRDIYSAFLLMNANKSGKKTNQNSCEETFPTFQKLHDQEIAYILKQKKMILNSGITLKN

SEQ ID NO: 58264 - protein, 397 aa, unknown
  TnpB Polypeptide
MLLCTKIRLEVSQEDATTLEFMQGKCRGLYNWWVGRWRDGEKWNLYEAKKSLQESKQHDPELAYVYSKLLHEVYFRLDKAMKAFYRKVQGGEKPGFPRYRKRHEFFTLCYPAMYITIVGDKLLLPTGGGGRHGPKKYPTIVARLTEEAPVTFKEVAISRDARGNYAASFVSERPEQLTTDMGVIAFDLGIKTLATGVSEQGRVYHVGGFKGARWYNKQLDKIRSQRDRCKKKSRRYIHLSKVYKRVSEKKRNKLKDSLHKASHLIAHRLVASTVVVGDLSQRQMVTKQHQERNRHLNRAVYNEWGFYTFLEMLKYKCQLHGKELIFLDERDTSKTCHACGRKQAMPLYKRTYRFKNCGLVMDRDENSAHNILMRFLARREPHTGDPVRCAEVFTAIE

SEQ ID NO: 58265 - protein, 389 aa, unknown
  TnpB Polypeptide
MIKGVWYMKKIMKGYVFRLYPNDKQIELIEKSFGCSRYIYNYFLGKNKNYINSYNVIKEIPNLIKEKEWLSEVDSCLLRCSIFNLEDSFKRYSKGLSEYPKFKSKTKTRPSYRTNNITSTYKGKTYNSISIDLENRVIKLPKLKEVKIRGYRNLNQINGKIINATIYKEAGKYYVSICVEQYITIPKLIPTKIIGIDLGIKDLIITSDGETIENKHIIEKYEKKLKGLNRWLSRSKPGSKNRYKIIKKLQTVYKKIKNARKYLIHSISKKLVTDNDIIVTEKLKINEMVQNKNLSKKIYDASWYELIRQLEYKSKWRNKKFYQIETYYPSSQICSRCGYQEKKVKDLNIRKWECPNCTNINNRDINASINIMFEGIKIYMRKGIELQVS

SEQ ID NO: 58266 - protein, 219 aa, unknown
  TnpB Polypeptide
LDLGICNLAALYIENEKPIVYSGRAVLSDWVYRTKKIADLQSKLPKKKRTSRRIQLTFRRRQRRLRHAVNTMLKDVFRVLEQKNVAVLVIDDLNGIRNDNDKGAHTNQKLHNFWAFGMVEKRIVELGEEHGVIVRKVSGCDTSRTCCLCGKQHNGRVERGLMVCHTMRQSMNADVNGAVNIWNVAVNRFPESLAQMLGTSGSGLLAQPLLLRWNYNEWR

SEQ ID NO: 58267 - protein, 401 aa, Bacillus sp.
MLRHKAYKYRIYPTKEQAILITKTIGCSRFVYNYFLDQWNAIYADTGKCLTYSACSKLLTHLKKQPDTEWLREVDKFSLQNALRNLADSFSRFFTHQNDQPCFKSKKNPIQSYTTQFTNNNIAVLDKYIKLPKLGLVKLAKSQEPTGRIVKATIRKQASGTFFVSILCEEEMHDLPKTDSAIGLDLGITDFAVFSDGHKVDNNRFTAKMEAKLKREQRKLSRRALVAKKNGISLFEAKNYQKQKRKVARLHEKVMNQRNDFLNKLSTEIIKNHDVICMEDLNTKGMLRNHKLAKSISDVSWSSFVAKLQYKAEWYGRAIIKVDKWFPSSQLCSECGHRDGKKSLDIREWTCPVCHAHHDRDINASKNILAEGLRRYTLVYSLKTNNRRYYGDSLVNKRNRC

SEQ ID NO: 58268 - protein, 388 aa, Lentibacillus sp.
MLVRMNYKYEMFPNEEQMQLLASWLSICRQQYNSALLDKQRFYQKNKMGLPRTQLQKQQKADKQKTPLLKTIPSQPLQEVFFRLERAYKNFFEGRARYPKLKKHKDYNSLTFTQFGMAKRQVKNKTTGEVKRRDVRYAASLDEHNYLLISKLGAVYVNFHRPLEGKVKQVTIKRQGSRWFAIFSVERHVNETVAFPVQSTGIDVGIQKFAVLSDGTTIENPTFLLKAERKLKRAQKKLSRMRKGSNNWKKQCQKVQQLHIKVANQRRDFLHKLSYRLSKTYKFVFAEDLMIRNMVKNRHLAKSIHDAGWGAFGNMLDYKCHNNGGKLVRIKPHYTSQDCSGCKARVRKSLSIRTHICKSCGTILDRDHNAAINIEAAGLALFNLSPTA

SEQ ID NO: 58269 - protein, 529 aa, unknown
  TnpB Polypeptide
MILNFKYGLQNPLGWDDDCEREITLQDALWNRLVALEATYRERVEDTIRQDQAYRAAADEILGVTNELETVLAERRAQRKAARAKLATPILDEQIAGLSKQRRELWAKAKPLRTAAFKFYRDELKVLSDERYASFTKARQESGLWWANYNAVLGSFDATLRRIEPWQTPRALGNEGRLSGRLSVQLQGGCPGPSFIAGSRNEARIDLRSGEWHRRGTYNWRPRYGHMVATVHAEGRGTRKLVRWPMVMHRPLPDGAVVKSIVITRRRPVPTSRLWKWEATLACEIPEPKESTTPFSCGIDIGWRKVEAGLRIATIADTATGLDHLVLPTALLERRARIAVLQGQVELEAREKGMAKTDHYDWRRLTLEVARWNRRRRDLYRVAAAELVRRCHLIGIDASGIASMAKDRRLPPETRRMRTWAAPAEFAAYVKDAARKAGATVRQVEGASTLVCHRCGHKNVASEADRQALVWRCAGCRGIWDQDENAAKNCLAAVLETSAAITVKAAAERKRPPRMNRKKKPPAIEEAAQ

SEQ ID NO: 58270 - protein, 392 aa, unknown
  TnpB Polypeptide
MFLNYKYRLIPNKRQHRALADICESQRQLYNAALEERIDCYRKTGKGRSYFDQCKAVTECRHALPEMGALPANLQRWTLKRLDDAYAGFFRRCKTNGKAGFPRFRGKGWWSSFGFATFSGVEFDGKRLRFKGFPGGLRVHICRPLPQDCRITSCVFNRDHKGWNVCFQIEVAAAEKKAIASEVGIDVGLIAFAYQSDGVAIPAPQFARRAEREMRRRQRALARCKNGSNCRKKAKERVARLHRKIVNVRTTWLHQQSARIVNSYDLIAVEDLKVANMVRNGHLARSISDASWSTFTNMLSYKAEKAGGTFVKVDPRMTSQICSGCGVVVKKGLADRVHSCPDCGLTLDRDHNAAINILHRAGNRPGAANVIQVWDERWPGNMPEAPARGRVV

SEQ ID NO: 58271 - protein, 409 aa, unknown
  TnpB Polypeptide
MHVRSGVFCLDAPLAPEARFLMQDFRLATNRAIRAGLQAKVTSRNALSKLIYKDFREGHPGLYAKHLASAFAVAAGILKNHRRRMKGLKNGRTVRPPYVKRLMMKAVNQGYRLDRKEGVIDLPIRAGLHIKLRLVVSQYHRRYLDDESWSLGSLTLLPDRVIIAFRRVSLKPYAPKSILSLDTNERSLDGVFIKECSGVPLRAVFPDVAIIQQRHHDRRKKLQKKKANDRRITRALCKREGQREHDRVKYRLHHVANAIVSFANSQGSAIVLEDLRGIRYKKGKDLNRRLSMWPRRELHRIIEYKAEEKGIPIIKVDPRYSSKRCPICGSIHHSRMGTEFECECGWHLDRHINASINLLQTASSKGLVGGLRFDPGAFRHDAMRILYEPAMAARSEPNGMSGELEVVVL

SEQ ID NO: 58272 - protein, 413 aa, unknown
  TnpB Polypeptide
MLLCKKIKIEVSDRDAEALEFMQEKCRGLYNWWVMRLRNGERWNVYDAKKTLQGSKQYDPELLYVYGKLLQEVYFRLDKAMQGFFRRVAAGEPKPGFPRVKPRHRFFTLCYPVMYLDKIEGNTIVLPTGGGARWGPKRYPNIVAHLTEDPPEHFHEVAVSRDTRGNYYCSFVYDDAEQGKQDSEHKPGKKRKNRKSRPIREDGIVAFDLGIKTLATGFTDQGCFYHIGGFKGYRWYNKQLDKIRSKRDRCKKKSRRYIHLSKVYKRVAEQKHRKQRDCLHKASHLIAHRLAERAVVIGDLSQKQMVIPKKEDETPKEKRKRQIRNRMVYNDWGLYGFVQMLAYKCLRFGKELSILDERDTTRMCHVCKRKQDMPLWKRTYRCENCGLVMDRDENSAVNIFQRFVAGPPPHTLL

SEQ ID NO: 58273 - protein, 243 aa, Actinomadura sp.
MFVVMKLVVQVKLLPTHEQAAALTATLHTCNELANRVSVMAYEKQMFSRAGLQKLVYAELKASGLSAQPAFHVIRKTADAYTTLHAQIDAGLLGGECSRRRRKAESKPVAFRPGAAQPFDDRCLSWQVDARTVSIWTVHGRVQGIAFTASAAQLKTLAERRKGESDLVFRDSMWFLYATCEIEEAELFEPVDWIGVDRGVVNLATTCDGTNYQGKGLGDHRQPGRLRRRVARRPGWPTRRASR

SEQ ID NO: 58274 - protein, 436 aa, Scytonema sp.
MATRRQTFRLYPNKQQETKLLQARRDHAYLYNACIAHRKYEWRANRKSVSYFEQQNCLPAYKKEWVEFAYLHSQALQATVKRVDLAYNAFFQGLRKPPKFKSIRKFSGWTYPATSGWKALTSGKHGSVNLNDLGIKVKMRGQAKQWGKPTTLTIVYKPGLKQWFASFTVEVPDICTKFGSNSELAYDSIVAFDLGCETAITTYDGKNVEQISNPRFTQKTEVKIKKASKELRRKQAPNRNKKIKASRRWKKANKCVAHLQRKAGSQRRDWQHKVTSEIASRYDIGVTEQLNTKGMTKKAKKGSKRKKQKAGLNKSILSVGFGTLNKMLAYKIEAKGGLMVMLPTKDIKPSQRCPKCGAVHKEWAELSNRHHACDALSTHLSPEIEPAFVFVDLSSKSGTRSSKAAQFLRVRPRPLKIWAALLLRVLVVAGFRLGKC

SEQ ID NO: 58275 - protein, 195 aa, Paraburkholderia sp.
LKPHRAEHKRIVRLSRSLSRKQKGSANRAKAKTKLARLHLRIANVRKDAMHKLTANLATNYSTIGIEDLNVSGMLKNGKLARAIADAGFFEFRRQLEYKAAMTRAQVIVVDRFYPSSKTCSACGAIHAITLGERVIECGCGLKMDRDLNAAINIRRQALAQQSVERKALAGASATVKPASVKQKKSGLHSNVQTT

SEQ ID NO: 58276 - protein, 410 aa, unknown
  TnpB Polypeptide
MEIQRTAVVKLAVPDDRRGDLKETMDAFRDATQRFVDRGWEGNDDGYVITSRSQVQSLVYDDIRQDTGLHSDLCVGAANHASAALRSAVEQMKDDENDDPVSKPVFVSNTTVYNTSAISYFDGYCTLAAYGSGRVKAEYVYSDDSIQAEYMESEEWEKQGAKLRYDHQSDTYYLHVSVVKERDEPQPEAEGSTVLGVDRNVDGYLAVTSSGSFIGNADLFNHKRREYERRRGNLQQQGTRSAHLTIQSIGSRFANWSEDYLHRVSKAVVAEAVVNGCDTIVLEDLAGIRDRIADLNKFQQWAFGELSRQLTYKAKAEGITVEMVNPAYTSRQCSHTECGFTHKQNRDGDEFCCQKCGKELHSDYNAARNIAARYLQNRRKSGSGGATNHLALKSGTVNGSGGFTPTASRG

SEQ ID NO: 58277 - protein, 424 aa, Lactobacillus sp.
  misc_feature (344)..(424): Xaa can be any naturally occurring amino acid
VVKNVLRTQKVKLYPNQTMKKVLDELCDYRRYCWNQGLATWNEMYDASVILADKKQRPNERKVRDELVANKADWQYQLSARCLQLAISDLGKAWKNFFNKAQPDWGKPRFKSKKAPRQGFKTDRAKLVNGCLRLDKPRGIAEKWSDIKFKGAKDLAGELKVVSIYRENGQYWASLPLEVMTVPSKPKTGAKTAVDVNIGHLNYTDGEINTLPSHLQKLYKRIKHYQRVLARKRKVNGKQATQSNNYAKTRAKLQRNYRRVANIQHDLMQKFTTRLVNDYDQIVIEDLAVKKMQMSHVASKGLQRSMFGYFRQVLSYKCDWYGKALLVADRFYPSTQRCSACGHXXXXXXXXXXXXXXXXXXXXXXXXXXXXXXXXXXXXXXXXXXXXXXXXXXXXXXXXXXXXXXXXXXXXXXXXXXXXXXXXX

SEQ ID NO: 58278 - protein, 406 aa, Streptomyces sp.
MVWLGGTRRKSPHNFVIVKLVVRVKLLPTPEQAAALEATLRSCNAAANWLSAEAFARRVTSRAGLQALAYVDLRTRGLSAQPALHVLRKVADAYAALKAHARVGNLGKPTSKRYARATSKPITFRAGAAQPFDDRCLSWQIGAATVSIWTTSGRLKNITFTGHSEQLELLARYRRGESDLLCRDGQWYLIATCEVPDVEENSRPDGFVGVDLGITNIATTSSGRRHSGRHLNRRREQDRKLRGKLQRKGTKSAKRRAKRHAGREARRARDINHKISKCIVAEAQRTDRGIALEDLGGIRERARLRKPQRVTLHSWAFHQLGAFISYKAKRAGVPVVYVDPVYTSRECSQCHHIDKRNRPSQAVFACRSCGFVEHADLNASHNIASRGWWVWVCGARSVAPALAPLA

SEQ ID NO: 58279 - protein, 418 aa, Nocardiopsis sp.
MLSGRRYRLALTQEQAAMCAEFGDICRAVWNTALDQRRQYVDRYTRGRKGPFCGYHLQAGQLAEAKSEETWLKAAPSHVLQQTLKDLDRACRDKGTFNVRWRAKGRWMPSFRFPAGNLITVEKLNRKWSRAKLPKLGWVRLRSSRPIGGTIRSATVSRKGGHWFVSFLVEDGQLTPEHHPGTPVGVDRGVAVAATLSTGQFHDRPFATDGEKTRHLRLQRKLARQKKGSANRGKTLKAMGAITTRAVERRGDFCAQLAHTLTTRHNMVVLEALRTTNMTASAKGTLEAPGKKVRQKAGLNRAIRDKGWHRLELALRNAARKTGTRIALVNPAYTSQTCHRCKVVDAHSRKSQAEFACTSCEHTDHADVNAAKNILYAAGHAVSACGDLGVTRSVKQEPAPPRGQAHQPALSLVGIPRL

SEQ ID NO: 58280 - protein, 346 aa, unknown
  TnpB Polypeptide
MTTSKGRFKKKIKYCRLVRKTIKNRERFFLQVLLEGTAPVKHIYAPDSERLSIDPGPQAIAVFSEQFAGKIQIAPTAKVNEAVIRRMQRSMDRSLRRNNEEVYESNGTLKKGVKLKQTKSYKKRVAQLSDYHRRVAATRRCEHGQLANLILSLAGDIRIEKNQWKTFQRGLFGKSLGKSGASNFIERLKSKAESAGLKVSEVKPYTLKLSQYDPYTETYRKKALSERWHQLGSSSEWIQRDVLSALLLQCADIDKEKHIPTKIIETLEGAKQLLRDAGYVVDKPSSNGDHYDRPFASEPKAQTPEEVRLEIFCGVGDSRLPLLLRNGSRQKANEKAHVRSKETFSL

SEQ ID NO: 58281 - protein, 278 aa, unknown
  TnpB Polypeptide
VNFFQKRAAHPTFKSKHNRHQSYRTINQRDNIRIAGRYIKLPKLGFVRIRQSMEVGKINHVTIEHTPTDKYFVVLNVEFEPQPRQNNGGCIGIDVGIKEFYTDSNGKSVANPKYLEKTMRKLIREQRKLSRKQKGSDNRRKQRVKVALVHEKITNQRNDFLQKQSTMLIRENQTICIEDLKVKNMMRNHKLAQHIGSAAWGKFFDMLTYKSAWYGNDVVKVPTMYPSSQTCSCCGYKNPLVKNLAVRVWECPDCHTVHDRDGNASINILNKGLQMQSA

SEQ ID NO: 58282 - protein, 457 aa, unknown
  TnpB Polypeptide
VGVLVYQAFRFELSPNNLARSELSSHAGAARLAYNWGLATVSAHMMAYESCRVLALRQGADAAQAKDWARAVVGALPCSLPALRREWNRAKYEVAPWWASNSKEAYSSGLDALARALKAFFGSRSGQCKARSVGFPHFKKKGSRRSFRVTTGSFGVRDGRHVRLPRIGVLRTNEPTTKLAARLADGTARVLSATVSEHSGRWYVSFGCEVQRPEPNRPTGPAVGVDLGVKRLAVLSYGEVIANPLHLSRYARRMARLQRQCSRRCGPRGGTIASGRWRRAKAKLARAHLRVADARSDGLHKLTTRLAKAHHSVVVENLAVAGMTKSAKGSGNWRGKAGLNRAFLNAAPGRLCRQLSYKCTWYGSKLVVADRWYPSSKTCSRCGRIKAKLALSERTFCCEHCGIVLDRDHNAARNLASWRPRPTAQTVPPVGRERAAAQPRRTRRERRSPCHLAGAPR

SEQ ID NO: 58283 - protein, 372 aa, unknown
  TnpB Polypeptide
MENAYKFRIHPNNDQEILIQKTFGCVRFVYNYFLAKRIEEYKTTGKSSTQFQQSKQLTALKKETDWLREPDSQALLNALADLDMAYQNFFRSIKNGGSFGYPKFKSKRNRHKSYRTRNGNNDTSIRLERNKIRLPKLGWIKCKTTREIQGRILNATVSQNPSGEYYVSICCTDYEPEQFPKTGKSVGIDLGIKSFAVTSDGIEYPNHKYLAKSEKKLARAQRKLSRKPKDSKRYEKQRIKVAKIHQHIVNQRNDTLHKISIDIVRNYDVICIEDLAPSNMVKNHKLAKAISDVGWYELRRQLQYKADRYGKQVVVVDRFFPSSQLCSECGFQWEGTKDLKVREWTCPSCGIHHDRDVNAAKNILNEGLRQIA

SEQ ID NO: 58284 - protein, 413 aa, unknown
  TnpB Polypeptide
MYSATKIRIYPTKAQEESLSKAFGCARWYWNNSLAETQKVYAETGKGLGQYALNARLPSLKKELPWLSETHSQVLQSVSLHMSRAFVNFFERRAKYPRFKSKHDRQSIQYPQGVKIVEERKVFLPKIGHVKATVHRKIEGAIKTVTISKEPSGKYFASLLAETGQVAPVASFGGKILGLDVGLTHLAVTSDGSKYENPRHVARASKNLARKQRMLSRKTKGSSSRNKARIIVAKCHEKVANARKDWLHKLSSKLVHENQVIAVEDLSVKNMMQNHCLAKAIGDAGWGMLANFVEYKAAKAGKGFIKVNRFFPSSKVCSCCMHAQKKMPLSIRTWRCDACGAQHDRDVNAAKNIRAEALRMIAVGTTATANGGSVSQKRGRKSSILLEPLKLEAPSLGRGSSRCYWFSPRFAIS

SEQ ID NO: 58285 - protein, 387 aa, unknown
  TnpB Polypeptide
VTGARSVLQRYADAWFQAANRRTAGQKDAGFPRRKRALVPVRCYHGTFKIDGQRVRLPVASGQPALWVRLARALPYPPEQIRAVILLADGGRLWLAVTAAVPVQDHDLDGGRVAGVDLGVIHPYAVVTETAGLLVSGRALRADSYLHLDDQKSRQAKAARRVPRPGQRGSRRWRRHRARVRRAEACHRRRVHQAQHQAAKQVIAFAVHHQVGTLVVGDLKGITNQDAGRVQNLRLREWRRTHLLQALRDKAEQAGIVVRLVDERGTSSTCPSCRRRVAKPKGRRFCCPHCTFQGHRDLVGAHNIAAKAGGGPPSTDVPVLIEHRRAGILPARRDRRRHFHDQRRRRSCLASGHPQGDPASLGCRSPRVPDLAHGEDQAALPNRANVA

SEQ ID NO: 58286 - protein, 378 aa, unknown
  TnpB Polypeptide
VLRKCKMIRAHKIRLKPNNNQATYFAKACGIARFAYNWGLAEWKRRYEMGEQVNERILRKSLNSIKREQFPWMYEVTKCAPQLAIKNNLNSAFRNFYRGLKQGEQVGFPKFHKKGIKDSFSLSNDQFQLKEKSVQIPNLGWVRLAEELRFEGKIMGATVSRTADKWFIAIQVEMPNEPIPKRESQAVGVDLGVKVLATLSEGTSITGSKASRKYEKQLRHINQSFSRKTGAKKGEKKSSNFVKTKRKLSRLYAKMANLRNDGTHKLTTMLVQNYTLIGIEDLNVKGMMSNHKLARSVADMSFFEFRRQLEYKALTAGTQIIVADRWFPSSKTCSACGIVKTKDELTLSMRTYECSCGFVCDRDVNAAINLRNYALKHA

SEQ ID NO: 58287 - protein, 382 aa, Nocardiopsis sp.
MMVGVSKIVVQLKLTPSPEQATVLESTLRDLNTHATWVAQVAHECGVTRNYELRKHTYQQLREAGVGSQAAQHTIKKVCDAYRTRRSNLNHGNYGPKGSVRRERIESRPITFRPDSGHPYDARNLSFALDARTISLWTFQGRLKDVPFAGSTDQIKALAEYKHGEADLLCRDGTWFLAVTVDVPDAPEIEPGSFLGVDLGIVNIATTSDGQVLAGRKPNRYRRRQQRLRQKLQKKGTKSTRRLLKRQRRKESRRSRDANHRISKRIVAEAERTLRGIALEDLTGIRQRVRQRKPQRVALHSWAFAQLAGFISYKSKRAGVPVVFVNPAYSSQECAECSCTHRHNRISQAVFTCRSCGVVAHADRNASRVLARRSQDVWDAGR

SEQ ID NO: 58288 - protein, 506 aa, unknown
  TnpB Polypeptide
MSEKVSIASVKHTGSPVYLGVRSGHHSWTQNPYEVLEWMGDSWRLRFNQHRSKRKKWEKVTRKSGKEQRILVPIGDSVTDVTDKQARADFSSLAALPSMILQSAERIEDSAWWSAVKRRKTSGGKMPRFRSKKSQDNIFTCWFNKGSNATYQKTGKKTGIITIKGQNPSKHNKPGHKSRWTLKIRVKHSGREFSHYTSVQVNTTTMSAVFTSVPKKLTRSNDQHSIGIDRGGVVAVSTSDRQSLAPNTKLTSQWDKKHTYHQKKMSKMRSRALNSAKKEFISNNPNIPKGELSHKAHQVGKEAMYQVMKGVQYQHHKERANHYSSKITKYREAWQQEITTKLVCFSDRIVLEDLKVKNMTRKGGKRKRGMNRSFLAFSPARFVAMLEYKTLLSGGELIFVPPHYTSQRCNKCGYTEKENRESQAVFVCKNCGHKDNADNNAALNIRDYADYLYGTYQGTDLSASGETQENGSGVIIRATPSKEDVEGFYTWKQPDHSDAINPSSVV

SEQ ID NO: 58289 - protein, 669 aa, Mycobacterium sp.
MTSALTDNPAVSSGDAVPGGLRWRGKSKAANFTYQGPVAVIRLELDATDDVVRRRMVAQWEAVFRLRRALQRDAVARCRAYWAAHHERACDSKAVRARLGLSRKGIEAAAKRHIEGSKWMRSHLTKAVGLHVADEVWETIDRHLFADASGRRHGAPRVGAWFDFTRIPGRARSHTKTTPTWETYRLVGTLDGHLATYRHPRLSAAISTAAVADTTPAGSSILAQPARIPAVPRPVSKSWWDHNGALAVVFTGLPAGDLVLPVRLAQGAGQWPHLHHFLGNPAVWHKIDLVRVADRKAPGGWRYYAHLLVHQAGYQSASTRARRAALPAGRRAGVDANVSNLAVASFPHDRPSELTVARIVCTPEQQRAAARAAKRARDRQRALDRSRRNTNTDQYGPSVRQRTRAQRRTAKGLPAKRIANPGGARHARADGVPLRAYRRDDLSQRYRRTRSDHATHARRTSQAKQARAAAVAAQIVATHGNAITMEDCRIASWARLWGKRIALFSPGMLVAALAAECAVTGGRLTRAGTRTTAMSQHCLCGVRVAKTLSQRVHDCPQCGLHADRDIVSATLAACVEFADPDDPRTAWVDYGLARALRDGLASQQEWEGSVNRHQRPTPPDGVGSTRTGSHPPVASAEQAASGPPPNRPHQRGRHGTSRKQPVPKLIGAA

SEQ ID NO: 58290 - protein, 415 aa, unknown
  TnpB Polypeptide
MPIHYATTKTKLDKLDSLTARVTYCITLISSLISDDTELDRKTVRKLVKENDIVLKTGLSSGFVDQCVDTVIWSWKSYRKLHADWERRLESSRERVDFAEDDKARERAEKSLAKLVKREPSAPEFHEKTPCRIDYRTGRIEPGENSFVLWMHISTLEKNKPMDVPLNPSRYHLKQLEGSEIDDFEIVKHGRKYYAHISISREITEKETSSVGGIDQGLNRTLAIVLLDRDMPHEELFCETEKLNLIDKYDSIIASVQQSRNGRKLRQLRHKRSNVAIYHDWCLSNHVAKLTEGYYLAIGNARFHQTNIRGNGKPGLRKRVGIWSYSRQRQYIALKRAEMGYPTKLINERYTSKTCHVCGSRLVERKWLDGSSYILCYCCGLKYDADLNAGHEIALRCRDDWLKVRMNPAEKRVSA

SEQ ID NO: 58291 - protein, 489 aa, Caldivirga sp.
VLGLVPPKRGFLALDEPVGRLPTLFTNPGTPSSSKPRKGDIRTVRLRLLPNGAQERRLRKLADATAKLWNGLNYARLIQFRASGKIDFKGTEHEYYHRYKSVLGVNAGQVINLNNGAWMSYFKLKEMYEQGKLPRFNGKPSPPGFWKDRLLGKRRLIILVRNDRYYIEQVNGGEGYLVLKDWGLRIKYAGRIKWAGKQGMLTIKLEGNRWFAYVPVSVGEKPARSNPKGYVKGIHEKIQIENPKGDNKAFIDVGLNNLFAVVFNHTDTAILIKGSSIKAEYYWWKREIGTYQSVRDWLRNRGFNTWRKYHMFYLHAEYKQHERLRHYYRTAVRFLAKTLWRMGVDEVFVGYPYLVGQDNGNEYNTNVWWFNKIINWLGDVLEEYGIRLNVVNEYGTSRQCSICDMKHENGRVKRGLYICETTGIKINADLNAARNIARKVGYNTPIPRKILSYIVTTNGVKPLTPKEGVTIETPHSETLAQKGQGGGSC

SEQ ID NO: 58292 - protein, 428 aa, unknown
  TnpB Polypeptide
LATVIQAYRFALDPTPRQRRALASHCGAARVAHNWGLQLVRERLEQRRAGEEVEVPWALPALRREWNQAKDQVAPWWAENSKEAYSSGLDGLARALRNWSDSRTGRRKGRPVGFPRFKKKWRSRDACRFTTGQIKVLGDRKHVQLPRIGVLKTHESTRKLARRLEQGSARILSGTISRTADRWFVSFTVEVQRHLPGGNGKTTVVGVDVGVRQLAVLSNGTTIANPRALEDALRKLRRLNRQLARREPGSGRRKKTHRRLARVHARTANIRRDALHKLTSSLATEYGTVVVEHLNVGGMVRNRRLARAITDTGLAEIRRQLTYKTTWYGGRLVVADRFYPSSKTCSACGRVKAKLTLAERTFTGEDCGLHLDRDMNAAHNLAKLAQHVAQSGWETLNARGADRWTQLAGQVAMKREPSSVDIKTGTDG

SEQ ID NO: 58293 - protein, 344 aa, Kibdelosporangium sp.
MIIVKRVVKVRLLPSPEQKAAWADAYAALHAKVRAGNYGAPGCVRRRKVETNPIRFRDDAAQPFDARCLSWQLHAPGRGGTVSIWTVAGRMRDVRLLGSPMDLARLAATKIGQTDLVLRDGYLLLYAVVDEPEAPSQMPVNGFLGVDLGIVNIATTSDGHRATGGRLNRYRNRQLRMRKRLQAKKTASARRLLKKRRRREARFVADLNHQISKSIVAEAERTERGVAVERLTGIRARVRLRKSQRATVHSWAFGQLGKYLEYKSRRAGVAFVQVDPAYTSQTCSRPGCGYVDKKNRRTQALFVCVRCDFVGHADHNAARNIAERGVARWGEAMRPYAAPILAPS

SEQ ID NO: 58294 - protein, 504 aa, unknown
  TnpB Polypeptide
MYTVRLLLSTTEYDKQILDKRFHAVSHIHNALVKHARKRLKKLSCDKEYQSLKTEYSILLKKNKLSKDDKAYKKQLSQRMADIIRAYGLSEYSFQSYIKVCAKQFRKCLSSQQVQKEATRVWRGVEDILYGDGKELHFKKYRDFTTICGKTNTNGVKFHKDTYSIEWLGLDINCKLPKEKDYILKALDSDISYCEIERKMFPNGWHYYVTVYLKGDAPHKLKTVGTDYNITGVDIGTSTVATVSDNIAALKELAPMCKDYNKRIEALLRSMDISKRISNPDKYKSDGTIDESNHDKWVYSKTYLKNLNKLKSLYRQKAAYIKQSHEEMINKLLAESVNFVVENMSFKGLQRKSKNTERSDKVSDIKQKDGSVKQIHKYKRKKRFGKSLNNRAPASFIAILLRKATLYGGNVYKVDTKSFRASQYNHITDDYIKPELSERDKLIDGHKVQRDLYSAFLLKNSNSELSKPDRDKCIYGFNRFLELQNNLITKMKENNISMKHCFGF

SEQ ID NO: 58295 - protein, 452 aa, unknown
  TnpB Polypeptide
MQIFTSYKVKIIRSEKEFSDTAKIYQSALHYLLDIVAQEWPMLKDIKGDSKKNISAGQARQMALEHLIHKTAKTPFPEYPFDEKFYKLPSYLRRAAIMEALGMYSSFQSNFANWKQKNQKNRGRKPHFPTVGRSFPALYKGNMFIPSDGYVAKIKVFIRNTWDWMTVQFRKSDADYITRHCQNRKMSSPTLRQRGKNWYLDFSFEERAELKKTKLKDTIVLGVDLGLNSACACSAMTIDGTVVGRRFLDLPVEKDRLSHILGQIRKSQRLGGRKNSARWAKANGINKHMAQQTAKFIVGAAEKFGADVIVFEHLNFKGEKCLGKYAQKMALWKANEIQRVTADKAHRLGIHISHICARNTSKLAFDGSGEVRRNPQNYSLCKFKTGKQYNCDLSASYNIGARYFIRALLKPLSKKARLDMEAKVPSCSKRITCTLSTLISLRAAMAPSGAVY

SEQ ID NO: 58296 - protein, 230 aa, unknown
  TnpB Polypeptide
MIKNNGKRIKLPAIGWVRLAEPLPLTAVHNCVISRQANKWFIAIKYDVQLPEVALNRPSTGVDIGIKELAVCAHGEVFANPKAYRRMSKKLKHLQRAVSRKVKGSNNRTLAVRDLAKLHARVANIRKDAIHKLTHYLAKNHSVIKIEDLSIKAFLKNHKLAGAIADCGMFEFRRQLEYKCQKFSSQLVLVDRFFPSSQIYSNCGKHRHKMPLKQRVYIFALIVDIPKTVI

SEQ ID NO: 58297 - protein, 385 aa, Micromonospora sp.
VDTGQPPKFGSAPRIGQGLRARSAGRRVGRQWRVAAVWAPDSERGRPGGAARLSRRPSVRFTTGSIRVEPDRKYVVLPRLGRLKVHESARKLARRLEAGTARILAATVRREGGRWYVSFTCEVVRAARTPTRPDSVVGVDLGVTHLAVLSTGEQVPNPRHLVEATGRLRRLARRVSRRVGPDRRVRRDPSNRWQRATRQLARAHARVANLRRDGLHHLTTRLAREHATIVVEDLNVAGMLRNRRLARHIADAGFAELRRHLHYKTEWNGGRLIMADRWFPSSKTCSGCGTVTTKLALAERTYTCTTCGLTLDRDLNAAINLAALAREVIDDRSGRESLNGRRADRKPPPAGLVAVKRPPGTAMAGNTGTVPPQGGTTPRLLVKAH

SEQ ID NO: 58298 - protein, 324 aa, Micromonospora sp.
MGLSAQPAIHVARKVSGAYATLTANIQAGNLGKPGSKRRQATEGKPIRFRRDAAQPFDDRCLSWQLAARTVSIWTVAGRSGPIRFGCSDQQHALLLAHRRGESDLVRRDGKWFLYATCDIPDAPTKEPDGFLGVDLGIANLATDSDGRHYCGKATNRVRHRNQRLRAKLQAIGTKSAKRLLKKRRRKESRFAADTNHRIAKSIVTEAERTGRGIALEDLGGIRDRVRLRRPQRVTLHSWAFHQLGQYIAYQAKRSAVAVVHVDPAYTSQGCSTCGHVAKANRPNQSTFHCRSCGFAEHADRNAARNIAARGVTGWAAVSLPNAA

SEQ ID NO: 58299 - protein, 382 aa, Micromonospora sp.
VKIVVQVRLFPDAAQHAALRATLDLCNEAANVASTQAYQRRVFAKQSLQRLTYGQLEDMGLSAQPAIHVARKVSGAYATLTANIQAGNLGKPGSKRRQAAEGRPIRFRRDAAQPFDDRCLSWQLAARTVSIWTVAGRSGPIRFGCSDQQHALLLAHRRGESDLVRRDGKWFLYATCDIPDAPTKEPDGFLGVDLGIVNLATDSDGRDYCGKATNRVRHRNQRLRAKLQAIGTKSAKRLLKKRRRKESRFAADTNHRIAKSIVTEAERTGRGIALEDLGGIRDRVRLRRPQRVTLHSWAFHQLGQYIAYQAKRSAVAVVHVDPAYTSQGCSACGHVAKANRPNQSTFHCRSCGFAEHADRNAARNIAARGVTGWAAVSLPNAA

SEQ ID NO: 58300 - protein, 283 aa, Streptomyces sp.
MPAGRSRSVVTCACRRSAMWVKWSRVLPSTPSKVTVIKDSAGRFFASFVVETDPSEVLPATTPEAGIDLGLGHFAVLSDGTKIDSPRFLRRAEKRLKRTQQSLSRKTKGSKNREKARHKVARAHARVADARREFHHQLSTKLIRENQAIAVEDLAVKGLARTRLAKSVHDAGWSTFTAMLEYKAARYGRTFVRLGRFEPTSQVCSACGIKDGPKPLHVRVWTCKECRTVLDRDINAAVNVAKAAGLAVTARGAQVRPVPVPAQRVEAGTHRDGQTTVVGIPAL

SEQ ID NO: 58301 - protein, 443 aa, unknown
  TnpB Polypeptide
MQKRKFTVVTQLHENNNTSLIEYFDKTRVLYAKAMRETFHVLKRVDNFNKSSYNTYLQNKYDITQRTANSIIFDAQGQLNALTERKKYEKSQLIRKINYLENNVIPKLVEKRNDHNDKLQQKLSVSLVKHRNLRRKIVAKKLKLNRLKQRLENLNYQIETGLFKLCFGTKHLLQRNYEKFINQRDSQMSFVGAKAQKACNLMLQLTYNSKNNQFDIKLRKDFGFKTAKGDDRYVYGQVYFRHHKNHIISILHQGNSPLSYKIIKKNNRFYLYCTFEIQVCDEDFVTHSSHGTIGLDFNKGFVTLSETNQYGHLVQTQFSPYRFKAGDKTKTDLQRIANHVVILARSTGKDICIEDLNFKNKKAQTESKNGKKYNDMLHSLAYQQFMTTVDSCAYRNQVNVNKVNPAWTSWLAKQLYCPTMKLNSHVGASYVIARRGQGYNDSV

SEQ ID NO: 58302 - protein, 331 aa, unknown
  TnpB Polypeptide
MILTYKIKHNSELSSELLKGRQVALYAMKNKSRSSKDVKHIGLKSVISNQILKKYSSNKKLKRISSVKLTLPAQAIKYEEGKIRITCLKMSLDFEKEIEKINQVELDETFAYISCTVKEAKQIECDTWIGIDLNTTGHCCVAGNTKTGKVLKLGKKANHIHQKYKNIRKNLQKKKKYNAVKNIKNKESRVVRDLNHKISNKLVLEAKSKEAGIVLEDLKGIRKTAKSSRKFRYALNSWSFYQLKTFIEYKAKLHGIPVVKVDPRYTSQQCSKCGLLGERKRKIFKCSCGHVENADVNSSFVISLRHQGILQSPVDRDTGEGHLACPKRLVA

SEQ ID NO: 58303 - protein, 341 aa, unknown
  TnpB Polypeptide
MKRSNTFTVRPLSDDGEQVLQDLLDASAALWNEINYQRLMRYNGEDGFEGDVWDADTGALEGTYKGVLGASTAQTVRRENSEAWRSFFRLKDQYHDESNSSVTEHPEPPGFRGNEDDGRILKGAIRKDAYTVEWGDRSRLEMVVGEELRDKHNSPKGRLRLEIVGKPNWPDYVDQSRLELWYDDTDSTFRASQPVTVSDDARDTPLASETAALDIGANNLVACTTMTGKHYLYEGRELFQRFRETTREIARLQSKLEDGRYSSERIRRLYRKRTRRRDHAQEALCRDLLDRLYAEGVDTVYIGGLTDVLETHWSVASDAEGGSGERGGPFSYLWRCSRPRT

SEQ ID NO: 58304 - protein, 398 aa, Lactobacillus sp.
MVLQAFQVRLYPNATQKQLIHMTFGSTRFVWNQMLNMLIERYRNNPKCGFLSTYDRDALLPALKREYPWLKLVDSTALQRVNRDLTDAYKRFFDKTLSNRFPRFKSKRNNHRSYTSKLVGKNIEVLDQHHLKLPKLGKVYFRAGRILNGKIHTVTVSINPQGQYSATILLECDDPIPLPLTHQKVGLDLGLKQLITLSNGVSVPLTRYDRKLARRLRRWERKLARRLRNAKQAMAEDRHKKVLNPRTELWQFPRYQQARKTVAKIKRQIAARRLDNLQKLTTQLVREYDVLVVEKLSVKNLMKNHRLARSIANAAWGTLVRLLTYKFEWAGKQLIVVNPKSTSRICHVCQQKNTDFDGLSTHEWLAVRDWQCPNCQTTLDRDINAALNIKQRGLALVD

SEQ ID NO: 58305 - protein, 350 aa, unknown
  TnpB Polypeptide
MEVRNKAIKYRLYPTEEQATLFLKTFGCCRKVYNHKIESYKLRGKFITVTPAIYKNDYPYLKEVDSLALANAELNLQAAFKRYFDKKNKRKNRFPKFKSAKHTRRAYTTNNQNGTVAIIDNSIKLPKIGRVKAVIHRRLDDSWRIKSATISKDGDGKYYASVLFETEENVVRRVGTFDNAIGLDYASSGLYIDDKGNVGSDHKYYRLSQEKLKKAQHKLSRKQGSKKDETKSNNYIKQLQKVNRIHKHISNQRLDNLHKISTEIANQYSVVCVEDLNMKTMANKGFGNGKATMDNGYGKFLNLMEYKLKERGKYFIKVDKYFPSSQICSCCGKVHPEMKDLHIRTMKCEL

SEQ ID NO: 58306 - protein, 313 aa, unknown
  TnpB Polypeptide
MVREKGVFASAYDLQKYTDGSGKLLGLHSHTVQEVGKEYVTRRKQFKKARLGWRKSGGARRSLGWVPFKSGSVKWKNGCVYYNGKYIHVWDSYGLSKYAFRSGSFSEDARGRWYFNVVVEASVEQSAGRSAIGIDLGCKEAATDSAGDKLRGRNYRDLEQQLGIAQRANKKSRVKAIHAKIKNRRADALHKYSRKLVNENAAIFVGNVSSLKLAKTKMAKSVLDAGWGQLKNMLSYKCAYAGIYFEEINETYSTQTCSCCGGIPDSSPKGRAGLGIREWICSECGAEHDRDVNAARNILALGLQRLDGGRVAT

SEQ ID NO: 58307 - protein, 391 aa, unknown
  TnpB Polypeptide
MKRATKVRIYPTVEQQELLDRQFGAVRFVYNKALAIMSHRYRVHGQKLNATKDLKPLLAVAKRSRKYSWLKEFDAIALQQACRNLDTAFKNFFNPNHTARYPKFKRKHDEQSSYHCTGKTGFDGQSITIPKIGPIAAKIHRQVEGTLTSITVSKTVTGKYFASLLIETGEVAPAAIGELDASAIRGIDVGIASLVSCDDGVKIENPRFVTRAAKNLRRKQKSLSRKQKGSANRAKARMVVAKCHERLANARHDFQHKLSKQLIDENQAVVVETLKVKNMMKNRRLAKAIGDASWHSLLEKLSYKAEQSGKHLVKIDQWFASSKTCSCCGEKRDTLALSVRAWTCACGAVHDRDTNAAINIKQQGIIQLKAAGRVVSAPGGERKSGLLPAVA

SEQ ID NO: 58308 - protein, 353 aa, unknown
  TnpB Polypeptide
MLLSLMLLFEYKLKGTDEQYRILDEVLRTARFVRNSCLRYWMDNPGKNKYDLNNYCTVLAKEYPWAKKLNSMARQASAERAWSAISRFYENCKAKIPGKKGFPKFRKECTHASVEYKTCGYKFSEDRKSITFTDGFKAGTFRIWETRDLHYYQLDRIKRVRIVRIADGYYVQVCLDVELVETHKFQNKMVGIDVGLNYFYTDSDGNQVEKPRFLRKSEKALKRLNRGLHRKKKGSQNRAKARNQLRRKHLKVSRQRKDFCVKAARKLCQSSDLVVFEDLRVKNMVKNRKLSKSISDASRSLFKQWIIYYGKLFGIATIAVAPYYTSVNCSNCGEKVEKTLSTRTHKCLKPFFS

SEQ ID NO: 58309 - protein, 469 aa, Actinophytocola sp.
VKVTRIAYSDDLNDGKYAQLDEQARRLGRVRSLVWRRYGSLAGVGLSDRSIRDQWIADGTASTFGVLANAWKETVRDAVADIKANREAAKVTARRAIVRHTTDRTERKRLFSALNREQWMTDTYLSRLMRRHWRRGRSRTSNQIVVRSDQYRTYRLADGGNVWLAVPGLERRSLVRIPLNTTLAPMGTLRLILRNGRVEVHYAIAAETMKSSQRPRGTAKVGVDKGYTEVLTDSDGNHHGTELGELLRSESDFLKFSNARRAKIRSIAEKAREAGDHSKADRIIENNLGTIKRARRRHAFEQKVRHITFAAVHEVVDKAAHVVAEDLTHCFASRKKLGNTTNRRLTMWTKGITAEALFSVSERRGSALTLVNAAYTSQVVPCCRILGKRSGDRLHCTQRGAVWQADHAAAINVLERDGDPDISLLTPHTRVKQIIQERADRRRTRLPVQDSSTSVRRAKYPIRAAVLNE

SEQ ID NO: 58310 - protein, 267 aa, unknown
  TnpB Polypeptide
LDIVFSKCVAHFCNLYHVGQRYLATSATMTNESQFFSGRKVRARADHYARLHKRLQHKGTRSAKRRMIALSRRERRFKLNTNHIIAKTIVKAHPYTLIGLENLTGIRERTKRRKYRRKGKQLLPLTTKQRRANRHASNWAFAELHKIIAYKACLAGSQAVKVDADYTSKACPMCGYTDKRNRPDHGLRFVCQNDVCQYYIRTDRRYTLHADLIGARNIAMRTLCVWHDWIQTGHLSLAPDVSDREAKAARLTRYAELRWSPDTSLLL

SEQ ID NO: 58311 - protein, 354 aa, unknown
  TnpB Polypeptide
MERFNEACDFAAETAFRIRAANKLLLQKEVYYEIRERFSLSAQLAIRAIAKACEAYKLNKSRKPKFNKHGAVVYDQRILSWKGTDRVSLLTLHGRTVMPFLGCDYYKARKGIVHGQADLILRNGKFYLCVAVEVQEEDAITPIDALGVDLGIVNLAVDSDGETHSGDKVLKVRDRTAKLCSGLQSCGTKSAKKHLKKLSGKEKRFQRDVNHCISKHIVAKAKDTKRAIVLEDLGGIRSRTTVSKAQRRDLHAWGFFQLRSFIEYKAKLSGVQVILVDPRNTSRTCPKCGHVAAENRRTREDFTCVRCGFAGPADSTVAINIAARDRINGPIVTRDLLGPLDSLNRKPLNTFVGG

SEQ ID NO: 58312 - protein, 441 aa, unknown
  TnpB Polypeptide
MNAIFCYKCIIQVRFPNLSERREQSMYLTVKQQIKHLSKEDYKTLRDLCHIAKNLANQAIYNVRQHYFTEGEYLNYQKNYALLKSSDNYKTLNSNMAQQILKEVDGSFKSFFGLLKLAKKGKYSFKDCRLPNYLPKDGYTTLVIGFVRLNGDKLILPFSQSYKKTHKAVEIKIPPILADKKIKEIRIIPKANARFFEIQYIYEAECIQRNLNTSNALAIDLGINNLATAVSSKGKSFIIDGRKLKSINQWFNKENARLQGIKEKQNFGSKPTKRQKSIARNRNNKVNDYMSKAARKIIDYCIQNDIGTLVVGYNETFQQGVDIGKANNQNFVSIPYGKLREKLEYLCELNGIIYVKQEESYTSKASFWDKDDIPVYNEDNPKSYVFSGKRIHRGLYKCSNGKMLNADVNGALNILRKSSVVDLKVLYSRGDVDTPVRIRVA

SEQ ID NO: 58313 - protein, 231 aa, unknown
  TnpB Polypeptide
VSYIIQKEDIELTDKSIGIDLGIKDLAITSYHKKYKNINKHPKMKRIEKKIKRKQRKLQRQYDANKNEPIKEVNVDENGNEVISERKKKLSECKNYQKTRKEIQLLYRKQRNIRENHIYLIINEIVRTKPSRIVMETLYPHRLMKNRHLAKAIQEAKWRFFINHIKNKCKRYGIEFVQAEQFFPSTQKCNKCGNVKKGKEKMKWNHRIYRCSECGNVIDRDINASINLAKY

SEQ ID NO: 58314 - protein, 414 aa, unknown
  TnpB Polypeptide
VNSVQLVEQHCIDRNDPRYSVIDEAAFKSKNLYNAALYEIRQSFIHEGKYLNYTEIQRRMQSSDSYKALPAKVSQQVLVLLDKNWTAFFEARAAYEEDPSTFTGRPRLPKYKHKLEGRNILVYTVQALSKPAMRDGLIRPSGLPITIETEHTVVDQVRIVPRNGYYVIEVVYTKEPVQANVDPSFCVAIDLGVTNLAAIASNREGFVPRLVNGRPIKAWNQWYNKRMKELKKQLPKADRERVTKQMERLTNTRNRRIHHYLHTVSKRMIDFLVKEGVGTVIIGKNPLWKQETGMGRKNNQNFVSIPHARFIDMLTYKAALVGIQVEVREESYTSKASFLDLDPIPTYTPNDEEEHIFSGKRIGRRNRLYRTKDGRTICADVNGAYNILRKSRPDAFSKAKGIAGYVVHPVRLAV

SEQ ID NO: 58315 - protein, 375 aa, unknown
  TnpB Polypeptide
MKRVKTQVLKIDPQPIFTEIQQASGSVWNECLYQMDMYQWHRGYLHAHCDFYIGDACEGWMDKHLSKSQPLHSQSIQHIRKTYFRSWKSYAALKKSGGIQKPKPPRKTKKYMTTRWLKSAIHFKDRLLRLSMGAGRDRLEIRLPKKFDASKTHLISTIDLVYNFGQWALHFTYTDEINPESPGKGVCGVDVGEIHPIVSNDGEHTEIYNGRYIRSLYRQRNKVLADFSRAMSRCDRRSKRGWRLTRHKWRRIRKIDNQIKDALNKHTTAFVRRCVSRGIGRIVLGDLTGIRNRIDYSKSSNQKLHQWAFGKLTDLITYKAKQVGIQVRQINEAYTSQTCPSCGKRNKPSNRNYKCGCGFTYEYLTEDFTKTLLVT

SEQ ID NO: 58316 - protein, 380 aa, unknown
  TnpB Polypeptide
MRLTFIYPVYPTQEQETTLERWLDHLCDLQNSARHDRLVASETEGAFVSLSDQQTLLRVARETYNDFREVPQDFQNHALRRNDKAFTAFRKRCKENAVKKGYPRYKKRVRSLTWSLRKYTKVVGKKTKDTKKQTIRVRENPIIETEFRHNRLKVPKLGQVKIRMHRPLQGDPKEVTIVKKASGWYAHITCELPDTPKVEPTDAIAVDVGTTHYLTTSEGETEDNPRWYRQAEGLLRKHAKDFSRKKKGSQRWQKQKHKLALHHERTTNKRKDFIGKLVYKLYHHRQNNVLVAEDLRVSNMVKNKHLSKSISDASWGIFFKWCADMVSERDGLHFHKVDPKNTSQTCSACGQKSQKKLSLAIRTFNFNHQLVLCCLVSESS

SEQ ID NO: 58317 - protein, 421 aa, unknown
  TnpB Polypeptide
VSKSKKDYRTYILATAKPTEQLDGLNRLGGRIYSKTLSLAFKTHEKKGFWLSDGGLKAYLKFKKYPCHAHSVQAIIDDYCGARRSFFANRKTNPTAKPPHKTRKFHTFTWRATGISYKRGKLRLSMGKDREPLWIKIDKKFYKVVPAEVSLVYNRTTKQYEFHATYDTTPKKTKAKVGSAVAVDMGEIHPIVTFDGLHSEIYNGRQIRSVVRYQNKFKSSINKALSRCVRYSRRWKKLKRVKNRTLQKLTAQLRDMRHKITSRFVSSCRERKIETIVIGDIKHIRQSINYGKKVNQKLHQWAFSKIQNMITYKAKAVGINVDTEDEAHTSQTCPSCGHRKKPSRRTYQCRQCKWQGHRDVVGASNILTAYQGWLFNPVVGAVVSPTGVRFDPHLRRLDKWSPFSGLKSSKPPTRKQRSTRL

SEQ ID NO: 58318 - protein, 406 aa, unknown
  TnpB Polypeptide
MRNTKHKLFKDKTLRHLHDELNICGVVRNHFVALCMRYYRRYEKGLSYRKMSSHLTKLKKLEKYQHWNIPYAWALQNMLKRLAQSFREMKTLGRGHPQFKSCKKHKGNMTFRGEQVKIEKVLDKQKNERNHPTYRIRLNGRWYRFALHRKIQGEIIEVQVTRDALGDVYITLTEDYSEVTYEPKTGKAEGFDFGIKDFLTGSDGHPYTSPMFYKHNADKLAKAQQAYSRKVKGSQNQERERKNVARIHKKTANQRTDHHWKLAIELCQKFDILFFEDLNLRGMKVSLWGKQVSDLGFGEFLRKLKHQSKKRIRSVLKIGRWSPTSKCCSVCGHKNETLTLADRNWTCPECHTHLDRDQNAAMNILKEGVASFGLGVIRPIVLFNQIVGISVEASSPLLNSTNASVA

SEQ ID NO: 58319 - protein, 515 aa, Vulcanisaeta sp.
MLRRSIAVELEVTKELNKLLHSVETAYLNIVREVVEYAVKNNVLNATQLHKLFYHKYRDEYPGLHTHLVVQAIRQASEIAKSFVERRRRGLAQKPYPEVRSVSIRFDETAWNYEQFIKSVAPVRLELSLPNGRTEVWLRPHKRFWLYWWRVLSGEAELASTLMIKRKLNRWYAVFVFEIKPRREVPQSVVAFDINENTVAVGRVDLLTTVNEVTNWNKQYMVPELYAIRTDFGRLARRYERIRNAIIERLKPEFALPNGKYINITNTREYKKFVRRLREDNRKLGRVRQIANELTKVPTLIITEELGKAPQQSMINEIKRSETRHRVSQVPFKSIEKTVEDKALERGSKLVRVSSYRNSKTCPVHFVRLKSTNDWHVLYCPKGHYMHRDYTSILNMLWKVTPEGWVKGVWWDLRREMNWREYEDKHNPVIPQNIVQYIHAVLKSFVANEQCPAVLARGSPMNPAGGADEGWAREKGQIEFNASIITNEDLSEISTPEDLMKVILIAHSQMGYYYG

SEQ ID NO: 58320 - protein, 371 aa, Actinomadura sp.
MSRMVKRAYKYRFYPTPEQADLLNRTFGCVRLVWNKALAERTRRYAEEGMATSYVDTAKWLTAWKQDDELSFLREVSNVPLQQVLRAQQVAFNNFFAKRARYPRFKNRKKSRRSAAFAGNAFTFRDERLTLAKMSEPLAIRWHRPLPEGARPSTVTVSCDPVGRWFVSILVEEVIAALPTTRASVGLDAGLEYLVTLSTGEKVSNPRYERADRRKLAKACKHMSRKAKGSANRNRARQRVAKIHARIADRRRDHLHKLSTRLVRENQALAIDDLTVRNMLANRSLARAISDAAWSELRSMLEYKTGWYGRELLLVDRWFPSSKLCSTRGCGHVNGKMPLNVRSWMCPQCGMSHDRDVNAAKNILAAGLAER

SEQ ID NO: 58321 - protein, 387 aa, Glycomyces sp.
VLLRYRFRVYPTAPQRVALARTFGCARVVYNDAVAARKHAHAEGLPYPTASDLSKVLITEAKRTPERSWLSEVSAAVLQQALADADRAYKNFFASLNGTRRGPRMGSPRFKRRTGAQSIRFTRNAKFAVLDSGRLRLPKIGELKVAWSRELPATPSSVTVSRTATNKYYASFVVAVEDGADMLEPLSDADAETGIDLGLKDFAVLRGGRTIDNPRFFRRSERKLRKAQREFSRKVTGSANKAKARAKVAKVHERIKDTRSDWVDKQIHRIVAENQGIYVEGLSVTGLSQGRAAKSVHDAAFGIFLSRLESKAARAGRTFVRVDRYFPSTRLCSDCGALTGPRGLEGLKVRIWACGCGATHDRDRNAELNIRREGKRLATLAAGLAER

SEQ ID NO: 58322 - protein, 407 aa, unknown
  TnpB Polypeptide
MRLVEQHIIKQSSIYYNELQDLLHKCKNLYNKGLYVVRQHYFQYKNDNTVKYKYLNYYSLERVLKTENDVDYRALPAPIAQQVLMMVDRNFKSFFNLFNKKNRGEYSEFVRMPKYLNKDGLFPAVFTTASFSQKWIKQGIVKLPKQFSFTTRTNKQNIQQLRFVPKNGYIVLEIVYNKKEKDLMSDNGNYLGIDIGLDNLASCVSNNGSCFIINGRSLKSINQYYNKRLAFLKSKLKDNKHTSKQIRSLTNKRNNKIKDYLHKASRILVNHVVSNGINTIIIGHNKCWKQEINIGKRNNQNFVSIPFNVFISMISYKATLEGINVKIVEESYTSKCSFLDNERICKHESYKGRRTKRGLFKTSFGRTINADINGAFNIIRKSEKESFDVTMLPEGRGFWWNPVRISV

SEQ ID NO: 58323 - protein, 394 aa, unknown
  TnpB Polypeptide
MENARMIKTIQVMLIPNNKQKTKLFQYANTARFAYNWSLSREQENYKSGGKFILDGDLRKEFTQLKKTEEYSWLNKISNDVMKQSIKDACNAYKRFFKGYSKFPKFKSRKHSTPSFYQDNVKIKFTDTHVKVEGFATSRKKNKQKLNWIRLAEHNRVPTNCKYSNPRIKYDGLNWWITVGIECEDSLNIPFNKGIGIDLGIKDLVICSDGNTYKNINKTQKVKKLEKQKRRLQRSVSRSYEKNKKGGSYCKTKNVIKKEELLLKLNHRLTHIRQNYLHQVTSEIIKREPSFICIEDLNVSGMMKNRHLSKAVQQQCFYEFRRQIEYKSDWNNISIIIADRFFPSSKLCSCCGVIKKDLKLSDRIYKCECGNVIDRDFQAALNLKQYGENVLKHL

SEQ ID NO: 58324 - protein, 486 aa, Mycolicibacterium sp.
MARFEIPQGWTAQAYRFALDPRPTQLRALASHAGAARFAHNHMLALVKAVMDQRAAERSYGVTESELTPVLGWSLPALRKAWNQRKDWCAPWWGENSKEAYNTGLDGLARGLDAWSSSRCGRRAGKPVGFPRFKTARAPRSVRFTTGVIRIEADRRHISLPRLGAVRTHESTRKLARRVEAGSARILSATVRQDSAGRWYCALHTIVEAKARPAHVRRSAHPVVGVDVGVKADSLLVIATPDGTEIDRIPAPKSLSAAQSRLRALQRGAARQHGPYDPATKTRRAPSARWRATQARIGRTHAHAAAVRRDVLHKATTTLAQQHDVVVVETLNAAGMRTKGGAYKRGLNRALADAALAEVRRMLGYKTRWYGAHLVEADRHFPSSKTCTACGRRKPNLTLADRVFTCDDCGVRIDRDLGAAINLARLGVPTLVGDQSPAGSGPVAGRGATRETEPAPAGNAAGDETSTPHHHPVDQTGTASPRGEAA

SEQ ID NO: 58325 - protein, 376 aa, unknown
  TnpB Polypeptide
LRAYRFRSYPNRLQEEALRHHLWLSKELWNRMLDYSKNKYKSSKKFASKKELREMVKGQGLFSQVAQELVDRLVDAIWRFVKLKREGKDCGFPRFKSFDRLKSLSYPQMGFKLVGNHLKVTPFGEIKLKLHREFKGKIKTLTLKRESSGKWFAIFTVEEEVMPFCSNHGVSIGVDLGLSKFAVASDGSVIANPRHIKKYERKIALLGRRVSRKKKGGCNRFKAKVKLARAYEKLGNSRLDFLHKTSCSLVNRYSVISLENLNIKSMVQEKFGKQIYDAGWGMLASMLCYKAESAGCKVVFVNPEGTTQQCSRCGTVVPKGLVDRVHNCPCCGLVLDRDLNAAHNILNRCTVGHTEINACGVNPERLMLKQEAHTYS

SEQ ID NO: 58326 - protein, 321 aa, Microcoleus sp.
MDCCDFHLRSKVKLWFGVGEFFLRMPSNLDYKKLVEIRILPRNRCFYAEFVYRTEELAVEFNPDHVLGLDHGINNWLTGVSNVGTSFIVDGLHLKSLNQWYNKRVSVLKENQPQGFWSNQLARITEKRNRQIRDAVNKAARIVVNHCIENKIGTLVFGWNKDQKQNANMGKKTNQKFVQIPTGRLKDRISQLCKQHGINFVETEEAYTSKASFLDNDSLPKFGEKPEGWKESGKRVTRGLYCSAGGTKINADGNGAANIIRKVAVKLGLNLSRISSGDLMAPLKIRLWTLQESPSMKGLGSIKSFRMPDANFLLLPSFGER

SEQ ID NO: 58327 - protein, 485 aa, unknown
  TnpB Polypeptide
MPNELIPIYDFLQNELNFILSNNETRAILNKIDLSKHRGNVWRELRDNLKWRIKDWAIHNKTWHSYILFENIRRELQSKQEAIIIWNELVENNFNINENLFDNLHKLKLYPTRSRIANIKRSDKIPDLSYSVTLNLDYTISEKQIFRMKSNNICEIKINKKDWINYEIIFPSSIDSRFTGRIAKPRFIKRKRDNQYIGICSYEYEIGNYDLEDKILGVDIGKIKLFSSVVMSKDGTFSDEYINTKRSQRIEEKINRLYENKQILYNKIKSYDDLNITEELKYNTWKTLYSNIRKKITNSKDYQSKILSNEVVQLALQNRCKTIHIENLSWLNSQGGKWNHSQIHSKIIEKASMYGIKVKKVSAYNSSKEHPVTKEIGIVKDRIVEFTTGEIDRDLLASINLAIRSTNIKIKKSLPIKVKTKRVKTKSNKKEVKEKVNKLKGNTQIVVFLTNVLNTTIKVELGVRPLNEVLVCNSLLGTYYQKCQL

SEQ ID NO: 58328 - protein, 370 aa, unknown
  TnpB Polypeptide
LLTIGEDAQYPLPFDCPAQFRRSAIRKAIGAYRSWRSNYERWLKRSKRHRHHRPPVPPRHFNFSPSFDAGIWKEDTGENILLKIRRDGQWAWVKFSYQGYPIGSEWVKGSPSFVLKGNSAYLTFAIERYVTATGGMKTVMAQDSVRVLGVDIDLDKNAAICSVLETDAKGVTVEVARHFIKQPALVKRRKRELGQIAIRMKATGIIHKGFCQKWWERLSNREVEMGRAIARLIVNIAHGYGCKVIAFEHLGNLKPVRGKYSRRSNSKRAYWLKSKIYLNVKRIAYQDYGILTTRVNPRNTSRLDPWGNQVWRGSEFPTNLLGYLDYQPGADWVAGVNGYKAHSGLNAARNIGMKTIIRHKLEAVFRQAAE

SEQ ID NO: 58329 - protein, 432 aa, unknown
  TnpB Polypeptide
LNRVLKTLTSTVVLECYVNRFARRALREIEEAYRRMLEEMLEYALEHNVSQSTLHKIFYRKYRDAYPWLPTRVIKGAYRDAVRRAKGFRRFKKIGKSYKDKPEIRKITLAYSDLQDWRLEGGVIKLRTHIGWVELHYRGYKQLYRYLYGGWKLGGELKLKINGRNVLAYIVFKRDFEIEYNPRNVVAVDVNENNVTLALFKDGVLGDVYRVETGLGRIVIAYSERRKSIMEGKPPWDKLVKRKLGKLREKRRKLDILGKTAWFIERLALENKAVVVVGDIDAKAKERMERDKSDRLRHRIHQWSVSTLVGLLECKPVHVVRVSERGTSSRDPFTRERIDGYSPLVIRIAVRGARRVKVLKVTLRVARVNGRVLERDVVGSIGIGFNYLNSDGSPMALGSTGACEVWVKLVIPHQSPTPLTEIQVFTNTIKYR

SEQ ID NO: 58330 - protein, 408 aa, Sulfobacillus sp.
MVRQEKGASMQETTVFTYRIALSQTEWTKASEARRAAGDLWTRLVKIHRFCRRRHWRWPTAAQLKTHFKRRLPLHSQTVQAIIEKFCATIDGVRTKRQNGDKKARYPWRFRRYFNPIFKGQALKRDGFYLLLPLGRRRPAIRVHLPQNLPMGRLVQAELGFGEIHLTITRERDEPGVPASGNAGGLDIGSIWLGMVTDGHEALAIAGRGLRSVKQGRAKALARLQKKRSRTQPGSRRRKRLHRARHRLSQKVNQISRNALHHATNQIVEFCVTHQLAVLYTGDLGTLNHKTRRRRSRRTNQTVGVLEFGRLEQYLQYKLRRYNIQLIRISEAYTSQTCPCCGHLNKVGGRTYRCRACGYRAHRDGVGAVNILNKGIHGEIRPGTMLVPQRITYRRPVPFHGTLRRRCG

SEQ ID NO: 58331 - protein, 381 aa, unknown
  TnpB Polypeptide
MTTVQKGVRVRLYPTKEQEKLIDKTIGCCRFVYNQTLDDCKQSYEQTHHFPSKNERIKNLVPLKEIHEFLKEVDAKALQQSVRNLNFALDKFFKNRSYFGFPKFKSKHNSKQSYRTPCDKGRATVLDNKHLKLPKLGKVKTKKFSMPEVYKIFNITVEKTSTGKYYASICIETEVEPLHKTGKQVGFDLGLKDLLIGSDGSRYARPKYAYVYKDKLAKEQRKLSKMRTKLERANLNLEDCKNYQKQKRKVAKLYEHIANCAKDFNHKLSIELVRNYDVLAFENLNVEGMKKNHYMAYSISDVRWSQLLNFIQYKCQWYGKEFRQVDRFYASSKICSDCGTYHKDIVSSLKVREWTCPDCGTYHDRDVNAAKNILNQALSVA

SEQ ID NO: 58332 - protein, 427 aa, Escherichia sp.
MHQENTMLPLRISVSLFIDQSIIWPVKRLQAFKFQLRPGGQQEREMRRFAGACRFVFNRALARQNENHEAGNKYIPYGKMASWLVEWKNATETQWLKDAPSQPLQQSLKDLERAYKNFFQKRAAFPRFKKRGQNDAFRYPQGVKLDQENSRIFLPKLGWMRYRNSRQVTGVVKNVTVSQSCGKWYISIQTESEVSTPVHPSASMVGLDAGVAKLATLSDGTVFEPVNSFQKNQKTPARLQRQLSRKVKFSNNWQKQKRKIQRLHSCIANIRRDYLHKVTTTVSKNHAMIVIEDLKVSNMSKSAAGTVSQPGRNVRAKSGLNRSILDQGWYEMRRQLEYKQLWRGGQVLAVPPAYTSQRCAYCGHTAKENRLSQSKFRCQVCGYTANADVNGARNILAAGHAVLACGEMVQSGRSLKQEPTEMIQATA

SEQ ID NO: 58333 - protein, 344 aa, unknown
  TnpB Polypeptide
MLLGELKKKGIAKTDKPVVKRITITYSDSQDWRLSNGIIEVRTHRGWVKIHYRGHKQLHRYLYNGWKLSSELKLKLNSRKVIVYLMFKKNLEVVYNPNNVVAIDINENNVTVAVFKDRKLCEVYRVETGLGKLIISYAERRKRITRGKSTKTRSVKKALKKLREKERKQDIIHKTTKIIEELATQNNAIVAIGNVRRGKRRLVKRTGKSTLRHRIHQWSVSALVEALNNKPLHVVEVSEAYTSSIDPFTGKRIRKFTPSMTRYAVRRRKRVRIIKIWLRLVKIYSRLVLDRDVIGAINIGLKYLSSDGSPMALGSTEPHEVRVKLMNPHQGLTPLTELKVLKTI

SEQ ID NO: 58334 - protein, 449 aa, Massilia sp.
MLLAHRIRLEASPAQRDYFARAAGTSRKVWNWALAEWLRQEALGQQPNAMALKKQFNAIKYVHPDWLDGDGRPWLRTIHRDAHAQPFTYLAQAWCRYLEQRRVNNQAGQPTFKKKGRCRDAFYVANDKFRLEGKYIVLPKLGRVMLAEALRFTGKIMGANVSREAGHWYVAVQVELPVCEAHIKRWGNGVVGVDLGISAAAVLSTGEKIDAPRPLQARLRQLRIRSRRQPRKLKAAKASAGIVGAMPKGVRLPVSRNRAKGARSLGRLHAHIAHVRADFTHQLTTRLCRENQAVAIEDLNVRGMLSNYRLARAIADVGFYEIRRQLHYKALRFGTLLVIADRWYPSSKLCSCCGARNESLTLGQRTWTCICGAHHDRDVNAAINLQRLATGALAAQTALPVASQSVTHGTAAGMVPAGGGKVTPVRHEHGHQDGSGQEENSAYNRAPFR

SEQ ID NO: 58335 - protein, 565 aa, unknown
  TnpB Polypeptide
MINKKKLLCKMLNNHLKKKLYERKQDYFYEDLLCFKMIKYKQRNISLLNKIFSRINKNKTHINNNYSPSLVKCMSKDLSIKPFWDDNIKKLSDQLFMPTFDNLVTIENPFNTFNYKNWFDVTKQIPLNPIENDLFNYSNEDYEEKDITKCKKVKLNFNKEQRKYFNQIIGTYRYYYNRCVSYINNYNPLTRTTFFYIYPDKKTDIEKQKITIVINKKDSVYSNFTARKHLNKNNPEWLLKRFPVHLIDQAIFECCNRIKSCFSNLINNGRPFVLKYKTKKDLVQTINLEKIMIKKINAKKINLFSNFEINNKYLYRNIKLYESYPSNFGDSSISYHKLLKHYFINFNYKEKTTNSGSNKLCSIDQGIRTPFNIFSKDESITIGDNCFKVLLKKCKEIDIITSRMNSKSYYVKKDNITYYYKMNSKRKKNLRKALHRKINKVKNLKTELHNKTIKLLTDTYKCIILPPFNIQEMATGLTSKVSRSMYNMSFYQFKEKLKKKALSKNITVAEYSEPYTSKTCGRCGTINEELGNSKVFNCNNCKLIIDRDNNGARNIMLRNYQFIKK

SEQ ID NO: 58336 - protein, 375 aa, unknown
  TnpB Polypeptide
VLTYEYKCEGANKQYAAIEEAIRIVQFIRNKCLRKWMDSDGTTANDLQCYCAVLAQEYSFAARLNSQARQASADRAWSAISRFYDNCKTHKPGKKGYPQFQHDNRSVEYKTTGWKLGSDGKHISFTDGCGIGRLKLVGNKKQAIATFPTKQIKRVRLVRRADGYYVQFCVKAERKIKHVETGKQIGIDVGLRAYATSSDGNTIENPRYFRKAEKKLKQLHRRLSRKKKGSKNRNKARKQLAKAHLQVQRQREDFARKQASALVTSSDLIAYEDLQIRNLVRNRHLSKSIHDAGWGQFLTWVKAYGLMHEISVVAVPPKWTSADCSACGTRVQKSLSVRTHICPRCGVVLDRDHNAALNILSHALAGTVGHTGTDE

SEQ ID NO: 58337 - protein, 407 aa, Streptomyces sp.
VGRVIRAYKFLMRPTVGQQAALGEILRDHCGLYNGALQERRDAYRHTSKTSIKYGMQSAQLKEIRAFDPERHGRWSFNSQQATLRRLDKAFAAFFRRIKAGGTPGYPRFRGVNWFDTVDFPKDGDGCRWDSTPHDPVTRVRFQGVGHVKVNQHRAVVGKVKTVSVKREGRKWFVVLTAEQAQPEPLPETGSVVGIDMGIASFLTTSNGEHVLNPRHARKAAAKLEAAQKALSRFGRVRRDKRTANHQRTVERVATLHRKVRRRRLDHAHKTALSLVRKHDLIAHEDLTIRNMSMTAQPKPDLDKPGAFLPNGAAAKTGLNRSIADAGWGVFLTILHAKAESAGREVIAVDPRNTSRQCPECGHTAKENRPTQEKFHCVSCGHTAHADVVGATNVLRAGLARRNANQA

SEQ ID NO: 58338 - protein, 380 aa, Streptomyces sp.
LNTRHHLAEAGLSEEEWRERWEAERWFLAADGESGKRYGNETIRVTPQGRVSIKLPAPLAHLANSKHGRYTLTSRVAFAHWGAEWADRVEGNRAVAYRIHYDTGRGRWYVTASWQRPVVQTVTLEAARAGGVIGVDTNADHFAAYRLDLHGNPVGNPRRFPYDLSGSAGHRDAQVRHALTRLLHWATRSGVTAIAIEDLDFGAEKTQEKHGRRKRFRQLISGLPTGRLKARLVSMAAEHGLAIIAVDPAYTSMWGGQHWQKPLTTPHRTMSRHDAAGIAIGRRALGHSIRDGASPARTKLRAWGRTTPPPHDRSDRAGHRTVQTAPGAPGREEPRPRVIGPRTRSVPPDATRTREARTPKTVRDVRSEQEWVQDSLLLTE

SEQ ID NO: 58339 - protein, 410 aa, Streptomyces sp.
MRLRYGFRLYPSAGQRTALARAFGCARVVYNDALRARETARVEGLPFPKAGDLSKQLITAAKDTPERAWLGEVSAVVLQQSLRDLDAAYRNFFDGLKGKRPRMGAPRYKSKRDARQAVRFTANARWSVTTGGRLRLPKIGDVKVEWSRSLPSVPSTATVVKDSAGRYFASFVVETGPEEVLSEVVPVVGIDLGIGHFAVLSDGRKIDNPRFLRRAEKRLKKAQRELSRKKKGSKNRDKTRVRVARAHARVADARREFHHQLSTKLIRENQAVAVEDLAVKGLARTRLAKSVHDVGWSAFVNMLEYKAARYGRTFVKIGRFEPTSQVCSQCGVKDGPKPLNVRVWTCGACGTVLDRDINAAVNVAKAAGLAVSACGAQVGPGLVPAQREETGTHPKPQPVTTGKQAGISAL

SEQ ID NO: 58340 - protein, 560 aa, Streptomyces sp.
MSKAKKELRPIDAPFVAPGPSGVAVRDRLKHLTPEDDKVLRLVGEHLGNLASADLKTRCADGLEHSNETWAARKQGLTAASSSRWAGAITKASHDQWALSRRCQTAHIQGLEAGVRTLMHRLSQPLGEKGTKRAPGGYRSKGEWFQKSRRLAVLEHRLDVARAEREAGVVRVVRGGRRLLGNRHNLAAAQLTETQWRERWEAERWFLAADGESGKRFGNETIRVTPDGEVSIKLPAPLAHLANARHGRYVLASTAAFAHRGAEWRDRIEADRAVAYRIHLDVTKDRWYLTASWTIPPIKTIPLATARAAGMAGVDTNADHFAAYHLDQHGNPVGEPVRFFYDLSGSADRRDAQIRHAISRLLHWAKRCGVKAIGLENLDFTAEKTREKHGRHKRFRQLISGIPTGKLKARLVSMAAEHGLAIVAVDPAYTSMWGDQHWSKPLTSNKRKMSRHDAASVAIGRRALGHPIRHGVSPARTELRAWGRTAPPPQHRSDAAGHRTAQAGPCARGREGTRPPVTDRAHDARRRIGAQRTREPSASNTVRDARCTGSWQQMPLLDTV

SEQ ID NO: 58341 - protein, 168 aa, Okeania sp.
LRVSVALVKCLVNLNLRKKVETIVLLDYGSISIGFNQIKLPRIGWIKTYEILPDNVTPKSVTINRKADRWFISFKIDAETQITEKSVDVVGVDLGIKSLATLSTGQVFPGAKSYRKLEAKLSRLQYLNRNKVKFSNNWKKAQLKIARVHSQIANIRKDTLHKLTTTAG

SEQ ID NO: 58342 - protein, 369 aa, Roseiflexaceae sp.
MADDAVLRATQTAFNQAASYCARVAWDEEITNKNTLHQIVYGPTRVTYGLGAQLACCARDKAAEAVRAVRAAPERRDRNTDAVITKTCPTFRDDGSVRYDANSYKLKSLDRVSLNTRSGRVTGQLVLGDFQRAHLYDMSWKIGGAELFRRANVWYLGITQTKADPAPAEPTGWLGVDLGIVNLATDSDGETHTGTDVEQTRQWYMRRRTALQRVRTKSAKRRLKRLAGRQRRFQKHTNHRISKRLVERAKRTARGIALEALKGIRERVRVRGTAQRARHSNWAFAHLRACIVYKAQRVGVRVVVVDPRSTSQRCSRCGHTERANRRTQAVFCCVVCGHAAPADYNAAINIERAAVKQPMVSNPTQSRSG

SEQ ID NO: 58343 - protein, 345 aa, Bifidobacterium sp.
VYEAVKVALDPTPRQERLLEGHAGAARFAYNTMLSRIQSQLARGEKADWTMYAQRRWWNEWKNEIAPWWAEYSKEAYNSAFESLSAALKNHFDSKTGRRKGKRMGWPRFKSKRRSMLRFAYTTGSFGLIGGDPKALKLPRIGRVHCMENIARRVGAAKVVRMSVGRRAGRWYASLTVEREDKPVPCPPKGGSVGVDLGVKTLAALSDGTVFDNPRLLKRAHRKLGKAQKTLSRRNEGSNRWKEAELHLQRVHAHVASQRRDGLNKLTTMLAKTYSHISIEDLNVSGMVRNHSLAQAISDCGFRELCRQLEYKTARTGAKLHVVNRWYPSSKTCSNCGTVKGLFPF

SEQ ID NO: 58344 - protein, 414 aa, Okeania sp.
LEFINNVLNYDTEKVWEFGSPVNLGAGRENDVAVSTAVVRVINVLQNLSSADFPYFDDNRNMSKTTKNMGCQQVLLHPDQNLLAILEYLCGEANKVFNCSVYYARQIWFKENRFLTQGELCRQMKWNLHFNAMYASSAQQICNGIVESFRSFKQLLKLFGKGELANKPKPPKYRKPGLFTVSYPKKWLKLTDIGIKIPLGLKVKAWFRLDAFYIPMASNLDWKLIKEIRILPRHGCFYAEFVYEMKTQSVKLDPNQALSIDHGLDNWLTCVDTQGHSFIVDGKHLKSKNQWYNKHIATLKKNKPQDFWSKRLACITEKRNCQMRDAVNKTARLVINHCLKYGIGTIVFGWNKGQKQSIELGSKINQKFVQIPTAKLKERIEQLCNLYGLQFVETEESYTSKASFLDDDFLPIRA

SEQ ID NO: 58345 - protein, 405 aa, unknown
  TnpB Polypeptide
MKATRTETIFLSGENLYCSLELCHLAKNLYNASLYLIRQHFFSTGKYLGYNSLQKQMQDNENPDYIALPRKVSQQILMQVDYDFKSFFNANKKYKEKPEKFKERPRIPGYKDKKGFSLLTYTTQAISQKLLKKGIVAPSQTGIQVRTTVNPESIRQVRIVPLKTENVKVEIIYEKETRDHEVNYDSILAIDLGVNNLVSLTSNKRGFQPLVVNGRPVKSINQYYNKERSRLMSLLSSDQKETKRIRRLTEKRNRRIAYYLHNTSRFVIDICLFEGIGTIVIGKNPNWKNGCNMGDTNNQNFCGIPHSVLISQIVYKAEEYGIRVEMVTEEYTSKCSFLDSEEICKHASYVGRRIKRGLFRSNSGRLINADTNGSYNILIKAFPEAFAEGIEGLVVSPVLCTVCTA

SEQ ID NO: 58346 - protein, 411 aa, unknown
  TnpB Polypeptide
VSETVTKTLQATLATPTTGKEQRLQRLLDTYRTALHDAFDNRADTMSAVNDVVTPYDLPYQAKDALKSYVPKLRDTYNAEELDDEHPLRLVNRAATFDYSDEREHGFVWQAPQPGRGTNFWIPLRINPEQESLWFDLLSEDAKAGELRLQRHRTSWELHVTVEYEVEEPTESDDETYIGFDVGESALITGCALKRDVPRKPMLVSGSRARHLRKEMFTTLRRLQSRDAAEWRVDERFDHYQNALTDIVEKASREAVEYADSFENPVIVLEDLSYIRERLDYGKFMNRRLHAWAFARLQGRIEDKATEAGIRVEYVNAAYTSQTCHACGCLGRRSQQAEFVCPHDDCHVSEFQADINAAANIAGRANPWGESVPWKPERDDTPQDGSGSDTATVHRETSPRTGQMTLSAYSD

SEQ ID NO: 58347 - protein, 534 aa, unknown
  TnpB Polypeptide
MNKEVLKMLTEKKGNSNFVTVECLLAFDKDEDKGRVLTVMRKFSSMVRFAYKRLMEGAERKELKKLLSRKYGINTRYSDDAILLAQQTLKSCLERKQNPKKIVFGSRELFEQLKKKHLIGKSREKLRQKWEERRYGILQSRGDKSKAGNLNLRLVNLNNRWCLRVNLGNGEYVWARVIRTAKRKTDKWAGFISDIEHAEKTGDCFPYTVRLKLRNGKIYAQFSKEENFSEVTITKENGVIGIDINAYPFHLALVHTTEAGNLAKFDRISLDKLLESSSDKREYLSWQMSHQVVEFAKREKKAIVIENLEKLPKGKRGDGLPKLRQRLQKWVYKALLQKIEIVARRNGIQVIKVNPAHTSIIGKLKYAPLYKIDKDTAGAYVIARRGLGFKERLPKNYKELLKDAEFLCYTIAKIEEEIAKLKHEIREVKNEYKRNRLKSALWKTRKELETLLGYFRGSGESESAAQQTVNRKMERMRGRTQALQKSWQVLSVAFAFSCLESFRDFSPLKRVLISRDWAGVANKASLSHLGQGTN

SEQ ID NO: 58348 - protein, 189 aa, Alicyclobacillus sp.
LPESKETVGIDLGVKHLAITFDGEFYEHPKFPRESERKLHRKQRVVSRKKKGAARRRKAIRELARLHEHIANPRRDYAHKVSRKLVNSYGLIAFENLNVQGMVKNHHLAKSIVDAAWNQLVRYTTYKAEEAGRGVVLVDPKNTSQPCSNCGEIVSKKLSERMHHCEHCGYVQDRDINAAQNILKRALAG

SEQ ID NO: 58349 - protein, 494 aa, unknown
  TnpB Polypeptide
MKRKLIDNTLEYAVTRIGYCVSGDVEKARIMAERAGRLRSDIWNKYGSLKCWGISHQKLYKEFQKTNPPLMYNLPQKQWQKTFERVINDIHTSQEAAKTIVIRKIYRHFKPEKDKQEKEIKSTSFRYELIKSLRTLDWMKYPLLHRWIRQAYHRGHTYINNQICVGISNGAVVKRISRNVISVTIGGDLIGNHKYEKLTLLFKVGRITPTGLFQIIFDNIRQEIRLHFPKVVKKISSVGVGKCGLDKGYTEAFTDSYNRTYGEGIGKVMTQSVKKRHTRGKGRNKLYQIAIKKNKKHIFKCNLTKKRHQSSENKKKQTLRTMVRTGVNKFFDKYEYAITEDLSFVVKNKKISRQINRNLAEWCKGTLQKALDEISYRRSSSVTVVNAAYTSQVDSRFGVLLGTRCGDQFFTFDGEVLQADSNAARNIETRLDDPNITRFMKYVDVRKVLIQRTVSFLLQRNLTLDDAINQGWFNPRHLQGIDKKAWVESETLGA

SEQ ID NO: 58350 - protein, 426 aa, unknown
  TnpB Polypeptide
LNGKWNDRFSNVSKSTPFGTKPLILWIGARGGMGVMRQEKKDSHTGLGQVIQYNTIKVRLYPTPQQEELFQKTFGCCRYIWNQMLSDHERFYEETDAHFIPTPAKYKKEAPFLKEVDNQALTQEYNRLSQAFRNFFRNPGAFGYPNFKRKKDARDSFSACNHVMGGSATIYITRDAVRMTKAGLVKAKFPRRPRSGWRLTRITVARTKTGKYYGYLLYACPARRPEPVEPTKERTVGLKYSISHFYVADNGASADPPRWLQQSQEKLAVIQQKLSRSQPGSKNYQELVQRYRLLHEHIANQRRDFLHKESRRIANTWDAVCIRNDSLKAISEKLGSSAVRDTGFGMFRALLRYKLERQMLEVDRFIPTTKVCSVCGSVNEVLSPKVRRWVCPVCGEEHGRGRNAAVNIKARGLAWCQNKQTAEAVS

SEQ ID NO: 58351 - protein, 402 aa, Microcoleus sp.
MLVLEFKAKGKTTQYAAVDEAILTAQFVRNKCVRYWMDNRGVGQKELYRLSKTLREEFPFVKALNSSACQASVERAYSSIARFYDNCKKSVPGKKGYPKFQKNCRSVEYKTSGWSLSENRKQITFTDKKGIGKLKLKGTWDLNFYQLDQIKRVRLVRRADGYYVQFLVKAENKVDKKPTGRTIGLDVGISQFYTDSNGHTEPNPKFYRTGEKRLKVRQRRVSRKNIGSANRQKAINKLGRVHLKISRQREEHAKRVARCVIQSNDLVAYEDLRVKNLVKNHCLARSINDAGWYQFRKWLEYFGVKFGRITVAVKPAYTSQKCSLCGTLVKKALSMRTHACQCGFVLDRDWNAAINILELALSTTGHVGTWVLNLNASGDLASTVAGAILSEQAGSMNEESPP

SEQ ID NO: 58352 - protein, 492 aa, unknown
  TnpB Polypeptide
MIIGNKYRIFPNESQQKRMKQDIKNCNYSYNWALDWYLLGLIVVKFKNTNFSSKKELEDKIKEEVFFIISKKDKINFLPKDLKCEKNEKYKYLDLTKLFSKQYLGIRLDFLKGLFELNNLNIDDYITKRCEEYKLEISCKKSKKTNESKWYSWSINDLNKKFTSLKKEKLFLLKTPAQALNAEFRNLDTSFKAFFDKKAKKPKFKSKFNTKQSFSIQQNADNKQNRIEGNKLIIPLSSIEKRKGNDKGIKIVLHKPIVGRIGTITISLNAAGNWFVSFPSDDGLTPPIKRTIDEKTTVGIDVGLTSFITKDDGTKIDLPKFFKNNKIEKKKLFYERKIQKIRDRNPNWENSKRYNKIKIKKSVLDEKIKNMRNDFQHKTSHELLDENVSLVATESLRVKNMIKNNKLSRYIANAGFGMIVDKLKYKSEQRGITIHQVDTFFASSKICSCCGHKKDKLSLSIREWICNNCGMKHDRDINAAINIKKEALKSYI

SEQ ID NO: 58353 - protein, 542 aa, Streptomyces sp.
LGGLREVAAPFLVPGPSGVAVRDRLKGLTADDEKVLRLVGDHLGTLASRDLKTRCADGLEHDGDRWAERKRELTGRSSSRWAGSLTKATHDQWALARRGQAAHLNSLEAGVDTVRRRLSLPVGAKGTKRAAGGYRSQKEWFAKSRRLRVLEDRLERERADREAGRVRVVRGGKRLLTTRHHLEQAQLTQDAWRRRWEASRRFLQADGESGKRYGNETIRVSPDGKVSIRLPAPLAHLANAPHGRYVLAARVTFPHRGETWRDRITVNRAVAYRIHEDTDRDRWYLTASWTIPPVQRVPLATARANGLVGVDTNADHLAAWRLDAHGNPVGQPLRFGYDLTGTADHRDAQIRHALIRLLHFAQRHGLALAVEDLDFSTEKTREKHGRRKRFRKLISGMPVARLRARLVSMAAELGIPVIAVDPAYTSKWGAQHWQKPLTTTTRKTTRHDAAAVAIGRRALGHPIRRRTAPPPHDRSDRMGHRTVQARPEAPGREGNRPRIPGPRTRSVRPGRGANAVDQNTQHRSGCSAEHESWQQGSFPLSL

SEQ ID NO: 58354 - protein, 460 aa, unknown
  TnpB Polypeptide
MKNNENNQITLKLKYSTDENSKFRILEYIKNYNNVFRFTYNRLHENDKLKTKEITELQKSINNIFVDSHFKNSAIFDSKTLLHNDKVIFGGKKLFIDRCQNKISKEEFQLKKLRPIYSVGQSDRKGNRKFSIITDNHIIFKPNQNEKFLLEINPSKNYQKYLLELSDLASQKKIPIDFKLDLEYVYIGFDLNKLKSERIISEKIKDRYFAIDMNPNYVGYTVIDWIDENYKIIDKGAISLKDLNDYDDSLKGKGFSSESKERKYIINKRNYEISDIAHKLERIANHYQCENFVMEDLTIPSKDNGKGKRFNRLCNQQWCRNRFCNILKKLCKVDKIKILKVIPNYSSFIGNLVYRDERLFDPCLSSIEISRRGYEFNHQYILKDKEQKKNIVFGNFDEDKEVYAQSLEELGISGEFSSFQELYDKVKKSKVRYRFPLDLCNYAVFSKNSIRDYQTLYKFI

SEQ ID NO: 58355 - protein, 473 aa, Clostridioides sp.
  misc_feature (172)..(172): Xaa can be any naturally occurring amino acid
MYCGQHIKLPKLGMVKVRDKQIPQGRILNATISKEPSGRYYVSLCCTDVDIEVFENTNNHIGLDLGIKEFCISSCGEFIENPKYLKKSLNKLAKLQRELSRKTIGSLNRNKARLKVARLQEHIANQRNDFLQKLSTKLIKDNDIICIEDLQVKNMIRNRKLSRLISDVSWSXEPDKFSLQNALKDLDNAYKKFFKEKAGFPKFKSKKINRFSYKTNFTNGNIMYCGQHIKLPKLGMVKIRDKQVPKGRILNATISKEPSGRYYVSLCCTDVDIEVFENTNNQIGLDLGIKEFCISSCGEFIENPKYLKRSLNKLAKLQRELSRKTIGSLNRNKARLKVAGLQEHIANQRNDFLQKLSTKLIKENDIICIEDLQVKNMIKNRKLSRLISDVSWSEFVRQLEYKANWHGRQIVKVGKFFASSQICNKCGYKNEEVKNLNIREWICPSCNETHDRDINASINILKEGLRLITIQNK

SEQ ID NO: 58356 - protein, 335 aa, Bacillus sp.
MEVNQMIINKAFKFRIYPNQAQAILINKTIGCFRFVFNHFLSLWNHAYKETGKGLTYGTCSAKLPAMKKEFVWLKEVDSIAIQTSVRNLADAYTRFFKKQNSAPRFKSKKNSLQSYITKQTNENIAVVGNKIKLPKLGLVRFAKSREITGRIVNATVRRNPSGRYFVSLLVETEVQELPKTHSYIGIDVGLKDFAILSDGTPYENPKFFRSLEDKLAKAQRVLSRRMKGSFRWNKQRVKVARIHEYISNARKDYLDKISTEIIKSHDVIGIENLQVSNMLKNRKLAKAISEVSWSQLRTMLEYKAKWYGKQVIVVSKTFASSQLCSCCGYQNKDV

SEQ ID NO: 58357 - protein, 418 aa, unknown
  TnpB Polypeptide
MLLSQETTIVLSKNDANIVGHMCYAAYKLWNVCNYERNNYKDLGLEKYPDWYYQKSKHKDDLWFKSLPSQTAQEVCKLLDKSWKSFYCLKKSGGIENPRPPRYKKDKMPITYMQNGIQHEKGSLSVRLSLPKKLKEYMDLTYGIRAAYLYLKNPVFSNTDMIKQIRIYPPASEGTCRILIIYEVEDVTPVQDNGRYLSIDLGLHNLMTCYDNAGRTFIVGREYLSHTYFYDKEIARVQSQWANIQNARGVKHPRTSNHLQMVYQKKNNCIKDYIHKLTRYITDYCVKNEIHTVVIGDIKGIRKENDLGRRTNQKLHSLPYARIYMQLEYKLKMEGIRLIRQEESYSSQCPPQSEEVSVKYAEKKNRKKRGIYIVDMVIYNADAVGAYNILRKYHAVSGRKIDMPITGLSNTNIVKVAV

SEQ ID NO: 58358 - protein, 392 aa, unknown
  TnpB Polypeptide
MLCEYTHLTKNLYNHANYLVRKEFAETGNWLRYQDLDKLLKQDTDYPDYKNIPEAQSAQQTLRLLDVNWKSFFVAIKDWSKNKDKYSGKPKLPKYKSKDGRMVFILTNQRIRLKDDLLHFPKSFKGFTIKPRCVRLHNFEKINQVRIVPKNQIFCVEIVYSITINDNMLPDNSRYMSIDLGLDNLATIVTNTELNPIIVNGKGLKSNNQYYNKQKAYYQSVAKRTNDKFYTNRLYRLTQKRNFKIEDALHKISKFIVTSALSNNIHTIVIGNNKNWKQSISLGKRTNQSFVNIPHQKLINKLIYKARNVGINVILTEESYTSGTSFLDGELPTKEFYNKDRRIHRGLFVSNQGIRINADVNAAYQIMKKVFPNAFADGIEGVVLHPVRVNII

SEQ ID NO: 58359 - protein, 241 aa, unknown
  TnpB Polypeptide
VPKNKTFKYRLWYVTFSCVVSEDAPLPPSKAAVGLDLGVLYFATLSTGEHIENPRHYRKGLKHIQALSQIKDRRKKGSHRRKRAAIALARAHRKVRNQRVNHHHQLSRRLVNGYGLIAMEDLSILNMTATPEPKPDPEHEGQYLPNGAVAKAGLNQSILDAGWGQFQQMCIVKAERAGRRVVLVDPRMTSQLCSQCGAVVHKTLDPRWHSCECGAELDRDHNSAITILSRGQEVAHKGTLL

SEQ ID NO: 58360 - protein, 422 aa, Natrialba sp.
MEYSPRFRLFPSTTQREGLDWTRDIVRQVYNHALHEFNKIPEGKGTLRQRVWQVRDDLPSLKQQWTDLKQVYSTVLQKAVERIRTNINNLGKLKSKGYDVGSLNWKGPCEYRSFTYRQSGFELDKKSGPRDRAILRLKKVRGDTLEIPIRLHRDLPEHDAIKEVTVKKEPTGAWYASFCISTDEPVKPDVDNIDTEDTVGLDLGVRNFIHDSEGRSIGRLDLADERDRLEREQRSLSRKQYESNNWEKQRRRVAEVHTRMSNKKRDYKHKLAYFYATKYDAVFVEDLNVKSMLEGDGNARNKAEVGWSDFRKILEHHCDKHGTHYVEVPAQGTTKECAKCGAETEKPLWVREHSCPACGFELERDWNAALNVKSRGLEKLGVVHSKATPVETATAVDPITVSASRVVEAGSPCLEEPASAGE

SEQ ID NO: 58361 - protein, 405 aa, Caldicellulosiruptor sp.
MYKTQKNHIRCDKQTYMLLQILCHFSKNLYNYALYHIRQHYFKTRQYLRYESVYHLVKENENYRLLPSQVAQQTLISVDEGFKSFLGLLKAKKEEKTDKKVSIPKYLPKDGMYQIVFPKDQFKVEGDKLRLSLGRNFYREFGIRYLYFELPQNITGKKLKEVRIIPKFHGRWFEIEYVYEEEEQSYNLDKSKYLSIDLGLDNFAAVADTIGTAFLIEGRYIKSVNRWYNKERARLQSIYSKQGIKSGRRLAQISLRRQHIIDNFLNQAVNLIVKHCLSNQIGWVVVGKMKEIKQEINLGKVNNQNFVGIPFEKFKRKLESKCKYYGIGYVEVDESYTSQTCSRCEIIKKSNRKHRGLYVCKDCGYVVNADINGAINILRKVAGESAIRQITSSGCVNHPVRIRVV

SEQ ID NO: 58362 - protein, 586 aa, Bacillus sp.
  misc_feature (424)..(582): Xaa can be any naturally occurring amino acid
MKTTRTCKINSITKEQTEDLITLIRTFESAKRYSFNRLIEGENEKELIKKLQPKYLLNKRFCEDAILQAQTILFSQKELLPVYLENNQKKLEKTLQKIDDYERGKKRPKQVALETCLIGLRKRKQKLEQKIETYAKHIKNKTLPPIIFGGRKNFYERMKDKISNQEWKDLRTRQLYSRGDKSKKGNLNMRITVDDCGQGWLEIANPLGRTNGKTKSPRIKVPIIIPYHFYHQITNVVMGKQIGVNPKGKPIIEHQKYSVEIIRKQNEFYVNITFDETEIGRVLDFKETPQSDVIAGIDVNPDRIAVSLCTKQGNFKGSKIFYLHNLNAFSTNKRATIIGQIVQQIKTWLLENNVGGIVLEDLKFQQSHDTDKYSNRNFHQFTYKKMLNSLIRMSLRNGFSVKTVNPAYTSVIGKLKYSKNFGIXXXXXXXXXXXXXXXXXXXXXXXXXXXXXXXXXXXXXXXXXXXXXXXXXXXXXXXXXXXXXXXXXXXXXXXXXXXXXXXXXXXXXXXXXXXXXXXXXXXXXXXXXXXXXXXXXXXXXXXXXXXXXXXXXXXXXXXXXXXXXXXXXXXXXXXXXXXXXXXTDRS

SEQ ID NO: 58363 - protein, 424 aa, Bacillus sp.
  misc_feature (424)..(424): Xaa can be any naturally occurring amino acid
MKTTRTCKINSITKEQTEDLITLIRTFESAKRYSFNRLIEGENEKELIKKLQPKYLLNKRFCEDAILQAQTILFSQKELLPVYLENNQKKLEKTLQKIDDYERGKKRPKQVALETCLIGLRKRKQKLEQKIETYAKHIKNKTLPPIIFGGRKNFYERMKDKISNQEWKDLRTRQLYSRGDKSKKGNLNMRITVDDCGQGWLEIANPLGRTNGKTKSPRIKVPIIIPYHFYHQITNVVMGKQIGVNPKGKPIIEHQKYSVEIIRKQNEFYVNITFDETEIGRVLDFKETPQSDVIAGIDVNPDRIAVSLCTKQGNFKGSKIFYLHNLNAFSTNKRATIIGQIVQQIKTWLLENNVGGIVLEDLKFQQSHDTDKYSNRNFHQFTYKKMLNSLIRMSLRNGFSVKTVNPAYTSVIGKLKYSKNFGIX

SEQ ID NO: 58364 - protein, 128 aa, Halomonas sp.
MKESNAFLERVLPRAQGLTENPILLREDSGFDSQAHLALLERQRQAFADMGRQLDYKAEWAGRQFVQIDRWYPSSKRCHGCGFVLESLSLDARIWDCPGCGTQGIDRDVNAACNILQAGTALLAGAES

SEQ ID NO: 58365 - protein, 379 aa, unknown
  TnpB Polypeptide
MAGGEYEMLFSYTAKFRLNVSDIDNDCFLSTVQAYTKACSYVSRYVYETHNLKQLSLHKELYFSLRDLFSLRSQQAQSVIRTVIARYRTLLSSKQPWTEIKFKQGEYDLVWNKDYSLKDTVFSVNTLTGRRKVGFYDNDYISQFFDGTWTFGTAKLICRHKKWYLHVPVSKEIDTLQDCDVCNVTGIDLGINFLATAYDSKGKTVFYSGKAVKTKRAHYKNLRRELQQVKTASSRRKLKAIGQRENRWMDDVNHCITKALVESNPTGTMFVLEDLTGIRNATERVRKNDRYVQVSWAFYDFRQKLEYKAKLHGQKVLIVSPKYTSQTCPKCGHVERQNRDRKTHTFCCKTCHYSSNDDRIGAMNLYRKGIEYLSTVVAE

SEQ ID NO: 58366 - protein, 401 aa, Lechevalieria sp.
VRTAYKCRAYPTAEQAAALNRTFGCVRVVWNKTLHERTHRYRNENTRTSYRETDAALTRWRQGEELAFLSEVSCVPLQQTLRHQHTAFQNFFAGRARYPRFKSRTGRQTAHYTRSAFRMRNGSLTLAKTSTPLRFTWSFDDVDVRDIDPTTVTISREPDGRWYVSFAVDIAGTTARPVNHAIGVDLGVKTLLVTSDGEHITNPQHLARKARNLARYQRRLARCQRGSNNRGKAKIKLARAHRKVRNARQDFLHRTTTRLVRSADMIAIEDLSVSGMVRNRHLSRAISDAGWGEFRRQLEYKCERAGRTLVVIDRWYPSSKTCSSCGHLLAELKLSARHWTCPGCRTRHDRDLNAAKNILAAGRAVARGDSGDACGADVRRQGSSLPRSAMKQEARAGKIGS

SEQ ID NO: 58367 - protein, 718 aa, Microcystis sp.
MLNVLKVRIYPNKEQELALAKNFGCVRFVWNYYLNKTNNQYLETGKGMTYCDMAKDLTQLKKQPNFEWLAEATAATLQQSLKNLESAFKNFFSTRTKFPKFKSKHKKQSIRYPESCSIRNNGIKLPKLGVVKAKISQVINGQIKSVTVSKTSTDKYFAAILFEMDDSTTIEKLKISGIDLGLSSLVTVFDGETTYKVDPIKPTRKYAKRLKRRQQALSRKAKGSNNRQKAIKEVAKVHEKIANTRQDFLHKLSRKLCDENQIVVAENLSIKGLARTKLAKSIHDAGFGMLLNFLDYKLEREGGKLVEVDRFYPSTKLCSCCGFKNDLLTLSIREWICPECESHHDRDENAAKNLREEGMRILSTNTDGQSEFQAWGETVRLVGTCTEKRVSVNQESSVTASAWRRECQSYYTADVFSDRIFGGNPLAVFPEASGLTHTQMQKIAAEFNLSETVFVFPPETPQGTKKVRIFTPSTELPFAGHPTVGTAYILALIGAIPPHQETTIYLEEGVGLVPVKILMEGEKPVYSELKVAQLPELVADIYAIDDLAAILSLSVADFLPGYPPRAFSCGLPFLFIPVKNRDILGKIKLNLTLWSSLLGQSPANSLFVCCFDPESPQSRLCGRMFAPGLGVMEDPATGSAVAALAGYLGGLESSREGMNQWTIIQGVEMGRPSIIQLKFQKNNWEITEVSVGGASVLVCQGKMIIPDGETKSDIKRSL

SEQ ID NO: 58368 - protein, 367 aa, unknown
  TnpB Polypeptide
MQIVYKFKLCPSKEQEISLQNTLDICRELYNYMKGLRERYYYNYKYSMSYNEQAKILTFLKTTEEWESLKNIHSQVLQDVLKRLDNAYKRFFQGISGYPKFKSYRHYNSFTFPQVKTMKNPFEKKGFLLIPKIGFVKMKVHRGFNPEKVSTMVIKREIDTWYVCLTCEIEELDIFDKSTFSIKAIGIDLGINHFLALSDGTFVENPKYLRKSEARLKLLQRRLSRKEFGSNNREKARKQLVKLHRKIKNQRRDFLHKVSKFLTDTYNLIVTEALNIKNMVKNHRLAKSISDAGWGILLDYISYKAKLKGKKHEMVNPNGTSQECICGAKVPKDLSVRVHTCPNCGIEEDRDTMSARVILKRSQFALA

SEQ ID NO: 58369 - protein, 504 aa, Streptomyces sp.
VGGLRELAAPFVVPGPSGVAVRDRLKGLTAGDEQVLRLVGDLLGTLASRDLKARCAAGLGHDTERWAERKRTLTPESSSRWAGSVTKATHDQWALARRGQLAHIQSLEAAIATITHRLSLPLGEKGTKQVPGGYRSRREWFAKSRRLQVLEDRLEAARADREAGRVRVVRGGKRLLNTRHHLEAARLTEADWRARWQARRRFLQADGESGKRFGNETIRVSDDGEVSLKLPAPLAHLANAPYGRYVLAARVSFPHRGEQWRDRVTANRAVAYRIHEDTVQGRWYLTASWTIPPVKTVPLEAARAGGLVGVDTNADHLAAWRLDAHGNPVGKPLRFTYDLSGTAEHRDVQVRHALIRLLHWAARHGLSIAIEDLDFTAEKSREKHGGRKRFRKLISGMPISRLRARLVSMAAELGITVVAVDPAYTSKWGAQHWQKPLTSQTRKTTRHDAAAVAIGRRALGHPIRRRTAPPPHDQSDRAGHRTVQAVSVAPGREGNCPSIPGPRT

SEQ ID NO: 58370 - protein, 224 aa, Clostridium sp.
  misc_feature (8)..(134): Xaa can be any naturally occurring amino acid
MVVATGIXXXXXXXXXXXXXXXXXXXXXXXXXXXXXXXXXXXXXXXXXXXXXXXXXXXXXXXXXXXXXXXXXXXXXXXXXXXXXXXXXXXXXXXXXXXXXXXXXXXXXXXXXXXXXXXXXXXXXXXXXXXXXXXMKNKHLSKAIASQKFFELKTKLMSKCKQNNIELRIVDRFYPSSKTCSNCGKVKKDLKLSDRIYKCDCGLTIDRDLNASINLKNAKKYKIA

SEQ ID NO: 58371 - protein, 336 aa, Clostridium sp.
MKKLKRAYKIEINPTDEQKCKIHRTIGVSRFVYNFYIARNKEVYEKEGKFVSGMDFSKWLNNEYIPNNQEMKWIKEVSSKSTKQAIMNADKAFRDFFKKAKGFPRFKKKKNQDVKAYFPKNNKTDWTLERHRVKIPTLGWVRLKEFGYIPKNSVVKSGTVSQKADRYYVSILVEEIDIKTSNSNIDIKIFNHNNEGIGIDLGIKDFAICSNGNKFKNINKTSTIKKVEKNLKREQRKLSRKYESLKIRNKKEKGGNVTRQNIQKQIVKVQKLHQRLTNIRTDYINKIVSSIIKQKPSYITIEDLNVKGMMKNKHLSKAIASQKFFEFKTKLMSKCK

SEQ ID NO: 58372 - protein, 316 aa, Escherichia sp.
VKRLQAFKFQLRPGGQQEREMRRFAGACRFVFNRALALQNENHEAGNKYIPYGKMASWLVEWKNATETQWLKDSPSQPLQQSLKGLERAYKNFFQKRAAFPRFKKRGQNDAFRYPQGVKLDQENSRIFLPKLGWMRYRNSRQVTGVVKNVTVSQSCGKWYISIQTESEVSTPVHPSASMIGLDAGVAKLATLSDGTVFEPVNSFQKNQKTLARLQRQLSRKVKFSNNWQKQKRKIQRLHSCIANIRRDYLHKVTTTVSKNHAMIVIEDLKVSNMSKSAAGTVSLPGRNVRAKSGLNRSILDQGWYEIRRQLEYKQL

SEQ ID NO: 58373 - protein, 589 aa, unknown
  TnpB Polypeptide
MEITRTINADKRYYIDENLIINSDSLVDTEYRFNDMKIQMYNLLYDKKYKNTGILTENTYSKWCKDTFKTSDYYNCAVYTSASGMLSSQNELNKLYIKTKKSDLDARDTKIASTIEQLEKKQAIKESLVIYAKTKKWKTPYSGCQTKMTGKSVSLPGNKKVEVDIYERNIEADIRKLKSRLKLLISARNHMQDKLDCLKKNPPKRIIFGSKKMYSEKDSEDINIEIWKQEFFNKRHASMSLPGRHTSKNCNFLVRKASAADFATRKELDGHKEALIITCMDGKEAILLDFQLSRDNNLWLDALNAKPDDRKPVCYNFQLKCDEKGRLYFIPSVTMVLENTYCNESFEDGCVSIDLNYDHVALTDIDKDGNRISGKVLRFNPENKTSGQISDEIGRIMSKVGQYCEDRKKPLVMEDIDTTISKHGMKYGNAKGNRHASIFAYRKMESCIENQSYRRSFGVIKINPAYTSQIGKILYMRRLGISIHEAASYVIGLKGMGLRDKLTLEEEMAARLTDSLKKELSDGEDIYSLMKVWKYISSKLSGICTHSFYRSIPYEYKKGDGLTKTGKPKKPKSLKAIAAEMKGWTACYY

SEQ ID NO: 58374 - protein, 411 aa, unknown
  TnpB Polypeptide
VTERTAKQRRLQHLIAQLDEIEKRLRAADVSICRGGHQLAKQRHNLDKAGISEEQWRGRWRAARWFLTADGDAEYPLGNGMIQVHPDQHWLELRLPAPLEHLANRPGGRYRLANPVSFSYREDEWAAQVTTGAVRYDIFLNTATGRWYLDASWRTKLVQPPSLEELRQERTLGVDLNADHLACWPIDDSGNPIGQPHTIPLELDGLPASTRHGRLRSAVASLMQVATSNCCQSIAIENLDFAPARQIGRETLGRGRRGKRFRNVIAGIPTSRFRGLVAGMAANRGLWVIAVDPGWTSRWGRRYWLAPLNQTTKSSIIVTGHHAAATVIARRGLGLGARRRPGMPGHDRRIVIGELPARPDTHRPGGEGPGPPSGQRAAVEPCKTRVAEWIRSGDQEVQDRSGSPGDIVLID

SEQ ID NO: 58375 - protein, 405 aa, Proteobacteria sp.
MSKSAAQPPRLSYGVKPPRVRRTRECSHGVVERHGAYCCHVLDNQKQVEHDPAALKLRLNTGQEAHLDTWLFQLTGVWNWAIRKIEQNAKDGIYYRPKAFHNLLAGHSKKLGIPSHTLQGLLDMAHTAWQRCWKKLAKKPRLKGQRNKLASLPFPDPFKAPHGTRLHIPGLGHVRFHAQDIPPGRLTSGRLVKRASGWYLCLFIDAPPNAISPVGDGAIGIDPGFHSLLTLSTGEKIPHPHELRQSAQRLAQAQRGGRKRLTARLHERLANQRQDRNHKLSRRLVAANATIVWSKDNDQALARAFGKSVASAAHAQLRGMLAYKCTASGRQYLEVPSRFSTKTCSACGSLSGPTGYAGLKVRHWVCADCGAAHDRDVHAAINTLHAGVGTTHERRRKVAPGIPRL

SEQ ID NO: 58376 - protein, 385 aa, Proteobacteria sp.
MRKTFKYKLYCSKRSRKLHRQINVGGAIHNHCIALHRRYYRLYKKSLSCFTLNTHLAKLKKRPKYAWWKQLGSQAIQNIAARIDTGYKVFLAHVKARQAGKSARRVGPPTFRKVRNAKSFTLSQAGWKLLDGNRLKIGPTIYKFARSREIAGTVKTVTIKRDPLGDLYVYFSCLVAPQPIDRVMTGKSVGFDFGLTTYLTGSDGTEFQAPQPLKKHLKALAQVNRRLSSKKKGSGNRWRARLHLGRVHKRVANQRHAFHWELAHALCAQYDVMTLETLNLQGMKALWGRKVSDLGFATFVETLHYVASKTGAIIQHISPWFPSTKLCSACGGINQHITLRDRVWTCTDCGTIHQRDVNAAVNIFREGASSPRGIHVSQASACRGC

SEQ ID NO: 58377 - protein, 429 aa, unknown
  TnpB Polypeptide
  misc_feature (420)..(426): Xaa can be any naturally occurring amino acid
MLRRAVAVELEVTKELNKLLHSVETAYLNIVREVVEYAVANNVTGANKLQRLFYSKYRLEYPSLNSQLVIQAIRQSSEIAKSFVERRRKGLVNKPYPEVKAVSIRFTEFTWSYEEFVKSIAPVRIAISLLGGRREVWLRLHKRLWLFWWRVLNGEAELASTLIIKRRLNKWYAIFIFKLKPREEEPKSIISFDINENTVAVGRVDLLTTVNEVTNWNKQYMVPELYAIKTDFGRLARRYERVRNTIIERLKPHFVLPNGKYVNITNTREYRKFVKRLRERDRKVGRVRHVASELTKTPAIIVTEDLGEKPQDEMINGVGKGELRHRIKQTPFKSIEKTVEDKALERGSKLFHVSAYRNSRVCPIHFTKLESTNDWHTLYCPKGHYVDRDYASVVNMMWKTTPEAWSKGVWWDLKREKMDXXXXXXXRSR

SEQ ID NO: 58378 - protein, 242 aa, Desulfosporosinus sp.
MGKKWGGKSVNKAYNFRLYPTKEQERLFAKTFGCVRFVYNKMLGERIELYERFKDDEAKLKKYKSPTPAKYKAEFAWLKEVDSLALANAQMNLQTAYNNFFRDKRIGFPKFKAKHRDKNSYTTNNVNNNIRLEETKIKLPKLGFVKLKQHRYLPGNQIIKSCTISKSSSGNYYVSILVEFFQDVPPISPARENVLGLDFEMKTLYTDSQCERAEYPRFYRKALEKLAREQRKLAKCTQGKQQ

SEQ ID NO: 58379 - protein, 244 aa, Streptomyces sp.
VKLRYQFRVYPSVPQRQDLTRAFGCARVVWNDALRIRQGAHAQGLPRPTAAELSRRVITEAKKTQGRAWLAEVSAVVLQQSLRDLETAFSNFFASVKGARKGPKLGPPRFKKKTSRQAVRFTANSRFCITGDGRLRLPKIGDVRVHWSRELPSAPSSVTVIKDAAGRYFASFTVEVDDKPLPELDMEETDTGIDLGLSTYAVLRGRKIKTPKFFRRQEKKLKRAQRKLSRCAKGSNNAGRPSWP

SEQ ID NO: 58380 - protein, 417 aa, unknown
  TnpB Polypeptide
MVTISVKFKLELTKEQRRKVLDLAKKYRDAFNEVSEYAFNNRVFDHVSLHKAFYYKLKEKYGFQSQIAISVIREVAQHYDNIFNQLAGKIDVPKKNRRKLIELFYKEIGRPIKRKKLIVKLVKRRSYDLKLNPRVCSISVIGERLKKIPYYGWNKHYEYIEKYGYGDAVLYYERSNKLWYLIVSVEVPDKELRPKKVVGVDINEPSNSFVALHDSLGESHLVEFSQHVLKLKTHYHKLRSQLQSKGTRSAKRRLLSLSGVEKRLVRNYLHVVAKKIVVENSPCVFGLEDLTGIREYRENNAKFTGERRRQFSQWCFRELQQLIEYKAKLYGSKVVYVNPQYTSISCPVCGYTDKENRDGKEFNCKNCGFREHADVVGAKNIMLRVLKSLQNGAFVSRPDAPSHNGRSSKLRPSGRGS

SEQ ID NO: 58381 - protein, 417 aa, Lachnospiraceae sp.
MYLTIKQQVKHLSKEDYNNLRELSHTAKNLANEAIYNVRQYYFTEGEYLNYEKNYSLLKNSPNYKKLNSNMAQQILKEVDGSFKSFFGLLKLAKKGKYAFKDCKLPHYLAKDGFTTLVIGFVRLNGNKLILPYSQTYKKTHKYIEITIPPILADKKIKEIRIIPKAKARFFEIQYTYEVIEQSLNLNLDNAIALDLGINNLITAVTNAGKSFIIDGKKLKSINQWYNKQTSKLQSIKDKQHFDKKHTTNRQKTITRNRNNKVNDYMVKTARYIINYCISNDIGTLIVGYNETFQRNTNIGKANNQNFVNIPYGKLRDKLEYLCRLYGITFVKQEESYTSKASFWDKDDIPVYNNDNPKSYSFSGKRIHRGLYQLADGKLINADINGALNIMRKSNVVSLNTLYGRGEVDTPVRIRIA

SEQ ID NO: 58382 - protein, 376 aa, Thermococcus sp.
MLSYRYRLYPSKTIQTRLNEQLGLCRWLYNRLLYELNKARKQGRKITQKDTQSRIVELKKEEKPELKKVYSKVLQMVNYQLWSNIKALSRLKKNGKKIGKLRYKTGNSFKTLNFNQSGFKIENNKLILSKVRAIPIKVHRKIEGKIKGVIIKREKSGKWYAIFQVEDEPKPLPKTGKAIGIDVGLRYFSTDSDGRQIENPRFYEKTLKRIRKLQKDLSRKKKGSKNWEKCRIKLAKTYEKLVNQRDDFLHKLSRFYVNNYDVIVVENLKIRNMVKNHRLSSKILDASWGKFLQMLSYKAERAGRILLKVNPRDTSEGLTFDDPCRDFISANRILARGLGRPFQPVEGRPLLLVTALAVIEGQVSSMKQEAPCVSEG

SEQ ID NO: 58383 - protein, 346 aa, Microbispora sp.
MTSGTTWCVDRGRPTDVEGQRRWSFSSQQATLRRLDKAFVAFFRRVREGRAPGFPRFKGRGWFDMVEWPKDGDGCRWDSQPEHPTATYVRLQGIGHLRVHQHRPVQGRVKTISVKREGTRWYVILSCDDAPAQPLASTGAAVGVDMGVVSLVTTSDGERVNNPRHLEASAQRLAAAQPDLARKKRGSRRRRKAVARVAVLHAKVRRQRVDGAYKAALTLVRSYDVVVHEDLRIANMTRSASGTIERPGRNVAAKSGLNRSILDAGWGVFLRVLAYKAESAGRELIAVNPANTSRTCARCGHCAKDNRLTQAEFVCTACGHTAHADVNAAINILRAGLALRDAAEAA

SEQ ID NO: 58384 - protein, 355 aa, Methanomassiliicoccales sp.
MLLEDELTHYRSEGAKRSKFELNRRMTEISNKHPEIKNGAYSTCRRNVTDRVHRAMRGCRPGKTGRLVHVPRFRSRNRYDSFCYESPQGFEFRGDRLHLPKIGDIRFRHDYHPKGEMRTCTVRRDAKGKWYAVIVYRMDVLGYGKTDLDGRTETGYDLSLRSLVTDSTGEKVDVPDFYKLEKPKIAKIQAKMQKYEPGSPGWEKERVKLASAHQGIQRRRKGFLHKLAHDIVRKNDVIVFEELNVKKMKERPDQGPAVHDRYTEASWGELIRILRPKAEEAGAELILVDPRNTSRTCSGCGNVKADLQLSDRTYQCDCCGMVMDRDQNAAINILRRGLNTQTLRSAVNGRPCRPR

SEQ ID NO: 58385 - protein, 429 aa, Acidimicrobiaceae sp.
LVHVIRLRSHREAIHRTPRGRSKMRRAYKFRVRPTARQHVALGQCLEAQRTLYNAALQERRDAYEVAVRRSPNYFSTQRPKAPVNYGLQSAQLSEIRELVPDQATWSFSSQQATLRELNKAFESFFRRVKSGETPGYPRFKPAHRFDSVLWPKDGDGAKWIPEASRVYLQGIGHVKVTQHRQVEGRVKTIQAKRVGRHWYLILSCDDVAQKPLEHTGAIIGIDVGVANFLTTSDGDFVDNPRYSRVGAGRLTNAQQVLARKQRGSKNRRLARETVANRYRKVANQRRDFHYKVARRLVKEYDVLVVEDLKVANMTRRAKAKPDPENPGQFLPNGASAKTGLNRSINDAGWAQFRSILEAKVEEAGRTVMSVDPRNTSLTCHECSHVDAGNRVSQAEFRCKRCGHEAHADMNAARNILGAGLALLVAQAA

SEQ ID NO: 58386 - protein, 210 aa, Halomonas sp.
VRDRRLIKQFQQRVQRQLVPLDYGHWHTLVDDDGLLLQAKLKRAGHILSSGYLEVSLQSRKQKGSNNRAKAKQKVARRHAKIADARLDHLHKLTRQIVNENQVICAESLAVKNMVKNRSLAKAISDVGWGELVRQLEYKAAWAGRQFVQIDRWYPSSKRCHGCGFVLETLSLDVRTWDCPDCGTQGINRDVNAARNILQAGTALLVGAES

SEQ ID NO: 58387 - protein, 645 aa, Halomonas sp.
MAYGHGNSDSEKRMVSLGVGQLTDAKFHALVQLRDQYLAAANAMMAAVFVSEPLAGVPDKKTLDQALLAIQKDRQGLNKAYVEKARMAVKDHAHEVHGRYLKRLVGKLRHCADEIEGYPGSGRRYYHLDEPLQDTISHAELKALQAKADGWEAALTLYRQVVIDGSSGGLSEAQVAVIRHLHETVQSRYRPPVYGKDETFTCHLHLDYRVVRGLKEGKVLDPLNKAAAWLLHDPANRCYQHFLEVSHPTPRQPPIRIPIHLSEKRLRRLGIDGLETAFKSFVLEISTTDLAVKGVVEKVRPAYTAAQTTANASPAKLGDDDFIALAKALNECDALVGRDFGYANTIALTVLKRERELSADDLRELMVIRHLPQARAKAAMKAWFSSREGRDIEVVTQQCYSGRNFLKAIHEHCAYLDRLSSQIDRLYNKIHALRDIIAGYLGLDKTQRLPQKKAGIQQGFVKSLHQRFFHLLDKVTHLKGKRRQRYRRIAGLKKSWFGYLTNQEIALAKEHNAAMIREDLTVMAVEKTAPDYKGRRFNKMINNGSKGQYIRRASDKLLWNGIPELAMPTPYTSQACLYHQQLGKRQGERFTCPRCEKSRHSDLNAAMNIAGMLLTQWPGNSEKRSSFGKAISSENLVYEKPLPTA

SEQ ID NO: 58388 - protein, 367 aa, unknown
  TnpB Polypeptide
VKVSLSRLASIKGSSANVHTKQRPTEPARAIPEYAQRLYPNRVGSELNQHEVAFSEGLSRKNRHAKEPYTRRLQLVTCYGFKIRNGKLLLPLRHRQSISIPLNAHTTSIISHPGLIPRSITLTESRLAITYAKELVPIYPKGAIALDRNLNNVTSAASDRSIQVFNLARGTEIKELYREIKSHVKRNDRSVRREIFAKYGRKERNRVHQILHQTSKRIVENAKHKQYAVAMEKLTGIRRLYRSGNGQGSEYRARLNSWSFAELQRQIEYKARWEGIPVIYVNPQGTSAKCSICGSRMTRIPEENRTLKCPSCGFTVDRDVNAARNILVAGMRGLRFSPVAPAIEAMVAVKRCQVDAGELTNRHGPAC

SEQ ID NO: 58389 - protein, 394 aa, unknown
  TnpB Polypeptide
MADEDVQSIVLSYKYRLLPTRAQHRALERILEDQRQLYNAALQERIDCYRKTGGGRTYIDQCKAVTEGGGACPAAAETPANLQRWTLKRLDDAYKAFFRRLKKRDGKAGFPRFRGRGRFNSFGFNEFSGIRFDGRRIRFNGLPSGLRVHMHRAMPNGRPLSCTFTRDGKGWSVSFQVRVPCAEKRQSVRSIGIDVGLTSLATLSDGTAFPNPRHAKRAERELRRRQRALARCKRGSNRRNKVRAQVARLHRKVADTRSTHLHQVSADLVRRFDLIAVEKLNVKGMARGMLAKSVHDASWGRLRQFIAYKAEKAGVQLIEVDPRHTSQTCPGCGRVAAKTLAQRTHECDCGCCLDRDHAAARVILGKAAIGLGVHNVADCSERAHVNIICEGIAA

SEQ ID NO: 58390 - protein, 359 aa, unknown
  TnpB Polypeptide
LILTYKIRHGGDFSNELRKAERVANFALKTRTQSSYDVKHLGLKSMISNQILRKYSRNRVLKEIRSVKLTIPSQGVRVLRELRTLIIPCLGLTLNYHYRDDFEKVNQVEVGDEYAYVSVTIPVEKTYEPKGWIGVDRNTTGHIAVVADPETGKVLKLGKSAKHIHDKYRNIRRSLQSHGKYRKVKEIKNRESRVVRDLNNKVSRKIVDAAKSSDKGIKLELLEGIRKTARQVRSFRYALHSWSFYQLERMIEYKAKLLGVPVAYVDPAYTSQTCSRCGQIGDRNGKNFKCSSCGHVEDTDANASFNIAVGQVGVSRSAADRDAVEGSTDTPREATPMSDGDLRTPQVSAVGVCQSTDKV

SEQ ID NO: 58391 - protein, 404 aa, unknown
  TnpB Polypeptide
MMISYKFRLYPSPEQEEKMLEVLDRCRFVYNKMLEGLNQQDGKPNRLELQNSLPKLKEKHPELKEVYSKVLQYESWRLFSNLRSLAGLKKNGKKVGKLRFKGKGWFKTFTYNQSGFKIIKTGKRHDLLNLSKIGNIKIRMHRRVKEGKGEGQEKIKQVTVKRYSSGRWHAFLVCCEQIIPDKKEVEKVVGIDVGIIHYVTDTKGRKVEHPLYLNKSLKSLRRKQRKLSRKKKGSNNYNNKKIKVAKIHERIKNQRDDFLHKLSRFYVNNHDFIAVEKLDIRGLIKVNYNARNITDSSWNRFKQFLSYKAERAGKTVVEVDPRGTTKECYRCGKEVEKSLAVRTHKCPFCGLEIDRDYNSAFVVLKRGLEELLGQGLPEFTPAETEPLPGKIPASSVVETGSSLQ

SEQ ID NO: 58392 - protein, 404 aa, Mycobacteriophage sp.
MLGMRRAYKVRAYPDKAQEAILNRTLGCVRLVWNKTLAERQRRYTVERATTSYKQTDATLTRWKKTKDLAFLNEVSSVPLQQTLRHQHTAFLNFFKGRARYPKFKSRNGKQSAHYTRSAFRMKPDGLWLAKMKSPLRVAWSWDTEMTNLDPTMVVISREPDGRWFATLCVDLPDPEPDTPTGNSVGVDLGITNFATLSTGEKIANPRHLARHERGLRRHQKRLARMKRGSNNRAKQRVKVARKHARVRDARRDFLHKTSTRLVRDNDVVAVEDLNVSGMVRNRSLAKSISSVGWTEFRTMLAYKAEQAGKRLAVIDRWYPSTKTCSSCGHLLATISLGTRHWTCPDCGTRHDRDVNAAKNILVAAGLAETQNACGADARPVRATSRRSAVKQETLDVSPGIPCL

SEQ ID NO: 58393 - protein, 378 aa, unknown
  TnpB Polypeptide
MGVQATMQLKVPHSESIIRTMQEFSKATQYAHDFALKHKIRSWKTLHQQIYADIRKFSKLGSQLCCKAIKTALETKRGCKNRKADFSRELAIQYDQRSYSFDFSGRCSLSTIDGRYKTTLYIPEYYLKTYGDWKITSATLCKHGKELYLNVVVAKDISPAFLGLNSQIVGVDVGINNLATTSDFVFVKGVKSKIAGFQRLRSALQSKGTKSAKRHLNRLRGRQTRFMRSINHEISKRIVSRVDAGDIIIMENLHGIRAKRRGKDLNRLLSNWSFLQLRSFVEYKAVRKGIVFCTISPEYTSKMCNRCHEINSVRPKKAGFFKCLNCGYSCNADLNASFNLRNRVDAWRNALGLPVNQPNVGNHINHLSDKPTTSVVGY

SEQ ID NO: 58394 - protein, 391 aa, unknown
  TnpB Polypeptide
MIKSIKVRLHPNKKQLTKLFQYANCARFAYNWAINREQENYNDGNKFLSDNELRKEFTQLKHQKHDWLKQISNNVTKQAIKDACNAYKLFFKGQCRYPKFKSKKRFKPSFYQDTSKIQFTDTHVKVEGFSMSNKRSKQRLNWIRLCEKGRIPTSCKYMNPRFTYDGLHWYVSVGIEVDDITSVTTTDGVGIDLGIKDLAICSDGNKYPNINKTQRVKKLEKRKRRLQRSISRRYESNKKGERFCKTRNIIKGEHELLKVTKRLTNIRHNHLHQTTSDIIKRKPSFICIEDLNVSGMMKNRHLSKAIQQQGLYKFRRQIEYKSDWNHIPVIVADRFFPSSKLCGCCGGIKKDLKLSDRIYRCDCGNTIDRDFQASLNLKKYGENVLKQKSVK

SEQ ID NO: 58395 - protein, 209 aa, Clostridioides sp.
  misc_feature (171)..(204): Xaa can be any naturally occurring amino acid
MYPNKKQQELINKTFGCCRFVYNKYLAKRIEVYKNDKETFTYKQCSSDLTNLKKELKWLKEPDKFSLQNALKDLDNAYKKFFKEKAGFPKFKSKKINRFSYKTNFTNGNIMYCGQHIKLPKLGMVKIRDKQIPKGRILNATISKEASGRYYVSLCCTDVDIEAFENTNNHXXXXXXXXXXXXXXXXXXXXXXXXXXXXXXXXXXIKQTC

SEQ ID NO: 58396 - protein, 376 aa, Oceanisphaera sp.
MKTKRAFKYRFYPTPEQVALLAQTFGCVRFVYNSILKWRTDAFYEDGESINYNAASARLTALKKEFDWLSEASSVPLQQALRHQQTAFKNFFEGRAKYPVFKKKHRRQSATYASSAFKYRDGQLFIAKSKEPLDVRWSQALPGIPSTITISKDAADRYFVSCLYEVDTQALPVVAKTIGVDLGLKDLFITSDGFKSGNPKYTSKYAAKLAYLQRQLAKKAKGSRNRAKARLRVARLHVKIADCRKDATHKATRRLINENQVVCVESLAVKNMMKCPTLAKAIADANWGEFIRQLVYKGEWAGRSVVQIDRWFPSSKRCPTKGCGYINDTLPLNVRSWSCPSCGTTHDRDVAAAVNIKAVGLAVLASGATGAGVQVV

SEQ ID NO: 58397 - protein, 461 aa, unknown
  TnpB Polypeptide
MSDNTYLSNNTKRDYKAQFQKKAENAARRASMMDIKVFELKIQANHLNQTQKQFLHNVFLEAKWYYNSCIAFGKIEGNKPYKNDYKAKTVVHYDKDKNPIVSEYTCLSAASRQEINKQIGTACKSIKSNLKAGNIKHTKGLSFVSEVNSVAFRQFGHDWKFNGTKIKLLKCKKPLKVFGLEQLNVEGIEFANARLVQKPTGYYIQIACYVPKQERKHNYQTVGVDFGCETSFTTFVEETNESRKLNYCFEQSENEKRVQRLLSRRYSKKFSNRTNKGLRLTKHLRKQKQKRTNQKKDATNKLIFWFKQFETIVIQDEMLSNWQASGHGKKIEKGILGRVKAIIKSLSNVFVLDRSLPTSKYCFDCFHKNENLKVWEREFICPNCGCITDRDVHAAQNMIAFYKLIQMVPMECRDPKRIKRFLIDIEKRVEMNPSRPLDEVIQLAIQGLSTKHEATDGLASW

SEQ ID NO: 58398 - protein, 263 aa, unknown
  TnpB Polypeptide
MGMIFYERCNYKIEDGKLHLSKIGAIRIFQHREIGGKVKTCTIKRDGDQWYASFSVELPDVEKKEIETSVGVDVGITTLATLSDGTEIENPKTLDKYDSKVKKAHRDLSRKKKESSNRNKQKIVLAGMYRKVRNARKDYLHKTSRILADAYDQIVFEDLQIKNMVKNHHFARSIHDASWSMLINFTTYKVEYTGGAVELVNPRNTSKQCSVCGSIQPMPLSQRTYRCSGCGAVMGRDQNAAINIKNRYVPADCGELTPVEMVV

SEQ ID NO: 58399 - protein, 314 aa, Enterococcus sp.
LKEIDSLALANAQLNLDKAYKNFFRDKSVGFPRFKSKKNPVQSYTTNNQNGTVALIDSKFIKVPKLKSLVRIKLHRQPKGIIKSATISRHSSGKYYISLLCKEEVRELPKSNSAVGIDLGIIDFAILSTGQKFDNNKFTSKMEKKLKREQRKLSRRALLAKQKGINLFEARNYQTQKRKVARLHEKVMNQRTDFLNKLSTEIIKNHDIICIEDLNTKGMLRNHKLAKSISDVSWSSFVSKLQYKADWYGRKIIKVDKWFPSSQICSNCGHKDGKKSLEIREWTCPICHTHHDRDINASINILTEGLRLHSMGLA

SEQ ID NO: 58400 - protein, 385 aa, unknown
  TnpB Polypeptide
LNRTFGCVRKVWNETLNARQQRYATQRKGTSYAQTDRALTAMKKDPALAFLNEVSSVPLQQTLRHQNQAFAAFFAKRARYPRFKSRHARQSAHYTRSAFAVRGGELQLAKACGPLRFIWSWPNVDVAALNPSMVVVSREPDGRWYVTFAIDAEVPEPLPLAGRTVGVDLGVRDFAVTSDGDRIANPRLLERKARGLARYQRRLARRHKGSANRAKAKAKVARAHRKVRDARRDFVHRASTRLVSRNDVIVIEDLNVRGMVRNRHLARAISDCGWGEFRRQLDYKCQRYGRQLVVIDRWYPSSKTCSVCGHLLAELSLSTRTWQCPSCGARHDRDVNAAKNILAAGQAVTACGADVRHSGTSRVQSAVKQEPWPATAGIPIPRGGE

SEQ ID NO: 58401 - protein, 360 aa, Calothrix sp.
LLDVDPTGDNWLHRQYRKYYIPGHTYKRNQIVYQGQGYTCTRINRHSVKLEVYGLNARERIVLICRSRQIIRGQIRLIRSEQNQLAIHSTRTRSYNSTHAEPTETIGVDKGYTEGFYTSYGEKIADGIGKLMTAKTLRITQTNKNRYRIRCYAFRIENTEISKRIWQNNLGYKVKSKKIKKEKATIQNFIRRDLRRVIKKPLIICAEDLTSPIKNKNNSKATNRKLNQWMKGELQVSLEQIAKERGCIVKAVNPAYSSQTDSVTRTLLGSRIGDSFIRYTGDEIQADHNASKEIEFRGSDSDLLVGMKTQEVLEVLLDRTIRYLHSMGKTVQDALNLGWLLPKFRTAALRLERKNYHLQG

SEQ ID NO: 58402 - protein, 413 aa, unknown
  TnpB Polypeptide
MRLSLKFYPKLSQEQLNIIEELSFHTTKLYNIANYENVSHGYRFYVDMQSYLKDNWHREYLHSHTYQQCLKVLEQDWKSFFSASKDYNKNPNKYSGKPQMPWYKNGTRKNQVIFTNFAIRSKGNTIILSLSQKMQKLFGVKSLNLILPKSVLERMNKSLHQIRCCWDISKKIWYMIIICKQEEVKLPEDYFNTMAIDLGLDNLCACTFLHSEEQYLLSGKSLKSKNSYYNKEIARLTRIQMKGTGSKNFKRTNKMKTLQIKRNNTMNDGLHKASKYVVDLAITHKCHTIVIGDIKGIKKENNSKSFVQIPIQRMVTLIKYKAELNGIKIELINEAYTSGVSAFDLEPIDKASYNIKRRINRGLFVSEGGHYVNSDINGSLNIMRKYESKVLPMPIRRLRDNGCLDQPVRILIA

SEQ ID NO: 58403 - protein, 397 aa, Streptomyces sp.
MARYRLCPTSDQVEVLCRHCAHARFVWNLAVEQHSWWTPRRGPAPGYVAQARQLTEARAVYPWLAAGSQTVQQQALRDFAQAMTNFFRRTHRRPTWRKAGRQEGFRVVAVKPGDVRRLSRKVGEVKVPKVGRVRFRWSRAVPEGVKSYRITWDRAGRWHVAFAAVPDPVPAPGNGAVVGVDRGVTVSAALSTGELLHAPRLREGEARRLVLLQRRLARCKRGSNRRRKVRSAIARLKARDADRRRDSVEKTTTRLAAGFDVIGIEDLDVRGMTASAKGTVEAPGTQVRQRAGLNRGILRSGWGALAARLEDKAPGRVVRVDPAFSSQGCSACGIVDREARESQAVFRCRACGHTANADVNAARNIKSAAGRAVAAREGPCMSGPVHREPQSDLLLSA

SEQ ID NO: 58404 - protein, 383 aa, unknown
  TnpB Polypeptide
VFRAYKFRLWTNVNQERELEIALETHRRLYNSALAQRRWFYDEWQISRSYSDQSGWFKDERESNLWFAHINFSSAQATLRRLDKAFQNFFRRVKAGQEPGYPRFKAADRFNSILFPSHGDGIRLKGNKLRVQHVGTIRVCLHREVEGTIKTLSLKREADKWFVVVTCDLPDLAKVGNVLPAVGLDVGLTHFVTTSEGEKIANPRFLKEELPKLRRAQRSVARKKKRSNNRKKAKRRVARIHARVANLRREHQYKVSNDLISRYGKVAVESLNVQGMVKNRRLARAISDVGWSGFIDVLTHKAERAGGELVQVSSNNTSQLCSACGMKVPKTLSVRVHRCGCGLVLDRDVNAARNILERARPGTGRWSITLPLGDVLQEAVCFS

SEQ ID NO: 58405 - protein, 409 aa, unknown
  TnpB Polypeptide
MSLPVRVRATARVEAAAPEGGEALLVEFLRTYRDAVQLVIDEIWEQGKALSIKKLHAVFYEKLRRLGFRAHHVSEIYKRAREVVEATKKNKGSKPVLRRLTARISTYDYRIDFNTKTFRVAVLNGQRVELNLKWYSYLDKYLDGSWRLGEVQVGYRSGKIVIYLTFNREVKLREPKTVMGVDINFNNITYTVIDLNSNLVSMGIIPFKGLSKALHLKRLAEELQKRYPKSWRFLKWVRRARARWLKRARNILLDSSHYIAKKIVEIAKEYSAIIVLEDLEKLRERANGGKLSWELQLWCYRRIQAYTEYKVLVEGIKVVYVDPRGTSKTSPNRKPLVFINYRFAELGNTITTRDVIASWNLALRGLMQMRGSRVKWSPDSPVDAGMRTRPNTENPGAEKYLQVFTDNYK

SEQ ID NO: 58406 - protein, 563 aa, Streptomyces sp.
MRDLYGGCSLGVVTGSSSRVGVGGLREVAAPLVVPGPTGVATRTSLKGLTGQDEKVLRLVGGLLGSLASRDLKARCVAGLDHHTDQWTQRKRVLTQDSSSRWAGSITKATHDQWALARRGQLAHIQNLQAGIDVIARRLSLPVGAKGSKGAPGGYRSRQEWFAKSRRLHLLEDQLERERADREAGRVRVVRGGRKLLRNRHDLEAARLTATQWRQRWEARRWFLQADGESGKGCGNETIRVTADGEVSIKLPAPLAGLANRPHGRYVLACRVRFRHRGREWVDRVSANRAVAYRIHYDVGRGRWYLTASWQTPPVETVPLEAARAGGLVGVDMNADHLAAWRLDAHGNPVGNPRRFDYDLTGSAPHRDAQVRHALIRLLHWAGRHHLAIAIEDLDFRAETTREKHGRRKRFRKLISGMPVSKLRAHLVSMAAELGITIVAVDPAYTSRWGAQHWQKPMTCKTRKTTRHDAAAVAIGRRALGCPIRRRTQPPLHDQSDRAGHRSVQAASGIPGREGTRPRTPGPRTRSAGAGYGAKAGDQCAHNRSGHTAEHESWQQDSLPLSP

SEQ ID NO: 58407 - protein, 364 aa, Vibrio sp.
MLLAHKIEIRPTKEQKQFFEQACGSSRHLYNNLVDHFSQEGVKWSKKEARQFYYASRDNFPWYSELSSEIFQSTINNLEVGFKKFFKTKVGFPKFHKKGVKDSFSITQAPKFRVEGRNLYIEKFNKGRKGKPITLRENLRFTGKPKQLTISNKAGRWFASILVEVESGYNLKQAEDETSIGIDLGIKTLVTTSDGESIGKSDKLSKQLKKLAKLQQKMAKQKKGSNRRAKTKLKIQKLFYYVSCQKQALLHSVSGYLTSRYKTICMEDLDVKGMLEKGNKSLSRMIADVGMYEFRRQVEYKSFLRGGDVKFVDRYFPSSKMCSCCGNIKEDLKLSDRTYRCDCRLEIDRDLNAAINILNQGSIK

SEQ ID NO: 58408 - protein, 392 aa, unknown
  TnpB Polypeptide
MLKGFKTELRVTKQHIAKIHQSIGVCRFLYNSYLAKNKELYKLFENGEIDKKSAFMSANDFDKYINNEVKVLDEFKWIDNCGSKARKKSILNAEIAYKRFFKGQSKFPRFKKKKNQDVKIYFPKNNETDWTVERHRIKIPTLGFVQIKEKGYIPTNAKVVSGTVSMKAGRYYVSVLCDIADHNDYSDVNNEGIGIDLGIKDLATVSNIDTPFKNINKTIDVRKLKKKLRRLQRQVSRKYEMNKDGKKFIKTKNIIKLEAQIRTIYQKLSNIRLNYAHQITNTLVKSKPEYITIEDLNVKGMMKNRNLSKAIAEQSFHEFRRQLTYKCLWNNIELRVVDRWFPSSKICSECGSIDKDLKLSDREYICKECGIILDRDKNASINLKNAQEYKVA

SEQ ID NO: 58409 - protein, 378 aa, Chloroflexaceae sp.
MNATLSTRTICCKVALDSVADAMVHATQQAFNRAATYCASVAWEQGVTNKNKLHHLVYGATRAEFGLGAQLACCARDKAAEAVRAARSTGSDTCPVFGADSSIRYDARTYRLMSLDRVSLNTVHGRVVGQLVLGDYQRRHLYDTTWKIGSAELLRRANVWYLHITQTKANPAPDEPTGVLGVDLGIVNLATDSDGETFSGEQVKHVRERRFRHRQRLQTANTRRARWRLRQLAGKEARFQRQVNHTISKRLVQKAKQQRKALALEDLKGIRARATVRRSQRRQHANWAFHQLRQFVSYKAQCDGVRVSFVDPRYTSRTCSACGHCDKANRKTQDQFLCGACGYQANADVNAAVNISRAAVNQPIVSASPVGAGYKLPA

SEQ ID NO: 58410 - protein, 419 aa, unknown
  TnpB Polypeptide
MADSVVTRTYKARIRNQQQVCGDLNSLGFAASKLWNVGRWTIQRVWDAIGLIPDATDLCAYLKHHDRYVDLHSQSSQRVLQELTEAFRGWYGDDSTEANPPGYRKSGDEHPRSTVTFKQKGFKVDAKHGYVRLSKGRALKTHRGDFILCSYETRPDADLGTVESVQQVRAVWTGDVWELHFVCRVANERTNPPGEHSAGVDLGICNTAAVSFGDETLLYPGNALKEDRHYFRQVEYDTEGEDGLSARAEWARMKKARRQRHFLHTLSKDVIEQCAERGVETLAVGHPKHVRADGDWGRHGNKRLHDWAFETLIGYLEYKAEEYGINVERVDEAGLKTSKTCCRCDTVAASHRAERGLYVCEECGLVANADLNAAENMRTTVTPSPTEDRSNGCLAQPAVRLFDKQTGQVAPREQVACKP

SEQ ID NO: 58411 - protein, 331 aa, Mycobacterium sp.
VVVGRLRGVSRYRLCPTPAQEAGLLEHCSHARFVWNLAVEQLAWWTPRRGPAPGYVAQARQLTEARAAFGWLAAGSVTVQQQALRDFAQAMANFFAGTHRRPTWRKAGVHEGFRAVGVRGRAWEVRRLSRRTGEVRVPKVGWVRFRWSRPVPPDVKSFRVTRDRAGRWHVAFAAIPDPVPAPGNGAVVGVDRGVAVSAALSTGETCTVPGLTPGEVERLKRLLRRLARARRGSNRRARVKAAIARLEAREGDRRRDWVEKTSTDLARRFDVIAVEDLDVAAMTRSAKGTIAAPGVNVRQKAGLNRGILAARGGTPSGGPVNREPQPALLPA

SEQ ID NO: 58412 - protein, 388 aa, Enhydrobacter sp.
  misc_feature (285)..(324): Xaa can be any naturally occurring amino acid
MKTLKLRIRDKHADQLNRLSGSVNFVWNYVNDLSYRHLQKTGKFFSAYDLNDYTKGSGELLGLHSQTIQAINETHAKSRKQFKKAKLSWRTNNPNSKRKSLGWLPFKQSAIKHIATHQTGKKGLKSTLQLSLAKGQKLIIDLWDSYNLSLYQINTLEVVQDSRNRWYACITVKDYPKQSCGTGSVGIDLGLKESATTSNGDKLQIKQTLKYAKALATAQRAKNKQRVKAIHAKIKNTRQDLIHKFTTQLVKDNALIVVGDVKTNQFNNKKGKLAKSVYDAGWFEXXXXXXXXXXXXXXXXXXXXXXXXXXXXXXXXXXXXXXXXERYTTQRCSCCGDITDNSPKGRTSLGIREWTCASCGTWHDRDINASKNILAVGLDRLAEEIPER

SEQ ID NO: 58413 - protein, 390 aa, unknown
  TnpB Polypeptide
MIRGLKYRLYPNPEQEVLLAKAFGCARHSYNWSIEQRRTAYANGEKTPSRFDLNVRMTQHKRELPWLSYVSDWVLKEAIADAVRAYDNFFAHRAKFPRFKSKRDSEQSARWRQPTHKGKNHVMIPKVGVMRFREHRPVEGTIKSVTITKSSSGRYHVSFLVDDGVDCVPKPDVVTSSVGVDVGIADFVTLSTGEKVANPRLSKAREGRIKGLQRKLTRQVKGSNRYKETKRKLAREHERLACERRAFLHELSTRLVRENQAIAVEDLNVSGMLRNHSLAGAISDASWGEFFRMLEYKCEWYGVHLMKCGRFEPTSKTCSECGHRMGRMPLSVRSWVCPECGTIHDRDVNAAKNILSAASVEYGRGGQVSPRLQQRGTARRSVKPPASAVG

SEQ ID NO: 58414 - protein, 367 aa, unknown
  TnpB Polypeptide
VKLTLQLQILPTSDQASDLLTTMERFNAGASFAAKVGFEAGVHGQVPIHNLCYREIRERFGLSAQLAVRAIAKAVECFQRDKTVCPVFKPNGATCYDQRVLSFKGLTTVSLWTIAGRILVPFVCGEYQKERQGRIKGQADLVHRDGKFYLLCTIDVQESAPEEPSDVIGVDLGIVNIATDSTGETFTGDQVEKTRKHYARYRAGLNRRGTKSARRRLSKIRKREANFRRNENHRISKQIVAKAKATGSAIALEDLKGMRDRVSVKKPQRNRHAGWSFLQLRSFVSYKATLAGVALILIDPRNTSRTCNACGHCEKANRKTQSEFECRQCGHSANADLNAARNIRAKALVKVPMVGSVEAKAGLRNCG

SEQ ID NO: 58415 - protein, 458 aa, Escherichia sp.
  misc_feature (156)..(159): Xaa can be any naturally occurring amino acid
  misc_feature (279)..(282): Xaa can be any naturally occurring amino acid
VKRLQAFKFQLRPGGQQECEMRRFAGACRFVFNRALARQNENHEAGNKYIPYGKMASWLVEWKNATETQWLKDSPSQPLQQSLKDLERAYKNFFRKRAAFPRFKKRGQNDAFRYPQGVKLDQENSRIFLPKLGWMRYRNSRQVTGVVKNVTVSQSXXXXLGWMRYRNSRQVTGVVKNVTVSQSCGKWYISIQTESEVSTPVHPSASMVGLDAGVAKLATLSDGTVFEPVNSFQKNQKKLARLQRQLSRKVKFSNNWQKQERKIQRLHSRIANIRRDYLXXXXNWQKQKRKIQRLHSCIANIRRDYLHKVTTAVSKNHAMIVIEDLKVSNMSKSAAGTVSQPGRNVRAKSGLNRTILDQGWYEMRRQLEYKQLWRGGQVLAVPPAYTSQRCACCGHTAKENRLSQSKFRCQACGYTANADVNGARNILAAGHAVLACGEMVQSGRSLKQEPTEMIQATA

SEQ ID NO: 58416 - protein, 402 aa, Blautia sp.
MDKTAYYAVTVRKFSVLSRHRGRMEKTQELYNEILGFYYRLYLDTLPETGSGSMETMRSLEKMTIVGRNREPVPYPLPWKKVPLYFRRAAINGAVAAARSYLARDAQKEESRNFTESVTFYKGMYRDFSENGISLKLWDGDSWKWTRLRLRGNEVPEEGQMMSPALVLREKKTELHIPWKTPVSDGRNAKERMKAGENICSAVFTNRDACVVCCILDSDGKTTDSLFLKGGTEYSHQCGHYLEKLKKSQASKGAGNNPRGNAKYWEKLKNISDNYAHQISRQVIDYCKKNHVGILVLPYFEQNHRNIIMHSSGRYSPIYLSTSVREKLKYKAWQAGIVVLEAQQHKISSVCSICGSEIRQSGTEFFCEKGHRGNRYLNTARNLGLKCLNDFQSKQKSEHENR

SEQ ID NO: 58417 - protein, 518 aa, unknown
  TnpB Polypeptide
MSNAKAMVTTYRHATDANAGKSTALLDLFPAFREALGGLQSVTRRELLGGLPLLKWRLMPEGSLGFSHQLSSRQMKSAQNMVYEAVASWRSNLENRVREFITGSELPDLRKAVLYRINARNSWWNTTLSLPWEVDPATGELIHISEKRAEDNPSAVWLEVDAEELALARQMARRAQRDWRFPDLRGVNTLKLDSIVAKATEATTATHKGAVGWWVQVATLTSGKPARIPLLRNTYFERRRTAAIDAGGKICGAVQLHLVRNNHQQPAGVELSLLLETPTTAPRTTGQSVGADFGVSSALFALSTGDLLGTATLARLRELDAILTPYAADLQRRGVSLKTDARYRALQKRISDYATNEIGRLLNQIAARRGKAAVRELVTEKLDFRGGGLSRRMNRIITRTGRGVLKTRLKTLTGKYGIAVTEVPSPWTSCECSGCGYTAKNNRSGRKFRCRFCGLKLHADVNASRVIQSRRSRLTPEHTGPRSRKITFQLLDSRHRQRWKLPTEGTVPGIAGALERSA

SEQ ID NO: 58418 - protein, 369 aa, unknown
  TnpB Polypeptide
MAVKHKAYKFRLYPNQTQKVLFAKTFGSSRAIWNMMLEDKITYYKETGKSLRNTPAQYKKDFPWLKEVDSYALCNVQLNLEKAYKNFFQHGAGFPKFKKKSHHQSYKTNSVNGNIALVNGAIKLPKAGWVKVKTHRDIEGVIKSATISMTATGKYYVSISCETDITPLPKTGSNVGIDLGISDFAILSTGEKVGNPRLFNQLSQKLAKEQRSLSRKALAAKKAGRKLSDSKNYQKQRVKVAEIHEKIANKRRDFLHKLSTAIVKNHDIICTEDLSSKNLMKNHKLAKAIGDASWAEFMQMLGYKADWYEKQVSKISRWYPSSQLCSDCGYSSGKKPLNVREWTCANCGSHHDRDINASINILIEGLRHV

SEQ ID NO: 58419 - protein, 217 aa, unknown
  TnpB Polypeptide
MGVKRFATLSNGEFFEPISPFKREQEKLAKLQRKLARQKKGSRNSRKTKRKIARLYRHIADSRRDFLHKTSTQIAQNHSTVFVEDLKVSNMSASAAGTKENPGKKVKQKRGLNRSILDQGWYGFFQMLSYKLERKGGKLIKVDSRNTSRTCPQCGYVSAENRKTQASFACVHCGYHANADLVGAINVLRAGRARLACGKSGAVRPLSAGTQRDLLQH

SEQ ID NO: 58420 - protein, 420 aa, Oscillatoriales sp.
MLVFEAKLEGTKQQYDRLDEAIRTARFVRNSCIRYWMENQGVGRYELSAYCAVLAKEFPWAGQLNSMARQASAERAWRAISRFYDNCKKAKPGKKGFPRFKKHQTHGSVEYKTTGWKLSQDRRTIDFTDGFAAGSFKLWGTRNLHFYQLKQIKRVRVVRRADGYYCQFCIECERREQRELTGKTVGIDVGLTHFYTDSNGHTVDNPRHLRKSEKTLKRLARKLSRTQLGSKNRIKARNRLSRKHLKVSRQRKDFAIKQALCAVQSNDLVAYEDLQVRNMVKNKKLSKSISDAAWSAFRWWLEYFGKVFGVATVAVSPHYTSQRCSNCGAIVKKSLSQRTHRCPDCGHVQDRDWNAAINILELALRTVGHTGTNASGDIDLCIGGETPQCKSSRRKRKLQEQSWNPHLSKMGRMSNSSLVS

SEQ ID NO: 58421 - protein, 476 aa, unknown
  TnpB Polypeptide
VTGAGNRYVLTSKGKKKNSNLNEHVFIFVRKRRKDEDSIQLWRRIAKTEYSDPPDTGYLSHCGQLPDGDLCADMDELAVITEPKKRFNTAEHLVHTTKKNQAKFAFDLRFPKMPSYLRRAAIQHALGSVSSYKTRLELWEKTDQKGGRPKLGCSDHAMPVFYRDVMYREDTEEKDRAYLKLFDGHDWKWFRVSFSHTDMEYLRKYWAGKRTAAPVLEKRHRKYFLRFSYTEEVPLTKAPVKEQIICSVDLGINTDAVCTIMRSDGIVLGRKFIDFPSEKDRMYRVLGRIRRFQREHGPVQVKSRWAYAKRLNTELGRKIAGAVAGYAEENHADVIVFEYLETKGKISGRKKQKLHLWRKRDIQIRCEHQAHRRGMRISRICAWNTSRLACDGSGTVVRDPGNHSLCTFQNGKRYNCDLSASYNIGARYFIRELLKPLPATERSLLEAKVPSVKRRISCVYADLRELFSEMELLRAA

SEQ ID NO: 58422 - protein, 379 aa, Thiomonas sp.
MDVKRAYRFRFYPTPAQEIILAQTFGCARFAYNHMLRLRSDAWLQRQERVGYHATSAALTALKKTPEHAWLNDVSSVPVQQALRHLNTAFSNFFAKRAKYPTFKRKDGPQSAEYTTSAFRWDADRRELRLAKMDEALDIRWSRTLPKAAKLSTVTVSKDSAGRYFASLLCDDAVAPKPEVAGKVGIDLGLSHFAILSTGEKIASPKTFRKNEARLAKWQRRLKKKKLGSKNRAKVKRQVARVHAHITDARRDFLHKLSTRLISENQVIAVETLSVSNMQRNHCLAKSISDAGWSEFVRQLEYKAQWYGRTLMGIDRWYPSSKTCSVCGHVQGKMPLSVREWTCSECGTHHDRDVNAARNVLAAGLAVSAHGEAVSPVLL

SEQ ID NO: 58423 - protein, 433 aa, unknown
  TnpB Polypeptide
MQLAERHIIKSTENRFVEIDRLAFKSKNLYNAANYVIRQSFVYGWGYISYNEMNRLMKYHQAYKDLPAKVSQQILMILDKNWKSFFEAVKTYKIEPNKFTGRPKLPKYKDKVKDRNILVYTIQAISSKELKKGIIKLSGTNISIKTLVKQEQICQVRLVPKCDSYVIEVIYNACAERSRSKPESTAIASPKEAIASIDLGLNNLVALTSNQPGFVPVLINGRPLKSINQFYNKRKARLQSQLKGNRQTSSRIQRLTRCRHQKVDNYLHHSSRQIINLLASQKIGTLVIGKNLQWKNEIDLGKKTNQNFVSIPHARLIEMLKYKAELMGIQVIEQEESYTSRSNFLNLDPIPVYGNIRTLDVTFTGNRIKRGLYKTSSGRLINADVNGSYNILRKAIPNAFSDGIESCVVQPRRVNPLEVKAKGEGLNASHVMQ

SEQ ID NO: 58424 - protein, 305 aa, unknown
  TnpB Polypeptide
MTYMKPDTGYMKEALASDQRVKYCRIVRRTLKGVRRWFVQLVVEGLPPVRKVYASKCEVVGIDPGSSRIAYFHERHAAIVEVAPHVDLKEPKIRLLQRRIDRSRRANNPDGTVKKGFVDLEHKQSRTQDGGTIKIEKNNYRSFQRCFGRSTNRRGMGEFVEHLKRKAESAGCEVIEHNAYKLKMSQYDPQTDAYRKKPLKERWPRWGNTGTLVQRDSMSAFPACHATEKGHDRALLLEKWTTAEALLSGSGLCRHEPCSDPEVSKDASRLTKPNCGSKAERERGLPRTLCTDGDVQAALPPERAV

SEQ ID NO: 58425 - protein, 395 aa, unknown
  TnpB Polypeptide
MPTYKTYQLRAYATDAGYDRIDALMRQCAHLYNAALEERISGYQKTGQLISLYEQYGSLTEIRKADPLGYGAFSVTVSRGVLIRLDNAMKRFFARCKQGETPGFPRFRPSNRYKTLELKETTSSMVRAHGKRTHLKIKGLPTLTVRPTGLPSGDQLKTLSITRRHRRLYVNLTYVLESVELPETHQAVGIDLGITDRLVCSDGVVYPRRVINAEKIKRIQRRLSRCKKGSIRFKQHKRMLSNLHERERIRNRNACHRITTDIVQRNDVIVMEDLKITNMTQSAKGTRDKPGKQVKAKSGLNREINNQSWGLLQVQMAYKAEKAGRLFLKINPRHTSQSCSVCGMVDPSSRKGKRYGCTSCGQVMDADLNASINLLNRGLATLPGGNIPGAVASAA

SEQ ID NO: 58426 - protein, 394 aa, unknown
  TnpB Polypeptide
LWQQYQKIQKNKLEGIFKIRKESEVKSVEKAYKYRIYPNKQQEELIQKTFGCCRFVYNTYLAKRIKLYEESKKSLSYVQCANDMKKLKSELEWLKEVDSTALQSSLKDLDAAYQKFFKEHSGYPKFKSKKTHKFSYKSKCTNGNIQYCDKHIKLPKRGMIKTKNKLVPQGRILNATVSQESSGKYYVSLCCTDVDIKPLKQTGNSVGLDLGIKEFCITSDGEMIENHKYLKKSLAKLAKVQRELSRKSKGGSNRNKARIKVARLQEHIANQRKDFLQKLSTEIIKNNDVICLEDLQVSNMMKNHRLARSIADVSWSEFVRQLEYKANWYGRQIIKVDKFYASSQTCNVCGYVNKETKDLSVREWDCPCCNSHHDRDINAAINILNEGLRLLKVA

SEQ ID NO: 58427 - protein, 432 aa, unknown
  TnpB Polypeptide
VPVGQRQGRVRGYATHAQRFAKQGRLQHLKAKLAEVDGLLAMGHVSICRGGRRLAQHRHALEETGLSEPEWRSRWQAERLFLTADGEAVKPWGNETIRVHPDQRWCEIKLPAPLAHLANRSHGRYRLACSVVFTHRGDEWVAQAATGAVRYDISYDSDKARWYLDASWRRSATVPPSLDDLRRTRTLGIDLNAGHLDVWVIDPNGNPVGSPHTIPLKLDGQPASVRDGHLRAAITSVLRLATVHSCRSLIVEDLDFADARQNGRETMGYGRRGKQFRRIVAGIPTRRFRTMLVGMAASRRLWVIAADPGWTSRWGQRYWLTSLNESTKPTITVNVHHAAAVVIGRRGLGLRARRRHGVPSHDRRIVAGELPARPDPPPGRQGPDPPGGQRAAALPQKTRPAERSGIGDQVFQDRLGSPGDGTQPRLSQGAVE

SEQ ID NO: 58428 - protein, 670 aa, unknown
  TnpB Polypeptide
MAMTCKTDLRVNISGLIIKQGMPRVKPGTSPPVTNRQLEEHDNEDDLVVDDTDDCTDVFVANAIVKMKLNSFSTKKQLNTKIRNIVLDMNQVLGEAYTFANFHLLRILHKKKEFPDVVIPVIDRNFYYRCIVAIGLNKCRGSTLDNELEESKKCFDLLRDPNIPKVVLSGHIQVLADLSISMTTMAKNHLWLNIAKRLLQFLSWSQPTMKPPMRKRIVDAILYKPTVPLTKLFPNKDPKEQEGLVVATELRAILTLTTSKQQGSSAHLLIPLYFHILEKTVEAKKVTATGKKFAGRTFTLLPMKNGYTINNIQFSTMALLGYIKAVKLEKFQGDGRDVDASKMLRKYFNVNLIETKHRIFGNRITTDGVAVSIFIKKKCALICPNKCPCEKKLSDLVKRSVLERDNPKHVRVVSADPGFTDVAVTRDHYGNTNSYSSAKYYEKALYNMSRRRINKWNETTVELTRAIPCPETDSFQEFRDFTKSYLLNLVAILKHRFDKGYRNMRFLRYTSKNIAINEICEMIAPRDEMNVVGFGNWNGGKGTPIKRRCAGPLQEIKLQLDKMKNTALLSIDEYLTSQTCSNCENKLSNMKAQHYTYKKVDGKMSKVDKGIEHIHKILHCRSRQVGKSSQKTPSCGTTWNRDVNASINILNLTFLLMQGLPRPKAMTRKC

SEQ ID NO: 58429 - protein, 387 aa, unknown
  TnpB Polypeptide
MEYKTYNIELQMSDETRQHWMNLLSETRDAFNRCATLVTSSDIKLGLVPVHNLCYDTLRTEFPNIPSQGIIRVQKSVLAALRSIRSNKHKDADIPQKKSLSLQLDKRMYSNLSVDGICLSNGNSHKREKCTFVLYDKIRELFDTCTFSDPTVFARDNRLFLSVPFEVATPPLKGDKALGVDLGMKRLFVTSDGQYYTDKEYLKRRRKLRYLKRCLQSKGTRSAKKHLARVKRKERNLSKDMLNRATNALLTCNASIYVLEDLKKIKYKTSRTKEGFKRIRHNNALSQVPLAEFREMLTHKATLVGRQVVSVSPTWTSQTDCRTGKRDGERHGCRYYCNDGIVFDADWNAAVNIAQRANHPTSTILPIDGKMQALVGKAQSASSTSRT

SEQ ID NO: 58430 - protein, 379 aa, unknown
  TnpB Polypeptide
MYPSSKQKIKLINNLKICKSAYNNLLATSIDAYKFGKVSLTKFDYDAIIKGYSSDTHSQVIQNVSDRVNKAFKNFFRRVKDKSCKQKGFPRFKSRVNSITFPQSGFKLLSDKKLKLSKIGSIPIILHRIPKGKIKTLTIKQNKAGQWFACFSCELPDVKIKHQSTERVGIDVGIENFATISNGEFITNPRHLVKSEKRLKLLQRRLSRKIKGSKNRNKARFKVARLHNKIANQRADFLHKLSSRLTKSYSFIAVEDLNIKGMVRNHCLAKHISDVSWGTFINMLSYKAVRCGGQIISGNPRNTSKECCVCGTIVEMPLSKRKFLCPYCGSSLHRDLNASHNILKVGTDCAKLNACGDSASTTESVASGIVEAGTINDTV

SEQ ID NO: 58431 - protein, 157 aa, unknown
  TnpB Polypeptide
LAREQKVLSRRNINSSNWHKQKYKVARLHEKIANIRKNYLHEVSTEIIKNHDVIGIETLRVKNMLKNGKLAKSISDASWSTFKTMVEYKAKWYGKEVISVAPTFPSSQLCSVCGVQNPLLKDLSVRQWVCPNCSVEHDRDYNATVNIYNRVRETLVA

SEQ ID NO: 58432 - protein, 394 aa, Chloroflexi sp.
MKYKRAYKYWFYPTDEQKGILARTFGCARYIFNWGLRKRTDAYYKLGIRLYYDDLSALLTELKKQDDHTWLNEVSAVPLQQSLRHLDRAYVNFFEGRARYPTFKKKYGPQAATYASNAFTWDGQRLTLAKMEKSLDIHWSRSLPGGYKPTTVTVTKDCADRYFVSLLFEEEMDSKPVINKQVVLDLGLTSMVVLSTGEAIGNPRYFHRDEKKLAQAQHRLSKKKKGSRNREKAHRIVARIHAHIADRRRDYQHKLSTRIVNENQVICVESLVVKNMVKNHNLAKAIHDVGWGEFVRQLEYKSQWSGRTFVQIDKWYPSSKRCCACGHVVEDLPLEIRVWTCPECRVVHDRDHNAANNVLAAGLAVSACGEAVRPGAVKAASGKPRRSRKAYSRG

SEQ ID NO: 58433 - protein, 323 aa, unknown
  TnpB Polypeptide
MLKAENQSYWLDRETGRLRIPIRGTVGLQVILPLSEWHRSFLRNPSWKLGSLTVVPGRITVALRRAPPKAYEPLSAEAFDTNEDSLDGIVAERDAVMAVTVPFGGVRRVQATHFRRRRRIAKKKAHDWRVARRLLRAEGRRERHRVLQRLHQVSKRVVASAKARRAAIVLEDLTLLGAGGRSHRMNRRLSSWPRGELHRQIEYKAALAGVPVIKVNPAWTSKTCPVCGARRRDRVGQDFVCSVCDWEMDRQHNAACNILLSALASHEALARAVRFRPGALRDDVVSPLYDLSALPASAREEPSGVESQTVPSAPCWNRTRIYP

SEQ ID NO: 58434 - protein, 537 aa, unknown
  TnpB Polypeptide
MAKVKTDSFIVEIPLRITPPEEKCLLARLEAARQVYNACLGESLKRLALLRQSKAYQAAQKMPRGRTGKGATRKQREMAKARTRAFREANAAVGFREYDLHAYATQFNHCWLGEHLDINTIQKLATRAFKAVQQHSFGKRGRPRFKGKNQMDSVEGKSNASGIRWRETCVEWLGLKLKAIIDTDDPVIAHGLAASVKYVRIVRRKLKGRNRFYVQLVCEGKPYRKPKNQLGEGDVGLDLGPSTIAAVAEQGAFLERFCDELIPRQREIRRLQRQIDRQRRANNPDCYDEKGRAIKGKRPRKKSARQQKMETKLTELHRKQAAHRKSLHGQTANRVLRMGNVFKLEKLSYLAFQRQYGCSVGMRAPGMFVELLKRKAASAGAEVIEFPTRTTRLSQTCHNCGTVKKKSLSQRWHKCDCGVEAQRDLYSAFLATCVEGDRLNADRAKAAWSGVDALLRAALSQAAQRAAARQRRAQAASGRTTPLVSGTPSSFGLGQRQSGSSVESGVKSSKTQDVVPPSSLAVGELERARRIVRTPGL

SEQ ID NO: 58435 - protein, 408 aa, Burkholderiales sp.
MKRLQAYKYELKPNGQQLRDMRRFSGSCRFVFNKALALQKTNHEAGNKFIGYVAMAKLLTAWRNSTDTAWLSLAPVHPLQHALKDLERAYKNFFAKRADFPRFKKKGMGDSFRYPDAKQFKIDAGNSRVFLPKLGWIRYRNSQNMLGTAKNITVSSNGGKWFVSIQTEREIEQPLPTSTTAIGIDVGIARFATMSDGRFIAPLNSFKKHQQRLAKYQRRMSRKVKFSSNWKKAKARVQKIHSDIANARKDYLHKASTTISQNHALVCIEDLQVRNMSKSSKGNSEQHGKMVKQKSGLNRSILDQGWGEFRRQLEYKVSWNGGILLAVPPHNTSRTCPCCGHIAKENRITQAVFLCVDCGYENNADVVGAINVLARGYRVLACGELAQSGRSVKQEPAEATQADFACAQ

SEQ ID NO: 58436 - protein, 572 aa, unknown
  TnpB Polypeptide
MTMKRRLNRMPRTRTPSFIAEIPLQATGSQEQTLEVRFRMAQQAHNACLGEALRRLDLMRERTAYQAARKLPAGNARRDAFRDLRSLFAFSAYGLHAWATHYVSHTVLGDHLDVNTIQTIATRAFRAVEQYGFGVRGRPRFKGQNQIDSVEGKGNKQGLRWKEGALVWGDLTLTGLIPPNLSSDPSSNPVLAHGLTHPIKYVQLIRRRLNGRVRFFAQLVCAGQAYRKAQHIVREGVVGIDPGPRTFGVAGPDWGAQVDLQTPLTQSRQVIRRLQRKIDRQRRTNNPTNYNPTGTVKKGKLEWVISKGRRRNQVTLAEMHRKATAHRTSLHGRVAHAILSRGSTIVIERNSYTSFQKTYGTSVGTAAPATFVAHLTRLAESAGGSVVRVPAMLRLSQTCLCGTIRKKLLSERVHHCDCGITVQRDVWSAWLARFVVATLTKKGTGRGKAGKDLVTWRLDAEAAHAAWARLPGSDAGLPAASHPLSPERFAALVGRWGKREPASGRAVRCAHVVAGEVVSRVVASELVAGNARLKTREATDAVALVQLSLFSEDGVSRESRGKLVRRRESHGL

SEQ ID NO: 58437 - protein, 329 aa, unknown
  TnpB Polypeptide
MIKDQMVVSSYKLRLYPTKSQENKLNDTIEICRILYNDFIFESHLAYKEGYKIKFDELQRMIPAMIPKDKLYSKVAQMVLWQFYNNLKTLSALTKRGKRTGNLRFKSKSRFRSINYNQSGFKFLPDNKIKFSKIGKIKCVIHRKIQGKIKEIHVKKELTGDWYAIVVCENELKSTCSLFRKKIVGIDVGINNFVYDSDGHVIKHPQLLRKSEKKLKRSQRKLSKKIKNSNNRWKQKLNLARIHQKIKNQRNDFLHKTSRYYVDNYDTIFVEDLRIQNMKKNHHLAKSISDSSWNSFFQKLEYKAARAGILFKKFHHITQVRSVLCVITL

SEQ ID NO: 58438 - protein, 210 aa, Microcystis sp.
LGAYCLEIVYEQPSSSSQEGERYAFIDLGLNNLAAVTSNIPEFQPTLVCGKALKSCNQKYNKTLAKLKSELPSLQKTSKRIQGLTLKRNCQVDYYLHTASKYIIDKLLAHQINLLVIGHNQGGQQNINIGDRNNQSFVNIPHSRFIEQLTYKANLVGIEVKTTNESYTSKCSFLDLESIQKQKSYLGKRIKRGLFRSSSGWKKGSRRGRL

SEQ ID NO: 58439 - protein, 469 aa, unknown
  TnpB Polypeptide
MSISCWIWTRSLAFIGWFACSKAGPLASCDRSFRRSRVGCPPSGPIGTLSARWVAPLGPSSSSISRRRRMSRKAFQYRLYPTKQQEQHLLFVLRRCRELYNTALEQRRAFYQMRRKSLSYSAQAAELAEIKAAYPAYQDIYSQVLQDVLRRLDKAFAAFFRRFKHGEKPGFPRFQGQGRYDSFTYPQSGFALASWQGTGKERYATLSLSKIGDLKVRLHRPMIGQVKTCTIKRDVNHWYVTFSCEVEEEPLPPCEEAVGIDLGLLHFATLSTGETIENPRHYRTGLKRLKLLQQAKDRKKRGSRRRKRAAIALAKAHRKVRNQRKDFHHKAARSLVNRFGLIVFEALNILTMSKAPAPKPDPDKEGAYLPNGASAKAGLTTSILDAGWGQFQQFCVAKAASAGRRVLFVDPSNTSQLCSGCGRLVPKDLDVRWHSCPYPDCGAELDRDHNSARTILFRGQEVAHRATAL

SEQ ID NO: 58440 - protein, 645 aa, unknown
  TnpB Polypeptide
MEKKQKKPVKGILELQKQLELLVCTPIHFVNMLKKVRLKALQHLPDKRDLIDKIWKNLLILLYLLKKYKKMIKSIIYMPEFQVKNKWMTLNDKLITLNKDDQNTVHIQLLAILLQELILKEKDLKPFWTPVYKELSEKLLSPIEIDCVDLDSNSLILSSKKVEVKSSFLTTTSKKVQNMNYQKTYYQLSTSTVVNKWEKEVINQDNNHLKSLKIKLKPRDVQKKMFNEWFNTTNYIYNKTIETIKNGHKKNPISLRNLLVTDETRTKNILYNVNLKKLKELNNDKIILEKKINEKNKRINSDFLFIKEQLINDMIKDLKTKQKNIPLEKNNNINTWELKTPKNIREGAVNDVCKSYKTGFTNLKNGNIKFFNIKYRKNNKQEKSFLISKDMIKNKNGIIEIAPSYFKKEGISCKFKMGKRTIKKNKDLKINNDCRIVKQCENYYLIVPVPMIFEEKKTPLNYCGIDPGVRTFMTCFNNNGYSEYDYDINYLKKLDNKISLLKNKRINKRIKKRKLSKIERKKDHLIDQLHWITINDLLKKNDILFYGDIKSHDVVKNGKYKTLNRDMNNLKFFKFKQRLIFKAFEKQKMIFEVKEPYTTKTCSFCGVLNNPGKSKIYECHSCNKKMGRDINASKNMLLKGIINYL

SEQ ID NO: 58441 - protein, 551 aa, Rhizobium sp.
LSAKASVLAKGKKRERPPIYRCDKLPTFMNAGKQQLVREMLDRWRRAAVATAAIQWRCFFENGKFDPFFDPATAHRKATVAVRTGLLLQIGMHFGQTVDPAKAGARRRLPEMAPGLVDCLAQMKQDLGPAQVQMVREQVLGSLNSYVSNRVNDFRSIVLASTVDEITRHMLLVINKARAWFDLQRKIVVEGIEVPARIRHLARKIMAHVISRNRFPRMGGINMMVDQRIAKLEASTTASNHDLWLRLTVAKGVKIDIPLKGFEYFSKRLGERAKSFQIIEDRDDGKFYVGVMTNVAEPFEKSRESYVASVKTDALALDFGLTTMFATDQGDLLGRGFKAKLQSMDRTMSAIASHVQRSGRKPRSSKRYCAWVAKVRGFIKTEINRVINRLIDVKRPSKLYLEKLNFQSPGMSAWMNRMIQNCGRSVLSVKLKAIKQQFGVEATEVASAYTSQTCSCCGYTDKRNRSAQKFQCRFCGNRMHADVNASRNVGSERFRFFGSPTPGFRQRILDTLVSQHVERYTRERGAPSDPRKSNPYFAGKAIEARLSSRVA

SEQ ID NO: 58442 - protein, 413 aa, Gemmatimonadetes sp.
MPYLTIKARLRGAPERFAILRDAMLSVTKVYNGLIFHLRQEYEQQGKACYSASHLNRIARGLPRHKELYSDVVDTTRQEVGWAFGSFFQKHKRDKKARPPGFRKKMCLSPLRYSHPNNGSIKVIHKRGITYLRISLGTTRQDGIRRLVFRLHTRPNVDLSQLKNVQIIYDTHTRDFQARLVVGVDVPDKQQGEASVGVDIGEDWLIAADFCDGAQYLVCGRELKATRRYWQKVRAKVKPPSQDHPVMSRRYRQIARKEARQITHALHIASRRFVDVCADKGVGTIILGDLTGIRQHIAYGTRMNQRLHAWPYAKLRALIEYKAALLGIKVKVVCEKYTSQTCPHCGIRKKSNRKHRGWYSCRCGFEGQADLVGAFNIHRKVSGVPSSGRSARPVVLVFDHHTVHEAASSREAA

SEQ ID NO: 58443 - protein, 433 aa, Bifidobacterium sp.
MLEAVKVALDPTPAQERLLLSHAGAARFAYNAGLAHVKEMLEAREKPEWSLYALRRWWNVNKDMLAVGSDGTPWWRENSKEAYNSGLEALAAALSNWSKSREGQRRGRRMGFPKFKSKGRTTPRFAYTTGSFGLIDRDSKALRLPRIGRVHCMENIAERVGGARVLRMTVSRRAGRWYAALTVEREYRTPARPPKGGAVGVDLGVKSLATLSDGTTIANPHTLKANERRLKRAQRSLSRRQPGSHRRAHARERVVRLHARVANQRRDTLNKLTTWLADTYSDIGIEDLNVAGMVRNHRLAKAIEDASFAELRRQLEYKTMRTGARLHVIDRWHPSSKLCSNCGSVKTKLSLGERTYHCGTCGLVIDRDLNAAINIQVAGSAPETLNAHGGDGRRNDASRRATQTPVKCEPSSHASGVRLGADDRKTVLQTKTN

SEQ ID NO: 58444 - protein, 415 aa, unknown
  TnpB Polypeptide
  misc_feature (308)..(308): Xaa can be any naturally occurring amino acid
MEVTKTIKAKLVGLTNVKKEALESEYANYQKALLLSKQLVEELKITSLKQAGGLLYNEDSEYSLKHSAKLYSATYQMAFKKALHTRGKSRRENPLRLRNDTFDVKRFPSKIATYWAKIPIYCNRGGVKVALRMSPKHEELLADPHIKTCDSELLKQGDNFFIHITVKKCVDTTPKRPGKLAVISIDAGIRNTATSVVWRDSRIHGVKMHSGKKLKHRVKQMKARLGKCHRTAFNHNSYHCVEKALDRETVLGQKLNNYTKDYLHKLSSEIVAKALELRSQGYNVLIACENLKHIRKGISGKLHWWAFXQLLDFVKYKAEWEGIAYLEVEPANTSRICPKCGNYDKNNRKAIAFKCTECEYNANADLVGATNVARRSLGSCELHAYGNGQHESAQEVALTTPQAMMSKQTRRYSDF

SEQ ID NO: 58445 - protein, 385 aa, Lactobacillus sp.
MVKGGAIMVLKGVKLRIYPNAEQQLKIKLNFGYNLFVWNQMLTMMIQRHENNPQAPFLNAFALNNLLPALKIQYPWLKEAESTSLQSTNHDLMEAYKRFFRNHKGFPKFKSRKYPKQSYQSKMGIRMIDSSYLRLPKLGVVRYKCGRKISGKIKSATIRLSATKKFYAILLLDTDIKQLDKTNQSVGIDLGVSDLMITSDGEKYPTVRFDKLMADRKRHWERKLARRRRLAEKEIAWDRHNQVLEPRTLADFKNYQKAKTMVAKYNEKIANQRNNYLQQLTKQLVTNYDVIKIEDLKAKNLIRNHKLARAIANQSWRKLRLQLEYKCAWYGKELRIVSPYKTSQICSHCDYDDGQHSLEIREWTCPQCHMHHDRDINAAKNILTA

SEQ ID NO: 58446 - protein, 283 aa, Streptomonospora sp.
MRARLRISAFAPRRGGGDRRITAVKIVVQAKLVPDAAQASALSATLRTLNEAANRVSAVAFEHGVPREYELRKHTYADLRSQGLGAQAAQHTIKKVRDAYTTLAANIRAAGHLGTPGSKRRRNAESAPISFRPEAAHPFDDRCLSWQYDQRTVSIWTTAGRLKNVRFACAPDALKMLIEHRQGESDLVERDGVFYLMATCEVAEAEQYEPDGFIGVDLGIANIATTSTGYRAAGRGLNRHRRRQAALRAELQAKRTKSAKRRLKTRRRREARHAANTNPPSRS

SEQ ID NO: 58447 - protein, 212 aa, Streptomonospora sp.
VKLVVQVKLVPDAAQASALSATLRTLNEAANRVSAVAFEHGVPREYELRKHTYADLRAQGLGAQAAQHTIKKVRDAYTTLAADIRAGHLGKPGSKRRHKAESAPVAFRPEAAHPFDDRCLSWQYDQRTVSIWTTAGRLKNVRFACSPEALEMLVEHSQGESDLVERGGVFYLMATCEVPEAEQYEPDGFIGVDLGIANIATTSTVTGRPGGA

SEQ ID NO: 58448 - protein, 375 aa, Streptomonospora sp.
VPDAAQASALSATLRTLNEAANRVSAVAFDLGVPRTSCASTPTPTCAPKVWAPRRPSTPSRRSATPTRRWRPISGPATSAHPVRSAAATPSPRRSPSGPRPPHPFDDRCLSWQYDQQRVSIWTTAGRLKNVGFACAPEALKTLIEHRQGESDLVERDGVFYLMATCEVPEAEQYEPDGFIGVDLGIANIATTSTGYRAAGRGLNRHRKRQAALRTKLQAKKTTSAKRRLKKRNRRERRDVANTNHVIAKQIVTEAERTSSGIALEDLTGIRQRVRLCRPQRVAIHSWAFARLAAFITYKAKRAGVPLVSVDPAYTSRECAECRYIDTRNRVDQARFVCRSCGVVAHADRNASRAIARRGEAAWNAGRESRVPAAP

SEQ ID NO: 58449 - protein, 469 aa, Streptomonospora sp.
VNGAHHQAYLFALDAAPEQEQALSSHAGAARFAYNWGLARVKANLTRRAAERTYGLDEADLTPGLNWSAYSLRKDWNTAKHEAAPWWGENSKEAYSCGLANLAQALKNWSASRAGKRTGKKTGFPKFKSKRSRKSFRITTGAFGLAPGDNRHVKLPRIGVVRTHESTRKLARHLARGSARILAATVSFQRGRWHVSFTVEKRTPAPAPATGGAVGVDLGVKHLAVLSTGEAVDNPEHLDRAQRKMRRAQRRAARRTGPDRRTGQTPSNRWRKARAAADRLHTKTANARRDGLHKLTTRLTNAFSTIVIEDLNVAGMAANRSLARAVSDTGMGELRRQLEYETAWSGRHLVVADRWFPSSKTCNDCGAVKAKLRLSERTFTCEACGMVADRDANAAADLADLAEVAEVAEVASSPGCGARINEPLETHVSPPLVAMGTATGRPRPVGRGQRSAARRRLRTRFHTFPERHR

SEQ ID NO: 58450 - protein, 266 aa, Streptomonospora sp.
LSWRYDQRTVSVWTTAGRLKNVGFACAPEALKMLVEHRQGDSDLVERGGVFYLMATCEVAEAEQYAPEGFIGVDLGIANIATTSTGYRAAGRGLNRHRRRQAALRAELQAKKTTSAKRRLKTRRRREARHVANTNHVIAKQIVTEAERTSSGIALEDLTGIRQRVRLCRPQRVAIHSWAFARLAAFIAYKAKRAGVPLVSVDPAYTSRECAECHHIDTRNRLDRARFVCRSCGVVAHADRNASRNLARRGEAAWNAGRASRVPAAP

SEQ ID NO: 58451 - protein, 385 aa, Streptomonospora sp.
VQLVVQAKLMPDAAQASAPASTLRTLNEAANRVSAVAFDLGVPREYELRKHTYADLRAQGLGAQAAQHTIKKVRDAYTTLAATIRAGHLGKPGSKRRRNAESAPVAFRPEAAHPFDDRCLSWRYDQRTVSIWTTAGRLKNVGFACSSEALEMLVEHRRGESDLVERDGVFYLMATCEVPEAEQYAPAGFIGVDLGIANIATTSTGYRAAGRGLNRHRKRQAALRAKLQAKKTTSAKRRLKKRNRRERRDVANTNHVIAKQIVTEAERTSAGIALEDLTGIRQRVRLCRPQRVAIHSWAFARLAAFIAYKAKRAGVPLVSVDPAYTSRECAERHHIDTRNRLDRARFVCRSCGVVAHADRNASRAIARRGEDAWNAGRASRVPAAP

SEQ ID NO: 58452 - protein, 559 aa, Streptomonospora sp.
MLVAGHLQYAFHRTGRRVAQRLPAPGGARDGGDALVRGETGDPPRQETTNAPRRGGLSGESRWRVVVSTITAVATPPGSRRAGSADFSEEPRLCRAGRNRFSSRPRPECEHACGYRRSAPIGAAVIVGSPLCSSSCRPNSCPMPHRRPRRPPPCAPSTRPPTGSRRWPSTSACRASTSCASTPTPTCALKDWALRRPSTPSRRSATPTPRWRPTSGPATSAHPVRSAAATPSPRRSPSGPRPPHPFDDRCLSWQYDQQTVSIWTTAGRLKNVGFACAPEALKTLIEHRQGESDLVERDGVFYLMATCEVPEAQQYEPDGFIGVDLGIANIATTSTGYRAAGRGLNRHRKRQAALRAKLQAKKTKSAKRRLKKRNRRERRHVANTNHTIAKQIVTEAERTSAGIALEDLTGIRQRVRLCRPQRVAIHSWAFARLAAFIAYKAKRAGVPLVSVDPAYTSQECAERHHIDTRNRLDRARFVCRSWGRCPRRPQRFPHHRPPGRGRVECGACVTRPCRPVSNRGVWTEEPTRQPVGRLPPSPALQGCPEGPGQVDRHPSSGAT

SEQ ID NO: 58453 - protein, 384 aa, Streptomonospora sp.
VGFACAPEALKMLVEHRQGDSDLVERGGVFYLMATCEVAEAEQYAPEGFIGVDLGIANIATTSTGYRAAGRGLNRHRKRQAALRAKLQAKRTKSAKRRLKKRNRRERRHVANTNHVIAKQIVTEAERTSAGIALEDLTGIRQRVRLCRPQRVAIHSWAFARLAAFIAYKAKRAGVPLVQVDPAYTSRECAECRYIDKRNRVAQARFVCRSWGRCPRRPQRFPHHRRTRRGCVECGACVTRPCRPIRGVWTEEPTRQPVGRLPPSPALQGSFRARVKLTIDLALDEGVAEIPEPQWVESRADADSEGGGSEAGSRGGDSGADSGIESIWVPILIVVGVVLFIRFVVWGASGGRSPRHRGGVIGGGGGAGGGAGGAGGGCGGGGGG

SEQ ID NO: 58454 - protein, 349 aa, Streptomonospora sp.
LGIANIATTSAGYRAAGRGLNRHRKRQAALRAKLQAKKTESAKRRLKKRNRRERRDVANTNHVIAKQIVTEAERASAGIALEDLTGIRQRVRLCRPQRVALHSWAFARLAAFIAYKAKRAGVPLVSVDPAYTSRECAECHHIDTRNRLDRARFVCRSWGRCPRRPQCFPHHRPPGRGCVECGACVTRPCRPVAGVSGRRSPPAGQAGRYLQARPSGLLQGPGQVDCRSSSRLPSSLRSDATRSASKRPSALPASRAQPGASSVCVQPGGQSATASSRSGNPATTSSALTWASPKLRSPGVSMIQPSSNGSATAEVEVCRPRPVTGLTSPTERSASGTSRFTRVDLPTPE

SEQ ID NO: 58455 - protein, 198 aa, Streptomonospora sp.
MNRTGSSGIASIATTSTGYRAAGRGLNRHRKRQAALRAELQAKKTESAKRRLKKRNRRERRHVANTNHTIAKQIVTEAERTSSGIALEDLTGIRQRVRLRRPQRVALHSWAFARLAAFIAYKAKRAGVPLVQVDPAYTSRECAERHHIDTRNRLDRARFVCRSCGVVAHADRNASRNLARRGEDAWNAGRESRVPAAP

SEQ ID NO: 58456 - protein, 333 aa, Streptomonospora sp.
VPDAAQASALSATLRTLNEAANRVSAVAFDLGVPREYELRKHTYADLRSQGLGAQAAQHTIKKVRDAYTTLAATIRAGHLGTPGSKRRRNAESAPISFRPQAAHPFDDRCLSWQHDQQTVSIWTTAGRLKNVGFACAPEALKMLVEHRQGESDLVERDGVFYLMATCEVAEAEQYEPDGFIGVDLGIANIATTSTGYRAAASPALQGCPEGPGQVDPKSTFSPRCSAMASDEVAAGEGALRTQATRPWVSIAKSSSSSPLRVSACARTPAGAGRRSAAVTAGTRRRAWRANTVVEAETAISRAPMVQCRRASRQNPGEDRVSAKSRGSTSRSR

SEQ ID NO: 58457 - protein, 264 aa, Streptomonospora sp.
MRIVVQVRLMPTPGVASALECTLRTANDAANWLSGQAHERGETSRKALQGFAYLDLKERGLSAQPALHVLRKVADAYSTLKANIRAGNLGKPGSKRRWKAEAKPITFRDDAAQPYDDRCLSWQVDEQTVSIWSTSGRIRGVRFACSEQARKLLAEHRKGESDLVHRDGMWFLIATCEVPEAEQYEPDGFIGVDLGIANIATASTGYQAAGRGLNRHRKRQLDLRAKLQKKRTKSAKRLLKARPQRGAAYRERQPHDLEEDRDRG

SEQ ID NO: 58458 - protein, 223 aa, Streptomonospora sp.
LSWRYDQRTVSVWTTAGRLKNVGFACAPEALKMLVEHRQGDSDLVERGGVFYLMATCEVAEAEQYSPEGFIGVDLGIANIATTSTGYRAAGRGLNRHRKRQAALRAELQAKKTTSAKRRLKTRRRREARHVANTNHVIAKQIVTEAERTSAGIALEDLTGICDAVAHGSGVRPAPRHRRAGRVDLRRGRLCHPARFQPRFPTCQRNTPGRVPFSAPNVMTGNT

SEQ ID NO: 58459 - protein, 386 aa, Cyanobacteria sp.
MRKAIKVRLYPNSQQEQLLAQSFGNCRWLWNYGLNLINQTYKETGKGLSSYDIKKQIPSLKKEYEWLKLTYSQCLQQVCINLNTAFTNFFQKRAKYPKFKSKHGKQSIQYPQNVEVKENSLKFPKLGEIKAVIHRPIKGSVKTVTISKNTCGEYYASILVEDGKEQPPPHLRSGYIFPSGGEREGGKAVGIDLGLNHFVITSDGEKSDNPRWMDRHEKNLKIKQQQLSRKQKGSKNRGKARKKVAKVHKKVASCREDFLHKLSRSLVEENQVIAVENLNVKGMVKNHNLAKAISQVGWGMFCTMLKYKAEQEGKMYVEVDRFFPSSKTCNVCLNQVDSLPLDVRSWTCSNCKTTHDRDINAAINIRDEGLRIISCGTRDDSLVRQG

SEQ ID NO: 58460 - protein, 295 aa, unknown
  TnpB Polypeptide
MPKQSKVQCKSDRGGLAGDLRMIPRGNSFIIELTYQKKEEKEPVLLDRDEGAFIDLGVNNFAAIVTTKSGEKPILVKSGFLKSINQSYNKRAAELRSKGYKKHLESVTFKRQRRIDDAIHKISRGIVDYCAAQDIGRIFTGRNKNWKQSTQMGRRNNQNFVNIPHAKLIEQLRYKGEAFGIEVVEVMEDYTAKASAVDYDPIPEYEAGKKRGPFSGKRILRGLYRTKDGKIINADINGAINIGRKGLGDGWLKKLLGLDEGVFVNTPTVIRTLYGERKPLEFGVRPKEAAAVSLR

SEQ ID NO: 58461 - protein, 374 aa, unknown
  TnpB Polypeptide
METYTLGYKFRIYPDKEQTELINRTLGCCRFVYNHFLAVRRDQWQTNHKSIGYLETARLLTDLKKREETSWLKEVDSMALQESLRNLDRAFQNFFKLHTGYPHFKSKHSHSQSYRTRNQSNGVRIVGNKIKLPKIGFVKVKQSRAFDGRVLFATVSRAASGKYYVSLCVEQDKEKLVHPNKGGQIGIDVGLKAFYTDSSGNTVENPHTLKKLLVKLKREQCRLSRKMSKSQNRDKARIRLARVHERIANIRKDFLHKQTTRLARENQTVAVEHLNVKGMLKNHRLAQAISDVGWSEFFRQLAYKTELHGGELLEVETFYPSSQTCFACGCQNKLVKDLNVRDWVCPVCGEYHDRDHNAARNILRHALASKAGTA

SEQ ID NO: 58462 - protein, 383 aa, Thermofilum sp.
MADPRGNGKLAVEGFRVLRFRAELPEELKDFIERVYQPRASMRYWQKLLGLGNEELEEAWKAVPWAYRDAFDNIVQPRMPKRRSYLRFPLLSWTLKRTGVNLQGGELVVRVYGKAYRIPLPERGIKWLQSQEDACRDSGGRLTRYVAVKVDGQVSVVLHCSHSLGVEELLESLDAIAVVDVNSSHGFYLFAYDLRSGGFRIRRFKIPKVNWRRIKELQHKAVKSRSPGAWATARCTLRKAYRRRRAALLRAVAEATKELRGKRAIVFVDVPFDESLRNNGLQRTLRSFARRLENALGFHGILAIERTLPSKRCPLCGGKLEEAERRGETRVMRCMECNMEFERDSVPALHALKLFLGEAEVEELAEKLARHYRLQSSQRLQGD

SEQ ID NO: 58463 - protein, 228 aa, Okeania sp.
MADNYILSLTKPWVSMTWKKSIKTTITIKFYIHSSAQQILRTVAESFRSYYSIIKAYSSGKISDKPRIPNYRKKGGMATVSYPKQALKLKDNQIRVPLGNTCKRWFGIDCFLIPMPSIRAFSTLKELRILPINRCFTQEFVYEKEVVVKPQLNQDNVLGIDHGVNNWLACVSNVGTSLILDGKHLKSMNRWYNKQVSTIKENQPLGFWSNRLASITEKRNRQMRFGYK

SEQ ID NO: 58464 - protein, 284 aa, Salinicoccus sp.
MDLNKAYTNFFRDKSVGLPKFKSKHSDRASYTTNSQNGSVRIEDGKVKLPKIGFVKFKQHRFFEGIIKSATISMTKTGKFFVSILVNQGEEKWIPAKNKIGIDLGLEHFAIMTNDEMISNKIDNPRFLRKSEEKFKKAQRALSRKNIGSKNREKAKLILAKKHEKIANQRKNFLHKLSKQIVDENQVIVVETLKSNNMMKNHKVAKSIADVSWYAFVRQLEYKSNFYGRMLIKADPWYASTQICSTCGVKGEKKTMDVREWTCACGAHHDRDINASINLLMLAN

SEQ ID NO: 58465 - protein, 376 aa, unknown
  TnpB Polypeptide
MANKAIKYRLYPITEQAIMCTKTFGCCRKVYNLMLSDKIEGYKLTGKFPTVTPAKYKKDYPYLKEVDSLALANKYMDLQSAFRNRFSKSRKKNTGFPKFKSGKHSRKSYTTNNQKGTVAIIDDKYIKLPKIGLIKAVIHRIPDNNWIIKSATVSQESDGKYYVSVLFKYNNSVNTYVADKTNAIGLDYASDGLYVDNNGNIGTNHKYYRESHKKLAKAQHRLSRMRGSKKHEIKSNNYLKQLCKVNKIHRHIANQRLDNLHKISTKIANLYDVVCVESLNMKSMSNKGFGNGKATMDNGYGMFLLMFKYKLSDRNKYFVKVDKWFPSSQICHCCGDLHPKMKNLTIRKMICSCGVVINRDQNAAINILNEGLRLLS

SEQ ID NO: 58466 - protein, 410 aa, unknown
  TnpB Polypeptide
MHKAYEFRIKPTKSQEVLLNKTFGCVRFVWNKHVAAFNSFGVEGPVQQVTSKRLKDTDAFSFLNEVSAAALQQKERDFEEFKKQFFNKNRKKKIERPKFKKRGHNDSYRLPNQKFSLDQTSSRIRLEKIGHVKIILDRIIQSNVKFLNVTVSKTRTNEYYVSILVDEQIDVKPNTGRSIGIDLGFIDLLTCSTGLVISNPRWFRESQAKLGRTQKHLSRKQRGSKRYEKQRLKVAKQHQKVTRQRNWYLHQVSSYLVNNFDTIVMEDLNITGMKKLFGKSASDAGLSTLVYQIAYKSNWYGRTFHKIDRFYPSSKICSCCGTKTSFGLDVREWKCSTCNTVHDRDLNASINILKRGLQDLYDYTSAELIEVVTRNSNEYERGEDIRLKDRALHSLVATSMKRLTDFYEFV

SEQ ID NO: 58467 - protein, 411 aa, unknown
  TnpB Polypeptide
MRYRYRVEPSPVQQQMLARVFGSCRVVFNDALRVREEAYRNGLKLSNSSIQRRVITVAKTTAERAWLVEVPSVALVQSVNDSHRVWRNFFDSHTGKRRRRVGRPRMKSKKDHRQSFRLTRNGFTVRPNGRLFLAKVGEVRIRWSRDLPSDPSSVTIIREPDGHFYASFVVDVEPTPLRALETEAGVDLGITRLATIAANDGARTDVANPKYLTRKLRKLRRLEREKCRRQKGSNNRNKTRQKVAMAHDEVARSRLDYQHKQALALIRKNQVIYVEDLNIAGMVRNRQLARSISDAGWGQFVRIIGEKADRYGRTVHQVSRWLASSKTCSACGHKLDELPLHIRQWTCPACWVVHDRDHNAARVILAAGRAERLNASHKSGRDGECGSGGVLVRSQPVAAVDNEAGSNPSAA

SEQ ID NO: 58468 - protein, 373 aa, unknown
  TnpB Polypeptide
MKVRYTFRAYPTTDQQQELARVFGHTRFVYNWGLRHRTDAWANAEKVNYNQSSAALTALKKTPEHAWLNEVSCVPLQQSLRNLQTAFGNFFSGRAKYPRFKSKRDKQSAEYTTSAFKYSDSVLSLAKVGKLKVKWSRPFSSQPTTVTISKTPAGRYYVSLVLDETLVAFTKTGESIGVDLGINRLATLSKGEKIPNLRFTRKYEKRLAKAQKSLSRKVKGSGRWKRQRIKVARLHQTLSNARIDHLNKVTTDLVKRFDVIAVEDLNVRGMVRNRKLAKHISDASFGRFVSMLEYKALWRGKRVVKIDRFFPSSKRCSCCGYVAQAMPLDVRNWQCPECKSEHDRDENAAVNILNFALGQRVNAHGADVRPSVA

SEQ ID NO: 58469 - protein, 483 aa, unknown
  TnpB Polypeptide
MPSKRNVSYHAYNAASPMNNRKLAEFDCLLPVWRRGLVFAMGGWTRVLTSGGELPRWMDTKSFPGWLSQRQWDSVTRQAKGALDSWMELRETEFRRVVNGSSLSPDMKRELYDINRRHEWWKPEDDEAHRMARRIIKHLRKQVPFPRMGRCRTMSMDGKIARVEDAMNAVHYRWWVTVSTLDRGRPIRIPIIADPRLEENLAVNNETLANHLQATHTPEEGWTFHVMTTSPKATPRRTGEIIGVDWGVQSLFATSDGRLLGLGLYAWLSERDVELETLTKELNRSHIPCRESKRYRRLNKRIRDHVTNETNRLLNRLGEQDIKEIVVEELDFRHGGLTRRMNRIVSRAGRNAVKRKLQDLQDNKGVTVTKVNPAYTSQECPNCGCTDPRNRKTRDLFRCICCGYTLHADINASRNIRARRSRRDGWRFIGRKQILATLRNEHGERCSRPDHHRDGRHVAKSATTPRNAKTSPEVKAPNGIKNH

SEQ ID NO: 58470 - protein, 423 aa, unknown
  TnpB Polypeptide
MIRSSAHSLRFANPGKVRLVGELIGEYRLFVQRILNDIWENGFPTWDFFPSSNRLDFKGKSLLPTKYLKQFPTEISARLQQAAGKQAVMMLKAATEKRRKQLFVLANLQREGKKYQYLQSRVDRQPLVKPDASGINLELDSRFVGFQETDIFLFVQLSSLGIPHIRIPIKKTRCSNKWQTRGLLKVCVRISEDTLHLIYEVPNKSASGSQIVGADQGITTALTLSNGEATKRCPHGHTLQTIQAKLARKQKGSNGFRRTQEHRKNYIHWSLNQLNFKDVKEVRFEKIKHLRLSKRSSRYMSHWRYTLIKDKLVRLSEEEGFLFREVANEFRSQRCSECGWVRKSNRKGKTFKCGKCGFTIDADLNAASNLKLDLFEIQWWVRLSQINRKGFFWTSDGLFDEGRESIVPATIKDNESKKLLQHC

SEQ ID NO: 58471 - protein, 462 aa, unknown
  TnpB Polypeptide
MGQATRTTKLLLDLAERKRGGANTGKRTFLIETVALLTAARAFYIDFFLNHADKLAERKSYYSEKQQQMRNRAISAHELLTWAEFHTVATNEHPFPWRSWNFSERFPDLPFLYRRSVIKDAIGKVKAYLSNYVNWQQTGKKKGKPGLPGASNHPMLYAGTFSLELDQVDRRKSFVRLKVYTGERWMWVNYPLKDSRFFEQRRADPTWEQQSPRLVLRSRSAELHFSQTREVKVKKVKESKLDPDLVTVAVDLNVKNLAVITVRRQQRIIESIYVRDKGLDQHRYRHLKRISKKQWLSGKPVKGEQSNRQLWGHVRRMNTDTARKTAHAIARVCAKYPGCVLLFERLRKIKARGVSKSRRLNRKQANQLRGQINRLTREQVYAQETVTVEVNPHGTSQYCARCGAHGQRFSLRAGQRITGRGGKLFWCPVCQYEAQADFNASANIHRSFYREYHWQPPLQRSG

SEQ ID NO: 58472 - protein, 158 aa, unknown
  TnpB Polypeptide
VKFAEQFSNPVIVFEDMSGIRNEMQYGSYMNRRLHKLPFHKFERFVSYKATWREIPTDTVDAYYNSRTCSCCGERGSRQGRRFRCPNDECDVVQDHADRNASVNIAWREKAKLDGNESNYRTHKTQPQVRLVRLSGSGRVSRPPSSRSLAEQGVLAHG

SEQ ID NO: 58473 - protein, 234 aa, unknown
  TnpB Polypeptide
LRKAQQALSRKVKFSNNWKKAKARLQRIHSQMANARRDFLHKVSTAISKNHAMVCIEDLRVRNMSKLAAGTADAPGKNVRAKSALNKAILDQGWYEFRCMLEYKLAWKGGRLIVVPPQNPSRTCPCCGHVSSDNRQTQAWFECVACGYENNADRGSGPEAFRGSGPEAFLVGAINILARGIQLLRDEGQDTADAAVGMRVGEPPVSARMACGSNCTGGRKQEPAETTAQGAIHA

SEQ ID NO: 58474 - protein, 191 aa, unknown
  TnpB Polypeptide
MVANPRFYCKAKRKLAHAQRVLSRRQRRIKQEGRNLCLAKNYQKQRLIVAKLHGKIRRQRNDFLQVLSTTLIKNHDLVVAEELRSKNMLKNHALSQSISDVGWRSFLDMLAYKAGLYGKEFLTIDPNYTTQRCHACGSIMGQNGYKKLTLKDREWTCPICQIPHIRDWNAAVNILEKGLGKWQNPTIKEAS

SEQ ID NO: 58475 - protein, 388 aa, Microcoleaceae sp.
VLNLTYEFKLKPTTAQVPIFEDWLEQCRRVYNYALAERKDWFKSRSCQINACSLRSEYIIPADKPRPTYVSQCKGLTQARATIPTLKAVQVHVLQQTLKRLERAFVSMWEQKHGFPRFKKVGAMRSFVFPQMGVEPIKNSAVKLPKIGWVKFRQSRLIPHGAALKQVRLVRRISGWYAMLTLQWDVSIPDVVPHGNPIGIDVGLTNFIATSNGLLTKRQRFFVDAERQLKLLQQCVSRKRIGSNNWKKAQKKVALLHEYVANCRKDWHRKLSHQICNDAGMVFVEDLNLVGLSRGMLGQHCLDAVFGQFFTILEQTCFKRGVYFQKVDAKKTSQICPNCGTETGKKELSERTHSCSNCGYTTDRDVAAAQVVLQRGLAAVGHTVKMLG

SEQ ID NO: 58476 - protein, 256 aa, Desulfovibrio sp.
MAQMEKIRFSGKIMSVMVSRTADHWFASFQIETSNVQRYSENQGIVGVDLGVKNLATLSEGTVFDGPKALRYYLKKLKRLQRRLSKRLKGSKNRAKLMIKVARLHARLANIRKDYLHKLTTFLAKTFSVIGIENLNVKGMLKNYSLALAISDMGFYEFRRQLTYKCQLFGSWLEVIDRWFPSSKTCSNCGFMNDGLALKDRDWICPECGIHHDRDINAAINIKNLAASSAVTACGEISSGRKSQFSSETGLCETGT

SEQ ID NO: 58477 - protein, 426 aa, Hydrogenophilales sp.
MIYGMQRLQAFKYELKPTGEQQCLMRRFAGSCRVVFNEGLALQKARYERGEKKLGYASLCKELTSWRNGTPMPSGRVAPWLAEAPVHPLQQALKDLERAYSNFFSKREGFPRFRKKGRHDSFRYPDPKQIKLDQVNSRIFLPKLGWLRYRKSREVLGTVKNVTVRHSCGKWFVSIQTEREFEQPIPSGGAVGIDLGVARFATLSDGTFYAPLNSFKRHEAALRKAQQALSRKVKCSCNWRKAKTRVQRIHARIANVRRDFLHKCSSAISKNHAIVCIEDLQVRNMSKSAVGTADAPGKNVRAKSGLNKSILDQGWFEFRRQLEYKLTWNGGQLIVVPPQNTSRTCPCCGHVSAENRRTQAQFRCVQCGFEDNADVVGAKNILARGMAIVASEMKGGARPDGLWIEPQWRSEAGTHRSDSGAPQCCA

SEQ ID NO: 58478 - protein, 383 aa, Nonomuraea sp.
VQLRYNFRLYPAAGQRQALARAFGCARTVFNDGLRLRQEGREQGLPYVSDGDLSKRVITQAKQTPERAWLGEVSAVVLQQALADLNTAYRNFFASITGRRKGPEVAPPRYRSRKDNRQAVRFTRNARFTVTAGGKLRLPKIGDVPVRWSRELPAGPSSVTVIKDAAGRYFASFVVEICQEPLPQTASEVGIDLGLTHFAVLSDGRKVGNPRLLRRAERRLNKAQQALSRKQKGSNNWARAKRVLARAHAKTADARRDFAHKLSTQIIRDNQAVYVEDLCVKGLARTRLAKSVHDAGWSQFVAMLEYKAGRYGRTFARIDRFFPSSKLCSACGLPAGTMPLSVRSWTCPCGAVHDRDVNAAINILAAGRAERLNACGGTVRPAA

SEQ ID NO: 58479 - protein, 164 aa, Nonomuraea sp.
LKKAQRALSRKAKGSSNREKAVVRVARAHARVADARRDFAHKLSTQIIRENQTVVVEDLCVKGLARTKLAKSVYDAGWSQFVGMLAYKAARHGRLFVRIDRWFPSSKMCSACGTVTESMPLDVRMWTCRCGAVHDRDVNAAINILAAGRAERPNACGGTVRPAA

SEQ ID NO: 58480 - protein, 361 aa, Clostridiales sp.
MFAKTFGCCRKVYNLMLSDKIEGYKQTGKFPTVTPAKYKKDYPYLKEVDSLALANKQMDLQAAFRNAFSKSRKKNNGFPKFKSKRHSRKTYTTNNQKGTVAIIDNRYIKLPKIGKVKAVIHRTAPDGWVIKSATVSQESDGKYYISVLFEFEKAVNFYAADKSNAIGLDYASDGLYVDSNGHVGANHKYYRESHKKLAKAQRRLSRMRGSKKHEKKSNNYMKQLLKVNKIHRHIANQRLDNLHKISTEIANRYDVVCVETLNMQSMANHGFGNGKATLDNGYGMFLSMLEYKLSDRNKYLVKVDKWFPSSQICHRCGTLHPEMKNLQIRKMKCDCGLAISRDQNAAINILNEGLRLLIEGA

SEQ ID NO: 58481 - protein, 388 aa, Clostridiales sp.
MQKLLKSFKTEINPTVEQKIKINKTIGTCRYVYNFYLSHNKTLHDNGEKFMSGKSFSVWLNNEYLPQNPDKLWIKEVSSKSVKHSIENGCVAFTRFFKHQSAFPKFKKKGKSDVKMYFVKNNPKDCRCERHRINIPSLGWVRIKEKGYIPTTKDGYVIKSGHVSIKADRYYVSVLVEIVDKKILNNSNEGIGIDLGLKDFAIVSNGKTYKNINKSARIKKLEKKLRREQRCLSRKYENLKKGGPTQRTNIQKQKLKVQKLHHKIDNIRTDYINKTIAEIVKTKPSYITIENLNVSGMMKNRHLSKAVAAQKFYEFRTKLKAKCDENGIELRVVDRWYPSSKICHCCGAIKKDLKLSDRIYRCDCGYVEDRDFNAALNLRDAWTYEVAQ

SEQ ID NO: 58482 - protein, 309 aa, unknown
  TnpB Polypeptide
MALQESVRNLNKSYRAFFEGKAGFPHYKSRRGPQSSYHCTNVSVGPNYVRVPKMEPIKARIHREIVGKVKSITLEADSAGDYYAAVLWEDGLAEKEPLKEIYEDQVIGIDVGIKDLLTVSNGRKEPNPRHLKRARKALRRRSRQFSRTKKGSRRREKARRRLARAHKRVANARNDNLHKVSSRLVNESQALVAESLRIINMLKNHCLAESIADAAWSELFRMIAYKMKREGKYFVQIDTFFPSSKMCSCCGFKLEKLDLATREWTCPHCGSHHDRDVNAAANIRAEGIRKLRAEGLPVLRRETSSPNAR

SEQ ID NO: 58483 - protein, 440 aa, unknown
  TnpB Polypeptide
MTKKKSMRVDFVKSCITYNKLNKIAISGIENICKRLNLDNIFDVINGKFAIPSKRPSGKKSSSKRVAKCDTVFVAYRFCGHPTEEQASDLNQNIGASRFMWNRMLSDYKLMWKMYGISIPMTPADYKDVSGLEWLNDRDSLALANVQLHLEKAYKNFFRDPKVGFPRFKSKHHSKNSYTTNVVNGNILVEDKRIRLPKLKWISMKKHREPAENCCLKSVTVSMEPSGKYFASLLYEGYSCENQAADEDYSNAKILGIDYAMQGMAVFSEEIELEKAGFFRRNEKRLAREQRKLSRCVKESRNYVRQKKKVARCHEKIRNQRKDYLHKLSRRITDQYDIVAVEDIDMKAMGQCLHFGKSVQDNGYGMFRNMLDYKLAWKGKKLVKIDRFFPSSKKCSKCGKIKKELGLSERVYRCTCGNEMDRDRNAAINIREEARRMLAV

SEQ ID NO: 58484 - protein, 377 aa, unknown
  TnpB Polypeptide
MWNTALAIRSAAHRECGLTLTGNDVSRWLTLWKRTPGHEWLAQLPATCLTQCLRDQDKAFRHFFARRARYPRFKGKSTSGSLRFQNVGVAWTCGLMFLPKLRVLKLAESLPEVERPDLVTLSRDATGRYHVTFCAQVETSLLPIRQRSVGVDLGLTYLATLSTGEKISNPKRYYGRLRYLRQQQRCLARRQKDSRRREKQRLRVARAHAKVKQERQSALHALTTRLVREFDLICIEDLNVKGLSRGMHSRAVHDAAFREVRRQLAYKSDWYGKILVDVDRWYPSSKSCSLCRHTLDELRLYQRQWRCPKCGTCHDRDVNAAQNLLAEGLRQLAGRDDRDLRVDAGDACPERILGQVLAEEARSGQRNRARVIRARFG

SEQ ID NO: 58485 - protein, 412 aa, unknown
  TnpB Polypeptide
MKLTRTVKVECIVSSRNLAVLMEVYFMYKSMLEYILDYALENNIKSFTKLKAKLYRELRNTYPQLPSHYAYTVCQDATTRVKSFLKLKRKGLTYTEKPEVKKITLWLDDHLWKLNGYSEVKIATHKGWITLGIRPHKLSWKYMNNSEWNLSGESKLKLNSSKVELILTFRKEEYKPYEPKAVIPVDVNEDNVTFKVGKEVYMVKTNFKKIVVGYHNHRRRVQEKYQQKLPKLFKKIIRATREKERKRNIRYQLANLIVKTAKELKTIIVLENLPKKTPSNMITRINSKMLKHRIYQAGFRGLLNTIIDKCMEYDVPYALVNPRETSSTCPICGSPLMRGNAPRQMACPKCNYTSGRDIIAVINLEKIYLQMRGTMLFALKPCEVGVKLMNPAQRIKPLPTTRTKTKIYKIDE

SEQ ID NO: 58486 - protein, 411 aa, unknown
  TnpB Polypeptide
MIVSRIEKHIIKSNNKFYSLLDKFCFESKNLFNHANYIVRQEFCKTNKWIRYSELDTILKNDNEYPDYRNMPTAQSSQQILRLIDKNWTSFFKSIKDWSKNKSKYLGRPKLPKYKNKNGRNILILTNQNIKLKGDMLHFPKTFKDFILKPQCIKKKDFYSIQQVRFIPRSSYIEVEIVYNIKTKDIIPDNGRYMSIDVGLDNLTAIANNYDKRPFLINGKGLKSINQYYNKTISHYRSIAKQLNKLEYTKRMDRLTNKRNFKINDYIHKSTRYIVNKAIEDNVSVIVIGYNKNWKQSSRMSKKVNQSFVQIPFNKLLQQIQYKANDVGIKVILTEESYTSGTSFLDNELPIKEFYNKKRRIKRGIFKSNNGKIINSDINASYQIMRKEFPNAFKQSYGIEGLVLNPFKVNL

SEQ ID NO: 58487 - protein, 493 aa, unknown
  TnpB Polypeptide
VPKFEIPEGWTAQAYRFALDLTPSQRREFRSHAGGARKAYNTMLALVKAVMGQRAAERSYGIAEKDLTPAVSWSLAGLRKNWNGRKEIVAPWWEQNSKEAYNTGLDALARGLDAWSKSRTGERAGRPSGFPKFKSAKSRRSVRFTTGAIRVEPDRHHVTLPRLGKLKAHESTRKLARRVEAGTARILSATLSEDSAGRHHVSFQVLVKRSAAVPAHAGLAEPVVGVDVGVKEDSLMVAATPDGREIKRVPAPKSLTAAQGRLRALQRKAARQQGPYDPETRTRRRPSKRWEKTNRRVGRTHGHAAAIRRDVLHKETTALARRHEVITVETLNASGMRSAGGACKKGLNRALSDAALAETRRMLSYKCTRYGSALVEADRCFPSSKLCSGCGGRKPSLTLADRTYECDHCGLVLDRDLNAAVNLARLGERLRTGATGTGTGSSPAASHRAGDGRGATRETATTKVVNAAGRETSTRHDDTVGKTGTAPSQGEAA

SEQ ID NO: 58488 - protein, 484 aa, unknown
  TnpB Polypeptide
MKTTMKAILVNLSNEQKAILNNLMLVFCTAIRYSFKRLLEGQFIGDLEKVVAHKYNLNIRQAKDAVESARQTIASQHELVKLYHGNYSKKVEALVKKLKNPRLTERKVKSLTAKLEKRQRRLDYWTAFLTSKTFPPVTFGRKEMFLRRCKGLITKQEWNDCRNNRIYSRGDKSKGGNPNLRVVFKDGVSFIEISTLEKTVKNRAVKVLMPIYLPQKLSKKTGKVNGIQYRKMFMDSLERGEAYQVELIKRDDKYYAHITFEELKAKVIYTGHMNMIGIDTNPDGFALTKIDRFGNYRGHTYLKQHELTFCRSNRRTNLCGELVAQAVDYALVRQCGVTVEDLKFKDDRDVSSKLARVSSPFVYATLLMMLERSCLRNGVEFAKVKPQYTSKIGLYKYCHQYGMDVHNGAALVIARRSYGFKEAVPKLLEERLVPKKKLIAFKKMNEWSKWSEITRQITKLFKKRKEVNTPGLWIVRRKELLGIA

SEQ ID NO: 58489 - protein, 433 aa, unknown
  TnpB Polypeptide
VGLVATVRLAYRFALDPTAIQERALRSHAGAARFAWNWGLHQCRQRYAAERKWYSASELHRLWNAAKKTDPALGWWAENSKCVYQEAFRNLDRALRDFVKSKRGERKGKKLGFPRFKKRRKRKNSFRLTGTVRCGGSTVQLPRLGVIATHEPTWRLAGRIAAGNARILSATVTKTAQRWYVSLTVEEERDIPDRHARPGTAIGIDLGVRTLITGVDSAGTLVTVPGPRPLRTTLRRLRRASRAHSRKRPGSGRRRRSAARLARLHARIASVRADALHKATTMLAERYETVVAEDLNVAGMTRNRKLARAVADQGFGTLRRMLGYKTAWRGGTLVTADRFYPSSKKCSGCGAVKTKLALSERIYTCERCGLVTDRDVNAARNLLSLAASGAERLNAREGALRPGTAGHAPPNLEPGTRKRGKTGTAARQQAAAA

SEQ ID NO: 58490 - protein, 383 aa, unknown
  TnpB Polypeptide
MKRNKALKVRIYPNAKQIEQLNKTLGCSRAIYNMMLHERITVFEEYKDDRQKLYDYKYKEISVYRKEFEWLKEADSQALACSKVNLVNAFSNFYKSVRGERKGKVGFPKYKKKKKQNSYTSSCINNNMAVDFELKTVKLPKLGWIHFRDQRCSAEGKVKSVTVSRTATGKYFASFLFEREAPEVIKKVITDPQRVVGLDMSLSDFYVDNEGNNPGYSRNTRKHEMQLAKVQRRLSKKKKGSSNWYKAKRHVALVHEKIANSRVDFNRKLATSLTSEYDAVCIETLSLKGMSQTLNLGKSVFDLGFADFVSRLKQKAEETGKHVIQVDKWYPSSKLCSSCGHKNSALTLKDRTWTCPNCGAELSRDVNAGKNLHNVGCKMLGLG

SEQ ID NO: 58491 - protein, 405 aa, unknown
  TnpB Polypeptide
MALPMQLRYNYRIYPDPAERAALARVFGCARVVFNDGLRARQAAQAAGLPYIKDADLQKQVITAAKRTEKRAWLAEVSSVAPIQSLNDLHSAYRHFFASATGRRKGPRIAPPRFKSKRDNRQSIRLTANGFSLRDNGRLYIAKIGDLAVRWSRPLPAAPSSVTITKDAAERYWASFVVQTQDRPLPELDTATGIDLGLSHFAVLADGTKISSPRFLRRAERKLKRLQKDLSRKQKGSNNKAKARIKVARAHAVVVDRRRSWHHEESTRIIRDNQAVYVEDLAVKALARTRLAKSVHDAGWSAFVAMLEYKARKNGRTFAKVSRFAPTSQVCSVCGVKDGPKPLRIREWMCAACGSVHDRDVNAARNILALGRRERLNACGGNVRPERVPAAPCETGTHLGDRKHS

SEQ ID NO: 58492 - protein, 436 aa, Thermococcus sp.
MKRTVTLKLQPSKEQEKALFELAHATAVIWNRLNYQRLKQFKEFGKIDFNGTEKKAYHEFKNWIGGSTVQQLARKNAESWRSFFSLNRKKKSGELPEWFRPKPPGFLREENGRKLFIIPLRNDQYKIDGNVIELRRLGKFGRLRIQFNGRIYLKGKQGRLEIQYDPVRRKWYAHLSFTVEEKLINDEWVEVPKQPLGNLSAGIDLGVNNLMAVYVENGESFLVSGRPLKSIAFYWQKRIADYQSKLNKSGAKKGRKLRRMHEKAKLQAKHYINTAVRQTVERLYHLGVSRIVVGYPKGIARGSEKGRKQNFLLSHVWRFNTVIKRLKEVAEEYGILVVLVGEAFTSQLCPLCGQRHSNARFVRGLFKCCGEGVVMNADLVGAFNILKKAVKTITPSLRGLTAGRGNGGKTLPEGSKTRFLVGFNETPRTSPRLARG

SEQ ID NO: 58493 - protein, 402 aa, Escherichia sp.
VKRLQAFKFQLRPGDQQECEMRRFAGACRFVFNRALALQNENHEAGNKYIPYGKMASWLVEWKNATETQWLKDSPSQPLQQSLKDLERAYKNFFQNRAAFPRFKKRGQNDAFRYPQGVKLDQENSRIFLPKLGWMRYRNSRQVTGVVKNVTVSQSCGKWYISIQTESEVSTPVHPSASMIGLDAGVAKLATLSDGTVFGPVNSFQKNQKTLARLQRQLSRKVKFSNNWQKQKRKIQRLHSRIANIRRDYLHKVTTTVSKNHAMIVIEDLKVSNMSKSAAGTVSQPGRNVRAKSGLNRSILDQGWYEMRRQLEYKQLWSGGQVLAVPPAYTSQRCACCGHTAKENRLSQSQFRCQVCGYTANADVNGARNILAAGHAVLACGEMVQSGRSLKQEPTEMIQATA

SEQ ID NO: 58494 - protein, 398 aa, Streptomyces sp.
VKTELVERAFKYCFHPTSEQAVELLRVFGCVRKVYNLALEARTVAWFQRQERANHNTTPAMLTQWKRTEELAFLSEVSSVPLQQTLRHLQGAFSDFFEGRAEHPRFKSEKKTRRSAEYTRSAFPYRDGALTLAKTKDPLAIVWSRPLPQGAQPSTVTVSQDSAGRWFVSMLCEDASVKPLPTSDTAVGVDAGITSPVTLSTGEKVTNPRHERRDRACLARAQRALARKGKGSRNRDKARIEVAKIHARIADRRRDFLHQQTTRPVRENQTIVIEDLTVRNMLRNKTPARAVSDAARTDLRSMLEYNCTWYGRNLVTIDRWFPSTKLCPVCGTIREKPPLNIRAWTCECGTTHDRDINAARDIPAAGPAVTACGAGVRPQREPSRTGQPAAKQETLTAK

SEQ ID NO: 58495 - protein, 435 aa, unknown
  TnpB Polypeptide
MHQKYTVSTLPYIVVCFHRPSIIQSMKRLQAYKFELMPNGEQSRTMRQYAGCCRVVYNKALAWQNEQYQADNTFKFSYTKIANLLPQWKTEFAWLKEAPSQTLQQSLKNLESSFRNFFAKRADFPKFKKKGMSDSFRFPQGFKIEQQNNRVFLPKLGWIGYRNSREMLGVAKNITVSKKCGKWYASIQTEREVAQPEHPSTSIIGVDVGIARFATLSNGQVFEAVNSFKQKQTRLARYQRALSRKVKFSNHWKKQKGKITQLHSAIANIRRDYLHKTTSTISQNHAMIVIEDLQISNMSKSAKGTIETKGRNVKAKSGLNRSILDQGWFEFRRQLEYKQAWAGGGVIAVNPRNTSRTCTCCHHVAKENRLTQAKFECVECGYAENADLVGAINILAAGHAVLARGVTVQQDCTVKREPTEGIRKSSREPVGIPAL

SEQ ID NO: 58496 - protein, 295 aa, unknown
  TnpB Polypeptide
MNLNRAYNNFWSNKKHFGKPRFKSKKSGHLSYSTNNQKGSVRLEGNKVRLPKVGWVKLRLHRPIMENSIIKTVTISRTPSGKFYISILVEYENQILPIIPETFLGLDFAMHGLYVASDEEDADYPNFLRKVEKRLAKAQRKLSKRQKGSRNRDKQSLRVAKLHEKVANQRRDFIHKKARYLVDKYDAIGIEDISVKAMAKRKKGGKFSFGKSVADNGWKKFVNILEYKLVWQGKQLVKIDKWYPSSQLCHTCGYKKSEMKDLSIREWDCPKCGSHHGRDKNAAINIREEARRISA

SEQ ID NO: 58497 - protein, 210 aa, Burkholderia sp.
MILVYRYRVKSLNGLLNKQSRAVNYVWNFCNDTQKHALSTGEKLPNDRFGRRAAEKLAKAQRARKHKRHIAKLHAKVANARADFQHKLALDLVRRFDYIAVGNVSAAKLARSRIAKSVYDASWSSFRDKLRYKAIAHGATFEEVDESGSTQSCSSCGSKDSTARPKGIAGLRVREWVCSDCGVEHDRDTNAALNILRCGRASPGVGILRL

SEQ ID NO: 58498 - protein, 636 aa, Caldivirga sp.
  misc_feature (431)..(437): Xaa can be any naturally occurring amino acid
VPGVVPPGGGFLALDEPVGRYPTFFTTLGTISSSTPKSKGRKSRDGDEEIRTVRLRLLPNGAQEGKLQRIADATAKLWNELNYARLVQFRASGKVDFKGTGHEFYYKYNVVLSVNAGVVIQLNNQVWMSFFKLLKLHRQGKLPKFMGKPSPPSFWKDRLLGKRRLIILVRNDRYYIEPVNGGEGYLVLKDWHLRIRYAGRVKWSGKQGTLVIKLEDNRWFAYVPIEVGGKPAKSNPKGYVKGIYDRVQIENPKGSNKAFIDVGLNNLFAVVFNHTDTAILIKGSTIKAEYYWWKREVKTYQAVRDWLRNHGFESWRKYHAFYLHAIYKRRERLRHYYRTAIRFLARTLHEMGANEVFVGYPYLVSQDDGNEYNVNIWWFNKIINWLKDVLQEYGIKLHVVNEYGTSKQCSICNANHENGRIKRGLYICPVXXXXXXXAGQVINLNNWAWDSFFKLSRLYKQGRLPKFMGKPSPPGFWRDKVLGRRLLRILVRNDRYYLEPINNSEGYLVLKDWGLRIKYAGRIKWSGKQGMLTIKLEGNRWFAYVPISIGEKPAKSNPKGYVMGVYEKVQIEKPRGGNKAFIDVGLNNLFAVVFNHTDTAILIKGSTIKSEYYYWKREIKTYQSIGDWLKNHGFES

SEQ ID NO: 58499 - protein, 446 aa, unknown
  TnpB Polypeptide
MIVVHRIALDPNAKQETFFRKSAGTARFAYNWALAEWRRQYEEGGKPTESNLRRLLNQIKEQAYPWMLEVSKNVIQQAIKNVGAAFTNFFRRLEEYQHEPDPRRKKRLKKKLGYPKFKKKGRSRDSFRADNGPSKASADAVRVDGVYVVLPKIGRIRMRERLRFSGPIKSAVVSRTADHWFVALSVEVPEEVLPRKNHAVVGVDLGIKTLATVSDGRGEFHAEHQSPYARKKVAKKRRRLAKSLSCKQGPEPGKKPSKNFVKAARRLARIDARTANIRADATHKATTDLCRTCSEIVLEDLSVQGMMANHKIAGAISDAGFFEFRRQIDYKAKRYACKVTIAPRFFPSSKLCSKCGQSNDNLTLRDRVWTCPECGAVHQRDRNAAQNLASLAESSPATAWIVGSKDTAILPCEHGNGAASSGSGRKPRTKLAAVKQEPTRRIKSQG

SEQ ID NO: 58500 - protein, 292 aa, Escherichia sp.
SFRYPQGVKLDQENSRIFLPKLGWMRYLNSRQVTGVVKNVTVSQSCGKWYISIQTESEVSTPVHPSASMVGLDAGVAKLATLSDGTVFEPVNSFQKNQKKLARLQRQLSRKVKFSNNWQKQKRKIQRLHSCTANIRRDYLHKVTTTVSKNHAMIVIEDLKVSNMSKSAAGTVSQPGRNVRAKSGLNRSILDQGWYEMRRQLEYKQLWRGGQVLAVPPAYTSQRCACCGHTAKENRLSQSKFRCQVCGYTANADVNGARNILAAGHAVLACGEMVQSGRSLKQEPTEMIQATA

SEQ ID NO: 58501 - protein, 650 aa, Emiliania sp.
MPRNKKDDARVIKCPLDKILKPEIVSIIRDIVPVYNRIAISATLFLNLRIRQLVESRASSTEFAQFFQANKLVKYFMAVTSSTLGAGDLHAAFGTNFPSVIREDRPKAFSQVCMYICRNLEATATTNVWYHMKKRVCTVVKKTFGIPRDEWLHMSNEEKKNHKIHLKQVNVDVLSLEGDAFVSPEQYHDWISNLRSEMKVTHVTRQLLADTRGVDVDDPNVPGMVYYMKVKPYEFIYAIATLSSHLNSITGGGYALYPIRSSMVPKYLHLDELILADISPGISKGATNTAAGKKRTADGSELSNKDKLVARRMIVFKHVMTPKAFNKWENHLGWSVDTDGYGCSLHVKKKVNELPPSTHPSIHNGLIKIDAFKDKFSERYSINDLSIIGVDPGKREIVSAVDSMDYTSKYTFRKTHQDHLTGTVRHRKAMECTKPQSVFETEQDLATTSKKVVPVERFMDYATKLATSISSSSGFYEQGVYRKRKWKRHLRLQKAYSGIVNNLKMVSCHPNKPIVLAYGSWGMTTSGLPFKGLPPTIGIGMVRYLARFFPVVITPEYYTSTICPCCDSNVTRCTHVEQQRASPYFENGRLKDIRGLKHCPGCNTYFNRDNMGAWNIARNFTNMYQGMAPIRVRNAAQAAEQELTNRTEVD

SEQ ID NO: 58502 - protein, 268 aa, unknown
  TnpB Polypeptide
MRKSFKYRLYPTKSQRSRMERTLDLCRWVYNQTLAYRKDAWEIEGRSISKYETHNLLPTWKVEKPELAEVHSQVLQNVQERADLAFKAFFRRVKSGEKPGYPRFKGKGWYDSFTFPQSGFKLVSGKLRLSKIGDVMIKLHRPIEGKIKRLTIRRTSTGKWFACFSVEVDDPIKPPWKDGSMAGIDVGLESFATLSNGEKIDNLRFFRSEEKALAKAHRRLSKCEKGTPERRKALKVVQRIHERIANMRYYFAHQISNQLVSEIWSDCF

SEQ ID NO: 58503 - protein, 303 aa, unknown
  TnpB Polypeptide
MKEVSFTAVQQKERDFKEFKKQFFSKTRKKVVNRPKFKSRYGKQSFKLCNTDRFSILTDRIRIEKMGWINFTQHQSLPEVHKLISVTISKDSLGDYYVSILVETDIKQFEKTGKSIGIDVGIKEFATLSDGTVIHNPKYFRENQSKLKRSQQHLSRKKKGSIRHKKQKLKVAKIHKKIQRQRELFLYTTSLNIVKNYDVICIEDLNVSGMVKNRKLAKSISDAGFSTFFRILKYKSEWYGKELVQTGRFEPTSKTCSNCGNVKKELKLSERTYHCEVCKHSQDRDLNAAINIKALGVTSAQRA

SEQ ID NO: 58504 - protein, 440 aa, Okeania sp.
MKARYKYRIYPTPGQKYQLAKLFGCVRTVWNDSLACCQEKYALGQKKPSNSELQKLFITQAKKTKNREWLSEVSVVPLQQSLNDLNQAYQNFFNSTKSKRKGKAIKPPRFKKRRSRQTARFSLRGFQVNEDKVYLAKIGLLKVVWSRPIPGEPSSVTVIKDCRGDSRIAPTGYFLSFVVEIQAQKLPESSKSVGIDLGISTFATFSNGQKVEAPKPLKKRIKKYRKLSKSLSKKSNGSKRYEKARLRIAKFSYGMLRKHARLKDTRTDFLHKLSTEIIRENQTIILEDLNVSGMIKNRKLSRAISDLGWRQFRTLLEGKAEKYGRELRVISRWEATTQICSCCHFRGGKLDLKVREWECLNCGTKHDRDENAAINILVAGGHSETKNGRGGKRQTTAKEAATCVSDSYAKQSVNPPKSYGSVGIFAPLGRRGCQNIRCYI

SEQ ID NO: 58505 - protein, 406 aa, unknown
  TnpB Polypeptide
MKTTRAEQHIIKKNNPLWQVIDAMCFKSKNLYNFANYIIRQEFINNGNWIRYNSLFDLCKESEPYKDMGSNIGQATLRLLDKNWKSFFTAIKDWKVNPSKYLGRPRLPKYKPKDGRFILSIDNNKVMLKDGYVYFAWKPLKVLNNHFITKIQDNCKVLQCRFIPTGSNYTMEVVYEIEVSEQPEHSERIISIDLGIQNFVTITNNVGLKPFVIKGGVIKSVNQYYNKEKARIQSELKKVNKKDWSNKLQRLTDKRNNKIKYLMHVYSKRIIDYCLENGIDTIVCGYNKEWKQKSVMTKKVNQKFVTIPYEIFISMLDYKSIDSGKKFILNEEGYTSGTSFLDNEEPIKSNYNKSRRVHRGLFKSNNGTFINADVNGSYQIMKKVFPNVFDNGIEGVGLHPMVFKIA

SEQ ID NO: 58506 - protein, 537 aa, unknown
  TnpB Polypeptide
MNQNKKRLQTNKVENSKNKNINDKQKNENILKRVSIYQIKTKHLMFSYADSNTFYGKNLYNLANYYIRQCFINHSKDEKDLTQEQKDFIENINKNIKTYNEHYANNFRKNNKKNLIKYMTEYNLLKTQENKENEILELDEKINKLFKKRMNLQTEISKENGLLSYNFLNYYFAHCLNTEDNPYKTLPIPTAQQVLRYLEKNWISTFKSMKKYAKDLSNYTSRPNLPKYKKKDGRIKISFTYQQCKIKDGYLSFPKTDLTIKLGFDYSGLILKEVRIVPMGINYKIEIVWNKKKSEENNNLDKNVYMGIDLGVSNFATLTNNIGLSPIIINGRQLKSMNQYYNKKRAELQSKLPFYKANDDLMKQISWSKKLSLLTEKRNNKITDFMHNASNFVIDYCLRNKIATIVIGLNNDWKQQLNIGKKNNQMFISIPFKKFIDQIQYKTEDVGITVIVREESYTSKASFFDLDEIPTYKKDNKTKYTFSGKRKYRGLYITKDGKYMNADVNGSYNILRKEFPQLFTKETMKYLSFKPMVVNLI

SEQ ID NO: 58507 - protein, 466 aa, Thiocystis sp.
MKVTRTLHADVPAELTPICQAMGYLRADIWRRYGALGNVGRSALDIRKDIVARNLYGALPIDGTIRNETTKDVVNDLLTYKAAAKLKVRQAIAKRTNDPTERKRLYTLLKNDRWLDDPFLHRQMRAHFRHGVSHTANQFIVRSDKHSSAVVDGRLVITIRIAKQYGMDIRLITTSNGKHVDLTGCNLRICVKDGFTEIHYATDKAPGRPHGEQTLGIDKGYTEAFTDSDGDAHGATFGAVLTAYSDAAAKTGKSRNQLHALEKKHRAGGYIAKADRIRRCNLGRKKIDARRSRAQQRLRTVAYQSAHSLADKAALVVSEDLTSPIASKVQWKRYNRRMSGWAKGTLADALDSVCEQRGAEHVLVNAAYTSQMDSVTGLLQGKRVGDKFYRATGDVLQADRNAALNVLARLSDPEITRLTPYRDVKRLLLARSPAPLSVKRLELSDSSRQPSADKSIEQICSRKMEQ

SEQ ID NO: 58508 - protein, 462 aa, Thiocystis sp.
MKVTRTLRADAPPELAPICRAMGYLRGDVWRRYGALGNVGRSALDIRKDIVARNLYGSLPVDGTIRNETTKDVVNDLLTYKAAAKLKVRQAIAKRTTDPAERKRLYTLLKNDQWRDEPFLHRQMRKHFRHGVSHTSNQFVVRSDKHASAIVDGRLVITIRIAKPSGGDLRLVTTSTGKHVDLTGCNLRICVKDGFTEIHYAADKGAGRPHGEQALGVDKGYTEAFTDSDGEAHGAAFGAVLTDYSDAAAKTGKQRNKLHALEKKHRDAGRIAKADRIRRCNLGRKKIDARKRRTKQRLRTIAFQSAHSIVDKAALVASEDLTSPIASKVQWKRYNRRMSGWAKGTLADALDSVCEQRNAEHVLVNGAYTSQMDSTTGLLQGRRVGDKFYRATGDVLQADHNAALNVLARLADPEIKRFTPYRDVKRVLLARSPAPLSVKRLELGDPSRQPSADKSIEQVCSR

SEQ ID NO: 58509 - protein, 495 aa, Thiocystis sp.
MKITRIAHSRRLNPGKYRALAEQARRLGAVRSEVWQRYGSVRGVALSDRQIRDAWLAEGRAFPVLANAWKETLRDAKGDIAAHLEAAKVKARRAIWRRTDNVAERQRLFTALKRNAWPSDPYLARVMRQHRRRGHNRTHHQIVVRADSYTSFTLGGRVWIKIPGLDKGQRIAIPLDTTVAPTGTLRLIIPRDERVEVHYTIDAAPGKPCGNATLGVDKGFTEVFVDSDGAHHGPELGPFLRDESDRLKAKYQRRSKLRALAERTRNPRKRERIRQFNLGRQKLDRRACKTKSRFRDVVYQATHAVIDKAATIAAEDLTVPMNGRRFAKDTNRRLAAWTKGVIAEALDTVSQRRGSTLVLVNPAYTSQMDSRNGCLLGKRQGDTFHCHDGVVLQADENAARNVLARLLDSEIDRWTPYRTVKSILLARTERLRLGLLNPDSSCSPEAALSTESESPTNINAQLRAGFQEQEKAHACVDATTHARPRPAEKTARSFR

SEQ ID NO: 58510 - protein, 276 aa, Peptococcaceae sp.
MLAGQNRVELVYKDGKYSLHCAITGLIEKPEKPGDKLAAIDLGEIHAMAITDSSEALIVTGRALRSIKQYRAKRLASINQAMSRCKKHSRKWKKLLMAKRKLLAKTRRQILDLTHKITRKVTGWCIEHKIGRVAIGNLDGVQRNTSRKKAALKKQKSRKVNQKLSTWEFGKQTQLLEYKLSRVGIQLKKEDESYTSQTCPACGHRHKPKGRVFKCRCGYIEHRDIVGSLNFWRVNKYGEMKPQPTGKIIVKYLRPFVLRQKKVVVPAEPQALPKAG

SEQ ID NO: 58511 - protein, 402 aa, Ruminococcaceae sp.
MFYGCNVVNEGLRVKLYPDKVMRDKFNQSLGNARFVWNNLLTEYQETFELFKQHGYTKLKCNQTTFNTMLTMLKKQYPFLYKSESSSLQQVYRDLLQAFNGFFNNTSNYPKFKSKKNPKNGFRIQNNNNIKITNNTIVLPKLGKVHYRTSPQYKQLLKESKINNVTIKKEHNHYYAVFNIETEKRPMKKTGKTVGIDLGIRTLATLSNGLKITNLDTTHEDKMIKKYHRILSRKKYNSKRYNKTLKTLGKWIQRKNNRIKDAYHKLSHYLVKNYDIICMENLDIKELFQDTDLSSSLQSIAWRKLVDMIKYKCEWYDKKFIQINRWFASSKNCSQCGYYYKDLGDKKEWTCPNCQTHHDIDINAAKNIQNEGLNLLIDDPLVNLRNWGDSTAILLSWESTGP

SEQ ID NO: 58512 - protein, 460 aa, Escherichia sp.
  misc_feature (293)..(350): Xaa can be any naturally occurring amino acid
VKRLQAFKFQLRPGGQQEREMRRFAGACRFVFNRALARQNENHEVGNKYIPYGKMAFWLVEWKNATETQWLKDAPSQPLQQSLKDLERAYKNFFQNRAAFPRFKKRGQNDVFRYPQGVKLDQENSRIFLPKLGWMRYRNSRQVTGVVKNVTVSQSCGKWYISIQTESEVSTPVHPSASMVGLDAGVAKLATLSDGTVFEPVNSFQKNQKTLARLQRQLSRKVKFSNNGQKQKRKIQRLHSCIANIRRDYLHKVTTAVSKNHAMIVIEDLKVSNMSKSAAGTVSQPGRNVRAKXXXXXXXXXXXXXXXXXXXXXXXXXXXXXXXXXXXXXXXXXXXXXXXXXXXXXXXXXXSGLNRSILDQGWYEMRRQLEYKQLWRGGQVLAVPPAYTSQRCAYCGHTAKENRLSQSKFRCQVCGYTANADVNGARNILAAGHAVLACGEMVQSGRPLKQEPTEMIQATA

SEQ ID NO: 58513 - protein, 335 aa, unknown
  TnpB Polypeptide
MLNDKIREYEKTKKMLKNTPAMYKREYPFLKEVDSLALANVQLHLEKAYKNFFRDPKTGFPRFKSKHHSRNSYTTNVVNGNILVESKKIRLPKLKWIAMKKHREPAESLQLKSVTVSMEASGKYFASLLYEGYSCENQAAEPDYSTAKILGIDYAMQGMAVFSEKIEMEEAGFFRKNEKRLAREQRKLSRCVRGSHNYELQKKKVARCHEKIRNQRRDHLHKLSRKIADSYDAVAVEDIDMKAMGQCLHFGKSVQDNGYGLFREMLDYKLVWQGKKMVKVDRFFPSSKKCCKCGRIKKELRLSERVYHCECGNEMDRDRNAAINIREEARRMLTA

SEQ ID NO: 58514 - protein, 361 aa, unknown
  TnpB Polypeptide
MIRKTINAKIIGLTNIKREKISKEYGNFNEYLKGNREVDLYSATRQQADRLLWKLRKAKNFRKQPLIIRNDLIKIEKQNTKLSNYWCRIPIYKKSIWVAIQFPNNQEELLRCSIRESKLICKNNNYFIFITIQKEVGLKKKYNGIIAIDLGERYMATSVELSNDSVNIKFYGKEVRGIRRHYSWLRKRLGEKKLLKVIKRISDKENRKINDILHKISRQIVNDAEESNSVIVLGELKGIRKSARGKRFNRIVSNMPYYKLTKYIEYKANWKGIQVFKINERGTSHTCSRCGSEGKRPHQGLFVCPNCSEYNADLNGCMNIAKRSLEYILRDGVQLAEPITLKVSENLLNLFVESVKLSLPL

SEQ ID NO: 58515 - protein, 458 aa, unknown
  TnpB Polypeptide
MIKRAYKYRFYPQNDLKVILAKTFGCVRFVYNQTLDFSEKHYADKLVLESQGLEYKHLTSSDRVNFVKSLKDSIETDITKDNFGQLKYPWLNEVSSIALQQAARHLNDAYSRFFKGQSGKPQFKSKHHNHHSFTITGKNSIHFDKDFAKNNLIYLPKYDKPLNIKWGKSNKAKNKTTKRNFNYLAVSSITVSQNPSGQYFISFLVEEEITSVNPINDKTSFDLGLKTMAKVYDGKIDSEGKPIFYDFNLPDLLKAIDKKLRKAQRVLSKKTKGSKNRDKQRLNVARLHQKRVNIITDYYQKKSTIMVNENQEIILEDLNISGMKRNRKLSRAIHNVAWKRFIEMILYKAKWHNRIISRVNRFYPSSKTCSSCGHIYHGLKLSHREWTCEKCNAHHDRDENACLNLFNYNSFVGLNGKNQYIAGTANYACGGNVRPKTSKKIISKKSRAVSNEAGIHVL

SEQ ID NO: 58516 - protein, 479 aa, unknown
  TnpB Polypeptide
MLIGYMYKLDPSRNQTATMEKHIEMLRLQYNFRIRERTEAYSQVSHPVMGNYCDLVTKAECCPLTCFVSNRAMQGEPWTIDKKTGRAKLRSAKAQQDADLPNLKLSRPWYGQIQHHVLQQMLRRVDDGFQRFFSGEAKYPKTKRRGKFRSFSYPPGDVRFNGNRVRLPGIGWMRFFQSRPFSDGIKVRSVTVRRKADGWYVSVRLQDDSVPSSPSPNEVKTAIGVDLGIAKLASLSTGETIPNPRFGQKLERRRKILHRRASRKVKGSTKRRQAYQRLARLENTVANQRLDHQWKLAKKLTAMADLVVFEDLNIKGMCARCKPKKDELSGRYLENGQAAKSGLNKAILDASWGELKQKVKVMSEKAGVIFLEINPRHSSQECSECGYISPTNRDKERFLCEACTYLADADVDAAIVIRKRGLEELGINLPKLPGVPRKVTPKERPVMVGISAALVAEPGKPPAFVQLSLFEMLESREGA

SEQ ID NO: 58517 - protein, 434 aa, Thermococcus sp.
MKRSVTIKLQPSKEQEEILFQLGQATAIIWNKLNYERLKQFKEFSKIDFGTTEKEAYYTFKDWIGGSTVQQLARKNAEAWRSFFTLNRKKKAGELPEWFKPKPPKFVREKNGRKMFIIPLRNDQYRVKGNVLELRRLGKFGKLEIQFKGRIHLKGKQGRLEIQYDEVKRKWYAHVSLTVEEKLEGEEWVKLPRKPKGNLSAGIDLGINNLMAVYVENGESFLVNGRLLKSIDFYWQKRVADYQSKLNKSGAKTSRKLRRMHEKAKLQAKHYINSAVRGTVERLYELGVSTIIVGYPKGIPRNSDKGKKQNFLLSHVWRFNYVIKRLKEVAEEYGIRVLVVDEAFTSQTCPLCGQRHSDGRIFRGLFECQGEGVVMNADLVGAFNILKKVVRTITPSLPALAGGRGNGGKALPEGLKAHFLVDLNEAPQTSLPSG

SEQ ID NO: 58518 - protein, 460 aa, unknown
  TnpB Polypeptide
MAKKRNDQRSTCPEGWLKAGIRVPVHLRVRQERYATRCVGIARTVYNQMVATHRMARAHGEGPWPSPMELEKTFNGLKHESEFGMGYATEVSKFVAQGACRDFRRSYENWRNPDLKASRPSFKKKNRNGTGSFLAASGVDRVQYDGRRRIRLPCLGSLKLKRELPEGTPYEVRIKKQNGQWYASVNYWKPPVVAEDKTHVFGAVDVGQNPLAVDSELVHYENPRSLVKHLRKLRRWQRALARRTPGSQGWREAQQRINAIHRRIIGLRENAQHQLSRLLVRKYAVLGVESLNVAGMDKLRHQARSIRDAAIGGLLRKLRYKADWYGTLIVEADRFFPSSKLCSDCGYHNGGLMRETHWTCLECGIRHDRNENAALNLLGLALKAADELPDQLILGPVGPDVTLLDGKALAGGKRVVGETGPGEARTASSARGMSAVDGGTAGNVGDRTQALIPVQLQLAI

SEQ ID NO: 58519 - protein, 452 aa, Lactobacillus sp.
  misc_feature (6)..(6): Xaa can be any naturally occurring amino acid
  misc_feature (10)..(12): Xaa can be any naturally occurring amino acid
  misc_feature (19)..(19): Xaa can be any naturally occurring amino acid
  misc_feature (27)..(27): Xaa can be any naturally occurring amino acid
  misc_feature (44)..(44): Xaa can be any naturally occurring amino acid
  misc_feature (50)..(50): Xaa can be any naturally occurring amino acid
  misc_feature (59)..(59): Xaa can be any naturally occurring amino acid
  misc_feature (66)..(66): Xaa can be any naturally occurring amino acid
  misc_feature (73)..(74): Xaa can be any naturally occurring amino acid
  misc_feature (80)..(80): Xaa can be any naturally occurring amino acid
  misc_feature (82)..(84): Xaa can be any naturally occurring amino acid
  misc_feature (90)..(91): Xaa can be any naturally occurring amino acid
  misc_feature (94)..(94): Xaa can be any naturally occurring amino acid
  misc_feature (98)..(98): Xaa can be any naturally occurring amino acid
  misc_feature (104)..(105): Xaa can be any naturally occurring amino acid
  misc_feature (108)..(108): Xaa can be any naturally occurring amino acid
  misc_feature (114)..(114): Xaa can be any naturally occurring amino acid
  misc_feature (117)..(117): Xaa can be any naturally occurring amino acid
  misc_feature (125)..(125): Xaa can be any naturally occurring amino acid
  misc_feature (129)..(129): Xaa can be any naturally occurring amino acid
  misc_feature (132)..(132): Xaa can be any naturally occurring amino acid
  misc_feature (137)..(137): Xaa can be any naturally occurring amino acid
  misc_feature (146)..(146): Xaa can be any naturally occurring amino acid
  misc_feature (149)..(149): Xaa can be any naturally occurring amino acid
  misc_feature (151)..(151): Xaa can be any naturally occurring amino acid
  misc_feature (161)..(161): Xaa can be any naturally occurring amino acid
  misc_feature (167)..(168): Xaa can be any naturally occurring amino acid
  misc_feature (180)..(180): Xaa can be any naturally occurring amino acid
  misc_feature (184)..(184): Xaa can be any naturally occurring amino acid
  misc_feature (194)..(194): Xaa can be any naturally occurring amino acid
  misc_feature (202)..(202): Xaa can be any naturally occurring amino acid
  misc_feature (208)..(210): Xaa can be any naturally occurring amino acid
  misc_feature (215)..(216): Xaa can be any naturally occurring amino acid
  misc_feature (224)..(225): Xaa can be any naturally occurring amino acid
  misc_feature (229)..(229): Xaa can be any naturally occurring amino acid
  misc_feature (233)..(233): Xaa can be any naturally occurring amino acid
  misc_feature (235)..(236): Xaa can be any naturally occurring amino acid
  misc_feature (238)..(238): Xaa can be any naturally occurring amino acid
  misc_feature (243)..(243): Xaa can be any naturally occurring amino acid
  misc_feature (245)..(245): Xaa can be any naturally occurring amino acid
  misc_feature (247)..(247): Xaa can be any naturally occurring amino acid
  misc_feature (249)..(249): Xaa can be any naturally occurring amino acid
  misc_feature (257)..(257): Xaa can be any naturally occurring amino acid
  misc_feature (260)..(260): Xaa can be any naturally occurring amino acid
  misc_feature (266)..(266): Xaa can be any naturally occurring amino acid
  misc_feature (277)..(277): Xaa can be any naturally occurring amino acid
  misc_feature (279)..(279): Xaa can be any naturally occurring amino acid
  misc_feature (281)..(281): Xaa can be any naturally occurring amino acid
  misc_feature (287)..(287): Xaa can be any naturally occurring amino acid
  misc_feature (289)..(290): Xaa can be any naturally occurring amino acid
  misc_feature (293)..(293): Xaa can be any naturally occurring amino acid
  misc_feature (296)..(297): Xaa can be any naturally occurring amino acid
  misc_feature (300)..(300): Xaa can be any naturally occurring amino acid
  misc_feature (303)..(303): Xaa can be any naturally occurring amino acid
  misc_feature (310)..(310): Xaa can be any naturally occurring amino acid
  misc_feature (313)..(313): Xaa can be any naturally occurring amino acid
  misc_feature (320)..(320): Xaa can be any naturally occurring amino acid
  misc_feature (333)..(333): Xaa can be any naturally occurring amino acid
  misc_feature (335)..(335): Xaa can be any naturally occurring amino acid
  misc_feature (338)..(338): Xaa can be any naturally occurring amino acid
  misc_feature (355)..(355): Xaa can be any naturally occurring amino acid
  misc_feature (364)..(364): Xaa can be any naturally occurring amino acid
  misc_feature (369)..(371): Xaa can be any naturally occurring amino acid
  misc_feature (406)..(406): Xaa can be any naturally occurring amino acid
  misc_feature (410)..(411): Xaa can be any naturally occurring amino acid
  misc_feature (441)..(441): Xaa can be any naturally occurring amino acid
MSSLAXHFGXXXRFYPSSXQKKIIKLXYDAQRFVYNSYVGRNRXNYHAKXYLAVRQYQXMPFAFSXLNNYETXXAEEVVXNXXXLAKPKXXRDXYSFXRVKEIXXLAXANAIQXYQXAWNNYRKXGHGXPTXHKKRXDWSYQTNCXYPXQXEAFLDNGTAXFIDAKXXKLPKLGVVRIAXFRKXIKERLLNHIXTRIGTVTXKKTADXXXYLSMXXGSDIAFVXXLPKXQSQXGXXLXLDNFXTXSXGXMVANPRFXRKXKKKLAXAQRVLSRRQRXAXKXGRNLRXAXXYQXQRXXVAXLHXKIRRQRXDFXQVLSTAXIKNHDLVVAEELXSXNLXKNHALSQAISDVGWRSXLNMLAYKAXLYGKXXXTIDPKYTTQRCHQCGSIMGQNGYKKLTLKDREWTXPICXXHHIRDWNAAVNILEKGLGKWQNPKIKEAAXERLQSASNSRT

SEQ ID NO: 58520 - protein, 404 aa, Gloeocapsopsis sp.
MLNLTYTYALKLTTQQSQTYEAWLETSRRVWNFALAERKDWYNSRSCRIDACSLKHEYIIPADTPRPTFASQCKALTQARKTNPNLNAAHSQMLQQVLRRLEKAFIGMWESGRGFPRFKKLGRMRSLLFPQLGVNPIQENQVKLPGVGWVKMRLSRPIPCGFVAKQAQVVKRASGWYVMLTLQADVDVPNTIPHGQAVGIDLGLISFLATSTGEQVARPRFFVDLQRKLKLLQQRASHKKLGSNNWRKAQAKIARLHEHIYNTRKDFHFKLAHQLCDQAGMIFAEDLNLKAWAKGLFSKHTLDAGFGNFLSVLEWICWKRGVYFAKVNPDGTSQTCPNCNHHTGKKELSERVHRCGECGLETDRDTAAAMVVMQRGLAAVGHTVKMLGEGLSTSSPVTQESPFF

SEQ ID NO: 58521 - protein, 392 aa, Gloeocapsopsis sp.
MAELALTLKLPFYRLNRVKALEFEQLTAVNTQVANNLLQVNKDERKKLTSAAFRHIEIGSMWINQTIRNTNAKTKVKHFKRMWLEVNNQGFEIIKSGDLYTVSFSLYRGRKGRIPLSIHQASHTSVLDQVISKEAKLGSLKLCKSKKGIWYALVSVSMQVADAGEVKGWIGVDRGQNNIAVASLPLGFGKFWKGGRLKGLRRQFQRTRGKLQQAKQLKEVKRLEQRERRIMTQINHVISKELVQFAKDFGMGLRFENLSGCRQTMRQKKKTKSDAANNRDTWAFYQLETMTRYKAIRAGIPVESVPAPYTSKSDHRNGVIGVRNGDWFRGYDGYRCNADWNASQVIGQWSGFSCPLDLQKAVAAMAVVDVEGAVNDSPLSGEASMQVDLSPA

SEQ ID NO: 58522 - protein, 249 aa, unknown
  TnpB Polypeptide
LAHQVVDLAIQKGKAIAVENLKKLKKGVRRDGKATLRKRLHQWNVKKFLQKLKRVAMLKGVEVVEVNPAYTSVIGMLKYAPQLSIDKDIAGAYVIGRRALGFKEDVPENYERLLKNKAYLEFALKRYEEREKELRELIEKESNEYKRNALKSELRSVENSKRLLINLLQSLQSEPSGCEGANGSNPEQGRVAKATLQSVWQVLKVALLFPILGKVLPRDLSPLKPVLVEGVWDRVGSRSVPFEAGGRSQ

SEQ ID NO: 58523 - protein, 268 aa, Helicobacter sp.
MEYKPSGTLRLIIKNKVVEVHSSYEKTDNRACGNEIIGIDKGYSEVFVTSTNEFLGKDLGKILTQYSDKLKVKYQRRNKLLALMKKAQKNNQLEKANRISKNNLGKIKQNKENHKVKQRLKTLIYNACHQVVDKAKVVVCEDLKENFSKNTSYGKNTNRRLNSWVKGLIAAALKNVIACRGSALHLVNPAYTSQCDSFCNNLLLGRRKSNTFYLFNGGTIQADYNAARNILARYFDKEIKRNTPFNAVKEILLKRTDSYRLTTVQARL

SEQ ID NO: 58524 - protein, 398 aa, Burkholderia sp.
LCSNLLHNYRGSISAYCSTRSRTRLTATGTPANPSNTAGRATCWRADRHAGACPRRQRGDQLRRTPAAAAIRSGARSPERPVRLRLSRPHRGHEVSSVPLQQALRHLQTAFANFFAKRAKYPNFRRKDGAQSAEYTASAFRWDGTSLKLAKMDAPLAIRWSRRIPSGAKVTTVTVSKDSAGRYHVSLLCDDVVCAKPTSTGKVGIDFGLTDFVVLSTGEKIAAPNAFRKNEARLAKLQRRLARKQKGSANRTKARLKVARMYARTADSRRDFLHKLSTRLINENQVIAIESLAVSHMLKNRKLAKSISDAGWSEFVRQLTYKAKWYGRTLIGIDRWYPSSKRCADCGHTVASMSLKVRAWDCPGCGMTHDRDINAARNVLAAGLAVSAHGESVSPMSL

SEQ ID NO: 58525 - protein, 407 aa, unknown
  TnpB Polypeptide
MEKKLVRTLCFKLIPDNPELLDELMLEIRNVFNQYLEACKKLNTTNRNKLETYPVKSKLIQKMAREKAREAVKSYFELRKQGKDTSFPKPKEKPMPVRMNYKEGYVVKEDFTVRISVYPRVHVYGRLKGSDLDFAYLYNALKGKYDIGTAELLKRDGEFYLHVTISKDFNKSYEPKTFIGIDVNENSVAITALDESGRVLKSAILEFNELKFLRHKFDLIRKRVQSKKLSMLKVLGRIEKNTVRDWCYKVSRIVVEFVKQFPKPIIVLENLNGMRESIDYGKRMNRRLHKIPYAMIQSFIEYKALWDDVLVERVDPRNTSHRCPLCGGRGVRRKRLFKCSCGLQDHADRIASLNIALRGYTYLKENVPSVKRLPALRKVRWVAAGRVNRPTPAVRVYLGEATVFRRW

SEQ ID NO: 58526 - protein, 346 aa, Catenibacterium sp.
MAQQILKEVDGSFKSFFGLLKKAKQGEHALKDCRLPRYLPKDGYTTLVIGFVRLKGNKLILPYSNSFKKTHKAVEITVPPILLDKKVKEIRIIPKADARFFEIQYTYEAECIQRNLNTTNALALDLGINNLVTRVSSKGETFIIDGRRLKSINQWFNKKNARLQSIKDKQHFGKKPTNRQKALARRRNNRINDYMNKTARRVIDYCIDHDIGTLVVGYNETFQKDSNIGRRNNQTFVNIPYGKLKDKLEYLCELNGIILVMQEESYTSKASFWDKDVIPVYKSDDTEEYHFSGKRIHHGQYRTASGQVLNADVNGALNIMRKSSVVDVNILYSRGEVDTPIRIRIA

SEQ ID NO: 58527 - protein, 543 aa, unknown
  TnpB Polypeptide
MTTKLLSVKKKDNRNFITVECLLAFDKDEDKEKVLNLMRKFSSMVRFAYKRLLEKIERKELKKLLAQKYRINTRYSDDAIFLAQQTLNACIERGQNPKKLVFGSRELFEKLKKKHLTGKRREKLRQEWEERRYGFLYSRGDKSKEGNLNLRLVNLNNQWHLRINLGNGEYVWAKVVRSVKRERDRWINLVWDFTQAERTGNWFAYTVRLKLKNGKIYAQISKEENFPEITITKENGVIGIDINAYPFHLALSWTSRDGNLEEYERISLNGLLDGNADKREYLSWQIAHQVVEIAKREGKAIAVENLGKVPKGRRGDGMPKLRQKLQKWIYKGLLEKIEVVCKRNGVQLIKVNPAYTSIIGKLKYAPIYRIDKDVAGAYVIARRGLGFEERLPKNYRELLKDKEFLAYAIAKVDERINELKSELEKEKNEYKKNALKGRIKRLSRLLKLLLSHTRDSGKSEPATQEPVNRKMERVRGSTQVGQKSWRVLSVALAFSCLESFRDFSPLKRVILLGDWVGVAGRVSPSLLGQGTAAQNMCSFIQFR

SEQ ID NO: 58528 - protein, 669 aa, Micromonospora sp.
LVLLDRWWVVELVSGKLRLGEGETVRTACARAVLRTGVDEESGEVLSAAVLVQRVGWCADLVAGMVAALIGEHWNTADVEVLAAGVDAGGRRLPSNAWMALRRLGWAVTAPEGVRVNDRIVRMAQEQAGRALRSAAWRAEVTAGVLSTWPADPRQRTPAEWDQVRKAIPGGQHLPSNVIKGRTRQVVTFVKANGRLPVDVFELEGVPRIPRMLLLAACDRQQATIERSDTDPARALLRLQLPTRPDPQTYRDWTWVECRITLPSTVPASAVLHLPTLRLTDGTVRADMAYTHAVPKARTTGHSVALGVDWGLNTLLSAGALRLGQDGRITVLGAGGQFRAAGILAKQHRLRRQSERLHAKADQYQRLIGVDERHHLVGKHAVIRDEIRHVSARRQNLNDALAWAAARWTVDQAIAARATAIYLEDLRSMEAKGMGRTLNTRLSQQVRGKISDRMRHLAAEHGIAVVTVPARNTSKHCPQCLTPLQHRKAPDRPTASGWKWAICPHQSCRWQGDRDHGAWRRIAARGLTHQTKTVTDKTTGAMVIRTVVDELEAAAVVTPTMSKTSRRDRSKTGPTRPRTSRPAPRRRRAPSPTRPHGRAGKRPEGHAPTDRRLPRAAHRHQDVNTISTPTTGHRPRGAALGAGFHLHAHATPPRWETIPETPSDSGSLS

SEQ ID NO: 58529 - protein, 196 aa, Lentzea sp.
VEQLTRYLELLNRDPQLAPVRGVFAAQQAKVARAHRKVRTARQDFLHRTTTGLVRSADVIAIEDLSVQNMVRNRHLARAISDAGWGEFRRQLGYKCDRAGRTLVVIDRWFPSSKTCSACGHVLARLALSTRHWTCPSCRTRHDRDLNAAKNILAAGRAVARGTVSGDACGADVRRQGPSLPRSAVKQEPRAARHSA

SEQ ID NO: 58530 - protein, 367 aa, Clostridiales sp.
MERIRGYKYRAYPDKKQQEFFSKNFGSCRFVYNHYLAMRKTSWTEDHVSMSYTDTAKDLTHNLKKEYVWLKEADSSALQQSLRHLDNAYKNYFAKRAGYPKFKRKRSDQSYRTMNNNDSIRIEGDAIRLPKAGKVKVVNTRGFEGRIISATVSRTSSGRYYISLQVEEEYEILPNNGGKVGIDAGLTVLYTDSENNKIENPRTLSKHEKRIRRLQRELSRKKKGSRNRDKARLRLAREHEKVADIRNDFQHKVSYRLASDNQVVCIEDLNVKGMMKNHRLAKSISDASWSEFFRKLGYKMADRGGILIKVPRTYPSSQRCSCCGRQNRRVRDLTIRNWTCPACGTKHDRDMNAAVNILAKGLEMIAS

SEQ ID NO: 58531 - protein, 598 aa, Chloroflexi sp.
VDLLSWRWVFFVNVPIGIAACIFSFFFLQEYRDRTAGHFDLAGFLLAGSGLALVMYALSEGPSYGWTSISILGSAVGGLLLLSVFAVVEVRVQEPMLDLHLFGNRLFRSANLVTLFSSAGFLGVLYAAPLYLQVGRGVSALTSGLTTFPEAIGVVVSTQIAAQLYPRIGPRRLMAGGLLGAGVVMALLSLMESDTSLWWMRLLIFLAGAGMGFSFLSAQTATFATISPRATSQASALANALRQIGSALGYILAPLTIHERDGTFPSKYELEAAFKGKGEHVPATTVQMLADRLSKSLKRFLVAKQHDIPGIGFPRFKKPNRWHSIPLRQYGKDCYLHEDKNHLIVPKKMGHFLKIKLHRPIEGTPKTVHLVLRADGHWYALIVCETEPQHEHLPSTCEHPDIGLDVGLKSFLTDSEGNTVENPRFYRTSQRTLRRKQRTMCRRKKGSHRRRKAAKNVAKTHLKINRQRRDHHFKTAKPYAERYHHLAIEDLQITNMVKNHHLSKSILDAGWGQFLDILEDRAARAGHQVIRVNPRFTSQKCHQCGEIVQKSLSVRTHVCPFCGCVADRDVNAAKNILQAARLGHSLQEPTYTDGCRVS

SEQ ID NO: 58532 - protein, 410 aa, Actinomadura sp.
MARQVKRAFRYRFYPTDEQAAELARTFGCVRLVYNRALEERTRAWYTEQRRVSYVQSSAALTSWKKTTELAFLNEVSSVPLQQALRHLQTAFTNFFAGHAKYPRFKAKKKSRDSAEYTGSAFRWRDGELTLAKMSEPLAIVWSRPLPVGAEPSTVTVSRDAAGRWFCSILCHDTITPMDPVERAVGVDAGVTSLVTLSTGEKIANPRHERRDRERLAKAQREMARKTPGSANRDKARRRVARVHARISDRRRDFLHKLSTRLVRENQTVVIENLDVRNLVQNHSLARAISDAAWRQLRTMLEYKTDWYGRELVVIDRWFPSTKACSRCGAVTEKLPLKARTWGCGECGARHDRDVNAAKNVLAAGLAVSACGAGVRPQRESSRTGQSAAKQETRRATAGIPAFGQERKSR

SEQ ID NO: 58533 - protein, 377 aa, unknown
  TnpB Polypeptide
MQVKRAYRFRFYPTPEQEVVLARTFGCARFAYNHMLRLRSDAWMQRQERVGYHETSAALTALKKTPEHAWLNEVSSVPIQQALRHLQTAFANFFAKRASYPQFKRKDGPQSAEYTTSAFKWGGQSLKLAKMDAPLAIRWSRTIPKAAKVTTVTVSRDAAGRYFVSLLCDDAVAAKPVAQGKVGIDLGLTHFAILSTGEKVAAPNTFRRYEKKLAKLQRRLAKKTKGSNRRKKAKLKVARLHAKIADSRRDFLHKLSTRLINENQVIAVESLSVSNMQKNRCLSKSISDAGWSEFVRQLEYKASWYGRELIGIDKWYPSSKRCSDCGYTMAKMPLNVRQWTCPECGATHDRDVNAARNVLAAGLAVSAHGESVSPVSL

SEQ ID NO: 58534 - protein, 398 aa, Microcystis sp.
MIVLETKAVVKPSQCSAIDEAIRTVQFIRNKALRLWMDAKREDKIDKYSLNKYCAVLAKQFKFVDTLNSTARQASAERAWSAIARFYDNCKKKVKGKKGYPKFQKNNRSVEYKNSGWKLSEDRKKITFTDKKNIGTVKLKGTRDLNFYPIDQIKRVRIVKRADGYYVQFCLSVDIREYAKPLEPTKRCVGLDVGLKVFYANSDGETVEIPQYYRKAEKRLNRLNRKKSKKFRKGQPQSNNYQKARKRYARKHLRVSRQRKGFVEKEALRVIKSNDFIAYENLNIQSMVKNSKLAKSINDVAWSIFRQWLEYFGFKYGKVTVAVAPHNTSQNCSNCGQKVPKSLSTRTHTCPHCGYVEDRDINAAINILKKGLSTVGHTETNTLGERFPLANAGYVLPD

SEQ ID NO: 58535 - protein, 273 aa, Microcystis sp.
MEKAYSYRFYPTPEQESLLRRTLGCVRLVYNKALHERTQAWYEKQERVGYTETSSMLTDWKKQEELEFLNEVSCVPLQQGLRHLQTAFTNFFAGRTKYPSFKKKHQGGSAEFTKSAFKFKDKQIYLAKCTEPLPIRWSRQIPESCDPSTVTVRLHPSGRWHISIRFDDPTIKPLPPTDKAIGIDLGISSLVITSDGDKVSNPKHFKKHYRRLQKAQKSLSRKQKGSKNREKARIKVARIHAQITDSRKDHLQKLTTQLGFAEKVIEKYRSLNQ

SEQ ID NO: 58536 - protein, 240 aa, Ureibacillus sp.
KYEMPEDQRELNDQKALAIDLGLNNLATCVTSDGRSFIIDGRRLKSINQWFNKENARLQSIKDKQKIKGTTRKQALLAMNRNNKVNDYINKTCRYIINYCIENQIGKLVIGYAETLQRNMNLGKKTNQNFVNIPLGNIKEKLEYLCKFYGIKFFKQEESYTSKASFFDGDEIPEYNADNPKEYKFSGKRIKRGLYRTKSGKLINADVNGALNTLKKSKAVDLSVLCSSGEVDTPQRIRIA

SEQ ID NO: 58537 - protein, 133 aa, unknown
  TnpB Polypeptide
MALIYQPSKRIFCGWFEPLKSTTYSEYPKIQGMMKNHHLAKAIADAGWAEFMRQCEYKAKHEGRIFAKIGTFFPSSKTCSSCGHKLKELSLATRSWTCPHCGAHHDRDINASLNIKQEGIRKLKAAGLTVLRS

SEQ ID NO: 58538 - protein, 470 aa, unknown
  TnpB Polypeptide
MGQATRTTKLLLDLGKRTQGGANSQKRAALDATAAVLNAARTFYIDFFLAHAEKLAERVAYYSEEHREIRARLISAHELLSWAEACTVATAAHPHPWTGWNFTERFPAMPFAYRRSVIKDAIGKVRSDLSNRANWEKSGKQKGKPGQPAATDHPTLYQGCLALDLEVLDFQAAFVRINVHTGEGWRWMAYPVSSSRYTVRRLREADWQRQSPTLVLRAHTAELHIPQVKQIAAKKVMERKQDPDLITVAVDLNVKNLAVITVRQHDKVIQTVFVTDHGLDAHRYRHLGRIAKKQWQSGRPVKGEHSNQQLWRHIDRLNEDAAHKVARIIATVCARYAGCLLLFERLRAIKPGPGSKSRRMNRRRANQLRGKIREHAKDKAYVQQVVTVEVNPHGTSQYCSRCGAKGERFSYRGGKRIVEKWGKLFWCPVCQYEANADFNASANVHRSFYREWHWQPRKAKAPPLPVSEGG

SEQ ID NO: 58539 - protein, 458 aa, unknown
  TnpB Polypeptide
MRFAFKRLLEGYQRVELKCRLQSIFDLNSRYVDDAIFMAQQIIDNAKSRGQNPRKIIFGGRKLFERFQSKRLTPEEHERLKAEWKERRQGNLMSRGDRSKGGNLNLRVVRRDDGYYLRVNVGNRQWLMFKMKTAHKRWQTFAEVIKRREPYCVQIKKRQGRYHVLISFKEPQPAAAIGFDKGAIGVDINAFPSRIAWAEIDCTGNLSSYGVINAPQLWNGRANQRNYWCWQIAHRLIRIAKSKEKGIVIEDLKIQDKGIRGDWSGRKSRRIRHQFTYRKLISCLKRAAARHGVAIREVNPAYTSVIGSLKYAPQLSLSKDVAAAWVIARRGLGFCERIPKNYKALLKSLQPESGTVEESTDGRNSLTAGAAKSHLYNPWRALKVAVLTALSPGRRVPRCLSPLKRFLIQGTWGEPTKGREVLLPGAGPMGGQIPPAGSGRPEDGGPGQIARPRASCAL

SEQ ID NO: 58540 - protein, 377 aa, Escherichia sp.
  misc_feature (180)..(319): Xaa can be any naturally occurring amino acid
VKRLQAFKFQLRPGGQQECEMRRFAGACRFVFNRALARQNENHEAGNKYIPYGKMASWLVEWKNATETQWLKDSPSQPLQQSLKDLERAYKNFFRKRAAFPRFKKRGQNDAFRYPQGVKLDQENSRIFLPKLGWMRYRNSRQVTGVVKNVTVSQSCGKWYISIQTESEVSTPVHPSASMXXXXXXXXXXXXXXXXXXXXXXXXXXXXXXXXXXXXXXXXXXXXXXXXXXXXXXXXXXXXXXXXXXXXXXXXXXXXXXXXXXXXXXXXXXXXXXXXXXXXXXXXXXXXXXXXXXXXXXXXXXXXXXXXXXXXXXXXXXXXRLSQSKFRCQVCGYTANADVNGARNILAAGHAVLACGEMVQSGRPLKQEPTEMIQATA

SEQ ID NO: 58541 - protein, 391 aa, unknown
  TnpB Polypeptide
MTNLSIRYALENDLTARGSMVSFAQSMAKEYHINFAHARIATEVALSMDKGHRRRVRKGKRCKVPYVFKPFLRADDSTFHVSLDTGRIRLSLRAGEWIGFNFKMSKHHLDVLSSGKAKQLVLNEKRAVLVIEREVPKRYEPAAIIALDTNERSLDGVSFSSDGTSAVTVPYPDVSMIQHRHFVRRRRLARKKLHDRRVWRRLANKEGARERARVKQRLHLISEGLVEEAAKERAAIVLEDLHLPKGGGRGGKMRRRLSVWPQRELHRQIEYKAEERGVPIVKVNPRNTSKTCPRCGEIKERRSRVGKVFVCGKCGWRMDRQINAGLNICRTALDELPEGAMKQALGGLRLDPDALANDAMILLYSPSNVGAHEVSGRPGNTGRVEQERDWL

SEQ ID NO: 58542 - protein, 422 aa, Microcoleus sp.
MQLTERHIIKSTELRFIEIDQLAFKSKNLYNAANYVIRQSFVYGWGYVNYNEMNRLMKSHEAYKALPSKVSQQILMVLDKNWKSFFEAVKAYKADSSKFTGRPKLPKYKDKTKGRNILVYTIQAISRKQLKKGIIKLSGTELLIKTQVAPARICQVRLVPKCDCYVIEVIYDEPESTLGNANSVASIDLGLDNLVALTSNQPGFIPLLLNGRPLKSINQFYNKRSSRLQSQLKRNRKTSLRIQRLTRCRNQKVDNYLHHASRTIVDLLIAQQIGTLVIGKNAQWKTDINLGKQTNQNFVSIPHARLIKMLEYKAFLVGIKVIVQEESYTSRANFLGLDPIPVYGKTEIEPIFTGKRIKRGLYKTSAGQLINSDVNGAYNILRKAIPNAFSNGIGSCVVQPRRVNPLKAKVKGEGLEASHVYK

SEQ ID NO: 58543 - protein, 331 aa, unknown
  TnpB Polypeptide
MLIIALPWINDCASKACKKSLVNAEVAFKRFFYGLSGFPKFKKKSKQDIKLYFPKNNKSDWKIWRHKLMIPSIKQVRLKEFGYLPVNANVINGAISYIAGKFYVSVVVDIDKKSKYNKDLKVSYQLQTKGFGIDLGIKDLAIVSNNQIFKNINKSSKVKRLEKRLRREQRHLSRKYEFKKKKGGKTAMTSANIEKQKLKIQKLHQKIGNIRKDYENKVVHEIVKQKPSFITMEDLNVKGMMKNKHLAKAIAAQRFNYLLTKLKRKTEIIGIELRMVDRFYPSSKTCHACGYINKTLKLKDRIYVCPKCGYTKDRDFNASLNLRDAKEYWVI

SEQ ID NO: 58544 - protein, 415 aa, unknown
  TnpB Polypeptide
MQSNVIRGLSKQDYTMLREMCRYSNNLYNVAVYTIRQHYFDTQQFLRYEENYPICKKNENYSLLQAGISQQILKVADRSFCSFFGLLQKVKSGNYGSKAVRLPHYREKGNLFSLILSTNAINIKNGFLTVPMSREYMKRHNGHRIRIPVPDRLKDKTIQEIRICPMYGGRYFKIQYCYLQDPEPVKTSPDHVLAVDLGLDNLAACVTNTGTSFLMDGRKLKSINQYWNKRKARLQSIAAKQGQKTTNQLCQLAKKRHFRMQDILRKTARYILDFCIDHQIGTLVCGYNRDFKRGLKLGKVTNQHFTQINLSYLRSTLKYLCERYGITYLEQEESYTTQASCLDLDDIPVYQPDTPYTGTFSGKRIRRGLYRFANGRTANADINGAANILRKSKQNFDFEGLCKGLLDSPLRIRLS

SEQ ID NO: 58545 - protein, 498 aa, Bacillus sp.
MTKPKKDCFIIELKLIVDTWQKDILLKRFEIARKLYNTTLSYATKQYTLMKEAKSYRKQLRCYQKAKKANHPKESKEIAKELDSIRQSFGLSEYQLHAYIKKHQHNYKKHIDINTSQKIASTVWKSMQDVIFKGTKAHFKPYGMLRSVEGKSNKTGIRFKENRVYWNGLLLPVRFRKNDLFIEESLALHTIKYCRLVKKMIRGKDTFYVQLVMGGIPPAKRINKTGAFRHSYQKKKRVGIDIGPSTIAIVSEETVSIQQLAPDVPLFEREKRRILRKLDRSRRSTNQNNFNKDGTVKRGIKLHWTCSQNYQKTKSLLNELYRKKASYIKEKHGALANSILSLGDEVYIETMHFNGLAKRTKETKTNQQGKFQSKKRFGKSIGNHAPAMLVEIINQKLKYGKQEIQKVNTITFRASQYNHVTNSYEKKKLHQRWSQIGNHLVQRDLYSAFLLMNSDVNLKQTNQNRCIQTFDIFLKLHHQHIESLQQTKKKYPLSMGIL

SEQ ID NO: 58546 - protein, 513 aa, Chloroflexi sp.
MRQTNTDSFTTEIPLRTAPAQEQALLARLEAARQVYNACLGESLKRLALLRQSKCYRAALKIPEGKARSQAFRKAQAAVGFREYDLHAYAVQFNHCWIGEHLDINTIQKLATRAFNAAQQHAFGQRGRPRFKGRHQMDSVEGKSNASGIRWREGHVEWLGLELEAIIGADDLVIAHGLKSRVKYVRLVRRKLNGRHRFYAQLVCEGRPYQKPQNRPGQGVVGLDIGPSTIAAVGEGEAFLEQFCADLAPRQDQIRRLQRRIDRQRRANNPDNYLPDGRIRPGPKVWRRSSRQRQTESQLAEAHRRMAAHRKTLHGQMTNRVLRMGNTIQLEKVSYRAFQRQYGKSVGVRAPGMFVQRLKRKAESADASVVEFPTRTTRLSQTCHGCGRIAPKPLAQRWHICDCGIVAQRDLYSAFLASCVEGDRLNAGQAEMRWPGVDSLLQAALSRIQPANGRPVPSSFGLNSRRQSRSPVKANVNAVEAQDVVPSIAPGNAGESLRETAESLEPPGFSRGE

SEQ ID NO: 58547 - protein, 374 aa, Clostridium sp.
MILGNKVRLFPTKEQEQKLWQSVGTARFIYNWTLARQEENYKNGGKFISDSDLRKEITILKKTEEFKWLSGVSNNVAKQAVKDGCEAYKKFFKKLADKPRFKSRRKSKPSFYNDNIKLKVKDNTVLIEKVGWVNIKRNAIPMNCKYCNPRVSFDGKYWFISVGIEKEQSIVELTNEIIGIDVGIKDLAICSNGMAFKNINKTKTVKKLEKRLRRLQRRVSRKYLKNKEGSKFVKTSNIIKIEKQIKLLHRKLANIRSNYNHQATNMIVKTKPSRVVMETLNIKCMMKNKHLSKAIAKQCLYEFKRQMQYKCEFNGIEFVEADKWYPSSKTCSECGHIKTKLSLSERTYICEKCGCVIDRDYNASINLSRYELVV

SEQ ID NO: 58548 - protein, 257 aa, Blautia sp.
MVKAIKVMLIPNNVQKTKMFQYAGASRFAYNWALAREIENYEKGGKFLSDAELRKEFTKLRHSDEYAWLLSISNNVTKQAIKDACTAYKNFFKGLQKFPRFKSKKRSMPKFYQDNVKIRFSNTHVKFEGFSSSRKANKQKMNWVRLAEHGRIPTDAKYMNPRISFDGLNWWISVCVEFPDCREILNDDGVGIDLGIKELAVCSDGTKYKNINKSQKIKKSEKQKRRLQRSISRSYEKNKKGESHCKTNNVIKRKNFY

SEQ ID NO: 58549 - protein, 529 aa, Bacillus sp.
MFVEVFHMAIPRSPSFVLTLELDSHPGLFSAADKELEILRVIYNTVLGNYLKLENQMKRLKEYKRWIRQLHGIKGKLAFDEENPFLQNELECVRERLKDLREQYQLTEYASHAWVKGIRKHFGDKVNAAFAQKTASRAWLTFRKKLFGKAKKVVFLRKGEMASFEGKTNKTGWRYHNKHLVYKDMSTPLKWTGHDSYVSEILSHLEKKTPFTYTIQKNGEAQTINDFYHVKYVRIVREIIRGKVRFFADLIIAGYPSSKGRKLGKGRIGLDIGTATLAVSSLKKVALYNLAEDVKILAREIKLAQRRMDRSRRAMNPGNYHENGTIKKGRKEWQLSNRYQKQQARVRELNRRQAAIRKLAHQGLANSLLPLGDAFFIETMNFKALQKRAKETKVSEKTGKYARKKRFGKTIGHRAPSMFVSILEQKVKSLGGIFKRVNTQTFKASQYCHVRNDFFKKPLSERWHVIEDETKIQRDLYSAFLLMNADSSGTKAKRKACMETFRRFKSLHDQEINTIIKEERRILNSGILL

SEQ ID NO: 58550 - protein, 409 aa, Bacillus sp.
MARKTTKQRNEELAPDGKQLCHYGLKLRMEPNSKQEKQIHQTIGNARFTYNFYLSEKKEVYQLTGETLTYGEFKKAFNHLKDHPYYSWLKASDKFALETAMEQVDDAFERFFSGQNKFPKFKSKHKSKQSYSTKETNGNIKLNIEKQTIQLPKLGEVKVRLSKKHRKMLKENGLKGTIKSATVTYHSSGQYNVSLKMEEIIHMKEPVDVSEIPDESFIGLDLGLTHFYIDSNGKKVENSHYLKKSLRKLATLQRQLKNKNIGCHNYKKLQKKISKLHLHIANQRKDFLHKESRKVVDENQVIVLEDLHVKGMIRNKKLARSIADAGWGLFKTFITYKASWANKTVVFVNRFFASSKLCNRCQTKNIMLSLSDREWICPSCRTKHDRDINASKNIKEEGMRILHSHPHSA

SEQ ID NO: 58551 - protein, 381 aa, unknown
  TnpB Polypeptide
MNKAIKYRLYPTKEQIEYFNICFGCCRYIYNQGLDWRIKAYNADGTYLNYNDTAFGLTALKRQNSWLREVDSIALQQSLRNLDTAFKDFFNKPKSGFPKFKSRKNSRKSYTTINQNGTVAVIDDKHIRIPKAGVIRATVHRMPETRWKLKSATVSMDCDGKYYISMLFEYVSCVTPVSVSNKIIGFDYKSDGLYMDSNGNIGSDHKYFLESHKKLAKEQRKLSRKVGSKKNEPKSKNYIKQQLKVNKIHKHIANQRLDNLHKKSSEIANQFDVACAESLDMKAMSNKGFGNGKATMDNGYGIFLNMLEYKLNDRGKYFIKVDKWYPSSQICCNCGSIHKLSLNERTYRCECGLVLDRDLNAAINIRNEGLRILQSKNTKVG

SEQ ID NO: 58552 - protein, 425 aa, unknown
  TnpB Polypeptide
MNRTYKYRLYPNKTQSERLDFLLWQGRRIYNGALAMRKEAWEQRQESISLYDLRDHWCALRKDEPDTFGLLPYKTVEDLMRRLDKAYKAFFRRVKTGETPGFPRFKGRYFFNSLGYVKGNGFKFLATSEGWGKLSIVNCGDIRVRMHRKLPDDAAIKYGLVMRNKRGQWWVALQLELPDAEPEPSDKPAVGIDVGMVYLLALSDGTTIDNPRWYREGKQKRRVLMRKLDRQRRANNPQNYNADGTAKAGVFVWHKSTRMKETERQLRKLDDKIRQQRRYFWHTLTDWLTSTYGFIALEDLTLDFMIENKRLAMSAHDAAFGEFWQMLDYKAAERGVTVVRVPPAYTSQTCSECGVVDRENRQTQAKFECVSCGHTENADVNAAKNILRMGLKGAVQAPRGAIEASGSKMPCEGPETDTVSGRVAT

SEQ ID NO: 58553 - protein, 424 aa, Microcoleus sp.
MVAMKQVLTIVVKLQPTPEQAAKIEATLQAFADACNYVNQHTDPKLTNKIAIQSLTYQTIKNEFNLVANMAVRACARVAANRKVAKHKVAKHKVAKHKVAKHKGKPVKWFAPTSIDCDKDLFRFREHDWTVSLATTHGRERVKLKVGNYQRGKLKGRNPTSAQLCKHRDRQFYLHIQIKDDAPDSPITDKVIGIDLGRRDIAVTSEEKKWDGLHIQSVRDKFSQVRASLQKKAPKGTRTTRRRCREVLKRLSGRERRYQQWLNHNISKSVVKRAVELSASIAIEDLTGIRERTNQQPRNKTERRRSNSWAFYQLRLFIEYKSLGAGVQVIPVSPAYTSQMCHNCLHIHPVKGKSYRSGKIFKCEHCGWHGDADFNGANNIALVGLSINQPGGTGLSCKLNRTPRYVQLSLFDDFRATENPDLSR

SEQ ID NO: 58554 - protein, 142 aa, unknown
  TnpB Polypeptide
VTRWIAEYCRKEDIRCVVVGDICNIRNGKDMGHKTNQKFHGLPYNRLYIMLEYKLKLYGIQLIKQEESYTSQCSPLSPEVSKRYAEVLNRKKRGMYVTGGVRFNADTVGAFNILRKYLSAFGKQKQLSVTGLKNPEIIKVAA

SEQ ID NO: 58555 - protein, 427 aa, unknown
  TnpB Polypeptide
MKSIYKSYKFRLYPNIDQAILLNKHLGCTRFIYNYFLNFKKTEYETNKKTYSIYDIQKELTKLKSITEYKWLNEINSQSLQCELQNLNTSYTRFFNHRSNFPNYKSKKNSGSFKIPFQLANKINPTIRIETNLIYLPKFKTGIKFNDSRNIDGKILSITVSKTPTNKFFISICCKINADKLPQIDKTIGIDLGLKSFLVTSDNERIDNPNFLKKTLKKIKYLQKQYSKKQSKSNNKNKIRLKLCKQYEKITNKRTNFLHQISKKLINENQVICLEDLNVKEMVQNHSLAQSIHDVSWNTFVNFISYKADWYGRNIVFLNQHFPSSKMCSHCGYINQSLKLNDREWICPKCGNKHDRDYNAATNIHNVGMNWFNSDEINISKNISNKTIKTGSGTESVYKQKSQEASTIAESMNVKFKSIDSSSNKVY

SEQ ID NO: 58556 - protein, 132 aa, Klebsiella sp.
MDNLHKLSRRLINENQVVCVESLKVKNMLRNPQLSEAIADAGWSELVRQLQYKGEWAGSSVVAIDQCFPSSKRCSCCGFTMKNMPLDVRKWHCPECGADHDRDINAARNIKAAGLAVLADREPVNPESQHAA

SEQ ID NO: 58557 - protein, 528 aa, unknown
  TnpB Polypeptide
MFVSLQFKLELKKEDKEKLIQLMRKQSSAIRMAYNMLKELEKEKTKNPHAQIYHRLRQLFPELPTKYIDSAIYKAKQYPTDKPVVFGGKRLFEKLCKNHLTRKAREKLKKQWRELRQGTLISIGSRHEAVKGNLLLRFMELDGKLHLRITTGKREFVYAKVLREPSNSKDKWLTFIAMLLESWQTQNYFAYTVELKLRNGEVYGSVSFEIPTPEVRCTKENGVIAIDTNASPIHLAVAEVSKTGELLSYQTISLHNLLGLSQNSKDNQEWILAHQLLDLAIQKGKAIAIENLKKLKRGRRGDGKVKLRKILHQWNAKRFLQKLKRVAMLKGVEVIEVNPAYTSIMGMLKYAPQLSIDKDVAGAYVIGRRALGFKEDMPENYEKLLKDKAYLEFALKRYEEREKELKELLEKESNEYKRNALKSELRSVENARKLLANFLQSLQGEPSGCEGAYGRNPKQGETKKVSQVVWQVLKVALLFPILGKVLPRDLSPLKPVLVEGVWDRVRSRLVPLEAGGTVPMRDFLEQPP

SEQ ID NO: 58558 - protein, 325 aa, Salmonella sp.
LRAATDKRLTAIKAMPEFSWLCDVSAVPLQQAIRHQQTAFANFFAGRAKYPTFKSKRHKQAATFMNTAFNGCLFMAKSKAPLDVRWSCPLPSVPSSIIISKDSAGRYFVSCLCEFEPVSLPITPSTVGIDVGLKDLFVTDTGFKTGNPRHTAKYAKRLSLLQRRLSKKQKGSKNRAKARLKVARIHAKIADCRLDNLHKLSRKLINENQVVCVESLKVKNMIRNPSLSRAIADASWDELVRQLQYKGEWAGRSVVAIDQFFLSSKRCSCCGFTMQKMPLDVRKWHCPECSADHDRDVNAARNIKAAGLVVLAHGEPVNPESLNAA

SEQ ID NO: 58559 - protein, 407 aa, unknown
  TnpB Polypeptide
MTQFSLAECHYLGYYMTMDMTRTVRIRLRPDLATAALFEQTVQAYTSSFNEVARVGWGAGIANGVELHKATYYPERARTGLPAQLVCAARVKATEALKSAKALRTKELKKPADKQHLPALPQSAWCPIRYDVHSYRVDLAAGHGTLLTLHGRRPIHFTLTAYTRQYSDWTVTSADLVRDRRGRWGLHVVVTHPLSKTAPTDEIVGVDLGIVHPATDSNGTHYGSDHWTVVEDRTHQLRRRLQAKGTKSAKRHLKKMSGRQRRFRRDCDHILSKRLVASVRPGATLVFEDLTDIRGRAKARKEQKRRLHAWSFAQLQFFVTYKAEAWGVRIGLVDPRYTSQKCSACGHRDRANRVDQAHFRCVSCHFSCNADHNASLNIRDDYQRAAVSPPTVSTQPRAAASGTSLAL

SEQ ID NO: 58560 - protein, 347 aa, unknown
  TnpB Polypeptide
MMLKRTIHAKLILDRKGKREAVEREYDAWQRQLQGSNEQLYSATKQQAERFKQRVKKQNHRRGLKMREYPMILRHDCVKLQQQKKSMFRWWIRIPLHPESLWIPIQLPYEQQPLLEHELRECKLLHGEADGEWYVNITVQKQAHLKRKYATVLPIDMGIRKLATSIEDDKPCFYGKEVRSIRGYHFRLRRSVGKPSIIKKWKHAEQVSVKHEVHAITRRIVEHAKRMNALIVVGDLEGIRGQDRGRRFNRRLSSQPFYLFKQLLTYKANWEGMRVLAVSEAYTSQTCHRCGVRGERVAGRFSCPTCGLVCDADVNGAWNIAKRAHGLLIHETGGLSAVPRTLAVCEP

SEQ ID NO: 58561 - protein, 372 aa, Nostoc sp.
SQALQSTLKRVDFAFQRFFKGLGKYPRFKPIRHYSGWSYPSFTGWKAHSAGDNGYLELTKIGQIQMRGKARLWGHPKALDIVHRNGKWFASIVLEIDDTLLKNSRKTDCGVIAIDLGCNDAIAWTNGEDNGLILAPRFFRYAEQIIKQLSKKKRRKRSSNFKKKQKASRRWKKVQKQISKLYRQVANKRQNWVHQQTTRIISSNSTVVTEHLEVKNMSAKAKKGKRKKQKSGLNKSILDVGMGMIKQSLKAKLDDVAGVFVEAPTKKIKPSQTCPKCGHQEKKSLDQRVHICSNCKYTQQRDIASCEVLLLWYSNQLPGFGTNLVGADDSSSTSHTRKTAASMKQLGQRKRQKSQTSPEDVETPGSSKPSQG

SEQ ID NO: 58562 - protein, 693 aa, Actinomadura sp.
LGPSTDTETPGHGSTRIDPPDRRPAEPAPQAGSGRRTAPRAGRRAAGGGAVPGVPAAADVVRAAADRRRPAVGGGRRAGDDDPGVAERGPAGRPLDLADALAGHRGAAYRDRRPSAPRRPAARGRRRPPGEPPDGGRDGRPAAQGRGDRGAGLAVARAPAGADRDGPARPDGEPGGRAPRDPRGDGEVPGVLRASRTARRPGGEGGAGQMTEMRTNARVCAYASSEPRRRQGTFARVLSAAPITVRAVMVTQAYRFALDPTSRQERGLRSHAGAARFAWNWGLAACRDRYDAEGKWWSGAELHRLWNREKKSDPGLGWWSENSKCVYQEAFRDLDRALREFVRSRKGVRKGRRLGFPRFKKRGRCRDSFRFGAGAMRCSGRTVTLPRLGTIHTHESTRKLARRLENGTARILSATVSRTAHRWYVSFTVQLDRIVAERHVRPGSAVGVDLGVTTLLTAVDDHGRVTQIAGPKALRTGLRKLRRLGKAHSRKQRGSTNRAKAAKRLARHHARVADIRADALHKATTHLAARYETVVVEDLNVPGMIANRRLARAVADQGFGAARRMLEYKTGWNGGRLVVADRWFPSSKTCSGCGGRKPSLSLSERTFRCDACGLTLDRDVNAAINLRDLAASGAEKRNACGGAVRPGLAGQPPAKQEPGGRERGHDRGRRRASGGYPNSGCPHPLTFQVTVTS

SEQ ID NO: 58563 - protein, 552 aa, Actinomadura sp.
MKQSATDGERATTGAFAAPFVVAGPSGVAVRDRLKGLTAQDERVLRLAGAHLGSLAGRDLKVRCADGLEHDAQRWAVRKRELTGESSARWAGSITKATHDQWALARRGLLAHLRSLEAGVATIEHRLSLPIGAPGSKRAPGGYRSRREWFAKSRRLGVLRDRLAAERADWDAGRVHVVRGGHRLLNARHHLNEAGLTQEQWRERWEARRWFLRADGESGKRYGNETIRIAPGGEVSIRLPAPLGYLANAPHGRYVLAARVAFRHRGTEWADRITADRAVAYRIHLDVERGRWYITASWQRVTAPTPPLETARVRGMIGVDTNADHFAAWHLDRHGNPVGDPKRFGYDLSGDAAHRDAQVRHAITGLLHWAADCGVAAIAIEDLDFAAEKTREKHGRRKRFRQLISGMPTGRLRARLVAMAAEAGLAIVAVDPAYTSTWGAQHWREPMSSKTRRVSRHDAASIAIGRRALGHPIRRRTAPPRHHQSDDRGHRTVQTGPGTLGREGPRHPVTEPVHDAGPPDAGNQNAGNQRVQHRSGHAQHRDMGSELTPGHC

SEQ ID NO: 58564 - protein, 568 aa, Desulfotomaculum sp.
MKKRGKNKKKLIESDDGIKYTVCGEWFPLFWDYHPDPYGKEDETPLDTEMRLFCACTRWAFNRLQEGRSREELKREGQKLFGINSRFCDDAVLKAKAVIESQKELLALEIEETETKLARARKKLGWAEKDLDKAVEANDLVKIEKAKHAVHGCKARVKKLKTKLDELKTHQSNGTIPAVVFGGRSLWKGICKGRVSKEEWRQARQNRLFARGDETKGGNPNIKISYRNGEFALSVTVSHLSEQIGTDSRGRPVMTRAPRVEGKLWLPEKHRLKVWELLLSGAPYTVELIRGGDGRYRVHISFAITAPEPVTNPSRGYLGMDTNPDGIALANVDYFGQPEPWPEGFTVPHPKALHKFAGEFQVTVHPNGFLYIKVSELAYSRGYRRTYLIGVLAKVVVDIAKALGKPIALEDLYFGKDRLDTNRKFNRMAVNFPFRKIIEAVMGRAFKEGIGVKPVRPAHTSTIGYYKYMERYGVIIHHAAALTIARRAIDFRDRITNELKQKILAVKEKLIRKVGSLPGEGKGMTRKVKRLFKRLDKKIPVYNGLDRYKQESFYSVWHDLKELVLLSR

SEQ ID NO: 58565 - protein, 400 aa, unknown
  TnpB Polypeptide
MKLYLYALKMLRATKVRIYPTQEQSEFLVAQFGAVRFAYNKALHIKTHMYRRHGVSLSPKKDLKPLLAIGKKSRRYSWLKQYDSIALQQSVIQLHTAFDNFFNPKLKARYPKFKRRFDKQSSYHCVGVKVLDEAIKLPKIKEPVKANIHRCITGEVKSITVSLSKSGKFYASILVDDNVDTPSKTSTITTLIGIDLGLSHYAIQSSGNKIENPRFVKRAENNLRRKQRQLSRKKIGSANRAKARLLVAKCHEKTVNARADFQHKLSRTLIDENQAVIVETLKSANMMKNRRLAKHIADASWHAFIVKLEYKAKEQGKHIVKLDQWYASSKTCHGCGYKVETMSLSVRKWDCPSCGMADIDRDINAALNIRDKGILDLKAAGHVVTACGGLRKSRHERVAA

SEQ ID NO: 58566 - protein, 368 aa, unknown
  TnpB Polypeptide
MKLTLKIKLLPTIEQADILLQTMREANVVCDAISDIAWQNKVFNQFKIHHLCYHSFKSTFNLSAQMLVRCISKVADAYKLDKKTQRFFRPLGAITYDSRILTYKDFSVSIWAIGGRLNIPFICHNSKYLPYIKGEADLVYKKGRFYLFQTVDIPDEDVDDVEDFIGVDFGLTDIIVTSDGKKHTAETLNNYREQRQRVRSSIQSKGTKGKTHSCKRNCAKLLKRLKGKERTTATIINHTIAKSIVKSAKEQGKGISIEDLTNIRFTSKRRNKKFRAKLGRWSFAQLRSFIEYKAKLNGVEFIAVEPAYTSQTCSVCHHIGTRKSKSFKCTNCGNDMDADFNAAKNIATLGRSINNAEKSSMYCILHSA

SEQ ID NO: 58567 - protein, 390 aa, Jonesiaceae sp.
MTDEHARLSSMTANTVKRAYKYRFYPTPEQQEQLAQTFGCVRYVYNRALAERSRAWTQEQRRVTHADTDKMLTAWKRDPETAWLKDPSKGPLQAALRNLQSAFDSFWRKQAKYPQRKKKGKTKDSATYFRGTFTYRNGELKLAKMGAALNIAWSRNLPEGADPSQVTVSKDSADRYFVSILVDDTITPAPATNKQVGVDAGITTLLTLSTGEKITNVKAEKKDREKLARAQRELSRKQKGSKNRAKARLKVARVHARIADRRRDNLHKVTTTIIRENQTIVIEDLAVRNMVKNHSLARAISDAAWTQLRSMLEYKAAWYGRELIAIDRFYPSSKTCSSCGVIRDSLPLNVRSWVCSCGAQHDRDVNAARNVLAAGLAVSACGDGVRPPRS

SEQ ID NO: 58568 - protein, 424 aa, unknown
  TnpB Polypeptide
MKLSMTYSVKIKRLNHIFMDTVRLYRQAVSFFMDVCLQEWDTVSSGKGQKERVNLVESFTVISKKNPSVSYDFGADFYKFPSYLRRAAIAEALGKVSSYRSNLARWEAADPVSRGEKPGLPQAGIVYPAMYRENMFIRTGTYQAALKVFIRNTWDWILVDLRKSDVDYILRHCGNYKECVPTLQKRGKEWFLDFVFQTTVKLSENPVERILAVDLGLNSACTCSVMDAEGTVLGREFLSLPREYDSLSHAISHIKHAQKLCARRTPRLWAQAKGINNDIAVKTAQFIVDTAVKYDVDCIVMERLDLTGKKRGSYYLKETEAPAGYEMDEAPVSLEIGKAQYDAETDTIHAAVTAKDAEKAASIRLTKYDAVSGKTLKNAYYDVAVRKADGSYRKLYEYLKTNAAGELTVEAVSLPKMICCGNLS

SEQ ID NO: 58569 - protein, 452 aa, unknown
  TnpB Polypeptide
MQQIITAKLKLTPTPEQFQPLREIQLAYRDALNVVSRYAFAQGKTSNVTKLHKGMYAQLRARYGLPSQLACSVERQVAATYKGLWTKLLKNKEHRQKHLTKKRFKGLDQPPHYSSPTVQYTYERDYTFQRNQQVSVGTLNGRISIPYQGKDSHIALIQQGASIGDAKLWYDKPKKTFYLLVSLSIDVSDPTPAQLQEVVGVDVGIRYLAVTSTSTGKTSFHPGKRVRHRANHYARLRKRLQKKGTRGAKRRLKRIEQRERRLKMQANHCVAKQIIKQHPHTLFGLEQLTGIRERKKRKKLKRKKNGKGYERVSPKARKANRVYSQWSFAELQALISYKAALAGSLAIKVDADYTSQTCPMCGYRSEQNRPHKGLLFLCHNEECHYTLHADLVGARNVTMRTLLVRQDWIRTGLLSMAPNASDNEAKAARLSRYAELRWSPDVRSLRSLGGGD

SEQ ID NO: 58570 - protein, 270 aa, Erysipelotrichaceae sp.
MQVVSSYGVHIRDSYEALKRTADLFSYAVACLVQTALANWNSLSDTDSSFARLRMMECMVHSANGFSSFDSFDQKFPKFPSYYRRAAIMQALGIVSAYHSAMKSWKASGCKGEAPKLDSCRHRMPALYRGNTYKPVIDKETGEVLPYLAQIKVFRNNDWVWDTVRLSKTDADYLEKRSRNAEISAPVLEKKHGCWKLRFAVTETVKLSKKPVSEQKICAVDLGVNTDAVCSVMDSRGTVLARKFIMRGRERLLEQCPASGICISVSAWIT

SEQ ID NO: 58571 - protein, 393 aa, unknown
  TnpB Polypeptide
MPAGGEGALTVTVRVRVSPEPEGEQAILDLLRRYRDALNYSVRTLIASKALSLSRAHRLLYEDLKERYGLPSKIAQGCYREAIAIAKSWLRNPRRGAVPTAKRLSMWLTHELGYRVKGDYVELIGGYRLRVIGWDRRYDNFPNREARLVFRDGRFDLYVTKRVPRPAKYAPKGVLAVDVNERRIVVGNSSVEQRIETPIERALRYRRLAERLQGKYSSSRYRAWRRRSGVRRRVRHFHRKARNIIEDWARKTAHRIISLAKQGQLAVAREDLTGLVESLRELPKGHRTALITLGYRRLAFWLDWQAEKNGVPLFVVDPTDTSSTCPRCGTKLVEVGHRRLRCPRCGLEADRDTVAVLNIERRALGKMGGSLATPTAPQMTDVSPNRWGEPSAL

SEQ ID NO: 58572 - protein, 366 aa, unknown
  TnpB Polypeptide
MLKTFKYRIYPTKKQIRIMNQWLEECRWLFNHFLAERKEAWGKEQRSINYHSQATSLPALKEQRPSLANVHSQVLQNVAVRIDLAFKAFFRRVKAGEKPGYPRFRGKGRYDSFTFPQSGFTLDGNILRLSKIGNVKVVLHRPVEGRIKTCTIKRSSTGKWYVMFSCEWEPTPLPENNEAVGIDVGLHSFATLSTGEHIENPRFFRQEEKALAKAQRKLSKAEKGTLERKKRRKVVARIHERIAWKRQNFIHHHSRKIVNRFGIIAVEDIHVNRMLHNHCLAKSISDAAWSGFFQLLSYKAAWAGREFVAVNPAYTSQTCSSCGHRQKMPLSERVFKCPCCGLELDRDLNAAFNILGLGRQALGVCP

SEQ ID NO: 58573 - protein, 382 aa, unknown
  TnpB Polypeptide
LSVINRAIKYRLYPTTEQVTQFAKTFGCCRKVYNLMLNDKIENYKSTGKFATVTPAMYKNDYPYLKEVDSLALANVQLNLQSAFKNCFDKSRKKKNGFPKFKSAKHSKKAYTTNNQKGTVAIIGNTIKLPKIGRVKAVIHRQPDANWILKSATISQNCDGNYYASILFEFESNITMISISDNAVGLDYASDGLYVDDKGNIGTNHKYYRESYKKLAKAQRKLSRMQGSKKGEQKSKNYIKQLQKVNKIHRHIANQRLDNLHKISTEIANQYDVVCVESLNMRAMSNKGFGNGKATLDNGYGLFLVMLEYKLNDRGKYFIKIDKWFPSSQICHCCGVVHSEMKDLRIRIMNCDCGLTINRDQNAAINIKREGLRILKTGLFAV

SEQ ID NO: 58574 - protein, 419 aa, Actinobacteria sp.
MIVRGWTVALDPAPEQAAVFRRDCGARRFAYNWAVAQIKRSFEAGRETGDYDRDVWSGWALRKRWNQVKGDVAPWWAECSKEAYAGGIAGAVTALKNWHGSRTGKRPGPTVQFPRFKKKAKDRLRCTYTTGALRVAGSRAVVLPGAGTVRTAENIRALWRHTRRGTGRVLSATVREKAGRWVVSLRLEITARRRPPPRASTVGVDVGIGNHLLIVMHPDGSVTEKVPNPKALRACLVELRRANRALARKKEGSPRWHEAKRKLGRVHARVAAVRSDTIHKATTRLTKTHGAVVIEDLAVAPLTRGLRRHRKAWADAAAGELRRQLTYKAAWHGCDLWLADRFYPSSKTCSACGQVNTSLTLADRTWSCGCGAVHDRDENAGTNLARLPASQAEAPSDDKTAPVRHVAVKRVNHPGKVAA

SEQ ID NO: 58575 - protein, 337 aa, Halobacteriales sp.
VADTEYCRRTAVTGLSVSSADAPRLRELIEEWKRGCQLAVNEAWGVCHTRSEVQQLAYDRLREETTLGSQHAVLATHRAAEAIKRARDGDGRKPEFTNPSVAFDTRTMTVFDDRSVSLTTTDDRVRCNLRLPDDGAYQSRYLDDERWEPAKSTLHYRDGEFTFHLGFRTPKPSTDPPTEGATVLGVDLGVENLAVTSTARFFGAGELNHRRTEFDRVRDSLEATGTRSAVRTLRQAGNRLDRFVRQRLHEVANGIVDEAEQFDCDLIAFGELEEVIELLPDAGPYHEWLLERSSSTGRSSGTSRSCRSTPSTPASAAWSAGSLTPRTATWRTTSSSA

SEQ ID NO: 58576 - protein, 470 aa, Burkholderia sp.
  misc_feature (366)..(419): Xaa can be any naturally occurring amino acid
VRSSRREACGRRPARRPRDADPSHRRPAFRCGRAVSPYFAPRNPVIDGGKERSALDRQLLPRVRMAGMILVYRYRVKSLNGLLNKQSRAVNYVWNFCNDTQKHALKWGKKWPTGFDLNVLTTGSSKALGIHSGTVNATCEQYAKSRSQRRRPYLRYRGRKSLGWVPLKGRDLKREGDAFRFAGNTFRVFNSRPLPDGKIRDGTNFAQDARGNWFLNIVIEMPDVPARPVRSGVGIDLGLKDFATLSTGEKVPHDRFGRRAADKLAKVQRARKHKRHIAKLHAKVANARADFQHKLALDLVRRFDYIAVGNVSAAKLARTRMAKSVYDAAWSSFRDKLRYKAMAHGATFEEVDESGSTQSCSSCGSXXXXXXXXXXXXXXXXXXXXXXXXXXXXXXXXXXXXXXXXXXXXXXXXXXXXXXDSTTRPRGIAGLRIREWTCSGCGVVHDRDTNAALNILRCGRASPVVGIARL

SEQ ID NO: 58577 - protein, 470 aa, unknown
  TnpB Polypeptide
MSDNRVTKCQSIRINFIDSPTMDWDEFGCIFELLQKETVLASNKIISVCNVYSALGRDNEWLKNTYGSDKIRNVLYVVARENCTFQYSGAANMISNNIYKNYFTGKNSWEKKIQKGDGNPPMSFSETIPLFIRSDHTEEPTCIDEEKGYHALSFSFLSNNAKGNMFYEAKKEGKNGKEKTEKKVIEINSNKLKFRFGVKKNAQLEELIKKLEDPDSGYKIGDSQLIRWKNKKTKRWIYSLQLAYSFPKDDTIKKTLDPEKIMGVDVGIKVPLYATINTDTKLKFKLGDDRIHKKALKDIRERSKIQRVVSFNLRDGHGRKHKLDIIRAKKKTRNRQKTYNNVLSRRLVNLAVKRRCGTIHIEDLSGMKQREKDNLFLQTWNYFELQQMIIQKANEVGITVAKVKRYGTSQTCPCCGFKDAKNRPKGKYGQAYFKCIECGYQDNADHVAAINISRAEPIKNMIYPGWVEEV

SEQ ID NO: 58578 - protein, 542 aa, Streptomyces sp.
VGGLRELAAPFIAPGPSGVAIRTRLKQLTAGDVEVLRQVGVHLGALAGRDLKVRCRDGLAHDSQAWAVRKRELTPQSSARWAGAITKATHDQWALARRCALAHIQSLEAGVRTLRHRLSLPVGEKGTKKAPGGYRSRREWHAKSRRLHLLEDRLARERAAWKAGTVHVVRGGKRLSRMRHHLPTAGLTEAQWRERWKAARWFAQADGESGKRFGNETIRISAEGEVSIRLPAPLTHLANAPHGRYVLTGRVVFAHRGQERADRAAANRAVAYRIHHDMDRGRWYVTASWQTPVSKTLPLAAALADGVIGVDMNADHLAAWRLDTHGNPCGSPRRFPYDLTGPAGHRDAQVRHALTRLLHWATSCGVKAIAVEDLDFTAEKTREKHGSRKRFRQLVSGMPTGRLRARLTSMADATGITIVAVDPAYTSKWGAQHWQKPLTHATRKTTRHDAASIAIGRRAQGYPVRRRTALPRTHQSDGCGHRTVQAGSDTPGREGPRPRIPGPRTRSVPPDTERTRATRTPKTVRDVRSDQERVQDPLLLTE

SEQ ID NO: 58579 - protein, 364 aa, unknown
  TnpB Polypeptide
MKLVANLKLTPTHEQAARLRATVERANAACNWLSAEAWTTRTFGQYALHRLAYQAVRARFGLTAQMAVRCIAKVADAYKADRERQRTFRPLGSIAYDDRILRFKRGDQVSLWTLDGRQVVAFVCGERQRALLAHRQGEVDLCYVRGHWYLNVVCDVPDPVPFLPADVLGVDLGIVNLAVDSDGTTYSGERIEHHRRVYQHRRRNLQRKGTRAAKRKLRALSGRQARYQAHTNHSISKAIVATAQRTGRAIALEDLGGIRNRVTARRRQRARLANWAFYQLGSFIQYKARQAGVPLVRVDPRNTSRTCPRCGVIDKANRPTQALFLCTSCRFSAPADVVAAGVIATRARAACKSADVRGSYTGSC

SEQ ID NO: 58580 - protein, 375 aa, unknown
  TnpB Polypeptide
MRLAYRYRIYPTKAQRRRMERTLESCRLLYNAGLEQRRTAYQRQHISLSKARQQADLPALKAAYPEFSEVYSQVLQEVLARLDKAFDAFFRRVKLGTNPGYPRFRGKGRYDSFTYPQLGFAVKDGRLHVSKIGAVKITLHRAIVSQVKTLTLRRTSTGKWFACFAVDAEPVAVDTPVASVGVDVGLSHFATLSTGEHIANPRFFRTDEKALAKAQRRLSAVQKGTPARVERRKVVARIHERITNRRHNFCHQLSRRLVNTYALISFEALKIQNMLQNHALAKSIADAAWGQLIQCSTYKAENAGRSVKQINPAHTSQDCSGCGARRTLTLKDRVYVCLSCGLVRDRDHNASLNIEARGLASLRASVRSPRFEPWE

SEQ ID NO: 58581 - protein, 551 aa, unknown
  TnpB Polypeptide
MKEKKSVHVVKLKLKTTKKDDMIIDRRFHAIAHIHNIMVKHAQNCLKQIWRNTEYKQTLENLCAAKKQLADVEKKTSKAQKKIENNNIDNNILNEIQNLLDEQKRILKEINTTKERLSKIRKDFKLTKNDFEKYICVNTNVPAKNGSKGRRRYKNLLSASQIQKEVDRVWQGTEKVMFSNGKTVHFKKYEQFKTISGKSNESGAIFNLETLTVKWNGLVLKCKAPDKNNSYAWEALKGQIKYCDIERKMFPNGWHYYASIVISGNPPKKLKNTGTKTMGLDLGVSTIAAVTDDTAFLEELAPDKEKYNKAISEIQKAMDRSKRISNPDKFNDDGTVKKGSKKKWIYSNRYQKNKRRLKYIYRKKSAYIKQFHEILANRLIAESLYIITEDMNFAALKKKAKKTERSTKAVKVKSKAGIVKLVRKFKRKKRFGKSISNRCPSKFLSILERKCILYGGMVVKVNTIKFKASQYDHSDDTYIKVRLIDRDKKVGEYKVQRDLYSAYLLKNSNTELTKPNRKECIDGFEKFVQIQNALISELNSKGVSMKQCFGF

SEQ ID NO: 58582 - protein, 412 aa, unknown
  TnpB Polypeptide
LIKTFKTRIRPTKEQVTYLNKCFGYRRFVYNNTLEYFNKILEFNGNIVDKDLRKFFDKFDFITHIYSKKEKEPGFEWTGEYNKSIKNETVSDVNLAVNKFFKDIKNKQRCKLHFKRKIHGNGSFRIYIKQAAVKILDKNKFSFIINREYGHMELKTYEDISFLYHHEMKTMSISMENFKYYVSFTYEIDNPSHNHEKNTIGIDLGIHNPVVCFDGKDIINPKFPKGKIKKLEKKTDKLSEIVSKKKYDKRNPSKNYIKARTKLNDIHAKIVNIRMDYIQKVSTFLAKTYRNVVVDEFSFKDLLTESDGIKRINRGIHRVGAFTFTQVLKYKCRFYGSEYILAEPNSTITCSVCNHKVKTKMKLSQRVFNCPQCGHIDDRDNNAAINIYNTFKLSLLTNVNKDFAVGRTVQRT

SEQ ID NO: 58583 - protein, 398 aa, Azospirillum sp.
MLKPVEAAYRFRIYPTPEQENLLNRTFGCVRVVYNRARALREAAWTERKERCGFTQTNAMLTALKKQPEFVWLNDVSSVPLQQALRHLDVAYRNFFQRRARYPKFRRKDGPQSAEFTKSGFNHRDGRLTLAKMAEPLDVVWSRDLPSEPTTVTVTREADGRWYVSCRVIATVETLSGGDVVGIDLGLKDFAVLSTGETIANPRHLAKRQKRLARLQRRLAKKVKGSKNREKAKLKAARAHASVRHARNDFLHQLSTRLIRENQTICVETLSVTGMLRAKLHSRSIADAGWSEFGCMLACKAAWYGRKLVKIDRFYPSTKTCSECGATGHALTLADREWTCPNCGAFHDRDINAARNILAAGLAVSACGAGVSLGVPRHSEPSAVKQEPVLRSSGIPRL

SEQ ID NO: 58584 - protein, 267 aa, Microcystis sp.
LPSLKKAYEWLTDAYSQCLQVVALNLSQAYQNFFEKRARLPRFKSKHGKQSISYPANVKFEGDYLKLLGKVRLVYCVRHREFAGTIKTVTISKNPDGKYYASILVDDGQSPLAPLDKGGAEGGGIDGKAIGIDLGLNHFAITSNGSKYDNPRHLAKHQRNLKRKQQKLSRKKKGSNNRQKARGKVAKVHSKISRCREDFLHKLSRKIVNENHVIAVENLNVKAMVRNHNLAKAISDCSWGMFCTMLKYKAEWQGKTYIEFLTPQTVK

SEQ ID NO: 58585 - protein, 424 aa, Symploca sp.
LPVSILETILTLHKNGCKIGHQEVMPVFNLTYEFKLKPTKAQIQHFDDWLEQNRRVYNFALAERKDWYKSRSCQINACSLRCEYIIPAESKRPTYVNQAKALTAYRKTSPSLQKVQSQVLQQTLMRLEKAFVSMWEQAHGFPRFKKPGTMRSFVFPQLGIDPIKNGLIKLPKTGWVKFRHSRPIPSDAKVKQARIVKRASGWYVMLTLQWDIDVPQVMPHGEAIGIDVGIKHFAAASNGRLFPNPRPFKNLEGKLKLLQVRVSRKRPGSSNRKKAQHKVSRLHERIKDTRKQYHWEIAHNLCDLAGMVFAEDLNLKALAKGMLAKHCLDAGWGQFLQILEQCCFKRGVYFQKVDSKKTSQICPNCLTETGKKTLTERTHHCHHCGYSTDRDVAAAQVVAIRGLAAVGHTVKMLSEGKFVGIPVT

SEQ ID NO: 58586 - protein, 420 aa, Bifidobacterium sp.
MMGGMGQTVRYRYRAYPTAVQEQALRRLFGCCRVVWNDTVRLFRDHFDPTDRNSVPKPGEAQKIVLTDAKKTPERAWLGEVSNVALTQIHRDAMRACWNGVRHARRQRMARYRSLKRNPVNSARFTANGFAIRDNGKVYLAKIGDIKIRWSRALPSVPKSCTILQEPDGAWYVSFTVTRETEPLPPCGTDAAIDLGFTHLGELVATDGTRRRIDAPKPLNRLRRQLARFQRKEARQQQTSNRRRRTRQRINRLYAKARHQLDDYQNKQALRIVRETQTVGLETLNVSGMSRRHGRSILTVAPARFAAKLKAKAEQYGRTIVQIGKWEPTTRLCSQCKHHVDGGIPEQVRVWRCADCGSILDRDYNAALNILDAAGLAESLNAHGGDARLRLATAGRSSRQGTANPSDGTRKHSGLGIPVL

SEQ ID NO: 58587 - protein, 381 aa, unknown
  TnpB Polypeptide
VFKAFVYRLYPSKSQRGRLEAVRETCRHFYNDLLRERKEAYEQRGETINKTVQLRKVKVEKAMSPYALDIHSHILQNVVADLDKAFQAFFRRLEAGENPGYPRFRSRNRFAGFGFKEYGNGFKVDGRRLKLTGIGRIAVRWHREIEGKIKTARIFCRAGKWFVAFSCEVEKPEPLPATGECVGIDVGLHRLATLSNGEEIDNPRWYRRILRKLRIVQRSISRKKLGGANRRKVVRLLQRLMVRVANTRKDFLNKFVDELIKRFDVIVLEDLRINAIVRSRYAMSILDAGWSFLVSRLTHKAESAGREVVKVEPAYTSKTCSGCGSLFEHLNLSDRWVSCGCGISLDRDHNAAINILQRGLGRSLWASSSAMAGLAQEAAAL

SEQ ID NO: 58588 - protein, 273 aa, unknown
  TnpB Polypeptide
MHRPYEGTVKGVLITRSGDTWYVIIQAEREVSEPKKEGRSVGIDVGLTSFAVDSDGTAIENPRFFEQSKEKIKKLQRSLSRKKRFSKNWMKVKAKLEKVYDHITNQKRDFLHKLSRRYVDNYATVCVEDLNIKYLKEKGKSRGLRRSIHDASWGRFYSYLAYKAESAGTNFIQVDPRDTTQMCSNCGSIVKKTLSVRVHECPYCGFVADRDYNAAVNIHRVGMEQPFEPVEIIPLHHITVMQVLSMNQEAPPERSGVVHSGNPVRERGVVHPD

SEQ ID NO: 58589 - protein, 368 aa, unknown
  TnpB Polypeptide
VEAARLWGDLVTRHHRLRRLNWAWGSKARWEKWAKGKYRGLSAQAVQQIIGEFQEAVNATRQLRTKGHDEARYPWKRPRYRDVVYTNQDARIKGKRLVLPNGTSGTLRIPLPQDRPLPGRLMEVRLCLGHILLVCEVPDEPRHQQTVIGVDLGVNTLIAATDGKKALLISGREAKATVQWRNKRLASAVSKQSKMVKGSSRWRRVQRRKKQMLTKTRRRLNDLIHKATHRVSQEFPGATCYVGEPFNEASQKMNGVWAQQVSQASNGKITRQLDYKTSGAIQVDEHYTSKTCPHCGTRHTCRRVYRCRHCGTVAPRDQIGATNILCIGREGAMRIGQALATEVVYARPVKVFRREPDSSVGHTAGSSA

SEQ ID NO: 58590 - protein, 374 aa, Deltaproteobacteria sp.
MQLAIKVKLVPSQKQAKILLETIEAFNEACNFVSQIAFENRTASVVKIHRICYYEIRKKFNLSSQMAVRVVGKVADAYKVARNKKLKLEKPYRFKKHGAVIYDQRILTWKGLEKVSILALQGRQVVPIVLGGYQEAKLQFPRRGQVSLLYKNSKFCLIAIVDVPEPPEKVNKEFLGIDMGVKVLAVDSKGQVYSGKEVDKKRIKLDKLKSALQKCGSKAAKRHLKRLSGKEARFRTWVNHNVSKKIVEKAKRHSLGIAIEDLTGIRERTVFRKSQRRQHSSWAFNQLRRFLEYKSRIAGITIKAVNPHYTSQRCSNCGYINHKNRKTQSNFVCKSCGFSANADLNGAINIAQLAVVNQPILTPEMGVKSHLVFS

SEQ ID NO: 58591 - protein, 245 aa, Streptomyces sp.
MYSLMVADALKVLRQYREGESDLIERDGVFHLIVTCEVPEAEQYEPEAFIGVDLGIVDIATTSTGYRAAGRSPNRYRKRQLAPRAKLRKKRTKSAKRRLKERSRREQRHVENTNHVMSKTIVTEAERTGPGLSLEELKGIRDRVRLRKPQRVALHSWAFARLGDFIVYKARRAGVPLVFVDPAYSSHECAQCGYIDRLDRISQAKFACRKCGVVAHADRNASRVLARRGENAWTAGRESRVPATP

SEQ ID NO: 58592 - protein, 373 aa, unknown
  TnpB Polypeptide
VKRVVKVKLRVDDGQRAALLRTLELMNAACDGLSDVAWAGREFRQFSLHRAHYRDVRDVFGLAAQAAVRVIGKVADAYKLDKKSKRTFAKYGAVAFDDRCLSWQIPDVGNAGTVSIWTVEGRLKGLPFVGRPEDVEKLRQFRQGETDLVFDGNHLFLVATLDIPTPATKQPEGWLGVDLGIVNIAVTSDGTKHSGSRLNRYRRRQQRLRTELQKKGTKAAKRLLKARRRKEARHVTNQNHIIAKQIVAEAERTGRGIAVEDLTGIRNRARLRKPQRTSLNSWAFHQLGQHLAYKATQAGVAFVHVDPAYTSQECAECGHTEKANRPNQATFACRDCGVIAVSADHNAARVIAKRAPAAWAAVNQPQPKAAKAA

SEQ ID NO: 58593 - protein, 405 aa, unknown
  TnpB Polypeptide
VSIVQRLYARPSEVEALDAHVRDARFVFNLGLEQRALWSETKRHYAQKVNVATQMRELAEARKASEWLRAGSSVVQQGALRDLDRAFQNFFAGRSGFPKWRRLSDPKQSFIVRDLTVKRLSRKWGAVLVPKVGFVKFRLTREWSSIEAATSARVTRHNNVWHVAFTTPPKGKLNPNTGEMVGIDRGVANSLATSDGQFHHAPSLTLGEQRRFVALQQKLARQKVKDSKRRESTKSKLGRLRTKLNNRRTDWVEQTTTALARRYDLIVVEDLRITNMVRKPKAKPNPDQPGQFLPNGARAKAGLNRAIHASQWGKIEQRLADKTNVEKANPKNTSRKCHECGHISENNRKSQAEFACERCDHAANADINAARNILQRYLNQPQPEDISGARACKPRKSRANHLTAA

SEQ ID NO: 58594 - protein, 377 aa, unknown
  TnpB Polypeptide
MPETLRKAQKYRLFPTKSQAAKMAWTLETCRHVYNSLVNDRKCQYEVSGKAPTWLEQKRSITSWKPNHTELADVHSQVLQDVSKRVDLAFQAFFRRVKDGETSGYPRIKGDGYDSFTYPQHENGFSFHQGRLRLSKIGDLAICLHRPFDGDIKTCTVRCINGKWFACFSVEYVPELLPPSDEEVGIDIGLKSFASLSNGEFIENPRFFRKEEKALAKAQRKLAKQTRGSKARKKARKVVSRVHERIRNRRHDFVHQTARRLVNRYGVIAVEKLNVKGMVKNHCLAKSISDASWSMFRSVLTTKAESAGRLVVAVNPAYTSQLCSGCGDIQKKSLSVRTHRCSVCGLVLVCGLVLDRDTNAAVNIMTVGQYSLATRVA

SEQ ID NO: 58595 - protein, 377 aa, Saccharothrix sp.
LVKRAFKYRFYPSESQEQELLRTFGCVRLVYNKALEARTVGWYEQQRRVSYVETSALLTGWKKADDLAFLNEVSSVPLQQCLRHLQGAFVSFWEKRAQYPKFKSRKRGRASAEYTRSAFRWRDGRLTLAKMAEPLDIRWPRPLPEGTEPSTVTVSRDAAGRWHVSILVETTIEHLPPTTAEVGVDAGLTALVTLSTGEKITNPRHGKRDHARLARAQKTLSRKQKGSSNRAKARLRVARVHARIADRRRDLLHKLSTRLVRENQTVVIEDLNVRGMMRNRMLARAIGDASWAQLRSMLDYKTRWYGRELIVVDRWYPSTKTCSRCGYLLDRLPLDVREWTCPECDTTHDRDVNAATNILAAGRAVTACGAGVRPARQ

SEQ ID NO: 58596 - protein, 414 aa, Pseudanabaena sp.
MMYLTQKNQIRNLNKSEFLALRELCRLSKNLYNVGLYAVRQYYFQEHKHLRYESAYHLCKENENYRLLNTDIAQQTLKVIDRTFHSFYGLISAVKAGSYQPKISLPHYLPKDGYFVLIIPRIKVKDGRFNVPMSFAFKQQFGLVSLPFPDRLDPETIKEVRIHPKYDARFFEIEFVSKVEAEPVETVEDSAISIDFGLDNLATCVDTNGASFIMDGRKLKSINQWFNKENARLQSIKDKQKIERLTERQARLFVNRNAKVRDYLNKTARLIIDHCIANKISKVIVGFNLGMKQEINIGSRNNQNFVQIPFYSLRAKLKALCERYGLIYQEQEESYTSKASALDGDDLPTYNADKPAAYQFAGSRVKRGLYRSKDGHLINADCNGAANIGRKSKQNGFTGLSRGCLAQPLRIKIY

SEQ ID NO: 58597 - protein, 408 aa, Pseudanabaena sp.
MIIYEFKVKGKDKQYHAIDDAIRTSQFIQNKALRYWMDNKKIGKYDLNKYCAVLAAEFPFADELNSMARQSAAERAWSAISRFYNNCKRKVKGKKGYPKFKKNCRSVEYKTSGWKLSDTRKAITFSDKKGIGTLKLKGTYDLNYYDIKQIKRVRLVRRADGYYAQFAIDVNITVETQPTNQIVGIDLGLKYFIADNKGNVEQSPQFYRKSEKQLNRANRKKSKKFSKDRNKANQKQSINYHKARNRYARKHLRVSRQRKEYCKRVAYSVIQSNDLVVYEDLNVKGLVRHRNLAKSISDAGWSTFRSWLEYFGHKYGKVTVAVPPHNTSQNCSSCGKKVKKSLSTRTHVCPHCGYVEDRDVNAAVNILRLGLSTVGHTGTYAWGDLPSWAIGVNLSSNGESANQESQCL

SEQ ID NO: 58598 - protein, 292 aa, Thermobifida sp.
VVPDTAVHPVHRDGHQGRRGPVLRQLRRLNRPRGSPPRHHARDRHRSRLGALRRPLRRHRDRLPALAASGRKRLKKAQRALSRKQKGSANRDKARARVARAHVRVADARREFHHQLSTRLVRDNQAIAVEDLCVKGLARTRLAKSVHDAGWAQFVAMLAYKAARYGRTLVKTNRFEPTSQVCSACGAKDGPKPLHVREWTCQACGTVLDRDVNAAVNIGRAAGLAVSACGAQVRRAPVPARRGEAGTHPKRPTQPVGKQAGIPGPQAREDVNSATAAPSPGAGSGWCPRRSG

SEQ ID NO: 58599 - protein, 430 aa, Gammaproteobacteria sp.
LLYERTLNPPASDLVAGYNSQIRTVTRSYRIRAYPNGAQRRLLDRWFGAARWLWNTALAIRSEAYRECGLALTGDDISRWLTQWKRTEGHEWLRQVPATCLTRCLRDQDAAFRNFFARRARYPRFKAKRFSGSVRFQGVGTAGWARGLMSLPKLGAVKLAEALPGIERPGQVTVARDAAGRYHVSFCAEVEISPLPIMHRVVGVDLGLKDLATLSTGERIPNPKRYHARLRYLRQQQRCLARREKGSRRREKQRLRVARAHARVRQERQAALHALTTRLIREFDVICIEDLNVKGLGRGLHARAIHDVAFSEVRRQLAYKSDWYSKILVQVDRWYPSSKTCSACRHTLDELGLDERQWKCPKCGTLHDRDVNAARNLLAEGLRQLAGRDDRDLRVDAGDACPEEILVQVLAEEARSGQRNRACVEQAIFG

SEQ ID NO: 58600 - protein, 373 aa, Bacillus sp.
MTKQNKAFKFRLYPNKEQEELLSKTFGCVRFVYNKMLAERKETYEKFKDDKETLKKQKFPTPAKYKDEFPFLKEVDSLALANAQIHLQNAYKNFFEGRAEFPKFKSKKHKQSYTTNMVNGNIKIEDGHIKLPKFKKPLKMKQHREIPAEYKIKSCTISKTKTGKYYISILTEYEKETTTVNIQHVVGLDFAMDGLYVDSEKGKRANYPRFYRQALKKLAKEQRILSRRKKGSNRWHKQRLKVANLYEKVVNQRRDFLHKLSHHLASKYDCVVVEDLNMKGMSQALHFGKSVTDNAWGMFTTFLQYKLEEQGKKLIKIDKWFPSSKTCSCCGRVKESLSLSERTFRCDCGFVADRDWNASINIKHEGLRLLGLV

SEQ ID NO: 58601 - protein, 269 aa, Nocardia sp.
VEVEKAVKTAHHPESTIGVDLGVTSLAVLSTADVIANPKHLERALRTLRRLQRRAARQCGPDKRAREKPSNRWRKTHARIVRLHARVAAARRDGLHKLTTGLVREHGTVVIEDLNVAGMLANRRLARRIAGVGWAELRRQIECKSGWAGGRVVVADRWFPSSKTCSDCGAVKAKLRLSERVFSCDRCGFVLDRDLNAARNLAALASAASCVGTENTPAGNPGKTRIMRATGTVTGRPAPVGAGQLCRGNSGRSGHGFTHFLNGSMSEPV

SEQ ID NO: 58602 - protein, 389 aa, Salmonella sp.
MFRATKIRIYPTSGQAEYLNARFGAVRFAYNKALHIKKHAYQRHGLNLSPRKDLKPLLSVAKKSRKYAWLKEFDSMVLQQAVINLDVAFSSFFNPKLKARFPAFKRKHGRQSSCHCVGIKVLDSAIKIPKISPIEARLHREIKGTLKSITLSRSATGKYYASLLCDDGMEAPAKPALISNVTGMDMGLAHFAIKSDGNKIANPRHLTNSSRNLRRKQKALSRKKKGNANRKKARIRLTALHERVANARADFQHKLSRAIVDENQAVIVETLKAANMMKNHHLARVIGDAGWSGFIAKLEYKAAEKGVHLVKLDQWFASSKTCHCCGYKMPEMSLHKRIWQCPECGVEHDRDINAAINIEHKGILELQATGLVVSAHGGQRKSVKQTVAA

SEQ ID NO: 58603 - protein, 287 aa, unknown
  TnpB Polypeptide
MAAMKQVLTIVVKLQPSPEQVAFLEATLQAFADACNYVNGHTDPKLTNKIAIQSLTYQTIKSQFNLVANMAVRACARVAANRKVAFSKGKPVKKFASGSMDCDKDLFRLREHDWTVSLATVRGRERVKLNPGNYQRGKLKGRNPTSSQLCKHRDGQFYLHIQIKDTPPDPKNTDKVIGVDLGRRDIAVTSEDQRWDGKPIQSVRDKFSFLRASLQKKASKGTRTTRRRCREVLKRLSGRERRYQQWLNHNISKTVVRRACKLNRTIEYVQLSLFDDFRATKNPDLSS

SEQ ID NO: 58604 - protein, 373 aa, Alkaliphilus sp.
MNKAYKYRIIPNREQEELIKKTFGCVRFIYNQMLSNRKEIYEKYKHDKLALKQQKYLTPANYKGEFPWLKEVDSLALANAQLNLNTAYGNFFRDHSIGFPKFKSKHRDKKSYTTNNQKGTIRLVDNSHIRVPKLKGVKIKMHRQLPEDSVIKSATISETATGKYYISILVEFDIQIDLVMATKETTLGLDYSSKELYVDNEGDIGNYPRYYRQAEAKLKKEQRKLSKRKKGSQNREKQRQKVAKLHEKVANQRKDFLHKKSRQIANAYDAIVIEDLNMRSMAQGLKLAKSTNDNGFGMLRTFLEYKLKEQGKQLVVINKWYPSSKLCRFCNRVNRDLTLSERVWTCFCGEVIERDINAAINIRNEGCRIIGVA

SEQ ID NO: 58605 - protein, 370 aa, Desulfovibrio sp.
MEKTALEKGTKFLGYHALCDQLMVWKGRKEPKEEAKVFPFLADVHSQILQQRLKDLGQAVKRFRESETVGFPKFKRRGRDDSFRYPQGFKLDEGNSCIYLPKIGWVRYKKSRDIQGTPKNVTVSLEADHWYVSILAEIESPDPVHPSQEAVGLDAGVVRLLTLSDGSFIVPIDALRKYEEKIASLQQELSRKEKGSSNYKKVQARIAKIYDKVANTRKDYLHKVTTEISRKFGIVVIENLLVRNMTRSAKGTVEEPGHNVKAKSGLNKAILDQGWYELRRQLAYKLDWLGGKLIVVPPQYTSQTCSRCGHKDKNNRPTQEQFKCTSCGFELNADHNAALNILAAGRAVITDGSGELSLPREAGTTQGSNR

SEQ ID NO: 58606 - protein, 299 aa, Salmonella sp.
MKRLQAFKFQLRPDGQQERDMRRFAGACRFVFNRALALQNENHESGNKYIPYTKMTSWLIGWKADQETQWLKEAPSQPLQQSLKDLERGYKNFFQKRAAFPRFKKRGQNDAFRYPQGVKLDQANSRISFPKLGWIRYRNSREVVGEVKNVTVSQSCGKWYVSIQTEYEVPEPAHNATSIVGLDAGVTRLATLSDGTVYQPVNSFKANQRKLATFQRQLSRKVKFSSNWQKQKRKIRHLHSHIANIRRDYLHKVTSEISKNHAMIVIEDLKVSNMSKSAKGTAEQHGRNVKARTDWKQTY

SEQ ID NO: 58607 - protein, 299 aa, Sutterellaceae sp.
  misc_feature (150)..(183): Xaa can be any naturally occurring amino acid
VRFRRYRFSKRYEKLRSELAEMLRLSAATRKREHGEVCNWLLGHAGHIIVEDNSYKAFQRGRFGKTIGRHAPAALYAQLTNKAESAGLLVEVVSPKKLKPTQHNLLTGQFVKHELWERRVRLGNDDDDRWIDRDAAACLNLLYADLEKQXXXXXXXXXXXXXXXXXXXXXXXXXXXXXXXXXXLGNDDDDRWIDRDAAACLNLLYADLEKQTYAPERIREAVLAGVTAWLDAGVVVIQAREGITEREFGRFRRRGIPSLTVQGLRQQGFRGRSDSTSGATPRRKASTVSKPSHFSGEVV

SEQ ID NO: 58608 - protein, 392 aa, Lactobacillus sp.
MLITYKVELKPTNQQAWRINQQISGSRWAYNLFLDINRQRYECGYHYMSAYEFSKWFNHDYLETNPDDQWIKELSAKSIKQAFIDADTAMKRFFKKLNGYPHWRSFKRGQGSYYFVKNGQKRIIACERHRIKLPKLGWIRLKEFSYIPTDAEHFVIKHGRVKVKAGRYYLTCVVEQAGSIQPILDGNPIGIDLGLKNFAILSNGSSYSNQNKSSRLQRIRKRLRRLQRKLSRQYRALKARKQKEGRSATDLNLAKTQLKVQRLYQRLTNIQIDYQNKIVATVVRAKPQWVALEDLNVGGMLKNRHLAKAIAQQGFYNFRVKLIAKCQQLGIPVHLIWRFEPTSKLCHNCGTKKVSLKLSERTYHCPNCNYTNDRDLNAALNIRDTKNFALAY

SEQ ID NO: 58609 - protein, 280 aa, unknown
  TnpB Polypeptide
MLNLTYSYRIYPESSAESIMLDWLEQSRRVYNYALSERRDWIKSRKCAVNACSLRSEYIIPADTPYPNYYAQKRNLTQARKIIPELDSVHSQVLQETLARLDKSFRSMQERGFGFPRFKKYGQMRSLLFPQFKANPVTGWHIKLPKIGAVRINLHRPIPEGMAVKQVRVVKKASGWYAMLVLQSDVSIPEALPTGTSIGIDLGLLSFLATSSGKMIARPKFFVQLQSKLKWLQRQLKDKVKGSNNYRKAQKQIAKLHEHIHNTRKEFHFLTAHQLCDDAR

SEQ ID NO: 58610 - protein, 373 aa, unknown
  TnpB Polypeptide
MNMQRTIKIKIENQYLRDTVEQYFQAYNYCVNKGFELHTSNKKILHNATYNSLRKMFPKIPSALIQTVRDVACENLKAVKLKTKPIPRNKFIRFDKRTFSFKNGKVSVSTIKGRQKFVVNLPKFAEKYFEWKCKASTITLRNNQLWLNLIFNKDVIIKSPESFLGIDRGINNIAVCSDNEFFNSKQLKYVKGNYQFLKAGLQSTGTPSARRKLKRLSRKEKRFVRDMNHCVSKKIANKSYDAIVQEDLKKFLRNKGRKFNKKLGNWSYAQLGSFLAYKTEELGKTLIKVNPRYTSQRCSGCGHVERSNREGSSFECKVCGFELNADLNASRNIAILGISRFSRLEVNQPIVATNEAIAIADVSYKPTFSKVGN

SEQ ID NO: 58611 - protein, 649 aa, unknown
  TnpB Polypeptide
MEIKKTNNNLHVEDVIDDIETDSHATIKMKLRTFCPDKGIHTKINSIVFDVNRLVAEAYEFANFHLLMVISNQRMNNMNVCAPKIDRNFYYRCLLAVSINNCRNGTLGNDFNESIIAFDNLREGDAQHKIDIRSMNPIVADQSITMATMATNHLWLNIYNRITRFISWKYPILGPKWRKRIADAILKTPTIALTILFKNDTSHQAQLSMSICKTMRSLLPLQNSNTYASRAHFTIPLYEYILSETETSKRAFEVDGLGMRVKLLVKDNSVGIRLTKFRGRTFTLLPSKNGLTISYVAFSDMTMMGILKRMKKEAFKGDGRSVDSLSLWRKHFNVKMVETKTREFDCRITTDGCGVSIQFKKKSSILFPSPPINMEHPEPTSTDLKTLQDILSQKSDPKIDIRSVDPGFTDVATIASIKGTVEHYSSAKYYETAFYNLSRKKTDKWNTEKMDEVKSIKARDTCQVETFKTNIKTYIELLPSLLRHRMDKNYRGMRFQRYIGKQKAIQEISDLIAPPKKTTIIGFGNWNGGNGTPIKRRCAGPLQEIKFELHKRKNVFLEMIHERNTSQVCSCCYEKLTNMRSETKNGVKKVHKVLHCKSNQTLKPELRAQRCGTTWNRDVNASKNILELLLHMINGSKRPSVFMMPLKFR

SEQ ID NO: 58612 - protein, 304 aa, Cyanobacterium sp.
MKLVQRHLIKPNNQFYQEIDKLTFLSKNLYNCGIYLCRQAFFKGEKIPSQNQLYHQLKGEIDYRLLPTKVSQLVLKQVEKTFKSYQSALKEYKQKPSKFTGKPSLPRYKDKVKGRNIVTYNYQAISVKSLKKGLVNPSKTNILIKTDIKEILEVRLIPKNRGVYLVEIVYEKPEKETIISDNSAYIDLGLNNLAVLTSNKKGFQPKLICGRALKSCNHYYNKRIAQLKSQLNHKQKTSKKIQSLTLKRNNKVDYYLHTASRYIINHLLENNISLLVIGQNKNWKQGMKLGKKIIKTLSIFPMIN

SEQ ID NO: 58613 - protein, 405 aa, unknown
  TnpB Polypeptide
MLIVESKLKGRDEQFRLVDSAIRTVQFVRNKALRFWMDRQGKSQYDLNKYCAVLAKEFEWAKKLNSQARQAAAERAWSAIARFFDNCKKAISGKKGYPKFQKDNRSVEYKTTGWKLSPDRKVISFTDGFGMGSFKLIGSRDLNFYSPDQIKRVRIVKRADGYYCQFCIAVEREVATEPTGNALGIDLGLKYFLAGSDGQVVENPRCLRRSERTLKRLQRQVSRKQKESKNRIKARKRLAKKHLQVRRRRKDFAVKTARTLILSNDLIAYEDLQVRNMVRNRSLAKSISDASWNVFVQWLGYFGQVFGKIVVPVPPQYTSQDCANCGYRVPKTLSTRTHTCPRCGYSACRDVNAAQVILQKGLKLASEKYRGALGNLTLGESFTSTLGNENCSRQAISMNQESPHL

SEQ ID NO: 58614 - protein, 365 aa, Gammaproteobacteria sp.
MLVLSHKIQIKNPTYKQEQYFRQACGTSRFAYNWGLEEWKKQYNAGKKPTARTVRTVFNALKPVDFPWVFNVTKCAAEQAFSDLGTAFKRFFRHLGRYPCFKKKGTHDSFYLSNDQFKLSGSKIRIPKLGWVKLTESLRFSGKILSATVSRAADKWFISISVQMDTAPLKKSENQALVVGVDLGVKHLATLSNGETASGGKPLKTLSRSEARLQRHLAKCTFGSKRYIRQKMKIARLHYRIRCIRIDGLHKLTHHLCQGFKIVCLEDLNVKGMLKNHKLAKAISDMGFYELKRQIEYKATLFRNFIVSVDKWFPSSKKCSNCDHKKEELKLSERTYHCDECGVSIDRDLNAAINIEREGIRVLAY

SEQ ID NO: 58615 - protein, 505 aa, Mycobacterium sp.
MSQQVKITRTRLHGSAVYLGDVTGPDGAQIPVWSANPDEVLSWLCGGFRFRFNQRRSTRCRYLTCQDRDGENVMVIDPVGEPVLVPIGRTVTDITDARARKEHSFLAAMPSLVLEATLKTEATDWFSATKRRKTNSANGRKPGAMPGFRRKDSDQRFVCWFNGGRNAVFTKTGRRSGMVTITGANPRTHRAPGLGRDGKPHKLGWKVTLHVRLSQPIRPYTSVRVNWTRRELVFVNEPLPVTANARMGEVVGIDRGVVHTAADDRGRFYDAPNTAELDKQRKFHQRRMAKSKLIAAQQGRRFWESSRYQAHKTAAANLAARQARIRDDFAHKLSTQLVREHDFIGIETLHLDRMTRRRRGTGAAAKRGLNRALQNAALARLAKHIEYKAELAAVTFVEVPAPYTSQRCHRCGHTARENRESQAVFRCLSCAWTGNADTNAAMNVREEALTRWAAKQHTEQLAGTSAQAGGEAVSQAGSKSKTDPHMGPAPGPAASAMNRKPPNAA

SEQ ID NO: 58616 - protein, 510 aa, unknown
  TnpB Polypeptide
MFVSLQFKLELKKEDKEKLIKLMRKQSSAIRVAYNMLRDLEKGKTKNPHAQIYQRLRQLFPELPTKYIDSAIYKAKQYPTDKPAVFGGRRLFEKLCKNHLTGKAKERLKKQWKEQRQGTLISIGSKTDKGNRLTRFEDLNGQLHLRITTGNREFIYAKVLREPSNSRDKWITFMAMLLESWQTQSYFPYTVELKLRDGEIYGGVSFEIPTPEIKYTKENGVIAIDTNASPIHLAIAEVSKTGELVSYQTISIHHLLGLSQNSKDHQEWILAHKIVDLAIQKGKAIAIENLKKLKRGVRGDGKAELRKRLHQWNAKKFLQKLKRVAMLKGVEVVEVNPAYTSVIGMLKYAPQLNIDKDIAGAYVIGRRALGFKEDMPENYEKLLKDKTYLEFALKRYEEREKELIELITTESNEYKRNALKSELRNVQNAKKLLTNLIPSLQSEPSGCEGANGGNPAWQVLKVALLFPILGRVLPRDLSPLKPVLVEGVWDRVRSRLVPLETGGTVPMKDF

SEQ ID NO: 58617 - protein, 412 aa, Arthrospira sp.
MYKAYKYRIYPTDDQKASLAKAFGCCRWYWNFALNLCQETYLKTGKGLSRGYIQGLLPGLKKEYPWLTDAYSQSLQVVALNLSIAYKNFFEKRAQLPRFKSKHGRQSLSYPANVKFEGDYIKLPGKIGLVYCHRHREFEGTIKTVTVSQNSDGQYYASVLVDDGKETPSQSTEGKAVGIDVGLTHFAITSDGSKYDNPRHGDKHHRNLKRKQQKLSRKQKGSQNRTKAQQKVAKVYSKTARCREDFLHKLSRKIVNENQVIAVENLNIKGMVRNPKLAKAISDVGWGMFTTMLKYKAEWEGKTYIEVDRFFASSKTCHVCLNRVDSLSLDIRQWQCQHCGTCHDRDVNAAQNIRNEALRILRLCSVQVLRLCSVQVLSLVTSDTAWVGSVRQPGKTSVLLDAVPVESGSPIL

SEQ ID NO: 58618 - protein, 404 aa, Caldilineaceae sp.
MDAQQSTTRYRAYKYRIYPTAAQANALAFHFGAVRYVYNRYRAAREGYYQDTGETLSEADCCLDLTDHKREAGNEWLQQAYNQSLQQAIRDLDRAYRNFFAGRARYPRFKSKRSHQSIRYLFAGSIQLRIANGRIRIPKVGYVKIMQHRRIEGTPKNMTVSKSKSGKFFVSIQCEVDMTPSPAIGPEVGIDLGLKTFVTLSDGRTIDPPKHLRKAERRLKRLQRRLSRKRKGSANRRKAKVLLARQHEKVANRRADFLHKLSRQLVETHGHIGFENLYVKGMLRNHSLAKSIVDAGWGEFVRQLEYKGDWYGCKIIMVDRWFASSKTCSACNAALDLSDRRWACQQCGALHDRDLNAALNILKQSTARTVGINARGNMSRCSKTTQPGNLTASGPPVQLRFPFA

SEQ ID NO: 58619 - protein, 404 aa, unknown
  TnpB Polypeptide
VKIRYRFRFYPTPPQKRVLARTFGACRFVYNWALRTRTDAHHAGKNVNYNSSSSALTQLKKQPQTAWLNEVSCVPTQQALRHLQTAFRNFFDKRTGYPSFKKKHGPQAAEYTLSAFKYDFKNRNLTVAKLGRLDVHWSRTFVNTPTTATITKSSDGRYFITLVLDEPVSSLSKTGADIGIDLGINRLATLSNGEHIVNPRLLQKKLRKLAKAQHILARRKKGSHRRERQRIKVARIHAQISDARMDHMQKVTTDIVRRFDMVCIEDLNIRGMVKNHCLARALNDASMGQFARLLEYKCSRYGKTLNKVDRFFPSSKRCHDCGHIVERLPLSVREWTCSECGAFHDRDQNAAQNILAEGHSDRVNAQGDRRSRGKALAKPRIGRRTVNQPALSRASHVSPGIRLL

SEQ ID NO: 58620 - protein, 423 aa, unknown
  TnpB Polypeptide
MDVHRTESIWLGPDKGLGHLCHLSKNLYNEANYLIRQEKFSTGRWVRYYELWTNLKNSPNYQGLPAQTAQQTLRIVDACWRAYQIAMEDYTVNPEKYFAMPRFPKYKRKDGEFILAFSNQQVKLRNGMLRLTNGIIEVRTRLSKGTKITGARIMPRGVGYNLEITYDKEVKEKRVQEKERTIEGEMANDPKEQARPCRALGIDPGLNNLLTTVNNIGVPPIAFKGGPVKSINQFYNKRRAELRSQYARQGIETGPKMQKLSLKRNRKIDCFFHLVSKLLIWYCLMWKIDTIVLGRNKLWKQEINLGKRTNQNFVNIPFYKLYQMIKYKAEEAGIRVIEIDEAYTSMCSFLDWESIEHHEVYMGKRISRGLFRSAKGILINADVNGAYNHMRNAIPESMEKLKQKVMADGIEAVGIHPVRAVLD

SEQ ID NO: 58621 - protein, 416 aa, unknown
  TnpB Polypeptide
MHRTFEAALSPTVGQQHKLGRLFRLQCELYNAALEERRGVWKQNGVSVTKFEQFKGLSGFDHPVMQYGVVPARGTLTRLDRAFQSFFRRVKQGGTPGFPRFKPSARWSSVEYPDAKCWRIVAGGRKHGGVGKLYLKGVGHVRFRGSKRGIRGAPKTLTVRRVAGKYRMYVTYVLEPALGPPAPRTPRDIGVDLGVTEVVALSDGTLFPNPREARRAAAKLAEAQQALARKQKGSNRRKRAVERVACQHRKVACQRRNRNHQISRTIVDRADGGLVVFEDLKITNMTTRVKPRPDPDNTGQFLPNGQAAKTGLNREIQAVGWAELRQMAGYKAEEAGTRLVVVNPAFTSQTCNICGHISPHNRHGTKFHCVRCGHTGHADVNAAKNIKRVGQTPRSQPRKATIFEGRATRDLSHGKP

SEQ ID NO: 58622 - protein, 456 aa, unknown
  TnpB Polypeptide
LETNLTYVEKCQIFHYADLVRKAGNELTGIMKKRYDQLVRTKRYRKLKSLYKRYKDADNKKALKDVCDQMKEMQKQYDVTWDYCRTSMIPIGKKYGIDAVFALTKAEDVFRGIEKCLYSDGETVHFKKRGDLPCIRAKQINRGIIMKQMNFKFKNIEFGVNIKDRYEQEEVDAILYYLKHAEFMDSIAANTYKETDICVSTYRPCYVSLVCKKIRGKLRVYVHITIEGLSKPKQDRFGNMKHNKGKGIVGCDIGTQTIAYTTETKVGLKNLAERGSCIEVNERKERRIYRAMDRSRRAMNPDNYNEDGTIKKGKKKWTYSNRYKKLRTKHRELCRINETNRHLAINEDVNELRSLGDVFVTEPKNAKKLQKRAKTGKRKKRFGKSIKNRCPAIFRVRLKESSESMLKCQMIIRQVNMIIRVMNTSRNHCHKECINCKMEQGYKEIYIHPFFCTALI

SEQ ID NO: 58623 - protein, 623 aa, unknown
  TnpB Polypeptide
MVKMQTLSFPMRLPDRMQAEALRLLDAGTAAINQIIIELWPQLDLFAGERTGLAWKQVEQQLVSRSGHGSRQERCEMEQAGRILRAQASRKQVFHTILPLLSEGLIRPAEGQRPAKKDYRLIKERVRELRAALEEADAFMAMTNVVEQACNVYLQTGAFPTTYEAMQPMPVQEVAQLTFAGDDGMQAGQTYRARIESSQFCDVVTRAEHTQATLFLKLRAPDAAGQWAWGTWSEPMVLPETVASHLAGGAKSQAPTLREIRSADGSRVAVLDLILEVPAQYVAPLEQETRVLGWDWGIRSLITVSILEKPEGDEPYRQVSRPVFLDTGGIDGRQARLRREIDRLKACREHYDTLSKQALSAQREQHTPLPVHFARWQEQVSAYERRIQTCWKKYERRNRELAHLASNLLILLALLYDCRLICGENLTTLKTEGRGRGVRGRWRNWRNNTTVRGELWRVLKYKCHLLGIRARQVEPRGTTHTCPRCGKPAHTYRSPAKADRNKALEWAPWLCCGNPTCLWNGARDYAASLNIARLGLAFLLTYHDTKRYQAYRTTDSSVKPALYTRAGATLLLPSQGITPRPHEGKDIYYAGWSFSISLRTSQKNSLLSLLSTAQLRKRLLKSA

SEQ ID NO: 58624 - protein, 395 aa, unknown
  TnpB Polypeptide
VEVKKTIKCGIVFLTKHKQDLLNQEYNNFQHFLQTGEDLGVYSAHKQQAKRFYKVIKEGKEYPISIRNDLLKIEKRDTKITKYWARIPVKGKYGGIWVAIKPHEDFPDEYKICESKLYRRNGRFYLNVTIEKEVNVELPKENIAVIAIDIGEANPVAYTVYADGKILGMGLEGRQIRSIRWHYLQRRKEIGRKKVKHALRVIKKIGHKERDKVRDILHKATTKIIKIAKKLREQGYNPVIAIGDVKNVRKPREKGKPRNRKLNRMIHSMPSYQVKYMLQYKALWDGIPVMLVNEAYTSQLCWRCGAYGKVDGRRFLCPECGLDYNRDLNASRNILNRSLGYMLRDWAVVNQPISPPVSNAPKGLVSDAVSEGRSHRFQSVVVHHVVEVFGIHARV

SEQ ID NO: 58625 - protein, 372 aa, Bacillus sp.
MAKQNKAYKFRIYPTEEQALLIRKTFGCVRFVYNKMLAERKETYETFKEDKEALKKVKHPTPAKYKKEFEWLKEVDSLALANAQLNLNKAYKAFFKGNAKFPKFKSKRHKQSYTTNVVNSNIELLEGHIKLPKLKTVKIKQHRHIPSGYMIKSCTISMTSSGKYYISILTEYEKEITPIEIQHVVGLDFAMNGLFVDSETGKKANYPGFYRQMLEKLAQAQRKLSRKKRGSSNWNKQRIQVAKIQERVANQRKNFLHHKSKEFVTHYDAVIIEDLDMKGMSRALKFGKSVADNGWGMFTSFLEYKLKEQGKRLIKVGKWFPSTKTCSNCGSVREVKLSERTYQCTCGLNLDRDYNSALNIKKEGIRLLAIAE

SEQ ID NO: 58626 - protein, 358 aa, unknown
  TnpB Polypeptide
MLVRSIPIKLNVNELILKTIKLYKQGLQLCVDRAWELKIRNNIKLHPFVYYDLRTLGLPSQLSISCIKQACGIVKKAKSKPFINRTSIRYNAPRSFSFRNNVLSISTLEGRVKIPISIPNYALKYFKGWNIVESLLTQSKDKHYFTFTFSQESPEASNQHCEVLGVDLGVNKLAVTSNNVFYGNEIKSLRKRRDRFVGKLQSKGTKASKRKLKKFSGKWNRFMCWTNHKISKSIISSLKSGDVIVIEDLTGIRKSARYNKWVHKWAFRQLQDFIEYKALEKGIRVVYVNPTYTSKECNRCSSRNTTRHSGFFECRDCGHSIDSDINGARNIARRYTRNMCRAVVNTPILTSDDAILRG

SEQ ID NO: 58627 - protein, 392 aa, unknown
  TnpB Polypeptide
MSKIRTYKYRLYTTKNQVYKLENAIETCRILYNSCLVDRRNHYERTGKGLSRIDQQRIIVADKARMPLLREVHSQVLQDVLFRVERAFKAFFRRLAEKDKKAGYPRFKGKERYNSITYPQKPGFSFKEGKLVLSKIGHIKIKMHRQIEGKVKTCTIVRDSDRWYACFSVEKMPLRIAPPSNKRIGIDVGIKNFAVLSDGASIENPKYLIKSETKLARLQKSLSRKKKGSSNRGKTKLLVARLHRTIRNQRADFHHKISRQIVDSYGTITVEDLQIRNMVKNHHIAKSISDAGWGLFLAKLAYKAEEAGRLFEKIAPNNTSQICSGCGEKVLKSLSIRIHKCPFCGLILDRDENAAINILKRSTVGTTGSYAWGEAVQLGSSLNQEALSVRSG

SEQ ID NO: 58628 - protein, 362 aa, Bacillus sp.
MLRSYKYRIYPNKEQQMFFSKTFGCVRFVYNKMLADRIKSYQESQDKLDKSVTYPTPAQYKAEFPFLKEVDSLALANAQMNLNKAYANFFRDKSIGFPKFKSKKDNHRSYTTNNQKGTVYIESGYIKLPKLKTLVRIKQHRQFFGLIKSTTVSQTPTGKYFVSILVEENVQMFPKVDAKVGIDVGLKDFAILSNGKKYENPKWLRKAERRLALLQRSLSRKKKGSNNRNKARLQVAGLHEKIANQRNDFLHKISNEITNENQVIVIEDLKVKNMQKNYKLAKAISEVSWAKFREHLDYKAIWKGRDLIVAPKNYASSQLCSCCGYKNKEVKNLSLREWTCPECNSHHDRDVNASINLLKLAT

SEQ ID NO: 58629 - protein, 417 aa, Nonomuraea sp.
VPVGQKGAKDAPPGYRSRQEWFAKSRRLRVLKDWLAAVRADWQAGRVRIVRGGKRFARMRHNLQAATLSESVWRQQWQAKRWFLQADGESGKRYGNETIRLSPTGEVSIRLPEPLAHLANAPHGRYVLAARVRFAHRSTGWADRVAADRAVAYRIHLDVRRGRWYITASWQIPAAPAIPMSAALTHGVIGVDTNADHLAAWRLDVHGNPIGNPRRFTFHLSGGAVHRDAQVRHALTRLLHWARTCGVKTIAIEDLDFQAEKSREKHGGRKRFRQLISGMPTGRLRARLTSMADQTGITIIAADPAYTSKWGAQHWQAPLTSKTRTTTRHDAAAVAIGRRALGHPIRRRTAPPPAHRSDEQGHRTIQARPGTCGRQGTRPPSTGPCTRCMPPGRGAKAGDQCAQHRSRHTAEQLLLSP

SEQ ID NO: 58630 - protein, 383 aa, Planomonospora sp.
MQLRYNVRLYPSPPQRQALARAFGCARTVYNDGLRARQQARAHGLPYVSDADLSKQVITAAKTTPERAWLGEVSAVVLQQALADLNTAFRNFFASVSGRRKGPKIAAPRFRSKRDSRQAIRFTKNACFSITAGGRLRLPKIGDVDVRWSRDLPSEPSSVTVVKDASGRYFASFVVQTSDEPLPETASEVGIDLGLAHFAVLSDGRKIDNPRFLRRAERRLKKAQQALSRKAKGSANRKKAVVKVARAHAKVADARRDFAHKLSTQIIRENQAVYVEDLCVKGLARTRLAKSVHDAGWGRFTAMLAYKAARYGRALVKIDRWFPSSKKCGACGVVAESMPLDVRTWTCACGAVHNRDVNAAINILAAGRAERLNAYGGSVRPAA

SEQ ID NO: 58631 - protein, 380 aa, unknown
  TnpB Polypeptide
VQGGDNLNKAIKIRLFPTKEQEILMFKSIGCSRFVYNWALNRCNERYEQGEKYSIKEIRKEFTQFKKNDNYKWLNEVSNTTVVEAIRNLDKAFQNFFKRIGKYPKFKTKRKSRQSFYVRYDRLNFKDNVCHIEKIGKVKFKTNYEIPKSKYKNPYCSYDGRYWYLSFGIEVEENQTTLNKDLSLGIDLGVKDLAVCSNEIKFKNINKTKRVKKLKKRLKRLQRQVSRKYEANKEGNKFIKTNNIIKLEKQIKLLYRKLSNIRNNHIHQATNKIIKLKPYRIVMENLNVSGMMKNKHLSKAIAEQCFYEFIRQIKYKSKFNGIEFIQADRFYPSSKKCSCCGNIKKDLKLKERTYICNECGNRIDRDLNASINLANYKLLV

SEQ ID NO: 58632 - protein, 324 aa, unknown
  TnpB Polypeptide
LRINLGNGEYVWAKVVRSATRKTDKWICFISDIEHAEKTDDWFPYTVRLKLKNGKIYAQFSREEKLPKVTITKDNGVIGIDINAFPFHLAVVHTAKDGNLERYERISLDKLLEGSSEKREYLSWQIAYQVVEIAKRERKAIVVEDLEKLPKGKRGDGLPKLRQKLQKWVYKALLQKIEIVARRIGIQVIKVNPAYTSIIGKLKYAPLYNIDKDTAGAYVIARRGFGFKERLPKNYRELLKDAEFLSYTIAKIEDRIAKLKEEVRNEQNEYNRNRLKSALWKTRKELDLLLRYLRGSGESESATQQTVNRKMERVRGLTHVRQKS

SEQ ID NO: 58633 - protein, 462 aa, unknown
  TnpB Polypeptide
MGQATRTTKLLLDLGQRRQGGANTGKRAFLAETVAQLTAARAFYIDFFLTHADKLAERVSYYSEKHLEMRERAISANELLTWAEACTVATKDHPHPWPGWNFSERFPDLPVVYRRSVIKDAIGKVRSYLSNRAHWEKSGQKKGKPGLPGASEHPTLYQGTCELILEEAQVADRFVRLKVYDGKTWRWANYPVRCSRYFQQRLGDLAWEQQSPLLVLTKQTAALHFPQTKRVQAKKVKESKRDPDLVTVAVDLNVKNLAVITVRQHQQIIETVFVSDHGLDQQRYRHLKRIAKKQWQSGKPVAGEHSNQQLWRHVGRMNADAAHQVAHRIAAVCAKYPGCVLLFERLRKIKPKGASKSRRMNRRQANQVRGKINQTAREQAYALGVVTVETNAHGTSQYCSRCGARGERFSLRGGVRIQAKWGKLFSCPVCHYEANADHNASVNVHHSFYQEWHWQPRLKRSG

SEQ ID NO: 58634 - protein, 271 aa, Microcoleus sp.
MKVKIHPDTIGKLRTVTVSKMPDDRYYASLLIDDGIEQPESSNEGKTIGIDLGLTDFAVTSDGSKHQNPRHLKKHERNLKRKQRKLSRKRDKTTSKRRKAKLAVAKVHSKITRVREDFLHKLSCKTVNENQVIVVENLAVKNMVKNHNLASSISDAGWGMFCTMLKYKAESQGKVYLEVGRFFPSTHLCSNTLLPIAKMALSVREFDCTHCGQRHDHDVNAAINIRNEGLRVLALGTSVTALGGDVRPKPYGYKSTTVEAGAVEWGSPYQW

SEQ ID NO: 58635 - protein, 405 aa, unknown
  TnpB Polypeptide
MLLCKKIKIEVSKKDAEALEFMQGKCRGLYNWWVMKLRNGERWNLERAKKSLQESKAYDPELRFVYGKLLAEVYFRIDKAMNGFFRRVANGEKPGFPRVKPRHQFFTLCYPAMYPEVKDNTIILPTGGGSCWGPKRYPNVIAHLTEEPPAHFREVAVTRDARGNYYCSFVYNESEQHTHPDGIVAFDLGIKSLAVGYTNTGRFYHIGGFRGYRWYNKQLDKIRSRRDRCKRGSRRYIHLSKVYKRVSERKRNKQRDCLHKASHLIAHRLAERAVVIGDLSQRQMVLPKKEHETRREKRKRQIRNRMVYNDWGLYGFVQMLKYKCLLYGKELFIIDERDTTRTCHRCGQKQVMPLWQRVYRCRNCGLAMARDDNSAINIYQRFLARLGPHTEAGLPCGVLHEECSN

SEQ ID NO: 58636 - protein, 645 aa, unknown
  TnpB Polypeptide
VRVDARHVKIGSGADARVRRRRRAGPHRLSDAGLRGRARPRHPGRRRPRDRRRPPRRQRAARGDPGSGPLPLEGRPGSLPAPRGSAPAFRPGVNRVARPVLLLDVGAEHVRRGTAHRPGEVRPGPQPLRPPVVSGQFGELLTQPPGGDALEAVDQPRQRHGRGEADEQADVFGLAVELHQLAAEVAADRPHDLPHPFQMRVGEHRVPVFRHENQVGVQRENAMPTSTNVPVLSHEPNILCGMRLRYRHRIYPDAAQRQALARVFGCARVVYNDGLRLREDAYRAGLPYPSDGELSHRLTLAKLTPERAWLGEVSSVVLQQSLADLHRAYRNYFRALKEYKAARARGEKPKLKVRKPRFKNRRHDQTARFTANSRFRVLPDGRLSLPKVGDLKVRWSRPLPAAPSSVTVTLDGAGRYHASFVVEVQAAPLPAVDAAVGIDLGLSAFAALSDGRKVDNPRWLRARERALRRSQRNMARKRKGSRNQEKARRKLARLHARVTDTRRDFHHQLSTRLVREHQTVCVETLNVVALGRSNLAKSIHDAGWSTFVGMLEYKARLYGRTLVKVDRWYPSSQYCSACGRRDGPKPLKVRAWTCPGCGTTHDRDLNAARNILAAGLAVAACGPDGRPGSRRAVGDEAGTALAGAA

SEQ ID NO: 58637 - protein, 416 aa, unknown
  TnpB Polypeptide
MNYTYRIYPNSAQQAQLLEWLEICRGVYNYALRELKDWIASRRCPIDRCSLEKEYIISADEPFPSYHRQQNNLPKAKKQFPHLGKVHSQVLQTTIRRLHDTWEAFQKRGYGFPRFKKKGQFKSLVFPQFKSNPIVGSAIKLPKIGAVPINLHRPIPEGCTVKQVRVLSRVRGTQWYVVVAIESDVSVPATPVQGRAIGIDLGLERFLTVSDGSFQERPKFFKALQSKLKLLQRRAARKRKGSQNWEKAQLKVSRLHHRIANRRKDFHLKTAHKLCDQAQTILAEDLNAKGMVRGMLRKDCADAAFGQFLSLLEWVCWKRGVYFAKVSANGTSQTCPHCLAMVRKGLAVREHHCPECGYRTHRDHASAEMVLLRGIEQVVAQGRWGKETACQVGLSGVYDLDKWRGAGIPNREVGRA

SEQ ID NO: 58638 - protein, 418 aa, unknown
  TnpB Polypeptide
MLTMNYTYRIYPNEAQQTELVEWLEICRGVYNYALRQLKDWIASRKCPIDRCSLEKEYIIPADEPFPSYHRQQNNLPKAKKQFPHLGKVHSQVLQTTIRRLHDTWEAFQKRGYGFPRFKKKGRFKSFVFPQFKDNPIASSSIKLPKIGAVPINLHRPIPEGFKVKQVRVLSRVRGTQWYVVVTIQSDVSVPDAPVHGRAIGIDLGLERFLTVSDGSFQERPKFFKALQSKLKLLQRRASRKQKGAQNWEKAQLKVSRMHHRIANRRKDFHFKTAHKLCDQGQTIFAEDLNAKGMARGMLRKDCVDAAFGQFLSVLEWVCWKRGVYFAKVPAKGTSQTCPSCFARVSKGLAVREHHCPECGYRTHRDHAAAEMVLHRGLEEVVAQGHWGKETACQVVLSGVWRGAGIPNREVGSSPHCP

SEQ ID NO: 58639 - protein, 293 aa, unknown
  TnpB Polypeptide
MKGKGQYDSITYPGTGFKIGEASVWLSMSGRPVQIKAKLHRPVVGKVKTCTVRRYGSKWFVCFAVEQEDDFLPRCAETVGLDAGLNSFLALSNGEFVLNPRFFRKDEKALAKAGRRQAKTKKRSPERRKANKVLSRIHEHIRNRRHDFVHQTARRLVNRFGVIAVEKLSVKNMLGNHCLAKSISDASWSMFRTVLTHKAESAGRVIVAVNPAYTSQDCSQCGYRPDGLEGRTKKKLGDRWHHCPMCTASLDRDTNAAVNILNLAINTSIGTNHAGITACQVTPVEAPTFRSGE

SEQ ID NO: 58640 - protein, 368 aa, Blautia sp.
MLVAYKYRLYPNKEQQIYFAKCFGCVRFIYNRMLSDKIEHYKETKQRLNNTPAQYKKEFPWLKEVDSLALANAQMNLQTAYNNFFKRPEVGFPKFKSKKSHKYSYTTNNQGGNIYVSDRYIKLPKIGLIRIKKHRDFEGLIKSVAVSQKPSGKYYVSVLVECDEIEKLPKSESEIGIDLGLKDFAILSNEEKIANPKYLSKSELKLRKLQKDLSRCQKGSKNRNKCRIKVAKQHEKIVNQRKDFLNNLSKRLICENQTICLEDLKIKEMMSNKQISKSVADVSWSEFVRQLEYKAQWYEREIIEISTWFPSSQTCSCCGYINKRIKDTNIREWICPNCNVHHDRDINAAINILNEGLRIRTAGTVEIA

SEQ ID NO: 58641 - protein, 305 aa, unknown
  TnpB Polypeptide
MREKKGNYNKPIHPPKFLPKDGHFVLIFPYQSFRVKEDKVILILGRNFAKKYGQMHLEIPLPKNIKGHRIKEVRILPKYNALWFEVEYVYEVQSEKKDLDHSKYLAIDLGVDNFATCVETIGTAFIIEGRWLKSFNRWWNKEKAKLQSQYDRQGIKFGKKMAWLLRKRKNVMNNFMNQAVNYIIKYCLENKIGNIVIGELEEAKQRVFLGKVNNQNFQFIPYGLFKQKLKAKCEYYGINFIEVDEAYTSKVDALALEPLEKKEECWGRRVCRGLYQSSTGVLVNADVNGALNILRKVAGDSSIRG

SEQ ID NO: 58642 - protein, 483 aa, Streptacidiphilus sp.
VRKFEPQPGFVVQAFRFALDPNATQEAALTSHCGAARAAYNWAVGWVSASWWQRKAEESYGIVEGDLTPWRPWSLPALRKEFNQVKKVDPRFAGWWEENSKEAYSTGLANAAAAFDNYSKSKRGTRKGKRVAMPRFKSKHKARLACRFTTGTIRVEPDRRHVTLPRLGTIRTHENTRKVECRLSNGTARVLSATVGFERGRWFVSFQVETRKSERAAVRPDVAVGVDLGVKCLAVMADSTGEVRWVPNPKHYDQHVKQLKRMSRRVSRRQGPDRRTGQRPSKRWLIANAGRNRVHHQVANLRADALHKLTSGITAEYGTVVVEDLGVAGMLRNRRLARKIADAGFGEIRRQITYKTGWTGGATVVANRWYPSSKTCSNCGAVKAKLPLHVRIFDCDGCGLVMDRDKNAATNLAALAAASTTGSGVAADPDARASKPRGADQKTRATTRSRKDASGRAGGPTLPHQRQEEARDRQQDPTALTLW

SEQ ID NO: 58643 - protein, 376 aa, unknown
  TnpB Polypeptide
MSNRAIKYRIYPTTEQAVMFAKTFGCCRKVYNLMLSDKIKSYEETKSFGRQTPAMYKADYPYLKEVDSLALANVQLNLQSALRNRFDKKRKFRNGFPKYKSAKHSRKSYTTNNQKGTVAIIDSGIRLPKVGIVKAVIHRQPDADWKIRSATISQDKDGKFYISVLFEFDTNIVSVTKTTTNAIGLDYKSNGLYMDSDGNIGSNHKYYRECHDKLAKAQRKLSRMQGFRKGETKSNNYIKQKRRIAKLHKHISNQRLDNLHQKSTEIANQYDVVCVETLNMRAMSNKGFGNGKATLDNGYGMFLNMLEYKLADRGKYLVKVDKWYPSSQICSCCGNRQRLKLTDRIYSCKCGLTIDRDYNAAINILNEGLRLLKEAA

SEQ ID NO: 58644 - protein, 482 aa, unknown
  TnpB Polypeptide
MRHTTFRFALAPDQAQLAMLVRHAGASRFAYNQCLQLVGAAHRAHAIDPSTAVPWSGYDLINAFNGWKRSESAGRIFVAAPDGTVTKKVTGLPWRRDVAAQVFEEAAVDFGRALTAYAQASTGDRRVRVGFPRRKRKGRCRDSFRLRNKQREDGTFSIRVGVGHPRSVTLPRIGTVRVLDDTRRLRRLLRPISEAKLDTGRQMVAPRARILFATCSRHGSRWYLSLTVQASEFHAERRHPPRPAEDPGGFVGVDRGLVALAVAATSDGTEVGRWPAPRPFLTGLEGLRRRAREVSRTQPRSRNRAKATRRLSRKHARIADIRRSFLHDVSSQLVKTHDRLCLEDLAVANLLRNKHLASAIFDTGWTELARQLSYKAAWFGTELVVCDRWFPSTRSCSRCELVKQPMGLAERMFCCGACGLAIDRDRNAAANLAAWAERHHARVPDRQAGGRTTNAPGGEGASHCPAMAEPAPMKGEPTPTSS

SEQ ID NO: 58645 - protein, 301 aa, Haloquadratum sp.
MEYSHRYHAYPTQELAAELEHHIDIHRQAYNYTRYEYENVDADDIGSAYKHHYRLPGWKDEFPVFSEVNSKALQRTVTRFYQNLDGLSEQKQNGRKVGKLKWKSPRKFQSMTFSQSGFELKNTSGRHATLWLSKIGDIPIRYHREIPDEADIKEVTIKKETTGEWFVCFGLETDDADLPEKPDVESLNTTNSVGIDLGILNYIHTTDGKTVDWLDLEDDYERSRREQRKLSRKQKGSNNYEKQRREVAKLKRHIRRTVLDYQHKITTWLVREYDAVFVEDLDLKGMLEQSHNARNKQDAAW

SEQ ID NO: 58646 - protein, 237 aa, unknown
  TnpB Polypeptide
VGVDVGQRYLAVATDTQNKTTFFPGKEVRAQADHYARLRKRLQQKGTRSATRRLIVIAGRERRLKQDRDHLISRRIVDAYPHSLIGLEDLTNIRERTRRTRGKRASAKQRRANRHASAWAFSEVQSYLAYKAVLAGSLAVKVDAYHTSQACPRCGYTSPDNRPEKGLVFMCQACHFTLHADLVGARNITLRTLLARQDWVRTGVLSERPEVSDAEAKAARRQRSAEVRWSLDTSPAL

SEQ ID NO: 58647 - protein, 305 aa, Escherichia sp.
VKRLQAFKFQLRPGGQQECEMRRFAGACRFVFNRALARQNENHEAGNKYIPYGKMASWLVEWKNATETQWLKDSPSQPLQQSLKDLERAYKNFFRKRAAFPRFKKRGQNDAFRYPQGVKLDQENSRIFLPKLGWMRYRNSRQVTGVVKNVTVSQSCGKWYISIQTESEVSTPVHPSASMVGLDAGVAKLATLSDGTVFEPVNSFQKNQKKLARLQRQLSRKVKFSNNWQKQKRKIQRLHSCIANIRRDYLHKVTTAVSKNHAMIVIEDLKVSNMSKSAAGTVSQPGRNVRAKSGLNRSILDQAAR

SEQ ID NO: 58648 - protein, 489 aa, Streptomyces sp.
MIVSPLNSLSSIEVLEHGCLHREQFRLDVIFRRERPGSIRTVIGMQLRYNYRAYPDAAQRRALARAFGCARVVWNDCLRDRQQAHAAGQPYVKSAELSRLRITQAKRTEERAWLADVSAVVLQQSLRDLDTAYKGFFDSLRGKRQGGKVGPPRYKSKKDTRQSIRLTTNAFSLQGDGTVYVAKVGNLKVKWSRRLPAAPTSLTVIKDSCGRYFLSFVVDTELDILPEVETDAGIDLGLSAFAVLSDGRKIDSPRFLRRAEKKLKRLQRELSRKAKGSKNRAKARFKVARQHARVADRRRDFHHKVSTQIIRDNQAVYVEDLAVSGLGRTRLAKSVHDAGWSAFVGMLEYKAVKHGRTFAKVDRVFPSTQLCSACGFRDGPKPLHVREWMCRACGAVHDRDHNAARNVLVEGRRIVAAGRAETLNASWSAGKTRTKVPAQRGEAGSLRKGQPTQAGIPGLHAGEHVNEAENGVWHHRVDGGESRTVLSGW

SEQ ID NO: 58649 - protein, 285 aa, unknown
  TnpB Polypeptide
LGIPSFKSKKAPRQGFKTDRAKIVNGRLRLDRPRSISKDSWHDLSSYEVLKMSEVKVVSIFKEKGAYYVALPYEEEIELKAKTQQKTAVDVNVGHFNYTEGQINILPAKLQKLYKRIKHYQRMLARKREVNGKLATKSNNYFAVRTKLQRDYRKAANIQNDLLQKFTTKLVNNYDQIVIEDLAVKEMMMTHVASKGMQRSLFSKFRRILTYKCDWYGKELILADKTYPSTQRCAACGYVKKGEEKITLQGNKKHGTKHNEYVCYGCGYKNDRDENAVLNLLALAK

SEQ ID NO: 58650 - protein, 348 aa, unknown
  TnpB Polypeptide
MILTYKIKHKQNFERELELAKKVAEFGLATRSITSKDVKHIGLKSMIANQILKKYSKNKKLKNVNSVKLTIPNQGIKIKEGKIYIPCLKLYLEIWFDKGFQKINQVEIGKEFAYVSVNYNEPKTYVPENIIGVDRNTTKHSLVASNLDTGKILKLGKECSHIHNKYKNIRKSLQKKGKLKKLKSIKQREKHIIENINHQITTKLILEALKVKGRIVLENLKDIRQTAKTRRKQRYSLNSWSYYQQEQMLIYKAKKYGVPIFYVEPEYTSQRCSCCGHIEKANRKQKLFQCKKCGKVENADVNAGFNIGYKYKKGISQFDIERDISKGNTDTPKEALLVKPSNFRTQSL

SEQ ID NO: 58651 - protein, 363 aa, unknown
  TnpB Polypeptide
MQAVKMVRQKHQTPANLLWLLDEFRCMVNVCIAIGIEENVSSLKTLSLRSYHRLSRDNLSYYRLCAISAATGILRNYRKAKRKNPRTRVPYAKKLMLTTCYGFEITDDLLRLPVKPRKYVYLKLNNHTLRVLSGLNVRSVTVTPASVSIAYSIGTAEIRPEGYVGVDRNLDNVTTASTDGTVKTFDLSKATGIKSTYRFVKGRLKRNDTRIRARVFSKYGEKQRNRVQPLLHNVSKRIVEDAKTRQHGIVMERLTGIRRLYRRGNRQSRSYRARMNSWSFGELQRQIEYKARWEGVKVIYVPARNTSKRCSICGYKTLESTQRQLWCPILILAEQLIGNRMRRAGMEGETPNRTIWPRTSTTL

SEQ ID NO: 58652 - protein, 403 aa, unknown
  TnpB Polypeptide
MEKGYKYRIYPTEEQKKIILLIISACRYVYNKTLEWHNKVYESENRYVSYREAWDMLVNAFVYFDWLNEADHVALQQTLMNLEQAFKNFFNKKSRYPKFKSKRKSRLSYRTMNNNNTLKIIGDKIHIPKVGDVKAVISRTAPEGWKIKSATISMERDGTFYVSLLYSNSKEKEPPVTTIVDPKNTIGLDYKSDGLYVDDNGTNFHMEKCFRKSEPRLRREQRKLARMIRCHITGFKKGNRGGDIPIYDKPLKDCKNIQKQIKKIAKIHRHIADQRKDTLHKESTRIANLYDLVAVEDLDFKAMSNKGFGNGKATLDNGGGMFYTFLEYKLRERGKPFIKVDKWYPSSQLCSCCGHRDKRLKNLQISRWECPECGAVHNRDHNAAKNIKTEGLRIFSELLTKAA

SEQ ID NO: 58653 - protein, 398 aa, unknown
  TnpB Polypeptide
MNMRLQRTIKLVLKPTEEQKRILLETIEQYKFAYNYTCKIGWEAELWNGVELHKLTYYTVRDKTSLPSQLVISARVVATESLKSAIKRKRKGFKSKCPESNNPAIRYDKRSYTVWLDREEVSLATVSGRLKFKIKIPEYFKQYIDWNVTSANLKYDKKLKKFFLNITVEKDFPDAEPADFYVGVDLGLKNIAVVSTPDGKINKFFDGGHIRAVSERYYALRKRLQSKGTPSAKRHLKKLSQKEKRFRTAINHKIAKEIVNVVPAGGVIVLEKLKGIRKRIKVNKQNRRWIHSWNFAQLQQFIEYKAQSKGIRVVYVDARYTSQKCSRCGYISRSNRIDQSHFVCKHCGYSLNADLNASRNIVKNYLTSLHRGEVRTGAGISAPVGRCQPSQCSGAITA

SEQ ID NO: 58654 - protein, 376 aa, unknown
  TnpB Polypeptide
MHKAFRYRCYPTRAQDAAMGDMLDTHRHLYNRALAERKAAYEQEQRTVRYDEQSGHLKEERLTNPFLTKTNFSSCQATLRRLDRAFTAFFRRLKTGEKPGYPRFRGRGRFDSVVFPSYGDGCRLKGGRAEFQHIGTIKLKLHRPIEGTIKTMTFRREADGWYVIFSCDLGDRQPKPATGPAVGIDLGLKSFLVTSDGAQIAPPQFYRKAQASLRRAGRRVARRTKGSTRRRKAVRLLAKAHQHVANQRKDFHHKTALGLVQTHSLIAHEDLNVRGIARTRLAKSTHDAGWAGFLTILAHKAEEADVTVIAVNPANTTQACSDCGSLPDVRLTLADRVHSCSCGLALDRDENAARNILQKALGLSVQAPTLPIGDVA

SEQ ID NO: 58655 - protein, 306 aa, Vibrio sp.
MKEIAIKQRLYPTTEQVNLLEQTFGCVRFVYNAILKWRTDTFYNDNQKVNYNSASSQLTELKKEPELNWLNDVSCVPLQQSLRHQQVAFKNFFEGLAKYPTFKKKRSQQSAEFTKSAFKYRDGKLYIAKSKVPLNIRWSRELPSEPTTITISRDSAGRYFVSMLCRFEPKPLLISKNTVGIDLGLKDLVITSNGFKSGNPQHTKRHARKLAKAQRVLSKKKKGSSNFYKARKKVARIQAKIADCRRDFTHKLTTQLVNENQVISCESLSVKNMVKNRKLAQKQSVMLTGLSLLDSLNIKLIGLEEP

SEQ ID NO: 58656 - protein, 382 aa, unknown
  TnpB Polypeptide
VGFRGKGSGMVANRAYKFRIYPNDEQKILFAKTFGCVRMVYNHWLDRKIRQYEENKTNVTYTICAKEMAAMKKTEEYGFLKEADSIALQQSLRHLDTAFQNFFKQPKTGFPRFKSKKRNKNSYSTVCINGNITLSNGYLKLPKIGQVRLKQHRIIPDEYRLKSVTVSQTPSGKYYASILFEYEDQVQEKELQKFLGLDFSMHELYRDSNGKEPAYPGYYRNAEKKLAREQRKLSKMQKGSNNRNKQRLKVAKLHEKVSNQRKDFLHKQSRQITNAYDCVCIEDLDMKAMSRSLNFGKSVSDNGWGMFTTFLKYKLEEQGKKLVKVDKFFASSQICSACGYKNTKTKNLALRKWDCPQCGIHHDRDVNAAINIRNEGMRLVIA

SEQ ID NO: 58657 - protein, 406 aa, unknown
  TnpB Polypeptide
MLIRGVVFRLESQLPSDAQSLLRDFRLAVNEAIRLGLQARLTSRNSITSLAYRELRREHQMMYCQHLVSSFEIAASVLKNYRNRVRRGLPVKTPYVKRLMMKTERRAFKLDRESGILDFPIRAGHHVQLRLIVSRYHRRYLDDKSLSLGSMILLPDRVIIAFRKDAPKPFVPESTLSLDTNEQSLDGIFMKTESAIPVTVPFPEVTAIQQRHHDRRRRLQKKKAHDRRTSRRLCKREGTREHDRIQNRLYHVADSVLSFAEARRSAIVLEDLTGMKHKRNKDLNRRLSIWPRRKLHHLIEHKAQWRGIPVVKVDPRYSSRKCPICGRIQDSRMGTLFECECGWRLDRHINASINLLQTAISKGLEVAGGLRFNPGAFQHDVMMILYDPERGARSEPNGTSCIGSAT

SEQ ID NO: 58658 - protein, 373 aa, unknown
  TnpB Polypeptide
MKLTIAVKLQPTQEQAFFLHETLERANAACDHLSDMAWEMQTFGQYALHKIGYAPTKAAFNLSAQVVVRAIAKVADAYKLDKKTKRSFRPLGAIAYDDRSLRWYAGGVSIWTMAGRQRIPFVCGERERALLANRQGESDLLLRDGAYYLYTTVNVEEPPAGKPTDFLGADFGIVNILTDSDGATHGGAHLNGLRHRHRRLRRRLQAKGTKSAKRLLRKRRLTESRFASHVNHTISKRIVATAQGTGRGIALEDLQGIRDRVTARKPQRATLHSWSFFQLRAYIEYKFRLAGVCVVAVDPRNTSRTCPCCGHVSKGNRPHRDSFLCQSCGLAGPADYIAAINIGRGAAVNPPYVGGESASLLATHKPPALAGDR

SEQ ID NO: 58659 - protein, 386 aa, Desulfomonile sp.
MTEQVLTVQCKLNPTDSQAEEIEDTLKAFADACNWINQNTPVKQTNKVRIQGLVYQDVRAKFGLSANLTIRAINRVAANRKTVKLTHSSVKNFEPTSIDYDARIFAFREKDEEVSVTLLRSRQRIKLVLGDYQRDRLKGSKPTSATLCKKGSEYYIHIQVKSEAPDQIHVDTILGVDLGITDIAVTSEGQKFGGKTIKLIKNHYASMRAVLQQKAVKGTRSSRRRCRELQQRLSGKESRYQRQINHEISKAIVTRAQEIPAKIALEDLTGIRQDINEKEGKKQRKKVNGWAFYQLREFLTYKALQVGIPLVLVDPHYTSQVCHVCGKDGDRHGKSFKCSCGWSGDADLNGAINIAFLGRYVDRPGGSEWLPNIKVVISGLQKAKVL

SEQ ID NO: 58660 - protein, 532 aa, unknown
  TnpB Polypeptide
VLAKNQTYKAFTARPFHVLDLNGELLDSEPIMTQLASEVRCISAYATFVARNDTELGIRLAQAGAVQPAEAGRRAGVNIPDALVVKGKLRKNKAGKLVEEKVSGKSRKERIFRHRVVTEYRAWEERIKAANDESGKYISQGWKRTVNASPPSYGGDTINLGAVDNLYAVIENDPFTDREIVLKMVIWGEWYRLIFPFDNNRFPEGKVTLPVIKVEDNQPVFIFSVVTDNPVVQFSGDYVLGVDVGINNYATVAVINSSTGRVVYETTLSQRVHSLWNSIRASEKQVKQLREKAEPIVYDRQGKMAALDEAQLHREAASRKKRELAILAAQEIAYLSHFWDNAVVAVEDLSWVTNTMQNGRWNRGELVKWLAHYVEQNGGWVVSVNAADTSQVCHLCGEKVKHPTHKVSVCPEHGAMDRDVNAAANIAARAVKNVEKAREKRGNNSKLQPQAPLKTPVARSSLKYPGQDRTKSAPTPKRKRKGVKPHLSPARVQASRVDTSVLADCHTYGVAGTSAAIKQGTITNKYRLCSPI

SEQ ID NO: 58661 - protein, 406 aa, unknown
  TnpB Polypeptide
MEHLITHNLAHAIRLYPNRNQQTFFKKACGCSRVAYNYGLAKYIKALDAGGKPKISDIKKQFNQEKKTLYPWMSETNKDANQQPFTNLHSAFGRFFKKQSKFPVLKKKGVKDSFYISNDKFSIDGNKFRIPKLGGVKGAESLRFSGKIMSAVVKRKADYWFIVISVETNQTFTTCDNQAVVGVDLGIKTLATLSDGKIVEAVKPLMTRLDRLRLLQRWASRKIKGSSNRHKANQKVAKIHYEVSCLRKDILDKLTTYLCENYKVVVIEDLNVVGMVKNHCLAFSLADCGFGEFRRQLEYKSLLHGNTLIVADRWFPSSKICSGCGHTKETLLLSEREFICENCGQVIDRDLNAAINLQNYGLKQLRMACPEVTPVDKRALGYPSAIGVNETILDEAGISEHSQVLT

SEQ ID NO: 58662 - protein, 472 aa, unknown
  TnpB Polypeptide
MWKMFEIFHIDDRKEGVFMARKKKIQNITEGWTSYVYLCQAEVPVYPLLWRYRPSVEAVRAKMPKKKRNAARTDHSVEYDHIAYRFLGLPTKAQAEQLRRTIGCARFLWNRMLGDRLDLYRIMGLTVYNTPADYKDLDELFFLNEVDSLALANVQLRLEAAFSDWLSGKTGKPRFKKKNLSTKAYTTNCVNHNIRFEEGGLTLPKVSGTVKIRMHRPVKEGGTVKNVTVTQEPNGDWFFSIVLAYPKEQNDAFPCMEAEDVHKLKILGLDMSLPHMYVDSDGRFPSYKLNGITVEFEKWYKTHQAKIAREQRKLSRMVKKSSNYARQCKKIAGLYAKTKHWRSDFLHQMACRLARAYDVIAVEDLNMAAMKKSLNFGRSVSDNAWGTFLTILEGQCKKYGHMLLFVSKWFPSTKTCLSCGYIHKEITLKDRTYICPSCGHVMDRDYQAAVNLREEALRIISENIARIKRIAA

SEQ ID NO: 58663 - protein, 283 aa, Microcystis sp.
  misc_feature (154)..(278): Xaa can be any naturally occurring amino acid
LGAYCLEIVYEQPSSSSQEGERYAFIDLGLNNLAAVTSNIPEFQPTLVCGKALKSCHQKYNKTLAKLKSELPSLQKTSKRIQGLTLKRNCQVDYYLHTASKYIIDKLLAHQINLLVIGHNQGWKQNINIGDRNNQSFVNIPHSRLIEQLTYANXXXXXXXXXXXXXXXXXXXXXXXXXXXXXXXXXXXXXXXXXXXXXXXXXXXXXXXXXXXXXXXXXXXXXXXXXXXXXXXXXXXXXXXXXXXXXXXXXXXXXXXXXXXXXXXXXXXXXXXXXXXXXPIKQI

SEQ ID NO: 58664 - protein, 310 aa, Fusobacterium sp.
PKYLAKDGFTTLVIGFVRLKDDMLIIPYSNLFRKTHKEIAIKLPPVLKGKKIKEIRIIPKQYSRYFEIQYTYEVKEIQRELNRENGLGIDLGIDNLCTCVINTGASFLIDGRKLKSINQYYNKINAKLQSIKDKQKIEHTTLRQKRIARKRNNRIEDYLSKAARIIINYCLNNDIGKIVLGYNEDFQRNSNIGSINNQNFVNIPYGKLRDKLIYLCKLYGIEFKLQEESYTSKASFFDGDEIPIYNKENPQEYIFSGKRIKRGLYQTSADKLINADCNGALNILRKSKVVDLSILYNRGELNTPKRIRVV

SEQ ID NO: 58665 - protein, 366 aa, Methanomethylovorans sp.
MKVDRTIKLRLRLNEIDEPKLKETIMMYNKAVNIAANYGFEHHTSSKIIIHHATYYSIREQFPELNSSLVQAARDVAAEALKGVKLKILPVAKPLAAARFNQRTLRVVLKHMFATMSTIAGRIEATYTIPEYYSKYLNWSVQSSTIKYIQQKNEFWLHLVMRTESPKQSGNKVLGIDRGIVNVAVCSNNKFFNGFQIKAVRAKYAYIRQKLQSKGTKSAKQLLKKISGKERRFVKDVNHCISKEIVAMPYNVFALEDLTSIRVQTRRGKNFTRKLNNWSFYQLEQFIRYKAEAVGKLVITVDPRFSSQKCSRCGNILKENRNGNAYRCHNCGLQLHADLNAARNIAQSGTSCLSRLPVNQPNVVSI

SEQ ID NO: 58666 - protein, 389 aa, Methanomethylovorans sp.
MESTRTIQLKIADPDFDLVETIKKYAQGMNYVSEIVFDNEKVIPARKLQPLVYNHLREELGLKSQVSCNIPRQVAGTYKTIVELAKQGLSYWQKIVYSPTSMILSYKRDYTITENSVSITTFSSGRKTYQLVNYPYAMQFFKSPWKFGASKVVKHDDGSYYFHLTVYQEIPDKRTEDASTFMGIDVGMNYLAVASTTDKKCKFFAGGEIKNQRNIYKNMRARLQSKGTSSAKSVMKQLAGKEKRLMKDVNHCISKAIVKFAAENNVSVIGFEDLTGIRTRTEHNISKKHRYHHSSWAFRQLQSFVAYKAKLAGIITEYVDPAFTSQTCFRCNHISRNNRHSLKFHCEICGYEVNADLNAASNLEHRTRDFRYTLESQGCQSITHTHEMI

SEQ ID NO: 58667 - protein, 370 aa, Methanomethylovorans sp.
MLKAYKYRIYPTKEQEESFFQHFGACRFVYNWALENKIKSYEQNDKSVSRFTLNKMITELKEEHTWLKDVNSQSLQGATLNLETAFTKFFREKKGFPNFKSKKNPVQSFSVPQFYEVDFDNNKVKLPKIGWIKTKLHRKFKGIEKTATLSRTPTGKYYISILVDDEQETPVKSLFNEKVTVGIDIGIKDFAILSNGKKIDNPKYLKTSIQRLHVLQRRMSRKQKGSKNRAKARNAVSKLHEKISNQRNDFQHKLSSKLIGENQALALETLNVSGMLKNHCLALHIADASWSSFVTKLEYKAEWFGKTILRIGQFEPSTKICNVCGYHNKNLTLADREWQCPDCKTNHDRDVNAAINIKKSALNKQNLIGI

SEQ ID NO: 58668 - protein, 370 aa, Methanomethylovorans sp.
MLKAFKFRLYPTLTQAVQLNQHIGSCRFVYNWALDQKIITYEQTGKSVSRFDLNKMIPALKESNKWLGEVNSQSLQGMTKQVESAFTRFFREKNGFPRFKSKKNPIQSFPVPQHYTVNFDNNTVKLPKIGEIKAVLHRVFEGELKTATVSKSCKGYYYISILVEDGNEIPVKQEFSDSTTVGIDVGIKDFAVLSTGEKIENPRHLKNSLQRLKVLQKRVSKKQKGSQNRAKAKQRLSSLHDKIANQRNDFQNKLSFKLISENQAIALETLNVKGMIKNHNLAQSIGDSAWSSFVTKLEYKAAWLGKTVLRIGQFEPSSKLCSMCGYHNKELQLRDREWECPECATKHDRDINAAINIKKFALIDQNLICL

SEQ ID NO: 58669 - protein, 374 aa, Methanomethylovorans sp.
MRKIYKFRIYPTKSQIRQMERSLELCRQVYNRTLAERKQVYEETGKTLSKYALNNLLPQWKVENTEYNEVFSQTLQEVQERVDLAFKHFFRRVKNGEKPGYPRFKGKGWYDSFTYPQMGFKLKNNHIYLSKIGDVYVKFHRQIEDNVKRITVRRTACNKWYVCLTIEVEDTPTPIADLNKVVGIDVGLANFATMSNGTFIPNPRFFRAEEKELARVQRKLSKASKGTTERQKARKVVQLVHERIANKRYNFAHQISRQLVGNYSFIAFEDLNIKNMIKNHCLAKSIADVSWNMLINMTKYKAESAGSVVVLVNPANTSKMCSRCGLLVEKTLADRVHKCDSCDLVMDRDHNAAINILRLGLQSVGIETVEAHRL

SEQ ID NO: 58670 - protein, 416 aa, Methanomethylovorans sp.
MQLTKKIKIHPTEEQVDVLWKLSEKCRLVYNFALAERREKWKEEHRSVKYVEQQNQLPELKKQYSQYNMVYSKVLQSTIKKLDANYKSFFALCKKGDKSARPPKFRSRKYLMTLVYNQSGFKTKDGKLSFSHKVNKIPLAFEIGAAIDLLPIKQIEIYNDDPYKARGEFFVSVTYEIPPEKEYVDNGLYQAIDLGITKIVTAVNTQGKFFEIKTPRSDQYWNAKIDSIKSRRDHCKKDSKRWNRLHNRYQKMEAKKSHQIKDFQHRLSKKMIENTKANTIIVGDLNVKNMAQSKKVTGKKKRSINRSTQNQGYLSRFIGFLTYKAELRGKKIIRIDESYTSKACHNCGKLHDMPLSKRNMVCDCGNVMDRDRNSAINIMKRFLSQNALWTGYQQFVGNLRHYRLLDGIEIHRIEAK

SEQ ID NO: 58671 - protein, 371 aa, Methanomethylovorans sp.
MLKAYKFRIYPTTKQEEIIKVHFGACRFVYNWALEQKIKTYEQTKESISRFDLQRILVHEVKHSNEWLKEANSQALLASLVNVESAFTKFFREKAGFPKFKSKKNPVQSYQMPQHYSVDFEKQIIKIPKIGEVKTILHRRFEGKLKTATISRTCTEKYYISILVEDGKQIPNKQNFSESTTIGIDIGIKDFAVLSNGEKVENPKYLKNSLQRLKVLQKRVSRKQKGSQNRAKAKQRLASLHDKIANQRNDFQNKLSFRLISENQAIALETLNVKGMLKNHCLAQSISDAGWRIFVTKLEYKAECFGKTILRIGQFEPSTRICNVCGYHNGKLTLADRDWTCPDCKTKHDRDINAAINIKKFSIQEQNLIVI

SEQ ID NO: 58672 - protein, 159 aa, Methanomethylovorans sp.
LKVLQKRVSRKQKGSQNRANAKQRLASLHDKIANQRNDFQNKLSFRLISENQAIALETLNVKGMLKNHCLDQSISDAGWRSFVTKLEYKAECFGKTILRIGQFEPSTRICNLCGYHNGKLTLADREWTCPDCKTKHDRDINAAINIKKFSIQEQNLIVI

SEQ ID NO: 58673 - protein, 206 aa, Methanomethylovorans sp.
MENQIPNKQNFSESTTIGIDIGIKDFAVLSNGEKVENPKYLKNSLQRLKVLQKRVSRKQKGPQNRAKAKQRLASLHDKIANQRNDFQNKLSFRLISENQAIALETLNVKGMLKNHCLAQSISDAGWGSFVTKLEYKAEWFGKTILHIGQFEPSTRICNVCGYHNGKLTLADRDWTCPDCKTKHDRDINAAINIKKFSIQEQNLIVI

SEQ ID NO: 58674 - protein, 372 aa, Methanomethylovorans sp.
MLLTLKAKLYPAVEQKKKLVDTMEQFNNACNSISKIAFELKCYNKFKLQQKCYYDIRKEFNLPAQLAIRAISKVVESYKIDKTCLHLFDKFGAIVYDQRVLSFKGLDKASITTLEGRIVVPMVYGSYAKLKMSRIKGQVDLIYIKGDLYLCIVVDVPEEIPLTPEGVLGVDMGVVNIATTSDGVIYSSDKCNEVREHFSKLKSTLQSVGTKSAKRHLKKISGKERRFKTNTNHIIAKQIVQVAKDMNRAIAVEELTHIRSRTTVKKAQREQFGKWAFSQLKLFLEYKSKLIGVPFVSVNPRNTSRECSVCGYIDKNNRTSQAEFKCLDCGHTEHADYNAAKNIAARALVNMPIAVCPKGNLNRKPTPLVVGY

SEQ ID NO: 58675 - protein, 444 aa, Moorea sp.
MYGCQQHLITTTVENQAVIEFICSEANKLTNCGLYYCRQMLFKNGKYLKNAELDKIMKTNVHFKAMRSACAQQTLHGVIESFKSYKALKKLYDKGQLTNKPRVPKYRKKGGLAVVSYPARWVKRCLGQLKFTLGKQIKIWFGIDHFLLPMPSNIDFQLIKEYRFVPRNGCFYLEFVYERPSPDPVLSTDNVLGVDPGLNNWLTCVSNIGKSFIVDGRKVKSQNQWYNKRVAAIKKGKPQGYWDDRLASLTEKRNRQMRDNVNKVARFIVNWCKRNQVSTIVFGWNKRNKDRINIGKKNNQQFVQIPTAKLKNRIEQLCIEYGIKFVETEESYTSKASFLDRDFLPVLGAKPVRVACAKAQGWAASGKRVKRGQYLSSKGNLINADCNGAGNILRKVETQLGFPLAEVCRAVLNLPQRYRLDSLSKSYREATSRSAVLTREVKSA

SEQ ID NO: 58676 - protein, 319 aa, Moorea sp.
VSRYVFNETVKILQAGVVKANWKAIKTGILNDLPDWCKEVPYQIKSIAIKDACTAVREAKKKYKKTSQINRVRFRSRKNPIQSCYIPKSAVSETGIYQTKLGKLTYTENLPVDICDCRLTSNNGDYYLVVPHQVAISCTENQGRVVALDPGVRTFVTFFSEASVGKIGHGDFYRIQRLCQHLDNLLSKISKAKREQKRRMIKASRRMVVKIQNLINELHHKTARFLVDNFDVILLPTFETSQMSKKGNRKIRYKTVRNLLTFAHYRFKEFLKHKAQETGKVVVDVCEAYTSKTVSWTGELVSINGSKTIKSKVDGLCHG

SEQ ID NO: 58677 - protein, 414 aa, Nitrososphaera sp.
LPETVTVVKSAKQSYQPTQEVLQMMEIFRQMVNDCLRMGLENNTSTLKKLSRLCYSALAGYDIISYYKLHAIAKAAGILANRKQSIKRGYPTRIPYMKHTSLISCYGFKIANGILQIPLGDRLYFDILLNSYTKKILSDPAVIVRSFTLAASNTVSICYSKEVAGIGWTATAGVDRNLANVTYGNNERVIMFDVSQATKVVENTRSVTRSFKRNDVRMRKMITDKYGRRRRNRVHQLLHKVSKAIVQDAKKRKVAIVFEDITFIRRLYQKGNGQGRGYRSKLNSWPFFELKRQVEYKAAWEGVKVITLTKGKTRGTSQLCPRCGKRVQESRRDDPFHRRQLWCPDCQRWMDRDVAAAMNVARKGGEVFHRSEGLAGEAVVQEPGSVTPAILKVDASKSSRCELKVDSVARQPRT

SEQ ID NO: 58678 - protein, 399 aa, Microcoleus sp.
MTQRAYRYRFYPTTEQEQLLRRTLGCVRLVYNKALNSRTEGWYERQERIDYKQTSAMLTAWKKQEDLQFLNEVSCVPLQQGLRNLQKAFTNFWAGRAKYPNFKKKRSGGSAEFTRSAFRWKHSQLWLAKCNDPLPIRWSRTLPENCEPSTVTVKLDASGRWFVSLLVEDHSVKAFPQLDKAVGIDAGIASLIATSDGEKITNPKHFKRLRYKLRQAQKALSRKVKGSNNTHKARQQVARIHAKVAETRTDFLHKLTTRLVRENQTIAVEDLAVKNMMTNRKLAQAIADASWSELVRQLEYKCQWYGRTLIKIDRWFPSSKRCGNCGHVVDKLPLDQREWDCPECGTHHDRDINAANNILAAGLAVIVCGANIRPDRHESPKGSCEKPVRERSRNLSREA

SEQ ID NO: 58679 - protein, 430 aa, Microcoleus sp.
MWDELRVNSVPTLTRVMVGLFIANAFSSKMLKVVKVRLYPSAQQQQLLEQSFGNCRWLWNYCLNLMNQTYKETGKGLSGYDVKKLIPQLKKEYEWLGLAYSQCLQQACLNLGVAFNNFFEGRAKYPRFKSKHGRQSIQYPQHVKIADSYLTIPKIGDVPATIHRAIEGKVKTVTVSKNCSNQYFASILFDDGSYKPESSMDGKAIGIDLGLSHFAVTSDSSKFDNPRLLHKHERNLRLKQQQLARSQKGSNNRNKARKKVARVHRKITNCREDFLHKLSRRIVNENQVIVTENLNVKGMMQNHCLAKAIQQVGWGMFCTMLKYKAEAEGKIYQEVDRFFPSSKTCHVCLNQVGSLPLDIRSWTCENCQTKHDRDINAAINLRDEGLRILTSGTGDKACRPDVSRSNRGRKKSTTTLSVGQEAYCVREASL

SEQ ID NO: 58680 - protein, 386 aa, unknown
  TnpB Polypeptide
MTKNKEKKFTRKEIVSNIKEQILLSKDSKNDVAFEYQSLFEQIEDFVIEMKSQGLIYKDIRELIELFVETPKVTTISHNIQYPTLTIPDLDVTEKTVVQEGKAGKYNIVITELYKEEISRTKVIEESTVTEIIKVPASSELIVENDFSANSTEDGNSDVISYVGESYESSKAKRGKNLSVGIDINSSYKDDNLITVVFSDQRHPISFVCEQYKNYLASLKKTIGFDPMDQKFNSQKTAGTFYRKTLNFAISIVKKLKEFGVKQVYIGKSGCMSLNNGNDFMLSLYAQLITACSIYSLEVIVVDEHRTSVADSIANDDFDKDTFSGKRSKTNVHIYSSGTGLEVDADVNAAYNILRKGTQGNFRVLPDLVKVSFKKKTVQLPDLNYM

SEQ ID NO: 58681 - protein, 393 aa, unknown
  TnpB Polypeptide
MKAYKTEIDPTEFQIELIHKTFGCTRYIYNQFIFENLENLRLGNEFISAFDYSKRTNNDPKTPSWLKEVPSKAIKQSLIYADRAFRDYFSKRKGKPSFKKKGSNESFYLIGTIKVERHRIFVPVLKWIKLKEFGYIPNDINSVTISMKNGRYYISCLCKDEVNEHIPLSDYIMGIDFGLKDQFITEDRVIPSINRTLRIKKLEQRLRREQRKLSRKREANMIDKVYYQRGTKKGQLKSYNWLKPLSDCKNIQKQKLKVARIYERLTRIRTEYNQQALRSLVLERKPSSIVIEDLAVCNLMKNRYLSKAISKAQWYQSRLYLENLCKKLGIELRLVNRFYPSSKLCSDCGFKYKDLKLSERFWTCSNCGSEHDRDVNAAINLGQCKQYTVLTTV

SEQ ID NO: 58682 - protein, 383 aa, Nocardia sp.
MVQLRYQYRLYPTPSQQLSLAQAFGCARVVFNDCLRVRQTTYAAGERLSDTEIQKRVVTVAKRTPERAWLADVASVVLVQACQDARRAYRNWFDSMSGKRRGPRSGAPRFRSRKDSRQSIRFTRNGFRLRANRTLDVAKVGELDVRWSRELPTEPTSVTIIKDSAGRYFASFVVEVDATSLPEADSEVGIDLGLTTFAVLSNGKTISSPKFLRRAEHRLRKAQQCLSRKEEGSRNRAKQRVRVARAHASVADARRDWAHKQSTTIIRENQAVFVEDLCVRGLARTRLAKSVHDAGWGKFIRMLEQKAARYGRVFGRVDRFHPSSQLCSSCGVRDGPKPLSIREWTCQACGAVHDRDLNAAVNIHAAGRAEWLNACGGAVSLSA

SEQ ID NO: 58683 - protein, 390 aa, Nocardia sp.
MHRCYRLDVQLRYRYRVYPTPEQQNALAQSFGCARVVFNDCLRLRQDAHKAGVRISDTEVQKRVITLAKKSPERSWLAEVASVVLVQACGDARRAYRNWFDSLSGKRKGRRVGPPRFRSRRDSLQSIRLTRNGFSIRANRRLYLAKVGELAVRWSRELPSDPSSVTIIRDSTGRYFASFVVDTDDSPMPPSDSEVGIDLGLETFAVLSDGRTISSPRFLRRAARRLRVAQQGLSRKRVGSQNRNKQRIRVAKAHAAVADARRDWAHKQSTAIIRENQAVFVEDLCVSGMARSRLAKSIHDAGWSMFINMLEYKANRYGRAFWKVERFYPSSQICSACGVRSGRKQLSIRKWACSACHSVHDRDHNAAKNIHAAGRAEWQNACGESVSLTA

SEQ ID NO: 58684 - protein, 402 aa, Streptomyces sp.
MLSGRRYRLELTAEQAQMCQEFGDICRAVWNTALEQRREYRRRGAWMNYVPQAAQLAEAKREHPWLKVAPSHVLQQTLRDLDRACREHGTFRVRWRSKARWPVSFRFPAGNLIKVERLSRKWARAKFPKLGWVRFRWSRPLGGEVRSATVARRGGQWFVSFLVEDGHRTPEKHTMPDTAVGIDRGVAVAAVTSDGTFHDRKFIAPGEAARYRRLQHKLARQEKGSANRSKTIAAMGRIMWRVTDRRADFCAYTANRVTTLNALVVLEDLRTRKMAASASGTLERPGSKVRQKAGLNRAILDKGWYRLEVALRSAARYTGSWILLVDPAYTSQRCNRCGHVDAKSRKSQAVFACTACGHRDHADVNAAKNHRDAGLAFPACGDLGTSRSAKQEPVSRATGRNP

SEQ ID NO: 58685 - protein, 147 aa, unknown
  TnpB Polypeptide
VETEHVELPHVNQNTGIDLGIKELCITSAGKKYENPKIIRKYEKKLIKLQRQLAHKEKRSQNYYKTKKKIALCHEKITNTRKDYLHKMSLEIISENQVIVSEDLQIKNMVKNHHLAKSISDVSWYELTRQLEYKAKNILEEGLRQIA

SEQ ID NO: 58686 - protein, 358 aa, unknown
  TnpB Polypeptide
MIRKSTINLKFVNKGKLEKLKIIAEEYQRVVNIFIDRLWEQQQFSGSFVKDTTVDSWLSACLKQTASKHALSIIKPQRKKKKKSKPTLNKLIMELDSRVIKITQDINSFDIWVKLLTVSNKIDNKFGKRFSLNLPSKKHIHFNKFLQDGWTIKKSIRLRINEKGYFADIIFEKEAPIIKTKGKQKAVDIGYKKLIVSSDKEFIGDNKIYEKISRKKQGSKAFKRALIERDELVNLSCKSLDLINVKSLYVEDLKNVKHKSKGKIHKKFNNRLQRWVYSQCLRKLAMLCEESGILFKKIPPQYTSQRCSCCGEIHKKSRKNELFCCVSCNFESDADYNASLNILHMGQYDVHALQKPIL

SEQ ID NO: 58687 - protein, 385 aa, Moraxella sp.
MTVIRGHIIRLDPTDKQATYFAKACGVARLAYNWALAEWQNQYQADKTYRDDCLANGIEIDSTKLNKPSQGKLRKQLNAIKRTQFPFMLEVTKCSPQLAIMQLGDAFKRFFKGEAKYPQFRKKGVDDRFSLSNDQFRIDGKRIKIPNLGWVRMSEPLRYHGKILSAKIFKKGGDWFVSVAIELADIITPLPKTGKAVGIDLGITDLAVLSDGTKIQAPKPLKQQLQKLKRLSKQLSRKQKGSNNRAKAKTKLSRLHAKIGNIRKDFTHKLTTHLVKEYDTICIEDLNVSGMVRNRKLARAISDLGFYEFKRQLIYKANQWGKVVKEVDRFYPSSKTCSNCGFIMAKADLTLNVRNWQCPSCHTQHDRDINASINILNNATKVLTV

SEQ ID NO: 58688 - protein, 389 aa, Photorhabdus sp.
MLRATKVRLYPTPEQAEYLNAQFGAVRFAYNKALHIKKHAYKYDGVSLSPRKDLKPLLAVAKKSRKYGWLKEYDSIALQQAVINLNTAFDNFFNPKLKARFPTFKSKQGKQSSYHCVGVKVLDSAIKIPKLSPVEARIHRKIPGEVKSITISRAATGKYYASILCDDGAKTPAKPSRVTNVTGLDMGLSHYAIKSNGDKVTNPRHLINASRNLRRKQKALSRKKKGSARRRKARIQLASVHERVANARADFQHKLSRAIVGENQAVIVETLKSANMMKNPHLARAIGDAGWHGFITKLEYKAAEKGVHLVKLDQWFASSKTCHCCGHKMREMPLNKRIWQCPVYGVGHDRDINAAINIKRKGIQELQAAGLVVSAHGGQRKSVTQTVAA

SEQ ID NO: 58689 - protein, 265 aa, Mycobacterium sp.
LSGSSPKVGRGCWRSPCAATAPAWMRACGCSSNAPQQRRVALPDSRVGVDVGVRRLATVADAEGTVLEQVPNPRPLDAALRGLRRVSRARSRCTKGSRRYCERTTELSRLHRRVNDVRTHHLHVLTTRLAKTHGRIVVEGLDAAGMLRQKGLLGARARRRALSDAALATPRRHLSYKTGWYGSSLVVADRWFPSSKTCHACRHVQDIGWDEIWQCDGCSITHQRDDNAAINLARYEEPPSVVGPVGAAVKRGADRKTGPGPAGWP

SEQ ID NO: 58690 - protein, 398 aa, unknown
  TnpB Polypeptide
MKLVEKHKIYKSHPVYSKLDDMSRKANNLYNQCVYFAKNSENLSEDLKNLDKVMKRFPDEHDNYRSLGYATCAQQIIRLFHQNLRSYFASVKDYKQNPAKYTGRPRFPKFRKSGDRFQVIFTSQNTRLVDRVVTIAPRTFENKLSIRLRSTSVKKLCQVVFAPRNDYFLVYVIYESEDSIISQDADKVAAIDVGLANLATVTFSDKYEPILYRSDLVKINKDFNQLIAEYVSVLRKTQDKYTSKRRQRLSDKYAGLIEDRLHKISRTIVNDLSHRGVSTLVVGKNTGQKINSKLKNFVQVPLFRLIEMIKYKAELSGITFIQVNESYTSGTSFLDNELPTKTFYNKNRRKFRGLFLSNDLKRINADVNASFQIMKKVYEKFTYDSSVKYANPIVKTIC

SEQ ID NO: 58691 - protein, 270 aa, Cytophagales sp.
MNYRSFKIRLELNNKQVTLAKKHAGVARHAYNWGLAICKKAYQNQEKHPSAIDLHKKLVREVKSVYTWYYEVSKCAPQEALRNLTKAYQRFFKKQAKHPAFQKKGRKDSFYLEGKIQVKNSKIKLPKFGWVRLAENVNFDGIKNATISRKAHHWFVSFRVPRENYKIKAIENKEVLGVDLGIKNLATLSDGTIFTNLRPYKKYKRKLKIEQRKLSKKFKKGQPQSNNYKKQQLKVSKIHYKIACTRQDALHKLTTYLAKNHSQITLKACN

SEQ ID NO: 58692 - protein, 306 aa, Sulfolobus sp.
MARRGNKAIRATVSMKIALSEPLLVLVNNYVKALRFTLFWLKENVPNPEEKGVLSKVHEALYEKLREEYNLPSKVAEDCYREALATYKGWYNNPRRGRFPRVYRPTVWLTPRASYNVDFEAMTVRIVSVGELSILGYPRNLKEYMGWKMKEARLVIRDDKAFLKVVFEKEEQKVEPKESIAVDINMAEVVVGKDDKNYVRIPTRLEEVHHWKSLAERLLKKYPRRWRENKRILYRVRSFHLKARRIMEDFARKVGKWIVDVAKRMGVNVIKLESLKNLIKSVEKLSKEFRDKLKMQLQKNVITKRN

SEQ ID NO: 58693 - protein, 436 aa, unknown
  TnpB Polypeptide
LVGVLFSGIHGASHIRGAKEVCREPKRRVKISRPLRSVSRTVTLHIPRICRSTGWRTGQIRFAACIADSALGMVNSQVLQDCLQRVDKAYVKFFTGIARKRSGEKIKASYPRFKKTGRYVSFTYPQAWMKRKDRVSQAVKFRHNGSSRNAVIVLPGIGEVKLRLHRQFDWSNARTVTVKRSPSGRWYVCVSVEVFHRPSLPDNGKKTGVDVGVLKTAAVSGGSFREHPKFLCRSEKKVKRARKTLSRKEPGSGGYRKQKLILAKRHEEIASQRKDFLHKLSLWLVVMYSCIAFEKLNIQAMAKNPHLAKAILDAGWGTLICFVTYKSMMLRGNDVIRGNDVIRGNPAYTTQDCSRCGYRVPKTLAERMHRCPQCGLEMDRDQNAANVIELRAFGSNTVGQVLSEPAEEPLQNDGGDGATALGSTRVSLVVDSESHV

SEQ ID NO: 58694 - protein, 401 aa, unknown
  TnpB Polypeptide
MALSGGFQRNVLRLKPLKILGVRDIIRTLVRRNIMERIRGYKYRAYPNKEQREFFTKTFGSCRFVYNHYLAKRKAKWEECHDTMSYNDTAKDLANNLKKEHAWLKETDSTALQQSLRHLDNAYNNFFAGTGGYPKFKRKRTDQSYRTTNTNNNIRIEDNAIRLPKAGKVKIVNTRSFKGRIISATVSRTSSGRYYISLQVEEEFEILPNKGGEIGLDAGLTALYTDSENNKIENPRTLSKHEKRIRRLQRELSRKKKGSKNREKARIRLAREHEKVANIRNDYRHKMTYRLASDNQVVCIEDLNVKEMMGNHRLARSISDASWSEFFRKLEYKMGDRGGILIKVPGTYPSSQRCSCCGRQERKVRDLSIRSWTCPECGAKHDRDVNAAVNILVKGLEMLAS

SEQ ID NO: 58695 - protein, 438 aa, Bacterium sp.
MIRVIHAQIYSKDFSPLDSLARDYSSCVRFSYSRFKKDSMEFSDVRRLAKAMYPRLNTRQISDAAMEAQGIHRRNGDGKVVFGGRKLAKTMKSGESTSKAWKDARDCRMYSRGDTTKSGNPNLRVVGDSLRVTVGNRKFEAYKMFVPRKYRTSLKRLLDSGTAYNVRIMKQDDNHWRVAIDYETTVPATTVNFDDGAIGVDTNPDRIAVAEVSSDGNYISSETFVNSRLKDGSTHKRMYDVGVMAKDVVAMAKQSNKGVIIENLEFKNKFGSNRKFNRMKSNFLWRKFTEILERRCLESGIACRRVNPAYTSVIGRCKYAPMYKTAVHEAAAFAIARRGLGFGEKISVNGCPSGLVKQKIMGTLEEKYHGRKVHSWVLWGKLKAALTGPGKRMRSLQELRDHFLYDGGSPSGEAFLQELVAGSDDNNHSGGRKAALQG

SEQ ID NO: 58696 - protein, 450 aa, unknown
  TnpB Polypeptide
MKRTNTFAVRPLSEVGKQLLWDLLDASAALWNEANYERLMRYNDEDGYEDEDVFDADTGRLEGKYKGVLGASTAQQVIRKNSEAWRAFFRLKDQYHDESNTSVTEHPEPPGFWGNKDDGRKLHTVIRNTSYTVEWGDRSRLEILVGKELKDRYDHTGRLRLEIAGEPNWPEYESQGRLDLWYDETDCTFRASQPVTVSEETRATPLASEKAALDIGANNLVACTTTTGEQYLYDGSGPFDQFRETSARIAELKSKLDDQRRTSKRIDRLYDVMHERRDHAQDALVRDLVDRLYDDGVSTVYVGDIHDVLGTHWSAEVNAKTHNFWAFRRFVDRLECVCEEYGIEVVEKSESWTTQECPECGEREETERNGDVFRCVCGFEGHADLKASKQFLERETGMEVGLMAQPVCLKWNDHNWSEIPHSPEGASPNEERTDRSTRRKVGKVAAVESA

SEQ ID NO: 58697 - protein, 496 aa, unknown
  TnpB Polypeptide
MTNKDDDKHLFIYTLKLKTNQQDRERLNKRFRMAQDIYRKTLIEVHKRYLKLKKDPLYKRASKLSKDDKERTALFKELREKYQLQGKFTFGAFANNYRNARNYSSYIPSDVANKLGHRAYDAYEKVMFAKGAKKVDFHKVVNSMEGKSDNGIMIRSGIFKMGTKTNKAKFSCPVIYAEDGFEEEILRNKVKFVRLVRKLEYGQHNFYAQIILEGTPVVKNSQNDLKTNVGIKVGLTTVAVATDYETQLFELAPSVKNNEKELAKLNQKMDRQRRANNPDNYNPDGTIKPGRKAWKNSKRYLKTKQEHQELERLGREQRRHAHEHLSNQIVEMGDSFIVEKTPFAELAKRYSAPRKNKSGKFLSSARFGKHIKRRAPASLITLIQYKAKFRGRKFLEINADEIVASQLDHSTGEKTPLETSKRIRTIDNQLVQSDLYSAFILKNVDPDSATVDLDSCKKDFDNFLTLQEETMNNLVLDKTTPSMGLKKWVALKKKHK

SEQ ID NO: 58698 - protein, 539 aa, Methylacidiphilum sp.
MMIASPAGLPVLGPVELKVTYRLYPSKTVRDELLRTRWVHCFLWNLALEERRRAWKEEKRRIGFVEQCRWLTELRSRSALLASINAQSAQVTLKRLDLAFQAFFRRVRQGEKPGCPRFKQAGRFSGFGFKQHEGDWRLLARERSAHLKLRLSGIGEIPIRGKARTPGEPRTCEIFLSGGRWQASVTMRCRPAREHGCGAEAFDLGTERFLTSARLEPGKSEPDVSEVANPRHLRKALKKLRKLGRTISRKMEAAIRKHGKRKGFRISKRLRKQYELLARMHAKVANVRKDFLHKQSAAMVRRSGLLITEELEPKRMTASARGSRKKPGKRVRQKAGLNREMLDASFGAFGAMAGYKAEEAGIGYLEAQARTLKPSQRCHRCGGVVKKTLGDRWHECACGASCHRDENSALGLLDWGLAKWEKDHGFAFPGPKVVVYGKEWTGTDPCVEREALAGWNLAAGWKSASRAYSGETARREARNSIPEPSGLDGVVHTSRMLREEIPCLKSRLPSIWTRSYHCESVGHISEKTIQKYIEDQKGK

SEQ ID NO: 58699 - protein, 392 aa, Methylacidiphilum sp.
MERVRILSLKRISKRQAAIIRQGQMEAAKVWMACRDMHLKARETNASWPGRKEYHEATAGGRYALHSQSVQQVFCAFDAAVEATGRNRRAGRKEIRYPYKDKRFFPLMWPAQAMGLEEKRIILPMGRDRSSLVLPRPAWLSRKSACKVVWNGLHNELHVTLDESTTDPNSQGITERCATVDFGQIHHAAVVTNNGNALVVSGRGMRTIKRLHSKHLGEIQKKRSRCKKGSRRWRKLGRARAERTLRHKRRICDLRHKGIRKVVDFCLYHGIQSIFAGNPDGARRGACGRRHNQRMSQWEYGKDLDYLMQKSEQARIACFTGDERGTSSRCPECGHRHKPNGRNWRCPKCGFQGHRDVVGGVNRHPLAFGQVVPFPTRITYLRPGLCEGGPPG

SEQ ID NO: 58700 - protein, 407 aa, Methylacidiphilum sp.
LYLAFQAFFRRIRQGEKPGFPRFKQAGRFSGFGFKQHEGDWRQIARERSAHLKLRLSGIGEIPIRGKARTPGEPRTCEIFLSGGRWHASVTMRCRPAREHGCGAEAFDLDTERFLTSARLEPGKSEPDVSEVANPRHLRKALKKLRKLGRTISRKMEAAIRKHGKRKGFRISKRLRKQYELLARMHAKVANVRKDFLHKQSAAMVRRSGLLITEELEPKRMTASARGSRKKPGKRVRQKAGLNREMLDASFGAFGAMVGYKAEEAGIGYLEAQARTLKPSQRCHRCGGVVKKTLGDRWHECACGASCHRDENSALGLLDWGLAKWEKEHGFAFPGPKVDRNGKEWTGTDPCVEREALAGWNLAAGWKSASRAYSGETARREARNSIPEPSGLDGVVHIATRDFEPVG

SEQ ID NO: 58701 - protein, 267 aa, Methylacidiphilum sp.
MGLEHGKRIVIPLAGKLKIRGMIYLVLKEKKAVISYVAPLKVPKRLDGEIVGIDMGLSEAFTDDKGKKYGKGVGKVLAKLSKQYTEKGRKRQKLHAICKKTKDKAKARGVGKNNLGRKKLAERLHKVPAEIESRVTTSLRKLLKLRSPSMIVFRGFTHLWEIAKQRAFQAHPPDANRCASGSNRFLAPGGRFSAREEVNLAYSSWALSLVRVYVHSKNRIGDKLACRHYKYVSYVDRVGGIQPQEKGRRSGDRLVDAAGTPACDPSC

SEQ ID NO: 58702 - protein, 438 aa, unknown
  TnpB Polypeptide
LAAHAPLWNQINYRRRQEYFADDGDVWDAEYTDLYDDYAPILGKAACQQVARKNSEAWRSHFDLLDTYHSDDPTVTEKPSPPGYWGNRDEGYELHGLVRNDLYTFDWDEDTSTLKFGVGDVLEEKYDFEYQERITLEVRGNPQWDGDDSRLELVYDEAASKLRVKHPVRIRSDNVQEQRLDAFTHTLDTENTTHSAAIDVGANNTLAIVTTTGETAVYHARPEFERFQVLSELIAELQSELPDDQYTSKRIQRVYDERGEKRDHSRDAAVKHAADWLLERNVDTVYVGDLTDVLDTHWSSEVNEKTHAFWSHQQLVERIELTLGDVGINVEQVSEADSSSECPECGGEDVTRDGDSFRCHECELDAHSDVAGAWNILQSEVGPMARPAALLAERDRDAPNTGAYWEWDGHDWTLGSFGEQSSPLDQTSISKPASSQPG

SEQ ID NO: 58703 - protein, 263 aa, unknown
  TnpB Polypeptide
MKLTAQVKLVPTQAQAQAMKDTLQVANAACNYISAYAWEHKMFGHYSLHGVLYYEVKEKFSLTAQVVVRCEAKVGDAYKLDKKALRKFKKHSAISYDDRILRWYVGKNEVSIWTVAGRQRIPFVCGDRQRKMLQSRQGESDLAYVEGQFYLLATCNAIDPTPRDARDFLGVDLGISNIATDSEGEKFSGSQVKGLRHRHAELRSKLQAKGTKSAKRLLKKRSRKESRFARDVNHCIAKKLVAKAQGTARGIALEDLKGNATSG

SEQ ID NO: 58704 - protein, 439 aa, Armatimonas sp.
VPTALDAGGIASSLPKASGRRWKILDYFPFHSFRFCGHKHSIATVASKAYKYRIYPTKNQLSIMLQLLETHRHLYNNALAQRKEWHEAEKTPLNFAQQCKILTQERKINPFLAFANAASCQRTLKRLDRSFQAFFRRVKSGEAPGYPRFKGRGQFDSVEYTIGDGCKFTLDNKAYFQKVGNIKIKMHRPIEGKIKTMRFKKEGDGWHVVFSCELPPMRSAGHELPDVEIEATKLPSVGIDLGLKSFLVDSEGNEVKPPKHYRKAQAKLRRLQRSVARKKRGGANRKKSVNRLAKFSQHVANQRKDFHHKSALDLVKRFGKIAHENLNVKGIVRSLNLAKSAHDAGWGKFLSILKHKAESAGVEVVGVDPQNTTQACSNCGCLPVEKLTLKVRVYKCLHCGLILDRDHNAAINIRNKAWIEPLGVNQEGYLMDFSRSPQL

SEQ ID NO: 58705 - protein, 374 aa, Trichormus sp.
MKTLKFKLYQHNRNRYLKRTINAAGVIYNHCIALHKRYYRIWGKHLNCSKLQAHIAKLRKRHPFWQLVGSQAVQDICQRIEKAYQLFFKQHQKGVRPPGFKKAKRYKSFTLKQAGYKFMGGNRVKIGQRVYQYWKSKEIEGTVKTLTIKRTSLGELFMLVVVDSETELMSKFETSRIAGFDFGLKTFLTVSNGTKIESPSFLKQSINAIKQASRQHSKKVKGSNNREKARKNLVRKYENISNRRIDWFWKLAHNLTDEFDILCFETLNLRGMQRLWGRKISDLAFGEFLQILEWVAQKKGKFVVFIDRWYPSSKTCSACGHVLKELDLSVREWRCPSCQSVNGRDENAAKNICAVGASTAKVGDVRQGFPAIAV

SEQ ID NO: 58706 - protein, 460 aa, Paraburkholderia sp.
VRGAEHRNRHHPQGRSALVRGRTRQGRAGNHHRLFGAPVRLAQQEEQATARRARASRQMIRVHRIRLDPTATQGVYFARACGVSRFAYNWALAEWKRQYEAGGKPNEAALRKQLNAIKAAEFPWMAEVTKCAPQTAIKNVGLAFEHFFRRVKLGQKPGYPRFKRKGIRDSFRADNGPADATSHAVEVTGKAVKLPRCGVVRMREALRFAGRVKSATVSRMADGWYVALAVETEDRLTAKQDRGAVGVDLGVTTLATFSDGTTEPALKPHRAEHKRIVRLSRSLARKKKGSANRAKAKAKLARLHLRIANVRKDALHKLTTTLATNYSTIGIEDLNVSGMLRNGSLARSIADAGFSEFRRQLEYKAVMTGAQVIVIDRFYPSSKTCSGCGTIHEITLRDRVLSCGCGLKMNRDLNAAINIRRQALALQSVERKALAGASASVKPVSVKQKKRDVHRNVQTA

SEQ ID NO: 58707 - protein, 353 aa, unknown
  TnpB Polypeptide
LKRAYKTEIKPTKKHIEKINQSIGICRWLYNSYLAKNKELYEQYNQGLIPKEKAFMSANDFDKYINNEIKILDNFKWINNCGSKARKKAIQNAETAYKRFFKGQSKFPRFKKKNKSDVKLYFPKNNKGDWKVDRHRIMIPTLKNVRLKEYGYIPVGAKVINGTVSKKANRYYVSVIIDTDTPIVQNINQGIGIDLGLKDFAICSDGNTYKNINKTQKIRKLEKKLKREQKRLSRKYEFLKKRGGTATKSNINKQIVKVQILHQILANIRTDYINKTISSIIKQKPSFITIEDLAVSNMMKNKYLAKAVSQQKFYEFRNKLTNKCHVLGIEVRIVDRFYPSSKLCHCCGQIKKI

SEQ ID NO: 58708 - protein, 376 aa, unknown
  TnpB Polypeptide
MRKAFKYRLYPTKKQAELLDRTLWLCREVYNAALQERRDAYRKSGVSVGYYEQKRSLVEAKRLVPELKGVHSQVLQDVTRRVDLAFQAFFRRVKGGEKPGYPRFRGRYRYDSFTYPQAGEAGAKPLEEAAKAYLPKVGNVRCKYHRPLEGIVKTATVRREGEHWYITFSCVVEPQPLPVTGRVMAFDLGANPNFLIPHEGEPVQAPRHWKRSARKIARLQKARSRKKRGSRRRKELRRQVRREHQRAANRRRDFHHKLARQIVNEHDVIIHENLRPKNMARGYAAASIHNAGWGQFIDILSFKAAEAGRRVVPVDPAFTSQDCTGCGHRQKVPIGRPYECEACSATLDRDVNAARNTLARGLDGAIGETMLVAAGH

SEQ ID NO: 58709 - protein, 382 aa, unknown
  TnpB Polypeptide
MNIIKRAYKYRMYPNKTQEELLAKTFGCVRVVWNACVESFSSYDKETNPNPKLPTKSDLIVYKPWLDEISAAALQQKQRDFIEFSKQYFNKKRKEKFGKPNYKNKHGEQSFRLPFPKFKVVENKIRLEKIGWVRIIVDCEIPDNSRFISCTVSKNRTDQYFVSVLVEIEQCYKKETGKAVGVDLGIKTLATLSDGTIVDNPHFLCENQAKLKRMQRHLSRKKLGSNRRKKCRLKVARLHRKIANKRSWYMHNMTTMLVNNYDIICIEDLNTSGMLKNHHLAGSVSDASFSIFRSQLEYKCKWYGKELVVIDRFYPSSKTCSRCGWKSMDLKLSDRTFVCKDCGLEIDRDLNAAINIQSVGVEAAKRTQSIRVAVCVEASKVE

SEQ ID NO: 58710 - protein, 581 aa, unknown
  TnpB Polypeptide
MRAGRHYQPLSYDIRLPDEAQADALRLLEASRVVVNEALIRLWPYLDDFMREHAGPAWKHVGEFIGSPQPHGDRQWRCESETAGRIMRAQAERKEVFQLIQPILSDGFIRPKTEKRKACKNRPQIREAIQALQRTLGDDETAFVTMQNVIEQACNHFLEHGTFPEHYEDMQAVPLLKVGMLTYAGDDGAAKGQSYRLSFDQGEGAATLLFRFPDETGKWQWRRESTHIPLPACVVERLKEGISMAPTLREVIKPDGERIAVLDVIVQVKKTPLPDWKSIERVLGFDWGVHGLLTAVVLGPNPTDPTQPVQLSRPLFVNTGGLDGHQARTRRQIDQLKTAREQLAPADPKRAVYDQEIQRCWRLYEARNQELAHMAANLLLLFASIWGCSLLSGESLSTLKTVGRGKGVKGRWRNWRNNTTIRSEIWHILRYKSHLLGLRFRSEKPRGTSHTCPRCGQPAKTYRSPRPQHRGDPVKWGRWLVCSHCHFNGDRDYCAAVNIARLGIAYLSQMQVIGKAHACSVTDGESVKPCPYMAHGAVPLFPPHTDHHRLMDSGKIYLNGWKRSCTIRSSYATPLLLRLCS

SEQ ID NO: 58711 - protein, 437 aa, Thermococcus sp.
MKRAVAVKLQPSKEQKKILFELAYASAIIWNKLNYRRLKQFKEFGKIDFSTTEKEAYHEFKNWIGGSTVQQLARKNAEAWRSFFSLNRKKKKGELPEWFKPKPPKFVKEKNGKKLFVIPLRNDQYQIDGNVIELRRLGKFGKLKIQFKGRIHLKGKQGRLEIAYDDVRRKWYAHISFTVEEKLESGEWVSVPRKPRGNLSAGIDLGVNNLMAVYVENGESFLVNGRPLKSIDFYWRRKIAEYQSKLNKSGAKTSRKLKRIHERAKLQARHYINTAVRQTVRRLYELGVSRIVVGYPKGIARNSDKGKRQNFILSHVWRFNYVIKRLTEVAEEYGIQVLVVDEAFTSQSCPLCGQRNSNGRIFRGLFKCHRVGAVMNADLVGAFNILKKVVKLITPSLPALMGGRGNWPETRPEGFEEPVLTGSLMRTPQTSPPVARG

SEQ ID NO: 58712 - protein, 374 aa, Gemmatimonadetes sp.
MVKSFKYRLRPTKKQEKILLAHIEQCCILYNQLLCARIQAWKKNKESLSRYDQQETLPMLKKQYNPFSLVHSQVLQQVCQRVDWAFKGFFRRLKQKSKTGEKAGFPRYKSENRYDSITYTQFASSCRLDAKGLRLSKIGCIRVVQHRPLEGIPKSCTIRRTKTGKWFVSISCDMGDTPEKADTGSAAGIDVGLTSFAVTSDGERIENQRFFRQEEKNLAKAQRNWDKVKKRPKTDLVKEKRRKVIARVHERIRNKRHNFAHQESRKMVNRHGFIAVEKLDVKDMEKNRRLAKSIADVAWSLFRHCLEYKAEEAGIGFKAVPPDYTSQDCSACGHREKKPLSQRVHHCKQCGYKTDRDHNAAINILALGLQRQVA

SEQ ID NO: 58713 - protein, 205 aa, Paenibacillus sp.
HRLRTLRITKHSGKWIAQFSVTIPTTDKTDKRILGVDLGLKVPAVAITDDDKVRFFGNGRENKYMKRKFRKLDDKEQRWMKDKDHKVSRKIVSFAVENQISVIRLEQLTNIRQTTRTSCKNEKNLHKWSFYRLSTFIEYKANIVGIKVEYVNPAYTSQSCPKCSEKNKAHDRTYKCQCGFEKHRDIVGAMNIRYTPVADGNSLSA

SEQ ID NO: 58714 - protein, 466 aa, Synechococcus sp.
MRAARKYRLKLERWQSRLIDQWIELCRRQYNFRLGERFRWYEATRTPVNACPLTSSIVPIADIYRDIPETKILKKGKNKGAEVALINEGYVRWDSVQKDDLKRTKTLFPEYKAMPSQVLQDVIKRLDKTFSNFTVGDKNGKRSGRPKFKGKPHYRSICFPQSVELTDNGKIELPKVGVLDFIEHRPIPDGFTVKTATIKHETDGYFLTLSLEDKSVPVVEVNTLPTDENSKGIDLGLEFFSSGSDGVQIENSRWFRKSEKRIAKLQQRKARKPHGCYARKVLAKKIAKLQTRVARARLDWQYKTAHKLFKDCEVIFCEDLSLKNLIRRNRPKIENGKFVPNGQAAKSGLNKSLTDAALGQFVRVLKWVAFKLGKRVIQIDPRGTSQHCHACLNKTPKSLKNRWHECYHCGESLPRDVNSGKLIKRIGLLAVGMDSASLKTALTCVSNETLTTKQSSLKEARALSFA

SEQ ID NO: 58715 - protein, 511 aa, Synechococcus sp.
VLLTVKFKTNPTQEQRRKVDAWRPMVRSLKNFCLADRINSYADSFALGPFCTLRHQAEACPLTCSVNRSASVGYPWKAERVAKRDGKKVKKGQRLPPSKRSAYEMHSAYLPEMKVSRPWYQSVNADVLQQALRQQDAAFNQFFSGKANFPRFKKLTDVRGFEFKPGTVRFDEATRKVFIPSLGWMKYFQSRTLGSHYKVCKSHLMFEADGLYVVALLDYPEVADYSCKALAALKTVTGLDRGIRKIVAGADGEVVLNPQISKRFERRLKIRRRRLSRKKKGSSNRSKAGRQVSRVHQKIRRVRTDFQWKLAKKEAAKADVIGLEALNVKGMIKRCKPKQDESGRFTQNGQKAKSALNKAIADAAWFSLEQKLRHQASKLGNWVVSVPARFSSQACSACGYVSTNNREGEKFLCEACGHHDDADIQASVVIADRARIRIGLPNLPMVSRKVTLSPALTGHRQVELSAALAVEPKNLVCSEIVSSVQLELFHFESKPNCGCTAQESPVIAPSA

SEQ ID NO: 58716 - protein, 445 aa, Klebsiella sp.
  misc_feature (190)..(273): Xaa can be any naturally occurring amino acid
VLCSAGFNRRNTDFYLFPAPVDSVLYIWLFIQVISIHTECKMLIQKAYKYRLNPTDAQAQRLRQMCGCARFVWNYALAETQRILEAGQKLPSAFELNKMLTGWKKLPDLAFLSDAYTDNLQQKLKDLHGAWKRCFDKKLAAKAPVFKRKSHGNDSVRFVNFDKYCQLEYRRVKLPSGLGWVTFRQSRAVXXXXXXXXXXXXXXXXXXXXXXXXXXXXXXXXXXXXXXXXXXXXXXXXXXXXXXXXXXXXXXXXXXXXXXXXXXXXXXXXXXXXKARISRLHSHIANIRRDYLHKVTTTVSKNHAMIVIEDLKVSNMSKSAAGTVDEPGRNVASKSGLNRAILDQGWYEMRRQLEYKQRWRGGEVLAVNPAYTSQKCACCGHTAKENRQSQAKFVCTVCGYEANADANGARNILAAGHAVLACGGKVQSDHPTKQEPDTERSAVTH

SEQ ID NO: 58717 - protein, 318 aa, Acidobacteria sp.
VRFAYKYRLYPNEAQVQFLENQLHEACDLYNAALQERRDAWKVCRKSIHYYDQAKQLKPMREEGLLGLANFSCCQDVLRRLDKTFQAFFVRVRHDSITFPSYGDGCRLLDDGQLRIQGAGRIKVKLHRPVEGAIKTVTIKRDVDHWYVCFSVERDSVALPESSEEIGMDVGLDSFVALSNGKEIDNPRHLKRGLAHLRRAQRRLSRRKRGSHRRRKAATLVAKAHRKIRNQRAAFHHDLSRRLVKRYGLIGVEDLNIKRLSRGILAGPVHDAGWNSFFAKLWYKAASAGRELVKVDPRGTSQVCVRSGRAQDAYGALA

SEQ ID NO: 58718 - protein, 230 aa, Oscillatoriales sp.
NRGVKLVDLYKQCAIMAKEFEWAGKLNSMARQAMAQRAIFAIQRFFSNCKAKKPGKKGYPQLKKHTRSVEYKTSGWKLSTDKRCLTFTDGFAAGKFKLIGSRDLHFYAPTEIKRVRVIRRADGYYAQFCTNVERTEELVPRGKAIGIDVGLNHFYTDSSGETVPNPRHLRKSEKALKRLQKRVSRKKKGSGNRKKAINKLGRKHLKVSRQRKDFAIKTALCVVKSSDFVA

SEQ ID NO: 58719 - protein, 409 aa, unknown
  TnpB Polypeptide
VLVNRVEKHRINKNHPMFKIIDDLSFRSKNVYNYANYIIRQEFIFNNNWIRYKDLSKQIKHSDCFMALGSNSAQMTLRILDKAWKSFFVSIRDWIKNPSKYLGKPKLPKYKNKEHGRFIVVLTNMQTHIKDGYLYFAFKELKQFNNTIRTSVTDKLLQTRFIPNGGEYILEIVYEKEIEEQSNSNKNIIGIDLGLNNFVTMVNNCGLKPIIINGKIIKSINQFYNKQLAYYKSLAKTNNKLDWTKKLQQITNKRYNRIDNFLHKTSKYIVDYCYWNKIDTIIIGKNNNWKQDSNMSKQVNQSFIQIPHTKFIDKLKYKCEDKGVKLVITEESYTSKASFIDGDIIPKYGDKNINVFSGKRIKRGLYQSKEGILINADCNGAYNIIKKVFPNLMNGIEDVHLHPVMINVN

SEQ ID NO: 58720 - protein, 477 aa, Symploca sp.
LYKTIPVKARFTPEEQAFWVAQCEQANSLINCAVYHVRQTHYAKIESLENAFTVYWRGDELRAGWKTYKSQTSYRELDKVLKDSPHYKAMAAQSAQQTLKYVGESIVSYNGLVNLYYLGEVDRPSLPKYRKKGGLAAVTFPRQALTYFDGCFYPSISRETKPHLIADIVLSLPDFIDSDWVKEVTVRPSYGELWIDWVIDDGKEPIANNPNLDYSQAWSFDHGGTNWLTGVSTRGKSLIIDGRKLKSMNQGYCRLVAKYKQGKSDFYWDSNLDRVQCKRNNQMRDAVNKVARFIINRCLKDRVGNLIIGWNSGQKSGSDMGKRNNQNFVVIPTKRLIERLKQLCPEYGIVLTITEEAYTSRASYLDGDSLYKYGEKPIGWKPSGQRVERGLYRASSGLLINADCNGAANIAKKVARHLGLDLTKLGRAALTLPHRYNLFNDLKRLYRKRSEASCLKDTMRNNLRQSMVLNLASLILA

SEQ ID NO: 58721 - protein, 410 aa, Symploca sp.
MRHHAVKVRLYPTIKQQAILAQHFGCARWWWNHALNLCIETYQATGKGLTQSALNKSLPKLKKQQETEWLSECYSQVLQATTLNLVTAYKNFFEGRARYPRFKAKKNKQSIQYPQSVRMVDNCLKFPGRVGLVKAKLHRLIKGKIKTVTISMTPSGKYYASVLIELEANIPTPCTDGKVAGIDLGLKDFAIVNDGVKTSKYANPKHLAKHERNLKRKQQKLARKVTGSNSGNKARKLVARVHERVSNTRQDYLHKLSRKLVDDNQVIVVETLNTKGMVRNHKLAKSISDAGWGMFVNFLHYKLDLEGKVLVEIDRWFPSSKLCSNCHYQVSEMPLDVRTWTCPNCGTHHDRDENAAVNIRAEGIRMLSVLGTRTAADGGKISPRLGRKSKLRHSPMKSEARAIPDKVSAG

SEQ ID NO: 58722 - protein, 396 aa, Nonomuraea sp.
MAVRRSFKFLLRPTRQQEIALAACLEDHRQLYNAALEHRRTAYRRAGVTIRYGDQSSELKHIRADDPEGQARWSFSSQQATLRKLDKAFRAFFDRVKAGRAPGFPRFKGRGRFNAVEWPKDGDGCRWDSQPAHPTATFVRLQGVGHVRVHQHRPVMGRVKTISVTREGSRWYVVLSCDEVPAEPLPATGAAGGIDMGVASLVTTSDGEHLANPRHLAACADRLAAAQRDLARKKRGSNRQRKAVARVAALHAKVCRQRLDTAHKAALALVRAYDVIVHEDLRIANMTRSASGTIEAPGRNVAAKSGLNKSILDAGWGVFLRVLAYKAESAGRERIAVNPANTSRTCAECGHVAKENRVTQAMFRCRACGHTAHADVNGAVNILRAGLALRQAAQAA

SEQ ID NO: 58723 - protein, 384 aa, unknown
  TnpB Polypeptide
MVDMGYRFRIYPNRRQRLLIERTFGCTRWVWNHFLNKRQVEYEETGRNSRAFRQMKDLPKLKDANPWLREVDSVSLQAVIQHLDRAYDNFYRRVASKKKGGYKGTTGYPRFKGKHNRHQSYTTKNVGHTVYVADDKHVRLPKLGMVKTRVSRPVTGVVKSATVSRNPAGEYYVTIKCAGVHKSMAPAKGDAIGIDLGLKDYCITSEGVKHPNHRYFKQSEKRLRHAKRKLSRKPKGSNNREKQRIKVARLEQKVARQRRDTLDKLSTMLVRRHPIICMETLMPKNMVKNHRLAKHVSDAAWGEFARMLDYKAGWYGRKVVHVDRFYPSSQLCHDCGYLNPEVKNLDVREWTCPQCGVFHDRDVNAANNLRDEGLRMLGQLETAA

SEQ ID NO: 58724 - protein, 491 aa, unknown
  TnpB Polypeptide
MIVKENKKPVAMTLAGSAILALASGYCYHAGFGGAALFASVVAAFCAFFCALRLGAKNYLQIGEDAFTIVRGANSESFEYKDIANLGTKTFVAGRNKTELLNFVFKKTPQAQDRFNFLRFYSDTEATLPGSFEISIYELSKILREKAGLSQSSEEEQAAPKTRKGAKGSKKSASSDKNFKTKIAFMKIRKDKLVNKINSLNYQIETNKFKITFGTKKLFGKNSEEFRNKRDNQIIFLGSKEETSCNQNFQLKYITKINQFIIKIRKDFKYKNEKGEKRYAYGKCFFNNHGKLLKEILKFKNSALTYRIIKRKNKYYLQCIFEIDNRNTILTRKNYGVIGVDFNKGFLAVSQTNKYGHLVKADKMTYRFGNRNKTKNDLLLIINKLTKLAIYTGKDIVIEDLNFLKTKSKAIKGKSEKGKKYNQMLHSLAYRMFLDRTEQICNKKNVGLIKVNPAWTSWIAKNKFCERMKLNIHTGASFVIARRGMNIKDAV

SEQ ID NO: 58725 - protein, 458 aa, Actinomadura sp.
VIVMQAFRYALDVTPSQERRLLRHAGAARAAYNWGLAHVRANLAQREAERTYGLPEDALTPATSWSMYALRKEWNKAKHRVAPWWAECSKEAYASGLTQLAAALANWSRSRHGDRAGRRVEFPRFKAKRRAVPSVRFTTGAIRLEDGRHHVTLPVVGTLRTHESTRKLHRRIAAGTGRILSATVRRETGRWFVSFTCEVDRAVRVPARPAAIIGVDLGVKKLAVFSDDRPDVENTRRLKKSARRLRIASRRASRRQGPDRRAGRAPSARWRRADASRARLHRRTAFQRKDAIHKLTTSLAREYGVIVIEDLNVAGMLRNRRLSAALSDAAFGEIRRQLAYKTAWNGGRLIIADRWYPSSKTCSACGVVKPKLPLHIRTFTCDSCGLVLDRDRNAALNLAALAKHVIAGSGPEMENGRGAAVRPGRAGQVAEKRQSRTGRRRIRRESSPDNGRIADIEK

SEQ ID NO: 58726 - protein, 372 aa, Gemmatimonadetes sp.
MKRVIQIKLLPTAEQADALAETMCRFNAACNWVAERAFERKLANSYALHKLYYYEVREQFDLPADIAILTFAQVAACYKRDKSKPVSFRPLAAVPYRKGAFRYKGLEQLNIKTADGQRHNIPMVMGDYQADQFGNVKLFAELVRRKDGTWFLMATVEHEPEPPCDTDDFLGIDLGVENLATDSDGELHTGEDVEAVRVKCQTLKQALQSAADLAANHRRRKRIRKKLKRIADREARFRRNTNHVLSKRLVAKAKDTGRGIALEDLKGIRERIRFRKPQRNRMGSWGFDQLRQFIAYKAEQAGVLLKIVDPQYTSQMCSQCGHVERGNRSCQSRFCCKHCGHQAHADCNAARNIRARAPVNEPIVSVYSVAAG

SEQ ID NO: 58727 - protein, 404 aa, Okeania sp.
  misc_feature (404)..(404): Xaa can be any naturally occurring amino acid
LYSIKLELKLNNKERSLMAKCAGYARFVYNYGLNMVNGTKHMTKVNQRGKEVNFSYSQRINEAKKVFTNYVKNQPEYAWTNNYSSRIYQSAFKHLGEAFKRSKEGTSKYPRFKRKKDKQSFTVYDGNGKATVQAGHKIKIPTLGTFRLCEQVPLTTASQTFTISRTGEKWFVSFSIEAEQLPVHPLLDERPQEFRGIDVGIKQFATIGSSEENSTIAIPESIKFKQLKQAKFQWRNRKKQLAGKGKTPSKNAIKYYKKLAKYHARIANIRKDFIEKITTELASKYKHICLENLNVKGMMQNGKLAASIARLGFYEFRQQLTTKIVANGGTVVLAELWFPSSKTCHNCGHIHKELTLSDRTFNCPHCGTTIDRDLNAAIVLSQYGEVNQFTRVGCTRIYACELVX

SEQ ID NO: 58728 - protein, 457 aa, Okeania sp.
MLLKYKYKLKPHKSQGLIIANWLELARRQYNYRLAERLNWFEATRTPVNACPLNVSVVPIERIYQNIPEFRIQTRDGRKKDSNGHPITRKGDKHPNIIDGYVAWETVQLADLVQTKKLFPEYKSIHSQVLQDVIQRVQTTMDNFTQPDKNGKTSGRPKFKGKHYYNSFSYPQLSNTNIVKNANGRYCINLPKIDLVPLVFNRPIPVGFKVKTGTVIREADGWYISFTIEDKSVPVEVGEIQPTRKNSKGIDLGLLHYVVTSNGEFVEVPKFFRFSEHRLSKLQARLAKKPKHSKGWKILKGKIRSLHQLIARQRLDWQFKLAYHLFSNVSVIFVEDLQIASLVRRCKAKLGDNGQFLPNGQSAKSGLNKSLQDAAFGQFVQVLEYVAWKLGKRIIKVDPKGTSQYCWQCLNKVSKSLSERWHSCPKCGQELDRDYNSALLIQKIGLLSTRDEENHFC

SEQ ID NO: 58729 - protein, 331 aa, Micromonospora sp.
VVKRAYKYRFYPTVQQAELLNRTFGCVRFVYNRALAERTRAWFQEQERVTFAATCRMLTAWKRDPEMAWLSEVSNVALQQGLQHLQRAYLNIVWSRPLPEGASPSTVTVSRDSANRWHISILVETTIATLAPSPNRVGVDAGITSLVTLSTGEKVTNPKHEKRDRECLARAQRDLARKAKGSMNRAKARIKVARIHARIADRRRDLLHKLSTRITRENQTVVIEDLSVRNMVRNHSLARAISDAAWSQLRRQLEYKADWYGRTVVAVDRFYPSSKTCSTCGRITPSLPLDVRSWTCLCGAVHDRDVNAAINILAAGLAVSVSGDGVRPARA

SEQ ID NO: 58730 - protein, 436 aa, unknown
  TnpB Polypeptide
VVAETFKYVATPDDDETATAAWADIQTCREVYNHALTQEYRLRPDYDKPSYREMQNKLTGSDGWKDRWPEWKTVYSKCLQMAVRRIKQSETVLDSLKTRGYNVGRLKWKAPREFRSIVYNQSGFDVDDNTDRTDHAIVNFSKIGDFHLTYHRQLPDDGDITQVILKKEKTGDWTVSIVVDYDPDYPEKPAIEDIDPENTVGIDLGITKFIHDSDNRSFESLDEQRDRDRIDRRHRKLSRKEYGSNNWQKARQALARAYERLYNRREDYREKLAHEYTTRYDAIFLEDLDVKSMMESRRNSRNVAAMSWRQTIQAFNRHGKKNGCYIIEVQPDGTTKRCSQCGCATDKPLWVREHSCPSCGFEADRDYNAALEIKRLGVDKLGVEANTNAVGQGMAESTPAETAFPADTEATADDVSPKRVVETGSPCLTEAASAAE

SEQ ID NO: 58731 - protein, 434 aa, Nostoc sp.
VIVLYACQQILIHPNQELKAILEFICSESNKLANCAIYYARQIWFKAKRYITKFELHRQLKSNKHYQTLYSQASQQLCSSVYESFASFKQLNALYKRGKLIHKPKPPNYRKNGLTFISYPKQALKLINGQVRIPLGSLIKTWFKLDSFTLPMPSNLRFEDIRELRILPKNRCFYVEFVYKINAVASDVDKNKVLGIDHGVNNWLTCVSNVGKSFIIDGRHLKSLNRWYNKLIATMRKNKPQGFWSNKLAAITEKRNRQVRDAINKAARIVINHCRKNRIGRVVFGWGQGIKQEINLGKKRNQQFVQIPTARLKGRIKQLCQLYGIEFIQTEEANTSAASFVDGDTLPKHGEKPDGWKSSGRRVKRGLFRTAINWYINADCNGAANIIRKVSTTLGLDLSGVSRGALTHPTRIYIWVTAKNRQSEAVSTRRVALF

SEQ ID NO: 58732 - protein, 408 aa, unknown
  TnpB Polypeptide
MTLMLVHKAYRYELDPNNFQRSSLLQHAGVARFTYNWGLEQRITLFKHNHDAERFTDAMKQHKLLNSLKKTQFPWMYECSKCAPQGALRDLNRAFTNFYRGRKTGKRVGFPRFKRRGVRDSFRLTGTIRFEGRKLQLPRIGKVRVKEKREEYYHGRILSVTVRRRADRWFVSITVEETCADPTPMQGQKVGVDLGITTLATLSDGTTFPNPRALGRRRKKLKQLAKSLSRKKQGSKNREKAKLRLATMYLKTFNIRQDTLHKLTTYLAKSHSTIVIEDLGVSGMMKNRRLARAIADVGMYEFRRQLEYKCQWYGSHLVVAPRTYPSTKMCSNCGNKRREVALSEREYVCETCGVRIDRDLNAARNLVTVSLPETQTACGEDVRLLANPLGLTEKQTSVKQEPNISHGS

SEQ ID NO: 58733 - protein, 517 aa, unknown
  TnpB Polypeptide
MQTAYRFKLIESVSQDETMISWLGMLRGMVNYNLADRIDSYSQGFIQGDFCSLQSKAEACPLTCSVVRSASNGEPWKEDKPSLRRGKRDQPFNPRRSAYEMQSSGLKTLRKARPWYKSVNVDVLQQALRHLDTAFNRFFQNKSGFPRFKSRKDFNSFEFKPGTVKVKGHHIIFPTLGDIRFFKSRNIPKSWEIRTVTVIREPDGWYVSILLRDETVPERQLKTIDELQSVNGVDRGIKKIAAMADGTVEPNPLIGKRFQRRLEIRQRRLSRKKKGSENRAKMRQGMARLHQKIRRVRTDFQWKLARRIANSADVIGFESLNVSGMQARCKPKIDPGTGKFVRNGQTAKAGLNKAISDAAWYSLRLKTEHQANKLGNWVVDVPAHHSSQECSKCHFISPTNRDGEKFVCENENCGHHEDADVDAAVVIAQRAVEKLGIVSLRVVSPKVMPTYASLLKSGNPSTQLAPDLTGDTNKEISPPLGGEPGNQTGRGECVVAYVQLSLFDHLSGESTSIPLYG

SEQ ID NO: 58734 - protein, 508 aa, Brasilonema sp.
LARNQTSSFITEVPLIVDSKQEAELLSRFQAGRQLYNACLNEAMKRLELVRNSELYKTAKKIPRIKNKERCEAFKKAREQYRYSEYDLHSFATITSKNSKWIAEKVDSTAQQKLATRAFKASERVMLGLSSDVRYKVPSRFRSIEGKSNKQGIRWKDDYLVWGKLIVKPILDPANPVIRHGLESPIKYVRLLWRILNGKRRWYCQLVNEGLPYQKPQNYVSDGLVGLDLNISNIALVGDNHADLLPFAENVPSFTKEIAALQRKMQRSQRVNNPDNFEPSFKARKGRKTVVKKGKVKKNSRQWNKSKNYLKASAKKRELERKKTAYAKTQNRRVINEILRHGKHIKTENVSVKGWQKRYGKAISAKSPGFVQSELKRKAENAGGSFTKFSTQKTALSQAHLDGSRIKKSLSERVHRDVTGIPEHHRDLFSAFLSRSVNQDMLVLQDAQNEYLRLEPALLEAHQRHLTRKQVSKSESRQSDSPSERVSNESLTSDQIAIASEKSDGDVA

SEQ ID NO: 58735 - protein, 487 aa, unknown
  TnpB Polypeptide
MKIDRGAVTRMLLTYKIKHNRDFSEELRKARKVVEFCIKHRTQDRDPTPPPIQKPASSAPPLPVSSLSASLSASLSPSFSSFCSDFTHESSVLPSDPHLQAYVSESDSFPMPGSLSPTDVKHIGLKSTISSQILRKYSRNQDLRAAKNVKLIIPSQAVKVDREERTLFIPCLKLLLNYHFSSNFKKISQIEIDNVYAYVAVVFPDEKPESSGRYIGVDRNTRGHIAVAADPESGKIWKLGKMRYHTHKKYENIKKRLHKMGKHKQLKTVKQREKNIVKDLNHKISRKIVEVALYNGCGIKLENLKGIRKLKSKADGAGKGKKNKNKDKKMEQKRDKNKSKEMNKNLIKSKSKAEKHMWSNEYSLNSWSFHQLQQFIEYKARLRGVEVVYIDPHATSKKCSRCGHTGNRHSKQFECPHCGHVDHADVNAAFNIALTPKGSGQFFAERDAGKGSSDTPQKVLDRTLFGKRTASEETSPHFAWEVCQFLA

SEQ ID NO: 58736 - protein, 398 aa, unknown
  TnpB Polypeptide
MKLVEKHKIYKSHPSYSKLDEMSRKANNLYNQCVYFAKHSENLVEDLKNIDKVMKKFPGEHDNYRSLGYSVCAQQVLRLFQQNLRSYFAAISDYKKNPSKYAGRPCFPKFRKSGDRFQVIFTNHTARLSGQTIRIAPRTFENKLSIKLRTRSAKKLCQVVFAPRNNYFLVYVIYEVDDLIVSRRSDKVAAIDIGLSNLATVTFSSESEPILYRSDLTKINHDFNRITSEYVSILKKTQNKDTSKRRKRYSEKYAGLIEDRLHKISRVIINDLSHRGVSTVIVGKNTGQKINNKLKNFVQVPLFRLVNMIKYKAELAGITFIQVNESYTSGTSFLDNELPTKEYYNKERRKFRGLFLSNDSRRINADVNASFQIMKKIYKEFSYNDSIKYTNPIVKTIC

SEQ ID NO: 58737 - protein, 222 aa, Hydrogenophaga sp.
KDGTNFSRDSRGNWFLNVVIDVAADAQGVPAARAPVKSVGIDLGLKSFAALSTGESIENPRPFHQLEERLGNAQRARKKRQATKIHARVVNARRDFLHKLSNRLVREFDYIAVGNVSAAKLARTSMAKSVSDASWSSFRSMLAYKALRHGAWYEEVNESLSSQVCSSCGALPDSRPRGIADLGIRQWVCSGCGVSHDRDTNAALNILARHGHVSPVEGIPVL

SEQ ID NO: 58738 - protein, 542 aa, Streptomyces sp.
MVAGFRAVAASFVVPGPAGVAVRTRLRLTAVEAGVLREVGGLLGSLASGDLAVRCRDGLAHDAECWAVRKRVLTGVSSSRWAGSITKATHDQWALARRGLAAYIRGLEAGIAVVRHRLSLPVGERGTKRAAGGYRSRREWHAKSRRLTVLVARRDRAVAEWRAGRVRVVRGGKRLANTRHHLTDARLSEGGWRGRWDAARMFLSADGETGKRYGNETIRITPDGHLSVKLPTQLAHLANAPYGRFALAGAVVFPYRGEEWADRIAGNRAVAYTLHHDPDRDRWYVTASWQRKPAPALPLDAVLTAGCIGVDMNDDHLAAWQLDPHGNPVGEPHRFCYDLSGTAPHRDAQIRHALTRLLHWARGCGVRAIAVEDLNFDRDKTREKHGGRKRFRRLISRFPTSRLRARLVSMAAEHGLTIVAVDPAYTSRWGAQHWQKPLTTPRRKTSRHDAASIAIGRRALGHPIRRRTAPPRNDQSDRYGHRTVQAPPDARGCDGNRPPATDRPHGEPPPNGTRKRQPSASTTVQDAPRTHQRVQDPLTRTG

SEQ ID NO: 58739 - protein, 376 aa, Micromonospora sp.
MICSIRDRCRSPNTLCRNFVQLRYQFRVYPTPGQQIELARAFGCARVVFNDGLRARQEAREAGQPYVSDGELSKRVITEAKKTETRAWLGEVSAVVLQQALADLNTAYRNFFASVTGKRKGRKVAPPRFRSRKDNRQSIRFTKNSRFKVLDNGRLRLPKIGDLEVRWSRALPSDPSSVAIIRDAAGRYFASFVVTLGTDETLPPVDSEVGIDLGLTHFAVLSDGTKVAAPKFLRRAARKLKWLQQDLSRKQKGSNRRKTAVVKVARAHARVADTRRDWQHKLSTQIIRENQAVYVEDLCVVGLGRTRLAKSVHDAGWASFTACWSTRPPGTGAPSAGWTGSSRPPACARRVAGSTRRWRSTSDRGTARAEQPTTGT

SEQ ID NO: 58740 - protein, 457 aa, unknown
  TnpB Polypeptide
MAYRVTQRIISSDDLLYPYFDDLCRKSKLLYNAALFRVRNIFTGYDKEHRTENEVEVFQEVALLQRSYPNMHVRRVISYTHLEKMMRVTENADFFSGLPRQTAQQMVKQSVTDFKNWLASLREYKKHPEKYLGKPKMPRYKKSDLTTVIITNQDAVLYRDDIGMSLKLPLQKQRLYFSNLSSDTVLKEVKIKPYYGRFLLCLTLEEPDVAFDPSGSHVCAIDLGTDNFAAIVCDDYSSAIYKGGAVLSNTQWFHKQRAKYTSIITKGHRQMNATSARLKDLSFHHANFTKDQCHKISRSIIDFCVDHQAGTLIFGVNPLWKQNSRIGKINNQKFVSMPIAFLRAMITYKALNAGIKIIEQEESYTSKADITTKDYIPTYGVDDKDVQFSGLRIKRGLYRCADGTILNADCHAAANIMRKAVPDIWDRTTDFSFLTSPKVYGFHELNPKGIPVKGIAA

SEQ ID NO: 58741 - protein, 1220 aa, Lampropedia sp.
MGHRRPGRSGRESAAARPRRKRETVPCGQSRPPPPGRTHRAIQPCATGPAAGHRHGKPACPARRECVCASPALPSKGRWCLSWIGDRLRAGWQVARATRRQQTARSWWIRFSGLGGRDEIGQCGRASRERQHLVARGGDNELVLPLRRQAMVLGNDGPAIAPMRLDLLATQVEHGFDGEHHARLQHFHRAGATVMQHLRVFVEVAADAVAAELPHHREAVAFGEFLDGVAHVSQRLAGLDLHDADPHGFKGQAAQTVRRNRGFTHLEHAAVVAIPTFGSDDGDIHVQDVTLFQGLAAGNAVADHMVGRGTDRAGIGRIFRPGAVAQRGRTHAQLLHALGGELIDFQGGDAGLNVRCQKIQHFGSLAAGLAQARQVCFGFESNGHDGMNYPTARGGLQNSAGKCGPSMQRGIHPLDRSLRMGWGWNWPRLLQNLREYLGHFKQGAVVHRRHPLAQNGQLRQHGLHRRGNAPLSLADQAHALLHHPLHVVAFLRHGIAAMQHHHGQATAQGLADAARPRLANEEIRHPHEAGDIAGESLYQPGSLGGQFAQGFCQSLIVAAQQNQLHLGQLAGNVQHGPRTMPPEQHQPGGPLRVQAVMAHQWLPLAHRVAIEFRAHQHARGGMHIIGSMPQCQSLLHGPVGATDQMLRIACLGRFDPEMPACQIGQIRHHRHIRGLRATAAQALQHGAVEIGNQRYHHVRRAVLPMRTQALHQTRVAQADQLLQDLQLLPHAARPAPRQSLVVHVFRLEAGQGLEAVGRIEHLEQVHQANVPGPSLLQRDRLQCQGRGTVPATGIDVHKIEGTGHQIARETPSFTAGRDSAALAECPSLASFLKFAIFQVNNARVDIKRAYRFRFYPSPEQEQILARTFGCARFAYNHMLRLRTDAWMQRQERVGYHATSAALTALKKQPEYEWLNEVSSVPVQQALRHLQTAFGHFFARRARYPQFKRKDGKQSAEYTTSAFRWDGSALKLAKMDAPLDIRWSRPIPKAAKVTTVTVSKDTAGRYFVSLLCDDAVAAKPEASGKVGIDLGLTHFAILSTGEKVAAPNTFRKNQAKLAKLQRRLARKTKGSNRRRKAKLKVARLHAKIADSRKDFLHKLSTRLINENQVIAVESLSVSNMQKNRHLSKSIADAGWSDFVRQLEYKAHWYGRELVGIDQWYPSSKRCSDCGYTMPKMPLNVRQWTCPECGEHHDRDVNAARNVLAAGLAVSARGEAVSPVAF

SEQ ID NO: 58742 - protein, 282 aa, Crocosphaera sp.
MIKGKKIHEFRIIPKYNGRYFVAQFVYEIKEEIAENLDKDQCLSLDLGLNNLVAAIDTKGSSFLVDGRKLKSMNQWYNKQLSKLQSLKDLQGIKRLTNKMAKLILKRTNQVNDYLKKTARLVINYCLKHKLGTLIVGVNEGWKTSINIGKVNNQMAVPPLGETPRPHCLNFVQIPFHALRQQLAYLCKRYGISYIEQEESYTSLASALDLDELPEYNADNPKTYQFSGQRIKRGLYRTKNKKLVNSDINGSANIGRKSKANLFKKREVLEGLLDAPIRYFIV

SEQ ID NO: 58743 - protein, 421 aa, unknown
  TnpB Polypeptide
VEQVSRKVVYRMYPSPSQEKELLDMLGLHQRLYNTALEQRIVAWHVARKGVGFAEQCRDLTELRAAFPEYENLPCHSSQVTLKRLDLAFQAFFRRIKAGEDEPGFPRFKSFDRFSGWGYSSHGDGFKFKSGDGLGRSTVRLSGIGQIKLRGRARTAGEVKTCEIQRKAGRWYASFSIACAPKRDGGTVAVGHDWGVETFATIAHGDGSFEAVENPRFFAKHKASVERAQRHLDSVTIKDSIGRPRNGKDPKRIAAKIALGRAKGREANARKDFLHQTSAKITGQIAVFATEKLQVSNMTRSAKGTVEKPGKNVPQKAGLNREILATAPATFLKMMRYKAEEAGSLFIETPTKTLKPSQRCSDCGRLPKVKKTLAQRQHVCECGCVLTRDQNGARNNLVWALNHLGWEPAGNAIPYFSNWVA

SEQ ID NO: 58744 - protein, 421 aa, unknown; identical to SEQ ID NO: 58743
  TnpB Polypeptide

SEQ ID NO: 58745 - protein, 460 aa, unknown
  TnpB Polypeptide
VRQHSLAVNNIDEIRDIAKAYTTVKNYVYSRYSGINSLLLIKGYKKNIRDEWMKSNFAAQWKLPARYWKMALDEAISNIKTEWSNTKNRVKIAVINNENLTESERGFILYILKADSILYSILHREGFKIPEKLKGLTIRMQYICKLVRRYIRKYKGSVPYSHKKTSFMIDRDMYEYKFIDNNLNIYIQGLNWGQRIEVKLKDRNKHKGNLRIVIKDKSIEIHKAKYIKVKNEEKAEEKSIGIDKGYRCLIATSENKFYGEKLNDFLSKETERLNQINAKRNRLWALMKKYEKEGNTQKADNIKRFNMGKVKYNRNKNRFDSQVKSYINREINRFITNDNPSELIMEDLSFVSWEDKFPAHIKRKLSRWIKGYIRERLNYKSNLNNIDQVIVNAAYTSQVCHKCGRFGVRNNEVFTCPSCGSMDADYNASKNIEARKEDKEITLYTPYKKVKEILIKRCPA

SEQ ID NO: 58746 - protein, 385 aa, Rhodococcus sp.
MTERHGILSQMASKVVKRAYKYRFYPTGEQREQLARTFGCVRYVYNRALDERSRAWSQERRNITHAETDKMLTGWKRDPETEWLTEPSKGPLQAALRNLQGAFDKFWRKQAGYPTFKKKGRSKDSATYFSNCFTYRDGRIKLAKQAQPLDIRWSRPLPEGAVPSQVTVSRDARGRYHISILVEGTITEHDPTEVMVGLDAGITSLYTLSTGEKIHNPQHEKNDRAKLAKAQRALAHKQKGSNNRAKAREKVAKVYARIADRRWDHLHKLSTRLVRENQVIAIEDLSVRNMVRNHSLARAVSDASWSSFRSMLEYKADWYGREVIAIDRFYPRPRPARRAGTSWTRCRWISGNGPARNAGRSTTGTTTPRRTFLPSDWRCKPAEMV

SEQ ID NO: 58747 - protein, 397 aa, Halobacteriales sp.
MADQVTRTYVASVRNHQQVRADLDSLGFAASKLWNIARWTCDRNERYADLNAQSSQAILEELAEAFDSWYAHRENGTENANPPGYRKYGDDHPRSTVTFKEDGFKHDPDHNRVRLSKGRNLKDGRSDFILCEYAADPDVDVQNVQQVRAVWTDEEWELHIVCRVEIENADAPGDRVAGIDLGICNFAAVAVGDEALLYPGGALKEDDYYFQKERAKCDDSDSQKARRVDRKRDDRRTHFLHAVSADMVVECAARGVGTIVVGDLAGIREGTDWGDHGNLDVHEWAFDRFTEMLEYKATERGISVDLVDERDTSKSCACCGTTDDTQRVERGLYVCEVCELVANADVNGAENIRQKVLPSLACDGGDRDNGWMAQPAVRLFDKSTGRVAPQEQVRCKP

SEQ ID NO: 58748 - protein, 543 aa, Streptomyces sp.
VADSKVRALEAPFVALGPSGVAIRDRLKHLTPEDEKVLRLVGSHLGTLAGRDLKARCQAELDHDTDAWAERKRALTEESSSRWAGSITKATHDQWALSRRAQLAHIQNLEAGVRTIAHRLSLPVGERGSKRAPGGYRSAQEWFTKTRRLHLLEDRLEAARADRESGVVHVVRGGKQLARNRHNLEAAQLTETSWRQKWEAERRFLQADGESGKQFGNETIRVTPDGEVSIRLPAPLAHLANARHSRYVLTGTVRFPHRGDTWRDRITANRAVAYRIHENVERGRWYVTASWTIPPVKTVSLDAARAGGMVGVDTNTDHLAAWRLDEHGNPIGEPRRFHYQLDGPADHRDAQVRQALIRLLHWAARHNLSIAIEDLDFTAEKTREKHGRRKKFRKLISGMPVAKLRARLVSMAAELGVTVVAVDPAYTSKWGAQHWQKPLTSKNRRTTRHDSAAVAIGRRALGHPIRRRTAPPPHDQSDCAGHRTVQAAPDTPGRKGPRPHIPGPRTRSVSPDAERKRATRTPKTVRDVRSEQVWVQDSLLLTD

SEQ ID NO: 58749 - protein, 407 aa, unknown
  TnpB Polypeptide
MNNKIVLVERHIISTKHQFFKECDHLTFLSKNLYNSTLFRQRESFFDPNKEFLNYFKINKIFVVENNPDYRALPAKVSQQIQMIVDRSFKSFFALQKMISNGTYSKKAKLPNYLDKVKGRMVVPYEKGAISLKEEGFVKLSKTKIKIKTLQSKKAIIGARIVPKGNHFVIEILFEKETKPKIKSCEQRVAFIDPGMNNLMTVTSNVFNPIIYNGKVVKSINQLANKNFAKIASRKENEGSIKVKSIYSKRNNRIDYLFHKITSHLVNHLVSNNVSLLIFGHNKGQKQDINLGKKTNQNFVSIPFYKLISMLKYKCELNGIEFLENEESYTSKTSFLDLEPIQKLDSYVGKRVKRGLFKTKTGKLINADVNGSLNIGRKALSKLNLYNENLHKQLVDFMVNPKKITIK

SEQ ID NO: 58750 - protein, 399 aa, Sulfobacillus sp.
MQETTVFTYRVSLPPREWAKASDTRYAAGDLWTRLVKIHRFCRRRHWPWPTESQLKTHFKRRVPLHSQTVQALIEKFCATIDGVRTKRRNGDKRARYPWRFRRYFNPIFKGQALKIQHQHLLLPLRRGREPIRVHVPKDMPTGMIVQAELGYGEIYLTITREIREPVPAASGKAGGLDIGVIHLGMVSDGTEALAISGRGVRSVKQGRAKAQAKLQKKRTRTKPGSRRRKRLNRARHRGSQKVERVTRNVLHHTANQIVAFCLAYGITILYAGDLGTLNHNKRHRRSRRTNQDVGALEFGRLEQYLAYKLHRHNIQLIKISEAYTSQTCPHCGHLNKVADRTYRCRACGYRAHRDGVGAVNILNKGMHGEIRPGEILVPQRITYRRPVPLRGTLRRSCG

SEQ ID NO: 58751 - protein, 341 aa, Escherichia sp.
VKRLQAFKFQLRPGGQQECEMRRFAGACRFVFNRALALQNENHEAGNKYIPYGKMASWLVEWKNATETQWLKDAPSQPLQQSLKDLERAYKNFFQKRAAFPRFKKRGQNDAFRYPQGVKLDQENSRIFLPKLGWMRYRNSRQVTGVVKNVTVSQSCGKWYISIQTESEVSTPVHPSASMVGLDAGVAKLATLSDGTVFEPVNSFQKNQKTLARLQRQLSRKVKFSNNWQKQKRKIQRLHSRIANIRRDYLHKVTTTVSKNHAMIVIEDLKVSNMSKSAAGTVSQPGRNVRAKSGLNRSILDQGWYEMRRQLEYKQLWRGGQVLAVSPAYTSQRCASCSHPA

SEQ ID NO: 58752 - protein, 400 aa, unknown
  TnpB Polypeptide
MLKAIKIKLYPTLDQQTYCNKLLGTSRFIYNNLLAYKIQRYNDNKQSTSFKQLGSKLVSLKTEFPWIKEAHSKVLQQSLLNLKVAYKSFFKNGTGFPNFKNKKNNKQSCRFPIDAIGNVKGNRITIIKQLKDIHFKCSRRDEKYLNKHQSLIHSATLTKTRAGQYILSILIDKLDTKILPSTNKIIGIDLGIKDFVITSDNTKFKNIKVIRNNQNKLAKLHRNLSRKQPNSKNKEKARIKLAKFHEKLTNIKEYYLHSISNQLLTENQVIVMEDLSVKNMMKNHNLARSIQELSLCKFKSILQYKASWYNRDIILIDKFFPSTKLCSDCGYKNDELTLSNREWGCPSCGVIHDRDFNAATNIKNEGQRILQIGMSSPKLTTVKSNPSGPRRSSKTKVDSF

SEQ ID NO: 58753 - protein, 413 aa, unknown
  TnpB Polypeptide
MLKAYKYRLYPTDEQKVLFAKTFGCCRFVYNWGISIQKSEYESKKEKLSKFDLMKKMRSELKSENEWLREVNSQSLQNALYNLDAAYSKFFQNSKAVGFPKFKSRKSRQSFQCPQHCSVDFSSSTISIPKAKSIPAILHRKFTGKIKTVTISMNSSGRYFASVLVETNITELPVSEIKEDNAIGIDLGIKEHAECSDGRIFDNPKNLAHSLELLRRRQRQLSRKQKGSANRDKARIKLARIQERISNQRKDHIHKVTSILTHDSQVRTICIEDLNVRGMQQNKKLARSISDASFGMFRSILEYKCRWYGINLISIDRFAPSSKACSKCGYVYEGLRLNDRSWRCPQCGSLHDRDLNAACNIKNFDLKALPVERGEVKPVDCPIVDERRPRPKKQRQVEAGKTRSNLTPKPLNF

SEQ ID NO: 58754 - protein, 242 aa, Nocardia sp.
LGVQLRYSYRVYPTPGQQIALARAFGCARVVYNDALAARMEAFGKGERISDTELSKRLTASKATPDRAWLGEVSSVVLQQALADLNTAYRNFFASISGKRKGARVGLPRFRSRRDSRQAIRFTKNARFAVTVGGKLRLPKIGEVRVAWSRNLPSDPSSVTVIKDAAGRYFASFVVQTDGQPLPELDTEVGIDLGLTTFAVLSNGKTIDSPRFLRRAERRLRKAQQALSRKEKGSKNRAKARG

SEQ ID NO: 58755 - protein, 408 aa, unknown
  TnpB Polypeptide
MLRAHKIRLSPTFGQEQWLLQACGVARFCYNWGLAEWQRQYEVGGKPSAYALKKQLNAIKRQAFPWMYDVTKCAVDTGFRNLDAAFKNFFRRCKNGDTKKGYPRFKSRKRSKKSFRMDGSRVKLNGHWIKLEKLDGLINMAEPLRFGGEVKSVTISESAGRWYIAINVERELPEYKHPQESVGIDLGVKTLAVLSDGREFENQKLLRSELRKLKRLNQELSRRQEGSGRWKRTKKKLAKLHRRIADRRLDYQHKITTEVAQTYRVIGVEDLNVAGMLRNHHLALSLADAGFGEIQRQLGYKAEWYGGLLVEIDRFFPSSKLCRHCGCTNTDLTLADREWICDCGAVLNRDSNAAINIETEALRIVADVGSQRRKTHVESDVRPAATPLAASVKRENMVEERRPSRLAI

SEQ ID NO: 58756 - protein, 359 aa, unknown
  TnpB Polypeptide
MANANKKIISKGKATEEKEKKPSKSPVTVEVVDGIFVFHGGKGGHNITERKNKALEPYGKCIYNYGLLLELIPGDKTSRINQNIGNSRYVHNNYLAERIKYYDEHKKTLSIDQYKKEFLPKLKKEKEFLKRTDKFVYQNACQNVETAYQNFFSGKSGFPNFASSRKPNGNSFTTNYTNNNIELKMIDGLPYLKLPKIGNVRFVLPKGKTLADLQPLGVSIKSATVTRTNSRYRVSLQMETVIDRPVFPTVIHADEVFSVDLGLKVFGMFGNAKETFTVPNPRWIKVHAKRLRRFQQSLSRKQYDHNTHKGSKNWEKAIASVGWSQFLTIVKCKMEKAGKYFRKMSRWFPSSQTCRCCQR

SEQ ID NO: 58757 - protein, 400 aa, unknown
  TnpB Polypeptide
LRAFKTELDLNNVQKTACARHAGAARWAYNWGLARKMEAYQKGEKDPTAIDLHRELNVLKKGELSWMYKVSKCAPQEALRNLDQAYAHFFRRVKEKKAGKKIQAGFPKFKSKKNGLGSFRLTGAIHAFDHAIQLPRLGRLRLKECGYLPVEGVHILSATVSERAGRWFVSVQVEKEIADPQTSYRPVVGVDLGILALATFSDGTRIENPHALKRDLGKIKRLQRTVSRRKKGSANREKAVRQLARAHLRVANVRKDALHQVTSRLARTKSAVVLEDLHVSGMVQNHHLAQAITDVGFSEFRRQMVYKGQWYGCQIILADRFYPSSKRCSQCGQIKHEMDLGTRVYICDQCGLMIDRDLNAALNLEQVTTGSSPERYACGESVSPGYQAVLVEAGTEQQST

SEQ ID NO: 58758 - protein, 494 aa, unknown
  TnpB Polypeptide
MKLVAQVKLLATPEQASALKRTLALANAACNFVSQQACKAKTFKQYDLHHLCYKDLRAKFPLSAQVTVRVIAKVADAYKLDTQSKRSFKPLGSIAYDDRILTWRLKDSKVSIWTVDGRLRIPFVCGERQRELLTTRQGESDLGLFRNMFFLSATCNVEDPQLIDVEEVLGVDLGVTNIAVDSDGAVHSASHINHVRFRHRRLRAKLQSKGTRSAKRKLKKLSGREHRFAKDTNHCISKKLVAKAKDTGRAIALEDLGGIRDRITVRRPQRAALHSWSFFQLRKFVEYKAQRAGVRVVLVDPCNTSRTCPKCEHIDKANRKTQSVFSCVACGYSGLADHVAAVNISRRAVRLRDRAADVNPPIVARAVSKVASPKRASAATSHPLLAGAQLTGPYDFAFFQPEYRFTNRSTAPASENPASTCLRASNPASCRWASSAKRSFSCRTISASVWATRPISGNTPTAVPTAGTPQAAASSNAMPWASCRDAWAKTLADR

SEQ ID NO: 58759 - protein, 381 aa, Escherichia sp.
  misc_feature (318)..(336): Xaa can be any naturally occurring amino acid
VKRLQAFKFQLRPGGQQEREMRRFAGACRFVFNRALALQNENHEAGNKYIPYGKMASWLVEWKNATETQWLKDAPSQPLQQSLKDLERAYKNFFQKRAAFPRFKKRGQNDAFRYPQGVKLDQENSRIFLPKLGWMRYRNSRQVTGVVKNVTVSQSCGKWHISIQTESEVSTPVHPSASMIGLDAGVAKLATLSDGTVFDPVNSFQKNQKKLARLQRQFSRKVKFSNNWQKQKRKIQRLHSRIANIRRDYLHKVTTTVSKNHAMIVIEDLKVSNMSKSAAGTVSQPGRNVRAKSGLNRSILDQGWYEMRRQLEYKQLWXXXXXXXXXXXXXXXXXXXAVRCLLFRQRTQASVARAVVIQRKEIVCHKVNSDARYVDIQRTPM

SEQ ID NO: 58760 - protein, 573 aa, unknown
  TnpB Polypeptide
VTVTAGRRIAAPFVAAAPAGARVRARLRVSGRDAEVLAAAGAHLGSLAGRDLAARCAEGRLDAAGCAGSRAVRKQALTAESSSRWAGAITRTSDDAWRLGGRNLRAERASLTARIRRIEARLAVPAGGKADRARGYATAAERHAKMIRLHTLQARLHRVQGQVDSGAVSVVRGGKGLLRTRSNLAAAGLTEAQWRRDWESARLFLTADGEKDKAWGNETIRFNPDEGWLEIKLPAPLARLANRPHGRYRLSCPVEFSYRGDEVAAQAATGAIRYDITRRPHRSGPARDRWYLDASWKTTRAPAPSLDELRRHPVVAIDVNHGHLAAGVVAPDGNILGTPATIALRLAGLPATTRDGQLRAAVTAIITTANNHGAHAVVIEDLDFADARAEGRERHGSRPSRGGRGRGFRRAISGIPTGRLRDRLVQMASNAGLSVIVVDPAYTSRWGAEHWLGALREHHPKATGHHAAALVIGRRGLGHRARRRVTGNPSAPAEAARPAQTRPRTIRHPARTQETRHPTRPPAATRHQDRPASPDHGRRPGSPRPFGAAGQPGPCPASSIGTVGGERADVVWS

SEQ ID NO: 58761 - protein, 442 aa, Okeania sp.
VKKLVKQVITAKLKLHLSSEQKKLLREVSLAYRDALNDSSEIAFTNGKVSSANKLQKLVYQDIRTKFGLPSQMSCNVPRQVAATYKGLWTKVKQNANHIQLGQTKKRYKGLDKPPKYASRTCNLNYKRDYSFVKQGVSLITLQGRIKVFYSGYNKHVELIKSGEDAVKFGGAKIYYARSNKTYYLLVSLELKIPDIEPDAINCVVGVDVGQRYHAVTTDTANQAHFYPGKQCNHKATRYQKVRKSLQQKGTRSAKKRLVSLSGKERRFIADRNHCLSKQIATPNTLIGLENLTNIRERTQPRKIGKKASTKQRKANHKQAKWSFAELHLFIDYKSVLNNSLAIKVDADYTSQACPHCGHTSRGNRPNKGLIFHCESCGFELHADLIGARNIAMRALLFRQDWESTGLLSAAPDGSSAEAKAARLSRFAEMRWTAESSQHHNL

SEQ ID NO: 58762 - protein, 418 aa, Okeania sp.
MLVREAKLLNGTSNQYKSLDEAIRTAQFIRNKAVRYWIDNQGVDKSRLYKLSKELASEFAFANKLNSSARQASVEVAWTSISNFYRRCKEGVKKKGYPKFKKHCRSVEYKQSGWKLSDDCMFITFTDKFQSGKFSLYCDSETREDLFRLKINRVRIVRRADGYYCQFCIDADRKEPGNYTGNFIGIDLGLKYFYKDQNDNAVVYPQYLRKSEKKLKRRQRQLSKKFVKGKKPQSNNYHKARKRLGKCHLKVSRQRKDWSIKQARCVVASNDVVVYEDLKIQNMVKNHHLAKSISDAAWYQFTQWLEYYGKIWDKAVVSVNPKFTSQDCSNCGHRVKKTLSTRTHVCPSCHVEICRDTNAARNILKRGLEIIGIEWNQGTEGHSGTSDYSGTLEETTTSAVDGQPEAVSGVGESRITDV

SEQ ID NO: 58763 - protein, 224 aa, Okeania sp.
MKSIRTKLKLNNKQKTLLAQHAGYSRWCYNWGLSLWNQAYIDGYKPNASKLREVFTNHTKPLYPWMKNLSSRVYQYSFRHLDAAFKRFFKGIGKHPRFKKKGKHDAFPTECYANTIDNCGKPIELNGWSHKLPFIGIVKTYEPIEATTKKITISRQAGEWYLSLGFEFHPNTKPKKTDVIGVDLGVKTLATLSNGKVFSSIRPYHKAQKKLAKLQRQLSRKVKH

SEQ ID NO: 58764 - protein, 391 aa, unknown
  TnpB Polypeptide
VGGIALLYLKFVICDILNKVELVKTVKCKLEVREGIKPVLHDTLIKFSKACNDILKVSIENKTSNKVKIQHLCYREVKEKYSLPANLVIRAIARVCASRKFKRPIKEFRPTSIEYDARTFSLKFIGGYYFTSLSTAQGRIKNIRLSIGNYQLGLLKGQKPTSATLVWNKRKKVFYLHIVLSNPVPSPGEVKRFVGVDLGINRIATASNKVKFKIKNLKQVRNHYLKVRSSLQKKGTKGAKRLLRRLSGKERRISREINHIVSKQLVESLCDGDCIVFENLKGIRQRAKLGKCQRRHLHSWSFGQLIDFCKYKALQRGIPVVFVDARNSSKECSRCGYISKSNRKSQSLFRCIRCGFQHNADFNASLNLAKRAGSLALGYLSDSPKVSALSG

SEQ ID NO: 58765 - protein, 418 aa, Lachnospiraceae sp.
MRTSKEMPYHIGLHVKLYPSNEQKHIIAVNDGAQRSVYNHLVAAGNERFRLRQAAKYAPAYRDHLQYLQDTASSTAGMKTALPYLNEADVDSATVDNAFRNYRFAWKNMKDNHRGVPAFHKKSAEQSYQTNSHYKSGDTGIFDGSIRFDGMSHLILPKIGKIRIGASPKLLQELLVHPTDRRITTVTVQRDAVGEYWCSIAIASETPFRMQLPKTGTMAGIDLNILELVNQSDGVSFENRKFYKEAELHLAKEQHDLSRKQARALRENRSLLSSKNYQKQRTKVAFINRKIARRRDDYLNRVSRNLIENQDLIAAENLQVRNMLKNHKLAKAIQDCGWRKLLTLLQEKAATYGKECILVPPQYTTQTCSACGHKLTGDQMIPLSVRDWTCPACGKHHLRDTNAAQNILNKALEKRMTA

SEQ ID NO: 58766 - protein, 678 aa, Streptomyces sp.
MDVQAAQKPRQFRGKGKQAQRWRKPDDGQVSVMVLPLAITDSADLDRLEKLCAAIWSIKRAVQRDARAKADAYWAAKHERDRDGAKAIRERLGLSLDGLVRCAYRHLEDAGHLKHHVSKALAMHIAAEVWTGISRHLFPDATGKCFGRPKVGRWHEFTRIPGRARSHTTDNKWETFRLVGTIHGHAMAYTDGGQHAMSQPRRMPKPPMPEGRVPTGKLTASGKPGMRKVSWWDHTGPLAVVFAGGPDSKRGDLVLPVRVPQGTGPWTRVEHFLSNPLTWHKVDLVRRRKASAPGGWVYEAHLMVLGPGYTAPAVQAMRDQATQLDRKGGVDGNVSNLSIVSFPAQLDGGTPVSTEVTLTDAERARLEREAKKQRGRARALERSRRATNAGQYGLSKKQAQRAEHRAAKGLEPKTVTVPGGARAARSDGVPKQAFRRDRLSANYRTQRARQAEHAAAIAEHRRHRARLVAREIIANHGPVLVVEDCDIRTWYRLWGKRLSQTTPGMLVAALDVECKAAGGRLVRASTWSTALSQHCLCGERVNKTLRDREHKCIACGLVGKRDLVSAALAAFVDFGDVDDPKTAFLDTAMSRHAQIVYGEGLEEALRESTTQSQNTSRGAGRVAVPRQRGTSAPRIVGQRNRATPDETRPLRDHAGAPDLRTTCIPQQLTLRGDIRDKS

SEQ ID NO: 58767 - protein, 377 aa, unknown
  TnpB Polypeptide
MSTSLAHKIALDPTPEQREFFQRAAGVSRFTWNWALAEWQEGYQQDEKPNGHLLKKSFNALRRVQFPWTYDVHRDATARPFADLQRAFVNFWAGRADYPRFKKKGKGRDSFYLACDKFHVDGKTATLPKIGPIKMREALRFEGKILGATVSREAARWFISIQVQMNAHSRDRTADGCVGVDLGITNLATLSTGEAIEGPKPLKQTRKQLRRTNRTLHRRHLGSVNREKTKRRVARLYARMAHIRTDALHKLTAKLCRENQVVSIEDLHVKGLLKNKRLSRSISDMGWGECRRQLEYKAPLYGTQLKIIGRFEPSSKMCSHCKAVKPVLTLGERLFICNACGHMEDRDLNAAKNINQLGQAMPEVTPVEKRSAGLGFG

SEQ ID NO: 58768 - protein, 545 aa, Streptomyces sp.
MGGRREVAAPFVASGPCGVAIRARLKTLTPEDEKVLTLVGAHLGSLASKDLKARCVDGLEHSARTWAARKRELTAASSSRWAGSITKATHDQWALVRRGQSAYVQSLEASIETLQRRLSLPIGERGTRHSPGGYRSAHEWFHKTRRLHALEGRLVSVSADREAGVVRVSRGGKRLLKARHNLGKAGLTEAKWRERWEAERWFLQADGESGKRFGNETIRVTPEGEVSIKLPSPLAEHANAGHGRYVLAAKARFPHRGTEWADRVAANRAVAYRIHYDVQRGRWYLTASWTFPVAKTIPLDDALADGVIGVDTNADHLAAWRLDTHGNPIGHPRRFFYDLSGSAEHRDAQVRHALSRLLNWAKTCGVKAIAVEDLDFTAEKTREKHGRRKRFRQLISGMPTGRLRARLTSMADSTGITIIAVDPAYTSKWGAQHWQKPLTTKSRKTTRHDAASIAIGRRAQGHPIRRRTAPPPAHQSDVQGHRTVQAGVEAPVREGTRPRIPGPRTRCVPPDTERTRATRTPKTVRDVRSDQVWVQDSLLLTNEER

SEQ ID NO: 58769 - protein, 542 aa, Streptomyces sp.
MGGLREVAAPFVALGPSGVAVRDRLKHLSVEDEKVLRLIGDLLGTLASLDLKARCAAGLDHDTGQWAERKRTLTQESSSRWAGSITKAAHDQWALARRGQLAHIQSLEAGVRMIAHRLSLPIGEKGGKRAPGGYRSRQEWHAKARRLHVLEDRLRAARADREAGVVRVVRGGKGLLNTRHHLRAAGLTEEQWRTRWQAVRRFLQADGESGKRFGNETIRVTPDGEVSLKLPAPLAHLANAPHGRYVLATRVAFVHRGEQWRDRVTANRAIAYRIHEDTSCGRWYLTASWTIPPVKTVPLAAACTNGLVGVDTNADHLAAWRLDTHGNPVGEPLRFGFDLSGPAPHRDAQVRHALIRLLHWAKRHGLAIAIEDLDFTTDKTREKHGRRKKFRNLISGMPVAKLRARLVSMAAELGITVVAVDPAYTSKWGTQHWQKPLTSKTKKTTRHHAAAVAIGRRALGHPIRRRKAPPPHDRSDRAGHRTVQAEPDVSGREGTRPSVPGPRTGSVSPDARAKAGDQCAQHRSGHAAEHGLWQQDSLPLSH

SEQ ID NO: 58770 - protein, 389 aa, Tenericutes sp.
MEMITIYKGFKFRLYPNSTQKEKINKTFGYNRFVYNHYLNQIRKEGYKNVNYYIKDYTTNLKYAYPFLKEANPILIRKTLYRLEDNYKRYLNSSFGYPKYKSKYAKNSYTITLTSSNVGPNCQNVSLDLKNKRAELPELGILKIKGYRHTQQINGRIANYTISREKNGKYYISLLFELATVNKIVPSVVVGLDLGIKKLITLSDGITYNNNKYITKYETKIKKEQQNLSRKQKGSKNYYKNLKKINVLYVKLSNSRKYYTHSITKEITDNYDIISTESLTTKKMIMNKQNHLSKNIVDVTLSEILRQLEYKSNEKGKYFYKISPYYPSSQTCSVCGNIDRKYKNLDERIYKCDKCQSILDRDYNASINIMFEGLKLYMKDAKGKPITTS

SEQ ID NO: 58771 - protein, 330 aa, unknown
  TnpB Polypeptide
MPKYCRLDKKTFKVTNQDAILYPAPDGKGCLLKLPNMTENRIPLSYLKDTADLREVVFKPYYGKYIMTFVIEDAAPPCYPDMPNMAGVDLGTDNIAAIACTDGSSVVYKGGAILSANQFFAKQKASAVSILTRGKTYSHATSAFLNNLSLKHDCFIKDQMHKLSAAIIQYCIDHRIGVLVVGTNRLWKQRASMSKKSNQKFVFIPHDKLRWMLSYKAMVAGIDVVWQEESYTSKADCTAGDFIPVYGKVKGHPVFSGRRVERGLYLCKDGYCINADCNGAANILRKAFPDAWAACEDYHFLASPDVIGFKDLNPAVFPDRQRQRNVNKKN

SEQ ID NO: 58772 - protein, 376 aa, unknown
  TnpB Polypeptide
MILAKKVRLIPTPEQEKVLRNHAGAARFAYNYCKRISDRYYKLFGKSVSQLALQKRFTKIKKRKRYEWLKEINAQVPKQASRDFDAARKNSFKKYKNGSHTSYKSKKDVIQGFYANYERLIIGKKVVHIQSIGEVKTSQQLPRNKKPSNPRVTFDGRHWWISVGFQEDFESQELTNESIGVDVGLKELFVASNGMKERNINKDAKVKKLLRRKKSAQRDMSRRFKKGVKIQSAGYEKAKAEHLRLSRKITNIRNNHIHQATAKLVKTKPMRIVVEDLSISNLLKNKKLSKAFSFQKLHFFFQCLSYKCEKYGIAYVKADKWFASSKICSCCGVQYDHLVQPEGQWSLKIREWRCVQCNSHHNRDLNAAINLSRWVK

SEQ ID NO: 58773 - protein, 435 aa, unknown
  TnpB Polypeptide
MKGPISKRGLAPLSYTSPAEIFFRGNGVGHITFIKAESSSSIMKIIRAWKYRIYPSKKQENELNGYLFDCKNLWNFLLEHTKKSYEETGKFPTRKELYLLSKEANVYSQVAQNVADKLAKSLKGMIAKKKADKKAGFPRFKSFERMRSFTYPQFGFKLNEKLELSDIGNIAIKKHREMHGEIKTLTLKKSPSEKWFAIFTTESEVVIPEKKHGAEIGIDLGIENFGYLSNGSKIENPRHLEKAEELLIRAHRELSRKKKGSNNRRKARLKVTKAHEDLTNTRRDFLHKISKKLVDSYSLIAVENLNVSGLARGFLAKHVLDCSWAEFLSMLHYKAEEAGCEVVLVDPAHTSQRCSSCGLVQKKTLAERWHECSCGVSMHRDLNAAKNILARVTSGTGGYQACEETTSTHYKHNEQVSSMKQEAHTIDRRNGQCAP

SEQ ID NO: 58774 - protein, 334 aa, unknown
  TnpB Polypeptide
MSHEFTTLRNSHPEIFAHWRELDSWAARQILKRLDEGYQRFFEKIAKRPPRFRSFRKPYSFTMCPSGYKFAAPIAGDKGFGIYSDRVTIMGRTYRFNLSRPIFGTLKTVTIKEDALGDFYMSVVTDHKRSYLKPMTGNAAGFDMGVKTMLTCSNGKHYESLQFYTESIDNVRTANRNLSKKKRGSNNRERARQHHARMHRKITRQREDHHWKLALELVRRFDILFFETLNLEGMKRLWGRKVSDIGFYGFMRKLKWQAQKRGKRVERIDQWTPTTSVCHVCENRVELQLSDRIWTCEHCKTHHDRDVNPAINILQVGASTFGVENVRLAIASGS

SEQ ID NO: 58775 - protein, 363 aa, unknown
  TnpB Polypeptide
MNKNFKVRIYLTEEQKALVEKTFGCKRYIYNFMLNLKQKLYEFYGINLNYNNMSKILTELKKHKLWLKAPDKCSLQNSIKDLDQSYQRFYNGVTGFPNFKSRRGKNSYRTNGDLDLDQDNKMIKIPKVGWIKFRDKTNFNGLTKINNITISKTPSGKYFASISAEVDITALSKTKKNCGIDLGLKDFCILSNGTKFENPRFLINNEKRLRLLQKSLSRKIYGSKNYEKARIKLAKFHEYIASCRKDCLHKISIHLVREYDIVCAETLQVKNMLKNHKIAKAVQDVSWSEFCRQLEYKCLWYNKKFVQIDTYFASSQICSNCGFKNSDAKNLDVREWICPECGMHHDRDVNAANNILDHGLQLI

SEQ ID NO: 58776 - protein, 366 aa, unknown
  TnpB Polypeptide
VNKSFKVRIYPNQEQQKLIDKTFNYTRYLYNYMLNLKQKLYEYFNLNLTYNNMSKVLTELKKHKSWLKDVDAVAFKESIKDLDSAFQKFFNGAGYPNFKSRKRDKLSYRTNSYLYLDQNNRKIRIPKVGWIKFRDKSNFKGLTKIYNITISKTSSGKYFASISAEVDIKTLSKTKKNCGIDLGLKDFCILNDGTKFENSRFFIRSQKKLAKMQRKLSKKVFESNNYFKYKIKVARFQEHIKNQRLDFLHKISIRLVKEYDIICTETLKVKNMIKNHKVAKAISNVSWYEFCRQLEYKCLWYGKQFVKINAYFASSQLCSNCGYKNPDIKNLDIREYDCPVCGIHHDRDINAAINILNEGLRVLNSI

SEQ ID NO: 58777 - protein, 520 aa, unknown
  TnpB Polypeptide
MYFYSKRKEATDMGYMRTITVCITQNHPLFNYAETVTRLANHLSNAIRFRQRQVLTAVSKPATNWSANEQEVMKEILDTISQMKRPVPVPTKENHFLGYSFLDSVMKYTKNPDYYAKGLPRQTAQYVLKQAVRDMKTFYASCHAYAKDPSAFTGKPKLPGYKKKGGHTTATVSNQDCIIKLRNGKWYAEFPFIKEMPVCIGFPIPDARLKQACIIPENGRYRLTFQFEVEKDLPEHSKESHRICAIDFGVDNLMAVTNNCGIASLLYKGGPAKASNQWYNKTIAKLVSEQTLQTGKKFIPDETYYAITNRRNDQVSDYLHKCAKHFVTWCVENRIDTVVMGVNKYWKQNSGIGHQNNQEFVQLPITKLREIIQYLCEWNGIRCIEQEESYTSKASFPDHDPIPVYRKEDSTKYTFSGKRKPTHYAGMYKKDGFRGLYKPPNGTIINSDLNGSANILRKAYPQAFDGESLPCFENVFIILHPDYENQKKNRQKQLQAKNSFSKSKEKRQRRKKCAFRQTVA

SEQ ID NO: 58778 - protein, 409 aa, unknown
  TnpB Polypeptide
MKLVYKFHIGKNEELSRLCKISNNLYNQALYVFRNTLSEEDKWLSYYELNKILIDMENLEGEVNYKLLKAQCSQQVLRVLDKNIKGYYKSVQDFKKNPSKYRGKPELPKYRKRGSEFTLFYTNQSCSIKNGKIKLSNDLFIDIPQYDKYHDRIRDFKQVRIIPMFAGYKVEIVYDLDVSNNMDVKEHKVASIDLGIDNLVTLISEDFNFIFSGKFVKSYNQFFNKTLSNLNSIKDLQNIKGTTNRIKKLYYDRDRYLEDVFHKISRMIVNLLTDSKITKLVVGYNKGWKTGVNIGKGNNQKFVQIPFARLISYLEYKCELLGIEFVTNEESYTSKCDSLALEPISKHESYLGKRVRRGLFQSSVGKLINADVNGALNIMRKVVGDSDEVIQRIINSGLLFNPVRIRSVF

SEQ ID NO: 58779 - protein, 392 aa, unknown
  TnpB Polypeptide
MLKGFKTELRVTEKHIIKIHQSIGICRFLYNLYLAKNKELYEMFKNGEIERKQAFMSANDFDKYINNEVKVLDEFKWINECGSKARKKAIVNAETAFKRFFKGESEFPRFKKRKNQDVKIYFPKNNETDWAVDRHRIKVPTLGFVELKEKGYMPTNAKVVSGTVSMKAGRYYVSVLCDIRERTDYSDIKNEGIGIDLGIKDLATVSNIDEPFKNINKTEVVRKLKKKLKRLQRQVSRKYEMNKDGKKFIKTKNIIKLEAQIRTIHQRLSNIRLNYVHNITNTLVKTKPEYIAIEDLNVRGMMKNRHLSKAIAQQSFHEFRRLLTYKCLWSNVELRIVDRWFPSSKTCSECGNVDKDLKLSDGVYVCKECGSVMDRDKNASINLKNTQKYVVA

SEQ ID NO: 58780 - protein, 414 aa, unknown
  TnpB Polypeptide
MGFKMIRTHKIRLYPNNKQVTYFKKACGVKRLAYNWGLAKWKEMYEHGEKPNANMIDKEFNKIKKEKFPFTKEVTKWATQLAIKEDLDSAFQRLYKKIGKYPRFKKKSVKDSFRVFPTAIRNGLNDVRVDGLKVKIPRLGFVRMAQLLRYSGTLKYCTISRKADKWFISISVEIPDTVKETSTNENQVVGVDLGVKNLATLSNGLVIEGRKVSREFGKRVRRLNRELSRRKGSKKGERKSNNFLKTQLKLSKFYLKMVNIRNDQIHKLTHYLTRNYPIIGIENLNVSGMLKNHRLAGSIQDMSFHEFRKQLDYKAKETGSKVVIANRFFPSSKTCNVCGGINKELRLSDRVWVCSDCGTEHDRDINAAINLRNMAVGVTVSALRSQDGGVEPSLGRNPVVWGSETCKSGEKDYA

SEQ ID NO: 58781 - protein, 413 aa, Merismopedia sp.
MQLVQRHIINKNHKYWSYFDQQAFLSKNLFNLTNYQMRQHFFEKKEILSFTSLYHLVSKSDAYYALPNTKVAKQIIRRIHKAWIGYKQAHKDWKRNPSKYLGEPRIPKYKDKIKGRYAVIFPDETVSKPALRKGVVKLTPCPIEFESGLQEVDEVRVIPRSGCYVVEIVYSQEPINNSATEVAGIDLGLTNLITLTSNQPGVKPLLIKGGALKAINTYYNKQKAKIQSELENKHKAKTSNRLNKLTHKRNCRVNNYLHTSSRRVIDWCIANQVGTLIVGKNDGWKQSINIGRKNNQQFVNVPHAQLISMISYKAELLGIKVVVTEESYSSKSSILDNDPLPKYGEDKPKFSGKRVKRGLYVSKNGIRINADVQGSLNIIRKVKPNVFDYGLRGLPFSPVTLDPLRTHDFLQIA

SEQ ID NO: 58782 - protein, 429 aa, Deinococcus sp.
MKLTVTAKLKLRHTPEQKQALDAVTLAYRDALNFTSEAAFKLEKTSSAPKIHKEVYPVLRERFGLGAQLACTVSRQVAATYKTQWTKLRQNLVAQETGRTKRRYRGLDVAPTFVSRTLEYQYQRDYSWKKGQQVSVGTLDGRIVLDYEGYQKHLKFIAEGAEMGAAKLYHQKSKKQYYLLVALNIELPDPQPTDHPNIVGVDVGQRYHFVATNNHNQTMFQAGGQARQYKDRFVRARKSLQRKGTRSATRRLVLLSGRERRFIADQNHTLAKKLLTRFPQSLIGLEDLAHIRERTEGRSTPAASPQAKSAQRRRSQWSFQELHAFIAYKAPLMGSMAVKIHANHTSQACPKCGHVSKANRPKAGLMFICEVCGKQGHSDLVAARNINLRTLLVRQDWMSTGALSVRPDVSYNEVKAAYAELRWSADTSL

SEQ ID NO: 58783 - protein, 451 aa, unknown
  TnpB Polypeptide
MKVTEIYYSLQLTNTKLLKLSKIAKRLGTLRSEIWNEFGSLKGLRLTHRIIRDQWLKENKIFNVPARLWKETLRDVIGDITAYREAAKQKTRKAIYKHYKTDKDREAAYKLLRQDRWLTDPFLRRQMRKNFKHGHSRVSNHIILDSNCYTAFTKSGKAWIHVMSLERGKRIAIPLTTNKLPTGTLRLIIREDRVEVHYSVEVTSLNRSMKSCGSKTIGVDKGYSEVFTDSEGYKHGEGFGVLLSNESDYLKTKYQKRNKLFAIAQEALKKGNYSKARQIENHNLGRQKLNKRKQRHTQRVKDLVYKAAHSVVDKAKVIAAEDLTSSIPSKSLGKNTNRRLAAWVKGLIAIALDSVSRRRCASVVLVNCAYTSQVDSIEGLLKGDRRGDSFYRTNGDVLDADWNAARNILARLDDPDINRYTPYYVVKSILLKRTRQRLGLLNQDSRCYEEG

SEQ ID NO: 58784 - protein, 488 aa, unknown
  TnpB Polypeptide
MTESYVLTLKLNTSFEQDRWLSYAFWCGQQIYNVLVRHCRKQLRKLIHDPEYLELLAARRKDDLSKKDKNRINQELATIRRSYGLSEYQLHAFVTVQQHRHKRSIDSDVAQKIASSVWRSVEKYLFDNGKCIHFRKYDEFESMEGKKNTSGMRFKDGRLQWRGQVIQPQIRTDYDKEALRSRVKYCRIRRKPVGTKYHYYLQLVLEEKPTVKHPVGHGTAGLDIGTTTAAVMTEDSCKLKVLGSDAKDRSAQIRRIQRAMDRSRRATNPDNYLPDGTVRKGAKKWIWSEHYKKLQFRKKSLERRYADAVNAGHHRLSNEIASKADTVYVEKMSFNGLARKSKSATKKADGRFRSRKRFGKSIGNHAPAVFLNILGNRLASGGGQLIKIDTISFRASQYNHVTDDYVRKKLSCRGNFIDGHYIQRDLYSAFLLKNSNDTGTAADRQKCIDAFPMFLITHDACMDALLAENKKYPSSFGLRSYERYKCNC

SEQ ID NO: 58785 - protein, 402 aa, Shigella sp.
VKRLQAFKFQLRPGGQQEREMRRFAGACRFVFNRALARQNENHEAGNKYIPYGKMASWLVEWKNATETQWLKDSPSQPLQQSLKDLERAYKNFFRKRAAFPRFKKRGQNDVFRYPQGVKLDQENSRIFLPKLGWMRYRNSRQVTGVVKNVTVSQSCGTWYISIQTESEVSTPAHPSASMVGLDAGVAKLATLSDGTVFEPVNSFQKNQKKLARLQRQLSRKVKFSNNWQKQKRKIQRLHSCIANIRRDYLHKVTTAVSKNHAMIVIEDLKVSNMSKSAAGTVSQPGRNVRAKSGLNRSILDQGWYEMRRQLEYKQLWRGGQVLAVPPAYTSQRCACCGHTAKENRLSQSKFRCQVCGYTVNADVNGARNILAAGHAVLACGEMVQSGRPLKQEPTEMIQATA

SEQ ID NO: 58786 - protein, 266 aa, Microcoleus sp.
MPSNLDYDQIREIRILPKNGQFYAEFVYKIQPITVELDASKVLGIDPGLNNWLTCVSNVGTSLIVDGLHIKSLNQWYNKRVATIKEGKPQGFWSKQLGRITEKRNRQVRDAVNKAARLVLNHCRENQIGTVVFGWNKKMRQEINLGSKTNQNFVQIPTARLKDRISQLCEQYGIRFVETEESYTSKASFLDEDELPMFGEKPEGWKESGKRVKRGLYRSKDGSKINADCNGAANILRKVAATLGLCLEGVSRGALISPLKVRIWTL

SEQ ID NO: 58787 - protein, 335 aa, Microcoleus sp.
MDSVPAWVSEQPYNPRQMAVFQAFEAHKAAKKSKGMAKFRSRFDGSQTIRFQVANWKSGTFYPQATKGLLFKAAEPIVEVMEHEPTLSLINGQWFICYAVDTARLDPTQSDLAIALDPGVRTFLTGFDGRDILEIGSCDIGRIYRLARHLDKLMSRIGLNKGGQFKRLRYCLRKSAAKIRIKIKALVNELHKKAAKYLVTKYKVIFLPTFETQQMVKKGKRKLATKTARAMVTLSHYRFKQMLKHQAVKYGSTVVDVTEEYTSKTCSKCGHIHIKLGGSKKFKCPECGHILDRDLNGAFNILLKALRDTSLTGELAAFSVLPYTANSGLVLDLPG

SEQ ID NO: 58788 - protein, 406 aa, Streptomyces sp.
VFCVKIVAQVKLLPASAHDADALAATLRACNRAANTASEVAFTKDLKRRNTLQDAVYHRIKADFDLGAQAAVRTIKKVCDAYAALKGNIKAGNLGPKGSKRRTRAESRPVGFRDDAAQPFDDRILTWNLDQRTVSVWTVAGRLKGIPFVCSPEAMTLLASRKGESDLVMRDGTFFLIATIDVPEPLVSEPDGSLGVDLGIVNIATTSDGQIMAGRRLNRYRKRHRDLRRKLQKKRTKAAKRALKRMRRREARHAAHTNHIIAKRIVATAERTSRGIALEDLGGIRQRVTARKDQRARLHSWAFAQLGTFVEYKARRAGVAVVHVGPRNTSRQCSECRHTHRTNRVDQARFVCRSCGIVLHADHNGSRNIAHRGEAVWQRGAVKRPSTAQRYTGRRGPTRQPVALHL

SEQ ID NO: 58789 - protein, 399 aa, Streptomyces sp.
MPTVHVKRAFKYRFCPTPEQAAELARTFGCVRKVYNLAFAARTQAWARRERVNYNQTSAMLTAWKKTGELAYLNEVSSVPLQQALRHLQTAFSNFFAKRAGYPRFKSRKTSRKCAEYTTSAFRFRDGRITLAKMAQALDIVWSRPLPEGAKPSTVTVSQDGAGRWFVSLLCEDPDIKPLPAADTAVGADVGLDHLLTLSTGEEITNPRHERRDRARLAKAQRDLARKARGEGANRARARRKVARIHARIADRRRDLLHKLSTRLVRDNQVVVIEDLTVRNMVKNGTLARAISDAAWREFRTMLEYKAQWYAREVIAVDRFFPSSKLCSACGTLTRAMPLNVRTWTCETCGTTHDRDVNAAKNLKAAGLAASVCGAGVRPQRKTPGGQSATKQKPSRREP

SEQ ID NO: 58790 - protein, 438 aa, Streptomyces sp.
MPTMDQRYNAGVKADMGRKYRAYPTEAQDQVLTGWGHTGRAVWNVALEQRVYLYQQRGYTLRSVEQCKHLTAARADLEWMGNFPAQAGQQILRNLDRAYDNFWNPEHPAAFPARKKRGHRLSIPFPGQAVEVRKLNRKWAQVRIPKLGWLRFRLSRAVGGTIRNATISRGGTGWHISFGVHIGARLAPPNGKPGCGVDFGVAASAYVSTETAPRFMPPSLTANEKARIKHLERKKARQVTYARKHQGGKYSRRLRKTIGQIGKLRTRQANRRQDFTHKLTTGLAKNHGMVGIEDLRVKNMTGSARGTAEAPGANVRAKAGLNRSILDNTPGERRRQLEYKARLYGSELRAVPPFHTSQTCAACGNADPESRKGCGRLFACIHCGHEDDADHNASVEIEARARRTGGTVTNSTRSTPKVRVPATGRRRTRETPKPANAS

SEQ ID NO: 58791 - protein, 403 aa, unknown
  TnpB Polypeptide
MQITYKVELKLNKAQKWQINSYIGVSRWVYNKFLEVNNKNYRETHDSKSYMSAYTFSTWFNNQYLKDNPSDLWIKDYYAKHVKQAMIDADTNMKAFFRHIRGKPKFRSLRKHQGSYYFCANSKSQPVRYDKYRIKLPKIGFVRYKEQGYIPVGDDFRIISGRIKERAGRYYLTALVEQPDFSKLNLTGEAIGVDLGIKDFAILNKGTVYKNLNKSARLKRLRKRLRRLQRKESRQYQDYKQRLKENKYERRATTDFNLSDTQDKILKLNGRIANVLNDYQDKIIADVVRTKPQYIAIEDLNVSGMLKNHHLAKQVQQQKFYRFRVRLVNKCQWLGIPVHLVDRFYPSSKTCSQCGFYNEEFRNMGQKFLKVRKWACPNCGSVLDRDINASENICITSKFKLAY

SEQ ID NO: 58792 - protein, 378 aa, unknown
  TnpB Polypeptide
MTLKAVKTRIYPNVEQQYKIVNTFGCCRFVWNQLLNMQIERYKNGGSYVNEFGMNYLIKCLKQEYPFLKMAESSSLQHVSRDLNSSFQKLFKEHSGYPKFKSRKFPKQSYQSTYNKNICQVGEHRLKLPKLGTVYFRSGHQITGKIKNVTIRLSSTGKFYAIVLVDTECNRLESTGTSVGIDMGVADLMITSDGIKYPTIRFDKLLAKKKHYWEKRLARRRLQAMKEIAWDHHNKVMEPRELSDFNNYLKAKHMVAKYSEKVANQRSNYLHNLTKQLVEKYDVIKIEDLKIKNLLKNHKLARAIANQSWREIRRQLEYKCTWYGKQLVTVNPRKTSQICSNCGYDDGKHTLDVRQWTCPNCGIHHDRDINAAKNILSA

SEQ ID NO: 58793 - protein, 389 aa, unknown
  TnpB Polypeptide
MIKTHQVKIEPNAHMTRVIEDLFNYRRYCWNQALATWNDMYDESSILGDKALRPNNSKVRNELVSNKQDWQYSRSPRVLQQAVSSLEKAWKSFWNPNMLNQGKPRFQSKKSYKPNFSTDRARLVSGKLALDKPQGISKSVWYGIKLRETPRFEGKLKLCTITQKADGYYASLVFDTSHNEIVPKTSEIVGIDVNVRHFNYNDGQQIAIYPKKLERYYQRITHYQRMLARKRLENPRNFKTKRYMKVKTKLRRVYQKVTNLQKDILNQFTCQIVSTYSEIHIEDLNVHGMMMSKKMGKNLHRSLFGKFREILTYKCEWNNRKLVLVDRLYPSTQICSVCGYLKTKDGYGGKQTLSGDSIHHNHQKYYCYNCGAILDRDENAVENIKNYVA

SEQ ID NO: 58794 - protein, 269 aa, unknown
  TnpB Polypeptide
VDFSNAKLLSKPDGYYINVTTYINKGDSPHRDFIPGSVIGLDFGLSTAITTSEGEHINLYVEETDRLKRLQKKKARQVKGSNNYKKTCSLIQKEYQKMSNKKKDMAYKLVSDLSHYEHVFFQDEMISNWKRKNGFARGGKKIQKGVLGRVKSLLKTKEWTTMLSRGDATTQTCVCGVRNKHQLDERTYFCSQCGYKDDRDIHAAKNMIRFGLSDKRYNTTQGLGEVPVEDITSVLHFNYLKGSISYHPLNQETYLLQVSGDTHSSSVSG

SEQ ID NO: 58795 - protein, 389 aa, unknown
  TnpB Polypeptide
MVVRKVAQRIPFTPSKIQVALLEQCFGARRFAYNQQVEAFNAYDKDTNPRPSYPNVTDMKNENEWLRDSPVPSNALSNAIMDFRKLQAAYFRQAEYGKNRPRFASKSDSVQSFRNGNPMRRMDGNRYPLSKKLGSVRIRRRDRIRYPLESLSSWTVKRENGVYYLVLLFNVDIKPKPTANGKVGIDVGVKDFLALSTGEKINYPDRLHQLEEKARWEQCKLSRRVKGSSNYRKQKATVTKANAKLRHYREDFQHQVSHRLIEDNQFIGMETLAVQNMTRKAKKKLGDNGKPVRNGQSAKRAMNRSILRNGWSGFVEKLSYKAQWYGRTFVRVDRFYPSSRLCHDCGHKYVGLRLSEREWVCDSCGVLHDRDVNAAMNILDEALRLSQTE

SEQ ID NO: 58796 - protein, 547 aa, unknown
  TnpB Polypeptide
MAAPFVAAAPAGARVRARLRLSPQDAAVLRAAGGHLGSLAGRDLAARCAQGRLDARGRARSRAARKRALTAESSSRWAGAITRTSEDACRLAGQNLRAEQSSLTARIRRIQARLAVQAGGTAGTTRGYPTAAERHAKTVRVQTLQARLGRVQRQLDSGTVSVVRGGKALLRKKNNLAAAGLTQAQWRREWEAARLFLTADGEKDKAWGNETIRWHPEEGWLEVKLPAPLAGLANRPHGRYRLSCPVRFSYRGDEVAAQAATGAVRYDISCDPASGRWYLDASWTAAPVPAAALDGLRQHPVVAVDVNHGHLAAAVIAADGNILGTPATIPLDLAGLPSATRDGHLRAAISSLIATARARGAQAIVIEDLDFAQARAEGREHDGARPSRGRRGRAFRRAVVGIPTGKLRDRLTQMAGNAGLPVIVVDPAYTSRWAAEHWLAPLRERHPEATGHHAAALVIGRRGLGHRARRRATRNQTAPAEAARSTQARPQTTPATRTAPRKPATPPGPRPPPGAKTGRPHRTTAGNQAAHDRSGPPPIQDYVLLDQ

SEQ ID NO: 58797 - protein, 448 aa, Deinococcus sp.
MTNTLILAPTPLRPTTSQVLSLELLYDTAEQIHLAVRTWLRAVGAGLHMHVREALWQTADGHLLPRVDDHRLIDIRLDALHQLAQVTHRDLPPRWQAAVPPTVLARLLDIEAQRLQRFGNDVKAGTALPLWPLDRVALDSAAQPIDEYRVMIEGLPDPVVADLWALPTDLTCALLAEADAHAAAVNAEWNAQMERLLRGDASAAATLYGLGRDAWPWLGRTVRHTVDRTVPHRYQHVSLVRTTDESGARSLILKWTIRIPRTYLPQARDRSAYGIDIGYRNIATGASVLEITSVPRQVDVRAGLPEPQDTELLTHAVMRQQCLEPHRTGLEAVLWQALQHQHVHAEAINWQGIRERGAAPWSAAAMALVGAPLLIRWIAMLAPMTGTCLHLIDPAHTSVTCSRCGAVGERPWPYTQFHCPTCDTWTDADHNSAAVLQGGRVTGALTRR

SEQ ID NO: 58798 - protein, 408 aa, unknown
  TnpB Polypeptide
MSDLVERHSFKRGTPQYNELDNTMWLGKNLFNATLYNVRQHFFNTGEFLGYYKLQKAFQDSSQPDYTALPAKVAQHVMQDVDKSFLSFFRALKEYKKNPSKYQGRPRMPKYKDKKKGRYMLRYTYQAISKRILDKYGQIKLSGLDVYIDTKLKYEQIKEVRVIQKVNSIVVEIVYGSEDVQELPDNGLYAAIDLGVSNFATVTSNKKGFQPMIVDGRKVKSYNRYYNKEKAKKQSILKKRNNKRTSNEIKRLTEKRNNKMSDFIHKSSRVIVNQLVSEGINTLVIGHNKGWKQDINIGKHNNQNFTEIPFSRFISTISYKCRMVGIRVIVTEESYTSKCSFLDMEEICKHDSYAGKRVKRGLFRSGGGSLINADVNASYNILRKCMPKAFADGVEGVLVHPRITKILN

SEQ ID NO: 58799 - protein, 410 aa, Symploca sp.
MLVVECKIKAKPAQYRAIDEAIRTVQFVRNKCLRYWIDAPKESQIKRFDLNKYSTELRNEFTFVKDLNSTACQASAERSWSAISRFYENCKSKRPGKKGFPRFQKNNRSVEYKTSGWKLHSTKRRINFTDKKGIGELKLLGKWDIHTYPIKSIKRVRLVRRADGYYCQFCLDVECVDVQPKTGQEIGLDVGLESFYTDSNGYQEHNPRFLRTAESDIKQAQRRIYKKKKGSTRRRKARARYSKKHLRVSRQRNEHAKGLACNLCKSNDLVAYEDLRVSNMIKNHCLAKSIADASWYQFRQWIEYFADKFGKEAVAVPPQYTSQECSQCKRVVKKALSTRTHACQCGCVLHRDTNAAINILHKTRSRGGHPQSNAKGVAASTLLGATLVEQVTTANLESLSMQERGVSIKL

SEQ ID NO: 58800 - protein, 373 aa, Pyrinomonadaceae sp.
VKLIAQVKLLPSKAQAQALKDTLELANAACDWISELAWDAQVFKQYKLHKLAYHDARHTFNLSAQVIVRCIAKVADAYKLDKKTKRTFKPHGAIAFDDRILSWQTDKQGASIWTVAGRQKIPYTCGERQKRLLESRIGETDLVFRKGKFYLLAVCEVPEPTPGDVDDVLGVDFGVINIATDSDGQTFSGAEVEQVRQKRATQRQILQHKASRQSQSGKRPRSIHRLIKRLSGHERNFKSHTNHCISKQLVRKAQDSDRSIAIEDLKGIRRRPRFGRRERARMSSWGFAQLRQFLTYKAKLGGVQLIFVDPRNTSRTCSACGHCAKENRKSQAEFVCVSCGHSLNADFNAAINISRVASVNTPQVSERTASVSA

SEQ ID NO: 58801 - protein, 392 aa, unknown
  TnpB Polypeptide
MAVLKAIKIRIYPNSNQRLVFAQTFGCTRWLWNRMLDMQIKRRENNPEANYVSVFDMNNLLTQLKNEYPWLKQVESSALQNTNESLNDAFQRFFKGQNGFPKFKKRKYAQSFTSKYNSNNIEVIDDHHLKFPKLNRQPLYYRSGRPIEGKIKRVTIRQNSAGQYYASVLVENEVKQLSKTNQSIGADLGLKALLNFSNGEKEPLKRFEELNRKLHHWQKLATRRLRGAKREMAWQEHNHYPVSPLSSFQNYQKARKMVAKYYQKITNIRIDQAQKLTTELVRQNDTIVLEKLNIKAMMKNHRLARAVANASWSRLIAILQYKCNWYGKQLIQVNPAYTSQTCINCGKTNHRLGLNKFDWLKIREWDCPHCGKHLDRDVNAAQVILKKGLATL

SEQ ID NO: 58802 - protein, 383 aa, unknown
  TnpB Polypeptide
MKVYKVHKIKIHPTIKQQQLLTKHFGSCRWVYNYFLQYKTDQYKKTKKSASWLEMNKSLTELKKQPDKQWLNEVSRVALNCALENLDSAFNNFFRKTAKYPNFKNKYAKQSYKLTNQAFNIEKDGIKIAKIGYLKCNLELPNDYKLLSVTISKTTTNKYYASISYETEIPNPKSDKTKPVIGIDFGLKTFITTSEGEKINHPLPFKDSIKRLQKQQRRLSKRIKGSKRRLLQKHRVAILHERVANIRRDFLHKLSSRLVSENQAIYLEDLSLKGMQNRWGKKLNDLGWGIFTNQLSYKGPWRGCLVEKRDRFFPSSKLCSVCGWVNNSLTLEVREWDCPRCFTHHDRDVNASRNIRDYGPVTRKQRTGRVEVLDSLVELSRHE

SEQ ID NO: 58803 - protein, 420 aa, unknown
  TnpB Polypeptide
MSQRVERIVVKPGHTHYLACHRLCSAARKLGNQAVYIQRQRIFAKEPWLNRVQLDQTVRSECTESYRNMPSAASAQRQTQIIQEQFVSWNKAKKAYLSDPSKFQAMPRLPGYSKKYRTFVVGRNGYKVVDGNLVITDKNDIGFPRLPIRSCENQPLNAKINETIVGDVRIVPHGNAFFIELTYQVACSTSILLDGSRACLVDVGLRNIVTLASTISGIHPVVVKGGMLKSINAKYNKDAASLQTHGKQAHRRSKVMKRICRINDNLHKVSRFVVKFFLQHDLGTVVIGHNDGWKQNVNLGKVNNQNFVSIPFNRLIHMIRYKAEEYGIKVIVREESYTSRQSALDFDPLPNYGDKNANQVLSTGRRVRGLFFRSNGQVINSDVNGCLNIGRKEFGDDWLKKLVETDKGCLMQPVTVRIGQ

SEQ ID NO: 58804 - protein, 494 aa, Bacillus sp.
MAKKSTPTYTIEFALNIPTWQNHRLEKKFKIARTVYNSCLGEALKRNKAVQADKEYRTLLHESKSKERDKKLAAIRLNYGFSEYGIHHFVKEVQHKFEEHIGSFEAQKLATRAFQTVEKLHFGKSKRVHFKNVNDDISIENKSNKTGLRYIEGHIMWGDKPTKKTPKPKNWLCMPISPKADDEYAHVALLDKTKYVRILKREVRGKIRYFVQLIQEGYPPKKRNRKIANDETKRIGLDIGTSTIAISGETIVELRELAPECNNDEKEIRRIQRKMDRSKRTTNPNNFNENGTIKKGRLTWKYSTKYQKLRQKRKELYRKVGVERKMSHEKLANDILALGSDIRVETMRFQSLQKRAKHTTRNHTNGKINRKKRFGKSIANRAPAMLLTIIDRKLGYQGQSIKKIDTFAIKASQFNHLTGEYTKKQLSERWNDVGEFRIQRDLYSAFLICNTNDALDSVDVSLCNAQWNHFLELHTIEMERLKHSTSKTMRWFVA

SEQ ID NO: 58805 - protein, 383 aa, unknown
  TnpB Polypeptide
VVQLRYRYRIYPTPGQQNRLAQAFGCARVVFNDCLRARQVAHESGVKLSDTDVQKLVVTEAKKTPQRVWLGDVASVVLVQVCQDARRAYRNWFDSMSGKRKGRKIGAPRFRSRKDTRQSIRLTRNGFSVRSNRKLYVAKVGELTVAWSRELPAVPSSVTVIKDSAGRYFASFVVETNDEALPPIADEVGIDLGLSSFAVLSDGRVIGAPKFLRRAERKLRKAQQDLSRKQKGSSNRAKARLRVAKVHARVADSRRDWAHKESTTIVRENQAVFVEDLCVTGLARTRLAQSVHDAGWSQFVGMLEYKAERYGRVFGKVDRFFPSSQLCSACRVQDGPKPLSIREWTCTACGAVHDRDLNAAKNIHAAGRAEWLNACGGAVSLSA

SEQ ID NO: 58806 - protein, 443 aa, unknown
  TnpB Polypeptide
MVSNRIFNVLPSGRKSYFPTSEILSSQLVKNAQAQAVELVHGWVNGVYGRTLKAKITGLKEDGTYSDLEALQLYTIGKYRLTHGGKFGKGTISQELVDLYWSWVWNPETVGNPPTISERFPLRFTEMTCTFRESGASHFHGWWLKFSSLTRYKTIFLPLKESPFLRKRKDVQLTVLAAKRPDGHWTFQFSEKSEDPVLDGSAGKLGIDVGLNVLAATSSGTLYGQRFKAKFNRLHKRAQSIRANRKRQGFLEDSRRLWAMERRLSGQIKTATNTVANQLVKSHPNTTFVVEDLDLSSAPGSKRFAYRALQSSLERKAVTEKVNPAYTSQECPSCHFVSRSNRRGVKFVCQSCGRKSHADFVGGSNLLGRSGDNQIGLKTSVKSVKAILDERHRLRFRSPRSLLEGAHTDEPEAYCGGMAGNSLTRIAPKQPIPIKPRKRDKRV

SEQ ID NO: 58807 - protein, 484 aa, unknown
  TnpB Polypeptide
MKSRLTLPDPETNLGKLAQLDLLHREYIKYLQSCIEKMVSDRIISLAPSARRTYFAKSESLSSQIVKNAQMQAQAMMLTWASGVYGRVLKGKISSERVTEKNPDGIYSELEAIQLYTIGKYHLTHGGKFGKGSISQELVDLYWSWMWDPELVGNPPTISERFPMQLSEMTCSIEESKSLHFKGWWLRFSTLTRYKTVVIPLKASPFLRSPKDVQLTVMAQKTPVGSWVFQFSEKSEDPIFDGSAGKLGVDVGLNVLAATSSGTLYGQRFKTKFNRLHKRVQSIRANRKRQGFLEDSRRLWALERRLSGQIKTATNTIANQLVKSHPSTTFVVEDLDLSETKGSKRFAYRALQLSLECKAVTEKVNPAYTSQECPSCHYVSRSNRKGVKFVCQSCGRKSHADFIGGSNLLGRSEDKQIGLKTPVKSVKAILEERHRLRFRSPRSLLVGAQTDEPGAYCGGIDRKVITRIAPKQSIPVRPSRDGCI

SEQ ID NO: 58808 - protein, 433 aa, unknown
  TnpB Polypeptide
MTSGKKKKVKYQSPPGKVVRSFKTELNPNDKERSLLVQSTGAGRWAYNWGLARKTEFYWNTGKRLSAIDLHRELNELKKLPVEEGGVPWLYEVSKCAPQEALRNLDKAMSNFFQRCREGAKKKGFPKFKSRKRGIGSFTLTGTISVQETSIQLPNLGTIRLKESNYLPTSGVRILKATVSEKAGRWFVSVQVEMDQPALKPLPHHVIGVDVGISHLAVTSDGEVFENPKALRATEKKLRQLNKSVSRKRKGSNNRKKAAVKLARQHYRVSNIRKDTIHKATSAITKQASTIVIESLNISGMMKNRKLSKAMADAGLGEFHRQLTYKVGRSGGQLIRADRFFPSSKTCSKCGAVKDDLTLSDRTFRCSECGLTIDRDLNAAINLKKLAASYAVSACCPGSSGCGLNDTTKLLVGQAPNTIDSQSGIDGSVLDNG

SEQ ID NO: 58809 - protein, 236 aa, unknown
  TnpB Polypeptide
MDQPILGVLPNHVIGVDVGIKSLAVTSDGEVFENPKALKAAEKKLRQLSKSVSRKVKGSNNRKKAAAKLARQHYRVSNIRKDTIHKATSAITKQARVVVIESLNISGMMKNRKLSKALSDAGLGEFHRQITYKVAWSGGQLIRADRFFPSSKTCSKCGQVNQALTLSDRVFRCPSCDFTIDRDLNAALNLKKLTGSYPVSACCPGSSGWIPEEPTKLPVGQAPNCMYPTSTGGINA

SEQ ID NO: 58810 - protein, 413 aa, unknown
  TnpB Polypeptide
MVLRAYKVELDPNDRQRTDFLRHSGAVRFIYNWGLATIKQDYETKKAQTPPGEKVKNTICPLDLSAKLPTMKAGGFPWLKNVTAQSLQQALHHLDAAYQGFFRRVKAGKTPGYPHFKKRGVSRNSFQFPQNVVVTNTHVKLPKIGQVRLARHGYIPTDLTPKTTTISERAGRWFVTVLMEVGELPKVVPTGGVLGIDLGIKTLVVLSEGTVYENPKHLERTQRKLTHLQRKLARQQKGSNRRARTKARIAKVHARIANQRADSIHKMTSEIVKTKRPTAIVIEDLNVSGMTKNHSLARSVSSASFGEIRRQLTYKTEWYGVQLVVADRFFPSSKTCSKCGAVKDKLSLGDRTFVCESCGHTQDRDLNASMNLRSWGVAFLAGGTPATARGGDVRPEAIQANSVETRTDLRIAS

SEQ ID NO: 58811 - protein, 399 aa, Microvirga sp.
MLCSTKIRIYPTPEQAEFLGRQFGAVRFVYNKALAVKKHRYRVRGQKLSAYHDLKKLLSIAKKSRRYAWLADYDAMALQQACINLDKAFRNFFEGRARFPRFKRKHGEQSSYHCSGKIAVLEDSILLPKMAKPIKAVIHRPVSGALKSITVTRTATGKYFASLLFKDGKEKPEPVKVVPEDAIVGVDIGVIDLAVESNGRRTPNPRFLKRAQRNLRRKQRALSRKSKGSRNRAKARLKVAAAHERLANARHDFQHKLSKRLTDENQAVCVETLAVKNMLKNHCLARAIADAAWYSLIAKLAYKAERSGKHLVRIDRWTASSKTCSCCDMVKDDLDLGERRWTCDGCGTEHDRDGNASENIRRVGVLELRAGGWHVPVCGGLRQTVHATAAANEAESLAA

SEQ ID NO: 58812 - protein, 370 aa, unknown
  TnpB Polypeptide
MKQVIVVKLEPSAEQAASLIETMQAFNRGCDYVAAVAFEKRQANKIALQPLVYGSLRADYGLSSQMAIRCIAKTVEAYKRDKNIQPTFDPMGAIVLDDRLMSFKGLSHVSLLTLQGRTLVPMRYGAYQAARIDRAKGQADLVFRGGVFYLHLTIDLPTPPPIDPTGGVLGVDLGITEIASDSEGNQYSGATVKAVRRRVREHRRQLQKKNSRSSYKRLQKTRRRQSRFVKNTNHVISKQLVLRAVSQAKALCMEDLSGIRSRASVLSREVRWLMGNWSFDQLKQFVAYKCEAAGVPLILIDPRNTSRTCHKCGHCDKANRKSQSKFECLSCGFQANADYNASCNIASKGLEARGLMSTPLLFRSTANACE

SEQ ID NO: 58813 - protein, 448 aa, unknown
  TnpB Polypeptide
MQLAERHIIKSTENRFVEIDGLAFKSKNLYNAANYVIRQNFLYGWAYLNYNKMAQLMKSHQAYKDLPAKVSQQILMILDKNWQAFFEAVKAYNIEPTKFTGSPKLPKYKDKVKGRNILVYTIQAISSKQLKKGIIKLSGTNILIKTKIKPEQICQVRLVPKCDSYVIEVIYNACAEPCDAVYPERSRRAQGKLRRSKPESTIDENQKELVASIDLGLNNLVALTSNQPGFVPLLINGRPLKSINQFYNKRKAHLQSRLKEIRKTSCRIQRLTRCRNQKIDNYLHSSSRSIINLLRSGKIGTLVIGKNVQGQNEMNLGKQTNQNFVTVPHARLIEMLEYKAVLVGIKVIVQEESYTSQSSFLNLDPIPVYGSIGDMDVTFSGKRIKRGLYKTSSGRLINADVNGSYNILRKAIPNAFSDGIQSCVVQPRRVNPLEVKAKGEGFNASHVM

SEQ ID NO: 58814 - protein, 288 aa, unknown
  TnpB Polypeptide
MRLEHELGYRVKGDYVELIGGYRLRVIGWDRRYDDFPNRDARLVFRDGEFTLYVAKRVPRPAKYAPKGVLAVDVNERQVVVGNSSVELRVETPIERALRYRRLAERLQEKYSSTRYMAWRRRSGVRRRVRHFHRKARNIIEDWVRKMAHIIMSLAKQSQLAVAREDLTGLVESLRRLPKDHRTALVMLGYRRLGLWIDWQAEKNGVPLFVVDPAGTSSTCPRCGTKLVEAGHRRLRCPSCGLEADRDTIAILNIERRALSQMGGSLATPTAPQMTDVNPNRWGEPLRL

SEQ ID NO: 58815 - protein, 408 aa, unknown
  TnpB Polypeptide
MHTQKCLSLNLLEPTRVKERLLRETYKTFFDIIKEALDHLDGVRSRAELHERTYEKFKDKYRVASQLVIEATSYAWSSRKTINEKPTKCIVRFDHWLFSFKKTKRNNPVLSLRTNHERRGLPISRDGAYRRLQEHLKDGWRITSIIMKRNLSFLAVLSKAMSKPTIKPNVMGIDINSSKIAVSVISPNKVLKQTYYGQDVSTRQFHFEERRAKLQEYRDTVSRGKAGLKLKRLSGRQRNYVKTNLWEIANRVVKLAKELNANIAIERLRHLRKRKGEWSRKSQRKVNRIPYGFFRHALKYVANREGVVIEEVKPNYTSQTCPKCGHVGKENWKGYSYFKCVKCSYEANRDRVASLNIAERASQVANSYTAQIPLGNAPVNGHVWKDEGVERWHQTHQSFKPMNLFMGR

SEQ ID NO: 58816 - protein, 323 aa, Brasilonema sp.
DWVSLPGHQRQEACNDACDSWRQAKLERGFAKFKSCKAKSQAIKFKAGNYKNGTWYPKTTKGLKYQASQPVPYQCEYGTQLVYQRGKWFACFPQVIEVVGTGSDRVIALDPGNRTFLTGYDGENVLEIGKGDIGRIQRLSLHLDDLISRSTKVKSRQRRKMRIAADRIREKIQNLVKDLHSKAVSLLVNSYKLIYLPTFDSSQMVVKINGKGKKRRINSKSARQMLTLSHYRFEQHLKQAAQRKGVIVAQVNESYTSKTCPRCGHVHHKLGGNKKFQCPKCQYAAPRDWNGALNIMIRALQATAFTFNGDAITIDSSRNIGIV

SEQ ID NO: 58817 - protein, 384 aa, Eubacterium sp.
LLKSFKTEINPSKEQIVKINKTIGTCRYIYNFYLAHNKELYDKGEKFMSGKSFSVWLNNEYIPNNPDKLWIKEVSSKSVKKSIEDGCTAFTRFFKHQSAYPNYKKKDKSDVKMYFVKNNPKDCACERHRINIPTLGWVKLKEKGYIPTTKDGWKIKCGTVSKKAGKYFVSVLVEIPDTNIANNSNEGIGIDLGLKDLAIVSNGKTYKNINKSGKVKKLEKQLRREQRSLSRKYGNSQKGEPTQRANVQKQKLKVQKLHHKLDNIRTDYINKTIAEIVKTKPSYITIEDLNVSGMMRNRHLSKAVAAQKFYEFRNKLKVKCDDNGIELRIVDRWYPSSKLCHCCGSIKKDLKLSDRIYKCSCGYVEDRDFNASLNLRDAITYEVA

SEQ ID NO: 58818 - protein, 403 aa, unknown
  TnpB Polypeptide
MLVRSLVFRLECPLPIDAKFLMEDFRLAVNETIRIGIGSQVTSRNGLTMLAYKDLRKEHPGMYAQHLVSALEVAGSILKNRRRMQRKGKARNVPYVRRLFMKAENQAYKYDRENGIVDLPIRAGLHVKLKLIKCEYHRRYLDDESISFGSLTLLPDRVIIAIRKHPPKQYAPKSILSLDTNERSLDGVLVKEGDVNVVRAVFPDVSTIQERHHARRRKLQKKKSHDRRTSKRLCAREGKRERHRIDYRLHEVANAVLKLAKERKSKIVLEDLSEMRPRWSKQMNRRISIWPRRKLHQMIEYKAEWLGIPVVKVDPRYSSRRCPVCGRIQNSRKGADFSCVCGWRINRHINASINLLRTAAPEAAGGLRFDPGAFQHDVVMVLCGPNKTVRPEPNGTSGMRAMA

SEQ ID NO: 58819 - protein, 271 aa, Geobacillus sp.
MGRWERKNQPPIVVKIDKEQIPNGTVKEIELIFDAKHWKLMLCLSYENGEQPTTKKEGTIAAGDPGEIHAISAVSENGSSIIITGRKIRSIHRLRNKKIAELQKKMSKCKKGSRKWKKYNRAKQYILSKSEAQLKDCLHKTTKQLVDWCLEQNVKHFMIGDVEGVQRNKKKKRSKLVNQKLSNWCFGKLYDYLKYKLEAKGITFEKVDESYTTQTCPVCGKKKKPSSRNFICACGYSQHRDVHSACNILTKHLYGEFRPMKITNHKYLRIA

SEQ ID NO: 58820 - protein, 463 aa, Mycobacterium sp.
  misc_feature (181)..(182): Xaa can be any naturally occurring amino acid
  misc_feature (407)..(408): Xaa can be any naturally occurring amino acid
VCASGWRARGWGPLQAGTGGAPSGRAAGCALMAMFDVPEGWCVQAFRFTLDPTEEQARALARHFGARRKAYNWAVATLKADIEAWQTAGVEAAKPSVRVLRKRWNTVKDEVCVNAETGAVWWPECSKEAYAAGIKGAVDAYWNWRSSRAGRRAGKRVGFPRFKRKGRDHDRVSFSTGAMRXXRIERLIRAGRARVLAICVRRNGTRLDASVRVLVQRPQHPRVALSGSRVGVDVGVRRLATVATADGVVIERVENPRPLEVALRDLRRLCRARSRCTKGSRQYRERTTELSRLHRRVNDVRTHHLHVLTTRLAKTHGWIVVEGLDAAGMVRQKGLPGARARRRGLSDAALGTPRRQLFYKTGWYGSQLVVADRWFPSSKTCHACGHVQDIGWAEHWQCDACSVSHQXXPTVRPDLVRLVAVKRGREPANRLGNNPEMGCESRDHKGSLTRNGGLAQWCPAGFR

SEQ ID NO: 58821 - protein, 465 aa, Ktedonobacter sp.
  misc_feature (359)..(448): Xaa can be any naturally occurring amino acid
MYTRSMKQTMLLKLAPTTEQAQALLDTMHTFNRAATSVAAIAFAEKSADKFSLQKLVYGELRTTYKLPAQLAIRCISKASEAYKRDKSIQPTFKPEGALVYDERVMSFKGLTTVSLLTLSGRVLVPFLIGSYQESRMGSIKGQADLLYRHGTFYLAVTLDVPTPAPDEVTETLGIDLGIINLATDSEGETFSGHGVEQVRTRHHALRQRLQKRGTKSAKRHLKNLSGREKRFRTNTNHVISKRIVHKAKATRQALAIEELRHIRPRTEARLRHSQRARHSSWAFGQLRHFLSYKAALAGVPLHTVDPRNTSRTCSECGHCAKANRKSQAAFVCQACSHTDNADRNAAINISRASVMVPXXXXXXXXXXXXXXXXXXXXXXXXXXXXXXXXXXXXXXXXXXXXXXXXXXXXXXXXXXXXXXXXXXXXXXXXXXXXXXXXXXXXXXXXXXRGRGDQQFVKRSIDIVK

SEQ ID NO: 58822 - protein, 391 aa, unknown
  TnpB Polypeptide
MKGVIKMFKKGSFKSNGTNTVNIKCSIDIPVSKLELLNKYFGHSRFIYNWAIDFNTDRYKNNLQQYNFVNLAKELPNLKKVNPFLKEADATCLQQALQDYWTTMQHFYQKKCGLPKYRSKHSNQSFRIMNVTNGIRFDGNKIKLGKFGWVRTKPNQAIPNGTIQSATVKKTKSGKVYVTLTIRRADRIEQFDKTGKEVGIDIGISHFTTFSDGTVIEKPNFIKQNEKKKRRLYRQLSKKQKGSKNREKAKLKLAKFCGKDANCREDFLHKLSLDIVREYDLIAVEHLNVKKMLMDNSLPYSKELHKNIGELGWYSFISKLKYKSEWYGKTFIQVDTYYPSSQICSCCGYKNAEVKNLSVRNWICPNCNTAHDRDFNASVNILNEGKRLLTA

SEQ ID NO: 58823 - protein, 463 aa, unknown
  TnpB Polypeptide
VRAEAWNRYGGLGTLARSNRAIRDEDWLRGPKLGERTGLPARVWKAALEDALNGIRATGKAAAADVVRAVWRSKRPDSKKKALSVKLRDGTWHEDRTLHRLMRKHWRRGHSSVADQIVLDVQGHKSFEHGGQRWIEVSSLEKRRRIAIPLGKFDRPITGGVRLRVRADGEVDVLYAVDEAEACVTRPCGEAEVGLDKGYSEVFADSDGERHGEGFGELLSAESDRLKAVWAARRKLKAVAEKAARKGKFTKAERVRRHNLGRQKLTERKRRHRQAVRGHVYHACHSVLDKAGSLVVEDLRRPIRGYDRGRNQNRRLSGWVKGLVQEAVETTSRRRGASVDEVNAAYTSQWLPGCASFGKRAGDAVHCPTGRVVCDADTVAAVNILQRKTDEGIGRFLPYREVRRVLEGRSRQAPRPCEADGRCGVDGSCLRLPRRDSSCGVSARAETAINGERINSNEYNCVL

SEQ ID NO: 58824 - protein, 370 aa, Microcystis sp.
MLFVLLNSSVTNVSGYGWIQKVRIRTIYTDILKNELRDFKFADELNSTARQASAERAWSSISRFYDNCKRKVSGKKGYPQFKKSRSVEYKQSGWKLLSPKTVKFTDKKNIGVLKLVGTWDLGYFQESDIKRVRLIRRADGYYCQFVLSCDVKEDVKPSGKCIGLDVGLASFYTDHNGNKVDNPQFLRKSEKRLKRLQRRLSKKKKGSKNRQKARQRLAKAHLKVNRQRQDFAVKLARCVVHSNDVIAYEDLRVKNLVKNHCLAKSINDAAWYQFREWIEYFGVKFGKITIAVAPNYTSQNCSNCGETVKKSLSTRTHQCKCGCVLDRDENAAINILKRGLSTVGHTGTFDARSNKRLGREYLYFFRSNSV

SEQ ID NO: 58825 - protein, 393 aa, unknown
  TnpB Polypeptide
MHTKYCIVPPNIPAIFGVKNVTVYPNINTLLKILPDNTQQRLMHETMRAYSAACNRVSSYIYRVHDLNQSSLNKALYYELRETFALRSQMAQSVIKTVIARYKTVLANENEWLPVSFKRPEYDLVWNRDYYLTQGIFSVNTLAGRIRLPFHQEGMEKYFDGTWQFGTTKLVYKHKKWFLHIPMSKEIPFLDDVDVCNVTGVDLGINYLATTHDSKGATVFFPGREIKHRRAQYAKSRKKLQQRGTASARRRLKQIGSRENRWMQDVNHRVSKALVESQPAGTLFVLEDLTGVRSATERVALKNRYVSVSWSFFDLRKKLEYKAFAAGSKAIAVDPKHTSQTCPKCGHTARGNRNKKKHLFSCQRCGYSSNDDRIGAMNLHRKGIEYLSAVAAE

SEQ ID NO: 58826 - protein, 400 aa, unknown
  TnpB Polypeptide
VIPNFLKFREVPLKLTIHLKVSEKTNREKLLKFEELYSKYQMALSLFYNYARDNKVYELRKKTLIERELQKLYYTVKESLALHSQLVQSARRDIANDIVSWLEVGGEYPKLNEKPVTLVYGRSYRLFEHGKEFKLWAKICGIPYPLEPGDRQLELIRKAKKIGEATLFKRDGKWYLNVSVEIQESKPINPKGVLGVDLGLKNTAVIAGSKPIFIKHRHLLYKITRYWKQIDKLKSKLPKGQRTSKRIKKLWRKIARINDFIAHDTSAKIVQIAVQSQKAIALERLEVPNNGYNRVWSRRLSNWVRGKIIRYVQYKAKLNGIPVILVNPAYSSRKCHVCGGDGERFSSTFKCKVCGRTYNADFNASVNIARGAMSLLARRRNPASVGLRNDGRKLPTFSGE

SEQ ID NO: 58827 - protein, 445 aa, unknown
  TnpB Polypeptide
MSEWRTMQVGIILSAADYRRAHDACHRTAQLWNTVVDWVHTEWAAGRYPSIYDTKKWMTTIPRADRPFHAHTAQAVVFDLFDAITTARTNRRNGMIVKYPWRTKNYRPLAFTAHNGWHVNGKGRLSLSLGRGRPPIVLVLPELVDSETGFPIPPALWGEIKLCWDITGRRWSLHISVPTKPPRVLNPTRTMAGDEGIINPFTLAVQQDDGTINVTVINGRAARAIKHRRNTTHSALDKKMSRCTKGSRRWRKLNAAKKKSAATTNRGLRNIDHQVSRKVAAFAHTHDTGRIVVGDVRGIEQHTRRRRNTGRHQRRRLSQWSRGRQETYIHHKTGVELEHLDESYSTRTCPACLTRNRPTGRRYHCQNEACRFTCHRDAVGAINILMKALHGQYTAIDPGTEIRVTYLRATPNWTAPQGRVHSRTTASARSKAPNRATTSSQPLAA

SEQ ID NO: 58828 - protein, 406 aa, Calothrix sp.
MYALKRELKLNNKETSSMRGMAGYRRFVYNFGLEMLKASWGFEGIKASDSDRLSEIKKVFTNHVMTLPEYAWTKDYPSAIYQSAFQDLGEAVARWRKGLTEFPVLATKKKGDKFTLYKSRGIYPKKGEPALPFTNRVSIAPGKKINLPGYGEVRSKEKVDFYYSSQTFTVTRTSDKWFVSSNIDAEPIPPIIHKVEKVGIDLGVKTFATFSDASTISAPESLKKAKTKLSKEQWRNRNKEFGNRGKGVRASKNAKKFFNYIARKHAHIANIRRDFLQKTTTQISRKYYKIRVEDLNVSGMVANHKLAEAVSSLGLYEFRRMLDYKQSHYGTKLEVVDRWYPSSKTCSVCGHVQDMKLSDRVFNCGACNFVIDRDLNAAINLERADNHMSAAPKQKKSIKKSRKKKD

SEQ ID NO: 58829 - protein, 203 aa, Calothrix sp.
  misc_feature (15)..(48): Xaa can be any naturally occurring amino acid
LKSWNSPICGKLIIXXXXXXXXXXXXXXXXXXXXXXXXXXXXXXXXXXIRTRIKNLRSECHKQVASYLAKNYDVIVLPTFETSEMVVKKKRKLKNKTARAMMTWAFYQFSQTLEHLCNRYGSKLVRITEEYTSKTCTKCGHVHRKLGSSKNFKCPNCGYEIDRDFNGAVGIFLKAMWDTTFTDSVGDVVLNIENVLDVQKCPG

SEQ ID NO: 58830 - protein, 518 aa, Calothrix sp.
VQVRWNFKLKPNKTHVKTMERWLITLRKHRNYALREREQGYSTNNQDVVEEIVYAFGSYCDLETRVEYGACCPLTCPVLKHGVVPEKLSIAFKNTKEKFDTKTGKLLKPSIVKWDDASGIQKKVTTELRGKSPYFGEIYSAVLQGNLERLDDAYTNFFKHGRGYPGYVTRLDSFEYKPGQAKIGLTNKNYATAYLPGIGNVKFHNSRKKEFDTVTDVRSVTVSREATYWFISIIVEIPDLIQEQMPLEKVKSVVGIDVGVNKLVASSDGSFAENTKPATNKKTARRLAMRQRSIARKVKGSKNRKKAVIKLARTKHKIAASRNGRNWKVANDIVKTADVVVREDLKIKNMVKRAKPKHDGKGGYVMNGASAKSGLNKVILDCGWGDIFNKIAWLALKAGKHVIAVNPKHTSQECPACGHIDKANREGEKFLCTNCGHTDHADTKASRTIALKAGLDFPKNKKSLRADCAKVTPRSHQHKVVEPRNHTYGVSGTQLSLFDTTDYHSLDNRITKKYGRKS

SEQ ID NO: 58831 - protein, 485 aa, Calothrix sp.
MALKKQKGHFQINESILATVETATPEYVKLTQLLFNDCVMFYVSQMSSNLKLFISTSSDSLYNVYEKRIRSEPILNAARIPQDLRRAAIKKAAGVVKSWYTNFERWMKRIERSKTCHTLKKRTRLKKKAGKPPVLPQSTNFPIQVYSGMFKDDTGETLVVKLWTGKVWQFQKVSYKCRELPPDYVKGTFSLIYDESKLKLVWVIQKNTPSKGKLVDHIKAYGKLRILSIDLNLDDPIVVGKVLEGYEDTGVVVELANLRIKGNNRLHHLRKRYLGKIAKAKSLTNTKTELGVLPPENLCAKLWKRIKNLEKELVETISYSIVEIANVHNCNVIVFENLKTLKPQRGKYSHRSNAKRSFWVAKKIQKRVEQKALNRYSIYTVRVNPAYTSITDSLTGGKCLRGSQVGVLNLYLWSDSGLGKLVLTPDNKILCSGENAARNIGLKYLAAKFEKPVVFKNAGLPTGCVVWLREPVGKGNVVIPAWSCA

SEQ ID NO: 58832 - protein, 504 aa, Calothrix sp.
MVTLTYVKGLPTPESEMNQLGFTEFEMFLNAFSTIFKQAVSETVNVILSKKDFQKGKSKFNTYLQSKYSLNKRQATGVITSALAKVDSAKKCRLNHIKQLEGKLKSALIWLKNAEKRIVDSQKFYAQKNWENSLTGCNLPLCCDLETGRSNWHGLKFQIHNKKRYIYQLSKKIADLKVATIKVSVSSSEIFIVGSKDESFGNQSCQYDGTKIRLKVPYCLESRFGKYIETEIGNFDRNINRLPSFGAKTWHFYRKNGRWVVAVQFTPKSIKAVSRPIQYGAIGIDINPKSIGWAYVDSYGNLFDSGTIPLLTGLSSNSNQQQLVDACLELAKLASKYASPVVCEELDFSAKKQRLREKGKRYARMLSGFAYSQLYQLLESILSNRGIALYKKNPAYTSLIGLVKYSRMYGLSSEISAALVIARRGMNLSEKLPASTNTYLEVNSRKHVWSGWSKLNKLIRQSVDVVSRHDYYNVPNWSVLVKVHVERVASSNTSKSRACSKRKR

SEQ ID NO: 58833 - protein, 243 aa, Escherichia sp.
MRRFAGACCFVFNRALARQNENHEAGNKYIPYGKMASWLVEWKNATETQWLKDSPSQPLQQSLKDLERAYKNFFRKRAAFPRFKKRGQNDAFRYPQGVKLDQENSRIFLPKLGWMRYRNSRQVTGVVKNVTVSQSCGKWYISIQTESEVSTPVHPSASMIGLDAGVAKLATLSDGTVFGPVNSFQKNQKTLARLQRQLSRRVKFSNNWQKQKRKIQRLHSRIANIRRDYLHKVTTTVSKKPRK

SEQ ID NO: 58834 - protein, 423 aa, unknown
  TnpB Polypeptide
MYHIQRPIFYHNKIVTSTKVTEWLPTQSRTYSSHQTQSWFYASEFNETFQHIISPTHEQRVILSEWFNAFIEMYNKTIDYIQKLFDCQEKYLFSEQILNFCKLRYHLSDVQNYILAGMTNIIPPALLVEAIRRAVQSCKDRIARFNKTGKKIRLRKISHAKKRKVLVIPNRFLNDTTFCHRIFESTTILNDVTQAIILQYETQLGEYKLIIPGKKDDHISCASCDKVATECGVDPGCRTFMTTFSNDDVYLIGTKITKRLEEYYIKIHEILNHLHNSAMTIIERNEMKRICQKYYNMVANMVDDLHYKTAYLMVTKYDNIYLGKFRPMEILAQKNNLSDQARWILRVLDHDTFRIRLNQLADKYGAKVYEVDEYLTTKTCSGCGNIADVHGEIYECDRCKIRTYRDVNAAKNILKIGKQMNKN

SEQ ID NO: 58835 - protein, 211 aa, unknown
  TnpB Polypeptide
VAFAHVPDPNAGPGDHSVVGIDRGVAVAVLQQRLTRANRGSNRRARPKLAIAKLKAREADRRKDWVEKVTTDIARRFDTVRIEALDVRAMTRTARGTVEQPGVRVAQKRGLNRAISRGGWGLLAARLQHKAHGRVEQIPDTSQRCSACGHVAAGNRKSQAVFQCEVCTAGRCNADVNAARNIAAGRPVTAREDLGVSRSANREPHLATPAA

SEQ ID NO: 58836 - protein, 532 aa, Cryobacterium sp.
MARARTEGNSVSAIILQPLGPLGNGSLTDRVVPLTKGRKPREVVRTYPLPNSANVRKTEAIVAMLAPWQAGLVRVHSGLTRTRFEGAHFPKFLDTKPLAETSVLSQRQWQCVTKQAFAATRSWEEIAKQRVAVLIRGSRIPKNTQFWLYRVNAFRAWWLKDGSLLLPTDEEAPPAAAYRLSRQMIKQVTRSHPRPRLGSIRTMQMDSLIANVERSRAKTFDYWVKISTLDRGHPVMVPLSSYRHMETAPGRVLHYAQVRVDTDNQVSVSLLRKNALAQLRTDGTVLGLDWGLSHMFATSAGQLLGNTIFTWRKERDAELLALTRALQKQGIKPNASRRYRALTRRIREHTVNEVNRILNQLSRRSIRAIVVERLDFRGGSMSPRMNHLLSRSARATVKAKLTSLTEVAGIAVTYENPAYTSQQCASCTNIDFRNRSGELFRCRFCGRKSHADINGARTILGRSHNDSVQLWMYRGTVKKIIDAQFTQHWGSPPTGLTRRRAPSSTRVEKAHTAFAVGLAGLQQPANAIQETS

SEQ ID NO: 58837 - protein, 407 aa, Microcoleus sp.
MQQVFTLTYEYKLKPTSAQVALFEEWLEQCRRVYNYALAERKDWFKSRSCQVNACSLQSEYIIPVGTKRPTYASQCKGLTEARAKIPALNALQVHVLQQTLKRLEQAFVSMWEQGHGFPRFKKVGTMRSFVFPQMGVNPIQNSAVKLPKIGWVKFRQSRPIRDGATLKQVRIVRRASGWYAMLSLQWDVNIPDVMPHGEAIGVDVGISHLAAVSNGKLFPNPRPFKKLERKLKLLQRKCSRKVKGSNNRRKAQRQVSQLHGRIANTRKNYYWLLAHNLCDWAGMIFVEDLNLKGLVRGFLGKHCLDAGWGQFFQILEQCCRKRGVFFLKVDSKKTSQICPNCFVETGKKELSERVHSCQYCGYTTDRDVAAAQVVLVRGLAAVGHTVKMLSEGKAVALPVKKESSSF

SEQ ID NO: 58838 - protein, 381 aa, unknown
  TnpB Polypeptide
LSFTAVEEQQEGSPSPQAGERVPHKALSSAYSQNAFDEAVTKLHNRLDNIRKDVIAATGGSVFAVSILLFHAVLTGQSREEMCDLLARIRDSYKAKEKIQYYDKLRDTVKTMEEKEFHDSVSEVTMFYHIISDEYRIPVVEKAHVMMDSRLCCLEKAKDVTTSHVLSVTIPDRKGERIEVPVQADRDALRRMEQYGISGSMRYTITAGGSLKLTCSFEKKTQTPEEHSAVIGVDVGIMDAFHTSEGQAIGSFQPVIEFYQTEVEPAFGNLSTLRNRKQQLRRFLKKHKGVLPEKVMLNLRKRMDHLEKDIRQAHAPYRKKRHYYQLVEHTIRNAVNTYIESLNGDKSVLTAMELLDIKEFNKSRRVNGMLSVFPEGSLRRS

SEQ ID NO: 58839 - protein, 428 aa, unknown
  TnpB Polypeptide
MKKHKKLINNIKNHYDDLWIPDYNINYININPNQCYDTLYYKSSASLHFENNLKIQKSKNITQYSYCKKIKVIFNSKQKKLIDTWFNACTIMYNESIDYIKTNMVLDYKILRTYHLKEVRDEIVRKSNIPVHVIDCVIKTACAMYKSALTNYKQGHIKYFRIRKLKHNRPRKVMEIEPAYFNYKNKTSLFYRKIGEVKYIYNGKEIKLEKIQRACNLQYDINRKEYYLFVPFNDDVSPKSTNKVVSIDPGIRTFLTCLSNDEVIHIGTNIQNKIKHYLNKINSIHKIKCKKKIKKKIEDRNIFKIRCLIDDMHWKSIKYLTDNYKTILIGNLSTKEIVNNNKSKITRMTKRIAYAMSFYKFRQRLDYKSKSKSTNCIVVDEAYTSKTCSKCGAIKSNLGSNKVFHCSNCNLKLDRDINGCRNIFMQCH

SEQ ID NO: 58840 - protein, 378 aa, unknown
  TnpB Polypeptide
MKILKAFKFELIPNGKQVQKMKQFCGCSRFVFNRALSYQNEKYQADNSFKFNYNKIANLLPEWKRELPWLKDCHSQVLQQSLKDLEKAFKNFFNKKSHFPKFKHKGEKDSFRFPQDCKLEQQNNRIYLPKIGWVRYRNSRKVAGEVKNVTISQKCGKWFVSIQTEYEQEIPTPNGGEIGIDMGIVRFATLSNGEYFEPINAFKNLKGKLSKLQKQFKHKTKFSKNWQKLKAKIARLHHKISNIRKNHLHQISSIISKNHAIVYVEDLKVANMSKSAKGNVEQHGRNVKQKSGLNRSILDQSWAEFRRQLEYKLLWKGGYLIAVPPQNTSRCCPSCGHTEKDNRKTQAEFKCVNCGFTENADVVGAINVLKRGQAIQVA

SEQ ID NO: 58841 - protein, 393 aa, Oceanimonas sp.
MLIRKAYKYRLEPTAEQAARLAVLCGHARFVWNHGLRHCLEQLDQGKNIPCAFELNKLITQWKKQDDLSWLKEAYTDNLQQKLKDLHGAWTRYFDKSLVAEKPRFKKKGKNQDAIRFVNFNKYCQLDGKRVKLPGKLGWLKFRESRQVHGIIKNCTVSLKSGHWYIAFQVEQEVATPCHPSTSAVGLDVGVARFITLSDGSHLKPLNAFRKHEKRLAIEQRKLSRKVKFSANWKKQKAKVQKVHTRIANCRNDYLHKASTKISKNHAMIAIEDLRVSNMSKSAKGTAELHGTNVKAKSGLNKSILDQGWYEFRRQLEYKQHWQGGMLLAVPAHHTSQTCPSCGHVSKENRQTQARFKCIECDYTNNADLVGALNVLERGHRLLACGESALVTQ

SEQ ID NO: 58842 - protein, 397 aa, Hapalosiphon sp.
VKTAYQYKLRPTKQQAQEIDRWLSMLCAQYNYLLADRFNWYEQNRCSINACPLVCHLPELKDNPDYYSQKKTLPNLKKTHPHYGEIYSQVLQDVVKRVKVTFKRFLKGDSNGKRSGRPRFKPRDRYRTFTYPQMKQGCLQGNLINLPMFGKVKVIVHRSIPDGFKIKTASVTKKTDGYYVTLSLEDSTVPAIKPDINPDSIAGIDMGLKEFLTTSEGEPVAIPQHYRKSQKRLRVIQKRVSRRNKGSKRKQKAVKQLGKQHKKVADKRKDFHFKTAKHLLSKYDVVVHEDLNVKGLSRTRLAKSVHDAGWSSFLSILSNKAENAGLLVIAVNASGTSQDCSNCGLKVPKKLHERWHNCPLCRCSLDRDHNAAINIRNRAVGHSVLKAQSLLSNSRIV

SEQ ID NO: 58843 - protein, 455 aa, Moorea sp.
MKYTYQYKALPTTDQKLEMNFWLRICRYWYNRQLGERFDWWFRHRTPVNSCPLVCHLPELRDRPNYYSQKKLLPGLKKGKLTVEWSGENLEFSRVPANTLQEVCKRVDKAFDRFISGDTNGKRSGKPRFKSHARYRSFIVEGAGLNLHSCSVGGKFIYLKIPKIGLLKIRSHRHVPDGAILKQVQFIKKNDGWFVNLKLDHPTVPTIPSEKIIPNWDNSLGMDAVLHKDHYLATSEGAKLPSAKFLRRNQAKLAKISRKKNARKRGSKARRKLAKREGRVHQQIARARKDFQYQTAHSLVRTGKKVFFHEKLNLKGLTRRNTPKQDQTGKYLPNGQSAKSGLNLSWADAAFGEFFLILGHIAAKAGAIVISKNPAYTSQVLSYRDHVIFTDCSIREYWDETEKLWVDRDINAAINIKRVGLDVFPTIKRRKGSIKIVGSITDDTSKEVLRTLRGA

SEQ ID NO: 58844 - protein, 630 aa, Streptomyces sp.
VEEKTGDLLSASALAGRVGWAADLVSGMVAALLAEHWNAADVDVLAAGEDAGGRGLPSHAWMALRRLGWSVGPAGGMRVNDRIVRIAQEAAGRTLRAAKWRADLTTAVIATWPADPAKRSPQEWDHVRAAVPGGEYLPSSVITGRTRQIAGFVKQHGRMPVNVFELEAAPRIARMLLLSACDGQQATLERADEPGRALLRLQLPTRPDPRSYKDWTWVACPVSLPPTVPAGAVLHLPTLRIHQGTVRADLAYTHAVPKAQRSGHVIALGVDWGLNTLLSAGAARLHSDATIAALGAGGMFRAAGVLAKQHRLRRLSEHLHAKADHYQRLIAENEQHALTARHQVLADELRHVSGRRSNLNDALARAAARWAVDQALAASATVIYVEDLRSMEARGMGRTMNTRLSQAVRGQIVDRMRHMAAEAGIAVVTVPARGTSRHCPQCLEVLRHRRAPDRPAIPGWKWAVCASCGWQGDRDQGAWRRIAARGLTHQAKTVIDRTSGAMAIRTVIDKLEAGAVITPAPKTRRTDRSKTGPTRRHPARPTPRRRRTPSPAGPSCPAGQRPEGHAHTDQGRLPRAAHRHQGVTTISTPISRHRPRGTALGAGFHLHAHTTPPRWAAPEPDTTSDMRSLS

SEQ ID NO: 58845 - protein, 395 aa, Virgibacillus sp.
MRTNIPVERDEVMLINKAYKFRIYPNKEQATLINKTIGCSRFVFNHFLVKWNEAYKETGKGLTYSTCSKQLPSLKQEYKWLKEVDSIAVQSSVKNLSESFIRFFKKQNNAPRFKSKRNPTQSYTTKFTNGNIAIIDNKIKLPKLGFVKFSKSREVDGRIMNATIRRNPSGKYFISILAETEVEALPKTNQSTGIDVGITDFATLSDGTTFANPRFLRTLENKLEREQRKLSRRYEQARKDMKPLHEAKNYQKQRVKVVLIHEKIKNIRTDYLHKVSTEIVKNHDIIGIEDLQVNNLLKNKRLSKAISEVSWSAFRTMLEYKAKWYGKKVQPVAKNFPSSQLCSACGYKYKEVKNLALRRWQCPTCHTHHDRDRNASINIEVEAIRLLTVGATGIA

SEQ ID NO: 58846 - protein, 510 aa, unknown
  TnpB Polypeptide
VLLKQNYKSLITNSKNFQDAYRDVKTMYQIMISNSFKWSKKQETLSYLTKFYSANLKQFLFDKLFTEGLEPHQLKAFKLLVFDEKKVEKIVTMRRQRIFKKCKCIKFKSLTFTNSGPISAYNDQFIVKYSNEILALNKYKRQTRIQRRLKGKELKILKTNALIKIRLGSQKYDLPIRLSDKYHTDELLKTIAQSYAGGSGAIHQFTNIIQIDEFKKEIIIKFTVKVKKQSQPDSMNKILGVDTNVKNNFFYCSNGKIFKARKKIIEHIVNTDKKLKEAKNSKFKKEELEIKNDNNLSRKEKADKLNELKKKRVFNKKERYMALRNDRRKKALQDYMTSQLCKYAKSKGYDQIVIEDLQFVLSKNYIVNKTFEVNYNDLFSILHLRELKQTIPRIANRSKYFLSVSITPASYTSQTCNICGYIDKNNRPNQHTFKCKNCSHTDNADFNAAKNIRDRIVNPALRTLLHDKQKGKQYTFEPKRIKYKQIKSMLNKTNSPKMVGYRIFKNSKVS

SEQ ID NO: 58847 - protein, 374 aa, unknown
  TnpB Polypeptide
MATKTFVYKLRPTRSQEATMAETLETCRRLYNRALGERKDAYEQEQRSVCFAEQCASLPLAKKESPFLPRVHSQVLQDVLHRLDHAFAAFFRRVKAGEKPGYPRFRGAGWYDSFTYRQYGNGAKFDGNRLVLSKIGSIKFCKDRPLEGKPKTCTIIRKANGWFAHITCEVEPEPLPKTGETVGVDLGIESFATLSTGEQIANPRHYRTAERRLKTAQRRLSRRQKGSNGRRKARQLLAKAHLKVGRTRRDFCHKVAHDLVTRFDHIVVEDLNIRGMVKNHPLAKSISDAGWGTFVTILSEKAESAAKTVEKVNPAYTSQNCSACGERVLKALSVRWHSCPYCGAELHRDHNAALNIRKKGGGTALVDVAALAAA

SEQ ID NO: 58848 - protein, 374 aa, unknown; identical to SEQ ID NO: 58847
  TnpB Polypeptide

SEQ ID NO: 58849 - protein, 379 aa, Methanosarcina sp.
MFVRREYNGMLKAYKFRLNPTTSQIAMFEQHIGSCRYVYNWALEQKIKTYEQTGKSLSQFDLNKQLTVLKKEHNWLKEVNSQSLQGMTRNLESAFTRFFREKSGFPKFKSKKNPIQSFPVPQHYSVNFENNTVKLPKIGEIKAVLHRKFEGDLRVATISKTSTGKYFISVLVECNEETPKKQEFTKSTTIGIDIGIKDFAVLSTGEKIENPKYLKNSLQRLKILQKRVSRKPKGSKNRDKARHRLSVLHEKINNQRNNFQHQLSFRLISENQAVALETLNVKSMVKNHCLAQSISDASWSSFVTKLEYKAEWFGRTVLRIGQFEPSTKICHVCGFHNSNLTLKDREWECPECNTLHDRDVNAAINIKKFALQDQNLITI

SEQ ID NO: 58850 - protein, 461 aa, Natronorubrum sp.
MMQDSGLTQTISFGLTIHEGSSENLHEGCLEARRVRNEVNRLDNEGWDWDDIHDTVVDNANLVKNTTQLIVQKALKELETYYDYKDNEWGRPFPYIDETYPMRMNHNEGYSLTLDESGDVRFRVSYKPYNHVKGVLRGSPYHLEGVKNALASDAWCVGAAELVYKHDEWRLHVTVTHKTRTVAAPDDAETVVGVDINEDCVALTALNRDTGDVLDSVVIEYPDIKRVRHEFFTKRKRMQNVGQTAFETVVRTEERDFVHDQLHKVSRDVTQWVSQFNDPVIVFEDLKDIRDSIDYGTRMNRRLHSLPFAALRVMVTYKAAWEGIPSDDIDPEYTSQRCPRTGCLHIERANRRRKRFKCNKCGFQDHADRKAAVCVAQEWVDDQDGNVPSLETLPRVRKVRRTASGLCEEADSHGAVFASGVYRHGTSARDSQSQAREELKTVAPTTGQTRTPRVTRPVVLH

SEQ ID NO: 58851 - protein, 409 aa, Hapalosiphon sp.
VLHKAVQVRLYPSEQQQIQLAQTFGCSRWWWNYALNKSIEVYKETGKGLGQVALNALLPKLKKEKNTQWLAQCYSQVLQATTLNLTTAYKNFFEGRARFPRFKSKHGKQSIQYPQNVKVVDGNVKLPGNIGEVKAKIHRPIEGKIKTVTISKTPSGKYFASILTEVDGENPVTSQGKIYGVDLGLKHFAVVTDGEKVSKYDHPKHIAKHEKNLKHKHKKLARKQKGSNSRHKYRKVVAKVYERVSNSRQDFLHKLSYKLVSDSQAVIVENLYVKGMVRNHNLAKAISDCGWGTFTNFLAYKLERKGGKLVEIDRWFPSSKLCSNCFYQMGEMPLDVREWTCPHCGTHHDRDGNAAINIRVEGIRMLKAEGSAVSAVGGQVRPKMGRKSHLRHSPMSTEAHAVPDRVSVG

SEQ ID NO: 58852 - protein, 573 aa, unknown
  TnpB Polypeptide
MSDLLSLPIRLPDEDAERFERLATLTQRVATHVLEDHWTPPHLNGIADSSYQAWKYFDEHEPFEELDLYLPSRFRRCILQKVGETLRSHADRRDAFQSIQSVLPDHKIRRIHRRRIKEQLWDDGDYLSSGYLDILIDQLNSYYDRHGTYPDTYLEMQDCPEYDNAVLPYSADDGPTSGQACKYQYDSDTETLTIRLKTPDTLSPETRGDWSWTEYERGGYEAFYDLLAYGDLSAPEFQPARRKTGDAYYELSFPVEIEHGEPTDDGDCVLALDAGMRKDMTAVVVTGDGEQLSTPHFIQFTGREKMRGLHRERTRLNDRLSALRRDGRAHTDEFAHLQSEYERVNSKLQHKREQLTHDVANQVLALALLYDVDAIVHEDLRSLSPPSDEGTLSWELSSWARREIIENIEYRAESAGVAVERVYPEATSRSCPRCGSTGHTCKSPDHHEELWWGGHFRCDNARCGFEGDRDYIGALNVARVFFSETDELDHGFTSSYTGECEIVLAGRSAGTRFTFGSGIVAYEPEQAAATTGGGSAVIAPAVALPEPNADGSDGRGPVVQQCTRFLRCTTESY

SEQ ID NO: 58853 - protein, 420 aa, unknown
  TnpB Polypeptide
MSQEKNASISNTIRKTRERHANMICKTYKIKVVTSKLSCVQKEELNAAFREAKWLRNDIVSDLKHANRNAKTANVKTPNGFEERELTHLGSQIKQDIYDKVKSEVKGLATKKRQGKKVGHLKFKSVCNSLPLQQFGKTYKIDFDLNRIKVQKIKKAFHVRGLKQIPKNAEFANATLVRKASGLYFCITCYIPVTASVKTGKSVGIDFGIENNLNFSDDREAINAYINETNYIKHLSRKINRCWIRNGKKHSENNKKRIMKLRRAYEKLANQKADLAHKIVHEILSSYDFIAIQDEMLKNWHEGLFGKQVQHSCMGLIKAELIHSSKTHVVNRSFPSTQICPICGSLTKHPLSKRDYDCASCGYHHNSRDKKSAQSILERALYEVSLEQRAKSLVETEPSTPVSLTDSCKIPSMTQETQVL

SEQ ID NO: 58854 - protein, 420 aa, unknown
  TnpB Polypeptide
MIVLETKLKGTEEQYERLDEAIRTAQFVRNSCIRYWMDNIGVGKGDLSKLCAQLAKEFEWANKLNSMARQASAERAWQSIARFYSNCKKKKPGKKGYPRFKKNTRSVEYKTSGWKLSDDRTSLTFTDGFEAGSFSMWGTRDLNFYQIAQIKRVRIVRRADGYYAQFCVDIERNVQHEYTGKIVGIDLGLEFFYTDSVGQTIANPRRLRKSEKRLKRLQRRVSRRRKGGKNRKKAINRMARQHLKISRQRKDHAVKTAGALVASHDLIAYENLQVRNMVRNHKLAKSISDASWSMFVCWVEYFAKLHKVVTVAVPPQYTSQDCSGCGERVQKTLSVRAHQCVKCGTILHRDHNAAKNILVKGVEVLGVKQSTGGHPETYTPGDENHLWLVEGNFGWVSGLVEPGTRRGDSMESPAIFGTPN

SEQ ID NO: 58855 - protein, 371 aa, unknown
  TnpB Polypeptide
MRKVSFGFKLQSQKNIIKLGNMIDDMWGVHLHIMLLARRYRRMFGKDVSAYRLKRHVAKLKKRTKSHWKDLPSQVVQDVVLRYSKSQDAFFQNIKDRKAGLTTRKVGRPKIKPRHKYNSMTFTQAGYELEENRIKINCIETWFSFHKHREIEGLIKTITIKRDRCGDYWIYFSCENVDDSEPKPKTGKSAGFDYGNKTFLTSDEGNKIRSPQFLKQSLKTLRSLNKALSRKVKGSNNWYRACRALARLHQKIARQRLDWQWKLATELCTEFDTLCFETLNLDGMKRLWGRKVSDHAFYQFLRVMEQKCAKHGKKLKRIRQWTATTKPCSDCGYPNKELSLSDRQWTCPDCGSHHDRDVNAAINIKRAGLVA

SEQ ID NO: 58856 - protein, 180 aa, Bacillus sp.
MYYVSILPAYEKEIVQKEVETVVGLDFTMDQLYVSSEDERANYPKFYREILDRLANAQRALSRRTKGSGRWNKQRIRVAKLHEKVANQRKNFLHHKSKELATHFDVVAIEDLNRKGISQALHFGKSVADHAWGMFTSYLAYKRNEQGKQLVKIDKWFPSTKTCSSCGNVKHMSLSERVYS

SEQ ID NO: 58857 - protein, 446 aa, unknown
  TnpB Polypeptide
VIRAYLFALDPTDAQAEMFRSHCGAQRYAYNFGLALVRANLDQRAAERSYGITDDQLIPAVSWSAFGLRKIWSETKNERAPWWAQNSKEAYSSGLANLAAALSNWSSSKTGQRAGRKIAFPRFKSRRSRLSCRFTTGTFGLGPDRRHVRLPRIGAIRTHESTRKLARGVEAGTARIRSATLSWQRGRWHVAFSVELPDPKPASRSGGDAVGVDLGIKSLAVLSTGEVVPNPRHLDGGLTALRVAQRRCSRRRGPDRRTGAIPSNRWRKAKARVTALNTKVANARRDGLHKLTTRLVASHDVVVIEDLNVAGMVANHHLARAISGLGMAEFRRQLDYKTRDAGGRLVVADRWYPSSKTCSACGAVRAKLTLAERQFVCDSCGTRIDRDLNAALNLAALAAQASEPSCGRTENQPAGNPRKTAIGGIGYRHGKAQIMSQRRLREVAAP

SEQ ID NO: 58858 - protein, 397 aa, Bacillus sp.
MDFAFGSKNLTEVYLLVSLEMGMPRFGRQKSLVKGGNQMSQTITVKVKLLPTKEQSVILNEMSSTYISVINELVSEMVNKKKSTKKTSKHVATPLPGSVKNQAIRDAKSIFSKRVKKSNYKIIPILKKPICVWNNQNYSFDFTHIYLPLTIDGKTKRTPIRALLVDKHNRNFDLLKHKLGTLRITQKSGKWIAQISVTIPTSEKTGTKVMGVDLGLKVPAVAVTDDGKTRFFGNGRQNKYIKRMFKSKRKKLGKLKKLNAIRNLDDKEQRYMKDQDHKVSRAIVNFAKENKISVIRLEQLTNIRQTARTSRKNEKNLHNWSFFRLSQFIEYKANLEGIKVEYVNPAYTSQTCPKCHEKNKAQDRKYKCKCGFEKHRDLVGAMNIRYAPVVDGNSQPA

SEQ ID NO: 58859 - protein, 527 aa, Catellatospora sp.
MSDSAVASAPRAACSLASVCGSSSSIRFRSGVRSFHGEGSSRMARGRRWCAVTFRPPPFLCVIGRESRNTQSPMMIVGSFDTLGGYARRVRPPPDPALRVPGHRGAHLRPRRAAAGDGPLRLGVAVAVEPRGLVSGLVVHIDRGHHDDLAGTLIGGHAQELPRSAGPWCGARQARHRPTRRAPLSFRIRCKTSTTGRASIRVGDQRPRTVTLPVIGTITVRQDTRRLRRMLAKGRAKVFSATVTHRAGRWAMSLTCEAADLHDAVRHQPDTRPAGWVGVDRGLTAFAVAARADGTEVLRVEDPPRPARAGMARQRRLARAVTRKQLGSNNRAKAAARLGRHHARVRAIRQRFLHQVSNELVKTHDRLAIETLNITGMLANRHLAAAISDAAWGELARQLTYKQQWRGGHLTPVDRWYPSTKTCAPCRTVAPAMPLDQRTFTCAVCGYQADRDHNAAVNLAIWAEQHHAQVRDLHAGGPVTNARRGEGSGPRTRAGETSPDDAGTAPTPPRARRGRPRRALSHHSNEL

SEQ ID NO: 58860 - protein, 272 aa, Proteobacteria sp.
MKTTLQLKLLPSITQHALLLDTMHVFNAACTWIAAYAYAEQCTSKFLLQKALYQEVRQRFGLSAQLAIRAIAKAVEASKRDKATPVAFRPDGAVVYDERILSFQGLECASLMTLQGRVIVPMQMGAYQRVQFSRGHGQADLVLVHGQFFLLLTIDTPEAPPMEPTHFLGVDLGIVQLATELRWARLHGCCGGACARALRKSTADLPGHWHHICPAATQEAVRHRIPVSSLGQSCDLQTPCCPRHRHEGRACAGRLDAHPQPDDGSQRPAQQA

SEQ ID NO: 58861 - protein, 263 aa, Proteobacteria sp.
MDTASICLGSGAVEFWDSRPVEGTIKNVTVSRQGQHWFVSLQVEMAIADPVHPATAQVGIDLGIATFAAFSDGALHPPINAYRRVAKKKARMQRRLARMVKYSCNWKKQRQRIAQLDIRIANCRHDFLHQLSTATSKNHAVIVVEDLQVKHMSKSARGTVEEPGKHVAAKSGLNKAILDQGWGMLRGMLAYKQAWRGGAVIAVHPRYTSQTCPECGHVAKANRVQQALFACVACGYTYHADVVAAKNILALGHRERLNACSPR

SEQ ID NO: 58862 - protein, 556 aa, Proteobacteria sp.
LPPWVVRHSKSSSSTSKTRNGSSMMQRQLKLRLNTGQEAQLDTWLFQLTGVWNWAIRKIAQDAKDGIYYTQKDFHNLLANHGKKLGIPSHTLQGMLDAAYTAWQRCYKKLAKKPRLKGRRNTLTSIPFPDPFKTPDSTHIHVPGIGHIRFHAQDLPAGRLKSGRIIKWASGWYLCLFIDAQPQAIPPAAYGEIGIDPGFQTPLTFSTGEKVAHPHELRQTAHRLAQAQRGGRKHLTARLQERLANQRKDRNHKLSRRLVADNRVIIWSKDHDKGLARSFGKSVASAAHAQLRGMLAYKCTASGRQYLEVPSRFSTKTCSPSGQVSGRVDVGVGRMAALQTGELGLRTAVPLINVRTPRTGPTGVAGVHKEDRDACALGFVGDKVTQLGKAPTTMLVALAFANRRPAADVRQVFQHKRGLRVCGAGNKVFGDRMIDPTTKPGFCVGQLLESPLGRCGASGLVGLPCSSATHAHTLHRSTRVGVPIGARLRAAQSRGLRPKSAWVPSVALPACRWSATRRTVHAPRPDRLARGLWKTAPVDTRPSASGQSLGPGASSG

SEQ ID NO: 58863 - protein, 369 aa, unknown
  TnpB Polypeptide
MMETFRQMVNECIRIGLDNNISTLRKFSSDHYHDLKKYNIQSKYKLTAISQACGRLSQMKRSIKEGKTPKSPHIHKPYLVSCYGFKINGMLLSIPIGNRKYINIILNHHTKQILSDKSLKVKSFVITPDSISLGIQKEVEEIKCDNTIGIDRNLRNVTVGNHEKVTMYDMEDLPKITYRTKKVTSSFKRNDHRIRQKIYSKLGNRRARRVKQFLNRISKNIVQKARESNSIIILEDIKGIRKLYRKGNGQGNRHRAMMNSWPFYELQRQIQYKSAWEGIPVRFVSSVRTSILCPICGNRTRKDTEQHRQVWCGICKKSMDRDVVAAMNISYKGLQRFCNPSCDASEAMKGNLRMPVILRVDASKLGLKV

SEQ ID NO: 58864 - protein, 389 aa, unknown
  TnpB Polypeptide
MNQRVLKLRLYPEDYHLPILNQHIGHNRFVYNECIKLNKKLYEETGKIKGRFELCSYIKQLKDTDKPWLGDVLAQSLQQTILNYSRAMSNYIQYLKQISKGKKPKRKVGEPKIKRKNIVGAGSFRVPQKCKLIVDDINPKYKSSIKIHKVKKPIKVHYHRMLPSDAIIGAMTITKDNVGDWWVSIEYKTNEPYKVFKTGSGVIGIDVGVANYYTTSNGKVVKNPKFFEEEVNKIRKLNRIISKKRSNKVGTKKLQLKQNKLYIKIHNKTMDFIHKETNTLIRENQSISIESLGVSDLLIMNDSNLSRRIQYSNLSMFLSILKDKCKWSGTELRTVDKFFASSKICSSCGNKDDTITLKDRTYNCKHCGHSIDRDLNAAINIRDHSKPIK

SEQ ID NO: 58865 - protein, 137 aa, Bacillus sp.
MTPTGKYYVSILTEYEKEIVQKEVETIVGLDFAMDRLYVSSEGKRANYSKFYREMLDRLAKAQRVLSRRTKGSIRWNKQRIRVAKLHEKVANQRKNFLHHKSKELATHFDVVAIEDLKYFILEKVSLTIVGVCSLLF

SEQ ID NO: 58866 - protein, 408 aa, unknown
  TnpB Polypeptide
MLVKTIKLQLYPTPEQIELFRETQSVFTEACNFVSNYVFENDFELSQRKLHDVLYRILRSQFDLQSQMAQSVIKTVIARYKSVNTNMKQKPYRFRDNNTGIKHHVKRDMYWLKQPIQYKSKVAVLVRNRNYSLLKTGEYSISTQQGRVKVVCDKSNLDYLQQFNDYKLGEAELLERRGKWYLHISASKEVESLDTNEIKHVVGIDRGLRYLITAYDEKGKTLFINGQDVIKKRRHFKSLRSELQSKNTKSSKKRLKAIEKRENRWMNDVNHCISRALVDRYGQNTLFVLEDLIGVTFDTVNHRKKENRYEHMSWAFFDLEQKLMYKAHQDKSMVVNVSAKYTSQRCPKCGAIHKENRIKEKHFFKCIQCGYQSNDDRVAGMNIQTLGTWYMSGDMNPKFEKLEPKLEY

SEQ ID NO: 58867 - protein, 425 aa, unknown
  TnpB Polypeptide
MFKVQKNKLKLDKSQYRFWRDMCRRSKNLFNSTLWETNNHFDRCGEFLSYPTAYHILKTRPEWKALPTDPAGQTMKVVERCFRSFFGLLKKKQAGNYNKPVKKPHYLPKDGYFLCIFPQRNYQCKKHFCVIVPKDLQSKYKFKKFVYPIPPNVKGHKVKEVRILPRGRAGHFEIEFVYEVEQQHPKLDRKRTLSIDIGVSNFATCLDSKTGRAFILDGRKMKSINQWYNKERARLQSILEKQGQKSSKRMRRVEAKRNRRLNEFLNQYTNLIVQVCLKHKIGKVVLGEGWHAQNGSNIGSRNNQNFVMLPYGKFAWKLRNKCELYGIEFKTINEAYTSKCDHLANEPMCHQEKYLGRRTKRGLFKSSTGTVLNADVNGALGIMLKSGSGNSLRTKLSRGVVNTPWRIRLDDIQQTSSMRLALSIA

SEQ ID NO: 58868 - protein, 476 aa, Desulfovirgula sp.
MQRTVRQKSLPLNDRKWARLVETAEAYARQKDAFLVEYAHIKYLHYLGDKRTLRDELVSASFASPFGLQARMWKLALEDALFTLERQWEAAIETARGLVARHEELTDEEKHYAFWLLYRPRKGGRDWKRIQSIFTGEDVTGEQVKLDGAGRRRVRNYLRRVLRRVLGRRPRVKKARSFVVDQQMYRVFFTEKRQYIAVSTLTPGERVVIPLAGAHAVEGNLRVVLLPDERAVEVHISCEPVVFPAGSEEAGIDLGVTEVFTDDTGRKYRAEYGEALQEMSDYILDKGRKRQKLWALYRRNLERDPARARRMRRHNLGLAKQRKRHRRLRRRCENEINRAFNEFLKARRPRVVAYEDLSHLQGKAKSKELARKISGWRRHIIKERREYKWFVFSVEDPGPVNAAYSSQTCPVCGWVDPQNRKGDIFECRECGFTADADQVAAMNLKARLHDEEITRYTPRSKVKEILLRRYSENSAV

SEQ ID NO: 58869 - protein, 419 aa, Pseudomonas sp.
MGMERRKVTLKLYPTSSQLKRLDSWVRLHAELYNAALQERIEAYRKAGLSISYCDQQNALPAIKSFRPELVELGSHALQETLRRLDRAFQAFFRRVKAGQSPGFPRFKSSARFSGFTYPDPAGWKLLQQGPRGGTLRLGSGKGAMMIRLRGRHRFAEFTPNDLTLLRRRNPATGEDQWYASITLRVPEVACARQRTGDAAVGIDFGLAHWANFDDGSVIENPRWLREALPRLADLQRQRARKKRGSHRYRQLSQQIARLHQRIADRRRDFIHQQTSALVQRCALIATEALAPQNMSRSARGTVEAPGRRVRQKAGLNREILSAGFGMAHQMFGYKAEEAGTRLHLAKTRQLKPSQRCSACWAVVPKTLAERMHRCPCGCVMPRDQNSAKVVLFDAWTPEYSPGTGETARLKPLAAKAAK

SEQ ID NO: 58870 - protein, 543 aa, Pseudomonas sp.
MSNPVFTYQTRLLLDAAQASALDAYAELHGRAERTLFAALRAGSPINDLKRSFLPRFGITARQFNALRVGLEGKIRSIKERRPDLIAEAKSRIKTAESVIAKLSARAKGSNKLHQKKRRLATLKVRCSSLEADQAASAVRLCFGSKRLFRAQFNLAANGYGSHGEWKADWQRNRSSQFFVLGSGDETAGNQTCQAALESKGNFTLRLRLPDALVASGASRIMALTDVRFAYGHDQIAVALASSQRIHAQTKDGKQIVKRIGTALSYRFVRDAKGWRVFVSVEAEPAGRASSMALGSIGVDVNADHLAVSETDRFGNLIGARRIGLTVYGKTTDQAKALIGNAAVCIAAQARAAGKPVIIEKLEFQRKKAELEANNPKQARLLSSFACRQVAAHLKAACFRAGVEVIEVNPAYTSVIGVVNHAQRHGISVHMGAAFAIARRGLGFSERLPKRPAIVPVRNGGHVTFTLPARNRAKHVWSSWADIRKKLKAAHVAHARSGEANATPAPLLSATRAACSHRAFGARFPDANRSQHCSESVLDDVPW

SEQ ID NO: 58871 - protein, 417 aa, unknown
  TnpB Polypeptide
MSAELTKLSKNVLKWGNASDIQMKRTTQLRHENTYYRRIDSDVLPRNIARLDAAFQGFWEHGKDFPEYAISATFKSFEYKPKRCKFEVKRIVGAKHRFSRVYLPLIGWMRYFDSRQFPEDAETRTVTITRQADGWYISVLLNLSESLPDEMPLEEVNGIVGIDVGINQLVALSDGSFVKNLKPGTNKRVRRALRIRQRRVNRKQQGSKNRAKAGRTIARLHQKVSAKRDAHQWKAAKIVVDTADAVAHEDLNILGMKKRCQPKKSNGRFMPNGQSAKRGLNRSISDAAWGGLFQKIAWLALKAGKPIAIYHPKNTSCECSSCGHTSPDNRNGEKFICANCGYIAHADTQASRTGLKRVGLKFVSTRRKNLPGDSRKVTPIKYDSARNGKRDQGRNLESMASSVIATVRKQDTRGVSP

SEQ ID NO: 58872 - protein, 405 aa, unknown
  TnpB Polypeptide
LSFIVLAVKSVWQNHAPAWEVLRLLDVFRRMVNDSIRIGLVNDASSLRRLSLLSYNQLARYDSPSCYKLCAISRAAGILAARKKSVRRGFPTRTPYAVRPQLVSCYGFKIENGRIDIPVSRGKRFSIPLTKHVLEIISQPRVKVRSFTLTQNRLSLCIARDTPMIECASTVGVDRNLRNLTVGNEHETSKYDLSKCVRIANTTARIVASFTRNDDRITTAIASRYGQRRTARTGHLLHTATKTIVAVAVQRKTAIVLENIEGIRSLYRKGNGQGRRYRGRMNGWSFGEAQQQIEYKARWVGLPVIRLSRRETRGSSVSCPRCGERLQSDKRLGRKLWCGKCRVVMDRDMVAAVNLARRGRVRFARSRPPITIEAQGRAVEAMKGNPTPTVIPRVDAPKLTHPTKS

SEQ ID NO: 58873 - protein, 399 aa, unknown
  TnpB Polypeptide
MSRYRLYPSPAQEAVLRDHCAHARNVWNLAVEQHQHWRPGRKSAPGYLEQCRQLTAARAGHDWLRAGSQMVQQQALRDFRQAMAAFFDPANPAGRPSWRKAGRDEGFRVVALKPGQVRRLSRHVRVVRVPKAGWVRFRWSRAAPAGVKSFRVRRDRAGRWHVAFAAVPAPVPAAGNGQVAGIDRGVAVAAALSTGELLHVPGLTGRERARLRRLERRLARARRGSGRRGRVRLALARLKARETDRRKDWAEKASTGIARRFDLIRVEDLRIRNMTRSAKGTAEDPGRGVRQKAGLNRGILRSGWGLLVRRLQDKAPGRVEKINAAFTSQRCSACGQVDPKSRESQARFVCTACGYACHADVNAARNIAAGHAVTARGGCRDAGPVNREPHLLASFTGRQ

SEQ ID NO: 58874 - protein, 431 aa, unknown
  TnpB Polypeptide
MDNEVIKTRKVRVYPNKKQQIEFKKYFDTSRYIYNQCVEYYSTENETLLKKYNDIKKDGCVYKNKTNTTRCKKTLDGEGFFCKTHKYYKHTFELTTSFITMRKTIMKSDKDLLSKEEWLKDTPYDTRQLMIKSFCGNLKSVITNQIKGNIESFDFEKKKENKKLFHISKNALDGDLQIFKRRLKTNSKLKKKKNNKKQNYKIECDCSMEKIGGKYFLLIPIKSDRINTKATYDTISLDPGVRVFQTGYSPDGLIMDFNMNRNKLEEKEKYHNNLTKVNLNKISGKTKRHIKNKTSLLRTKMRNKITDFQWKLANYLVKDFNTIIIPKFQVSKMVKKENRTIGKITVKKMLELSHNKFLEKLKVKCIEYNRVLIICTEEYTSKTCGKCGIINKTLGGKKIFKCETCNLVIDRDVNGARNILLKCWDVMQSLN

SEQ ID NO: 58875 - protein, 476 aa, Mycobacterium sp.
MMAEKFTVPDGWVLQAYQYALDPSAAQAAALESHAGGARFAYNTMLRAVKSNLSQREAERSYGVAAADLTPTVSWSFQSLRNDFNRRKHTVAVRDDGTPWWPENSKEVYANAVKNLSLALKNWGDSRAGARKGPHMGFPGFKSKRSIRAFAFTTGTIRIEADRHHVTLPRLGTLRVHESTRKLARRLEAGTARVLKATVRHERGRWMVSLTCVVERARQRPAHLKPLAPVIGVDLGVKDLIVAATPDGRQLLRQHAPRELVHASQRLRALQRKASRQIGPWDRASKVKREPSNAWRRTQHCIAAQHTRVANLRRDRLHKLTTQLAQSFEVIGTETLAVKNMMAAGGARKRGLNRAVADAGLGEFLRQISYKTTWYGSAHVKADRWYPSSKTCSGCGSVKAKLSLSERTYVCDNNDCDLVIDRDLNAAINLARLARAEQSACFDRGGADRKTTASVAQVAVKPQSSNGSASPQGEAA

SEQ ID NO: 58876 - protein, 302 aa, unknown
  TnpB Polypeptide
MNKSYKFRLYPNKEQLNTIEQTFGNCRFVYNYYLNKRIELYKNEKQSFNYYACANDMTQLKKQDEYSWLKLSDSIALQSSLNNLENAYQKFFKEHIGFPKFKSKKDTRHSYQTKNTNNSIQCFDKYIKLPKLGLVRCKFSKQVEGKILNATISRNPAGKYFVSICCDLDYIEHLEKTGSIIGIDLGIKDFLIDSNGNKIANPKYLAKSSKKLAKLQKQLSRKSIGSNNRNKARIKVAKLYEHISNQRKDFEQKLSTKLIKENDIICLETLKVKNMVKNHKLAKSISDCSWSEFVSMLNYKAD

SEQ ID NO: 58877 - protein, 406 aa, Epulopiscium sp.
MQSKTYKENFKKKSHFVTYICKKYNLLKRVVNSIVKDVEGNIKKLRELKKYEIKQLKLKIKALIEYRKEQSAKLETLKKRVVNNDLRVLEQYRNLKIKVYYLSQKINKKNLQFSNLERVINNNEKIRLCYGSKIEFKKQYYLQLNKLKSHQSWKNNFLKNRDKVIHYVGSGDESYGNQLFNLIPDGLGYKIKVRKHIPNIEYKYINGYCHLKNYITNTNIIGEMQNFNRPLTYRIIRRKNKWYLQVVVEVEVNIVTRNNEGVIGLDYNEGFIELSETDKAGNLINNKRIIIKDNVKEKLSGILKHALNVGKDIAIEDLNFNGTKGKMIKAKSKRGKIYNRMLSRLGYGMYKEGLINSGARNGIGILLINPINSSKNGAILYNEKKKLTTHQSASYVIARRGMGLKD

SEQ ID NO: 58878 - protein, 407 aa, unknown
  TnpB Polypeptide
MQLVERHIVSRQHRFWKECDYLALQSKHLYNTANYVQRQYYFETKKYYNSIDIYHQTKNLVAYRYLPTKVSKQIVRRVTDAWKGWTAALKDWFKHPDKYLGKPKMPGYKHKERGRNVVIYPIDAISKPALLKGIVKLSQTSIEFPTRAASVDQVRIVPKLDHYVLEVVYTVEDAPKSTGQYVAGADLGLNNLMAITSNQPGVRPLLINGRPLKSINQFFNKRVAASQSIDAYRQIKKLNGKRDRRIDNYLHTVSRRVIDWCQINDIGHLIIGNNYLWKQDINIGKKNNQEFTNIPHAKLINLLTYKAQLIGIEVIVTEESYTSKASALDGDELPKYGDKPETKPVFSGRRIKRGLYKTDTGKTINADTNGSLNIARKVIPNFMDGIVGLPFIPVVLGLWTKITNVVV

SEQ ID NO: 58879 - protein, 494 aa, unknown
  TnpB Polypeptide
MPDFLAKILHFGENPAYCMYNRKQIRREVISMANTNKNTVCKGKTVDKVQKQPSESKSPVTVKQLPDGTFEFSGGKGGFNIVERKNNALEPYGKCIWNYGVVLELIPGEKQADINQQIGNARFVRNNYLHERKECYTQYKKTLTVSQYQRDYLPKLKKKNEFLKTSDKFVYENACRNVDNAYKRFFKGEAGFPKYASYNKPNGNSFTTNYTNNNIELNMVDGLPYVKLPRLGYIRFVLPKGKILADIQPHGTSIKAATVTRLNNTYRISLRMETVIDKPVFQTIVHKDDIISVDLGLKYFGVFGNHKETNTVPNPRWIQVHARRLRRFQKSLSRKQYDKKTHTGSRNWEKARLKVAKEQRKTTDQRKDFHHKLARAITDSCMAFICEDLAVKNMMKNRCLAKSIASVGWSQFLSMVKYKMERSGKYFRKVSRWYPSSQTCGCCGHKNINVKDLAVRKWICPKCGTLHDRDINAQQNIFRAGVELLQAEGIQVIQ

SEQ ID NO: 58880 - protein, 381 aa, Methanosaeta sp.
MRKSFKYRLYPTKSQRSRMERTLDLCRWVYNQTLAYRKDTWEKEGRPTSKYETHNLLPSWKVERSELTEVHSQVLQNVQERVELAFKAFFRRVKSSEKPGYPRFRGRGWYDSFTYPQAGFKLLCGKLRLSKIGDIKIKLHRPIEGKIRRLTVRRSSTGKWFACFSVEIDDPPKPPWKDGSTVGIDVGLESFATMSNGEKIDNPRFFKSEEKALAKAQRRLSKCAKGTSERRAAVKVVQRVHERIANRRYDFAHQVSHNLVERFGLIAFEDLNITNMLKNHCLAKSISDAAWRMLVTVTSNKAESAGSKVVLVDPRNTSQLCSRCGVKAAKSLSDRVHECPQCGLVMDRDENAAINILRLGMQSLRKSDRSPFREGSIHIRS

SEQ ID NO: 58881 - protein, 415 aa, unknown
  TnpB Polypeptide
MSGMIHRALKVKLYPNKEQETQILKTLGSCRFLYNQMLAERIETYDEWKASGEDVRKLYEYQYKTEKQYKQEFEWLSEPDSISLQQSRIDLSMAYQNFFKSQSGKRKGKSGFPKFHKRGHKDSYRTLNLGTNIAINYETRKVKLPKLGWITFRDLRCNTKGAIKQATISRSKTGKYFVSILFEQELELEGVEINQGLKTKGLDMSLSSFYVDDEGNSPAYERIYRKNEPRLKWLQRQASKKTKGSNNRRKAQLRVNQVFERITNSRKDFSQKLSTKLIQENDVIVVESLNLRAMAQCLNLGKSVNDLGYGEFLRQLQYKSLWNNKTLIEADKWFASSKTCSKCGYAHKNLQLDDRIYLCPSCGFEIDRDQNAGINLKNYGLKELGLGQPESKPVETSMHKVESVKQEALKSLVSG

SEQ ID NO: 58882 - protein, 443 aa, Sarcina sp.
MILTENHRIKRNKHKELFKKIDAYCYCAKNLSNSVQYLICQCYRIHRKIRNGEMIEPWEQEMLDDINNAIAAYNAGRAEKKQLKCIDADNGFIADAYFLSWHMKTKGVYKAMPYATCSQICIQEKCREWKSFYKTRNEYSKNPDRFLGAPRRPGYLDPAKGRGSLVITSQNFSIAEDGLITMPGFLKGIKIKAKHGHVRQIRVRTDKNSIRIMLMYEQEVSMSRVNGNIMGVDLGVDNLATISLLSGGAPVVINGRPLKSINRYYNKRKARLQEVAKRSNRLDITNRIEQLTEKRNNKVKDYLHKTSRKVIEIAQRRGVSHIVIGNNRGWKQKVDLGKRTNQTFVSIPYRMLIDMICYKAELAGIRVSIVKESYTSGTSYLDGEIPDKASYNISRRIKRGMFKSNKGMLINADVNAAYQIIKAGGYKDIPIKENETVTRLNVA

SEQ ID NO: 58883 - protein, 486 aa, unknown
  TnpB Polypeptide
MTTCTRILYAQCAVPADMKRLKATCRNVGKMRAAIWQRWGGLGTVGKSVNEVRREITAANLFEKIDIDGTVRAESTKDIVNDIFTYRKAAEAAVVKKIYKRYKDDAERKVKCGKLRNGEWLKDPYLHRQMRTHFRHGKGKCSRQFVVRSDKYLIGHSGGFLTITLLFNRKSGGPVTLVTTTNGTNVKIANRNLRIIIENDEIQIHYAFEKLCKRPHGEETVGVDKGLTEAFATTTNELLGQGLGKLVFEYSDAITEIWRGRNKLRALAERYEKEGKTEKANNIRLNNLGTKKLDNMRRRFRTKVRNLLCKAAHKLMDRACVIVVEDLSGFIKGKSLGRKTNRRLRTWVKGVMQEILEEIAALRDVRIVIVNGAYTSQTDSLTGAFTGERKGDRFYRENGDIVHADFNAAFVILLRLWDPEITRYMGYREVKKIIEARTAEYRDAISSGGTYWPSRGFNWMQPTLEKAARTLVKCGKKSENTSSNFE

SEQ ID NO: 58884 - protein, 365 aa, Acidimicrobiaceae sp.
LVCSTSEHRDEAAPWWAENGSSTYNDAAQRLSKAFTNFHQGRAKFPCFKRKGQGGSVRFMGSAVRLADSHHVRVARIGEIKNYESTRKLYRHLERGTGKIMAATLTERGGKWTISFTVEITQAIPAPRAPERIIGIDVGITTLYTGATPDGEHVLEVDNPRRYVTVEKRLAHAQRIASRRQGPKQGVAPSNRWKKANGRVQNIHASIRNARRNLIHETTSMLAKNYDVIVIEDLNVTGMVKNRSLAKHIQDAAWGEFTRQLEYKTKWYGSTLVRADRFYPSSKTCSHCGTVKATLSLDQRTYHCGACGLTLGRDHNAAINLARQGLPGTSSGTGRGGEVSPAQQNLVVTAHPDEASTESFTMVDD

SEQ ID NO: 58885 - protein, 536 aa, unknown
  TnpB Polypeptide
VPEVPQAGDHRRCGGPVERAAHREVCRAWLGGGRFGDDARSCASVPAGGSHRCARPDRRPAQGVHLSDAAGRVRSSAPADGHLVVPVVFHVLGRPRLRRDDHPLHRVAEAIRAPKCGPVMHKAFTYRLYPTSKQRDNLSQMMSDHAELYNAALEERREAWKLAKVGIRYTGQAGQLSAIREVRPDQARWSFTSQQQTLRRLDKAFAAFFRRVQDGQTPGYPRFKASARWDSVDFRHGDGIKWIDTGRKAHAKVKIQGVGHVDVRMHRRLTEGAIIGQISIKREGLGRRARWFLVLPVTIPDTEPAPRTGRRIGGDLGVNHLFSLTEHVPVLINGEDQCDPQGHIANPNHYRAAEAELAAAQQVLARRKKGSKRRMQARIKVAALHSKTKRARLDYLHKMTRALVDHADVICVEDLAAANMTRAPKPRPDPDKPGQFLPNGAAAKAGLNKSILDAGWSTFTALLHAKAEEAGRDVVLVNPAYTSRTCSGCQAIKESLGRSERVYTCQHCGLVADRDSNAAINILRAGNALRQTAQAA

SEQ ID NO: 58886 - protein, 506 aa, unknown
  TnpB Polypeptide
MNSITYVKGIPTAEQELNKLGFSEVEMFLTSYSKIFHAAACETANHLLSCSRFNLSKWNTYLQDKYGISKRHAGGVIAFANGDVKSRKECSKEEIAQLTRKLKSAKKWLNSKVKLLKSSQKFYSNKKWFESKKGCLLYLACSLKYKDTNLKNLRFQIHHKKRYIHLLEQKIQHLKDKPIQVKIPHSQCFIVGSKDETCGNQICQWDGENLKFRVPYCLEDKFGKYVIFKLGDFDRKVNRLPFLGAKTWHFYYKYEKWNAAVQFTPAPVQQVSRSIHFGCIGIDLNPTSIGWARVDQDGNLKASGKIKIQPGLPKNKMDAQLVDACLQLQQLANRFACPIVVENLNFQAKKTRLREEGKKYSRMLSGWAYARFFELLSDITSNRGIKLIKVNPAYTSLIGLIKYSRLYGLGSDQSAALAIARRGMRLSERIKPGSITAYLGVKPGKHVWGQWNKLNSIVKVHRIKRHSYYSISNWESQVKEWTTATKSRRPKPSESVCDCIFKTLTA

SEQ ID NO: 58887 - protein, 356 aa, Tissierellia sp.
MKKAYKFRLYPNEEQKEYFSKCFGCTRFIYNQMLEDKIKHYKKTGEMLKNTPAQYKKEYPWLKEVDSLALANAQLNLDKAYKNFFRDKSIGFPRFKSKRMKQVYTTNNQNGTIYIKNGYIKLPKLKSKVKIIKHREIKGKIKSCTISKTKAGNYYVSILVEEDIKPLPKSDKKVGIDLGIKDFAITSHGEVFENPKWLRKSEKKLRKLQKDLSRKKKGSKNREKAKLKLAKQYEKIVNQRKDYLHKLSSKIINENQVIVLEDLKVSNMIKNHNLAKCISEVSWYEFRRQLEYKAKWYGREIVIAPSNYASSQLCSNCGYRNKDVKNLALRKWTCPKCGVHHDRDINASKNLLKLAI

SEQ ID NO: 58888 - protein, 384 aa, Chromohalobacter sp.
MLRMTKRAYQYRFYPTPEQAQLLARTFGCVRFVYNAVLRYRTDAFYQRQERIGYVEANAYLTRMKKADETAFLNEVSSVPLQQCLRHQQAAFKHFFEGRARYPAFKNKRHRQAAEFTRSAFKYRNGQLFLAKCKEPLAIRWSRELPSEPTTITISKDSAGRYFVSCLCEFTPETLPITPRMTGIDLGLKDLFITDQGERIGNPRHTAKYAARLAKAQRRLSKKKLGSANRAKARKRVARLHAKISDCRMDRLHKLSRRLINENQVVCVESLKVKNMLRNPSLAKAIADAGWGEFARQLEYKAQWAGRQLVRIDPWYPSSKRCSDCGHIKDALPLSVRAWDCPACGVTHDRDINAARNIKAAGLAVLALGENVSGMEPVSVSGSR

SEQ ID NO: 58889 - protein, 152 aa, unknown
  TnpB Polypeptide
MNKTARRVIDYCIDHDIGTLVVGYNETFQKDSNIGRRNNQTFVNIPYGKLRDKLEYLCELNGIILVMQEESYTSKASFWDKDVIPVYKSNDTEEYLFSGKRIHRGQYRTASGQVLNADVNGALNILRKSSVVDVNILYSRGEVDTPIRIRIA

SEQ ID NO: 58890 - protein, 384 aa, Lactobacillus sp.
MLKGVKLSIYPNKKQREQLDIMFGNSRFIWNNMLAMMNERYQNNKDLPMLTEYRLHRLLKPLKVEYPFLKESDSSALQVDCQNLYQAWKNFFKSGFGKPRFKSRKFYKQSYTGKSTIHIVAKRYMKLPKLGYIKTSKTSQLTDCRIKRYTLSYDTTGRYYLSLQVECENQALLPKTNKAVGLDLGVADLAISSDGIKYDTFHVEDLERKANLWQRKFSKRRHQAKVCIESDKYSKVLVPRDFNDFKNLQKAQRTKARLQAKIANTRKDYLHKLTTMLVKQYDTIVIEDLRAKNMMKNHKLAKAIANGSWYLFRSMLEYKCNWYGKQLIIVNPNYTSQVCSNCGVNTGKKSLDVREWTCNNCGTHHDRDVNAARNILAKGLKQVA

SEQ ID NO: 58891 - protein, 264 aa, unknown
  TnpB Polypeptide
LSTTRLATTRSGLFNQSPYLILDWIHHWLRKKPPSTLERTISSRVPRLLGTSTSTTVVSCSDGSARRQTKSPRLQSKLREGRYSSNRIRRLYRQRTKRRDHAQNALVRDLVERYDEGVATVYVGDLTDVLEAHWSVRVNDEKTHNFWAFKKFIHRLACVCEEYGISLETESEAWTSQTCPECGDHEKTVRHEDTLTCPCGFEGHADLTASETFLRENSNCEIRPMARPVRFEWDDHDWSGKLYPLTKVPKKCARTRKLPPWVGR

SEQ ID NO: 58892 - protein, 216 aa, unknown
  TnpB Polypeptide
LFGRFRETTDEIARLQSKLREGRYSSNRIRRLYRQRTKRRDHAQNALVRDLVERLYDEGVATVYVGDLTDVLEAHWSVRVNEKTHNFWAFKKFIHRLACVVCEEYGISLETESEAWTSQTCPECGDHEKTVRHEDTLTCPCGFEGHADLTASETFLRENSNCEIRPMARPVRFEWDDHDWSGKLYPHEKSQRSAHEPASLPPWVGSRTLNGGIRAL

SEQ ID NO: 58893 - protein, 390 aa, unknown
  TnpB Polypeptide
VWDTSEYRGRYNGVVGSATVQQVTRKNSEAWRSFFALKEKGEYANPTVVLGQRGRTDANSVPTSDATSTRLSGKRSRLEIPVGQELKDEYGLGYHERLRLEVRGNPKWDGKQGRLELEYDEVSDTFRAFQPVTVPDSRLDSPLASEEAALDVGANNLVACSTTTGNQYLYDGRELFGRFRETTDEIARLQSKLREGRYSSNRIRRLYRQRTKRRDHHAQNALVRDLVERLYDEGVATVYVGDLTDVLEAHWSVRVNEKTHNFWAFKKFIHRLACVCEEYGISLETESEAWTSQTCPECGDHEKTVRHEDTLTCPCGFEGHADLTASETFLRENSNCEKSGRWHGPCDSSGTTTTGRGNYTLTKVPKKCARTRKLPPWVGSRTLNGGILAL

SEQ ID NO: 58894 - protein, 396 aa, Lachnospiraceae sp.
MLIGKKVRLQPNRGQERDFFRFAGTNRFAWNESLAFYEDVYRSGGGYATLADLMKHLQDMKHNYPDYKWLLEVPEAITKQAMKDLLKSYRTYYKERDPLHPERYKPKFKKRGKCTESFYQRTDNIRKTDDTHIKITGIRKPVKCTMLRGVDLPKNIQNPRVTFDGKYWYLSYSFEVEEAAIVDYARGTLGIDLGIKDFAVFSDGRHFANINKSPEVRRLRRLLKRLQRQVSRKYEANAAVDGNGKKVFHKTANIRKIEQQIRMVYRRIANIQRTYMYEVAGAVMRTKSRTVVLEDLHVKGMLQNPRLARAIQEENLSEFRRILTYKCERQGTELVLADRWYPSSKTCSCCGHVARDLKLSDRIYKCAICGLVMDRDENAAVNLERYPEMVSKTKTA

SEQ ID NO: 58895 - protein, 367 aa, Selenomonas sp.
MRTYHFKLYTSKRNRKLHRQINAAGLVYNHCIALHKRYYRLFGKSLNMYQLQKHLTKLKKIFRFAYMKEIGSQAVQDITQRIDRAYKLFFHNLKHKIRTAPPSFKKIKKYKSFTLKQSGWKLDEADNSIVIGKQRYRYAKSREIDGKVKILTVKRDALGDIYLYFVCEASENKVLARTGKSVGFDFGLKMFLNASDGKDIASPLFFKQNATAIKRASSILSRKAKGSNNRKKAKLALARLHRKVANQRDNFHWQLASKLVGEYALICLEDLNLKAMQKRFGRKISDLGFADFVNKLKYMAHRTGSSVVEIDRFFPSSQLCSKCGYQNIEIKNLKFREWTCPKCGSTLDRDKNAAINIEREGNKIFSA

SEQ ID NO: 58896 - protein, 385 aa, unknown
  TnpB Polypeptide
VGDTVRKTFKYQLTPTPAQAQALEMVLSRCRTLYNVALEQRKTWWQRGQGIGATYFRQKAELPDLKAACPEYAQVNAQVLQDVILRVERAYQAFFRRLKAGEQPGYPRFQGRNRYNSFSYPQYGGGAVLDGGVLSLSKIGRIRIRLHRPLEGTPKTVTISREADGWYTSISCAEVPTEPLPLTGQETGIDVGLKVFIITANGEVVENPRHYRKAEKQVAKAQRRVSRRKKGSTRRKKAVALLRRKHQTIQRQRRDFHHKVALALLRRYDVISLEDLQVRNMARNHHLAKSISDASWGQFRTILTFKAACAGKWVIAVPPAFTSQDCSGCGERVPKSLSVRTHVCPSCGLVMDRDENAARNIQWAGQALWGLAGIPAGMNREAPSL

SEQ ID NO: 58897 - protein, 418 aa, Moorea sp.
MAILRQTFRLYPNKTATSKMFYARKLHQLLYNAGIADRRYEWKANKKSIGYLDQQNCLPDFKKCWPEYKELYSTSLQATLKRVDLAYNRFFQGLGGIPKYKPIRKYSGWTYPSKAGWKTDTNGKDGTLTLNDLGLTIKMRGQAKSWGTPTTLTITYKPSINAWYASITVKTETPDPKYGSESDLKYEKIVAYDLGTETAITAFNGSEFEEIANRRFTKTLEPKVKAAGKEKRRKQAPNFKKGIKASKRWKKANKKESQLNRKAANARRDWQHVLMQSLMGETPKTALHRKVTSDLSSRYDIGVTEKLNTKGMTRKAKKGSKRKKQKAGLNKAILDVGFGTLNKMLTYKIELKGGIVLQLPTRQLKPSQRCPECGKVHKNWAELSNRYHVCDACGLGASQFGTLALFRGLKPLKYRCFG

SEQ ID NO: 58898 - protein, 397 aa, unknown
  TnpB Polypeptide
MSRYRLQPSREQETVLLRHCSDARYVWNLAVEQRAWWRPERGSAPGYLKQCRQLTAARADNPWLAEGSATVQQQALRDFALAMTNFFKGTHRRPSWRKAGKNEGFRITGRRGRDWDVRRLNRNWGQVKIPKIGWVRFRWSRDLSADVRSFRVTRDRAGLWHVTFAVIPDPVHGPGTGEVVGIDRGVAVSAALSTGEMLKVPCLSAPERARLLLLQRKLAKAKRGSNRRGKVKLAIAGMKARERERRKDWAEKTSTDIARRFDVIRVEDLRIANLTRSAKGTAAQPGRNVRAKAGLNREISRSGWGLLVRRLQDKAPGRVEKVPPAYTSQRCSACGHVDGRSRESQARFRCTACGYACNADVNAARNIAAGHAVKARGGDGDSRPVNREPQLLASLGA

SEQ ID NO: 58899 - protein, 410 aa, unknown
  TnpB Polypeptide
LEEKLNSNDNKIYRSVRIRLLPTKEQDILFWRSVGVARWSYNYFLSESYRVYKEWLEDNSKPKYISEKDVRKYINNHLKKTTHTWPKDVGSNVMKQGVKDANIALQNFFRHDKGYPKFKSKKRSKPSFYVNYASIKRLPNGFQGERLGYVKTKESLPKIGKNQNYLRTRISFDGRFWYLSVSFEVNKLDVSLSDTKLGIDLGIKELAVVSNQDGTVIKKYHNINKTYEVGRLERKLKREQRKFSRKILMNTSHYTGSGRPIYSKDLESCKNIQKQKGMIQRLYRRLLNIRTNYLHQTTTEIVKTKPSRIVLEDLNINGLMKNRHLSKSIMCQKLYEFRRQIEYKAELYGIEVVIADRFYPSSKTCHNCGHIKKDLKLSDRVYRCDCCSNVIDRDVNASINLANYNIESIN

SEQ ID NO: 58900 - protein, 383 aa, unknown
  TnpB Polypeptide
MRAYKTEINPTPEQKQIIHQTIGVCRYVYNFYLAYNKEIYKTEKRFVSGMDFSKWLNNEFIPNNQEYIWIKQVGSKAVKKSIMNAETAFKRFFKKQSDFPKFKKKGKSNVKAYFPKNNKTDWTIERHRLKIPTLGFVQLKEKGYIPTNAKVMSGTVSMYAGRYYVSVLVDEQTSITVQNNNNGIGIDLGVKEFATMSNEVTKRNINKTSQVKKLEKSLKREQRCLSRKYENKKKGEATISAKNIDKQKLKVQKLHQRLTNIRKDYIKKIVSELVKAKPNYITIEDLNVKGMMKNRHLSKAVAQQNFYYFRTQLESKCKQYGIELRVVSRWYPSSKTCACCGYIKKDLRLSDRVYICDDCGFEIDRDLNAAINLMNAKEYAIAC

SEQ ID NO: 58901 - protein, 393 aa, unknown
  TnpB Polypeptide
LHAEEEEYEKNKHTMGRNELRQLALDLRKQNPEFQALYSQVAQQVAERFYQARQRFFEGLANKPRVKKPHRYLSLVYPQSGWRLSNIRVVGQGENKKKRARLYLSKIGFFTLVMHRDFPLERVCQVCIKLNPSGRIYVVFLVEEEASNQERAPVGGPRRAVAVDVGISRLVTLSDGRFLENPWPLERSLDRIRALQGSLSRKRKLSKNWFRAWRRLAREHEYVGDFRCDLFFKLGVLLAAECDVLVLEDLDVEGLIRRGETRRRRIRLHDSSFSELRRVLEWEFVKQGRAVLAVPAYNSSRECFFCGEGNRSLTLEDRVFHCPCCGFTLDRDLNASLVLLKRVGWVPPVVPVELRPIPPLPSLGLKRGQGGVLMREAPPFRAGWLTLCGVLWC

SEQ ID NO: 58902 - protein, 456 aa, Lactobacillus sp.
VLGVFELIFERTFATIQVRRGDDTMKPKSDEEEKKPLFAKLKYHFGIKLVAFPSSDQKTTIKQNSDAARFIYNEFVALGLEGWKLRRLEKSLIQNQVSSSNPEWFTLALKAVAARLKIIGDQLYNPTQLKQRFKWLDKNKRIDSTMLYATLNFYRASWNMFHKVHSAGIPKFHKKSDSQRYSTLKTTNNIRIADQNHLKIPKVGQIRVTKIPDWLLNRTDIEISGASVKMDAVGRYSISLTLGSDHPFKEELPKTNSKVGIDVNVENLYIDSFGDVVENPRFYQKQKKQLQKEQRKLGKRAARAKKEHRSLRTAKNYQKQRKVVAALHHRIYNQRHNFLHHVSTALIKNHDLVVAEKLQGKKPVKKNHALSQRIQDVGWGILFEDLAYKAKLYGKEFTKVDPKMTTQTCHTCGFVMGRGGTRKLTLADRIWTCPKCQTKHVRNHNAAINILSKATV

SEQ ID NO: 58903 - protein, 464 aa, Acidimicrobiaceae sp.
LSADSRKNIALPHKYESPDGWIVQGFTFALDPTDEQMKSINRFFGARRFAFNWALSQITTDIEHYHETRESRTPPSLYGMRRQWNAEKNTVCFNDQTGEVWWPDISKEVFADGVKGAVDGYWRWKKSRAGKISGKPVGFPRFKKRGHDRDRFSFTTGATRLERDRRHITLPVLGTVRTHENTRRLERLIALDRAKVLAVTVSRHGDRIIAAVRVSIARPQRARVTQPDSVIGVDVGVRRLATVATVDSVIGELANPRALEGRLAELRRLQRQRARRTRGSRKYQECAKKISRLHTEVAHVRQHTIHVFTTDLAKTHGVIVVESLDVSAMLQQKSLPGARARRRGLSDAALGEIRRQLRYKCPWYGSTLIEADRLFPSSRTCHDCGHVQDIGWSVRWVCEECASSHPRDENAAINLARWASLGSVGAPVKRGAEHQTESHSAAGQDTRTGSSTSVGPNNSVRRAE

SEQ ID NO: 58904 - protein, 276 aa, Okeania sp.
MKSIRTKLKLNNRQKTLMAQHAGYGRWCYNWGLSLWNAAYKDGYQPNARKLREVFTNHTKPFYPWMKNLSSRVYQYAFPSECCANINLGQAFKRFFQGLGKYPKFKKKGKHDSFTIDNCGKPIELNGWNHKLPFIGVVRTYEPIEATTQKITISRQAGSWYLSCSDEFTQAPTPKTTEVVGVDLGIKTLATLSDGKVFESANSYRKFEAKLSRLQYLNRNKIVGSANWQKAQLKIAKLHTKVANIRKDVLHKLTTYASLEPRQCCHRRLECSRYVS

SEQ ID NO: 58905 - protein, 412 aa, Escherichia sp.
MHQENTMLPRRISVSLFIDQSIIWPVKRLQAFKFQLRPGGQQEREMRRFAGACRFVFNRALARQNENHEAGNKYIPYGKMASWLVEWKNATETQWLKDAPSQPLQQSLKDLERAYKNFFQNRAAFPRFKKRGQNDVFRYPQGVKLDQENSRIFLPKLGWMRYRNSRQVTGVVKNVTVSQSCGKWYISIQTESEVSTPVHPSASMIGLDAGVAKLATLSDGTVFEPVNSFQKNQKTLARLQRQLSRKVKFSNNWQKQKRKIQRLHSCIANIRRDYLHKVTTTVSKNHAMIVIEDLKVSNMSKSAAGTVSQPGRNVRAKSGLNRSILDQGWYEMRRQLEYKQLWRGGQVLAVPPAYTSQRCACCGHTAKENRLSQSKFRCQVCGYTANADVNGARNILAAGHAVLACGGCQQTG

SEQ ID NO: 58906 - protein, 483 aa, unknown
  TnpB Polypeptide
MRHTTFRFALDPTPAQEQMFAWHAGASRFAYNECLQFVTDALAAKRNDPSVKVPWSGYDLINAFNAWKRSEEAGRVFVVDTDGVISKQVTGLAWRQKVSAQVFEEAAVDLGRSLAAYGRAKQDAGGGRRFGFPRRKRKGRCRDSFRLRNKRQSGGHLIRVGDGPLRSVTLPTLGRVRVHDDTRRLRRLLRPRAQIDPATGEQRVAPRAKILFATVARRGTRWYVSLNVHAPDIHPGRRHQPRPEREGGGYVGVDVGLVAFAVAARSNGTEVGRWQANHPLSTRLRRLQRSSRSLSRAQRGSRNHAKASRRLRREHARVADARRSFLHEVSSQLVKNHALLAVEDLAVHNLVRHNRLARAVGDAAWSEFARQLTYKADWFGVGLVVCDRWFASSRTCSACGAIKVRMKLAERVFHCGTCQLVMDRDRNAAANLAAWAEHARALDRQAGGQVTNASGGEGAGRWPDSGESGPLEGGTEAPAVAGA

SEQ ID NO: 58907 - protein, 382 aa, unknown
  TnpB Polypeptide
MEINRAYKFRIYPNKIQEQKLLQTIGACRYIYNYYLNIQLNSHAQAGRIVSYADLARDLTKFRNSGDLPWMREVQAAPMQKSLRLLDVAYSNYFKGVSKLPRFRSKKDSRQSFSKAKDWGLKGGRLRIQGDIVVRVRGSLPPEATEMKTLTVSVTPTGKWFASICVIESIEQPYVLEGKVGIDLGLTHTVITSEGEKFENLRPHKTQLKKLRALQQSLARKQGGSNRREKTRLRVARLHEKIANQRLHHLHQISSAITGKNHALIAVEDLAVANMLKNRRLSRSISDVSWGELLRQLEYKQAWKGGQFVKVGRFFPSSKTCSNCQLRADKMPLSIREWSCVGCGTTHDRDINAAKNILKQAEAQLVVESTDGSPLGRELLAL

SEQ ID NO: 58908 - protein, 288 aa, unknown
  TnpB Polypeptide
MKVIAHLKLQPTPAQADALKRTLEAANAACDAISQVAWDTRTFQKYALQKQTYTDVRERYGLSAQLAIRCIAKVCDAYKLDKQAQRTFRPHGAIAFDDRILSYDLSKHTISIWTLDGRLRMSYHAGDRQKEYLAFRQGESDLVYHKGAFYLLATCDIPDPDEHDVEGVLGVDLGIVNLATDSNGNTYSGDQIEQKRTWYARRRAALQKIDTKSAKRRLKQLSGKQKRFQRDVNHCISTQLVATAKDTSCAIALEDLTHIRQRTERTVRKSQRSRRSNWAFAQLRQFIS

SEQ ID NO: 58909 - protein, 337 aa, unknown
  TnpB Polypeptide
MSGKSFSVWLNNEYLPKNPDKLWMKEVSSKSVKRSIENGCVAFTRFFKHQSAFPNLKKKGKSDVKMYFVKNNPKDCRCERHRMNIPSLGWVRMKEKGYVPTTKDGYVIKSGHVSIKADRYYVSVLIEIPNNKIADNSKEGIGIDLGLKDFAIVSNGKTYKNINKSAKLKKLEKQLIREQRSLSRKYENLKKGESTQRANIQKQKLKVQKLHHKIDNIRTDYINKTIAEIVKTKPSYITIEDLNVSEMMKNKHLSRAVASQKFYEFRIKLKAKSKENGIELRVADRWYPSSKICHCCGTIKKDLKLSDRTFRCHCGYVEDRDFNAALNLRDVKTYKIA

SEQ ID NO: 58910 - protein, 318 aa, Bacillus sp.
  misc_feature (272)..(300): Xaa can be any naturally occurring amino acid
MEVNQMIINKAYKFRIYPNQAQAILINKTIGCSRFVFNHFLYLWDHAYKETGKGLTYGTCSAKLPAMKKEFVWLKEVDSIAIQSSVRNLADAYTRFFKKQNSAPRFKSKKNNIQSYTTKQTNENIAVVGNKIKLPKLGLVRFAKSREVEGRIVNATVRRNPSGRYFVSLLVETKVQELPKTHSYIGIDVGLKDFAILSDGTPYENPKFFRSLEDKLAKAQRVLSRRMKGSSRWNKQRVKVARIHEYISNARKDYLDKISTEIIKSHDVIGIXXXXXXXXXXXXXXXXXXXXXXXXXXXXXTVLLVVRTMIGILTQVSI

SEQ ID NO: 58911 - protein, 434 aa, Desulfotomaculum sp.
MAQLTREGGEIPVSKLKKNANKKIGAPGNEKSNLLVEKFPVDLGIFEPLARELQREAARVWNTVCSVHRTLYIRNHVWLNEAGMDDFVKGKFDLLHSQSVQAVVSTYYEAWERTRELREKGHTDWRYPYRKKYFFTVTWKRSAIKHRGTYLRLSNKRGVKSLELELPEHLKGAVIHQVQLVWHRNGYWLHVTVEKPALPEVQGDVYAAADPGEVHALALTDGEEALVISGRLLRSLARLRNKELRKFQRAISRTKKGSRRRKKLLAAKYKFLNWIERQMEHILHAISAIVVRWCEKRKVKKLFYGDPSGVREKDCGRKYNQRMSQWPFGWLRKLVEYKLKLRGIAVEKKEEHGTSGTCPKCAGYTKQSGRVYKCGNKDCGFTGVHRDVVGASGILDVNLNGEFTKDRKLPGEVIYVRPVLRKVKQRRKKHKTAA

SEQ ID NO: 58912 - protein, 399 aa, unknown
  TnpB Polypeptide
MIRLSYKYRLKPSTVQAAALDEQLRLCRYAYNALLEHSFNERKAGRGTPTYKALTYLLPAMKAMKPELNAVYSQVLHNVAKRVRSGFEGYWARKRAELKAHLPRFRGEDRYDSLTYTQFGFRLKDGVLSLSKISDVRITQHRPVEGKVKTLTISRSRSGEWYAVFSCEAEAKPIQGRLPAVGVDLGLNSLVALSDGTTIEAPRSYRVAEERLGRAQRSLSKKMRGSRNREKARRRVASISERVANQRRDYAYKTARSIVNRYERVYVEDLKVQGMMRNRRLSKSIGDAGWGILRNALTYMAERSEGVIAFVDPKNTSQLCSGCGAIVEKDLSVRTHRCPVCGLIIDRDVNAARNTLQRGLEIGRGPPEYTPVGEETPTSLSEGMQVTSMNQEAHLFRGG

SEQ ID NO: 58913 - protein, 408 aa, Lyngbya sp.
VLNKIVKVRIYPSQEQRIQLARMFGCSRWWWNYALNKTIEEYKATGKGLSRTQLNALLPPLKKAEETEWLAECYSQVLQATTLNLTRAFKNFFEKRARFPKFKSKRSKQSIQFPQNVSRVGENLKIPKIGIVKAKIHRWFEGRIKTVTITLNPAGQYHASVLVDCECCDLPGTSDKISGVDLGLKHFAIVHDGSKVKKYAHPKILKKHSRNLAKKQKTLSRKKLGSNSRQKARKLVAKVHHRIFNARYDFCHKLSRKLVDENQTLVFENLNVKGMVRNHNLAKAISDSGWGMFTNFCSYKLEQRSGQYVEVDRFFPSSKLCSECFHLMPEMPLDVREWTCSHCGTHHDRDENAGKNLRAEGIRILTSGTEVPASGGECKTKLGPKTKFRQSSKKLETPASIKRGVVHF

SEQ ID NO: 58914 - protein, 762 aa, Actinomadura sp.
VFTMMQSAVGHVDGGVVPAATRRYVDSVNAAARESASEAAGDAGVADVACPIVDGAEARRVRGRNRAPAWRRPAEGPVTVVRLRLTPDPAARHRLEGLFGAAWSLKRALRRDARSRALAYRAGHRRRRTQAEAKRWRVRLGLSREALERAGYRHLDASGHLRHHLSKAVAMHLADEVWSGLERHLFADASGRRQGVPKVGSWWEFSRIPGRARSHTKSRKWETFRLHGTLAGHLAAYPVSGLPGGSSPEAAAALPPGTGVLAQPRTMAVPSAPRSRGGKGVWWEYEGPLALVYAGGPDGCRGDLVVPVRLPQGAGQWPHLLHTLADPEVFHKVDLVRRRDPAEPGGWCYEAHLMVLKPAFVPASTAARRAKAPAGRRGGVDGNVSNLAAVSAPIERADAAAASPQTALDSSGVISSKVTMSPDERARIARRARKRRGRQRALERSRRASNTAQYEPSRRQRKRQRRRQAAGLPPKQAAVPGGPRVARADGRPRRSYGRDALSGSYRRLRAREAAAAHRTAQSRKTRARHTAGQIVAVHGPHLVIEDCDIRAWFRLWGRACARFTPGMLITALDHECRATGGRLLRAAISITALSQHCPCGRRVPKHLGVRTHHCRTADGGCGLTGDRDLVSAALAAFTHLTDPDDPSTARVDYQTSRRVLCAGGPGLPGALTESTAPIPAPGTGAPAGAGTGNAAATPPQPRRRRPRRRNRRAASARRTRTGTAPTPDEPPLPTTPAGGTAVTPDRRRPRTRLSKQPDHGTC

SEQ ID NO: 58915 - protein, 556 aa, unknown
  TnpB Polypeptide
VAKFQIAEGWMAQAYRYELDKPSNNPAVSSHVGAKRFAWNYMLDLMNEQLRTREQFRIIALRQGASYNEAIAFAEKACAIPHLVELNEKRKKEHEIKITEGNRRPGEYRPVSEWCPWSMEAMLYTWNRTKNEVAPWWKENSKACYGSAFEGLAQAFKNYFSYKDGKRKGAPVGWPKYKRRSGHQSVGFTTGSGSIATLDRHHVRLPVIGVCRTKESTDKLRLKILAGDARILRATLSNEGDRAYVSFGVLVKRDAKVLKPTNDFSCQVQGHDVGITKLITSSDGSVVENQKAEERVKKKISRYQRRMDRQHRVASPKCFNSDGTHISGTCHWKDRSNRARENQARLRRTYAHVARIRKDTIHKASYHAATTNAINVVEDLRVEQMGRKGHGKRAFNRAQHDATMAEFRRQLAYKHSWYGSQLWLAAWWYASSKTCSRCKTKKTKFSRSARIFCCDNCGLIIDRDLNAAKNLQALAELACVCILAQISTGTPVDWSKVPVRPYGWELGKNTRSSRGCARAGGRKTEGGDRNTARSDLQNEAVTAFDREAAILVEVGV

SEQ ID NO: 58916 - protein, 457 aa, unknown
  TnpB Polypeptide
MSKGWKKKDKNNERGYIAIRYRAYPTDEQNQKAAQIDGCCRQIKNLAKEQRDLAYRLTGKSPGYTAQAKNLKELRDDPDFAPWLSDAPSQILQQALRDRDAGYQRFFLGKARYPTWARKSSRVSFRVPQHVEIKRISRKWAEVRIQGMGWIRMRMHRPLVGSRISSATYTREPDGKTFISILCERHKRQPTKPLDKANTIVGVDRGVAVAVATSDGDLINRENWTQKERERLVRLERTRERKKRARAKVKGEASHKSKKQVKTELAIAALHARARRRRNDFVEQVSCDLSKNHALVVFEDLHLSAMTRSAKGTIDNPGKNVRQKSGLNRVMLDKALGKILTRTDDKAHNHGHVVLCVPAPGTSITCPKCGHEDADNRASRSVFICKSCGHRAHADVNAAINIRERGIKLTLAGGTPVAAYQGTNLEPTLVGAEPGAVRDGLGSGNKDLDCITERVPA

SEQ ID NO: 58917 - protein, 459 aa, unknown
  TnpB Polypeptide
MLIGIKLRAHPKPHQKLILSQWMGCARFIWNAKVDEEAYHRTFARKYYPLGTYAPIDKKAAHFKSKELTPWLSQCPSQIIRNSATNWCNTYQKFMKGECGRPRRKPKTDQGSIYLTREVFRFDRCADGNLRLFIGTKNNNIGYLSFKAHAKFEIPNSLYVRKERGQYTVSFCYEDGLDTSELSSNAEHLAFLRGATDEYLNDHVVGIDRGVVVPVQAGQVTFDYDASQKKRMDKSDRYIKRLQRKLARQCKGSNRRNKTKHRIASHHAKRANIRNDFAHKTSRSLVNGQAKVIVFEALRTSNMTRKPKAKQDEQGRYIANKAKQKAGLNKAILNVGWHFIETYTEYKAYRAGKAFFKIPAPYTSQECAQCDYTHPDNRSSQAEFACGRCGHTDNADHNASLVIKKRAIALLKHTGTVLSAKGVLTLKADTERGGVRKTGRAKGSASSGLRSVKKEELAA

SEQ ID NO: 58918 - protein, 380 aa, unknown
  TnpB Polypeptide
MQRTISLNIPIKNEIVETIKQYNTISNLHIKECFELKTNSKSKLHKALYRNIREQFPNFPSALIQCARDNAIEMLKGNKYKRKTTKSLLSSIRFDLRTSKVFLESGQIQLTTVEGRKKYSVKVPKYFHKYFSWKIKTVVIGIHRKFCRIKVVVENGIVAPIDNKEVLGIDLGINNFAVCSDYTIIKASKIKRIKRHYAHLRQKLQAIGTQSAKRKLKKLSGRERRFMADYNHCLSKRIAEKPFGFLAMEDLKNIRKGRKGRKFNRMRSNWSYFQFRQFLVYKAEDRGKRIILVDSRFTSQRCSKCGFIDKSNRNKGFFHCKSCGFSHNADLNASFNIFQLGKASLDRLIVNQPIVTANDGNRCIKSPDVIYKPPFLNGGS

SEQ ID NO: 58919 - protein, 385 aa, unknown
  TnpB Polypeptide
METVRKTYKEKLRPTPAQERALEEVLGRCRTLYNVALEQRITAWQRCHVSVSRYEQEAELKAIRAEMPEYAALHSHLLQDVLARLDKTYQAFFRRVQRGEKAGFPRFKGRDRYHSFTFKEYGNGARLDNGALVLSKIGRISVHWSRPIEGTPKTVTITREADGWYVCHSCADVPCQPLPLTGQETGIDLGLESFATLADGSQIANPRIFRVAELNLKRAQRRVSRRKKGSKRRRKAVVLLAKAHQHTRNQRRDFHHQEACKLLRAYDVIYHEELLVRNMVQNHSLAKSISDAGWSAFIAILTFKAESAGKRVQAVNPAYTSQACSGCGVLVSKGLSVRWHECPDCGTSLHRDHNAALNILRLGQEQRRPGYGLQALTQPVGAYVA

SEQ ID NO: 58920 - protein, 239 aa, Rhodococcus sp.
VVFNDALRARIDAHEAGLPFPTDGQLSRRIITEAKKTPERAWLCEVSSVVLQQALADLNAGYRNFFASRNGTRKGRKFAPPRFRSRKGNRQSIRFTRNAGFKIGDGGKLSLPKIGKVEIKLSRELPTEPSSVTIIEDASGRYFASFVVQHADERLPEVESEVGIDLGLTALAVLSDGTVVENPRLLRRAECRIARAQREVARKHKGSNNRRKAVRKVARLHARVADARRDFHHQTSTSV

SEQ ID NO: 58921 - protein, 407 aa, unknown
  TnpB Polypeptide
MPDLFYPTLLQSSNIKSNSWFDIKGYKNKKRRKKKTTFESNYIDTIKIKLSPNEKQKEILKLWLNDCIDVYNHTNTYIKNNINNDKFGKIVNFINIRKNLKDYLRNICLINNVNKHTIDYSIKHCVEMYKSAESNKNNNNIKDYEIKDLDKDRRRKNLVIEPSSVSKKKNAIFIKQLGEMKSSHKLDIIKRNSILQFDRIKKTYHIIVPINKSEKININRYSKCGIDIGVRTFLTVYSPEETYEIGTNTNKIIDKYNKRLDKIKSNENKMSKEKYERLYYKYSDKLRNKINDMHNKSASFLIKKFDTINIGKVSTKKMVSNLKGNLHDIVKRRLMALSHYRFRMKLHTMSKKYNCNIIEIDEYMTSKKCSKCQNIKGDLKAEKTYECIKCNLKIDRDINASINIYKL

SEQ ID NO: 58922 - protein, 398 aa, Brevibacillus sp.
LTQQYRTMRLLINCNKSDLKRLQMCNKESAMIWNKCIEANNKLYEENKKLHNRNSFFTLVKDIETEVICSNNKQTVAKRVIDAYKAISKARKAGRVDEKYPYKIKKYFPTEWDYNYLFCDYNKNEISLTVSRFTDANGVARNGKQIRLKFKTSIPQNIKTLKLIYEGERYYACISYLTDVEEKQPSFSNVAAIDLGEIHAITSVSDQQDQLIITGRKIRSIKQFRNKKQAELRSKMDKCTKYSRQWHKYNRAWQYIKSKTRRQLDYHIHKLTRMYTDWAKEKGISLVYCGDVTGIDVGSNKGTNVNQKLSQWEYGLIMELLDYKLRLEGIRFIKVNESYSSQICPSCGFKNKPTNRNYCCSNCEEEYHRDIVGAWNILNMNHKLDFVPSRNTKYLRIS

SEQ ID NO: 58923 - protein, 301 aa, Caldalkalibacillus sp.
LWAGDADMPNKAYKFRLYPTQEQEQLLAKTFGCVRFVYNKMLEERQHIYDTFKDDKEALKQHKFPTPAKYKKDFPWLKEVDSLALANAQLNLQKAFTNFFSYEHQPVPKEIENVVGLDFSMNTLYVDSEGKRANYPRFYRQALEKLARAQRVLSRRRKGSKRWHKQRLKVAQLHEKIANQRQDFLHQASRQLANRYDAVVIEDLNMKGMAQALHFGQSVHDNGWGLFTTFLRYKLAEQGKKLIKIDKWFPSSKTCSCCGRVKVSLSLSERLFRCACGFVADRDINAAINIKKEGLKQLGTA

SEQ ID NO: 58924 - protein, 213 aa, unknown
  TnpB Polypeptide
MSKSITIFREYVQLSFEVQIEDKKKEGLLVGIDSGINHLMTTSDREFLGNEIKPLINRIKTRFQGSKAYKRAKKTLSYYLHKTVKDYFEKKDLRLVVVEKLRDLKQGRKNKNKEFRKTLSNWNYRELLEIIRMRCEENRVSFRMVNPYKTSQECPLCTHTERGNRSKEEFKCLKCGYSEQADYVGSLNILHRFLIGPYGADFKTEPILLNTIG

SEQ ID NO: 58925 - protein, 404 aa, Salmonella sp.
MKRLQAFKFQLRPDGQQEREMRRFTGSCRFVFNRALALQNENYEAGNKFIPYTKMASWLVEWKNSPEMQWLKDAPSQPLQQSLKDLERAYKNFFQKRAAFPRFKKRGQNDAFRYPQGVKLDQENSRIFLPKLGWMRYRNSRHVTGVVKNVTVSQSCGKWYISIQTESEVLTPVHPSASMVGLDAGVAKLATLSDGTVFEPVNSFQKNQKKLARLQRQLSRKVKFSNNWQKQKCKIQRLHSRIANIRRDYLHKVTTTISKKHAMIVIEDLKVSNMSRSAAGTASQPGRNVRAKSGLNRSILDQGWYEMRRQLEYKQLWRGGQVLAVPPAYTSQRCACCGHTEKENRLSQSKFRCPVCEYTANADVNGARNILAAGHAVLACGGRVQSDRPLKQEPTEMIQAKACT

SEQ ID NO: 58926 - protein, 358 aa, unknown
  TnpB Polypeptide
MSELKTTLPVRLYPTPDQAALLRAHCQEYLRTINVLVQALDSAVLSDGASTQDFPAALPSAVKHQALRAARSVWKRSFDLGVIPILRKPLCQWNTQNWRIDGDTLLIPVDQDGQVQQIAIRGSNREPLGKPGVLRIKRGKWMADLAYRLPEPEPTPAQGIMGVDLGVKVPAVVPVIGQGNRFLGNGREQRAKRRQFYARRKKLQQAQQVRAVRKSQGNEPRWMRDVNHQLSHQIIFHAQQQEVGIIRLERLAGIRRRTARTSRGAKARKNNRLIATWTFHQLASFIAYTAERAGIAVEWGDPAHTRQICPACCHRNKATDRRYVCAECGWTGHRDTVGAITHSRRTGQRGHSAGAAVA

SEQ ID NO: 58927 - protein, 349 aa, Acidimicrobiaceae sp.
MPVYQAFRFELDPSTTTRSALGSHAGASRFAYNWGLALVKDRLEARQVLEVLAMRQGAGAGEARAWAAETAGPVPWTLYSLRKEWNRVKDESAPWWRENSKEAYNSGFDALARALKGYFDSRGGARAGKPMGFPSFKKKGGRPSCRFSTGVIRVLDDRHVQLPRLGVIRTKEHTTALSDQVVAGTARVLSATIKEEAGRWFVSFGCKVVRRDPVATYPEAIVGVDLWLHHFAVLSTGELFENPRPISQRARRMARLNRELSRAQKGSKRRARTRAKLARCHRRVANLRRDTLHKLTTHLATAYGTVVIEDLAVKNMTACPKPKADPENPGHHLDNGHAAKAGLKGPSST

SEQ ID NO: 58928 - protein, 630 aa, unknown
  TnpB Polypeptide
LSDSNNILTFREKAIVSLALYTGIRGCDIANLKLTDIDWKKERVSFVQEKTGNPIVLPLLPHVGNSLFDYIRNERDNEAGSVYLFPNKKNTTERLENKSIGTIVNTVFEKLNLRKGESGRGVSVFRHNLASKLLGKGTEIRVISHILGHICSSSIVPYIDADIPHLRECGINIECYPIRKELFDMRIFSTYSAKIKNYNHILKKTVSVYREAVDFMIQICLQKWEDIRKEDYLCSPVIYVERLCHRTKRNPEVSYESFDRKFYKLPSYLRRSAISDAIGKVSSYKSNLKNWKEEDPKIRGRKPSFPKAGYSYPCMYRGNMYQQIGKYEARIKVYIRNTWDWLTIKLRRSDMDYIERRCSGRRKCVPVLQKRGKEWHLDFPFEEFLELCDVDVADRIICAVDLGINSAATISVMRSDGTILGRHFLKLPKEQDCLTHSINRIKKAQQHGNRKMPRLWAKVNGINHEISVKTAEFIMDVAALYNADAIVFEYLEKKGKKHGSRKQRLHLWKSQEVQRIVTDKAHRLGMHIARICAWNTSRLAYDGSGRVLRGKQAGFSSYSVCQFQNGKVYNCDLSASYNIGARYFIREILKSLPEKERLALEAEVPQAAKRSTCTWSTLIRLNAELVSSVA

SEQ ID NO: 58929 - protein, 277 aa, Campylobacter sp.
MSMPIKMRYHRALPNNYKLNQITISKTHNKYFVSFSITYDEPSVVLMSSNKIDINRAVGIDMNINEIALSNGALLLTCSKSINKAKYSTTFKRLMRKQSKRVLKAKKDKIKLGSNFRKTQIRLNKIYERASNIKKDLAHKISNQIVKNFDLIVVENLKVKNMTKRAKLKNVKAKSGLNKSILDTSFYQFLSFVEYKAMHNGKVFTKIEPQYTSKACCKCGTIKENLTLKDRVFTCDNCGYVEHRDINASKNILDRGLKSFGLGTSLLDYKQEALRVS

SEQ ID NO: 58930 - protein, 241 aa, Streptomyces sp.
VPGAGSSRCCATTVSLRLRPRRTRSASTPGSPPSWPSTGEKVANPRHGRRDRARLARAQRELSRKAKGSNNRAKARLKVARLHARIADRRHDHLHKLSTRLVRENQTVVIEDLTVRNLLKNGKLARAISDASWTALRSMLEYKCAWYGRELVVIDRWFPSSKLCGACGTVAAKMPLNVREWTCDCGAVHDRDVNAARNTLAAGLAAAACGDGVRPQRESSRTGRSSVKQEPQRVTAGIPRL

SEQ ID NO: 58931 - protein, 381 aa, unknown
  TnpB Polypeptide
MTVVQKSIRVRLYPNIEQETLIDKTIGCCRFVHNQTLADCKQFYEQTQHFPSGKERSANLVPLKEEYEFLKEVSAVALQQSVRDLDSALNNFFKNRSHFGFPQFKSKHKSKQSYRTPYGNGIARIIDNKHIRLPKLEKIRTKKFLVPDEYRLFNITVEKTSTGKYYASICIEIEVQPLPKTGKQVGFDLGLIDLLIGSDGTRISRPRYTYEYKDKLAKEQRKLSKMRTKLERAKLNLDECKNYQKQKHKVAKLHEHIANSAKDFNHKLSRKIVEEYDLLAFENLNVKGMKKNHKLAYSISDVRWSQLVNFIRYKCEWYGKEFRQVDRFYASSKICSECGAYHKDIVNSLSVRERTCPDCGAHHDRDVNAAKNILNQALSVA

SEQ ID NO: 58932 - protein, 450 aa, unknown
  TnpB Polypeptide
MSNVFTLTTELKLNKEYNQLVGKYISGYIELFNKIQRLTFHRIKNHYIKNGKITLKDRGVIHSQLKEEFNLTSRAIDAILSNMLGRYESIKELKKFERKSLERKILNLEKELTKLKNERTLQRINLKNDSKNFNHTKYKNLKIKIYWKQNKLNTKKQKLKNLEEEIKTGKYKVCFGTKDLLQKDYDKFVKKRDSEIYFLGRAGDNACNNNFQVKYNSKINQFNFRVRKEINSENDKFVCGQFNFNNKTYTNLLKNLLRTKESALTYRIKFKNGKVLLQIIYNFEHNKDLCVTRNNYGVVGVDFNKGFVSVSETDKYGNLINTFNIDYRYGKGNQTTNDFQCIATRLKEYCLDTGKDLVIEKLNFNKKRDTLISKIGKKYNKMLSTFAYSKFDSIITSKCLKNRIFLHKVNPAWTSWIAKQKYCPKMKLNIHSGASYVIARRGMFLQDKIK

SEQ ID NO: 58933 - protein, 376 aa, unknown
  TnpB Polypeptide
VKGGGFVERSYRFRISPNIKQLTQIQRTFGCCRFIYNHYLAARIESYEADRTTFGYNACSADMTALKKQLTWLTEVDSTALQSSLKDLDAAYQNFFRRVKSDEKPGFPRFKSKRDNRKSYKSKAVGANIKVLDGAVQLPKLGKVKCRISRKVEGRILSATVSQNPSGKYFVSLCCTDVEIELLPKTGAVIGVDMGLKAFAITSDGTEYSNPRYLSKSQKKLARLQRQLSRKPKGSNRRERARIQVARLHEHIANQRSDMMHKFSAQLIRENDVICIEDLAPKNMVKNHRLAKSISDASWGEFRRQLEYKAAWYGKKIIAIDRFFPSSQLCSCCGYQNTSTKNLAVRDWTCPECGTRHDRDINAAKNILNEGMRLLA

SEQ ID NO: 58934 - protein, 421 aa, Burkholderiales sp.
MSASVIKRAAVLRLYPNQQQVSSLRRWQGGLRYVWNAVLDCVFTSRDINGRWPTKAEMQALIVGMKKMEGTEWIADIPAHALLTLADDLYKALVNWFNSLSGKRKGPKISRPRFRGKFDRQFSVYMVNQNTSFSDGLVRLPKLGQVKFRAGDLPAGRLLSSRVYREANKWYMASIFECDAPEMNAAPVECIGIDMGLKTLATVFDGQGIREVPKLGALRRHEQRLKRYQRRMSRRVKGSNRRTKAKLAVARLHQRIANIRKDYAHKATSDIVASAQTIKVETLNVKGWAKNRSISKSTADASVGMFLNMLRYKAAWAGRSLVEVGQWEPTSKTCSDCGSHNATVVLGVSRWVCRACGAIHDRDHNAAKNIYAYGEERRNVTGNTVESAWTGGDQAGEIPPVPQVETRILKRTARKSNCALA

SEQ ID NO: 58935 - protein, 385 aa, Erysipelotrichaceae sp.
MKRIAYKYRIYPNMAQKEYFSRVFGCVRFFYNKSLSDMCEIYKSTGKNENITPASYKEDYPFLKEVDSLALCNAQLNRNAAFKAFFKKQSSFPKYKSKRNDQSYTTNNQGSVKFSSNDRYISIPKCPRIRIKKHRNFKGEIKSITVSKTTDEKHYISLLVEENTECINICDNAIGLDLGIKELIIDSNGNKYKNHKYLTKSQNKLAKEQRKLSHMVKGSNNRNKQRIKVARLHKKIENQRNDYLHKLSRHIIDENQIICIEDLKVKNMTRSNKLARSINDASWTKFVSMLIYKANWYGNVIVKVPTNYPSSQLCSYCNYQNPLTKDLRVRKWTCPQCGSVHDRDINAAKNILRKGIEILTKDGTHPDSLFMLGSLGPSSKKPPLL

SEQ ID NO: 58936 - protein, 375 aa, unknown
  TnpB Polypeptide
MMKTFRYRLYPGREENKKMHDTCFLCSLVYNRFLEERNTAWEERQESLSTYSQINTLPAKKTKDPRLKEVYSQVLQDVGRRVDKAFQAFFRQVKQGATPGYPRFRSARRYDSFTYPQSGFRIEKDGRGGRLYLSKIGRVKILMHRPVEGKIKTLTIRRKAGKWYACFSCEVEPKPLPKTGKSVGVDLGLTNLAITSDGQFFPPSRHLRELEGKLGWLQRAVSRKKKGSKRRQKAVRNLQTLHVKIANKRKDLAWKVVHELLHKYDAVAIERLRPRNMVKNHHLAKSISDASWGTFRSILCAKAEEWERTVAKVDPKDTTQECSGCGHIVKKSLSQRQHDCPNCGLSIHRDVNAAINILKRSGLGGAFGDSSAVAD

SEQ ID NO: 58937 - protein, 542 aa, Rugosibacter sp.
LANDADRCSAARCGEVGRRPKHVFPIPPLNVWPLATQPPTGCALEAIHQRRYGHFRRILHQQMHMVALAVHLDQRSLKVHADLGEHPAQAIYCIAVKHFAPIFRHKNQVDVHLENAVPPVSNFVVITHRPKHNRAMKCLQAYKYELQPNGEQQRLMRRFAGSCRFVFNKGLAMQKANHEAGEKFIGYVAMAKHLTAWRNSAETGWLSDAPVHPLQHALKDLERAYKNFFAKRADFPRFKKKGMGDSFRYPDAKQFKIDAGNSRVFLPKLGWIRYRNSRDILGTAKNITVSSTGRKWFVSIQTEREVEHPVHPATSIIGIDVGIARFATLSDGTVFEPINSFKKQQARLARYQWAMSRKTKFSNNWKKAKAKVTKLHQKIGNIRRDYLHKTTTTISQNHAMVCIEGLQVRNMSKSAAGSAEASGRNVKAKSGLNKSILDQGWFEFRRQLEYKQAWRGGQVVAVNPRNTSRTCPCCGHVSAENRQTQARFACVECGFEENADLVGAINILAAGHAVLACGGPVQSGRPAKQEPAEATTQEFALV

SEQ ID NO: 58938 - protein, 253 aa, unknown
  TnpB Polypeptide
LLDYKSDGLYMDSNGNIGSNHKFYRESQKKLAKEQKRLSRKKGSKKNEAKSKNYLKQQERVNRIYRHIANQRLDNLHKLSNEIANHYDVVCVESLNMQNLSNKGFKNGKATMDNSYGMFLNMLEYKLKDRGKHFVKVDKFYPSSQICSKCGARHKLSLNERTYKCSCGHVMDRDLNAAINIKREGLNLWTLCKTITSIGLIQWVLSQRRLKQEAPTSKACFKWGWFTIEDLENGTTKDENGLLYNGHDLEKNY

SEQ ID NO: 58939 - protein, 469 aa, unknown
  TnpB Polypeptide
MGQASRTTKLLLDLGKRDQGGTNREKRAALSQTVKILDAARAFYVAFFLTHAEKVSERVPYFSKQHQEMRERLLSTDTLLTWAEFQTVETAEHPYPLATWNFSRAFPDLPFIYRRSVIKDAIGKVRSYLSNLANWQQSGKKRGKPGLPGAANHPTLYEGAFSLELGSLDLRESFVRLKVYTGEQWTWVTYPVKYSRYFEQRRTEEGWEQQSPKLILRPKTAELHSCQTKEIKAKKVMESKRDPDLVTVAVDLNVKHLAVITVRQRGTVLETLFVRDHGLDQARYRHLKRIAKKQWQSGQPVKGERSNQQLWRHVRRQNLDAAHKGARAIATVCAKYPGCVLLFERLRKIKGSGGSRSHRLNRKQANHLRGQINQLAREKAFAQSVVTVEVNPWQTSQRCSRCGARGERFSMRAGQRITHKGGKLFGCLVCHYEAQADYNASVNLHHSFYGEFCWQRKRKSPKQGSGHTP

SEQ ID NO: 58940 - protein, 378 aa, Erysipelotrichaceae sp.
MIAHKVLLYPNQEAEAFLQKQFEYARRDYNRQLETIVRGIQSGKVDLFNLKKWMDAVYAQAKKAPDFYDGESYHYPDIIGWNKKRVQAAAEDYLANPLNKPKYLKHSRYRKIFRLTSAPLDAQRFSVSEDHHLLLGGMHRIKMAEPLRFQTRPIACEISLRNGRYYASFLFAENLKPYLLTGKTAGVTVGSASLVAVADSDGKKVRFALDAKKRTRIHKRIRHLEKMLSHKEIGSAQYEKTRAKLMRAKRKEEDIIRNFVEQTSHTLVKAYDRIGIDDASTQIRLIQHAYAKPYLQEPFSALSNRLQSKAKSHGKTVVKVKDRRSSAPICSQCGERNRKTKGLSNRRWACPHCGAVHDSDLEGAERLCKEALKQERRI

SEQ ID NO: 58941 - protein, 289 aa, unknown
  TnpB Polypeptide
VSSAGLGEPVITLEKVHLPVHYEDTQNEKPSVAWDFNLLSLDGYSPETGWIRIDTSKLASVHTSSFEKRRSVQRRASKSKKARRILAKYSGRERENRARRHQLEITRVIQSVAGVVALELKKQGMFTRSRIWNRRISRSDWRGIARILEGRLWEVKVVELDPYGSSSYCSRCGWFNRDLNGADVFVCGGCGLRINRQLNAAINLYMRMRFGYTEKWVGGRKRVELRVEGASRVAWWDRVVLPSLVGGCVLTGAELKGISEPVRSLYDAVRPKLYYAYDRHADAYLRIPT

SEQ ID NO: 58942 - protein, 404 aa, unknown
  TnpB Polypeptide
MSRYRLHPTPAQEEALLGHCAYARYVWNLAVEQRSWWQPGRPAPGFATQCRQLSEARAAFPWLATGSVIVQQQALRDFHAAWASYFAALREWRRRYARTASDERPDPPGQPSWRKRGLDEGFRVVATGPQDVQRLNRRWAQVLVPKLGWVRFHWFRPVPEAKSYRVTRDRAGRWHIAFCAVPPPIAGPGTGEVVGIDRGVTVTLMLSDGRRYQAPADRGVERLQGRLDRARRGSIRRAKLKARLARAHARNADARRDWVEQRSTQIARDFDLIRIEDLDVRNMTRSAKGTVKRPGRNVRQKAGLNRAILASGWGMFAARLEHKAAGRLEKVNPAFTSWRCSECGTVDRKARESQAVFRCRSCGYSANADLNAARNIAAGHAARGGRGLPRPSNREPQLPTFHVA

SEQ ID NO: 58943 - protein, 233 aa, Fischerella sp.
MTDKLTATATPTPVLTPDAPDMENTVGIDMGLKSFLVTDAGAGVKIPQHYRKAEKRLKRLQRSLSRKHRGSLRRRSAIKRVSKAHLKVSNQRKDFHYKTANKLLSQGKHVAHEKLNIKGIARTRLAKSTHDAGWGQFLQILSIKAERAGLLAIAVNPNGTSQSCSRCGAKVPKTLLDRLHVCPECGLTLLRDHNAAINIKYLAVGHSVNKAQVTSDAVAGVTEKPTLMLTHTV

SEQ ID NO: 58944 - protein, 420 aa, Fischerella sp.
MVTTRRITFKLYPNRQQEKTLHYWRKLHCALYNAAVYNRKTQYQKFGHSVNYLEQQNCLPEFKEVWTEYKPLGSHALQATLKRVDFAFSRFFKGLGGYPKFKASCRYGGWTYPCKAGWKSETDGKNGHLNITNLGKIQMRGKARNWGLPTTCTIMFRNGAWFASITVQCSPSRETGAESVGIDLGCKDAVTLSTGEKIAKPDFIKEGQQKVKVASKKLRRKRSPLRNKKVKGSRRWKRERQKASKLQRKVARQTEDWLHKTTSNIVSGNSLVAGEKLNVKGMTAKAKKGKPKAQKAGINRSILDVGFGMIGQMLEYKLAEAGGFYVESPTQTLKPTQRCSKCWELTPKTLADRVHFCSNPSCNHTEDRDVNAAQVNIAWARGQELSSIHAESPSSTPCGSMRQLGALRREKLRVQRSNPE

SEQ ID NO: 58945 - protein, 331 aa, Fischerella sp.
MDNWLDMLRANYNWSLVDRIDTYQQKFIQGEYCDIKTKSIACPLTCCAVKFGASGESWRDNGKKRSAGEIQITALPELKKARPWYKDIDSTVLQQNIKRLDKAFENFFDGRGFPKFKNRSTMRSFTFTTGVKVDGNKIYLPKLRWMRFYNSRPIPTAFKIKSVTVRKKADGYYVSIRIEDTNVPVFPVKSNSEINTVVGLDMGLGKLVYCSDGSVIDIPRFATNKKTKRLQRILGRRVSRKNKHSHSRRKAQQKLSLFQHRIATKREAHQWQVAKKIIKKADAIALEDLNISGMMKRCKPKYDEKTGRFLPNGRVLNVLCLGQLQMLPGMR

SEQ ID NO: 58946 - protein, 394 aa, Streptomyces sp.
VRRAFKYRFYPTDAQAAELSRTFGCVRKVYNMALAARTQAWVRGERINYSRTSAMLTAWKKTEELAYLNEVSSVPLQQALRHLQAAFTNFFAKQAKYPRFKSRKRSRNSAEYTTSAFRFRDGELTLAKMSEPLNIVWSRHLPEGAQPSTVTVSHDSADRWFVSLLCEDPAVGPLPATDAAIGVDVGLDHLLTFSTGEKIVNPRYERRDRARLARAQRALARKARGDGANRAKARRAVARVHARIADRRRDLLHKITTRLVRENQVVVIEDLTVRNMVKNGALACAISDAAWREFRTMLEYKAQWYGREVIAVDRWFPSSKLCSNCGNLAEVMPLHVRTWTCGDCGVTHDRDVNAANNLLAAGLAVSVCGAGVRSQRRTPSGQSAAKQKPLQREP

SEQ ID NO: 58947 - protein, 414 aa, Streptomyces sp.
VRGGGLRFVACVQVPAAPYGPSGGRAGRDAAGSLLAVQRSPAGTPRCLPARLQDEYQVRRSVGPAQGDPGVRPRASRPLVVLLPAGHPAPPGQGVPSVLPPRQGRSEAGIPQVQGRRPLRHGDLPRGRGRVPLGLHPPHDPQTRIRLQGIGHVRVHQHRPVRGRVKTISVKREGNRWYAVLSCDDVPAEPLPATGAVVGIDMGTTHFLTTSDGAHIARPRFLDQAADELAEAQRHLATFPKRTRRRTKAHRAAVRRVAKLYARIRRQRLDHAHKTALTLVRDHDVIAHEKLKTAGMTRAPQPKPDPDAPGTFLPNGAAAKAGLNRSILDAGWAQFLTILANKAESAGRLVVAVDARNTSRTCPPGLGGCGHVAKENRVTQAKFACTACGFTAHADHVGATNVLDRAGLALCDAA

SEQ ID NO: 58948 - protein, 386 aa, Streptomyces sp.
VKIVTQVKLMPDAVQAPAFERTLPAINEAANWVSAVSFEHWALKGSVRELRKRCYGELKTRGFGAQAAQHIIKRVADAYTTLRANIKAGNLGPEHSKRRRKAESKPVAFRPHAAHTFDDRCLSWNYDTRTVSIWTLDSRVKNVRFTCSPGALKQLAEHRQGESDLVFRDGKWFLIATCEIPEAPRFEPKGFLGVDRGITNLATTSDGDNHSGRRLGRYRRWQARKKAELQARRTRSARQLLKKRARHEARHATHTNHKIAKTVVAVAQRTGRGLALEQLTGIRERVTVPRDQRARQSSWPFHQLGSFIAYKAKRAGVPFIEVDPAYTSQRCPRCGHTEKANRPTRDHFRCRRCGLAGPADHVAGANIAQRGATAWVFVNMPDPAPA

SEQ ID NO: 58949 - protein, 412 aa, Streptomyces sp.
MVIAMQLRYGFRLYPNAGQRAALARAFGCARVVFNDALRVREDARAVGLPFVTAGELSKRLTASKKTPVRGMDDRGVSVILQQSLRDLDIAYRNFFDGLKGKRPKMGPPRFKSRKDTRQAIRFTANAGWKITPAGKLRLPKVGDVPVKWSRMLPSIPSTVTVIKDSAGRYFASFVVETGCEEVLPPVTPEVGIDLGLGHFAVLSDGRKIDSPRFLRRAEKQLKKAQRSLSRKEKGSANRDKARLRVARAHATVADARREFHHQLSTKLIRENQAIAVEDLAVKGLARTRLAKSVHDAGWSQFVTMLEYKASRYGRTFVRIGRFEPTSQVCSACGIKDGPKPLHVRVWMCQLCGTVLDRDINAAVNVAKAAGLAVSARGAQVRPVSVPAQRVEAGTHPKSRPTTARQAGIALL

SEQ ID NO: 58950 - protein, 356 aa, Streptomyces sp.
MCARLYGRRTAKNRAARLACRFTTGTIRVESGVRHVTLPKLGTIRVHEPTGKLLARVEAGTARILSATVRHERGRWFVSFQVEVKRELVHVGRPGTAVGIDLGVKTLAVMADSAGDIREVPNPRPSTRRSPSCAIPPVPSPAAKAQTAGPDSWPPSGGRRPTPPATVCITASRTSASTPCTSSPLVWRPSTAPSWSKTSTSPACSRTGASPARSPTLDSGRPAACSPTRQRNACRTVVANRWYPSSKTCSGCGVVKAKLPLHIRTFECDACGLVLDRDANAALNLAALAAAAVTGTGVAGDLDTPKVSKPRGADHKTRTTRPSRKATAERAGVATLPHQRQTETRDRTQIEALTLW

SEQ ID NO: 58951 - protein, 380 aa, Nocardia sp.
VAAKVVKRAYKYRFYPTGEQAEQLARTFGCVRYVYNRALAERSRAWTQEQRRISYAESDKLLTQWKRERETEWLTEPSKGPLQAALRNLQGAYDKFWRKQARYPRFKKKGRSKDSATYFANCFTFRDGRIKLAKQAEALDIHWSRPLPAGAEPSQVTVSRDSGDRYHISILVEEKITPHAPTDGTIGLDAGITSLYALSTGEKVSNPRHEKKDRARMVKAQRALSKKLKGSSNRAKARLRVARIHARIADRRRDHLHKLSTRLVRESQVIAIEDLSVRNMVRNRSLARAISDASWSEFRTMLEYKADWYGRTVVAIDRFYPSSKTCSTCGRINDSLPLRVRDWTCLCGASHDRDINAAKNIRAAGLAVLACGDGVRPSRS

SEQ ID NO: 58952 - protein, 417 aa, Cyanothece sp.
MIVCHYGEFLKSVKQFLTLVVKLQPTSKQTQLLGDTAQAFADACNYINKTVKHNLTNRNSIQAVCYQDVKEQFGLTANHVVRACARVAANRLTAKQKGRKVKHFKPTSFDCDARTFRFVETGYLASISTTGKRAKIPMRVSNYHIGKLSGQNPTSAQVCQHKDGDWYVHIQLKSDAPKPIKSDNVIGVDFGRRDIAVTSTNKSWSGKEILRKRDKFNRVRASLQKKADATPRRRTAQGNAHQAATQGTRSTRRRCRQILKRLSGKERRYQAWLNHNISKAIIDEAKQSQSFVSIEDLTGIRERTNQKPRNKTERRRSNSWAFYQLRTFLEYKGIKEGIEVIAINPRYTSQTCHCCLHIGLRNNKSFKCSNKACGWIGDADLNGSLMIALVGQSVRLPGGSSLLACSIDSGLQKARAV

SEQ ID NO: 58953 - protein, 618 aa, unknown
  TnpB Polypeptide
LDWLLEIHLSSSTGEARGVCHNCDPRTYRIIKTANIFPFLAICIFTEYEVRKPRGFYPGDETFRAGYHLSLFVRDPWVGLTPSQGSAILLDRNRNNVLHGVSMSQKPTPSFVLTLSLRVNAQQATHLQAHFECARQLYNALLVEAMKRLTRMKADPAWQAARSIPRSDKHARRQAFARLRTQYGFSEYSLHEAAKRLRTSWLAEHIDSLMAQKLASRAYQAANRVCVGEARRVRYRSKRRGLDAVEGKTNTSGLRFHLQAGAEGNQGWLSWNGDQIPALIEWEDEVVHHGLQQRIKYVRLIRHQASSPQRQGADCRGFAFSVQLILEGHPLQKPKNLPGKGTVGLDLGPSTVAIVSGDGTARLLLLAEELAPDGRKRRRLQRHLERQRRANNAEHYDEKGRIRARSKGQGRRVWRESQGYQRTRRRLAASERRLAAHRRSLHGHLANQIIRLGDDLRLEKVSYKGWQRCFGRSVGLRAPGRFVDAVKCVVARTRTAQLHEIPTGPTKLSQYCHACGTYTRKPLSQRFHDCPHCGLGSDRSLQRDLYAAWLASVLDPIRLTFPSRGQLDIHWQSMEACLSAALEETRQHASAQGLLRRFGIPGARACRPVVLSAQHKSR

SEQ ID NO: 58954 - protein, 427 aa, unknown
  TnpB Polypeptide
LTSSKSNSIIRVYPEGQNKSMKLRYRYRIYPNTQQKRLISQLFGCCRVVFNDALAHCQEAYLKGHKKPSSNELSKRLTELKKTEEKIWLGEVSSIPLQQSLRDLEQAYSNFFKSCKGQRKGQKVKPPRFKKRKSKQSAKFTDNGFKLYPESDYIYLAKIGDIKVIWSRELPAIPSSVTIIKDSADRYFVSFVVEFNPKQLPKNGSSVGIDLGITDFATLSNGDKVKSPKPLKKQLKRLRKLQRNLSRKQKGSKRREVARKKLAQLHAKISDTRKDFLHKLSTKIIRENQTIVLEDLQVSGMMKNRRLSRAISDLGWRTFRTMLEAKSVMYGRNFRVIDRWEPTSQRCSCCGLKGGKKELSVREWTCLNCGAQHDRDVNAAINIKVAGGHSETLNGRGGRRKTTAKVAVAIEASTPEFKQLSIFDLLK

SEQ ID NO: 58955 - protein, 575 aa, unknown
  TnpB Polypeptide
MDMITLQSRLIKKSSLQKPALIDVTRDMGAFEHHVRAMVGDILHRQETPEDADSLHVQYKKLGLSDYIVGSMEQVAKGAISAAKEALALDIKTKVQRIPKIEAQIKKKTDQLNRAMNAKAQLAARSRARKDKELPPPFQNPFGNWVQPKHYQDGSLWFLVGGIHKKRPPQKYSSEYLFEVQYLDLRIRRLKQEIANMHARLHDLKGRLERLRREQKAGIVHICFGGKAHLRRRNEAKTPKEVEAWRKEWHDLRRRELTLVGRKDSKCGNWMARYDIATHQLSYKSIRGRQVVIDGVHFPHGQQLVEAAVAAHDIAIRNKKLPLDQQVEGWKPGPVTWSIRDCGNAFLVKCMISVPADPHLNSCFDEGCVAFDMNYDHLAVAELDGKGCLLNHRVVRFRMAGRTSDQVNNAISEALEQVFRQAAVANKPIAMEDLDNPDKCLLYGNKKANRKISEFAHGRMTYLAGRKSQKYHLVVRAVNPAYTSQIGKLKYMRQMGLSVHEAAAYVIGRRAMGFQEDVPAELMHLIRKPAIPVFHLSNWAALYKATKKIPTHCFYRKLNYQEYKTAAALRKALVK

SEQ ID NO: 58956 - protein, 578 aa, unknown
  TnpB Polypeptide
MLTLTSTYIKKKAMLPVSAQELVNDIFTFETLLRTTVYDLPHDIRRKSQHPHPNARESLHRQYKQAGLTDYFVTSLERTAKGIVDAAKEALALDIKTKEQQAIRIAEKINRKKVQLSRVACAKASLAARNRARKNGGIVPPFENPFGKFVTKKVTKEGLAFTVGSVHGKRPPDKYENEYLFEHLYLNPRARKLKKDIHFMEHRLHNLKRRLERLKREQAEGILHICFGGKKLLRQRQAVKNGTQLHDWQRMWDRRRHRDMLLVVRHDSIGGNFIARYDTNSHTLSYRSIQGRQIDIPNVRFPYGQDWVDAAVNAHDIAMRNKKLPPDQQIEGWKPGPVTWAIKDCGDAIQVKCMISLPADPHINSCYSNGCVAFDMNYDHFAVSETGPEGELLEHYVVPFQMEGRTSDQITNAISESLEKIFRHAASVNKPVAMEDIEHPDKCLLYGNKRANRKISEFAHSKVTYLAERKGQKYHLNVKKVNPAYTSQIGKLKYMRLLGLSVHESAAYVIGRRAMGLKDKVPKDMFHLVPEKVVRLHHWAHWAALYTALKKIPVSKFYRKINYHEYETPAALKKALLK

SEQ ID NO: 58957 - protein, 382 aa, unknown
  TnpB Polypeptide
MVQRAYKFRFHPTPEQADQLARTFGCARFVYNHFLRVRADSFFNEKKRVGYNDTAKMLTILKQQPETEWLNEVSNVCLQQSLRNLDVAFKNFFQKRAKYPTFKSKHGPQSARYMSNGFRIKDGQLWLAKQDAPLNVRWSRKLPSVPSSVTVSRDCAGRYFVSCLCEEDIKPLPVVAKVIGVDLGLKDALITSEGERIANPKFLLSISKRLTTAQRRLSRKQRGSKNRAKARVKVARLHARVADARNDWANKLTTKLVRENQVISAESLQVKNMLKNHCLARAIADVGWSEIVRKLEYKSAWYGRTFVQIDRFYPSSKRCSCCGHVLKSLDLATREWTCPECSTEHDRDINAAVNIREAGLAIIAGADMLRLHEKDTGGPPGF

SEQ ID NO: 58958 - protein, 474 aa, Thiomonas sp.
MKTGFRFRCYPSAAQEQTLLRWIGCQRFVYNAKVREDRYFRAFARQSLQHVGQFAPQDQQYAQFIGEDTAWLREVPSVVLRNGAVRWKQAYGRFFKKLAGRPTLQRKPCAQSVWVTSELFQFDAVTDAATGAVQHRLILGTKKFPVGEVAFKVSGSFKVPASIHLTVEAGRWFVSVSFDDGATAPTFQETADWLAKFERQELLERAVGVDRGVAIPAMASTGHAFDFSDAQKRRTEKKAAAIRRWQRKLSRRAKGGANLRKAARRVEALHQYSKNMRRDFAHQTSHVLVSDPSTLLIVFEDLGVQRMTRRARPKQDEHGRHVRNGAAAKSGLNAAILRSAWGQTREFSTYKALRAGKLCLCVPAQHTSQECAACGHIHPDNRPSQAAFVCQRCGHQDNADHNAGRVIAHRGVDRVLSGQYKDKDRKRTMRLRQKSLGPERSEVTPTETTVSLDYSNAVQHGSVKWETPATTPCV

SEQ ID NO: 58959 - protein, 226 aa, Nonomuraea sp.
  misc_feature (81)..(84): Xaa can be any naturally occurring amino acid
VVSHRHLRPAGRSGARAGRVCRGGSGDRQHRHHRHRHRHRHRHRHRHRHRHRHRRWCPSQRQDPERGPSPPPRAAPPPAGXXXXLLRKRRRKEARFAADTNHTIARRIVTEAARTGRGIALEDLQGIRDRVRLRKPQRVTLHAWSFHQLGHFIAYKAARAGVAVVWVDPAYTSQVCSACGHVAKKNRPDQETFACTSCGFAEHADVNAARNIAARGETGWAVSHAA

SEQ ID NO: 58960 - protein, 398 aa, unknown
  TnpB Polypeptide
VEQHQIKKTDSIWKIVDDLCWKAKNVYNCANYIIRQEFINNHNYIKINDLDKIMQKQECYSILGSQAAQKTLQLLDKNWKSFFVAIKDWGEHSEKYLGRPKLPKYKDIKHGRSILMLKNIQCRIENDYLIFSWKPFRKFKIHTKVKGKLMQVRFIPKASHYVLEIVYQVEVPEVLLESKNIVGIDIGINNFATISNNIGVQPIIINGRSVKSMNQYYNKKKAELQTDLKVKHEMDWSNKLQKLTNKRNNKVSNFLHNASKTIIDWCIFYNIDTIVIGKNDNWKQESKMSKKVNQSFVQIPHALFIEKLKYKAENVGIKLIETEESYTSGTSFLDRELPIKENYNKGRRIARGLFKSNNGELINADLNGAYQIIKKVFPNVFTDGIEGAGSHPIRLDVI

SEQ ID NO: 58961 - protein, 362 aa, Ruminococcus sp.
MNKASMAVKTAAASGCFPQKIEANITFFKGMYRDFTSTSVVLKLWNGKKWIWTECGLTGRSFPVNAAVLSPTLVHEGKWLMLHVPVKQENSDARTAKERMKEGCRVCGVRFTNTDSFAVCSVLDERSRPVSVKNCHGGNAYRYHCKTLLKKIEASKVFTDKDNVDQPNKKYYMRYKHLNEHYAHQVSREILDFCKENQAGIIVLPEYDEDFYRMTMYRSGNDSPLHLSTKIRNYLKYKAWAEGILVLELRADGTEKYCSICGSPGKKTEQIVHLPERPPDQPLSERLQKPGLQMPAKLSEKIWIKKLISGRNASYIDAEKSAKEEAPVTQPLRVEYRPAAPAGVAREPYGHLLGVDGVYSKL

SEQ ID NO: 58962 - protein, 409 aa, unknown
  TnpB Polypeptide
MKRLQAYKFRIEPTGEQARSLRRFAGSCRFVFNKALALQQENHQAGNPFINYVAMAKLLTGWRNSADTAWLRDAPVHPLQHALKDLERAYKNFFAQRADFPRFKKKGSSDSFRYPDQKQFKIDQPNSRIFLPKLGWVRYRNSREILGLAKNITISCSNGKWHASIQTEREIEQPIHPAASIIGIDMGIARFATLSDGSHIEPLNSFKKHENRLALLQRRMSRKVKFSSNWKKAKTSVTKLHQKIAHVRKDFLHKTSTILSKNHALIVIEDLKVSNMSRSAAGSVETPGRNVRAKSGLNRSILDQGWSEFRRQLAYKQVWRGGEVLAVPPQYTSQTCPACAHVSAENRRSQARFECVECGFEANADHVGAMNILAAGHAVLACGEAAEVRRSVKQEPAEATTQGSPCLAQ

SEQ ID NO: 58963 - protein, 590 aa, Cupriavidus sp.
LLHTFEARLNLTPELAALLAANSERWSWGARKAWSLLYRQNLTRTTAYATLTREGFTSHQVDSMLTQAEMRHAGLVELKKYERGQLELAIQRRECALADKGKKIQALSKRQAKLRAQRDKVAPKPGKARSNRYLTRLARLREVDTELEFCRNWVAQKERVLTAKRGKLSALLKAIDEGRYSLCFGSKKLLQQRPGEHNTETTPFASVEDWHEAWDTARNGQVWSIGHTAKPSGNSELQWLPDTNQLRVRLTDKLAHERMDALGIPRSGGPQKVMPLRMKCRFIVIDGVDFASHRGAARAALIDAFGKRPVTMRLLQRLSPGGERIWYLQASVDVPTGFNPETARTREAGVLGLDLNARGVAWAVVKPDGNRLREGHPQSGFLGWDLKGLSDAVRKQVIGTTVAELARLGKRLGLAVAIENLDFATKKAGLRAGGVNKRYNEMLSSFASSQFAELMTRACEKAHVRLYLVNPSYSAVGGFTKYGRPNRIGADESAALWLGRQALYGIPWKTVGAQCFVKRHNERLVFSHLPATPKQSKTALAGAQWRDVARALGKNRKRWGENLRNWFLCQVETPSPQTVCEPGVASLPTG

SEQ ID NO: 58964 - protein, 367 aa, Crenarchaeota sp.
MVNESLRIGIANNALSLRRLSLLSYNQLAQYDSPSYYKLCAISRAAGILVARKKSVRRGYATRNPYAVRPLLVSCYGFKIRNGLLEIPVARGQRFAIPLTTHTLHAIAQPGVTVRSFTLTRTRLCLCITRDPPRIECASTIGVDRNLRNLTVGNDNQTQHYDLSKSVRIANTTVRVVASFRRDDVRIKTRIASKYGRRRISRTDHLLHNATKTIVAVAVQRREAIVLENIEGLRSLYRRGNGQGRKYRGRMNGWSFGEAQRQIEYKARWTGLQVIRLSRRETRGSSTTCPRCGERLQSDKRLKRKLWCSNCRTVMDRDMVAAVNLSRRGRVRFARSRPPITEAQGGAGEAMRGNPTPTVIPGVEPRS

SEQ ID NO: 58965 - protein, 390 aa, Chloroflexi sp.
MKQKRAYQYRFYPTDEQGRIFAHTFGCTRFVYNWALRLRTDAYYQDKQRIGYHETSAQLTRLKKQTSWLNEVSSVPLQQALSHLDRAFRNFFAGRAKYPTFKKKQGEQAATYAASAFQWDGKHLTLAKMEAPLDIHWSRPLPPGSQPRTVTVSKDTANRYFVSILVEEDIQPLPEVNKQVGLDLGLKSMVILSTGETVGNPKFFHQDEKKLARAQRRLAKKKKGSKNRAKARHQVARLHARIADRRRDYQHKLSTRIIRENQTVCVESLQVKHMVQNHALAKAISDVGWSEFVRQLEYKAAWYGRTLVKIDKWYPSSKRCCACGHILDSLTLAVRCWTCPECGVVHDRDVNAAKNILAAGQAVTACGESVRPGRAKAPTGDSRRSRKPLS

SEQ ID NO: 58966 - protein, 511 aa, unknown
  TnpB Polypeptide
MLQAYEYRMYPTQTQIPLLMRHVHACRFVYNYSLEQKIRAYEQDGKRISCFDLNNRLPTLKAEYPWLADVNSQSLQYANRNLDNAFTRFFREKKGFPKFKSKKNPVQSFQVPQHYHIDFERCRVRLPKIGDIKTIVHRTFSGKMKYATVSVTSTGKWFVSILVDDELPEPGPVPFSSETTIGIDVGLTDFATVSTGEKVANPRYLKNSLQRLKVLQRRVSRKVKGSQNRQKAIRKLATCHEKIANQRNDFLHKLSFRVVCENQAIAVESLNIAGMQKNHTLARSISDVSWSTFFTMLEYKCRKYGKTLLMIGRFDPSSKICNCCGYMNRDLKLSDREWTCPDCGTVHDRDSNAAINIKKFALQEQNLVGVAGAERAEEPVDYILERSCGRGCDRGVGADPPDLRGNVPCLSLLPLALRGGEELRAQERAILLPAGRLVLCGRLDPARRPCLVRSFDQRHDGVRGRAWLHCLLHRPRVQAERRGAGGPADETRDVGPLEDRLSRGPRRDLLD

SEQ ID NO: 58967 - protein, 502 aa, unknown
  TnpB Polypeptide
MFTQEFPLVVNQEIMDYFHTACRLHCNIYNSIVAEAHRRIRAYRMSADYKIANELWRQDKRTKSAEVKMKELYKKAKINNNLYGQFLFLSFIKGKSKLWEGQYASASMITELYVRVVEVIQNHFTNPKIDGLPYFCKLRNFTTIQGNKNRDKLSYDAKNRTIRFFDYIINIPVQDKSHPDYKRFLYFDKIANTRMSGINEKTGLPRRDDSSANSPISNVRIIKRMFNGVPRLFAQIVVKDEPYSTSAKIEGKVGLDLGVSTVAVVAENVNGKFAELLKFMPNMESIDKERRILERKLDRSTRATSPQCFREEDGRWLKNKKKNKDSNNYKNIRAHLNDIERRRAVYRKNEHGRLTNYIITNLGSTIITENVSVQGWASGKFGKSITEYSPGTFMSKLEDKSDKFIKLNTQKTCLSQHCVCGNKKKKELSERIHHCEVCGRTIQRDLLSAYLMLYTNEENITDFNAAQYNWTEWEPILTSAWNKSGISLQQETSLLTSETTSI

SEQ ID NO: 58968 - protein, 407 aa, unknown
  TnpB Polypeptide
MRLVEQHTIKQSSIYYNELQDLLHKCKSLYNKGLYVVRQHYFQYKNDNTVKYKYLNYYSIEKKLRTEDDVDYRALPTPVAQQVLMMVDRNFKSFFNLLNKKNRGEYSEKVRIPKYLDKDGMFMAVFSTTAFSQKWIKQGIIKLPKQFSFTTRTNKQNIQQLRFVPKNGYIALEIVYNKKEKNLIYDNGNYLGIDLGLNNLASCVSNTGSCFIINGRPLKSINQYYNKRLAYLKSRLKGNKQISKRIRSLTNKRNNKIKDYLHKASRVLINHVVSNGINTIMIGHNRCWKQEINIGKRNNRNFVSIPFNMFISMISYKATLEGINVKIAEESYTSKCSFLDNEKICKHEEYAGRRIKRGLFKTSSGSIINADINAAFNIIRKLAKEAFDVSTLPEGRGFWWNPVRISV

SEQ ID NO: 58969 - protein, 374 aa, unknown
  TnpB Polypeptide
MSGLKTAYKFRLYPNKQQEAMLDLTLETCRHLYNLALADRKNAYEVEGVSRNYEDQAAMLTVEKKDGNFKGVFSQVLQDALRRLDKSFKAFFRRVKAGEEPGYPRFKGQGWYKSFTYPQAGFKLEGSKLTLSKIGSIRIFKHREVEGKIKTCTIKKDKLGRWHAILVSEIEDVPQIESKTAIGVDVGLKNMVALSTGETVQYPRYYVRAEQKLAVAQRDLSRKKKGSSNRRKAKIKVARLHQKIQNHRDEFLHQVSRKLADSADLIVFENLNIQGMLKNHHLAKHIQDHAWGKLIQFTQSKAAKAGKVVELVEARYTSQKCSPCGIMVPKTLAERVHHCPNCGLEMDRDINASLNIVTLGLRGRACGDTRALDL

SEQ ID NO: 58970 - protein, 380 aa, unknown
  TnpB Polypeptide
MYRVYAYRLYPSLAQEKLLFSTIETCRRFYNALLAERRDAWTHEQRSVTKIEQLRKVKELKATNPYARDIHSHVLQVVVADLDRAFQGFFRRVRAGEQPGYPRFKGKNRFLSFGFKEYGNGFKIDGRRLRLHGIGRIAVRWHRPLPCTPKTVRIVRKADGWYAMFTCDVDATPLPPAGRDVGIDVGVASLITTSDGEKVPNPKWYQAGQKKLRRQQRRMSRRQKGGSNWRKAVRLVACHHLHVARQRKDILDKIVHGLVHRYDFIAVEDLQIRNMARNRYLAKSIMDAGWGYFMNRLHAKAAEAGRVVVEVDPAYTSQTCSSCGQRFPEHIDLSVRTVSCPCGLVRDRDVNAAINILRLGRSRWASTSAVAGVAQEAAGL

SEQ ID NO: 58971 - protein, 157 aa, Bacillus sp.
MSRRFKKGVKIQSAGYEKAKTEHLRLSRKITNIRNNHIHQATAKLVKTKPMRIVVEDLSISNLLKNKKLSKAFSFQKLNFFFQCLSYKCEKHGIEYVKADKWFASSKICSCWGVKYDHSVQPEGQWSLKIREWRCASCNSHHDRDLNASINLSRWVK

SEQ ID NO: 58972 - protein, 400 aa, unknown
  TnpB Polypeptide
MLMAHKIRLDPNNVQATHLARAAGIARFAYNWALGEWQRQYQACLLNPALPKPNEGALRRQLNAIKRTAFPWMMEVTKCAPQMAIMQLGRAFENFFAHRARYPKFRCKGRDDRFTLSNDQFQIKDKRIRIPKLGWIRMRESLRFTGHIVSACISRIADHWYLSITVDVPEVRSLPPSENQGAVGVDLGVSNLVTLSTGETFAGPKAIRHAVKRLRRLSRSVSRKMKGSRNRVKARRKLARHHARVRNIRHDSSHQITSSITRRFHTIGIEDLNVKGMLGNRCLARAVADMAFGELRRQLEYKAAWRGGQAVVVDRWYPSSKTCSCCGDRIDVLGLAQRQWVCASCGAAHDRDINAAINLRNMAVSSTVSACRGDGAGLARECKVKPAPVKQESNGTASLR

SEQ ID NO: 58973 - protein, 277 aa, Moorea sp.
MGFYNSRPIPEGFTLKSVTVRRKARGWFVSLQIEDKSVPAILTKDKYEIDPLKVKGCDLGINKLISISNGKTIANPAKQKSFRRRERRLKLRQKAASRKRKGSKNRGKSYSKVASLHERITNKRTAYQWNVANQLVNGTDALVFEDLNIKAMKSRCKPNKNENGGYDRNGQSAKRGLNRSISNAAWGELVKKVEVVAAKSGIPVVKINPRHTSVECPKCHHISKANRKKEKFVCTNCGHYDDADINGSINIRMRGLKKLGIDPRDETLDSGALITNF

SEQ ID NO: 58974 - protein, 373 aa, unknown
  TnpB Polypeptide
MIKGFKIRLFPTKEQEDIMWGHIHGCRFIWNYMINLQNINYKNGGKYLSWIDMCKQLTILKNECFNWLYDVSNHSLQTTIKDLDFSYKAFFNKKARYPKFKSRKNIKYAYPLRCDSIYFDKDNIKIAKLGRVKFKTNYNIKDGKDVKFLNPRISLINKKWILSFGLECENQTPKLTNKSMGIDLGIKETAVASFGGDVRIFHNINKSQKIQNLEKKQKHIQKIVSRKYRVNGSYEKSNNIIKYENILRGIYAKLKNIRNNYIHQITHNLIALNPKRVVMEDLNILGWIKNKHLSNAVIRQCLGEFIRQMRYKCEWAGIEFVQVGRFYPSSKTCSRCGKIKSNLKLSDRIFICECGLEMDRDENAARNLEKYIS

SEQ ID NO: 58975 - protein, 375 aa, unknown
  TnpB Polypeptide
MMMKGFKIRLLPNQEQEDMMWKHIYGCRFIWNYMLNLQKERYKNGEKHLSGFDMCKVLTPLKKLEKYAWLNEISNHSMQLICQDLAKAYDKFFKKLNNNPKFKSKKKAKKTYPIRCDAFYFKNSLTQISKLGKVKFQTNYKIPEGKGVKFYNPRISLVNKKWILSFSMECENQTPILTDKSMGIDLGIKETAVVSFGNESFVYHNINKSKRVRKLEDKKKHIQRIISRKYCTNGNYEKTQNIIKYEKILKEIYYKLSNIRNNYIHQITHKLISLLPKQVIMEDLNISGMMKNRHLSRAIAEQCLYEFIRQMRYKCERAGIEFIQVPRFYPSSKTCSECGLIKKDLKLSDRTFVCECGFKLDRDLNAAKNLEKYIG

SEQ ID NO: 58976 - protein, 284 aa, Gammaproteobacteria sp.
MLLVYRYRVKSLTGLLNRQARACNFVWNFCNDTQRHALKWNKRWPSGFDLNRLTAGSSKELALHAGTINAVCEQYAKSRRQQNRPFLRWRGRRSLGWVPLKGRDLKREGAAFRFAGNTFRVFHSRPLPEGKIKDGTNFSCDARGHWFLNIVIEIPHSAARPVHSGVGIDLGLKDFAALSTGEKIENPRLLRQLADKLATAQRAGKRRQATHIHARITHARRDFHHKLSTRIVREFDYIAVGNVNAAGLAKTRLAKSVLDAGWSSFRALAPLQSDRARGLVRGSQ

SEQ ID NO: 58977 - protein, 387 aa, Blautia sp.
MGKLRKSFKTELNPTEEQKIKIRKTIGTCRFIYNFYLAYNKERHEKGEKFMSSHKFRVWLNNEYLPNHPEYSWIKEAYSKAVTQAVNNGQTAFTRFFHHESAFPNFKKKGKSDVKMYFVKNNPKDCCCERHRLHIPSLGWVRIKEKGYLPVTKDGYVIKSGSVSMKADRFYVSVLVEIPDNKISSHYSEGIGIDLGLKEFAIVSNGKRYKNINKTARLKKLEKQLIREQRGLSRKYEHLKKGESTQKANIQKQKLKVQKLHHRIDNIRTDYMNKTIAEIVKAKPSYITIEDLNVKGMMKNRHLSKAVASQKFYEFRVKLQAKCKENGIEFRVADRWYPSSKTCHCCGAVKKDLKLSDRIFKCGCGYIGDRDFNAARNLRDAVTYKIA

SEQ ID NO: 58978 - protein, 191 aa, unknown
  TnpB Polypeptide
LQRQLSRKKKGSQNRKKAVKRVAKVHKRIADIRKDNLHKITTYLTRKHRVVVIEDLNVSGMLKNHKLAGSIADCGFFEFKRQLEDKAKLYSCQLVVVDRFYPSSRSRCGHQQNMPLNQRVFRCQKCGFGEIDRDFNASLNLVKWYQTTLSSRGSDACGDSSAGVGSPTRYESLNQEGSNKSSEIQLSLGVV

SEQ ID NO: 58979 - protein, 407 aa, unknown
  TnpB Polypeptide
MLLTERHIISKNHRQFKNIDSLCFLSKNLYNYANYLIKQHYKETGHFLRYREIEKQLRENKQIDYVSLPNNSSQQILMLLDKNWKSFFALIKIFKKNKKELSGCPKPPKFKDKVKGRNIVLFTYQQINVKNSFIKFPKKTKLSSLKTNVAKLQQVRVIPQSTCYVIEVIYEEQEQSLVKNNNYCAIDLGVNNLMTLTFNKNIKPIVINGKPLKSINQYYNKKKGKLQSDLEKNHKRKTSNRINKLTLKRNNKINDYIHKTTKKLVDICIKNNISKVVIGCNKGWKQNINIGKRNNQNFVNIPYLKILQQSEYKLKLKGIFVLLNEESYTSKCSALDLEPVQKQDVYLGKRIKRGLFKSSKGLLINADVNGSLNIGRKVFNDVFIPVDIGLVMNPVKVNLNKESYIKL

SEQ ID NO: 58980 - protein, 459 aa, Candidate division AD3 bacterium
VIVHQGYRFALDPTSAQERHLASHRGAARFAFNWGLEQVRASLALRELEWVMGLPRTESLGWSLYALRREWNAQKQGVAPWWGENSKEAYSSGLAALAAALDNWSQSRKGKRAGPRVGFPRFRRRGHPMGCRFTTGAIRDDEERHVTLPRIGRLRTSEATTALRQRLTTGTAWILSAVSSCEAGRWYVAFGCEVQRAVVESNGHDDTVGVDLGVITLATLSTGEVIAGPRALRAGLRKLRRLSRHHARCRRGSANRGRAARSLARHHARVAHLRRDHLHQLTTRLAKSHGRIVIEDLNVSGMTRSACGTVATLGRNVRAKAGLNRSLADASFGEFRRQLEYKCRWYGSELVVADRFLPSSKTCSRCGTVRDGLRLEERVFGCIACGLRIDRDLNAAINLAGWARPDVAPSAGETENACPRGGQPGPRPARPVDAGTGITPESAGMTGGRCHRPGLTPAS

SEQ ID NO: 58981 - protein, 351 aa, unknown
  TnpB Polypeptide
MILTYRFRLKDGTKRDELKTLAGNVNYVWNFCNEVIRRRWQESRFYTSKNDLHVLTKGSSKLLEINSQTIQAVAYECLLRVQKAKKRVRFRTGKKNLGWVPFNGQTVKFHAGYIDYNGYRFRLWEHRKIAEGFQIKTGSFSEDSRGRWYVNLTCEIPDENWFQSPSPHGSELGIDPGTKTVMVSSEGEEFSRENITREYAEDLAKAQRHRKKKRVKAIHAKIKNSRQDWNHKKSFDLAKRYQTIFFGNASSGKLAKTRMAKGIYDAGWHQIKTFLSYKSLRRGGSMLEVNERNSTVTCSTCLQKTGPSGLSGLSVREWICSSCSASHGRDHNAAKNILRVGRYTLSLGHSA

SEQ ID NO: 58982 - protein, 255 aa, Leptotrichia sp.
VNNSIRIEEKKYLVLPKLKRIKLKYHREIPKNYRIKSVTLTNSNGNYYVSILTEFEKEIQKMPNSDKVIGLDFSMSELFISSENQRADYPRYFRMLEEKLKKLQKSLSRKVKFSKNWYKQKMKISKLHEYIKNCRRDFLHKLSKKLSETYNAVVVENLNMRGMSQALNFGKSIGDNGWGMFLRMLEYKLMFLGKQFLKIDKWFPSSKICSKCGNIKEELKLSERSYKCECCGIEIDRDYNAALNIKNIGKAMLKY

SEQ ID NO: 58983 - protein, 415 aa, Leptotrichia sp.
MYLTLKQQVKHLSKNEFRNLKCLSHIAKNLTNEAIYNIRQYYFNKKKYLSYNENYKMLKNSDNYKKLNSNMAQQILKEVDGSFKSFFGLLKLARNGQYNFKDIKLPKYLAKDGFTTLVIGFVRLKDDILIVPYSNAFRKTHKEITIKLPPVLKGKKIKEIRIIQKQHSRYFEIQYTYEVKEVQRELDKENVLGIDLGIDNLCTCVTNTGVSFIIDGRKLKSINQYYNKTNAKLQSIKDKQKIEHITLRQKRIARKRNNRIEDYLSKAARIIINYCLNNDIGKIVLGYNEDFQRKSNIGSINNQNFVNIPYGKLRDKLIYLCKLYGIEFKLQEESYTSKASFFDGDEIPIYDKENQKEYIFSGKRIKRGLYQTSTGKLINADCNGALNILRKSKVVDLSILYNRGELNTPKRIRVV

SEQ ID NO: 58984 - protein, 255 aa, Leptotrichia sp.
VNNSIRIEENKYLVLPKLKRIKLKYHREIPKDYRIKSVTLINSNGNYYVSILTEFEKEIQKNPSNDKVIGLDFSMSELFISSENQRADYPKYFRMLEEELKKLQKSLSRKVKFSKNWYRQKVKISKLHEFIKNCRRDFLHKLSKKLSEVYNAVVVEDLNMKGMSQALNFGKSVGDNGWGMFLRMLEYKLMFLGKQFLKIDKWFPSSKTCSKCGNVKEELKLSERSYKCECCGIEINRDYNAALNIKNIGKLMLKY

SEQ ID NO: 58985 - protein, 394 aa, Kamptonema sp.
MLKAYKFRIYPTSEQKVLLAKSFGSARWFFNFALDLASKTYKETGKGLSRDDIIKLLPGLKKEHEWLSEPPSQVLQQAALDLSSAFLNFFAGRAKYPRFKSKHRKQSIRFPQNCKLDGEYLILPKLKEVYCRVSRLPEGMLKSVTVLMTPTGEYYASCLYDNGKEKPKPSSEGKAVGIDMGIAHFAITSDGSKYGNPKYYRKYEKKLAIRQKRLAKKQKGSRNRAKAKRKVALVHSKITRCREDFLHKLSRKLVDENQVIVVENLAVKNMVRNHSLAKSISDAGWGMFQTMLKYKAEWSGKMYIEIDRFFPSSKTCHVCLNQVGSLPLDIREWTCESCHTKHDRDINAACSIRDEGKRILAGGHLASASGERVRLSKGTAFTQRHSVKEESTSF

SEQ ID NO: 58986 - protein, 213 aa, Deinococcus sp.
VVRRVHLRSPCSAASRNGKLGGCGCGNTVFYHHLRRRVRPQPRHLGNALKKLRVQQRTVSRRKRGGNRRRKAVQQVAKTHRKIRRSRQDFHHKTARKLVNEHDLIAHEDLKVSNMVQSNLSRSISDVGWSAFFDILRGKAESAGRVVVRVPPQYTSQRCHACGHTCRENRNNEMFRCVSCGHEDHADWNAAKNILGRAVPSALNGSGVAHAVV

SEQ ID NO: 58987 - protein, 394 aa, unknown
  TnpB Polypeptide
MLRTYRYRLYPNKVQREQIRKNIDACRFVYNWALEQKKLAYETDSKCLSWYDLNYLLTSLKQDHSFLKEAYSQSLIQAIKRVILAYKHFFRRVKLRKNPGYPKFKSRKARRQSFVVPQFFDVDFEANRVCLPKIGKIKAVFHRRFTGNPKECIVVSTKTGKFFICIVVEDGKQPPRKRLITSEGSVGIDVGLTSYATLSSGEKIKNPRPIQHGFKRLRCLHQRLSKKKKGSKNREKARYRLARYYEHVANQRIDFLQKLSTRIIRENQAIIVESLNVRGMMGNRKLARQISDAAWSKFLRMLKDKAEICGVTLIEIGRFESTSRLCSACGFKNTALQIADRAWVCPECRTHHDRDINAAQNIKMIGLRSIMTPGEPREGPVELSALAEALKQET

SEQ ID NO: 58988 - protein, 408 aa, Methanoculleus sp.
MLRRYQYRLYPTRDQEVLIAKHLGCCRYVYNWALDRKNLAYHDDGISLSGYDLMKQLPALKAELPWLKEVNAQSLQQSIHHLSRAFTNFFEGRADEPTFKKKHAPEQAFTVPQSYTVDFEQGTVKLPKIGAIKTVFHRRFEGRMKTATIICRSTGRYFISIVVEDGRKPPHPADPIPDQTVGIDLGLTHYAVLSTGEKVANPKYLKNTQTRLAVLQRRLDRKQKGSRNRGKARLKVARCHQKIADQRRDFQHQLSSRLVRENQALAVESLNVDGMVKNHSLAGAISDAGWGSFVSMLAYKCQEAGKTLLKIGMFEPSSKTCSVCGYWKTDLTLKDREWACPECGTHHDRDLNAAINIKQFALAGAERAEEPVDSLPIGRRMKQEVPRLRGGSSLRAPALCRRGARRSR

SEQ ID NO: 58989 - protein, 208 aa, unknown
  TnpB Polypeptide
  misc_feature (1)..(4): Xaa can be any naturally occurring amino acid
XXXXAVAYSTEQADLYPGNRLKQDGYCFPKEIANCDDSGGEKATRLHAKWSERRTHFFHSLATHIVERCIENGVGRINIGKLADVRENNNNGESKNWDRNGNLDLHGWAFNRFTNILEYKAKVEGIEVVEVSERDTSKTCCVCGREDDSQRVERGLYVCEEHDDGDGDGDAFNADVNGAENIRLDINHTESNSESSPSLGEDRSPGCG

SEQ ID NO: 58990 - protein, 309 aa, unknown
  TnpB Polypeptide
LTKYNRAMTQVLTVSCKLKVSQSQAAKLDATLDALSLRDANANKGGFATYDARIFSFRERDWTVSLTTVEGRERFELEIGRYQREKLAGFNPKSATLVKRRDGSYSIQICVETEPCPPQRPDRVLGVDLGRTDIAHTSEGDNWNGQQLNNVRERYSRFRATLQRKASKGTRSSRRRCRGLLQRLSGKERRFQSRQRCVAKTWVNHRISKAIVSRAKATNSAIALEDLTGIRERINQQPRSKAERRRANSWAFYQLRQFLEYKARVAGVSLILVPPAYTSQTCHRCLHIHPDPAQSCRVFASALRSNSVA

SEQ ID NO: 58991 - protein, 367 aa, unknown
  TnpB Polypeptide
MERAYKFRIYPNKTQEQLIIKTFGCARFVYNHFLNRRNELYKVDKATLKYTQCSKELTILKQEKEWLQEPDKCALQNSLKDLENAYKNFFTQVKAGFPKFKSKHDRHKSYRTSCNIKFLGNKIQLPKLGKVRIKDSRKNIEGRILNATVSQNPDGKFYVSLCCTDIEKPLLQATCKDIGIDLGLKEFAITSDGEKVENPKYLAKSLQRLKFLQRSLSRKTKGSKNREKTRLKVARLYSRISEQRRDFLQKLSTMLIRGYDKICLENLQVSKMVTNHTLARSISDVSWSEFVRMLKYKSEWYGRKVIQIDTFYPSSQLCSVCGCKNSVLKDLSIRHWECSECGAVHDRDINAAKNILQEGLRIASVIE

SEQ ID NO: 58992 - protein, 417 aa, unknown
  TnpB Polypeptide
MIVRKGFKYRIYPNREQQQKLAVQFGHTRYIYNWGFAQSQEKYPGYNHLAKQLPILKASTETAWLKEAHSQVLQQALKDLDRAFQNFFEKRGGYPHFKSKRTKQSIRYPQPKESWLGPDGQHIYLPKVGHVRLVLHRPLEGVMKNVTVLRAKSGKYFVSIQVEMAMEEPVFTGGAVGLDFGLGEFATLSTGEKIVPPQYYRRAQEKRRRFARQLSRKKRGSRNREKARLRLARLDEKIANQRLDFQHQLSRKLVEENQFIGLEDLNVRGMLANHHLAKSIGDAGWSAFVTMLGYKGEWYGCRVEKISRWYPSSKTCSVCGAKMEALPLNVRLWQCPVCETVHDRDVNAAINILKQSTAGVAGSNAWGQSVGPSTDGYAGRTRKRQLALAVGSSRSLGSGGGYPGPGEYALVTGVSRR

SEQ ID NO: 58993 - protein, 428 aa, Prevotella sp.
VCITIFHTINIQYSFVFYNVIIIFVSKMRKINRTYKFRLYPNKEQAELLARHFGCSRFVYNYFLNQRKEQYRLTGKSDNYYAQAKFLTEMKKQEATAWLKEVNSQTLQFAIRSLEVAYTNFLQKRAKFPSFKSKHSKNSFTVPQFASIAGNRIFIPKFKEGIKCCVHREIVGKIGKVTISKTPSGKYFVSVFTEEEYITPIEKSGKSVGVDLGLKNLLITSEGETFKNNRYTKKYERILAKAQQHLSRKKKGSRGFENQKLKVARLHEKISNSRADYLHKCSVSLVRRYDTICIEDLNVKGMERNHRLAKSVADASWGTFVSMLTYKAEWNGKKIVKIDRFFPSSQTCNVCGNINKQTKDLSVREWECPVCHTHHNRDVNAAINILRFGLNHTSAGTVDYTGGEEVRADLLESRSSVKPEAHKSLACG

SEQ ID NO: 58994 - protein, 367 aa, unknown
  TnpB Polypeptide
MLKAYKYRIYPNKEQKIQIAKTFGCCRFVYNQTLAYRKETYEKEKKSVSKTDCNNYCNRELKKEYKWLKEVDKFALTNAIYNMDSAYQKFFREHAGYPKFKSKHDNYKSYTTNFTNGNITVDFDGNKVKLPKLKGVKAKLHRKFSGQIKSATISQVPSGKYYVSVLVETEHMELPHANQNTGIDLGIKDLCITSDGKRYENPKIIRKYEKKLIKLQRQLAHKEKRSQNYYKTKKKIALCHEKITNTRKDYLHKMSHEIISENQVIVSEDLQIKNMVKNHRLSKSISDVSWYELTRQLEYKAKWNGREYIKIDTFYASSQLCSTCGFQNTETKNLSVREWVCPVCGTKHDRDINAAKNILEEGLRQIA

SEQ ID NO: 58995 - protein, 410 aa, unknown
  TnpB Polypeptide
MLVKAVSFRLEDELPVQARFLLEDFRLAVNRAIRAGLQTRATSKYALCKLAYRGFRTEHPGMYSQHLVSVFEVAASVLKNHRRKARKGKTGKIPYVRRLFMKTENQAYKLDRTNGVVDLPIRAGCHVELRLVLSEYHRGFLDDPSYSLGSLTLFPDRVVIAFRKTEPRAYVPESVVSLDTNERSLDGVFVCEGKGVPVRAPFPEVAMIQQRHHDRRKRLQKKKSHDRRTSRRLSRREGKREHDRVEYRMHQVANAVLDFAEENKAAIVLEDLKGVFKPRRDKPLNRRLSMWPRRKLHHFIEYKAKWRGVTVLKVDPRNSSRKCPACGRIQHSRKGTEFACECGWRLDRHINASLNLLQTAVSKEMVGGLRFDPGALQRDVMMTLYDPGKGARSEPNGTSREGTAAIHAAA

SEQ ID NO: 58996 - protein, 401 aa, Gammaproteobacteria sp.
MDKYWQSLFDKIKSDIYKSSFSDTERHYACWLLKDYARFADALLFKAPNFKELPLKERKRVIHFLNRKIRIHKKQLPKVKKHISFMLDDNCYSVFEHQGRQYMDIMTLIPRKRIAVPLSGHTAIKGNVRILLKGSMIEVHYASDIKHTSTSKNDSVIAIDFGYTEVMTDSDGKQYGTSFGAMMSDASDRLKNKMQHRNKLHALHKKYAQSNKIEHKAKAKNILHFNLGRDKLEEQQRKFKAALNAEINKAFNQLIEKNHAIVVSESLSHSFDYQSGRTWNRRLSSWVKGEMKERLTFKALAKGFSHKQVNPAYTSQTCPPCGYVDARNRKGDKFQCLFCGYVNHADWVAAMNLKSRYDDPEITRYTPYRAVKEILLLRFHRRLEMGLPRTVNGRIPDTAIA

SEQ ID NO: 58997 - protein, 422 aa, unknown
  TnpB Polypeptide
VPPAESSIVHRGYRTELDPTRVQVAAFLKHAGTSRWTFNWGLQRKIETYRATGRTPTRFDLEKELVVRKQTDLPWLRQVSKCARQEALRDLDVAFAAFYRSWRHGRKSGFPRFKRRRLTAASFRFSGDNVKVEAGRIWLPRIGWVRLKEDGYLPVVGVHLVAATVAGRAGRWFVGLTVGRDVPDPPPSRGPVVGLDVGIAHLVTLSDGTMFESPREFGHYAARLRRAQRSMSRKKRGSANWRKSARTVAQVHMRIVNVRADRTHKITTELTRTKSLIVVEDFRAQALGRNRRLSRALWNASLGELLRQLSYKAKWRGGAVQIAPLFFPSTKRCSSCGVVGPALPLAHRTFTCAACDFTLDRDVNAARNLCQLAASPADSNACGEDVRPYLAAALDEAGTAIGGGRSSWKTKVTTTSRVDTMR

SEQ ID NO: 58998 - protein, 434 aa, Nocardiopsis sp.
VCTRTAYKCRAYPDPEQAAQLGRTFGCVRLVWNKTLSARQDAYRQRGEKTSYKATDAALTGWKRGQDLAFLSEVSSVPLQQTLRHQHTAFANFFAGRAKYPRFKSRNGRQSAHYTRSAFRIRGGGLVLAKQTRPLPVAWSWPETDPAALNPTTVTVSREADGRWYVTFAVETEDPEPAPEAGSEVGIDLGVKDFATLSTGEKIANPRHLHRKAHRLQRYQRMMARKQRGSHNRRKAKRKVAAAHRKVRHARQDFLHKATARLVREHDVIAIEDLNIRGMTASARGTMEEPGRNVAQKRGLNRSVLDAGLGEFRRQLEYKAARAGRTVAVVDRWFASSKTCSECGYVLAELSLGTRFWTCPSCRTRHDRDVNAAKNILAAGRAAAREEISGEAGPPLCDTGGAHTVGAGADIRRHGFVLPRSAVKQETGLVRAGP

SEQ ID NO: 58999 - protein, 349 aa, Streptococcus sp.
LELRQNAKQMSNHFQFLGDKRIDSLAKANAIQNYRKAWNAFRKIHTAGVPNFHRKSYVWRYQTNCQYLKQKEAYLTNGTVRFEDSKHVLVPKLGRLRVKGSHQRILARGAETRIGTVTITKDAIGSFFLSMQLASDAPFVTMSKQTNRQVGIDLNTENFLTSSDGQVITNPRYYRTIKGRLAKAQRILSRRARRAKKEHRSLRESRNYQKQRLLVAKIHTQIFSRRRAFLHQLSTTLIKNHDLVVAEELRSKNMLKNHALAMSIADVGWRTFLEMLTYKAEFYGRQFITVNPKNTTQTCHDCGFVMGTGSTKKLTLADREWTCPKCHVHHIRDHNAAQNILTKGIAKLA

SEQ ID NO: 59000 - protein, 380 aa, Paraburkholderia sp.
VKYGCQARVSFPVLPNAPAGSHPCPDVRLRSLCIQLHAPASNRCLATAARARRLSRNFRRSDRAQEDTYAWLNEVSSVPVQQSLRHLQTAFANFFGKRAKYPGFRRKDGVQSAEYTTSAFKWDGQSLKLAKMDAPLAIRWSRALPKGATPTTVTISKDTAGRYHVSILCDDAVSLKPKAQGEVGIDLGLTHFAILSSGEKIAAPRTFRRHETKLARLQRRLAKKKKGSARRAKAKLKVANLHAKIADARRDFLHKLSTRLINENQVIAIESLAVGNMKKNRPLAKAISDASWSEFVRQLTYKARWYGRTLIGINRWYPSSKRCSDCGHIAAKMPLSVREWTCPRMWFDPRPRCQRCPQYIGRRTGGFSPWRKHKSHVSLR

SEQ ID NO: 59001 - protein, 512 aa, unknown
  TnpB Polypeptide
VTFKVDDAANAGKTGALLATVQGWDRAVAFYTDFFLGHPNIFSEKKTYVVERGKHAREERQRPLTNQEILTWAERHTVATRAHPNPLRDFGQVCPQSPTVLRRAAINHAAGAVRSHLSNLARWDATDPKRRGKAPAPPRPHPHLVAYEGLSSLRLEDYREGYLRLRLFDGEQWGWRNVPVQGPPYAAELFSQSQKEKERIAGERAAQNRRMAQEGRTQRTDEEREALRPAVGMWVAQSPSLIPKEDGWWIHVPFEKRVPIRGKADDRRLAEPDLRVGTFDLNAASTVGAAWEGKHCIGIKTIRHARENAKREQTLRTVAKKQRRSGRAVKGERSNRSLWNYIRNLDDSLAWQTASAIVTWAVLMGLQVLVFEHLRSYRPVRGLSWSRRTNRKRSYWLRGKVVKRVRELAIREGVLVVERNPAWTSQMCPNCSHLAERFSPGGIGYPSRLICGHCGWTGDANVAAALNLKQKWDRTFRYPKKRRAKGAAESRRAGDGGAASGANARTADALTA

SEQ ID NO: 59002 - protein, 405 aa, Caldivirga sp.
MQYRVSGKIDFKGTEHEYYHRYKSILGVNAGQVINLNNWMWNSFFELSRQYEQGKLPKFMGKPSPPGFWRDKVLGRGLLRILVRNDRYYIEPINGGEGYLVLKDWGLKIKYAGKIKWAGRQGTLVIKLEDGRWFAYVPITVGEKPAKTNPKGYVRGVYEKVQVEEPKGSNKAFIDIGLNNLFAVVFNHTDTAILIKGSSIKAEYYWWKREIGTYQSIRDWLKNHGFESWRKYHTYYLHAVFKRRERLRHYYRTAIRFLARTLHEMGIGEVFVGYPYLVSQDDGNEFNTNVWWFAKIIKWLGEVLQEYGIRLNVVNEYGTSKQCSICSMKHENGRVKRGLYVCESTGIKINADINAARNIARRVGYETPIPRRMLSYIVTTNGMKPLTPKEGETTKTPKINPTSLR

SEQ ID NO: 59003 - protein, 429 aa, Vibrio sp.
VKDIRVVKINTGASTAAQTELRGESARLWNRLVKLHKFCRKKRWNWLKQSDLEKHLKGRFNLHSASVQALIQKFCANIDSTRTKRKNGDSSARYPWRDQKKFQIVMWKASAIKRNGNRLILSNGRDNAALKVKIPTNLPLGKIVAAELGFREIRLTISNEVDKPISAGQNVVAADMGVIHLAVMTDGVTSKAIVGRGLRSITQGRNRALAIYSELLSKTTKGSRRNRKLRIAKARMLDKYHKRAHNLLHHAANQMIDFCVENEAGTLVVGDIAEMSRNARKKKKGSRRTNQMNSGNPLGILYNYLEYKGKLKGVSLKKENEAYTSQTCPVCGHRHKPTGRIYKCRSCDYVGVRDNVGATNFLNKHHHDGIIKVNTLLPPSIVKYLRPVALRQPVVDRLNGGKLLDTTLLSALGTSVSGSSEPSSLTIAA

SEQ ID NO: 59004 - protein, 365 aa, unknown
  TnpB Polypeptide
VIRTIKLQLNLPDAARESILQTMRDYTVAFNTCAEWGFSNHSANKVNCHHATYFDIRKAVPNLPCALLQGARDCACESLKAIKCSHKPIHKEYSAMRYNQRVIRVNMESRCVSLATSAGRIKAEFFFPEYYRRYSGWKIKSSNLSLNRNDGRFYLHCQVESRTPDLLPEQKVLGIDRGIINIAVCSDNRFFNSSAVKNTRAQYAYLRAELQSKGTASAKRKLKRMSGKERRFVTDVNHCVSKQIVQSPYTVFALEDLTKIRVQKRRSHDFNQKLNNWSFFELEQFIRYKAENLGKQVILVDARYTSQKCSVCGHVYKGNRNGSQFKCRSCGFELHADLNASRNIAQAGISGLGRLPVNQPNVACL

SEQ ID NO: 59005 - protein, 409 aa, unknown
  TnpB Polypeptide
MYQVRRVHIGKTAQLDELAHACGELYSKTLVFFWRTVRHQGIWLKPKHLMRLFTSEQLHAHTSDACVQAFFAGLKSWRERRKTDPTAKPPRKRKWYFRVEYKRSAMSLADGLLKLSNGRGNAPLVLEWAWACPQTVVIHWTGTQYEAIATYTQQEASVAPQGNKVAGIDLGEIHLAVSHDGEHTHILNGRLLRSKRQYRNKLIAELASKIDRKKKGSRRRKKLLKSQQKQLKKLKHQIQDIEHKSTTRLVSTLYEEGVQTLVIGDVRAIRQGNDVGSTNNQKIHQWSHGSVRHKLTYKAQRLGMSVVLQEERYTSRTCPVCCHRRKSKPSGRVFHCTNKQCGWTWHRDGVGAINIRKKYREEFGTPLVVAAMAPATGMRYLPHTSVARWEKEYQRENVCVGNCAEAAGL

SEQ ID NO: 59006 - protein, 293 aa, Gloeocapsopsis sp.
MYLYGYQQMLLHPNIKLKSVLEFICQQANSLINCGIYSARQLYFKADKLIGKYDKDSAEYKTNKHFKALYSQAAQQILRTVAESFESFKKLKQAFNRGELTNKPKPPKYRKSGGLALVTYPKQAVKLKDNQIRIPLGKQVKCWFGLDSFVIPMPSNLKFADIKELRILPRNGCFYAEFIYKLEQVNVSLDKDKVLGIDPGLNNWLTCLSNTGLSFIVDGKYVKSLNRWYNKQSTLKENKPQGFWSKKLADITGQLNRRKVIRFQPTTQYPFRIPRHLCGGEVKSNHCSLLLLT

SEQ ID NO: 59007 - protein, 408 aa, Haladaptatus sp.
MNYNYRYRLNPPADIEERLAWTIDTCRQVYNHFLHRLNRNDDTSAYSEQKLLPSLKKWWNDLKDVHSKVLQKVVQRLYDNLSTLRGRKDNGYRVGTLKWKAPEEYRSFTYSQSGFKLKNTSGQTRLWLSKLGDIPITFHRDLPDEADIKTVSIKQEPTGKWYAILGVETPDEAPEKPANPEKCVGIDVGILKYAHDTDGTAVESLDLSDERDRLERTQRTLSRKQHGSKNWEKQRRAVAERHADLKQKRRDFLHKLSNYYAKEYDLVAVEDLDAKGLMELPDNSRNRAGASWGTFLRMLEYKCEREGTHYVPVNPRGTTKECASCGVSTDKPLWVREHSCPACGFEADRDANAAWNILSRGITKVGAGRSESTPVETALPTDTVVSAKRVLEAGSPVLSEAIRPSRAG

SEQ ID NO: 59008 - protein, 404 aa, unknown
  TnpB Polypeptide
MRLTFKYPVYPTKTQEQTLFAWFDHLCELQNSARNNRKYAHETEGRFVSQSEQEKLLTAVRAKYDDFREVPQDFQVSVLKRVDKAFDAFRRRCKEGAAKKGYPRYKTRVRSLTWCLRKHRVKDKATGGFIRVRQNPIIETEFRYNRLKVPKLGEVKIRMHRPLQGEPKEVTIVKKASGWYAHISCEIPETPKVEPTDAVAVDVGTTHYLTTSEGEKEDNPRWYRQAEGLLRKHSKDFSRKKKGSHRWQKQQHKLALHHERTANKRKDFIGKLVYKLYHQKENNVLVVEDLSVSNMVKNKHLSKSISDAAWGTFFKWCGNIAERDGFHFHQVDPKNTSQTCSACGRKAPKKLSLSVRAFNCGYCGLSVDRDHNAALNILLRAACVHRGERWVTNLYETRNLSVNR

SEQ ID NO: 59009 - protein, 428 aa, Leptolyngbya sp.
MIVTHEYRIYPSLDQTEVMDTWLELLRRHWNYALGERLDYLSRTRESINRCSLVSEPIGEIPSRVDYYSQQAAIKETKRLFPEYKGIYTETQQGNLRRLDKAWKKWMVPDATGKRGGKPRFKKVGKLRSFIFPRVNCSKAGAHVIGNKLKLSKIGEMRINLHRPFPDGFTPKTCTIIKKADGWYASIVLKDASVPEILPLDEVKTAVGIDVGLKELAVTSDGEMFPIQQFYRMGQKRLARAQRKLSRKQKRSKNYLKQLNKVQRLHQKVQRQRKEQHYKVAHQLVKQYDFIAVENLNIRGLAKTRLSKSILDAGWGQLLTIVEAVAVKRGSHFVKVRPHGTSQDCSGCGTKVPKDLSVRLHQCPHCGLEMDRDENAAINIRERALSEVGLILPACGGLDNSQPVKQETSSWDGIQLSLNEALGIAHSA

SEQ ID NO: 59010 - protein, 311 aa, Beggiatoa sp.
LPALSSELSERYKRGAWQQAAGIMKSFYANNRENKPNLKNIKIQGNVNVIQIQGSKTKTFEYWLKISTLEKGKPIYVPINIHNYGKQVLGEGKLRGGVTLSKTDGQWYATLAVEIDKKKPIADLSKKVGVDLGIKNIFTASTGQFFGQFSNPLKKLVDQAEAKRRGKQKLNTCLRKKGQPEVDYRSPKIIATVRNEIGRATNKLVKILERDSLVVLERLNIKGMKFKSRRMNRILKASKIGLALEKLKEKLDYKHIRYATVQAAYSSQECSECGYVHRNNRPTQEKFKCGYCGQTENAEIGWQQLTVNQST

SEQ ID NO: 59011 - protein, 495 aa, Faecalitalea sp.
  misc_feature (190)..(206): Xaa can be any naturally occurring amino acid
  misc_feature (424)..(441): Xaa can be any naturally occurring amino acid
MRGDACMKRYRTFKVEIDPTEKQKQKIAQFQGICRFVCNLYLGENDKRWKSEKALAKTENRKPKSTLMKPAKFFTWLKKEYIPETGKTWINDCPAKAIRQSINNAYKAYQNFFKGLSGFPKFKKKNMNSPKVCFCRNNVYKQPIQSTRWYVQIPKLGRVHLKEKGRIPVFRAMPNGVSILKGHVCEQHGXXXXXXXXXXXXXXXXXCGIGIDVGLKDMAVLSDGTSIININKKRPMKRKMRKHKHLQRIFSRKMEAYRKRKAEIKEKLGRSLRPEEFPSRKKLDKARKAMNACQRKINNAREAHRRQSAALIMKKCPSFIVMEDLNISGMMKNRKLAPAIAQVQWYAFRMDILFQCEKRGIEFRLADRFFPSSKTCPKCGHIHQDLKLSDRTFVCPECGYSDNRDLNAAKNLRDTNRYTVITAXXXXXXXXXXXXXXXXXXNHAEMQCLKQEGESQSFKETSEQIRTIRKEARKDRNESVKRRTQNRSQEREERF

SEQ ID NO: 59012 - protein, 502 aa, Streptomyces sp.
MIGVQLRYSFRLYPSAGQCSALSRAFGCARVVYNDALRARETARSQGLPFPKTGDLSKALITEAKNAPERAWLGEVSAVVLQQSLRDLDTAYRNFFDGLKGKRPRMGAPRYKSRKDTRQSVRFTANARWSITPGRKLRLPKIGDLKVKWSRSLPSTPSTVTVVKDSAGRYFASFVVETGPGELLPQSMPEVGIDLGLGHFAVLSDGTKADSPRFLRRAAKRLKKAQRDLSRKEKGSKNRDKARVRVARAHARVADARREFHHQLSTKLIRENQAVAVEDLAVKGLARTRLAKSVHDAGWSAFVSMLEYKAARYGRTFVRIGRFEPTSQVCSQCGVKDGPKPLHVRVWTCGACGAVLDRDINAAVNIARAAGLAVSACGAQVRPGLVPAPRGEAGTHSTPQPATARQAGIAVLQGGEDVKYPIAEARGKLGELARRAAQHEHITLTDRGVPAAALVSPAELEDLEDALALARLERDRALGRAETPIPHDEARRALLEAAGRGE

SEQ ID NO: 59013 - protein, 532 aa, unknown
  TnpB Polypeptide
LAGRVLRAVGSHLGSLAGKDLAARCAEGRLDSRGKAASRARRKRALTAGSSSRWAGAITRTTEDQVRLARQNLGAERASLRARVRRIESRLVIPAGGKQGRARGYASAAERHAKDIRLRSLKARLAVVERRAESGAVPVTRGGRGLLRKRANLAAAGLTEDRWRAEWEASRWFLTADGEKDKPFGNETLRWHPEERWLEVKLPAPLAHLANRPHGRYRLSCPVEFPYRGDEVAAQAATGAIRYDIAYTPASRRWHVDASWKAASEPVPALGELRRHPVVAVDVNAGHLAVAMVTADGNVTGTPFTVPLNLAGLPAATRDGRLRAAVSGLIATARDHGARAIVIEDLDFAEARAEGRERTGNRPSRGRRGRGFRRAVAGIPTGKLRDRLVQMTANAALAVVVVDPAYTSKWGACYWAAPLRQHHPETTGHHAAAVVVGRRGLGHRARRRASGNQPAPEEAARPAQARPRTRPSAGPAPRKPATPRGPRQPPGTKTRQPHRTTASDQAGQDRPDPPDSQDHLLGVGTEYVRKGP

SEQ ID NO: 59014 - protein, 262 aa, Limnoraphis sp.
MRYCLILPNAVRRVNRETPGNLTNQIAVQSLIYKAARAYSGLSSQLTILAIRRVCGNRKTAKQKNKPVRKFAATSANYDSRTFTLNESQWQVSLTMMKGREKFPLAIGNYQRHLLTSQKPKSATLVKKRSGDYCLQIQIHSEPPKTKETDKCLGVDLGRRDIAVTSAGHSFSGEQTTKVRAHFSRVRQSVQQKASKGASEFAAKMPSISSTVKWTRTEVSSLAKSYNQLSFGSVRQSQQSVHFFGRFNWNSRTHQQETALKN

SEQ ID NO: 59015 - protein, 538 aa, unknown
  TnpB Polypeptide
VSLRRSILAPFVARRPTGARVRTRLFVTGADDEVLTTVGRHLGGQAGVDLGARCGSGRGDANRADRKRSLTAASSSRWAGAITRTSNDQWALGMRNLVAQGRSLGARVARIEKRLAVCCGERQGGMRGYHDAQERFQKQRRLQVLKARLAEVESRIDEGRVSVCRGGARLARVHHNLEASDLTEAGWRQRWEAARLFVTADGEADKRLGNETIRWDPSNGWLELRLPSPLAHLANCSRGRYRIEGVAFPYRGDEVAAQTVAGAVRYDIRYDPVKGRWYLDASWSVSDAVGASMDGAGVVGVDLNEGHLAGSVLDAAGNPYGRPWSVRVDLAGLPTSTRDGRLRSAISEVLRRAASAGCKAIVIENLDFEADKATSKETHGRGRRGRRFRRTVHGLPVARFRDRLVQMAANAGISVIAVDPAYTSRWGAEHWQVALQTNHPTLQISRHHAASVVIARRGLGHKARRRTGVPQPQRIHGDERATAQAAPEPTAGEETRPREGGRASPLREEDSRPATRTRRATRTPKTVRGVRVSLVGTQ

SEQ ID NO: 59016 - protein, 348 aa, unknown
  TnpB Polypeptide
MRLIFASLVLNVFLYHHSGIITDVSWCSTNATLQKERICIRVTFYKSRLCNSRQQWQMLFEVSTFHGDHLPIGYVSGSLKEVRVRPYYSDFLVICVYETESTEPLPENGNACGIDFGISNIVALVSNTQKCMLYKGGALKAQNQWYNKQRSYYQSIAMQGHEAKEAKQPGVLNTRRMEQLNRKRNQFFHDALHKITSDVVKFCLENDIRTIVLDKNKNWKQNCNLGYRNNQIFVQMPIATLSYCIKYKAEANGLFVMEQEESYTSKASLVDGDKIPVVGDQEKPSFSGKRVSGRLYCTKEQMLINADLNGAGNILRKAYPTAFEGITDYHFLNKMIVKKYNTMYSRNG

SEQ ID NO: 59017 - protein, 373 aa, unknown
  TnpB Polypeptide
MWDEREQMERTIRIKIENQDLKDTIKQYFQAYKFCIDKGIELHTSNKKKIHDATYKELRQLYPKIPSALLQTVRDVACENLKALKLKTKPLPKNKFIRYDKRTFSFKNGIVSISTINGRKKFNVTIPEYFKKYIDWNCKAGTVTLRDNQLWLNMIFNKEVNQKVEPKTFVGLDRGINNIVVTSDNEFFNSKQLKQIKGKYQYLKKMLQSKGTPSAKRHLKKLKWKEKRFVRDVNHCISKELASKNVDCFVLEDLKKLPRNKGKQFNKKLGNWSYYQLGNFLDYKAEDFGKMVTKVDPRYTSQRCSKCGHTERTNRCGSRFKCKKCGFELNADLNASRNIVQLGKAELNRLNINQPIVTVGTSVTSSHSLEVGS

SEQ ID NO: 59018 - protein, 498 aa, Geobacter sp.
VQITSGIKYRLRPDGQQAEVLSQWIGCQRFIYNAKVGEDRYFRTFSRKSLMHAGLLPPVDQKYSQFVSEETAFLRDVPSQILRNGAYRWMTAYQRFFKGLAGRPKSKGKDGRQSAMVTSELFSINILKDEVTLGTGKHPVGTISYTRHGERRPVPKSICISRHAGTWWISFSYDELHPDKAEPVSEKELIELFQAMPKEELAAVTTGSDRGVAIPVAGSNGVDFDFDPVTKARMQKKEHSRRRYQKKLSRQQEGSKRKARTKLRIDRTYAYQANSRHDFAHKTSRKLVDSESRVFVFEDLKIQNMTRKPKAKQDPITGKYLKTGARAKAGLNRAILGSGWGKTVAFTIYKGLRKNKLTIKIRPNGTSQECSLCGHTHPDNRETQSLFVCQSCGFTANADYNASLNIKRRGVDALSSGAYAEKQKKTVRFRKSAAARDGAPEVKRASHKGAADSTKTITAAQETTIRRRRAKPASAGVHESRNPHYNEAVPSAAQFSGG

SEQ ID NO: 59019 - protein, 513 aa, Geobacter sp.
MSKTFIHEMPLQTTPHDEAALDVRLDAARQLYNACLGETLRRLDLMRESKAYRAARKLKKSKDRNDLFKAAKAACAFDEYSIHTFAAKTKNACWIGDHLDINTAQKVASRAFNAVEKHIYKGHGRPGFSRYGEFVTVEGKNNTAGIRWREGLVHWSGLKFKPLFDLKDTHGVEAHALACRVKYLRLVKQTLKGKPAWYVQLVLAGVPHQKAKNLVVDAVSGLDIGPSSMAALGEEDALLTQFCDEVIQPWQELKIDQRAQDRSRRATNPENYNEDGTVKKGSRKWHRSNRYKKRQNNIAEKQRVIAATRKKQHGTLANKVISIGKHIKTEKLSYKSFQKNYGRSVAVRAPGKFVAMLTRKAENVGGSVTEIATQSTKLSQTCICGVIKKKPLKLRIHLCECGVEAQRDLFSAFLAKHCDHKTLDIRQAETAWPAAKPLLQRAISRLIETASRGPRPASFGLSKAQRQSCLPVKDGSTFIEVADVVARRVNAGESRKEMLVLPSKPPGFIHGVV

SEQ ID NO: 59020 - protein, 409 aa, unknown
  TnpB Polypeptide
MRTAYRCRAYPDPAQQQVLARTFGCVRVVWNRTLAARQARWHLERTGTSYAQTDRALTIMKRDPELAFLTEVSSVPLQQALRHQHQAFAAFFACRARYPRFKSRRGRQSAHYTRSAFTLRGGQLCLAKTSAPLRFTWSWSEVDVTTLDAAMVIVSRESDGRWYVTFTLDADAPQPLEETGRAVGVDLGVTDFAVTSDGDKIANPRRLDRKARSLARYQRRMARCQKGSANRAKAAAKVARAHRKVRHARADFLHRASTRLVRQHDMIVIEDLNVSGMVRNRHLARAISDCGWGEFRRQLAYQCERYGRELVVIDRWYPSSRTCSACGHRLAELSLSTRHWTCPACGTRHDRDVNAAKNILAAGRAAARGSPGDACRAEVRHAGFPRMHSAAKQEPGPVTAGIPVPPGEE

SEQ ID NO: 59021 - protein, 177 aa, Microcystis sp.
EKGSKRREKARKRVAKIHAKIKDTRTDFLNKLSPRVVRENQTIILGDLNTSGMVKNRKLSRAISDLGWRSFRDILSAKSDKYGRDFRIISRWEPTSQRCSCCGNIGGKKALNIREWECLFCGTFHDRDVNAAINIKVAGGQSETSKNGRVGQHKTSVKEAASREASTVRLSSRPKPH

SEQ ID NO: 59022 - protein, 401 aa, unknown
  TnpB Polypeptide
MRKINRTYRFRLYPTKAQTELLAKHFGCARFVYNYFLNQRIEQYRLTGKSDNYNAQAKTLTELKKQEETSWLKEVNAQALQFALRCLETSYTNFFKKRAKFPNFKSKHSKNSFTAPQFAYIAGNRLFIRKFKEGIKCRVHREIKGKIGKVTITKTPSGKYFASVCTEEEYITPIEKSGKSVGVDLGLKDFLTTSDGEKFKNNRYTKKYESRLATAQRHLSRKKKGSRGHESQRLKVARLHEKVSNSRADYLHKCAIELVRRYDIICIEDLNVKGMIKNHHLAKSISDASWYSFVAMLTYKAEWNDKKVVKVDRYFPSSQTCNVCGYVNKDIKDLSVREWECPECHTHHDRDINAAINILHFGLNNTSSGTGDYTGGEGVRTDLLESHSSVKPEANEPLAQV

SEQ ID NO: 59023 - protein, 390 aa, unknown
  TnpB Polypeptide
MQRAYRYRFYPTSEQEILLRKTVGCCRFVYNRALAMRSESWTQNKERLSGFDLQKRITLWKKEEGTEWLKEVSSVALQQSINNLEVAYQNFFAKRAKYPTFKKKNAGGSCRFTESSFRIKDGAVWLAKTKTPLDIRWSRPLPEGAKPKQCAVKLSPSGQWYISFLCEVEISHLPPVDSHVGIDLGISALATLSTGEKICNPKAYRKHKRKLAHRQKHLARKKPGSRNREKARLKVARLHQKISDTRKDQLHKLTTRLVRENKSIALEDLHVRGMLRNHCLAGSISDASWGELKRMLEYKCEWYGRELRVVDRWFPSSKTCSACGHVVEKLPLNIREWTCTCGAVHDRDVNAAKNILAAGAVVNACGGTVRPKSVKARRQVSVKQESPSFR

SEQ ID NO: 59024 - protein, 437 aa, Sulfobacillus sp.
MQETTVFTYRVSLPPTEWAKASAARRSAGDLWTRLVKIHRFCRKRHWPWPTEAQLKAHFKGRWPLHSQTIQALIEKFFATMDGVRTKRQNGDKKARYPWRFRRYFNPIFKRQALKMQGSHLRLSLGRGREPIRVRLPDALPTGMRVQAELGYGEIFLTVTRILDDPQPPVSEKAGGLDIGVIHLGVVSDGQEALAVSGRGLRSIKQGRAKGLAHLQKKRRRTQSGSRRRKRLNRARHRISQKVERVTRNALHHAANQIVAFCLATGITMLYAGDLGTLNHQKRHRRSRRTNQEIGVLEFGRLEQYLEYKLRRYGIPLIKISEAYTSQTCPHCGHLNKVAGRTYHCRACDYQAHRDGVGAVNILNKGMHQGEIRPGTLLVPERITYRRPVPFKRALRRSPAEPRHVAGGISGSESGGSLRGVHTPRRSHNGSLRISAL

SEQ ID NO: 59025 - protein, 402 aa, Escherichia sp.
MKRLQAFKFQLRPGGQQERQMRLFAGACRFVFNRALALQNENYEAGNKYIPYTKMASWLVEWKKDTETEWLKDSPSQPLQQSLKDLERAYKNFFQKRAAFPRFKKRGQNDAFRYPQGVKLDQENSRIFLPKLGWMRYRNSRQVTGIVKNVTVSQSCGKWYISIQTESEVSTPVHPSASMVGLDAGVARLATLSDGTVFEPVNSFQKNQKKLARLQRQLSRKVRFSNNWQKQKRKIQQLHSRIANIRRDYLHKVTTIISKNHAMIVIEDLKVKHMSKSAAGTISQPGRNVRAKSGLNRSILDQGWYEMRRQLEYKQLWHGGQVLAVPPAYTSQRCACCGHTAKENRLSQSKFRCQVCGYTANADVNGARNILAAGHAVLACGGMVQSGRPLKQEPTEMIQAIA

SEQ ID NO: 59026 - protein, 265 aa, Cyanobacteria sp.
MHDKHQIIEEPCEVKVSRTVLKTSEAGDSLAEFNTVTSEGEKTSGKEITQVRDKYTRVTASVEKKASNGTRSSRRRCRQLLKRLGGREQKFQTLVNHTISYRHVQYAKATGQAIALEDLTGIRERTNELPRSKTERRRSNSWAFYQLRQFITYKAVKFGVNPILVVLRYTSLTCHHCWHIHPNRGESYRNGKSFRCGHCGWHGDADLNGAKNIAAIGHLLAVPGGSGLACSLSDRVLGLLKSPRSASATWGRLNACPIRIIHVSE

SEQ ID NO: 59027 - protein, 424 aa, unknown
  TnpB Polypeptide
MDYVLKYRLLPTTSQREHLDWVRDTVRQVYNHALHRFNRIPDSAGTVTQRVRQVRGELPELKDWWTDLRNIYSTVLQEAVERIDTNITNLGKLKEAGYTVGSLNWQAPHEYRSFTYRQTGFELDEKSGPAGRGLLTLKKVNGETLEVPIRLHRDIPTETHVKHVTVKKDKTGAWYACLSVERDTPEKPAPSDIDTADTVGIDLGILSFIHDSDGRQIERLDLSADRERLEREQHNLSRKQYGSNNWEEQRRRVATVHKRMGNKKADFKHKVAAFYTSEYDAVFVENLNVKGMLEGGRNSRNTAEVGWRDFITILRHHGRKHGCHVVEVDPENTTQKCHQCGVTTAKPLWVREHSCPSCGYTTDRDYNAALNVWERGVEKLGVVHSEDTPAETATATETENSASVSASRVVETGSPYLKEAVADG

SEQ ID NO: 59028 - protein, 397 aa, unknown
  TnpB Polypeptide
LRRTNILKLVPDEDQEAKLFALCTLSSVLWNKITFKRRQSFFDGTLDWDTTEEYQDFSPQIGSATTQQIIRKNNEAWKSFFALLRKKKQGKLSPHIKVIRPPGYWKDRKTGKRILRSLIRTDCYKFEARRLLLPNKLAITYHGNLNWHGKQGRLEIHFDMLSKGWYAYQPVECTPLHQPLGNKKAYIDLGVINVLTTYTEGDTRAKLYSGKSLLSDWWYWNKQIANYQRKLGGKPRPTKKLNKLYRTRKRRFRQGINTMIYRFVKDCYEKGVSEISVGDLTHIRVDNDKGKKTNAMIHNFWSFRYIVDRLNITAENFGMIVKTIDESWTSQTCSLCGKRHRNGRKHRGLYVCKTANKVLNADVNGVANLSNPIFPGPRMVERDNWVMAHPEVVRIRG

SEQ ID NO: 59029 - protein, 394 aa, unknown
  TnpB Polypeptide
MQLVERHIRINDKAIEALCVKAKNLYNQSLYYLRQATFGKIQHFTEYELSSLFAEFNQEDYRALPAQTSQQVIKQVFKNYKSWYRARAEWEKNSSKFSGRPKLPKYKKVTSEVIFTGQQLKLKDGYIHFPKMTNLQPLKTKVDNICQVRIIPQATCFVIEVVYNKEEVKNGNLKKENVLSVDLGLNNLATCVNNVGKQPFIINGKIIKSVNQMYNKTKAKLMSYVGDRGTSNRIKKLTFYRNNFIEDKLHKTSRFIVNYCLENEIGTIIIGYNKQWKDEINIGKVNNQKFVFIPHSKLIDKITYKAKLVGIEVIEQEENYTSKCDSLALELICKHEVYSGKRMTRGLFQSSVGKLINADVNGAINIARKVIGDYFAMSIINSGFVFNPIKLNII

SEQ ID NO: 59030 - protein, 424 aa, Anaerostipes sp.
MKGKKKDKHYLCVKQQLKRLTKEEYLILRELCHAAKNLYNEGLYSVRQHFFQTEEYLPYAKNYHLLKNSENYKLLNSNMGQQILKEVDGTFQSFFGLLKLSRQGEYSFQDISLPHYLPKDGYMTLVVGFVRLNGNQFILPYSNAFKKNHKPIIITIPPILMDKKIKEIRIIPKANARFFEIQYTYEAEPIEIQINPNKALAIDFGINNLATCVTDEGASFIVDGKHIKSINQWYNKENARLQSIKDLQGIKGTTKRQAILARKRNNAVNDYINKTCRYIINYCIDNQIGHVVIGYNKDLQKNSNIGHRNNQNLVNIPVGEIRKKLEYLCALYGIHYMLREESYTSKASFFDRDVMPVYGEEDSQTPATFSGKRVKRGLYRTSTGYEFNADVNGALNILRKSNVVCLDALYSRGVVATPMRIRMA

SEQ ID NO: 59031 - protein, 380 aa, unknown
  TnpB Polypeptide
MIRGYKIRLYPTKEQEQLMWKHIGCCRYVWNYMLELQQTRYKNEEKRLTGFDMIKLLTSLKKDGDHDWLTEVSNKSLVEVCRDMDKGYQRLFGKISRAPKFKSKKNDKPSFPARAECMYFKDPMHVNIEKIGKIKCKTDFVFPIGRSVAKFSNPRISYKNGKWMLGFGMERENQAPALTDQTMGIDLGIKDLAIAELNGEKIVFHNINKSKKIRYLKNQRKHTERTISRKYEGNRVGNKYFKTNNIIREEDKLRKLHARIANIRHNYIHQATHTLISKLPKRVVMEDLCVKDMLKDRHLSKYIHEQCFYEFIRQMEYKCEWNSIEFVQVGRYYLSSKTCSQCGYVKKNLKLSDRRYVCDECGLVIDRDYNAAINLSKYTG

SEQ ID NO: 59032 - protein, 365 aa, unknown
  TnpB Polypeptide
MKRGFRIRIYPTEEQEELLSFYCKTAHNMWNFLVAKYKDKLPVCNAYGIKDYTPRDLINEYGVEIPQRIAFGVMKTYCAAAKKCFDKLGNAPKFHKYDPNKQSFYVTSTTVKVKNETVQMTLVAGKKVTSKNILLDPQQIEKFDITEIIEPRYTCLKGKWYISGCCNVPDVEDAGIKEWIGLDWGIKNFMTTSNGEFLNYPKTVLREYQRIKRLQSIMDKKKRGSNNRDKMKKKLFSAYERLENLKRDFIEKSTTEICKTSNVSVEDLKGIEKRPQKFIRRQMVIAPRDRFIEKLEWKCKRFGTRFVKVSPAYTSQTCSVCGEVHNLKLKDREMICECGNHMDRDVNAAINIRNAAQAASVFVAP

SEQ ID NO: 59033 - protein, 527 aa, unknown
  TnpB Polypeptide
MMHKSKKHSILETVLPGDKQQRTYQSRIAPLPEEDNLLGAYAGLFSKAQRTLFAKLQAGGEVASLKRQFLPQFGVSARQFNAMSAELKGKISSIKERRPGLIKESEQRIARAKKVLKKITNPAKLHNKKRRIEALQTRLDHMKADHTDGKVRLCFGGKKLLNAQFHLQDNGYANHDEWLADWQDKRSSQFFVLGSKDETAGCQSCVATVAGDGSITLRLRLPNALSKESKHITFNNIRFEHGHTEIVSAIGRNLSNNKDDWQAISYRFLRDDKGWRVFVTVAVPEVKKISDSRLGVIGIDINADHLAITETDRFGNPVECFTVRCVTYGRTSEQRSAIIGDAVKQAMAFAVDRGKPVVIEKLDFQKKKSALESQAAQYARILSSLAYTQIQTTIRARAFDAGVEVHEVNPAYTSVIGQYKFKDRYGLSAHNAAALVIGRRFLGFSETLPSQLHGTLSLSVRNRDRHVWSKWAAVSRKTSAALAARRRSELSRSSPSPVCSMGQGTACDTSAWTGEIPVCESSQELFV

SEQ ID NO: 59034 - protein, 527 aa, unknown; identical to SEQ ID NO: 59033
  TnpB Polypeptide

SEQ ID NO: 59035 - protein, 406 aa, Lactobacillus sp.
MVKLGRTLKLRLYPDTFQADEFLAMAQEYQRLANIVSQWVFDHDFPLSWLKINNHLYKKLRQASALNSQMVQSVFRTVVARYKTVQKQMRQHAYRYKTADNKWIQVSRDLTWLEKPIHFRRPQADLVRQSNYSFINGMTQISITTLGKRTKLAFTNKGFEKYFQNDWKLGTAKLVHNQGKWFLHIGITKDVADFDRENNPRIVGIDRGLRFLATAYDHLGKTIFFDGHKILLRRKKFLENRRHLQSKGTKSAKKKLRQLAQRENRWMTDVNHRLAKTLVAAYGPNTLFVLEDLTNVTFNTDDLPKSLRNSHRSWAFFQLESFLTYKAQANQSTVVKVNPAFTSQRCPKCGLIAKANRHHDTHEYWCAECQYRCNDDRLGAMNIELLGQDWLSGVKRPKIQKLTTIG

SEQ ID NO: 59036 - protein, 368 aa, Nonomuraea sp.
MAQIVKRAYKYRFHPTPEQTSQLARTFGCVRFVYNKALEERTRAYALEGKRVSYAESSAMLTAWKHSGEFGFLREVSCVPLQQALRHLQAGFANFFAKRAKYPVFKSRKKSRASAEYTRSAFHWRDGELTLAKMDAPLAIVWSRSLPEGAQPSTVTVSKDAAGRWFVSILVEETIALLAPVQQAVGVDAGITALAALSTGEKIVNPRHERRDRRKLAKAQRALSRKEKGSNNRAEARLKVAKAYARIADRRRDHLHKVTTRLVRENQVIAVEDLTVRSMVRDHSLARAVSDAGWRQLRSMLEYKARWYGRTLVAVDRWFPSSELCSVCGCVQEKMPLNVRMWQCACGALHDRDVNAAQNVLAAGLAEN

SEQ ID NO: 59037 - protein, 118 aa, Acinetobacter sp.
LEKVCLQRLDLHHKLTHHLICENQATTYAVEDLGIKNMVKNSKLAKSISDVAWGQFLTLLEYKAQWYGKNILKIGRFMPSSKTCSFCGYKMEKLPLSINVSLNIRNFALANALGLSAV

SEQ ID NO: 59038 - protein, 405 aa, unknown
  TnpB Polypeptide
MIRLQAYKYELMPDGGQERDMRRFAGACRFVFNRALALQKENHDAGGEFIGYVAMAKHLTAWRNHPATVWMKDAPCHPLQHALKDLERAYHNFFAKLANFPRFKRKGCGDAFRYPDRKQIKLDQINGRLFLPKLGWLRYRNSRDVLGELRNVTVSLSGGKWFVSIQTRREVEQPLPTATTAIGIDVGIARFATMSDESYIAPLNSFKKHQRRLARYQRRMSRKVKFSNNWKKAKASVQKVHTVIANARKDFLHKITTTISQNHALVCIEDLQVRNMSRSAKGSSEQHGKRVKQKSGLNRAILDQGWGGFRRQLDYKVAWNGGTLLAVPPHHTSRTCPCCGHVSKDNRQTQAKFLCVDCGYENHADVVGAINILERGYRLLACGESAQQGRSMKQEPAEAATQITA

SEQ ID NO: 59039 - protein, 554 aa, unknown
  TnpB Polypeptide
MLTLQCILEFKNEKDKEIVLDLMRRFSSAMRYAYKRLLEGEKRKDLKKHLSKLFNINTRYSDDAILLVQSMISSYKERGQNPKKIIFGSRKVFEQLSRNHLTGKRRKQLKTKWKESRQGNLYSRGDKTKQGNLNLRFEWINDKLYLRINTGDRQYIYTKVIRGVKREKDKWIEFMFMLENAYKYGAWFLYSVRLKVKNGNVYAFISVEEKLPPVTIKKDNGIIGIDINAYPFHLALATASKDGNLENYQAISLHELLDVSSEKRQYLEWQIAHQIIEIAKKENKAIAIENLDKLPKGKRGDGFAKLRQKLQKWIYKRLLNKIEITAKRNGIEIRKVNPAYTSLIGKLKYAPQFNIDKDIAAAYVIARRGLRFKESLPKNYKGLLNDKDFLLFSEASIEDKIAKLKKEIKEEKNQYKRNKLKSKLSRLRKELKALQKHLSFIIESEKSKSVSQQPVNQRKEQVRDLPVGRYKNWQVLFTALAFPCLESYRDFSPLKRVMISRDWVRMVNRLVPVLGAGSMILPKYRLLGLEVSEMAEYKYPNPNCADQYSFVQFG

SEQ ID NO: 59040 - protein, 507 aa, unknown
  TnpB Polypeptide
MYITLRFKLIENSKEDLEILKNLMKLQSSAVRYAYNRIREGYADKDIYHLIREKFPSLPTRYITHAINKAKSINKDHEQIVFGGKKIFEKLCKNHLQGKRREKLKEQWRQNRKYNLISIGTANNTDKGNRLLRFEKKNDELYLRVNIQPRKWIWLKVKRQISSKNDKWAVFTAMLDDLWKNKRYLPYTVELKIRGNDIYGYVTFGFPVPSTYITKNNGVIGIDTNASPLHLALAEISRDGNLVSYERHELHNFLLYEKNRKEYEEWILAHKIVNLAIEKQKAIAIENLNKVNKGYRGDGKAKLRKRLTKWNYKSLLSKIESIAIQKGVEIIKVNPAYTSVIGALKYAPILNIDKDIAGAYVIARRAMGFKERIPINYKKLLKDENYINYALERLNNEIQKLKEKIKQEKDKYKQNPLKQELNIILNDVKKLESFQSESSFCKGANGRNLEQTNKAWQVLRVALVIPVLGKVFTRDFSSLKTLLVLGDVDRVASRLVPAQADGATLRK

SEQ ID NO: 59041 - protein, 393 aa, unknown
  TnpB Polypeptide
MGYRTVEIRWTPDRPSQWATYTGARVEAARLWADLVARHHRLRRLNWRWPSKARFQRWAKRRYPGLSAQAAQQIIGEFIEAVDATRQLRKNGHAEARYPWKRPRYRDVVYTNQDARIRDNRLVLPNGKSGTLRIPLPHDRPLPGRLMEVRLCLGCVLLVYEIPDEPHHQRTVVGIDLGVNTLVAATDGTKALLISGREAKATVQWRNKRLASAVSRQSKMVKGSRRWRRVQRRKKQMLAKTRRRMNDLIHKATHRVAQEFPRATCYVGKPFNEAAQKMNGVWAQQVSQASNGKITRQLDYKASGAIQIDEHYSSQTCPHCGARNKCRRVYRCRTCGIVAPRDVVGSTNILCIGLYEEMRTNQALATKVVYARPVKVFRREPDSSSGHLAGSSV

SEQ ID NO: 59042 - protein, 463 aa, unknown
  TnpB Polypeptide
LGAGGRGFESRHSDDIITYTIHKTFIRRLLVMFEAIKIALDPTPRQLRLLCSHAGAARFAYNTGLAHVKNMLENGGLLDWSHYALRRWWNANKDTLAVNPDTGVVWWSQNSKEAYSMALRDLAQALSNWSKSRKGQRKGRRVGFPRFKSKKAVMRFAYSTALTAPTASDPYGLKLSRIGRVHCMENVYKRVNGARLVRVNLSCRAGRWYASLTVEREPSTTRKPKRGAIGVDLGIKHLATLSDGTVIPNPRALNARSKALRKAQKALSRKTTGSTRRKKAQERVARLHARVTDVRMDAINKATTMIAQTYNVVCIEDLNIAGMVKNHHLARSLNDASLGEFRRQLEYKTAHTGASLHAVDRWYPSSKTCSNCGTVKAKLSLNERVYHCDVCNLSIDRDLNAAINIMVAGSAPETLNARGGDVRRADALSGNADPSETRTKQPPKGGMRLGAGLGNEAMRAKTN

SEQ ID NO: 59043 - protein, 337 aa, Streptomyces sp.
VIRAYKFLMRPTVRQEQALSEMLRDHCSLYNGALQERRDAYRHVSKTSVRYGMQSAQLKDIRAFDPERQGRWSFSSQQATLRRLDKAMQAFFRRVKSGDSPGYPRFRGVTWFDTVDFPKDGDGCRWDYSAPHDPVTRVCFQGVGHVKVNQHRAVVGRVKTVSVKREGRKWFVVLSAEQDQPEPLPATGSVVGIDLGIANFLADSNGGFVPNPRHGRRAAQKLQAAQRALSRFPRRTAKDRTASHQRAVEKAAQLHGTVRRRRLDHAHKTALGLVRAHDFIAHEDLRIRSMSKAPAPKPDPPGRPAPSCPTGLPSKPGSTCRSAMPVGGVPDDPARQG

SEQ ID NO: 59044 - protein, 351 aa, unknown
  TnpB Polypeptide
MLRVRLKDKHSKGLVGKSNSVNYVWNYINELSTKSIRDRGIFLSGYDLQKYTVGVAKELGITSQTVQMIGHEYATRRKQFKKSKLKWRVSRGSRRSLGWIPFSGQAIQLINGQVRFNKTFYSIIDTYGLSKYKIKSGSFSEDSRGRWYLNVCVEVEAVKGMGTGSVGIDLGCKEAATDSNGDVVVGREYRKLEKKLATAQRARNKRQVKTIHAKIKNRRADTLHKYSRKLVNENAAIFVGNVSSSKLVKTNMAKSVLDAGWSSLKVMLKYKSDNACTHFEEINESYTTQICSCCGENPDSSPKGRKDLNKRDWVCSLCGAEHDRDVNAAINIRGRGLASLCGESPGFNHGE

SEQ ID NO: 59045 - protein, 358 aa, Haloarcula sp.
MLEVHRTHRAKILNYSQVEDSLNRHGWSASKLWNVANYHSRQVWEETGEIPGHEELKNELKGHDKYKGLHSQSSQRVLEELAEAFNSWYSSDDERDNPPGYRKQNYYDQQGCRVHEEHPLSTVTWKQNGIRHDTKNNRVRLSKGANHKEHPKAWEYILVEYETRPGVEVENLQQVRAVYDQTKERWELHLVCKDEIETPDAPGTETAGIDLGISNFAAVAYSTEDADLYPGNRLKQDGYYFPKEIANCDDSSGDRATRLHHKWSERRTHFFHSLAKHIVEKCIERSVGRINVGDLEGIREDENAKSKNWGRHGNLDLHGWAFDRFTSILEYKAKVEGIEVMEVSERDTSKTCCAFVFS

SEQ ID NO: 59046 - protein, 409 aa, unknown
  TnpB Polypeptide
MLKSYKYKLKPNEEQDVLLNKHFGSIRFAYNYFLSERRKEYEANKQTLTYNDNAKALTQLKKQEEYTWLKEVNSQSLQYSLKSLDGAYINFFKKRAQFPRFKSKHNKNSFCVPQYVKLEGNNLIMPKFKDPIKVVLHRTFKGKVKQCTLSKTPTNEYFVSILVETEHKKLNKTGKQAGIDLGIKDFAITSDGKKYKNNRYTKKYARKLKKEQQNLSKKQKDSNRYNKQKIKVARLYKKITNSRNDNLHKVSTQLVKNYDIIFLESLNIKGMMSKCKPKKDENGKFLPNGQSAKRGLNRSIADANWSKFISILEYKAKWNDKQIVKIGRFYPSSKSCHKCGFINQNLTLRDREWICPECNSKLDRDLNAAINILIEGSKIISAGTVDYRRGDEIRPSSLGTIRETSKVLK

SEQ ID NO: 59047 - protein, 238 aa, Methanobrevibacter sp.
MCDKTFILTDKVEFVPDEEMEKELWFNKKIVKTLKKHYPFLKDADSTCLQASTDRLIKSYEGYYDHRTSAPRFKKRKKNPVTSITLRNNFYDTKEGNVGAIRWLSENELRVTKLGKITVKHRRHIKGQIKEATLKYENGRWYICIVYELDENKHGEFSYGGLYVGIDVGITDFLTFSNRKVIAKPDLKKINGRIQYYQQKLDGKKEGGSNWKKTLKKLHKKTPQMDKKEKQHSKRLLP

SEQ ID NO: 59048 - protein, 402 aa, unknown
  TnpB Polypeptide
MDKHAGGMDAMKQKKQDGHAEPSRVVQYNTIKVRLYPTPEQEELFQKTFGCCRYIWNQMLSDHERFYLETDAHFIPTPAKYKKGAPFLKEVDNQALTQEYNKLSQAFRNFFRNPSAFGYPKFKRKKDDRDTFSACNHVMRNSVTIYTTRDAVRMTKAGLIRAKFPRRPRSGWRLVRVTVERTKTGKYYGYLLYACPMRQPEPVAPVEERTVGLKYSIAHFYVTDDGTSADPPRWLRQSQDKLSAVQRKLSRSQPGSQNYQELVQKYRLLHEHIANQRRDFLHKKSRRVANAWDAVCIREDSLKAISEKLGGSAVRDTGFGMFRELLRYKLERQGKQLLEVDRLVPTTKVCSACGAVNETLAPRARRWVCPVCGAEHRRGVNAAVNIKARGLIQHQQTAEAVS

SEQ ID NO: 59049 - protein, 373 aa, unknown
  TnpB Polypeptide
MMQTVFVKLETSDKEAEALIQTMHQFNAACNAVAEVAFHTHTANKIKLQKEVYYSIKERYNLSAQMAIRVIAKVAEVYKRDRSIQPVFKPDGAIVYDQRNLSWKGLDRISITTLNGRLKLPVKIGEYRQLDHKQVRGQADLIYRNGKFFIAVVVDAPSEPVIVPKNVLGVDLGIVNIATDSTGEVFSGKKIDDVRERTATIRSALQSVGTKSAKRHLKKIGKREGRFHRDVNHCISKKIVAKAKDTESVIAVEDLTGIRERTTVRKSQRSRHHSWSFYQLRNFIGYKADLAGIGVVDINAAYTSQECPHCHTISKLNRPNRNSFSCISCGFSAPADTVAALNIRDRVSVNLPIVSGFIKHDLPQVQAHEFIRG

SEQ ID NO: 59050 - protein, 332 aa, Limnoraphis sp.
  misc_feature (15)..(15): Xaa can be any naturally occurring amino acid
  misc_feature (166)..(166): Xaa can be any naturally occurring amino acid
  misc_feature (325)..(325): Xaa can be any naturally occurring amino acid
LFKILDGQQNGEQVXDEAIRSYKFIRNSCLRYWMDNKMVSKYDLNKYCKVLAKQYPFAHKLNSQARQSAAECSWSAISRFYNNCKRKVPGLKAFPKFKKHARSVEYKTSGWKLSENRKHITFTDKNNIGKLKLKGTYDLHFYQLEDIKRVRLVKRADGYYVQFCIXADSFGNTIENPQFYRKAEKQLNRANRRKSKKYIRGVKPQSKNYHKALCRYARKHLKVSRQRKEYAKRIAYCVIHSNDVVAYEDLNVKGMIKNRHLAKSISDVAWSTFRYWLEYFAIKYGKLTIPVAPHNTSADCSNCGKKVTKSLSTRTHVCSCGYCEXCTSFNVG

SEQ ID NO: 59051 - protein, 393 aa, unknown
  TnpB Polypeptide
MTKIINKAYKFSLNPKDESIDFLNQCFGHTRFVFNYFLNYRSESYKNHQLKVNYQDTSKLLTQLKKQEDYQWLKDIPSIPLQQKLRHLDTAFKNFFKKQAKYPRLKKRESRQSASFLTSGNTYVGDGYVVISQHKKQFKIPFIKHRNFDFTKVKSFNISKESNGKYFISCSIEEEIKPISKPKNVIKAVDLGLKDYLIDDENNKTLPLKALNNNLKTLRKLNQSLSRKKKNSNNFKKAKIKLSTLHCLIANQRKDFLHKLSSKLINENQVICLETLKVKNMIKNKRLSRHVADASWGMFVDFLTYKAQWHERDIVKIDTYFPSSKLCNKCKTKNEDLKLSDRKWICKICHTIHDRDHNAAINIKEESLNMIATDNDFKEIIDDEGLLNIEKSQ

SEQ ID NO: 59052 - protein, 406 aa, unknown
  TnpB Polypeptide
MQRLQAFKYELMPNGQQQRSMRRFSGSCRFVFNKALALQKERHERGEKKLGFAALCKLLTEWRNGTQTPWLADAPTHPLQQTLKDLERAYANFFAKRADFPRFKKKGRSDSFRYPDPKQIKLDQGNARIFLPKLGWLRYRKSRDALGALRNVTVSLSGGKWFISIQTQREVEQPIPQGGAVGIDMGIARFATLSDGTFIEPLNSFKKHEARLRRYQRAMSRKVKFSKNWSQAKARVTRIQSRIGNARRDYLHKATTTISQNHAMVCIEDLQVRNMSKSAAGTTEKPGKNVRAKSGLNKAILDQGWAEFRRQLDYKLGWRGGWLVAVPPQYTSRTCPCCGHVSADNRQTQAQFLCVECGFEENADVVGAINVLRAGHARFACEVSGAAMPPAAGTHRSDSGTVQCRP

SEQ ID NO: 59053 - protein, 485 aa, unknown
  TnpB Polypeptide
MKRAKTPTFIVELPLSVCDNTERQLTARLLAGTRLYNAALGEALRRLGLMRESKAWQAARKLKAKERSAAFGSAIKAHHFTSASVSAFATGCKNAAGRKSRLSANETQRIAETAFDSAEQYSFGKRGRPRFKNAKRPLKSFTGKTNKAGIRYRAELGVVEWAGLVMAVKYPPKGKDVWLEKALEAATKFCRIVWRTVKGKRRWYLQLAQTGLTPAKEKNTTQPGREVGLDVGPSTVAVVSESGAELFKFCPTINQPWKEIRRIQRAMDRSRRATNPHCYNANGTWKKGARVTVVSKNYRELKHALAESERKLTDERKRSHGELGNTVMRLGNVLKAEKLSYKAWQKLYGKSVKVKAPSAFMQRLNRKAESAGGQLLELNTWSLKMSQYDHVSGECHKKQLSERWHILGGKAAEITESSVIVQRDMYSAFLALCVAENGHQSSQLNHRWPVVKQLLERTGWCRQIQIASGGTLVLPTVTPSERFVF

SEQ ID NO: 59054 - protein, 406 aa, Lactobacillus sp.
LVKLGRTIKLRLYPDTKQSTEFLAMSREYQRLANIVSQWIFDHEFPLSWLKINHQLYQVFRQESPLNSQMIQSVFRTVTARYKTVQKQMEQHPRRYKNEDNKWIQVPRDLTWLVKPIHFRRPQADLVRQKNYSFVDEMNRISITTLGKRTKLCFTDKGFEDYFHGDWKFGTAKLVHNRGKWFLHIGITKEVDDFDKQGCPKIVGIDRGLRFLATIYDHLGKTLFFDGQKVLRKRKKFLEIRRQLQSKGTKSTKKKLKQLAQRENRWMSDVNHRIAKTLVALYGSHTLFVLEDLTNVTFNTDDLPKSLRNSHRSWSFFQLESFLTYKAQAIQSTVVKVNPAFTSQRCPKCGLVEKTNRHHETHEYWCAQCQYRSNDDRLGAMNIEMLGQEWLSGIKRPKIKKLTAIG

SEQ ID NO: 59055 - protein, 374 aa, unknown
  TnpB Polypeptide
MYMMKTIQTVMVENKAQRITINETFDKMTLAQNSVVDSCYEHEDTNAFRMHHKTYRKLREDFALPAQLAVIANKYACASVKTAIKRKGKKPVFKGKAIHYDSRSCTINLSKGIASILTTKGRAKVKIAVPDYFKKFVGWQAKESNLIRCKDGKLRLMISIEKPSIESKQIGRAIGVDRGINNLIATSDGWLYDSTHIWEVKHRYVNLRSRLQAKGTRSSRRHLKKVSGIEQRFMRDVNHCVSKKLIESAGRDGVIVLENLKGIRNAKHRKKQNWLFSNWSFYQLESFLRYKGEEFGVAVEFVPARDTSKTCSVCGSLRRGQRQGSVFTCKVCGVVLHADLNASKNILHRYTNSNSGAAVNQPIAPHIGRASHRF

SEQ ID NO: 59056 - protein, 425 aa, unknown
  TnpB Polypeptide
MSMTEEQRLAKNASIKEAMKATHEKRKSQVCRVYMLKIQRNKLSARQKEDLKMLFVEAKWLYNDILNYGSINGNSIFDYELGNVVEVKLPDGTFDGRNLDHIGSQMKQSVYTDLKSSIKALSKLKKKGFKVGRLKFKSEIGAVSLKQYGTTYKFYNDHRVKIQNIHGLVRVNGLDQIRDNVEFANAKLLNRADGYYLAVTTYTERKPYSNRPHADVGIDMGCHTSFTLSTGEEVDAKVKEPEHLKHQQRKLARQKKGSNSRKRTIHKIQKKHQRLVNRKNDMASKFVADLNSRFGLIYIQDENLSGWHKDGHGKAVQHSCLGRVKAKLKAQDNVFVVNKWNPTTQQCICCGKKHEMPQNVRTFICPHCGTTMPRDFHSANRMVQEGRKLVPPELREFMSVDWESSIAPYLGRNKSPGSKLEAHRL

SEQ ID NO: 59057 - protein, 420 aa, Streptosporangium sp.
MPDRTRLLCVKIVAQVKLLPVSAHDADALAATLRACNRAANAASEVAFARDLKRRNVLQEAVYHRIKADFDLGAQAAVRTVKKVCDAYATLKANIKAGNLGPEGGKRRMRAESRPVVFREGAAQPYDDRMLTWNLDARTVSIWTVAGRLKGIPFVCSDQAMELLASRKGETDLVLRDGMFFLIATIDVPEPEVYEPDGFLGVDLGIVNIATTSDGQIMSGRQINRYRRRRRDLRTKLQKKRTKSAMRRLKSIRRRESRYATQRNHIIAKKLVATAERTSRGIGLEDLSGIRQRVTAKKDQRARLHSWAFAQLGSFVEYKARRAGVPVVFVDPRNTSRQCSECWHTHRSNRISQARFACRSCGAVLHADHNGSRNIAHRADAAWQRGAVNRPRTAQPFRTQETTARHHTVLCLQARSSRTR

SEQ ID NO: 59058 - protein, 416 aa, unknown
  TnpB Polypeptide
MYLTVKQQVKHLSKEEYYILRELCHTAKNLANEAIYHIRQYYFTEGEYLNYEKNYTLLKNSPNYKMLNSNMAQKILKEVDGAFKSFFGLLKLAKKGKYSFRDCKLPRYLKKDGFTTLVIGFIRLNGNKLILPYSNLFKKTHDPVEITIPPILIGKPIKEIRIIPKSGARFFEIQYIHEAGCIQRNLNKNNALALDLGVNNLVTAVSSEGKSFIVDGRRLKSMNQWFNKENARLERIKDKQGEKRRTTNHQKILADKRNRQVNDYMSKTAKRILHYCIQHDIGTLVTGYHETFQCNAGMGKQNHQNFVSIPYGKLRSKLEYLCELNSIVFVKQEESYTSKASFWDKDRIPVYNADNPQSYRFSGKRIQRGLYKTASGKLLNADINGALNILRKSSVVSLDTLYSRGEVDTPVRIRVT

SEQ ID NO: 59059 - protein, 508 aa, Anaerobacillus sp.
LKIKRKGVRKELKAMARKRTPTYTIEFPITIPTWQQHRLEKKFKMARVVYNSCLGEALKRHQAIKSDKEYRILLKKPKSKERDRLLSNIRLNYSFSEYGIHSFVKSVQKKFKEHIGSFEAQKLATRAFQAVEKLHFGQSKKVHFKNNTDDISVENKSNKTGLRFAKGNILWGDKPTKKNPKPKNWLCVPVSPKPNDEYAHLALMDQTKYVRILKREVRGKVRYFVQLIQGGYPPKKRNRKVCNDETKRVGIDIGTSTIAICSDEKVQLQELAPECKVDESNLRRIQRKMDRSKRKTNPTNFNENGTIKEGRLSWTYSKNYEKLRKKRKEFYRKISVQRKMSHEKLANEILCLGSDIRVETMRFHSLQKRSKNTTRNKKNGKINRKKRYGKSIARRAPAILLTIIDRKLGYQGRCLKKINTYATKASQFNHITGEYRKKQLSERWNNFGQILIQHDLYSAFLISNTNETLNSVDIDLCNEKWNKFVKLHNLEVERLKQSQDRTLRWFVA

SEQ ID NO: 59060 - protein, 459 aa, Streptomyces sp.
  misc_feature (459)..(459): Xaa can be any naturally occurring amino acid
VAVRTRLKQLTPDDGKGLRLVGGHLGSLASKDLRTRCRDGLEHSGDTWAVRKRELTLLSSSRWAGSITKATHGQWALARRCRSAHLQNLEAGVRTVEGRLSLPVGQKGTRKAPGGYRSQREWHAKSRRLRVLEDRLAAARADREAWLVHIVRGGRRLARTWQHLEAAQLTESGWRGLWEAERWFCQADGGSGKRYGNETIRVSPDGEVSIKLPAPLAHLANAPHGRYVLACRVAFAHRGEEWADRVEANRAVAYRVHLDTGRDRWYVTASWQIPPTPTLPIDAALAHGVIGVDMNADHLAAWRLDVHGDPTGSPRRFSYDLSGTAEHRDAQVRRALTRLLHWARTCGVRAIAVEDLDFAAEKTREKHGRRKRFRQLVSGMPTGKLRARLSSMADQTGIAVIAVDPAYTSRWGAQPWQKPLAGTTRKSTRHDVAAVAIGRRAQGHPIRRRTAPPPPHRSX

SEQ ID NO: 59061 - protein, 554 aa, Streptomyces sp.
MATGSSSGGDEVGELRGAASSFVVSGPGGVAVRTRLKQLTPDDGKGLRLVGGHLGSLASKDLRTRCRDGLEHSGDTWAVRKRELTLLSSSRWAGSITKATHGQWALARRCRSAHLQNLEAGVRTVEGRLSLPVGQKGTRKAPGGYRSQREWHAKSRRLRVLEDRLAAARADREAWLVHIVRGGRRLARTWQHLEAAQLTESGWRGLWEAERWFCQADGGSGKRYGNETIRVSPDGEVSIKLPAPLAHLANAPHGRYVLACRVAFAHRGEEWADRVEANRAVAYRVHLDTGRDRWYVTASWQIPPTPTLPIDAALAHGVIGVDMNADHLAAWRLDVHGDPTGSPRRFSYDLSGTAEHRDAQVRRALTRLLHWARTCGVRAIAVEDLDFAAEKTREKHGRRKRFRQLVSGMPTGKLRARLSSMADQTGIAVIAVDPAYTSRWGAQPWQKPLAGTTRKSTRHDVAAVAIGRRAQGHPIRRRTAPPPPHRSDAVGHRTVQAGRRVPGREGIRPRILGPRTRSVPPGRVANAGNQNAQHRPGRSTEHGSWQQDSFPLSL

SEQ ID NO: 59062 - protein, 388 aa, unknown
  TnpB Polypeptide
MIKTIRVMLLPNNKQKSKLFLYANTSRFVYNWAIAREQSNYKDGNKFISDYDLRKKFTQLKKLEEYSWLNNVSNNVMKQSIKDACDAYKKFFKHQTGYPKFKSRKFSMPSFYQDNVKIRFTETHVKVEGFSSSKRKNKQKLNWIKLAEHNRIPINCKYHNPRIKYDGLNWYITVGVDYDDCANKPKNDGVGIDLGIKDLAICSDENIYKNINKSKKIRNLEKKKRRLQRSVSRKIKKSKRKGSYRESSNLKKAKRKFLKVNHRLTNIRHNYLHQITSSIIKREPSFICIEDLNVSGMMKNHHLSKAVQQQCFYEFRRQIEYKAKWNNIKIVVADRFYPSSKTCYCCGNVKKDLKLSDRIYKCECCGNVIDRDYQAALNLQRYGEDFAK

SEQ ID NO: 59063 - protein, 360 aa, unknown
  TnpB Polypeptide
VRSFKTKLKLNNKQRTMMAKHAGVARHAWNWGLATCKQVYEKGGLRPTAVDLHKRLVAEVKPECRWYYEVSKCSPQEALRNLDQAFKRVWKVKGTGFPKFKKKNVKDSFYLEGSIRISGDWIKLPKIGWVRSHEQLPSVKPKNVAISKRAGDWFIAFKVDFEPEVTLKQRDCVGVDLGLNWLATLSDGQQFPNPRAYKKAKHRLVKLQKELSRRTKGSRNREKTKHKLAKAHLAVANARTDNLHKLTTYLAKNHSEVVVEDLNVSGMLKNHKLAEAIADGGFYEFHRQLEYKCQWYGSKLTVVDQWFPSSQLCSNCGQGQKMPLNLRLYDCQECGVSLDRDRNAAVNLENFNLHADSSTV

SEQ ID NO: 59064 - protein, 360 aa, Paenibacillus sp.
MRRAYKYRLYPTRDQKKKIEFILERCRLLYNRLLEERLLAYKQNGKSLSYLDQQNSLVDRKNHIPILKHVYSQVLQDVAKRLDKAYQAFYRRVKQGERAGFPRFKQKQRYDSFTYPQGGYTIQGNKLKLSKIGEIKFKLHRPVEGSIKTCTIIVKNGCYYACFSCEVEAVLLEPTGRQVGIDLGIKHLAIPSEGKPFESPTYLRKSERKLKQLQRAVSRKKKGSNRRKKAVLLLAKQHEKVANKRKDHAHKISNSLVQSYDLIAFEKLHIQGMIKNQHLAKSISDAGWHQLVQFTSYKAESAGRAVVQVDPRYTSQLCSNCGNLVKKTLAERIHRCPCGTTLDRDINAAKNILQRALQVS

SEQ ID NO: 59065 - protein, 450 aa, Actinosynnema sp.
VSTILQAYQFALDPTPAQDAELRSHCGGQRFAFNWGLARVAANLGQRAAEKSYDIPEDQLTPSVSWSAYSLRKDWNRAKDEVAPWWGENSKEVYSSGLANLATALKNWDGSRTSKRRGPKIRFPRFKGKRAVLSCRFTTGAFGLSDTDRRHVKLPRIGLVRTHESMRKLARHVEHDTARIRSATVSHRRGRWFVSFSVEITRVDPAPTRPQTAVGVDLGVKSLAMLSTGEVIANPKHLEIAQRELRRLQRQAARRHGPDRRTKTASSGRWRRTQARIGRLHTAVANARRDGLHKLSTRLVRTFGAIVMEDLHVSGMTKNRRLARHVAGVGMAELRRQIEYKAAWSGVHLHIADRWYPSSKTCSACGAVKAKLRLSERTFACDQCGFALDRDLNAARNLAGLVSVITGGDGGELRRDSPMETHVRRPLAAQRVPPREGPSGQRRRGDTSAA

SEQ ID NO: 59066 - protein, 562 aa, unknown
  TnpB Polypeptide
MAFMGKRSLRRIGDPVVAGGPAGVRIRTRIHASAEEAAALSAIGQYLGSVYRGELAGRIGRGALDRQGDAAWRAERKQAVTAVSSSRWAGAITRAVEDQYQLGMRGVAAHVADLRAAIEVIEARCAVPPGELAPADADGEVSQRARRGRRRRGYRSAGERFTKTRRLAVLQDRLTAAQDALTAGRPPTVVGGKRLWRNRNHLEAADMTEQQWRDRWDAARMFMTADGETGKPGGNETIRVDADGRLRIKVPAALVGRFGSHVMIGEPIGFSHHAQQWSDRVAGRRAVRYDIGYDPARGRWYLDASWKTSPQPVPDLKMLRLARVLAVDLNDGHLATCILDASGNPIGEPGSIGVSTTGLRASRRDGRLRAAITALLDQAHQQCCAAIVIENLDFADTRATGREILGRGRRGKRLRRTVAGIPTRRFRDRLTAMAARRGIAVIGVDPAYTSMWGNQHWRKPLQQQTSDPSTVTGHHGAAAAIGRRGLGMAIRRRPLGPRTRQRTGAGTPPARPEHQPSTTPRRCRRSGSPPRPQQRPGAAVHRTTPTASGQHRSGRTGPTPAH

SEQ ID NO: 59067 - protein, 378 aa, unknown
  TnpB Polypeptide
MIRAKKVRLRPTEEQEKQLWQSAGTARWIFNWTLQMQEMYYRFGRKFISNNDLRKHITKMKQRPKYAWLNHVSNNIAKQAVKDACDAYKKWFDGMTDKSRLKTEKPHFKSRKKSKPAFYNDNIKLKVKTKLVLLEKVGWVKTSEQLPVNTKYSNPRISFDGKYWYVSVGIDEEQPVQDLTGETLGIDLGIKDLAIVSNGKVYKNINKTGKVRKIEKRLRRLQRKVSRKYDMNKEGNRFVKTCNIYKLEKEIRHTHRKLANIRQNHLHQTTTEIVKTKPSRIVVETLNVKGMMKNKHLAKSVAQQKFYEFKRQLQYKCEDYNIELVEADKFYPSSKLCHECGHKKVDLKLSDRTYHCEECGYTADRDYNASLNLASYSA

SEQ ID NO: 59068 - protein, 495 aa, unknown
  TnpB Polypeptide
MELNSILQITINPDHVHLFISAHPTIPVHKIVRRIKGRSSNILRKEFPELLKLPSLWTHSYYVSTIGAVSKETIEKYIEAQKKASKMERTNTFIVEDHPALWELADNCARLYNEVNFEKRQAYIRYKKFEWYPKHLYAKYAPLIGSATAQQIINKNNEAWRSFLKLKELESKGKLPEHITRVSMPRYWKRNGRRELRMVVRNDCYKIDEKYLYLPKGFKLKYKGELKWKGEQGRLEIIYDGVGGVWRGFMSVKVEKPPPKGGNKPLYIDLGVINLATVWFEGLRQPIAFSSRAVLSDWWYWTRRIAKERSNLARINEAKTSRKLRKLYRIRQRRFRHTINTMIRTIVEDAYRLGISKIVLGRLKDIRNNKYGSKTNAMINNFWSFNYIVRRFREKAEEYGIKVEEKSEYGTSSKCPLCHSKNITTKGRLFKCLDCGLEAHRDAVGVLNIGYLHGGSINGVVAHPLLLRWDGMRWEPKRAVNSQLMRALEARISRL

SEQ ID NO: 59069 - protein, 447 aa, Bacillus sp.
MTRKKAVKVLRKQKKLENIQRFTQKQNLGRTSLAAKEFRLLQRMTHSSKALRNVGLYAIKQCYLNNGRMATVNEVDAAMQADVNYWGIQSNSVQAIRRTLFSETKSFFKALEQWKKTPEKFTGRPKFPKYSGSTEKRIIEIYQVPKVDKDGFWTIPMNVEFRKRFSSIKIRMPKNLLNQKISYIEIKPKQKGRFFEVHYTYEVHVAQMKKQSTTTIYALSGDLGVDRLLSCATNKGDAFLINGKKLKSINQHFNKAISNLQQKNIENGISKRVVTNKLAELWNKREHQINGYFSQVVGLLFKKVKEYNIDTLIVGYNVGWKQECDIGKKNNQQFVQIPFQKLISAIENKCIKEGIRFLRQEESYTSKASFLDRDSMPVWSKDDKTSYHFSGKRITRGLYQSKSGKCIHADINGALNTLLKSGIVKLEENFQIKTPNLLYVQKRKAVA

SEQ ID NO: 59070 - protein, 421 aa, unknown
  TnpB Polypeptide
MEMLLSHKTSIRISQEYSNIIGHMCYAASKLWNVCNYERHHYKELGLEKYPDWYYQKRAHKGDLWYRQLPSQTAQEICKQLDKKAWKSFYVLKKTGGIKDPNPPRFKQENIPVTYMQMGIRHEKGSDQLRLSLPKDLKSYIEETYGIHEKFLYLENKIFRNMARIKQLRIYPPENGTCDLIVIYEIEEPELLSQNGHYLSVDLGLHNLMTCYDSRNGRTFILGRKYLSLERYFHKEIARVQSVWYAQQSKRGIKYPKSSKHIQRLYRKKQNAVKDYLHKVTRWLAEYCRKEDIRCVVVGDIRNIRKEKDMGRKTNQKFHGLPYNRLYIMLEYKLKLYGIQLIKQEESYTSQCSPLSPEVSKRYAEASNRKERGMYRTNGVRFNADAVGSFNILRKYLSISGKEKTLFVTGLKYPEIIKVAV

SEQ ID NO: 59071 - protein, 351 aa, Paenibacillus sp.
MQTVTIQIRIFPAHPSVLVDMGNEYIRTVNELTEQAEASGTFPKLTSKTVHANLPSAVKNQLIRDAKSLFQKSKKNKKRPILKKRVYYVNNQNYAIGDDSLSFPVVMDGKVQRLVVPALLSDRERDMLSNSKHGLLRVVQKSAKWFVQVSIVRPTEQAAGDGIMGVDLGLKVPAVVVTSSGKTRFCGNGRKNKFIRRKYNTHRRKLGKLKKQSAIRKQRDKESRYMKDQNHKISRQIVNMAIQEKVSIIKLEKLADIRKTTRTSRKNAKNLHSWSFYQLQTFITYKAALAGIKVIEVNPAYTSQTCPSCGQRNKAKDRAYQCDCGYTAHRDRVGAINIMHKPVADGNSLSA

SEQ ID NO: 59072 - protein, 395 aa, unknown
  TnpB Polypeptide
MSRYRVLPSPAQQAMLREHCAHARFVWNLAVEQHLHWRPGRKSAPGYLEQCRQLTVARAEHPWLAAGSQMVQQHALRDFAQAKANYFRGTHGRPSWRKASRDEGFRVVALRPGDVRRLSRHVAEVRVPKAGWVRFRWSRPVPPGVKSYRITRDRAGRWHVAFAVIPEPIPGPAHGETVGMDRGVAVSVALSTGEMLTVPGLSAGRRRRLRRLQRRLARARPGSNRRVRVKRAAARLRAREADARKDWAAKTSTGIARQFGLIRVEDLRITDMTRSAKGMAGNPGRNVRQKAGLNREILRSGWGLLVRRLEDKAPGRVEKVKPHTTSQRCSACGHVDPESRESQARFVCTACGFAGHADVNAAINIAAGHAVTARGGDGVTRPVNREPHLLLQPAQ

SEQ ID NO: 59073 - protein, 276 aa, Sporosarcina sp.
VQSYTTKQTNGNIRIIGDKIRLPKLGNVRFAKSVEVNGRILNATVKRTPSGKYFVSVLVETEVQELPKTNSVVGIDVGLKDFAILSNQTLYSNPKYFRTLEQKLAKAQRILSRRKEQAIRQKKALFEAKNYQKQRVKVARIHEKVSNSRTDYLQKISTDVIKNHDIIGIEDLQVSAMLKNRKLAKAISEVSWSQFRTMLEYKAKWYGKQVVVVAKNFPSSQLCSCCSYRNKDVKNLALREWDCPECSTRHDRDINASINLKNEAIRLQTAGTAGIA

SEQ ID NO: 59074 - protein, 399 aa, unknown
  TnpB Polypeptide
MQTISVKCKLQVLQESRQEIDCTLDRFADACNQILEIAVERNCWNTTKLHHLVYHSVRESTGLKANHVCQAIRRVIGNAKAVKQIHKFRPTSISLDVRTFEYIEESQSVGVTLISGRKKFKLLIGNYQLALLRGQKPTSATLNKTNNGDYYINICVEIEGEPTGKTPKVIGVDLGRRNIATTSTGQAWSGEKIQSTRERFSKVRANVQSKRTRSSRKLLRRLSGREQRFQKWLNHNISKQLVTQAKKCNCALAFEDLTNIRESLNEKPRSKTERRRTNNWAFYQLRLFVEYKANIAGVPVVFVPPAYTSQTCSRCHHVHPLKGKSYRSGKLFRCGHCGFECDADLNAAMNIAALGVCVNNPEIPGISCQLEGQLCLFPIAGEIWDKAPSSTKRKRSRVG

SEQ ID NO: 59075 - protein, 530 aa, Chloroflexaceae sp.
MRTARQRQQQLSKAERSAYRRQKRQSLTRAVTHIPLLALTEANADKVAQLDGLADEYQRVCQWYATHFCAQGVADRHTPLLIESTLSDKWHRCAVRRAAGIAQSWLSNRDRAWREYQEALAEYDAHPDEHAPDEPLPPGCRVRFQMAAGTQTVTSPDGTTRPYRTKPTWTEPSPPHLTSTVLLAENDVATLRPAEDTATFPFWLRVSTLTAGARIDLPVTLADYHLDQLAGHDIDGDVSLIRRENGWWLQLSYHDQPAATSDGASPAVGVDVGIASFLTTSLGDQYGSFHGKLAKRHQRDREQRRRKAKLRACLKKKGVTKLPSLTNQRLARHVRQEIKRAVKAFLRDYAGFQVAYEDLSVRTMRFKTRRMNAYLYASNLGHLPKQLAWGAKKRGVRLTAVNPAYTSQECPVCYHVSRANRPNQQTFCCGACGYTAHADGVGAGNILARLTDAELRDCPDTAAIKALLGRRHQAYSLSSALPAVQRPPRYPPRVHRAQVITRPRRGNINAISSRHCSHPNGECKISRWFW

SEQ ID NO: 59076 - protein, 380 aa, Chloroflexaceae sp.
IPLLALTEANADKVAQLDGLADEYQRVCQWYATHFCAQGVADRHTPLLIESTLSDKWHRCAVRRAAGIAQSWLSNRDRAWREYQEALAEYDAHPDEHAPDEPLPPGCRVRFQMAAGTQTVTSPDGTTRPYRTKPTWTEPSPPHLTSTVLLAENDVATLRPAEDTATFPFWLRVSTLTAGARIDLPVTLADYHLDQLAGHDIDGDVSLIRRENGWWLQLSYHDQPAATSDGASPAVGVDVGIASFLTTSLGDQYGSFHGKLAKRHQRDREQRRRKAKLRACLKKKGVTKLPSLTNQRLARHVRQEIKRAVKAFLRDYAGFQVAYEDLSVRTMRFKTRRMNAYLYASNLGHLPKQLAWGAKKRGVRLTAVNPAYTSQECPVC

SEQ ID NO: 59077 - protein, 324 aa, Bacillus sp.
LTYGTCSAKLPAMKKELVWLKEVDSIAIQSSVRNLADAYTRFFKKQNSAPRFKSKKNNVQSYTTKQTNENIAVVGNKIKLPKLGLVRFAKSREVEGRIVNATVRRNPSGRYFVSLLVETEVQELPKTHSYTGIDVGLKDFAILSDGTHYENPKFFRSLEDKLAKAQRVLSRRMKGSSRWNKQRVKVARIHEYISNTRKDYLDKISTEIIKNHDVIGIEDLQVSNMLKNHKLAKAISEVYWLQFRSMLEYKAKWYGKQVIVVSKTFASSQLCSCCGYQNKDVKNLNLREWNCPSCRTHHDRDINASINLKNEAIRLLTARTAGLA

SEQ ID NO: 59078 - protein, 407 aa, unknown
  TnpB Polypeptide
MLHKAVKIRLYPTEEQQILLSQHFGCARWWWNYALCKSIETYKETGKSLGQSALNALLPKLKKETETLWLSECYSQVLQATTLNLTTAYKNFFAGSARFPRYKSKHRKQSIQYPQNVKVLEGIVQLPGKVGQIKAKLHRSIEGTIKTVTISRDPSDKYFASIITESEGENPAVSTEGKVIGIDLGLTHFAIASDGCKISKYDNPRHLAKHEKNLKHKQQKLAKKQKESNSRSKAKKTVAKVYERVANSRQDFLHKLSRKLVNENQVVVVENLNVKGMVRNHNLAKAISDVGWGTFTNFLGYKLEKKGGKLVEIDRWFPSSKLCSNCYCQIDKLPLNMREWTCPHCGTRHDRDGNAATNIRAEGIRMLQTDGTAVSTVGGEVRPRLGRKSVLRHSPVSTEAHTIIASI

SEQ ID NO: 59079 - protein, 292 aa, Pseudospirillum sp.
MIKATKVRIYPTPEQAELLKRQFGAVRFAYNKALHIISSQYKRHGTKLNAKRDMKPLLAVAKKSRKYPWLKDFDSIALQQACINLDKAFQNFFDPKCPARYPKFKRKHGKQSSYHCMSVSARENWIKVPKMEPIKARLQLAKAHERLKNARADFQHKLSRTIVDENQAVIVETLKVKNLLKNRKLSKHTADASWSALIQKLEYKAKAQGKYLVKIDPWFASSKTCSCCGHRVDTLPLSVRKWTCPVCTVALDRDVNAAINIRQQGMIKLRAEGLSVPANGGLRQSGHAPVAA

SEQ ID NO: 59080 - protein, 376 aa, Sphaerisporangium sp.
CIRDRAKGGFEWLAQVPGHCLQQTLIDLDQACSRHGTWKVRWKSRATNTPSFRFPEGAKIAIERLSRRWARAKLPKLGWVRFRITRPLGGKVKNATVSRDGEHWYISFLVEDGVITPERHANPGSAVGIDRGVAKVVTRSDGLFHHQVFARDREVEHAATLQRRLARTQKGSARRRHVAVKLGEALAKVGRRRADFAAKTAHTLATSFELIVFEALATKNMTAGVAPKPDPGQQGAFLPNGAASKSGLNRSILDKGWHRIELAARSKARYTGTCVITVNPAYTSQRCNVCKVVDRKSRESQAVFRCTSCGHTEHADVNAAKNILTAGRAEFVQPRPGVRAGARKPRNRVGRKANRQATAAQATAQTEPELAGIPRL

SEQ ID NO: 59081 - protein, 241 aa, Haloarcula sp.
MKYRPEIRSTRSFSYSRCMVFVILLLFISVRSAILTGGHPNSGSLAKNRSAASSFVPGLIGKSISVPSRFLRSSTRTGSIIIVIFCHRSSLAFGFGQASIVVSEYFHSMNRCLYSLPVAKLRNLMTYKAAWQGIPSDDVDPEYTSQQCPICGHTEQANRHKKRFKCCECEHQDHADRGAGVSVAQKWLRTQDDRDVPALKTLPQVRKWELRRQASGPVDGPTVASDTGRGDQTDGIRGVSD

SEQ ID NO: 59082 - protein, 425 aa, Symploca sp.
MQHQAVKVRLYPTIEQTEVLAQHFGCARWWWNYALRLCIDTYQATGKGLTQPALNKYLPKLKKEKETEWLSSCYSQVLQSVTLNLVTAYKNFFEGRAKYPRFKCKKNRQSLQYPQKVKVVDGCLKFPGRVGIVKTKLHRPIEGTIKTVTISMTPSGQYYASVLTELEGDKPSPNTDGNVAGIDLGLTDFAIVHDGLKTSKYANPKHLAKHERNLARKQAKLARKVKGSSSRNKARKLVARVYERVSNVRQDYLHKLSRKLVDDNQVIVVESLHVKGMVCASRTLRERNHKLAKAISDLGWGMFVNFLQYKLDKEGKVLVEIDRWFPSSKLCCNCHYQVREMPLEVRQWKCPSCGTHHDRDGNAAINIRTEGITMLAVGCPEGSSVSGTGIAADGGEVRPRLGRPSKLRHSPAKSEAHTVPLGQCG

SEQ ID NO: 59083 - protein, 498 aa, unknown
  TnpB Polypeptide
LDAAIEESGGLEAIRARVLEGVSLFTTAALSPATGTIRRVPKDAAAPKPSRVLISHTGVPLSRSTTFRFTLDPNREQHRRLLAHAGAARLAYNHQLERVKANLDQRDAERSYGVTGSDLTPSLSWSRVSLINHMNAWKDGRAPDAQVSRGEDGNEVRGLAWRGEVSTDVFECASVNAAQALANWSKSRKGERAGKAVGFPRFKARHKTAPAFRVRSKSKPGQTSPVRATSPRTLRFPKLGVLRAREHTGQLTKMLAGGRFHVYAASFAFERGRWVVAITGVAGVLHHLRRSPKNRHRVPVGVDLGVKALAVVADEQGRVLHTWEGVKALQHAQARLKLANQSYSRTKRDSGGRKKAARRLGKMHARVAYQRDSMLHAITTELARGYTYITIEDLNVAGMLHLRALARHVSDAAFGQFRTLLEYKGAWYGTEVAVADRWFPSSKTCSGCGTINATLTLSDRAYDCDACSLVLDRDVNAAVNLARYAPPPPKASPLPAAA

SEQ ID NO: 59084 - protein, 385 aa, unknown
  TnpB Polypeptide
MRTYTYKLRPTKAQAAALTATLDTCRHLYNRALAERKGAWEQEQRSVTFAAQCATLPAQKRANPYLPAVHSQVLQNVLRRLDRAFDNFFRRVKAGEAKAGYPRFRGRGWYDSFCYPQWGNGAKLVDGRLVLSKIGSIRVCADRPLDGTPKTCSIVRKADGWYAHIACETTDTSLPATGESVGVDVGLTHFATLSTGETIANPRHDRAAERRSRKAQRRVSRRVKGSKRRAKARTLLAKAHLHVQRQRRDFAHKTALTLVCRFDGIAVEDLHIRGMLRNHALAKHIQDVGWGQFRTILSQKAESAAKTVIAVNPAGTSRTCSDCGSRVPKKLSDRWHSCPLCGCEMDRDHNAALNIKHRGGCAGRLVRPRPDPGTLVAWRPANRHG

SEQ ID NO: 59085 - protein, 317 aa, Bacillus sp.
LWLKEVDSIALQSSLKNLSDSYTRFLKKQNKAPRFKSKKNSVQSYTTKHTNGNIAIIENKIKLPKLGLVRFAKSREVTGRILNATVRRHPSGNYSVSVLTETEVLLKPKTGSTVGVDVGLKHFAILSDGTIFENQKHFRKLEKKLVKAQRILSRRKEAALKRTCKLDDAKNYQKQKVEVARIHEKISNARSDYLHKVSSEIIKNHDVIGIEDLQVSRMLKNYKLAKAISDVSWSQFRTMLEYKAKWYGKQVIAVSKTFASSQLCSHCGYQNKAVKNLAVREWDCPSCGTHHERDLNAGLNLRNEAIRISTAGTVEIA

SEQ ID NO: 59086 - protein, 477 aa, unknown
  TnpB Polypeptide
MKRTIKIKANCLNKENEILLIGTIQRNIKNYVWSRYSGIGSLLKQSGWTIRDELVQKNLLSNKIPKTFSRAAIEKSASIIKTNWITTKKKVKQAIAQNENLTKADRHYLFLCLKHTPTLYNILNYKKVDYAIDYLKDLKVDVHRLNNLLRRYIRRYKTKSYTNKANIILTPSLYKFDLNNNTFSFAGKKKNSRIVITLIGNVPKSNSILELVKNQKSNQYYLHVPLDRIISKKEMTAESEVLGLDVGMTDLITLSNGSVYGANSAELFYTLSDNLVNKNRSRLFAHKQKIEQRILEEQDDAKKSLLELKLKNLEENNLGSQKRISKIGKYKSRIVSHINCELNKMVKEEDLKEIVREDLNWSSKKSKKKNKRNVSRKQQNRFSTWTKGVLLERLSVKLAENGIKETIVNPAYTSQVCCKCNHLGDRKGKEFKCSNCNLSIDADFNASINIKKRKFIKEINIDTPYKEVKKYYENISV

SEQ ID NO: 59087 - protein, 450 aa, unknown
  TnpB Polypeptide
MSNVFTVTTELKLNKEYNQLVSKYISDYIELFNKIQRLTFHRIKNYNIKNGKITQEDRNIIHAQLKEEFNLTSRAIDAILSNMLGRYKSIKELKEFERKSLERKIFSLEKELTKLKDERTSQRINLNNNSKDFNFVKYKNLKIKIYWKQNRLNTKKQKLKNLENEIETDKYKVCFGTKKLLKKDYKEFVKKRDSEIYFLGRAGDNACNLNFQVEYSSKINQFYFRIRKEVDLDNDKFVYGQFNFNNKNYTNLLKKLLRTKESALTYRIKIKGNRVFLQIIYNFEHNKGLCVTRNSYGVIGVDFNKGFVSVSETDKYGNLINTFNIDYQYSKGNKTTRDFQYIATTLKDYCLNTGKDLVIEKLDFTKKKDNLISKRGKKYNEMLSTLAYSKFNLIITSKCAKNRIFLHKVNPAWTSWIAKQKYCPKMKLNIHSGASYVIARRGMFLKDKVK

SEQ ID NO: 59088 - protein, 552 aa, unknown
  TnpB Polypeptide
MKFNKTKDTVFRMYKTKGPDLLLPLYNILQRELDRILATPTYVEALSKIELKYKNENGKEQSKLNGMLWSEIHEIIGESLKDKVPDAWYLRILYHNIISLLKSRQEQIKIYEILKANQYKIDSTLRDKLVQEKLYPTNAYLEILAAAKDMPVLPKRKTFILDFSVSDKQMFRVGKNSNAYEIKIHSKKEVKAYNLETGWISFEMFLPTYIRESFTGKTAKPQFYWDHNKEEFVCAIPCEIKKLPNEYENVMGVDLGKIKVYSATVVRKDDSISDEYVPTEELQNLVNKLKRMNQHIKSVYEKKKRSSKYGNFTERQARRKLDYKKSKNKRTKLQFAIARLVAVEVVNIAIKEQCKEIHLENLSWVKSSGGKWNFAQVQACIEEVAELFSIEVVKVGAKNSSKTNPVTFEVGYISNRDVIFKNGQKVDRDQLSGLNLALREPKKSKQRKIKTLNVRNSVVIQRESRRFKNYLMKKSVMSEIKSKREIHKEFLMAKQEASKPDLIKKENKKIVMFSHDKAKSDFAIMSVYKSSNLKLEYYFTNNLQFKHIYSDL

SEQ ID NO: 59089 - protein, 426 aa, unknown
  TnpB Polypeptide
METIRGFVYSLKPTSAQEHLLTQTAGVVRLVYNLALEQRRIWGGRPYGGGAPRYFGSKGLSGELSDLREAYDWIRSVSQTAQNQALVDLDRAFTNFFEGRAGYPTPRRKYANDAFRQAGREIQTRKINKRWSEVKIPKIGWVKYRDTRALPHAEGCAPDIRNATIRRTASGWEISIAVRYEIEDRPVPSAAQGVDRGVAIPFALSDGTTWLLPEAMEARQKTIRRGQKIMSRRQRGSKRYAKARRRVARLKARDARTRAHLHHVLSRHLADTCGMVAIEDLKTCNMTASAKGTVEEPGKNVRQKAGLNGSILNVGWYGFELKLSYKMEETGGIIVKVDPRNTSRTCAECGAVDKESRKSQAAFVCTTCGAAENADINAAKNILARALRSPEQEKAVEHVASGRGGQGVSSQRSVKIPDQSVHLDGA

SEQ ID NO: 59090 - protein, 370 aa, Uncultured sp.
MVKLLPDKQQQEALIDTFVKFNEACNFVSRLAFERKLYNKVLLQKLVYRDIRENFGLAAQLAIRVIAKVVETYKNDKTVMHEFREFGSIVYDQRVMSFKGLDTVSLNTVRGRVRIPMTIGKYRELPLDRIRGQCDLVRRNRIFYLMVVVEVPEEEAISASDVIGVDLGIENIAVDSSGHYYSGDRIAEAGTKHSSLRSRLQACGTRSAKRHLKKLSGKERRFARDVNHVISGEIAERAKGTSSAIALEELKGIRKRTTVGKNRRYRHNSWSFCQLRTFIEYKALESGVPVIGVNAKNTSRECPDCHTVDKRNRPERSIFKCISCGFEGEADFVASLNIRNRAAASQPIVAGAIFDQPLIPQLQAPSVRVG

SEQ ID NO: 59091 - protein, 410 aa, Uncultured sp.
MLNRRRLRELKAYRFRLYPSAEQEEMHNEQLELCRQLYNSFLLERRYAYRGSRKSLTYNRQQNEIPELKNAFEEYKEIHSQVLQDVARRADRAYQNFYRRVKEKKQGIKKKAGFPRLKGMGRYRSLTYPQSGFRIIENGHLKISKIGRVRMFMHREIEGEIRTLNISRDSTGKWYASFSVKQEIVAFQPEKTGNSIGIDAGLLHLATMSDGTVIDHPKFLKKGEKRIKKAQRKLSRRKKGSNNRRKARMNLSKQNQKVKNQREDFAHKLSSQIVKNNDLIAFENLNITGMMKNHHLAKGIADASWSTIVQYTTYKAGSAGKSVVMVDPGNTSRECSNCGYGKESMKLSERTFHCDSCGYEIDRDLNAAINIHNRGLEKVGRGTPEVTPVETGVQLSFRMVQPVREAGSPV

SEQ ID NO: 59092 - protein, 382 aa, Chromatium sp.
VNIIVNMKTTLQIKLIPDDTQRKALEDTMRVFNAACDVIADVAFREQCASKFVLQKLVYAHVRKQFGLSAQLTIRAIAKVVDAYKRDKSKQCVFKPTGAVVYDQRILSFKGLEAASILTLQGRLTVAMHMGDYQRLQFGRGHGQADLVRVDGVFYLLLVIETPTAPPIDPNGFIGVDLGIVQIACDSDGEAFSGETVENTRRRDHALRQSLQACGSRSARRHLQRIRRNEARFRRNQNHVLSKTLVAKAKDTGRGIKLEQLKHIRERTTVRKSDRAKHSGWSFFQLQSFIAYKAKREGVVVQYVDPRNTSRQCAACGHLDKANRKSQSRFQCVSCGHVANADQNAAINIAARANVNSPRVAHDDNNGWFECSHKPRPLGRGN

SEQ ID NO: 59093 - protein, 404 aa, unknown
  TnpB Polypeptide
MRFVEQHVIGKQDARYAMIDATCFASKNLYNYANYIVRQSFIHEHIYKGYAVVYHEVKGHECYRALPAKVANDVLRLLDKNWKSFFKAIKAYMQDPTPFVGRPCLPKYKDKQKGRNILIYDIQAINKKGLRKGLIQPSMLGIEVQTKQTSVQQVRIVPRCGFYMVEVVYSREETQADVDPSLMASVDIGVNNLVALTSNKRGFTPRIVNGRPIKSVNQFYNKRKADLQAKMRSDTAFTRRMERATMKRTRRIDNYLHTASKRIIDVLVSERIGTLIIGKNPLWKQDPTMRKKDAQHFVQLPHARFIDMLCYKAKLVGIQVILQEESYTSKASFLDNDPIPTYGKVKDEPIFLGKRVKRGLYQSRHGICFNADVNGSYNIMRKASPNAIVQGSRGCAVHPVRLAV

SEQ ID NO: 59094 - protein, 439 aa, Actinomadura sp.
MPSSSVVDRYGAGVQLRYNYRLYPTPGQQIALARAFGCARVVFNDGLRARREAREQDLPYISDAELSRQVITLAKATPERAWLGEVSAVVLQQALADLNTAYRNFFASVSGKRKGRALAPPRYRSRKDNRQAIRFTKNSRFKVLDNGRLRLPKIGELQVRWSRPLPSAPSSVTVVRDAAGRYFASFVVTTQQDETLPPVDSEVGIDLGLTHFAVLSDGTKVTAPRFLRRAARKLKRLQRALSRKQKGSNRRRKAVVKVARAHARVADTRRDWQHKLSTAIIRENQAVYVEDLCVAGLGRTRLAKSVHDAGWAAFTAMLEYKAARYGRTFGRVDRFLPSTRMCSACGGTNEKMALSVRAWDCPCGAAHDRDVNAALNVLAAGRAESRNDRGARVRPPAMAAPRDEAVTHPDAARTPRSVEGISALQSGEDVKTSRTACTR

SEQ ID NO: 59095 - protein, 384 aa, Lactobacillus sp.
MLMIRTQKVRIYPNRHMKKVLDSLCDYRRYCWNEGLATWNDMYDLYTLDSNSPGPSFYSVRNELVANKADWQYELSARTLQLAITDLGNAWKNFFDKAQPDWGKPTFKSKKAARQGFKTDRAKIVAGKLRLDKPRGTRDWYDITISKHTDLSGVLKVASIYRENGKYWASLPFEVELDTKPKTGDRSAVDVNVGHLNYTDGIIDTLPKRLRKLYQRIKFYQKQLAHKRVVNRKKATKSNNYGVMRAKLQRDYCKVANIQHDIMQKFTTKLVNDYDKIVIEDLSVKVMQMSHVASKGLQRSMFGYFRQTLSYKCKWYDKELILADSQYPSTQWCSKCGRIKSGSDKITLQGNASHQTKHNEYVCYGCGAILDRDENAVANLLDLI

SEQ ID NO: 59096 - protein, 411 aa, unknown
  TnpB Polypeptide
MQRLQAFKYELMPTGEQQRDMGCYAGSCRFVYNKALALQKTNYEAGGKFVGYVAMANLLPEWKKEFPWLKESPSQALQHALKNLERAYKNFFEKRADFPRFKRKGMGDSLRFPQGCEIDQANGRIKLPKLGWMRYRNSRDILGIPKNITISQCGGKWYASIQTEREVEQPIPKATSAIGIDMGITRFATLSDGSFVAPLNSFKKHEVRLNRYQRAMSRKVKFSKNWQKAKRRVQNIHARIGNARRDFLHKTTTSISKNHAMVAIEDLQVRNMSKSSKGNAQKAGKNVAQKSGLNRAILDQGWFEFRRQLEYKLNWNGGILVPVPAHHTSQTCPACGHVAAENRQTQAKFECVDCGHTDNADVVGAMNVLARGHRVAACGEDGSGLARKRKTKPASVKQEPTEATMCEVTHV

SEQ ID NO: 59097 - protein, 607 aa, unknown
  TnpB Polypeptide
VFKKKNKSTLFTPTKAICLSVGELTPYKKNTLLSIREKYITIANDMTKACFQDDFLALADYSPKIITQNFTLPFQTNIPKGFLNKTYIEKARKSVESTLWEQYSRSIKSLCFAIHNIDKENFWSNKQINQAKKKNEALPKYKYIPFEIENNVNEKILNEIKSEFSNIESKKRLDWLRDIIFNNNKFTFNKNQINIINHTYEVIKSRFSQPRFGINDDFSTTIHFDKRIVNKYKEKVIDIDKHYKWLIDNNNKHYRLFLAISHPVNHGEKINIPIQLNKELYNRLLNNGELPDTQSILLVIKHNTIEIRNTLTKEKIETNLKAKFNQLKNSDHIISRDFGYLDTITLSVIENEFNLSLKEFEERLELNKKDTKLLYENKNYTPKIVKQYQYSGKNFMTKLSQQGLKIDKYKSEIDCLYNKIELLLMNIKNHLNLKEEQQINENIIVKDKFVQQLIHKFFKLLKTTTNLKTLRRNVYKKIQGIKKSWFGFLSNIEKKLIKSYNATIIVENLSVMAIEKEKPEYKGKSFNKMINNGSKGQYMTMAKEKFLWNGILEIRIPSYYSSTTCTQHSLVDKDMRKNKKFLCPKCKITKDADKNASDTIASFLLLR

SEQ ID NO: 59098 - protein, 428 aa, unknown
  TnpB Polypeptide
MKLTFRYPVYPTKTQETTLFQWLDHLCDLQNSARHDRKVAWETEGKRVSCNAQEKKLTAAREKYADFREVPQDMQVCALERTDKAFDGFFLRCENRAAKKGYPRHRKRIRSMSWKLRKQKVRDKSTGEYKRVRENPIRETVWKHDRLKVPKLGEVKIYMHRPLQGDPTGVTLVKKASGWFAHITCELPDTPKVEPTDAIAVDMGTTHYLTTSEGKKEDNPRWYRQAEGLLHKHNQTMARRKKGSHRWYKAVHASALHQERTTNKRKDFIGKLVYNLYHHLENNVLVAEDLSISNMVKNKHLSKSISDASWGTFFTWAGNIAERDGFHFHQVDPKNTSQICSNCGQKSPKKLLLAIRTFNCQACGTSLDRDHNAAINILLKAAAAFRGEWWATPLNEARNKNEARGLDLQNAQQLSLFDTSPMPLGLGS

SEQ ID NO: 59099 - protein, 407 aa, unknown
  TnpB Polypeptide
MVSSRQFKRAYRFRFYPTPEQENLLRRTVGCCRLVYNKALHERSTAWTKERRRVSYKDTSALLTGWKKTDDLNFLNEVSCVPLQQTLRHLQKAYSNFFNQTGDYPTYKRKSHGGSAEYTRSAFKWDGRNLTLAKMSEPLDIRWSRTLPRKAQPSTITVSLDPAGRWHVSILVEDTIARLRKKSAAVGIDLGTDSFAILSTGEKIDNPRHRNRDMKRLAKAQRALARKQKGSRNYEKARLKVARIQAHTKDRRTDFLHKLSTRLIRENQTIVLEDLAVRNMSRRCKPKPDPEHPGQYLPNRQAAKRGLNRSITDTGWREFRRMLEYKSEWYGRTLTILDRWYPSSQICSTCGENTGRKPLDIRQWDCPYCGTHHDRDINAAKNILAAGLAVTVCGDGRSRRDDAGSDR

SEQ ID NO: 59100 - protein, 359 aa, unknown
  TnpB Polypeptide
MKYTKTLKVRVRDNHRFLLNNMAKSVNFVWNYVNELSSRSIKDRGVFLSNYDLQKYTQGANKELSLHSQTVQQVSKEYVTRRKQFKKSKLNWRKSHGARRSLGWIPVNTGQAKWKNGCVFHNGQYFKVWDSFGLSQYKFRSSSFSEDARGRWYFNVVIEVETEKSTGTKAVGIDLGCKTAATDSNGGAVEGREYRKLEQKLGIAQRARKKQRVKTIHAKIKNRRADTLHKYSRKLVNESAAIFVGNVSSKGLVKAKMAKSVLDAGWSTLKTMLEYKCAHADIVFEVVNEAYTTQACSCCGSISASSPKGRAGLGIREWKCSDCGTAHDRDINAAINIKNHGLDTLAVGLHRLVEEKVAA

SEQ ID NO: 59101 - protein, 449 aa, unknown
  TnpB Polypeptide
LASTRRASNSWQRRANKSRSVSCAASVKTFLRYLVTKTKWTCNAKTQCLPVRKSFVFAIDQLYNMPMQIRKGYKYRLKTNRSTGGKFVRFAGACRFVWNKILSINEHRYFSGVPRRSYAEACELVAWWKQSEEYGWLKEVHSQVLQQCLKDLERAYANLFAGRTAPPRYRKKFLADSFRCPQGFKLDGRQVYLPMIGWVEFWESRPIEGTIKNITVSRQGQHWFVSFQVEMEVEAPVHPATADVGIDLGIATFAAFSDGQLHPPLHAYRRVAAKKARMQRNLAGMVKYSCNWKKQQRRIAQLDIRIANCRHDFLHQLSTETSKNHAVIVVEDLQVKHMSKSARGTAEEPGRQVAQKSGLNKAILDQGWGMFRGMLEYKQAWRGGALIAVDPRYTSQTCPECGHVSKDNRVQQALFSCVVCGYTYHADVVAAKNILALGHRERLNACSPR

SEQ ID NO: 59102 - protein, 381 aa, unknown
  TnpB Polypeptide
VRQSFQFKLFGCKRLKHLHRTIDASAEIWNHAVALHRRYYRLFKKTLPKARLQAHLAKLRNGRMPHWKAVGSQSVQSITDRLYLGWEAFFAGDIKRPPTFRKRRKYRSFTLKQCGYRVLGHGRIRILGRNYRFNQSRSVAGTIKTVTVRRDALRDIHITFSCDQVPQAEQGPKTGLSAGADFGLKDFLTLSTGEKIAAPQPLKSQLRHLRKAQRALSRKNKGSKARARAKLDVARVHKKVANVRNDWQWKQARMLLLTFDMLVFETLNLRAMQQLWGRKVGDLGFADFVSKAGWMATKLGRELVKIGQWTPTTKRCSSCRHVQDVPLNVRVFACERCGHTEDRDVNAAKSILEEGRLLRSGAARKTSQEASGVNTAESHGL

SEQ ID NO: 59103 - protein, 397 aa, Escherichia sp.
VKRLQAFKFQLRPGGQQECEMRRFAGACRFVFNRALARQNENHEAGNKYIPYGKMASWLVEWKNATETQWLKDSPSQPLQQSLKDLERAYKNFFRKRAAFPRFKKRGQNDAFRYPQGVKLDQENSRIFLPKLGWMRYRNSRQVTGVVKNVTVSQSCGKWYISIQTESEVSTPAHPSASMVGLDAGVAKLATLSDGTVFEPVNSFQKNQKTLARLQRQLSRKVKFSNNWQKQKRKIQRLHSCIANIRRDYLHKVTTAAMIVIEDLKVSNMSKSAAGTVSQPGRNVRAKSGLNRSILDQGWYEMRRQLEYKQLWRGGQVLAVPPAYTSQRCACCGHTAKENRLSQSKFRCQVCGYTANADVNGARNILAAGHAVLACGEMVQSGRPLKQEPTEMIQATA

SEQ ID NO: 59104 - protein, 434 aa, unknown
  TnpB Polypeptide
MLCPCGTAPHMRKTYQYKLLLTADQRREIDRWLSMLRAQYNYLLRERFDWWEYHRSYLVVPQGEYCLRWCELGSVELKNNPSWHSQSASLPSLKKERPWYKNIYSQVLQDCVKRVKKAFERFLAGDSKGKRSGRPRLKNQARYRTLTYPSLPNKNLMGSRIKLPKLGVLKFVKSRDIELGFKLKTASITLKADGYYLSLSVEDKSVPEAKLDTIPTESNTTGVDVGLEKLYVDSNNNQALPQKHLRKAESKLAKLQRKLKDNARSKKAKKLIRRAISRLHQKIARQRKHWHYSEAHSLARSCQVLAIEDLSIRNMKRRNKPKKVDGVYVPNGQAASSGMNKSWSDNGVGNFLEILSQVAQKYGTIIVKVNPRGTSQHCSQCLNRVTKTLSDRWHSCNVCHLSCDRDYNSALLVKKLAVGSSQDKTLPSLKDLLG

SEQ ID NO: 59105 - protein, 524 aa, Streptomyces sp.
VRPSATRTRRSPRSSTSRRTPASRPCTGPGSTSRRAGRVRRSTGPRPGGSPTSSSRRPPAAGPNRWSGCSPRTPCRSATAAGRSRPAPRRSRAPAPWRPWDRVFPVTHGTASSYGLRMQLRYAFRVYPDAGQGLALARAFGCARVVFHDVVRAREDARKAGRPFQTAAGLSRKLITEAKRTAERSWLGEVSAVVLQQSRRDAETAHRNFFASLKGTHKGPRVGPPRYKSRKDARQSIRFTANARWSITDSGGLNLPKIGAVKVKWSRTLPTIPTSVTVIKDAAVRYFASFVVDTDPAADRVRMPDADRTVGIDLGLTHFAVLSDGTKIDSPRFLRRAEKKMKKAQRELSRKQKGSKNRDRARLKVARAHAKVADARREFHHQLSTRLISENQGIAVEDLSVAGLARTRLAKSVHDAGWSSFVGMLKYKAERYGRTLVVIGRFEPTSQTCSTCGVKDGPKPLQVREWACTACGTVHDRDHNAAINVKQAAGLAASACGAPVRPGAIPARREETGSHGLPTEPRAA

SEQ ID NO: 59106 - protein, 279 aa, Hungatella sp.
MNRAYKYRVYPTAEQEQLLKDTFGSCRFVYNHYLAQQSENRQQGKAYMNKIACNNDCNRILKQEQSWLKQVDKFALTNAIYALDAAYQRFFRKQGGYPRFKSRHHSRMSYTTNYTNGNIAILDGAVRLPKLGKVKAVVHGRAPEDWRLKQATVSREGDGSYYVSVLYEYEAVIMPQAVNPEQVIGLDYKSDGLYMDSEGRCCGMPHYYRKNQKKLTKVQRKLKAKQLQSVNYRKQQKKIARVAKKAANQRKDYLHKKSTEIANQYDLVCGRLKFEGAGK

SEQ ID NO: 59107 - protein, 483 aa, unknown
  TnpB Polypeptide
MQTLTLEISITKRSVLNKLKKASLTFQQFKNLIYLCLWEYYRNTKDIKPFLNAYFLEKFVKGKESLAFENEKIKDYREKLKELWKNKIGSDSAKALVQQVSKEVKSVLEKWKRGEKSSLPKPKKLEKVHKFTIFTNQNMLVDKRNLKRGKENSIVIRLGTDFGAVKVKIPQEINVRNVKITWYKDIEAVFKITYEIQKPKTELNKNKWLSIDVGVKNLVSCISNDENLRSFIVDGNPLKSFNQWTNKLSAKLKSKGEQTLERTLWRYREKRIKGFLHQVANLIVRICLERGVGKVIIPNSLNGEYQRESKKGARFNQTFRFFPLEKLLKIIEYKCEMYGIEVVREEESWTSKVSSASGNIEILQNKRIKNISEEEVKNLKLEGKRIKRGLFIDLRLKKAFNADLNGALNLAIKALGSNARETFFALNNWLDKLSRPIKVNLFRYPASLPIIREIAGSISCFSKRSSEGHSTEKISKVITNAYL

SEQ ID NO: 59108 - protein, 411 aa, unknown
  TnpB Polypeptide
MYLTQINMLRGLTKAEYFQLRELCFFSNCLYNFALYNVRQQFFKDKTYLRFEANYHECKDNDNYKLLQSNMAQQTLRAVDFAFKSFFGSVGKIKTARPPRYRKKGGLYNLIITGNSISIQDGFLTIPQSRTYTKILNDYRIRIKVPERLIGKKIKEVKIIPLYKGRAFKIAYCYEVDAQDLKLNRENSLAIDIGLDNLATCVTNFGTSFILDGRKIKQINRNWNKRRAYLQSILMKQCRYSSKLLEKITLKRNNRVNDCLKKTARYIINFCIANDIGTIICGYNPDFKRNINLGAKINQQFTQISFGALRRQLKNHCTRYGMNYIEQEESYTSKASFLDLDELPVFDVETPYTGTFSGKRIRRGLYRSKSGRLINADVNGAANILRKSKQKVNFEQLCMGLLDSPLRIRVA

SEQ ID NO: 59109 - protein, 376 aa, unknown
  TnpB Polypeptide
MRKAFKYKLYPTRQQQTAMSAMLETHRRLYNDALAERKQAWAQEQRSVSYGEQSGHLKAARTTNTFLAATNFSSCQATLRRLDKAFVAFFRRIKASETPGYPRFKGRNRFDTVEFPSYGDGCRFDGGKVYFQHIGRVKVKLHRPIEGRIKTVTFTREAGDWYVVFSCDLGDVDVSSSSGPAVGIDLGLKAFLVTSDDESIPPPRYYRQEQAALRLAQRRVARRQKGSNRRRKAVRMLQKQHQRIGNLRRDFHHKTARALVSRYGTVVHEDLNIRGIARSRLAKSTLDVAWGAFLSILAHKAEEAGVTVIAVPPHNTTQMCSRCGKLPLVSKTLADRVHSCAHCGYVADRDLNAAQNMLRLGSSLQDKTCANGQCVS

SEQ ID NO: 59110 - protein, 182 aa, Fusobacterium sp.
NFALTSDEISIENPKYLQKSLNKLAILQRKLSRKPKGSSNRNKARIKVARLFEKISNQRKDFLQRLSTELIRKYDTICIEDLQVKNMVKNHKLARNISDVSWSEFNRILEYKVKWYGRTIVKVDKFFASSQICNCCGNKNEEVKDLSIREWTCPVCKAVHNRDINAAKNILKEGLRILGISA

SEQ ID NO: 59111 - protein, 475 aa, Crocosphaera sp.
MILAYKYKLRVSSSQEIIMTNWLSMLRSHYNFCLRDRIEAYEQVKSPKLGNYSDLKKKAPCCPLTCSISNKSQLGEPFKKTGKKRNAYEMQSSELPVLKKARPWYKAIYSSVLQQNLRRLDVAFKNFFDGRGYPKFKTRQRFKSFSYPPNQVKLESNKIYLPSIGWMRFFKSRNIPDGFNLKTVTISLKADGWYVSIRIENKDVPQSKPKDLKQVQAVVGCDLGIKKLLALSNGELIENPQFEKRQSRRKAIRQRRASRKKRGSSNQKKAYAKLARIDQKIVNQREDHQWKTAHHLVRLADVIVLEDLNIQGMIRKCRAKQDENGKFLKNGQSAKRALNRLIRDCSWGNLTEKIESVAAKFGSICVDVNPKFTSQKCSHCGHIEKENRNKERFLCLNCGFLADADIQASINIGIKGLKTLGISQSKLLMVNQKVTPKPEMTGSSDREISVSLEIEPGNPQQLNLFEWVNGEAIPC

SEQ ID NO: 59112 - protein, 398 aa, Acidiphilium sp.
MLFRGYTFALRPTVEQAEKFAQTAGVCRLVWNLALEQRRTHWRNYQGRTGNNLNYVTQARELTLLRAEMDFIREVSQNAQQYALKALDDAYRRAFKGLGGFPQPKKKGVNDSFTFTGREVSVERLNHRWGRVKLPKIGWVKFRMTRDVEGKMTEATVNRTALGWQVSIGCKIDRDIQDVGGAVGIDRGVAVPLMLSDGTAYRLPETVALLDRRIRKAQRIASRRKRGSNRCRKAQRRVAALSAKRARIRKHWAHETTTDIARKFGTVVIERLRTKNMTKSASGTIAEPGKNVAQKRGLNRAILNVGWHQVETMLFYKAFRVVKVDPRHTSQTCSACGNLDSRSRKNQASFVCSACGFHSNADQNAAINILQRGNTPVVEPATLQAMKRELPLVETLVV

SEQ ID NO: 59113 - protein, 332 aa, Lyngbya sp.
MVKRVDLAFSRYIKGDKNGKRSGKPRFKGKNRYRTIGFPSIKPDCVNNNHITFPKLGNIKFIQHRPLPDGLTIKRALITQKADGLYVTLTLEDKSVPSLTVDIQPTEENSLGIDSGLEFFVACSDLTAVKLPKFYRQSEDKLAKLQSKRDRRKLGSKARRKLNQKVAKLHQKIARQRKQWHYEIANQLLDKADVLFVEDLKVSNMSRRNQPKQGENGTFLPNGQSAKSGLNKSFADAGISGFLSEILPGKAEKAGKKVVKVNPKGTSQHCAICLNRVPKELSDRWHSCACGASMSRDINSAILIKKVGLGVRLTIKRKSSDNKKRRSQRSVA

SEQ ID NO: 59114 - protein, 560 aa, unknown
  TnpB Polypeptide
MIPIKTYFGTCLGDFMVIRTITLKLYKPSRRKREIIDDALLRYSMAYQYMLDKAFEQIEEIREKYKEPYGIYSSFKLSKWMDSTLSEELNEFGVQPFKDSLKIDLGMSLAGHLNLKRIRENTSFPLVYLPDDRYDSSYDALMDEIISEGLNDNLKRHKCEKELLRLERKSASLSPIFFCRCATNRDYCLLYDVINKKYYAKLYLMNRSDDRKKALNPSENMLLRYIHKDGGMLKPSDRKERYIIVPLSFGKWQEQYLKTALVDPSIIKTARLIKKKDEYYLAVNIDIEEEKAVETETYLGLSRDLKALACYTIVDSGGQVLETNKFTNLEVNKFAKMKCISSGAFPADVLHSIANEIVALSANNKSQVVVQSMIDKSDRLVWRDEQGRVFKPLLDCRRYNDLVKILEYKLPSRGLPPPIKVSPVGIFYKCPACELQAKKNRISKDMFICTACGQVMEIGHLGSLNLAKKPIQYSKDVLKVNVESTPIGVRLINKELGLDFKPSEDINWFDDFKKEIVDIIENFNANMPGVKDDSKSFKMKYSIIKRLESGKDLSEMIRLS

SEQ ID NO: 59115 - protein, 447 aa, unknown
  TnpB Polypeptide
MITIKLPYRSTDKYYAVLHQLRKEYSSVVRYSYNRYLDDIKQIDIRHSLSQLNNINHLNSWHEQNAIMEANQLFKRFNDTPNIIFGGKHNFIQRLKNKITKEEFDEKRLLPLNIQGECLKKGNRSFILDIIDNNQIIFKLNTKQHFNLELPNLRNNIKKQLYKLQELNEVKQGNHGYCYSIKLTDTHIYISFEEFKEQIHQYDEQRYIGIDLNPDTIGISIHENNKILHTQEFSLKLIFDKILSNNLSSDSKEIKYYQNKLQFETYEISKSISNLAKHYNCKTVFIEDLNFKSKLSKSQKYNNIGNRKNRNLWKRQLFVNNLVKRLNIFGIKLFTVNPAYSSFIGNLQYNYTDPINASIEIARRGYEYRINKNKDKFYPIIKLKDNLIHQWKEMVNIDTVKNWKDLFLIIKNLKLKYRVSLADCQRTFKVFRLNHTNTSCINIYNFS

SEQ ID NO: 59116 - protein, 387 aa, unknown
  TnpB Polypeptide
MSHKTFQYRIYPTKKQETTLLTWLKLLCETYNAALQERRDAYRLVGKSIGFSHQCAELPACRQVRPDLAQVPSQVLQDAVKRVDLAFDGFFRRCAAGEKPGYPRYKSCFRYDSMTFKQYGNSFSLEASPKENRGTLMLAKLGHVKMVMHRPLQGTPKTAMVKRTPTGKWFVSIGCEDAPEPTVPASEKEVGIDVGLKTFAYLSDGTTLENPRFFRQEEKKLARAQRKRDKAPQKSQERKKLNKRVARVHERTKNRRKNFAHQQSRKIVNTNGLIAVESLVVRNLIKNPKLAKSIADAAWSQFFEFLQSKAEEAGREVIRVNPAYTSQTCSCCGHHQEMPLSVRIYECPICGLVIDRDHNGSKNILEEARAAKACGRAGCVIPEAPDL

SEQ ID NO: 59117 - protein, 358 aa, unknown
  TnpB Polypeptide
MNLAVTVKLKPNPEQASALLETMERFNAACTAVATVAFRERTASKVKLQRLVYYQIREQFGLSSQLTVRCIAKAAEAYKGDKTTRPSFRPRGAIAYDQRVLSWKGTQRVSILTLRGRKIVPVALGAYQAGRLKRVHGQADLLYQKGSFYLALAVDVPDAPAFRPDGWLGVDLGVVNVAADSDGAIYSGGHLNGLRMRHVRLRARLQSKGTRSASRLLKKRRLKERRFARNVNHVVSKKLVAQAKGTGRGIALEDLRGIRERITVRKAQRRVQYSWSFQQLRAFVEYKARLAGVPVALVPPRNTSRTCPACGHVAKENRPTRSSFHCVSCGFAGPADTIAAENIRRAAVIQPHAAGART

SEQ ID NO: 59118 - protein, 413 aa, unknown
  TnpB Polypeptide
MIRTRIFACSLPKDTADTLNRESGRIYTGVLVEHYRILRHSDHWLSPGGGEKLSDYLSGTILHAHSRDAAQQGFYKACKTAQAQKAAGMGPARYPHHLKRFRTSIWKNTGIRKKGDVLLLAMARGYQPLRVCLPSQLANLPAESFLEMRLVWDRAGRRYNWHSVVEDGLQPANPPGNAVAAVDLGEIHPAAVTDGEEGVVFCARELRSLSQYSHKRLAEIQSVLSKKEKHSRRYQRMLARKVRFLAKQKRKRTDIEHKVSRSVVNYAVERRVGTLAIGDVRDVADGVNYGKKTNQKISNWSHGKLRSYIEYKAAAEGIQTVLENEAHTSQTCPNPNCLHKIKPKGRVYRCPACGFVGHRDIVGASNILSRRVYGKLGQIYPAETKYRHPWITGKRSPVDTRQVARQNREAAVL

SEQ ID NO: 59119 - protein, 413 aa, unknown; identical to SEQ ID NO: 59118
  TnpB Polypeptide

SEQ ID NO: 59120 - protein, 556 aa, unknown
  TnpB Polypeptide
MGKKHAEERKPSRAKTPTFLLELPLVADAGQAARLGGHLEVGRQFYNAVLSAGQRRLRRMRADPAWQAARAIPRTQRQERRAVFSALRERYGFSEYAFHELAKGLRVSWLAEHLDAVLAQTLASRAYRALNRVCLGKARRVRFKSRGRGLSSIENKRKDTGMRFVLEPRAEGRPQGCLLWHDEKLRALIDWDDPVVAHGLAHEVKYARLVRRRASSPRAQGADSEGERYFVQLALAGTPLQKPKHAVGSQTIGLDLGPSSIAIVPREAEARLEPLCAELRPDARAIRRLQRKMERQRRAANPEHYDEKGRAKKRGKGAPRWKQSRGYQATRRRKATRERRLAAHRKSLHGRLVHQIVAVGHTIVTEKISYKGWQKRYGRSVGLRAPGMLIDQLKRTVASTGGTLHEVPTRSTKLSQYCHGCGQTVNKPLWQRWHQCACGIGSVQRDLYSAFLAAYLDPADPIPSCARYVVPWEGAEARLRAAHERATQRAKEGQVMPRSMGIPRAGARLPKSRGEATQELLFLSRRGKVEAWKHRSEPPELELGESSGKVSTPPPF

SEQ ID NO: 59121 - protein, 536 aa, unknown
  TnpB Polypeptide
MRCRKIRIFPNADYMKYFNQCFGATRYLYNKTISRFKQEIEKIQHEYSESAKKDGCVKLIIPPKKANDVPKRCCKKIDGKYFCEQHSECKIVYNIPCGFIYWRDIMIKGNDDLSDDEKWLADIPFDTRQLVVKNVMGGIKSAFSNLKNGNINEFDMSFRTKKENLNYFHVDHRALRADLVLFQKKFKKPLTVPKRDFKWLRDHLKNNKICDMIISREQPGFYYLQIPYELELIDHKTNDSVISIDPGVITQGTFYDPSGKCGKMGDGLARKIDRLYSKMDKLNSLISKEVNNLKYLKTNPKKITRDQYEKIMLKKKKCLTKQMSKLNSKINAERVKRNELIKIDAGIHESNKKIWRAKKQLRYKKILDNCLPYGESLDYYFKKIEENHYIKESKKRIKNLKKKLRIVRRKKQNVTKESHQKTISHYVENYKYIVIPELNAKQIAKKQKMMGMKREARKTMGMCHGKFMERLKTKVESIKNCHLIIVKEDYTSQTCGRCGILHKIKGRIFICPNCGLDQDRDTNAARNILIRGLLQE

SEQ ID NO: 59122 - protein, 404 aa, Lactobacillus sp.
MTLKAFKMRLYPNQKQIKQIKQTFGSTRFVWNQMLARQSARHKNNPNAKYQNNYAMDLMLTTLKAEYPWLKDVDNTALQATNSNLHDAFQRFFNKKLSNGYPCFKSKKNYAQSYTTKNNGQSIKVIDDHHLKLPKLGKVYFRAGRILTGKVKRATVRINSQGQYYAIVLVESEKQVLKPKTKQVVGIDLGLDSLMILSNGQKVNMVHFDNDAKQQIRVWERKTARRRQNALKEIAFDKHEKVLFPRTSLRQFPRYQQARLTVAKLKRQVSDRRNDKLQKLTTQLVQGYDVIVVEKLNTQGMLKNHHLARAISNAGWGNLVRMLQYKCDWYGKQLIIVDPKYTSRICSACGQHNHQFDGLSQHEWLAVREWQCPTCGTHLDRDLNASQNILKRGLAQIEKEKALA

SEQ ID NO: 59123 - protein, 443 aa, Moorea sp.
MYGCQQHLITTTSENKAVIEFICSEANKLTNCGIYYCRQILFKSGKYLNNAEVDKIMKTNVHFKAMRSACAQQTLHGVIESFKSYKALKKLYDKGKLTYKPRVPKYRKKGGLAVVSYPARWVKLVKGQLKFTLGKQVKVWFGIDHFLLPMPSNIDYISIKEYRFLPRNGCFYLEFVYERLKPEPVTPTSNVLGIDPGLNNWLTCVSNVGKSFIIDGRKVKSQNQWYNKRVAAIKKGKPQDYWDERLASLAEKRNRQMRDNVNKVARFIINWCQKNKISTLVFGWNKRNKDSINIGKKNNQQFVQIPTAKLKKRIEQLCIEYGIKFVETEESYTSKASFLDRDVLPVLGEKPVREACPSGLGWVPSGKRVKRGLYRSGKGELINADCNGACNILRKVVTQLGKTLAEVSRADLSLPQRYRLDSLSRSYREASLRAVSTREVTSA

SEQ ID NO: 59124 - protein, 365 aa, unknown
  TnpB Polypeptide
VLRAYKYRIYPNKEQRIYLAKTFGCTRLVYNLMLSDRIDTYNKYKDDKEKLKKQKHPTPAQYKKEYEFLKEVDSLALANAQMNLDKAYKKFFRDKSVGFPKFKSKKTNRHSFTTNNQKGTIYIKNGYIKIPKLKSMIKIEQHREFEGLIKSCTISQTPSGKYFIAILVDEEDVKKLEQVDKKVGVDVGIKDFAITSEGEVFSNPKWLKKSEKRLKKLQKDLSRKKKRSKNRNKTRLKVAKLHEKITNQRKDFLHKLSSELINENQVIVIEDLKVSNMLKNHKLAKSISEVSWYGFRVLLEYKAKWYGREIIIAPSNYASSQLCSECGYKNKEVKNLGLREWICPKCNTKHDRDINASKNLLKLAI

SEQ ID NO: 59125 - protein, 456 aa, Streptomyces sp.
MQLRYSFRLYPNGPQRSALAQAFGCARVVYNDALRAREIARTAGEAFPRIGGLSKLLITEAKKTDDRAWLGEVSAVVLQQSLRDLDTAYRNFFDGLKGKRPRMGAPRFKSRKDNRQAVRFTANARWKITTGGDLSLPKIGVVRVKWSRSLPSVPSTVTVVKDAADRYFASFVVETEPDEMLPGTDAAVGIDLGLTHFAILSDGTKIESPRFLRRAEKKLKREQRRLSRKAKGSGNRARARVKVARAHAQVVDARREFHHQLSTKIIRENQAVAVEDLAVKGLARTRLAKSVHDAGWSAFVAMLEYKAARYGRTFHRIGRFEPTSQVCCVCGAKDGPKPLRVRFWECQECGAVLDRDINAAINVAKAAGLAVSACRAQIRPILLPAQRVEAGTRRDGQPTVVGIPGLQAGERKSSQPGDDEGGRKAVEVSHDALGVLDGIEGLLGDQVLNYARRGTE

SEQ ID NO: 59126 - protein, 493 aa, Zixibacteria sp.
MKKHKRSRFLYLHPETNAGKIEELEKLQLEIGDYVRTCVDLMINNRVYELRLSQKQTFFPAAEKLTSQQEKNARDQAIQIVSGWFSSLYTLRIKKIIGKLFKDKEINEAQKIALYTIGKYRIGRPSNTISQENIDFYHKIIEDEGFNKPQIKPNFPIRLSEMTARLEQPETTSYKNVDYWLRVSCLGFRNSVWFPLVGNPYVKNISDISKGGLFRKTKRGRWRLEVVEKQDWIIPEPKDLPEDAPRIGIDVGLNVLVATSEGDLYGADFKPKFNKAYQKIKEIRTNRKRQGLIFNSKRLECLESKLTGQMATEIGTITNKLVLKYQGYLFVLEDLDLRGCSGQKRFAYTAVHHSFSMKVPTAKYNSAYTSQECPSLCGCIERNNRKGTKFICKKCGRKAHADWVGASGILRRSENKEITCDDEPNQVKKVLQEQSRVLRSVKRLRNKVRSVGSLVSFPKGLGDHELLPLSQKLTVEVFFKKEIRTASNSVTYA

SEQ ID NO: 59127 - protein, 472 aa, unknown
  TnpB Polypeptide
MATVSYGLKITEAYHIFDKTIKIYRNAVHYISDIAIRHFDELKSLESITGDDGKVIISAQQRRQQKMERLIHSTENNDAVYKRFDKEFYKFPSYLRRDAINTSIGLMLSYRSQLQNWENGGKHGCRPYLNRNQNTMPCFYRNNTFLNSEETNIVSLKLYNGKDWIWETFVIRDCDFMYAYSHMKAWKASAPVLVKRNHRYELRISYEMANSKFPKFKKDKEVETVIGVDLGINTDAVCSVVHKDGTVTGQRFINHPVEKDRMYGLLNAIKKAQQNGNHKTPRLWRLANNYNETIAIKTAAEIVRFAMESKANVIVFEHLNMKKKRRGNKQKLSLWRKRDIQHRVEALAARNGIRVSYICAVNTSRLAFDGSGKVLRGKDAGFNTYELCKFTTGKVYNCDLSASKNIGARFFIRVLLKSLSAKEELLVLAKVPELNRRTSCCLATLINAYAVLCASKVKPEAPAKGDAARQSH

SEQ ID NO: 59128 - protein, 245 aa, Bacillus sp.
LPKLGLVRLAKSREVEGGIVNATVRRNPSGRYFVSLLVETEVQELPKTDSYIGIDVGLKDFAILSDGTHYENPKFFRSLEDKLAKAQRVLSRRMKGSSRWNKQRVKVARIHEYISNTRKDYLDKISTEIIKNHDVIGIEDLQVLNMLKNHKLAKVISEVSWSQFRSMLEYKAKWYGKQVIVVSKTFASSQLCSCCGYQNKDVKNLNLREWDCPSCCTHHDRDINASINLKNEAIRLLTERTAGLA

SEQ ID NO: 59129 - protein, 283 aa, Megasphaera sp.
LVRNRDYSFVDNGQSLSINTLGKRTKCTFKSKSFSKYLDGSWTLGTAKLVELKGLWYLHIPVTKSVEVFQRENVRHVVGIDRGLRFLTVSYDEQGKTEFVSGRKIAAKRHKFLKVRQQLQSKGTKSAKRRLKALSGRENRWMSDVNHRISKTLVTKYGKDTLFVLEDLTGVSFEASNLSQTAKQNYDLRSWPFYQLEQYLTYKAHENCSEVLKVSAKYTSQRCPKCATVHKENRKPHQHLYRCQCGYQSNDDRIGAMNIQHLGTMWISGDNHPRYERITTASE

SEQ ID NO: 59130 - protein, 469 aa, unknown
  TnpB Polypeptide
MYISCYKKKKTFFLKINPKKIKIYVFFSSIQIKLMRSLSKKKIKCGEHLFMVDKTFILTDKIEFVPDEDLEGELNFNLRAAGYVFNKTLEYSIYRENLVKEFGIGKKCKINRTYTQKIVRTLKKQKPFLKKAESTCIQASTDRLIKAYEGFYDGRTGRPKFKSLKKNPVRSITLRNNEYETKNGIKGSIMWEGNKLRLNKLGYIEVKHKRDIDGKIKEATILKENGKWFVCIVYELEKIQPREIFSGPSLYVGIDVGLTDFLTFSNGKVIPKPDLKRINGRIQYYNQKLARQKEGGSNWKKTLKKLHKWINKKNNVVNDYYHKISYNIVKHCEFIAMETLNIRGMIRQRSLSRSIHEIGWGKLIEMIRYKAEWYGREFVQIDRWFPSSKRCNVCGEINHSLGRDEREWECPHCHGILQRDVNAAKNILDEALRATGSMVLCLVDFIPIGQGKFEYYYEWKGLDKTIGMA

SEQ ID NO: 59131 - protein, 392 aa, unknown
  TnpB Polypeptide
MLKGFKYRILPTKEQSILLNKHIGSSRFVFNLALETKQMAYAGSKVNLSCFDLVKQLPDLKKECEWLKEVNSQSLQQSITNLDMAYIAFFKGQNGFPTFKKKSNGGSFNIPQNVLVENNKLIIPKFKKGINIVLHRPIKGTIRQAIISKTPTGKYFASILCKTCEVIKPKAIIKENTTIGIDLGIKTFLVASDGQEIDNPKFLRKAMARLKYVQSKYSKHKGKRTKHRLAILHEKVVNQRKDFLHKISSKLIKNHDSLAIEDLSVSNMVKNHKLAQAINDTGWSTFVTMLEYKAEWYGKNILKIGRFEPSSKTCSCCGYINKELTLSDREWICPNCGAVLSRDKNGAINIKSFAIKNYLSVECRLKNCNELPRINKGVMTYEAQPIAFGVDG

SEQ ID NO: 59132 - protein, 400 aa, Snodgrassella sp.
MLVRKAFKFELMPNGAHVRKMKQFCGCARFVFNKALAWQNEQYQADNSVKFSYTKIANLLPSWKSEFNWLKDCQAQVLQQSLKDLESAFRNFFAKRSDFPNFKKKGIKDSIRFPQNTKLEQHNNRIYLPKIGWVRYRNSRQVVGTIKNVTVSQKCNKWYVSIQTEFEQPDQTPNGGEVGIDMGVVRLATLSNGQYFEPSNSYKKSLPKLAKLQRQMSHKTKFSNNWKKAKAKVSKLHFSIANIRRDYLHKISAQISQNHAIVYVEDLKVSNMSKSAKGNSEHHGKNVKQKSRLNRSILDQSWYEFRRQLDYKLLWRGGHLITVDPRNTSRTCPICGHISKDNRKTQAQFECVDCGFAANADEVGAINILRAGRARLACEVNDAVMSSAAGTHRSDLAECC

SEQ ID NO: 59133 - protein, 460 aa, Geobacteraceae sp.
MIVTRILQAALLPDLTAICRTMGFIRADIWRRYGALGTTGKTAADIRRDITQGEYYAGLPVDGTIRAETTKDVVNDLLTYKEAAKLKVRRSIAARTDDAVERKHLFTLLRQDEWLLDPFLHRQMREHFHHGRSHTDNHFVVRSDKHTPEVVSGRLVVTLHIAKKFGQDIALVTSSNGDDVDLSGRNLRVIVKDRTVELHYACEIPAGRPCGTREIGVDKGFTETVTDSDGAAHGMTFGAVLSEYSDRVSSTGRARNKLHALKKAHRAAGRIAKANRIQTHNLGRKKLHARKERTQNRLRTLAYQSTHAVVDKAAVLVSEYLSSPIAKKPPWKRFNRKMSAWAKGVLAEALDRVCTQRGARHELVNGAYTSHSYSGLLEGKREGGMFYRVNGDVLQADHNAARNVLTRLADTGITGFMPYTRVREILLARSPAQPSVNRLELDGLPSPYKSYGRAQVCARK

SEQ ID NO: 59134 - protein, 412 aa, Micromonospora sp.
VQLRYNYRVYPTPGQQEALARAFGCARVVFNDGLRIRQQARDEGLPYVSDGDLSKRVITGAKKTPERQWLGEVSAVVLQQALADLNTAYRNFFSSLTGERKGPKVAPPRLRSRKDNRQAIRFTRNSRFAVLDNGRLRLPKIGDVPVTWSRRLPSEPSSVTIIKDAAGRYFASFVVTSTEDETLPATNAEVGIDLGLTHFAVLSNGKKIAAPKFLRRAARKLRRLQQDLSRKQRGSSNRKKAVVKVAKVHARVADTRRDWQHRLSTRIIRDNQAVYVEDLCVTGLARTRLAKSVHDAGWASFVEMLEYKAARYGRTFGRIGRFAPTSQACSRCGRLDGPKPLSVRSWTCPCGAVHDRDVNAAINVLTQGRWDNSNACGAQVRPAPLPAPRREAGIHPGVAGSPARSAEGISAL

SEQ ID NO: 59135 - protein, 451 aa, unknown
  TnpB Polypeptide
VRGASCRGRDLESGRGIFVRGGAGTGRAGDDHGVFGSPVRLALAQEPEAGGSGQGPERVTKMAMLAHQIRLTPHGAQAEYFRKACGTSRFAWNWGLAEWKRRYEAGERVDALKLKKDFNALKPVDFPWTYEVTKYASQQPFLHLQAAFRRFFDKKARYPRFKRKGVNDSFYIGGDHIQVIGKRIRIPRLGWVRMREELRFPGRVVSATVCRIADRWFVSVHVELEEAPAPCESQAGIGVDLGVNRLATLSNGEMFEGPKPLRQGLRKLRRLSRRLSRKWKGSNNRHKARIRLARLHYRIRCIRQDALHKLTSYLTENFVGIAIEDLNVKGMLRNRRLARAISDMGFHEFRRQLDYKARMRGNHLEIVDRWFASSKGCSKCGLVKDNLALGERAFVCEGCGFESDRDLNAAMNLLRTVSSTGTQTCGEEGSGSSTRWSETILCEAGTWRDQI

SEQ ID NO: 59136 - protein, 242 aa, Methanosaeta sp.
  misc_feature (34)..(34): Xaa can be any naturally occurring amino acid
MTLSPILRKDSRSILESCIFPRSGRSRSSSTGPXPWKDGSLVGVDVGLESFATLSNGVKIANPRFFREEEHELARVQRKLSKAPKGTPERKKALKVVERVHERIANKRYEFAHRISNQLVNRYGLIAFEDLNIKGMMHNHNLAKSIGDVAWNMLVTLTSYKAASAGSMVVLVDPRNTSKMCSRCGILVQKDLSERVHNCTQCGLSMDRDWNAAINILRLGLQSVGIQSVQARPFSRAGVVTG

SEQ ID NO: 59137 - protein, 696 aa, unknown
  TnpB Polypeptide
MDGKLKYDSSKTHQTTGLKYLTESFILCSLNREVNKKGKGRKPDPRYRRSNPEIVKQQIQTVTGRKVIDSDLSLIGMYFEKYVEMVNLVLERVYSGEQRVEFLGDELNSYRGQGYTLLKKENYLSYKDNKDIQAQCFERMYRNVLEQAARIIYSDWMRRQLMKSAIEYVSENRPSLISLLKNKYIPFRMIKEVRAKCESIKDNGTGYYYTVSVLKQLRKSLDEYILSERGEPLGFRGYQRKRVRKYIKDKTESVAVLALVDVLLHEFETNGYPFSTPKMQSYAQDFSASTENSPGQGYWYSLDKEKDNEVIFFLKLPEPIIGKEAEGSPFRTKTICFRYLDWMPRAAAKDRVKAATAEKECKYYRAKKLRFRARKYEDMHQQLLNTTELQHATYQLTRLKNRKEKDLNRIKELQERISTLRKERRCAPPKLLLRDNRVTLQIPFQPPTREMVDEELGPRTYRRRAGADRGVRVPIVLSTRDGNGGFVDEMVPFDHLISKRDFLRGQTRKLTSQVRRMQINWERKHTKKSYPRHFLKKDRHLSAIWRKVRRLDTEIARQVASQTVWFCEEYGVRTLYFENLKNYSTPAGWGTLSWRLSSNLWSKVFDTVVYMRQSLGHKRGGVWTVSPAWTSQKCHVCGEKGIRVESKGSTDEKKGGAYFYCESCGCSLHADVNAARNIIEVHTSRPRVVAGQMTLT

SEQ ID NO: 59138 - protein, 398 aa, Methanomassiliicoccus sp.
MAIRKYEYRLYPDKKQIRRLEEQIRIGTEVYNRLLTIYKEEYLEKGIKIRKYDLEYHVTSLRKENVAYGAMYRITLTSIAKRISRGLDYYFRQMSEWKEGKARKPGLPRYKKSLRSIEFAPLSVKIIDDKTVKIGRIGKIEAVVHRETEGEIKEVTVIRKPSGKWHIIFTCDIPDEIVERTAGGEIGIDMGVLSFATLSDGTKIENPRFLAKSEKRIRRLHKDLSRKVKGSNNWMRTKDLIASAYETVENQRNDFLHKTSRALVDEYRLIAVESLGISRMIVGQRTAKSISDVSWYKFRRMLEYKASSAGTQVIFDKPFSPTSKTCSACGNIIEMPLSERTFVCPSCGLTIDRDINAAINILNNCRAGSARIDACGDGSSTSLIREKRVLSLNQELYV

SEQ ID NO: 59139 - protein, 353 aa, Methanomassiliicoccus sp.
MLLTEKVKLVPTSEDKRILLETMEIFNAACDKISAYAFSEKAFDIYPLHKIVYHEIRSEFHLPAQLTIRAIAKVVETYKQDKSAVHLFRKRGCLIYDARILAIKSEDTLSLTTLSGRLNIKIQSRMPLIHRSSFRNQMDLVYVRGSFYLNLVYEVPEAPELEPQGFLGVDVGIANLAATSDGELMSGESSRKVRRRYKQIRGKLQHVGTKSAQKHLKKISRKESANKTHQNHCISKAIVLAAKGTNRAIAIEDLKGIRTVETVSKRHREERDHWAFYQLQSFIQYKAKIAGVPVFFVDSHDTSMICSECGCCTPENRVKSQFRCTRCGHRDHADINAAKNIASRAAIARPIVV

SEQ ID NO: 59140 - protein, 475 aa, Methanomassiliicoccus sp.
MLLPDRALWWGLRPWGPDRLFLGISYLGLRGTPLTRSIMVFLPPFHYAWSCPPPFPLLPCYLFSQRPLSALSGTPGRKGDINRNRLIFMLLTEKVKLVPTSEDKRILLETMEIFNAACDKISAYAFSEKAFDIYPLHKIVYHEIRSEFHLPAQLTIRAIAKVVETYKQDKSAVHLFRKRGCLIYDARILAIKSEDTLSLTTLSGRLNIKIQSRMPLIHRSSFRNQMDLVYVRGSFYLNLVYEVPEAPELEPQGFLGVDVGIANLAATSDGELMSGESSRKVRRRYKQIRGKLQHVGTKSAQKHLKKISRKESANKTHQNHCISKAIVLAAKGTNRAIAIEDLKGIRTVETVSKRHREERDHWAFYQLQSFIQYKAKIAGVPVFFVDSHDTSMICSECGCCTPENRVKSQFRCTRCGHRDHADINAAKNIASRAAIARPIVVPPKEKGVWNDKPLSFQIDAGYSHSTVPGGLCVMS

SEQ ID NO: 59141 - protein, 408 aa, Planktothrix sp.
MKLRYRYRIYPTDQQKRLMSQLFGCCRVVFNDALAYCQEQYRLGNKKPNSNELSKRLTELKKTQEKIWLGEVSSIPLQQCLRDLEQAYSNFFKSRKGQRKGKKVNPPKFKKRKSKQSARFMDNGFKLYPNSDYIYIAKIGDIKVVWSRVLPATPSSVTLIKDSADRYFVSFVVEFNPQPLPENQNSVGIDLGITDFATLSNGEKVKSPQPLKKQLKRLRRLQRNLSRKQKGSKRREVARKKLARLHAKISDTRSDFLHKLSTKIICENQTIVLEDLNVSGMIKNRKLARAISDLGWRSFRTMLEAKSVMYGRDFRVIDRWIPTSQTCSCCGFRGGKKELNIREWTCLNCGQSHDRDVNAANNILVAGGLSETLNGRGGRRKTTAKVAVASETSTHSAFKQLSIFDLLR

SEQ ID NO: 59142 - protein, 158 aa, Blautia sp.
MRHTPSSRRRLKAIGQRENRWMQDINHQVSKALATGNPKHTLFVLEDLTGIRNAAERVKTKDRYVSVSWSFYDLEQKLIYKAKQNQSSVIKVDPRYTSQCCPACGHTEKSNGNKKIHLFTCKNCGYTSNDDRIGAMNLYRMGINYLTDSQVPNTVVTE

SEQ ID NO: 59143 - protein, 426 aa, Sporolactobacillus sp.
MNQRPGSPFFVRKPVQSLPTFERMFYTISEKRGETMPLKGLKVRIYPNKKQKLFIQCNFGYTRFVWNQMLAMLIERHKNNPDAPFLNAYALNNLLPALKKEYPWLKEAESTSLQITNHDLVEAFKKFFKQKHGFPKFKSKKFLKQSYQCKCVNQNIRQAATNSIQLPKLGMLRFRSGKPIPGTVKSVTIRKTFTGNYDAVLLVEDENQVFTKTGNTIGLDFGVSDLLIGSDEQKIPSIRFDKKLSKKLHHWEKRLARRRLQAQKAIAWDRHNHVLQPRQLANFKNVQKAKLMVAKVHEKIAHQRQNYLHQITTKLVKNYDRIVIEDLKTKNMMRNHKLARAIANQAWREIRRMLTYKCAWYGKEFVVVNPYKTSQICSNCGHDDGKHGLGVREWTCPQCTTHHDRDVNAAKNILTLGLGQALVKEL

SEQ ID NO: 59144 - protein, 410 aa, unknown
  TnpB Polypeptide
MPDVGFRFRAYTDEQTLRALKAQLRLACEIYNTLRWADIYFYQRDGKGLTQTELRQLALDLRKQDERYQQLYSQVAQQIADRYYEARKRFFEGLARFPKEKKPHKYYSLVYPQKGWKILEIKKIRTRSKKNKKKLVVLRLANLGIFKLIIHRDFPLDKVKRIVVKLTPSERVYISFIVEGYEFPKLPSTGKVVAIDVGVEKLLTTSDGHVFPNLRPYEKALKKLRILHKRLSRKKFLSHNWFKAKIKLTRAYEHLKNLRKDIYMKLGKWFAKHYDVVVMEDIQVKQLVGKSERKLRMRLHDVAFHELKEIIKYQMEKYGKETRFVDPAYTSMTCARCGYVKNDLTLDDRVFVCPKCGWVADRDYNASLNILRRSGWEPPLVPVELRPLPVVKSYGQGGAMKQEASPFRAG

SEQ ID NO: 59145 - protein, 263 aa, unknown
  TnpB Polypeptide
LSLDTDATAAIRATAEAFNAAATYCAAVAWHKRITNKNKLHHIVYGPTRSVYGLGAQLACCTRDKAAEAVRAARANGHDTCPSFQPHSSIRYDARTYRLLSRDRVSLHTLTGRVVGQLVLGEFQRRQLYDTSWKIGGAELVQRDGQCYLHITQTRLNPTPDEPTGFLGVDLGIVNLAADSDGDTYSGADVQRVREPRFQHRQRLQIVNTRRARWRLRKQARREARFQRDVNHCISKKLVAKARTARKALAVEDLTRIRERGTV

SEQ ID NO: 59146 - protein, 284 aa, unknown
  TnpB Polypeptide
VLRRLDKAFKAFFRRVKAGEKPGYPRFKGKGRYDSITFPSYGDGCKLKGNRLYVQHVGQIKIKLHREIAGRIKTVTVRRQADLWFVTFSCEVESHRLPPTGKAVGVDLGIESFAITSDGEFFESARYLRNAERNLKRLQRQVSRRKKGSNRRKKAVQQLARAHMRVACQRRDTAHKVARSLVNRYDLIAVEDLNIRGMLKNHHLAKSISDAGWNLFVTILKAKAAEAGRQVVEVDPHNTSQICSGCGEIVPKLLSQRWHSCPHCDTSLHRDVNAAVNILRRAAA

SEQ ID NO: 59147 - protein, 284 aa, unknown; identical to SEQ ID NO: 59146
  TnpB Polypeptide

SEQ ID NO: 59148 - protein, 468 aa, unknown
  TnpB Polypeptide
MPRHRDPLSPKVVYRTARVGLRVTRAQRRRMVRLLVSAGDVWACVLELNTWRQARQGRLLVSYQELCRELACAGPNTFGELDSVGARSVLRRYSDAWFAAAKRRRKGDQRARFPRRRRALMPLRWHHGTFTLQARRLRIPVARGRPPLWVRLDQDPPYPPEQIRSVTLLYDAGRLWVDVTAEVPVACYPDGQKPDPARIAGVDLGIIHPYAVAGPDGQGLLVSGRAIRAEHRMRLADTKARARAVAHRAPKPGQRGSRRWRHYRRRQRLAEARHRRRVRQAQHEAAKTVIIWAVDRRIGTLAVGDPRGVLKLDAGRRHNQRTRDWRIGHLITVLADKAEAAGIRLQLVDERGTSSTCPACRSRIPKPAGRVLTCPACQFTGHRDLSAAANIAARLGGGTTPALPAGVTHRRAGAHLPGVAPSRRDPRRRAHHRGARGSPGRHRPARTSLAQAGPGVARHLARSLNTTR

SEQ ID NO: 59149 - protein, 375 aa, unknown
  TnpB Polypeptide
MKRTNQFVVRPRSEQDRELLHELLDASASLWNELTFERRQRFFDGESVWDTADYRKQYVGVLGSATAQQLIRKSKSAWKSFFSLKENDEPCSPPGYWGNEEEGRELRTYVRNDQYTLETGERSRLEIPVGTELKAKYGFGHTERLRLEVAGVPKWDGKQGRLELYYDEALGQFRAFQPVTVDDSRLDSPLADETAALDIGANNIVACTTTTGQQYLYGGRDLFERFRETTREIARLQSKLRDGRYTSKRIRRLYRRQTRRRDHAMDALARNLMQRLYAEGISTVYVGDLTDVLETHWSVQTNAKTQTSGRFGRSSTGWHVPARNTALPSKSGPKRGPPRSVPTAVRRRTRPGTKTRSPVRVASRVTRTSPRQRRS

SEQ ID NO: 59150 - protein, 452 aa, unknown
  TnpB Polypeptide
MTQVYCYETELKPSHNSDIIEYFEQYRRKFNEVVRFTWQYYNNQDPLIAKKSKLNTLIQNKFNISSRGAASIISYVAGRHRSLLELKKSELNSFQAEITELKKDIEDISIKVNILGRKASSNSLNEKQLNKYRYLKNKMVAMKKRLDRRNNALPNIKKQIETKKLSLCFGSKVLFAHQRLEADHLSWYMNFIDARDSFIYYLGRREETSCNQQCQLIYDKKHNSFKIQLRKEYAYQENDRDKYVYGECYFRYGNKNIQEALSLKNSPISYRIFKRDDRYFLQATITVEKIDVQQESKAIGVDFNKGFVALSEVKEDGNLINIDKIYYRFKKGDGSINDLRVLADTLAKRCISDKASLAIEDLNFAKKKAKTMKHKNNKKYNEMLHSLAYSNFSEFIKRACFKHNIHLSLVNPAYTSIIGKEKYSESKKLNVHTAASYVIGRRALSFVDNRPV

SEQ ID NO: 59151 - protein, 429 aa, Halophilic sp.
MEYTHRYCAHPPSEVAAELERHIDIHRQAYNYTRYEYEDLPDDTDTIGSAYKHHKRLKPWKDEFPVFGEVHSKALQRTVTRFYDNLSNLKDRKDAGYNVGWLKWKAPREFQSMTYSQSGFELKNTSGQTATLWLSKIGDIPLTYHRDIPDEAVIKEVTVKHEPTGEWFVSFALDVDEEHLPEKQPVDELEAVDCVGVDLGILNYIHTSDGLSVEKLEIEAEYERLRKAQRTLSRREQGRENWEKQRKRVASIKRRIRRKVLDFQHKLSTWLVTEYDAVFVEDLDVKRMLEGSQNAQNKQDAAWRQFIQLLEYKADLHGCHVRQVNPENTTKMCSECGVKTDKPLWVREHSCPSCGFELDRDWNAALNVLERGLRKLGLGQSEVQRLLETGAAVEQTHRESVSASSVVEAGSPTREQGSPDLKEAAVAAE

SEQ ID NO: 59152 - protein, 418 aa, unknown
  TnpB Polypeptide
MVVGVKTVVQVKLRPDAGQACALEATLRTVNEAACWVSAVAFERRVFREYALRRHAYGELKARGLGSQAAQHVIKKTCHAYATLRANIKAGNLGRPGSKRRVKAESRPVRFRPDAAQPFDDRCLSWQLDTSTVSIWTTAGRLRGIPFACSPDALKTLTRYRQGESDLLHRDGAWYLYATCDVPEAAQYEPSGFLGVDLGIVNIATTSDGAIMAGRKLNRYRRRQRDLRRKLQARHTASARRLLAKRRRKEARFARDVNHCIAKKIVTEAERTSRGIALEDLGGIRERVRLRKPQRVTLSSWAFAQLGSFIGYKARRAGVPVVYVDPAWTSRTCADCGHAGRRNRVSQALFTCRNCGVVAHADRNASRNIAARGKVAWDAGRESRAPATARHGQRLDAAASITASDALAASSVLQDRVS

SEQ ID NO: 59153 - protein, 389 aa, Shimazuella sp.
LIAFKTEINSTSIQIKKIITSIGICRFLYNQYVNQNLGLLKQNQRYITATQFDKYVNHQLSKEFPWIKECGSKARKKALVNAEKAFKRFFKKISGKPRFKKKHEQSVKLYFPKNNPLDLEIKRHCIKFPTLGWVRLKEKGYIPTQGTVLSCTIEHKANRFYVSVLFSSALEKRKLKQLKQKDFTKGMGIDLGIKEFAITSNGPRFLNINKTFGIKSVEKRLKRAQRALSRKLEFKKKRGEQTATKNGRNIEKNVLRVQKLNQRLAQMRDAYRSWVVSVIAKTKPTFITVEKLNISGIRKNRHLAKAISDQGFYDFKNKLLNMCRKIGIELREVGFFYPSSKICSSCGIKKATLFLSDRVFQCEHCGIRIDRDQNAAINLMRASEYVILT

SEQ ID NO: 59154 - protein, 350 aa, Halorubrum sp.
MEHSHRYHAYPTQEVAAGLEHHLDVHRQLYNHVRWDYEQAPEDNKPSEYDQNNKLPDWKRKWPVFSKLHSKAAQATVARFYRNLSNLRKKKEKGYNVGRLKRQAPTDYRSVTYNQSGFDLDEKRGQDRFAYVRFSKIGWVKIRYHRPIPDHATIKEVTFKKETTGEWFVSFGLETDDADLPEKPDVKSLDASNSVGIDLGILNYIHTSDGKTVDWLDLEDDYERLGREQRKLSRKEKGSNNYEKQRVEVAKLKRRIRRKVLDYQHKITTWLVREYDAVFVEDLNVKGMLEQSHNTRNKQDAAWRQFITLLEYKAKLYGSHVVQVEARGTSKECASCGVETTKSIWASVFS

SEQ ID NO: 59155 - protein, 404 aa, unknown
  TnpB Polypeptide
MSIRCVVFFLDGDLPIEARFLLEDFRLAANNAVRIGLQMRVTSRNALNRLVYKVFRKEHPKMYSQHLVSAFEVAGSVLKNHRRRVRNGNASHIPYIRRLFMKAENRAYKLDRANGVIDLPIMSGCHVSLKLILSDYHRRYLDDPSLTLGSLTLFPDRAIIAFRKNNPRIYEPESALSLDTNEHSLDGVFFDDSSITTVKALFPDVATIQQRHHCRRKRLQKKKAHDRRTSKRLCKREGRREHHRIEYRLHQVANAVLSFAEKRRSAVVIEELNGFRPTRSRDLNRRLSMWPRRKLHQIIEYKAEWKGIPVIKVDPRYSSRTCPICGRIQDSRMGAEFRCECGWHLDRHINASLNLLQTAVSKGLEVAGGLRFNPGAFQHDVMMILYEPAMAARSELNGTSCIER

SEQ ID NO: 59156 - protein, 398 aa, unknown
  TnpB Polypeptide
MRLGYSYRLYPDGPQREALARAFGCARVVYNDALAARKAAHEAGEPYISDAAMSARLTESKATPGRAWLGEVSSVVLQQALADLNRAYRNFFNSATGKRKGAKVAPPRFRSRKDRRQAVRFTANSRFRVLDNDRLRLPKIGDVEVRWSRPLPAEPSSVTVIRDAAGRYFASFVVEASPKPLPEAEAECGIDLGLAHFAVMDDGTKVTAPRFLRRAERKLKRAQRDLSRKQKGSRNRDKARVKVARAHAHVADARRDFHHKLSTKVIRENQAVYVEDLSVKGLARTRLAKSVHDAGWSAFTVMLEYKAALHGREFYRIGRFEPTSQVCSACGVKDGPKPLAVREWECAACGTVHDRDVNAAKNILALGRRESLNARGGRVRPPLAVAQAVESGSRRSAA

SEQ ID NO: 59157 - protein, 390 aa, unknown
  TnpB Polypeptide
MAHYTYKFRIYPNDEQQQKLAKCFGCQRFVYNYFLNKRNERYLQNETSTYNKDAADLTTLKKEYDWLKEPLSQSLQRTLRNLDTAFNRFFTKKAKFPKFKSRRDKQSFCIPQNTEVKDGRLYIPKFKEGIKIKQHRAVEGEIINSTISKKPCGHYYVCITVERHIPKHKRNDKTVGVDLGIKDLAILSDGKRYKNIKSYRTMEKRLARLQRHHSKKEKGSANREKARRKLARLHERIANIRSNYLHQVTSKIVSENQTICLEDLSVRGMLKNRRLAKSVADVSFYEFVRQITYKASWYGRTVIQIDRWYPSSKTCFHCGFVNQNLTLADRAWDCPRCEKHLDRDFNAAKNIEREGLRLNTVGTTEIEACGEDVRPSARRRSSMMQEAPTL

SEQ ID NO: 59158 - protein, 396 aa, unknown
  TnpB Polypeptide
LKIQRAYKYRLFPTPEQEQNLRQQCGNCRFLWNKFLDLNKEIYEATGKFVFGHALITSIPKLKQEYGFLGATFSQSLQQVGRHFDRALREFLDHKKEFPKHKKKKYRDGLTIPQKFRLEKTFVFIPKVGEVQWVKHRPYKGKVKHITIKQDGDQWYCSVSVEIKAKNPQRKSRNIVGIDVGLKTFATLSDGTVVENERILRKYEKKLKKAQRILSRRKKGGSNRTKQRFKVAKLHRKIRNSRNNFLHQTTARMIAKYDGFILEDLCVSGMMKNHCLAKSISDAGWYEFNRQLEYKAVWNGKWFWKIDRFEPSSKTCCECGWVNKNLTLSDRVFRCERCDNVKDRDLNAALNIRSFGIRDLPLDEREITLGDEGRLQSVSDSATRRAKNKECVVLVG

SEQ ID NO: 59159 - protein, 399 aa, unknown
  TnpB Polypeptide
VDQQQININHPLYKVIDQFCFYSKNLYNAANYIIRQEFINNKKYIKYYDMDKQLQQTPEYKQLMSQASQCTLQVLDRNWKSFFEATKDYKQHPEKYLGRPKLPKYKKKDGRFTWFLKNNQTYIMDGRLYFRLKAMNGYSFKTNVLGRLISVRFVPKGSIYVMEIVYECEADVDFKEPHNIAGIDLGVNNFVTMTNNIGLQPIIINGKGIKSINQHFNKQRAKLQSEVEKRNHKHWSNKLDNLTLKRNNKIKNFIHHASTYIVKYCKVNDIDTLVCGLNKTWKQECKLSKIPSQNFHFIPYDMLIKQLEYKCQENGINFFMTDESYTSGTSFLDNELPIKQNYNKKRRIKRGLFKSNTGKLINSDVNSSLQIIRKVFPDAFSYGIQGCLTPTVINIVKTA

SEQ ID NO: 59160 - protein, 413 aa, Thermogemmatispora sp.
MNEQRKEEGMAQVQRTIPILLPADEDLRQTLAVFQAVQQQLSAPCFNGGRPLSAVRLHRACYQEVRGQLNAQMTCTAIRLVAAAYQSAQSNRRPPRHPFQFRRRRALFLIGPRGRDASLRPDGSLSIWTVAGRKQLPYRVPEAFQQRLAQAKTIDSLMVLERAGQLIGRLTLTLEVPDPPAACPETEAIVGIDLNETNALVAVDGEERVLFVSGKAVKVRNRRTAKTRARLQRKLAAHKAQHRDTRSVRRVLKRLGRRQRHRTQTFAQTVAKRLVDWAPPQAVLVFERLQVPPPQQEQIRGRALRRRLALWQRGLIRRWAEQQAQEQGLRVVEVNPAYTSQICSHCGQRGTRRRHRFTCPHCGAEEHADINAARNIRTRARCTVLRGSGLLSTSPEARAAEAAGKPLAPARGS

SEQ ID NO: 59161 - protein, 431 aa, Thermogemmatispora sp.
MVKYTHETQSIRQRRMALVVRGYKTELDLNNEQRTACLKHAGCARFAYNWGLARSQEVYRATGKRPNALQLHRALNALKKTDFPWMYEVSKCAPQEALRDLDRAFAHFFRRLELRKQGKLTGKLGFPRFRKKSRGIGSFRLTGHIHVFEDRIQLPRLGRLRLKECGYLPAGAKVLSATVSEEAGRWYVSVLVEEDQEAVPCTARTAVGVDLGVNRLATLSDGTTFQNPRPLKQAQKRLRRLEREKARRLIGSKNRKKTVRKLAKQHVRVARIRRDATHKLTTHLCKNHALVAIEDLHVTGMLKNHRLAQALADSNFGEIRRQLEDKAKRYGTWLVVIDRFFPSSKRCAACGYIKPALGLHERTFVCEACGVVLDRDQNAALNVLQEALRTTGSSSGSHACGQGSSGRLTGGGEPALAEAGTSHCLGSVLDG

SEQ ID NO: 59162 - protein, 381 aa, unknown
  TnpB Polypeptide
LSVVPRQRPAGAGKVVHRSARCDLRVSPIKRERCFALLAAGGDVWACVLELNAIRRQRGAWPIASYQALCRELSLAGPGCFGELSSVAARSVLRRYSDAFFSAAKARRAGDASVHYPRRRRHLMSLGFYAGTFSLEGRRLTLPVARGAPPLVVSLKRAVPYEMSQVRSVTLGQCAGRLFLEVTAEVPVQANDADPARVAGVDLGIIHPYAVATTSEALLVSGRALRAESRLHLADSKARSQATARRAPKKGQRGSRRWRKVRASQRLAEASHRRRISQAQHEAAAEVISWAVARRIGTLVVGHPAEIARRDAGRRQNLAVHNWRMAHLLSTLSDKAEVAGIALLTVDERGTSSTCPECRSRTSKPKGAHLLLHLVRAPRPS

SEQ ID NO: 59163 - protein, 381 aa, unknown; identical to SEQ ID NO: 59162
  TnpB Polypeptide

SEQ ID NO: 59164 - protein, 239 aa, unknown
  TnpB Polypeptide
LAIDFGLNNLATCVGTNGASFIVDGRKLKSINQWFNKENARLQSIKDLQGIKRIIELQSRLYINRSSQVRDYLNKAARLIIDHCISTKIERLIVGFNIGMKDGINIGSRNNQNFVQIPFYSLRNKLKSLCERYGLIYQEQEESYTSKASALDGDEMPIYNADKPVSYQFSGKRVKRGLYRSKEGHLINSDTNGAANIGRKGARVLEVSSSKKRDKTSKQNGFTGLCRGCLAQPLRIKVY

SEQ ID NO: 59165 - protein, 388 aa, Escherichia sp.
  misc_feature (298)..(382): Xaa can be any naturally occurring amino acid
VKRLQAFKFQLRPGGQQEREMRRFAGACRFVFNRALARQNENHEAGNKYIPYGKMASWLVEWKNATETQWLKDAPSQPLQQSLKDLERAYKNFFQKRAAFPRFKKRGQNDAFRYPQGVKLDQENSRIFLPKLGWMRYRNSRQVAGVVKNVTVSQSCGKWYISVQTESEVSTPVHPSASMVGLDAGVAKLATLSDGTVFEPVNSFQKNQKKLARLQRQLSRKVKFSNNWQKQKRKIQRLHSCIAKIRRDYLHKVTTTVSKNHAMIVIEDLKFSNMSKSAAGTVSQPGRNVRAKSGLNRXXXXXXXXXXXXXXXXXXXXXXXXXXXXXXXXXXXXXXXXXXXXXXXXXXXXXXXXXXXXXXXXXXXXXXXXXXXXXXXXXXXXXCSQAAR

SEQ ID NO: 59166 - protein, 411 aa, Okeania sp.
MVHLKAMEKGKLTDPNPGGDTTDEGGSMTMLATLTPAPVAAAPGIGRNPHKLEKEEIEKEFWQVWCEHRDRLYRCCLRLMNSNQTDAEDALSEAMLKALKMVRKFAGKIANLPAWLMTLTRNLCLDIIRKRSRGAVGVDDIEWVGDRGEMGVASAVELQEQVLEKDERSVVIRRAIASLPERMRETFILHFYQELSNQEIVERQGISIDCVYKRISQARKKLKEMLSRYFIDFDGSVLGTERELGDANESCQKQEDLANVSVQEISATPGVSGEEQKREELEVVSADIAPENSQGLETMTVSVSEECVEVDGAEKSELVDGAGFSLGMVAVADSSLYEIRRQVEYKASWYDCKLVFADRFYPSSKTCSNCGHIQEMPLKERIFNCEACHISIDRDFNASLNLKHYAEGYSV

SEQ ID NO: 59167 - protein, 530 aa, unknown
  TnpB Polypeptide
MTSQSFVIELPIAVDDAEMRTIVRKLEFARQLHNATLGTAIGQLQQMRQDTAWKQACAMPKGKERTAAFRALDRKYGLTEYDLHSVIARHREGSGRKAELGINETQKIATRVFQAINRYKLGLGGMPRFKSSKRGLHSIEGKTNKTGLKFRPEKKVLNWCGHDYRVLIDPKDDYIQRALKENERSDKYRKIKYCRLVRKRIRSSDRFFLQVVLEGTAPVKHVYAPVTERAAIDPGPQSIALFSKEFAGKIQVAGSNNFNEAASRRLLRAMDRSLRRNNPDAYNENGTIKKGAKLVKSKNYQRKVDRLREMHRVAAAERKCRHGQTINLLLSIAGDIRIEKNSWKAFQRGHFGKSLGKSAMSGFIAQLKSKAASAGLKVTEVNPYKLRLSQYDPYTDTYRKKDLSERWQEMKAGSGLYIQRDVLSALLLYCADIEKEIHIPKVAVEQLEGAKQFLTDAGYVVLKSTSSRDQRDPRLAPEPKAMTPEMARQKILRGAGDSHLPTDQALGRIRAGGKVSTWSKETFPLQRGVV

SEQ ID NO: 59168 - protein, 299 aa, unknown
  TnpB Polypeptide
LEAKPSKTSPTEWIVPTKIGLKISETGKRKDKIFQYKSFTLKQAGWEINEEEKTIIINKKKYKYHKSRNLDGEIKTVTVKRDACGDFWIYFAVEVEEPVVEVRSGEIVGFDYSFEKDSFLVGQESRFDVLAPSFFRVNLKIFQKLSHALSRKEFGSNNRVRARLSLARQYRKSCWARKDYHYKLAYELCNKYSVICLETLDQSKYARTRHGKKVSDRGFGQFLLILQHVAKKVGTKIVFVDKWFPSSQLCHCCGFQNKALRGKFWIRKWTCPSCGVFHSDRDRNAAINIYNEGLRLLAS

SEQ ID NO: 59169 - protein, 432 aa, unknown
  TnpB Polypeptide
MARVTRTVIVRSARFPKKVFRFLVELEGMYRNMVEQLSMYAVRNNIKSFTRLKALKYHEMRSLYPKLPSHYVYTACQDSSARVKSFLRLKKLGLAERDYPEVRRISIWLDDHLWKPDGLISIKIATHKGWILVEFKPHKQCWKYINRGWRLSSEVKVKLDKRNRQLVIYLTFVKEVEEYKPTGYLPVDVNENNVTMLVDDVAYLFETNMEKLVLGYYYRRKRIQEKYDKLYGVKSRIKKKAMKKLKERKKKYDVRWKIANIIVRTAYGKRYAIVLERFGKKPANNMTKRIKDKQLRHRIFQASFRGIQRAIEEKAREYGVPVIYVNPRNTSKLCSIHNVPITYSNGSRIGRCSKGRELWHRDVVACWNLLFKALRGDGSNAPSPVGLSLDVRLVPLASKAAHEPTGINRSLWARWKSLPPIQKATISNKMKR

SEQ ID NO: 59170 - protein, 691 aa, Actinomadura sp.
VALRGGVEESNGEALTASVLAVRVGWAADLAAGMAARLLCEHWNAADVSVLAGGAGPDGRPLPSHAWMALRRLGWALPDDAVPGEVKVNDRIVRMAQEQAGRTLRGAEHRAGVIAGILAAWPANPGKRTPEEWDAVRDAVPDGRSLPSNLIKARTRQIDAFLAEHGRLPTGVFDLEKPPRAAKMLILAAVDRQQATIERHDADPARVVLRLQLPTRPDPRAYRDWSWVACPITLPPTVPTRAVLHLPTLRPQGARVRADLSFTHAVPAARRTGHTIALGVDWGLNTLLSAGACRLHDDGIITTSGAGAMFRATGILGKRDRLRRESEHIHAKLDQYQRLALRPGEVDRRDASDTGSRKEHGLGTACESGLLAARHARLSTEKQRISAKRSELNNALAKQAARWAVDQALAADATVIYLEDLRSMEATGQGRTHNTRMSQTVRGQVVAWMRHLAAGTGIAVVAVPAHNTSRLCPGCLVPLKHCAAPDRPNDRGWKWARCSNPRCGWQGDRDHGAWRRIAARGLTHQTTTSTDRTTGKMTIHRVIHKFETRAVIAPAPAADTAPVRSDRSKTGARARNELDKPSVTTRPVPRRRGVPSTNPHPARQAGQAGQRPEGHAPKAPTAAPGQLPRAAHRGYQGVTTISTPARPRHTPRGAALGAGFHLHAHATPPRWADPLSRHTQHDYGSSADQRR

SEQ ID NO: 59171 - protein, 125 aa, Streptomyces sp.
MGTTDPGRGKQAPAQTLGVAASRVRLRKPQRVALHSWAFAQLAEFIVYKARRAGVPVVFVDPAYTSQQCCECGHIDKKNRASQARFTCRNCGVVAHADRNASHNIARKGEAVWTAGRESRVPATP

SEQ ID NO: 59172 - protein, 393 aa, Streptomyces sp.
LLFVKLVVRVKLLPTPIEAAALEATLHACNEAATWAASVAFETEARRPLELRKHTYAEIRVRWQLGAQAAQHASKKTCDAYTTLKANLRNGRYGRPGTKRHTRASGKPVAFRPQAAQPYDDRLLSWQHEQQTVSIWSTAGRLKGVAFTGQGGQLAVLAGHRQGESDLVCQGGKWFLIATCEIPEAAPNAHPAGFLGVDLGIVNIAATSDGARHCGRRINRKREQDRQLRSKLQKKQTKSARRRAKKYAGKEARRNKDINHKISKRIVAGAERTGRGIALEDLKGIRERARLRKPQRVKIHSWPFAQLGAFIAYKAKRAGVPAVSVDPAYTSQECSQCHHTARGNRPAQAYFACRVCGFVDHADHNASHNIAHRGWMAWVCGARSTAPELTLIA

SEQ ID NO: 59173 - protein, 408 aa, Streptomyces sp.
VIRAYKFLMRPTVRQTQALGEMLRDHCSLYNGALQERRDAYRHASKTTVRYGQQSVQLKDIRSFDPERQGRWSFSSQQATLRRLDKAFASFFRRVKSGEKPGYPRFRGVNWFDTVEFPKDGDGCRWDSTPHDPVTRVRLQGVGHVKVHQHRSVAGRVKTVSVKREGRKWFVVLSAEQVQPEPLPATGAVVGIDLGVVSFLADSSGGFVPNPRHGAKSAAKLEAAQQALSRFPCVRRGKRTANHRRAVEKVSKLHRKVRRQRLDHAHKTALDLVRGHDFIAHEDLKIRNMVRRAAPTPDPDTSGAFLPNGARAKAGLNRSIADAGWGVFLTILAAKAESAGREVIAVDPRNTSRQCPECGHTGGPHRKSSTASRAATKRTRTPWAPPTFYGPGWSVAKPHRRSEKPPHS

SEQ ID NO: 59174 - protein, 385 aa, Streptomyces sp.
VKIVVQVKLIPEAEQAAALSATLTACNDAANWVSVVAFERGVPREYELRKHTYAELKARGLGAQAAQHVIKKVRDSYTTLKANVRAGNLGKEGSKRRRKAESKPIAFRPDAAQPFDDRCLSWQLDAQTVSIWTTSGHLRGIQFACSTDALKTLQDHRRGESDLIERDGVFYLIATCDVPEAEPYEPDGFVGVDLGIVNIATTSTGYQASGRGLNRYRKRQLVLRAKLQRKRTKSAKRRLKERSRREQRHVKNTNHVIAKTIVTEAERTSAGISLEELKGIRQRVRLRKPQRVALHSWAFAQLGEFIVYKARRAGVPLVYVDPAYTSQMCCECEHVDRRNRVDQGLFICRSCGVVAHADRNASHNIASRGAAVWIAGRESRAPAAS

SEQ ID NO: 59175 - protein, 414 aa, Streptomyces sp.
MHLRYSFRIEPSPGQCAALARTFGCARVVFNDALAARKAAYKADKSRIATGVLARQVITEAKRTAERAWLAEVSVDALQSSLRDLDTAYKNFFESVSGRRRGRRVGLPVFKSRRDRRQSVRFSRNGFRLRDNGRLNLAKIGDVQVRWSRALPSVPSSVTVIKDASGRYFASFVVDVEPEPLPVVESEVGIDLGLTTYAVLSDGKTIDNPRFLRRAERRLRKAQQALSRKAKGSNNRVKARIRVAKAHAKVADTRRDWAHKQTSKLVGENQAVYLEDLAVSGLARTRLAKSVHDAAWSMFRRMLEDKAARTGRHVAVVGRWLPSSQTCHQCWTIDGKKPLHVRAWTCGGCGVTHDRDLNAARVVLAAGQADRQNASGGPVRPGVKTSRPALPVERGTHPTPQPDTTGRQAGIPAR

SEQ ID NO: 59176 - protein, 395 aa, Streptomyces sp.
MCVKRAFKYRFYPTDAQAAELSRTLGCVRKVYNLALAARTEAWARQERVNYNATSAMLTAWKKTEELAFLNDVSSVPLQQCLRHLQTAFSNFFAKRAKYPRFKSKKKSRKSAEYTTSGFRFCDGRLTLAKMNEPLGIVWSRPLPEGVSPSTVTVSQDAAGRWFVSLLCEDPAVSPLPASDQAVGIDVGLEHLLALSTGEKIANPRHERKDRARLAKAQRNLSRKAKGDGANREKARRKVAKICARIADRRRDHLHKLTTRLVRENQTLVIEDLTVRNMVKNRSLARAISDAAWSDFRSMLEYKGAWYGREVIAVDRFFPSSKLCSHCGTVQGTMPLDVRTWTCECGRTHDRDVNAARNLLAAGLAVTVCGAGVRPQRRTPGGQSATKQKTPRREP

SEQ ID NO: 59177 - protein, 439 aa, Streptomyces sp.
MGELAWEKRQFGHRARLALTPAQARLMDDQAHAARTLWNCLHDWWTMLPKDKRSLAAADAAIRQARKEIDWLGVLPAQAAQAVLKTYVQAWRNCWDRRADAPNFKARLRTVMSVDIPQGRDLQIKRVHRRWGMVNIPKVGRVRFRWTKDLPVGKLADRENRITGARLVKDGLGWHIAFRVQTLETKPEPHTGPEIGIDAGVNLPLALSDGNHQDHGRGARLPDGTADRDKWLTPQEKAKLLRLEQRATHRKSFRKPKERSSNRLNRTYDQIKQLRARATRRVVDWQHQTTTHLARTYGTLVVEQLNITNMVKSAKGTIEAPGKNVAQKSGLNRSISQEAWGRTVTMLTYKAARHGGTLVKVPAPNTSLRCSACGFLTPGSREGQATFVCKNPDCGWLGNADWNAARNILHLYRIGLVAIPAAGRAVVRRTRGVQPPTAR

SEQ ID NO: 59178 - protein, 378 aa, Enterococcus sp.
MYLVKQSNDMLKINERGEHFMTQSMTVKIKLEPTKSDRELIRSSSLVYIATVNSLVSEMVSNEKITKKSSKDINVSLNSAVKNQAIRDAKSVYQKAKKSKLKKIPVLKKPVIIWNNQNFTVCPSSIRMPFLISGKSKKIEIPANISEYERSLLNQASKVGTLRITKKGKKYIAQISIEISERITTSVKTMGVDLGIKIPAVCCTDENEVKFAGNGRMNKYVRRYHNSRRKELGDTKKLNAIKKSKDKEQRWMKDQDHKISREIIDFAINYNVGVIRLEKLANIRKQTRKSRKNNHSLSNWSFYRLASYIEYKANLVGIKVEYVNPAYTSQRCPDCGHNHHAKDRRYHCTNCGYVGHRDVVGAKNIIYAPVLDGKSQVA

SEQ ID NO: 59179 - protein, 424 aa, unknown
  TnpB Polypeptide
VQVVLRGSNPRGLTHTHYTDLVQVRRAYKFRAYPTRPQEGRAVRLLADHCDLYNAALMERREAWQMRQARVSYRMQSAQLTEIRKADPDGQGRHSFTAQQQTLRRLDAVFTAFFDRVSAARKSRANTKPGYPRFKPYQRFSQARFVNGDGAKWVAAGRHEWARASFQAVGSVKVRQHRMVPGTVKALQLKREHRRWYVIVIAETEPVPEPATGRAVGVDLGVARFLTTSDGEVVGNPRFLSASAEVIVDLQRRKARARPGSGNRKRLRRALARQWRKVRNRRRDFHHKTARTLVGSCDVIALEQLNTAGMTRRPAPEPDPGTPGGFLTNQGAAKAGLNKSILDAGWSQFRSILAGKAESAGRRVVLVNPAGTSITCHQCGQRCARPQQDTVICPVHGAMDADVNAAKNIFTRAGLGSGQAASAA

SEQ ID NO: 59180 - protein, 404 aa, unknown
  TnpB Polypeptide
MKTREALLAYKFRLYPNHEQEKKLLWTKEVCRRIYNRFLELYNAGEHDRFKLSALLPVWKESDKDFLGVYSKVLQYELQRLFYNLAALRELKKRGHKASKLRFKPSHRFRTFTYNQSGFKLLPKNDKFGLLHLSKIGDIPIRMHRAVEGGIKGVTIKHTASGKWFACLLVDDGRDPRDSVIIDSAVGIDVGLEHYAVDSDGNEVENPRYLKRELKKLRREQRRLSRKQKGSKNYEKQYIVVARTYERVLNQRNDFQHKLSRYYVDNYDLIITEKLDAREMIENGHLARSISDAAWSSFSQKLAYKAESAGKLFVQIDARGTSQTCPICDRVEAKSLSQRTHECLCGCTLTRDHASSLVILDRGLRKVRSERPELTLVNTRPLLPSAQVRQVGWMKQEALLERAG

SEQ ID NO: 59181 - protein, 409 aa, Tolypothrix sp.
VLRRAVKVRLYPTDEQKQILAQHFGCARWWWNYGLNKCIETYKATGKGLSQSGLNSMLPSLKKEFEWLGECYSQVLQSVSLNLSRAYQNFFEGRAKYPKFKSKHHRQSIQYPQKVQPIGKFLKFPGRLGVIEAKVHRLLDGTIKTVTVSLCPSGKYYASVLMEYKGENPTPSTDGKVIGIDLGIKDFAITHDGEKTSKYANPKHLAKHEKNLARKQRKLARKQKGSQRRKKALKLVARVYERVSNVRHDFLHKLSRKVVDDNQVVVVENLNVKGMVRNHKLAKAISDVGWGTFTNFLAYKLEKEGKVLVEIDRWFPSSKLCSNCHYQVDEMRLDVRTWACPSCGTHHDRDENAAKNIRAEGIRMLISSGTGESASGGDVRPNRGRKSKTRQSPVKLEAHTVLGTPTQCG

SEQ ID NO: 59182 - protein, 499 aa, Tolypothrix sp.
MQVSYQYKLRPRENQSKVMDSWLDMQRSLFNWFLADRIDGYYQTFVMGEYCDIRTRTEQCPLTCSLSKNSNLHNPWKNPDKNGVVKKRSASLMQDAYLAEMKQARPWYKTIHSNVLQMLVKRLECSMEGFFKHGRGFPSFKNRSNFRSFQYKPGDVKLDGNKIYLPLIGWMRFYNSRPIPQGFQIRTVTLRKKADGWYTSILIRDDSVPDYPTPKEVNTIVGVDMGLTKLVHCSDGSEFDNPRPSTSKKGKRTLKIRQRRLSRKKKGSANRKKEAQKLARLHKKRADKRSAYQWLVASKIVRKADAISVEDLNIKGMKARCKPKPDDVKQGRFLKNGQSAKRGLNRSISDASWGTLIEKIQYAAAKSGKSFFKVDPKNTSRTCSKCGVVDALSRFGEKFVCTSCGHEAHADKQAAVNIKTRAVQQNGLTIKKLKKVRRDSAEPKQLILFETPNPELTAIKRRHRASNGKRGVPGNPPTSVLLSLWDNAEMAYSRESHPF

SEQ ID NO: 59183 - protein, 400 aa, Tolypothrix sp.
MRTSYQYKLRPTKQKAIEIDRWLSMLCSQYNYLLARRFDWYEQNRCPINACPLVCHLPELREKPDYYSQKKSLPLLKKTHPHYGEIYSQVLQDVVKRVKVTFDRFLSGDSNGKKSGRPRFKSRDRYRTFTYPQMKDDCIQGNLINLPKLGNIKLVLHRPIPDGLTVKTVSVTKKADGYYVTLSLEDSTVPEIKPDINPEFITGIDMGLKEFLTTSEGETVEIPQHYRKSQKRLRVIQKRVSRRKKGSNRRRKAVKQLGKRHKKVADKRKDFHFKTAKQLLSKYDVVIHEDLNIKGLSKSRLATSLHDAGWSSFLSILSNKAENAGLLVIAVNASGTSQDCSSCGVKVPKKLHERWHSCQCGCSLDRDHNAAINIKNSAKLAGRKPTPPNFVRQSGRAFRS

SEQ ID NO: 59184 - protein, 468 aa, Tolypothrix sp.
MDTWVDMLRSHYNWCLNDRIAQYNQQFIQGDYCDIRTRAEACPITCFVSKNGATGEPWKDNKLDKEGKSAGQKFLSGELSGNLKNPRRSAGDIQITSLPILKKARPWYAEIDSTVLQQNVKRLDVAYKNFFEGRGFPQFKNRSNFTSFTYTVGIKVQGNKIYLPKVGWMRFHNSRLIPDGFTIKAVTVRKRQDGWYISVRMEDKSVPEYISKPLTEVEKVLGCDLGITKLVHLSDGYQIDNPKFSTNRKTKHLLKVRQRRVSRKVKGSKNRKKAAKKVGRLHKRVSDKRLAYQWYVANKIVSRNVDGIGLEDLNVSGMLRRCKVKVDEKTGRFLKNGQSRKKGLNRSISDASWSELTSKIEYLAEKQGKVVIKVNPRNSSCECRNCGHIDKLNRDKERFICTSCGHMEHADLGAAKTVRDRAKQVIQSMVRGDSAKPDADISKSGECSSKRPKQRKETSQCVASLSPG

SEQ ID NO: 59185 - protein, 424 aa, Tolypothrix sp.
VLHKAIQVRLYPTKKQQTQLAQIFGASRWWWNYALNKSIESYKETGKGLGRSALNALLPALKKTEDTCWLADCYSQVLQATTLNLTTAYKNFFEGRTGFPRFKPKHGKQSVQYPQNVKVIEGNLSFPGNLGIIEAKIHREIEGKIKTVTVSKTPTGKYFASILTEVEGENPTTSEGKIYGVDLGLKHFAVVTDGEKISKYDNPKHIAKHEKNLKRKQQKLARKQKGSKSRNRYRKVVAKVYERVSNSRQDFLHKLSYKLVSNSQAVIVENLNVKGMVRNHNLAKAISDCGWGMFTNFLAYKLERKGGKLVEIDRWFPSSKLCSNCFYQMNEMPLDVREWTCPHCGTHHDRDVNAATNIQAEGIRMLKVNQCVAGVPPVEATGEPVRAEGSAVSAVGGEVRPKLGRKSKLRHSPLSTEAPTSSAS

SEQ ID NO: 59186 - protein, 355 aa, Tolypothrix sp.
MINASGGIYNHCIALHRRYYRMWGKHLSCAKLQSHIAKLRKRNPFWQMVGSQAVQDICQRIEKAYQLFFKHSLKGVSPPGFKKVKKYKSFTLKQAGYKFLGGNRIKMGNRVYQFWNKREIEGTVKTLTIKRTPLGELFMVVVVDSVASPQIQFETGKIAGFDFGLKTFLSCSDGTKIESPQFLKQSLSAIKKASRQHSKKVKGSSNRERARKNLVHKYEDVSNRRRDWFWKLAHDLTNRFDVLCFETLNLKGMQRLWGRKISDLAFGEFLQILEWVAKKKGNSVIFIDRWYPSSKTCSCCGHVLENLDLSVREWRCPSCESINGRDENAAKNICTVGASTVGLDDVRRAMSAVVA

SEQ ID NO: 59187 - protein, 380 aa, Tolypothrix sp.
MQTISVKCKIEVPVKLQQEIDATLEGFADACNQILSVAKREKCWNTTKLHHLVYKSVREATGLKANHVCQAIRRVIGNAKAVKQIHAFRPTSINLDARTFQYIEESQAVGVTLISGRRKFKLSIGNYQLGLLKGQSPTAATLNKTKRGDYYINIAVDVPSQPPGKTPRVIGIDLGRRDIATTSTGKSWSGKQIQFIRDRYSKVRANVQRKRTRSSRRLLRRLSGREQRFQKWLNHNISKEIVFEAKQSNAALAFEDLTNIRESLNEKPRSKTERRRTNNWAFYQLRLFTQYKASIAGVPVVLVPPAYTSQTCSRCHHVHPVNGKSYRSGKSFKCGHCGFECDADLNASANIAVLGYSAIVPESPGMSCLLEGQRRAVSDK

SEQ ID NO: 59188 - protein, 374 aa, Tolypothrix sp.
MKTLKFKLYEHKRNKYLKRMINASGVIYNHCIALHKRYYRMWGKHLSCTKLQSHIAKLRKRSEFWQSVGSQAVQDICQRIEKAYQLFFKHNKKGVRPPGFKKVKKYKSFTLKQAGYKFLGGNRVKIGNRVYQFWKSRSWEGTVKTLTIKRTPLGELFMVVVVDGVVEPEIKFTTGRIAGFDFGLKTFLTCSDGSSIESPQFLKQSLSTIKKASKQHSKKLKGSSNRERARKNLVRKYEDVLNARRDWFWQLAHSLTNRFDVLCFETLNLKGMQRLWGRKISDLAFGEFLQILEWIAKKKGNSVIFIDRWYPSTKTCSSCGHVLEKLDLSVREWRCPSCQLVNGRDENAAKNICAVGASTVGLGDVRRAVPAIAV

SEQ ID NO: 59189 - protein, 440 aa, Tolypothrix sp.
MRSAYQYKLRPTKVQVVEIDRWLSMLCAQYNYLLADRFHWYEQNRSPVNACPLVCHLPELRDNPDYYSQKKTLPELKKTHPHYGDIYSQVLQDVVKRVKVTFDRFLKGDSNGKKSGKPRFKSRSRYKTFTYPQMKEDCLQDDLINLPKLGLIKVVLHRQLPTGFKIKTASVTKKADGYYITLSLEDPTVPTVKPDINPESITGIDLGLKEFLTTSEGEAVAIPKHYRKAQKRLRVVTKRVSRRKKGSKGRQKAVKQLGKQHKKVADKRRDFHFKTANHLLKKYDVIVHEDLNIKGLSKSSLAKSVHDAGWSSFLSILANKAENAGLLVIAVNPKNTSQDCSNCGAKVPKKLHERWHSCPHCSCSLDRDRNAAINIKKRADGHTVLKAKSLLSNSRIVLEAYTYCFSVSVGDVTENQSQVEEARLWLPQLRTIALPTIEQD

SEQ ID NO: 59190 - protein, 416 aa, Tolypothrix sp.
MLDVLKVRIYPNKEQEISLAKSFGCSRFVWNFYLNKTNTQYEETGKGMTYCQMAKDLTQLKKLANHEWLQEPTAAVLQQSLKNLESAFKNFFAKRTGFPRFKSKHSKQSIRFPESCSIKSGNLKLPKLGLVKASFSKSVNGKIKSVTVSKTSTDKYFAAILFETDRLATAKQGKISGIDLGLNSLVTVFDGETCYKVDPIKPTRKYSKRLRIRQKALSRKVKGSNNRRKAIKVVAKVHEKISNTRQDFLHKLSRKLVDDNQVIVAENLCIKGLARTKLAKSIHDAGFGMLLNFISYKLERAEGNFIQVDRFFPSTKLCSCCGHKNDLLPLSIREWICPSCQTTHDRDENASRNLRTEGIRILSTNTVGHTEIQACGEAVRLFGTCAKKRQCGLGVSPSGATAVRVSEKQESPATLR

SEQ ID NO: 59191 - protein, 247 aa, Tolypothrix sp.
PLPGIKSFRLHEAINFICSSQTFTVSRTADKWFVSFALDTEKIPPIIHPIEKIGVDLGVKTLASCSDGTTYAMPITTKIAKTKLGKLQWRNRNKVLGNKKLKIRASKNAREFYALVAKSHARIANIRQDVTQKMTTDLSRKAYIIRIEDLNVQGMIANSKLAGAVSDNCFYEIRRQLTYKQFFYGTKVELVDRWYPSSKMCCKCHHVQPMTLSQRIFCCESCGHTRDRDDNASVNLENAPNNKVRLA

SEQ ID NO: 59192 - protein, 505 aa, Tolypothrix sp.
MATKTYTTLAPQELWKYLEAYSKLQNVIREDLKNRLLSGDKAASLVKEFQPKYHINKRQINSIRIEVEGAIASAKECKERHTKILEAQIKSAKEYVKSQEKRVADYRKAKNSKKSKSSHLKDACSLRSKQHGCSTLLQDAKFGIHQKKRRIHLLENKLKHVKDSPLIVRIGGNTNNFTLIGSKDETNGNQISQLSSEGLLKIRVPTALEARFGKYVIASGVNFPYGQEDINYAISNSAVSFRFYYKKQRWYIAVSVNVQDVPIQSRNRWQSGCIGVDLNPSVIGWTYVDAYGNLKDKGQFQLNLHSKTTTQIETILSDVAAQLVLIAESFEVPLVLENLDFCAKKNQLREKGKRYARMLSGFAYAKWQEIIERRCATRGVELIKVNPAYSSLIGIAKFMRQHGLSSDTAAAMALARRAMFFSERVPLRTAYLNSADRRYDGLLDARKHVWAHWNILSQKLKQLCLRRHEFYQTGINSPLVVMLSNLVPTEFDSKPKGTSRTRRKS

SEQ ID NO: 59193 - protein, 412 aa, Tolypothrix sp.
MRRQAVKVRLYPTDKQVQVLAQHFGCARWWWNYGLNKCIETYQATGKGLSQSGLNSLLPALKKDQQTQWLGECYSQVLQSVSLNLSRAYQNFFEGRGKYPRFKSIHHRQSIQYPQKVEQINDCLKFPGKLGVVKAKIHRPVDGTIKTVTVSKCPSGKYYASVLMEYSGDYPTSKTNGQVIGIDLGIVDFAVTYDGEKISKYPNPKHLAKYEQKLAKKQRIAARKVKGSNRRRKATKIVAKVYEQISNVRQDYLHKLSRLIVNNNQVVVVENLNVKGMVRNHKLAKAISDTGWGTFTNFLAYKLEKEGKVLVEINRWFPSSKLCSHCHYQINELPLDIRTWVCPSCGTHHHRDGNAATNIRAEGIRMLSSSGTGEANANGEEVRPIRGRKPKMRHSSVKLEANTVPGTPVQCG

SEQ ID NO: 59194 - protein, 454 aa, Tolypothrix sp.
LYRTIPIKARFTDEELAFWINQCEHANSLINSAIYHTKQTHYSRLEQQGDAFTTYWRADELRYGWKTYKCSTTYPELDKVLKDSPHYKAMAAQSAQQTLKTVGESITSYNGLVKKYYQGDVDRPSLPRYRKRGGLAAVTFPRQALTYKDGCFKPSISKETKPHLLTEIALAIPEFIDSDWVKEVTVRPYLGEVWIDWVIDDGKQPIDVNPHLDYTQAWSFDHGGTNWLTGVSTRGKSLIIDGRKLKAMNQGYSRLVAKYKQGKSDFYWNSNLDRVQRQRNNQMRDAVNKAARFIVNQCLNDRVGNLVVGWNDGQKSGSSMGKRGNQNFVLIPTGRLIERLKQLCPEYGIQLTITEEAYTSKASYLDDDSLYKHGEKPTGWKPSGQRVKRGLYKTFQGWLINADCNGAANIAKKVATQLGLNLVEVGRGALTLPRRVDLFKGLSKSFRIRCGVGL

SEQ ID NO: 59195 - protein, 259 aa, unknown
  TnpB Polypeptide
LKIWHHLFTLICRIWRNDLGTDNIAAIACTDGSSVVYKGGAILSANQFFAKQRASAVSTLTKGKKHRHASSAFLSNLSLKHDCFLKDQMHKLSTAIVRYCIAHRIGILVVGTNRLWKQHASMSKKNNQKFVSIPHERLRWMISYKALIAGIEVIWQEESYTSKADCTAGDLIPVYGKERTHPVFSGRRIERGLYLCKAGYCINADCNGAANILRKAFPHAWDACKDFQFLSTPASVGFESLNPSSIPNRQKQRAANKKK

SEQ ID NO: 59196 - protein, 370 aa, unknown
  TnpB Polypeptide
MLTYKFRLRPSKSQRTKLLRTLELCRLVYNSTLATRKNAWEGEKRSVSLYDTNKMLTLWKAEYPDLAQVHSQVLQNVQERVDLAFQSFFRRVKEHADEVGYPRYKSFGRYDSFTFKQSGFDLLDNALRVSKIGTLKIIQHRPIEGRIKTLTIQKDAVGNWYACFACEVEPTPLPFNALAVGIDVGLKSFCTLSNGVTVDNPRFFRRDEYELAKAQRRYSKDKTPKRRKVVAHIHQRIANRRKDFAHKLSREWVNNYGAIFLENLSIKNMMQNHCLAKSIGDAAWNQLIQCIFYKAADANRVCKLVDPRGTSQKCSGCGSVVAKDLSVRVHDCPSCGLVIDRDWNAAINIEAIGLDSLGSALEAPAFMRRD

SEQ ID NO: 59197 - protein, 358 aa, unknown
  TnpB Polypeptide
MKLTAQVKLCPSPEQAQALKKTLEVANAACNHISAWAWENKTFGQYRIQKGVYGEVKALFGLTAQVVVRCIAKVADAYKLDRKKKRTFRPHGSIAYDDRILRWYVDRGEVSIWADGKRRRVPFICGDQQRKLLASRQGESDLVFFGGNFYLLATCNVVDPTPTETKGFLGVDLGIKNIATDSTGETFSGGLVNGLRKRHAKLRAQLQAKGTKSAKRLLKKRRRKEARFARYVNHCISKKLVVKAKDTGKGIALENLKGIRSRITVHRSQRRIQHSWAFAQLRAFIEYKAKLAGVPIVLVDPRNTSRTCPKCGCVDKANRSSQAVFSCVSCAFSGHADHVAADIIRRVAVNRPYADAAD

SEQ ID NO: 59198 - protein, 409 aa, Streptomyces sp.
MSPSTSPDRLPSAPGRRTRPHLRPERTLLDGHDDVAHGLRPRSARLSRRQGRDLQIVRLNRRWGRMRAPKIGRVLFRWTKDLPVGKRADKLNKVTGTRLVREADGWHVVFRVQSEVPDPMPRTGPTVDIDRGIAKPLALSDGTFREHGNWLTPDEARRLRRLEKAAARKRCARKRGEKTPWRCQDCWALAKRQAVKRQPPTGPHCDSDGIPPRSRGGGSQSVFQQIRCGEGQMAKPDRMSPSGAKVRFGGAVMLLIACLIGGLCIAALPYAAGLAGTRGTLTVDGYQYTHSSRGGTSTSSEGTFRSDDGRTVAREAVVEPEYALGERVAVTRAPWTYYVISPACFLGWLAGTCFALCCLLFGVPAIAFGASWNRRERPAAVSTQIRIAKGAFYAALASSVLAIVAAIAT

SEQ ID NO: 59199 - protein, 132 aa, Streptomyces sp.
ISKRIVAEAERTARGIALEDLSGIRERARLRKPQRTTLHAWPFAQLASFIAYKAKKAGVPVVYVDPAYTSQECSRCHHIARGNRPDQAVFACRVCGFVEHADLNSSHNIAHRGWMARVCGVQSTAPELTLMA

SEQ ID NO: 59200 - protein, 542 aa, Streptomyces sp.
VADLRPIDPSFVALGPSGVAIRTRLKAITAADEKVLRLVGDHLGTLAGRDLKARCAAGLEHDSDQWAERKRTLTQEASSRWAGSITKATHDQWALARRAQLAHIHNLEAGVRTIAHRLSLPVGEKGSKRAPGGYRTKQERFAKSRRLHLLQDRLIAEQADREAGRVRVTRGGKRLLGSRHHLKAANLTEAEWCERWEAKRRFLQADGESGKRYGNETIRVTPAGEVSIKLPSPLAHLANASRGRYVLTGTVVFHHRGDEWADRVTGNRALAYRIHEDVQRGRWYLTASWSIPPVKTVPPQAARTSGLIGVDTNADHLAAWRLDPHGNPCGEPRRFFFDLSGTADHRDAQVRHALIRLLHWAAQHQLAIGIEDLDFSAEKTREKHGRRKRFRKLISGMPVSKLRARLVSMATELGLTIVAVDPAYTSKWGAQHWQKPLTSNNRKTTRHDAAAVAIGRRALGHPIRRRMAPPPHDQSDRAGHRTVQARPDVLVREEPRPSVPGQRTRSVCPDVRAKAGDQCAQHRSGHAAEHGSWQQDSLPLSL

SEQ ID NO: 59201 - protein, 406 aa, Streptomyces sp.
VIRAHKFLLRPTVRQGAALGAMLRDHCTLYNAALQERRDAYRHVSKTSVRYGDQSAQLKEIRAFDPERQGRWSFSSQQATLRRLDKAFQAFFRRIKAGQAPGYPRFKGVGHFDTVTFPKDGDGCRWDSTPNDRQTCVRLQGVGHVRVHQHRPVRGRVKTISVKREGRRWYVVLACDDVPVEPLPATGSIVGIDMGTVHFFTDSKGVHVENPRFLETTAEKLAAAQQHLATFPRRTRQRTKKHRAAARKVAKIHARIRRQRLDHHHKTALALVRDHDVIGHEKLNTAGMTKAPAPKPDTDHPGAFLPNGAAAKAGLNRSILDAGWGLFLGILAQKAESAARRVIPVNARNTSRTCPPEAGGCGHVAKENRVTQAKFECTACGFVGNADHVGALNVLHRAGLVLCAEA

SEQ ID NO: 59202 - protein, 384 aa, Streptomyces sp.
VKLVVHVKLLPTPVQASALEATLHVCNRAANHASGVAFAKELKDRNGLQKAVYADLKATFGLSAQPVVRAVKKVVDAYATLNANLRAGNLGPPTTKRHRKAVSTPILFRPQAAQPFDDRCLSWQYDARTVSIWTVDGRMKGVRFACSPDQFKRLVAYRKGESDLVQRGGKWFLIATCDLPDPEPYEPVGFIGVDRGIVNLATTSDGTNHQGRRLSRYRCWQARKRPELQARRTRSATRRLARRARKERRHAADVNHRISKEIVSVAQRTGRGIAVEKLDGIRERVRLRGDQRVILSSWPFRQLGQHLAYKTRKAGVPFLEVDAAYTSQRCPRCGYTERANRPNRDRFCCRRCGLAGPADVVAGVNVRDRARAAWVFVTAPAPSP

SEQ ID NO: 59203 - protein, 478 aa, Streptomyces sp.
LFSSRNERAHGAGAWCGGWGFGAGGIFIVDSVRFATSVVVRPVVSGGHHGEQVSHKQGIRFELAPDPRQAILMGRHAGLSRVVENFCLETVRKRWSQRKAEESYGITGDDLTKVPWSAPALEKEWRAAHAERFPWFDENKLSSRVPKEACRMRAAGFANYLKSRQGTRKGPRVGFPSWRKRKHGSRFRYDADRAKPVAPRTVRLPAIGDVAVCEDMYWLTSRIATGQARILAATIREQAGRWWISFQIEVDRDDTNQRHQADTEAPACGIDLGLKTFAVIRNDDGSREEIHAPKPLKAAQRALRRANRKLARAVENSNNWAKARRRVAALHLRVADRRRDFLHKATTRLTRTKSAIAVETLNVNGMVKTAGLPAPSPMPGSASSSASSATRPTGTARTSGRPTAGSPARRRAGTAAGSTVPWFSRTGPECVPDAACCTTVTTTQQATSSPRCSPPQALDMRTLAGKFPGEEKRLVETA

SEQ ID NO: 59204 - protein, 386 aa, Streptomyces sp.
MVIVMKLGYQFRLYPSAPQRGMLAKAFGCARVVWNDALRARQDAYRQGTKRPAAAELSKRFITDAKKTEDRHWLDDASAVVLQQSLRDLETAYSNFFASKNGTRKGPKMGPPKFKKKTSRQSIRFTANARFSVTEDGKLRLPKIGDVKVRWSRILPSAPSSVTVIKDAAGRYFASFVVETEGKPLPELDWDDTDTGIDLGLGSYAVLRGRKIASPKFFRRQEKKLRRAQRKLSRAQKGSNNRRKAKLAVAKVHARIADRRRNFIEQETTQITRESQTVYLEDLNVKGMATGKRAKSVHDQSLGMFARTLEAKCARYGRGFAQVSRWFPSTQLCSACGSVEGPKGLEGLKIRSWTCSCGAVHDRDENAELNIRREGRRIVAEGRPDT

SEQ ID NO: 59205 - protein, 314 aa, Escherichia sp.
  misc_feature (244)..(307): Xaa can be any naturally occurring amino acid
VERLQAFKFQLRPGGQQEREMRRFAGACRFVFNRALARQNENHEAGNKYIPYGKMASWLVEWKNATETQWLKDSPSQPLQQSLKDLERAYKNFFQNRAAFPRFKKRGQNDAFRYPQGVKLDQENSRIFLPKLGWMRYRNSRQVTGVVKNVTVSQSCGKWYISIQTESEVSTPVHPSASMVGLDAGVAKLATLSDGTVFEPVNSFQKNQKTLARLQRQLSRRVKFSNNWQKQKRKIQRLHSRIAXXXXXXXXXXXXXXXXXXXXXXXXXXXXXXXXXXXXXXXXXXXXXXXXXXXXXXXXXXXXXXXXDIQRTPM

SEQ ID NO: 59206 - protein, 529 aa, Euryarchaeota sp.
VRAHPEGGQGGRDARERLWEGGGRPHPYFICGLAGIHRRGREPDRQGFGEALSPSTRPREVRGVQRLLRPPMGADSAPRSEIFTFAHLSSETIHRYRAHTQLSVTSDRGPMTVATKSTRVPRAYKAELDPSSAQIETFERHAGASRWVWNWGLARKTTVIALCQLPIERVRIPTAYDLGKEIVQLKRTTHRWLAEISKMVPQKALEDLDTAFKNLYENHCGFPKFKSKKWSKRSFRLQGNCPTTPKVIDVQKRRVRLPFFGWIRVKHGQAGYLPITPNDRVKIHSATVSERAGRWFVSLNVQEELSEQRPVEGPVVGVDLGISRLATVSDGSVIENPKPLRRMERSLKHLQRVVSRRRKGSSNRHKAVLRAQHLYLRITNVRKDALHKATTMLAKTKSVVVVEDLAARGLLKNHRLAKSVADASWSEFVRQLGYKTRWYGSKLVKADRFFPSTKTCSKCGTVKLEMSLAQRTFHCECGLVMDRDLNAAINLSRWPAVGRTHETPVRDERSQVENRCSSMKQEPRFQVAL

SEQ ID NO: 59207 - protein, 821 aa, unknown
  TnpB Polypeptide
MNYGYYKDEYLTFFQSWIKNKNQSEIKELIFHLLYEINEKYEVNENHKGFLTSFIHQLNLTTVQNINNELNKRNIIERLKKISNSIVQTLKIINHVNFYLDQNNLLNYIEKEDYNVLIKIKERGFNNFKNVKRDLNINTSTSKLKKNIFNTLNKLNQKFNYNYHNYESKQKYPFAHQTIITTHNVLKSKNRYLKPIRNVVRTNSIISSCYTRNLLYQITYDIEQSNNIDFTKKLLNENYHNYLMKLLVKHLYFENENEITNYLNIPEELPHQNHLNNVNELNCLLQSFKYTSSELRTNINTHLTYTMPKFLKRYIHCYLDQLEKLENNNNKFYKKNRNKIVHKVIRLFYNDEDDEISDIEQSSPNFKNEEFINNQVNKIQNHILKIMDINENQTPLSNKKITHDTNWIPTILKLYYYMNEQLKSYERKTFTLIPISSIKPKFTTFDGICMKELGVSVGDVQSVGDCYSVKDFLEIDKKIKFSRTQRENRSINSIQTNGIQFNLCFNKLKNYNDSYLTKSSVSKTNHTCSSIPENFCGIDPGIKEIMKVVTMNNQILRLTNNEYYDRIGMNKYRKMLEEYKKKFNIHTSELYESPKTTSTNQMKKHLFQFNNVVEKLYQFYSNNTLLRFKFKINSRKKRILDDFNNIIEKTLLTNQKKQKASQRYSFKKSKEKEYNKQLTNVNNNTKRTSSISNTIYNYNSDEKPHIYIGAAKFSSSYKRNRSAPRTYLPSNFSSKVKCFKINEYLTSQLCNTCKGYLVDKDERIVRCKNVSCNMSFLSLNRDVNAAQNIRDKGIYYAQYNEHDPSFIKNNQLQEDDDEDVE

SEQ ID NO: 59208 - protein, 435 aa, unknown
  TnpB Polypeptide
LGQRSSHCVYHREPGKACIGSCCQVKTNQAFRYELDPNNVQHGALVQHAGVARFAYNWALADRIERFEQNEGKAKFTSAIEQHKLLNSLKVAQFSWMYSVSKCAPQEALRDCERAYRNFWRGRKQGQDIGFPTFKKKGQHDSFRLTGSLHVKEHGVVLPRIGRIRTKEGTEKFRGRILSATVSREADRWFCSLAVEVERAKPLAVVGEAVGIDLGIKTFAVLSNGERFESPKLLKRKMKKFQLLSRQVSRKKKGSKNRTKANLHVARLNRSIRNIRKDFLHKLSTSVAKSHGIVCIEDLAERNMVRNHHLAQSISDAGWGEFRRMLAYKCSWYGSELRVIGRFAASSKTCSVCGEVNYSLALADRTWVCENCGTLHDRDDNASVNILNLGTGSHRPEPHPSKIGCNACGDPLTKRWSQKQEASSPVFLHEVVCNE

SEQ ID NO: 59209 - protein, 379 aa, unknown
  TnpB Polypeptide
MNTAIKYRLYPTTEQCILFAKTFGCCRKVYNLMLDAKIKSYQSTGKFGSFTPAQYKKEYPFLKEVDSLALANAQMNLQSAFRNCFDKKRKKRNKFPKFKSAKHSRKAYTTNNQNGTVAIVDKGIKLPKVGKVKAVIHRFPDTTWRLKSVTISQESDGKYYAAVLFEFEDTAVPIVTSDKAIGLDYASDGLYVDDQGGIGTNHKYYRESQAKLAKEQRRLSRKKGSKKNETRSNNYKKQLQKVNKIHRRIANQRLDNLHKISTEIANQYDIVCAESLNMKAMSNKGFGNGKATLDNGYGIFLRLLEYKLANRGKHLVKVDKWFPSSQICHCCGTRHLEMKDLRLRTMKCDCGLTMSRDQNAAINIKKEGLRIYHSAEKAS

SEQ ID NO: 59210 - protein, 372 aa, Moraxella sp.
MKTLKLRIRDKHTAQLNKLSGSVNFVWNYVNDLSYKHLQKTGKFFSAYDLNEYTKGSGELLGLHSQTIQAINETHAKARKQFKKAKLSWRTNNPTSKRKNLGWLPFKQSAIKHIATHQTGNGLLKSKGLKSTLQLSLAKGQKLIIDLWDSYNLSLYQINTLEVVQDSRNRWYACITVKEYPKTTCGTGSVGIDLGLKDSATASNGEKLQIKQTVKYAKALATAQRAKNKQRVKAIHAKIKHTRQDLIHKFTTRLVKDNALIVVGDVRTSQFNSKKGKLAKSVYDAGWFELKRQLTYKCENAGCRFEIVNEKYTTQTCSCCGDTSSSLSGRAGLRIREWTCAKCGTRHDRDINASQNILAVGLDRLAEEIPER

SEQ ID NO: 59211 - protein, 286 aa, Moraxella sp.
IQAISNEYVTRRKQFKKSKLSWRVSNPKSAKRSLGWIPFKKSAIKYGKDFIQYGKNIFKLWDSYNLSQFDIHTGSFVQDSRGRWYVCVTVDMPKQLPNQATKAIGIDLGLKDLATCSDGTKISNPKYYSHYQAKLGKSQRANKKRLVRTLHAKIKNSRRDYLQKQSTQLVKANGLIIVGSLSANKLTKTKMAKSVNDTGFSAFKTMLKYKCENAGVWFVEVSENYTTQICSCCGEISANSPRARTNLGIREWTCSLCNATHDRDVNASKNILRLGHQTLAGGIPSL

SEQ ID NO: 59212 - protein, 367 aa, Moraxella sp.
MKTLKLRIRDKHKDQLNRLSGSVNFVWNYVNDLSYKHLQKTGKFFSAYDLNEYTKGSGELLGLHSQTIQAINETHAKARKQFKKAKLSWRTNNPKSKRKSLGWLPFKQSAIKHIATHQTGKKGLKSTLQLSLAKGQKLIIDLWDSYNLSLYQINTLEIVQDSRNRWYACITVKDYPKQSCGTGSVGIDLGLKDSATASNGDKLTIKQTLKYAKQLAIAQRSNNKKRIKAIHAKIKNTRQDLIHKFTTQLVKDNALIVVGDVKTTQFNSKKGKLAKSVYDAGWFELKRQLTYKCENAGCRFEIVNEKYTTQTCSCCGDMSSSLSGRAGLRIREWTCATCGTWHDRDINAAKNILAVGLDRLGAGIPLL

SEQ ID NO: 59213 - protein, 601 aa, Microvirga sp.
MAYGKGARRTHDKRMVRLGALPADASWLTLRAAWIVAANHFASRIRLPILDELPDGKDLDRVMLAAQAELKGRLSSVWAEKARISAKAAVVEHHRRARGNLFGRLKHLDTVGDKPLEDGTRRLVNLPEEWSRKLTDGDVAALKQLTASFDFRGALAFLRQVRDGTANLSALHADALLALVEAVEAKFRHPAWQDHPDTVVQLHLDFRCVPKGEAESNKAAWQALTQRLTASVPRVLSDGTPIVVPLLVAAPLARQAPLLVRAVLRQAPLQTLIGTADPQEVEIGSLCLELGQNSVEVKGVLSKKPRVKPLPEVTHLLARDFGYRNTCAFAVVRKDADLDEGLLTRAKDWSKAEAKAYLERHVHDGELLEALLLDGSDFLNAINVRCETIDALRSEIDRTYNRIGRIKANINRVLGRPAETLVDLATETDDRMLAGWIRRLQRLLAHVGRLKECRRREYRAIDGLKKSWFGYITSEEAALARQWNAAVVREHLTVMAEEKDSPAYKGRTFNRMINNGAKGQYIRRASNKLKWNGIPEVVVPSFWTSCTDVRFGVVDKAQRRGPVFVARADGLRADADLHAAHTLALWPLLRPKMNDRTALAA

SEQ ID NO: 59214 - protein, 409 aa, Microvirga sp.
MPLVHRRVTYKLYPSSRQAAMLERVCDLHRALYNAALEERIEAYRKAGQSISFADQCRSLTQIRAEDPAYLAINAQSAQVTLKRLDRAFQNFFRRVKAGQTPGFPRFKSRDRFPGFGFKSHGDGFRFTPGQGWRHGTLHLSGISAMRARGEARTPGEVVCADLQRTADGWFLSLVVACEPHRERTGDRIGGLDWGVETYATLCHGPFAFEEVENDRFLAAEQDALREEQRALSRALRGKRSKRTARARRLLARRARRLANRRKNRTHQVTARLVREHALIVTEDLAIQNMTASARGDAVKPGTNVRQKAGLNRAILDTAPGSFLSNLRIKAEEAGSQIMLIDPRQHKPSQTCPIFGMVRKKGLSERTHALPDGRVITRDQASAWVLWNIGQELAAAKRPETVVRAAQAA

SEQ ID NO: 59215 - protein, 390 aa, Okeania sp.
MLLGYHTELHPNNQQKTLLAKHAGVARHAWNWGLWLTKNILNHNSHNPNNKLKFPTAIDLHKLLVAMVKPKNYWYYEVSKTAPQYALRYLSVAWKRCFTLISGQPKFKKKGRDDSFTLDGSITVGFNHIKLPRIGWVKTFEILPDNVTPKSVTITKKADRWFISFKIETATIVTEKSVDVVGVDLGVKSLATLSTGEVFSGAKSYRKLEAKLSRLQYLNRHKTKFSNNWKKAQLKIARLHTNVANIRKDTLHKLTTYLAKNHGMIVIEDLNVSGMMANHKLAKAVADMGFYEFRRQLEYKCELYGCELIVVDRWFPSSKTCSRCGTVKESLLLSERVFTCEHCNFSCDRDLNAALNLAMAGSSPVTACGLDNADVTRSEAGIEQAIYRNL

SEQ ID NO: 59216 - protein, 416 aa, unknown
  TnpB Polypeptide
MRLAFKFKPKFTNKQLKIIKEISWHTTKLYNIVNYEVRNNEDVKPVYTRLEKQFKSNWHNDFLHSHNRQQALKQLAQDWKSYFASIKDYNKNSNKYKGQPRPPKFKNMDKNPNEIIFTNLATRVRDNHLLLSLSKAIKSEYNVKSLKFELPLAVQSIVDLDAIQQVRIKQDKLSKEWYLLIIYKVEEVEENTNPNIMSIDLGLDNLATLTFKDNSESYIINGKTIKSKNSYFNKEIAKFQNIRMKQVGSDKFKDTQQIRNLRLKRRNYVKDYLHKASRKIIELAIENKVSTIIIGDLKNIKQDNSLKSFVQIPIQRLVELIEYKAELEGIKVILINESYTSGCSSVDLEKLNKANYDKSRRIARGLFKTGNKLINADVNGSLNIMRKYLKDKCIPKMLKQIRDNGVVDTPKRIRVA

SEQ ID NO: 59217 - protein, 400 aa, unknown
  TnpB Polypeptide
LYLAEITVVKSSNRQLYKACDELCFLSKNLYNAVLYIQRQNYQEGKKYIGFYDMCKLLIKQKNPNYCALPSSPAVYVIKQADESYKAYFSLSKLKKKGKYNKKVKLPYYKDKVKGRNVTTFYKTRLSKNTYKKEGLIHLSKTNIKLKSNIPFEQIQEVKVFPKNGYYELHVIYKVEEEKQIVSNSVTAIDLGINNLATVVTNISSPMIINGRPLKAINHHWNKRVSKLKSKLPKGVKTSKQIRQITHKRNRRVNNYLHQTSRALVNELRRLSISKVVIGSNKGWKENISLGKRTNQNFVQIPFQRFIEMITYKCKLVGIEVITAEESYTSKCSFLDNESVEKHNTYAGKRIKRGLFHSSTGKLFNADVNAAYNIMKKHLGINLQDLDSVQVCSTPKVLKF

SEQ ID NO: 59218 - protein, 409 aa, unknown
  TnpB Polypeptide
MTYKVQKIFVNPNHVLFKFLDNYAFLSKNLYNSIIYRHRQDYKEAKKKISWMKLVGEFASSNQPDYRALPAKVAQNIVKGIDEEYKSFFGKLKVDLKAKLPRYKHKTEGRYKITFDYQCLSKKALKKGFIKLPVPKTFTQELKFKLPKSIDCTTIKQVTITKFNDGYMINIVCKDDDEIKLKEGNNVAAIDLGLNNLVACVSNNEMKPFLISGRVIKSINHFWNKKVSKLKSKLDISKDEGEKNAIKTKINKLNRKRNFKVNDYLHKSSSLLVNHLDSNQIDSLIVGYNQGWKQDINLGKKNNQKFCNLPFYKFLNMLCYKCNNKGIKVNTQEESYTSKCSFLDNEEVCKHDSYKGKRVKRGLFRASNGSEINADINGAYNILTKAIGKFNYHPIQVCGLPPTLRVGFK

SEQ ID NO: 59219 - protein, 412 aa, unknown
  TnpB Polypeptide
MSAVVKDWMLVRGVVFHLDSSLPTEAKILLEDFRLAVNNAIRAGLQARVTSRNALVKIAYKDFREQHPRMYAQHLVSAFEVAGSVLKNHRRRVRKCVTVRIPFVKRLMMKAENQAYKLNRKSGVIDLPIRAGCHVELRLVVSQYHRKYLDDMALSLGSLTVLPDRVIVAFRKDAPKPYAPDSVISLDTNERSLDGVLVTDDAGMAIKAEFPEVAIIQQRHHDRRKRLQKKKAHDRRTIRNLCRMEGTREHHRIDYRLHEVANSVLKFAEERKSAIVLEDLKGMRRKRSKELNRRLSMWPRRKLHQIIEYKAQWRGIPVVKVDPRNSSRTCPICGRIQDSRMGTEFKCECGWHLDRHINASINLLQTAISKGMAGGLWFDPGAFQHDVMMILYEPAMAARSEPNGTSGIPGVT

SEQ ID NO: 59220 - protein, 372 aa, unknown
  TnpB Polypeptide
MKTYRFKLYKTKKQRDLHHRVRVAGEIYNHLIALHKRYYSMFGKYPNKYKMQNHLVKLKKYNRFSHWKVVGSQAIQQINIRIDFGYQKFFKKENKRPPSFRKLRKFRSFTLTQAGWTLNDDNSVNIGGKTYKFWKSQEIKGKPKLIHVVRDTLGDFHICIVTDFEEDKPDYAASSKTVGMDFGLKTYFTLSDGSEIKSPLFFKQGMKEIARANKVLSRKKKGSKNRSKARKSLARAHQNIAARRRDWQEKEARKLANTYAAIFIEDLNITGMKALWGRKVSDLAFYQQVQILERQCSKTGTILNKIDRWFPSTKMCNKCGILHDMQLENRWMRCDCGNDMSRDENAAINIKNAGMSALGLGTVREVLLPCAA

SEQ ID NO: 59221 - protein, 409 aa, unknown
  TnpB Polypeptide
MILVEKHNINKNHTFFKECDVLCFKSKNLYNQALYNVRQFYFENKQYLPFHKNYHITKIQESYSELPTKVSCQIIKLVDQNFKSFFALLKLEGHIAKIPKYLDKQGRYVVKFPKQSLERREFKKSGKIKLSQTKILINTNIKNYQNLKEVRIIPKIDYYVIEVVYEQKEKLNNNTTIASIDVGLNNLATVTFDNKNLNPFIINGRPLKSMNQYYNKKKAEYQSKLNHYINKKGEKVQCGKSNKIRILTNKRNNKINNYLHKASRLLVNQLVSNKVGVLIIGKNTGMKQDSNMGHVGNQNFVNVPIFKFLDVVAYKARLEGIKVIWQEESYTSKASFLNLDNIPIYGDDKTKHFSGYRFKRGLYKIRGVKKFINADVNGSYNILRKAFPNAFANGTEGFGVIPIVMNVML

SEQ ID NO: 59222 - protein, 404 aa, Nocardia sp.
MLIGRKYRVEFTDEQTHTAEAIGAACRAVWNIGLEQRREYRKRGAFMNYAPQCVQLTEAKDEFSWLSEAPAQSLQQTLRDLDRACRERGTFRVHWRAEHRWSPSFRLPEGAKLRIERLNRRWGRVKLPKLGWVRFRFSRPLDGQVRSATVSRDGDAWFVSFLIEDGATTPESHASVSAVGVDRGVVVAVACSDGNLLDRKFSTLGERKRYRRLQKRLARQQKKSVNRDKTRAAMRRIKGRERYRRKDFAAVAAYRLGTRHGTVVIEDLRIRNMTRSARGTLSEPGSHVAQKAGLNRAILDKGWHVIELALHNIARRTGCRIVKVPPAYTSQRCSECHVVDAKSRESQAVFRCTACGHREHADVNAAKNILADGLSVTACGDLQPSGGSVKQEPAPPRGAVHQPA

SEQ ID NO: 59223 - protein, 187 aa, Tolypothrix sp.
VQDVSNRRRKATRIVARVYEQVSNVRQDYLHKLSRKIVDNNQVVVVENLNVKGMVRNHKLAKAISDTGWGAFVNFLSYKLERNGGKLVEINRWFPSSKLCSNCHYQINELPLDVRTWTCPSCGTHHDRDGNAAMNIRAEGIRMLSSFGTGEANANGEEVRPIRGRKPKMRHSSVKLEAHTDLAVQCG

SEQ ID NO: 59224 - protein, 443 aa, unknown
  TnpB Polypeptide
LKYIIIYIIIYISTQIYNRKEKNAMSEIVKTMKLHIHVNETEAKSLEELTACYAQACTFISKYVFDRGSILNFMKLQETLYQTIRAEFGLKSQFTISAFKTVIARYKTVKEQLFQNPYRYENEKGETHFISRTLEWLQKPIVFRRPQADLVRGRDYSFVTADDGQKLLSLNTLKKRIKVTFDLPKKFKEYFDGTWSFGSGKIVSMNGNWYFHIPMTKNVSEEFSMDHVKHVVGIDRGIRFMITSYDEKGKVTFVSGKEIQKRREHFQQVRSELQSKGTKSAKRALKRISGRENRWMSNVNHCLSKTLVDKYGSNTLFVMEDLSDVSFDENLERRSDQQRNELRSWSFYQLEQYLTYKAEAIGSQILKISPEYTSQRCPKCGRIHKANRDHDKHLYTCDCCGYQANDDQVGAMNIQLLGTLWISGNENPKFKLSEQEKPLALTN

SEQ ID NO: 59225 - protein, 222 aa, unknown
  TnpB Polypeptide
MKCKSNNNVIYSCKYHVVFCPKYRRPVLVDGVDDRLKELIKETCDQLNVEIIEMEIMPDHVHLLMEVDPQYGIHKAVKRIKGYSSRVLRQEFPWLKSRIPTLWTNSYFVSTVGGAPLSVIKLERLQNIRSTTRTSRKNNHSLHTWSFYRLATFIEYKAKLAGIEVEYVDPAYTSQICPICGSVHHAKDRNYTCRCGFHTYRDLLGAINICNSTEYIGNRYTA

SEQ ID NO: 59226 - protein, 490 aa, unknown
  TnpB Polypeptide
MEYEITVGNQEKNFLEKCFNIGSNINNLCLNRCLKQLNKLKRDKEYIKSVKAMKNLNKRIEKKNISQIEITKLKEIKKILSDKIKDLEKKYQFTENDIQKYAKVPRKFTGNILNSNIVQKIASTAFNAVKKIQYRKAKKVKFKKKGEISLEGKNNKTGFIYDIKTMKLKLGKKMSCNLKTIDERQRNCFKNRIKFCRVLKRYIRGKKRYFLQIVFEGIPETNFQIGKGEVGLDLGTSTVAISSKEEVKLLKLSETELERKKIRNLQRSLERKRRTANPENYDEDGKIKKKRKKWKLSKNYFKELNKLKETYRKKKVKDNQYKNILAKFILKQGDTVKVEKISINSWKNRSKKTIKNKNNGKFASKKRFGKTVNNNAPGTLLRKLKEKLLYFGKELIEINPFKVKASQFNYIKQEFKKCSLEVRFKELEQGIIVQRDLYSAFLIQNVKNSNEYDIKKINQEFENFYKKQLEEIERIKKEEKLKFYIRNHIV

SEQ ID NO: 59227 - protein, 434 aa, unknown
  TnpB Polypeptide
MRKVIHGEIYSHDFGSFNQLVSDWSSAYRFAFCRFQKDNLSFGECRSKTKIKYPSLNTRQISDAVMQAKGLYSRVKDKKVVFGGKKNQDRLIKKEISNQEWKDKRDNQIYARGDVTKKGNPNIRLLNKSGNFYLRITVGNRKFEEYKLFIPAKFEQQLLFLLCSANAYNVRLLKKDGKHYRMVIDYKVDNPKTIIDFSNGVMGIDVNPDRVAISNIKPDGNLISSHTIASNRMFFGSTAKRNYEMGCIVKQVINYALENNKGVVFENLKFKKEFENQGRKFNRIKSNFVWKKLLTLLERKCVENGIQYKKVNPAFTSVIGKFKYQKMYNLPIHESASYVIGRRGLGSGEKLSLYKYPSEIVKEIVFDHVGDKTKRIHSWALWRKLRDNYKTVLTGLQSRLFNLKELNDNLCYEGENPSGKVVPLKLVEEHLSVN

SEQ ID NO: 59228 - protein, 377 aa, unknown
  TnpB Polypeptide
MQCNKYSAIIWNNCVKADKKYYEINKKYLTQSELQFMMKKTVPHILANSINMVIIKYISARDAMWSKTNHENSNKVKLPYKEKKFYNTGWTQQNIKIYKDKGYLTLAKPVLPDEQGINRKQKPLKCHIKNIPENIVEIELIYRNKLYLIIKTKQENDNVLIQSENEASIDLGEIHSITSIDNNENAIIITGRKLREIKQLRNKHIGKLKSRRSKCVKGSRQYKKYSKAIWKLKYKTDNKIKNYIHKIIKLYLDYCMENNISKVYYGDLDNCTRNTKKEKRSSKKVRQKLTQWNYRQLTQELINKLSRYGIQLVKVKEYYTSKKCPICGQLNTPKGRNYECECGYSMHRDVNGAINILNDNSNFKIHKYNNLKYLQIT

SEQ ID NO: 59229 - protein, 357 aa, Xylanimicrobium sp.
MNFWAGRAKYPTFKSKKTHRDSAEFTYRAFSYRQPAQGWAPKKHAAVNQRPGQPVLTLAKTSGPLKVAWHRQVPAGVPSTVTVSRDPSGRWFVSLLFETEAPTVPDPVFEVTGVDMNQADTVVTSAVTASGQVVVRKEPGLMPRKRLEQRLRRAQREYARTAKGSKNRAKAARKIAKIHAAITDARRDHLHNLSTTLVRENQAIGIEDLDVRGMTATAKGTVDNPGVDVKQKAASNRNNLDVGYRALRTMIEYKADWASRQVIAVDRYYPSTRLCSTPGCDYIAGKLPTTIREWTCPRCKTHHDRDVNAATNIRTAATAEIACGSGIRLHGGHTTKDTGAPKRSRKLDGGDPTSPAL

SEQ ID NO: 59230 - protein, 367 aa, unknown
  TnpB Polypeptide
VIRSHQIRLYPNKEQSVMLAKTAGTARYCYNWGLAKWNEMYKNGKACSTCELSRLWTQERPEWAKETFRGSQTKAFMFLGTAFSKFFKKQAKHPTFHKKGRRDSFYVDNAHASLKGDMRIRLPNIGVVRMAEKLRFDGKIQRFVVSKVADKWYVSITVEMADEPMPENENITPIGIDVGSKHWAVASNGDVLDSPKAIPALEKRLKRAQRSLSRKQKASRNRRKARMRVARLHHRIRCVKMDAVHKFTSRIAKNHGVICCENLCVSGMGKSVKSIRKAVRNSCMSEMRMLLMYKAKHYVEIDRFYPSSKMCSRCGNVKDDLKLSERTYRCASCGNVIGRDLNAAINIRDEGFRIFTEGHSESACGGR

SEQ ID NO: 59231 - protein, 374 aa, unknown
  TnpB Polypeptide
MIITSVMQLRTYKYRIYPTSKQQIRLFNNFNACKNTYNDLLNKNKQVYIECKQSLTKFDMNQLITKKDDIHSQVLQNVSDRLSKSFNNFFRRCKDSSCKKKGFPRFKSSVKSITYPQTGFKFLNERHLKVSKIGSIPIVLHRLMKGKIKSFTIKRNEANQWFGYFSCEVEDSVVDKSLPVVGIDVGKQYFSVGSDGKYSQYPFFKEQQKRKLKLLHRQVSRKKKGSKNRKKSILKLNITYNNINNQREDWSHKLSNHFRENYSEVAIEKLNIISMLNKNGKISNRRTLDVAWRSFFQKLTYKAVISEVKPEYTTQECSNCKNKQEISLSNRKYICSHCGLHLHRDLNASFNILSRAGLVRTYTPLDIEPLSFLT

SEQ ID NO: 59232 - protein, 450 aa, unknown
  TnpB Polypeptide
VDKETLKELLFIGEQYKRVKNYVYSRFSGINSILLIGTDRKIRDEWTHNKFYEQWKLPARYWKLALSEAISNIKSEWSMVKNRIKTIINNNTNLSNDDKYYIRYILKFNDLFYNVLVNNSFDIPEVFVEKNLNYKYLNSLIRRYTRKYKGKVPYTKNNNVFSIDEGLYFRKDGYIRIACRNKRKRLFIKLTDKNIYKNNNTLIIKIVGNKIEIHCPLKIKTKRNKNKENIIGIDKGYKYLFAVSNDKFYGDKLNKFLNKETERLNNKNKQRNRFWALYNKHLKENNLIKANNIKKNNLGKIKYNHHKNKHDQTVKSYINHSIRQLINIEKPTEIIMEQLNFTSWNKKYPKSIKRKLSRWIKGYIRERLEYLCSYYDINITYINPAYTSRTCNICDSFGERKGDVFTCPKCGKLHADINASKNILNRKYDKEITLYTPFKKVRDILEKRVN

SEQ ID NO: 59233 - protein, 366 aa, Succinivibrio sp.
MQLTETVKLYLTTEQKSLIVNSMREYIKTVNIIVADGVLGKKISKYTTATFDAALPSAIKNQCIRDAKSIYRKYLKKKAQNSKENKNTTIPVVRKACCYINNQNYKIADGRIEFPMLINGKSKRISVLTRITQRQISILENSKLGLMRIVYKGNKLVAQFSYEKQEKEDTSSDNVMGVDLGIKCPAVSYIKGGGVKFYGNGRRNKYVRRYYRNLRRKLQKAKKISAGRKINNKEQRWMRDEDHKISRGIVNNAIANKVKVIKLERLANIRSTTRSSRKNNHSLHSWSFYRLSQFIEYKAKLAGIAVEYVNPAYTSQRCPVCGHIHHANDRKYTCKCGFKCHRDLVGAINISNSPEYVGDSDIRHTA

SEQ ID NO: 59234 - protein, 412 aa, Moorea sp.
MIQRAYRYRFYPTTEQETLLRRTLGCTRLVYNMALAARTQAWYENQERVGYAQTSSMLTSWKKQEELSFLNEVSCVPLQQGLRNLSAKPTLREQKAFANFWAGRAKYPNFKKKHNGGSVEFTKSAFRWKNGQVFLAKCSEHLPIRWSKKIPENCTPSTITVKLDARGRWYVSLLVDDHTIKPFPKTDKSIGLDVGINSLIATSDGEKITNPKHFKGLHQKLRRVQKVLSRKKKGSNNRQKARLKVAKVHAHITDTRKDFLHKLTTQLVRENQTIVVEDLAIKNMVKNHKLALAISDASWGELTRQLDYKCQWYGRDLIKIDRWFPSSKRCGNCGHIVDKMPLDIREWKCPECGIIHDRDINASQNILAAGLAVSVCGANIRPDNHKVEGQLRKSRSRSVGFLETGRKQKPKS

SEQ ID NO: 59235 - protein, 495 aa, unknown
  TnpB Polypeptide
MIYKNPFKSWKKKGARTVKTTMRAILINVSDEQKQIIDNMMLVFCTAIRYSFKRLLEGVEISNLEKDVANKYNLNIRQAKDAVENARQTIQSQKKLVKLNYQNYDKKVKAIEKQLKSNKLSDKKRNALLSKLDKRKRKLQYFQHFIDTNTIPPVIFGTKQMFLKRCKGLISNEEWKDCRNNRIYSRGDKTKKGNPNLRIVIKDKMSYLEISTLEKTETNRAIKIQVPIYLPQKSSKKTGKINGIDYRELFLNHLQTGEAYQVEIIKKNGKYYVHITFELPQTEKNYTGHNNIIGIDTNPNGFALTCIDSNGNYKWNRYLKQHELLYARSNRRSNLCGELVKQVVLIAKNQGCGIVIEDLKFKDDRDVHSKFARIKHQFIYSTLLTMLENACYREGVEVIKVKPQFTSKIGLYKYCHQYGMAVHNGAAMVIARRSYGFKEKVPKLLKDKLIFDKDTFNKKNEWAKWAIINKIITKEGVNNPGLWQNKRKQILGLVN

SEQ ID NO: 59236 - protein, 504 aa, unknown
  TnpB Polypeptide
MHTVQLLLKTSKYERHEIDRRFHALAHLHNVCVKHARKCMIRLQHDKRYAELRQLYNELVKKEKMSKEEKSQKKKLAKQLAACRTKQGLSKASLEHYLKVCGKQFSKLLSSQQVQAEADRVWCGVERCLFGNGKELHFKKLMDFDTIGGKSNKNGASFDLDAMHVNWLGLSLKCYLPKSENSLSYVWESLKGKISYCNIKRLMFSSGWRYYAEIVVSGAAPTRVSIGTSTMGIDPGVSTIAGVSEDACVLEELAPNAIQYEKKIQKISQSMDRSRRISNPNKYNEDGTINRSNRDPWKYSKNYVKMCRLLKSLYRKKHAYIVDSHRKLCNKLITIAKYFPVEKMHFQALQKRAKETKRQEKKTEVKQKDGTVKVIQKYKRKKRFGRSINRRAPARFLLELKRKAEAVGGVYAEVDTKEFKASQYNHVTDTYEKIPLSQREKEIGNRKVQRDLYSAFLIRNADLDFKHPDREKCEYEFEYFADMQDQLILKMKESGLSMRQCFGF

SEQ ID NO: 59237 - protein, 374 aa, unknown
  TnpB Polypeptide
MVVTKTYKFRIYPNKDQTVLMARHFGSTRFVWNRFLAQRKESYLENKESLTYYDNSKSLTLLKKDDEFNWLKEINSQSLQASLKDLDTAYGRFFKKQAIFPKFKSKHKSVDSFRCPQSVNLRDGKLFIPKFKTGIKIKIHREMIGKILFATISRTPTDKFFAAITCEGEHTALPLADKEIGIDLGIKTLAICSDGKVFENPRATKEYAKKLAYEQRQLSRKEKNSGKRIKQRKRVAAVHETIKNTRLDNIHKITHAIISENKTVVVEDLHVKGMIKNHCLAKAIADVSWHEITRQLKYKAQWNERNFTKIDRWFPSSKTCFECNFINQSLQLKDRKWVCPHCKTVLDRDLNASKNILKQGLKILSGSGAESDVK

SEQ ID NO: 59238 - protein, 301 aa, Edwardsiella sp.
MKRLQAFKFQLRPNGQQQRDMRCFAGACRFVFNKSLALQNENHEAGNKFMPYVKMAAWLVEWKNEPETRWLKEAPSQPLQQALKDLERAYKNFFQKRASFPRFKKRGQSDSFRYPQGVKLEQENNRISLPKLGWISYRNSREVVGEVKNVTVSQSCGKWYVSIQTEYEVSEPQHESTSMVGLDAGIAKLATLSDGTVFEPVNSFKTNQKKLARLQREMSCKVKFSNNWKKAKRKVQNLHSRIANIRHDYLHKVSTTLSQNHAMIVIEDLKVANMSKSTAGTVSQHGRNVRAKSGLNRSILD

SEQ ID NO: 59239 - protein, 404 aa, Crenarchaeota sp.
MPSVLAIKVVRQNYAPNNDILGLLQTFRAITNSCIEIGLANDAWSLRRLSELSYKALAGYRCPSYYKLGAISRAAGILAARKKSMRRRMPTRTPYSFKPQLASCYGFKIKDKTFSLPIGGGRTFSILLNRHTLEILSDENLRVKSFVLTPSTISLCVTKEVANVECIDMAGVDRNLRNLTCGNERCISRYDLSKAAEIAATTTSITSSFKRNDARIRHKIASKYGKRRRDRTNQLLHNVTKRIVNEAKRRREALVLENITGIRKLFRRHNGATSSFRGTMNGWKFREAQRQIEYKAAWQGLSVIRLTRKETRGTSITCPRCGERLQSDREHHRELWCSSCEKWTDRDVVAAINLAQRGRLRFDRSKGEAIEAMKRNPTPTVPLRVDASKLDRPTAETSRTFIDD

SEQ ID NO: 59240 - protein, 364 aa, unknown
  TnpB Polypeptide
MQIGGETMKRTYKFKLEPTKQQIEQIETTLNLCRWLYNSMLEQRKLAYKHWNISLTFYTQKKELPQLKKEFPEFNQVYSQVLQDVCQRLDNTFQAFFRRLKNGEKAGYPRFKGKNRYDSFTYPQSGFSLDGKYLKLSKIGKVRIKLHRQVEGKIKTCTIIRKNGKYYACLSCEVEQKHESTGKQVGVDLGVKHLAITSDGEFFEHPKYLRKAEKRLKYLQRMVARRKKGSNRRRKAVAMLAKCHEYIANQRRDTAHKISRYLVDHYDLIAFEDLNIKGMIKNHHLAKSIADAGWNQLVQFTNYKAEYAGKKVVLVDPRNTTQVCSECGQIVKKTLKDRIHKCSCGYIEDRDINAARNILKKAVA

SEQ ID NO: 59241 - protein, 402 aa, Actinobacteria sp.
MIISKGFKYKLRLTKEQESFCGQTAGSCRYVWNKGLALKKELWEKKKQKLSRFDLGKLLTQWKKGLDWLSLPPSQSLQQTNKDLDQAFSNFFHGRGYPKFKKKGIHDSFRLPQGITLMEQLSKKVGQAKLPKLGIVRFTKSKELEGRIKHVTISKTCGKWYIAFNCEVNRHVPKEIAQSKVGIDRGIKTFAQCSDGITIQGVSPLKKNLKKLAKLQRKLSKKKKFSSNWRKTKQKIEKLHYHISNVRKDFLHKTSTQLAKSHGLIVMEDLKVGNMSKSSKGTKENPGENVKAKSGLNRSILDQGWYTFQNLLSYKLDWRGGRLILISPKNTSLKCRICGHIAKENRVKLEEFQCVNCGHTENADLNASINILAEGHSVIACGVEAFASTVKQELLIRKPMAV

SEQ ID NO: 59242 - protein, 339 aa, Helicobacter sp.
MLITYKQKLYKNDKNRRIDTLLRRYGVFYNHCIALHKRYYRLFKKYLKLNDLQKHTTKLKKTHRYAFLKTLGSQTLQDLTERIDKAFKKFFKKQAKLPRFKKVANYKSFTFKSQVDKKTGLNKGVGFEIKDNVVSFNGYSYKFIKTYALIGQVKTLTIKRDNMGDYFLCLVCELENNPNKQTACDKSVGFDFGLRTFLTGSDNTKIESPLFFSKYLPLIKRLSKNLSKKVKGSNNFKKAKKKLAQLHQKIKHLRTDFFYKLALKLSRKYQSIFIEDLNMKAMQKDENFNKDIKKLGKTDKEREYHCKYCGLELDRDLNAAINIHRVGASTLGVEFVRPT

SEQ ID NO: 59243 - protein, 628 aa, unknown
  TnpB Polypeptide
MRLLRQSKPRKPSGLRVQAMPHEHERRLERGQQHPQTGIEPSPRLGRSRARPNGARRPTRLSREGRFRHDVRNLNTITCWNPGVLTPGGRQPKRSRQPSIQHWNQRIHARQLPVSGRGCPVFQCREEPLPPFGLSLLSLCARSDIIGIMSQKVVIERVQVRGAAPYLGMSATPDGQQAPLYSTNPDIVMRWLCDGWRCRYNQLRSRRTKWDRESQTAVPLNGRSDMRSDRQVRLECSWLAAIPSMVLQSPNRIENTDWWSANKRRRTLKKKHRNPGMMPRFKSRHDDLYFVCWHNKGSNANYRRLNRHHGEVVITGQNPGEYRLDGQPCRYSIHIRVRVSQSIRDYTSIGVNWTRRTLVFVNDPLPIGRERTGAMVGLDRGCAHTLATSDNRFLDLPKQRLERIDREIRRRQKAQARRVNMSGKTVREYRRNPSRTYERTGREISRLYAKAHRIIDDWQHKTTSMLVHDYDLIALEDLNLQGMSRKSKAKPDPDRPGAFLPNGQSAKRGLNRSLRAASLAGIVSKLEYKTRLTGQNRLILVNPAYTSQTCSECGYCDSRNRESQADFECKQCHMSMNADLNAANNILKRGLNHLLGLDEAEHARTEPDAQPAYRGKDASAMTCETSTR

SEQ ID NO: 59244 - protein, 402 aa, unknown
  TnpB Polypeptide
MKQTIIYKLNPTKEQEGHLHNLCSIATKLYNTDNYLRRKEWDETGKIYGWYEARKPLKDNIWRLLLHSQTADEVIHTLSTNYKSWFKLRKKDKTANPPRFRKKEMLSPITFNQGFKIVKDKIKLSVSRKYKIEKGINSIELNFDLWKEGKGIAKMCQIIFKKEGWFAHIVYEIIEPEINLNDKVMAIDVGVINTAVTRDNQGNSTIYKGGELLSVQRYYNKTIGKLQSTLTKQFPKRHSSKTLRKLNKKRNNQINQMIHTISKKIVNEAKKNNVKTIVIGDITDIRKDKHWRKKSSQKLHSWSFSKLTQQIEYKSILSGIRFVRVNEKYTSQTCSCCGTIRKNNRIKRGLYKCKICGRIQNADVNGATNILKKYLRIFNPEDRSSGCVAQPKVSLIENVLSR

SEQ ID NO: 59245 - protein, 147 aa, Exiguobacterium sp.
MILAKKHEKFAHQRQDFLHKLSKRMVDDNQVIVVETLKSKNMMKNHKIAKSIGDVSWYEFVRQLEYKCTFYGRTLIKADQWFASTQICSSCGVKGEKKTMDVREWVCVCGVHHDRDINASINLLLYSRLKNLQGGNHPMSLVNNRSS

SEQ ID NO: 59246 - protein, 180 aa, Exiguobacterium sp.
LNATIRRNASGKYFVSLLVEQEINELPKTGSSVGVDVGLKNFAILSDGTVYKNDRYFRSLEKKLAREQRKLSRRQRIALNKKVKLSEARNYQKQKRKVARIHEKIANKRTDFLHKVSTEIVKNHDVIGIETLQVKNMQKNRKWSKAISDVSWSEFFRMLEYKADWYGKTVVKVGKTFASL

SEQ ID NO: 59247 - protein, 198 aa, Exiguobacterium sp.
MGSFRPLETGHRPYLERNRPTKRFRKILRLPARRAGDQRTPKKGSSVGVDVGLKNFAILSDGTVYKNDRYFRTLEKKLAREQRKLSRRQRIALNKKVKLSEAKNYQKQKRKVARIHEKIANKRDDFLHKVSTEIVKNHDVIGIETLQVKDMKKNRKLSKSISEVSWSEFFRMLEYKAEWYGKTVVKVGKTFASSQLET

SEQ ID NO: 59248 - protein, 408 aa, unknown
  TnpB Polypeptide
MTVKSWFSTKQITSYNKNSQVDYLQPLMPSCTECMVSDAIVTKARRIRIYPSQQQKRLFKQWFGVERKVYNTCVNHFNEKDIPFKGWMNMSKTILSELTESYIKSVPYQIKKIAVKDSYTSWMTNCKKTKKTGKPFKLRYKSRKNPVQSCYIPKQAVSETGIYYTISGKLKFSEREWLKNDICDCRLIHDHGRWYLSVPQKIKIMPTENQGGIVALDPGVRNFLTYFSEDGRFGWLGVHAFDRILRLNLKCDHLFSRLALTKDKRKKVKLKRTLNRTYHRIQDLVDEMHWKCIIYLVHNFSVVVFPPFEVKGMTKKGRKLRKSVVRSMLSLRFFDFKERLKQKCKECGVTYVEQNESYTSKTNSFTGELMDNLGGKEWFMYDGIKVHRDLNGARNILIRAMRDSSAAS

SEQ ID NO: 59249 - protein, 481 aa, Thermoanaerobacter sp.
MIVIQAKLIFLNQQDKQIVLDLMRRWSPCMRFAYKRFLEGYDRNTLKRDLQGTFDLNSRYVDDAIMKAESALESVRELGNNPKKVIFGGKKLFKKLQKRHINGKAYKKLKNRWQEKRKGNLYSRGDKSKKGNLNTRIEAKENGTFLRINVGERKYAYAKIQAGYKKNKRREELLQEIRESNIPYSVELKLKNGSIYAYFAIEEEYPEIKITKEKGAIGIDINAYPDNISWVEVDEKGNLISYGNMSMPELASGNKDKKEYFRWQYAHEIVKIAKEKGKAIVIEDLEIKDKGKRGDFSGRKSRRIRHSFSYKSLLSKIKTLSKREGIEVIEVNPSYTSIIGMLKYSPQYMITKDIAAAYVIARRGLGLQEKIPDNYIKFLNALTVEELEELKEYVKKTIRNKHLREKYIKEINKAIEFLQSLESEPGRVLEPLDGTSFSTYDFWRVLKVAVVTPLSPERVLRDVSALKGVLHSGQVGRPVRT

SEQ ID NO: 59250 - protein, 397 aa, unknown
  TnpB Polypeptide
VKTRYRFRFYPTTTQAQELFRVFGCCRYVYNWALKVRSETWRTQQKRISYNQTSAMLTTLKKQEETKWLNEVSCVPTQQSLRHLQTAFLRFWSKLGKYPTFKKKRNRQSAEYTQSAFKWDPINRNLTISGLGRLDIHWSREFKSDPTTVTIIKEPSGKYFVTLCLDESIEKLPKTGLHIGVDLGVSRLATLSNGDRISNPRYLGSNLAKLSRLQRVLARRKRGSGRWASQRIKVARLHEHIANQRSDTFHKFTTDLVRRFDVIGIEDLNVRGMLANHCLARAISDVGFGMFRSQLTYKCERYGKSLKVVDRFFPSSKMCSECGHVNEKLSLGIREWDCPKCSTHHDRDENAAKNIDMAEGHSVTVHGGMVSRVRASAPRRASLRSVNQPDVSRVLHD

SEQ ID NO: 59251 - protein, 398 aa, unknown
  TnpB Polypeptide
MRKAYKFRIYPNKEQRQILERTLNTCRILYNNLLAERRDTYKKTGRSPSYYEQRRSLVERKPNDPYMRQVHSQVLQNVALRLQRTFDNFFRNIRRGRRTGYPRLKGRNRYDSFTYPQYMNGAELKDGKLNLSKIGMVRIFKHRSIPPSAIIKTCTIRRDVDKWYACFTVEMQSEKVAREQSGQEIGVDFGLNSLLTLSNGEKIQPPKFLRKSEKKLKREQRRLSRRKRNSQNRRKQRVKVAKTHRKIRLQRTDYNHRLSRDLVARFDKIAFENLQIRNMMSNHHLAKSIADAAWGQLHLFTSYKAEEAGKMVKGADPYGTTVDCSRCGFHVPKTLSERVHECPNCGLVLDRDWNAAVNILNRVGWGTAELTPAEIQPLLRPCVVAEQAGSKNQEAHDL

SEQ ID NO: 59252 - protein, 278 aa, unknown
  TnpB Polypeptide
MWGTRDLLARFGGQSPLPADSRHFYQIEQIKRVRVVRRADGYYVQFCVDVERREKHEYQNKVVGLDVGVNHFYTDSDGNTVDNPRYLRKGEKSLKRSQRRLSRKKKGSNNRVKARNKVGRKHLKVSRQRKDFAVKTARCVVQSNDLVAYEDLKVRNMVKNHHLAKSISDASWSQFREWVEYFGRVFGVGTIAVPPHYTSQECSSCGVMVKKSLSTRTHTCACGTALDRDHNAALNILRIGLSTVGHTGTQDASGDIDLCVGEETPPSKSGRRKRKTQK

SEQ ID NO: 59253 - protein, 389 aa, unknown
  TnpB Polypeptide
MRTFEYRLYPNRAQYQQLMACLIESRAIYNEMLALLKAQYDADSTFPTKYDLTARFKGRGGDTVPATTVQTLADRLSKALKRFLQLKDLGLPVGFPRFKTPNRWHSIQLRQYAVSRDVWLDEDGTHLHVPAKLGRLLKIKLHRPLAGTPVTAHLVLRADGHWYALIVCETAPQDEQEIIHPERTACAHPAIGLDVGLKVFLADSNGGTVENPRHYRQGQKRLAHGQRTVCRRKKGSHRRRKANREVACKHLKISRQRRDFHCKTAKHYAERYRRICVEDLNVCGMVRNHHRAKSIHDASWSTFLGILEDRAERAGHQVIRVPARFTTQKCHRCGTYVQKSLSVRTHICPSCGLVEDRDVNAARNILRAGAPPSGTGADRLPVELRSPRL

SEQ ID NO: 59254 - protein, 312 aa, Crocosphaera sp.
MSYPANVKFEGDYLKLNRKIGKVYCRSHRDFEGTIKTVTISKNSDGKYYASVTVDDGLEKPETSTEGAECTAACDSDFKSESVGGKAIGIDLGLTDFAVTSDGSKFDNPRHLAKHQQNLKRKQQKLSRKQKGSNTRDKARRLVAKVHSKISRCREDFLHKLSRKIVNEKQVIAVENLNVKGMVKNHKLAKAISDCGWGMFCTMVKYKAENEGKTYIEVDRFFPSSKTCHVCLNQVESLPLDIRNWTCEHCQTTHDRDINASINIRNEALRIISLGTSETANGGNVRRLGGKISCLLDATPNEIGSPNYIACN

SEQ ID NO: 59255 - protein, 373 aa, unknown
  TnpB Polypeptide
MVANRAYKFRMYPNDEQKILFAKTFGCVRMVYNHWLDRKIRQYEENKTNVTYTICAKEMAAMKKTEEYGFLKEIDSIALQQSLRHLDTAFQNFFKQPKTGFPRFKSKKRNKNSYSTVCINGNITLSNGYLRLPKIGQIRLKQHRIIPDEYRLKSVTVSQTPSGKYYASILFEYEDQVQEKELQKFLGLDFSMHELYRDSNGKEPAYPGYYRNAEKKLAREQRKLSKMQKGSNNRNKQRLKVAKLHEKVSNQRKDFLHKQSRQITNAYDCVCIEDLDMKAMSRSLNFGKSVSDNGWGMFTTFLRYKLEEQGKKLVKVDRFFASSQTCSVCGYKNAKTKNLALREWDCPQCGTHHDRDVNAAVNIRNEGMRLVNA

SEQ ID NO: 59256 - protein, 476 aa, unknown
  TnpB Polypeptide
LKCVHLGPFILLKRRVAFRVLSAKSLLFFIFNIYSILIIYFIFIFKILKIIFIYTLVQKLYIIMKLVEQHIIKKSNADFKKIDNLCWLSKNLYNAALYHIKQHFEATGKWIRYNDLEKDFSSNNNPDYRVLPPATSQQILMVVDKNLKSYFALLKKYKKNKKSLLGCPKFPKYKHKIKGRNILIFTNQQARHKPDKSIIRFPKLTELHPLKTKVQGKLNQVRIIPTSGCYKIEVVYEKPEEQLVEPNNNYLSIDLGLNNLMACYDSQDSISLIVPGKPLKSMNQYYNKKKSKLQTKLKKNHNKYVSKKTKQLNFKRNNKIKDYLHKSSRFIVNYCLESGISNIVLGYNLEWKQGINLGKKTNQNFVQIPFATLINQIQYKAKLVGITVTLNEESYTSKCSALDLEEVCKHEIYLGKRIKRGLFVSSNGTKINADLNGAINILRKVTGDKVFGESHRQTQTSRGQVRWPLKINLYKN

SEQ ID NO: 59257 - protein, 412 aa, unknown
  TnpB Polypeptide
MTNSLVLASLVLAVKSVRQKHRASIELLRLLDEFRRMVNVCIAVGIEENASSLKTLSSKSYHRLSRDMLGYYRLGAIGTATVILHNYRRAKKKNPRTVIPYARKLMLTTCYGFKVRDGLLKLPVKPRQSVYVKLNSHTLQAISRFSVRWVTLTPGELSVTYSREAVETKPEGYVGVDRNLDNVTIASTDQTVRRFDLSKATRIRSDYRYVKSRCNRNDARIRTRVFSKYGEKQRNRIQPLLHSVSKRIVEEATTRRYGIVMEKLTGMRRLYRRGSGQSRNYRARMNSWSFGELQRQIEYKARWEGVRVIYVPARNTSKRCSICGYKTLESTQRRLWCPHCGAILDRDENAARNIAAGGLRFSPNGPPGEAMVEEREPKNATLVLTVDGGKLSPTTDDFQSVRPRLNRTRTAY

SEQ ID NO: 59258 - protein, 377 aa, Massilia sp.
MHTANANMKTSNVPADVVRVLRLRLKDKHAHVLRAKAFWVNQCWNYCNETSHKVWQRERRFLSGYDLDKMTSGASKEGVPLHSQTIQAIGQEYARRRKQFNKVKLRWRKSSGARRSLGWIPFKASALRYRNGQLWMSGIDQALGLWDSYGLSKYQLGAGSFSEDARGRWYINISVKVAREPRSAATNAVGIDLGLKHFATLSNGEKIEALKQYRHHEAKLAMAQRAGKKRLVKTIHARIANQRKHQHHVRSTELVQRFGAIFVGNVNASALAKTRMAKSVLDAGWSQFRAMLRYKSDSAGVWFDEVDEAFSTQDCSVCDARSGPKGLKDLEIRVWTCDQCGAPHDRDVNAARNILRRGHATLAPGIPLLTAHAAALG

SEQ ID NO: 59259 - protein, 301 aa, Lyngbya sp.
LRVEQNTQTSRKNATVAVLNSRASAFKFKEGQIYLAKSKEPLPIRWSRQLPTGCTPSTIMVKLDPSGRWFVSLKINDPIDHKLKPLDKKVGIDLGISSLFTTSDGVKVSNPRHFNKVYKKLRLAQKSLSRKTKGSKNTEKARVKVAKIQAKIADCRRDHTHKLTTQLIRENQTIVVEDLAVKNMVKNHPYGLARAISDTNWGELVQQLTYKAEWYGRELIKIDRWFPSSKRCSNCGYIADKMPLNIREWDCPKCNSHHDRDLNASINILAAGLAVSVCGATVRPEGSKSLKAGAKKQKPKS

SEQ ID NO: 59260 - protein, 344 aa, unknown
  TnpB Polypeptide
VQALAQKLSANVATARALRQANPAAQYPYRAKRYQTVPWKQQAIHLQAGQLVLANGKGQAPLVLALPQRFASADIVKCELTWRADHYELCLTIDTGRVNPPLVNDSKAAGVDLGEVNIAAAVTDAGVGISISGRYLRSVNRLRLKRHTALNQRIQRCTAGSRRHKQLVKAKARASAAFYRQSRDVLHKAARQLANFARAEGVAHLAVGDVRDVANSGDKGRRHNQRMSLWAHGQFVGYVQDKARQYGIATEYIGEEYSTRTCSACRHCHPTAPRGRVFTCAGCGAIISRDGNGAANICSRYRHGEYGHVQVQSITYLRATEVVLRTTAMLPTGVGSHGPLGPVV

SEQ ID NO: 59261 - protein, 154 aa, Methanosaeta sp.
LSPWKDGPAVGIDVGLESFATQFNGEKTEDPRFFRSEEKGLAWVQRKLSKVPNGTPERNKTLKAVGMAHEEIANFSSDFINKGSQDLANHFRVIAFEYLIIKNTLKNNILAKSISDVAWGMLVTAIEGKAAYSGSEVVLVDSRKTSQMCSRMAS

SEQ ID NO: 59262 - protein, 290 aa, unknown
  TnpB Polypeptide
LRFRIDSNWFYDRVRDWKLGEIILKDKELILMFTKEIEDENINKVISWDMNMFTMDGFGDEIGVVKKSIRELYRIHITYHNKRRKVQKMLNKNPKQARRLLKKINKREKDKVRDFIYKFTTELAREFSDYIHVFEDLNKEVMYNRSKKHNRSIALHNWRRIVEVLKYKVKVIEVDPKFTTKTCSRCGSLDTIIRNGTVICKECGLKINRQLNAAINIYLKGKGLKRTVQVWNKLIKPRLKMWGVGVPPNGAKSNDMPPMNPEGVEDDVAQGEVGQIWVTLSKFVQLPQTP

SEQ ID NO: 59263 - protein, 425 aa, Bifidobacterium sp.
MSVRGRWTVLRGVRVKLDPTPRQERMLRSHAGAARFAYNTMLGMVKDALDGKIEGFGWSRAELRRIWNACKVRVAPWYADNSKEAYSYGVECLASALRNWSDSKKGRRKGRKTGFPKFKSRNRHMKFAYTTGSFGLVRDDPKALKLPRIGRVHCFEDVEKRVGVGRVIRMTVSCVAGCWYASLCVEYPDPAGLGKTGGGTVGIDLGVKTLATLSDGAVVENPKHYRRNERKLRRAGKRLSRRVKGSNRWKRAKLAVQKQHSRIASQRRDTIGKATTMIARTYGHVVIEDLNVEGMKHDHCLARAVSDAAFGEFRRQLEYKCSDTGTVLTVADRWYPSSKTCSRCGTVKAKLSLAERVFVCDNPDCEYAREGVDRDWNAAKNLEHYVAGSAPGDGKRAPRSRKTTSPLEVGNAGTVETRTKQPGGA

SEQ ID NO: 59264 - protein, 430 aa, Bifidobacterium sp.
VLRGVKVKLDPSPRQEAMLRSHAGAARFAFNFMLALVKASCAGRVRPFGWSRAELRRVWNAWKPDVAPWSANNSKEAYSYGVECLANALKNWKDSKSGKRKGPKVNFPKYRKRNRHMKFAYTTGCFGLIEGDPKALKLPRIGRVHCFEDVERRVADGRVLRMTVSCTAGEWYAALTVEYPDPIIPVKTGDNTVGVDLGVKTLATLSDGTVVENPKHYRRNERRLRRASKRMSRRQGPTPGRRPSKRWSRAKRSVQKIQATTASRRRDVIWKTAGMIARSHDRVVLEDLNVAGMKRNRHLSKAVSDAAMGMLSHAIQVKCAQYGTVLVVADRWYPSSKTCSRCGTVKAKLTLAERVFVCDNPDCEYAHKGVDRDWNAACNLKNYHVAPSAGGDAKRARSAGKTTAPRGGNARHETPDPGTETRTKQNHQRS

SEQ ID NO: 59265 - protein, 587 aa, unknown
  TnpB Polypeptide
MRDSRTHQPLTYDVRLPDEAQVDALRLLDASRAVINQALTLLWPSLDEFGSERDFSAWKQVGKYMGSPQYHGDRQWRCESEVVGRLLRQQAERKKAFELVAPILSDGFIRPKTEKRPAGKNRPAIKEAIAALQKNLEEDETSFVALQNVVEQACNFFFQHDRFPSSYEELQPVPLLKVGLLTYAGDDGRAKGQAYRLALDLDAGVAHFRFRYPDEAGVWRWRTGDTFIALPDCLKERLSHGKLMAPTLREEYRADGERFAVLDFIIEIEKEELPAWESVERVLGADWGVHTLLTATAVDGHHEQVGRPFFLNTGGFDGRQARTRRQIDELKKKVARFEAQRDALPPEHSKRLWFNQKLTLLTREIDRCCRKYEQRNRALAHLASNVLLLLARVHGCSLLSMESLKTLKSTGRGKGVRGRWRNYRTNSQIRGEIWRLLRYKCHLIGLRFHTEQPRGTSHACPRCGAPAKTYRSPSDRNEAVKWGRWMYCDGCQYHGDRDYCASVNIARLGVAYLIQMKHTGKARACSIFDPQVKPVSYTGTGAVLLLPPTGNHPARNIRGKMCYYPGWLGSAFLQSSHQKHIFLRLCG

SEQ ID NO: 59266 - protein, 204 aa, Blautia sp.
  misc_feature (4)..(10): Xaa can be any naturally occurring amino acid
  misc_feature (177)..(177): Xaa can be any naturally occurring amino acid
LIWXXXXXXXQIKQLRIYPPEKGSCKIIVVYEVPDQEELPQNGHELSIDLGLHNLMTCYDSENGNTFILGRKYLGLERYFHKEIARVQAQWYGQQSGKGVKHPTTSKHIRKLYKRKHDSVTDYLHKVTRYLAEYCREQGITCVVTGDIRNIRREKDLGHRTNQKFHSLPYNRIYIMXLFMRSLTRKNFHRTDMNWLLIWGFITL

SEQ ID NO: 59267 - protein, 461 aa, unknown
  TnpB Polypeptide
MERYCAAVRWSFTRILAGLKTQDIRQAVQGRFNLNSRQANDAVYDAQSTIKSQHELIKLHYENAKAKTQYTEKRIAEAKSPAKITNLQRRLDKEHRQLAKWQRYLETNTFPPVVFGGKKLFLERCKGNITKEAWREARSNRYLSRGDKAKGGNLNTRIYAADDKLYLDLAAEQVQTEKSVRYNRITVPIYLAQKPSQKTGRVNGINYRQMVLEYLKTGNAYQVEILRRDGKYYFHVTIEEETPVPYSYKGAIGVDTNPDGLGVALADCLGQYRGSAWLGQGEWTYAGTNRRDNLIGEMVSSVVLQAKEKGYALAVEDLKLKNDKSVTAKFNRMSQGFVWSRFLKSVDRRAAREGVPIIKVKPAFTSVIGILKYQHMDGMATHASAGYVIARRGLGFDHEKIPKLLLDKLVQKKPEFKQLSNWKQWSAIKKAVLAKIKKLTKRKVNSLVFWPVHRKNVLGIG

SEQ ID NO: 59268 - protein, 491 aa, unknown
  TnpB Polypeptide
LRVFPTENEEKKLLQETAQHRWYYNAYLDIFDIDKHMKNVHEALSHNEEIKAKNTETIGKNKEIAIANKKILQENKKNDENKEPIPRIPLEKRLFAPQISWRTMQTELKHYVYQEKLDGNMRYCEFVRSETKNKKYPAPTWIEDSNKNQVDPKTHNRVIRGAVYNFVSNLNSAVSNYFNGNIDSFNMNWKTSKGKHEFVQFTDCRYPPFYRDLQGKYCYRLPEGAAKRRTSITWNELLLIHKKSGISVVQDKQTKAWYACLPVERNWLPPNDHRSENQRNIIRGEAIGLDPGMRKFLTGISTTGELIFYGDKAYKEIIPLLFKISKIEAILRKHRKKENILNDVEVQENCKLKQRLWERVKNLVEDLHWKCITSLVLHYEYIFLGDFKVKDCCKKKEGQKNLAGIVKRVLLQYSFYKFKQRLEYMCEKHGCKLILVHEALTTKTCSSCGSIKEQGKSETYNCSACNTSFDRDENSARNILIKGMTMLTGNY

SEQ ID NO: 59269 - protein, 507 aa, unknown
  TnpB Polypeptide
VAENYRTYQSRISVSPEGDDLLSSYALLFGKAEKTLFAKLESSKNLTPLKREFIKQFGLTARQFNSISASLNGRLASIKERRPGLIAEAERRIKKAKRVLKGTTDPAQLHQKKRKLAILQSRLDRLVKDHLSGKVRLCFGSNELFRKQFHLKDNGYASHNEWLKEWQASRNKQFFVIGSKDETAGCQSCVATIAENGSIALRIRLPNVLVTKHLILKNICFAYGHDTITSAIGRNLSDNKDNWQAINYRFLKDDKGWRVFVSVAISKVQVISRKDIGVIGVDINANHLAITETDRFGNPVEYFPIPCVTYGKTLEQRRAIIGDAVCQAVAFAVCRSKPLVIERLKFQAKKAVLEGECPRYARMLSAMAYTLIQTIIRARAFDTGIEVHEVNPAYTSVIGQYKFRTRYGMSGHNASALVIGRRFFGFGETLPSQLQVTLPLSVRNRSRHVWSQWAVVSRKALAAPAAHMRSGNSRSLPSPVFDKARLVTIPPVAGEIPACESSSALFG

SEQ ID NO: 59270 - protein, 379 aa, Bacteroidia sp.
MMTYTYKLYRTKRTAKLDAMLREACFVWNHALALQKRHYFLYGKYVSCSKMKAHFAKRVRRCLLHSQTVQEILERLDLSYGRFFKHLSRRPPKFRKAREFSSLVYKQGGFKLNANVLVINSINQHFQFSFSRPYEGKVRQIRIRRSRLGEYYLYVVTDAVAGSLAHGKSLEGASVGMDFGLKTYLTLSDGTRIRNPLFLKSGLNELRRKSRALSRCGKDSNHRRERRKDLARCHERIRNRRDDWQWKTCHELCRRYGTICIEDLSLLGMTRLWGRKVNDLAFGAFVQKLEHVASKYGTEVVKVDRYYPSSKTCSVCQYVNEHLSLRDRSWTCPCCGTSHDRDLNASINILRQGIASSGSIRKTVLARQGALATGESPAF

SEQ ID NO: 59271 - protein, 507 aa, unknown
  TnpB Polypeptide
MQRLQAFKYELIPDGQQARQMRRFAGSCRFVFNKALALQKERYERGEKKLGYAGLCKLLTEWKTQAEMLWLSETPSQALQQALKNLERAYKNFFEKRADFPRFKKKGQSDSFRYPQGIKLDQGNSRVFLPKLGWIRYRNSRDVLGEVRSATVSQSGGKWFVSILTERTVEKPIPQGGAVGIDVGIARFATLSDGSFVEPLNSFRKHEARLRRYLDVTPTHYAERFGCWLKLENLQRTGSFKFRGAYNALAQFSPQQRERGVLTFSAGNHAQAIALAARLLDIPALVVMPEDAAVSKMAATRAYGAQVVTYNRFTEDREAISRQIAQERGMTLVPPSEHAHVIAGQGTAALELLQEVPRLHYLFVAVGGGGLLAGSTLGVQAQGGNCEVYGVEPETANDAQQSLRSGHIVTITQPRTIADGARTTAMSTLAFGIIRQHAEGIVTANDMQLMHAMRFFAERMKIVVEPTGALSFAGAQHGGVDMRGKRVGIIISGGNVDLARYARFLAD

SEQ ID NO: 59272 - protein, 289 aa, Hydrogenibacillus sp.
VIHQALRDVAAHRDVRTFRVLWPSFNNQNLRLEKVGDFWTAAFPTQAGRVRVPLAVTRKQAALLERLGRDVRQGTANPYEKRGQWFLALSVTLPVEEVKTLPADKIAGIDMGLRYLAVVNCEGETLFFHGNQAAYIRRRYHALRKRMGKAKALNAIRQMKDKEARWMKDQDHKISRAIVDWCLARGVSTIRMEKLEGIRRRKTRKRDFGRSLHSWSFYRLQPFIAYKARLTGIRVEWVNPCEPEGYQPDVPAVRALRKREPKRHSVPVPEGRRQSPRGRCRCLEREPRD

SEQ ID NO: 59273 - protein, 315 aa, Escherichia sp.
  misc_feature (147)..(147): Xaa can be any naturally occurring amino acid
VKRLQAFKFQLRPGGQQEREMRRFAGACRFVFNRALARQNENHEVGNKYIPYGKMASWLVEWKNATETQWLKDAPSQPLQQSLKDLERAYKNFFQNRAAFPRFKKRGQNDVFRYPQGVKLDQENSRIFLPKLGWMRYRNSRQVTGVXIQRLHSCIANIRRDYLHKVTTAVSKNHAMIVIEDLKVSNMSKSAAGTVSQPGRNVRAKSGLNRSILDQGWYEMRRQLEYKQLWRGGQVLAVPPAYTSQRCAYCGHTAKENRLSQSKFRCQVCGYTANADVNGARNILAAGHAVLACGEMVQSGRPLKQEPTEMIQATA

SEQ ID NO: 59274 - protein, 389 aa, unknown
  TnpB Polypeptide
MFKAFKYRIYPSNPQKELITKHIGSSRFVYNLALETKNAAYISAKHNYSAFDLIKQLPELKKELTWLKEVNSQSLQQSIQNMDIAFKKFFKGAGFPKFKSKRDRQSFSIPQNVLVENNLLIIPKFKEGIKISLHRPTEGIIKSATISVTPTGKYFVSILCDTNTEIPTKAPITENTTIGIDLGIENFAITSEGEVFENPKYLRKAQSKLKYVQRKYSKNKGKRTKQRLALLHEKVVNKRKDFLHKLSSKLISENQTIALETLAVKNMVKNHNLAQAISDVSWSTFVTMLEYKADWYGKNILRIGQFAPSSKTCSCGVINKDLKLSDREWTCKSCGTTHDRDILAACNIKSFALKNIFSGEHTLKNQDELPRLRGVLTPEAQPIGSAVGG

SEQ ID NO: 59275 - protein, 369 aa, unknown
  TnpB Polypeptide
MLKSIKYELKPTKSQVQKLNQGLGNCRFVYNWALDRKIKAYSKDKTSLSCFDLMKELTQIKKEEDFEWLNLSGSQQLQQSVSNLDKAFSNFFKAKKGFPKFKSKHNKQSFRIPQNVKVDCENYKFFVPKIGWIKFYKDKHIEGVIKFATISKTPTNRYFVSITFETQKKRKYGEGVVGIDLGIKNLVITSEGEVFENQKYLKQNLAKLRVEQRSLQRKFKKGVKEQSKNYYKQKLKVAKLHEKISNQRKDGLHKITTYLADTYETICIEDLSVENMIKNRNLSLAISDMGWGMFRRMLEYKSKDLRVIGRFEPSSQTCNVCGDRNKDLKLSDRKWTCKNGHILDRDENAALNIKNWGLRASTLNVNVSH

SEQ ID NO: 59276 - protein, 400 aa, unknown
  TnpB Polypeptide
MKMINKTYKFRIYPTVEQEILLVKHFGCTRYVYNHFLNERKEQYQVDKKSDNYYKQAATLTKLKKEEDTKWLKEVNSQTLQFALRSLDTAFLNFFRGNAQFPKFKSRKHKNTFTIPQFGKLEDGKIIIPKFKDDIKVKLHREVKGKIGKMNITKTPTGKYYISIFTEQEVEELPKTNKQVGIDLGLKDFVITSDNKKFKNNRYTKKYAKQLKKAQQHLSRKQKGSNGFEKQKLKVARIHEKIASCRLDTLHKVSKKLVETYDLISVEDLNVKGMIKNHKLSKHIADASWGNFVTLLQYKCNWYGKELVKVNRFYPSSKTCGDCGWINRELKLSDREWACKSCGVVHDRDLNASRNILKEGLKIISGGTLDNTDGDPNKTSVKKHKSVKSEAQPISSAVGG

SEQ ID NO: 59277 - protein, 359 aa, unknown
  TnpB Polypeptide
MIKTYTYKVYNNEKAEHKFNKWLGVTRCVFNLAKETKEISYKCGVSLTGYDLAKQLTECKKEFSWLKEVNAQTLQETIERLDASFKNFFSKRAKYPKWAKKRNWKSFGFKQGIRQTEKGFYLPKFGNIKVHNYKRIEHEIKTARLVKKADGIYLHITIEIPNKAYCNNENQVAIDMGIKYFLVTSDGEFIDNPRFLQKQLKKLRVEQRKLSRKKKFSNRWKKQVGVIGRLHKKVVDCRKDFLHKQSTYLATTYGNIAIENLMISKMIVGNYSKHISDVSWGAFFEMLKYKANNLVKVNPAYSSQECSKCSHTCKENRITQSLFKCVKCGHEANADLDAAKIIEGRAFPNNRERRTLVQA

SEQ ID NO: 59278 - protein, 465 aa, Scytonema sp.
VSQLYKTIPLKSNFNDEEKAFWVNQCEHANSLVNSAIYHARQTHYNKLEQLEEAFTTYWRGDELRYGWKTYKCSTTYPELDKSLKEISHYKAMAAQSAQQTLKSVGESITSYNRLVDAYYKGEVDKPSLPKYRKRGGLAAVTFPRQALNYKDGCFYPSISRDTKPHLLTEIFLQVPDFIDSDWVKEVTIRPCLGEFIIDWVIDDGKDPIKVNPNLDYSHAWSIDHGGTNWLTAVSTRGKSFIIDGRKLKAMNQGYCRLVAKYKAGKSDFYWDANLDRVQRKRNNQMRDAINKAARFIVNRCLNDKIGNIIIGWNDGHKVGSEMGKVNNQNFVPIPTGRLIARLKQLACEYGIVVTVTEEAYTSKASFLDGDSLHKFGEKPACWKPSGRRVERGLYKTASGLLINADANGAANIMRKVATQLGLCLVEVGRAVLTTPQRYDLFTRLDKSYRRRSADGLLALGAATV

SEQ ID NO: 59279 - protein, 418 aa, Okeania sp.
MVEKAYKFRFYPTPEQENLLRRTLGCVRLIYNKALAARTQAWYENKERVGYKQTSAMLTNWKKQEDLDFLTEVSSVPLQQGLRHLQTAFTNFFSGRAKYPNFKKKRNGGSAEFTKSAFKWKDGQVYLAKCAEPLPIRWSRQIPQSCVPSTITVKLDPSGRWSVSLRVNDPRDLKLNPVSKQVGIDLGITSLVTTSDGEKVTNPKNINKLHKKLRLAQKSLSRKTKGSNNYQKARLILAKIYAKIKDSRLDYIHKLTTQLIRENQTIVVEDLVVKNMVKNHKLARAISDASWSELVRQLEYKAEWYGRKLIKIDRYFPSSKGCSNCGHVVEKLSLNIREWDCPECGSHHDRDINASINILRMGTRVGVRRKGTPTKKAAGLAVSVCGATIRPSGSKSRKAGAKKQKAPNSDVKESHAVS

SEQ ID NO: 59280 - protein, 408 aa, unknown
  TnpB Polypeptide
MEVVRNIQIKLDVSDEDYEVLDETFEQFRQAAQHVADHGWNDNPYEITDAKNTLHDETYSDVRDKLSLQSSLVQSARNLAATALGNCKDRITEDGEKASKPEFKGTVVVYNGRTITYNDDHVSLATTDKRVTAEYVTPVNDEGTPFEDYWTDKWEKGEATLHKRDGTYYLHVAVKRDVEPDSSDEESENGVVLGVDLNVDGYLAVTSTGAFLGNADYLNHKRDEYERRRGNLQQTGTRSAHLTIKSIGSRFARWSTDYLHRVSKTLVREAVENDCTAIAFENLEHIRERISNASKFQQWAFRELQRHVEYKAEEYGIDVDDVAPAYTSQRCSHGECGFTHEDNRDGDEFECLKCGKQLHSDYNAARNVGWRLVQHWLKSGAERATSQLALKSGTVNANGRFRPTVLRS

SEQ ID NO: 59281 - protein, 310 aa, unknown
  TnpB Polypeptide
MLVHRAYRYELDPNNSQRSSLLQHAGVFRFTYNWGLEQRIALFKKNQGAARFTDAMKQHKLLTSLKKTHFPWMYECSKCAPQEASRDLQRAFNNFCRGMKTGKRVGFPRFKKRGVNDSFRLYGTIRFEGQKIKLPRIGKVRIKEKRKKYHDGKILSVTVRRRADRWFVSISVEEEIPDPKPIEGKAVGVDLGIRTLATLSDGTIFLNPQALGVRLNKLRKLSKNLSKKRSGSNNHEKDKLRLSKMHLKIFNIRQDALHKLTTYLAKNHSTIVIEDLHVSGLMKNRRLARAIADVGMFEFRRQLRYKCRWY

SEQ ID NO: 59282 - protein, 366 aa, unknown
  TnpB Polypeptide
MLRSGGDVWAALIELNEHRFRRHARPLLNYQELCREVAGVQVGELSVPALRSVVRAYADAAMETAKRKRRGERARYPRRRKALVPLRYYAGTFCLEGRRVRLSVVRGGPELWLRLSRPVPYAPDQVRSVTLLVEAGRLVLDVTAEVPVETDEGHRQAVAGVDLGIIHPFAVASGSDALLVSGRAVRAEERLHLADTKARSKKMAKKTPRRGQRGSRRWRKLRDAQRKAESRHLHRVRQMHHEAAKETVAWAKRHGVGTLVVGDPKGIARGGAGRHHNRRVANTWRRGHLLGALTDKAQLAGIDVVRVDERGTHDQAQRTPLCLQQLRLSRAPRPGRCPQHRRSWRRNHDDRGRRHAPPSRLGAGPT

SEQ ID NO: 59283 - protein, 421 aa, Streptomyces sp.
  misc_feature (360)..(363): Xaa can be any naturally occurring amino acid
SVPVGQKGSVKAPGGYHGKREWFAKSRRLHVLEDRLQAVRADRETGVVRVVRGSKRLLNTRHHLDASQLTEEQWRARWLAGRRFLAADGESGKRYGNETIRVTADGEVSVKLPAPLAHLANAPHGRYVLTGRVVFAHRGEQWADRITANRAVAYRIHEDTGRGRWYLTASWTIPPAQTMPLEAARAGGLAGVDTNADHLAVWRLDPHGNPVGAPLRFDYDLSGTADHRDAQVRHALIRLLHWAKRHHLAIAVEDLDFQAEKSREKHGRQKRFRKLISGLPTSRLRARLVSMAAELGIPVIAVDPAYTSRLGAHHWQKPLTSKNKKTTRHHAAAVAIGRRALGHPIRRRTAPPPAHRSDEXXXXAAPVAPGREGTRPRIPGPRTRSVRAGCGANAVDQNAQHRTGRSAEHGSWEQDSPPLSL

SEQ ID NO: 59284 - protein, 481 aa, unknown
  TnpB Polypeptide
LAQEKLFEQLKKNHLTGKRRKQLKIKWKESREGNLYSRGDKTKQGNLNLRFEWINDKLYLRINTGDRQYIYAKVIRSVKREKDKWIEFMFMLENAYKYGVWFPYSVRLKVKNGNVYAFISAEEKLPPITIKKDNGIIGIDINAYPFHLALAFTNKDGNLEKYQSISLNELLEVNSEKRQYLEWQIAHQIIEIAKKENKAIAIENLDKLPKGKRGDGFAKLRQKLQKWIYKRLLNKMEITARRNGIEIRKVNPAYTSLIGKLKYAPQFNIDKDIAAAFVIARRGLGYKEKLPKNYKGLLNDKDFLLFSEASIEDKIAKLKKEIKEEKNQYKRNKLKSKLSKLRKELKALQKHLSFVIESEKSKSVSQQPVNQRKEQVRGLPLGRHKNWQVLFTAFAFSCLESYRDFSPLKRVMISRDWARMVNRLVPVLGAGTTSMPRFMALPKYRLLGSEVSEMAEYKYPNSSCTKQYTVLYSLIDQVNYP

SEQ ID NO: 59285 - protein, 259 aa, unknown
  TnpB Polypeptide
VLSLESENFAADNTDMPNICAIDFGVSNFAAVVCNDGSSMLYKGGAVLSECQWFHKKRAKAVSIITKGHEHMHASSRYLSALSRHHADFIKDQCHKISRSIINYCMEHHAGTLVLGENKRWKQDCDMGSQNNQNFVSMPTGLLKQMIIYKASDAGIKTIMQEESYTSQADITAMDYIPVYGVDAENAVFSGRRISRSLYRCFNGMIINADCNGAANIMRKAITDAWNSITDFSFLASPEVSGFHELNPLSISVKGIAAA

SEQ ID NO: 59286 - protein, 360 aa, Streptomyces sp.
MFRDMAWMACPYDLRMQLRYAFRVYPDAGQRIALARAFGCARVVFFASLKGTREGPKVGAPRFKSRKDARQSIRFTANARWSIRDGGRLCLPKIGAVKVKWSRTLPSTPSSVTVIRDAAGRYFASFVVDTDPDADRARMPATDRTVGVDLGLTHFAVLSDGTKIDSPRFLRRAEKKLKKTQRELSRKQKGSKNRDKARLKVARAHAKIGDARREFHHELSTKLISENQGIAVEDLSVAGLARTRLAKSVHDAGWSSFIGMLKYKAQRYGRTLVTIGRFEPTSQTCSTCGVKDGPKPLNVREWTCAACGTVHDRDHNAALNVKQAAGLAASACGAPVRPGAIPAQRDEAGSHGFPTDARAA

SEQ ID NO: 59287 - protein, 399 aa, Cyanobacteria sp.
VFVYEYRVNPKPQQITAIDEAIRTAQFVRNKVLRYWMDNRGVGKTEMFRYNTLLRKQFKFVDELNCHACQTAVERVLRAVNRFYSNCQQQIPGKKGYPKFKKDTRSVEYKVSGWKLSENRKHITFTDKKGIGSLKLRGSRDLNFSQIEQIKRVRILRRADGYYVQFLVQLDPRDTVKPLIPSQKAVGIDLGIKYFLADSQGNIEPNPQFYRQGERRLSRLNRQKSKKYRKGQPQSQNYHKARQRYARKHLKVSRQREEFVKRVALRFIKSNDLVAYEDLNVKGMVKNRRLAKSISDAGWSKFRQWLDYFGYKYGKITIAVAPHNTSKNCSNCGNKVQKSLSNRTHVCPHCGFIEDRDINAAINILQKGLSTVGHTESYQLGESDPLVSLEQSCGVTIGL

SEQ ID NO: 59288 - protein, 458 aa, Escherichia sp.
  misc_feature (156)..(159): Xaa can be any naturally occurring amino acid
  misc_feature (279)..(282): Xaa can be any naturally occurring amino acid
VKRLQAFKFQLRPGGQQEREMRRFAGACRFVFNRALARQNENHEAGNKYIPYGKMASWLVEWKNATETQWLKDAPSQPLQQSLKDLERAYKNFFQKRAAFPRFKKRGQNDAFRYPQGVKLDQENSRIFLPTLGWMRYRNSRQVTGVVKNVTVSQSXXXXLGWMRYRNSRQVTGVVKNVTVSQSCGKWYISIQTESEVSTPVHPSASMVGLDAGVAKLATLSDGTVFEPVNSFQKNQKKLARLQRQLSRKVKFSNNWQKQERKIQRLHSRIANIRRDYLXXXXNWQKQKRKIQRLHSCIANIRRDYLHKVTTAVSKNHAMIVIEDLKVSNMSKSAAGTVSQPGRNVRAKSGLNRSILDQGWYEMRRQLAYKQLWRGGQVLAVPPAYTSQRCAYCGHTAKENRLSQSKFRCQVCGYTANADVNGARNILAAGHAVLACGEMVQSGRPLKQEPTEMIQATA

SEQ ID NO: 59289 - protein, 427 aa, unknown
  TnpB Polypeptide
MNLNEILGKITSDTEHSKELFNALPVKSPCFSLRDVDGSCFCWAKNFYVSSKYDIMWWMKTYKYKLSHQSNTIQLGNLLDDLHQVHVHVIRLQRRYYRLFGKYISAYTMNAHIVKLKKRTKPHWKQLPSQVVQDVVFRIDKGYQKFFQNIKDRQAGKTARKVGRPHIKPRHKYSSMTFTQAGYKIENNRIYIGCLKKWFTFWKHRDWASEIKTATIKRDYVGDYHLILACDNSEPSENLPLTGNRVGVDFGLKTFLTLSDGIKIKSPEFYKKSLNAIRSAHKALSRKQYLSHGWYKAKHHLCRVYKKTADQRRDWFFKLALRLVHKYDHIAIESLNLDAMKRLWGRKVSDYAFGEFALILNWTCNKYGKVLVKAGKWQPTTKSCHHCGYRNPDMQLTDRYWTCQACHTHHDRDINAAINILQAGVPA

SEQ ID NO: 59290 - protein, 410 aa, Methylotenera sp.
MKRIQAYKFELMPNGSQIRAMSQYAGACRFVYNKALGWQNDQYQADNTFKFSYTKIANLLPHWKEELTWLKDAPSQSLQQSLKNLESSFRNFFVKRAAFPRFKKKGMNDSFRIPQGFKIEQHNNRLFLPKLGWVRYRNSREIIGVVKNIMVTQKCGKWYVSIQSELEVEQPVHSSKTAVGIDVGVARFATLSDGQVFLAINSFKQKQVRLARYQRVLSRNVKFSNNWKKQQHKITKLHSTIANIRKDYLHKTTTNISQNHAMIVIEDLKVRNMTKSAKGTLENKGSNVKAKSGLNRSILDQGWYEFRRQIEYKQQWLGGDVLAVPPHYTSQRCSCCGTVSKDNRKTQARFACISCDVEISADLNAARNILAAGHAVLACGEAVQSDPSVKHEPTEGIRNSSRIPVGISAL

SEQ ID NO: 59291 - protein, 426 aa, Proteobacteria sp.
MVTVPPWCCAGFRMKILRAYKTELAPDNVQRTMFLRHAGAARWAYNWGLRQKIDAYKETGKSPSAIDLHRKLNKLKDMPKEDGGVPWMRQSSKCAPQEALRDLDKAFGNFFRRCKQGAARKGFPRFKGRKRGIGGFRLTGAVRATETHIQLPRIGEVRLKEHGYLPSGAKVLSAAVSEQAGRWFVSLQVEQQVPDPAPRPEHVVGVDVGVKALAVTSDGEVFDNPKALKAGQQRLRILQKAVSRKVKGSKNRKKAVAKVRRQHYRISNIRRDCLHKTSSAITKLASTVVLETLNVGGMLKNRRLSKAVSDASMAELHRQIEYKARWQGVVVLKADRWFASSKMCSGCGHIKQDLTLGERVFGCEACGEVIDRDLNATINLKNLAGSSPVSACRPGGAGLGRKTQVKPPVGQELSADRGHVIPIGSV

SEQ ID NO: 59292 - protein, 159 aa, Salmonella sp.
ILKLSLGRQRKSDGRTHSKGTAGSSEKIAEACPGNRPQTADPHPGWHRIETFTRYKAKAEGKVCFRVPAPYTSQECAACGYTHPDNRRTQDAIVCLSCGYSDNADRNATRIIKKRAIDAILHLGTGLTNDNELVTGRGEQRKTPRPQWSTKRQKRKRER

SEQ ID NO: 59293 - protein, 402 aa, Escherichia sp.
VKRLQAFKFQLRPGGQQEREMRRFAGACRFVFNRALALQNENHEAGNKYIPYGKMASWLVEWKNATETQWLKDAPSQPLQQSLKDLERAYKNFFRKRAAFPRFKKRGQNDAFRYPQGVKLDQENSRIFLPKLGWMRNRNSRQVTGVVKNVTASQSCGKWYISIQTENEVSTPVHPSALMVGLDAGVAKLATLSDGTVFGPVNSFQKNQKTLARLQRQLSRKVKFSNNWQKQKRKIQRLHSCIANIRRDYLHKVTTTVSKNHAMIVIEDLKVSNMSKSAAGTVSQPGRNVRAKSGLNRSILDQGWYEMRRQLEYKQLWRGGQVLAVPPAYTSQRCACCGHTAKENRLSQSKFRCQACGYTANADVNGARNILAAGHAVLACGEMVQSGRPLKQEPTEMIQATA

SEQ ID NO: 59294 - protein, 384 aa, Erysipelotrichia sp.
MNKAIKYRLYPTVSQQEMFAKTFGCCRKIWNLMLEDKINHYKQTKKKLSTTPAQYKKEYPYLKEVDSLTLANVQLHLQTAYKNFFRDKKIGFPKYKSSKRSRRTYTTNHVNGNIVIMDHRIKLPKIGIVKAKIHRSPNTDWVLKSVTVSQDNDGKFYASVLYENEKTMTKTKVKDTVLGLDYKSDGLYTDSNGKVCGSPKCYRKSQKKLAKLQRQLSRKEKDSNNRNKARIKVAKLQKHTANQRLDFLHKESTRIANEVDVVCVETLDMKNISNKGFGNGKATLDNGYGLFLNLLEYKLNDRGKYFIKVDKWYPSSQLCSCCGNKQKLELQTRTYKCGCGLIIDRDYNAALNIKKEGRKTTRSSLNPCYSRLGTSQTYTLVDSV

SEQ ID NO: 59295 - protein, 379 aa, Anoxybacillus sp.
MIRSIKVRLEPNNKQRTKLFGSAGVARWAYNWTLEQQENNYKNGDKFIKDGDLRKRLTALKQNDPNYQWLYDYSNNITKQAIKDACKAYKDFFKGKTKKPRFKSKKRSKPSFYQDTEKIKFSDTHVYIEKVGWVRLSERGEIPTNTKYYNPRITFDGVHWYVSVGYDVPKPSVALHSHTLGIDVGVQNLAVCSDGRVFPSINKTKEIKKLEKRLRRLQRKCSRKYEMNKVQEKGGVVRYVKTRNITKLEKQMQKIRIRLEHKRMDYENKVVNELVRTKPSRIVMEHLNIRGMMKNRHLSNAIQQQRLYTFKKKIKHKCEWYGIEFVEADWWYPSSKTCHSCGYLKKTLKLSERIFRCDNCGLEIDRDLNASINLSTYSA

SEQ ID NO: 59296 - protein, 314 aa, unknown
  TnpB Polypeptide
MNASAALTSYLNGNKGKPNFKKKSKDNSFYLIGTFKVERHRIFLPTLKWVRLKEYGYIPDQITSVTVSVKNGRYYISCLSKAETDERITTSGEGIGIDFGLKDQFITKDQVIPSVNKSKRVRKLEKKLHQKQRSLSRRYESNMTDKVYYKSGKKKGQLKSFKWIRPLHECKNLQKQQLVVNKLYERLFRIRTDYNQKALQSILKRKPSFIVIEDLNVKGLMKNKHLSKAISQAQWYQSRIFLQQQCKKLGIELRLVSRFYPSSKLCSCCGYKKVDLKLKDRSWECPDCHTIHDRDQNAAINLERCANYTVLTAV

SEQ ID NO: 59297 - protein, 275 aa, unknown
  TnpB Polypeptide
MQYSKDELQKKAIGVDRGVARPVQSSHREAPYGPTEKQLEKIARRENHRKRLQRRLAKAKKGSNNRRKVKRRLGRTYQYQRNVLEDFAHQTSHALVSLDDTWLIVLEALKIKNMVKHPAPKYDEETGRPLKNGASAHAGLADSILKSGWGKVGTYLKYKALKAGKLVLEVDPKNTSRRCPVCGFIDPKNRPLQAVFHCVRCGFDDNADHAAAINIRDRGIDMLLSGLYKPKTRKKLLRTKKAKPSSVKLGPDRADVMPVELTVPDKTSILSACRR

SEQ ID NO: 59298 - protein, 446 aa, Streptomyces sp.
VQFQLYVIFRCERLRSIRTLIDMKLRYNYRAYPDASQRRALAGAFGCARVVWNDCLRDRKEAHAAGLPYVKSGDLSKLRITQAKRTEERAWLADVSAVILQQSLRDLDSAYKKFFDSLEGERHGRKVGPPRYKSKKDTRQSIRLTTSAFSLKENGTVYVAKVGNLKVKWSRRLPAAPTSLTVTKDSCGRYFLSFVVDTEPDILPDLETESGIDLGLSAFAVLSDGTKIASPRFLRRAEKKLKRLGRELSRKVKGSKNRAKARMKVARQHAKVAYRRRDWHHKASTQIIRDNQAVYVEDLAVSGLCRTRLAKSVHDAGWSAFVGMLEYKAALHGRTFVKVGRAFPSSQVCSACGFRDGPKPLHVRQWTCGGCGAVHDRDHNAARNVLFEGRRIVAAGRAETLNACGALVRRAHVPAQRGEAGSPRKGQPTQAGIPGLQAREHVNSSP

SEQ ID NO: 59299 - protein, 490 aa, unknown
  TnpB Polypeptide
MKFNSADYCPRPPLNLFVDKPPSFKAGMNRPDTYPHPSPRLKNTDDFSSYSMTQMLLTHKIRISPTAIQAQVLWTLSEKCRLLYNFALAERRHQWTTNRTKPKTEHSYITYIQQQNTLPALKTQHPEYAWVYSKVLQMVLRRLDADYKSFYALWRRGDLQARPPRFKGKHYFTTLCYNQSGFFLDINHQRIRFAHRHPSGVELEFALPWLPPLKGRVKQVELFQDRRHRWFVAITCEVAVPPYVDNSRYQAIDVGVINLATAVNQQGKFVQIRNRRADLYWKNKLREVQSRRDHCRKHSKKWYFYQQKWLKMRRKLTNQLRDFQHKMSKVVVTNTRANTFIVGDLAVKVMARKQRASGRRQQDAAARTLYHSLQNTGFLGRFVQFLTYKAKKVGKSVIRIDEAQTTKRCCVCGTVRNRQLSERVIQCNCGTPLDRDQNAAVNLMVRFLLQQPPVNGEPLQAFLHGLHRHTALPQVPRGVDSMEAPAVMQG

SEQ ID NO: 59300 - protein, 438 aa, Shigella sp.
  misc_feature (398)..(401): Xaa can be any naturally occurring amino acid
VKRLQAFKFQLRPGGQQEREMRRFAGACRFVFNRALARQNENHEAGNKYIPYGKMASWLVEWKNATETQWLKDAPSQPLQQSLKDLERAYKNFFQNRAAFPRFKKRGQNDVFRYPQGVKLDQENSRIFLPKLGWMRYRNSRQVTGVVKNVTVSQSCGKWYISIQTESEVSTPVHPSASMVGLDAGVAKLATLSDGTVFEPVNSFQKNQKKLARLQRQLSRKVKFSNNWQKQKRKIQRLHSCIANIRRDYLHKVTTTVSKNHAMIVIEDLKVSNMSKSAAGTVSQPGRNVRAKSGLNRSILDQGWYEMHRQLEYKQLWRGGQVLAVPPAYTSQRCAYCGHTAKENRLSQSKFRCQVCGYTANADVNGARNILAAGHAVLACGEMVQSGRPLKQEPTEMXXXXTTGRSRNAKYSDCIPVSQISAGTTFTKSQRPSAKTTQ

SEQ ID NO: 59301 - protein, 532 aa, Limnohabitans sp.
MSFMAIKQPILKPSLLGYQYPEGGRLCGSGFLSVGVLCDFMRESLIYPKHPAINLTLAAGEPQDLQRKVSFRLYPNASELLALNKTATAHCKIYNTLLETSRLRYKAGLPAYTRTTVCEAVKAIRNAHPWIEASTTAQSAQVTGQRLVLAFKNFFDRVAKGQTPGYPRFKSYKKYPGWGYKTYGDGWSLLSQKSKTNAAGRTKYGYGAVRLTDIGNISIRGAARFLGIPKTAEIMRKGDKWYLSVTVNVTQQAIGRVGGNESMAFDWGLATLLTQVVGDPMTGAIKEVDNPRWLKNQIGAIAQVQKTISKLETAAKAKSGKDKHFPVCHQLKLAYARRRSIYGRVARQRGDFYHQLTAKLVGQYGLIVTEELAIKNMTKAPKAKPELDAQGNETGAFLPNGAAAKAGLNRSILDAAPAGLLAKLQYKALEAGTKFLFVPTRKVKPTQRCHQCGGTTKLTMDDRQWTCSCGVEHERDENAARTMLRYAFEGAWWESKDSTGSDKESVGYGQELTGSRKATRNSIEVGSPIWVE

SEQ ID NO: 59302 - protein, 442 aa, Ruminococcus sp.
MKIISSYDVELRKQNILICQTLDIYRSAVSCLIEIYAQTWDELAVIKEPKKRFNTAEHLVHTTKKNQARFDFDLRFPKMPSYLRRAAIQHALGSASSYKTRLELWKETDQKDDRPKLVCGNHAMPIFYRDVMYREDTEEKDGAYLKLYDGHDWKWFRVSLSHTDMEYLRKYWAGKKAAAPVLEKRHRKYFLRFSYTEEVALTKAPVKEQIICSVDLGINTDAVCTIMRSDGTVLGRKFIDFPSEKDRMYRVLGRISRFQRKHGSVQVKSRWAYAKRLNTELGRKIAGAVTGYAEENHADVIVFEYLEIKGKISGRKKQKLHLWRKRDIQKRCEHQAHRRGMRISRICAWNTSRLACDGSGTVVRDLGNHSLCTFQNGKRYNCDLSASYNIGARYFIRELLKPLPVTERSLLEAKVPSVKRRISCVYADLRELFSEMELLRAA

SEQ ID NO: 59303 - protein, 689 aa, unknown
  TnpB Polypeptide
VRDAGLQRTATCRVTRGIDEATGEALAARVLTERVAFLAALVAECGQRVLDAHWDGVSVEMLCTSRAPDGSLLPLQGYKAAAKLWGPAPLPAGVKASSRVGWMGAELAARQLRSAAHRLRTCAVLLAGGLPADCPDVVSGTAMRRRIGRRLDHGDGLPASLFALEPEAPRVPALVPLAVADQQLFTAVAADAEQAAHAALDAGLAGRTQHKAAQQGYARRKQAGVLEADEQPPRRRPTPRQAGAVLVVRLLLPLLARPATATDWSWHRLTVPVPARCQVGVCSPPTLRVTDTATARADVTVTLPAPRPLLGDDERPARVLSVDWGVRRLLSATVVRAVGHPGEDGRGQAAAVDGRPLYVQAGVLQGRARRAGVHRARVQAKADHYQRLAGGLAAHDPRRTGLAALLARAHTELADLQAAQTNLNDQIARLAARWLVEQALAAGCQAIALEDLKTLEHRGLGRRTNERCSLALRGKVAASTRQAACAVGLGVVTVTARGTSALCPRCGHRLRHLRAPGSKAGHAWAWCPACGHSADRDHAAAENVGQRAIAPTAPTVRHKPTRRAGLHPATRTRRGPTPTQAKRRPTPTRPPRTTHHRAALLGPGVGGQAGPAASRPVIPPPNPAGEGHRSAGPGPRRARQAGRMSKMRAAVPPTRLDGLLAAYRTTLRATPILYRAAPWSSAPSGRKKA

SEQ ID NO: 59304 - protein, 234 aa, unknown
  TnpB Polypeptide
MLKAYKYRIYPNIEQQIYIAKACGCSRFIYNQMLANRIEVYEANKDILTPKEMAKLYLTPAKFKKEYEWLKEVDSLALANAQLNLDTAYKNFFRDKSIGFPKFKKKINRISYKTNNQKGTIYIENGYIKLPKLKSMVKIKQHRLFKGEIKSVTVSKNPMGQYFVSVLVDTENIKLPKVDKKIGVDVGLKEFAICSDGYRVPNPKHLRKSEKRLRKLQKDLSGNKRGVLIEIKLG

SEQ ID NO: 59305 - protein, 449 aa, unknown
  TnpB Polypeptide
MMRSRLMASPSNTLRRYFVTKTKWTCILKTQCLPCRIMKRRQAFKYELRPSSQQERQMRRFAGACRFVFNKALALQKERHERGEKKLGYAGLCKMLTEWRNSTETPWLKDAPVHPLQQSLNDLERAYRNFFEKRAGFPRFKKKGVSDSFRYPDPKQIKLDQGNSRIFLPKLGWLRYRNSREVLGTVKNVTVSLSGGKWFVSIQTEREVAQPVPQSTTAVGIDMGIARFATLSDGTFFEPLNSFRRHEKTLRKAQQALSRKVKFSNNWRKAKSRVQRIHARIANARRDFLHKISNTISKNHALVCIEDLQVRNMTKSAAGTLDNPGKNVRVKSGLNKSILDQGWFEFRRQLDYKLAWSGGLLITVPPQNTSRTCPCCGYVSADNRRTQTRFRCMECGFEEHADVVGAINILSRGMQIRGIKGGARPDGLWIEPHERSEAGTRRSVSLEAQ

SEQ ID NO: 59306 - protein, 467 aa, Streptomyces sp.
MHTRTLGRDLRVSAIGLGAMGMSQSYGPNPGDRKNMIAVLRGAVERGVTFFDTAEVYGPYVNEELVGEALAPLRDQVVIATKFGFRIEDGAPAGLNSRPEQIRAVADASLQRLGVNTIDLFYQHRVDPDVPIEDVAGTVGELVQEGKVRCFGLSEASARTIRRAHAVHPVTAVQSEYSLWTRDPEPEVLPTCVALGIGFVPFSPLGKGFLTSRALPSVPSTVTVVKDSAGRYFASFVVETGPEESLPEVSPELGIDLGLGHFAVLSDGTKVGSPRFLRRTEKRLKKAQRALSRKKKGSKNRDKARVRVARAHARVADARREFHHQLSTKLIRENQAVAVEDLAVKGLARTRLAKSVHDAGWSAFVSMLEYKAARYGRTFIRIGRFEPTSQVCSQCGVQDGPKPLHVRVWTCGACGAVLDRDINAAVNVAKAAGLAVSACGAQVRPGILPAPRGEAGTHPTPQPSTAR

SEQ ID NO: 59307 - protein, 220 aa, Acidimicrobiaceae sp.
MPLERTCCEIGIDLGVVNQIATSDGELKKGDHFGSKAQSDLARAQRELATKQRGSNRRRRQVEEVARLHLKIKNQRRNAAHQLSRQLINDYDFIALEDLKITNMVRAPKGKPDPEQSGALLPNGASKKAGLNRSILDAGWGQFISLLSDKAESAGRTVVSVHPRYTSQMCAECHYVDSDNRVSQREFRCRRCGHCDFADINAARNILRAGRALQASACAG

SEQ ID NO: 59308 - protein, 404 aa, Nostoc sp.
VFHLTYEFKLKPTRAQIGIFEDWLEQCRRVYNYALCERKDWIKSRSCRINACSLHSEYIIPADTPRPTYFNQSERLTQAKKKYPELKKVSAQVLQETLKRLENAFMAMWEQKHGFPRFKKPGKMRSFAFSQLGVNPIQKGKIKFPKIGLLKFYQSREIPDSATVKQARIVKRASGWYVMLILQWDVSVPQPTPQGEALGIDVGLTNFIATSSGLTVKRPRFFVDAERKLKLLQQRVSRKRIGSNNWKKAQKKVAKLHEYVARCRKDWHSKLSHQICNNVGMVFVEDLNLVGLSRGMLGKHCLDAGFGQFFKILEQTCFKRGVYFQKVDSRKTSQICPSCGFETGKKELSQRTHVCSNCGYTTDRDVAAAQVVLQRGLAAVGHTVKMLAEGKFVGIPKMQESPSF

SEQ ID NO: 59309 - protein, 400 aa, Okeania sp.
MKARYKYRIYPTPGQKHKLAKLFGCVRVVWNDSLAFSQQKYRLGEKKPTNSELQKQFITSAKKTEEREWLSDVSVVPLQQSLNDLNQAYQNFFTSTKGKRKGKPVRPPKLKTRKSKQTARFTLRGFKLHQDKVYLAKIGKLKIVWSRELPAAPSSVTVIKDSANRYFLSFVVEIQPEILPQTDNSVGIDLGIKTFATLSNGEKIDAPKPLKKRINKYRKLSKSLSKKTIGSKRYDKARLRIAKFHAKLKDTRTDFLHKLSTEIIRDNQTVILEDLNVSGMVKNRKLSRAISDLGWRQFRTFLEGKALKYGRGFRVIDRWLATSQICSCCGFKGGKLDLSIREWECLNCGAKHDRDENAAINILVAGGQSETLNGRGGKRKTTVKEAAAYEMSTRRGATAR

SEQ ID NO: 59310 - protein, 410 aa, Oscillatoriales sp.
MRLVERHIIDKSHSFSKECDDLAWRSKNLYNYCNYLVRQSFVLENTYLDNCQIYHEVKSHESYKALPAKVSNQVLISLHRNWKSFFEAMKEWKQNPGKFLGKPKLPKYKDNLKGRFCVVYEKGAISKPALVKGLVKLSKTSIEFPTKCQNVQQIRIIPQSGQYVIEVVYEIASKLNQLNFQHIAAIDIGVSNLAAVTSNQKGFNPLLINGKPLKALNQHYNKQKAKLQSLLKGKAQTSKRIQQLSAKRNNQVDGYLHKASRLIINYLLPNEIGTLVIGKNDLWKQESSLGRRNNQQFVSIPHAKFVEMLTYKAELVGIKVILTEESYTSKSSFLDNDPIPTYGKKDSALKFSGRRIKRGLYKSAGGTIINADVNGSYNILRKVFPTALVYRDSGRAVRPIRITPNEFKKA

SEQ ID NO: 59311 - protein, 388 aa, Rhodothermaceae sp.
MRRTFKYRLYRSRKNRYLIEQIHVAASIWNHSVALTRRYYRLYGKYPGANRLMKHIAKLRRRNPYWQKLGSQAVQDVIQRLDRAYQRLFSDRAASGRGRKAGRPGFKSRHRYSSFTLKQAGWKYLGGNRLRVGRHNFKFVLSRPLEGEIKTLTIKRDRCGDLWVCFSVVVADVAPSAVGCNGHAVGLDFGLKTFLTTSDGDRYEAPQPLKQSLKEMAKRQRSLSRKLRGSNNRRKARIRVARLHRRIADQRRDWHFKLAHKICDGADVICLEDLNLKGMQAMWGRKVDDLGYGQFVSILRHVAQKRGKTVVQVDRFFASSKTCSDCGALNQTLSLSDREWVCASCGSLHDRDVNAAINIYREGASSLGVGDVRPSTTPPRWGGTAVAA

SEQ ID NO: 59312 - protein, 391 aa, Chromatiaceae sp.
MILAHKIALDPNSTQRTYFAKAAGTARFAYNWGLAEWQAQYQAWKDNPLLAKPNEAALRRQLNSIKREHFPWMLEVTKCAPQQAIMQLGDAFKNFFAGHAKYPRFHKKGINDSFALDNGQFNLNGSRIRLPHLGWVRIRETLRFTGKILSATISRTADRWFVAIVMDTDQTLTRPAENQGVVGVDLGVTTLATLSTGEPVPGPKAHQAALKRIERKVKFSRNWRKAKAKLARLHARIANVRQDATHKLTSDLARRFHTIGIEDLNVSGMVQNRHLARAVADMGFFEFRRQLDYKTAMRGGSVVVADRWFPSSKTCSRCDQHHPEMILGVDTLRCDCGAVISRDLNAAINLAKYAASSAVSACGGEGAGARRKTRVKPAPVKQEVNFVHVCS

SEQ ID NO: 59313 - protein, 365 aa, unknown
  TnpB Polypeptide
MQKGIKFRIYPNREQKNFIHQTLGCCRFIYNRGLAMRKEGYENGEKIGYPQTSAMLTELKKQEEFAFLKAADSIALQQSLRDLDRGFVNFFQKRASYPTFKSKHNRFQSYRTVNQKDNIRIVGRYIKLPKLGFVKIRQSMEVEKINHVIIEHTPAGKYFAVLNVDFEPEPRSNAGGTIGIDVGIKAFYSDSNGNTVSNSRYLERSMRKLIREQRRLSRKQKDSHNREKQRIRVARVYEKVTNQRNDFLQKQSTMLVRENQTICIEDLNVKGMIRNHKLAKSIASVSWAKFFEMLEYKASWYGNEIHRVPTMYPSSQTCSCCGYRDPRIKNLGIRIWECPKCHAVHDRDTNASINILKKGLQMQSA

SEQ ID NO: 59314 - protein, 369 aa, unknown
  TnpB Polypeptide
MKILRAYKYRIYPNQEQEILIQKTFGCVRFVYNQALSYRQELYKTKRKNISKFACEQYMIQVLKQQYEWLREVDKFALSSAIWNMDYAYQKFFKEHAGFPKFKSKHNHRKSYTTKITNNNIAVSFENNKIKLPKLSWIKARIHRKFVGKIKQATVSQNPSGKYFVSVLVEEEHRPLLTTGSTIGLDLGIKDLVITSNGKKYANPKILEKYKKKLSKEQRRMTHKQKSSSNYNKQRIKVARIYEKIHNIRLDYLHKISNEIISENQVIISEDLSISNMMKNHKLAKSISDCGWYELTRQLEYKAKWNERQYIKIGRFIPSSQICNCCGYRYPETKDLSVRAWTCPSCGTKHDRDINAAKNILDEGLKFVV

SEQ ID NO: 59315 - protein, 376 aa, Trichococcus sp.
MYNEAKEVSFMLKAYQFRLHPNQIQKEFFTNCFGSARFVYNQMLADRKEIYETYKDDKELLKSIKPRTYTSFKEEFPFLKEVDNLALANASQNLNKAYKNFFRDKSVGHPKFKTKHKSKASYTTNNQGGNIRIENGNIKLPKIGFVTIKQHRGFDGLIKSCTISMNKAGNYFISILVEQETPEWLPVEHKIGIDLGISDFAVTTNDADESVKHANPKCLYQSEQKVKKAQRALSRKQKGSKNREKARLVLAKKHEKIANQRKDFLHKLSNKITDENQVIVIETLRSSNMMKNHKLAKAIGDVSWSEFCRQLAYKAEWKVRTLIKSDRFYPSTQICSACGHRDGKKALHIRDWTCPACGTTHDRDINASKNLLALAK

SEQ ID NO: 59316 - protein, 367 aa, Bacteroides sp.
MLRAYKYRIYPTEVQKVLFAKTFGCCRFVYNWALNLKITAYKERKETLGNVYLTNLMKSELKAEHEWLSEVNSQSLQSALRNLDTAYTNFFRNTKAVGFPRFKLRKDRQSFLCPQHCRVDFEKGTVTIPKAKDIPTVLHRKFNGTVKTVTVSMTPSGKYFASVLVDTAIQELPATPMQGDTALGIDLGIKSLAVCSDGRTFGNPKNLQRSLDRLKLFQKRLSCKQKGSSNRNKARIRVARLQEHIANSRKDNLHKITYALTHDSQVRTICMEDLNVKGMQLNHRLAQAVGDASFGMFLTLLEYKCGWYGVNLVRIDRFAPSSKTCGKCGYIYKRLKLSERSWTCSECGAHHDRDFNAACNIKEFGLK

SEQ ID NO: 59317 - protein, 433 aa, Haloplanus sp.
MEDVIRTVKVKLDVPEERCDDLHQTKQQFLHCANTTAEWAWRHPNDYCVTSKQKAEQALYDSLRNETELTANLVQKGIRRAIEATKSGVARLKKRENTSQPQFDAWSVVYDKRSATFHRDHVSLSTVNGRVECDYVLPDDAERTPIGEYLLNEDYEFRMSTLQYDRQTESFYLHARMRRTTDQQEQSTTSSSDAKHRTVLGVDLNVDGSLAVTSTGAFIGNADEMNYRRREFEKTRGSMQQAGTRSAHLSIQSMNDREHRWMQYELHRTANRILDEARDHDCTHITFENLTDIRDRMVGAKRFHAWAFRRLFQYVEYKAEMYGIEVEQVSPAYTSQRCSSCGFTHEDNRRSKHQFVCQKCEYELNADYNASKNIARKLLKKLHSGQKSSGGGAPCQCALTSGTLNLNGDYTASVDSTAEGESTDKPTTSVVGH

SEQ ID NO: 59318 - protein, 416 aa, Haloplanus sp.
VAIQVTRTYVGSIQNHRQVCDDLDSLGDSASKIWNIARWTADRVWDEIGEIPDERVLKSYMKSQSCWKDLNAQSSQKVIEELSDAFQSWFDLRQNDPEANPPGYRKHGDTRPKSTVTFKTDGFKHDPEHNRVRLSKGSNLKESWSDFILCEYQTRPDVDLSEVNRVQNVRAVWNGDEWELHFVCKVELEPNDSAGDEVAGIDLGITNIATVAFPDEYVLYPGNSLKEDKHYFSREEYATEGENGPSEKSRWARQKLTDRETHFYHTLTDAIITACVERGVGTLAVSWPEDMRESDWGKTGNKKLHSWAFDRIYQYLAYKGEMRGVEVLKENEWNTSETCSRCGDDTKSNRVERGLYVCTACELVGNADCNGAENMRQKITPSPHGEDRSNGCVAQPSTYLFDRESGTFRTREQAVS

SEQ ID NO: 59319 - protein, 282 aa, Haloplanus sp.
DRNTDTPHAEYLFSDEYETTGAELHRKHSEWQLHIHCKKDVESDVADQATTENGTVLGVDLGVNNLAAASTGTFWTGNEFDHWRQEYEKRRGDLQVCGTRWAHENIQSVGRKEEGRFKQTLHQISNEIVAEARDYGCSVIVFEDLTDIRERTGASWGHKWAFNRLYEYVEYKAVECGIDVEQVDPENTSRRCSHCGFTHPDNRGSERFKCQKCGCENHADYNAAKNIGLRYLRRNQTGGDEGAPLGVRLNSGTLNVNGEYESPADVSARTGVHAESHRFSGG

SEQ ID NO: 59320 - protein, 387 aa, unknown
  TnpB Polypeptide
MQRAYRFRLYPTQEQDDLLNVLRYQSCVLYNEALDVRKKAYRTKGQTLNFVSLWRRFKADRKERPEDFGLLNATQVQQLLRRQDKAMQAFFRRLKKPRTDDKKPGFPRFKPFKRFRSLEYRHGDGCKLSDDKLYIQHVGLIKVKRHRDIPESMLRQVVLTQRLGRWYVCFLGDDGQAPKPLKSGLAVGIDMGLNALLALSDGTLIENPRWLKRSLAKLRVAQRALARKKKGSHRFYQSKYEVARLHDKIKQQRTDFWHRRTHKLTQDYALIAIEDLPLAFMTQSKTLARSAADAGLGMFKAMVGYKAESAGCQLVAIDPKNTSQQCSRCDAWVRKSLAVRMHTCSCGCELNRDVNAARNILKRARCWPTDANVEEGISSVVRESCLL

SEQ ID NO: 59321 - protein, 370 aa, Bacillus sp.
MTKQNKAYKFRLYPTGDQAHLIRKTFGCVRFVYNRMLAERKEAYEKHKDDKDQLKKQNLPTPAKYKAEFEWLKEVDSLALANAQLNLQIAYKNFFRGQNDFPTFKSKKDRKSYTTNVVNGNIMLLNGHIKLPKLKMVRIKQHREIPQGHIIKSCTISMTPTGKYYVSILTEYEKEIVQKEVETVVGLDFAMDQLYVSSEDERANYPKFYREMLDRLAKAQRVLSRRTKGSGRWNKQRIRVAKLHEKVANQRKNFLHHKSKELATHFDVVAIEDLNMKGMSQALHFGKSVADNAWGMFTTFLAYKLNEQGKQLVKIDKWFPSTKTCSSCGNVKNMSLSERIYTCICGVNIDRDYNAAINIKNEAIRLLVLA

SEQ ID NO: 59322 - protein, 399 aa, unknown
  TnpB Polypeptide
MMWRVYKYRIYPKAWQGRLMKSHLSALCELYNTLRDLKIGLWKREHVSLSRTDLRLKALEFRREDERLQEIHSQVVQSVATRLARSFKNYFEGRARFPKHKHPKKYLSLTYPQSGFKLCNNKLHLSGIGDVRIFMHRPMEGQVKTLTVKYNAGQWYVVFACKIPDREKTPIEQIPDGRIKGGDMGLIKFLTLSDGATIEPPKFLRKSEEKIKRLQRVMSRAKKGSRNRRKLALRLAKQHHHVACQRDDRQNKTLATLYKTTDILFLERLAVANMMKNHCLAKSLQDASPGKFLRKAQFKADVLGKWFIPVDPWGTTQFCHNCLSWAPKDLSEREHICPKCGEVLPRDENSAKLIKRIGLSGLKPDYAHGRWVNTPVESEPLPSLRGMVSKDVEAGSPRL

SEQ ID NO: 59323 - protein, 380 aa, unknown
  TnpB Polypeptide
MEETIKLTVRAVIPPRDLGLRKLMREYTAYKKVLIPKIKQAVRRVIKDKSIRVYAQQKWMVDKKLSEYLKNLPFHPMPFHNQSVWIEDKDGKFWIHFKTKEGEAICYLHVPLKYHSLIEQACGEGNPTLGQVELVEDKKYGWVNCHICLRLPKPKSYEPKGWVGVDVGWNKLATSILATTNPHLTFSNPTFHGKQFKTRIIQLRYLLKQYARKGKAWKKWDFRLKNTIKYAVGTVAKEIVSKAKRLKAGVAMEILTFKSTTKGYIIPRYKLMIAVKTLCEREGVPFKLVPAQYTSITCPKCGYADDENRNNERFKCLKCGYKADADIVGAMNIALKALDGTADEAVNGMGLAPMPKTLRLYAERGGHVASPLRAMTDDPL

SEQ ID NO: 59324 - protein, 392 aa, unknown
  TnpB Polypeptide
MTHTEKIRIYPNKSQRILIDKILWHCKCTYNRLLEIHNETWLTEKKTLSRYDYNNLSKNFEKPDCQIYSQVIQNVGTRLADAFSRFFNKKLRSHRPKFKSIKKFRSFTYPQSSGFSLDFQNKRIRLGKFGKVKAVFTREIIGTPKSCTIKKFPCGHYHAFVVVEEPENSRIIPVRQRTRVGIDLGVSRFFTTHDGKYFESPRFLRRNLEKLARAQRELSRKKIGSKNREKARFKVSRLHEKVKNARRDHHFKVAHYLVNTYDQVMCEDLETSKMFRKKNESKQRRALLDVALSEFLEILDWMGRKYSCEVAKVPPEYTSQMCSGCGSIVKKDLSVRVHSCPHCGLVIDRDINAAINILNRGNRVPGGTTGGGMVTATTPMLVELVTIAGLSR

SEQ ID NO: 59325 - protein, 348 aa, Escherichia sp.
MASWLVEWKNATETQWLKDSPSQPLQQSLKDLERAYKNFFQNRAAFPRFKKRGQNDVFRYPQGVKLDQENSRIFLPKLGWMRYRNSRQVTGVVKNVTVSQSCGKWYISIQTESEVSTPVHPSASMVGLDAGVAKLATLSDGTVFEPVNSFQKNQKTLARLQRQLSRKVKFSNNWQKQKRKIQRLHSCIANIRRDYLHKVTTTVSKNHAMIVIEDLKVSNMSKSAAGTVSQPGRNVRAKSGLNRSILDQGWYEMRRQLEYKQLWRGGQVLAVPPAYTSQRCACCGHTAKENRLSQSKFRCQVCGYTANADVNGARNILAAGHAVLACGEMGQSGRPLKQEPTEMIQATA

SEQ ID NO: 59326 - protein, 338 aa, unknown
  TnpB Polypeptide
MKAKKTIKAKILDLRKGKEELLKREYENWQHYLRGDKTVPLYSATKQQAERLLRRLKGKVKPNKEYPMILRRDVYRAYTKLTPYWLKIPIYGIRGGINVPIKTHEPITEDMICRETKIIRRRGEWFVYITVEKEVEERNPKSVLAIDLGIRWIATTVNSNNPKPKFYGKELRRVKGHYFYLRRSLALKKAYKTTKKIGHKERRVVNDLLHKISRAIVNEALENDSMIVLGNLKGIRRNGKGRRFNRKLNNGFPYYKLSQFIEYKARWLGIKVFKISERNTSKTCHKCGYKGFRVGSLFKCPNCGYSYNADYNGAMNILKRAVGYMPIVGVALTQPRTR

SEQ ID NO: 59327 - protein, 185 aa, Limnoraphis sp.
  misc_feature (116)..(116): Xaa can be any naturally occurring amino acid
VKVSNPKHFDKLYKKLRLAQKSLSRKIKGSKNRERARVKVARIQAKIADCRRDKTHKLTTQLIRENQTIAVEDLAVKNMVKNHKLARAISDANWGELVRQLTYKAEWYGRELIKIXEKMPLNIREWDCPKCNSHHDRDINASINILAAGLAVSVCGATVRAEQNKSVKPGAKSSSLKRKKQKPKL

SEQ ID NO: 59328 - protein, 358 aa, unknown
  TnpB Polypeptide
LNTTLETCRILYNRLLAGRKDAYEQTGKSPSRYEQQALLPQWKRENPYLSLVYSQVIQEVGARVERSYQNFFRRCKSGTEKAGFPRFKGRGHYDSFTFPQSGFELQDNAVKLSKIGLVRAIVHRRIDGKIKNCTLRRQNGKWFACFAIEVESVPLEANGEAVGIDVGLNSFATLSNGEQVENPRFYRKDEAALAKAQRRMSKFEKGTSERRKARKVVARIHERIRNRRHNFVHQEARTIINRFEVIVVEKLNVKGMAKNHGLAKSICDASWTMFRAGLSNKAENAGRKLVAVSPAYTSQDCSGCGLRAKKKLSERWHFCPVCGTSLDRDENAARNILSLGLQTFGIQSVEAPPFMAGE

SEQ ID NO: 59329 - protein, 524 aa, Actinomadura sp.
VAIRTRLKGLTPEDETVLRAVGAHLGSLASRDLKTRCVDGLKHDAGRWAARKRDLTVESSARWAGSITKASHDQWALARRCQQAYVESLEAGVRTLERRLALPLGAKGARGEPGGYRSRREWFAKSRRLGVLKDRLAAVRADRDAGTVHVVRGGRRLLNRRHHLEEAGLTSEEWQARWEAGRRFLQADGESGKRLGNETIRVTPEGEVSIRVPSPLAALANAAHGRYVLSARAAFAHRGQEWADRVEADRAVAYRIHQDPDRGRWYLTASWQRRPVPALPLEATRARGIIGVDTNADHFAAWHLDASGNPVGDPKRFGYDLTGSSSHRDAQVRHAVTRLLRWAASCGVAAIAIEDLDFASEKTREKHGRRKRFRQLISGFPTGRLKARLSSMAAEHGLAIVAVDPAYTSRWGAEHWRKPMCTPARKVSRHDAASIAVGRRALGHPIRRRTAPPPAHRSDEQGHRTVQTEPGTPGREGPRRPGSERAHDARSRTGPRTRATSASNTVRDARRTRRWVQDPLLNTV

SEQ ID NO: 59330 - protein, 460 aa, Cylindrospermum sp.
MTFRLYPNTQIEKTLRYHRKLQKDLYNAAVNNRFTQYQKFNHKVDYFEQQNCLPDFKEVWTEYKEINSQTLQATLKRVDFAFERWFKGLGKRPRFKSIRHYSGWTYPAKSGYSLESNGENGYLNLSKIGRIQMRGKAKYWGKPTTCTIVYRNGKWYASITVDVLDQALQPEALPLGAIGIDLGCKSALSITDGENHQQVNAPKFLRNAEQKIKKASQEKRRKRAPNRNKRIKASRRYKKAQVKVSKITRRVGNQRQNWVHQVAAEIVSSNSFVATEKLEVKSMTSKAKQRRSVVFLVSKMNNCVKTGKRKKQKAGLNKSILDVGFGMLRSTIKYKVEQIGGVFVEVPTKKVKPSQTCPKCGHQHKKTLDIRVHECAVCGYVQDRDIAAAEVMLYWAKGILPGLGTSLVDVESPSSTSCTRKKAGSMKQLGAKKRPKSIEVSASNELWDVETHSSGEANCG

SEQ ID NO: 59331 - protein, 506 aa, Pleurocapsa sp.
LIYNYQYRLKPTTEQKLVLNDWLRICQYWYNRQLGERFDWWENNRSYTDRCLLVCHLPELKDKPEFYGQKKQLPIIKQDLVSVGWSGELLDFNSVPSQTLQEVCKRVELSFKRYIAGDKNGKRSGKPRYKNTARFRSMVFEGSKLHSCSVGGKWLYISLPKIGLVKVRHHRSLPDGSILKQVQVIKKVDGWYVNLRLEDNSVPNFVPDITPTWDNSIGMDAVLHENDYLATSEGVKLPSLKSFRKSQGKLASISKRKSTKKKGSKSRRKLAKREANLHQQIARARNDHAYNTAHALLKTGKQVFFHEKLNLAGLSRRNKVKTDEQGNFLPNGQSRKSGLNKSWTDAAFAQFFTILKFKAEKAGALVIPVNPQYTSMLLPYKDEFVFTDTSIREYWDEELSLLIDRDISASINVKRVGLDLFPTIKRRKGNPVVVASATNSTLKEVLTAYARFSEAYICTRSVSVGEVTNDSGRHTPTRIKAIANSTTDQQRKPSSIADGISNESSK

SEQ ID NO: 59332 - protein, 453 aa, unknown
  TnpB Polypeptide
MSDCARQLYNACLREALKRLHRIQNTKEYQRAIRLSKATHEDERFAIFEALNEKYGFTANSMEHFGIKTRNDSKFICNHIGSLVTEKIAKRAFQSVQQLAFGKAKRVHYKRKGEFVSLEGKNNSTFLRFINGYAQITDLTIPRYPTNSKRYIRISCQFRKNDDAMNYALTKRIKFCRLICKKIKNRNIFYLQIIFAGKPFQKFELGKNITGIDIGPSTIAIVNKDRAILKVFCEDLNFMQQEKRQLQRKMERQRRASNPHKYNKNGTIKTNNHEKWICSKRYYRTKNEKAELSRKLAAKRKELHNREINQIVRTSKTVKFERISYIWFQKHYGKSVAKYAPGLFISLLKWKIVNYGGSFIEFSPFNTKLSQSCICGKLEKKPRNQRWHHCECGINVQRDLFSAFLAIFVTSQGILAIDNARNNFPVYAPLLDGQMIYLRKNKHHIVTSRSFGI

SEQ ID NO: 59333 - protein, 309 aa, unknown
  TnpB Polypeptide
MYNLCNYTIRQEFFETKKVKKYGDLNKELKHTEAFMELGSNAAQMVTKALCKSWKSFLVSVKDYTIHPEKYLGKPKIPAYKKKDGRFVCTLTNMQTKVKDGYLYFAFKRMKEHNNLIRTKVTGHHLSTRIVPKGGCYIIEIVYDDEKQCKNNLDRNRIASIDLGVNNFVTMVNNIGESSIIINGKGIKSYNQYWNKKVSNLRSIAKTVNGSDWTKQMQNLTNKRYFKMEYFMHCASRWIVNYCVEHNIGTLVIGKNDGWKQKSDMSKIVNQSFTQIPYESFIQKLEYKCVETGNSFTTVNSVSLFKVPR

SEQ ID NO: 59334 - protein, 485 aa, Sulfobacillus sp.
MLNGYKFRLYPSPEQEPILLQWIGCQRLIYNAKVQEDRYFRRFQRRMVGTVGEDIPVDQQYSRFITAKTAFLRQVPSPVLRNGAVRWRQAYQRFFQKLSGRPKMKRKSGRQSVWLTAELFDFRPIVDDPPGAGCGYHLHVGTDKFPVGIIPYVAHRPHAVPASIYLAIKGGQWWLSFAAEDLTVTIPGKEGDAATERIAEDLRHLSADQLAERTLGGDRGIAKPLMTSDGHVFDLLPVQQTRIQKARRQHRRWQRRAARRKKGSQNQKKAYRKVAHDPQYEKNVRHEYAHQTSHALVVHAAYDLYVFENLPIQQMTKRPKAKKDAQGHFLPNGRAAKAGLNRAILASAWGQGVMFTRYKARRRGKLVITVPPQHSSQECAECTFTAPDNRPSQAAFVCQRCGHRDNADHNAARVIKKRGIQKLLSGEPLTTSRKTTRIFRTLGPERSEVTPGETHIRRAPSKTDMHRSQNQELRGVIRETPTSTR

SEQ ID NO: 59335 - protein, 388 aa, Goodfellowiella sp.
MVARLVKRAFKYRFYPTDAQAVELSRTFGCVRKVYNLALQARTEAWTLRRERVTYNATSAMLTGWKKTEDLAYLNEVSSVPLQQGLRHLQGAFSNFFAKRAGYPRFKSKRRSRASAEYTSSAFRFRDGRLSLAKMAQPLAIVWSRPLPQGATPSTVTVSRDQAGRWFVSILCEDTPVPMPAATTAVGIDAGITSLVTLSTGEKITNPRHERRDRRRLAKAQRALSRKTKGSNNRDKARVKVARVHARIADRRRDFLHQLTTRLVRENQTLVIEDLTVRNMVRNHTLARAISDASWTQLRSMLEYKADWYGRTVIAVNRWFPSSKQCSACGALRAGMPLSVRTWTCGCGATHDRDVNAAVNIRAAGLAVQACGDGVRPARAHARAGSGR

SEQ ID NO: 59336 - protein, 426 aa, Natrinema sp.
MAEQVVTRTYTASIRNPKQVSDDLDSLGFSASKLWNVGRWVCDRVWSEICHIPGHNELTTYLKSHERYDDLHSQSSQRVLQELAEAFNGWYGKRRNGDTKANPPKYRKHGDEHPRSTTTFKDAGFKLDTTYKRVRLSKGSNLKEYWSDFILCEYQTQPDVDLSTVESVQQVRAVWTGEEWELHFVCKVEIDVAEVSGEKTVGVDLGINNFAALAYENGHSELYPLNCLKQDDYYFSKRIAQCDDSDSEQSTRLNQKKSARRTHYFHTLSKHIVQRCVDEGVGTIVVGDLSGIREDEENGESKNWGKHGNLDLHSWAFDRFTDLLEYKAKMEGITVEEVSERDTSKSCSCCGRTRKANRVERGLYVCDECDMVANADVNGAENIRKKVSPSPATDGGDRSNGWLAQPSTFLFDKETGAFAPQEHVTS

SEQ ID NO: 59337 - protein, 250 aa, unknown
  TnpB Polypeptide
MPRLPGYSKKYRTFVVGRNGYKVVDGNLVITDKNDIGFPRLPIRSCENQPLNAKINETIVGDVRIVPHGNAFFIELTYQVACSTSILLDGSRACLVDVGLRNIVTLASTISGIHPVVVKGGMLKSINAKYNKDAASLQTHGKQAPRRSKVMKRICRINDNLHKVSRFVVKFCLQHDLGTVVIGHNDGWKQNVNLGKVNNQNFVSIPFNRLIHMIRYKAEEYGIKVIVREESYTSRQSALDFDPLPNYGDK

SEQ ID NO: 59338 - protein, 398 aa, unknown
  TnpB Polypeptide
MFKYLFEKYITMLGSKCLNINLLEPTKHKQKLLLECYNTFYQMVLEIFEIKKNNPNLSRKDIQKLIYNSFRKKYNIASQLVIEAKTYAWNIRKQGRIDKVVVRFDKRLFSLKKTKRKNPVLSLRVNSERIAIPIKQDGAYKRLLEHIQQGWEITSVIMTKDLKFYATLKKEFPEPKAMPNILGIDINARWLAVSVYNPRTKRWLKQLYLGKDISLKQIRYEQRRAKLQHYRDKFFDSKAKRKFRMLSGKQRNYVKTRIRQIVSEIIKLAKESYATIVIEDIKYLRARKGEINKKARKKINRISYGFFRFVLEHKAMQEGIKVVAINPKYTSQTCPRCGKRRKPSQYNYFRCECGFEANRDRVASQNICLRASRLLPSITAQYPEAGVAVNQPVWSYEG

SEQ ID NO: 59339 - protein, 272 aa, Vulcanisaeta sp.
VIECRDLIPSVSARAGTARPTNCGVERGGMPSPRVGGRSVGCEGVGVVGVDLGLTRSVFSVVGDGASDLFSIVVGGLEARGVPVRLIRANGYFVFDVTYPSVDYYRGSEVVFNLFERVVSVIRNAFEMASRWYGVVTALSLENLLSDKGLARGIAKTWRLLLMALYNNKGAVEEVASYLGDARASIWCYDQWLTYNGHVLNLPGSNSYVVLVSPEYSSSLCPSCTRYLGPVRRGVEVVRPRCGFRGDADVVGSLNIAARGCCVLRRYLGGKS

SEQ ID NO: 59340 - protein, 399 aa, unknown
  TnpB Polypeptide
MTHYISRAYKTELDLTQAQRDACYNHAGAARWAWNWALARKKSVYETEGRVLSVFDLHKELTTVKKTMAPWLYEVSAIAPLQAIWDLGDAFKNFFEKRARYPRFKSRKRDRRAFRLQGDIEVMDRAIKLPKLGILRLKERDYLPVGVHVLNATISERAGRWYVSVCVEEERPAVPANGGPVVGIDLGISALATVSDGTSITNPRALARYERKLCRQHREVSRKRKDSNNKVKAVERLRRTYARIVDLRSDAIHKATTMLTRTKSVIVVEDLHVEGMMRKGHLTKAIADASMREFIRQLQYKADWHGAKVLVAPKYYPSSKTCSRCGHIKADLALSERVFVCEICGFEADRDLNAAVNLEMVAPSLEETLNACPRREVAGRPRRADQCLPMKQETHRTTT

SEQ ID NO: 59341 - protein, 463 aa, unknown
  TnpB Polypeptide
VPCFLSDSPKPPEDAPAFRPGRNPVSCEAGQHDGTETRPARLRISYEKRCDNVAMRTAYRCRAYPDAEQQAVLSRTFGCVRVVWNQTLAQRRARWQLNRQGTSYAETDRALTAMKKDLGLAFLNEVSSVPLQQALRHQHKAFGAFFAGRARYPRFKSRRGRQSAHYTRSAFSMRGGVLRLAKTTAPLRFAWSWPDLNVTALDPAMVVVCREPDGRWYVTFTADTDAPALLPQTGHVAGVDLGVKDFAVTSDGGRIANPRHLQRRARNLARYQRRLARCQQGSNNRAKAKAKAARAHRKVRNARQDFLHRASTRLVRENDIIVIEDLNVSGMLGNQRLARAISDCGWGEFRRQLAYKCQRYGCELVVIDRWYPSSKTCSACGHLLAELSLSTRHWTCPACRARHDRDINAAKNILAAGLAVARGSPGDACGGDVRHPGSSRMQSPVNQEPQPARAGIPVLQGVE

SEQ ID NO: 59342 - protein, 463 aa, Scytonema sp.
MIIYEFKVKGKDRQYKAIDDAIRTSQFIQNKCLRYWMDNKDEKVDKYALNKHCAVLAAEFPFADELNSMARQSAAERAWSAIARFYDNCKKKVKGRGLTRKKVGQPYNNEYPTTPTDQQTVCVAPPSGLGCPTFSGTMRGKKGYPKFKKHCRSVEYKTSGWKLSSTRKVITFSDKKGIGTLKLKGTYDLNYYDIKQIKRVRLVRRADGYYAQFAIDVDIEIETQPSGQVVGIDLGLKYFIADNKGNVEPSPQFYRKSEKQLNRANRKKSKKYDKTKKKAKKPQSTNYHKARNRYARKHLRVSRQRKEYCKGLAYSVIQSNDLVAYDSAACPLGIDLNVKGLVRNRHLAKSISDAGWSTFRSWLEYLGHKYGKITVAVPPHNTSQNCSKCGEKVKKSLSNRTHVCPHCGYIEDRDVNAAINILQKGLSTVGHTGTYAWGDLPSWAIGATLSFNGESGNQESPRL

SEQ ID NO: 59343 - protein, 284 aa, Oscillochloris sp.
MSIYTVRQCAKRISVSVKTFQRWDREGRLTPQRTPGNRRMYTDDHVQQVLHLRNGNDRYQAGWWWISIQVEVDHTPTTHTGPAIGVDLGIKSLAVTSEGEVFENQRYLMRALRTVKRRQRSVSRKVKGSANRRKAVLKLAKAHFRVVCQRKDVLHKLTTALVQQASLVGIEDLHVAGMLKNHRRAQAIADGAWAELRRQLEYKAPAFGSRVVAIGQSYSSCEEGVKALAGLIRLKPRLHATTPRGLPYVITCYRIRAPIIPCVCQDIRQRPAETGLLQSPQIAV

SEQ ID NO: 59344 - protein, 448 aa, unknown
  TnpB Polypeptide
MVHCRLQKILLKLTKTFNSSYNAQPFTVGIVDYISTNLVYLHSMRHKPTLKAYKYRIYPTDAQMVFFAKTFGCCRFVWNKMLNKKLQAYKKKERIPQDTPAKYKDEFPFLKEVDSFALCNVQLQLEKAFKDYFRNRKQFKLPKFKKKRDKQSYTTNNTHNSIRLDFKKGFLYLPKLREGVRIELHRSFDGKIKSITVSRTNDGKYYASILVETVNRRNKVVEPKSKACGVDLGLEHFATVTNDFGSYKVEHPRYLLKAEEQLRRLQKSFSRKQKGSKNSEKARLRLARQHAYIANARNDFLHKLSKAIIDENQVVVVEDINVKGLLKTRLAKSVADSGWSKFLTYLKYKAEWYGRTFIQVDRFFPSSKLCHRCGYKNDDLTLNDRTWCCPACGETHDRDVNASINLYYVGLGRPEVKPVEQALVDDRSPHGLPKKPSCVETGSSTTYG

SEQ ID NO: 59345 - protein, 405 aa, unknown
  TnpB Polypeptide
MLIRKAYKFRLKTDHEIEEKLTQFAGCCRFLWNKALALNLRRLEEKQPLMWYRELAFWLTFWKRTKEHQFLKQAHSQPLQQTLKQLERAFKDGFDTKQPLKRIPKFKKKFSGDTFSYPQGFKFDNRRVYLPKIGWVGFHKSQNIEGTQKNLTVKREADGWYISVQVELEVPDPKHSSQSCIGIDLGVSRFATLSTGEYYKPLHSFRKHETKLAKLQRDLSRKVKYSNNWRKQKRKIAKHYRKIRNCRNDYIHQITRRISKNHASVFLEDLTIKNMSKSGRGSPEVPGRYVKQKSRLNKSILDQGWGIFCNFLRYKLSWLGGVLRFVNPRYTSQKCPKCSYIDSENRPGQSKFKCLKCDYESNADLVGALNILAAGLAAIACQANPIRGRQQEPVGNREGVLSCVV

SEQ ID NO: 59346 - protein, 420 aa, Leptolyngbyaceae sp.
MFGCQQVLISPDKELKAVLEFVCSESMKLANCGTYYSRQLYFKTGKILTKFDLHREIARNPHFQALHSQVAQQCLTTVAESFKSYLGLLKGIQKGTVTQRPKLPGYRKGGLALITFPSQAVRLKPEGLRFPLGSKVKAWFGLDAFYLPMPSNLDFKAIREYRILPRNGCFYLELVYKTSVIQADVDPSGALGIDHGLNNWLTCVSNIGTSFTVDGLHLKSLNQFYNKQIATIQEDKPQEFWSKRLAAITEKRNRQMRDAVNKAARKVINHCLENRIGVVVFGWNKGQKDSADMGAKTNQKFVQIPTARLKERIAQLCEQYGIQFVETEESYTSKASFVDSDQLPTIGEKPDGWKASGKRVKRGLYRTANNQYLNADCNGAANILRKVAATLGLNLSGVSRGALLTPLKVRLWTLQESPSL

SEQ ID NO: 59347 - protein, 404 aa, Micromonospora sp.
VSRVKQGYRVELAPTAKQRSRLAQHAGLSRVVENFCLALVKAALDQREAERSYGVPDELLTPVPWSAPALEKAWRAAHSTLFPWFGAEGLSSRVPKEACRVRAAGLKNWAVSRTGVRRGRRVGFPTWRKRKHGSRFRYDADRAHPTGPGMITLPGVGPVRTREDMSWLTGRLAYGCARIIGATVREQAGRWWVSFQVDIDRSDIDQRRAVAADAPTCGIDLGLTTFAVVADDSGVVEEVHPPRALKAAQRKLRRANKALARCRTGSSNRAKAARKLAAVHLAVSHRRADFLHQLTTRLARTKRAIAVESLNVAGMVRNRRLARAVSDAGFAEFIRQLEYKAGWYGSKVWAADRWYPSSKMCGDCGVVNAELTLSDRVWTCQCGTLHNRDRNAARNLLAAMHSTA

SEQ ID NO: 59348 - protein, 374 aa, Halobacteriales sp.
VNAANYTSWNGRDEDGYLILNKSTIHDRVYHDLRDRTELPANLCVRAYSKAIGAMKSTVETWKSGESCLLPRFNEPSAVYDKRTVTIKDRSATLSTVTGRVAVEYVLGDYQRSYLGDDEYERRMGTLHYDEGEDAFYLHIVLLKESEQRSGDRILGVDLNLKNVAVTSTGSFYDGGRLLWGQNHYFRVRRSLQDKGTRSTTQTLRQLSGRENRFVLDRLHTASRRIVEEADRHDCAYIAIEGLTPIRENMRGSNRTVQRQMHSWAFRELQEMVAYNAAEYGIRVEPIPPAFTSQTCSRCGHKSSTNRDSSTGWFECKECGQEYDGDYNAAKNIGKKLLTLPSGQRPDGLGDGQLALKSGTVNGSGDYTTHGATP

SEQ ID NO: 59349 - protein, 423 aa, unknown
  TnpB Polypeptide
MKMKRNCTVELIVDEETEKRLRRLCDLSVKLWNEVNYIRLRMWLEKKGIDFDGTYKEFYEKYKPLIGAVTAQTILLRNGKAWKSFFRLLELRREGRLPPFITKVSPPGFGKRNGSRTLWTIIRKDQYEMDSDRIVLKYLGTIGWIEVKYRGIIHLRGERGELKIRYDADKGRWYAHIVFSKVSERMMKGEWRRVPLQPKDNLMAGIDIGVINLMAVYVEDGSTKLVNGRPLKAISFYWRKKIAEYQLMLNKYGLETSRKLRRMHAKWKRQIRSYIDAKVREVVEWLYDIGVSTVKVGYPKYITQRNGNFDNVHVWSYGLLLRRLSEVAEEYGISVIYVDESYTSSRCPWHGDGCGVRVYRGLFKCTTTNKVFNADLIAARNILMTATSNNTLMTPVTPESRRGVGGNGRRPGQGLNLQKGGGM

SEQ ID NO: 59350 - protein, 397 aa, unknown
  TnpB Polypeptide
MIKAHKIRLHPTTEQATYFARAAGTARYAFNWALAEWKRQYEAGEKPSALKLRTQFHALRKQQLPWTYDVTKCAIEGAFMDVAAAFKNFFEGHKAGRKMGYPQFKSKKRSRQSFYLANDKFTVGDHWIAVPKLGRVNMAEKLRFSGKILSARISKSASWWFVSITVEMPDEVPLNPHPPVGIDVGLNRLATLSDGRRFENQKPLVHQLKKLRRLNKELARRTKGGKNWLKTKEKLGRLHYEIACIRLDWLHKLTTEIAKTSGIVAVEDLHVKGLIRNRCLSRSFSDAAVGKLLDVLASKVPKGGGMLLKVDRFFPSSQLCHCCGARKEGLTLADRLFVCPNPDCGYVGDRDENAASNIILESLRVFGLNLNMPSGVVATTRRKTAWGPGVRPKKPSL

SEQ ID NO: 59351 - protein, 372 aa, unknown
  TnpB Polypeptide
MMVNYRFRIYPNKEQQELMSKTFGCCRFVYNYFLAKRIELYNKEGRSMTFYDCNNMCNRELKNEYEWLREPDKWGLQNSIKDLDDAFKKFFKRVKNKDSKCGFPKFKTKHNNKQSYRTTGDRVKINGNKIRLPKLGWMKISYSKEIDERILNCTIIKTKTNKYFVSICYENYQPKSIERNNNYIGIDLGIKNFINISNGDIIDNPKYLYKLEEKLKFEQRRFSRKQNSSKNKEKQRIKVAKIYEKISNQRNDFLHKLSTRLIKENQIICLEDLKISNMLKNHKLAKSISNASWYKFTRQLEYKGEWYGRTIQKVGTYFPSSQLCSNCGYQNKATKDLSIREWECPSCHSVHDRDINASINILNEGLRLLNNK

SEQ ID NO: 59352 - protein, 405 aa, Stanieria sp.
MITLEFKLKGNKQQFLAIDEAIRTVQFVRNKCVRLWMDSKGIGKKDIYRYTTELRKEFKYVEALNSSACQQAGERAWSSIAKFYDNCKKKVKGKKGYPKFKKNVRSVEYKQSGWKLSDNRKKITFTDKNGIGTLTLKGGWDLNFYPIDQIKRVKIVRRADGCYAQFAINIDVREYVKQLEPTQDCIGIDVGLKYFYADSKGNTVPVPQYYRKAEKQLNRANRKKSKKFCKGQKQSNNYLKARNRYARKHLRVSRQRKGFVQREALRVIQSNDLVAYEDLKVKNMVKSKLSKSINDASWSAFRSWLEYFGWKYGKVTVAVPPYNTSQNCSNCGEKVKKSLSTRTHKCPHCGFEADRDLNASLNILQLGLRTAGHAGTYAWGETPSWAFGEILMSNGDSLNQESPRL

SEQ ID NO: 59353 - protein, 334 aa, Absiella sp.
MIKLSLIVNNEIEKDLLDYEKNFKSEVGRIHDIFLKEHKTYEYRYKDISNRISYNSKHLVLAEAKNWFNEKEEAPFRFCYSSYWSNSSYWIKENLILELGLSDRKRKLYVPFYQNEQQLKRLKMGKPMNLQIVHSHQKWYAVIYLQLQERRIYSKKQMGIDIGIKVPAVVATSEGKVRFFGNGREIRYRQRQLRGHIKKLQKMKQYKKLIAFKHKLSHVLTNYDHQISRQIVDFAVKENIGVIKMEKLTRINRRFNVRKCENIYLWSYRRLQEFIEYKAELEGIEVRYINPYMTSQKCPKCGKINHADDRDYHCSCGYHAHRDVVGALNILQTL

SEQ ID NO: 59354 - protein, 385 aa, Okeania sp.
MCDHLAYLSKNLYNLANYYCRQHFFCTGHSLDLTKLYHLTKSSDAYRALPTKVSKQIIKCLTKTWHGYFQAIKEWLRHPEKFLGKPKIPKYKNKTQGRNVVIYSKESVYKAPLKNGICHLSMSDIKIPVIVETVVEVRIVPATGCYIIEVVYEKTSVPQIQSTYVAGIDLGIDRLVALATNKPGVKPMLVNGKPLKSVNQLYNKRKAKYQSALSGKKKTSRKIEALTYQRNRFVENYLHHTSKSVVNYLVTNRIGIVVIGKNDNWKQGVNIGKKNNQNFTQIPYSKLIQQITYKCQLVGIKVIETEESYTSKTSALDLETPCQHQNYLGKRVKRGLFRSSTGKVINADINGSLQIIRKKFPEAFSAEGIVSCAVQPMLVNPISRY

SEQ ID NO: 59355 - protein, 381 aa, Jeotgalibaca sp.
MVLKGIKIKLYPTEKQKIFIDRNLALNRFVWNQLLAMQGARHENGGRYVGKYAMHNLMKPLKWEFPFLKEADSTSLEYTSDDLDAAFLRFFNKQNGYPRFKSRKRPKSTYTTKCINNSITVVDNHYIQMPKLKLVKCHGAHRITGRIMRATIRKEPDGSYTATILVEEAVPILPKTGAIVGLDMGITHLVIQSDGYKLKNKQFERALAKQKRIWQRKFARRRERALREIAAAKANGVELQLTDFKNLQKAKQQVARINKRIKNQRLNYLHHYTTQLVKEHDIIVMEDLKTKNLMKNHHLARSIADASWGIIKNLLTYKCAWHKKELILVKPHYTSQTCSHCGMNTGKKPLHIRMFNCPHCHTVGIDRDINAAVNIRNKAFA

SEQ ID NO: 59356 - protein, 409 aa, unknown
  TnpB Polypeptide
MTKEIRSVEYVVLPVSRTKATKMFQIAGACRYVWNHFRERNLAGYQAFKNGKAKRPQTSYFSLGVEFTKLRHEVEWMRKLPANPIKHTLKYFADALKEAMRGNRGFPKPRSRKRTAPSFTLPSKENFRIRKLDAKYSLLFIPRVGWVKLVRGGGNPYGEGVAKQVVLRHDGHRWRAFVFYEVEVEGRLDDGEFLGVDMNVCQVATSDGHFYSLPDLKKKEARLKKYQKRMARQVKGSNRRKRTKKKLGKVSRKIANIRKNWIHQTTKEIAGKCGTIVVEDLKIKNMTASARGTIENPGRNVKQKAGLNRAMLDTAFGEIRRKLEYKCGRVIEVNPAYTSQRCSECGHTDKENRKTQVRFLCVSCGFVSNADTNAAINIWRLGMAQLHGEGSGISTVPRNREIDARIPYG

SEQ ID NO: 59357 - protein, 382 aa, unknown
  TnpB Polypeptide
MRAAYKYRLYPTKPQALILDGELREACSLYNAALEERIGAWKVCRKSISLYDQCKQLKYMRADGCLALTNSTCAQDVLRRLDRAFRAFFGRLKCGNKAGFPRFRSVRRYDSITFPAYGNGCKLLDTGKLRIQGVGHIKLKLHRAIEGIVKNATLKREAGKWFVCFSVERPIAPLPPSTEAVGIDVGLASFAVLSDGTDITNPRFYRHAQAKLRLAQRRVARRPNKRSNRRRKAVVLLQGAYARVANQRADFQHKLSRRIVNRFGLIAVEDLNIKGLAGGMLAKSVHDAGWAQFISYLTYKAEWAGRELVKIDPRGTSQTCLCGLRVPKGLGDRWHDCPACGLSAGRDHVSSQVILSRARNRPSSVNVGVVMPSVGREAVSLS

SEQ ID NO: 59358 - protein, 403 aa, unknown
  TnpB Polypeptide
VESVVTNYCYKFRLYPNAEQRQRLGQHFGVCRFVYNHFLDRRIRLYRENKERSSYHKDCAFLTLLKKELAWIGDANSQSLQQELKNLDTAFNRFFKGQARFPKFHSKKRDKQSFRVPQFVTVEGDRIEFPKFREGIKVRLHRKIEGETKHATVSRNRAGQYFVCVCVERVIKKLKKVNKEVGVDLGVKNLATCSDGKVFENIKPYRSLERRLRRLHRSMSRTQKGSKGRERIRRRLSKLYQRMADIRSNHLHQVSHTIISENQAVYLEDLNVNGMLRNRRLSKSIQDVSLYELVRQIEYKGRWYGRTVVKIGRFYPSSKTCSNCGFINECLALSDRSWVCPRCRVEHDRDLNAATNIYFEGKRTVGTTGLAGGEKRKTSVRKQFSAKPEAATSLRAKASREER

SEQ ID NO: 59359 - protein, 384 aa, Micromonospora sp.
VKTVQAYRYALDLTASQERALLAHAGAARVAHNWALARVKAVMDQRAAERSYGIDEADLTPVVGWSLPALRRAWNQAKSEVAPWWAECSKEAYNTGLDALARALKNWSDSRTGRRAGRLVGFPRFKSRRRSTPTVRFTTGAIRVEPDRKHVVLPRLGRLKLHESARKLARRLDAGTARILSATVRRDGGRWHVAFCVEVDRAERSPARPAAAIGADVGLKHLAVLSTGELAPNPCHLNAAGRRMRRLARRMSRRVGPDRRIGRNPSTRWAQARRQVARAHARVANLRRDGLHKLTTRLAREYGTIVVEDLNVAGMLRNRRLARHIADAGFAELRRQLAYKSQWNGGRLVVADRWFPSSKTCSGCGAVKTKLALSEPPTPAPPAA

SEQ ID NO: 59360 - protein, 316 aa, unknown
  TnpB Polypeptide
MEASATLPLFTYNQIGFWLIPGNDKFGALRLSKIGDIPIRLHCEMKGEIKQVIIKHMPSGEWFACIVVDDGMKDDEITFIEKAVGIDVGLEHYVVDSDGLEVENPRNLKKALKKLRRDQKRLSKKKKGSENWEKQCIIIARDYKHIENQRNDFLHKLSRYYVNNYDFIVMEKLDIKEMIENGHLAQSISDAAWSTFNFDLAYKAERAGKLYVQVSPRGTSQECSCCGKLVPKTLSDRWHDCPNCGLHLSRDHNASINILNRGIEKVRSERPELTLVDRTTYTLSKDGACRLDEIRNSVKKEQNSSLANRRYLPSTY

SEQ ID NO: 59361 - protein, 387 aa, unknown
  TnpB Polypeptide
MIRAHKIRLNPTPEQANYFARAAGTSRFVWNWALAEWNRQEEAGEKPRVLKLKKQFNEIRRTQFPWTWEVTKNASDQPFLDLGKAFTTFFEGTAKRPRFKSKKRGKLSFYLANDQFELGDHRIWIPKLGWVNMAENVRFSGKVTGARITKTADWWFVSIQVELPDTRPERKQAVVGIDVGLNRLATLSTGEEVENQAFLKTALKKLRQANKRMHRRKLGSKNREKARKQVARLHYRITCMRDDVLHKLTSRLANCYGIIGVENLNLKGLLKNRRLARSLSDAALGKLLRLLTSKVEWRGSRVIKVGRFFASSKTCHCCGWKWEEMELPDRVFLCQNTHCAYYQFEQDRDYNAALNILQEALRLIGLIDQAAIGTGSDDGVNLAVDAG

SEQ ID NO: 59362 - protein, 405 aa, unknown
  TnpB Polypeptide
MKITRGYKTELDLNQKQTTLCLKHAGTARFAFNWGLAKKIEAYKAGQKAPSAIDLHRELNRLKQTELQWMYEVSKCAPQEALRDVDKAYKRFFQRVELKKQGKYKGKLGFPKFKKKSKGIGSFRLTGSIKVFSDAIQLPRLGRLRLKEHDYLPVCDVHILSATVSEQAGRWYVSLQVERDIPEPVNTKVSAIGIDLGITTLATCSDKVTFANPKALKSQLKKLKKLQRSHSRKQKGSKNKEKSRRKLAKLHARIAHIRKDALHKFTSHVCKNHAHIGIEDLHVAGMLKNHHLAQAISDASFGGIRRQLTYKAQWYGTHLVVIDRFYPSSKTCSVCGYVLEKLDLKARIWTCPNCQTVHYRDDNASKTVLAASSVERLNACGAASSGYLVTGSETSRVEARTEHHL

SEQ ID NO: 59363 - protein, 379 aa, unknown
  TnpB Polypeptide
MMPQVFRYRLKPTKAQTTILNRQLDLCRWVYNQTLALRKNAWEGEEKNIGYYESKKYIAIWKQDKPELKEVHSHVLQDVSMRVDLALQAFFRRVRSGEEPGYPRFKDKGWYDSLTYYESGFKLEGSNLWLSKIGDIKVWLHRPIQGTIKRLTIRKTSTGKWFVSFLTEDAPREVLPESEKAVGIDVGISNFAVLSDGIFIANQRYLAECEDRLSREQSKKDKLPKGSPERRRAAKKVCHIFERLTNLRDNFAHQLSRDIVDDYGIICMEDIDIKNMIEKKPYLAKSILDASWNRFRTFLSYKAASAGRKIVLVNPAYTSQMCSCCGTLVKKDLSERAHNCPVCGMVMDRDLNAAKNILRLGLQSLVGIQPRCPRIYSGE

SEQ ID NO: 59364 - protein, 399 aa, unknown
  TnpB Polypeptide
MDSPLIFKYLFVKISLMARRGNKAIRATVSMKIAVSDSLLALVNNYVKALRFTLFWLKENVPNPNEKEVLGKIHEELYTRLREEYNLPSKVAEDCYRDALSVYKGWYNNPRKGRFPRVYKPTVWLTPKASYNVDFEAMTIRIAGVGELSILGYPRNLKDYLSWRMREARLLIKDGKAFLKVVFEKPGEEKVELKESIAVDINMAEIVVGKDDTHYVRIPTRLEEVHHWKSLAENLQKKYPRRWRENKRILHRIYSFHQRARRIAEDFARKVGKWVVEIAEDFGANVIKLENLRNLIKNVDRLPREFRDKLYLMQYRRLQYWIEWQARKHGILVQYVNPSYSSVSCPKCGRKMEEKGYRLFKCNCGYENDRDVIAITNLNGRGSLTLSTAPQMRDVNTNR

SEQ ID NO: 59365 - protein, 322 aa, unknown
  TnpB Polypeptide
MSSSKFRVWLNHEYLPQYPEYLWIKEAYSKAVTQAVNHGQTAFKKFFDHESAFPKFKKKGRSDVKMYFVKNNPKDCRCERHRVNIPSLGWVRIKEKGYIPTTKEGYTIKSGHVSMKAGRYYVSALIEIPDNKTADPSNEGIGIYKNINKSARLKKLEKRLVREQRCLSRKYENLKKGESTQRANIQKQKLKVQKLHHKIDNIRTDYINKTIAEIVKTKPSYITIEDLNVSGMMKNKHLSRAVASQKFYEFRIKLKAKSKENGIELRVADRWYPSSKICHCCGTIKKDLKLSDRTFRCHCGYVEDRDFNAALNLRDVKTYKIA

SEQ ID NO: 59366 - protein, 417 aa, unknown
  TnpB Polypeptide
MFTMNYQYRIYPSIEQETRMDSWLEMLRGVFNYALRERKDWIQSRKCAINACSLSGEYIVAADTPYPDYYKQQNALTAAKKALPQLKDIQSQVIQEPLRRVDAAFVARKERGHGFPRFKKFGQYRSFLFPQFKENPVVGSQIKLPKLGLMSIVLHRPIPDGFAVKTVRIIRKPSGWYATLCIQADVSIPDVAPHGRSLGIDVGLEYFLSTSDGLQVERPRFFGKLQRKLELLQRRLKNKQPRSNNLAKLRKKIGRVHEQIAAARLDWQFKLAHRLCDNAQSIFVEDLDFRIMAKGFLGKHTLDAGLGQFVNQILPWVCFKRGVYYSKVDAYGTSQECPDCGAMVRKDLSARAHQCGECGSVKPRDIAAAQVINARGQSGVKNVCGWDLSGTGLAQSRQDRVKQKLFGVNQGSPRCTA

SEQ ID NO: 59367 - protein, 160 aa, unknown
  TnpB Polypeptide
MSRKKKFSSNWKKAKAKVQRVHVRIANTRRNYLHKTSTTISKNHAMVVVEDLQVSNMSRSAAGTVEKPGRNVRQKSGLNKSILDQGRAEFRRQLDYKVLWQGGLFLARSQAVFACVKCGFSENADLVAAINILRAGHAQLACQVNGEVSRQQQEPSKIAA

SEQ ID NO: 59368 - protein, 412 aa, Cyanobacteria sp.
MQLVEKHIIDRHHWLYKHLDNLCFLSKNLFNYANYLIRQKFIRAGEYINYYKVQKLCQGTTDYKALPAKVSQQVLLRLHESWKSFFAATREYSKYPEKFKARPKLPGYKHKTNGRNVLTYTAQAISQKCLEQGIIHLANTNIFLTTKVQQVNQVRIVPKTYHYAIEVVYNQEPVSQSESSVGGIAGIDIGVNNLATITCNFQSVKPLIINGKPLKSINAYYHKKKAVLQSQLKGEAKTSKRIQKLTHKRNRLIDNYLHNAARFIVNHLVANRIGTLVIGKNDEWKQGINLGKRNNQNFVFIPHNRFIQMLTYKAELAGITVKFIEESYTSKCSFLDNEPICKHSQYRGKRIKRGLFRASDGRLINADVNGSANIVRKAFPNAFAEGIQGVVVRPVRITPYKTVVSGKLHICL

SEQ ID NO: 59369 - protein, 453 aa, unknown
  TnpB Polypeptide
MKSKENYTVEKHQIKRSNPLWAELDTLSYRSKNLYNQALYRVRQCYFSTRKYLSYNELQKQLQNESQVDYIALNSKLSQLVLKGLNQDFLSYFAAIKDYKKNPSKYKAPPRIPNYIEKNGRHLVEFNIQTIGKKELRDKILKLSGTSSRIEIQKDIVTIAKMRKGKLINVLSLKSVKVIPFNDSYEVIITHEIPHKKEKPIDKDPNKCAGVDLGVNNLAAVTTNIKGVRPFIINGRPLKSINAYYNRMLAELKSKEDTTKSKRKKKRIRKEITKLTRKRNNKIDDYMHKSSTMLVNQLDSLGVSTLVIGRNEDWKQEINIGSRSNQNFCFIPHYGFIKKIQYKSDDKDISVKLNEESYTSKCSFLDFEDICKHEVYKGKRIKRGLFKSSEGLLINADVGGSGNTLRKGVTGAFDLWSRAEVIQGFVVNPICLTIDDLRNKEDLSKIVACHRRL

SEQ ID NO: 59370 - protein, 370 aa, Proteobacteria sp.
MSILTYRYRIKDASSEKHLRQMAGAINYVWNYCNEVGLLAFRRDKAFLSAYDLHKLTAGTSKDLRLSADTTIQQVCTEYVTRRRQFKKVKWHWRAKKRSLGWIPFKAAYVRLTDDTVTYCGHRFRLWLSRPLGGALKTGSFTQDAQGRWYVNFQCDMADAAEPVGRLDLGIDLGLTHQLTCSDGVQYSRANLTRHYKDVLAMAQRAHKKKRTKAIHAKMTNVRKDWSHQVTTAIARRAKLMVIGDVSSTKLAKTPFAKSTYDAAWGIVRRQLPYKAKQLAGVCVDGHERCSSVTCSACGAHSGPSGLRGLGVRTWVCPCCGVMHERDVNAARNILAFRSGRATPSKGIPVLEAGEDVKTLPVPAAPRAVP

SEQ ID NO: 59371 - protein, 478 aa, unknown
  TnpB Polypeptide
MEKIGYRTLVLRYELSRLPPEVVSRIPELLLVQEEFRRWISRWMRDPKKTPRPAENPLKRFVVVFLHILGNKWLDSVKKSGVEVRSTKMPLFFDAQLRLNGERDIGRGVFVDLPARQIRIRKWSSQRGAIVLQLNEESVKWILERVREGGRLKLAAVWVGESRRNRNAKLNVALMFSREVAPIKFKRLLVVDLNALHNGLVWAVVEGERMLKKGVLRPDISKVLHLQKIASRLDKLCAEDDRVCGEAVAVKSRIWRLLKTWEEKAVKELILVARKQKAAIVVDVPNDNSVRELKEGSYASEKKIFLNFGRLRRRLKEAAAWHGIPYYEKRLYSTVCPRCGEKMKELSSRRVKCICGFEAYRDDVPIIWAVKLYPQLISFSSSAGNCLKRFSGVAGGLLGQLRRLGGPGESCGCIPSSPHAASPFPLLRAGLLPAPAHGPRSLLETSSNTSLCASTSAASTRAKRKPGGCSASSDALVP

SEQ ID NO: 59372 - protein, 357 aa, unknown
  TnpB Polypeptide
MPKSSKSYTVKIGGNILNKVNYLEWMIDELEDLSCFVFNFGKRFGEKHWDNYGQMYHFARRFFPDLNTKVLQNFIRLYRKRGKRPQPKSPINPSIYIDQAFNIKKTNETKITNYWLRFHKKNFPLFGKRILNRISKFSQVKLIQIYKKNNNLYCKLCLVNPLALPKENKNSKTIGCDVNFKTLVLSDNSFFSLAKLAHRKLEHKKNNSKKKNLTNFSKDFCHKITSQMVEHLLSTGSKVLILEDLRTLRKNASRKYGSYSKLRNYIINTMPYGMIQNFLEYKCLDAGILVHKINPAYTSKTCSACESLETQRPTQNSFVCQKCGLKLHADLNGSRNIEKFYTNTRWATSESSPAKDL

SEQ ID NO: 59373 - protein, 412 aa, Leptolyngbya sp.
LNKYTSVYSDEGYIGFMLNLTYEYKLIPTDTQRNTFDQWLNICRKVYNFALRERKDWVNSRKCDINSCNIKQEYIIPADAPRPTFARQCKTLAAAKQSIPELKLPHTHVLQQVLRQLEAAFVAMWERGHGFPRFKKRMRSFVFPQLNLESVTRFDDEDWVNLPKIGLVKIHLSRPIPDGFEVKQIRVVKRASGYYAMLTLQCDVEVPQASPSGRGLGIDLGLEHFLATSDGELIDRPRFFVDGHRKLKSLQRQLKRKKKGSRKFRQLQHRIAKHHETVSNRRKDFHFKTAHHLCDQEQTVFAEDLNLKAMSSGMLCKHTLDAGFGQFLDILNHVCFKRGAYFAQVNPSGTSQTCPRCQTHTGKKELSERIHNCPECGYETNRDVAAAQVVLQRGYTAVGHIAMNFGEGKLHE

SEQ ID NO: 59374 - protein, 416 aa, Leptolyngbya sp.
MEKAFRYRLYPTPGQETLLRQTVGCVRLVYNRALSMRTESFYQEQKRIGYLETSAALTQWKKQEDLAFLKDVSSVPLQQTLRHLQTAFTNFFEQRAKYPNFKKKRNGGSATFTKSAFSLKDGQLFMAKSDEPLSIKWSRQLPNNASPSSITIRLTPAGKWFVSILCDVKILPNPKSAKQVGLDMGISSLVTTSNGEKFENPKSLRKAQKKLRRLNKALFRKQKGSNNRRKARIALAKQHEKIANIRQDNLHKITTQLVRENQVIAVETLNVKGMLGNHKLAQAISDASWGEALRQLEYKSNWYGRDLAQIDPWFPSSKRCSNCGHIMSKLPLQIREWDCPSCNTHHDRDENAAKNILAVGHTVSACGATVRPKLSGSGGECDEAGNNSRKAVATRRRRKSSGESPPSEPQSRRLKV

SEQ ID NO: 59375 - protein, 384 aa, Leptolyngbya sp.
LYNAAVYNRKTQYQKLGKSVDYFEQQNSLPAFKEVWTEYKELGSQALQATLKRVDFAFQRFFKGLGGYPKFKSIRHYSGWTYPAKPGWKAPITGDNAYLELSNLGWIQMRGKPRTWGTPNTCTICYRNGKWYASITVQCQPERELGQGVIGADFGCKTAVALSDGTKIEAPKFLATAQKQIRKLSKQLRRKRKPEKRKIKASRRWKATQRKISKVKRKAANQRQDWVHQVATDITRCHSIVVTEKINLKGMTRKAKTGKRKRQKSGLNRSLLDVGIGMLKSAIEYKLVEGNGFYVEAPTRELKPTQRCAKCWKLTPKTLSDRMHVCSNPNCGHIEDRDVNSAQVCEIWVRSHELASLVADGSSSTSCGSMKQLAQAKRQKPRPS

SEQ ID NO: 59376 - protein, 414 aa, Leptolyngbya sp.
MYHAVKFRIYPSPEQEQYLAQAFGNCRWLYNFMLNKTTETYKETGKGLSKAAMDRLLPALKVEYEWLGLAYSQSLQRVTFNLSTAFQNFFDGRTKFPTFKNKFAKQSVSYPQNVRLLTEEKAIKFPGTLGTVKTVFHRDLPTGKQGCVTVSKDTSGKYFASVLFETESEPVEAINPAIGVDLGLKDFAVTSDGSKHNQSKGVQRKLKKLEQNKKRKQRKLARKKGQSNRNKAKRLVAKVSAKIARIREDFLHKLSRKIAHENQVIVVEDLAVKNMVKNPNLARAISDQGWGMFLTMLKYKAEKFGHDYIEINRFFPSSQLCSETLLPIPALQKGYDSLGIRFVDCPHCSKQHDRDINAAINIRNEGLRILALGTSAAAIGGDIRPKRSGRKKSTIVEAIPNEDRSPHCTEGQCG

SEQ ID NO: 59377 - protein, 441 aa, Leptolyngbya sp.
MAKIKKQMGVQQVLLHPDQETESILRYLCEQSGKHYNNGVYFARQTFFKTGKILTGKFDLDFEPTVSKTAVAQSLPSTPAQQTLRSVIEAFKSFKGLRDLYLKGQLHFKPKAPDYLKGSKRFKVAYPNSGGQKPILMNGRLKFSLGLAVRRWFGLSEFFLPMPSNIDIAKVKEFTILPKNGAFYLELSYEVKLQTNALDMNQALSIDLGTADNLAACVDTLGNSLLIDARAMKAMNQLWNKKVATRKEGKEQAYWDGWLDRVTRKRNHQMRDGINKAAKSMISHCLRYGIGTLVIGWNQGFKLDANMGRLNNQTFVQMPLGKLKDRLKQLCELHGIRFEETEEAYTSKASYLDGDSLPKFGEKPDGWKASGNRVRRGLYQSADGSIVNADLNGAANILRKVASKLGIDLNQLGRRCLTTVARVQLWVVPTVKRLSAESQCL

SEQ ID NO: 59378 - protein, 416 aa, Leptolyngbya sp.
VLTLNYEYKAMPTNDQIQLIEHTLTVCRKVWNFALRERKDWLNSRKCPVNACSITSEYVIPANAPYPNYYEQANSLTRAKVEFPELKTVNAQVLQQVLRKLETAFVDMQRKGMGFPRFKNKYRLRSFVYPQLSKSQLLQGNQIKLPQLGWLEYVKSRDIPDGFAVKQIRVVRKASGYFLVFTLECDVNVPNPVPSGHPRGIDLGLDKFAATSDGELIERPRFFQTLHRKLKLLQRRLKHKEKGSNNRHKLNRKIARLHQQIADTRKDWQFKLAHKLCDEAGMLFVEDIDFRTWAKGMLGEHTLDAGFGQFVSILQWVSWKRGVYFSKVNKDYTSQVCPQCNTYTGKKDLGDRLHVCHDCGYTTHRDVAAAQVIRNRGISALGSSVDENACGDGLTGTGNCLVKNQRSRKKGEEVRI

SEQ ID NO: 59379 - protein, 282 aa, Leptolyngbya sp.
MFRSEVFESVEQVLTIVCKLQPSVKQVSKIDALLQGFSDGCNYANQTVKAGVTSKTAIQNLVYQDLREQFQLSANQAVRVCARVGANRKTAKQKSKPVKTFKPTSADYDARIFSFREKDWTVSLTLLNCREHIKIAAGNYQRGKLKGRKPTSAQLCKHRDGQYYIHIQLKDETPEPIKAKNVIGVDFGRRDIAVTSDGERWDGQPIQNVRDKFSKTRASLQAKVSKGTRTTRRRVRNILKRLSGREQRYQTWLNHNISKKVIETAKSQSAIVAIFLNLGQSL

SEQ ID NO: 59380 - protein, 449 aa, Leptolyngbya sp.
MLLTHQYKLNPTDRQGSTLETWSELLRRHWNYALGERLDWLNRTRCPTDRCSIVSGPIGKIPERVDYYSQASELRQTKELFPEYKDIYADCQQQNLMRLDKAWKRSMIADKNGKRGGRPRFKKRGDLCSFTFPRVNCPKAGAFLNGNTLKLSKIGEIEVILHRPIPDGFTLKQATILHKADGWYASFSLEDETVPVPLPVDEIKSTTGIDVGLEKFLTTSDGESISVPQFYRNGQAKLARQQRKLSRKQKSSKNYAKQASKVAKLHLHVARQRKEFHYQVAHWLCSKYDLIGFEDLNIKGLARTRLAKSILDVAWGAFLNILQAVALKRGKQTVGVDPKRTSIDCSGCGHRVEKVLSDRVHHCLNCGLMIDRDWNAAINILVRALRTVGLPFSGCGGLEVTQPVKQQILVVRLEAPATPMNAVSGESCHVETHGTNQLPKFYTVTQFSL

SEQ ID NO: 59381 - protein, 372 aa, Leptolyngbya sp.
MQRTIRIQLQPDIETAQVLSQTIKQYTWSFNAVCKHGWENDLTSGVELHKATYYDHRAFTELPSQLVCAARVKATEALKSAKSLKKKGKTVSCPTSKRCPIRYDARSYTVWFDRSEVTLLGINGRVKLSFEVAEYYRQYLNWKNTSADLLKDRKGRWWLHIVMETETPKTNATDETVGVDLGIASPAVDSRGSYYGSDHWKEIEDRTFELRRRLQSKGTKSAKRHLKKLSGRQRRFRKDCDHVLSKRLVQSVQKGATLVFEDLTNIRGRAKMRKAQRRRLHGWSFAQFQAFVTYKAEARGINVGFVDPRYTSQKCSKCGHIERGNRPSQAEFRCKKCGYECHADYNAAMNIRADFLKLRAAVNPPIVSAEHG

SEQ ID NO: 59382 - protein, 402 aa, Leptolyngbya sp.
MLKAVKVRIYPTDEQQAHLAQAFGCVRWVWNQSLAVMSLTYKETGKGVSALSMKKQIPIWKQEHEWLTECYSQCLQQSVLNLSQAFINFFDGRTQYPTFKNRHGRQSIQYPQNVKILSNSEIKFPGKLGTVKAKIHRDCAGKLKTVTVSRMTDGRYYVSLLLDDGIEKPESSSEGKAVGIDLGLIDFAVTSDGSKFNNPKHLKKHERNLKRKQRKLSRKKDKTTNKRRKAKRALAKVHSKISRVREDFLHKLSRKIVNENQVMVVEDLAVKNMVKNHTLAKSISDAGWGMFCTMLKYKAEQDGKIYLEIGRFFPSSHLCNVTLLPIPKMDLSVRSFLCPHCQKHHDRDVNAAINIRNEGLRILALGISATALGGNVRPKRFGRKSTTVEAIADELGSPLYNA

SEQ ID NO: 59383 - protein, 420 aa, Leptolyngbya sp.
MLSLTYEYKAMPTNEQIQLIEHTLTVCRKVWNFALRERKDWLNARKCPINACSIVSEYITPADMPYPNWAKQCKTLTVAKAQFPELKTVNAQVLQQVLRKLETAFVDMQRKGMGFPRFKNKYRLRSFVYPQLGKSQFLKGNQIKLPQLGWMEYVKSRVLPDGFTVKQVRVVRKASGYFLMFTLGCDVNVPDPVPAGHPRGIDLGLDQFAVTSDGELIARPRFLDSLHRKLKLLQRRLRNKQKGSNNRHKLNRKIARLHQRIADTRKDWQFKLAHKLCDDAGMLFVEDIDFRTWAKGMLGKHTLDAGFGQFVSILQWVCWKRGVYFGKVNKDYTSQVCPQCDMHTGKKDLNDRLHVCHNCGYTTHRDVAAAQVIRNRGISGLGRSLEENACGDGLTGTGNSLVKSQRSRKKKGDVAVLQPA

SEQ ID NO: 59384 - protein, 429 aa, Leptolyngbya sp.
MLTRRITFRLYPKPVQEAKLFEWRRLHAYLYNSALADRKYSYQKQGESVDYFDQQNRLPAFKEVWAEYKELGSHALQATLKRVDFAFVRFFKGLGGYPRFKSIRNYSGWTYPCTSGWKAHTTGDNGYLKLSNLGQIQMRGKARQWGTPSTCTIVYKHGKWFASITVKCEPVRETGMGAVGIDFGCLTAAAMSDGTMIENPRFMATTQAKIKKASKQKRRKHSPNFKQKIKASKRWKKASKKVAKLQRKVANQRQDWVHKQASEIVSRNRLVATEKLNLKGMTAKAKKGKRKRQKTGLNRSILDVGMGMFRKALEYKLIEAGGVFVEVPTQKVKPSQTCPNCGHQEKKDLSQRVHQCVQCGCTEDRDIAAAKVMLNWALGLGTSLTNAEPPSSTSDTRSTGSLRQLGAKKRQKLLAVGEAETPRSACGGE

SEQ ID NO: 59385 - protein, 457 aa, Cyanothece sp.
MNYQTQKILLTGNIDDEAHAYLLWCCEQSNKLYNSVLFSIRQDYFENCNYKTWFDNNDNYRRSPRLRRIKVSYAQLCKDFKDNVHYQAIGGQQGQQTIKLVVEAIKGYNKLLPMWFNGELKDKPKIPNYRKKGLYQVAFTSQNIRYEPQIRICHLPIANSQRKELENPSVIIPSGANFQFLDIAEIRIVPQNGKLWAEYVYKTQLVKASNLDYSHALAIDHGVDNWLSSVTTKGKSFIVNGRRIKSINQRYNRFVAKYKQGKSQDYWDDKLEQVTHRRNCQMRDAINKAARFVINYCLKHQIGNIVFGWNDRQKESINIGKTNNQNFVQIPTARLKNRIQQLAESVGIIFTEIDEAYSSKASFLDDDLVPNYGEKPKGYKFSGKRFKRGLYKTAKGWLVNADIQAAANLLKKVATQLGINLARVVKECLTVPKRYELDGLSRSYRKQAEMWLQPIEA

SEQ ID NO: 59386 - protein, 408 aa, Oscillatoriales sp.
VLKAVKVRIYPTVAQQVHLAQAFGCVRWVWNQSLATMTATYQETGKGVTAMTMKKSIPVWKAEFEWLSECYSQCLQQSVLNLGVAFGNFFDGRSLYPTFKKRQGKQSIQYPQNVKILSDREIKFPGKLGVVKAIVHRDIEGKVKTVTLSKNPDGRYFASMLLDDGTESPESSSDGNIIGIDLGLTDFAVTSNGSKYQHPKATQKHEKNLARKQKKLARKKDKTTNKSRKAKLAVAKVHSKIKRVREDFLHKLSRRIVDENQVIVVENLAVRNMVKNHCLAKAISDAGWGMFCTMLKYKAEMVGKIYLEIGRFFASTHLCSNTLKPLPKMDLSVRAFDCPHCKQRHDRDINAAINIKNEGLRVLTLGTSVIAPEGYVRPKQYGRKSTTVAAVVVEGRSPHSTRSRVSVW

SEQ ID NO: 59387 - protein, 360 aa, Filamentous sp.
LLTNSTPKLDSLPPNVHGRQLLVSLTIAKKQFRGRSAPVPASPKGARERSARQGYPRFKKNCRSVEYKTSGWKLHDPKHIVFTDKNNIGRLKLVGTWDLAFYPIESIKRVRLIRRADGYYCQFCIDIEVKVDAQPTGKAIGLDVGLKEFYTDSNGTTEPNPRFYRQNEKRLRFCQRRVSRKKKGSSNRKKAINRLGRRHLKISRQRKEHAKKVARCVIQSNDLVAYEDLRIKNLVKNHCLAKSINDAGWYQFRKWLEYFGRKFGRITIAVNPAYTTQQCSHCGTIVKKSLSTRTHVCRCGCVLDRDWNAAINILKSALSTVGHTGTWVTDPNASGDLTATEVGAILSQQVDSMNEESPHL

SEQ ID NO: 59388 - protein, 251 aa, Clostridioides sp.
MYCGQHIKLPKLGMVKIGDKQVPQGRILNATISKEPSGRYYVSLCCTDVDIEAFENTNNQIGLDLGIKEFCISSCGEFIENPKYLKKSLNKLAKLQRELSRKTIGSLNRNKARLKVARLQEHIANQRNDFLQKLSTKLIKENDIICIEDLQVKNMIKNRRLSRLISDVSWSEFIRQLEYKANWYGRQIVKVGKFFASSQICNKCGYKNEEVKNLNIREWICPSCNETHDRDINASINILKEGLRLITIQNK

SEQ ID NO: 59389 - protein, 543 aa, Streptomyces sp.
VAEQRKQLRQIARPFVADGPSGVSIRDRLKGLTSQDEKVLRAVGEHMGRLASLDLARRVRDALDHSTDTWAARKRDLTAESSSRWAGSVTSNTHDQWGLARRSQHQHLTSLDAGIRMIRHRLSLPVGGKGSGGKPGGYRSRQEWFLKTRRLAVLETVHDRVRAERDAGGVSVVRGGGRRLLKARHNLTAAGKTKAQWREEWEASRWFLTADGESGKRHGNETIRVTPGGEVSIKLPAPLAEYANARHGRYVLTVRVSFPHRGEEWRDRVACNRAVAYRIHRNTSSGRWYLDASWTRKDLPVVPLGTMRAGRVIGIDMNADHLAAWLLEGHGNPVGAPRRFDYDLTGTAGHRDAQLRLGLTQLLHWAKATGVRAVAIENLDFTDSKTREKHGRKKRFRQLLSGIPTGRLRARLLSMCAEADISVIAVDPAYTSQWGAEHWQKPLTTPRRPASRHQAAAVAIGRRSLGHRIRRRTAPPHRDKSDHGGHRTARARPDTRGSEEHRPRVPGPRTRSAEPGRGRNAVDQDAQDRSGRPAEHVQPMLSL

SEQ ID NO: 59390 - protein, 406 aa, Streptomyces sp.
VGADSFVKRAFKYRFQPTEDQAAELSRTFGCVRKVYNLALAARSEAWSAHGERIGYAQTSAMLTAWKRTAELSYLAEVSSVPLQQALRHLQRAFTGFWTKRARYPRFKSKRKSRASAEYTRSAFRYADGRLTLAKMSQPLDIVWSRPLPQGAEPSTVTVSQDGAGRWFVSLLCEDTPAPMPVTAEAVGIDVGLTALLVLSTGEKIPNPRHGHRDRALLAKAHRALSRKEKGSRNRAKARARVARIHARITDRRRDHLHKLTTRLVRENQTLVIEDLAVRNLLKNHGLARAISDAGWRELRGMLEYKAAWYGRTLVTVDRWFPSTRLCSACGLVAEPIPLGVREWTCEHCGTTHDRDGNAAINLLAAGLAVTACGAGARPHRESSSRSGRSVVKQETSPGRVRPPSR

SEQ ID NO: 59391 - protein, 369 aa, unknown
  TnpB Polypeptide
MILTYCYRLLPSRKQHRALEGLLESQRQLYNGALEERIGAYRRGVTRTFFDQAKALTEWRRSDPEAAAFPLRLQRGTLRRLDSAYKGFFRRAKLKGGKAGFPRFRGAGRWHSFNFDEFDGIRFDGRALRFKGMPSGLRVHIHRPLPSGSRIRCCVFRRGAKGWTVGFSLDFPKAPKKTEDRCVGVDLGISLFAALSDGGFIPSLRAARRAQRRLRILQRSLARKKRGSRNRRKARVNVARCHAAISRSRSNHLHQASSRLVRDYDVIAVESLVGLTRGTLACDVYDASWSTFLTMLRYKAERAGARLVVVDARYTSQDCSCCGMRVPKPLRERTHSCGNCGLCIDRDLNAARNILHRAGVGPGLQNVAS

SEQ ID NO: 59392 - protein, 410 aa, unknown
  TnpB Polypeptide
MKLSIKINLNPSEEQHSLLLETMGLFNNTCNTISQIAHLNQTFGKWPIQKLVYHQLRESTGIPAQLMVRAIAVVAISYKAEKDKKRVHWFKPTSAIPFDSRLRTFLGSESVSLRLWKQRIKVPIVLGKYQQQKLNGIKLSETGESDLIYDRAHDRFYLVLTVDVLEIPTQHHSKVLGLDLGIKNIAADSDGVIHTGAGVGCTRKKYSNLRSGLQSRGSKSSRRHLKRLSGKERRYSRDVNHCLSKLIVQKAKGTGRSLALEELKGIRDRLGRRPVKQAPPSLGDSTVVESPRKHVRKSVRTLINTWAFFQLRFFLAYKAKIAGVEVYVVPAAYSSQTCSVCGHVSKSSRISRDDFRCIRCGHEEPADTNAAKVISQRASVNRPIASDVRQARKRKPYGARCKPTTKVVGS

SEQ ID NO: 59393 - protein, 408 aa, Synechococcus sp.
IGLTGHTLRYRYRLYSHPHHKAALARAFGCARVVWNDALALCQRLYKRGEKYLGVAELQKRCITQAKQSPERSWLAEVSNVPLVQSVRDLDKAFRAWWGCLKGKGRGKVRAPRFKRRSNSQSMRFTRNAFWVEGHTLRLTKVGSIPIVWSRELPAEPSSVTIMKDEAGRYCASFVVEVERPKLPASSKTVGVGIDLGLASLAVTSEGEKIAPPKFLRSALQRIRRLQRSLSRKEKGSHNRQKARLRLARAHVQVADQRLDHLHKLSTRLIRENQTVVLEDLNVSGMVKNRKLARAIADAGWRLLRTLLESKAEIYGREVKIISRWEPTSQTCSACGHRDGKKSLSVRAWRCSACGAEHDRDVNAARNILAAGLAARLNACGAEGKTSVLASGSEAGTHLNQGVQPCTT

SEQ ID NO: 59394 - protein, 385 aa, Iningainema sp.
MFAIKVELKLNNKEKTLMAKHAGFSRFVYNYGLILYKELDYTQFKGSTSKKLDAIKKIFTNITKNRAEFEWMKELSSRVYQHSFMNLKDAFTRFFQGQNEYPKFKSKKEGESFTVDNANGKSLLDVGKRIKIPTLGNFRLKEKLKCRYVTQTFTISKTADKWYVSFTVDADRITPLIHPIESVGIDLGVSIFATTNDSDDKSKKIAAPPPMKKAKTKLAKMQYRNRNKQLGSGKTKTPASKNAKKYYQKLAKQHAKIANQRKDFLHKLTTDLSKTYYRIRIEDLNVQGMIANRKLSAAISDLGFYEFRRQLEYKQYVYGTKVEIVDRWYPSSKQCMVCLQKHTGLSLSDRIFDCPHCDAPPIDRDIQAAINLRLAPDIVVTPARG

SEQ ID NO: 59395 - protein, 313 aa, unknown
  TnpB Polypeptide
MPKKVEEYSFLKEVDSIALQQALRHLDEAFQSFFSSQGKGYPKYKSKKENDRSYTTNCVNGNIELSNGYIKLPKIGKVKIKQHRKVPDSYILKSVTVKQTPAGKYYVSILFEYEKQVQNKELLSFLGLDYSMHELYKDSNGNEPAYPRYYRNAEKQLQREQRKLSHMQKGSSNRNKQRIKVAKLHEKVANQRKDFLHKLSRQITNAYDCICIEDLNMKAMSRSLRLGKSVSDNGWGMFTAFLKYKLEEQGKILIRVDKFFASSQTCSVCGYQNNATKDLSIREWDCPQCGTHHDRDVNAAINIKNEGMRMLSA

SEQ ID NO: 59396 - protein, 345 aa, unknown
  TnpB Polypeptide
MAFEVNQVWNKINELTFNAYREPIPGVGWVNCGDWLSNFDVHKLLNGYTKTNPVAINMFTVQEISAVHAKARNQFKKSKLRWRISGGTRRNLGWIPFRVGAVNFKNGQLIYAKHHFKIWDSFGLSKYKFLSGNFAEDARGRWYFNVCVEVEAQPNQATKSVGIDLGLKATATCSDGVKLEAERFYRKLEAKLASAQRAHKKSRVQALHAKIKNQRKDALHKFTTTLCNEYGAIFVGDVSSTKLAKTTMSKSVYDAGWGILKSMLKYKAIARSAWFSEENEAYATQLSSCCGIFSQNRPRGRTGLGIREWTCECGVIHDRDVNAARNILALGHKRLEGGITGLSVR

SEQ ID NO: 59397 - protein, 399 aa, unknown
  TnpB Polypeptide
LKVKKTIKTKIMHLTKIKQRLLKEEYYNLQRFLHGESVKLYSANKQQAKRFYKKIKPDKEYPISVRKDLLKVERRRDTKIAKYWARIPVAGRRGGVWVAVKPHCPIELDMEICESKLFKRNGEFYLHITVQKEVEVPKPELAEKTTVVIACDIGEANPLVSVELWDQGKKRKNAQFLGGEMRSVRAHYNHLKKRIGRKKIKHAINWIKEHVANKETRKVNDILHKATTKIVDRALMLKRSGYEPVIVFGDLKNVRQPRVKGKRRCRKTNRKIHTMPSYKIKQMLTYKALWEEVPVIALNEAYTSKLCWRCRSLNTEIRKRCFRCKDCGLEYNRDLNGAINIGNRLLGYMLKSRAAVNTPKTSPEYTALLEKRFDNVSEREGGSPLQQLGVVHPVSWIIT

SEQ ID NO: 59398 - protein, 421 aa, Escherichia sp.
  misc_feature (86)..(129): Xaa can be any naturally occurring amino acid
VKRLQAFKFQLRPGGQQEREMRRFAGACRFVFNRALALQNENHEAGNKYIPYGKMASWLVEWKNATETQWLKDAPSQPLQQSLKEXXXXXXXXXXXXXXXXXXXXXXXXXXXXXXXXXXXXXXXXXXXXAFRYPQGVKLDQENSRIFLPKLGWMRYLNSRQVTGVVKNVTVSQSCGKWYISIQTESEVSTPVHPSASMVGLDAGVAKLATLSDGTVFEPVNSFQKNQKKLARLQRQLSRKVKFSNNWQKQKRKIQRLHSCTANIRRDYLHKVTTTVSKNHAMIVIEDLKVSNMSKSAAGTVSQPGRNVRAKSGLNRSILDQGWYEMRRQLEYKQLWRGGQVLAVPPAYTSQRCACCGHTAKENRLSQSKFRCQVCGYTANADVNGARNILAAGHAVLACGEMVQSGRSLKQEPTEMIQATA

SEQ ID NO: 59399 - protein, 148 aa, Clostridium sp.
MNKKGESYQKTKNIAKLEKKIEKLHSKLKNIRLNHIHQTTSKMVKAKPYRIVMEDLKVSNMMKNKHLSKAIAEQGFNIFLNQIKYKCEKYGIKFVQVPTFYPSSKTCSHCGTINKDLKLSNRTYKCSCGFICDRDKNASYNLANYGLV

SEQ ID NO: 59400 - protein, 550 aa, Mycolicibacterium sp.
VGGVGTTISLLVGGGCEYAGVAGHRPLRRIADPVVAAAPAGVRVRTRIHPSADEAVALTAIGDLLGSMYRSELAARIGLGRLGPQGRVRWRAKRKQALTAVSSSRWAGAITRAVDDQILLGMRGLVAQVADLRAAIEVLEVRCALRPGQLVPAADGDEEPAGRGRSRRVRGYRSAAERFAKTRRLAVLKARLAAAEAALAAGRPSITVGGKRLWRTRNHLDAADMTEPQWRARWNAARMFLTADGESGKPGGNETIRVDEHGHLRVKVPAALAERFGTHLTVAAPVAFHHRGTEWAGRVQHRRAVRYDISHDPDRDRWYLDASWKTAPETVPGIDQLRDGPVLGVDLNAAHLACCVLDASGNPIGEPVTVAVQTSGLRASRRDGRIRMAITALLDLAAQHNCTAVVVENLDFAGARATGRETLGRGGRGKRLRSIVAGIPTARFRNRLVGMATRRGIGVIGVDPAYTSRWGTQHWRTPLQQQTSDPATVTGHHGAAVAIGRRGLGVAIRRRPVGPRTRQRTGVGTPPARPEHPPRTTRRCRSSGSPPRPP

SEQ ID NO: 59401 - protein, 303 aa, Archaeon sp.
MRTYKFRLYPSKEDKRKLEETLELCRQIYNHFLEELNERNDVPPRTELQSQLPNLKNEWNKLNSVHSKVLQMVLHRLCSNLRSLSEKKKNGYKVGRLRFKGKGWFKTFTYNQSGFKVVKTKNRLDTLTLSKIGEVPIRIHREVKGEIKQVTIKRAQSGKWFACIQTDHEENRESGEGVVGIDLNTENYLTDSDGNVVENPRFLEEKEEKLKKEHRKLSRKEKGSKNREKQRIKLGKAYEKLVNCRRDFIHKLTTAYVENYDTIILEDLNIDEMCENSRYAKSNLDASWAYSRSCFYTRLRALV

SEQ ID NO: 59402 - protein, 209 aa, unknown
  TnpB Polypeptide
MLLSKKTSIKVSREYANLIGHMCYAASKLWNVCNYERQHYKETGMEQYPDWYYQKKAHKEDLWYKQLPSQTAQEVCRLLDKAWKSFYALKRSGGIETPRPPRFKQESIPITYMQMGIVHERDTDRVRLSLPKTLKKYMEETYQIHENFLYLENKIFRGMDQIKQLRIYPPEKGSCKIIVVYEVPDQEELPQNGHELSIDLGASQPYDVL

SEQ ID NO: 59403 - protein, 274 aa, unknown
  TnpB Polypeptide
MKTFFTLKIRFSGAWIRSNSCGSIRRRREAVKLLLFMRSLTRKNFHRTDMNCLLIWGLHNLMTCYDSENGKTFILGRKYLELERYFHKEIARVQAQWYGQQSGKGVKHPVTSKHIRKLYKRKQDSVTDYLHKITRYLAEYCREQGITCVVTGDIRNIRREKDLGHRTNQKFHSLPYNRIYIMLEYKLKRYGIRFIKQEESYTSQCSPLSPKVGKRYAEPSKRKERGLYRDGNRTYNADAVGAYNILRKYHSVSGVKRELSVTGLKTPEIIKVAV

SEQ ID NO: 59404 - protein, 308 aa, Mycobacterium sp.
MRSPSPRTAAAAALTGAFSAPWHEDPKLIVMTWTHSVTVRVVKLVVQVKLLPDTTTEAALRETLKLCNQAACHASRRAHATGAKGKTTLQRLVYGELKAMGLSAQPAIHCVRKVAGAYATLDRNVKAGNYTVHSGKHINQVRHRNRRLRTKLQRKGTRSAKRLLRHLSGREARFAADTNHRISKQIVTEAQRTTRGIALEDLGGIRARVRLRKPQRVTLHSWSFAQLGAFIAYKARRAGVPVVFVDPRYTSQGCSACGHIHKRNRPDPATFNCTSCGFAEHADVNAARNIAARGAAGWAVSHAADDAA

SEQ ID NO: 59405 - protein, 407 aa, Chloroflexi sp.
MPSVVVGVPSATFTSEKFIYINASTLIMRSVVTAKIRINPTKELVATIKAYTRALQFCVDKAWKTKIRTNFNLHRVVYPTLRQRFKLPAQLAVGCIVQACAMVKKAKFKPIINRTSVRYNFPRSANLKANILILRLLKTRQEFSFNIPDCYKEYFTWEVNESLLRMDSKGRCFFLFTFSKEVDATEQNNASQNIVLGIDLGVNNLAVCSDGRFYHSSKVKQIKRKFKHLRSVLQAKGTRSSKRLLKKLSGRETRYMAWVNHNISKDIVSNFDGNKIIMENLKGIRKQRRGKIMNYWISNWSFFQLQFFIQYKAERVGISVIKVKPNYTSQICHRCGQLGTRLSGCFSCSHCGLSSFSADLNAARNLAHPMLVERQGAVTHPHSQSDEAEGNSQVAIEAELMAKSPAL

SEQ ID NO: 59406 - protein, 351 aa, Nocardiopsis sp.
VVGGRRLLHTRHHLADAALSEAEWRRRWEASRLFLTADGETGAPFGNYTITVHPDDGSVTVALPEALRHLANAPRGRYLLSCTVRFSHRRDEWLDRVTAGRAVRYDLTHDVERGRWYVDVSRAVENPTPPTPDELSAQGVRLLGVDLNADHLAACVLDSHGNPVGAPFTVPLELTGPTNTRDGRLRAAISQLIRLAHQHGCAGVAIENLGFTDARQTGRETMGRGRRGKTFRRTVAGIPTARFRDRLRGMASHAGLVVVAVDPAHTSVWGRRYWKEPLQQQTRGKTNVTVTGHHAASVAIGRRALGCGIRRRSGRAHDRRIVCAEPTTRTDPPPGRGGPRAHAGYRAHPLG

SEQ ID NO: 59407 - protein, 498 aa, Deinococcus sp.
MVGLRNEAGFVDRRASVPASDDAGGLLLKEAIMTNVVSVDLAVPLYPAPGMHRIWDVVLRAQATVNTHLQLLAAGHNITLLEVAGAAREAQATVPLPRLPPHDTYVRVSVPTTNEYLVSFRSVRDAMGWLEVVPASALAWMVRQTLREWRAHVGNESVRVSELPPPWSPFRPVELHVDQGVLLVDGATIEVARVGRVHADVRLLPDPYWGALWSQRQRRLLSEQQRLHRAEQAWLESGNHEASRLALRIRARYQAAGISLDDPVVIDAPHASDLAVTERVVIQRVERPGESHAWQVVWRFRVRAPASPRWTIDDLIGLDPGFQNVVGYASGTLRGVIRRPTGGAWEEPELLPTRVVPVSMQDEARARVAHRLALIERMRPAYAELHALALAHRSVVIEDTDWGAFQRRQQWFGEYAARVGLRTALDHLVALAPLHGVTVQYTRCQYSSSTCSRCTWVGRRARVGARFRCPHCGYTAHADINAASVHRQRSLTGEGRQP

SEQ ID NO: 59408 - protein, 383 aa, Streptosporangium sp.
VFEVKLVVQVRPLPAPEQAAALEATLRAVNAAATWVSALAHHRRVFRNYDLRRHVYGQIKDDYGLAAQAAQHVVKKVADAYATLHANVGNGNVGRPGSARRERVLAKPILFRPGAAHPFDDRCLSWQMDARTVSIWTIAGRMKSVAFTASADQLKTLAAYRKGESDLLYRDGMWFLIATCDIGDRPVATPNGFLGVDLGIANIATTSGGGRHSGKGLNAVRHRHRELRRRLQAKQTKSAKRLLKKRRRKEARFAADTNHTIAKRIVTEATRTGQGIALEDLQGIRDRVRLRKPQRVTLHSWSFHQLGQLVAYKAARAGVALVHVDPAYTSQACSSCGHIDKKNRPDQATFSCTSCGFAEHADVNAARDIASRGVTSWAVSHAA

SEQ ID NO: 59409 - protein, 407 aa, PVC sp.
MLLVERHHINGTPEIIELCRVARRLYNKCCYILRQAHFRGERLPDFNGLHEQVRNEESYFKLHNTKTAKQTIRQCYQDWMSYFAALKAYYQDKTKFIRKPKPPGYKKDLSQVVFYKETIRKAPLRKGIITPTNDLFQIQSEKAKEGDFQQVVITPKKFGFIIEVRYKVLKNERRERIRRHGMCSVDIGVNNLMTITSDVQPPLLVNGRIIKSINQYYNKSQSKKALKKRYWRLENYFHHASKFLIEWCRSNRIGTIIIGRNTGWKNGNKMSRKSSQNFQSIPFYKFFEKVLYKAEFAGIKVVFTEEAYTSQASYLDRDPIPLFEKGVKPPVFSGRRVKGLFKRSDGSSLNADVNGSANIGRKVINDAEFLSRVDRSLAARPARVNPLKNFNQNSGSLESVGSANSKS

SEQ ID NO: 59410 - protein, 407 aa, Calothrix sp.
MQLVEKHIINRQHKFWKECDYLALQSKHLYNAANYVQRQYFFETSKYYNSIDIYHQTKNLEAYRYLPTKVSKQIVRRLSEAWKGWLAALKDWSKHPEKYLGKPKMPGYKHKKRGRNIVIYPIDAISKPALTKRIIKLSQTHIEFPTQAKNVDQVRIVPKIDHYVIEVIYTVADAMKSSGKYSAGIDLGLNNLMAVTSNHPAIRSLLINGRPLKSINQFFNKRVAKAQSIAATRQVKKLNSKRDRRIDNYLHTVSRRIIDWCQLNAIGQLIIGNNLRWKQDINIGKKNNQDFTKIPHAKLISLLTYKAQLAGIEVVLTEESYTSKASALDGDELPVYHSKTNHQPVFSGQRIQRGLYKTHTGKFINADTNGSLNIARKVIPNFMDGIEGLPFIPVVLGLWTKITNIVV

SEQ ID NO: 59411 - protein, 426 aa, unknown
  TnpB Polypeptide
VYQVEQHYIMSNHVWWDYCDAICFASKNLYNTAQYSQRHSYKFGHGILSQPTLNKLFKDSLHYKAIPAKVAQLVLKQNTDAWSTYFKALKAWKEDPTKFTGSPKEPNYITPGDKGRNLVKFNKQAVGKREFSKGFIVPSMSPILIPVKPGLALEDLVEVRIVPKTAAFVVEVFYEIPEHSEFFCSLNPELAASIDIGLDNLATITFNAPSIQPLSVNGKPLKSANQWMNKEVARLRRQLGFGTSRRVQNVIRNRNNFIHTYLHQATRLIVNELLGLGVTQVAIGKNEQWKSKINIGKRNNQSFVQIPHAKFMAMLTSKLEAVGIKVTVGEESYTSKASFLDWDNIPIYTPNNFESRKFSGQRVRTKEYRAHNGAKIHADVNGSFNIGRKVIPNCFDCLKSIVERNRGCVVAHPRRISPKITHRNLS

SEQ ID NO: 59412 - protein, 494 aa, unknown
  TnpB Polypeptide
MAKCNTKSYVIEFNLATSENDDTILKTRFRIVHHITNVLVKHAIHCIKNLERDKTYKMIMNNYSKTKKFSKEEKDILNNLRLKYGLSEYQFYDYAKTQSKMYNLGSAIVQKIATRTWSSVHSYLFKNGEMIHFKKYPDIKSYENKCNGANITFKNNVIYNNGLKIPIKYKKTDVLINNALKDIKNNYTKVKYCRIIRKWHKNKYVYKCQLILEGTPPKKKNIPINDNKIVGIDIGTSTIAVVSDDNVLLKELAENVTSTEKELKRLQRHRDRQNRINNPNNFNDDGTVKKGSKIWYRSNAMIKTDNKIKTLYQKRSNQLKQSHILLTNEILKFGTNIIVEDMQWSALAKKSKKTEISEKTGKYKKKKRFGKTIANHAPSMLINIIDTKLGYIDKHVNKVDCFKTAATKFNHVTGELMDTTLSDRYVYINDQKVQRDLHSAFNLKYIIISKDKYEYDINAMNENFDSFILKHNELLNSLRNEKQLGHKFPSCMGI

SEQ ID NO: 59413 - protein, 409 aa, unknown
  TnpB Polypeptide
MKRSNLFDLVPTREQHRILQELSINCAKLWNEVNYLHRQQYQNYLRLDWNPHIYKKHVPLVGSATAQQIVRKNNEAWRSFLMLKRMERNGKLPPTMKRVKPPGYWKRDGRCVLRVLFRCDCYHIRQGRVDLPRHLSIPFKGKLKWVGKQGRLEVAWDTLSEKWRVFQAVEVKPIITPLGSKTCYIDMGVRNLATVWIPEWRQPIAYQSGHLLADWWYWTKRIAQHQQRLLTVNGKKKSRQLARHYRIRKKRFRHAVATFARQLVRDLYRQGVSTIVIGELTGVRTNSNHSRQGNAMVHNYWSHKHVADRLGWTAEEYGIKIETVSEAYTSQTCPRCHSRHSLRVLRGFRCLDCGLEAHRDAVGVLNMAARCGGYAVRPMAWPMLLRWDGCGWNRNNGMPTQEKRIVVEA

SEQ ID NO: 59414 - protein, 349 aa, unknown
  TnpB Polypeptide
MVTVTVTTKFHNPSLSRRKEWQHATHLYRDTKQFCIDGWENGDFDKSVTTASIDNDLYSAIQNQAIREAKSDHNEDGAVQYRESQPFAVNNQNWEIDTTDNGTVIIGFPCVSQWWYTPIEVYDDIADPVDRLVEGDADKTRLQVYRRGDDWYCTFNVEYDTGPSGETPIGVDIGERHILAATAYGKNESMLVSGGEAKYVRRKYRSLRDSLSKAGALRARNRVGNKEQRRITELNHKLSRRLITFAEQFENPVIRMEDLEGVRENSSWSGVHSWHFHQLQEFITYKSERAGIRVEKVDAYHTSQKCSECGSMGDRDGDHFSCSSCGRGRHADLNASENIAQREGEPCTA

SEQ ID NO: 59415 - protein, 404 aa, unknown
  TnpB Polypeptide
MLVKGVAFRLESDIPFEAMSLLEDFRLAVNNAIRAGVQARVTSRNTLVKIAYRDFREQHPRMYAQHLVSAFEVAGSVLKNHRRRFRKDVSCRTPFVKRLMMKAENQAYKLDRKLGVIDLPIRAGYHVELRLIVSQYHRKYLDDMSLSLGSLTVLPDRVIVAFRKEAPKPFVPESVLSLDTNERSLDGVFVEGEVAKAVKADFPDIAIIQQRHHDRRKRLQKKKAHDCRTSRNLCRREGTREHHRIDCRLHQVANSVLKFAEERKSAIVLEDLKGMRPKRSKELNRRLSMWPRRKLHQIIEYKAQWKGIPVVKVDPRYSSRTCPTCGRKQDSRMGAEFKCECGWHMDRHINASMNLLQTAISKGMAGGLRFDPGAFQHDVMMILYEPAMAARSEPNGTSYVVEVT

SEQ ID NO: 59416 - protein, 372 aa, unknown
  TnpB Polypeptide
MSQLAHKYRVYPNAEQKVLLAKTFGCVRVVWNNILDWRSKEYSLNATKINYVASAKRLTAIKQIPELVWLQEVSNVALQQSLRAQDVAFSNFFAKRAQYPKFKSKHGKQSFRLTNSGFRIKDGELYIAKSNVPLVLSLSRPLPNNLNSATISLDASGRYFISLQGEAEKLPLPELTKSIGLDVGLTHFVITSDGDKVENPKFYRKQAFKLARLQRSHSRKVKGSINRNKARIAVARLHAVIADSRKDFLHKLSTKIIRENQTISVEDLNVAGMVKNHHLAKSISDASWSEFTRMLEYKAGWYGRNLVSINRYYPSSQLCSACGHYGEKKALNVRSWLCAKCGAEHDRDINAAININTAGLAEIGLNPKVCQI

SEQ ID NO: 59417 - protein, 280 aa, unknown
  TnpB Polypeptide
MNPSQWRKPGEKLHWRIIIHVRVSQPIRPYTSVHVDWVHRTLVFVNMPLPLPRTGGGVIGLDRGCVHTLALSNGMFEDMPKPSKAELKRLRYLQRRMARQDRVNEAKGGRTAKFASKRRRKTLNQFNVLQGHIVCRRNDWIEKTTTRLACENVLVAMEDLDVQAMTKRPKPRPDPDKPGRYLHNGAKAKAGLNRSILSNNWSRLMRRLQDKMDANGGNLVIVPAAYTSQACHECGHVASENRDSQAVFRCVECGYQANADTNAAMNILDRALNKTGGGAA

SEQ ID NO: 59418 - protein, 426 aa, unknown
  TnpB Polypeptide
MSMQEKQAARKSKRAKQATEPRRITRAVTRIRLTDVNAGKLAALDALAPVYLILCQQYVTLFCTEELPNKLRDSLYETELSERWHRVAIMQAAGIAKSWRSNRVNALRDYEKSREQYKKRLAEYKEQKARGMLEEGEEEIKEPKAPVWREWNIPTLQEWCIQTNANVARLEPSEDSSFDYWLTVATLEKGQPMKIPVKLADYHKEALKEKKLNSSVSLNKRNGDWWLTVTYDEEIAISTSPDAPVVGIDVGIANFITTSTGKHYGTMHGKLKERHKRDRAKRRRKAKLRACLEKKGVKKLPSTSSRTGQKLIRQTKQAINRAVNECYADPDHQSVQFAYEQLSVASMRFKAKAMNAYLRASNLAHIPQQIKWNAEKRGGMATPVIPAYSSQECSVCHYTDRKNRPDQRTFRCQVCGLTAHADHMHR

SEQ ID NO: 59419 - protein, 313 aa, Oceanospirillales sp.
LQQSVINLDKAFQNFFNPKLEARFPRFKSKHGKQSSYHCTSVSVGDKWIEIPKCEPIEAKIHREIPGKVKSITLTRTPTEKYYASVLVDDEKTEAVAITDLQSTQVVGVDVGLTDIAITSTGVKTGNPRFVKNAQLNLKRKQKKLSRCKKGSKGRAKARLLVAKAHERVAFARNDFQHKLSKQLIDENQAVIVETLKVKNMLKNHCLARSIADAGWHSLITRLDYKAKQAGKHLVKIDQWFASSKTCSCCGHKQENMPLNVRSWTCECGYLADRDINAAINIRQQGILKLKAEGLSVSANGGKRKSSTLLVAA

SEQ ID NO: 59420 - protein, 418 aa, unknown
  TnpB Polypeptide
MRRKKKETENPIPTIARTHKIRIYPNQHNQEVFQKYYDYQRYVWNRAIDERNAQYKIYKEMKATGLYTQKELNKNYFPNTRNLRKMEKFDWENNFHCRVREIQFDNLCQAWDNYFNPSMPNHKKPKYKKKKDVESHKKISLRGIRIKDKWLFLPKSQKSKPEYRFTKIKMAETLRFNGRITDDFTISVKNNKWYVTITVETPLDKKQSTFKQSTGIDVNVGSIDYLKKGGQNKEYDKFYLLPKSLLRQYEKIKFYSRLISKKRNKNPYYIHSKSYHEAIIKLNNAYTKAYNIQEANLNNMVKYFFSNYNRIVIEDLDVNSMKMNKRLCKSLHRNAFGRFKKKMIDKAEEYNVEFILANRYFPSTQTCSECGHVKTGDEKLFLWGDKYGNDHDTYVCYNCGTIQDRTENAILNLNHYGK

SEQ ID NO: 59421 - protein, 370 aa, unknown
  TnpB Polypeptide
MKLTAKIKLQPTPDQHDALLQTLETANAVCNDISRQAWDSKVFGQFKLHRLVYHDIRDRFPLSAQMVVRAIAKVADAYKLDRKTKRTFQPRGAFPYDDRILSFRTDEQTVSIWTLEGRQRMGYLCGDRQRKLLEGDRGEADLCYISGEFYLFVACEVETPEPQDVGGYLGVDTGVANIATDSDGNNYSSAHLNGLRHRHARLRAKLQQKGTKSAKRLLKKRRRKEDRFARDVNHCISKQLVQRAKDTGRGIAVEDLTGIRDRVTARKAHRRQLHSWAFRDLRAKVEYKAALAGVPVVAVDPRYTSQTCPECGHISKANRPNQSTFSCVACGHSGFADHIAAVNISRRAAVNQPYAGGEATKGHPANCVAA

SEQ ID NO: 59422 - protein, 223 aa, unknown
  TnpB Polypeptide
VASIDINVNNIVAMADNIGSRPIIVKGGVVKSINQFFNKERARLMSAKDKQGYTHWTKKLTKLSLVRYNKLHDVFHKLSRNIVEHCVENDIGTLVIGYNATWKQEVNMGKRNNQNFVSIPFLMLIDKIQYKAELIGIHVILQEESYTSKCSFLDREDIGWHYQYKGLRLDHLKKRGLFRASDGRIINADINAALNIMRKAIPNVKFAKGIEDIVLRPRCVSWY

SEQ ID NO: 59423 - protein, 422 aa, unknown
  TnpB Polypeptide
MATKAEKIKQTIKETKERRKNLRPVVYQLKIQNLSDTKEEKLNRVFLEAKWLYNWIVADIDRVNTPTKEIKEIEVKVGDKLEKREIKYLGSQIKQSIQDRIKDNLKALKTLKKNGHKVGMPKFKKTISSINLKQYNVTFDIDFKRNKVRIQGLGWFRVLGLHQIPQDYEIANAQLIKKPSGYYVYLTCYIKKEHFERDNVRTAIGIDFGVSNKLTLSNGLTVDFEIEVSKRLKRLQKKLARKKTGSKNRAKTQNKIKREHERLANKRKDVHNKLLALFRHYGTVIFQDDSIKSWHEGWFGSQVQYSGIGKLKARLRDSLATISVDRFEATTQECHVCGYKQKLNLSDRVYCCPVCGNTINRDLNSAINMLKKGLDLSHSQIVGMDCPELTPVERTLATKILGSNPYIKVAVLCEAGSPHFYK

SEQ ID NO: 59424 - protein, 407 aa, Thiomonas sp.
MKRLQAFKFELRPNGQQQRQMRRFAGSCRFVFNKALALQKARFEHGEKKLGYAGLCKELTAWRNGSDTPWLGEAPIHPLQQALKDLERAYANFFAKRADFPRFKKKGHGGSFRYPDPKQIKLDQANSRIFLPKLGWLRYRNSRDVLGAVRNATVSFSAGKWFVSIQSEREVEPPIPSATSAIGIDVGIARLATLSDGTFVAPLNSFRTHEVRLARYQRAMSRKVKFSNNWRKAKRRVQRIHARIANARRDFLHKATTSISQNHAMVCIEDLQVRNMSKSSRGSAEKPGTNVRAKSGLNKSILDQGWAEFRRQLDYKLQWSGGWLVAVPPHNTSRTCPCCGHIAADNRRTQAQFKCVACGYANHADVVGAMNSLARGHRVAACGEVVHSGPSMKQEPTEATAHEVTHA

SEQ ID NO: 59425 - protein, 429 aa, Thiomonas sp.
MQRRKVTLKLYPNAAQAQKLEAWTRLHCELYNAALEERIDAWRKAGKSISYYDQQNVLPQIKADRPEFIALGSHALQQTLRRLDLAFQSFFRRVKAGQTPGFPRFKSSKRFSGFAYPDPAGWKLMQHGGSGATLRIGSGDAALSIRARGRHRFGPDAKPNDITLTRRNGQWFVSVTLRVPDAACARPRTADMRRGVDFGINDWATFDAGPPIANPRWLRTELPRLAALQRERARKRKGSVRYKRLSRGIAVLHDRIANLRRDFVHKETTTMVQQCAVLATEQLTPKTMSRSAKGTVEAPGRRVKQKAGLNREILSAGFGMAHQMLAYKAEEAGTRLHLSHTRQLKPSQRCSACWELVPKTLAQRVHVCPHCGHTAPRDQNSALVVLIDAFNTQDTPGTGVAARPKPLPRQRGKSKSVTRETPTTAPSGA

SEQ ID NO: 59426 - protein, 167 aa, Thiomonas sp.
MNLHQLAEQTACCTVISCYDEIVAKKGQHDSLRYPDPKQIKLDPGNSRIFVPKLGWLRYRNSRDVLGAVRNVTVSSSGGTWFISIQTEREVEQPIPSATRAIGIDVGIARFATFSDGAFLPPLNSFRTHAVRLARYQRAMSRKVKFSKNWRKAKAKVTKLHQRIGNA

SEQ ID NO: 59427 - protein, 279 aa, Thiomonas sp.
MTSNAGIGRSKIPLVGATAHRRIDLLLHFMVQTGLGPRKGAKAWQATAQTKPARSRATATQTLLSVTPRACSLANGSLRFKRLGCRIARLHDRISNRRQDFVHKETTKMVRQCAVLATEQLAPKTMSRSARGTVDAPGRRVRQKAGLNREILSAAFGMAHPMLAYKAEEAGTRLHLSNTRQLKPSQRCAACWEIVPKTLADRMHVCPHCGHVMQRDQNSALVVLIDANTPGTGVAARPKPLPRQRDKSKSVTRETPTTTAQDAMDASLLRAGQWIGHKA

SEQ ID NO: 59428 - protein, 429 aa, Thiomonas sp.
MQRRKVTLKLYPNAAQMARLEAWTRLHCELYNAALEERIDAWRKAGKSISYYDQQNVLPQIKADRPEFVELGSHALQQTLRRLDLAFQSFFRRVKAGQTPGFPRFKSAKRFSGFTYPDPAGWKLMQHGGRGTTLRLGSGDAALSIRARGRHRFGVEAKPNDITLTRRNGQWFVSVTLRVPDAACARERTGDQRRGVDFGVTDWATFDDGRTIDNPRWLRVDLPKLAALQRQRARKKKGSLRFKRIGRRIARLHDRIANLRRDFVHKKTTCMVQSCAVLATEQLAPKNMSRSAKGTVEAPGRRVQQKAGLNREIRSAAFGMAHPMLAYKAEEAGTRLHLSHTRQLKPSQRCSACWEIVPKTLSQRMHVCPHCGHTAPRDQNSAMVVLIDAHNTQDTPGTGVAARPKPRPRQRGKSKFLTRETPTTAPSGA

SEQ ID NO: 59429 - protein, 295 aa, Thiomonas sp.
MQHGGRGATLRLGSGEAAMSIRARGRHRFGDQAKPNDITLTRKGGGWFVSVTLRVPDAACARERTADFRRGVDFGINDWATFDEGPPIANPRWLREELPRLAALQRQRARKKKGSLRFKRLGRRIAQLHDRIGNLRRDFVNKETTKLVRQCAVLATEQLAPKTMSRSAKGTVDAPGRRVRQKAGLNREILSAGFGMVHPMLAYKAEEAGTRLHLSNTPTRASSNRRNAARRAGNLFPRRWRSVCMCARSAGTRPRATATAQWWFSSTRTTRRTRLGRAWRRDPNLCHGNVASPGL

SEQ ID NO: 59430 - protein, 296 aa, Thiomonas sp.
MISAVAWTSVSPTGRHSTMDGPSITRAGCARNCRALPRCSGSAPGRRRDRCASNGSGVALHNSQLHDRISNLRRDFVHKETTKLVQQCAVLATEQLAPKTMSRSAKGTVEAPGRRVRQKAGLNREILSAGFGMAHRMLAYKAEEDGTRMHLSNTRQLKPSQRCAACWEIVPKTLAERMHVCPHCGHVMPRDQNSALVVLIDAHNTQDTPGTGVAARPKPLPRQRGKSRSVTRETPATTPCVSRRESSSSPLHDANVILASWVCGPTLPRLPKSRRSKRDPPPAVGGALIHPTRKET

SEQ ID NO: 59431 - protein, 370 aa, Bacillus sp.
MTKQNKAYKFRLYPTEDQAHLMRKTFGCVRFVYNRMLAERKEAYEKHKDDKDQLKKQKLPTPAKYKAEFEWLKEVDSLALANAQLNLQTAYKNFFRGQNDFPTFKSKKDRKSYTTNVVNGNIMLLNGHIKLPKLKMIRIKQHREIPQDHIIKSCTISMTPTGKYYVSILTEYEKEIVQKEVETVVGLDFAMDQLYVSSEDERANYPKFYREMLDRLAKAQRVLSRRTKGSIRWNKQRIRVAKLHEKVANQRKNFLHHKSKELATHFDVVAIEDLNMKGMSQALHFGKSVADNGWGMFTSFLAYKLHEQGKQLVKIDKWFPSTKTCSSCGNVKNMSLSERVYSCICGVNLDRDHNAAINIKNEAIHLLALA

SEQ ID NO: 59432 - protein, 252 aa, unknown
  TnpB Polypeptide
MGANIKVLEGAVQLPKLGRVKCRISKPVEGRILSATVSQTPSGKYFVALCCTDVDVEPLPSTGAVVGIDMGLKAFAITSDGVEYPNHKYLAKSEKKLARLQRQLSRKSKGSNRWEKARLQVARLHEHIANQRQDAAHKLSTQLIRENDVICIEDLAPKNMVQNHRLAKPISDAGWGEFRRQLQYKAKWYGKTVVTIDRFCPSSQTCSCCGAQWSGTKDLSVRIWTCPECGAVHDRDINAAKNILNEGLRLLA

SEQ ID NO: 59433 - protein, 523 aa, Acidimicrobiaceae sp.
LVLRPPLWAPRGAQPGREGAAVCRTRYGTHGAVTPCCDNLNMAVHQAFRFELDPSTTTRSALGSHAGASRFAYNWGLALVKDRLDARQALEVLAMRQGAGAGEARAWAAETAGPVPWTLYSLRKEWNRVKDEFAPWWRENSKEAYNSGLDALARALKGYFDSRGGARAGRPMGFPTFKKKGGQPSCRFSTGVIRVVDDRHVQLPRLGVIRTKEHTTALLDQVVAGMARALSATVKEEAGRWFVSFGCEVERHDSVATYPDAIVGVDLGVHHFAVLSTSELVENPKPVSHFARRMARLNRELSRAQLGSKRRAKTKAKLSRCHRRVANARRDTLHKLTTHLATAYGTVVIEDLAVKNMTACPKPKADPENPGHHLENGHAAKAGLNRSILDIAPGELRRQLTYKMGWHGGHLVVADRWFPSSKKCSSCKEAKATLSLATRTYRCGNCGLVLDRDHNAARNLAAYGKKHLVAGSGPETQNGRRGDAPCTSDTGAHSPKSPRGRKRQDGSGQPAKAVTASSQGEAA

SEQ ID NO: 59434 - protein, 404 aa, unknown
  TnpB Polypeptide
MLVKGVVFYLDSDLPTEAKFLLEDFRLAVNNAIRAGLQARVTSRNALNKLVYKDFREQHPRMYAKHLVSAFEVAGSVLKNHRKRVRKDVTCRTPFVKRLMMKAENQAYKLDRGSGIMDLPIMAGCHVELRLVVSQYHRKYLDDMTLSLGSLTVLPDRVIVAFRKDAPKQFVPESALSLDTNERSLDGLFVEGDVAKAVKADFPEIAIIQQRHHDRRKRLQKKKTHDRRTSRNLCRREGTREHHRVEYRLHQVADSVLKFAEERRSAIVLEDLKGFKSKRSKELNRRLSMWPRRKLHQIIEYKAQWRGIPVVKVNPRNSSRTCPVCGRIQYSRMGTEFVCNCGWHLDRHINASMNLLQTAISKGMAGGLRFDPGAFQHDVMMILYEPAMAARSEPNGTSGVVGVT

SEQ ID NO: 59435 - protein, 378 aa, Thermoproteus sp.
  misc_feature (321)..(327): Xaa can be any naturally occurring amino acid
LSFNSSAGGAKRQRYELWIKPHRRFWLYWWKALRGEAELASTLMLKRRRGRWYAIFMFDVKTRKEPPAEVVAFDINENTVAVARINLLATVDRVASWNRQYTYPAVYSIRTNFGRLAKRYRRIRNAKLEELKRKYPYAGRDDEEKVQNVTDTREYKKFARRLREKRRKEARVRQVARDVMRNPAVIITEELGKNPQEEMIGVKKKKVKKRELRHRIKQIPFRKLVRTVEDKAAEVGSSIFLVSSFRNSRACPIHFAKLEDGGDWHTLWCPHGHEVDRDAAAVLNMLWKITPEGVTRGVWWRSLRGMKLEREELVPEGLTKXXXXXXXFSSYLLCLYRQIRRTPFLSAIGPRLLTAASATGRPLKARGEIPKARTRLRK

SEQ ID NO: 59436 - protein, 270 aa, unknown
  TnpB Polypeptide
MQITTSYGVRIKANKTVLSNTVFIYRQALSYVTDIVDLEWDFLTAVDSKYPNARTMYIEKLIHSTKEKDRMYTLLNQIKRNQQRGNYRNPKLWSMVNNKNRGLTEKTACAIVDFAMLWGADVIVFEHINLTGKIKGSRKQRLHLWKKCGVQEIVTSKAHLQGLRIRRVNPWGTSCFAFDGSGAVVRGEQLPSGRKNYQICVFSSGKEYNCDLNASYNIGARYYIRERLKSLPEMVRLEAEAKVPQLSKRTTCVLADLISLNVALRDLDVA

SEQ ID NO: 59437 - protein, 365 aa, Clostridium sp.
MLKAYKYRIYPNQEQKLYLSKTFGCTRFIYNQMLANRIDIYETHKDNLTSKEMSKLYLTPAKFKKEFEFLKEVDSLALANAQMNLDKAYKNFFRDKSVGFPKFKSKKSNYYSYTTNNQNGTIFIENGKIKIPKLKSMIRIKFHRQFNGIIKNCTVSKTPSNKYYISILVNTENIQLPKIEKKIGVDVGLKEFAICSDGYRVQNPKHLRRLEKRLAKLQKDLSRKHRGSNNKCKARLKVAKLYDKITNQRKDFLHKISTKLIRENQSIAIEDLKISNMIENHKLAKVISEASWYEFRIMLEYKANWYGRNIVVAPSNYASSQLCSCCGYKNIEVKNLALRKWNCPNCGAHHDRDINASKNLEKLIA

SEQ ID NO: 59438 - protein, 367 aa, unknown
  TnpB Polypeptide
MRLGNMFDDLEDVHNHFLALERRYYRIYGKYAGRYRLQPHLTKLLERTHPHWAWIPRDTLDAVIIRIHIGYKRFFDWIKKGRRGRRVGPPKFKRRGKLRSAKFQTGYKLSEGTVRLSFKEWCPVKEKFVFIRRNILYHHHRDWEGNVRYLQIGRDAAGEYWLYIVTDNTSKEVLSATGESVGIDFGMETYLTLNTGEKIQHPQPLKHSLNQLRKLNKAVSRKVKGSGNWWRAIGELARLYVKIANQRRDWHYKRATDLCRRFDTIVTETLNLEGMKRLWGRKVSDLAFYQFIEILAFKCIKHNREFVQVGPWTPTTKPCSDCGHHNDKLSLNDRQWTCRECGSDHDRDVNAAINILRAALGPSVEQT

SEQ ID NO: 59439 - protein, 370 aa, Lachnospiraceae sp.
MGKSYKAYRFRLYPNKQQEQQFARTFGCCRFLYNHMLADKIEFYRRTGGMLKNRPADYKKEFPWLKEVDSMALCNVQMHLESAYRKFFTEPKTGFPKFHSKHHGTASYTTNVINGNIRLVSGRLKLPKMAPLKIILHRDVPTKARLKSVTVTREASGKYYASLLYEQENCENQTVLPVRADKVLGIDFAMAGLAVFSDGTKAEYPMYYRRGEQRLARAQRKLSRCKKGSRNYEKQKRRVAICHEKIRNQRADFQNKLIYRIAVSYDAVCVENLDMKAMSRGLHFGKSVMDNANGRFRRRLEEKMAEMGKTFIKEDRFFPSSKRCSCCGRVKAYLPLNERTYRCECGYVEDRDVNAAINLKMEGIRILGAV

SEQ ID NO: 59440 - protein, 284 aa, Escherichia sp.
  misc_feature (12)..(12): Xaa can be any naturally occurring amino acid
  misc_feature (226)..(226): Xaa can be any naturally occurring amino acid
MRPVINTSLTGXLERAYKNFFRKRAAFPRFKKRGQNDAFRYPQGVKLDQENSRIFLPKLGWMRYRNSRQVTGVVKNVTASQSCGKWYISIQTENEVSTPVHPSALMVGLDAGVAKLATLSDGTVFGPVNSFQKNQKTLARLQRQLSRKVKFSNNWQKQKRKIQRLHSCIANIRRDYLHKVTTTVSKNHAMIVIEDLKVSNMSKSAAGTVSQPGRNVRAKSGLNRSXRLSQSKFRCQACGYTANADVNGARNILAAGHAVLACGEMVQSGRPLKQEPTEMIQATA

SEQ ID NO: 59441 - protein, 284 aa, Okeania sp.
MPNNLAFSTLKELRILPRNRCFYWEFIYEKEVVVKPQLNQKNVLGIDHGVNNWLTCVSNVGTNLIVDGKHLKSMNRWYNRQISTIKENQPQGFWSNRLAAITEKRNRQIRDGINKAARIVINHCLKNSIGTIVFGWNKGQKNQIELGKKSNSEFVPIPTARLKERIAQLCNEYGIIFIETEESYTSIASFLDGDYLPNYGEKPDDWKPSGKRIKRGLYRTGNNCFVNADCNGAANIITKVSRKLSLNLSQLCRGTAEIVPKEYIFGQLRRNGATRINRCCVVSA

SEQ ID NO: 59442 - protein, 369 aa, unknown
  TnpB Polypeptide
VSEKAYKYRIYPNKNQQELIQKTFGCTRFVYNYYLNKRKEMYEKDKTTFTYNMCSKDLTKLKKGLEWLREPDKDSLQKALKDLDAAYKKFFKEHTGYPKFKSKKNRYKSYRTSCTNNNIRFENRRIKLPKLGVVKTRDKQIPQGRILNATISQEPNGHYYCSLCCTDIEHEQLPKTNQNIGIDLGLVDFAIMSDGTKIENPRFYENSEQKLVKLQRELSRKTIGGSNWNKVRIKVANLQKHVANQRKDFLQKLTTRIIRQNDIICIEDLDVKSMKETDISIRNKRVGDVSWSEFRRMLTYKSQWYGKTLSVVDRYFPSSQICHCCGFRSGKKSEDIRCWICPNCNSELDRDINAAINILNKGLRQLNFK

SEQ ID NO: 59443 - protein, 248 aa, Streptomyces sp.
VIVMQLRYAFRLYPDAAQQTALAKAFGCARVVFNDAVRAREDARKAGQPLPTAGELSTRLITQAKRTVERSWLGEVSSVVLQQSLRDAETAYRNSFASLKGERKGPRIGAPRFKSRKDSRQSIRFTANARWTITDGRRLSLPKIGAVKVKWSRTLPTTPTSVTVIKDSTGRYFASFVIDTDPAADAARMPDTGQTFGIDLGLASFAVLSDGTKIDSPRFLRRAEKKLKKAQGSCPANRRDPGTGRRPA

SEQ ID NO: 59444 - protein, 661 aa, unknown
  TnpB Polypeptide
MEKPKEKPPEFFKSVKTSLKSILKHPEINSPKINDVVIKAHQIVIHTLQFLKLYMLHYYDTSRILPTMDKVLILNVMKIVCGEKHTNMGKPPKKETIELKEKLTNFYNKHYKPYTQTEQLDYEYMSNVLSYLCEDIQTMYENNIQLHYVDYVERFVNVVWKKKMIVEKIRIIFTTKKERETKIRKLESDLRKIKNDLLNVDTVALTSHSCYHKWITEQKKLILPNKEKFQKQSIYYDLKCSPMDYFPCMIAMMRKVENELETISNVFPLRSSIAPGYIRLDTITLVYLLMRKEQGKKSDYSNQGNTKKHENKIWKFFFRTEKKVFRKNPYSFHHMISTDGVGVSVLFIRDDLVGKRLPNAKKGVSKEMYIDELNDYSALQNMKIVGIDPGKEDLIYCVDDASKDANVFRYSQNKRRKETKMKKYKNIMLGMKTKKIQGKSVIEYETELSAYNRKTLQIDKFKEYIREKNRINNILFGFYEKQLFRKLKFGRHINSKRNEQKIISNFRKMYGNPEEVVICIGDWEQRKQMKYKEPTLGKGMRTLFRKNNYKVFLVDEFRTSCRCSRCEGICEKFMVRKNPKPKPKSKIPGTEIKYDEMRLVHGLLRCKSGCGTWNRDRNGSSNIYKIAYQAIHKLERPDYLCRTTSNQNTSTSVYKQNIHMV

SEQ ID NO: 59445 - protein, 261 aa, Chloroflexi sp.
MWGRLRVIVHRPLEGTLKFARIVLRPSGWYLQCVCETPPHPLLKKENAVGLDMGIRYLVADSHGHLIDNPKHARKTAKRLAHAQRTLARGKKGSHRRKKAKKKVARIHEHIANQRKDTLHKASRYYVDGYQAIVIEDLHVSNMVRNHCLAFAIADASWGMFRQYLEAKAESAGRQVIAVRPHYTSQKCSSCGEYVEKSLSVRTHVCPFCGYIADRDENAARNILQRGLQVLARTGPSSSRREGPEPSGESPSALKREAAGL

SEQ ID NO: 59446 - protein, 382 aa, Bacillus sp.
MHKSFKFRIYPTQEQEILIAKTIGCSRFVFNHFLSKWNDVYKETGKGLTYNTCSSQLTQLKKELVWLKEVDSIAVQSSLKNLADSYTRFFKKQNKAPRFKSKKNSVQSFTTKYTKGNIAIVGNKIKLPKLRFVRFAKSREVDGRILRATVRRNPSGKYFVSILVETEIEELPKTNSSVGIDVGLKDFAILSTGEVFSNPKWFRKLEKTLIDAQRILSRRQEFALKRKCKLDEAKNYQKQKRKVARIHERIMNARTDYLQKISTHIIKNHDVIGIEDLQVSNMLKNHKLAKAISEVSWSQFRTMLEYKAKWYGKQVVVVSKTFASSQLCSCCGYKNKDVKNLNLRKWDCPSCGSHHDRDINASINLKNEALRLLTVGTTGVAY

SEQ ID NO: 59447 - protein, 233 aa, Gemmataceae sp.
MLKGRNPTSATLVRRRDGGFYLHVQICDAAPEPASVTDHLGVDLGVANIATDSDGTIHSGKPVDDVRRKNNLQRKRLQRKGTKGARKKLVRVSRKESRFKRHLNHEISRRIVDTAKRTGRGIALEKLKGIRTRIRARGGEAFNRLSGWSFAQLATFIAYKAVLAGVPVVYVDPRHTSQRCAECGHTERSNRKSQSEFVCKSCGLSAHADKNAARNQRALANRSVAIELDSQVG

SEQ ID NO: 59448 - protein, 399 aa, Ruminococcaceae sp.
MARAAKRTNGSLTAWPKQLRRRPMIRAHKIRLYPNNTQATYFAKACGVARFAYNWALARSRELYEQDSDHKFNEAALRRELNAKKKERYPWMLEVTKCAPQLAIKDDLSSAFRNFFEKRAGFPRFHKKGIRDSFSLSNDQFKIRGSQVQIPKLGCVRLAEQLRFEGKILSATVRRAADNWYISVQVEIAKPEPIHRQISENQAIGVDVGVTSLAVLSDGRVVTGSKPSRKYEDQLRRAQQSLSRKKGSRKGEKKSSNYRKQQIKVSRIHEKIANSRNEGLHKLTSMLTRNYSLIGIEDLNVKGMVKNHNLSKSIHDQSWGEFSRQLTYKADATGSHVHYSDRFYPSSQLCSKCGCQNAGTKDLSIREWVCPECGAIHDRDLNAAENLRKDAIKAVFGVA

SEQ ID NO: 59449 - protein, 371 aa, Geobacillus sp.
MYQVKSSNAMWNLKRKGGESMPTITLRLELHKPTKVKQEMYERMTEVNTEFANWLLDHPELNQATSKIFKEFSSQRFPSAIACQTIRDVKSQRKHQKAKKFRKQWCCFNNQNWKVERKGEFYTVSFPTLEKRVGVPVVTRPYQEAWLNRLLDGTAKQGAAKLYKKKKKWFLALSITFEEEPCKGEKIMGVDLGLRYIAVASIGTKSLFFKGNQCAFIRRRYAALRRKLQKAKKLRAVRKIGNKESRWMKDVNHKISRQIVNFALANGVGVIRMEDLTGIRKRATSMKEAGRNLHSWAFHQLQTMIAYKAEMSGIRVEWVNPTYTSQTCRCGYRDKGNRNGIHFQCQKCGYTIHVDLNGAINIAKAISGWSA

SEQ ID NO: 59450 - protein, 399 aa, unknown
  TnpB Polypeptide
MILAHRIALDPNNAQATYLARAAGTARFAYNWALAEWKHQYEAHKADQTQPKPSQMALRRQLNAIKREQFPWMLEVTKCAPQLAIIQLGEAFKRFFSGQNRYPTHRKKGVDDRFSLSNDQFSVDGARIRIPNLGWVRMREPLRFTGKIMSSTVSRKADRWFVSIAVEVPDASHLPKAENQGAVGVDLGVSAMATLSSGEKIVGPKPHTALLDRLRRLSRGMSRKQKGSANRRKARAKLAKLHGRIADIRSDAMHKLTSDLTRRFETIGVEDLNVRGMMANRRLARTISDMSFYEFRRQVEYKADLRGGRVVVADRWFPSSKTCSGCGHKVDALPLAVRSWVCPSCGTIHDRDVNAAINLKVMAASSAVSACGEEGSDRRRKTAVKPASVKQEPDSKLAA

SEQ ID NO: 59451 - protein, 425 aa, unknown
  TnpB Polypeptide
MLVVEAKLKGTKSQYSKLDEAIRTGQFIQNSCLRYWTDNKGVTRNDLQKLCSKLAKNKETPWANKLNSQARQAHADRAWAAISRFYENCRLGKSGKKGYPRYKKFSRSVEYKNTGWKLSADRRQVTFTDGFKAGTLELWTSRDLVWYSEKQISRVRVVRRADGYYAQFLIDWDRREQHEFQGEIVGIDLGLKEFYTDSNGETVENPRYLRKSEARLKKLQRRTSRRHVKGKKQSNRYHKARQALAKQHLKVSRQRKDKAIKDALALVRSKDLIVYEDLKIQNMVKNHRLAKSISDASWYQFTQWLQYFAKIYGTIVIAVPPHNTTVDCSWCGAKVHKTLSTRTHQCGGCKTVLCRDHNAARNILAKGLKLLAQYLNSTRGHLETGENIPNAQGQFDRWLADRDVSFLSHLEELRISGYAENPPEQ

SEQ ID NO: 59452 - protein, 408 aa, unknown
  TnpB Polypeptide
MNPDEEILQMMKDARWIYDQALYHQRQKFFETRKEGEIKTFSFKELYHIVSQTDEYKSMRLDSVSKSGVLRQLFSNWNGYIRSVMQYKKHPEKFLKRPKLPNYICRRSEFNLVQIDKTRFRSKGCRKNEIRLPNSNIKIAIPERIERKSIREITIKYYHGKIKVGIVFDESGEKIKYDCDKNLSVGVDIGLNNLMAITSNDKSFSYVVNGRPLKSINQFYHKQKSRLKSDLDRCNKKSKTSKRLEKLEIKRTEKISHYLHCASKQMIELCVSKGVSRIIIGHNNGWKQNVALGSRTNQSFVTIPFNRLIEQIKDKAGKYEALEVKIVEESYTSKTDHLSLEEMTHQDYPKGRRIKRGLFKSACGKTLNADINGAIGILRKGNAITDEQLILLRDRGDVVSPKVFRLNL

SEQ ID NO: 59453 - protein, 449 aa, unknown
  TnpB Polypeptide
MFVKEGCKTFYDDLCKNISSHLLSHKDIEQSMTERDKSSCTPYVNSWFSTKQVTSNNKNSQNNYIQTFFPTLAECMVSDAIVTKTRRIRIYPSQQQKYIFKQWFGVERKVYNTCINHFNEKNIEFKGWMKMSTLVLHSLTESYIKTVPCQIKNMAVKDSYTAWRTNCKKTKKTGKQFKLRYKSRKNPVQSCYIPKTAVSESGIYHTISGKLKFSEREWLKNDICDCRLINDHGRWYISVPQKFSTFATENQGGIVALDPGVRNFLTYFSEDGQFGWLGIHAFDRILNLNLKHDHLLSRLSLTKDKREKCMLKRTLNRTYHRIQDLVDELHWQCINYLVHNFSVIVFPPFEVKSMTKKGRKLRKSVVRSMLSLRFFEFKERLKQKCKECGVMYIEQNESYTSKTNSFTGELMNNLGSKEWFMYDVIKVHRDLNGARNILIRAMRNSSATD

SEQ ID NO: 59454 - protein, 535 aa, unknown
  TnpB Polypeptide
MKVIRSVTVPLNSILSSYQYSALDYLIDNLEQEQNKLMAEVDVEKLINDKRLFSKGKFRNYMLEKYGKPYRSWINIEGEKAKYYRIILGNVRHLSLSMRKQIIVATTCKKYNYDMNNLKKIKKDLRERKVSASNRYIRKICYTHEKPSLPDTTEFIFDATTEDKQVSQVIYDDGVVEYAIRVNQDWMHFDILIPKHIGMKVIKFSRPIIQRDITGQLILRASCEVQAEPQKPYNGLVLGIDLSYPGPFVAAVTDINGGYSTQLGPSQELDGVYDKYIKLLNEKGILSGKHRAHKNLLRKMQDVSTGYNALKRKHDNVLHELKMVEEKIENMETHISHMIARDVIDHAIHHNVSMIKVQQLNWLKKHGIPVNYELIQRKIEQAAEFYGLSMLSVHPNMFVNLNPFTMEEIVDDDETQGMDSHYLMALNISNNSGRPYASFMERREPPKKEKGLKDKERGTLQAGWHRDHHYEIMKRPNAIQRRQRRSYEDEMYDAMMLRRNVSGDQDAVDQLDRDSDPTGVVLRGDNTGESPSDEP

SEQ ID NO: 59455 - protein, 396 aa, unknown
  TnpB Polypeptide
MKAYKTEIKPNKKQIELIHQTFGNTRYIYNQFISYNFKRLENNQPIISGYDYSKMINNDPNRPDWLRKSPSKAIKQAIMNGHKAMWDYLNGKKGKPNFKKKTKDNSFYLIETIKVERHRIFLPVLKWVRLKEFGYIPNKIKSVTVSMKNGRYYVSCLTDEVSNQQVKQQVTTPIHGIGVDFGLKDQFITKNETIASINKSKQVRKLEKKLKQKQRALSRKYENNMINKVYYKSGKKKGHLKDYEWKRPLHECKNLNKNQRLVNKLYERITRIRTDYNQKALQSILKQKPSFIVIEDLNIKGLMKNKHLSKAISNAQWYKSRLFLTHQCKKLGIELRLAPRFYPSSKLCSCCGYKNTELKLKERTWTCPKCNVVHNRDINASLNLEQCQNYTVLTTV

SEQ ID NO: 59456 - protein, 298 aa, unknown
  TnpB Polypeptide
VFASKGANHKEHPRAWEYILVEYETRPGVTVENLQQVRAVYDSTKERWELHLVCKDEIETPNAPGNETAGVDLGISNFAAVAYSTEDADLYPGNRLKQDGYYFPKEIAKCDDSGGDRATRLHHKWAERRTHFFHSLAKHIVERCVEKEVGRINVGDLEGSVKMRTAARRTGASTGISTYTGGRSTASARFSNTRRESRESRSWKCLSGIRARHVAHAGKQTTHSVHRGLYVCDECDAAFNADVNGAENIRLDSNESNSESAPDLGGDRSTGWLAQPGVYLHDLSRGFQPRTEVVDCKP

SEQ ID NO: 59457 - protein, 381 aa, Erysipelotrichaceae sp.
MYRAYKFRLYPTELQKQQIHQNFGCVRVVYNYFLASLKENNNRYLNPYACTDILNNHLKKDEKYYYLNDADSCILYNSIFSLSNNLDRFNKNNFGFPRFKSRYDKNSYTTNAIYGSYKNRQYCNIEVDLVNKTIKLPKLKKVSIKGYRKLKALKGRIKKATISKEKNGKYYVSIMCEIPEPSKIDKPNTIVGIDVGISELLTLSDGTIYENNKYIEKYEKRIKRLQKELSRKEKQSKNYYKCKQKLAILYSKLTNARKYYQHKITKEITDNYDIISMENLNTKNMIMNTKLSKSISDASFSEIIRQIKYKSQNKGKYMYQVDTYYPSSQICSRCGHQDSKYKDIQYRNYECKICNNNLDRDFNASVNIMFEGLKQYMEGLI

SEQ ID NO: 59458 - protein, 371 aa, unknown
  TnpB Polypeptide
MLKGRKYRIYPDKSQKDLLNKHINNCRFIYNLSLETKISAYLGNKFIYSSFDLIKQLPELKKEFIWLKETNSQSLQQSIINMDIAYKRFYSGSGFPKFKSKKHKQSFQIPQRIKIQDNKLIIPNFKEGIKIILHRPINGIIKNVTITLTSSGKYYASILIEDNKILPNKSKIDKNNTIGIDLGLKSFVVTSKSDIYLYNEFLRKAQLKLKFLQSKYSKYKGKNTKQKIAILHEKVMNQRKDFLHKLSTKLISENQTICLENLGIKNMIKNHNLALSITDVSWGTFINMLEYKANWYGKNIIKIDKFAPSSKTCSNCGIINNNLTLNDRKWRCNCGSLHERDINAAINIKNFGLNIKLSTEHRQKIKKSCLQ

SEQ ID NO: 59459 - protein, 371 aa, unknown; identical to SEQ ID NO: 59458
  TnpB Polypeptide

SEQ ID NO: 59460 - protein, 451 aa, Nitrospiraceae sp.
  misc_feature (8)..(8): Xaa can be any naturally occurring amino acid
  misc_feature (416)..(416): Xaa can be any naturally occurring amino acid
VQCPIEEXACWRLRNILVADRIENRAANKRLKQQRVTEDLHYLSQSDQYADIIEYVSRDTALSKVHSQVRQNVAVRVDEGYKRFFDALKEGRANVHPPKFIERKKYRSITYSQYRPAAKIKNGKLHLSGLGEFRLFDYRKVKGKPKTVTVKFKQGRWHCIVTAEAQEKDILDLIRPDDPRQDAGFDTGLTALLTDSEGNEYDPPRAWYDYRARLRSAQKKMSRQFEARGKQYEILAAHAKAEGRPVSPIKDIPYSNRLKAQIKVVAKLHTKVDNIRDHHHKKNASVVESRYRKSAVEEHGVQFMIRNRRLAKVATDRAIHRQKLLLKSKLGKRYIATPNQTENGGNSQTCTCGAPVPKELKDRIHHCPVCGLTAGRDHVAANIVSIIAFGIASLTLGAGSHSPEAGQVFVRRGEDXMYKALRANPELSFRGCPQFQSGEDVTYAWLSTGVR

SEQ ID NO: 59461 - protein, 508 aa, unknown
  TnpB Polypeptide
MFIIVANGTSRNFAQSMISAARGPPPFRRGGSAALLSCCKLLPDKPAVTGTGEPPEFAGNRFEKRLAGSKILDDKGSFQPSATNVADVPFYRTAQSRPWLKPGGYQARSFSGGLGGVTLLPLDKCSTLCDNAAMRKMFQYRLFPNKKQVKALEATLEECRWLYNHLLEKRRDTWEQEGLSLSLYQQQETFSILKQERPTLKGVHSQILQNVAVRIDLAFHAFFRRWKAGEKPGYPRFRGKNRYDSFTFPQSGFSITHDDRVCLSKIGSVKMVYHRPIRGKMKTLTIHKSSTGKWYASFSCEIAPEHLPEKTDAVGIDVGLKTFATLSDGQEIENPRFFRAEENALAKVQRKHSKLAKGTPERRKHRKAVARVHERIAWRRQNFTHQASRKIVNQFGIICVEDLEVNRMVHNHCLAKSISDAAWSAFFAQLSSKAEGAGRQLVKVNPAYTSQTCSRCGHRQKMPLSERTYHCPCCLLVMDRDLNASINILALGLQCRVVPEAPGLSRGE

SEQ ID NO: 59462 - protein, 431 aa, unknown
  TnpB Polypeptide
MYAVQKDIWHLTKFEKPIVEQLLKWSNNLFNVGTYESRQRYFKDKSTVKYPDLYKIVKGNENYGLLYSQVAQQSLKSVAESFSSFRALSKLVHKGELRQKPRLPRYRTKGGMYPISYPGQALKVVGNKIRLPLGNKGKEHFGTDALWVPLPERIKSSTIKELRLIPRNGQVWVEYVHESLAEQALSCDLEATGILGIDHGINNWLTCVSSNGRSFIIDGHKLKSWNQWFNKQKAKVQSEQVKHKLPQGFSSQRLQQLSETRARRMRDAVNKAVRTIVDYCQDNRINVIVFGWNKGQKQEVNMGRVTNQKFVQIPTAKVKERLQQECNLKGWRFVEQDESYTSKSSFLDRDVMPVKVGEKPDNWQPSGKRIKRGLYRSAQGLILNADVNGAANIIIKSKVAIDSLIERVGSGLLTNPLRIKLWADSSPKVCP

SEQ ID NO: 59463 - protein, 382 aa, unknown
  TnpB Polypeptide
MSETIKGYVYRLKPTTKQINLINQTFGCVRKMWNILLFERKSIYELYGKYPELLKSHDYLNPKTIKEQFPYMYDVDSQSLTTAWLHLKQAYSNFFNKSHNEPQYKSRHNPIQSYTTHTTNDNIRIEGTYLKLPKLGLVKINLHRELPQGSIIKAATIKKDGKHYYISLRVEYEHLAQPEKVLENAIGLDYTLQGLYMDSEGRKADYPNYYKKSLKKLAREQRILSRRVQGSSNYLKQKEKLASLHLHIKNQRKDFLHKASRSLVNTYDLISIETLDLTEMAKTKHFRKSISDTSFGTFTRYLEYKAKDEGKTLIKIEKYYPSTKTCSECGREQDIKLSERTYHCICGHKMDRDLNAAINIGVQGLIQYVKNAYGTDAYSLVN

SEQ ID NO: 59464 - protein, 231 aa, Methanosarcina sp.
LKESLKRLRYQGHVKDITTSVSFVEDGKELPVKGAFTESTTVGIDVGIKDFAVLSTGEKVENPKYLKNSLKRLKVLQKRVSRKQKGSKNRAKAKRRLAVLHDKITNQRNDFQNKLSFRLVSENQAVALETLNVKGMVKNHHLAQAISDSAWSSFVTKLEYKAQWFGKTVLRIGQFEPSSKLCSVCGYHNKELQLKDREWICPNCKTKHDRDINAAINIKKFALIDQNLIGL

SEQ ID NO: 59465 - protein, 232 aa, Methanosarcina sp.
LAIKQIEIYNYDPYKGRGNFVVSITYDENPISPITEYVDNDLYQAIDLGITKIVTAVNTQGKFFEVKTPRSDQYWNTKIDTIKSRKDHCKKGSNRWNRLHKTCIKMEAKKSNQIKDFQHKLSKTMIENTRANTIIVGDLNVKKMAQSKKVTGKRKRSQNRSTQNQGYLSRFIEFLTYKAELTGKRVIRIDEAYTSKECCICGKRHGMPLWERIMICDCGNVIDRNNVINIMK

SEQ ID NO: 59466 - protein, 369 aa, Methanosarcina sp.
MQTFKFRLYPTTTQAIQLNQHIGSCRFVYNWALDQKIKTYEQTGESISRFDLNKLIPTLKASNEWLGEVNSQSLQGMTKQVESAFTRFFREKTGFPKFKSKKNPIQSFPVPQHYTVNFENNTIKLPKIEPIKAVLHRKFEGEPKTATVSRTCKGHYYISILVEDGKELPVKETFTESTTVGIDVGIKDFAVLSTGEKVENPKYLKNSLKRLKVLQKRVSRKQKGSKNRAKAKRRLAVLHDKITNQRNDFQNKLSFRLVSENQAVALETLNVKGMVKNHHLAQAISDSAWSSFVTKLEYKAQWFGKTVLRIGQFEPSSKLCSVCGYHNKELQLKDREWICPDCKTKHHRDINAAINIKKFALIDQNLIGL

SEQ ID NO: 59467 - protein, 309 aa, Methanosarcina sp.
MHLTKKIKINPTEEQIDVLWQLSEQCRCLYNFALAERKNSWETEQRTVKYVEQQNHLPALKESFSHKANEIPLSFEVGNVCDLLAIKQVEIYNYDPYKGRGNFVVLITYDENPISPITEYVDNDLYQAIDLGITKIVTAVNTQGKFFEVKTPRSDQYWNTKIDTIKSRKDHCKKGSNRWNRLHKTYIKMEAKKSNQIKDFQHKLSKTMIENTRANTIIVGDLNVKKMAQSKKVTGKRKRPQNRITDGYLHHCKYPGDVITRKKLLPRFHQKAGRGSSHTPSKYIIIDTTCTLLYPAWVYEGWEFLCFFL

SEQ ID NO: 59468 - protein, 186 aa, Methanosarcina sp.
VNIAVCSNNVFFNGKQIKNVRAKYAFLRQKLQSKGTKSAKRLLRKISRKERRFVTDVNHCISKTIVNMSHDVFALEDLTSIRVQSRKGKEFTRKLNNWSFYQLAQFLEYKAEALGKAVIYIDPRYSSQKCSKCGDIRKSNRKGSSYHCKACGFDMHSDLNASRNIAQAGISCLSRLHVNQPNVETV

SEQ ID NO: 59469 - protein, 281 aa, Methanosarcina sp.
MQAFKFRLYPTTTQAIQLNQHIGSCRFVYNWALDQKIKTYEQTGESISRFDLNKLIPTLKASNEWLGEVNSQSLQGMTKQVESAFTRFFREKTGFPKFKSKKNPIQSFPVPQHYTVNFENNTIKLPKIEPIKAVLHRKFEGEPKTATVSRTCKGHYYISILVEDGKELPVKEAFTESTTVGIDVGIKDFAVLSTGEKVENPKYLKNSLKRLKVLQKRVSRKQKGSKNRAKAKRRLAVLHDKITNQRNDFQNKLSFRLVSGNRKALRTGQKLNEDLLYSMTK

SEQ ID NO: 59470 - protein, 133 aa, Methanosarcina sp.
LLHDKITNQRNDFQNKLSFRLVSENQAVALETLNVKGMVKNHHLTQAISDSAWSSFVTKLEYKAQWFGKTVLRIGQFEPSSKLCSVCGYHNKELQLKDREWICPNCKTKHDRDINAAINIKKFALIDQNLIGL

SEQ ID NO: 59471 - protein, 513 aa, Firmicutes sp.
MRWAFNRLLEGVSRDEIKKLGQELFGLNSRYADDARLKAQTLLDSQRELLELEIEETEKKLGRARKKLGLAMKKLAKVEEKGATPEVVEKLRLVVKGRNNRVVSLEKKLAELEAHRENGTIPKVVFGGKKLWKKVCRGLATREEWRAARKNRFYSRGDETKGGNPNIKVTYRQGEFYLAVTISHLSEKLGEDALGRPKMSRAPRVEGRLWLPEKHRDLVRVWLAMKLPYSAELVRTLEGRYIVHLTFDLSRMREPDFAKGCLALDMNPDGVALCNINTLGQPEPWPEGFNIPYPGNLGKYEGEFQVRLYPNGFLYFRVPDLAYVSGFRRDYLIGVLAKVVVDIAFFLGKPIALEDLDFGKDRLDASKKFNRMASNFPFAKMVEAVCRRAVKEGVSFKLVAARHTSTIGYWKYMERYAVPVHCAAALVVGRRAMGFKERVTKELKQLVAQIKQNLTQKVDPDTPGEGEGMTRGVRACLRRLEGKLSAHNGLVLWQQEAYYSVWHDLRLLALSLR

SEQ ID NO: 59472 - protein, 232 aa, unknown
  TnpB Polypeptide
VVYHADEAPKLENSNYAAIDLGLNNLATVATNVSKPFIINGRPLKSINQRWNKRKARLQSKLKKGVYKSKQIQTITNKRNRRVKNYLHQASKALINELRRLSISKVVIGCNKEWKQNISLGRRNNQNFVQIPHARFIEMVTYKAALAGIEIVIAEESYTSKCSFLDDEPIEKHEEYAGKRIKRGLFKSKTGKLINADINAAYNIMRKHLGISVHQIDSVQVLSTPNVLVLGS

SEQ ID NO: 59473 - protein, 409 aa, Richelia sp.
MIRNQGLYIQRQSWFYGHGVIKFGKTELHKNIDALMKQTACYHFLPAFLAQQVMKSVNEEWTSFFNAIKQWKLDKSCFTGRPKPPKYKPRYQGRYKVTYPHTRAYKKAKRNGIIHLYKTNIRIQSKHSNNYDCVRIIPATGCYVIEVVYRLKQSDYEVNTDKNYIAAIDLGVNNLAAVTSNKPGFQPILINGRPIKSINNRYNKLISKLRSINKKLHGLHWSNRMELMTRRRNHRLDSYLHRASKLLIQTLVSSGIGTLVIGLNPDWKRNCNMGKVNNQKFVSLPHNKFVDMLTYKGFLAGIKVYTREESYTSKASFLELDGIPYYGKVQDNWKPSGTRIKRGLYRSKSGLINADVNASYNILRKEFPDAFSQGIKGCVVQPRLVNVPGYKHKSGKCPIACPIQHTNSN

SEQ ID NO: 59474 - protein, 406 aa, unknown
  TnpB Polypeptide
MQITTKRVERIWLKPSDELNRMCHIAKNLYNEATYLIRQELFNTGRRIRYNELAKVLKDSENYKILPAKTGQQILKYVDWNWKSFFNAMKQYKKIPSAFFGRPGIPKYKHKDGVFMLIFTNQQVSIKNNVLIFPKKMDEVLPKVRVRPIIEKLREVRLIPRAVGYILEIVYDKIINAPKRDKRIVAGIDLGVRNLATIVDNTGGKPIVIKGGTVKSIIQFYQKERARLQSIYDLQKQDKQGMKMKRLSDKYKKKMHDYLHKVSNAIIKHLDRRGIGLLVIGYNDDWQHKATLGRRNNQTFSSIPYRQLINMLQYKAEEQGINTMMPDESHTSVCSFFDNETIEHHDEYVGKRKGGLFRTAKGHVVNADVNGGFDIMKKAVPNAFQKWMADGIEGAVGHPLRLKVVR

SEQ ID NO: 59475 - protein, 364 aa, unknown
  TnpB Polypeptide
MNKAYKFRTMPNAEQQELFAKTIGCARFVYNRLLADKIAYYKETGKMLHNTPAQYKNEFPFLREVDSMALCNAQLQVQAAYKNFFRDKSIGFPKFRSKKSSRKAYTTNCINGNIAVAGNFLKLPKMGLVRVKFHRQIPATHHIKSVTFSQDPSGKYYVSVLTEYEAVEPERTLNTDKALGLDYSSPHFYVDSQGTEADMPHFYRQSEQRLAMEQRKLSKMLKGGSNYQKQKLRVAIVYEKVRNQRKDWQHKRSRELADKWDIVCVEDINYKGMSGSLRLGKATMDNGFGQFRTFLAYKLAEQGKKLITIDKWFPSSKLCRHCGYINDGLSLSERVWVCPSCGKTILRDVNAAINIRDTGVAQIA

SEQ ID NO: 59476 - protein, 280 aa, unknown
  TnpB Polypeptide
MKQTMLLKLAPTEEQYKALLLTMDCFNAGANYVAQIAFLEKSANKFALQKLVYGYLRKWYNLPAQLAIRCISKATEAYKRDKSIMPTFDARGAIVYDPRVMSFKGLTTVSLLTTTGRVLVPFRIGGYQQARMDKIKGQADLIWRDGTFYLAVTLDVPEPTPDEVTETLGIDLGIVNLATDSDGDTFSGEQVEKVRTRMHALRQRLQKRGTKSAKRHLKKLSGKEARFKRNTNHVISKRIIAKAKANKQGIAIEELRHIRKRTDSTVRRSQRNRFTSWAFA

SEQ ID NO: 59477 - protein, 465 aa, Actinophytocola sp.
VKLTRIAYSKNLNAGKRGQLEEQAKLLGRVRSLVWQRYGSVAGVRVSDRATRDEWMADGTADTFGVLANAWKETVRDAVADIKANREAAKVPVRKAIHRHYKTDEERKAAYVALKRDTWADDPFLRRLMRKHWKRGRNHTNNQIVVRSDQYRTYHLAEGGNVWLAVPSLIRRKTVTIPLNTTVAPCGTLRIILREGLAEVHYAVDAPDLRESRPCGDAKLGVDKGYTEVLTDSDGNHHGRNLGGLLRTESDYLKATNARRAKIRSMAEKAHKAGDAAKADRIKANNLGMVKRNRRRARFESRVRTTTFTAVHAVVDKAAQVVAEDLTRPFVSRKKLRKNTNRRLAAWTKGVTAEALTSVSERRGSALSLVNAAYTSQVAPCCRILGKRQRDRLHCTQCGVVWQADHAAAVNILKRDGDSGITLWTRHDRVKELLQERIDRRRTRLPVQDSSPRGRRAKYPINAQQ

SEQ ID NO: 59478 - protein, 246 aa, unknown
  TnpB Polypeptide
MVKAIKVMLIPNNVQKTKMFQYAGASRFAYNWALAREKESYEKGGKFISDSELRKEFTKLRHSDEYAWLLNISNNVTKQAIKDACTAYKNFFKGLQKFPRFKSRKRSMPKFYQDNVKIQFSNTHVKLEGFSSSRKANKQKKNWVRLAEHGRIPTDAKYMNPRISFDGLNWWISVCVEFPDCKKNLNNDGIGIDLGIKDLAICSDGNTYKNINKSQVVKKLEKCRRRLQRRVSRKYEKNKKGVSYCL

SEQ ID NO: 59479 - protein, 372 aa, Rhodothermaceae sp.
MKLTAQIRLDPSPEQADVLLRTMETANAACNAISEHAWATRTFLKYALQKALYHDIKRQFKLSAQVVVRCLGKVADAYKLDKDTKRTFRKRGGIVYDSRILRYYTERREVSIWTMTGRERIPYTVGEHHARLLAYQQGESDLIYRKGRFYLLATCDVPEEDEEAVDGVLGVDLGIAQIATDSDGDSFSGEQVESKRKWYAERRGTLQAVGTRSARRRLRQLSGRERRFRADVNHQISKHLVRKAKDTKRAIALEDLTGIRKRTTVRKSQRARHHSWSFYQLRQFIEYKAKLAGIPIILVDPAYTSRTCSQCGHCEKANRKSQARFACQACGHTMNADVNAAKNIAARGAVMRPMVSRSDHASTGVGRGKLAA

SEQ ID NO: 59480 - protein, 405 aa, unknown
  TnpB Polypeptide
LGVGARAYRFRAYSSNTTARVLRTQLRVACKLYNALLHSEEEEYEKNKHTMSRNELRQLALDLRKRNPEFQAVHSQVAQQVAERLYQARQRFFEGLANKPRKKKPHKYLSLVYPQSGWRLSNIRAVGQGENTKKKKALLYLSKVGFFTVIIHRDFPLERVCQVCIKLNPSGRMYVVFLVEGEEAAYEQASAGEPKKAVGLDVGITRLATLSDGRFLDNPKPLERSLDRTRLLQRSLSRKKKLSKNWFKAKLKLAKEHEYVKDFRRDLLFKLGALLATEYDILVLEDLNVVDLIQKGETRKRRLRLHDSAFSELRRILEWQFQKQGRAVLAVPAYNSSRECFWCGGINQGLTLKDRVFRCPNCGFTLDRDLNASLVLLKRAGWEPPSRCAWLGSSTQYLLYPHWGW

SEQ ID NO: 59481 - protein, 368 aa, unknown
  TnpB Polypeptide
MLEKKLYAYKKKEQIPRDTPAKYKDKFPFLKEVDSFALCNVQLQLQKAFKDHFRNRKQFKIPKFKKKRDKQSYTTNNVHNSIRVDFEKVLLYLPKLKEGVEIELHRRFDGKIKSVTVSRTNDGKYFASILVKTENPRNKVVEPKSKAFGMDLGLEHFVTVTNDFGNYKVEHPRYLRRGEERLKRLQKSFSKKQKGSKNSEKARLSLDRQHAYITNARNDFLHKLSKAIIDENQVVVVEDINVKGLLKTRLAKSIADSGWSKFLNYLKYKAEWYGRTFIQVDRFFPSSKLCHRCGYKNEDLALHDRTWCCPSCGETHDRDVNASINLYFVGIGRSERGTVEQALVDDRSPHGIPKKPSCNEVGISTTKG

SEQ ID NO: 59482 - protein, 479 aa, Micromonospora sp.
MKVTRIAYSARLNPGKYAALSEQARRLGRVRGEVWQRYGSINGVGAGLRDRQVRNRWLTDGTHLQFGVSANAWKETVRDAMADIGANLAAAKVDVRRAADRRTNDPAERKRMFTALRTNQWADDPFLSRQMRTHWKRGRNRTHNQIVVRADKYNTAVDRRGRLWLAIPGLEPRKLVTIPLSTTVAPTGTLRVILRGGRVEVHYQIDAAKMRSSQRACGDRTVGVDKGYTEALTDSDGAPHGCDLGALLASESDRLKERNRRRAKLRSIANSAAARGDHAKAHRIAANNLGTVKRDRQASRHRAAVRTEVFTAVHRVVDKAATIVAEDLTRTFAGRRMLGKNVNRRLAAWTKGVTAEALKNVSERRGSALVHVNAAYTSQACHRCGRLGRRSGDRLHCTSCGVVWQADVNAAINILYRAGDPDIALHTPHHRVKQILQDRTDRHRTRLPVQDSSPTAVGRRANYPNRSTMSIDWEAGSRL

SEQ ID NO: 59483 - protein, 291 aa, unknown
  TnpB Polypeptide
LEKAYKNFFRDPKVGFPRFKSKHHSKNSYTTNVVNGNILVEDKRIRLPKLKWISMKKHREPAENCCLKSVTVSMEPSGKYFASLLYEGYSCENQAADEDYSNAKILGIDYAMQGMAVFSEEIELEKAGFFRRNEKRLAREQRKLSRCVKESRNYVRQKKKVARCHEKIRNQRKDYLHKLSRRITDQYDIVAVEDIDMKAMGQCLHFGKSVQDNGYGMFRNMLDYKLAWKGKKLVKIDRFFPSSKKCSKCGKIKKELGLSERVYRCTCGNEMDRDRNAAINIREEARRMLAV

SEQ ID NO: 59484 - protein, 425 aa, Moorea sp.
MTTVISAYQYRLRLTKSQEAEIEKWLDMLRYQYNYLLADRFNWYEQNHCSVNSCPLVCYLPELRNNPDYFSQKKTLPQLKKDRPWYGAVQSQVLQDCVKRVDLAFKRFLKGDSNGKKSGRPRFKGKNRYRSFTFPSLSKTPINGNILTLPKFGKVKMIYHRPIPEGFKLKTATITRKADGYYVTLSIQDDTVPDIMAVNSVTNPIGIDMGLKSFLIKSDGTEVPIPQYYRKAQKRLKKIQKAVSRSKKGSNNRKKAVTKLGKAHKKVADTRKDFHFKTAKELLNSHDLVAHEKLNIKGLAKTKMAKSVLDAGWGQFLSILSTKAVRVAWPTALNAGLVTKAVNPRNTSQNCSNCGEKVPKKLKERTHSCSHCGYTEDRDVNAAKNILKLAVGHPVCSKAYRSRSVAYGLASKALAGVGKKPTLNL

SEQ ID NO: 59485 - protein, 401 aa, Microcoleus sp.
MLVFEAKLEGLAQQYERLDEAIRTARFVRNSCLRYWLDNLGIGKYELSAYCAVLAKKFPFAGKLNSQARQASASRAWSSIARFYDNCKKSKPGKKGFPRFKKHQTHGSVEYKTTGWKLSFDRRTITFTDGFEAGSFKMWGTRDLHFYQLKQIKRVRVVRRADGYYVQFCLDQERVEKRQPTGKTLGLDVGLTHFYTDSDGQTIENPRHLRKSEKAIKRLSRKLSRTTKGSKNRVKARNRLSRKHLKVSRQRKDFAVKLARCVIQSNDLVAYEDLQVRNMVRNRQLSKSISDAAWSAFRQWLEYFGKVFGVVTVAVPPHYTSQNCSNCGEVIKKSLSQRTHRCHHCGFVIDRDWNAAINILELALRTVGHTGTLNASEDIDLCIGEATPQCKSSRGKRKPKK

SEQ ID NO: 59486 - protein, 437 aa, Thermococcus sp.
MKRTVTLKLQPSKEQEKTLFQLADLGAKAWNRVNYLRRQQFFQGQIVDFNKTEKTVYEEFKREIGSSTVQQIARKNAEAWRSFFTLLRKKRNGELPNWLKPKPPNYLKEDGRRKPLIILRNDQYRIGGNRLILKGLGKFKRLEIQFKGRIHLKGKQGRLEIIYDPVKRKWYAHVSLTVEEKLEGGEWIKLPRTPRGNLFAGIDLGVNNLIAVYVENGESFLVNGRPLKSIDFYWRKKIAEYQSKLNKSGAKTSRKLKKMHEKAKLQAKHYINTAVRQTVRKLYELGVSKIIVGYPKGIARNSDKGKRQNFLLSHVWRFNYVIKRLTEVAEEYGIPVEVVNEAFTSKLCLVCGKPHEGARFVRGLFKCPTTGLVFNADLVGAFNILKKVVKTITPNLSGLYAQRRGNWPKARPEGFEEPVVMGSLMRTPRTSPSLARG

SEQ ID NO: 59487 - protein, 406 aa, unknown
  TnpB Polypeptide
MRVRAHRFRAYSSKTTARVLKTQLEAACKLYNTLLHAEQEEYERNKRTMSRNELRQLALDLRKKNPEFQALHSQVAQQVAERFYQARERFLEGLANKSKNKKPHKFLSLVYPQSGWKLSNARDVGQGKSKKRKARLYLSKIGFFTLILHREFPESQVSQVCVKLEPSGRIHVIFLVEEPETQVQASKEPVKAVGVDLGIARLATLSDGRFLDNPRPLERALDRIRVLQRALSRKKFLSKNWLKAKRKLAKEHEHVKDFRRDLFFKLGALLAQEYDVLVLEDLNVQDLIQKGENKKRRLRLYDSSFSELRAVLEWQFVKRGKLVLPVPSYNTSRECFLCGEINKGLTLKDRVFHCPRCGFALDRDLNACLVLLRRAEWVPPGVPAKLRPLPPLPSLGLVRRGRQGWL

SEQ ID NO: 59488 - protein, 378 aa, unknown
  TnpB Polypeptide
MKQTMMVKLQPTDAQASALLLTMERFNAACDAIAVVAFREQMVSKFRLQKIVYHDIREAFGLSAQLCIRAIAKTAEAYKRDKKIQVSFRPHGAITYDERILSWKGVDRVSLLTVNGRVLVPVRFGAYQAARLDRIKGQADLIYRDGTFFLAVTVDAPEAEPHDPTDVIGLDMGIVNIVTDSDGQSFSGAHLNSLRIRHNRLRAKLQHKGTKPAKRLLNKRRRKEQRFATNTNHIISKQVVAKASDTRRAIALENLSGIRERTGETVRKAQRRTHHSWSFHQLRFFVEYKARMAGVRVVAVDPRNTSRQCACCGHVAKENRRSQSEFLCVSCGYAANADYNAAMNLRERGRASVNMPYVGEQSASLAATHKPTALAVGG

SEQ ID NO: 59489 - protein, 386 aa, unknown
  TnpB Polypeptide
VEVVVVRKTYKYRLNPTPEQEQALEVVLHRCRTLYNVALEQRKAWWGRGQGIGASYHQQKAELPDLKAACPEYAQVHSQVVQDVLLRVERTYAAFFRRVKAGETPGYPRFQGKDRYHSFTYPQYGNGAVLDGGILSLSKIGRIPLRLHRPLEGTPKTATISKEADGWYVSFSCAEVPTHLLPLTGRETGIDVGLKVFLITAEGEIVANPRHYRKAERELKKAQKRVSRRKKGSNRRKKAVKILARKHQHVRRQRTDFHHQTAIALLRTSDTIYLEDLQVRNMVRNHHLAKSISDAGWAAFRTVLEAKAAWAGRRVIAVPPAFTSQDCSGCGERVKKSLSVRTHVCHSCGLVMDRDENAARNIQWAGQALRGVGAVVPAMNREAPSL

SEQ ID NO: 59490 - protein, 385 aa, unknown
  TnpB Polypeptide
MSSVVGCTDSAVIVKKSKKIRVYPTSEQRVKLRQWFGTARYVYNKTLDILNTTDTKANWKAIKTPILNDLPEWASETPYQIKSVAIRDVCIAVREAKKKCQETGAYQSVSFKSKRKPSDSIFIPKSAISKRGVYYTMLGDLKISETLPDNIADSRLAKDGDAYYLCASYTVTTPKRKPNGRVVALDPGVRTFLTYFHECGFGWLGHHAINRIQRFCAYLDDLLSRADKAPRHSRKNMRRAANRMRKRIRNLVDELHHKAARYLVDTFDIILLPTFETSEMTCKSARKLNKKSVRQMLTLSHYKFKKFLKHKAKETGCKVVDVCEAYTSKTVSWNGEIKQTLGGRKVIKDSTGLKMDRDLNGARGIFLRALVDEPWLLDISNLQTV

SEQ ID NO: 59491 - protein, 455 aa, Acidilobales sp.
MRRISVVELLVDKETENKLKLLCSLSSKLWNEVNYARRRMFFEKKGVDLKSTYKEFYEKYKTLIGSATTQQVLNKNDEAWRSFFSLLKLKKEGRLPPFITRINPPGYRKKAGRRTLWTVLRKDQYRIEADKLVLKGLGAIGNIELRYKGLIHLRGKHGRLEIHFDPDRRRWYAHISFDVSEKAVRGKWSTVPKKPKGNLVAGIDIGINNLMAIYVENGLTKLVNGRPLKAISYYWRKRIAEYQSTLNRYGLKSSKRLRGMYSKWRLQVKSYIDSKVRQAIEWLYSVGVSTIKVGYPKYIAQENGNFNNVHTWTYGYLLRRIYEVAEEYGMIVVYVSEVYTSSKCPLHGERCGKRIKRGLFKCTTLNKVFNADLVGAYNILTTITPSPVRGRGNGPETRPGIKSPFRGDVIPNLPVLPGSWMSTTTRESAPEEEIIEATQSRLTASPGLNLLSCLA

SEQ ID NO: 59492 - protein, 383 aa, Fibrobacter sp.
MEEPKMILRAYRFRLYPNKAQTETMNHHLWLSKELWNRMLETTKNRYKTEKKFPTKKELREIVKRQGLYSQVGQELVDRLLEAVWRFIELKKQGVKCGFPRFKSSDRLKSLIYPQLGFKLEGKRLKVTPFGSVNIKLHRPIDGKLKTLTLKREASGKWFAIFTVEVTPAIQANNSCSEVGIDLGLSKLAVCSDGSIIKNPRHIKKHEKKIALLGRKLSRKKKGSKNRTKAKVKLAVAYERLGNARLDFLHKVSHRLVHSYGLIALENLNVKSMVEQNFGKQINDAGWAKLADMISYKAESAGCEVVFVDPKDTSKQCSKCGTIVPKTLADREHRCPQCGLVLDRDLNASINILNRAVGHTVLTLVESTQAELTMKQEAHTLQG

SEQ ID NO: 59493 - protein, 234 aa, Escherichia sp.
VKRLQAFKFQLRPGGQQECEMRRFAGACRFVFNRALARQNENHEAGNKYIPYGKMASWLVEWKNATETQWLKDSPSQPLQQSLKDLERAYKNFFRKRAAFPRFKKRGQNDAFRYPQGVKLDQENSRIFLPKLGWMRYRNSRQVTGVVKNVTVSQSCGKWYISIQTESEVSTPVHPSASMIGLDAGVAKLATLSDGTVFGPVNSFQKNQKTLARLQRQLSRKVKFSNNWQKRIHI

SEQ ID NO: 59494 - protein, 373 aa, Enterococcus sp.
MKVLKAYKYRLYPNPLQEEFIRKTFSCVRLVHNLLLQDRVEIYRKLKKDSKLKIKYPTPAKYKKDYPFLKEVDSLALSNAQVHLDRAFKNFHKNKSVGFPKLRQRKDSVSSYTTNNQNGTIKILDSKYLKVPKLKTLIKMKVHRPLTGEIKSATISLSPSKKYFVSLLCEEEIPKAPKTYSAVGITLGTSEFAILSNGQRIDNDKYTQNFQIRLKREEKKLIRRKEIAQSKKMDISQQKNYQKQKLKIAKMHEKLMNQRIDFLNKITTEIVTKYDVICVEDIHKEDFFRNSKLNRGITDVSWAMFISKLEYKALWYNKKIIKVSACQDSSVIVEETESKLFTPDVNKKKALEDPEIAASVQVLSMGLNEAIAN

SEQ ID NO: 59495 - protein, 374 aa, unknown
  TnpB Polypeptide
MSNKVFVYAIYPNEKQNIQCQKTFGCCRFVYNHMLSLQQDRYKNGEKHLNKKNANNYCNQQFKEAYPFLKEVDKFALTNAIYHLEGGYDRFFKHLSKFPKFKSKHKAKKSYTTNFTNGNIEIGENFIKLPKLCTVKAVIHRKPEAGWKIKSATVTQNRDGSYQVSVLFAFEKIIPNASATEATTVGLDYKSDGLYVSSNGETCGMPHYFRHSAGKLAKAQRKLKHKTVGSNNYKKQQKKVAKIHRHVANQRKDFLQKKSTEIANQYAFVCVEDLNMRAMANKRFGNGKTTLDNGYGMFLSMLDYKLRDRGGQLVKVDRFFPSSQLCNCCGYKNPLVKDLSVRHWDCPNCGTTNIDRDINAARNIKKEGLRLLTA

SEQ ID NO: 59496 - protein, 409 aa, unknown
  TnpB Polypeptide
MEATRTLKFKVLNPTKRKREILNEIFSAYREMVEKCLDYAVKNNVTSRTKLHKALYKELREKYKKYPSHYIYTAITISLSIFKSFRKLKRRGKTKREAPTVNKDLSIHLDDYHLFKFLGDCVRLNTHKGHLFLKLRLSEYHRKILSENIKVKSAWIIRRGDEYFFNLVVKKEVERFRAKGVMTVDVNEKSIDVFIVRPDKLKYIHIDLSEAKHIHFRYSKKLEKMQKIRNPYERRMLLKKYSGRRRKKVEFLIHSATKYLSEVAKKENVRIVLEDLKNIRDRIKYGKKLNRRLHTWNFRKEQGFLEYKHLWNGGNVFYCDAYNTSRECPICGELNPNGRNHVFKCRRCGFEANRHFVACLNMAKRYVKTLMWGVLPFPPKAPMKLSCKWLVATMNGIVEGEGSKIDICY

SEQ ID NO: 59497 - protein, 537 aa, Lachnospira sp.
MISDEKYKKLLKQFHKLSDRHILVVETDMPSYDIQKVIKLSDKIRKAGNELVSLMKKNYDQLMRTKKYRKLLKLYGSTEDKKKRKDLAEQLNKMQKQYNVTWDYCRTAMIPISKKYGIDAVFALTKAEDIWRGIEKCLYDNGNTIHFSKYGDLPCIRAKQINRGIPMSVKDNKLQFKLGKSAFGIKINDGFQTDEVNAILNYLVEPEIVDNKAIQTLLDEAYCIDTYRPCYATLVPKLIRGKYRVYLHLTIEGKAKPKYDRFSNPRHRFGRGIIGADIGTQTVAYTSDTEIGLKNLAERGNSIQKSERLERLYYRAMDRSRRATNPQNYNKDGTVKNGRKSWKYSNHYKKLKAKHFELCRINAINRQLAINEDANHLRSLGAVFITEPKNASKLMKRAKETTVNSKGKFNKKKRFGKSIKNRCPSGFQTTIEKKFKVSGGTYIEVPNNYRASQYDHTIDDYIKKKLSDRMYNLADGTLVQRDWYSSFLLYCYNYKTETIDKDKCILKFEDCYNKEKALIEWIKANKIKILNSGIKVA

SEQ ID NO: 59498 - protein, 577 aa, unknown
  TnpB Polypeptide
MSKRCWTLKDRYESQFSAAFYPFMLSDTKRAEIIHRAEEIRSVRNDISEVFFSDMLGFHDMSKFDAFNFFNPTFTTRLSSHYLKKAIEDVWKAYQLRFDAIRKKIEFVEVEELVPSFYKINTKWHKKGELKSIEVHTKKTELTKVLTWLARYGKEESVYWLESVIPTVVESKQKFYRTILNKIRKFGFDRLMRLALSRRMSVFAEYEKRGKITFESLTFSGRSRITRPIVDARRNETGKFDYFIEVSWDWHDQGYRGDNKNTLCIPVKYNKAYHRSLSRYCNGRDTSYTVVIRGKDIHVVLARDGYRYKSDEEITEENTVGIDVNSKHNMFALSTGWFIPNDDTLIADLETELLRIDQKQKNYNVRFAKDEEHDAFKISKKDKARIEAITLKLNESNKRTIANLCKQLSELGIRHIAMENLDGFQGSKLHGTDKNGLNLGRLHLRTGLSSLKDEFIHIAPKYGLLVSLVQPAYTSKMCGHCGCIDDRNRQTQEKFCCVECHHAENADIHSAKNIKFRLTSTVLRGHLLEVGDSGYRYFRPKSLFRWQVRKCLEKCRCNGLFKRTIGNHENLTMSKFE

SEQ ID NO: 59499 - protein, 596 aa, Escherichia sp.
  misc_feature (267)..(270): Xaa can be any naturally occurring amino acid
MTAPQQLLGPDGKTPLRRYAGYNGGGPGFGGQLIDWNAPQQSADAALLPNFYRGNARADDLVRNNGVASNAVQLHQDHIVGNLFKLSYRPNWRYLGISREDARALARDVEVAWTEYAEDPHCTIDIERKRTFTMMIREGVATHAFNGETCVQPVWESSAGSVFRTRFKMVSPKRIRNPGYAADTQFRRAGVDIDKNGAAVGYWIAEDTYPLGGVGKCRRIPAQLSSGRHAFIHIFEPLEDGQTRGDNIFYSVMERLKMLDTLQQTQXXXXQPLQQSLKDLERAYKNFFQKRAAFPRFKKRGQNDAFRYPQGVKLDQENSRIFLPKLGWMRYRNSRQVTGVVKNVTVSQSCGKWYISIQTESEVSTPVHPSASMVGLDAGVAKLATLSDGTVFEPVNSFQKNQKTLARLQRQLSRKVKFSNNWQKQKRKIQRLHSCIANIRRDYLHKVTTTVSKNHAMIVIEDLKVSNMSKSAAGTVSQPGRNVRAKSGLNRSILDQGWYEMRRQLEHKQLWSGGQVLAVPPAYTSQRCACCGHTAKENRLSQSKFRCQVCGYTANADVNGARNILAAGHAVLACGEMVQSGRPLKQEPTEMIQATA

SEQ ID NO: 59500 - protein, 313 aa, Synechococcus sp.
MSAIVEVQASRHLDQAFPAWWSCRKGKRQGRVPAPRFKRRSNKQSLRFTRNAFRVEGETLKLTKVGSIPITWSRDLPPTPSSVTIIKDGAGRHFASFVVQVERPQLESNGKAVGIDLGVAALTVTSDGEKIAPPQLLRSAGKRLQRVQPSLSRKVRGANNRFKDRFRLAKARAKMSDSRLDVLHKLSTRLIRKTPTVVLEDLNVAGMMQNRKQARSMAAAGWRMLRTLLEYKADLYRPAWKGISRWEPTSQAGSTCGHSDGKKPFRVRAAWNILAAGLGERLNACGAEGLTGLSASGSEAATHLNQGVQPCTA

SEQ ID NO: 59501 - protein, 402 aa, Escherichia sp.
VKRLQAFKFQLRPGGQQEPEMRRFAGACRFVFNRALALQNENHEAGNKYIPYGKMASWLVEWKNATETQWLKDAPSQPLQQSLKDLERAYKNFFRKRAAFPRFKKRGQNDAFRYPQGVKLDQENSRIFLPKLGWMRYRNSRQVTGVVKNVTVSQSCGKWYISIQTENEVSTPVHPSALMVGLDAGVAKLATLSDGTVFGPVNSFQKNQKTLARLQRQLSRKVKFSNNWQKQKRKIQRLHSRIANIRRDYLHKVTTTVSKNHAMIVIEDLKVSNMSKSAAGTVSQPGRNVRAKSGLNRSILDQGWYEMRRQLEYKQLWRGGQVLAVPPAYTSQRCACCGHTAKENRLSQSKFRCQACGYTANADVNGARNILAAGHAVLACGEMVQSGRPLKQEPTEMIQATA

SEQ ID NO: 59502 - protein, 362 aa, unknown
  TnpB Polypeptide
MNNILEQTRWVYNETLALRKTAWDTEKKSISLYDTQKNLTEWKSQKPELNQVYSQVLQNAQLRVDLAFKAFWRRCKTGEKPGFPRFKGKGWYDSFTYPQSGFKMHPNGMLYLSKIDRVKVILHRPLEGTIKTCTIKRTPTNKWYVYFSCEVVPKDPLPKTGKVVGIDLGLLTYIQCSDGTKIDKPRFFKEGQDDLAKVQKRSSKAKSQQNRHSVALVHERIKNRREDFCHKAAKKLVDKYDIIAHENLDVKSLLEKKEYSKSISDAAWSLLILFLTYKAENAGRTVIAVDPRGTSQRCSQCGATVPKGIEVRIHHCPHCGFKTGRDLNSALNVLRLGLESVERPPHRRKAGAKVGAHGSPRL

SEQ ID NO: 59503 - protein, 390 aa, unknown
  TnpB Polypeptide
MVIRAYKFRLSPNQAQAGMLGKHMGCARFVFNWSLEQKSRAYSERQEKLSCLALMNRLPELKAELPWLSEVNAQSLQMALRNLDVAFTNFFKKNTAYPTFKSRKGRQSFQCPQSCSVDFEKGVLHIPKVKGIKAKFHRQFQGKIKTVTVSRTPTGKYFASLLVEQEGAEPESAPVTDNTIGLDVGLKHFLITSEGEKIANPKHLRRSSKKLGRIQHAFARQQKGSKRRQKRKKQLARLHEKVANQRADFLHKTTHRLTCENQAETYAIEDLAVKNMVKNHCLARSISDASWGMFFGFLSYKVERLGKNVLTIGRFEPSSKRCHVCGYINQALSLKDRDWGCPDCSTHHDRDINAAKNIRAFALIKHFSKHFSTAGSAETQTLRESGLSRG

SEQ ID NO: 59504 - protein, 380 aa, Okeania sp.
MQSIKTKLKVNNKQKTLLAKHAGVARHAYNWGLAACIAEYQSTKKRLSAITLHKRLVREVKSQNPWYYEVSKCAPQQALRNLERAFKNFFTIPKRGFPKFKKKGKKDSFYLEGSIKILKGNYIKLPRIGIVKTYEILPSVSIKNVTISKRANNWYISFKYNYQPIPTAKERDIIGVDVGINALATCSDGTKFANVKAYKQGKKRLTLDQRRVNKKELGFLRNATQTKNRAKAIKKLAKLHKKISDIRADALHKLTTWASFEPQHHSHRRFECKWNAQKAVRPRDDVSSLAERAPRHHKLASAIADCGFYEFKRQLIYNCEWYGSELVIADRFYPSSQICSHCGHQQKMPLNVRTYDCSNCGFQSDRDFNAAVNLENYVNK

SEQ ID NO: 59505 - protein, 392 aa, Cyanobacteria sp.
MYAIKRELKLNNRETSQMRGNAGFKRWVYNYALLLIAASWDFQNIKASDSKRLDAIKKVFTQVTMHKPEYAWMKSYPSTVYQSAFIDLKKAFSRWRKGLGDFPRKKSKKKGDSFSVYKTSGVYLEKGKPAVPFTNRAVIESGKRIKLPGLKAFRLKEPIDFVCSSQTFTVSRAADKWFVSFTIDADKIPPVIHPVEKAGVDLGVKVLATVSDGTNYDMPMTTKRAKNKLSKLQWHNRNKVLGNKRLQLQASNKAKKHYVRLSRQHLRLANIRQDTTQKMTTDLSRRIYNIRIEDLSVSGMIANHKLASALSNNCFYEIRRQLVYKQAHYGTKVELVDRWFPSSKTCSHCGHVQSMKLSDRIFECDSCGHSQDRDMNASINLENAPLDRVRLA

SEQ ID NO: 59506 - protein, 166 aa, unknown
  TnpB Polypeptide
VISNPKFYRKYEQKLGIAQRAKNKKRVRALHAKIANCRKDHLHKASTMLIKNNALIVVGDLSAKKLVKTKMAKSVLDTGFSALKTMLKYKCENAGVLFEEVNEAYTTQMCSYCGEITASSPKGRADLRIREWKCVNCGTAHDRDKNSALNILALGHKRLAVGIPVF

SEQ ID NO: 59507 - protein, 177 aa, unknown
  TnpB Polypeptide
MKTLKLRIKDKHCKVLDQLAAEVNFVWNYVNDLSFNHLQRTGSFFSAFDMAKYTKGTSKLCGLHSQTVDAIREEYAGKRKQFKKAKLKWRVSNKKSARRSLGWIPFKKSGINYADGYVQYGKQKFNLWDSYGIGKYSVKTGSFVEDSRGRWYVCLVVESPKQDKPQLLLKQLVLILV

SEQ ID NO: 59508 - protein, 430 aa, unknown
  TnpB Polypeptide
VKVVQAYRFALDPVPAQERMLSSHAGAARFAWNWGLARCLQRYDAERKWYSAMDLHKLWNGEKKTDPALSWWPENSKCAYQEAFRDLDRALREFIKSRNGQRKGKRLGFPRFKAKGRCRDSFRFGTGAMRCAGQTVTLPRLGMIRTCESTRKLERRLADGRARILSATVSRTAGRWFVSFTVEVERAVPDRHARPGTVIGVDLGVKALMTGADNAGNTISVQGPKPLRAARRTLARASRAHSRKKPGSANRRKSAARLARIHARVANIRADALHKATTALAARYETVVAEDLNVTGLLANRRLASSVADQGFAAARRMLAYKTRWNGGTLIIADRWYPSSKTCSGCGAVKAKLALSERTYHCDACGLVLDRDVNAARNLLNLAASGAESLNACGGTVRPGHAGQDPVKQEPGTAHADQTGTAARQQAAAA

SEQ ID NO: 59509 - protein, 461 aa, Nonomuraea sp.
MAIRRSTTTEQDLLPVVQPRLAPTPAKEPGLEKRQFGHRARLALTPAQARLIDTQAHAARALWNLLHDWWTMLPKCRRSLAAADAAIRQARNDIDWLAFLPAQAAQQVLKTYFQAWKNHWEGRADQPTFKARSRTVMSVDIPQGRDLQITRVHRRWGMVTIPKVGRVRFRWTKDLPVGKKATTGNRITGARLVKDPLGWHIAFRVQTLNPKPEPHQGPHVGIDVGVSVPLALSDGNHHTHEQWRSTKDKPNAWLTTNEQAKLLTLERRAAHCKSFRKPGQRTSRRLRATYDQIASVRARAKRRAIDWQHQTTTGIARAYGIIVVEALPITNMTKSAKGTVDNPGKNIAQKSGLNRAISQEAWGRTVTMLTYKATRYGGTLHKVPAPGTSQRCSACGFTTSGSRESQAEFACKNEGCGWSGNADHNAARNILHLYRTGLALVPAAGRAVVRRARRVKPATAR

SEQ ID NO: 59510 - protein, 442 aa, unknown
  TnpB Polypeptide
MTENAKKRVYKNRSNIITLTERHIIKENHAFFDECDKLSFKAKNLYNATLYVQRQSFFNHDVKFANYYDVNREFTVNNQFDYRELPAKVSKQIQMLVDKNFKSYFALLKKKNKGEYDKPVKIPKYLNKTKGRFVVPYPKDAISLKTDGFVGLSKTNIFIPTKVDKDSIIGVRIVPKGNHYVIEVLYDVIKQDINNDYSRVAFIDPGLNNLMTVTSNVFNPILYNGRPVKSINQLANKMASKRQSMRVPWKPNIRTKNKYRIQQVLFPRLESDNSKLTKSIWSKRSNRINDYFQKVTSDLMNYLVSNNVKTVIFGHNKGQKQDINLGEITNQNFVNTPFTKLISILSYKCLLAGINFVVHEESYTSLCSFVDKEEICKHKEYSGNRIERGLFKTASGLLINADVNGSLNIGRKYLESIGEYSNELHAELLNNMANPKKRTIVL

SEQ ID NO: 59511 - protein, 420 aa, Clostridiaceae sp.
LLLTKKIIYKPNELELNILNSMAFSSAKLWNIGNYEKRNYKTLGFSEFPNWYDQKKRLKDNFWYKNLPSQTSQDVLNKLQKAWKSFFELNKSKGIKNPKPPRFKGKKDLFNFTYLNNGFKKVSDDTIKFSISKQQKEYLKDKYDFDSKYLSLKIKYFSTIKGNIKTIEFKPLKNKKYQINVVYEIEDVALKDDNGNYLSIDIGISNLFTCYDNKGKSFIASGSKYLEISHYFNKKISHLQEIANKQQIASGKKYVTTTKRINNLYKKKQLQLNHYYHCVTKEVVKYCVTNNINKVVIGDIKGIRDNAKLGSINNQKLHFLPYDRLYDLLAYKLLREGIELIKIKESYSSQVSPFSPEVSKTYATKSKRKKRGLYIDKMTLFNADSVGAFNILRLYEQQENKGIKVPLKGLSNPYKIKVAV

SEQ ID NO: 59512 - protein, 459 aa, Nodularia sp.
MDIPDFWSQQKHPVATRRMTFRLYPNEKTESILRDHRKLHKDLYNAAVNNRFTQYQKFNHKVDYFEQQNCLPAFKKVWIEYKELPSHALQATLKRVDFAFERWFKGLAKRPRFKSIRHYSGWTYPDCAGFKVESNGENGYLNLSKVGSIQMRGQAKYWGKPTTCTILYRNGKWYASITVNVLEQVLKPEILPVGAIGIDLGCKSALSITDGENHQQIDAPKFLRNAEQKIKKVSKEKRRKRAPNRNKRIKASRRFKKVQTRVSKILRKVANQRQNWVHQVAIEIVSSNSFVATEKLEVKNMTSQAKKGKRKKQKAGLNKSILDVGFGMLRSTIKYKVEQIGGVFVEVPTKKVKPSQTCPKCGHQHKKTLDVRIHECSVCLYVQDRDIAAAEVMLYWAKGILPGLGTSLVDADLSSSTSRTRKQAGSMRQLGEKKRQKSQSNFAKNKLEDVETSNSGEAS

SEQ ID NO: 59513 - protein, 409 aa, Nodularia sp.
VLVLEYKIKGTKLQYQAINEAIRTTQFIRNKAIRYWMDTPREANINRVDLNNYSTALRQKFKFVEELNSMACQSATERAWLAIDRFYSNCQAKNPGKKGYPHFQKDNRSVEYKTSGWSLHPTKRRIKFTDKKEIVEVKLLGKWDIHTYPYKSIKRVRLIKKADGYYCQFAIKAEPLSESRKADGEVGLDVGLEFFYSDSHGHHEPNPRFLRKAEKSIKHAQRQIYKKEKGKHQRRKARQRYARKHLKVSRQRNEHAKRIARNVCKANALVVYVRVACAKRIDLRVKKMVKNHCLAKSINDVSWGLFRRWLEYFAVKFNTKAVAINPRMTSQKCSDCGTIVKKSLSTRTHKCNCGCELQRDVNAAKNILNLGKARVGQTQSNATGLATSTLLGETLVEQVARVKVESPCL

SEQ ID NO: 59514 - protein, 414 aa, Nodularia sp.
VVKSGQEVIKVFNLTYEFKLKPTQKQVLLFEEWLETHRRVYNYALAERKDWYKSRSCQMNACSLHSCYIIPAATPRPTFASQCKSLTAARKQSEYLKRVNAQSLQQTLRRVEKAFVSMWEHNHGFPRFKKPGRMRSFSFPQLGQNPFNNGYVKLPVIGVVKCRQSRSIPEVGVIKQARVVKRVSGWYVMLTIQWDVSPPQPMPHGEALGIDVGITDFIATSNGFFVKRPRFFVDAQCKLKLLQQGVSRKCLGSNNWKKAQKKVALLHEYVANSRKDWHRKLSHQICDSAGMVFVEDLNLVGLSRGMLGKHCLDAGFGKFFNILEQTCFVRDVYFQKVDARKTSQICPNCGVETGKKELSQRTHVCLNCGYTTHRDVAAAQVVLIRGLAAVGHTVKMLAEGKFIGIPVKQEFSRL

SEQ ID NO: 59515 - protein, 396 aa, Nodularia sp.
MLVFEFKAYGKSAQFTAVDEAIRTAKFIRNSCIRLWMDVKATGKNDLQKYCAVLAANFPFANELNSMARQASAERAWSSISRFYENCNSGIAGSKGYPQFQKDCRSVEYKTSGWKLADDCKSITFIDKKGIGRLKLKGTRNLHFYQINQIKRVRLVKRADGVYVQFCVNVKRSESIEPTGNTIGLDVGIKEYYTDSDGTMVENPKFLRVGEKALRRSQRRVSRKVKGSSNRGKARQILGKRHLKISRQRKDHAVKLARCVVQSNDLIAYEDLRIKNLVKNHCLAKSINDASWYQFRVWVEYFGKVFKRVTVAVNPQYSSQECSSCGEVVKKTLSTRTHVCKCGCVMDRDENAARIILSRGLGTVGHTGTFALDASNALGDESSTQSGVSLVEQVMS

SEQ ID NO: 59516 - protein, 427 aa, Nodularia sp.
MLTMNYRYRIYPTITQEQTLLEWMDICRVAYNYGLREIKDWCNSRKCMVDRCSISHEYIIAADVPFPSEVRQLNALPKAKKVFPRLSEVPSQVLQQALKQLHRAWEGFVKVGHGFPRFKKFGQFRSLLFPQFKQNPVQGGSIALPKLGLIRINWHRPIKSGFVVKQVRIINKADVWYASINIQCDVNVPSPMPHGHPIGVDVGLEKFLATSDGVLVKSPKFLKVMQSQLKLLQRRLSRKKKRSKNYDKQRIKVARLHHTIDNTRKDYHFKQAHALCDAGDMVFMEDLDYRTLAKGMLGKQMLDAGFGQFRTITKYVCWKRGKFFGEVSARGTSQECPECGAEVRKDLSVRVHHCPSCNYTTDRDVASGQVIRNRGIKLISTDGQSGIQNAYADGLPGIEETQSRSKSKTRKTRLERSRKETTRKSKK

SEQ ID NO: 59517 - protein, 352 aa, Nodularia sp.
MVKQWFGVSRFVYNTTVKLLQDSSLKANWKAIKTDILNGLPEWSKSVPYQIKSIAIKDACKSVSNAKKKLKNGGGMSKIRFRSRKDTVQSCYIPKSAVKDVGIYHTILGEATFKEALPQSFGDCRLVFAYRDYYLTVPQDVPQQKSDNQGRVVALDPGIRTFITFFSECSFGEIGTAANLQIQKLCFRLDKLISKFTKAKCKQRRRMKLAASRLRGKIKNLVDEFHKKTARFLVDNFDIILLPTFETSQMSKKAKRRIRSKSVRQMLTLGHYRFKQFLKHKAFETNKVVMDVNEAYTSKTVSWTGEIIPNLGGAKFVKSPSDGQVMSRDMNGARGIFLRALVDTPSLKECIC

SEQ ID NO: 59518 - protein, 397 aa, Nodularia sp.
MEQVLTLVCKLNPTPEQVVQMETTLKAFADACNYANQQVKPQVTSATTIQNLVYQDLRSLFGLSANLAVRACARVGANRKTAKQKKKPVKFFTPTSADYDARIFAFREKDWTVSLTLTEGREHINLDAGNYQRGQLKGKKPTSAQLCKYRDGSYYIHIQIKDEAPEPLKPNNVIGVDFGRRDIAVTSNGDKWDGRQITEVRDRYAKVRTSLQKKASRKPDAARTKGTRSTRRRARQILQRLSGRERRFQQWLNHQISSRIIQQAKSSSAIVAIENLTGIRERTNTQPRNKIERRRSNSWSFYQLRSFLEYKGIKEGVEVIAVPPAYTSQTCHQCLHIGLRSDKRFQCGNCGWHGDADLNGAKMISLLGQSVSLPGGSGYLCCDLSTDNLGLLKAPSL

SEQ ID NO: 59519 - protein, 395 aa, Nodularia sp.
MLVYEFKLAGKQQQFNLIDEAIRTALFIRNSCIRYWLDNKKVGKYDLSAYCKILAKNFEWAGKLNSMARQASADRAWSAISRFYSNCKKKVSGKKGFPKFKKRGHSVEYKTTGWKLSEDRKCLILTDDFEIGKLKLVGTYDLHFYQIKDIKRVRLVKRADGYYAQFCIAFARKIEIEPSKKAVGLDVGLTHFYTDSDGNKVDNPRFLRQTEKALKRLHKRVSKKFCQGQLQSNSYKKAKDKLARKHLKVSRQRKDFAVKLAKCVIQSADLIAYEDLQVRNLVKNHKLAKSISDASWYQFRCWLEYFGQLYGKITIAVPPHWTSQNCSNCGEAVVKTLSTRTHKCLHCGTVLDRDENAALNILALGLSTVGHTGTNAWGENDLCLDLVTDSDKLTR

SEQ ID NO: 59520 - protein, 429 aa, Nodularia sp.
VYGCQQVLINPDKDLKALLEYVCIEANKLINCGIYYSRQYYFRTGKFPSQADLHKQIGTVQKNKHYQALYSDTAQQILTGVAESFKSFTSLLKGVKKGTVTQKPRLPNYRTPGGLALATFTGRSLKLKDGMIRFPLGSLVKAWFGIDSFYLPMPANLDFKSIREVRILPRNRCFYAEFVYQQNIKVIELDKSKVLGIDHGLNNWLTCVSNIGTSFIVDGLHLKSLNQWHNKSVAKIKENKPQGFWSNRLAAITEKRNRQIRDAVNKAARIVINYCIDNKIGSIVFGWNTGQKDGADMGKKNNQKFVQIPTARLKNRIEQLCEQSGIDFIETEESYTSKASFLDSDELPTFGEKPEGWKSSGIRTERGLFKTATGIKINADCNGAANIVRKVAMMAKFDLAGISRGCLSQPKKVLLWTLQKSPCLQTGEA

SEQ ID NO: 59521 - protein, 462 aa, Nodularia sp.
VYKTCSIRAKFNDEETAFWLNQCENANSLINCALYETKKIHYAKLQENSNAFTTYWRGDDLRSGWKTYRCTTTYPELDLILKQNVHYKAMAAQSAQQTLKSVGESITAYNRLVKAYYNGEVDKPSLPKYRHKGGLASVTFPHQALSFKEGYFKPSISKETKPELLTEIRLYLPEFIDSTWVKEVTVRPNFGQLWIDWVIDDGKEPIQNNPQLDYTQAWSFDHGGSNWLTGVSTRGKSLIIDGRKLRSLNQGYSRLVAKYKQGKSDFYWDSHLDRVQRQRNNQMRDAINKASRFIINQCLNDKIGNIVIGWNAGQKQNSNLGKRNNQNFVVIPTSRLIERLKQLCPEYGITLTITEEAYTSKASFLDCDSLPKHGEKPQGWKASGNRIERGLYKSRDGFIVNADCNGSANIMRKVATQLGLNLAEVGRASLTVPQRIDLFTRLSKSYRKRCGVGLLDPVATSV

SEQ ID NO: 59522 - protein, 408 aa, unknown
  TnpB Polypeptide
LNYASQYSFEHGKMSNQQKLQKALYAELRQKYKLSSQLACNVPRQVGATYKALWTKLRQNIEARKNGRTKKRYKGLDQAPKYVSPTLTYNYERDYTFKKEQHVSILTLDGRVSVPYQGYNKHVAWIHHGASIGAAKLYYDKPRKQFYLIVSFEIERAEPTPQMHTDVVGVDVGIRYLATTTDTRNHSTFYSGKRMVAKAEHYSRLRKRLQRKGTRSATRRLSALSGRERRFKRDVNHTLATRILATHPHSLIGVEHLTGIREATKRRKGKRASKKQRQANRRTSSWAFAELHGILAYKAPFHDSMTVKVDANYTSQMCPKCGNTTRKNRPNGAIMFRCTVCTYECHSDLVGARNLALRTLFIRQDWMKTGMLSASLDVSDKEAKAERLSRYSELRWSPDTSPRVLREG

SEQ ID NO: 59523 - protein, 460 aa, Cyanothece sp.
MNYQTQKILLTGNIDDEAHAYLLWCCEQSNKLYNSVLFSIRQDYFENCNYKTWFDKNDNYRRSPRLRRIKVSYAQLCKDFKDNVHYQAIGGQQGQQTIKSVVEAIKGYNKLLPMWFNGELKDKPKIPNYRKKGLYQVSFTSQNIRYEPLEGICYLPIANSQRKELETPSIIIPSGVNFQFLDIAEIRIIPQTNKLWAEYIYKTQSVKGSNLDYSQGLGIDHGVTNWLSCTTTKGKSFIVNGRKIKSINQRYNRFIAKHKQGQHQDYWDDQLEQATHKRNCQMRDAVNKAARFIINYCLKHQIGNIVFGWNDGQKNSINIGKTNNQNFAQIPTARLKNPIQQLAESVGIIFTEIDEAYSSKASFLDNDLVPNYGEKPQGYKFSGKRIKRGLYQTAKGWLVNSDTHAAANCLRKVATQLGLDLARVGKECLTVPKRYDLENLTKSYRKQAEMWLQPIESLTA

SEQ ID NO: 59524 - protein, 424 aa, Bacillus sp.
METIVQRGYVYAAMPASKEVETYLRQCFGAARKLYNLHVAHLYDYLEKNDYQPGERLPSMKKMQMPSVSTFKKQCVDEHGFPYLYLVDAFASNEAKQHFQKAISAFNKIAYKKQFKKSALQRQKTLRTELTFRDLQGMPRFHSKKGSKASYTTFNQNGTISIREGVLYLPTAQKSPMNEVALTLNMHRPLPKGSSIKNVTVSVNAQGKFYVSLCVAFPKEIALIKQPKQILGIDYSQSHFFVDSEGKKANYPQYYRQAEERLANEQRLLSRRVKGSNRWEKQRLVVARLQTKVANQRKDWLHKKSYALARRYDMVVVEDIDLRSLSQNKRYAKNQQDNGFGTFRLYLQYKLEDRGRRFVKAPKQFPSTQLCSCCGCKNTLLKGDVGIRYWKCPSCEVAHDRDINAAFNLKQYGERHLHESHISA

SEQ ID NO: 59525 - protein, 373 aa, Bacteroidetes sp.
MNKTFKYRIYPTKSQVKKLNDNIRACRFVWNTFLNERKVLYETEKKQISCFDQTAKLTELKKEFPFLKNAYSQSLQQIVIKLDLSFKSFFRRIQNGETPGYPRFKGCYRLSSIYFTQFGKGCKIANGKLAVSKIGDIKLVYHRELIGTPKTATIKRTPTGKWFVSICCETDNTILQTNDLSVGIDLGISKFATFSDGTVIENPRFFKEEEIKIKKAQSKTDKLVKGSKERFKARKVVNRIYERLSWKRDNFSHQESRKVINKYQNIILEKLEIYKLIHNGYPNLNKCITDVAWNKFTSLVQYKAVEAGRTVILVNPKNTTKTCSQCGKIVDKSLSERVHNCSCGLVLDRDLNAAINILRLGTQSLQRLCLSAE

SEQ ID NO: 59526 - protein, 400 aa, Phormidium sp.
MLTALKVRLYPNKEQQTALAQNFGCCRFVWNYYLNKSNTQYQETGKGLSYCDMAKDLTQLKKQEEFLWLKDASSSALQQSLKNLEAAFKNFFEHRAKFPKFKSRHKKQSLRYPAGCSIKGSGIQLPKLGIVKAVISKKISGKIKSVTVSKDSTDKYFAAILLEVEDLPTNKEGKISGIDLGLGSLVTVFDGEITYKVDPIKPTRKYAKRLRRRQKSLSRKKLGSSNRKKQVKRVAKVHQKITNTRQDFLHKLSHQLVSENQTLVVENLCIKGLARTKLAKSVLDAGFGTLVNFLDYKLKRVGGILVEVDRFFPSTKLCNCCKHKNDSLTLKDREWVCPKCQTHHDRDDNAAKNLREEGIRILSTNTVGHTEFEACGETVRLVSTSAKKRVSKKQESPVTA

SEQ ID NO: 59527 - protein, 443 aa, unknown
  TnpB Polypeptide
MIKSYKLELKANKEKLEKVKEVLKEYRKTAKVVLNTQLSLLYKNSKLNKNHKLNINTKLSARYLQTLQYQIVGMLDSYLSNRQNDFKEIVLNSSLDTQRKNYCISITIKDKTIEREIIKHTFKKNRFPNIKRIHLQLDSKVAKIETKKESEAVEYDYWIKLSTLEKGNPIYLPIKSNNYFENIEGKIKNFVQIIVDKEEVVFMKEVKKRDYIPKTKKIAIDLGLRNLFATDRGDLIGRNFIDYLTKADKKIIKLQSELQKNEIKPNKSKKYRKLIYKLREYIKNEVNRAINKIVKLYKPEEIILERLNFQSPKLSKKLNRIIQNFGKSIIRKKLETLKEEFNIKITEVNPAYTSQTCHNCGYVSKLNRKSQKVFVCKFCGKKQNLDINASRNILKRSSYKNGGIYISKSKILDELVNLFIERYKGVNSCPLILTNPYFVERLE

SEQ ID NO: 59528 - protein, 402 aa, unknown
  TnpB Polypeptide
MQRTVRLTLKPTPIQAQALTDTTHLFTKAFNDVCAYGWAHAERNGVQLHHATYYAEKAACPGLVSDLIIQARVKATEALKSAFALQKAARTVSCPHSAACPPRYNLHTYTLAWDNGTVRLSTVEGRMSVPFTVPGYGKKYIGLPPDTADLIQYDYGRWGLHVVVTLEAPAVPQTDEVIGIDLGLTHPAVTSANTFLGQKAWKATEGRYFRLKRRLQSCGTKSAKRHLRHLRGKQARFRRDCDHLLSKQLAETTAPGGTLVLENLTNIRQRMRAKRHTPTKRRMHSWSFAQLFAFLTYKAEERGLTVARVDPRHTSQRCSACGHTARNNRRSQSRFVCRQCGFELHADLNASRNIAAKYRASRGITPTGVPLSTGVSSPVRSVVRQHASPEVRDKLPALAGSR

SEQ ID NO: 59529 - protein, 401 aa, Deinococcus sp.
VIVLEYKLVATNKQQQAMDEAIRTAQFVRNACLRLWMDAKDAEKSVGRNEISKHTTKLRAEFEWANKLNSTAVQAAGDRAWSAISRFYHHHKKGIQPVGFPKFKKNTRSVEYKGSGWKLDAANKRLTLTDGFKIGVMKLKGSWDLMLYRLEDIKRLRILKRADGYYAQFLIDAERHMDLEPSRKTIGLDVGLKSFYTDSEGHEEPSPRFYRKAEGALKKLQRRVSRKVKGSNNRKKAVKKLGRKHLKIGRQRKDHALKLARCVVMSHDVVAFEDLKVKNMVKNRKLGKSIQDASWRAFRHWLEYFAKIMGKIAIPVNPAYTSQMCSGCGQTVKKDLKTRTHLCGCGTVLDRDHNAAINILRAGLRMVGHTKTSGETQETLVEMEEDQPKLASIAEARIPQL

SEQ ID NO: 59530 - protein, 373 aa, unknown
  TnpB Polypeptide
METCRQVYNSLLNWHKHDYEVHGKTVSRYQMNGAFPKWRKEFPEIADVHSQVLQNTSLRVELAFSAFFRRAKAGEKPGFPRVKGDGYGSFCFPGASVGYAVVNGGLRLSKITEKSSTIKMCLHRPLVGKVKTCCIHRVGPKWFACFSVEQDDDFPPPSEEAVGLDAGLSSFLALSDGTFIDNPRFFRKEEKALAKAGRKQAKTEKRSKECRKANKVLSRIHERVRNRRHNFVHQTARRLVNRFGVIAVEKLNVKGMVTPITPKNRCLAKSISDASWSMFRSILTSKAESAGREVIAVNPAHTSQDCHACGYRAKKKLGERWHHCPMCSASLDRDTNAAINILALGLSSSTRNLAGITSSQVTPVEALGSSHGE

SEQ ID NO: 59531 - protein, 527 aa, Nocardia sp.
MSAVPSRLSAMFYIRVSASALHLSNEEARAVVPAIGEPCHPTRPARPVCGGVPFRPVAASNRSGRIWKLWCSWAAAAEFRIDRCCRWRVPHSSVMSRHTTFQFCLDPTVEQRRVLDRYAGAARFAFNKSLDFVKAALTQRENDPDQQVPWTGFSLINAFNAWKKTEAAGRVIRVDLLGVAEVEVTGLAWRSEVCQQVFEEAAVDCGRALTAFSDSRSGKRKGRRVGFPRFKKKNSTTPSFRLRNKISKSGCAGIRFGDNEIPRSVTLPCIGTVRVREDTRRLRRLLGNGRAKVLYITVSFRAGRWQLSVTTEAADLHPAFHHRPRAADDDSGWVGVDRGLSSFLVAAAADGTDVAHVDNPPKPLASGLRQQRRLAKSLSRKRKGSRNRKGAAARLARHHRRVANIRRHFQHQVANRLVKTHDRLVVEDLNVAGMLGNRCLAGAISDAGWGDFGRIVRYKQRWRGGTVVTADRWYASSKRCSACTRVNTELTLSDRVFVCRCGFRADRDHNAAVNLAVWPMLQREASP

SEQ ID NO: 59532 - protein, 373 aa, Deinococcus sp.
MLKAFRYRLCPTKAQEAALNEQLRLCRTLYNAALEERKAAYKKARKTLTGYDQMKHLSEIKAELPEYKGVYSQVLQDVLKRLDKAFQAFFRRLKAGQTPGYPRFQGRDRYDSICYPQSGFSVSEKTAFFSKIGNIRIRLHRPLEGKIKTATITRDCGEWYVSYVCEVEPRPLPVSGSSVGVDVGTTWFAITSDGEFVENPRHFQGAMKKLRVAQRSVSRKTNKRSNRRRKAVRRVAKLQRKVARQRLDFHHKTAIKLIRENDLIAHEDLNVGGLGRGTLARSIHDVGWGQFFSLLSQKAAWAARKVVAVDPRYTSQACHQCGHTCRENRVSQSRFWCVACDHQENADLNAARNILGRAVPSGINVAVVNASVA

SEQ ID NO: 59533 - protein, 246 aa, Thermus sp.
LEGKIKTATVKREGEHWYIIFITEVDPKPLPPSEEAIGIDLGTNPHFLVTSEGEMVEAPRHFQKAEEKLAKAQRELSRKKKGKSGRKKARLKVAKLHRKIANQRKDFHHKLARRLVNAYGTIVHEDLNILALSRSYVAKGIHDAGWAQFLAILAYKAEAHRASGSVLAGRRVIKVDPKYTSQDCPVCGHREKKPLWVRAYTCPQCGALLHRDVAAAQNILAKAWTGPSGETPRAFPQGNTPRSPGL

SEQ ID NO: 59534 - protein, 379 aa, unknown
  TnpB Polypeptide
MRVYKFRLYPNRTQENLMFNTLNLCRFTYNQLLEEMQNVKDKKHIQHHIVTLKGLYPDIKQVYSKTLQYECYRLYANIKGLSQSKKKGNKVGHLRFKGRQWFKTFVYNQSGFKLLQTDKRFNILQLSKIGSIKLLQHRPIEGNIKGIIIKRKVDSWEAHIITDAKYTMQKGWDKIGIDLGIKSFLTDNNNNKVDSPLYLKQSLSLLKHKSQVLSRKKKGSIRRLKARKILAKLHEHVLQQRDDFLHKTTTNLIRQNQFIGVEDLNIKSMSETTYNARNILDSSWGKFLQMLDFKAESAGCQVVKVDPKNTTKMCSKCGHLMDMPLYKRQYECEECGLSMDRDHNSAINILRKALEQGIVERKQKFSDEARSPILNTEGC

SEQ ID NO: 59535 - protein, 376 aa, unknown
  TnpB Polypeptide
MDLEQESIGELKVKKLRLYPKKKAKRKINEWIGATRWIYNKCVEAVNSGERKCNLKELRELISSEEEEWLTEIPYEIKDGAIRDLVKAGKATRKTRKKFSFKSRKDLQQSFYLRARDFFRKKGKFSFLGEIKTREELPELEHDLRLIKDSLNRYWLAIPVPLEIKTLNESQVKRVVSIDPGNRTFATCYDPQGSITEWGVNDQERLFRLCLKIDKYTSEASKSNAKRRFVLRKKIKRIRSKIRNLVDELHRKLAKWLCSNYQVILLPEFKVQGMAKKSKRKISNKSVRKMMTLSHYRFKQFLINKVREYPGVKVLIVTEEFTSKTCGRCGVENNKLGSSKLFECEREGCNLKIDRDHNGARNILIKTLTESKMSCS

SEQ ID NO: 59536 - protein, 456 aa, Mycobacterium sp.
  misc_feature (364)..(431): Xaa can be any naturally occurring amino acid
MPKFEVPDGWTVQAFRFTLDPTEDQAKALARHFGARRKAYNWTVATLKADIQAWHASGTVTAKPSLRVLRKRWNTVKDDVCVNTETGVAWWPECSKEAYADGIAGAVEAYWNWQTSRAGKRAGKRVGFPRFKRKGRDQDRVSFTTGAMRVEPDRRHLTLPVIGTVRTHENTRRIERLIKAGRARVLAISVRRNGTRLDASVRVLVQRPQQPKVVHPGSRVGVDVGVRRLATVATADGTAIEQVENPRPLGAALRELRHVCRARSRCTKGSRRYRERTTQISRLHRRVNDVRTHHLHVLTTRLAQTHGRIVVEGLDATEMLRQKGLPGARARRRGLSDAALGTPRRHLSYKTVWYGSALVVADRXXXXXXXXXXXXXXXXXXXXXXXXXXXXXXXXXXXXXXXXXXXXXXXXXXXXXXXXXXXXXXXXXXXXLARRVAVKRGREPATRLANNPETGC

SEQ ID NO: 59537 - protein, 421 aa, Bifidobacterium sp.
MTLKGIKVRLDPTPSQERMLLSHAGAARFAYNFMLGMVKAAVAGRVGRFGWSKAQLRRVWNSWKADVAPWSAGNSKEAYSYGVECLANALKNWSDSKHGKREGPKMGFPKCRVRSKHMKFAYTTGSFGLINGDPKALKLPRIGRVHCFEDMGKRVGDGRVLRMTVSCSAGCWYASLTVEYPDPVAPAKPSGGTVGIDVGVKILATLSDGTVIDNPKHYKRNERKLRKAGKRLSCRVKGSNRWKKASLAVQKVQARTAAQRHDTINRATTMIAQTYGTTVIEDLNVAGMKRNRHLAKAVSDAGFGEFRRQLAYKCLDSGATLVVADRWYPSSKTCSGCGTVKAKLSLADRVFVCDNLSCGYAREGVDRDWNAAVNLEHYVAPSAAGDAKRARRNRKTTGPRQAGNAGPCETRTKQNAPISVQ

SEQ ID NO: 59538 - protein, 390 aa, Symploca sp.
MTQKAFKYRFYPTTEQEQLLRKTLGCTRLVYNRALTARTQGWYERQERIGYKQTSTMLTHWKKQPELAFLNEVSCVPLQQGLRHLQQAFSNFFAGRARYPNFKKKRNGGSAEFTKSAFRYKDGNVYLAKCTQPLPIRWSRKLPNGTIPSTVTVSLTPSGRWYISLLVDVEIQPLPKKAKNVGIDLGITSLIATSDGDKVVNPKTYHTKYRKLRKLQKGLSRKVKGSRNREKARRKVASIHAQIVDARTDFLHKLTTQLIRDNQVIVVEDLAVKNMVKNHKLASSISDASWSELVRQLEYKSEWYGRELVKIDRWFPSSKRCSNCGHIVEKMPLEIRQWECPECSAEHDRDVNASLNILAAGLAVSVCGATVRPEQSKSVKAGAMKQKPKL

SEQ ID NO: 59539 - protein, 442 aa, Chloroflexi sp.
MRIMRGFRFELEPNRETVVSLKKHIGAARFAYNWGLARCKEALERGERVPSAFELSRMWNRWKRENAPWWVEVSKCAPQEAFRDLEQAFRNWRAGQSGFPRFKRKKSMDDNKARLRGSIRVFPRHIQLPRIGKVRVKEPTHKLHLLLQEGKARILSATVSREADRWFVSLTVEVEYPDPQPLPPDAPVVGVDVGLDSYATLHDGRNPEHVRIPEQLQHKLARLRKKLRREQRRLSRKQREREVPDPNNPNATIKVFGKNYVKQLLRLQRVHRKIRNAFRDFLHQTTTRLAKAKRVYVVEDLSIKGLMRKRKRGYRLSRSIAEASWGEFLRMLRYKAEWYGSRVIIADRFYPSSKTCSACGFIRSDLRLSDRIFICPHCGFTMDRDVNAAINLRHYGLATLNGPTARSAGSHACGDPSGGGTAKAGLRATGRRSRKDAPRSGQ

SEQ ID NO: 59540 - protein, 288 aa, unknown
  TnpB Polypeptide
MVLCTSGSYGYGISEKMLVREKGICPTLEKRHQKYFLRFSYKEEVTLTKTPVKEQIICSVDLGINTDAVCTIMRADGTVLGRRFIDHPSEKDRMYRTLGRIRRFQREHGSAQTQGRWAYTKRLNTELGKKIAGAIVRYAEENHADVIVFEYLEMQGKISGKKKQKLHLWRKRDIQKCCEHQAHRKGMRVSRICAWNTSRLAYDGSGAVTRDWENHSLCTFQTGKRYNCDLSASYNIGARYFIRELLKPLPATERSLLEAKVPSVKRRTSCVYADLRKLHSEMELLKAA

SEQ ID NO: 59541 - protein, 410 aa, unknown
  TnpB Polypeptide
MTTVIFLDRKRGYYFPKHKLVVYNKNIRFLVRGEVILLVNKAYRFRIYPNKQQEILIAKTLGCSRFVFNHFLSEWEKTYQDTGKGLSYNSCSKQLTQLKKELTWLKEVDSIALQSSLRDLADSYTRFFKKQNQAPRFKSKKNNIQSYTTKYTNGNIAILDHKIQLPKLGLVPFKKSREVEGRLLNATVRRNASGKYFVSIGVETTVKEAFPKTESSVGIDLGIKDFATLSDGTVYKNPKYFRTLEKKLAKEQRVLSRRQKGSSNWHKQRIKVARLHEKIQNARRDYLHKISTNLVKKHDLIGIEDLSVSNMLRNHNLAKAISEVSWSQFRTMLEYKARWYGKKIITVSTNFPSSQLCSSCGYRNQNVKNLALREWTCNDCGKHHDRDLNASINIKKEAIRLLTVGTTGLA

SEQ ID NO: 59542 - protein, 447 aa, Beggiatoa sp.
MKKAKKVTRIVYSDDLNQAKYDALNEIAKRCGSIRTEVWRNYGSIGGLGARFRPVRDGWIADKHVKNLPQRIWRVTLSDSLDDIKANREAAKEIVKRHIFRNIDDKDKRKELFKKLKNDSVWVNDPYLRRLMRKYWKHGKNNTFNQIVLEPGSYKCFSHNGKNYIEVISLKRGSLLAIPVGTNYSITGQIRLILRGGQVEIHYTIDNTDERACGSKKIGIDKGYTEAFVDSDGNFHGKGLGEVLSKESDYLKIKYQRRNKIKAVLGKIEQKNPKKARRIRKHNLGRKKLNLRSQRHQAQVKTIVFTAVNRVVDKAKTVVCEDLTKTFKSRKNYGKNTNRRLSGWVKGLMASAIDIVASRRGSRVVQVNAAYTSQICSQCGCLGKRTGNKFHCAWGCGAVMQTDLNAAVNILARSDDKELHRWLSFQKVKQILLERCRRPDETAHPGL

SEQ ID NO: 59543 - protein, 399 aa, Mycobacterium sp.
MRERHCADARYVWNLAVEQFRYRERRERGTTGRSAPGPAARQKQLAQARQEFEWLRGGSSSVQQQALRDFDRAAQACFEGNAKEPTWRKRGQSEGFCIRDTKVVVHSRRWAQVAVPKLGWVKFKLSRAFPHAKLGMARITCSCTGRWHVSFPAPQPAVSDAGRAGRSIGIDRGVATTVATSDGQMFRAPRMRKREQAKLARLEREKARRRKGRNRRKATVKQIAMLHERVAERRKDWVEKITTRLAGSYDFVAVEALQTTNMVRRRKPKPDPDNPGQYLPNGAAAKAGLSKGIYANCWGMFARRLGHKMQASGTTLVAVPPKNSSIECRMCGHTATENRKSQAGFQCVACGHAEHADIQAAQIVLARARPAPTPGPGAAPQGAGTARCARESGNQGWAA

SEQ ID NO: 59544 - protein, 393 aa, unknown
  TnpB Polypeptide
MSIIHKTYRFAIEPSKEQTVLIDKHFGCTRFIYNHFLNERKEQYQASKKSDGYHQQSASLTKLKKQEGTIWLKEVNSQSLQFALRCLDTAYINFFKGQAQFPRFKSKRNKNSFTVPQFASIENGHLFIPKFKQGIKVNVHRKIKGKIGKCTITRTAAGKYFVSIHAEEHHEPLSKTGKTVGIDLGLKDFLITSDGNKLRNHKWTKRYEKQLKQAQQHLSRKQKGSKSRERQASKAARIHEKLSNSRRDILHKISHSLVRDHDIICLEDLNVKKMVHNRKLSKAILDASWGEFIRMLEYKAQWNNKLIVKVDRFYPSSKTCHECGWINQSLELKDRKWTCANGHEIDRDINAAKNILQEGMNKISAGTVDHTNGDDVRPNDGQSPMKFGVLSAI

SEQ ID NO: 59545 - protein, 366 aa, unknown
  TnpB Polypeptide
MIPQPASANQSDSIRVLRLRLKDKHAAVMRDRAKWVNQVWNYANALSVKVFERERRFIGNYEIDTYTKGAGKEGVPLHSQTIQAISAELVTRRRQHRKVKLRWRVSKGAKRSLGWIPFKASALRYRNGQLWMSGIDVPLSLWDSYGLADYELGSGNISEDARGRWYINISVWVKPKQSVGTADLGIDLGLKSLAAFSDLALENVEAKKFYRHMEDRLATAQRAKKKRQVRTIHAMIANRRRDHHHQLSTLLVRQYGAIFVGNVNATGLAQTKMEKSVLDAGWSQLRTMLQYKCDSAGVLFGEINEAFSTQDCSVCDARSGPKGMKDLGIREWTCLHCGTTHDRDRNAAMNILRRGRATLAVGIPAL

SEQ ID NO: 59546 - protein, 479 aa, Firmicutes sp.
MKLENKTLTITIETKLEKATAYPQLEVIGRLYNNLKRRLYKRIIKESTSIAKLKKEFLSQYQIPARFFNSIYADLKGQIKSHHEMRRLNQSTISRKIRYLEEQVRQSKEKYVVFQKRRKIYRLQQQLNKPRREICFGGRNFFNKQFTGPEYITNHELWRQEWELRRNGEFTFLGSKDESYGNQLCQLIDNKLRIRLPNCLAVESKYIEVPIEFHYYQDYLKEATGNHKALTWRFKKRANGYWYVFLTFTLDKEVLDDQSNGVFGIDLNYESLAVSETDRYGNWIGSGQYHFSQEDKSSEQSLQEVSLLLDKIVVEAGQKKKNLVIENLDIKDKSGFNRLANRKKNYLLYRKSFSLLESKCTKRKVKLIKVNPAYTTIIGENKYRYRYGINQHEAASFVIARRGMGFKDMVPVQLTCFLPGRIKNRHHWSHWNWIRKNLPTCLKRFNSLSGKGFSREQLLTGRFNRRDLSFVLALSIVSI

SEQ ID NO: 59547 - protein, 298 aa, unknown
  TnpB Polypeptide
VPDPFIDSSDDVPGMAGGLPEGRGAGWWDEFFADRAKPCPFFVEWPDENLIAWFSEGLLTPGRVLELGCGHGRNAVYLASWGCRVDAVDFSAQAISWAQERANQVGAAVEFQCCSIFDAAITVKVTDRRKDRAEKISTRLVRDHDLIAFEKLRTKDMVRKPKPRPDPGQPGAFLPNRRRHKAGLNRGILASCWGLLATRSQQKAAASGAVVIYVDPKYSSQECRQCGHVASSSRESQAVFRCVACGHQDHADANAAKNVLARGLASLEVPAQAPGPRGVRPRKTPANPGAAGTTRDAA

SEQ ID NO: 59548 - protein, 243 aa, Mycobacterium sp.
  misc_feature (9)..(9): Xaa can be any naturally occurring amino acid
MPVYGCWCXVRRLATVATADGVVIEQVSNPRPLETALRELRQVSRARSRCTKGSRRYRERTTQLSRLYRRVNDVRTHHLHVLTTRLAKTHGRIVVEGLDAAGMLRQKGLPGARARRRGLSDAALGTPRRQLSYKAGWYGSALVVADRWFPSSRTCHACGHVQDIGWDEKWQCGSCSVTHQRDDNAVINLARYEEPVSVVGPVGAAVKRGADRKTGPRPAGGREARKGTSQPAGEQPRDGVRVA

SEQ ID NO: 59549 - protein, 383 aa, Methanohalophilus sp.
MFLTKTVILKIANPDNDLVETMKKYSDGMNYASEVLFDKGKPIPAMKLQQEVYPYLRETLKLKSQMSCNIPRQVAGCYKTLKKQKKAKWQKVEFSPSSMTFSYKRDFVIDEDTVKITTINGRKAYSILNYDYAKQYFEGSWKYQASKVVKHKDGDYYFHLSLEKEAPDKEITDASTFMGIDVGMNYLAVASTTDRKCSFFAGGEIKNLRNQYKSMRKRLQSKGTLSAKRMLKYISGKEKRLMRDVNHTISKEIVKFAVKNKVSVIGLEDLTGIRDSTLSKVSKKRRHNHSSWAFRQLQTFIEYKAKEVGIITHYVDPSYTSQTCIRCNHISKNNRNRLSFRCEKCDYANNADLIGAMNIEHKTRDYRYILESQGCLSATQTNA

SEQ ID NO: 59550 - protein, 373 aa, Methanohalophilus sp.
MLKAYKYRMYPTKEQEEKFFQHFGACRFIYNWALEQKIKSYEQDGKSISRFDLNKGITILKRDGEHEWLKDVNSQSLQGATLNLDNAFTRFFREKRSFPKFKSKKNPVQAYNVPQNYKVDFENNKIYLPKIGNVKTILHRHYGDGDLKTATVSRTSTGKYYISILVDNGLETPKKSEFSENDTVGIDVGIKDFAITSNGNKIDNPKHLRNSMKRLKVLSKRLSRKQKGSKNRKKARQKIAKIHEKISNQRHDFQHKVSTKLISENQAVVLETLNVSGMLKNHNLAQHISDASWSSFVTKLEYKAEWYGKTILRIGQFEPSTKICNVCGYHNKNITLADRKWQCHDCGTSHDRDVNAAVNIKKFALNTQNLIGI

SEQ ID NO: 59551 - protein, 379 aa, Methanohalophilus sp.
MILKLIYFLMLRAYKYRMYPDENQIEMFHKHFGACRYIYNWALENKIKSYEQEGKSISRFELNGKIRMLKREFEWLKEVNSQSLQGATLNLDNAFTRFFREKKGFPKFKSRKNPVQSFSVPQHYQVDFEKNKVKLPKIGWIKTKLHRNFEGVCKTATVSKTSTDKYFISILVDGGKELPVKQEFDIDTTIGVDVGIKDFAIMSNGDKIENPKHLKNTIERLKVLQQRLSGKEKGSANRQKAKLAVAKLHEKIANQRNDFQHKLSHKLISENQAIALETLNVNGMLKNHCLAQSISDASWSSFVSKLEYKAEWCGKTVLRIGQFEPSTKICNVCGFHNKNITLSNRNWQCPDCGTKHDRDVNAAINIKKFALNKQNLIGI

SEQ ID NO: 59552 - protein, 406 aa, Lechevalieria sp.
VKRLVKRAFRYRFYPTEEQAAELLRTFGCVRKVYNLALQARVEAWAQHGERIGYDATSALLTAWKRTEELAFLKEVSAVPLQQALRHLQMAFARFLAKRSRHPRFKSRKRSRASAEYTRSAFRWRDGRLTLAKMAGPLDIRWSRPLPEGAEPSTVTVSLDSAGRWFVSLLCEDPGVTPLPGVDAVVGIDVGLHHLLVLSTGEKIGNPRHERRDRAALARAQRSLCRKQKGGSNRAKARVAVARLHARIADRRSDFLHKVTTRLVRENQTLVIEDLAVSNMLRNHHLARAIGDAGWRQFRQMLEYKAGWYGRQVITVDRWFPSSKLCSACGVCVAELPLHVRVWTCDCGTTHDRDVNAARNILAAGLAASVCGAGGRPQRSIPGGQPATKQKPCGASRGNLLVRERE

SEQ ID NO: 59553 - protein, 397 aa, unknown
  TnpB Polypeptide
MKSIKTVKCRLEVNKETEPILHESLKRFADCCNDVLSVSKEHKTTNKVKLQHLCYHQLKAKYELPANLVIRAIARVAESAKGKKPPKQYKPTSIAYDQRTFCFSEPKEEISISTHTERLHIKLRLGNFQRGLLAGQKPTSATLSYKRNKKAFYINIVLQKEVNVPSGHNPVGIDRGLYNIATTTKGQTFSGKKIMQTRKHYSDIRQRLQAKGTKSAKHRLKQLSGRERRWMTDTDHYISKAIVNSCETGDVIVMEDLKYIRARVKTQKKQKLVMHSWSFWQLQNFITYKALEKGIPVIYIDPHYTSQNCSRCGQKGIRAKHSFVCPLCGHKNNADFNASYNIQKAGLAFLDGVQSITPSVLPLHGGTWLDVAVVDVEAPLRIEMEISYKPTNLLVGS

SEQ ID NO: 59554 - protein, 372 aa, unknown
  TnpB Polypeptide
VQYRNYRFRLYPSKVTEEKLLRVLDACRWTYNKLLELKKTNHAGRLQLQAMLVGLKEETLELKNVNSKVLQMVNNQLAYNLKVLAELKRNGKKVGKLRFKSENRYRTLNFNQSGFRVDYASKKLWLSKIGFVPLKLHRLIKGQIKGVFVKRERTGKWFAIFQVGVNSEPLPSSKRAIGVDVGLKHFLTDSDGRHVENPRYYRKMLLKIRYLQRQVSKKRKGSANRRKAILKLNRAYEKLTNQRDDFLHKLSTFYVKSYGVIVTEDLQVTRMVRNRCFAQSILDAGWGRFFGMLSYKAESAGRTLLKVNPAYTSQLNRDKVEDRDFRGAINILNRGLSGLGRPCVPVEIEPLRELVTVSASSIIEAGSPHPSG

SEQ ID NO: 59555 - protein, 413 aa, unknown
  TnpB Polypeptide
MRRTNSFEIVPQSDQAGTILRRLLDASASLWNELTYERRQRFFTGESVWDCDGYKDEYVDLIGSATTAQVARQNDQAWRSFFELRETSDHDPNPPGYWGNREDGRELRTFLRKDMYSVRWGERSRLEVPIGRDLKDEYGFGRYERLRVPVRGDPQWAGEQGQLRLTYDEVKETYRAYQSVTVPDEERTTPTGSDAAALDIGANVLVACTTTAHDQYWYSGQKPFRQFRETTERIADAKAKLPDGQQTSTRIQRLYRKRSRRRDHAVNALLRDLVERLHDDGVETIYHGDLTGVLGEYWSVEANLKARTFWAHRQCLDQLANVCEEYGIEVASVSEAWTSQTCPECGEREQTRRHRETLTCPCGFEGHADLVASQTLLEQTTNTEVRPTARPVRFQWDDHQWYPIEGDAVGPNE

SEQ ID NO: 59556 - protein, 416 aa, unknown
  TnpB Polypeptide
MYLTIKQQLKHLTKDEYLILRELSHTAKNLYNQAIYNVRQHYFEEKKYLKYIDNNSILKSSENYKLLNSNMAQQLLKEVDGSFKSFFGLLKLAKKGKYSFKDIKLPKYLPKNSFTTLVIGFVRINKDILVIPYSNSFSKTHKKISIKIPPILIDKKIKEIRIIPKFNARFFEVQYTYEVQEEQRNLDKNNVLAIDFGINNLVTCVTNQGKSCIIDGKKLKSINQWFNKHNAYLQSIKDKQKYGKKPTLRQKYMWHKRNNKINDYMSKSTRIIINYCLKKDIGTLVCGYNKDFQRNSDIGKKNNQIFVNIPFGKLISKLEYLCKFYGIEFVLQEESYTSKASFFDMDKIPEYKKDNPQEYSFSGKRVKRGLYITKKGYKFNADVNGALNILRKSSVVDLKVLYSRGEVDTPVRIRVA

SEQ ID NO: 59557 - protein, 398 aa, Kribbella sp.
MSRFRMYPTTAQRLALLQQCGHARYVWNLALEQWAMWTREKGPTPGYVAQCRQLTEARSAFDWLRSGSQMVQQQALRDFDQACRNFYAGTHRRPTWRKAGRCEGFRIVGSQASRIVRLNRKWAAVNVPKVGWVRFRLSRAVPEAKSYRITVDPSGRWHLAFAVIPPPIPVSGPGEVVGVDRGVTVSAALSTGERLSCPGLSDHEQKRLKYLQRRLGRCRRASQRRQRVKTAIAKLYARSGDRRKDWVEKTSTDLARRFAIIRVEDLRIVKMIGRPKPKPDPARPGRHLPNRRRAKAGLNRGILANGWGALVRRLEHKAPGRVEKVNPAYTSQTCSVCGHCVPENRKSQAVFRCVACGHQANADVNAAINIAAGRAVSARRETPGQVSPKREPQHSTSG

SEQ ID NO: 59558 - protein, 370 aa, Alicyclobacillus sp.
MHKAFSFRLYPNKEQERQIRRTIGCCRFVFNHFLARRKEVYERDGTTLNQYACMRELPELKRQYPWLQEVDSTALQRAVEELEDAFRRFFREKKGYPRFKSKKHPKQSYTSKRNGREDDKATIRIAGNRIRIPKVGWVKFAKSCEVQGRILSATVRIAPSGKFFVSVLVDTKIQPLKPRTNAVGIDLGLLDFAVLSTGERIANPRHLRKLEEKLKRWQRILSRRKPGGKNREKARLKVARLHEKVRNARLDFLHKLSTMLIRENQVMCLEDLRVRNMQQNHRLAKSIADASWSELRRQLEYKAKWYGRQVVFVSPIFPSSQLCSNCGHRNTETKDLSVRKWACPMCGEIHDRDINAARNILHEGLRLLSA

SEQ ID NO: 59559 - protein, 360 aa, unknown
  TnpB Polypeptide
LFQLCKNSFEYKSIGNNTGQATLRILDKNWKSFFKAIRKYGDCKDGFLGRPKIPKYLNKNGRFILALDNNKVSIKNGKVFFIWKPFKIMNNIFTTNIPEYAKVIQCRFVPRGSHYMMEIVYEIEVPDTLPESNRIVSIDLGVDNFITMVNNIGEKPIAVKGGVIKSINQYYNKEKARTQSELKKINKLDWSKKLQKLTNKRYEMIKYQMHCISKYVIDYCVLHNIDTLIVGLNKGWKQENGKKQNFTYIPYDMFINMLKYKCENNGIKCISVNESYTSGTSFLDGEEPVKANYNKSRRVHRGLFVTNNGKKINADVNGAYQIMKKVIPNCFIEGIEGVGLHPTIVKLMFSNVKVIRITIN

SEQ ID NO: 59560 - protein, 426 aa, unknown
  TnpB Polypeptide
MLVQHRVVTEFRSWQECVKAANGESSKYVSQGWKRTVDTSAPSYGEDYVNLGAVDRAYAVIENNTFTDGEIVLKMVIQGEWYRLIFDFDNTRFTEGKVTLPVIKVQDGAPVFIFTVATDNPVVQFSSDYTIGVDVGINDYATVVVRETKTGRIVHQTTLSQRVHSLWNSVQASQRQVRALRRKAATLLRDRQGRMSVLDEAQFHREAASRKKRELAILAAQEIACLSHVWGNAVVAVEDLGWIRNTMQNGRWNRGALVQWLTHYVSQNGGWVVAVSPANTSQQCHMCGAKVSHPTHKDSVCPEHGLMDRDANAAANIAARAVPRVAKARVTRAKNKKLRSQPPLRTSPARDSLKYPGRDRTKNKPTPKRKNHRLASREVILPVCPARAQAYGLVARVLADQGARVALGTSEAALKQGCVTCKCMLL

SEQ ID NO: 59561 - protein, 447 aa, unknown
  TnpB Polypeptide
MLYWRLGEKKGVSAMFEAVKVALDPTPEQERLLASHAGGARFAYNAMLAHVKEAIDAGEKPDWSHYSLRKRWNSNKATLAVDADGKPWWQENSKEAYSYGLESLAKGLSNWSKSRKGDRKGRKVGFPKFKTKNKATPRFAYTTDFKLVNGDPKALRLPKIGRIHCMEDVAKRVGCAKVKRVTVSQRAGRWYASLTVEREDKPVVNPPKGGTVGVDLGVKHLATLSDGTVVENQRYLRKAEKKLKRAQKSLSRKVQGSNRRAKARTKVARLHAHVANQRLDAMHKLTTWLTETHSDISIEDLHVAGMVKNRHLAKSISDASFGEFRRQLEYKATRTGARLHIVDRWYRSSKTCSKCGSVKAKLSLNERTYRCDSCGLTMDRDLNAAINILVAGSAPETLNAHGATVRRSDRSSGHRTRVAVKCEPSVGANRVSLGADSRKTVLQTAVK

SEQ ID NO: 59562 - protein, 434 aa, unknown
  TnpB Polypeptide
MPSSELLRRKPAVVMPRRNVPDMHWRAIPIGVGSRRYIAGMSRFRLLPTPAQRSVLAEHCRHARFVWNLAVEQQQMWQPGRHAPGYKEQSAQLTEVRAEYDWLAVGSQTVQQQALRDFAQAMRNFFAGTHRRPSWRKAGVHEGFRQVGVKPRHVEKLNRRYGRVWVPKVGWVRFRCTRPVPAGVKSYRITLDRAGRWHVAFADIPDPIPGPGDGSVVGVDRGVAVSAALSTGELLHTPRLTPGERNRLRRLQQRLARANRGSNRRQRTKLAIAKLKAREADRRRDWVEKTTTDLARRFDTVRVEDLDVRAMTRSARGTVHQPGVHVAQKRGLNRAISHQAWGRLVARLDRKAAGRVERVPAAYTSQRCSVCGHVATENRKSQAVFACVACGMGSCNADVNAARNIAAGRAVAAQGDLAAGRSMNCEPQLCSPAD

SEQ ID NO: 59563 - protein, 351 aa, unknown
  TnpB Polypeptide
MKQQVNLGNWSPPLPANERRLVQKLRYRYRLYPHPHHKAALAKAFGCARVVWNDSLVLSNRLHQQGQQFPRGTALQRLCLTDAQRTPERAWLTLTEVSNVLLAHSIRDLDKAFRSRWGCLGGKAPTAPMDNGKAVGIGLGLAALAVTSDGEKIAPPKFLHSALKRLGRLQRSLGYKVKGPSNRRKVRLRVAKAHATLADQRLDVLHKLSRPIIRENQAVVRENPDVSGMLKNCRRARSTGDAGGTLLRSVLESKAEQDGGQLAGVNRWLPTSQTCSACGHRDGRKELSVRFWKCSSGGAEYDRDLNSARNSLAAGPAARSSACGTERKAGSPASGLEAGTRLNQEVQRCTA

SEQ ID NO: 59564 - protein, 338 aa, unknown
  TnpB Polypeptide
MIKAFKYKLNPTKIQKMFFNKSFGCCRYVYNWALQKRIEAYQSDGIKLTAIDLCKLLPNLKKMEDTYWLNEVSSVSLQQSIRCMDTAFTKFFREHTGFPKFKSKHSRKQSYKETDGVNIDFNLNRIRLPKIGWVKFYPNKKFEGKIGTVTISKSSTNKYYVSINVDDSIPYPDKSPIDPNTSIGIDVGIKDFAVLSNGQVFQNPKHLGNAEKRLKCLQRRLSRKQKGSNRRCKAKHNVAICHERIRNRRQDFLHKVSKKIVSENQTIIIEDLNVKGMLKNHCIAKGISSASWSEFFRMLQYKSDWNGVNLIKIGRFEPSSKMCKCGYIYKNLKLSDRK

SEQ ID NO: 59565 - protein, 422 aa, unknown
  TnpB Polypeptide
MQPQSVLPFTGLPLRRKNRMYHVRRVHIGKTAQLDELAHECGILYSKTLVFFWRTVRHKGLWLKPKHLMRLFTSKKLHAHTADACVQSFFASLKSWRERRATDPTAHPPRRRKWYFRIEYKRSAMVRKSGMLRLSNGRGNEPLVLNWPWELPQTVVIHWTGTQYEAIATYEQQRAYGPFPVGKVAGIDLGEVHMAVSHDGERTYILNGRLLRSKRQYQNKLKARLQARIDVKKKGSRRRKQLTASKSRQLRKLKNQIRDVEHKSTTRLISTLHANGVQTVVIGDVRDIRQNNDVGPTNNQKIHQWSHGGIRFKLTYKAERLGMDVALQDEHYTSRTCSACGYVRSKVKGRMFRCPQCGWTYHRDGVGAMNIRQKYRGELGSRHVVGAMAPPTSLRYYPQSGVARSQGRENVCVGNCAEAAPL

SEQ ID NO: 59566 - protein, 389 aa, Lactobacillus sp.
MVLKGLKLRIYPNDYQKELIDLNFGANRFVWNNMLDMMIKRHENNPDLKALKAFDLNYILTAFKREHIWLKKAESTSLQVTNKDLFEAYRGFFSKKRKFPRFKSKKFPKQSYQSKFVKNNVEIIDSSYIKLPKLGVMKYKNKKSIPSIIKYVTIRKSLTNKYYAILTVDEDLKKLPKTSKSVGIDMGVSDLVICSNGRKYKTIRFDKKLAKKKHYWEKRLARRRTQALKDIQYKKEFGLVDPKPLEQYINYTKAKLMVAKYSEKIANQRKDYLHKITRELVENNDMIVIEDLKTKNLLKNHKLSRAIANQSWRALRLMLEYKCEWYGKKLLIVNPFKTSQICSNCGYDDGKHGLDIREWDCPNCSTHHDRDINASKNILNIGLEQALVK

SEQ ID NO: 59567 - protein, 406 aa, unknown
  TnpB Polypeptide
MNLTEKEIIYSTDERFSLIKELCHLSKNLYNASLYDVRQYYFETKLYRSWKSQRPIFTKSNNPDYYALQSHLAGEIFKQVGEQFMSFFNNKSNKKKRIPRYKDKNGYNVVAFPKITISKNIEFDEDKQLYSYTLCKRSYNLKVQSSKPNVKQVKFVYDEANDLIKCFKIYEVEQPKLKRDNSRYFSIDPGLNNIMSIYNNIGIRPLLYNGRPIKSINQYYNKTKEKMRSELPTNVNNSKRLKQLSFKRSNKIDYEMHKISSHIINEAVSNNISKIFIGNNKGWKNGINIGRRNNQNFVNIPHVKLFNQLLYKGALKGIEVIFTEESYTSKASFFDKDKLPVYGENDNHKFSGRRISRGLYKDSKGNLWNADLNGGGNIMRKISDKAAYKDIRKTEEMMKRPILITL

SEQ ID NO: 59568 - protein, 281 aa, Streptomyces sp.
MRGWGTSGRRHRDGWESSVGELIEEGKPRLRGWLHAGMAPLVLAAGIVLVALAPAGEARAAAAVYAGGDGANLRRARRKVAKIHARIADRRCDHLHKLTTRLVRENQTLVIEDLTVRNMVRNRSLARAISDAAWAEFRSLLEYRATWYGREVIAVDRFFPSSRLCSACGTLQENMPLSVRTWTCDSCGTAHDRDVNAAKNLLAAGLAASVCGAGVRPQRRIPGGQSATKQKTPRREPWESPRSQGEGSQPVDPGLRQRPDDLTRHPPLLLGAQSLLADEGA

SEQ ID NO: 59569 - protein, 496 aa, Mobiluncus sp.
MPGHETWQGFTLKPKFFADIKTGEILDCADSLKRDVETLHDLVEWQINSLEDGIFREIEEFSHLKPAAAGHYLGIKLPKGVVLKGKPGSSRFEFLFRGHVVEILRSWKARRDASNGEYDGYVSAGWKRTASDRPPTVPYRMNLGFAGQYYAKWLEPGVLAMVIDGHWVGVGFNIPPRYCGKLALPTVRLKDGELFFDFAVSNPYQQRDLNQNFLVGVDLGQKHTATWVVISGGKIIESHDGSRRVHSLENKVNATHRQVIFLHKKLDKRFSYSVWKELEQQRASLSRKRKELAKIVAQEIADTAYMYNCAVVVEDLSHIRNTMATGRWNRGEVNRWLNHYVEQNGSRVLRVNAAYTSQNCFICGNRRKTTPGRIYACTCGFTADRDVNAAANIASRGFTPYLKMIATRKKSKRYVPGKPSRKSPKIHETLKHPGQRRDKSCPTPKQLKRKSPAQAVKDKTAPTVWADVPQMVVQDSKKAARILDYSYRQCSLILII

SEQ ID NO: 59570 - protein, 370 aa, Methanolobus sp.
MLKAYKYRIYPTKEQEDSFFQHFGSCRFVYNWALENKIKSYEQDGKSVSRFTLNTMIRKLKDEHEWLKDVNSQSLQGATLNLENAFTKFFREKKGFPTFKSKKNPVQSFSVPQFYEVDFDNNKVKLPKIGWIKTKLHRKFTGIEKTATVSRTPTGKYYISILVDDEQETPVKSLFSEEVTVGIDVGIKDFAVLSNCEKIENPKYLKSSIQRLNVLQRRMSKKQKGSKNRAKARFAVSRIHERISNQRNDFQHKLSSKLIGENQALALETLNVNGMLKNHCLAQAINDASWSSFVTKLEYKAEWYGKTVLRIGRFEPSSKICNMCGYYNKNLTLADREWECPDCKTNHDRDINAAINIKKFALNKQNLIGI

SEQ ID NO: 59571 - protein, 425 aa, Nonomuraea sp.
VELVKQARAQVARLELSAAQVAVLDGQAHTARALWNLLHEYVTFRQGRLATLKQCDDAIRAARREIDWLGQLPAQAAQAVLKTYRQAWANFFNPEHPAERPTFKARFRSRPAVDVPQARDLQIKRINRRWGAVSLPKIGRVRFRWTKDLPGVTQGGPAGRITGARLVKDAFGWQIVFRTETMAAPVTVPHPGPAVGIDRGITVALALSDQTTREHGPWLSAGEKERLRRLEKKSARQRATRATRTPGQPASHRLGRTYGQIARLRATAKRRAVDWQHRTTTELAATFGVVVVEDLKIANMVRSAKGTIERPGRNVRQKAGLNRSIAGEAWGRTVTLMEYKTRDRGGQVLKVPAPGTSQTCHRCGHRDPASRDGTRFSCTNPACGWTGHADTNAAINIHNAAGTAVSGRGDLGDTRSTKRQPPHAA

SEQ ID NO: 59572 - protein, 368 aa, unknown
  TnpB Polypeptide
MLLAHKVELRPSREQHEKLLQWVGTTRHCFNNLLSNFSKEGVKFSKKIAREYLYNTLRVENEWYSDVSQVILQESINDLESSYKRFFKKLGGYPRFKKRGSKDSFSIRDKTKFKVDGRNLYLEKFNKGRKAKPLKLREKLRFEGIPKQVTISYRNGKWWASILIKGCSNYKGSFPQSGEVGIDLGIKDLATLSDGTTFQKSNKLSKSLKRLQRKQRVLSKKKKGSNRYAKAKLSISKLHLRIKNQREALLHNVSHAITSKYKTICLEDLSISSMTKSKNKSLNRMILDVGMYELRRQLEYKSFLRGVDIYFVDRYYPSSKIHNECGFKNDTLKLGESSWKCSNCGQLVDRDLNASKNILEEGTKHLHV

SEQ ID NO: 59573 - protein, 396 aa, unknown
  TnpB Polypeptide
MYLAHRIRLDPNNVQATYLARCAGTARFAYNWALDEWKRQYEACKLDPALPKPNEAALRRQLNAIKREMFPWMLEVTKNAPQMAIQQLGCAFENFFKGRARYPRFRRKGRDDRFTLTNDQFSVEEKRIRIPKLGWLRMCESLRLTGRIVSASIDRVADRWYASIVVDINGSFLPPTENQGAVGMDFGVTALATLSTGEIVVGPKALRTLLARVKRLARSLSRKVKGSRNYAKAKNKLARLHARIADIRRDGLHKLTTSITCRFQIIGIEDLNVKGMLGNRCLARSIADMGFGELRRQLEYKAVWRGGQVVVVDRWYPSSKTCSCCGHRLDALDLQVRQWRCPDCGALHDRDVNAATNLRNMAVSSTVVACGGEGAGLAREAQGETGPGEAGIQQQS

SEQ ID NO: 59574 - protein, 157 aa, Anabaena sp.
AIKKASIRHSKKLKGSSNRERARKNLVRKYEDISNRRRDWFWKLAHELTDKFDVLCFETLNLQGMQRLWGRKISDLAFGEFIQILEWVAKKKHKQVVFIDQWYPSTKTCSHCGHIRKKIDLSVRLWRCPECQLVHGREDNAACNIQAVADLFVVDSQ

SEQ ID NO: 59575 - protein, 387 aa, unknown
  TnpB Polypeptide
VTHIEHTTHKKAFVYRLYPTKAQEAALVRILDLTRELYNAALQERREAWRKAGKSVTVHEQMRRLGEVKAARPEYQGVYAQVLQETLKRLDRAFQGFFARVKRGEKAGYPRFRGRGWWDSFTFPQVWRGENWVGPGKPLGNGKVKVPGVGHVRMKQHRPLEGMPKTFTVKRSAGCWYAVYVCEVPSQPLPPSENAVGIDLGLSHFAATSEGETFAPPQAYRQAEARLKRTQRALSRKRKGSHRYRKLKGQLAKLHRKIANQRKDFHHKLARHLVNRYGTIVHEDLNASGLARTRLAKSVLDAGWAQFLAILSAKAASAGRRVVAVKPHGTSQICPECGSLKKKELSERIHACACGCVLDRDVAAAKVILALGLDGALGDGQRVAASA

SEQ ID NO: 59576 - protein, 406 aa, unknown
  TnpB Polypeptide
MEVTKTIKAKVVELTVGKRLALETEYANYQKAVMHAEQFIKELNITTLKQAGEVLYNEGSKYSLKRRVNLYSAAYQMAFKRALCARGTSKKEQPLRLRNDTFDVKEIHNDIAAYWAKIPVYGQYGGIKVALKMSPKHEELLRDPGIKTCDSELLKRGNDFFLHITVKKCVDTAPSNSGKLAVIGIDAGIRNTATSVVWRDESITGAVLHSGKRLEHRVKQTKARLAKFHKQAYMHDSYHCVCKALDKETRVGQKLGNYSRDCLHKISAQIIGQALELRAQGYDVVIACEDLKHIRKRISGKLQWWAFRKLLDFIQYKAQWASIPYVEVEPANTSKICPKCGHYDKNNRRGLAFKCTECKYNANADLVGAINVAKRSVGFLRLHAYGNGRHESAQEVVAAMPQAMML

SEQ ID NO: 59577 - protein, 238 aa, Aerococcus sp.
VLHIENERIKSVTVKYTPSGDYYISLLVTSDNQAMPKTGNVVGVDLGVSDLAITSDGQKYQSQRLHLSYKKQLHYWEKRMARRRLQAKKNGVALADAKNYQQAKRQVARIHQRIKNIRKDYIHKITTDMVKSYDVIVLEDLKTTNMMKNHQLARSIAGQSWRMFRTILEARCEMYDKTFVAINPYKTSQKCSNCGYDSGKKALNIRHWTCMKCNLHHDRDINAAKNILNIGLEQALVK

SEQ ID NO: 59578 - protein, 411 aa, Aerococcus sp.
MQLTKTIKVQLYPSASDIEKFEETQQQFLNACNFVSTYIFDHDFELGQTTLHNALYHQIRQDFGLQSQMAQSVMRTVIARYKTVKTQFKQKPKRYKDIHTGKYHTLYKDLYHLTKPLGFKQPVAVFVRNRNYAYHQNNTYSLTTNQGRIKVSCDKQHIDYLQQFSQNAYKFGQAELLCRKGKWFLHVSASKEIDSPDETNIQRIVGIDRGLRQILTIADDTAHTTFYSGKSLMKKRRRFKKLRQSLQAKNTKSSRRRLKTIERRENRWMNDVNHQLSKTLVDRYGANTLFVVEDLTNVTFNTTHHRKQDVRYEHHSWRFFDFEEKLMYKALESGSQVLKVSAQFTSQRCPKCESIDRANRQQDKHLFTCQNCGYQSNDDRVAAINIQELGHRYLSSEKNPRFEKVVPIQNY

SEQ ID NO: 59579 - protein, 408 aa, unknown
  TnpB Polypeptide
VTVVRNIQVKLDIPEEHHSIVDATFDEFQQATEPVIDYGWSDAPDDIITNKNQLNEATYHDIRETSPLTGGHVQSARNLAANALSNCKDLLEDGKNTSKPEFKGTVVTYNSNTITYNDDHCTLSTVDGRIRAEYVFPHDDEGTPFEEYWNDDEWEKKEATLHKSDGEYYLHVAVEQVDNTNSSDEQTENGVVLGVDLNVDGYLAVTSTGAFLGNADELNHKRDEYERRRGNLQQTGTRSAHLTIQSLGDRFAEWSRHRLHDVSNGIIREAVENDCTHIAFERLTYIWTRISNASKFQQWAFREIQRQVEYKAEEHGIEVEKVAPQYTSQRCSHGECGFTHEDNRDGDEFECLKCGKELHADYNAARNVAWRLVQNWLKSGSGRATSQLALKSGTVSANGQFRPAALSS

SEQ ID NO: 59580 - protein, 376 aa, unknown
  TnpB Polypeptide
VAATYKGLWTKLKKNVEHRRKKITKKRFKGLDKPPRYSSPTVQYTYERDYTLKTENRVSVGTLNGRISLPYQGYDKHTALLREGATVGDAKLWYDRPKKQFYLLVSLTIDLAEPPCEHFTEVVGVDVGIRYLAVTSTETGKASFHPGKHTRHRANHYARLRKRLQRKGTRGSKRRLRRIEQRERRLKAQANHCIAKQIAQQHPHALIGLEHLTDIRERTKRRKRRRKKNGKGTEPVSPKARKANRVYSQWSFAELQALISYKVALAGSLALKVDADYTSKQCPMCGHTADENRPHKGLLFVCQNPKCGYTLHADLVGARNVIMRTLLIRQDWIETGFVSMAPDASDKEAKAARLQRYAELRWSSGVTNKPPARSRR

SEQ ID NO: 59581 - protein, 387 aa, Lactobacillus sp.
MVQKAYKIRLYPTPDQQVLLARTFGCMRWFWNQMLTMHISRYVNNPKAKFINTFGMNNLLKRLKEEYPWLKDVDSSAFQCVSRDLNDAYQRFFKGQNERPKFKKRKYAQSYRTKSGSIKIIDDHHIQLPILKQVYFRAGRLPQGRIINATVRINSAGQYYASVLVESENQALPKTGKQVGGDLGLKALLNLSDGYKEPIHHYEDKLASKLHYWERRAARRRREAKKAIAWDEHNKVPVPRQLSDFKNYQKARVMVAKYKQKIKNQREDQLHKLTTTMVRNYDVIVLEKLNVKAMMKNHKLARAIGNASWAKLVTMLLYKCEWYDKQLIQIAPYYTSQLCAHCGKNNHRLGLNKSEWLSVREWDCPSCGTHLDRDVNAAQNILARGLA

SEQ ID NO: 59582 - protein, 382 aa, Escherichia sp.
MRRFAGACRFVFNRALARQNENHEAGNKYIPYGKMASWLVEWKNATETQWLKDSPSQPLQQSLKDLERAYKNFFQNRAAFPRFKKRGQNDVFRYPQGVKLDQENSRIFLPKLGWMRYRNSRQVTGVVKNVTVSQSCGKWYISIQTESEVSTPVHPSASMVGLDAGVAKLATLSDGTVFEPVNSFQKNQKTLARLQRQLSRKVKFSNNWQKQKRKIQRLHSCIANIRRDYLHKVTTTVSKNHAMIVIEDLKVSNMSKSAAGTVSQPGRNVRAKSGLNRSILDQGWYEMHRQLEYKQLWRGGQVLAVPPAYTSQRCAYCGHTAKENRLSQSKFRCQVCGYTANADVNGARNILAAGHAVLACGEMVQSGRPLKQEPTEMIQATA

SEQ ID NO: 59583 - protein, 421 aa, unknown
  TnpB Polypeptide
VARSISQSNEIPMQTLTAKAKVINLSDDDALLLGLLGFAGTKLWNVANNHRRSVWKETGKIPGFAEQCRELKINRWYKLLPSQSAQEILGEQDDSYRSWFSHRKNGDIKAQPPGFRKKHTLSTITFKQNAFEMLPRNCIRLKLPRAYERREIVLEYCLPIGTVLGKVQQVKLTYENKTGNWYLHMTHKLPVHYRETGNIMALDLGIVNIIAGLITDGYSFIVPGGELLSLDRYFQKEKAKCTKSTSNKCIRLNSKWSRQRNHYLHALTKWLVNLAVAHDVSTILVGELKGIRTDKDWGDKGNQQLHSWPFSKIVQFLTYKAALAGIQVIKVSERNTSTTCPICGKTVKKGRICRGLFLHCGNALNADLVGAYNILQRYLRENKVEWIPPCPGVVGALARPAVNLFVWRKTTPLGYGQGTFK

SEQ ID NO: 59584 - protein, 424 aa, Haladaptatus sp.
MNYNYRYRLNPTVDIEERLAWTVDTCRQVYNHFLHRLNRTDDTSAYSEQKLLPSLKKWWNDLKDVHSKVLQKVVQRLYDNLSTLRGRKDNGYRVGTLKWKAPDEYRSFTYSQSGFKLKNTSGRTRLWLSKLGEIPITLHRDLPDDADIKTVSIKQEPTGKWYAILGVETPDEAPKKPDTPEKCVGIDVGILKYAHDTDGTAVESLDLSNKRERLERAQRTLSRKQHGSNNWEKQRRAVAERHADLKQKRWDFLHKLSNYYAREYDLVAVEDLDAKGLMELPDNSRNRVGASWGTFLRMLEYKCEREGTHFVAVNPRGTTKVCASCGISTDKPLWVRKHSCPSCGFEADRDTNAAWNILIRGLKKADIGAGCSESTSPEIFDFWLANESLCDSSTPVETALPTDTVVSAKRVVETGSPVRTVRSV

SEQ ID NO: 59585 - protein, 537 aa, unknown
  TnpB Polypeptide
LRTTPEDDIVLDAVARHLGRLRRADLAYVCHPVPSGLSLDDDVNWQARRDALNARKHAITAESSSRWAGTIIRANDDQYRLARESQTRHIVSLGAAISSIERRLGQPTGDMLAREDRKTRKGQTRTKGYVTQAERFQKQRRLQSLRAELGRVMADRDAKLARVVDGGKRLVKTRHNLCTAGLAEAEWRERWSCARWRIEANGSGDEPFGNLTITVTPAGEVSLRLPKPLEHLANANPGRYVLSSRAKFAYRAAEWQARITGGKSVSYALTRKPGRSGVYLTAAWATAVETFGVTAGTADGKVLAAGPVVAVDLNVGHLAIRRLDAHGNPVGSPRRINFGLTGTTARRDAQIRHAITRLIRYSLRHGTGTIAVEDLNFADARQSGRETMGRGQRGKRFRRTVAGIPTAVFRNRLTGQSSRHRIRLLAVNPAYTSAWGDQHWRKPYQNVTRHEAAATVIGRRAQGHKARRREGVTRTRPEDRVVRATNQARPGQSRATSSRHRPRMRGTESRPPGRTGTRLLGRATVTPALASSGHLHS

SEQ ID NO: 59586 - protein, 402 aa, Nostoc sp.
VLVLEYKVKGKRQQYQAIDEAIKTTQFIRNKAIRYWMDAPIEVKVNKIALNNYSTALRQEFMFVEELNSMACQSATERAWSAINRFSSNCKSKKSGKKGFPRFQKDCRSAEYKTSGWKLHPTKRRITFTDKKGIGELKLLGKWDLQTYNVKDIKRIRLIRRADGYYAQFCIGVDLKDIQPKTDAEIGLDVGIESFYSDSNGYHEPNPKFLRKAEISIKQSQRRIYKKVKGSSGRRKARIVYAKKHLRVSRQRIEHAKRVARCVVKSNDLVAYEDLRVSNMVKNHCLAKSISDASWYLFRQWIEYFALKFDKIAVAVPPHYTSQKCSSCGVIVKKSLSTRTHKCSCGCDLHRDVNAAVNILNLAKQARDGQSRSNANGLVTSTLLGESLVEQVTRLKLESPCL

SEQ ID NO: 59587 - protein, 390 aa, Bifidobacterium sp.
MTKRKIAQRIPFTPSKTQAQLLEQCFGDRRFAYNQQVEAFNTYDKETNPNPEYPNVTDMKNANGWLRDSPIPSNALSNAIMDFRKARSAYFRKADYEKHRPRFASRNDNIQSFRNTMPIRRMDGNRYPLSKKLGSVRIRKRDRLRYPIESLSSWTVKRENRTYYLVLLFDVDVRPKPPAEGCIGIDLGVKDFLTLSTGEKINYPTRLRDLEEKVKREQRRLSHRKKGSSNYIRQKQKLAKAYAKLRHYRDDFQHQLSHRLIEENQFIGMETLMVRNMTRKARERLDADGKPMRNGQARKRAMNRSILRDGWSGLVDKLSYKAEWYGRALIRVDRFYPSSKLCHECGYKYQRLRLSEREWVCGHCGTLHDRDVNAALNIRDEALRLNGSGE

SEQ ID NO: 59588 - protein, 396 aa, Streptomyces sp.
VKRVKRAFRYRFCPTDAQAAELSRTFGCVRKVYNMALDARTEAWTRQERVDYNQTSTMLTAWKRTEELAYLGEVSSVPLQQALRHLQVAFTNFFGKRSRYPRFKSRKKSRRSAEYTTSGFRFREGKLTLAKMAEPLDIVWSRPLPEGAKPSTVTVSQDAAGRWFVSMLCDDMITPAPPTRGAVAIDLGITSLVTLSTGEKITNPRHERKDRARLAKAQRELSRKAKGDGANRAKARRKVARVHARIADRRRDFLHKLTTRLVRENQTVVIEDLTVGNMVKNHTLARAVTDAAWTGMRTMLEYKSAWYGRELVVVDRWFPSSKLCGVCGTIRAKLPLAVRTWTCDCGTVHDRDVNAAKNILAAGLAVSVCGAGVRPQREPSRTGQSAMKQKPPRREP

SEQ ID NO: 59589 - protein, 347 aa, unknown
  TnpB Polypeptide
MVSEDNPDFRAMSGSSSQQVLMRLDNNLKSYFSSIKAWKRDNKKFTGCPKFPKYKDKVKGRNVFTYSYAQIRHKGEYIYFPKKEGLSPLKTRCKEGSVKQVRIIPRQGCYVIELIYESSCKEQKVDNNRVMSIDLGINNLASIVTNISNKAVLIDGKRLKSINQYYNKKRSCLQSKLEKVNGKKNSRRLMSLTRKRNNKVKDYLHKASKEIIDICIEDNITTLIVGHNDGWKQEVNIGKRNNQNFVYIPFDNFISMLKYKSERQGLRFIIVNESHTSKCSSYDLEEICHHDNYVGKRVKRGLFKTKEGIFLNADINGSYNIMRKVKGDAVMPPYTGLGYNPVKKFIN

SEQ ID NO: 59590 - protein, 416 aa, Kitasatospora sp.
MLSGRRYRLELGTAQAELCETFGNICRSVWNTALEQRREYRRRGAWMNYVPQAAEMAEAKHEFPWLADAPSHVLQQTLRDLDRACREHGTFKVRWRSQRRWSPSFRFPAGNAITVERIGRKWGRAKLPKLGWVRFRWSRPLGGAVRSATVSRRGVHWFVSFLVEDGRSTPEQHAMPNTAVGVDRGVKVAATTSDGRFIDRLFATPGERARLRRLQQKQARQKRGSFRRRANVAAIGTIHGRVRDRRTDFCARTAADLTTRHAVVVLEELRTTNMTRSASGTMDAPGAGVAQKAGLNRAILDKGWHLLELALRNAARTTGTAVVLVPAAYTSQTCNPCGHVDPKNRESQAAFECTSCGHRAHADVNAARNILNAAGHAVSGRGDLGANRSVKRQPPPTRTRTGRSPRAARAAGIPVL

SEQ ID NO: 59591 - protein, 215 aa, Salmonella sp.
MKRAYKYRFYPTPGQVELLAQTFGCVRFVYNSILRWRTDAYYKRQEKIGYTQASARLTALKKEPEFAWLNDVSSVPLQQALRHQQAGLSNFFAGRARYPTFKSKRHKQAATLTDAAFKYRDGRLYMAKSKAPLDVRWSRPLPSVPSTVTVSKDAAGRYFVSCLCESEPASLPLTSSMVGIDVGLKDVFVTDSGFRSGNPRHTAKYAARLALLQAG

SEQ ID NO: 59592 - protein, 528 aa, unknown
  TnpB Polypeptide
MITLQCLLEFENKGDREIVLDLMRRFSSAKRYAYQRLLDNEKRKDLKKDISKLFNINTRYSDDAIFLANLTISLCEERGQNPKKVIFGSRKLFEKLNKNHLNGNRKEKLKAKWKESRQGNLYSRGDKTKQGNLNLRLERINDKLYLRINTGIRQYIYAKVIRSVKREKDKWIELMFMLEQAYQTNQRFPYSVKLKLKNGKLYAFISIEEKLPPIRIKRDNGIIGIDINAYPFHLAIAITSKDGNLESHQSISMHNLLDANSEKRQYLEWHIAHQIVGIAKKENKAISIENLEKLPKGKRGDGLSKLRRKLQKWIYKRLLNKIEITARRNGIEVRKVNPAYTSVIGKLKYAPQYNIDKDIAGAYVTARRGLGFKEKLPKNYKELLNDTEFLAYSIAKIEDNIINIKQKIKEETNQYKRNKLKSKLAKLRKDLKTIQTHLSLIQSGKSESVSQQPVNQRKEQVRGLPMGRHKNWRVLFTALSFCCLEKSYRDFSPLKRIIVLGDWTAVDNRLVPSPGGGMGVKIQNFTLF

SEQ ID NO: 59593 - protein, 328 aa, unknown
  TnpB Polypeptide
LLKLAKKGKYAFKDCKLPHYLPKEGFTTLVIGFVRLNGNKLIVPFSNMYKKSHSPIEITIPPILVDKHIKEIRIIPKANARFFEIQYTYQTECVQRNLNQNNALAIDLGINNLATCVTNTGESFIIDGRRLKSINQWFNKKNARLQGIKDKQGFGKRTTNRQKSIARDRNNKANDYLSKAARIIINYCIANDIGTLVVGYNETFQRGSNLGKQTNQNFVSIPYGKLRDKLQYLCELNGIAFVKQEESYTSKASFWDKDNIPVYNADNPQEYEFSGNRIHRGMYKTKDGITFNADVNGALNILRKSSVVSLETLYGRGEVDTPVRIRVA

SEQ ID NO: 59594 - protein, 404 aa, unknown
  TnpB Polypeptide
LTELEAMPMQLTYRYRLYPSRVQVEKLLATLDQCRWLYNHFLERLNQKENGRIPRRYELQATLPKLKQERSGLKEVHSKVLQMVLHQLYSNLRALAELKRNGHKVGRLRFKGRGWFKSFTCNQSGFKIIEGHGKRGELWLSKIGPIPIVLHRMPNGKIKQVHIKRECSGKWFACFSVEIENPSKAEIFFKPIGIDLGIEHYIADTNGNLVEHPHNITKSEWRLKREQRRLSRKKKYSKNWMKQCVKLARVHERVHNQRLDFLHKLSHYYVNSYDFIAVEDLNVKDLIEMAHNGKNSADAAWATFVHMLTYKAERAGRWVEKVEPRGTTDRCSKCGEVIEKPLWVRVHQCLKCGLDLDRDLNAARNILQDALKKVGWEPAEFTPVEIGPLPARASLVVEAGSPVL

SEQ ID NO: 59595 - protein, 433 aa, Streptomyces sp.
LTIAVMSFISFPPLRGEGGHKPAWQFVSMPAQMKRSFKYRFYPTEAQAAELSRTFGCVRKVYNMALAARTEAWTLRQERVNYNATSAMLTAWKKTEELAFLNDVSSVPLQQALRHLQTAFTHFFAKRAKYPRFKSRKKSRKSAEYTTSAFRFRDGKLTLAKMDQPLDIVWSRPLPEGAQPSTATVSQDGAGRWFVSLLVEDPSIQPLSANGRAVGVDAGLDHLLTLSTGEKITNPRHERKDRARLARAQRELSRKAKGDGANRARARRKVARIHARIADRRRDALHKITTRLVRENQTIVIEDLTVRNLLKNGRLARAISDAAWAEFRSMLEYKAQWYGREVIAVDRWFPSSKLCSHCGTLTESMPLNVRTWTCDRCGTTHDRDVNAARNLLAAGLAVSACGAGVRPQRSTLGGQPATKQETHGATRGNPLFQ

SEQ ID NO: 59596 - protein, 356 aa, unknown
  TnpB Polypeptide
MKMSYKYRAYITQTVENRVRRCLWQCKQLYNIALSQRIMAYKYEQKTISNFDQYDIIRRSGGLDGIGWIGLDSVNIRVLQNILKRLHLAYQSFFRRVKQGTEKAGFPKFQYRNESFTLDLCNGNPYGWSLNGNILVVKNIGAFRLRLHRPIVGRIKTVTIKQECDQWYVIFSCDDVPQFLYPKTDKTIGIYIPRTYFLIDSENNIQNELSYYRKSLAGLIDRQRIVSRRVKGSNRYKLAKLHLAKYHARIARQRKYRIDNIISYYVRNYDVIKVNKFAVAKELEGTGKKGFSREKNKKTLDNAWSLFWTRLENKALASGKQVIFIENFKPDKKASLFENTKNLMACVEPTLKPVKA

SEQ ID NO: 59597 - protein, 391 aa, Lipingzhangella sp.; identical to SEQ ID NO: 11

SEQ ID NO: 59598 - protein, 430 aa, Lipingzhangella sp.
VSADTVQQYIDTQWERPGTKKGGPRVIRAYRFLLRPTVRQQVALAAMLRDHCSLYNAALQERRDAYAHVSQTRITYGDQSAQLTEIRDFDTERQGRWSFSSQQATLRRLDKAFVAFFRRVKAGHKPGYPRFRGVGRFDTVDFPKDGDGCRWDSTPKDTVRRVRFQGVGHVRVHQHRPVKGRVKTVSVKREGNRWYVILACDQVPAEPLEPTGRVTGIDMGVASFLTTSEGEHVDSPKFLARSADTLAAAQRDLDRFPKRIKARNRTRKHQAAQARVTRLYAKVARQRRDHHHKKALDLVRRFDAIACERLNIAGMTTAPAPRPDPERHDAFRANNAAAKAGLNKSVLDAGWGVFLGILAHKAESAGRELIPVQARNTSRTCPRKACGHVSADNRPSQEKFRCLRCGYAEHADRVAAINVGIRAGLVLPVP

SEQ ID NO: 59599 - protein, 421 aa, Lipingzhangella sp.
MLSGRRYRLALSEEQVQQCQMFGDICRAVWNTALDQRRQYVDRYMRGRDGEFCGYHLQARELAEAKTDESWLKAAPSHVLQQTLKDLDRSCRERGTFNVRWRAKNRWNPSLRFPAGTLITVEKVNRTWGRAKLPKLGWVKFRMSRAIGGAIRSATVSCKSGHWFVSFLVEDGQLTPEKHAKPDTAVGVDRGVAVAATTSDGAFHDREFTTEGEKARYRRLQHKLARQKKGTANRRTTLAAVNRISSRAVNRRADFCAFTANRLTARHGVVALEELRTAKMTASAKGTIDAPGTRVRQKSGLNRAILDKGWHRLELALRTAARRTGTRVELVDPAYTSITCYSCKHVDAKSRKSQAVFACTACGHTDHADVNAAKNILSAAGHAVPACGDLAGGRSTKQEPAGTREEVPHQPAPELVGIPRP

SEQ ID NO: 59600 - protein, 405 aa, Lipingzhangella sp.
VHRAYTFLLRPTRRQQVALAAMLRDHRCLYNAALQERRDAYRHPSKTRITYGDQSAQLKEIRGFDTERQGRWSFSSQQATLRRLDKAFGAFFRRVKAGQKPGYPRFRGVGRFDTVDFPKDGDGCRWNSTPNDRVRRVRLQGVGHVRVHQHRPVKGRVKTISIKREGDRWYVVLACAQVPAEPVEPTGRVAGIDMGVASFLTTSEGEHVDNPRFLASSAERLADAQRDLAAFPKRTKAKNRTRKHQAAQARVSRLYAKVRRQRRDHHHKKALALVRRFDAIACERLNIAGMTTAPAPKPDPEQPGVFRANNAAAKAGLNTSILDAGWGVFLGILAHKAASAGRELIPVEARDTSRTCPRKACGHVSADNRPSQEKFRCVQCGYAEHADRVAAINVGIRAGLVLPIA

SEQ ID NO: 59601 - protein, 391 aa, Lipingzhangella sp.
MLISPLVKIVTRVKLIPEADQAAALSATLRTVNEAANWVSGVAFAHGVPREYELRRHTYAELKARGLGAQAAQHTIKKVRDAYTTLQANIRAGNLGTPGSKRRRKVGSTPIAFRVEAAQPYDDRCLSWQYDAQTVSIWTVAGRVKNVGFACSADALTTLRQYRKGESDLIQRDGVFYLVAVCEVGEAEPYEPDAFIGVDLGIATIATTSTGYRAAGRGLNRHRKRQLALRAKLQAKATKSAKRRLKNRRRKEARHAANVNHVISKRIVTEAERTSAGIALEELGGIRQRVRLRRPQRVTLHCWAFAQLGRFLAYKARRAGVPLVFVDPAYSSQECAQCQHIAKNNRLDQARFICRSCGVVAHADRNASHVLAHRGQSVWNAGRASRAPATP

SEQ ID NO: 59602 - protein, 338 aa, Lipingzhangella sp.
LLHDWWTMASQNRRVQMKDADAAIRRARKDIDWLSELPAQAAQAVLKTYVRAWRNCWEGRAKAPTFKARFRSRMAIDVPQGRALGIRRITRRWGVVKVPKVGMIRFRWTKDLPVGKHADVKNKVTGARLVKEANGWHVVFRVRTEIKEPAPHTGPGVGIDLGVAKPLALSDGSFREHGPWLSWAESQRLRRLEKKAARQKHARKRGARTSNRLTRTYDQIAGMRARAKRRALDWQHKTTTGLAETFGVIGMENLAIATMVRSARGTVDAPGTGVRQKAGLNRSISGEAWGRTVTLLEYKLAERGGHLVRIAAPGTSKRCHRCRTTKAGSVEPSGVPGL

SEQ ID NO: 59603 - protein, 313 aa, Lipingzhangella sp.
VKLQPPPEVASALRAELTGCNDGANYVSTVAFETGTMREYALRKLVYAELRERGIKSAAAQRLIKKTVDAHTTLPANIRAGNFGRPGAKRRSRAESKPIAFRADAARAYEHRNMGWDIGAQTVAITTMSGRMKGIPFACGPEQLTTLARYRKGEADPICRDGVWFLYATCEVPEAEQYEPDGFIGVDLGIENIATTSDGSSHAGRELNRYRKRQLPLRKKLQKKRTTSAKRLLKKRSRRESRRVKDINHRIPPPAQWWQDAARNLTASGAVAVSSGLHPEKLTAVGSAVFHGSPHHPRKRSHPVVTPALRREP

SEQ ID NO: 59604 - protein, 234 aa, Lipingzhangella sp.
VWFLYATCEVPEAEQYEPDGFIGVDLGIENIATTSDGSSHAGRELNRYRKRQLPLRKKLQKKRTTSAKRLLKKRSRRESRRVKDINHCISKTIVTEAERTGRGISLEELKGIRDRVRLRKPQRVALHSWAFAQLADFIVYKARRTGVPLVFVDSAYTSQMCCECHHIDKRNRVDQGSFICRGCGVVAHADRNASHTIAQRGETVWNAGRQSPVPATASAVVAKTRHVTSQPVGP

SEQ ID NO: 59605 - protein, 377 aa, Lipingzhangella sp.
MWLRYAFRVYPDTGQRVALAKAFGCARVVYNDAVRAREDAREQGMPFPTMGALSKRLITEAKRTEERAWLGEVSAVVLQQSLRDLQSAYHNFAEGLKGRRPRVGAPRFKSRKDSRQSVRFTANACWRITDQGKLVLPKVGAVPVRWSRSLPCAPSSVTVIKDAAGRYFASFVVETEDTPLPETDADVGIDLGLAHFAVFSDGTKIDNPRFLRRAERKLKKAQRALSRTQKGSANRAKARTTLARAHARVGDCRREFHHQLSTKIIRENQAVYVEDLCVKGLGRTRLAKSVPDAGWAAFVHMLQYKAGRYGRTFAKVDRFLASSQTCPICYRVDGPKPLHVRIWTCAGCGTEHDRDDNASNIVLAAGRKLARAREAES

SEQ ID NO: 59606 - protein, 403 aa, Lipingzhangella sp.
MARSAVKRAFKYRFYPTDAQAAELSRTFGCVRLVYNKALAERTRAWFTEQRRVNYNQSSAALTEWKKDPDLAFLNEVSSVPLQQGLRHLQTAFRNFFDKRARYPRFKSRKKSKISAEYTRSGFTYRDGKLYLAKMSEPLDIVWSRPLPEGVEPSTVTVSRDSAGRWFVSLLCADTVAHHPATDGAVGIDAGLDHLVTLSTGEKVANPRHERRDRTRLAKAQRALSRKQKGSNNRARARVKVARVHARITDRRRDHLHKLTTRLVRENQVVVIEDLSVRNLLKSSTLARAISDAAWSELRSMLEYKCAWYGRELVAIDRFFPSSRLCSACGTLREKLPLNVRTWRCGCGARHDRDVNAAINIRAAGLAVSACGAGVRPQRESSRTGRSVSKQETHPARGEILFL

SEQ ID NO: 59607 - protein, 426 aa, unknown
  TnpB Polypeptide
MSSSKNATISESLRKTREKRLSQDCRVFTIKVDMASLKAAQTEALKMQFVEAKWIVNEALASEDLFKYVAGKTVIRKDKDLNNVETEIKFLGSQMKQSVVDELKSNIKTLSTLKKRGKKIGKLKFRKQITSINLKQFGSTYKVSGKRKIKIQNVPGEIRVNGLNQILSNKGKLKFELANAKLLNTPLGYFVAITCYSKKKERECSGEIGIDFGISTAITLSDGRKFDAFVQETDRLKKLQRRFSKQQKGSKRRFNTLRLIKREYQKLSNKKNDVANKIVAEILKFKDIYMQDENLTGWKKLFGKEVQHSVLGRVKVKLKPKARYVLSRWEPTTKLCIECGQLHKITLADRIFICDCGIEPEDRDIHAAKNMIALSKIKIGQELSELTLVETLSDCNASAIEAEVGEARRSEKVFEAIRQEDATSLA

SEQ ID NO: 59608 - protein, 338 aa, Oscillatoriales sp.
IGKLNQYAAIDEAVRTAQFVRNKCIRFWIDNRGVGQKDLYRHSTALREEFAFVKDLNSSACQASVERAYSAIARFYDNCKKAVPGKKGYPTFKKNSRSVEYKVSGWKLSETRKQIISADNNVDTTPAGKTVGLDVGLKEFYTDSDGHVEPNPKFYRKSEKQLKFRQRRVSRKKKGSANRKKAINRLGRVHLKISRQREEHAKKLARCVIQSNDLVAYENLRIKNLVKNHCLAKSINDAGWYQFRKWLEYFGVKFGRVTVAVNPAYTSQKCSNCGAIVKKSLSVRTHACECGFVMDRDWNAAINILKLALSTVGHTGTWVLNPNALGDSTSTLTLRNPV

SEQ ID NO: 59609 - protein, 472 aa, unknown
  TnpB Polypeptide
MAVSSRLATCSPSRCRSGCTRAAPARSGCAVTARSPRPPEDVSRVQTGQEQEASSGGRCFVGHDRHAGSVRSAYRCRAYPGEAQQAILNRTFGCVRVVWNRTLAERQRLWCTEGKRLSYAGSSAAMTTMKKDPDLAFLNEVSSVPLQQALRHQQQAFSAFFGKRARYPRFKSRRSRQSAHYTRSAFSMCGGMLRLAKTGGLLRFTWSWPEADLTALNPSMVIVSREPDGRWYVTFAVDAESPEPLPETGRSVGIDLSVRDFAVTSDGERIANPRHLERKALNLARYQRRLARCQNGSANRAKAKTKVARAHRKVRNARRDFLHRASTRLVRGNDTIVIEDLAVTNMVRNRHLARAISDCGWGELRHRLEYKCERYGRHLIVINRFYPSTKTCSACGHRLAELSLSTRTWQCSSCGARHDRDINAAKNILAAGQAVTACGADVSHSRTSGVQSAAKQELRSVRAGIPVLRGEE

SEQ ID NO: 59610 - protein, 286 aa, unknown
  TnpB Polypeptide
LDSAYQNFFRRVEKGRKPGYPRFKSKKSHRKSYQTSSCIKVFDKHVQLPKLGRVRCAISKQVRGRVLNATVSQEPSGKYYVSLCCTDVEIEMLPPTGAVIGIDLGIKDMAITSDGRKIDNEKYTYKSAKRLARLQRQLSRKPKGSRNWEKARIKVARCQEHIANQRRDNIQKHTTQLIRDYDVICIEDLNVDGMKRGKNQGKAASDVGMREFRRELEYKAQWYGKTISVIGRFFPSSQLCHCCGYKNPLVKDRKIREWTCPECGENHDRDINAAMNILNEGMRLLA

SEQ ID NO: 59611 - protein, 408 aa, Tolypothrix sp.
VQKAFKATLTPNRNQEVLINKTIGCVRFVYNRFLARRQQLYAAEKTTLNYSGCSKELTQLKKEIDWLTEVDKFALQNSLKNLETAYKNFFLDLKKPKNQRRFGFPKLKKKHGFKQSYKTNFTNGNIEVRDNYLKLPKLGWIKFHKSQNIDGSIVNVTVTRTKTGKYIASILCEIEIKKHPNSNQNLGLDLGIKSYLVTSTGEEVENPKHHKTLLKKLRSAHRRLSRTEKGSNNRVKAKIKLARISERITNKRDDFLHKLSTRLIRENSIICIEDLRVANMVKNHKLALSISDASWSKFIAMLEYKALWHDRIVQKVSPFFPSSQTCSCCGFINPEVKDLRIREWDCCSCNTHHLRDATAAVNILNEGLRILQAAAGSSEAQNACGESVRRGNIQAGLDEAGITRLLVV

SEQ ID NO: 59612 - protein, 531 aa, unknown
  TnpB Polypeptide
MLLSVVHDTGWEGGLAKNKTYKAFVAHPSRVLDLEGEVLDSTTVLAQLASEIQGISAYATYVVRNDTTLESQLALAGAIQPAVAGRRAGVTMPDFLVTGKSGRSRKEFLVQHNVVTSYHSWQERINAVNGESAKYISQGWKRTINASPPSYGEDYVNLGAVDKWYAVIENNPFTDGEIILKMVIRGKWYRLLFNFDNTRFREGKVTLPLVKIENGAPVFIFTVATDNPIIQFSGDYTIGVDVGINNYATVVVRNSQTGEKVQESTLSQRVHSLWNSVKASERQVKQLRKKAKSILYDRQARMSALDEAQLHREAASRKKRELAILAAQEIAYLSYFYDNAVVAVEDLGWVSNTMQNGRWNRGELIRWLTHYATQNGGWVVSVNAANTSKVCHLCGSKVTHPVHETSHCPEHGEMDRDVNAAANIAARAVSRATKARKTRAKNRELQKKRALLKTPPARASLRYPGRRDRTKNYPTPKRKKRVAGEVILPPRPARVTTTTVLADQDAYGILGTSTAALKKGLHNLQMQVIQL

SEQ ID NO: 59613 - protein, 373 aa, unknown
  TnpB Polypeptide
MMLSRRIRLYPTREQSVQMFQFAGVSRFAWNESLSFWRKTYEETGKSPSEKDMRHHLVELSKREGFEWIVECPEAARKRAVSELANAYKAAFKKVRGFPRFHSKRKRRPSFFQRTDRSLVVGPHHVKLTNIRKPVFVKKTKLPEKMYNAHVTFDGKYWYLSYSYDTEVTERTESQGVVGIDLGVKDMACTSDGVVYGNPNNLDSVKRLERRKRFLQRRLMRKPTANQADGCSNNVFKLRRKIANIDRRIANIRQDARHNMTKGLATTYSEVHMEDLNVRGMLRNRHLAKSVSGVGFREIRRQLEYKTQIYGSSLVVVDRFFPSSQTCSRCGERNVGVRGFENLRVREWTCPTCGTRHHRDINAARNIASWNPA

SEQ ID NO: 59614 - protein, 517 aa, unknown
  TnpB Polypeptide
MSSVTRTIPLHPFACREKKTGTGLDIHNVLEEVRNDATLCAEEALKHVTVENLGKLSEYDRLKPAVAGRRMGVRLSVPGRGTGRSRFERMVQEYAVSQLRSWRERCKVRAGRADRYLSAGFKRTASSNKPDFLKPRLALSATDKSYHTVRLNNSTVELGMVVNKRWVTFTFKTPARFREPGVRVIAPTISIDDRNRVMFNWYVEIPVERAPFSDQYVVGVDVGVMNHTTVVVRNIETGQVVEASFMNRRVRSLENKIKRTKTQINALYRKNRLDEIESHRKALSNRRKELAILIGQEVADLSWRYGNALVAVEDLSHMVNTMRYGRWVRGLIIKRITDMVESNGGRVMTVPSVYTSRRCHQCGKNLDMSNYHTPLCQTCQVGWDRDENAAANIASKLKDKNRHKKSCQTRKKHASKTHRRNSKGSLHPLKHPLRKTGPTPKAPQNSPKPNNNHRVHHKHTVTKTREGGVFPVMCAAGWTLRDSNATVPAVAPSNGCSDNKPHDYPAGRHRSNDLCLP

SEQ ID NO: 59615 - protein, 417 aa, unknown
  TnpB Polypeptide
VSYSVRGEEPVVVEALKTRALPEGSCDKLLEFLRLYRDAVQIVVDRIWSINKKLSRRKLHRLFYSDLVSTGFRAHHAKEIYIYANSLVDSARSNGGRKPVLRRLSARIDKYDYRLDLDNMTLTLKLHSDHEVKLKLVTSRDRVEKFRGWSNYEIVVKYEDGEFWVSVYFRRAIKPVKPRTVMAIDLNFDNITLAILTLDGRLVKLKRFKTPYRKILTRRIWIERIQKKYSSSWRFIRGVRRTIERHGERTRNISWDYSHKVGDLVAELAIRYRSAIILEDLEKLRENNKRGKRFNKKLGLWFYRRIQFCIEYETRERDLEVIKINPKGTSSKCPRCGSKLIENENRVLRCRKCGFTGDRDVIATINLYKKYVSKHSRCGVSGVALNAPKPNENPSGVQGNRDEAMKNTPSCMNSYES

SEQ ID NO: 59616 - protein, 395 aa, unknown
  TnpB Polypeptide
MLKGVRIRIYPNKTQQNLIANTFGCCRLVYNKGLALRKETYETTSVGIGYKETNTMLTSLKKENNFAFLKNVDAISLQQSLKDLDRAYKNFFKHLGGYPHFKSKKETFKTYRTQNVNNNICVTLDGKHIKLPKLGYVKAKVSMDLSFAKINNATIEQMPSGKYFCVLNVDVPTPDVTNNGCMIGIDLGIKDFYSDTNGYKCPNNKYLAKSTAKLQKAQRKLSKMIESHIVGYKIIKGYRHPIYDRPLSECSNIQKQRKVVARIQEHIANQRNDFLQKESTKIVKENQLIALEDLAVKNMVRNHKLAKSISDVSWSKFVTMIEYKAKIYGSTVVKIPRFYASSQLCNHCGYQNKKVKNLNVRDWTCPVCGTYHDRDNNAADNILDKALGMVGFVAT

SEQ ID NO: 59617 - protein, 455 aa, Azospirillum sp.
MQTISVPYTTDEDSRAAITRLRRIQSAAVRTAYANAVGPDGKRLKQKDLRDLVKAHFAGHEADAWLLHTATLEGIACRERVPDGSMVFGGKCLARRRAKGLIPAQRWKNARLRPLNSAGDKTRLGNRHFRLAEDAETCALTVYGARYTLVLADMRGKHHAILQQIARDAALGLINVQFSLGDHRLNITIDETKLTAHPDRRSPQTFAKNRVLAVDMNPNWVGVSVVDMGDDGGVTVKDWRLFDLTGLNTGTRQDRSQKAAADQANKITTEVAEIAESIANLARSWNAGLIGLENLRGMPRGDLGRGANHNRLVLNLWTRQHLTACLKRHARQRGVEVLEVNAAYSSTIGNLLHEFPDAVAASIEIGRRTLEVRRGRQDRFYPVYSGDALAQRWKHVPGVVEAGDWVGLHGALKRANVRVRRPHPVAPSAAFEVRAHMSRTSRVSQWRVACANSPA

SEQ ID NO: 59618 - protein, 400 aa, unknown
  TnpB Polypeptide
MITVKLQLYKPTKCKEQRLFSIIREFTSCANWYLDKLQESRTTSRVKIHNGYYETARKSFRLLSANVQLALDKAIETQRAFLNKKGKKSVPKFKKQFACFRQDTFKIFDRYVQFNMPGRERVNIPFKVCNPNHKQFIKQQPKRSQLINKKGKWFLYVSYETDKPAIDGNINIIGVDLGVKKIVTVSNPEASVNVFFSGNKAIYTRNKYQRYRKQIQRAKDTGKAKRGYRALKRISGKEKNWIKDTNHKISKQIVNIAKQNKADIAIENLKGIRERIKATKKVRRMLHSWSFRQLISFLQYKSAMAGVRIVSVDPRHTSQRCPRCGHISKDNRKSQSAFKCSQCHYSVNADLVGSRNIALTALNLYGEGKRPSERAVMLLPMAEGKTLMASCLEAPSVRAG

SEQ ID NO: 59619 - protein, 389 aa, unknown
  TnpB Polypeptide
MRILLKSYKTEINPTQEQIQIINRTIGVCRYVYNFYLAHNKEIYEKDNKFISGMDFSKWLNNEFIPNNPEYVWIKEVSSKSVKQSIMNADKAYKNFFKGLSKFPKFKKKGKSNVKMYFVKTDAKVIIPCERHRIKIPTLGWVRLKEKGYIPTNSVIKSGTISSKAGRYYISVLVDEQEKSQVELDNFGLGIDLGIKEFAVTSNGIRKQNINKTKNIKQLEKKLKREQRCLSRKYEDLKIRSKKKGEATRQNIQKQKLIVQKLHQKIENIRTDYINKCVNEIVKTKPSYITIEDLNISGMMKNRHLSKAVATQKFYEFRVKLEVKCKELGIELRIVDRFYPSSKLCHECGCIKSDLKLSDREYICECGYHADRDYNASLNLRDAKTYKVA

SEQ ID NO: 59620 - protein, 475 aa, unknown
  TnpB Polypeptide
MLQAYKYRMYPSREQVTLLMQHIHACRFVYNHSLEQKIRAYEQEGRKLSCYDLNKQLPALKEEYPWLKEVNSQSLQNANKNLDNAFTRFFREKKGFPRFKSKKNPVQSFQVPQHYAVDFERSRIKLPKIGEIKTVFHRAFSGTMRYATVSMTSTGKWFVSILVDDGAATPKPAPFTSDTTIGVDVGLTDFATFSTGEKVENPRHLKKSLERLKVLQRRVSRKVKGSKNREKSIQKLARCHEKIANQRNDFLHKLSFRVVSENQAIAVESLNVAGMMKNHHLAQSIGDVSWSKFFTMLDYKCLKYGKTLLKIGRFDPSSKICSKCGYLKQDLVLSDREWICPDCGTHHDRDINAAINIKKFALQDQNLVGVSGVERTVEPVDSLPIGRRMKQEAPPFRAGSSPDRARVARCLPLRVCRYGDQCHRQVLRGAAGCKHPLRRGGCGDEEGVRVGSCARLDGSRFPARSQRTAGFTWSS

SEQ ID NO: 59621 - protein, 391 aa, unknown
  TnpB Polypeptide
MSKRAYKYRFYPTPEQVHNLACTFGCCRFVYNWALRTRTTAYFQHGQKLYYNDLSAALPALKTDEGTAWLKEVSSVPLQQSLVHLDKALVNFFEGRAKYPVYKKKHKQQSATYTATAFRWDGTCLTLAKQQEPLAIVWSRPLPENAKPSSVTISKDQSGRYFVSMLVEEEIALLPSIDKAIGIDLGLKSFLVTSDGEAIANPKYYARDEKKLAKAQRRHAKKKKGSKNRNKARIKLARLHARIADTRRDFQHKLSTRLIRENQVICLETLAVKNMLQNHCLAKAIQDVGWSEFVRQLEYKGEWYGRTVVKIDRWFPSSKTCSACGHVMDDMPLDIRAWACPACGIFHDRDSNAAQNILAAGLAASACGEQVRPVVAKAAAGTGRRSRKSSS

SEQ ID NO: 59622 - protein, 404 aa, unknown
  TnpB Polypeptide
MNTVRIYPLTHLSSTQLQQLHDAQREAAQVWNLCMNIHKTARLQRTSWPGRNELQKATKGRFALHSQSVQMVVHAFLANVDTTRQLRQTHPQMRMRYPYKEKRFYPVMWPAQAVSRENGRVVLPMGRGRKSLVLPLDLPENSGSCTLVWNNGYELHVCMEIEQRESAPGDRHATVDLGEIHLAAVTTNTGKAMIVTGRGIRSLKRQRTMQVRTITKKQAQCQKYSRRWKKLQHAKNIQCKRAERRIRNQRHQATRKVINFCVKHEVGTLFIGNPHGVRNQNSGRHHNQRMSLWEYGKDISYLTHKSKQAHMVCFTGSERGTSSQCPACGHKHKPRNRQWNCNKCGFTGHRDLVGSVNMHRLTFGEQVTFPRSFTYLRPSVLGKGVAGQTRPNVVSVSVQVNHVF

SEQ ID NO: 59623 - protein, 384 aa, unknown
  TnpB Polypeptide
MRKAFIYRIHANKATLAKAETWLNLCRNLYNCALEQRIDAYKRQRVSISGYKQNVQLPPLKATFLEYKQVNSQVLQEALERLNKAYQAFFRRINKGEKAGFPRFKSKNRYNSFTLKRSGWRLDGKYLTILNIGRFKLRLSRLIQGNIKTITIRRTPTNKWYVSFSCSDCPNNLLPQSNKVVGLDVGIKSFLVDSEGNPPIGNPKYLKNSLKILRIKQRKLARAKINSKRRKYIKLQIATVYEKIANQRRDFHHKLANEYIKNYGLIVFEKLMITNMQKNRTLAREISDCAWGQFFEFLGYKAEYAGRLIFRDNPRNTSKMCHVCGVINKDLKLSDRTWICKNCGTLHDRDFNAAVNHKNEGIKYLERLGQSHQESTYENTQCVF

SEQ ID NO: 59624 - protein, 396 aa, unknown
  TnpB Polypeptide
MEKHFLLKDKELFRGMKRDELAKRAGVERSTLFNILRGYTTTPKTAEKIAAALDMKVGQVFDDVTENKGLSGASTNKLKLNLSAIFTAAVKKEIMRRNPCRLATPPKVDTPPASYLNEEQCKEFLSLLRERGDFQLEVSCNLFVASGIRAGELCALYWEDLNLETGILHIRHTLAKVGEEYIRQAPKTQESVRYILLPAYILELLKRHKTEQAKASLKAAEWKNTELLFTNQTGGFLLGTNLNARLKRVIRGTDLPQDLHIHSLRNTFASLLINSNVAARVIADRYDAIGIEDIRVKAMAKRKKGGKFSFGKSIADNGWNLFTNILEYKLAWEGKQLVRIDKWYPSSQLCHVCGYQNNETKDLSVREWDCPKCGSHHNRDKNAAINIREEARRISA

SEQ ID NO: 59625 - protein, 213 aa, unknown
  TnpB Polypeptide
MSLDVYHPERGWLKVDLSELHRIAETYDRIIDGLKSIQRKAPKRISRLLEKYYSRRRNRIKDFLNKLAVQLSKELPDAVFIFEDLNKLKIFENGSRKFNRKLSHSTWSRIMQKLSYRVPIEFVNPAGTSSTCPKCERKIKPRNGLVVCECGFVADRQFVGAFNIFVRGLGVALSGGKADDLLPDEPRGELRLVSPKSVVRVDLNGRAFAHILF

SEQ ID NO: 59626 - protein, 372 aa, Desulfotomaculum sp.
MPAVTKTISVKLHDLTKTKLEALQDLLNISADLSRYYVTKLETLNTQSKKALHNETYTEVKSMFPGLPTGLIQTIRDKSLEAYKSYKARVNKGKKASLPVFKHSVVRFDSRTFTLHKTETCFPYFVSVSTRQKRVMLPVKYGRFQGEILAGLASGVYKFCTAELSFSYRLNCYILNISYKYDVPEQATTAVMGIDLGITNLAVLAVPGQIIKFFNGKRHNQKRDHYAELRRKLGKKKLIKKIKAIGNKEQRYMKDVNHKISRQIVNIAKQCNAVIQLEDLSNIRERAKFSHKMNRKLHNWNFHQLRSFIEYKAIAEGLKVVQVSPKYTSQGCHICGHTEKGNRPNQATFLCKACGYQANADFNASMNIAVAG

SEQ ID NO: 59627 - protein, 376 aa, Mollicutes sp.
VNKGIKVRIYPNKKQRELFQQNFGCSRLVYNQILDKLNNLYTQYPRMYKLNIKLINTLLNQIKVEFLFLKEVESTSLQQASRDLLKSYQMFFKNPKSNFPKFHTRKNTRLSFRQTVTKNLVQGNHLKLRKYGLIRFGTSKEYINLLNSEDIKINNITISCDNFKYFAIINIEAPVNKFKLTGIKKGFDLNSNRNGFLVSNTGEKYQFDINHEIQMIKQLNKSLSTKKKGSRSFKYYTKRLNKWYCKIKNKLNDFAQKLSTSLVKECDTIVIENNWVNILKSLTKGEQNIRFPLSRFKDMIQYKFYWYKPEATGLAEVNPAYTSQICHVCGSINSVLTCDNREWVCVNCQSVLDRDINAAINILNRWDDGDCLSARS

SEQ ID NO: 59628 - protein, 275 aa, Halorubrum sp.
VVTTTITTTFHNPSRERRREWQRATHLYRDTKQFCIDGWEADEFGMSVTTASIDNDLYSAIQNQAIREAKFDYKKDGIVEYHASQPFAVNNQNWDIDRTENGSVVVGFPCISGWWYTPIDVYDDIADDVARLVDGEADKSRLQVYRQGDDWFCTFTVEYDAETGDETAIGVDIGHNHLLAVDAETGESMLVSGREAKYVRRKYRSLRESLSEAGALRARNRVGNKEGRQIRDLNHKASRRLIDWAQQFENPVLKIEDLEGIRAGSDWRGVHSWHF

SEQ ID NO: 59629 - protein, 417 aa, unknown
  TnpB Polypeptide
  misc_feature (151)..(162): Xaa can be any naturally occurring amino acid
MNQVLTISCRLKVSTSQSVKLDATLDAFVQALNWVNQNTPEKIVNAVKLQSLCYYEVRSRFGLSSNLAQQVCRRVAGFRRLARQKHRPVKAFKAGFVTYDARIFSFREKDWSVSLTTVDGRERFALAIGNYQRGMLAGSNPKSATLLKRQXXXXXXXXXXXXNPKSATLLKRQDGSYYIQVCLESEPPEPQDRDEVLGVDLGRTDIAYTSEGQRWDGQDITKVRDHCSNLRAKLQHKASKGTRSSRRRCRQLLQRLSGRERRFQGWVNHNVSKCIVETAKSLSVSIALEDLTGIRERTNQRPRNKTDRRRSNSWAFHQFRLFIEYKALGVGVKVHRINPRHTSQTCHQCLHMHPDLDKSYRSGKRFKCRHCGWHGDADFNGAKNIQSIGLLVNQPRGSWLSCEITGGLQKARALCVA

SEQ ID NO: 59630 - protein, 380 aa, unknown
  TnpB Polypeptide
MNKAIKYRLYPTTEQAVMFAKTFGCCRKVYNLMLSDKIESYKSTGKFAAVTPAKYKKDYPYLKEVDSLALANAQLNLQGAFKSRFSKSRKKKNGFPKFKSDKRSRKSYTTNNQHGTIALADGNIKLPKIGYVRAVIHRKPDSNWLIKSATISQEPDGKYYASVLFEFENPINTYVADRTNAIGLDYASDGLYVDNNGNVGTNHKYYRESHGKLSKAQRRLSRMQGSKKHETKSCNYLKQLRKVNRIHRHIANQRLDNLHKISTEIANQYDVVCVESLNMKSMSNKGFGNGKATLDNGYGMFLSMLEYKLSDRNKYLIRVDKWFPSSQVCHCCGTLHPEMKNLTIRTMKCDCGLAISRDQNAAINILHEGLRILNESFDAA

SEQ ID NO: 59631 - protein, 370 aa, unknown
  TnpB Polypeptide
MLKTYQYRLYPTKAQTTVLNRTFDLCRKVYNNTLALRRDSWDYEQKSIGLFETNKELARWKSDHPELSSVYSQVLQNVQVRVDLAFKAFFRRVKAGETPGYPRFKSFGRYDSITYPQHGFSLDVQNQRVYASKIGRIGAVVHRSINGTIKTMTIRRSSAGKWYVSFVAEYEPKVRQHTGEEVSGIDLGLTSFATLSNGEKIENPRFFRTEEKALAKVQRRLSKEKKGTSEREKRRLVVAKVHDRIANKRNNFIHQESRKLVNRFKLIAFENLNIKNMQQNSHLSKSIADVSWGMMVQATKNKAEEAGSRVVLVDPKNTTQLCSRCNQIVRKELSDRVHCCPFCGLTMDRDQNAAINIMRLGLQSLPVKAG

SEQ ID NO: 59632 - protein, 390 aa, Actinoplanes sp.
MVRVVERGYKYRFYPTPAQAGLLTRTFGCVRLVYNLGLQARRDAWEQRRESLGYGATSALLTDWKKTTELAFLAEVSCVPLQQALRHLDTAYNRFYKGESRFPRFKSRKRSRRSAEFTASAFTYRPGELRLAKLMDTPLQVVWSRPLPEGVVPSTVTVSQDRAGRWFVSLRCEAPATVAPTTEKVVGIDAGLNRLLTFSTGELVGNPRQERRERGRLARAQRVLARKEKGSRNREKARLRVARVHARVADRRRDMLHKVTTRLVRENQVLVIEDLAVRNMLQNHTLARAISDASWRLFRTLLEYKATEYGRTLIVVPRWYPSTRLCSHCGLRTEKMELSVRVWTCTGCDNRHDRDVNAARNLVAAGLAVTACGADGRPQRGTTSRAGDRL

SEQ ID NO: 59633 - protein, 247 aa, Streptosporangium sp.
VPQASKLRIVRLSAKWGAVTVPLVGRVRFRWTKALPGIGKNSPAGKVTGARVVKEANGWHIVFRTEQHVPHPTPHRGPKVGMDRGITVPLALSTGEKLRHKPWLAPGERERLLRLERTAARRRAARIKGEPVSNRLARTYDQIARLRAKAKRRAYDWQHQTTTALARKYSAIVVEDLHITNMTRSAAGTATAPGTNVAQKRYRGAGRRQSRKSRGSRSATGHGVRGRRRGPPSMVQKSPPVASRHGA

SEQ ID NO: 59634 - protein, 1121 aa, Actinocorallia sp.
MAGCGVMKTTTTPDAAPSGASAGRGGVRRTRGANKAAAWRYDGPVVVICLPLVVDEQAAARLESLFGAMFCIKRALQRDARARVAAFWRGVHRRERDPVEWRKQLGLSRPGLERAAYAHLDASGWLRHHVSKALVMHQADEVWTGVERHLLPDASGRRACRPRPGSWWEYTRIPGRARSHTAPRKWETFRLHGSLQGHLNTYRHPALPAHVTSPAQAAALEPGTPVLAQPRRLPLPDPAGADGARRGAWWDHDGPLTVVFNGGPDSRRGELVLPVRLPAGAGRWRWLRHFLDRPELWHKIDLVRRPHPSAPGGWVYEAHLMVLDGDYTSPATAERRRRAAALERVGGVDVNVSNLSILSLPATLDPADGPVLADQIRLTEVEQAAVERERRTDRRRKSALERSRRAANKARYELSRRQLERQRRRQATGLPDRHVDLPKGPRQADAAGRPLSSHRTDRLTGGYRALRTRIRAEQAGRIEAKRARARVVAARLVEVHGARLTVEACHLPAWFRRWGRACAAFASGMLTAALAAECAAVGGGLGRASTFTTALSQHCLCGQRVSKTLAQRVHDCPACGLEADRDLVSAALGAFVIWTDPADALTASVDYVTSRHALGVFGSGLQGALTGSTVTRPHPAQRGEVLDGSRARKGGASARPHPERQRSRPRTGTRKGPHRTDTTGHRTVSPPLKQALGADRDDHGRHHRAPGERLGDPDPPGELGAQRAVPHLLPRPVRRDAALPARPRLQRVPQLRRLDHRRQPLPRVARPAPAPLGQPRHLRVEQRRQAPAPVAQLQHHAPGPVVGVEPPSRGGVDEFRRDLRQFPVQRPQPPVQPPPGDPGRGGLQLRAEGRQGQRRCQQQHAAQRGHRAGGLVEGVQVGEARAAREDREDADQREQRDVHPVRAVHPQAAPQPREGRVVRLPGPAEAPVGQHCVARQHPRQPQQGEHRHRRLAGVVGVEVLGALHRGGRGEEQCRERQDAQRAGQDDPSHQRPRLPERVAPQQGQGQVDPARHRLAGGDQQGGQVGDARAAVDPQHVRGRRQPQRDRGGEDRRAQRPQPRALPAGAQVPELVEEPGRHRDGAGYVEGAAEHFSAASRSAALSAFPAGRSGRPGRSSMRLGTL

SEQ ID NO: 59635 - protein, 436 aa, unknown
  TnpB Polypeptide
MQLVEQHVINKSDPRYAVIDEAAFKSKNLYNAANYEYRQAFIHEGKYLTYNEVQRRMQSHEAYKALPAKVSQQILLVLDRNWKGFREGLAAYNEDPSKFLGRPKPPKYKHKTEGRNILIYTTQAMSKPGLKRGLVQPSMLPIEVQTKQKDVDQVRIVPRKGFYVVEVVYGKAVKQAAVNPAYYAGIDIGMNNLVALTSNKPHFKSILVNGRPVKSVNQFYNKRKADLQKQLGTTGTTRRMERITNKRNRRIDQYMHTVSHRIIDVLVQEGIGVLCIGKNDAWKQEANLGKRTNQNFVQIPHARFIAMLAYKAELVGIRVEITEESYTSKASLLDLDPLPVRDPNNDAKHTFSGRRLTRGLYRASNGRYINADINGAGNIIRKVAPDAFSEARAVEDGKGVLASLVVHPVRIVVPLTKPKDKHSVAEASGQENARNR

SEQ ID NO: 59636 - protein, 403 aa, Haloterrigena sp.
MAEVRRTVVVKLDVDDSDATLLHETVEEYLWACNYVVRDAWKDDYKPTSKTKLHERTYSAVRNETRLQANLVQSARNKAAEAIKGVVARWKAGKRASQPHFTTPSVRYDKRSATFHDDYVSLSTVNGRVEADYVLPPEGENPHTTYLRNDDYEVTGATLQYRDATDTFYLHIGTKADMESEIPDESDTEHSTVLGVDLGIEQLAVTSTGMFWNGAYLNHRRREYERIRGNLQQTGTESAHRTIDQMDDRETRWVEDYLHRLSKALVQEAIVHDCDTIAFEELTDIRDRMPGAKKFHAWAFRRLYDYVAYKAKAEGIEATQIDPAYTSQRCSQCGTTLRENRRSQAEFCCQKCGYEANADYNAAKNIGFKMLRAGQKSPHGGATRHLALKSGTLNVNGEYSPAE

SEQ ID NO: 59637 - protein, 414 aa, unknown
  TnpB Polypeptide
MEKQVFKKTYKYRLYPTKRQQEVLEQRLSICRWLYNHFLEQRRTLYEESKTKITCYEQIKEIPSLKRESPELKKVYSQTLQDVVRRLDRAFQSFFRRVNENKNGKRQKPGYPRFKGYWRYDSFVYPQFGFKLKDDKLELSKIGFLKIKLHREIEGNIKTLTIRRTSTNKWYACFSTEINKELPKKKEIKQMVGIDMGLDNFLTTNQGEKIDNPRYLIHSEGKLAKIQRYHSRKKLKSNNRQKSRLKVARLHEKITNQRLDFLHKLSRKLINNFQLIAFEKLNIKGMTRNKYLAKSIVDASWNRFLQQLRCKAAEAGIWAVEINAKNTSQTCSGCGTIVPKTLAIRKHKCPTCGLTLDRDINAARNILQLALLNFAKQNLGGLALNTVGTTGSNVCGVGRLLPTMKQEAIGFNRW

SEQ ID NO: 59638 - protein, 399 aa, Moorea sp.
  misc_feature (19)..(19): Xaa can be any naturally occurring amino acid
LIVLFLKSSSNKSSINFCXKIRSRGTTVKVQSYNEEPYDTKVSRTVLETSQWGDPLTKFNKKTLPNLKKTHPWYKEIHSQVLQDLVKRVKLAFDRFIKGDSNGKRSGKPRFKKRHRYRTFTYPQMKEGCLEGNLINLPKIGKVKIVLHRPIPDGFKIKTASITKKCDGYYLVLSLEDKTVPEVKADINPESIVGIDVGLKEFLTTSEGENIEIPQYYRKSQKRLKVIQKRVSRRKKGGSNRLKAIKQLGRQHKKLADKRKDFHFKTANYLLSKYDVVVHEKLNVKGLAKSRLAKSVLDAGWSSFLTILTSKAENAGLLAVPVSAQNTSQNCSNCGKKVPKKLHVRWHDCPHCGCSLDRDHNAAINIKNRAVGQSVLKAQRLLSNSWIGWEAYTEPNGSV

SEQ ID NO: 59639 - protein, 313 aa, Acinetobacter sp.
MSRFIRGHIIELMPNNKQASHFAQASGVARLSYNWALREWQRQYKADKEYRDQCEYYDVAVNEMLLNRPKESKLRKHLNTFKFEKYPFMKKVTKCAPQLAIKQLGSAFDRFFNGKSGYPKPRKKGKDDRFSLSNDQFSVKGRSIKIPNLGWVKMTENLRYKGKILSAKIFKQGGKWFVSIAVELTQIEKLKPKTGLSIGVDLGVSNLATLSNGEVIPSNAPLKRQLAKLRRLNKSFSRKKKGSQNREKAKAKLSRLHYKIVCLRKNNLHQVTTDLVTRFDVIAIEDLNVKGMLRNRKLARAISDMGFMSLKGS

SEQ ID NO: 59640 - protein, 275 aa, Acinetobacter sp.
MSRFIRGHIIELMPNNKQASHFAQASGVARLSYNWALREWQRQYKADKEYRDQCEYYDVAVNEMLLNRPKESKLRKHLNTFKFEKYPFMKKVTKCAPQLAIKQLGSAFDRFFNGKSGYPKPRKKGKDDRFSLSNDQFSVKGRSIKIPNLGWVKMTENLRYKGKILSAKIFKQGGKWFVSIAVELTQIEKLKPKTGLSIGVDLGVSNLATLSNGEVIPSNAPLKRQLAKLRRLNKSFSRKKKVVRIEKKQKPSYLACTIKLSVYARIIFIKSQRIW

SEQ ID NO: 59641 - protein, 376 aa, unknown
  TnpB Polypeptide
MPSDKLIRRFNFRIYPTAAQEQQMTVTRDACRFVWNTLLTYRSLQYRICGRSVSKADCDRYITTLRTVFPWLKAADSMALQETSKDLDTAFRNFFEGRAGYPVYKSAKRQAHKYAFRTRNQSGGIAISGRYIRLPKLGYVKFRQSRDIPGRILNATLIHKPSGRWFVSLCVEQDLLSALQPNAGGAVGIDVGIKSFCVDSNGTVTDNPHCLGRMARKLRHEQRKLSRRKKGSRDYEKQRLRVSGIHERISDVRNDFLHKLSAWYAKQNAVIGIEDLNIRGMMRNHHLAGAIADASWNKFYAMLEYKTFLHGGRIIKVPRFYASSQACHICGHRYPKTKDLSVREWTCPVCGARHDRDVNAAVNIKQKALSMLTAPV

SEQ ID NO: 59642 - protein, 410 aa, unknown
  TnpB Polypeptide
VKIQNTIQFKIIYPNKNKALSLNTTMRQYRKCVNFYLHEIAKGTQLLEIYQKAKQQYRLQTGLIQTARDVAKEQYDSYKNNPDNPHFPHFKGLMTTRFDHRSISFKETDGLYKWWANISTVNGKVRVPIASCEEYFDLLKNNKFKCVQLKYRTGDFYLNVIFEEAKTIPKEKDFKFFVGVDRGSHNNIATVVVQDKNENILKSKFFPAEQLLEKRRRFYVLRKRLGHKKLLNEIRKSKCREYNYVRDVNHKISMEIVRIASKYPNAVIVLENLKNIRKQMMFGKKGNRIGHSWSFLMLEEMIVYKAHRNSIAVRRAYPRGTSSVCKNCFGDIQRSPSILAVCKSCKKKYNADWLGAVNIVRRFFYYMSKNLGVSESHPKQGKDEHAGSAIAPNPLVDLAHHGLMARPIRI

SEQ ID NO: 59643 - protein, 407 aa, unknown
  TnpB Polypeptide
MVQMLVRGVVFRLGGEIPSEARFLLEDFRLAVNSAIRAGVHAGVSSRNALTKLAYRDFRQEHPKMYSQHLVSAFEVAGSVLKNHRRRTRNGDSWRVPYVRRLFMKAENQAYKFDREKGTIDLPIRAGCHVHLELVVSNYHRRYLEDRSYTLGSLTLSPDRVIIAFRKDAPNPYVPESALSLDTNERSLDGVFANGVDVKAVKAEFSGIAVIQQRHHDRRKRLQKKKAHDRRTSRRLCRREGARERHRIEYRLHQVANAVLSFAENQKSAVVLEDLKGFRPTWNKELNRRLSLWPRRKLHQIIEYKAQWRGIPIVKVDPRYSSRTCPICGRTQDSRMGTEFVCECGWHLDRHINASINLLQTAISKGMAGGLRFNPGAFQHDVMMILYDPVTGARSEPNGTSCMGVAI

SEQ ID NO: 59644 - protein, 377 aa, unknown
  TnpB Polypeptide
MLRFVWNHLLALEKQEYRATKKFLWQKQLQPIAVALKRQPEFAWLADLPAHAVLDTVARLDGALRRMVSERKAGRRCGFPRFKKKFIREARIYCVGQATTILGREAFLPKIGRIKLRGGDLPYGRLLNARVWRDGHRWMLSAQYECPHPGEMPETGSKLGIDVGLTTTVTAFDGSDFIEISAPRHLRKALKKLRRAQRRVARRQKGSNRRKAAGQRVTALHRRVRHLRQNFLHQTSCRLIAKADRIKLETLNIKGMIKNRRLALSIADAGLGGLARMLQYKGAWYGRTVEKIDPWFPSTQLCFLCRAKNHAMKELKRRIFECLECKHREGRDRNAARNIYWCGEELAPGSERIEKCVETVVRPPLAEAVVDEARILA

SEQ ID NO: 59645 - protein, 397 aa, unknown
  TnpB Polypeptide
MEVWRAYRYRLYPKRETEQKMIDILETCRQTYNEMLNICQSTYEMTGKCLNRFDMNRCINYGIDTDISKVNSQVIQNINDRIAKAFSNFFRRIKEKQKGKNIEVGHPRYKNICKSFTFPRTGFRLENNTLFMSKIGIVQIHIGRKQNKVQGHIKTLTIKRELNGKWFACFTCIVNIKKKQKADNRKIGIDVGIEHFANLSDGTMIDNPRFLIQSERRLKILQRRLSMKRLGSTNRKKARLKFAMLHDKISNQRKDFIHKLSCYVVKKYGTIAIEDLNIKSMVRHPYLAKHICDASWGMFANMIRYKAVSAGAELVEVNPSGTSQKCSQCRNEVPKTLAQRWHICPFCGLSLHRDLNSARNILTVGTTGIYACGDGSSALTSLEHSPSRNQEAIQLVG

SEQ ID NO: 59646 - protein, 269 aa, Thiocystis sp.
LATLPQQPRGARYGENVTVSQSGGKWFAAIQTERAVEIPVHQGTAVGVDVGVARFATLSDGTVYAPLNSFKRHEQALAKAQQAMSRKTKFSNNWKKAKAQVQRLHTKIANARRDYLHQTSTTISKNHALVFVEDLQVSNMSASAAGTLDAPGTNVRAKSGLNKAILDQGWGEFRRQLDDKTAWTGGHLIAVPPQNTSRTCPSCGHIAKENRQTQARFACVACGFEENADLVGAINILRAGHARLACEVSPAGGQQQEPTEATIRELACA

SEQ ID NO: 59647 - protein, 378 aa, unknown
  TnpB Polypeptide
MQLSETIKLYMTKEQKSLVITTMNQYINTVYSLVSVATNGTSISKYTTADVNASLPSALTNQCIRDAKSIVNKYNKYCRKVSAKNKKLAKQKSNITIKEPTVPVLKRPCCYVNNQNFKIKNNHIEFPVLINDKSKRISIRTSMTDNQKLIFANAKLGTMRIVYKGNKIVAQIIYEVAEPEYIDDGNVMGIDLGIKCPAVSYTSDGNVKFYGNGRKNKYMRRHYKYLRKKLGKAKKSNAIKRISNKEQRIMKDIDHKISHDIVKTAVSHDVKVIKLERLTNIRSTTRTSRKNNHSLHIWSFYRLAQFIEYKAKLAGIKVEYVNPAYTSQKCPVCGNVHHANDRNYTCSCGFHIHRDLLGAMNICNSTEYVGDSNIRHTA

SEQ ID NO: 59648 - protein, 413 aa, unknown
  TnpB Polypeptide
MEYSCRYRAYPTEVVAAEMEHHLDVHRQLYNHLRWDYTNSLVDDKPSEYDQNNKLPEWKQRWPIFAELHSKAAQATVARFHRNLSNLHKKKKKGYNVGRLTRQAPTEYRSVTYNQSGFDLDEKRGHDKYASVRFSKIGWVKIRYSRPIPDRDIIKEVTFKKERNGEWFISFGLETEDADLPEKPALDSLDASNSVGVDLGIHHYLHTSDGKTVDWLDLEDEYEHLRREQRKLSRKEHGSNNYEKQRQTVAKTKRRVQRKVLDYQHKLTTWLVTEYDAVFVEDLDVTGMLQADGNARNKQDAAWRQFIQLLEYKGDLYGTHVVQVEAAGTTKECASCGVETSKPIWVREHSCPSCGFETDRDANAAINILKRGFAELGLGWPESAPVETVTATDTADFQRVSASHVIETGSLPS

SEQ ID NO: 59649 - protein, 431 aa, Ignisphaera sp.
VNEVARTVVLKSSPLPRKVFRIFIELEGMYRNMVEQLVIYAVRSIITSFTKLKALKYRELRTLYPQLPSHYAYTSCQDASTRAKSFLKLKKKGLTSRDYPEAKNISIWLDDHLWKLNGLTGIEIATHKGWIRVELELHKQYWKYVNSGWRLASEAKVKLDKKSRRLVIYLIFKKSVEVYKPKGFISVDVNENHVAVLIEDKVYLFETGFKDIVLGYYYRRKRVQEKYDKLYGIKCRVKRRILKKLKEKKVKNDLRWKLANIIVKVTRKNHYGIVLEKLGKNPAREMINHIKDDQLRHRIYQASFKRVQRAIGEKAREYNVTVIYVDPKNTSRLCPLHSAPIVYSNSNRVGKCSVGGEPWHRDVVACINLLLRAHLGNGSYALSLGGLGVDGSHVPFGSTATHDPTGIPKSLWARRKPLDATNKYKLMRMSI

SEQ ID NO: 59650 - protein, 409 aa, unknown
  TnpB Polypeptide
MQKVQLAYKFRLYPKPEDEEKLLETLELCRQTYNYFLGQWNGKENIPSRLELQSQLPILKKEKPELKNVYSKVLQMVLYQLYSNLKSLSQLKKNGRKVGRLRFKGKGWYKTFCYNQSGFKLIKTGKRLDVLHLSKIGDIPIRVHRSIEGSIKQVVIKRHNSGKWFAYICVEKEVEVENIVPNRAVGIDLGLRHFLTDTDRRQIENPRFYEKTLEKIRVLQHWLSRKRRGSKNYEKTRIKLAKAYERLVDQRDDFLHKLSKFYVKNYDVICVEDLQIRNMVKNHNLSQKILDASWGKFIRLLHEKAERATRVRVVVDVPPKGTSEGLSHKDPLRDFISSNRIKMRGLGSPATPAEMEPLRGLITVPASSIIEAGSPQPLGVGSSRRKSLSTKKIRSSPPIARKPTTFSHE

SEQ ID NO: 59651 - protein, 354 aa, unknown
  TnpB Polypeptide
MKAKTIKAKVLELRKGKEELLRREYENWQNYLRGDKTAQLFSATKQQAERLLGRLKGKLKPNKEYPLILRRDVYRANTKLTPYWLKIPVYGVKGGINVPIKTHEPITDDMVCREAKMIRKDNEWFVYITVEREVDERTPKSILAIDLGIRWIATTVNSNNPKPKFYGMELRRVKGHFFWLRRTLSLKKAYKAIKKVGHKERRAVNDILHKISKAIVNEALENDSIIVLGDLKGIRRNGEGKGRRFNRKLNNGFPYYKLSQYIEYKARWLGIKVIKVNERNTSKVCHRCGFKGLRVGSLFKCPNCGYTCNADYNGAMNILKRAMGYMPIAGAALTQPTTRYDETLRVEEPRISWL

SEQ ID NO: 59652 - protein, 504 aa, unknown
  TnpB Polypeptide
MHTLQLSLNTTSYDNHQIERRFHAVSHIHNVTVKHAIKLMNQLKHDKAYRSHLSEYLSIKKKEKLSSTDKKRLKELSKLMSDIRLSIGLSEYGLQSYIKVCAKQYTKLLSSQQVQKEATRVWRGVEKVLFGNGKKLHFKKYMDFDTICGKTNTNGAKFDKSSMAVNWLGLCLKCKPISKNDVYKTEALSHDISYCEIKRMMFNNGWHYYVVLYLKGNAPKKLVKIGPSKMGIDPGVSTIAGVSDSKAVLRELAPKSKDYDKQIQKLLQRMDASKRISNPDKYNQDGTINKSNHDKWIYSNTYKKNSRRLKCVYRKKSAYTKQSHEKLANELLEDSSTFLVEDMNYAALAKKSKKPAERQDKTANIKQKDGTIKAVKKYKKKKRYGKSLNNRSPSLFLKILKRKCELYGGQIQTVNTRTFKASRYDHVKDKYIKVPLTQREKVIGRYTVQRDLYSAFLIKNADHTLKHADRDKCIYEFEHFVIIHNQLINNLKASNVTMKQCFGF

SEQ ID NO: 59653 - protein, 391 aa, unknown
  TnpB Polypeptide
MSYLSYKYRIYPSNEQKRLFKKTFGCVRLVYNRCLELEIDALNIGDPPLGQKGLINFISQVLINEYPFLKEVDFNALCHAAFALFDACRRYWDHTTNPPVYKSRKTFGRNSFTTGNSSHQLSVGPDYVVMPIAGKTRAVIHRPLPESSRLLSFTISREPDDTYYCSVLFSYSRAAPPQKRNINKSIGLDYCANGLFTDSNGHECGAPRYQLESEKKLKRAIKRLSKKVGYGNGEKPSNNYLKQQKKLNKLYRKTANRRNDYIQKKSTELVNQYDLICVENLNMNEMAAHRYGFGKSTMDNAYGRFLELIDYKAHNKGKYLVKVNRWFPSSQICSHCGYLQKLELNERIFRCPKCGLNINRDHNAAINIRREGMRIIANGAGSQSDMRNRNS

SEQ ID NO: 59654 - protein, 486 aa, Xylanimicrobium sp.
VARHTTLQLVADPTAEQARALARHEGAARFAFNQGLRLHLDARQAFRNATVALTGEDGDAEVKIPWTGFDLINAFNAWKKSEDAGRRFVVDVSGAAKLEATGLAWRTEVSAQVFEEAVVDLGKALKAWTASRRGKRAGRVVGHPRFKKKNVERGSFRMRNKVSKTKTGERATIRLGENGPRSVTLPGIGAIRVHDDTRRLRRMLASGRARVLFATVSRRGGRWRISLNVQAADVHPAARHKPRGKADHAGWAGVDRGLHVPVVAAGADGSEVLRVATAPKALRSAQPVTRRLQKSVSRKAKGSASRRAAVRRLARHHERVRARRHHFLHQVSNALVKTHDRLVIEDLNITGMLANHRLAAAISDAAWGELARQVTYKQSWRGGQVLIADRWFPSSKTCSGCGDVNQALTLANRVFHCEHCGLALDRDLNAAVNLAAWGEQHYLSQVLDPEARGQVTNAHRREGSGRRARADETSPDDVGTLTASAA

SEQ ID NO: 59655 - protein, 362 aa, unknown
  TnpB Polypeptide
MKRSLKFSLASANTDKLIALDKLSQEYKRTVNYFLKRLFQKKGLSEEFLKSYNSTLSYRYKQCAKRQAIKLFKCWCRNKKKGEKPKLRNLSLILDYRFLELQKSTNSNSFDYWVKIATLNKGKPILIPIKSYDYIQQYFKNWQLLKGGRLLKKEGSWFLELTFQKETPAKKEKGKVIAVDIGIKKLLVTSENKEYGKDIESLMDKIQRKQQKSKAFERALKERDYYINRIVKMLNWNKLKTIVLENIKNIKQNTKKEKRLGKLFRSKFQRWTYSQLLRRIKLTAEATGVHLQPVNPAHTSQTCSQCGAVHKLNRKKEIFLCRNCGYTTDADYNASKNILISYLAQQPMVAGSIKAFNGTFVH

SEQ ID NO: 59656 - protein, 225 aa, unknown
  TnpB Polypeptide
VKVRTAYKCPHFAVLSTGEKIPHPKDWERHENPLKRWQRRLARCQRGSKNRAKARVKVARAHVRVADARRDFLHKTSTRLVRENDVIAVEDLNVSGMVRNRKLARAISCTGWAGFRGMLEYKAERCGRLVVAVDRWYPSSKTCSACGHLLAELSLSTRTWQCPSCGTRHDRDINAAKNILAAGLAAGAGDGANACGGDVRRAGATRTRPPVKQEPRPAREGTPVL

SEQ ID NO: 59657 - protein, 427 aa, unknown
  TnpB Polypeptide
LFIRIEYRMPTTRRTHISRIRNHSQVKDALDRHGWGASKLWNVANYHTREVWDDTGEIPGENALKHDLKDHPTYEDLHSQSSQRVLEELAEAFSAWVGSDDDRDNPPGYRKRNYYDSDGNRVHEEHPRSTVTWKHNGIRHDQKHDRLRLSKGKNHKDGHDFILCEYDAPPAATVENIQQVRAVWNAHKERWDLHLVCEHEIAAESPGDTVAGVDLGICNVAAVAFPDDAVLYPGNRLREDKHYFQQDEYGTEGEAGPSNRALWARWKLERRKTHFLHALSKDIVERCADRGVGTLVVGDPSGADEENWGRHGNKRLDNWAYKRLMNLIDYKARERGIEVEMPDERGTSSRCSVCGHEDGDDRIKRGLWKCSRCGVVAHSDINGADNIRQKTLSVTPPLGDSDNGCLAQPGVIHFSRSRGFQPRTTAG

SEQ ID NO: 59658 - protein, 398 aa, unknown
  TnpB Polypeptide
MLLTETHIIKGSKELDEITFKCKNLYNRANYIIRQEFINNGKYISKNDMFTSLKNDPDYMAMPARVSRGVLRTLDGNWRGFFASIKDWKSNKGKYKGKPNLPQYLPKNGKFNAIFTDLAVLKPSKKLSGIGLSSLKLRINTKQEYKNIKEVNVKPMKNGKYKINIIYNFEEKTLKKDNGNYCSIDLGLNNLMTLTSNKRGLKPLLVNGRPLKSINQFYNKQKAIMQSELPGKLYTSKRINKLTLKRELKINDYLHKASNFLINWCLENDLNTIILGYNEFWKTEINIGKRNNQNFVNIPFEKLAWMIEYKARKVGITLKKHEESYTSKCSFLDLEAIKKHDNYKGTRIKRGLFKSSNGSLINSDVNGSFNILRKAVPTVFTNGIEGIAVYPERVNSFK

SEQ ID NO: 59659 - protein, 385 aa, unknown
  TnpB Polypeptide
MTAETAKNPAQPEETTQYTVLKLRFYPSPEQAALIEKTFGCCRYLWNKMLSDVQEFYAATDLQYIPTPARYKKEAPFLKEVDSQALCTVHQNLRRAFLDFFRAPGAFGAPQFKTKKACRDSFTVYCREYRTGPSIYLTADGFQMPKLGFLRAKVHRRPLPRWALVSVTVRKTRSGKYFAAIAFKCPVRQPEPVVPTAERTLGLNYSLNRFYVDSEGNSPDLPGVARSKEKLSRIQRKLSRMQYGSGNYEKQLQKLRLQHERIANQRRDFIHKESRRIANAWDAVCVRDADLAELARRLKQPNVLDLGFGMFRECLRYKLERQGKPLILVDRYYPSTRTCSACGHVEAAVSYKRRTWTCPACGTVHQREINAAKNIKAEGLARFRA

SEQ ID NO: 59660 - protein, 384 aa, unknown
  TnpB Polypeptide
MLKSFKTEINPSEEQKVKIRKTIGTCRFIYNFYLAHNIELHENGEKFMSSNKFRVWLNNEYLPQHPEYLWIKEAYSKAVTQAVQNGQAAFTKFFKQENAFPNFKKKGRSNVKMYFVKNNPKDCHCERHRINIPSLGWVRIKEKGYLPTTKDGYAIKSGSVSMKAGRYYVSVLVEMPDNEITANSNKGIGIDLGLKDFAIVSNGKVYKNINKTARIKKLEKQLIREQRCLSRKYENLKKGESTQRANIQKQKRKVQKLHHRINNIRTDYINKTIAEIVKTKPSYITIEDLNVKGMMKNRHLSRAVASQKIYEFRVKLRVKSKEYGIELRIADRWYPSSKTCHCCGAVKKELKLSDRIFKCDCGYVEDRDFNAALNLRDAKTYEVA

SEQ ID NO: 59661 - protein, 484 aa, unknown
  TnpB Polypeptide
MKLTSTYNVRLAKDINVCLDDTLVIYRKAVDFYIDVIITEWVETFAYVQGSKESVKYAEALTVSSNKHPYPTYDFGKDFYKFPSYLRRAAIAEAYGSVKSYKSNLSNWINEPVGKRGRRPSEPKAGYTYPCLYSGNCYTRTGLRSARIKVFIRNTWDWIDVSFRKADASYIERRCKNLTECSPTLLKKGKNWELSFPFKEDVTLMTAPLAERKVVAVDLGIRNACTISVMTSDGTVIGRRFLSLPRENDSLRQALSRIKKAQRSGAKHKPRLWAKANGINKHIAEMTASFIIEACCLYDVDVVVMEALDTQGKKRGSKRQRLALWKAKYVQKLVEHKAHHLGMRISRVCPNGTSKLAFDGSGEVLRGKNSERCHNNYSLCEFSTGKLYNCDLNASYNIGARYFIRETLGGMTEKSRLSVLAKVPSLIRRSTCTLSTLYDLHAAVSGMPLMSAECQMSGETKESDAPQGQPTRVVGSRKHATSVV

SEQ ID NO: 59662 - protein, 532 aa, unknown
  TnpB Polypeptide
MIKMVEAPDQKRIMIRTPSKKKKKKENIFSERIQIRSDANLHKLCLASAQLFNIANNIVHSGFKMFVLCRGGTQKAGGWVRFYALLNELQGTPAYRALPAQSAQEVLYQVDAAWKGFFEAMKAWNEDPSKFRARPSPPGWKAEGEVNLLTFTNQQCKLKYDPQSGKAYIQFPKSVDLAPVQVNPYRIGTLQQVCILPRGHYAIVEIVYKRDVLRDSERRSAPQDRIAALDLGVRNVVCLVTNCGMRPVVVQGGAVKSMNQYYNKKKAEYQKMYSAHGVQGEPRRLERLTRRRNNKIEDQFHKLSSALIGYLSNALIDTLVIGYNEQWKQNAHLGRRNNQNFVNIPFYRLVEKLQYKASLAGIKVVLIEESYTSKCSLLDKESIEHHENYVGTRGVWRQIDNAKFQQKHGKNGKVCHGLFKTATGRVVNSDVNGAYNILRKAFPKALAVDGIEGRGLVPIAVKFSQKEQDFTGLKQLAANLDSSTDILPNAISADGSEALGSAPVRGTESAKTPGEDRTQHSLLNLVNKGQQI

SEQ ID NO: 59663 - protein, 457 aa, Gloeocapsopsis sp.
MANSIVRTDRWQLNPTPKQHEFLEATVNEYRAFCKALSYVVMGHWTEIAGSSSRCAAVERLIHKTSSNPNPKYQYFQKRFYKFPSYLRRAAIEFVLGQVSSFLTRYYDWQSGNRASIDALPPRFNPKAGCYPALYRGQCIKFDSEFNVAEIKVWNGSDWVWGKVQITQLRQRHLLSHAKGLSPSLIVKNGRAHLSVPFKLHPKKLSGDVVCAVDVGINTTATATIVSSDGTVIQSAFLHRGGDIDRRDKVLGQIRRKAKLTKKLHKGFCKGLYRRARGINHNMAQHISKEIVQFALSFGASVIVFENLKDWKPSCGKKRSTLKQRFHGWLHRLLVQLTQNKFVEVGGKVELVYPRGTSSWAYDGSGQLKRTKANYALATFQNGKRYNADLNGSSNIAARYWAYKLKLAYRNGRQLLSSKSSGSKSRMPIVLSHLWDLDATLHLLDRSVEHSLARKVY

SEQ ID NO: 59664 - protein, 443 aa, unknown
  TnpB Polypeptide
MQKRKFTVVTQLHENNNIDLIEYVDKTRGLYTKAMRETFHVLKRVDNLNKSSYNTHLQNKYDITRRTAGSILSDAQGRLNALTELKKYEKSQLIRKINHLENTVIPKLVTKRNDNNIKLQQKSPVSLVKHRNLRHEIVAKKSKLNRLKQKLEHLNYQIETGLLKLCFGTKHLLQRNYEQFVNQRDSQMSFIGSKTEKACNQMLQLTYNSKNNQFEIQLRKDFGFKTAKGDDRYVYGKVYFRHHKNRVISILRQGNSPLSYKIIKKNNRFYLCCIFEIQVCDEDFITHSSHGTIGLDFNKGFITLSETNQYGHLVQTQFLPYRFKAGHKTKTDLQCIANHVMTLARTTGKDVCIEDLNFKNKKAQTESKHGKKYHEMLHSFAYQQFMTTIESCAYRNNIYVNKVNPAWTSWLAKQRYCPTMKLNSHVGASYVIARRGQGFKDSV

SEQ ID NO: 59665 - protein, 441 aa, Caulobacter sp.
MTNNQGVQPKAASLQVRKQPKLIGGVLKAFAFTLAPTPSQEEAFGQYAGVSRLVYNLALEQRRDFWRQYRRAHGKGISFASQSREVTALRQEFDWIRAVHTDVTTAALRDLDGAYAAFFAGRAGLPTSRRLGVNDSFRFKSAYVLQRTLNAKWAEIRLPSIGWVKFRSTRPLPADMRTLTVSRRGGGWVISIVCAVEAQASVDGAVGVDRGVAVAVALSNGEMHAMPASLARLDARKRRAQKVLARRKRGSMRYAEQRAKVASIAAQTARVRKDFNHRITTHITARFGTVVLEDLKIKNMTSSAAGTLAEPGKGVAQKRGLNRAILNQGWGQFEAFLAYKLEHRGGHLIKVNPAYTSQTCSDCGTIDKASRESQARFACVACGHAENADTNAAKNILRASSSWLDVEGQTTDPAKRQPEALRAENRATGDAERAPVKSWER

SEQ ID NO: 59666 - protein, 386 aa, unknown
  TnpB Polypeptide
MLKTYRYRLYPNKSQEQALQNMLFLCCLVYNRCLAERRDAWQNERKTLTAYDQINKLPLWKKEDPRLKEANSQVLQDAVRRLDKAFQAFFRRVKAGEKPGYPRFKSERRYDSFTYPQGNFRIQNRRISLSRVGLVKIKEHRPLQGKVKTLTIRRQVDGWYACFSVEVEPVILPPSQKAIGIDLGVESFAITSEGEFFPAANHLRKAEQKLKRLQRIVTRRRKGSNSRRKAVKLLARAHLRVANQRKDTAHKVSRSLVNRYGLIAVEDLNIQGMLSNHHLSKSIIDAGWRIFVNILKAKAAEAGRQVIEVDPRNTSQDCSGCGVLVPKTLSQRWHACQGCGTSLHRDVNAARNILRKAVSLTQIWARTEPSGIASVGWLDDPRSPAL

SEQ ID NO: 59667 - protein, 593 aa, unknown
  TnpB Polypeptide
MTKKSKKKERKIKAYTISNFANIGKIHNTYQVFKLYRVDAEKINLYYQKAFFRNEKIGRNDNSPISNLIAKGRWRQTIQYQVFDQIDAHQGQLKDAFVKLAFRSSLDKETIHQLCYINKAGLWQANYLQLKPAYQAKISPENLKLARHIFKHLRETHRWPTCLNWKAMKLDAKVAIISNRGGCLGQSQKKGQAKKADYWIQLSTYQAPVEIKEGEKPENKIIQIPLSTNDYFQNAPGWRSNNCQIIFPQDDDKEMTVKFIRSEIKKDKNVTNVEKYLAFDLGVSTQFATNYGDRLGQHYKKQLDYFDNTKGGIAKGLTSRNRSNQKKTLVDGIFRPYLDKQQNKRYRALDRRHTQFVKNETGRNTNKLITIHQPTILDSEALNFQGSDLSCQMNRHLHRFGQGRIEEKIKEFLFDGVIKEHRKKNAPYTSKTCNKKKCGYVDAKNRDSKDRDKFECLACGGKAHGDVNGAKSVGDGSSVSGDTRSELLAALVKTSVKNLQAKPLSQDALRSILANPYYRDYHQDFQKRLRSPREQESGNKGRLSSVEKVLPLVAPSLDGTSLSCPNRRDEHESTQSSRLGSSRPRASTTKEFS

SEQ ID NO: 59668 - protein, 519 aa, unknown
  TnpB Polypeptide
MEHLIKTVELKIEDVSVYSILDNLGNYYSHIERVLYNYLYDKDITNGVLNSLKSQYIVKYGISARLFGAMYIVVKGKMDGAKKLHKQSLKDAEVRIKGLKEKIKKCENRLKTSKKLTKKDKDRLWLSVSQWKQKIDRLNQYINFQKPTKMLFGTKALYKKQWTVEKYSKNREVWLKEWRRKRDFHFCFVGSKDETSGNSLCQYHRENDREFLQIRLPNAMIEQCGKYVNFEVATSKPYYSDFHTAVLAGTALTYKFLKKENDAWYAHISFTLEKELQKTITGCSGIDINYGLIANTTVDRNGNFVGIQNYPCDPEFLTSEQMEDLISTQLSEIVNNAKINGYRISAENLDLSKKKLFKYDKITNRKIHMIAYGKIWNLLISKCFKAGVPLIGVNPAYTSFIGHFKYEKMYGLSRHNAAAMCIARRGLGLKDKLPAFIASVLQSGEESKRKTKKASLRTSWSQVYRHRHHWAHWAYLKKNLERCSSVLADAEDPGGSKATFEDTLTSRFNPSYLSFVGRS

SEQ ID NO: 59669 - protein, 615 aa, Rhizobiales sp.
LREGDGSSLACVLDQYAALMSRAERLLLGRLKAGRVWTGDLKVSFYQHLGLSSTHLDMAYRQLQAKLKSVAELASDRVKQLTGKIASKRTDIMRKDKALAKAIAERSKLPEELQVLQGKIAKWRASLATVKDSMRVKHLFVLKQHLEQWHAKTAAKDAIRRSIHALRAALHQHRRRLEILEHRKAEAQRQAADPTMCFGSRKLFLAQFALAENGYGDVDAWRKDWQSSRSAQMTIDGNASKECGNQFARLRRRKGGRYDLELRLPKALAHLSTRSFESAGHDVDCVDFTGLCFNHGDEVIQQAIDARRPVTLKFRRDDTSWRISVSVDDRIEPAMVDFSCGALGVDLNAGHVSAALVDADGNPVESFTFPCVTYGRSSDQGKDTIRKVAAQIAALADRLGVPVVSEKLDFARKKATLKDSDDARYARMLSSFAYSAFDAALASACLRGGVGHRRVNPAYTSIIGRVKFARRYGLSVHEAASVTIARRAMGCSERLPRSEDGTVTAPANGSVHVTLDLPVRNGSRHVWTEWNGLNKEYQKKALAALGLSGRRSRPGWRPKTSSGRGGEPLHGPSAEAGRSRWTPLQSRDPGVGRVPGKGSCNESRHQVEHSCFNHA

SEQ ID NO: 59670 - protein, 515 aa, unknown
  TnpB Polypeptide
MLTYKLKLKQNINIDEYLKQYSKCFRSIFNNLELVEDKEFNKSLKSKFDLLDSWFIQCAKIEAKTKYEQIQTFNKKKLIQINNINNLIENKEYNNKKHLYKLKNKLSFLNRAINNNIVFGGKTLLQNITKLKQQNKIDEYLAKLKEFKSKRILPIVSIGETPQKSNRKFNFDLINNQLTFKPNNKAKIDLEFICSNKQQLILNQLQEMVGITPISVRLDNKFVYIIFDEQKLNNYEFKKLDYFKEIKNIKDKEIRKNIFKKYCREQEDRKVIGKIKDRFMAVDLNPEYIGLSIMDKKNNKLIYKEAIDLTKLNTKLRLSSKDSKQEKQNNKRKHEITVIWKYIFNLCKHYKVSNFVIEDLEFKEKNNKEFSKEFNRKTKNLWHRTLTINLINKYTNMHGINLIEINPAYSSFIGNLTYDYFDPISASIEIGRRGMCKYEKNNKQFGSIDSINLEKVKSYLLNENVQLDMSEMTIPKLFKVFSENNIKYRNVLVEEGIKENYLSSYKSKAKCYNFI

SEQ ID NO: 59671 - protein, 515 aa, unknown; identical to SEQ ID NO: 59670
  TnpB Polypeptide

SEQ ID NO: 59672 - protein, 452 aa, Mycobacterium sp.
LNGRIQRSRPVGGCVYGCDVQRRYRYRFEPTSSQQAMLARVFGCCRVVFNDAVRLRTEAYQSGIKLSDSEIQRRVITCAKNTSERAWLSEVPSVALVQSVNDSRRAWRNFFDACTGKRKGRHMGRPRMKSKKDHRQSFRLTRSGFNLRPNGRVFLTKVGEVSVRWSRALPSTPSSVTVIREPDGHYYLSFVVEVAPTPLPAVGHEAGVDMGITRLATVATSNGGRTEVPNQKHLARKLRKLARLERVKARREKGSSNRDKVRREIAVVHNKVARTRRDYQHKQALALVRENQVIHVECLNVAGLVRNHRLARAISDAGWRQFTQIITEKADQFGRSVHKVSRWLASSKTCSDCQYQLEELPLHVRRWTCPACDAVHDRDHNAARVILAAGRAERLTASHASGQVRRREPGGAPVRPPTRRQGVDEAEASRQRLSRSGNPCPFRSGCTSKGRM

SEQ ID NO: 59673 - protein, 427 aa, Halomonas sp.
  misc_feature (70)..(98): Xaa can be any naturally occurring amino acid
VSSSPAATFVRSPVSTARFSTRAGTRSGANSTTSWPGAGRTWSSCHRTIPAAPAPSAAMWRWRIDPARPXXXXXXXXXXXXXXXXXXXXXXXXXXXXXPLQQSLKDLDRAYAHFFAKRADFPRFKKKGLRDSFRYPDPKQIKLDQGNRRRYLPKLGWLRFRKSREVLGAVKNVTVSPSGGRWFVSIQTEREVTVPAPTGGAVGIDMGVARFATLSDGSHLAPLNSAKKHQVALRKAQQAMSRRTKFSSNWKKAKARVQKIQARIANARRDYLHKVSAMISQNHALVVLEDLQVGNMSRSARGSVEQPGRHIRQKSGLNRSILDQGWYAFRRQLDYKLAWRGAHLVVVPPHNTSRTCPECGHVAVENRPSQARFVCVECGFAGNADHVGAMNVLRAGHARLACEVSGAVRPPAAGTHRSDSGAASCRA

SEQ ID NO: 59674 - protein, 602 aa, Halomonas sp.
  misc_feature (40)..(135): Xaa can be any naturally occurring amino acid
  misc_feature (520)..(547): Xaa can be any naturally occurring amino acid
MKPVRRSWGMRLCAKHSPAGATATTRRGSRMGRSTPCSSXXXXXXXXXXXXXXXXXXXXXXXXXXXXXXXXXXXXXXXXXXXXXXXXXXXXXXXXXXXXXXXXXXXXXXXXXXXXXXXXXXXXXXXXXXXXXXXXKSAACPVLLVRGRIARAPKAPYSTGCIDSSRCFMQRLQAFKFELMPNGEQVRKMRQFAGMARFVFNRGLALQKERYEAGEKKLGYAALCKALTGWRNSDDTPWLKDEPIHPLQQSLKDLDRAYAHFFAKRADFPRFKKKGLRDSFRYPDPKQIKLDQGSRRCYLPKLGWLRFRKSREVLGVVKNVTVCPSGGRWFVSIQTEREVTVPAPTGGVEGIDMGVARFTTLSDGSHLAPLNSAKKHQVALRKAQQAMSRRTKFSSNWKKAKARVQKIQARIANARRDYLHKVSAMISQNHALVVLEDLQVGNMSRSARGSVEQPGRHIRQKSGLNRSILDQGWYAFRRQLDYKLAWRGAHLVVVPPHNTSRTCPECGHVAVENRPSQARXXXXXXXXXXXXXXXXXXXXXXXXXXXXPPAAVSEGSGSCLRPLLRQAGRFPALQEEGAPRQLSLPRSQADQARSGQPSPLSA

SEQ ID NO: 59675 - protein, 300 aa, unknown
  TnpB Polypeptide
LKKLNGNGKKKWVGFPKYKPSHKYKSITYPQVYKLDLIGNSRYRKIYIPKIGYVKIKWHRDLPENARIKFFHVIKHADKYYISVGLEIDNNIQPKEINTEKIVGIDVGLEHLATLSDGTIIDFPKYFKAMEWKLKLAQQILSKKKKGTKAYENAKIKVERLHEKILNLRNNYLHQISKQIVDKYDVIVVEDLNIMQMLMKNKSELNKEITDASWNRLLSFIEYKAIKNGKRVIKVDPRNTSQICCNCGNIVKKELKQRMHICPYCGIKMHRDLNAAKVLQKLGMSLLFDTKSEVQQINAG

SEQ ID NO: 59676 - protein, 521 aa, unknown
  TnpB Polypeptide
MFVSLQFKLELKSEDKEKLIKLMRRQSSAIRTAYNMLKELEKEETKNPHAQIYQRLRQLFPGLPTKYIDSAIYKAKQYPTDKPVVFGSKRLFEKLCKNHLTGKAREKLKKQWRELRQGTLISIGSKSDKGNRLTRFEDLNEQLHLRITTGNRKFIYARVLREPSNSKDKWLTFMAMLLENWQTQNYFAYTVELKLRDGEVYGSVSFEIPTPEVKYTKENGVIAIDINASPIHLAVAEVSKTGELLSYQTISLHHFLELSQNSKDHQEWILAHKIVDLAIEKGKAIAVENLKKLKKGTRGDGKATLRKRLHHWNAKKFLQKLKRVAMIKGVEIVEINPAYTSVIGMLKYAPQLSIDKDIAGAYVIGRRALGFKEDMPKNYEKLLKDRAYLEFALKRYEEREKELKELLEKESNEYKRNALRSELRSVQNAKKLLTNLVQSLQSEPSSCEGANGRNPEQGETKKVSQVAWQVLKVALLFPILVKVLPRDLSPLKPVLVEGAWDRVRSRLVPLEAGGTVLMKDF

SEQ ID NO: 59677 - protein, 373 aa, Blastocatellia sp.
MKKAFIYKLRLNRAQEAKLSEMLETCRHLYNHALAERKEAWEQEQQSVCFAAQSASLPLLKQENAYLPRVHSQVLQDVLHRVDRAYQAFFRRCKTGEKPGYPRFRGRGWYDSFTFPQWDNGAKFADGRLVLSKIGSLRVCTDRPLEGQPKTCSIIRRADGWYATIVCEVEPVALEPTGETVGIDLGIETFATLSTGEQVANPKHYRRAEQVLKKAQRRVSRRKKGSNRRRKAKVLLAKAHLKVKRARLDHAHKVARELVERFDVLHVEKLNIRGMLKNHPLAKSISDAGWGLFLNILRSKAASAGKTVVEVNPAYTSQVCSHCGERVPKKLSQRWHSCPYCACSLHRDHNAALNILQKGGGTAIGERLATATS

SEQ ID NO: 59678 - protein, 418 aa, unknown
  TnpB Polypeptide
MLTHRTLVFPVEPKDSRLTWIQQEFRLLVNKSIRMALQGDIRSRARLNRVGYAILSRDHAVYKQYIPSAFEVALATLKVYRRRLREGKSSSIPYMHRQMLKAENQSYRLDRATGRLRIPLRAREHIEIQLSVSAWHHRFLEDPEWELGSLTVVPGKILLVVRMVRPKTYQPTAAIALDTNEDSLDGVIASDGSAACVIITLGGIRQVQEVHFRRRRKLARKKANDRRVKQKLLRREGLRERHRVLQRLHRTSKAIVSLAEQRKAAVVLEDLTLHATRSHSQRMNRRLSSWPRGEIHRQIEYKAALEGVPVIKVNPAWTSKTCPVCGARRRDRVGKVFVCLMCDWEMDRQINAGLNILKTALASNEALARAVRFQPGALRHDVVISLYDLFRRGTGAREEPSGVESSRPMGRRQNPKRT

SEQ ID NO: 59679 - protein, 286 aa, Psychrobacter sp.
MQLGDAYNNFFKGLAKYPTARKKGRDDRFSLSNDQFAIKGKSIRIPNLGWVRLKEALRFDGKIMSATISKRGGKWFVSVAVEIQKAVIPTKKTGKSVGVDLGITDLLVLSDGTKIKAPKPLQANLKKLRTLNKALSRTKKGSKNREKAKTKLSRLHYKIRCIRQDSLHQITTSLVNEFDVIAIEDLNVKGMVKNRRLSRAISDLGFFEFKRQLIYKATEQGKVVKSVGPFYPSSKTCSNCNHILGKDELTLKMREWLCPNCQVSHDRDLNASINILNNATVILTAA

SEQ ID NO: 59680 - protein, 230 aa, Psychrobacter sp.
MPRFKRKSDGCDSIRLVQFDKYCRVEGNRVKLPNGVGFVKFKKSQDIIGTIKNVTISKKSGHWYVSFGTERALSENPTHPSKSAIGIDLGITKLITTSDGQYIKPKNSFKANQIKLAKLQRQLSKKVKFSENWKRQNRKIQKLHNHIANIRHDYLHKITTTISKNHAMIACEDLKVANMSRSASGTMEKKGRHVKAKSALNKSILDQGWGMMVNMLEYKQQWQGGLQTVK

SEQ ID NO: 59681 - protein, 508 aa, Janthinobacterium sp.
MTKKSTPTFIHEMPLRVNRMQLHAVVKRFDVAHFPYNAVVQDMLGRLDAMRADPRFGVACKMPKKELADRAPRNALFAALRTEYRFSEFAAHEVVAKHIRASGYLDGLIDSHTAQTLASRAFDACHKYSTGLRGRPRFKRRGEIASIEGKGPTSPLQWNDDHIGWGGKRRDRRLVLRPIFDKCDKQGVEAHALSSKIKYVRLLRRRIKGGWKLFVQLVCEGDPKQRFEVKQQEVGIDLGPSTAAIVSPERAVLVSFLPEIKEDLAAKRVLQRALDRSRRATNPHCFNADGTWKRGQRQTVYTQRYQQLRTCLAERERVMAKRRDRAHGRLSNIVLRDFGNAIKTEKLSKVAWQKRWGRRMKATAPAMFMNKVDRKAGNAGGSLTEFNAGRYKLSQYDHTQRNFKKKPLSLRWHVLRDDSGQAVQRDLYSAWLALFVQADRLDASQAQNVWAVAYPLLERAPSSLVKAASWTPLVSTRPLEGVRAIRTLEQSERRARSLVKSEESCGTL

SEQ ID NO: 59682 - protein, 312 aa, Ruminococcus sp.
MNKAYKFRLYPNEAQRNKIQNTIHCARFIYNKMLSDKIEYYQRTGKKLKNTPAQYKKEFEWLKEVDSLALANAQINLQLAYEHFFRNQGVGFPRFKTKKHSKKRYTTNCVNGNIVIQDDHIKLPKIGFVRMKQHRMIPEGYKLKSVTITLSASGKYYASVLFEYKEEIEEVVPESVIGLTYSDKELYIDNSGEHCLYPSYCRPTAEKLRREQRRLAKMKQGSKNRAKQRVRAAKLHEKLANQRRDFLHKQSRQIVNAYDCVCVKSPSGAAGYDADWGMFIIFLKYKLTDAGKRMIWGDSSLSSEMLYVRQAV

SEQ ID NO: 59683 - protein, 308 aa, Enterococcus sp.
MKKLKGYRFRIYPEEDQRQFFIETFGCVRFTYNHLLMAKKDKTVESLTPAQLKKDYPFLKKTDSLALANAQRNLDRAFSNYYRGRAGYPKLKNKKAIWQSYTTNNQKNTIQLLNGTLKLPKLKTAVKVEQHRVVHGLIKSATISAKNNTEFYVSLLCLEEIQPLEKTGEKTIVMFHPTTFIQTDANITLPTLDLNPLNQKIEKEQLKLVRRKKVARTRGVALSDSKNYQKQKQRVEQLVLTKSNKKINFFDHLTWILVQQFDKIAISTPAPEDFCEEALYSPSDWQQFLIKLHYKTDWYQKELHQQQK

SEQ ID NO: 59684 - protein, 358 aa, Methanococci sp.
MKKSLVMKVRESLTTHAQMKIEQSLVDFRNAVNDWIRISINNGWITTRTLQKFGYKQLREKYSNLYSAVLLEAMDVAIGILKSAKSKGIVPEFDADVICFKNQHYKLHSSRVIVPLCGEKTYIPLYIPKKFRKYLANYKLGRLTIFKRDDWYYISISVKIEPPERKVTNVIGVDLGVYNFVVVADAKGRELLRISGKDIIERKKLLEYKYSVKQQRARRYSKNRVIGHKYKNYSKYVNHCIAKKVVEIAKKYNAMVVLENLKRIRGKSKSLRRLFRKWPYFDLIQKIEYKAKENGIPVVKINPRNTSKTCSRCGYVDRKLKNERIFVCPKCGLRIDRDLNGAINIARKVVPPPPYLRA

SEQ ID NO: 59685 - protein, 246 aa, Clostridioides sp.
  misc_feature (18)..(19): Xaa can be any naturally occurring amino acid
MQNSMKQEPCDFSHGRFXXGRILNATISKEPSGRYYVSLCCTDVDIEAFENTNNQIGLDLGIKEFCISSCGEFIENPKYLKKSLNKLAKLQRELSRKTIGSLNRNKARLKVARLQEHIANQRNDFLQKLSTKLIKENDIICIEDLQVKNMIRNCKLSRLISDVSWSEFIRQLEYKANWHGRQIVKVGKFFASSQICNKCGYKNEEVKNLNIREWICPSCNETHDRDINASINILKEGLRLITIQNK

SEQ ID NO: 59686 - protein, 339 aa, unknown
  TnpB Polypeptide
VTIVGKLIVSDGVSASKLLLLMRRFRDSVEMAHNTTSKRQLGESEVKRRITRYLSNAWYASSAIKMSKLYEEQDHLRLRKPFLYSLGSRDENGNRNIKFVSTDRVLIKIPHEDGRHEWIECKALFAKKHIPVIEELLRGRYSYSAGVAIKLRKGEDWRSVWRKRLVIYISIPVELYIKHVKPKNVDVAGTVNSNWLLAGFDFNVDRVCMAIIDPAGRLRDARTEFFSNAANTLKEVSENARKVAVVKLVKYAVAHGVRYIAVEGLRRPSRVEGRVGKWAHRQYLQHLKVLAKRFGLEVIEVNPAYSTIDAIGIALTLGLDKHTASAYIIALRGLAHKSM

SEQ ID NO: 59687 - protein, 381 aa, unknown
  TnpB Polypeptide
MPNEVEFTLDNRYVVKIGDERFYNLMGETMLSAFNGLVHPDDVMVFEQFINSDMSVRYCIVRCLIKNGSYRWMLLVKKRIYEVGTDRMVELVAQDIIVISNDFDMYYHRVRKYRAIINVIDEKIFEYDPVSGMITIYCYRNNKSEIFDRTSLKEWKEACITKGFVTGDDAVQFEALCTAIASGMNNFIVKLSSSVMSKGERVDNLIFRGQSLLADGENRITVGVISEPDRRTRTVQEYVGVDEAKLDLATGIYNKKTVTDMITDYINKTIAEIVKTKPSYITIEDLNVKGMMKNRCLSKAVASQKFYEFRTRLKAKCDENGIELRVADRFYPSSKTCHHCGSVRKNLKLSDRIYRCECGYVADRDLNAALNLKDAKTYRIA

SEQ ID NO: 59688 - protein, 459 aa, unknown
  TnpB Polypeptide
LITLKIKYEIEKDKKERILEYIKNYNSVFNCLLNYFQDQNKVLSTKDSFAFIKSLNNIFVDTRFQNGALKDAKQTFNKFGNKKLVFGGKKLFLDRIKNLISKEEFQLKRLRPLQVVGAANNKGNCKFQLFSENKILFKPTRKEHFILQLKNVGKNYEKKLKALILTQEKRELPITYKLDLEHVYISFDETKIEKVNIRPKLKNRIFAIDLNPNYIGWTVVDWKSENSYKLIKSGLISLKSLNDYENSLKVSSDSPKKKYVVNKRKFEIIQIGYELTKLANNFRCEIFSLEDLNIKSSDKSKGGNFNRLVNNQWNRNLLVHILEKNCKLYQIHFQKVMANYSSFLGNLVYREEKLPDPCLASIEIGRRGYEFYHQYILKDQEKTKNIIFDKLENVRDRITKSLEEFDYSDTFDSLSGLYYKVKKRKCNYRFSLEKALKEHQKSFSSLKHSKSYTIFYNFV

SEQ ID NO: 59689 - protein, 387 aa, unknown
  TnpB Polypeptide
MTRGTNAIRATVSMNIALTNSLLVFSKNYLEALRYVLYWLKEKRINPNKRNILSIIHKALYNTLKSYNLSSKIAEDCYRNAISIYKGWYNNPNKGRFPRIFKPTIWLTPKLSYTVNFNDMFVKISKIGEFKILGYPKNYKEYLSWKMKEARLVFNNGKAFLKIVFEKFAQKIEPKGSIAVDINMQNITVGKDDKNYVSIPTRINEIHRYKSLAEMLQIKYPKKWKENKNIKRRITTFHVKAKNIAEDFARKVSKRVIDEAIKMNANVIKLENLKYMIKHVKKLPKEFRDKLYLMQYRKIQYWIDWQAKKHGLLINYVYAAYSSIKCPKCKNKMKEISYRWFKCKCGYENNRDIIAIMNLNGRGSLSLSTAPQMRDVAPNQLRGTLAF

SEQ ID NO: 59690 - protein, 382 aa, Paenibacillus sp.
VNAMLRHKAYKFRIYPNKEQEILIVKTIGCSRFVYNHFLNLWNKEYSETGKRLTYSVCSKNLTELKKQPETAWLREVDKCSLQNSLRNLADSFSRFFKKQNNKPQFKSKKNPVQSYTTQFTNNNIAILEGHIKLPKLGPVKFAKSQEPKGRILNATIRKNASGKFFVSILCEEEIYVLPKTDSAIGIDLGITDFAIFSDGRKIENNKFTSQMEKKLKREQRKLSRRALFAKKNGINLYEAKNYQKQKRKVARLHEKVMNQRNDFLNKLSTDMIKNHDMICMEDLNTKGMLRNHKLAKSISDVSWSSFVTKLHYKADWYGREIIKVDKWFASSQICSECGHQDGKKSLNIREWTCPICHAHHDRDINASKNILNEGLRIHALA

SEQ ID NO: 59691 - protein, 417 aa, unknown
  TnpB Polypeptide
MANQVTRTYVASIRNHQQVRDDLDSLGFVASKLWNVARWTCDRIWGETGTIPGDSTLKAYLKNHERYADLNAQSSQAILEELAEAFESWYAHRENGNAEANPPGYRKRGDDHPRSTVTFKEDGFKHDPDHGRIRLSKGSNLKESWSDFVLCEYATDPDVDVQNVQQVRAVWADDEWELHIVCRVEIGDPGPPGDRVAGIDLGICNFAAVVVGDDTFLYPGGALKEDEYYFQKERAKCDDSVSRKARRLDNKRRARRRHFLHAVSMDVVTECAARNVGTIAVGDLSGIREDADWGDHGNLDLHGWAFDRFTEMLEYKAAERGICVERVDERNTSKSCASCGTTDDSQRVERGLYVCNDCGLVANADVNGAENIRQKVLPNLACDGGDRDNGWMAQPAVRLFDKSTGRVRPQEQVRRKP

SEQ ID NO: 59692 - protein, 394 aa, unknown
  TnpB Polypeptide
MSARGNPPRLGGGTIRAFLLFIVKIMVFIAQTFNIMDKMRRTIKLILPYDKRIAETVRVYNQACNFVMQDGFRSGTYNKLKLHRATYRTVRKRFPTLNSSFVCAARDQASDMLKREKMKRLPVKKKFSAIRFNHNTFKPFLKKGEISISTTFGRIKLPLKIPDYFTPYLNWKISAATLAIKNGQIQLNMSAETENPEKVKIIKALGIDRGIINPVVTSDAQFFNSRKIRAVKGKYQWLKSALQSKGTRSAKRHLKSLRGREQRFMRDVNHCISKKIASGDAQLVVLEKLGIRRSKKNGKRFNRLLGTWAFRQFEEFLKYKAEALGKSVEHVNPKYTSQKCSVCGQVRKANRKGVWYRCKGCGLTLNSDLNAARNILALSKLFEREAAVNQPIVT

SEQ ID NO: 59693 - protein, 395 aa, unknown
  TnpB Polypeptide
MVDFRLLVNECLREMLRTRMTSRGAISRYARTRALETRVTGTIGLAAADVARSLAGGHRRRLRDGVVSRVPYVRRLFVRVPEKSFHFDLDFGRLRLSLRRGEWTSLTVPVSDHHRRVLADPTHRVTQVYIGLHRVVLVYTQKGPEPYIPTSLVALDTNESSLDGVQVTPESAGYVRLLFPEIRELQFRHVGRRRYLGRKKAHDRRTSRRLLGREGMRERHRIQSRLHELTRRLIDRLAANHSALALEDLTNLPRPRRRGGRGRPPALGSRTFRRRLSSWPRSEFHRQLAYKAQDRGVPILWVNPYLSSRTCPKCGEISERRRRVGIRFDCAKCGWSLDRQLNAGLNLGMTVLRTTAGLGGLRLDPDALPQDVVRPLYGSDECRPARVERTGREGD

SEQ ID NO: 59694 - protein, 337 aa, Scytonema sp.
VIKVLKAVKVRLYPTTEQQEALAKSFGCARWNWNYALNACIQHYQETGKTLKLSIYKAYLPKLKVEYPWLKEDCYSAVLQCVAINLNKAYTNFFEGRAKFPKFKSKHHKQSIQYPQNVKVVGDCLEVPKIGVVKAVFHRSISGKIKTVTISKTPTDKYFASILCEVEDSASQHRGDKTLGIDLGLKGFAIVHDGSEVTKYSNPKHLKRHEKNLARKQKKFARKVKGSNSRNKYRKLVAKVHERVSNSRQDFLHKLSRKLVDDSQVIIVENLHIKGMVRNRKLSRVNIRCGLGNVHQFLRLQVESKERTTRRNSCVLPQFQNVFILWSCHRRVNAGYS

SEQ ID NO: 59695 - protein, 330 aa, Scytonema sp.
MLTMNYTYRIYPDLHQSAIMLDWLETLRKVYNRALRELKDWINSRKCLSDRCSIEREYIIPADVPFPSYHRQQNDLPKLKQSWTDLKNVHSQVLQTTIRRLHDTWEAFQERGHGFPRFKKFGQFKSFVFPQFRENPIVGNCINLSKIGSIPISLSRPIPDGFKVKQVRVLSKARGTQWYVVVSIQSDVSVPDVPFHGRAIGIDLGLERFATASDGSFFERPKFLKSQHRKLKLLQRRAARKQKRSANWERATVKVARLHHHIADTRKDFHFKTAHKLCDQAETIFAEDLNTVGLNRGMLRKDCIDASFGAFLRLLEWHVSNLSELRRNGA

SEQ ID NO: 59696 - protein, 452 aa, Halobacteriales sp.
MKRTNTFAVRPLSDDGEQLLRDLLDASAALWNEVTYERLMRYNDEDSFEGEDVWDADTGQLEGKYKGVLGASTAQQVIRKNSEAWRGFFRNKNKYHDESNTSVTEHPEPPGFRGNEDDGRQLKGVIRKDAYTVEWGERSRLEILVGSELKDRYDHTGRLRLEMAGDANWPDYEKQGRLDLWYDETDSTFRASQPVTVSDGARNTPLASEQAALDIGANNLVACTTTTGQQYLYEGCELFQRFRETTRHIAELQSKLPKGRYSSERIRRLYRKRTRRRDHAHEALCRDLLERLYEDGVDTVYIGGLTDVLETHWSVETNAKAHNFWAFKQFTERLACTAEEYGISVEVRSEAWTSQECPRCGSTDRTTRHQDTLTCPCGFGGHADLTASETFLKRHAEQAVRPMARPVRFQWDDHNWSESPRSPARASPNEQRTDPSTVHRDGNIASGETQAG

SEQ ID NO: 59697 - protein, 434 aa, unknown
  TnpB Polypeptide
MPEVTKTLELKLVEPTANKQRKLRETVREYRAALQAAFQADCTTQSAANDIVVEYDLSGYAKNALKQFVPQLCGDSYDADELDDEHPVKFTNEGPKLDHKPQNHYEWYCKVPHHEDYDLWLPAAVNPEQLPWLEALHAGDAEMGECRLIDRGGEWYFHLTTTRAIASESESESASAERTPVGVDLGDAALATVCYRDERGTPTAPNVFSEEGKTVRKLRKTYFTATRRLKRRGSERLAEEYGDKLWRRIETILQEVSREVVEDAQTVDDPVLVLEDLTYIREHMDYGAFMNRRLHGWAFAKLHSQITYKAQEQGIPVETVNPRNTSKECHACGEVGTRPDQATFRCTTTDCWVADYQADVSAALRITDKSRYRSGESQPQTCSDSGQKAAGDDSATDGASLTGPQDTPGDSEASTQRETGSAGSSLDDPGTHAS

SEQ ID NO: 59698 - protein, 268 aa, unknown
  TnpB Polypeptide
MAAFRDIPRAKAIKQIEVSEETGSFYANVTCEVISEQAIKTGKTIAFDPGVKTILAGFDGEQFISVDGKAIKKTQKHHAHALDRLQSRIDRSKNGSKRHKRLINAKKKVLRKRSARVKQISHCISKTLASMEYNAYLIGDWSKKDSLADTKSRKGDRIINRAVQNQLPLVKLIGYLSYKTALKSKQVRKVNEERSSQTCSSCNHIQEIRLTQRIFRCEHCGAKINRDDNAAINLYRWNAGPVTGPFDSLERIRLRFVFGRFNACLARV

SEQ ID NO: 59699 - protein, 465 aa, Tepidiphilus sp.
MQLTHKIALRPTPEQADYFHRACGTARRVWNWALAEWNRQYSAGLKPNAMALKKQFNAIKYSDPQWLDEHGRPWLKTIHRDAHAQPFAHLQRAWSRFFADLKAGARIAPQDKAERRALREQGVKLAYPPTFKKKGRSRDSFYVANDKFKIEGQRIRLPLVGWVEMAESLRFDGKIMGATVSRTADRWFIAIQVEVPDAQFYRQRTGQGVIGVDLGLKAAATRSNGERIEAPKPLKAALRRLKIRARRLSRKVEAAKVAAGFAPKASLPKGTRLPVSNNRKKSAAILARLHARVANIRADFTHKLTMRLTRENQAVVIEDLHVQGMLANDKLARALSDVGFGMIRRQMEYKAKRYDTRLVIADRWYPSSRLCSVCGWQHEELTLKDRQWTCPNCGTDHDRDLNAALNLKRLATETALPVASPSGNGGTTTEGVSAVVGKVTLVRHEVGPQGASGQEENRAHNRALS

SEQ ID NO: 59700 - protein, 370 aa, unknown
  TnpB Polypeptide
MSKTYKYKLQSQKNTLKLGNMLDDMWHIHVHIMTLQRRYYRRHKKNISAYRMNRHVTKLKRTTKPHWRQLPSQVIQDVVLRYGKAYDAFFKNIKEREAGLTTRKVGRPHIKPRHKYNSMTFTQKGYTIYDNRFKVNCIDTWYSFHKHREMKGEIKTITIKRDRCGDYWICFSCDNVDDSEPFAKTDKRAGFDFGLTTFLTSSDGGKIESPQFLKKSLNKLRSLSQAFSCKVKGSGNWYRALRAVCRQYRDISNRRLDWHWKLATHLCREYDALVFETLNIDGMKRLWGRKVSDLSFAQFLPIMEQKCAKHGKTFKQVGKWTATTKPCSDCGYKNKDLTLLDRQWICPECGTHHDRDINAAINIKQAGLAA

SEQ ID NO: 59701 - protein, 409 aa, unknown
  TnpB Polypeptide
MIVGKKIRLHPTSEQETLFWKSAGTARWAYNYFLIRQEEVYQEYLVNGQKGRRGISEGTVRKEINRVLKPTTHAWLKDIGSNVMKQAVKTADKAWKKYLKGLAWKPKFKSKKMTKPNFYVNYESLSRKNGGFHGEKIGFVRTAEPLPKLPHKKHYLNPWISFDGKYWYLGFSYEVEAHRESLTGDHIGIDLGVKSLAVLYSVDTGQSKVIKNINKSRKVLRLEKKLKRAERKRTRQLKSNVLRYEPIQRDGKRPGRKPVWKRPVPECKNIEKQRRKIKLIYRKLKNIRVNHLHQATTAIVKTKPSRVVLETLNIQWMMKNKHLAKAISKAKLYEFRRQIEYKCQKCGIEVVFADKFFPSSKQCSSCGEIHHELTLSDRMFSCSCGLHIDRDLNAAINLARYTPSKIAHN

SEQ ID NO: 59702 - protein, 378 aa, unknown
  TnpB Polypeptide
MRRTYKYRLYPNRAQAKALDFLLWQGRNLYNAALEQRIKTYQETGKGISCPEQWAHFRDQRNANPETLGKLNATSVQQMLRRLDKSFAAFFRRLKGGEKPGFPRFKGRNRFHSLEYRHGDGCKLRTGEGRPMFYVQNVGEIKVKLHRAVPDEATIKHVILKRSLDKWYVCLSLDMPDPEPVIHEGPAVGVDMGLSSLLTFSDGTTVENPRWFRGNLKKLRVCQRRASRRKKGSHGRRKASRQAARLHGRIANQRADFWHKTTRKVVNKYSLVAIEDLTLGFMTKNPHLALSTSDAGLGMFRQLLCLKAENAGCKVVFVNPKNTSQICSGCGKIVPKDLRVRIHACPSCGLVEHRDVNAARNILLLAVPRPGPDGAVRR

SEQ ID NO: 59703 - protein, 428 aa, unknown
  TnpB Polypeptide
MQLVEQHVIKCNDSRFAVIDAAAFKSKNLYNAGNYEVRQSYIHHGEYLNYNEVQRRMQLHEAYKALPAKVSQQVLMQLHHDWASFFKACEAYNLDPSKFTGRPKLPKYKHKTEGRNILVYTLQAIRGGQSKQGLKRGIIRPSQLPIEVQTKQKDIDQVRIVPRKGFYVVEVVYEKEVKQADVNPAYYAGIDIGMNNLVALTSNKPHFKSIIVNGRPVKSINQFYNKRKAELQQQLGHTGTTKRMERMTNTRNWRINQYMHTVSRRIIDLLVKEGISTLVIGKNDAWKQEANMGKRNNQHFVQIPHARFIAMLTYKAELVGITVEVTEESYTSKASLLDLDPLPVHDSNNGDEKHTFSGKRIKRGLYRASDGRKLNADINGSGNIIRKVAPDAFSKVEGVEDGKAVLASLVVHPVRLVVTPSRTQKGKS

SEQ ID NO: 59704 - protein, 438 aa, unknown
  TnpB Polypeptide
LQVVKTVRIPVHYAITRRKLSILDSLTARTTQGVYLWSQLFKEHRLEGTYADRRRFYEQVKAEAKLGTMAQCCFDTAAWMWWSYREAHKAWRRNVAIARRKGDRWWLRKLLRMEPQEPFANGMHGKVPIWFDSRFGAIEQSKHIKICSYVARVSTLRRGVKLTIPLNLAKYHLDTLEQGTLKSFQVVKRHGKYYVHVKAEFHVPDQPVYAIRGVDLGVKRSVASVMLRPNQPLRSSDFTIQTDGLKRGRLNRLEKRIAELQQARKWEPLKRLRHKRLHVSEQYDRLAAKHVAATSQNCLVAVGYPKGIKYTNPKGNGRAKLRKVLAHWTYGREIRYIQEECAKVGVPTEAADERWSSRTCHRCGSRYTERITQSIFHCWNCELVYNADYNSSINIGSPFLPMATTRRATDDLAYARDEQAREIVACKPRSPHPFMGGS

SEQ ID NO: 59705 - protein, 371 aa, Bacillus sp.
VNKAYKFRIYPNKEQEVLIAKTIGCSRFVFNRFLARWNDTYNETGKGLTYNSCSAELTHLKKELTWLQEVDSISLQSTLKHLADAFSRFFKGQNAVPRYKSKKNRVQSYTTKQTNGNIAIKGNKIKLPKLGMVRFAKSREAEGRILSATVRRNSSGKYFVSLLAEVEIQPFAKTGSSVGVDLGLKDFAILSTGEVFSNPKWFRTLEEKLAKTQRILSRRTKGSSNWHKQRVKVARIHERITNARADYLQKISTYIIKNHDVVGIEDLQVTNLLKNHKLAKAISEVSWSQFRTMVEYKAKWYGKQVVVVSKTFASSQLCSCCGYQNKDVKNLNLREWECPSCDSHHQRDINAGQNLKNEAIRLLTVGTTGIA

SEQ ID NO: 59706 - protein, 574 aa, Streptomyces sp.
MSGLREVAEPFVVSDPAGVAIRARLKRLAAQDEKVLVLVGAHLGALASRDLKARCADGLEHCADRWAARKRELTPVSSARWAGAITKASHDQWALARRCQLAHIQTLEAGIAAIAQRLARPVGAKGSKKAAGGYRSRQEWFAKSRRLQVLQDRLERERADHAAGTVHVVRGGRRLARARHHLEATGLTEAQWRERWEAERWFLQADGESGKRYGNETIRITPDGGLSIKLPALLKDLANAPHGRYVFTAPVRFVHRGTEWADRVEANRAVAYRIHYDTGRNRWYVTASWQIPPRATIPLKTALAHGLIGVDANADHLAAWRLDVHGNPIGNPRRFFYDLSGTAGHRDAQVRHTLTRLLHWAQSCGVAAIAIEDLDFAAEKTREKHGRRKRFRQLISGMPTGRLRARLSAMADATGIAIIAVDPAYTSKWGAQHWQKPLTTRTRKTTRHDAAAVAIGRRAQGWPIRRRTAPPPHDQSDRAGHRTAQARPAIPGREGPRPHVPGLRTRSVRAGRGANAGNQNAQHRSERSAEHEPWHQDSLPSVRRNGQPISSNALPLVSGTHLRMKGIESAAKTV

SEQ ID NO: 59707 - protein, 375 aa, Ruthenibacterium sp.
IERAYKFKLYPNAEQQTLIQKTFGCCRYVYNHYLAERKTAYEQRRETLDGYACMKDMTQLKKSLDWLREVDATALQSALKDLDAAYQNFFRRVKRGEKPGYPRFKCKRDHRKSYKSKRVGENIKVLDGAVQLPKLGKVKCAISKKVEGRILSATVSQSPSSKYFVSLCCTDVDVAPLQKTGGVVGIDVGIKSFAVTSDGVEYSNPKYLLKSEAKLAKLQRWLSRKQKGSRRRDKARLAVARMHEHIANQRLDMLHKLSTALVRENDVICIEDLAPSNMVKNHKLAKAVSDAAWGEFRRQLQYKADWYGKTVVAVDRFYPSSQLCSSCGEQWAGTKDLSVREWVCPVCGTHHNRDINAAKNILNEGLRLLAEQPAA

SEQ ID NO: 59708 - protein, 392 aa, unknown
  TnpB Polypeptide
VLVMEYKAVVKKAQSKAIDEAIRTSQFVRNKVLRYWMDNRGIGKKELYQYNTQLRAEFKFVNDLNSHACQASVENVERAINRFFDNCKNNKPGKKGYPKFKKHSRSVEYKVSGWKLHPIKRRITFTDKKGIGELKLLGKWDIHTYPIELIKRVRIVRRADGYYVQFCVKVDNQQEAPPTTSEIGIDVGLEFFYSDSNGKHEDNPRFLRKAEQEIKRVQRNIYKKKKGSSGRRKARGVYARKHLKVTRQRNEHAKKLARNLCLANALVVVEDLNISGMLRNHRLAKSIGDASWYNFCQWLDYFGEKFGRKIIKISPHFSSQECSNCGARVQKSLSTRTHSCPHCGYIEQRDVNAAKVILSRANATGGHPGSNASRDVPSTSVGRKTCKSKERQ

SEQ ID NO: 59709 - protein, 379 aa, unknown
  TnpB Polypeptide
MYAVLGYYKGMRKAFKYRIYLANGQRRILEQQLEESRWVYNELLAERKRAYAERGESLRKYDTLNLLPVWKLTRPSMKLVHSQVLQNIGIRVDLAFQAFFRRVKAGAEAVDFPRFKGFSRYDSLTYPQYGNGVRLEGARLILSKVGAVHVVLHRPLEGTPKTVTLTRSRTGTWFACFSCETEAAPLPPTDAVVGVDVGLSSFATLTDGKKIANPRFYRRDEADLKRVQRRKDAAKLAQDWPENAKQKGILARIHARIANRRSDFAHKESRKLVDAYQVIVFEDLAPMELGRSRGMRKSILDVAWTQFIQMTVAKAEEAGRRVILVNPRNTTKRCSSCGELVPKTLRVRVHTCPHCGLVLDRDENAARNILQRGLRSLSP

SEQ ID NO: 59710 - protein, 264 aa, Streptomyces sp.
VTASRVKRAFKYRFHPTDAQAAELSRTFGCVRKVYNLALAARTEAWARQERVNYNATSAMLTMWKKTEELAFLSDVSSVPLQQTLRHLRSAFTHFFAKRAKCPRFKSRKRSRKSAEYTTSGFRFRDGALTLAKMADPLDVIWSRPLPEGARPSTVTVSQDSAGRWFVSLLWEDPAVKPLPVTDTAVGVDVGLNHLLTLSTGERVANPRHERRDRVRLAKAQRELSRKARGDGASVRTAPRRRCSPTSRAWCGRPDTDSPPSRST

SEQ ID NO: 59711 - protein, 370 aa, Sulfurovum sp.
MKTIHRAYKYRIYPTVEQEVLLAKTFESVRFVWNTILDWRSKEYTQNKTKVNFVSSSRKLMEVKNSTKWLSEVSSVALQQTLRDQDVTFSNFFNKRAKYPNFKSKYSNQSFRLVSSGFIYKDGILKIAKSKQPLKVKWSRKVKGKVSSIIISKDSANRYFVSLLSEETIESKPISTKKVGIGLGLTDFVVTSDGMKYKSLKATAKYAQKLKKLQRRLLKKQHSKSKGDTIPKSKNYIKVQKRVARVYAKIADSRNDFLQKLSTKLINENQVICLEDLNVANLDASWSKFVSMLRYKADWYGRTLSFVSPNFPSSQICSHCGTRDGKKDLSVGKWICPHCGTHHDRDINAAKNILTAGLAGLACGDSITVR

SEQ ID NO: 59712 - protein, 404 aa, unknown
  TnpB Polypeptide
MMLIRKAFKFQLMPNGAQQRDMRRYAGNARKVWNLAFAQQQANHEAGEKFASAMAMTYWLPAMKETFSFLKQSPSQTLQQVTTNLAFAYKSFFAGRADFPKFKKKGKSGDSFRFPQGFKLEPHNNRVFLPKLGWLRYRNSRDVVGTIKNITVSCTNGQWFASMQTEQEVAQPLPTATTAVGIDVGISRFATLSDGSHINPLNSFKQHQVKLARYQRSMSRKVKFSKNWQKARQKVSKTHARIANMRRDFLHKTSTAISKNHAMIFVEDLKVANMSKSAKGTAAKPGRKVRQKAGLNRSILDQGWSEFRRQLEYKQSWNGGWLDAVPPQYTSQECPCCGHTAKDNRKTQAHFVCMDCGFAEHADLVGAINIRRAGLARLACGDTTNDVGSSAQESTEDTRQLLAA

SEQ ID NO: 59713 - protein, 375 aa, unknown
  TnpB Polypeptide
MRRAYRYRLYPTKAQAAAMSESVETHRTLYNRALAERKAAYEGQGRTVRYREQSAHLKEDRPANDYLTRTNFSSCQATLRRLDKAFVAFFRRIASGDKPGYPRFRGRGRYNTVEFPSYGDGFKLKESRVYFQHIGAVKVKMHRPIEGAIKTVSFTESAGHWFVVFSCELPDVLLPPSANPAIGIDLGLKAFLTTSDGEQVAPPQFYRKAQAKLRRVQRHLSRCQKGSNRRRKIRTRVARLHQHVGNQRRDWQHKTALDLVRRYGVIAHESLNVKGIARTRLAKSTHDAGWTQFVGIVSQKAACAAVTMIAVNPRNTTQTCSNCGCLPAVPLTLKDRVYHCASCGHVADRDVNAATNVLRLGLSRQMLTPAVVAVV

SEQ ID NO: 59714 - protein, 375 aa, unknown
  TnpB Polypeptide
LQRKLSKDNISTEHWRNIRNNRILSGARASISYGNDNIKLINENTLLIKLTKEKQIKLDVDLTKLHLSKEIFSMEQPKLFCQIIRRHEKHGRKCNQSVKSNTKQNAQQQKKQRKSKIYRTKPDYYLHVSVDYKNDNKQNGVDSTVQNSSTAGIDFNSGFITIACNKDKSGIANEKLVSKKSGLFKKTDLVEYFAKMKLNQDLEHERSLNIDNAASVPLPEPIPLPQNYIYDLLNDEATETAKFDFFVHNETKMNSQQLSDSMRKTIKSALNYVKEIGCSQVNIEQLNFDDKKRDISCSSQYDLTQDYNHMLHSLPYSLFKKIMEVECYKLDITLKQVNPAYTSRNTYVNSIAKNKDEPKVTEFRHFGAALIISML

SEQ ID NO: 59715 - protein, 371 aa, unknown
  TnpB Polypeptide
MKAYKYRFYPTVEQEQKLASFFGSCRFVYNLGLETKIQAWTSAKKNYTCIDLANQMKVLKDTEATWLADCPSQSLQMSLRNLDNAYTKFFKGGGFPKFKNKYSKQSIQFPQGVKVDFKNSTIFLPKLKQVNVLFHREFKGEVKTVTVSKTTTNKYFVSILVENQDNIPAKKKVQEKTTVGIDLGIKTLAVLSDGTIFENKKWFRESKRNLRIQQRSLDRKKKVKGENYEKQRLVVAKLHEHIKNQREDYLHKISTSIIKKYDTVVLEDLNIKGMMQNHKLALAIGDVGWHKFNTMLEYKAEWYGKNIIRVGRFEPSSKCCSSCGIINKELTLKDRVWTCKCGQTHDRDVNASKNIKNFGLRNKPSNANVGH

SEQ ID NO: 59716 - protein, 456 aa, Prevotellaceae sp.
MLSYDIYWNFLTIFAAKFLHKMIQLAKRFRIKSIPEVEVLCRISKDLYNQSLYELKKKGEEEGVWMRHFDLREHMKEITNLEGNVNYRLLRDAIADCVIKQVCNEKDSFFAAIKKWKIHPEEFKAKPEFPHFLGRNSMNLLQIRYKHDCIIDIHGNITLHGIPNVKIPIPQWGQYKQQILEGCKQIRILPFKGYMTVEVIYKTKIHPADVTKDRVAAIDFGIDNLATVVTPKGCYIFSGKVLKSYNQNFNKKLAHYTSIKSKQGIEKGTKRMTAMYDKRNRYIDTFMHTTSRAIVDMLIEQKIGKLVVGRNKGWKQEVNIGKKNNQKFVQIPFYMLQSQLEYKCVMAGIEYVEQEEGHTSKCDALAMEEIGHHEHYAGVRKKRGLFLSSTGRYINADQNGALNILRKNIGDKEYKEKTKDWQMNSPVRIKHPQMRNEICNPSNGQQIQRRSSVSSQ

SEQ ID NO: 59717 - protein, 479 aa, unknown
  TnpB Polypeptide
MDVVQRRNEEKEVNHEKVDLQKIKRRKKMTQANQLKNLDLSTVKESSNRCKLIRVYPTPTQKPILNRWFGTYRWTYNQLIAKSKDRNADTKWADYSKKTVRDFALNADSPLLNEYKWVKETPYDIRDGAMTEFLTALKTNLDKRKKNPSFTFDLQFKSKKKHRQESIPILAKHYKGAGLFFPQLFGKTPLGVGREPLPDKLEYDGRLLQNKVGQYFMAIPQAPLHVILPRQDKEPRKPTEVVHQRYFNESNVDLNIASIDPGVRTFATIYDPGSLHNNQGKWIKWGDKDMGRITRLCVYADRLQSQTDTPRKQRECRGTHKGQTSRMKKAFRKIHLKIQHLVKEFHCKCAKWLCENYNLILLPKFKTKDMASTKGSKKRLIRSKTVRQMLTWSHYTFQQRLIHKASQYPFCHVELVTEEYTSKTCPECGYIHKTLGGNKTFKCPQCHYTCDRDAHGSRNIFLKWLTDQHRKILSGSQQC

SEQ ID NO: 59718 - protein, 446 aa, unknown
  TnpB Polypeptide
MKKYTSTASCRVRLSNEWTQAVQDTIQYYQHAVSWLIPVAQAEYGSFSMLGANAKMTHMEKLVHSTSKRKAKYKGFDKKFYKMPSYLRRSALVATIGIVSSFMSNLENWKKNGMKGRKPKLRIHHSKMPCFYKGNMFKADEAGNTCQIKLRSNGDWAFFSFRLKKTDMEYIRRHYDLEDASAPTLERAGRGYALRFAFEKKYVLEEEVHRICAVDLGMNSDAVLLVMDAEGTVSARKFISCAEEKDRLHALLDRIGKQQASGNRKNKKLCAFAQHMNEEICRKTVIETVRFAREHGCGCIVMEHLDFSKKRKGSRKQKFHHWRHRFIVQKMEYKAHLNSMRFSTVNAWNTSRLAFDGSGKVVRGKEIRNKKIPKVYGLCEFTNGKIYNCDLNASYNIGARYFIRQKTEKLSDSEKITIGAKVPQMKTRASQTLDTLRQLNAVLQYA

SEQ ID NO: 59719 - protein, 317 aa, Desulfofundulus sp.
MTTKTSKDAAKFSEKLPSCVLCHAIRDIRAKKKAKRFKRLWPSFSYQNFRVEKELSKDGGAVWKASFPTLEKRIGVPIVVQSYQEKYLEMLLSGQAKQGSAKLVRHGRDWYILLSLTISVEEKQGKKIMGVDLGLIDLLVASVNGQTLFFSGKGLAYTRRHYAELRHRLQKAGAYRALVRLGDKEHRWVTDVNHKISKALIDFAIAHGVTKIRLEDLTGARWTNPQRKEQRKDHGRSLHYWPYYQLRKFIEYKAALAGIQVELVNPDLTTLTCSRCGEVRRSRPKGRWFKCPRCKKIKHIDVNAADNVAQAVSGLAA

SEQ ID NO: 59720 - protein, 399 aa, Synechococcus sp.
LPGTASKARQLFGLAGAGRFIWNHFLAKHQAAYQLHKENPEHHAKPSISFLSLGKEFTQLRNSGDFPWLQGYSFTIVRAALQSLSLAFQGFFRGKGHPRFKARGRDQPRFTIPDKGKIKGDRLSIPGVGLLRLRRHSGNPYPEGRPVKAAVVHECGKWYATVCYKVDLPPSAEPERVAAMDCNCRQVAVVYSDGTSEIRRQPDTTLLQIKLKRGQRKPGRQQKGSNRRQRTRTRLRKLHRRIRNMANTWRHRLTRHVADKARLLVLEKLNTQAMTRSAQGTVASPGRNVQQKAGLNRSILATGWGEIEQMLGYKTRVVYVNGAYTSRRCSGCGQVDKASRRSQSTFHCTSCGYRANADLNAAQNILASGVGATARGEAFSLETSTIRETGLGHSCDSWS

SEQ ID NO: 59721 - protein, 251 aa, Clostridioides sp.
MYFSQHIKLPKLGMVKISDKQVPQGRILNATISKEPSGRYYVSLCCTDVDIEVFENTNNQIGLDLGIKEFCISSCGEFIENPKYLKKSLNKLAKLQRELSRKTIGSLNRNKARLKVARLQEHIANQRKDFLQKLSTKLIKENDIICIEDLQVKNMIKNHKLSRLISDVSWSEFIRQLEYKANWYGRQIVNVGKFFASSQICNKCGYKNEEVKDLNIREWICPSCNETHDRDINAGMNILKEGLRLITIQNK

SEQ ID NO: 59722 - protein, 152 aa, Nocardia sp.
VSSTTSTVVKRAYGYRFYRADRRRDHLHELMTRLMRENQVIAIEDSWVRNMIRNRCPARASSDAGWSEFRSLPEYKAEWYGNEVVAVDRFYPSSKQCSECGALRQNMALHVREWQCAECGTGHDRDVNAARNIRAAGLAVLACGDGVRPPRS

SEQ ID NO: 59723 - protein, 421 aa, Synechococcales sp.
MMVSMILTYQYRIKPNLEQVELLNHWGELLRRHWNYALGQRLDWLRRTKCRIDRCSLISEPIGEIPEKVDYYSQAAALKETKQLFPEYKEIYADCQQQNLMRLDKAWKRWLIPDKTGKRGGRPQFKKRGELCSFTFPRVNSEKAGAHLTGNRLRLSKIGEMEVILHRPIPEGFVLKQATVVSKADGWYVSFAMEDSYVPESLPVAEIANACGIDVGLEKFLTTSEGEAVAVPQFYRKSQVVLARQQRKLSRQQKGSNNYQKQANKVARTHLHVARQRKDFHYAVAHWLCTKYDLIGFEKLNIKGLAKTRLAKSILDVAWRAFLNILQAVAVKRGKHTQEVDARGTSIECFNCQERVVKPLSERVHDCPNCGISLDRDYNASINVLKRTAGRSFAACGGLGVAQPVKQEISFINLRSPHQTA

SEQ ID NO: 59724 - protein, 406 aa, unknown
  TnpB Polypeptide
LILTYKYRLLPSKRQHRALEEILEAQRILYNSALEGRIWYYKNTRQLLSLFDQTKELTICRREMPEMAAIPTTIQRWTLKHLDWAYRGFFRRIRKAHKTPGFPRFKSYYRWRSFGFNQTVGSFRFGDNNHIGFKGFPGWIRIHYHRPLPKKADVKSCSFTKDTKGWYITFQIKLIEKTKCTISSAVGIDLGLKVFAYQSDGVIIPNPRVARKAEKEMRRRQRALARCKKGSKRRIKVRVSCTRLSASVTNARNTWLHQQSARIVRSYDLIAVEDLNVKNMLQNSTFARSISDASWSGFLTFLAYKAERAGKYLVRVDPKNTTKKCSGCGELVPKAILERTHSCPECGLTLDRDHNAARNILAVVADRGEHNVAQWGERALGNLSLASSQSSRRNLSLAVTKTSNKH

SEQ ID NO: 59725 - protein, 458 aa, unknown
  TnpB Polypeptide
LILTTSLKLELNSEEETVLRAEMEKYIACVNSLVALHLSGVSIQKFSSKDVDAELPAAVKNQAIRDAKSVLQRYAKKQRKVERKRAWFTEQGKTPKRPIRDAKIPILRRPVLFVNNQNFKIDLNAKTVSFPLFRDGKTASRKTKRNSVQKTIRVATVTPRQREILTETSHLATLRIVRRGDNLFAQVGYKVEEPETASLNELLADPNVLVMGVDLGIKCPAVSYSTDGKIRFYGNGRENRYKRRKCYTQRKKLQKAKKLRAIKRISDKEARFMKERDHQVSRAIVNEAIRQGAKVIALEDLGGIRENCTPFTPTRKSRKNVDKPKVDSVVENPKNVTDASTSTGEPVQLNLFSESETLTKKQRRKARKLSKKQVAARRKNNRSLNSWSFYRLAKFIEYKAALAGILVIRVDPYKTSQRCPLCGSEHKAKDRRYVCECGFHAHRDVVGAINIANNVLKR

SEQ ID NO: 59726 - protein, 403 aa, Streptomyces sp.
VRYGHSREAGVQVPLPPGRCAGNGAVAHVRLRAEGLQPGSRSPYHRVVPAAGAGQLQRDVGDAHRVEEDRGTGLPGRGVLGALAAVPAAPARRVHRLLRGTGEVPAVQVEEEVRRSAEYTSSAFRYRDGVLTLAKMREPLDVVWSRPLPEGAQPSTVTVSQDAAGRWFVSLLCDDAVTPAPATTAVGIDAGITSLVTLSTGEKITNPRHERRDRARLAKAQREVSRKEKGSANRARARLKAAKVYARITDRRRDHLHKLTTRLVRENQTVVIEDLTVRNMVKNGRLARAISDAAWRDMRTMLEYKCAWYGRELVIVDRWFPSSKLCGACGTIRTKLPLNVREWTCECGVVHDRDVNAAKNILAAGLAVSACGDGVRPQRESSRTGRSSMKQEPQRATAGLPRL

SEQ ID NO: 59727 - protein, 408 aa, Lactobacillus sp.
MLKAIKIRIYPNREQADFIARQLGCCRFVYNRCLAYRKESYEKDGTSINATQSLGHIVALKSEFEWLKEVHSKVLQQSVRDMNRAYENFFKYKKGYPKFKSKHDYSQSCRFPKDAFIGIRGNRIDLIKSLKDIHFKCSRNDERYLNRNQGKVSSLTLRRDCCGRYYISVLIDKPNTVRPPKGNAVGIDLGVKDFITTSDGEVFENLHFKKSENCRLKRLQRQVSRKVKGSSNRNKARVRLAKAYDRICNRKQAYLHKVTNVLIDENQVICMEDLNVVGMLKNHKLAESIQEMNFGEFRRMLEYKARWYGRKISFVDRFYPSSKTCHHCGYVNKSLTLKDREWVCPHCGQSISRDYNAALNILDEGLRNIIGLSSPEFTPVDCPTMDDRGTPCLLKSSDRMKQEKNEKH

SEQ ID NO: 59728 - protein, 363 aa, unknown
  TnpB Polypeptide
MKLTVQIKLLPSDEQAKSLLRTLERANEACQYISDYAYETGTHSKYNLQDAVYHDVREEFDLAAQMTIRALGKVADAYKTNPKAHNQFDIRGGFPYDSRILSFYTDRQEVSLWTLDGRERIEYEVGENHRSLLEQEKGEADLVYRNGMFFLLVSCQMPSANLSDEDMEAIDGYLGVDRGVNNIATTSEGDNWTSDKIDERRMWYQKRRDILQSVGTRSAKRALQRLSGKQERFQRDTNHTISKRIVSKAKARSSAIVLEDLSGIQERTTVRRQQRARRSNWSFYQLRQFIEYKALIADVPVIKVDSAYTSQTCSECGHCDPKNRNGSAFECKECGHSMDADENAARNIAARGAVNSPMVASEA

SEQ ID NO: 59729 - protein, 417 aa, unknown
  TnpB Polypeptide
MQRVHKIALDLTNVQATDCAKAAGCARVAYNWALRWWKDAYHAWKISPEEGTGFDAETGKEIRVSNKPTENLARRHFDMIKGEEFPWMYESTKCAPQEAIRDLGRAFTNFFAGRAGYPKPHKKGANDSFRLSPGQYSIKDKLLRIPNVGWVRMQEELRYPAIRTLSVTITRHRNRWFAAIACELPDPEVPPRPFAAVGVDVGTGDYATSDGETIEVPRAYRKAQSKLRRAQKALSRKKRGSKNRTKARIKVNKIHGRVADIRVNWIHQFTHHLVTNYSIIGIEDLNVKGMSRNRHLAKSILDAGFYEFRRQLEYKAPAYGAKVIVADRWFPSSKICSQCGEKTNRLTSLAVRSWECENCGASHHRDINAAMNLKNNAVSSTVSACGEFLASDLTGSSGKPSNLCEAGTRHQIVRKHT

SEQ ID NO: 59730 - protein, 459 aa, unknown
  TnpB Polypeptide
MPEIYRTIQIRLKLDELERQGLEFICQQANSLVNCSVYAVRQGYFMLGGTGMVRPDYPSLDVWMKQLENPHYRGVAAQAAQQVLKGVVESFSSFDKLLEKFWQGDVEKPKLPGYRKKGGLAAISFPAQALQFDIETGLCRLPLGKIASLESGIDSIWVQGAWVIKIEQISEVRILPRNGEFYAEYVYKATGLQAKYNLDPTQALGIDHGVGNWLTCVSSLGKSFIIDGYKVKSVNQLYNKRVATLKTGKNRNYWDTELARLSEKRNRQMRDAVNKTARFIVNHCLANSLGTVVFGWNEGNKDGASMGKKNNQEFVQIPTARLKQRIQELCEEYGIQFVETEESYTSKASFLDGDELPTFGEKPEWYKPSGKRVKRACFPGEASPGNTARGMYRTAAGFLINADCNGAANILKKVSIQLGLDLAKVCRGVLNLPQRYNLFSSLTKSYRRRSEAARFQPAA

SEQ ID NO: 59731 - protein, 282 aa, Okeania sp.
MPKRAQQICNGVVESFSSFRQLLKLFGKGELANKPKPPNYRKPGLFTVSYPKRWLKFTNEGIRVPLGRKVKAWFGLEAFYIPMVSNLDWDSIKEIRILPRHGCFYTEFVYEMKTPVAVKLDAGLALSIDHGLDNWLTCVDTQGDSFIIDGKHLKSKNQWYNKQIATIKENKPQGFWSQRLVRITEKRNRQMRDAVNKTARLVINHCLKHGIGTVVFGWNKGQKQSIELGAKTNQKFVQIPTARLKERIEQLGNLYGVQFVETEESYTSQASFLDDDFLPIRA

SEQ ID NO: 59732 - protein, 364 aa, unknown
  TnpB Polypeptide
MTTISFEHTTDYDLTSIIQDAAKESRLSYNRIEDGLSEKEIRAYLKSMFPNSMLSAYMQDSVIKSMVALKKSIDAINEENKKKNIANEKKHLKTKDEGKPIKTPKKLNENIKPIFGGKKNWDLTCKRKITRDEWKQHRLKNGLTIQGEALHKGNRHFELHIDKDYVLFKLNRKEHINLNIKSLGKKWKKELLKLQALNNVKAGEQGYTYTVRITFDKVYISFEEFKQPSRKLNKNNYAGIDLNPKEIGFSICSNKEVKVKNEYSYRDIFEEINNSSYASDSKEAKYLQNKLNYELFETVDNIIRQCLHHGVKFLFVEDLKFVNASYGRWFNRQCKNLWKRNKFIDNLTKKCNEVGIKVYKVNTV

SEQ ID NO: 59733 - protein, 403 aa, Micromonospora sp.
VAIQLRYNFRVYPTPGQQEALARAFGCARVVYNDGLRLRQQTREHGTPYITDGELSRRLITEAKKTPERAWLSEVSSVVLQQALADLNTAYRNFFASITGERKGRTVAPPRFRSRKDNRQSIRFTKNSRFRVLDNGRLRLPKVGDVVVRWSRSLPSDPSSVTVVKDAAGRYFASFVVQTTDEPLPASASEVGIDLGLTHFAVLSDGMKVAAPKFLRRAARTLKRLQQDLSRKQKGSNNRKKAVVKVAKAHARVADTRRDWLHKLSTTIVRDNQAVYVEDLAVAGLARTRLAKSVHDAGWSTFVGMLEYKAARYGRTFGRVDRWFPSTRMCSDCGRVADKLALHVRSWTCPCGSVHDRDVNAARNIRAAGRADLNDRGAQVRPASVPAPRDEAVTHRELAPSGV

SEQ ID NO: 59734 - protein, 386 aa, unknown
  TnpB Polypeptide
MLKGIKIQIYPDKEQEELLLSYCKDYHNMKNFLVAKFKDNLPNVGKRNIIGYKDKDLLSEYEVMYNCKTEMPTRCIRGAIEDYVSGAKKFYQKISSRPPKFHKYDPNKQSFYIVDVLYKISNGHIPMPINRNFVQKYKTISKKIPINKKYATKENLTYLKDVRFHCQKGKWYISGCYDVPDVAIDNKKEFLGLDWGIKNFMTTSESTLINYPKEIVREYYRIKKLQYYLDKKVRNSNNYKKLKQKFDKAYKRMNGLKRNFIHQETTKLAKQYHVVIEDISWNQISKDKKGKKKKFIRRMSMISPKNMFDEQLEWKCKKFGSHFIKVNPRNTSRTCSVCGQMHNMTLNDRMMICSCGNKMDRDINAAINIKNAGIHKILAEGICCTQ

SEQ ID NO: 59735 - protein, 384 aa, unknown
  TnpB Polypeptide
MLKEIKIRIYPDKEQEKLLLSYCKDYHNMKNFLVAKFKDNLPNVGKRDIFGYKDKDILSEYESTYNCKTEMPTRCIRGAIQDYVSGVRRFYQKLSSRPPKFHKYDPNKQSFYMVDLKYLIKDCSIHVPVKKDFRAKYKSAISKKIPMDKKYATKENLTYIKDIRFHYQKGKWYISGCYDVPDVDIDKDKEFLGLDWGIKNFMTTSESTLINYPKEIVREYYRIRKLSHYLDKKVKNSNNYKRLKKKFDKAYKRMNGLKRNFIHQETTKLARQYHIVIEDISFQDISKGKKRKFIRRTTMIAPKYMFEEQLEWKCKKFGSHFIKVSPKNTSKTCSVCGQIHDMKLNDRMMICSCGNKMDRDINAAINIKNAGMNKILAEGICCTQ

SEQ ID NO: 59736 - protein, 374 aa, unknown
  TnpB Polypeptide
MSLYQIAGRIIADNPRTLEDFKFVTINGKLVVDDPLDHMKLVKLARAYASAVRKLLNLIWGGHSHKEATKLLYNILPNYVYLETAYKNAKAITENIRFFEEYLGKNRILADIHRFWIASRGNKWDKGNRNIKLIPRDTYFEVLIKYPWDGSWIKARAFFGERYVPLLRELIELAGRREEGYGVVVSFREHPRIHIQIPLWLYLKYFSTSKPRGYGLIAGFDVNSDRLNVVVIDNDGNIVAVETFWYCETVSHGFPKGKAEWIRLNALSSALEWCRRIGADYVVFEDLTRIRCKRFTKNHYVNRKIAKFPKKQILIHGVIKALKLGFIVVLVNPRGTTNSVTHEQIMREKGLDRHMASAYMIAYRGLKVIRNHEK

SEQ ID NO: 59737 - protein, 362 aa, unknown
  TnpB Polypeptide
VLRLRLKDKHAKFLGDLAREVNFVWNYCNDLQIKKFNRERGFLSGYDFAKFTRGATKEGLHLHSQTVQAIAEEYARRRRQCGKVRLSWRKSAGGRRNLGWIPFKKVAIRAAHGQIKFAGHWLSLWDSYGLDSYQIRAGNVCEDARGRWYLNICVAVPVAEPTARSAPRREVGIDLGLKELVTTSAGETLSAPQFYRGLEAKLAIAQRAGKKDRVRTIHAKIANRRKDSLHQWSTRLVRGYDSIFVGNVSASALAKTPHAKSVLDAGWSAFRTMLRYKCDFAGATFAEVNETCSTQTCSACGSRSGPKGIAGLGIRAWTCSECETVHDRDVNAAKNILAAGRRRLAEGIPVLTWTPPPCQAFL

SEQ ID NO: 59738 - protein, 437 aa, unknown
  TnpB Polypeptide
LSVVAGTVRAVSIRQRLYPTPGQKDVLASHCSHARFVWNLALEQANFYRKWQGSTPSNAARSRQLTEARAEFAWLANGSSAVQQGALRDFDQAMTNWSDGLKKRKAGLPGKAHGHPTWRRAGAYEGFVVRDLTVHKLGRKWATVHVPKAGHVRFRLTRPWAEVQEATSARVTLDGAGHWQVSLTCLPTAFVRTTTGKSAGVDRGVANSIATSQGTMGHAPTLTDGEQARFLALARRMSRQRKGSNRRNRTRIALAKLHVTLGDRRTDWSQKTANQLVQDFDLIAFEDLRTANMVRKPKPKPDPDNPGVFLPNGARAKAGLNKAILGSCWGQVAAMVTYKAAVTPENSRTTVVRVNPHNTSRRCHACGHIAPGNRQSQAVFQCVECGHQAHADTNAARNILRLGLQQVLPTEVCGRSDRERTHQPRTKPRATSTPKAA

SEQ ID NO: 59739 - protein, 419 aa, Microcoleus sp.
MMLTYQYKLNPTPQQVVTMETWGELLRRHYNYGLGQRLGWLNRTRCQVDRCSLVCEPIGEIPDKPDYYTQASDLKQTKELFSDYKNIYADCQQQNLMRLEKAWKRWLIPDKSGKRGGRPRFKKRDDICSFTFPRVNSPKAGAHLIGNTLRLSKIGEIEVILHRPIPDGSYIAQATILRKADGWYCSFALEDKTVPSALPIDEIKTATGIDVGLEKFLTTAQGQSVEVPQYYRKAQATLARQQRKLARKTKGSKNYQKQANKFARLHLHVARQRKEFHYQVAHWLVNSYDLIIFENLNIKGLARTRLAKSILDVAWGAFLQIMQAVAVRRGKHIRGVDPRGTSINCSGCGERVEKTLAVRVHSCSCGLVIDRDWNSALNLLKHGSVGLPIPGCGGLEVTQPLRQQVSFVSLRCSRYTACS

SEQ ID NO: 59740 - protein, 554 aa, Bacillales sp.
VKNSFTIIGEFFPEVYPAFRSGKWTRGEEDPLATEMRLFSACSRWSYKRIVKGASRKDIKKQGQDLFGLNSRYVDDARLKAQGMIDAQKELLELHIETTEAKLRGARKKLSWATKKRNRAEKNGLPKDELRTLERTLQAIQARVSALEKKLRELKEHKENETVPTIIFGGKRLWRDVSKKKATRDQWRAARKNRLYARGDRTKGGNPNMKITFDGHAFRMTVTISHLSEPTGVDALGRPIMRRAPRVLGRLWIPAKYQARLLGWLAEKRPYTVEMIRGLDGRFRVHIALELDERPETDLSRGVLSVDTNPDGLGIANVSSHGLPEPWPKGFRIPYPKNLGKYDGEFQIISYPSGFLYIRVPELAYASGHRRRYLIGVLAKVVVDIAKALGKPLAMETLSFDQGRLDRGKTFNRMASQFPYAMVLQALMRRAIKENVGYKHVPPQHTSTIGRLKYEKKYGVPIHCAAALVIGRRTMGFRERMTREVRDFVLQVKERLKPMGHRFPREGIGMTRKVEAALQALETKLFLHNGLARWQQESFFSCWRELKTLALAFR

SEQ ID NO: 59741 - protein, 444 aa, Bacterium sp.
MMENKAKFMMGLKMRIYPNRKQERIFWKNINASRFVYNKLLANSWTDTPVYKNKLDELYPIPEKYWKYNKNGKLLKSSIVRKTGLARITKDKYPWLGDKDIDSDMVNNAQVAYKSAWNLFNKVHKSGTPKFKRKSNPNQGYRTSNHYSSSAVKKNGGVPSLYNGSIKFLDNKHIRLPKVGRIKVKLSRNLPNNQLVRIATVSIKHLSTGEWFVSLLLKSDEPFKRQLPKANSQIGYDLNTENFLTDSYGNTIDNPRFYRSIKGRLAKEQRKLSRRGRRAKSEGRKLWKSKNYQKQRKLVAKLHSKIRNQRKDFLHNLSTALIKNHDLVVGENLKSKNMSKNHALAMSISDAGWRTFIGMLEYKAPMYGRTFVEVDPAYTTQQCSECEFRMGTGNTHKLTLKDREWTCPNCNTHHIRDWNASKNILAKGLIELTKTLTEDSPIYR

SEQ ID NO: 59742 - protein, 285 aa, unknown
  TnpB Polypeptide
MQVRATAKIKIPTKSEIIRTLKVYTKGLQFCINQGWKHKITNKFRLQTIVYKHLKDIGLQAQLAICCIRQACEMIKKAKSKPIIKRTTIRYNYGRSFSLKNNILSISTTKGRIKIPITIPIIFQPYFDSWNITESNLLIDRKQRCFFLFCFTKEVNAKCSDLQNRVLGIDLGINNLVVTSDNQFFDSAKVKQIKRKFKFIRAKLQAKGTRSAKRLLKKISGREQRFMAWTNHNISKDIVSNFNGNKIIMENLKGIRKQRRGRIMNYWISNWSFFQLQSFIQYKAE

SEQ ID NO: 59743 - protein, 351 aa, Moorea sp.
MIVREAKLLNGSLAQYQALDEAIRTAQFIRNKAVRLWRDQPKVNKARLSLLCKELAGEFPFAKKLNSMARQASAERAWLSISNFYRRCREGAKKKGYPQFKKHSRSVEYKTTGWKLSPECMTINFTDGFKAGQFSVFCNYETREDLFRLKINRVRVVRRADGYYAQFCFDANRKEKGSYTGNVAGLDLGIKYFYKDQNNNAAIYPKYLRQAEKRLKKLQRRLSRKFVRGKKPQSNNYHKARIRLGKCHLKVQRQRKDWAVKQARCVVHSHDVVVYEDLKISNMVKNHHLAKSISDAGWYQFTQWLNYYGNIWDKTVIAVNPNYTSQDCYNCGYRVKKSLSTRTHKCPRCQT

SEQ ID NO: 59744 - protein, 357 aa, unknown
  TnpB Polypeptide
MQTLTYKYKVYKQNRNHERRLQEWFRTAAWIYNHAIALHKRYYRIYHKSISVYRLQSHLLKLRKSTYSQWKAIGSQSVQQICERINNGYKNFFNRTAKHLPTFKNWRKYRSVTFKQAGYTLNGNVLTVNALKLRLKFHLSRPIDGKVQTLSIKRDAVGDYWIIIAVRRNEESSARKPMTGKTAGFDFGMKHFLTQDNGTRIESPLALFNHLDELRRKSRNLSRKKKGSNGRNKAKLSLARLHRKISNIREDFQWKTAIRIVSEYDVICLETLNMKAMQKVWGRKINDLSFTSFVSKLSWLCAKYGKKFVQINKWEASSKTCSSCGYRAEKCRSTSGSGLVRNVAHTMTVIINAAKIF

SEQ ID NO: 59745 - protein, 301 aa, Okeania sp.
MLKSKQYMVEKAYRFRLYPNTEQENLLRRTLGCVRLIYNKALAVRTQAWYENKERVGYAQTSTMLTSWKKQDDLDFLAEVSSVPLQQGLRHLQTAFTNFFSGRTKYPNFKKKRNGGSAEFTKSAFKWKDGQVYLAKCSEPLPIRWSRQLPQNCVPSTITVKLDPSGRWSVSLRVNDPRDLRLKPVTKQVGIDLGITSLVTTSDGETFANPKNLNKLHKKLRLAQKSLSRKTFGSNNYQKARLKVARIHAKIKDSRLDYTHKLTTQLIRENQIENKYKRMTIKYDKYGKFIQLISEVFDRKD

SEQ ID NO: 59746 - protein, 402 aa, Shigella sp.
VKRLQAFKFQLRPGGQQEREMRRFAGACRFVFNRALARQNENHEAGNKYIPYGKMASWLVEWKNATETQWLKDSPSQPLQQSLKDLERAYKNFFRKRAAFPRFKKRGQNDVFRYPQGVKLDQENSRIFLPKLGWMRYRNSRQVTGVVKNVTVSQSCGTWYISIQTESEVSTPAHPSASMVGLDAGVAKLATLSDGTVFEPVNSFQKNQKTLARLQRQLSRKVKFSNNWQKQKRKIQRLHSCIANIRRDYLHKVTTAVSKNHAMIVIEDLKVSNMSKSAAGTVSQPGRNVRAKSGLNRSILDQGWYEMHRQLEYKQLWRGGQVLAVPPAYTSQRCAYCGHTAKENRLSQSKFRCQVCGYTANADVNGARNILAAGHAVLACGEMVQSGRPLKQEPTEMIQATA

SEQ ID NO: 59747 - protein, 388 aa, Lentzea sp.
VKIVVQVKLLPDAGQASALAATLSAANDGANWVSAVGFERHGLRASVHELRRLCYGELKARGLGAQAAQHVIKRVADACTALRANIRAGNLGGTASKRRRKAESKPVTFRAEAAHTYDDRCLSWNHDQRTVSIWTLMGRVKGLRFTGSAEQLGFLREHRRGESDLVCRGGMWLLIATCEIPEPALIEPVDWLGIDCGIANLATTSDGANYSGRRLGRYRRWQARLRTRLQTKQTGSARRRLKRRARRERRHAQHVNHRIAKDVVAVAERTDRGIAMEELGGIRDRVTVPRHQRATLSSWPFAYLQRVIAYKARRAGIPVIKVDPAYTSQRCPRCGHTEKANRPARGDFCCRRCGLAGPADHVAAVNIRNRARRAWVLVNGPAPDSAAA

SEQ ID NO: 59748 - protein, 403 aa, Nocardia sp.
VVQLRYRYRVYPTPGQQESLARAFGCARVVYNDALAERRAAFANKLPYIPDGELSKRLTAAKATPERAWLGEVSAVVLQQALADLNSAYRNFFDSVTGKRKGSKVSSPRFRSRRDNRQSVRFTRNARFAVTAGKKLRLPKIGEVKVAWSRELPAEPSSVTVIKDAAGRFFASFVVEVGDAPLPPVDPEVGIDLGLETFAVLSDGKRIESPRFLRRAERRLRRAQKALSRKQKGSANRAKARLMVAKAHARVADTRRDWAHKQATAIVRENQAVYVEDLCVKGLARTRLAKSVHDAGWGIFLHLLEEKAARVRRYFTKVDRFYPSSQICAPCGHRDGPKPLSVRVWTCPACGAVLDRDLNASNNVLAAGRAERLLNACGDQVSPGLAPAPAGEAGTHRKRPTGR

SEQ ID NO: 59749 - protein, 205 aa, Lachnospiraceae sp.
MDVIPVSKTSTKAVGLDYKSDGLYMDSNGIKADMPKYYRKNSKKLVKEQRRLSRKTGSKKKETKSNNYLKQLKKVNKIHRHTANERLDFLHKKSTEIANQYDVVCVETLNMKAVANKGFGNGKATVDNGYGLFLQMLEYKLHERGKYLVKVDKWYPSSQLCSNCGYRKKLSLGERIYQCSCGIHIDRDYNAAINIKREGLRLLYC

SEQ ID NO: 59750 - protein, 260 aa, unknown
  TnpB Polypeptide
MACNVPRQVAATLKSLLTKVKQNNEAIKKGHTKKRFKGLDKAPRYASRTVTLNYQRDYSFKSDQQVSIGTLNGRIVVPYEGWNKHLNLIKVCPKIGAAKIVYQRSSKTYYLVVSLEIELPDINPTNITRISGVDVGMRYLAVETDLNNKSTFYSGASSRHKANQYQKARRSLQRKDTRSAKRRLIALSGRERRFIADVNHQISKEIAKPNSLIGLENLTGIRDRTQSKSGKKASQKQRKANRNKAKWSFAELHGSTIKLI

SEQ ID NO: 59751 - protein, 450 aa, Moorea sp.
MLTNKPTKIIRTDKWMLNPTTEQRMLLSQTIKVYRRICRYLVGIVFTHWPELGKLSSEEQTPRVEGLMHASAKRPEVKYPQINRVFHKFPSYYRRAAISFAIGQVSSYMTRYRDWQAGNRKRRDAKPPRFNPNAGCYPTLYQGQCYKLHGLDAIDIKVFTGSDWVWTTVQITGLRQRHEIAGNKMLSPSLILNAKSCHLSVPFDCKPPKRKPNKNVVAVDLGINTTATVTVVTFDGTVIHREFIHPGRDIDRRDKRLKSVSTRASQTMGKGGNLHKGFCSNTYRKCRNINQQISHIVSKGIVQIAQQFNSDAIVFENLKGWKARGGRKRSHLRQRFHGWLKAMIRDFTEMKWRELGGKVIDVVAAYTSKLAYDGSGTVKRDSKNYALATFPSGKRINADLNGAYNIAARGILKLTRRNDSEDRFSQSSGRSPRSWACLCDLWTRDSLRLA

SEQ ID NO: 59752 - protein, 402 aa, Escherichia sp.
VKRLQAFKFQLRPGGQQEREMRRFAGACRFVFNRALARQNENHEVGNKYIPYGKMAFWLVEWKNATETQWLKDAPSQPLQQSLKDLERAYKNFFQNRAAFPRFKKRGQNDVFRYPQGVKLDQENSRIFLPKLGWMRYRNSRQVTGVVKNVTVSQSCGKWYISIQTESEVSTPVHPSASMVGLDAGVAKLATLSDGTVFEPVNSFQKNQKTLARLQRQLSRKVKFSNNGQKQKRKIQRLHSCIANIRRDYLHKVTTAVSKNHAMIVIEDLKVSNMSKSAAGTVSQPGRNVRAKSGLNRSILDQGWYEMRRQLEYKQLWRGGQVLAVPPAYTSQRCACCGHTAKENRLSQSQFRCQVCGYTANADVNGARNILAAGHAVLACGEMVQSGRSLKQEPTEMIQATA

SEQ ID NO: 59753 - protein, 398 aa, unknown
  TnpB Polypeptide
MTQKAFKYRFYPTPEQETLLRRTMGCTRLVYNRALAIRTEAWYSDKKRVCYNDTSAMLTEWKKEDELSFLNEVSCVPLQQGLRHLQKAFSNFFEGRAKYPIFKKKRNGGSAEFTKSAFKWRKGQVYLAKCSEPLLIRWSRELPQGAVPSTITVKLSPAGRWTISLLVDTEIEPLPKSPNQVGIDLGVTSLVALSTGDRVANPKGFKAKHTKLKKVQKALSRKQKGSNNRHKARLKVAKVHQKISDARLDFLHKLTTQLVRENQTIAVEDLSVKNMVKNRKLSLSISDASWGELVRQLEYKCDWYGRTLIKIDRWFPSSKRCGECGHIVEKLPLNIREWSCQNCGANHDRDLNAARNILAAGLAVKVCGANVRPDRHKSDGSCDEAERSKKRFLESPHL

SEQ ID NO: 59754 - protein, 365 aa, unknown
  TnpB Polypeptide
MIYLLQEKRTEVTFVQSITVKIRFFPESLEIIKQLSQEYINIVNRLSQQAVENQSFPKITTKDISTFLPSAVCNQAIRDAKSVYTKYKKTKKLSVLKKPVYYINNQNYTILDNTIAFPISINGKTKKTFFKAIPTDRDIELIKKSKLGLMRIVEKSGKWYAQVSIQIPEEKTNGENIMGIDLGLKVPAVAVTSTGKTRFFGNGRQIKYIRRKYQSRRRKLGKLKKLSAIKKLGDKESRWIKDQNHKISRQIVNYAIQKNVSLIKLERLENIRKTTRTSRKNAKNLHNWSFYQLQQFITYKANLAGIKVIEVNPAYTSQICPCCGKRNKADDRRYECSCGFKAHRDRVGAINIMRQPVADGNSLLA

SEQ ID NO: 59755 - protein, 359 aa, unknown
  TnpB Polypeptide
MKLTAKVKLQPNDAQADSLKRTLETANAACDYISQVAWDTKTFGKFQVQKLVYTDVRRTFDLTAQLVIRCIAKVTDAYKLDKQTQRTFKPLGSIAYDERILAWKMAQDTVSIWTVDGRQKISFVAGEHNKTMLAHQRGESDLCLIDGKFYLFTTCDIDEPTPKDVDEFLGVDMGVTNIAVDSDKIIHQGKTVKSVRYRHRQLRRKLQAKGTQAARRRLKQLAGKERRFAAWTNHNISKTIVATAKDTVRGIALEDLGGIRERITVRKSQRATLSSWSFAQLRSFIEYKAKQAGVAVAAVDPRNTSRTCPCCGHVDKANRKTQSKFLCVVCGFSELADYVAAINIGRRAAVNLPYIPDAI

SEQ ID NO: 59756 - protein, 329 aa, unknown
  TnpB Polypeptide
LKYFIIYIIIYISTQIYHRKEKDAMSEIVKTMKLHIHVNETEAKSLEELTACYAQACTFISKYVFDHGFILNFMKLQETLYQTIRAEFGLKSQFTISAFKTVTARYKTVQEQLFQNPYRYENEKGEKHFISRTLEWLQKPIVFRRPQADLVRGRDYSFVTADDGQKLLSLNTLKKRIKVTFDLPKKFKEYFDGTWSFGSGKIVSMNGNWYFHIPMTKNVSEEFSMDHIKHVVGIDRGIRFMVTSYDEKGKVTFVSGKEIQKKARTLSAGTFRSAVKGHKISKTCIKAYLRTREPLDVGCKSSDIKDTRYEIQSRNAVCTGRSERSQLQR

SEQ ID NO: 59757 - protein, 407 aa, unknown
  TnpB Polypeptide
MQRLQAFKFELMPDGAQQRDMRRFSGACRFVYNKALALQKTNYEAGGKFIGYVALAKSLTDWRKGPDTPWLKQAPCHPLQHALKDLERAYKNFFAKRADFPRFKRKGSGESFRYPDAKQFEIDQANSRIKLPKLGWIRYRNSRDVVGQAKNITISQTNGKWYASIQTEREVPQSTPAATTAIGIDVGIARFATFSDGSFIAPLNSFKKHQQRLARYQRRMSRKVKFSNNWKKAKARVQRIHSRIGNARRDFLHKATTTISQNHAMVCIEDLQVRNMSRSAAGSPEKPGKQVRAKSGLNKSILDQGWFEFRRQLDYKLAWNGGHLIAVPAQNTSRRCPCCGHVSAENRPTQARFECMECGFEENADVVGAINVLRAGHARLACEVSGAVMPPAAGTHRSDSGAAQCRA

SEQ ID NO: 59758 - protein, 489 aa, unknown
  TnpB Polypeptide
MKTTIRGVILSFEQGQQVIVDKLMSDYMAAVRWSYKRLLEGKGVQDLRIMVQGRFLPNSRQANDAVYEAQSTLTSQRELLKINYEDAVAKVDSIKKKVGKAKNPNKIEKLTRKLEKWQRKLAHWERFIKTNTLPSVIFGTKELFLKRCKGLISKEEWKQARNNRYLSRGDASKGGNLNARISLKDDQLYLDIASEAVKTEKTVRYHRITVPIYLAQKFSKKSKKVNGRNYQQMMMDYLKTGKAYQIEIIRENQRYYVHVTIEEKEVATYTSNDGAIGVDVNPDGLGVAELDYYGQYRGSQFIRESEWTYARSNRRLNLIGEIAKEIVLKAKGKGKALAVEDLKFRDDKSISTKFNRISHGFVWSKFLQAVERNALREGVPLIKVKPPYTSVIGILKYQSQYGISNHEAAGYVIGRRALGYAEETVPKKFLMFLTRKQLENIKEQNNWKQWSIVQKRLIKVLSLKRKDVKSLVSWQHMRKACLAEVLTPA

SEQ ID NO: 59759 - protein, 394 aa, Lachnospiraceae sp.
MEKAYKFRIYPNREQQNLIQQTFGCVRFVYNHYLAKQMDLYSDEGKHMSYSQTSKDLTSLKKELEWLKVPDKWALQNVLRDLDQAYQNYFSKMKKTNYVRYSKDLLEHLERIGKKPTLYLSDGHPKFKKKKDNYKSYKTTYTNGSIDVMDKYIKLPKLGWIRYRDKCVPQGRILNATISQTPSGKYYCSVCCTDVEIEKLTNTGKNVGIDMGLKDFAILSTDKDNKIENPKYLRKSLEKLKKLQKALSRKTINGANWKKCRLKIARLQEYIANQRRDFLNKLSSQLIRDFDIICIEDLQVKNMVKNHRLAQAIADVSWSEFVRQLSYKAEWYGRKISKVGKFFPSSQLCHVCGYKNTEVKDLKVREWICPHCDTRHDRDTNAAKNILKEGLTMV

SEQ ID NO: 59760 - protein, 234 aa, Cyanobacteria sp.
MRIPGSSAIAESGECQFYTDSDGQTMENPRHLRKSEKSLKRLQRRMSKTKKGSKNRAKFRNKLARKHLKVSRQRKDFAVKLARCVVRSNDLVTFEDLKVRNMVRNRHLAKSISDAAWTTFRTWVEYFGKVFGVVTVAVPPHYTSQNCSNCGKVVKKSLSVRTHVCHHCGHTQDRDWNAARNILEKGLSTVGHIGTHASGDIDLCNGKEETPQSKPSRGKRKPKEQSLESPAIFG

SEQ ID NO: 59761 - protein, 424 aa, Cyanobacteria sp.
VLVLEAKLKGRTEQFRVIDDIIRAAQFIQNKALRFWMDSSPEDKVNRYSLNKYCAVLAADPEYPWVKKLNSMARQASAERAWGAIARFFDNCKKKVLGKKGFPKFKKFCRSVEYKTTGWKLSKDRKSLTLTDGFDAGIFKLKGTRDLNFYDVKQIKRVRVVKRADGYYAQFCIDVERKERIKYTGSEIGIDVGLNHFLTDSTGKKVDNPRHLRSSEKRLKKLQRRMSNRYRNPNKGMKGQAMVKTKTPQSKRYHKARIQVALGHLEVTRRRKDFVVKTARALIQSNDLVAYEDLRVRNLVKNHNLAKSISDASWTMFREWLEYFAKVFDKVAVAVPPHYTSQNCSGCGAVVKKSLSVRTHACTCGTILDRDENAAINILMKAFEMLGKNTVGHTGIYAHGQPDLCVVGEILQRKSSGNPPPGKI

SEQ ID NO: 59762 - protein, 390 aa, Nocardiopsis sp.
MVGVSKIVVRIKLTPSPEQATVLASTLRALNDHATWVAKVAHERGVTRNYELRKHTYRPLREAGVGSQAAQHVIKRVCDAYRTQRSNLNNGNYGLKGSARHKRIESTPIEFRADAAHPYDQRNLSFALDARTISLWTVRGRLKDVPFAGSPDQTKRLAEHKRGECDLLCRDGVWFLAVSVDVPDAPEFEPDSFLGVDLGIVNIATTSDGQVMAGRQINRYRRRQHRLRAKLQAKGTRSARRLLKKRRRREARHAKDTNHQISQRIVAVAERTGRGISLEDLRGIRGRVRQRKSQRAALHSWAFHQLGQFIAYKARLKGVPVVFVNPAHSSRECAECSYTDKANRVCQALFVCRGCGVVAHADRNASRVLARRGQDTWNAGRKSHVPPEDL

SEQ ID NO: 59763 - protein, 373 aa, Thioalkalivibrio sp.
MAKRAYKYRFYPTPEQEVLLARTFGCVRFVYNTVLRYRTDAFFERQEKIGYTEASAYLTAMKKTEDTAFLNEVSSVSLQQCLRHQQSAFRNFFAGRARYPSFKKKRGRQSAEFTRSAFQYRDGRLFLAKCREPLNIRWSRDLPSEPTSINISMDTAGRYFVSCLCEFDPEALPTTPKTVGIDLGLKDLFVTSDGHRIGNPRHLAKYAAKLARDQRRLSRKQLGSSNRAKARKKVARIHAKISDCRMDYLHKVSRQIVHENQVICVESLKVKNLLRNPHLAKAISDVGWGEFVRQLAYKAEWAGRTLVAIDRWFPSTQRCSACGHVAGRIPLSVRNWVCQACSTEHDRDENAALNIKAAGLAVLALGEDVRPAT

SEQ ID NO: 59764 - protein, 390 aa, Oscillatoriales sp.
MTQKAFKYRFYPTPEQENLLRRTMGCARLVYNRALAARTEAWYERQERVGYAETSTMLTNWKKQEDLQFLSEVSCVPLQQGLRHLQTAFTNFFAGRAKYPNFKKKHHGGNAEFTKSAFKWKDGKVFLAKSTQPLDIRWSRQLPAYAIPSTVTVKLSPSGRWTVSLLVDVEIETLPKSLNQIGVDLGITSLIALSNGEKIANPKTFKAKRRKLRQAQKALSRKVKGSNNRHKARLKVAKVYAEISDTRNDFLHKLTTRLVRENQLIAVEDLSVKNMLKNHKLALSISDAAWGELTRQLEYKCDWYGRTFVKIDRWFPSSKRCGHCGHIVDKLPLSVREWDCPKCGTHHDRDVNAAKNILTAGLAVNVCGATVRPEQSKSVKAGAMKQKPKS

SEQ ID NO: 59765 - protein, 409 aa, unknown
  TnpB Polypeptide
MSKSYCEEQTVTKRAYKFRCYPTDEQKQILARTFGCCRWVYNWALRLKTDAYREEGKRLSSDDLSALLPTLKQQPETAWLAEVSSAPLQQSLRHLNRAFVNFFEDRAKYPRFKSKKRDTQAATYTAAAFIWKDDGLTLAKMETPLAIRWSRALPQGARPPRVTVTRDPAGRYFVSMLVEEAIKPLPESPHKIGIDLGISSLVITSDGEKVDNPKYFAKDEKKLARVQRRHAKKQKASRNREKARRTVSKIHARIADRRRDYQQKLSTRLIRENQVICVESLSVKNMMQHPTLAKSIADVGWGEFLRQLAYKAQWYGRTVINIDRWYPSSKTCSACGHVLDSLDLDEREWMCPDCGAHHDRDINAAKSVLAEGLALNAVGLTVSACGGDVRPNLDGIREGSHLGSRNHGR

SEQ ID NO: 59766 - protein, 237 aa, unknown
  TnpB Polypeptide
MNKLGNKPRFKKKNKGESYQTNYTNNNIEVLDNYIKLPKLGKVPAKVHRKVEGTIINATIKKYSNNKYKVMVLVRKEIKKLETNSYIVGIDMGVSNFVHDSSNNIYNAPKELINTYDKIGRLQKSLSSKMKGSNNYKKIENKINKLYDKCNNVRNDFLHKLSTSIINENQVIVVEDLNVKEMFQNKNIAKVLGDISISKFINMLEYKARWYGRKLIKVGRYYPSSQLCNNCGYQNKK

SEQ ID NO: 59767 - protein, 677 aa, unknown
  TnpB Polypeptide
MKKKKKYREVQKKKYNDFQKNIANNTKFICLPKSSEISTENINIGTNVNVVKTNSDKKIITKNFKLKTDLLKNDPIKTTQYLLLPNRKQCKILQQWFNAYVDMYNCIIRKIKNKYIKELNKNKYLKLTDLTIDLSIGCLKKEFAQTKKILINKYSQINAHVLDYAMGDAVAMFKSKITNLKNGHIKKSRLRFIKRTRSNKILKIEKYLCTDKSFCSSQIGKKMKTLPEINFKQRITTVAIIKYDSKKDKYYLYVRDQITNENNSNDIIKMHEDGIKICDDIIETSKEYEKLIIQIKKDNSNVQIKLVDTINKANKRFKLNAHKDITDQLNATSKKYNELIHKIKNSEMVDTIHILNISYMKYNDNLIKETSEQYKNLLIKIRKLTDECVKKENDMNRQLLETTDQYNNLMKIIPNKFNKMINNPIILKNNYLSNRITKSSKMYIKFIEMIKSPISLKIKNVNKESDLMKRKIKNTIKRENKKSYKQINQKKKDVISIDPGVRVFATGLSNNHLIEFGKNLSSIIRNKLKFIDNINNNETISADNKKRLVGRTYDRIQKKMKDCHWKIINYLTSNYSHIIIGNFSTKRMSEGKINPMTKRIGNMLQMYTFKERLKYKCFLKGVKYHEEDEYCTSICCSSCGNCKKDLGPNKIYNCNKCKIIIDRDVNASKNILMKSII

SEQ ID NO: 59768 - protein, 459 aa, Moorea sp.
MYKTISVKAVLSDEEKAFWVFQCEQANNLINCALYYARSKHYKWLREQTESYSVYWKEDILKYGWKTYKCSTNYPELDKALKMNPHYKAMAAQSAQQTLKSVGESLKGYNQLVGAYYKGNVDRPRLPRYRKKGGLAAVTFPKQALTYKNGLFWPSVSKESKPELLCDITLTPPEFIDPDWVKEVTIRPYFGELWIDWVFDDGKQPVENNPNFDYSQAWSFDHGGDNWLTGVSTHGKSLIIDGRKLKSMNQGYARLVAKYKAGKSDFYWDSNLDRVQRKRNNQMRDAINKAARFIVNRCLNDRIGNLVIGWNEGQKNNAKMGRRGNQNFVPIPTYRLIERLKQLCLEYGIKLTVTEESYTSKASYLDDDSLPKYGEKPTGWTPSGKRVKRGLYKASNGYLVNADCNAAANIARKVATQLGLNLTKVGSGSLTLPHRYDLWTSLSKSYRTRSGEGRVYPPS

SEQ ID NO: 59769 - protein, 469 aa, Moorea sp.
LSVFDIPRIHVYTKDIVAKELIKTTTKVIRTDKWTLNPTTEQRVLLSETVRVYRRACRYLVGIIYTHWGELGNLTADHLTPAVERLMHETAKRPNIKYPQFNKTFYKFPSYYRRAAIAFAAGQVSSFVTRYGEWQSGNRKRKDSNPPKLNADTGCYPALYKGQCYKLHGFDQVELKVFDGKNWVWTIVQITGLRERHQVATNKMMSPSLIIKDRYCHLSVPFACKPEKRNPETNVTAVDLGLNTTATVAVVTHDGTVIHRDFIHLGRDIDRRDKRLKSVSKRASKTMGRGGKLHKGFCSNTYQKCKRINNQISHIVSKRIVGIAEKFNSEAIVFENLKGWKPKGGRKRSNLKQRFHGWLKAKIRDFTETKWAELGGKVIDVVAAYTSKLAFDGSGTVKRNKKNYSLATFPSGKQFNADLNGAYNIGARGVLKLTRRNDSEGRSSKKPGRPPRSWACLCDLWTSGSSKLA

SEQ ID NO: 59770 - protein, 396 aa, Scytonema sp.
MERAFKYRFYPTPEQETLLRQTLGCVRLVYNKALPVRTESWYERQERVDYADTSAMLTAWKKEENLSFLNEVSSVPLQQGLRNLQKAFANFWAKRAKYPNFKRKHNGGSAEFTKAGFRWKNNQVFLAKCEQPLPIVWSRELPPGCSPSTITVKLDASGRWFVSVLVDDHTIKLLEKTDKSVGLDVGITSLIATSDGEKIDNPRHFKRLRRKLRQVQKSLQSKQKGSKNRHKARRKVAKVHSKITDARKDFLNKLTTQLVRENQTIVVEDLAIKNMIKNPKLALHISDASWGELVRQLEYKCRWYGREFIKIDRWFPSSKRCGNCGHVVEKLPLKIRQWDCPKCGTNHDRDLNAARNILAVFVLPFQSVERTAIPDSQLIEGQLLKTRKGKKQKPKS

SEQ ID NO: 59771 - protein, 446 aa, Scytonema sp.
MLVLEYKIKAAQKQYQAIEEAIKTVQFIRNKCLRYWMDASKEAKINYAALSRYSTELRNEFKFVKDLNSMAVQASAERGWFAISRFYDNCKSKKPGVALGQKNEPFAAGVPKAHLSNPTNNRDAKTINHEGSAHFSRHSPVKKGFPRFQKDNRSVEYKTSGWSLHPTKRRITFTDKKGIGSLRLLGKWDIHTYPVKSIKRVRLVRRADGYHCQFCVDVECIDIQPKTGKEIGLDVGLESFFTDSNGHHEPNPKFLRKAESIIKHVQRRIYKKIKGSNNRRKTRAKYSKKHLRVSRQRTEHAKRVARHVCKSNDLVAYEDLRVRNMVKCHNLAQSISDASWYQFRLWLEHFAKKFGKVAVAVPPHNTSQECCLCKTKVQKDLKQRIHSCNCGLVIHRDINAAINILLRAKSTVGQTGSNATGVDASTLVGAILLKQASTMNVESPSL

SEQ ID NO: 59772 - protein, 416 aa, Moorea sp.
VKIAYQYRLKPTKQQRAKIDHWLSLLCSQYNYLLADRFSWYEQNRCPRNACPLVCHLAELRDNPDYYSQKKTLPNLKKTHPWYKDIHSQVLQDVVKRVKLTFDRFIKGDKNGNRSGRPRFKKKHRYRTFTYPQMKEGCLEDNLINLPKIGKVKVILHRPIPEEFKIKTASIIKKCDGYYLVLSLEDETVPEVKPDINPDSIVGIDVGLKEFLTTSEGETIEIPQYYRKSQKRLKVIQKRVSRRKKGGKNRLKAIKQLGRQHKKVADKRKDFHFKSANYLLSKYDVIAHEKLNVKGLAKSRLAKSVLDAGWSSFLTILTSKALNAGLLAVPVSSRDTSQDCCNCGKKVPKKLHVRWHDCPHCGCSLDSPKATLRERDHNAAINIRNRAEGQSVLKAQRLLRDTRIGWEAYTEPARSV

SEQ ID NO: 59773 - protein, 298 aa, unknown
  TnpB Polypeptide
MNKGEPLPEIVFKNIGIHLDARTLTFSADRQSASVFTTQKRVSVRLCPGAFQKEILDSGKWAECELVFKKDGNGRRWCQLHIAVERKLDVPNLSRLKEEEVLGVDVGENNLAATSDGHLFKAGKLKNDRDKFLSHRTRLQRNGSRNAKRTLKRISGRERRHVEQVNHVVSKQIVKEAKAKGKRLIVLEDLTHIRERIRATLRVRARLHRWPFRELQQMIVDKACRVGIRVMFVDPKYTSQTCSACGAIGKRKKHRFECNCGYRAHSDLNAGRNLQGLGYRLVTQGPDVNRPDATLSRQ

SEQ ID NO: 59774 - protein, 338 aa, unknown
  TnpB Polypeptide
MRTLRLKVRSEAYPWLNAAAIEVNAVFNYCNETSLKAATRTDLKRKWLTGFDLCALTAGATEYFDKIGADTIQSVCIHYAQKRKAAKKLKLKWRVSRGAQRSLGWIPFKAASLKRKGRGVRFAGKCIRVFERERLEGVKWQGGEFAQDAVGDWWLCLPVKVQADCSIAPQEEVGIDLGLKTIAVTSDGDRLEAGRWTHRYAEKLASAQRRGHKRQAKRIHRKIARCRADALHYFSRKMVDRYQKIVVGDVSSLKLVKTRMAKSVLDSGWGTLKRFLEYKCEHAARSFEVRDERYSTVTCSNCGALSGPREVNGLIVDHGNVATVESCMTETLIRLGIT

SEQ ID NO: 59775 - protein, 425 aa, unknown
  TnpB Polypeptide
LEKLLKTLTRTVVVECYANNYARRALREIAEAYREMLQEMVIYAVEHRASQSTLHKVFYHKFREKYPWLPTRVIKGAYRDAVRRAKSFRELKRRGIAKTDKPVVRRVTITYSDPQDWRIEDGVIKLRTHAGWVQLHYRNHRQLHRYLYSVWKLSGELKLKLNGKKVFVYLTFMKEFEVPYNPSNVVAVDINENNVTVAVFVDRRLQEVYRIETNLGRLVISYAERRKRISEGKSTKVRSVKKALKKFRERERERKRDIVYKTARIVEMLALQHNAVVVVGGVRKGKRRLVEKVKKDSLRHRIHQWNVSTLVKALNERPIHVIEVPEAYTSSKDPFTGRCIHSFNPSMTCYAVRGRKRVKVLKILLRLAKLGNGVVVLDRDVIGAINIGLRYLSSDGRAVALPSTEPHEVRAKLMNLHRGLAPSRN

SEQ ID NO: 59776 - protein, 240 aa, unknown
  TnpB Polypeptide
VKRDSANDLWLCFAVEDEAANHVLPRLGNAVGLDFGLKTYLTGSDETTIESPEFFKQNLKAVKRLHRILSRKQKGSANYRRAQRDLARLYRRIANQRLAWQWKTAWKLVGDFAFIGLETLNIQVMQRLWGRKVSDYGFSEFSSILSYVASKVGTQVVHVDQWFASSQLCSVCGFKFEGTKDLKVRQWTCPHCGAVHDRDVNAARNILAEALRIADRVVTGGTIVRQGEPESDRRKSASGV

SEQ ID NO: 59777 - protein, 481 aa, unknown
  TnpB Polypeptide
MQTGRSYTAHFDDDKSRETYLTWSAAQMYVYNAKVQENNYFWRFHCKFWTPEPMPAPDQKYAHLVDFTETPWMKSVPSAVRGIGAYHWYQAQQRFMRGLARCPRTKRIKDADRQLSLTRPYFSIEKISRKWSRVVVGTKSKGAAFALRVRTHRPHEVPAMLTISMTRAGISVAFSYEEENVFPETQEEIAARLQGLSEAELEKKTLAWDWGAKRNLQLSDHTAYNIPTVQMERVRRKEVGAKRQQRRLAGMQEGSKNSKKQKSRIAKKREYERNVRKDFAHQVTHDLATREGIEVIACEKLNIKGMVKRPKPKYDENGKPLHNGASAKAGLNKALHNAQNGRLKEYLRYKCVREGKLFVEVDPKNSSRECHVCHKAARENRPEQAVFRCTNPECPNYGKEMNADLQASLVLKQRAIRDVRKGIKPKESKKLLRVPRAKNRTNVGVDRPEDVAACPNARMPVEPSEGKLRIAEPPHKTAIAS

SEQ ID NO: 59778 - protein, 424 aa, Cyanothece sp.
MITRRVTFRLYPSKSQSAKLFEARRLHAYLYNACVEDRKTSYQKFGKSVSYFDQQAALVPFKGCWPEYKSLNHGSLQATVKRVDFAFQRFFKGLGGYPKFRSIRQYSGWTYPDARQGFRVHSIGENGYLELRDLGIQVQMRGKARQWGTPSTCTIVYRHGNWYASITVKCEEILRETGTGAIGIDFGTLTAIALSDGTKIENPRFLANAKEKIKRASKQKRRKKAPDHKKRVRGSNRWKKASKKVAKLQTKVASQRQDWAHKVSTQIVSCNSMVATEKLNIKGMTRKAKKGKRKRQKSGLNRSILDVGWGITRDMIEYKLSECNGVFVEVPTQKVKPSQTCPKCGHQEKKTLEQRIHECKQCGYTNDRDVASAEVMLSWALGTSVPNRGGESSTEKPTVKSCGGFQQLASVKRQKLQSQRSGLE

SEQ ID NO: 59779 - protein, 391 aa, Gemmatimonadetes sp.
MASESKLVSRTVSRKAYLSKAGHRNLGELLAQLTWLWNIALHRRKQAWIERAESVSYYDQCKVLTKVRRDPLWSRFPVMAQRSALQRLDRAYKRFFDRVKAGGEKPGHPRFKPGDRGIRSFEVTTPVKTNGRWSWVNVKGMGRIRFRGRPPDGRIGLIRVCRTARRVKLQMVVEREVEVAPDRRPMVGIDMGIRARCALSTGETVPGVKLDRRELKRRQRRLSKAKRGSRNRRKRKAELAREWQRVREREHGALHELTAAIVRDYSANLAVEDLRIPNMVRNRRLSRSIHEQQWGAIVRMLGYKAESAGGSVTAVAPHHTSRECSGCARRRDMPLAVRVYRCTECGLVLDRDVNAARNVLQRGLAALNPGGDTPGCAEPTGRAGAVLPASA

SEQ ID NO: 59780 - protein, 220 aa, Cyanothece sp.
LGLDNLAACFDTEGHQFLIDGKKLKSINQWYNKRNAELQSFKDKQGIKGFTNQQARLYQWRNDCLRDYLNKTARIIINHCLTHQIGKLVVGYNPGIKQEINIGRSNNQNFVQIPFWQLRQKLKALCSRYGIEYFEQEESYSSKASFYDQDKIPVYNADNPSQHKFSGKRIKRGLYRTKGKHLVSSDINGSANILVKSKHRLNFERVSSGFLANPLRILIS

SEQ ID NO: 59781 - protein, 543 aa, unknown
  TnpB Polypeptide
MYKLSYRVRFPKELEEVYDFLQKEINRVLNDEEMRKKIETIDSELIKGEYWKQMRKAIGEETQYKWKKEKIMPTVSLYFYAFAEQIRQVQKSQKDQKKLYKALQKYGNEDTNEFYEYCQKNNIPYSKNKIKNLQRCKAEPEMAREVRFVLDFAFINKQSSYLDGDNVFHYQVYNKDKKVEWKEMPIIIHLSSKYELEARISKPRFSKDRDGNYYGTIVFDYERRVFDGEGKNIGAIDLGKINLFTFSYVEPNGEYSENYYKNSKKLDRLNKKVQKLKIERKALIDKNNIINDLLKGKKEIKYTTEELRRKYEVREIEKQRISRKISNMKKNIAREMAVEILELCKMSDCKTLFMENLSWLGTTGGRWNFREQQNEIERILDMNGIDVYYVSAKNTSKEHPITKAIGNVVERDIVWSNGDRMDRDRVSTLNQVQREGKRRTKNRKIEKKQGYKITKLRKKDKPTPRQLKRSFSTRRLKLKCLDSLLNENTKRNTQMAVFYPRISTVLTSNKTGRTWTCIEKFSFTSYNNVGSFENVYSYLLPLY

SEQ ID NO: 59782 - protein, 278 aa, unknown
  TnpB Polypeptide
MEYLPRNWKGKKTSAPALEKRHRRYFLRFSCTEEVTLTKTPVKEQIICSVDLGINTDAVCTIMRSDGTVLGRRFIDHPSEKDRMYRTLGRIRRFQREHGSAQTQGRWAYTKRLNTELGKKTAGAIVRYAEENHADVIVFEYLEMQGKISGKKKQKLHLWRKRDIQKCCEHQAHRKGMRVSRICAWNTSRLAYDGSGAVTRDWENHSLCTFQTGKRYHCDLSASCNIGARYFIRELLKPLPATERSLLEAKVPPVKRRTSCVYADLRKLHSEMERLKAA

SEQ ID NO: 59783 - protein, 332 aa, unknown
  TnpB Polypeptide
MSYADSDRALTLLKRKPETAWLNEISSVPLQQSLRDLQQAFSNFFAKRTGYPNFKKKGTAGSARYTRSAFKLSDGRRLLIRKIGVIRIRWDRNLPSAPSSVTIMRKPSGRYFVSFVVDVDIQPKEMTGRNIGIDFGISRLATLSTGERIANPKHGAKRAKRLAMLQRRLMKKQKGSKRRQKAKLAVAKCYEKISNSRKDALDKLTTKLITDFDVINIEDLNLNGMAKNHSLAKSVRDASIGVAVRMLKEKADKYGKLVIQVNRWLPSSKMCSECGHIVSKLPLEIREWSCPECGAIHDRDVNAAKNILAVGNTVAAHGFGVRDAMPSGMEPC

SEQ ID NO: 59784 - protein, 385 aa, unknown
  TnpB Polypeptide
VIFGQKYRIYPSDTQKILLEKHFGCVRLTYNLGLECKTMAWSGSKKNLTYFDIANQLKELKSEYPFFTEVNAQSLQMALRNLDTAFKNFFRGNANFPNFKSRKYKQSFQCPQSVRVERYKLYLPKFKEGIKIVLHRPIKGTIKNTTISKTSTNKYFVSFIVETKKGLPIQKASINKIGLDLGIKSFIITSDGEKFDNPKYLKQSLNKLKWLQRRFSKKKKGSNRSKRFSLKIAGIHEKIANQRKDFLHKVSDVITKQYDTICIENLKINNMVKNHKLALSISDCGWGIFEQFLKYKAEWRGCNIIQIGTFEPSSKTCSNCGYINSKLELKDREWICPNCNSLLDRDINAAINILKFSSRYLPVERRLLTDVELPTIVGAMKRQNS

SEQ ID NO: 59785 - protein, 370 aa, unknown
  TnpB Polypeptide
MKKNKAIKYRIYPNKEQQSLIFKTFGCSRFVYNYMLERSIEAHKNGESFCTRNSFSYLLTSIKKEFLWLKEVDSKALESANNNLAAAFSSFFKKNANFPKFHKKKLTGSYGTRGSIVLLDKGIKLPKLGKVRASLHCMPKKDWKLKSATVSQSSDGKFYASVLFEYESDIDYKVDLNNSIGLDYASNGLFIDSNGKRGTNHKFYRKAQKKLAKEQRKLSRMKGSKKNEPKSNNYIKQLRKTNKIHRHIANQRNDNLHKLSTEIANLYDVVCVEDLNMTAMGNKGFKNGKVTYDNGYGMFLDMLEYKLSDRGKALVKVDRFYPSSQLCSCCGNKKKLSLSDRKYICTCGLEIDRDLNAAINIKNEGLRLLA

SEQ ID NO: 59786 - protein, 552 aa, unknown
  TnpB Polypeptide
VSGLRPAAGPFVAAAAAGTRVRTRLRVSWQDEAVLRAAGTHLGSLAGRDLAGRCAGGRLDAKGGAGSRARRKRALTAGSSSRWAGAITRISEDQVRLAERNLRAEKASLAARIRRIEARLPVPAGGKAGRVRGYATPAGRHAKTVRLRALKARLASTGRQLGAGTVSVTRGGKALLRKRNNLAAAGLTQEQWRQQWESARLFLTAGGEKDKAWGNETIRWNPGEGWLEVKLPAPLAHLAHLAHGRYRLSCPVEFTYRGDEVAAQAASGAIRYDISHDPVRGRWYIDASWKAAPAPAPSLGELREAPVLAVDLNHGHLAAWAVTPDGNPAGPPVTICLTLAGLPASQRDGRLRAAISSLTRLARQHGCQAVVIEDLDFTDAREQGREHHGSRPAHGRRGRGFRRLVAGIPTGKFRDRLTQMAANAGISVIAVDPAYTSRWGREHWLAPLQEQASPTATGHHAAAVVIGRRALGHRARRRAGVTGGDQRISRRRAAPRAPVARQTTRNGRPREAQRQPPRWPKTATADRTRPPNQATQDRPGPSASQDHVLLAQ

SEQ ID NO: 59787 - protein, 417 aa, unknown
  TnpB Polypeptide
  misc_feature (4)..(10): Xaa can be any naturally occurring amino acid
LDIXXXXXXXQRVLQELAEAFKSWYAKQQNGDTRANPPHYRKRGDDHPRSTITFKNRGFKCDPKNSRIRLSQGEHLKDYWSDFILCEYQTRPNIDLSTVESVQQIRAVWTGTEWELHIVCRVEVDTPESTGDKTVGVDRGITNFAALAYEDGHSELYPLNCLKQDDYYFSKHIAECDETASDQSIRLNHKKSTRRTHYFHALSSHIVEQCMENGVGTIVAGDLSGIREDDGEAKNWGKHGNLDLHSWAFDRFCDLLECKSKAEGIEFQKVSERDTSKSCSSCGQKRDANRVERGLYVCDRCEMVANADVNGAENSRQKVTPSLACDGGERSNGWLAQPSTYLCDTETGSFEPREQVVSETTISHISGAVPWESSPTGGEDVKSDRRECGEPGSLRSTGPNMLDRTCKSDVLVSCILK

SEQ ID NO: 59788 - protein, 343 aa, Geitlerinema sp.
VSDEGIKLPQLGWVRVRWSRKIPDLFQVKQARIVRKASGYFVMLSLQADIDIPDTIPHGHPVGIDVGLEYFLSTSDGEQVKRPRFFNNLHRKLKSLQRRLKKKQKGSANWLKLQKKIARVHQRIADTRKDWHFKLAHHLCDGAGMIFVEDLDFRIMAKGMLGKHTLDAGLGQFVNQILPWVCWKRDVYYGKVDARGTSQECPDCGAEVRKDLSTRIHHCHNCGSIEPRDVASGQVICSRGQRQIENACGVEATGDRVTDSSWLAVKQEIFGATQGISLHTRNGLLGEDVNAAVVNSLKQGLGSTPKLTTLHRLNGLRRSGQPKKWEKCQTDSPAGVERCKPLD

SEQ ID NO: 59789 - protein, 399 aa, unknown
  TnpB Polypeptide
MTHKAYKYRLYPTKEQAVFLDKHSGCCRFIYNHFLALWRDTWKNSKQSISGFECKRQLKALKIEFPWLKEVNSQSLQESVLNLEKSYRRFFRGLSKYPVFKKKRNRQGFTVPQNFEIEDEHLYIPKLETGIKIKLHRSMSGIPKSLTISKTSTGRYFASITCETVIEKLPLVEQSVGVDIGLTAFATLSTGEKVEHPRMLKASEKHLKKLQCQMSKKKKGSHNRAKACLRVAILHEKIANQRNDFLHKLSFRLINENQVICLEDLNVKGMIKNSHLSKAISDSGWGEFVRQTKYKAEWYGRTVKQIPMFYPSSKECSVCHFVNSSLELSDRTWTCPNCGIVHDRDENASNVILKVGQDMPELTPVERMAAVTSIMSMKQVNLKKQETLASNKMHGILIP

SEQ ID NO: 59790 - protein, 203 aa, unknown
  TnpB Polypeptide
VPYTNISLKPTSIVGLDLGIKDFIVTSNGEKLKNEVKINEKRLKGLQKWLSRCKPGSKNRYKVKLKIQRLYLKIRNARKHMVYKLANKMIKENDIIAIETLDVKNMYQVHKIAKYLKNIPISEFVRVLKYKSKWLGKKIIEINKYYPSSQSCNRCGFKSEEVKNLSVRKWTCPRCGIIHDRDINASINIMFEGLKIYMKESII

SEQ ID NO: 59791 - protein, 350 aa, unknown
  TnpB Polypeptide
MFQIRKALNYISKYIFDNNCLNQSKINTDTYYYLRETYNLKSQMAQSCIKTAIAKYKTNKSNGHDFNLVQFKNLEYDLVWNRDYSLTKNIFSINSLHGRLKIPYETKGMEKYFDGSYSFGTAKLVYKHNKYFLHIPMTKDYPQTTPFEINKIVGIDLGINFLATTYDSYGKTTFYNGRHIKAKRGHYKVLRKQLQECGSKSAKRRIKSIGSRENRYVNDINHTITKALVDKYGANTLFVLEDLTNVRTATEKVNINNRYVSVSWSFYQFKQLLEYKAQMNNSMLIVVNPKYTSQTCPKCGHTEKANRDKKKHIFKCKNCNYQSNDDRIGAINLWRKGLEYIESNSKEHSE

SEQ ID NO: 59792 - protein, 1063 aa, Sulfurovum sp.
MLKAVKVRLYPNAEQKQCIASQIGGARYVYNRALTLRKYVYTKFGIKIGKFALINHITKLKKRANTSWLKEIDSQAIQQSIANMDKAYQHFFKGGGYPKFKSRHHSRQSFQYPQRVKIENNKVYLPKVGWVKCKGLRKEFVGKIKTVTVSHEAYQYHASILVDTEEKKTVISHNSKSVGIDVGVALVVADSNGKKVKPLDLMRELKKLRTKAQQLSRKKKGSNNRAKAKAKLAKQNLRIANMRKNFLHKLSKSYSQNQTVVVEDLKIKNITYLSVGYTATMLLIKLGLPSGRRIHLIYGWSINTYLALFYYNNPLIYRPKRTPNMAQIENLDHVLKTHKLSKAEYEEILRILEGRHPNIVEIGIFSAMWSEHCSYKSSKKYLNGFPTKAPWVIQGPGENAGVIDIGDGMAAVFKMESHNHPSYIEPFQGAATGVGGILRDIFTMGARPVANMNALRFGTVNGNSDIARYQRHLVRGVVDGIGSYGNCMGVPTIGGEVSFDESYNGNILVNAFALGLVKSDEIFLGVASGIGNPVMYVGSKTGRDGLGGAVMSSDSFTEESKSLRPTVQVGDPFTEKLLLEACLELFKADLIVGIQDMGAAGLTSSSFEMAGKTGAGLILHLDKVPAREEGMTPYDFMLSESQERMLICAKQGCEQAIIDIFEKWELDVAVIGEVTDTARMELMWHGEKCADMPIAPVSEEAPMLDRPTARPQYLDAVNAKTLSDYKTVDNQEAYETLLSHIEVSDKAWVYNQYDSMVQTNTTKGPGSLDASCIRIKENGKALAMSSDCNPRYCYIDPRKGAALAVVESGRNVAMSGARPLSITDCLNFGNPENPEVMWQFAESCEGIKEACLALNTPVVSGNVSLYNETNGVSVFPTPAIAMVGLNEDENKILPSAFQKEGSLVLLVGETKGEFGASLYIKALHGETTGSLPAFDYSAELALWELVIEANKKGLLNAAKDVNVGGIAIALSKMAAVSSMGVTVSVTLEASRDIFDESQSRALLEVSHTNMVAVVAMAKELGLEICVIGAVGGDKVSINDVALPLERVQELYFTTFAKTIEQDL

SEQ ID NO: 59793 - protein, 518 aa, unknown
  TnpB Polypeptide
MSPFRAGCQFIKVFMGGGDMEKVRRAIAVEIENPPPELYAVEIAYRRIVEEVAAYVAERGKLEKEKYGELYRRFRKQYPLPAQLIQQAINQGVETGKSFLELRRNGRIHKPRPELRRVSIRFAKDSWSYKKTISSTAPVKLALSLPGGRRKVWIKPHRRFWLYWWKVLSKETELASTLILKRRRGRWYAIFIFDLAPKREPLAEAVAFDVNENSVAVAKLSLLSTVDAVARWNRQYVDPAVYSIKTDFGRLAKRYEAVRNAKLEELKRKYPYAGRDEKERRQNVADTREFRKFVRRLRERRRKEGRVRQTAREITRSPAVIITEELGKNPQEEMIGGEEKKVKKRELRHRIKQTPFKKLLKSIEDKATEGGSVVFYVSPYRNSKVCPIHFTLLRDNGGWHTLHCPRGHPVDRDAAAVLNMLWKITPEGVVKGVWWDLKEVGKRLGKGIVQREAVKKANPIVPQPIVYAVWVSLKRLRASSQWPAVLARAAPMTPAQGADEGGTRTPPRGAPAPRGGGQ

SEQ ID NO: 59794 - protein, 453 aa, unknown
  TnpB Polypeptide
MTAVVQAYQFALDPTPEQEAMLRSHCGAQRYAFNWGLARVRANLGQREAEKSYGITGGDLTPSLSWSAWSLRRDWNAAKETAAPWWAENSKEAYAAGLANLAAALGNWKDSRSGKRKGPKVRFPRFKGKRAGLSCRFTTGAFGLAGAGRRHVQLPRIGVIRTHESTRKLARRVDAGTARIRSAVVSRCRGRWLVSFSAEVTRQDPPPARPGGVVGVDLGVKSLAVLSTGEIVPNPRHLEVAQRELRRLQRQASRRRGADKRTRAAPSARWRKTQARITRLHAAVASARRDGLHKLSTRLADTHGTIVVEDLNVAGMMSSKRLARHVAGAGMGEFRRQVTYKAAWRGGRVAVADRWYPSSKTCSGCGAVKAKLRLSERTFTCGQCGHALDRDLNAALNLAALVSSRSWRATENEPDGNPCKTSAVLAAGTAAGRPMRSTPCREATAHDTFSHVS

SEQ ID NO: 59795 - protein, 424 aa, unknown
  TnpB Polypeptide
MLNPVNRKKAHLTNSDRMIRLGDVMEIARTVKIKINLPREAAVRTLNTWTEACNLVSRIAFENGCLSNAIRLQKLAYRPAKEVGLSAQLAGSCIRHVASEYVAIRSNKRSPKAPCQFRKQAVILQGGTRGRDVSLRASGLSIWTVDGRFKAVPFQGPPDLEDKLNNWNLGDGRLSVSRKHVFLTLSFKKEVEPRTAPNDAVIGVDRGINVLACATDGKRHWMRKGGHTKHLRDRYSNVRASLQKRKAEHPTRSVAKVLKRLSGREARFMRAVNHEVSKAVVTFAERTGCPVIAIEDLEGIRNRRLRKVQRREIGRWAYGQLRKFITYKAEGLGMVVVGIDPRYTSQGCSRCGHTEASNRQGNLFLCKACGHSLHADLNAAHNIRLRGILARQALSEDGASHAPPKFAPTIRSGKPGRRRTSRQL

SEQ ID NO: 59796 - protein, 417 aa, unknown
  TnpB Polypeptide
MYLTVKQQVKHLTKEEYNILRELCRVAKNLTNQAIYNIRQYYFQEKQYLRYEANYHELKCSENYKLLNSNMAQQTLKDTDEMFKSFFSLIKLAKQGKYSFRHIKLPNYLPKNGYANLIISQIRIKEDNMLILPTSNTFRKKCKTKIQIKIPTVLEDKKIKEIKIIPKFNARFFEIQYTYEIQEEKINLNTNNALAIDLGVNNLCTCVTNTGKSFIVDGRKLKSINQFFNKQNARLQSIKDKQNIKKQTKQQYLISHKRKNRVDDYINKTCRYIINYCLINDIGTLVIGYNQSFQCKANLGKKTNQTFTQLPFGRVREKLEYLCKRYNINYVLQEESYTSKASFFDNDELPIYNADNPQTYEFSGKRVKRGLYRTKNNYRFNADCNGALNILRKSSVVDLSVLYSRGDLDTPKRIRIS

SEQ ID NO: 59797 - protein, 366 aa, Candidate divison MSBL1 archaeon
MKVEKTIKCKITDLTERKRKALEREYEGLQKYLHENEDIELYSANKQQAKRYYRKIKDGKEYPISVRKDLIDLKIMDNVVSKYWLKVRVASVYGGINVPLKPHTQIPVKGGGVEYCESKILKKDDEFYFHLTIEKTVQAKSSYSGLLAIDIGQKYLAVSVASHRNNPKFQGREIRGIRRHYNWLRKKLGNKKLKDEITRLSDKESRKVDQKIHEIAKELVEEADEHDELIVVGDLKGLRENSKNKGKTMNRIISNFPYYKFVKYLEYKANEKGIQVLKMNEHYTSQKCSRCGAAGKRANQGLFKCPRCEYEINADYNGAKNIFQRAKVALGNIPNVGVVSEPAHNSSEMVFTSGLQVERPRREASS

SEQ ID NO: 59798 - protein, 524 aa, Coleofasciculus sp.
MKGKSRASKTKQDKGSTMSSPTSEAIQLELPLFAIAESLPQSSETTLSDKLPICSLSTQEQKSSEILGQDSTSSGKDCAPYWTDLCGEISSRLLLPVVTDSQGLDSSLLSTWSSKTVATSWFSTKLYTALPQNLPKIYSPSSTSSLVECTDLESTVKKSNKTRIYLSPEQKKIVKKWFGVARFVYNKTIGYLQQPEKKANWKAIKGGILEALPEWCKEVPYQIKSIAVKEACQAVSNAKKKFKEGGGFSKMRFKSRKNPIQSCYIPKSAVKPQGIYYTILGEVTFKEPLPQSFGDCRLVFAYGDYYLAIPREEPRNVSDNQGRVVALDPGIRTFMTFFSETNFGELGRAANLRIQRLCFRLDKLISKISNAKCRQKKRMRLAANRIRGRIKNLVDELHKKVARFLVDNFDIILLPTFETSQMSLKAQRRIRAKSVRQMLTLSHYKFKQFIKHKAFETGKVVLDVNEAYTSKTVSWTGEIVPKLGGAKIIKSELTGQKMPRDWNGARGIFLRALVDTPSLRECIC

SEQ ID NO: 59799 - protein, 407 aa, Syntrophaceae sp.
MGQVYHMPMQKARRLIHKAYKFRLKATPQQSTQFTQIVGVCRLVWNLCLEQRKAVYSSRRMSLNSYNQLPDVTLLRHDYEWIKSVPSQVLQQKVRDLDAGYRNFFEGRAEFPERKKKGKAVDSFRFPQGFKIDNRRVFLPKIGWVGFFKSQKIQGTPKHMTVSRRGKHWFVSICCEDEQIIPVPKSKAVGIDMGIAKLCALSDGAVIENPVVFGQHKKKLAKLQRRMARKIKFSRNFYKAKAKITALNTKIADTRRDFIHKTTTGIAKNHGLVVLEDLRIKAMSRSAKGTMTNPGRMVKQKSGLNRSILDAAWGEFRRQLEYKVAWAGGVVVAVDPRNTSRKCPVCGHTAKENRLTQADFICVACGFADDADVNAAVNILRAGHARLACGEIGAVRPLDEAGTLEAA

SEQ ID NO: 59800 - protein, 442 aa, unknown
  TnpB Polypeptide
LGSTVYKNSYIGNIAQSLRFFVQVNNILDPMQRLQAYKFELRPNGEQSRKLRQFAGSCRFVYNRAFALQQENHGAGLKYIGYVAMANKLPEWRKDPQTCWLKDAPAHPLQQTLRDLDRAYQNFFSKRSGFPRFKKKGRGESFRYPEPKQFKLDPANNRVFLPKLGWIRYRNSRNVPGTLRNITVSERAGKWFFSIQTARQIEAPQHPSTSMVGIDLGIKVFAAQSDGINHLALNSFAKYRRQLSRAQRALSRKHKFSSNWKKQKARIARLHRRIANARADYLHKTSHAISKNHAVVCVEDLKVANMSRSAAGSQQKPGKNVRAKSGLNRSILDQGWGEFRRQLGYKLEWTGGQLISVPAHYTSQQCSECGHIAQENRQDQAHFCCMSCGHAQNADTNAARNIEAAGHAVMARGGDVRPELRTIAVQATPAKQEPAEAIQAFA

SEQ ID NO: 59801 - protein, 453 aa, Lachnospiraceae sp.
MAQVSYSAKITNAYRILDGTVRYYRDAVRYLAGIIMPEYDLLSTMDGPFVSHQRQLLIESWIHGTSRNTPRFREFDRRFYKFPSYLRRSAILDAYGIIDSYKKLTKLWEDDGCPGKRPRMNLNQCKMPCFYRGNMYICFTEKPDHVYKDNQEEWNIKVWHNHDWVWIPIVLKTSDVRYLREHCRGLKASAPVLEKRSKSYCLRFTYQRQSEGTFVKDVDVKRVVGVDLGVNTDAVCSLVEKDGTVAARKFINSPAEKDRLYTDLRVIKSAQKHGNIHNPRLWRFVHHYNDAIEITAARGIVSFAVQHHAQVIVFEHLDMRGKKIHGSMAQRITLWRKNSIQNRVEAEAARFGIRTAHVCAANTSALAFDGSGAVTRDPFNHSLCTFQTGKQYNCDLSASYNIAARYYIRALMKTTPAKKWLSVSAKVPGLDKRTTCTLSTLIHLAAEFRRCSV

SEQ ID NO: 59802 - protein, 455 aa, Natronorubrum sp.
  misc_feature (94)..(94): Xaa can be any naturally occurring amino acid
MAKRVVSRTYTASIRNQSRVQDDLDALGFAASKLWNVGRWTCSRVWDEGGHIPNHNELTTYLKSHERYDDLHSQSSQRVLQELAEAFNGWYGKXERYDDLHSQSSQRVLQELAEAFNGWYGKRRNGDKRANPPGYRKHGDEHPRSTVTFKAAGFKLDTKYNRVRLSQGSNLKDYWSDFILCKYQTQPDVDLSAVENVQQVRAVWIGEEWELHFVCKVEIEVAESPGEKTVGVDLGISNFAALAYEDGHAELYPLNCLKQDDYYFSKRLAQCDESNSEQATRLNHKNSERRTHYFHTLSKHVVQRCVEECVGTIVVGDLSGVREEHKTEESQNWGKHGNLDLHSWAFDRFTDLLTYKAEMEGISVEQVSERDTSKSCSCCGRTRKANRVERGLYVCDECGTTANADVNGAENIRQKVSPSLACDGGDRSNGWLAQPSTFLFDKETGAFAPQEQVTS

SEQ ID NO: 59803 - protein, 454 aa, unknown
  TnpB Polypeptide
MSREASHITVKASVSNHSQVTSALDAHGQSGSKLWNVACWTARRIWNETGSIPEDDVLKAYLKGSDVYRGLHSQSSQRVLEELAEAFESWYAHRRNGNTHHNPPGYRKHHHNDGTESHLRSTITWKQKGFKHDTDNNRVRLSKGKNHKENQSDFILCEYESPPGETVKDVQTVRAVYEHGQWELHFVCEHEFQAESPGEKTAGVDLGIVNFAAVSINGEQAHLYPGNAFKEDEYYFAKQIAKCNDSASRKATRLQDKRRARRVHYIHAVTKHIIEQCVAAGVGTLRVGNPKHIREDADGEPRDWGPHGNLDLHAWPFDAVLHQLQYKGAWNGVTVDAVDERDTSKTCSCCGEATQSNRVERGLYRCSSCGVVANVDVNGAENIRHVPVRVDGGAKIGSEVTQSSLIEFDSESSEKVDMSTGWLAQPVVNLFRRGEHGQSSGQGTFTQHVNSHEP

SEQ ID NO: 59804 - protein, 284 aa, unknown
  TnpB Polypeptide
VGFPPLRFGHKTFRVFEAHRLEGVKWKQGCFAQDAVGDWWLCLPVEYTPEPSVAPEDQVGIDLGLKDTAVTSEGERLESGRFFRGVESKIAQAPHVAPLALRGISYAALRSQRRGHRRQAKRLHRKAARRRADALHKFSRRIVNQYQFIVVGDVSSQKLVKTRMAKSVLDAGWGMLKGFLQYKGEHAGRSVMVVCERNTTRVCSFCSALTGPAGKDMLVVRQWRCPACGTGHDRDQNSARNILYVGLRTRASVRGNESSQDTIHLEPDTCVRAQEGSEWWRAAA

SEQ ID NO: 59805 - protein, 425 aa, unknown
  TnpB Polypeptide
MLKRNAKMTKNEKRKLTLQKTKEKRKSQVCKVYEVKVDKSSLSKEKTEHLNRLFLEAKWLYNHILSQENIFKIDCKVKKVQIMNKDKQFEEREFKHLSSSMKQNIYKRILTSIKSLTTTKKKGKKVGKLKFKSNISSIPGIFNLMRVECFKKCFRVRGLDQIPKESEIACIKLIRKNSDYYFHITTFQSKKEQIKTKQYISTDFGIKQTFNFSNGVKVDVKIKESKRIKKTQQKIARQEKHSKNRFKNRLKLQKAYDKRDNQKEDICNKIVSYLNTNFDYICVQNDNIAGWQRLYGKKINASIIGRTLSRLELLPKTIIVPRFFPSTQLCPMCSCKTKLSLSERIFKCSNCGFEEDRDVKAAKMIELEGLKQVKELVPMEYGELTLVENKTSTSMFEYFKTIPNVEASLCSLKQEDSLESVHSHL

SEQ ID NO: 59806 - protein, 269 aa, Clostridium sp.
MKWIKEVSSKATKQAIMNGDKAFRDFFKGAKGFPKFKKRKNQDVKAYFLKNNKTDWTLERHRVRIPTLGLVRLKEFGYIPVNSMVKSGTVSQKAHRYYVSILVEERYIKISNSNIGIKVSNSNAGIKIFNPNNEGLGIDLGIKEFAVCSDGIKFKNINKTSNVKKVEKKLKREQRKLSRKYESLKIRNKNIEEGRATRQNIQKQVVKVQKLHQRLRNIRTDYINKIVSSIIKQKPSYITIEDLNIKGMMKNKHLSKGLQVRSFLNLKLN

SEQ ID NO: 59807 - protein, 442 aa, Brasilonema sp.
LLKDYACQQVLLNRSLLVHPILEYLCNQAQRLTNCGIYYGRQVWFKERRYLKKFDLINELKNNRNYQSLYSQCAQQVLLSVAESFKSFYELEKKNRAGELNQKPRIPSYRKNGLTVVTYPKQALKLVGQGIRIPLGQTVKAWFGIDSFTIPAPSNLDFSSIKELRILPRNREFYAEWVYEQQPVRQRKMNEKWVLGIDPGVTNWLTCVDNSFDGNSFIIDGRHVKSVNQWYNKQVAELKKGKAQGFWSKKLATITEKRNRQMRDAVNKAARIVINYCLKNRIGNIVFGWNVGQRQESNMGRRNNQTFVQIPTFRLKERIRQLCKKHGINFIETEESYTSKASFLNRDILPTYGEKPDRWKPSGRRTKRGLYKSLWYGTINADCNGAANIIRKVDTTWGFNLDRVSRGALTRPTRIRIWVTAKNVKGHGFNLPCSINLESPFL

SEQ ID NO: 59808 - protein, 307 aa, Lactobacillus sp.
VTNQNTKLKGNYLIISKLQVKIKLDPKIKKIQRVAFKPTYGGYRLIVQYKTNKEISYLPDNGKYIGIDPGVDNAFTCAGNTGACPLLINGRSLKSVNQYYNKERSRLKSLQAKYHQLESTVQTKQGAKPVYQETKAMQRLTAWRNAKIRQFAHKASKRIVNYALSCEANTIIIGNNKSWKRSSDMGKRSNQNFIGILHKTMIDLIQYKANLQGITVITTNESYTSQTSALDHEKPCWENGNRSRQKQDKTLINRRIHRGLFKTNDGRLINADVNGALQIIKKAFPKFSFDKGIAGVVLRPIKWTPLI

SEQ ID NO: 59809 - protein, 418 aa, Kibdelosporangium sp.
MIVVHVRYRYRIEPSEAQRAMLARTFGCARMVFNDALRCRDEAYRAGEKITPTEVQRRVITEAKLRTERMWLSEVASVVLVQSVRDAHQAFANFFDSATGKRTGRKVGRPRFKSRKDNRQSMRFTRNGFSIRSNGRLYLAKIGDVVVRWSRQLPCSPSSVTVIREPDGHHYASFVVEVEPTPLPVIGQEAGVDLGIARLATVADTAGGRTDIGNPKYLHRKQRKLGRLEREKARRVHGSANRAKTQRKVAVQHGKVARARRDYHHKQALTLLRENQVVYVEDLNIVGMARNRRLARAIHDAGWSQFVRLLEEKAERFGRTVTKVSRWFPGSKTCSSCGHLMDVMPLKVRVWRCPECAVVHDRDYNAALNHLAAGRAERLNAGGAPVGPPSGKHEAMKQEAPSSGQASRGARQRAYCAE

SEQ ID NO: 59810 - protein, 468 aa, Tepidiphilus sp.
MFSSGMLAVLARRTIMPVLLAVIWKLIDPVRGKPRPSGRGRIARTPLAYLSLLFMKSRVSRMQRFQAFKFALMPTGEQERQMRRFAGACRFVFNKALALQKERYTQGEKKLGYTELAKELTAWRNGSETPWLKDAPVHPLQQALKDLERAYTNFFAKRAGFPRFKKKGQSDSFRYPDPKQIKLDQGNSRIFLPKLGWLRYRKSREVLGTVKNVTVSQYCGRWFVSIQTEREVEQPVPQATTAVGIDLGVVRFATLSDGTVYAPLNSFRRHEEALRKAQQAMSRKKKFSNNWKKAKAKVLRIHARIANARRDYLHKTSTAISKNHAMVCIEDLRVRNMSKSAAGTAEAPGRNVRAKSGLNKSILDQGWFEFRRQLDYKLAWRGGHLITVPPQNTSRTCPCCGHVSADNRQTQARFLCVECGFEENADLVGAINILRAGHARCACEVSGAVMPPAAGTHRSASRAAQCRT

SEQ ID NO: 59811 - protein, 175 aa, unknown
  TnpB Polypeptide
LARTFGWARYVYNWARRLRTDASYERQERIGYHEASAALTPLKQHPETAWLNEASSVPLQQALRHLDSAFRNFFAGRAQYPTFKQKRGRQAVTYASSAFRWEGKARTLTRAKMDAPLDIHWSRAVTGRPSTITSSQDTAGRSFVSFFVSFLVEEEIQALPVVNAMRGVEVGLKLA

SEQ ID NO: 59812 - protein, 309 aa, unknown
  TnpB Polypeptide
LVERGVERAAATGVAPPGQRLPQFLRGARAVPHVQAEARAASSDVREQRLPLGGKGPHPHAGQDGRAAGHSLVAGCHRKAFHHHQFPRHRRALLRLLLRLLLGGGGDPGPSGCQRNEGSGGGLEIGLKDVAVLSSGEKIANPQHLRRSARRLTHAQRNLARTQKGSKNREQARLQVAREPARIADQRLAGLHQLTTRLMRENQVLCVESLTVKHLVRNHTLAKAISDVGWGERVRQVEYKANWYGRTGRTRAKIDRWYPSANVPNAVTTAGRCSTLCHWTCASGPVLNVASGMIGMSTPPRPFLPWGSR

SEQ ID NO: 59813 - protein, 265 aa, Propionibacterium sp.
VEDGRGSRARDARLGALAQHAAPPRIPRRRPTRRVRERVLCCPQRQQSADRNQIARVSIRPRALQTDAAVGLDVGITTLVTLSTGEKITNPKHEKKDRAKLAKAQRNMARKQKGSNNQAKARLKVAKVYARIADRRRDHLHKLTSRIVRQNQTIVIEDLAVRNMVKNRSLARAISDASWLELRSMLEYKADWYGREVIAIDRWYPSSKTCSNCGHLLQSLPLNVREWVCAECGTVHDRDVNAARTILAAGLAVSACGDGVRPPRS

SEQ ID NO: 59814 - protein, 290 aa, Lactobacillus sp.
MQMALNDLCNYRRYCWNNALATWNILYEAYCLNADDNSKPNQRLVRNELVVNKADWQYSLSARTLQLAVADLGTAWQNFFDQAQSDWGRPKFKSKRAPRQSFKTDRAKLVAGKLRLDKPRDVTGWYDIRFNKQCDLSGDLKSVSIYRENGIYWACLNLEVTIKPKVKTNQVTAVDVNVGHLNYTLGVLKTLPLKLMHLYSRIKFYQRQLARKRQVDGKQATKMKAYLAMKNKLQRDYRKVTDCQHDLMHKFTTMLVTQFDTIVIEDLAVKEMQMTHVASKGLHRSMFGYF

SEQ ID NO: 59815 - protein, 311 aa, unknown
  TnpB Polypeptide
VHLDLEPSKEFYKLLARGFKPKSHTKIKLDRKNRKAIFHISLEKEVKIYRPENIIKPVDVNENSVATLYEAFAAILETDLAKTTLGYSYRKESIQRRNGSYSRETRKAMEKLKESEKKRDYRWKTASLIVREAMRMRGVIVIERISGEDIRVMIARYRNKQLRHRIYQSALKGELNAIIDKAREYGIPVLMVDPRNTSKICPIHKAVIEYGEDRIGVCSKGGERWHREVVALINIYLKAFEALHEGIAQKGFGVPSIDGSPVPLGSTATSEPIEIPRSLWGRWKFPDATGLKTLWIKKQSNPKQMNISDNQ

SEQ ID NO: 59816 - protein, 249 aa, unknown
  TnpB Polypeptide
LDIKEDRPEPYQPRDIIAVDINERKIVYGDHVINGERDTKIDKAHRWKLLAENLQKRYSSTRYPAWRRRRGILNRVRSYHRKARNILEDWARKSALEILGLALRLQYAVAREDLTGLINSLRRIKSKDHRTKLIIMGYSRLGEWIDWQAMKRGTPLAIVDPRGTSSECPKCDAEMIENGYRRLRCPRCGFEADRDVVGKLNIRKRALKKLKIKVIPGGSLTTPNCPPNDRCKPEQMGGTMNRPKGTLAL

SEQ ID NO: 59817 - protein, 506 aa, unknown
  TnpB Polypeptide
MSGGGNPRGVPTRDPDPLQAFRKEIERRKRSRRRTNRVALFPNRYEEETLFDIGLACARLWNELNYEKRRAFFNRELTPRKRDEINKKYYHKYKEMLGVNAGQVVNKNDEAWNAFFELLDLRNRGRLPPHIKKVSPPGYWKDRLTGKKEIHILIRSDRYYLEPINEGEGYLVLVDFGLRIRYAGRIRWEGKQGRLEIIYVNGRWFALVPIEVGVDPPKSNKKGYVKPIHDDEEERKKKKRRIVNPRSIRQGDPIGDKEAFMDMGLNNLFAVVISDRSAMLIKGGTIKSEYYWWKREIATYQSVRDVLRRLGISTWIYYHEKYLDAMYKRDEMLRHLYITAIRFLADELYRRGVRKLYIGYPIMLTQNNGNEYNTNIWWFRKIVLWIVDIFREYGIDVEIVPEDYTSQRCSICGIRHKNGRKYRGLYICKKTGKKINADINAALNIARRLGHRIKITKKIESYLVTHNGIKPLIPRQRANTRDPSIETPPFRAGRGHFQRLMRVPLL

SEQ ID NO: 59818 - protein, 372 aa, unknown
  TnpB Polypeptide
MLLRRRCIGVFYKRYRDQYPWMPTRVIKGSYRDAARRAKSFRELLKKGRAYIGKPEVRRVKIVYSDDQDWGSRMSIMSIMLRTHRGWIELRYKGNRQLHRYLYSGWNLSSELKLECDGGLIAHLAFSRSFEITYDPRNVVSLDVNENNVTIAVFRGGMLVEAIGVETGLGRIVIAYSVRRERISRRRSIVERGVKRKLMKLREGDRKQDILYKVASIIEELARENKAIVIGDIDGDDKERMERVKGRRLRHRIHRWSVAKLIKLLEDRPIHVVRVSERGSSGVGPFTKKRIDGYGHLVIRTAVRGNNGRYKVMKIVLRIAYVDGRVFERDVVGAINIELKYLSSGGRPVAFGSTGTHVVWVKPMNPHWGAAR

SEQ ID NO: 59819 - protein, 383 aa, unknown
  TnpB Polypeptide
MDYILQTIIINRKQVLNLSNKHHITVHHIKLFKPTKTKQKKLNLLLKNWNKAIRSALKIIKHWGFTAYTRSHKNTYRVLRNDFNLPSQVAVEANRKAVETYKSADKKYRDNVQFHKAVEVSLVNNKGFELINKEGRYIAKIPIEGRKSIYCPLAFGKYQLNKIINPKYKLKTAKLYKYNDEYYLDLIMEYKQHKRETDTILGIDLGIVKLATFSIIDKQENILHQECIKGKKLRFKRMRCKNKRKAKARSSGSNTTSLIKENRLCKELNFKIANRIIKLADKHNSLIVLEDLKNIRKNITNDNRLNNYEKNSWAFYQLKQLIKHKANLKGIPYQEINPKDTSQICSICDKKGYRLSQNRFLCKDLHLQNADYNASINIAKRAI

SEQ ID NO: 59820 - protein, 328 aa, unknown
  TnpB Polypeptide
MAMSLNGAKTNTVQTTTTLASCAAVPGPSKGYSTLRTVVRTATQSRAVTSAFVVLHANNSPSVLLPFYPFLYLSQFGGVRYFAAGDSFPGFGPSRQGEKWFVCFAAEVEAQSLPESNEQVGIDVGLEKFAALSNGEFVENPRFLRKDEKALKKAQRKLAKQTKGSRQRRKAKKVVARMHERIRNRRYDFIHQTARKLVNRFGLIAVEKLNVKNMSHRPAPKQDDETGEYLPNGHAAKAGLNKSIGDAAWFLFRKVLTQKAESAGRKVVNVNPAYTSQDCSGCGYRPDTKKTLKDRWHLCPQCGLSLDRDTNSTVRHLKIAVGQHSVPA

SEQ ID NO: 59821 - protein, 442 aa, Richelia sp.
MSKAKKIKKQMGVQQILLHPDKETEALLQYLCQQSGKLYNCGIYFARQTFFKTGKLLTGKFDLAFEDSVSKTMLAQSMPSTPMQQTLMSVVEAFKSYRELKTRHKRGELHFKPKPPNYLKGSKLFKVAYPNSGGQKPKLINGQLRFSLGLTVKRWFGVGEFFLPMPSNIDFSKIKEFTILPKNGAYYLECSYELTPQIPNLDFEQALSIDLGTADNLAACVDTNGNSFLIDARHIKSMNQLWNKKVATYKENKPQGFWNPWLDRVTRKRNHQLRDGINKAAKLIIDHCLKNGIGNLVIGWNEAFKTNAKMGRINNQKFVQMPLGKLKDRLEQLCKLHGIKFTETEEAYTSKASYLDGDSLPKYGEKPKGWKASGNRTRRGLYRTSKRYLVNADLNGSANILRKVSRNLGLDLSRLFRRTLTTAARIKLWHGSSKTPLHCPNL

SEQ ID NO: 59822 - protein, 373 aa, Kribbella sp.
MWNLGLEQRLMWRPGRPAAPGYAAQCEQLTDARAAEPWLKAGSQTVQQQALRNLDQAWRNFYAGPHGRPTWRREGVHEGFRIVGAAAQRVEKLNRKWGRVLVPKVGWVKLRLSRKLPDAKSYRVTRDRAGRWHLAFAVIPEPIQAPGNGDVVGVDRGVTVSAALSTGELLSCPSPSGREQQRFKHLQRKLARAKRGSNRRGKIRAAIARFKARESDRRKNWVEHTTTDLARRFDIIALEDLRIRNMTKSARGTIEAPGRNVRRKAGLNRGILAQGWGLLVQRLEQKAPGRVEKVNPAYTSQTCSACGHVASENRENQAVFRCVACRHKANADVNAAINIERISAAGRAVDARRETAVLVSEKREPQHAPPAVA

SEQ ID NO: 59823 - protein, 408 aa, Kribbella sp.
MSAPADSMSAMSRFRLYPTPAQQVTLLKHCQHARYVWNLALEQWSMWTADKPRTPGFAEQCRQLTEARAASGWLRAGSQTVQQQALRDFDQAIQHFYAGIHRRPKWRKADLHEGFRIVGAQASRIVKVSRKWAQALIPKTGWVRFRLSRAVPDAKSYRITRDRSGRWHIAFAVIPAPIPPPGTGEIVGVDRGVAVSAALSTGELLRCPGLSITEQARLERLQRRLARCHRGSGRRQRTQAAIAKLCARGADRRKDWVEKTSSDLARRFDIVRVEDLRLTQMTRRPKPKPDSARPGIYLPNRRRAKARLNRGIRANGWGALVRRLEHKAAGRVERVNPAYTSQTCSACGHRAPENRKSQAVFRCAACGHQANADVNAAINIAAGRAVSARRETPTRVPPKREPQLTTST

SEQ ID NO: 59824 - protein, 350 aa, unknown
  TnpB Polypeptide
LLLTFKVKHGRDFSQELAKARKIAEFAVRTRSRSSRDVKHLGLKSAIANQILRKYSCDRKAKKVNKIVLTVPGQSIRTDKAQRTVKVSCLKLELQYRFRNDFEKINQIELDGQYAYIIVSVPELKPIETGQFIGVDRNTTGHCVVVANPQTGKVWKLGKSAEHVHKKYKTIRRTLQKKGKFRKLKTTKRRETRKIRDLNHKISRKIVQIATANGCGIKMEDLEGIRENRKHARSFQYSLNSWSFYQLQQMIEYKARLQRIPVAYVDPAHTSQKCSRCGHIGDRNGKEFKCPSCGHVEHADTNASFNISTALAIQMGATRLHADRDACKGNTDTPQGATPMNDGDPRTPWL

SEQ ID NO: 59825 - protein, 577 aa, unknown
  TnpB Polypeptide
MQLTEQFHVPAEHHEACGRLTTLVQQHTRRLLAGEYWSEDHLEALSDHTGQSYTYIRDDEYDAFADVEEYVYSRFKRCVYHRVTHVLDAHTDESHAFQFVRETVAERKIRRIGWQRLRTRLFDEDSPYIEWGVLESVVEQLNEYVDCHGRFPDTYTQLVETPKPNGTLPYAPDKGDYHIHDLSIEDGDVVVVLNAPDSLSPDSYHDWTDHELRFPVHARFHEMVEHGTLKAPTLHASEHGYTLDVPVALPEQDAASVAGRVLAVDLGVKKQATAVVLDESDGDHHQQVGPPAVLDHPAKAKLFRVHADAEGINDRLAALRRQGRAHTDRFDHLLSEYRQTRRTERRLRKQIQHDLANKLVWLAMESGCETIVFESLGQLDAPEASGAVAWSIAAWARGDLLDHVAYKTGLVGIEFETVNPWGTSRYCPRCGERGQTVKAPDDHTEQRHGGHFHCPACGYECDRDVVGAVNVGRKHHSESKIEEANPAAYTEAGNHASFPSPSGARSTGVQSATDQQEQDQASGRQTHLSQCRVSSLAAKRDERDMGGLHYHHGRDRGQRRSSGSITRYVLASTTECD

SEQ ID NO: 59826 - protein, 410 aa, Streptomyces sp.
MQLRYSFRLTPTPGQRTALARAFGCARVVYNDAIAAREKARAEGRKPPTMAELSAMLITQAKQTPERAWLAEVSAVVLQQSLRDLGAAYAAFFAGLKGERRGPRVKPPAFKSRKGNRQSIRFTKNARFKIDDKGRLVLPGVGTVPVRFSRTLPSTPSSVTVIKDAAGRYFAGFVIETDPATDLAAAPDADDLPTVGIDLGLKHFAVLSDGTKIASPRFLRRAEKKLKKAQRELSRKEKGSKNRAKARQKAACAHAEVADARREFHHHLSTRIVREHQAVAVEDLAVSGMARTRLAKSVHDAGWSAFVNMLQYKCERYGRTFVQIGRFEPTTRRCSQCGHIDGPKPLHIREWDCPACGAHLDRDINAAINVEHAAGQAVHARGAPGRPWPKAMAGREEAGSQGIRTWDRAA

SEQ ID NO: 59827 - protein, 485 aa, Escherichia sp.
  misc_feature (365)..(418): Xaa can be any naturally occurring amino acid
VKRLQAFKFQLRPGGQQEHEMRRFAGACRFVFNRALALQNENHEAGNKYIPYGKMASWLVEWKNATGTQWLKDSPSQPLQQSLKDLERAYKNFFQKRAAFPRFKKRGQNDAFRYPQGVKLDQENSRIFLPKLGWMRYRNSRQVTGVVKNVTVSQSCGKWYISIQTESEVSTPVHPSASMVGLDAGVAKLATLSDGTVFEPVNSFQKKQKTLARLQRQLSRKVKFSNNWQKQKRKIQRLHSRIANIRRDYLHKVTTTVSKNHAMIVIEDLKVSNMSKSAAGTVSQPGRNVRAKSGLNRSVLDQGWYEMRRQLEYKQLWRGGQVLAVPPAYTSQRCTCCGHTAKENRLSQSQFRCQVCGYTANADVXXXXXXXXXXXXXXXXXXXXXXXXXXXXXXXXXXXXXXXXXXXXXXXXXXXXXXCCGHTAKENRLSQSQFRCQVCGYTANADVNGARNILAAGHAVLACGGMVQSGRPLKQEPTEMIQATA

SEQ ID NO: 59828 - protein, 375 aa, unknown
  TnpB Polypeptide
MQLSETVKVYPTEYQKSLITQTMKEYIDTVNGLVSDAMRGHSIAKTTTANVSAYLPSALLNQCIRDAKSIVRKHYKHCHKTVLKNRSLAKRGSVVRTKAPNIPILKKTCCYVNNQNYKIKDDCIDFPVMINGKSKRISVSVKLTDRQKALFADAKFGTMRIVTKNHALVAQIVYEVTEPKLKSDGNVIGIDLGIKCPAVSYCSDGSVKFYGNGRKNKYMRRHYAYLRKKLQTSKKIKAVKRINDKEQRIMRDIDHKLSHDIVETAVAHNVKAIKLEQLQNIRSTTRTSRKNNHGLHTWSFYRLTQLIEYKARLAGISVEYVNPAYTSQRCPICGSVHHADDRNYACDCGFHIHRDLLGAMNICNSTEFVGNRQTA

SEQ ID NO: 59829 - protein, 373 aa, unknown
  TnpB Polypeptide
MQQYTACFNTVAAYGWEKGEKNGVELHKATYYPLRADYPALPAQLVISARAKATEAVKSALTWKVKREREYPKKVAKAIARGKPAPVFKPVRCPQSTNCSIRYDERSYTVYGDCVSLATTQGRQMLALHLYPYAIRLLEQSTGFDSADLIYRKGRFWLYLVVTLPEVEFVPNGDVVGVDFGITRPAVTSNNKFFGNRSWKALERRYFRLKRALQSKGTKSAKRHLKKLSGKTARFRTNCDHVVSRQLVQSVIPGTTVVIENLMEIRSNTKQRSKQQKRAMHQWSFNRLRDLLTYKAEAHGCMVVGVDPRRTSQCCSRCGHIHRSNRRSQSRFKCRKCGFELNADLNGSRNIAVKYLASVGIADAGGLMSTSLS

SEQ ID NO: 59830 - protein, 438 aa, unknown
  TnpB Polypeptide
VKKSITHLKLNQANSKKLQKLDELAIEHQRVVQAYVNWLIEREVREPNKYADIPEEEVSTPLSDRWQRCAWQQACGIVQAWYSNEGENLPVLHNVCIQANANVVVIEPSRTPQFDFWLRISTLDARHPIRIPVTLYERAKKTLAQFPKLCRGVTLNRREGEWYVTFVVERKSPKVKSSRIVGVDIGMVSIVSTSEGQRYGQVSAELRRRVECVAEKRRRKHKLNACLKRKNKPVISLRDSRAEAFARNEIGRALNEMLDELPKGVNVALERLSIRDMRFKSRQMNRSLRASQLAYTRDKLKFKLDERSIRYRSVQPAYSSQQCSHCGFTISMNRRSQSSFQCLWCGFEANADENAAQNIAERFGDDELNALPFREVETVLALRFMCRLPDARSASDGLELQPRLWLPKSRSHHGVMAVNQPGQDLLWNARIQVMGDCS

SEQ ID NO: 59831 - protein, 380 aa, unknown
  TnpB Polypeptide
MSIRTIALTLRPTPTETAALTRLQAAFNDACNYVSGVAWEAQEFNAVRLHRLVYYDVRATYGLLAQHAVRAIGVVAASYKADKERRHTFKPTAAVCLDTPRLYRIEHNRAGIATLDGRIKVELNIGGIQRHQLVTATKLAEADLVRDHKGRWRLLVSARYADPPVREADAALGVDLGRRDIAVTSDGAAFSGERLTALRDRYERNRRIKQHKASKGTRTTRRRARTVQQRLAGRERRMQTTVNHTISKHLVAVAIETGRAIALEDLTGIRERTNKQAWGKAERRRSNSWAFYQLHCFVAYKCVAAGVPFVLVNPAYTSQMCHHCLHIGERSGKCFRCPDCGWSGDADYNGARNIAQMGTAVTRPRGPWLSCPVAGAPQGS

SEQ ID NO: 59832 - protein, 179 aa, Clostridioides sp.
MYPNKNDKETFTYKQCSSDLTNLKKELNWLKEPDKFSLQNALKDLDNAYKKFFKEKAGFPKFKSKKINRFSYKTNFTNGNIMYCGQHIKLPKLGMVKVMDKQVPQGRILNATISKEPSGRYYVSLCCTDVDIEAFKNTNNQIGLDLGIKEFCISSCGEFIENPKYLKKSLNKLAKLQRE

SEQ ID NO: 59833 - protein, 155 aa, unknown
  TnpB Polypeptide
MMNENPEASFIVEDLTNIRKTAKPQSRKLRIYLNRWTYAEFLRMLGYKSPNRVVKVNPGGASSECPVCGGKVKHPTWKMSRCENCGRDYDRDRLASLAISLRGLDLCGDPFPVSAESSLPSMMDEYLYTRSMPDASGSERAETAYVPNETLHNIS

SEQ ID NO: 59834 - protein, 420 aa, unknown
  TnpB Polypeptide
LRATKSVLQPFYDERVSSLLYECLTLTYNALHYAEENGIENRKGMRGFYGTLKGAKLPSCYKVAAITRACAVLKSRRKSQRRGVSTEHPKPLRPAICIISGFFITAKGRLFIPLERDRYVDVQLNRHVQEKLARMELRSLTVTQDAISFCFSDDVKPLPSRSIYGIDRNEKNLTFGNRKKVVQIDLSRTVSIRQRTREILSSFKRNDARVRRKLSHKYWRRAGNRTNQILHAATNLVVDYAVENGATLALEDLKGIRKMYRKGSGQGSDYRFRMNSWPYSKAYHMLEYKSLWRGITVIPLTKADTHGSSSVHSACGKRLHGPLMGDAVHRRMQWCQSCKVWVDRDANAVVVLSDRGLARFASSLPRPEGRPQQALKVGEEGLAGEAMKGNGPQTLILRVDASKLLGGSLARNGAGHGPES

SEQ ID NO: 59835 - protein, 405 aa, unknown
  TnpB Polypeptide
MTSATRIAGAIKAVKFQYKATSQTEELLDTFRRMVNDAIHICLEEGIKGRLKLRNRVYHEFQEKYGVASYFPYSVAEVAWSIVKKHRRWQRKPFAKRPTAKIEAQAYSLNHGLLSLPFKKGGRILIPLEYGNYQRSFLNDETLKRGSVTINPLAVIVTFSKPILPISPTSRVGYDLNEKSIVSSEGAKINLSEVARLHTEYGVRRGEFYLKHANDRRLKLKFANSRREKERVKQFLHRVAKEIVKKAKSNNQALVLERLNGIRYSHQRGTGDRKGSRRRISLWPFKILRDYITYNAAWEGVPFEFVNPGGTSQTCHMCGFINRKLKLIEREWRCPSCGAVLDRDLNAAINIERRGKIPCLGEVRPGAQDTDEAMKGNPTTPVILRAEALKLGSRDSIPTTSRNHT

SEQ ID NO: 59836 - protein, 425 aa, unknown
  TnpB Polypeptide
MERRKVTFKLYPNAREAERLTAWVRLHCELYNAALQERIEAYRKAGKSISYYDQQNVLPEIKAARPEFVELGSHALQQTLRRLDLAFQAFFRRVKAGQTPGFPRFKASTRFSGFCYPDPAGWRLHQQGQRGGTLRLGSGKDAMAIRLRGQHRFGADAKPNDLTIIRKNGEWFASVTLRVPEGACARERTEHQHRGVDFGINDWATFDNGETIANPRWTRNELPRLAELQRQRAKKKKGSVRYKRLSRQAAKLHDRIGNLRREFLHQATTRLVTTCAVIATEELQTKNMSRSAKGTLEKPGRMVKQKAGLNREILSAGLGMAHQMLAYKAVEAGTRLHMSNTRQLKPSQRCSGCWEIVPKTLAQRVHVCPHCGHTMQRDQNSALVALIDAHTPGTGVAARPKPLARQRAKSKSLTRETPATTTQGV

SEQ ID NO: 59837 - protein, 405 aa, unknown
  TnpB Polypeptide
  misc_feature (264)..(264): Xaa can be any naturally occurring amino acid
  misc_feature (272)..(272): Xaa can be any naturally occurring amino acid
MPPVTSFLTDSGSWGTIQAMELTVVGKLDLSPEDRQRLNRTLDVFADACNAISQAAFTERCFNSVALHHLTYYDIRQRFNLLANYTARARERVAKAYKTAKAKKQPLKLLTFKPQSLDLDARLFRLFLKDDAVWVSLATCDGKRIKCPVKVGQRYLPILRDSKPTSAVLKRHRDGELYLHIVVSVPVPEPSDSPQSVVGVDLGEIDLIVASNGVKISGVESIERRKRFRARRSILQRKGTRAKRARTRLGDKERRWARNYLHTXSRRFVDSXPPNSLVVLEDLSGIRDRCKRSGAEQRAQFHTWAFRQLQWMIAYKARLAGHQVVFVKPNYTSRTCPRCGHVSSSNRLSTRLFRCRECGFQHNANFVASLNIASRAVQAGLDGTGLLSTSLRLRAVNPFSANCRL

SEQ ID NO: 59838 - protein, 476 aa, Bifidobacterium sp.
MLVSMSQKVHITHVKVRGAIPYLGVRDGEPVYSRDPDTVMAWLCDGWRTRYNQLRSTRCKYGPDRTLIPLGGTVSDLTVKQAREQCSWLAAIPSLILESPTKLEAVEWYANVKRRKTQRRQHRPVGRMPKFKSRKRDPLRFVCWHNNGRNALYRKVNRTHGIVSITGQNPRAYRPDGARWTIEIHVRVSQPIRDYTSVNVNWTARTLTFINAPQPLAVQATGSMVGVDRGCKHQLALSDGTFIDLPKTKLDKIDREIRRRQRAQARKMKTAGCKNLRDYKQHGASKRYEREQSEIRRLHRKARNIVMDHTHKATTRLVREHDVIVLEALKVANMTRKAKPKPDPKHKGVYLPNGQAAKRKLNHSMNHANLGLVREQLAYKSKLAGRILIEVNPAYTSQICSRCGYCAKNNRESQAVFQCKHCDMRMNADTNAAINILNRGEQHLTGMDDARPAPSTSDTQTPTRGMGAVLASEPQS

SEQ ID NO: 59839 - protein, 408 aa, Richelia sp.
MYAIKRELKLNNKETSLMRGQAGFRRWVYNFGLEMVIASWGFEGINLSDAKRIDTIKQVFTQAVMKQPEYAWMKKYPSTVYQSAFIALKKAFWRWRQGLSGFPKYQTKKRGDSFTVYKTSGIYPEKGKPAIPFTNRVIIKAGKKIRLPGLKEFRLKERIDFTCSSQTFTVSRTADRWFVSFALDAQKIPPIYHPIERVGVDIGVKILATASDGTRYTMPVSTKKAKTKLSKLQWRNRHKILGSKRLRIKASNNARRYYVKLAKHHARIGNIRRDTIHKMTTDLSRSVYCIRIEDLNVRGMMANHKLAGAISDNCFYEVHRQLVYKQSHYGTLVELVDRWFPSSKTCSGCGHVQEMKLSDRVFDCQNCDRAIDRDLNASINLEAAPQEKVRSARPELNACGQEGAVTLG

SEQ ID NO: 59840 - protein, 395 aa, unknown
  TnpB Polypeptide
MSMPNPKRTAVKVQKVRLYPDVEMKQVLDELCDYRRYCWNEALALWNDMYEQSLILDDRKSRPSEYKVRNELVAEKQDWQYALSARVLQLSVSDLNKAFRNFFDKAQTDWGKPKFKSKKAPRQGFKTDRARIVNGKLLLDRPHESRHKKKWTAIPFKGAKSLEGDLKVVSVYRENGRYYASLPFEVDIRKKEKTGRCDAVDVNVGHLNHAGGAVSTMPKRLEMLYKRIRHYQKVLARKRTVNGKTAVRSRNYAKTRAKLQRDYTRAANIQHDLMQKFTTELVSRNDAVVIEDLDVKKMQMSHVASKGMHRSMFGYFRQVLSYKCEWYGRRLIIADKFYPSTQRCSKCGHIKQKDEKITLEGNSKHKTRHDEYICYECGAVMDRDENAVMNLLALA

SEQ ID NO: 59841 - protein, 282 aa, unknown
  TnpB Polypeptide
MKRNKLSKPILLSALVFGQCAGTVVAMQNSIVSVYAEQKNKDVTSQEFLDYINQLKEQNPNFKFNQGETKVFETEVQPLPKTGKQVGFDLGLIDLLICSDGTRFERPKYAYTYKDKLAKEQRKLSKMRTKLERANLDLEECKNYQKQKHKVAKLHEHVANCAKDFNHKLSIELVRNYDLLAFEDLNVSGLVKNHKLAYSISDVRWSQLLTFIKYKCLWYGKDFRQVDRFYASSKICSCCGTYHKDIVNSLKVREWTCPDCGTHHDRDVNAANNILNQALSVA

SEQ ID NO: 59842 - protein, 405 aa, unknown
  TnpB Polypeptide
MSIKAFKYRLYANKATTDKLQWMLDRCRELYNAALSERKDAYKYAGKSISVYEQKRDLVEIKEIRPEYQEIASHVLQDVLFRLNKAYKRFFQRMENGEKPGYPRFQGRNRYDSFTYPDGAGWKLDEHKRPPEKKGMVKVDLHLSKVGTVKLHLHRDIAGTIKTLIIKREGEAWYAVFTCECKPEKVPVSYEDVGIDLGVTHFAALSNGEFIDHPRYFRKAEKKLAKTQQALVRKKKGSHRRKKAAARVAKCHRNIRNQRRDFQHKASRKLVNQYQIIVFEDVQVKNLTKAPEPKQDETTGQYLPNGASAKAGLNKSILDAGWSTLTKMVSAKAAWAGRTVLFVNPFMTSQLCSGCGAVVKKDLSERWHSCRCGTELDRDTNSAKFILQLGYKQLSGGTRPTRATA

SEQ ID NO: 59843 - protein, 394 aa, unknown
  TnpB Polypeptide
MNTVHIYPLKHLSSAQLQRLRDAQMEAAQVWNFCMQMHKTARLQHDIWPRRNELQMATKGRFALHSQSVQMVVHAFLANVETTRQLRHTHPHMRMRYPYKQKRFYPVMWPAQAVSRENGRVVLPMGKGRKSLVLPLALPENSGSCTLVWNNGFELHVCIEIPQAENAPGDVHATVDLGEIHLAAVTTNTGKALIVTGRGIRSLKRQRSKQVRNITKKQVCCTKYSRRWKKLQRAKDKQCRRAERRIRNQRHQAMRKVINFCIKQKVGSLFIGNPHGVRNRNNGRHHNQRMSLWEYGKDIDYLTHKSKQAHMVCFTGSERGTSSQCPACGHKHKPKNRQWNCKVCGFKGHRDLVGSINMHRLAFGEQVKFPRSFTYLRPSPLGKGVVGPTRPNVV

SEQ ID NO: 59844 - protein, 426 aa, unknown
  TnpB Polypeptide
VSDDLDSLGFAASKLWNVGQWTISRVWDEIDYIPEHDELTAYLKSHERYDDLHSQSSQRVLQELAEAFNGWYGKRRNGDPRANPPGYRKHGDNHPRSTVTFKQKGFKLDTQYNRVRLSKGSNLKEYWSDFILCEYQTRPDVDFSTVESVQQVRAVWTGDEWELHFVCKVEIEVAESPGEKTVGVDLGINNFAALAYVDGHSELYPLNCLKQDDYYFSKRIARCDDSDSEQATRLNQKKSRRRTHYFHTLSKHIVQRCVEEEVGTIVVGDLSGIREDEENGEVKNWGKHGNLDLHSWAFDRFTDLLEYKAEMEGITVEQVSERDTSKSCSCCGRKCDANRVERGLYVCDECGMTANADVNGAENIRQKVSPSPATDGVDETLCVSSAHQNASRSEDGDRSNGWLAQPSTFLFDKETGAFEPQEQVTS

SEQ ID NO: 59845 - protein, 401 aa, Chloroflexi sp.
MKVKRAYKTELAPNSFQRSALCQFAGAARFVWNWGLARRIEEYLTTGKSSNAIEQHRQLNALKKTHFPWLYQVSKCVPQEALRDLDRAFAAFYRRLELKRQGKYKGPLGFPRFKKKKDGRGSFRLTGCIRVKEDRIKLPRLGWIKLKEKGYIPTDRHILSATVSERAGRWFVSVLVEEEIAVEEAKGPPIGVDLGVNALATCSDGRVFERPKALQKYERKLKRLQRELSRRMKGGKNWEKTRQKIARLFYRVRNIRRDTLHKVTSAIVAKAKPPAERPSVVVIEDLDVAGMMKNHHLAGAIADASFHEFRRLLEYKAAWYGVKLVVADRYYPSSKRCSVCGNVNSQLSLSARTFVCPVCGYTANRDLNAALNLAILATTPSSGGSYACGDGKFPIVEAGTG

SEQ ID NO: 59846 - protein, 412 aa, unknown
  TnpB Polypeptide
MSAKTTSIVTYNIKLNTQLKEEYNLLLDTLTIHQKIWNHISQDTFKTKHVDKKIMYDRNYHKCRKLFPTSPAQVIIRAKDSVYAAYKSIKSNKKLDTLKQPCEQRNLALRLDKRLYTFCDHNTIKLTTVQKGKPILCSYDPYPKFSELFSKYSACDPLVFYKNNQFWLSVSFEVPSPTYVQNSCIGVDLGIRRFAVTSEGLSLSDKDFLKQKRELRYQKRVLQSKVKTTNSHSSRRKLRNLKRKERNKNKNLCYHLANRILDTKSNTIILEDLSSLKKNNLGKKNYKKSKSSKNRLSQVPFGMLLSILSYKAPLLGKVVKTVNPAFTSQNDFRGFKRGERKGCRYYASDGCVLDADWNASINIARKHTLKQEINKNNHPISFSAPLDGGLNFLGRVLSTTQSFNSLSKPKGL

SEQ ID NO: 59847 - protein, 512 aa, Hungateiclostridiaceae sp.
MGLRTVVLKLHKPGKAKKEIIDKALLDYNKALGFLFAKGASELSAMTEKYRGKEGRNNAMALSKWIDSDISRELNRFDVQPFKDSLKLEFGIAVENCLRSGNNLLGQALPCRPLYFCRYDTKRSYCLLYDKAKDKYYAKLYLLNGTHTRSISGVSGYGGRLVHIHKDSNILGRTGRREAFILVPLEFGKWQEKILKEAADTPENFRTARLFERQGEYYLAVSIETGEVEDIKTSTFMGVSRGIKSRLNYTVVDEKGEILAQGPVSSAGWSRKPGADNSALSSRNAAGMPPGLAPGFIGISVNELHEASRFIADQAYLHKAQVIVQNLPGRSDRLGWMENEQKGIQPVYRQRDYNQLIRLLDYKLPWKCLPKPVKVSSVGIFYTCVECGFHSKSNRLGRDLFICTRCGTAMDIDRLGSLNLARRLIDYGSSKIKITVTRTEEGVIFTNRILGLDIFSSYQENQMVKLKAEIEEIMKRTEEGGIPSNERAQAARLSVVRKLRSAKRLMDLIEYI

SEQ ID NO: 59848 - protein, 412 aa, Halophilic sp.
MYYAYKYRLKPSDAHREELDRHRDICRQLYNHTRYRLNEYRENHGELPSMTTLRSELPDLKKWWDGLSDVYSKVLQTVVERLFDNLSSLSALKENGYSVGQLKWKPPREFRSFTYSQSGFKLDKKGGQTVLSLSKLADIPIRLHRDIPDDADLKQVTVKKEPTGEWFATFGVEVDREPPEKPDELTETVGIDVGILKYAHDTDGHAVKSLDLSDERERLEREQRKLSRKQHGSNNWETQRRRVAECHADLRRKRRDFLHKLSNYYAREYDLVAVEDVNVSGMIESPSNSRNTASAAWRTFLSLLEYKCEHEGTHFVAVNPRGTTKECASCGVSTDKPLWVREHSCPSCGFEADRDANAAWNILSRGLEDVGVGYSESPPVETALPTGTTSVPAQRVVEAGSPTLKREPSGEQ

SEQ ID NO: 59849 - protein, 138 aa, Cyanobacteria sp.
LIALENLEGIRERTNQLPRSKKERRLSNSWSFFELRQFIAYKSLAAGVEVVLIEPRYTSKTCHCCNVIGERKGKSFRCINTTCNWAGDADYNGATNIKKLGAVLVNQPRGSELFCSLEQVVLGLLESPHYSDGAKLVV

SEQ ID NO: 59850 - protein, 411 aa, unknown
  TnpB Polypeptide
MNLLMRVRATARVEAVAPERGEATLHQFLKTYRDVVQYIVNNIWSLERLPSTKQLHKMFYNELRKLGFRAHHASEIYKRAREVVEATKKNNGSKPVLKRLTARIHPLDYKIDFSAKTLRVAVLNNEWVELKLKWYSYLDKYLDGSWRPGEIMVSYRNNKIFVYITFIKDAVLREPRAVMGVDINFSNITYTVIDLNGNLVTMGVIPFKGLGRALHPKRLAEELQRKYPKSWRFLKWVRRVRARWLNRARNILMDSAHRASKKIVEIAKEYKALIVFEDLEKLRENGNSNCKLSWEKSLWCYRRVQMFTEYKAMVYGIKTVYVNPAKTSRRSPNGKKLRFINYRYAILGNVITSRDVIASWNIALRGLKQMRGSWVKLSPDSPADEGVRTRPNAGNPEARTKYSQLFTAIYR

SEQ ID NO: 59851 - protein, 369 aa, unknown
  TnpB Polypeptide
MKVKIYPTAKQAELIDTNIDVARYVFNYSLGHKKELWENSKEKVSKFDMINHISSLKKLEEYDFLNNGYAQSIQASIGDLDNAFKNFFRGNGYPKFKSRFFYKQSVTYPSGIKILGSKVKIPKIGAVRVRGLRNNLNIIKTKSGTITRESGIYYLSILCEVQDPKPITNNNQVGIDVGVAVFAYTSDNKQYKIDLLPKIEKQIKAQKVFSRKKRNSKNSKKAKSRLNKKYKKITNKRQDFIHKVTHELSKNKLVAVEDLKIKNMSKSARGTKENPKQSSGKRGLNRVILQQGWGMFFTILEYKLLMNKGQLIKVNPAHTSQQCTSCGHVSKDNRKSQDRFECIKCGFVANADYNASINILRRGIADSLL

SEQ ID NO: 59852 - protein, 317 aa, unknown
  TnpB Polypeptide
MLKAENQSYWLDRETGRIRIPIRGTEGVQLHLPLSEWHRSILGDSSWGLGSLTVVPGKVIVVLRKEAPKPYEPQGAIALDTNEDSLDGVHASGDSAGLLRVSFDGVRRIQEIHFRRRRKIARKKAHDRRVARRLLDREGRRERHRVRQRLHRVSKDLVRHATGASAAIVLEELTLHGAGGRSRRMNRRLSSWPRREIHRQIEYKAALEGVPIIKVNPAWTSKTCPVCGARRRDRVGKVFVCLMCDWEMDRQINAGLNILKTALASNEALARAVRFQPGALRHDVVSPLYDLFRRGTGAREEPSGAESQTGVIPSPEP

SEQ ID NO: 59853 - protein, 404 aa, Escherichia sp.
  misc_feature (13)..(52): Xaa can be any naturally occurring amino acid
  misc_feature (367)..(403): Xaa can be any naturally occurring amino acid
MSFRFQSCSGASXXXXXXXXXXXXXXXXXXXXXXXXXXXXXXXXXXXXXXXXATETQWLKDAPSQPLQQSLKDLERAYKNFFRKRAAFPRFKKRGQNDAFRYPQGVKLDQENSRIFLPKLGWMRYRNSRQVTGVVKNVTASQSCGKWYISIQTENEVSTPVHPSALMVGLDAGVAKLATLSDGTVFGPVNSFQKNQKTLARLQRQLSRKVKFSNNWQKQKRKIQRLHSCIANIRRDYLHKVTTTVSKNHAMIVIEDLKVSNMSKSAAGTVSQPGRNVRAKSGLNRSILDQGWYEMRRQLEYKQLWRGGQVLAVPPAYTSQRCACCGHTAKENRLSQSKFRCQACGYTANADVNGARNILAAGDGRLXXXXXXXXXXXXXXXXXXXXXXXXXXXXXXXXXXXXXK

SEQ ID NO: 59854 - protein, 415 aa, unknown
  TnpB Polypeptide
LYPNHAQQRTLNETLAVCRQVYNSMVHERTVCYQVQGKSPSMRDQQKEMTQWKKSHEELTTVHSQVLQNVAVRVELAFQAFFRRVRDGKEPGYPRLKGSGQYDSITYPQTGYATGESSVTLSKIGQVKAKIHRVCPGTIKTCTVRKDGEKWYVCLSCEYEAVPLPPCEESVGIDVGLKTFAALSNGEFIENPRFFRKEEAALAKAQRRFDKVKDEYGSKARKQAKKAVRRVHERVKNRRHNFVHQQSRKLINRFGVISVEKLSVENMTRRPKAKPDSNSSGRFLPNGASAKAGLNKSISDASWTQFRNSLTMKAESAGRLVIAVNPAYTSQDCSACGYRPDGLEGRAKKKLSERWHHCPMCGFRLDRDTNAAVNINALGQINALGQINALGQINALGQINALGQINALGQQCVAH

SEQ ID NO: 59855 - protein, 380 aa, unknown
  TnpB Polypeptide
VQVFKSVWQHYTPTPEIRWLLEQFRQMLNDCIRIGLAENVTSLKSLSLKAYGQLGRYDVASYYKLCAISAATGIMRNYRKAKRKNPHVREPYARRQRLTTCYGFKVRDGELSLPIHAKEHVQISLNQHVQATINGFAHRSLILTKDRLSLAYAIEVRQLQPRGFIGIDRNLDNVTVAATDGTVQQHDLSEATRIRAMYRDVGSHFRRNDVRIRHEISSKYGQKQQDKVKQILHHASKLIVEEAKARQYGIAMEKLVGIRRLYRRGNWQGRWYRGRMNSWSYAELQRQIEYKAKWEGLPVIYVHPYGTSSKCSICGRRMKPEENRMLRCPSCGYTVDRDVNAAKNILAAGTLRFGVVGLTSEVMVAEPARVQQSAKSMRGS

SEQ ID NO: 59856 - protein, 399 aa, unknown
  TnpB Polypeptide
VDHRTVEIAWTPGTPTEWATFTTSRLEAARLWGDLVERHHRLRRLCWSWPSKSRWETWVKRRYPSLHSQTAQILVADFLEAVAGIRTLRSKGHGEARYPWRKPRYHDVPYSNQGARIKGHHLILPHGKAGKLSIPIPATVTLPGRLVEVRLSFGRVLLVCQVEERKRPVERDVGCDLGVNSSAAATDGVTALVVSGREAKATVQWRHKRLASAQEALAAKTKGSCRHRKLQRRKYKMLAKAQNRLKDLCHKTTAKVVAAFPNAKVYVGEPFNDAAQKVGRRQAQQVSSVCCRKLIQQLDDKSSGAIVVPEPFSSQACPACGCRQKCRRVYRCQGCSFTAPRDVVGGLNIRQIGREGELSPTPGLVAPTVTFVHPTKKYPGRSQVVPAEPRHVAQGPQGL

SEQ ID NO: 59857 - protein, 408 aa, Streptomyces sp.
VCSVTGVQLRYSFRVYPSASQRTALTRAFGCARVVYNDALRAREVARDAGLPFPTVGELSKRLITKAKKTPERAWLAEVSTVVLQQSLRDLDAAYRNFFDGLKGRRPRMGAPRYKSRKDTRQAVRFTANARWAVTPGGKLRLPKIGDVRVKWSRRLPSVPSTVTVVKDSAGRYFASFVVDTGPEEALPQTTSEIGIDLGLGHFAVLSDGRKIDSPRFLRRAEKHLKKAQRSLSRKEKGSKNRDKARIRVAWAHARVTDARRDFHHQLSTQLIRESQAIAVEDLAVKGLARTRLAKSVHDAGWSAFVAMLEYKAARHGRTFTRIDRFEPTSQVCSVCGVKDGPKPLHVRTWTCKACGAVLDRDANAAVNVAKAAGLAVTACGAQVRPGLVPAQRSEAGTHPKPQPLTAR

SEQ ID NO: 59858 - protein, 138 aa, unknown
  TnpB Polypeptide
MKNDRDKYLSHRARLQRNGSRNAKRKLRQISGRERRHVQHVNHNVSKTIVEKASQSGKRLIVLEDLTHIRERIKAGHKVRARLHRWPFRELQQMIVDKVSRLGMRLMFVDPRYTSKTCSACGAIGKRKKHRFECHCGY

SEQ ID NO: 59859 - protein, 379 aa, unknown
  TnpB Polypeptide
MHRAHKIRLYPNNAQEMILRQWCGVSRLAYNTCLDHWNTEYQAGNKPNYYSIKKWFNSIKHEMFPFISVASKWVSEAAIKDMSDAYTRFFKKQNKHPKFHKKGIHDSFRIDGSGIKLDGKYLHLPKKLTIKMAEELRFNDVTKIDNVTVSKKADRWFVSVLCEIPDVVRENQGTAVGIDMGLKELATLSDGVVYDNPRWYVKRQRRLAHLQRGVSRKVKGSRNRDKAKARVAKYQYQTICKKMDYLHKCTSDIANSYSLAFVEDLDVDGMKSNHHLAKSVSDACMSTFLSQLDYKMPVTKIDRWYPSSKTCSNCGHVQDMPLSERTYECPECGMVMDRDLNAAHNIYNIGMANYSESKPVENESFRSMKQESTSKLRFA

SEQ ID NO: 59860 - protein, 455 aa, unknown
  TnpB Polypeptide
VSDRIDNRDANKLLKQQGETDIHYLTQSDQYTAIHEYVRHDIALSKVHSQVRQNVAFRVDEGYKRFFEGLNEGKTNVHLPKFIEHKKYRSITYLQYGPAAKIKNSKLFLSGIGEFQLLDYRKVKGKPKTVTVKFKHGRWHCIVTAEAQEKDVLDLIRPDDTRPDAGFDTGLTALLTDSEGNEYDPPKAWYDYRVRLRTAQKKMSRQFEARKLKYKQMVEQAKAENKQAPLLRDIPYSNRLKAQIKVVAKLHTKVDNIRDHHHKKNASVVASRYRKSAVEEHVVQFMIRNRKLAKVASDRAIHKQKLLLKSKLGKRYIAAPNRTENGGNSQVCTCGAPVPKDLWDRVHKCPECGLTAGRDHVAANIVSIVAFGIASLTLGAGSHSPEAEQVFVRRGEDKALCGESCLCESESIPALESSRKRQPSRALRRSTTGAEATVAGKTRSSRIADCYGIAT

SEQ ID NO: 59861 - protein, 455 aa, unknown; identical to SEQ ID NO: 59860
  TnpB Polypeptide

SEQ ID NO: 59862 - protein, 449 aa, Nakamurella sp.
VESTVLRYRYRAYPDAKQRHALSRLFGCVRVAANDAIAARRAAYRAGQPYLKYSELSAALTRSKTTPERAYLSEVSAVPLQQAIADVDRGYRNFFAGLTGERQGPKMGPPKFRSRHDSRQSACFTRNARFAVSRTGDREAVVRLPKIGPVKLVMSRPLPSTPASVTVIREADGRTYVSFVVEVTEDAAPAAGRVCGIDPGLSSFATIVTSDTATGQEAIARIDTPKFLRSKARALARSQRALSRKEKGSKNRGKAKQRVAVLHRKVRQTRLDHAHRQAAKIIAGHDVIAVEDLNITGMARSNLARSVHDQAMGQFLRLITEKATRQGRTVVKVGRYYPSTQTCSSCRQITGPKGRGELRVRHWTCVECGVAHDRDVNAARNILTEGLRLLASASTQPTTPVDSRSLKTPAAHADGPPGLLETGEDQLTTLASVDEAGRTTGDRDDGVAA

SEQ ID NO: 59863 - protein, 418 aa, Haloferax sp.
MKRSNTFEVVPQSEPDEEILRQLLDASAALWNEINYERRQKYTDPDGDVWDISDYGERYGGILGYATVQQIERKNREAWRSFFALRKKSEANRTPGYWGNATDGRDLRTYIRNTSYTVKWGDYSRLEILVGQELKEEHGFGYYERPRLEVRGEPNWKDYDKQGRLELYYDEHSDSFRALQPVTIDNSRLAQPLGSKSAALDIGVNNLVACTTTTGQQYLYEGRELFERFLGTTREIARLQSLLKNGKHSSRRIQRLYRKRTKQRDHAQAALVRDLIERLYQNGVSTVYVGELRRILKSHWSARVNKKTHNFWAFRAFINRIECTAEEFGMTVERRSEAWTSQTCPYCGSTDDTIRHQDTLTCSCGFEGHADLAASESFLKKQTTIVRPMARPVCLKWDNHNWLESSCSLRLNEEHTNP

SEQ ID NO: 59864 - protein, 425 aa, unknown
  TnpB Polypeptide
MTNEQALVKTLDFQLDIQSDNESLLYDATLETRSVYNETIRLAKQGVDWDAIPDRVADDANLVKNTTQRVVAKALGAMENYYEYDDFDLPSHTKDGVYPLRANYEEGYNLSLTDDGDVTFRISAKPYKHIKGVLEGDDAHLDVLKTALTSDEWKIGTAEALFHNDNPELHVNVTDTEQTVRDKHDSRTVIGVDVNEDNVALTALSEDGVKDSLVIDFPEIKFERHRYFTMRKRVQNAGKSSMHDTLEGREKRFVRDRLHKVSRHIVEWSRQFEKPCIVFEDLKEMRDSIDYGTRMNRRLHHLPFRALQYYTSYKAAFEGIPTGWIDPYKTSQRCPLCGHTERANRHKKRFKCRSCGNQDHSDRGASVNIAVKGIEKHQDWNVPALNSLPQVRKVRRQASGAVDAPTETHDTVRGYPTDGVAGVSG

SEQ ID NO: 59865 - protein, 240 aa, Thermus sp.
RPLEGKIKTATVKREGEHWYIIFITEVDPKPLPPSEEAIGIDLGTNPHFLITSEGEMVEAPRHFQKAEEKLAKAQRELSRKKKGSNRRKKARLKVAKLHRKIANQRRDFHHKVARKLVNRYGTIVHEDLNVQALSRSHIAKGVQDAGWAQFLAILAYKAEEAGRRVIKVDPKYTSQDCPVCGHREKKPLWVRAYTCPQCGALLHRDVAAAQNILARAWTGPSGETPRAFPQGNTPRSPGL

SEQ ID NO: 59866 - protein, 445 aa, unknown
  TnpB Polypeptide
MNVISSYKVKIKDMNHCFNETIYMYQEAISFFMDVCRKEWSLLQNLSSLKSVALMEKLTLVSEKRPSVPYDFNERFYKMPCYLRRAAIAQAIGSYSSWFSNHENWKKNPEGAEPRLQLDRHTMPAFYKGNMYKRISDDMAQIKIYYRNDWVWQTVHFRKQDVKYIQRHCSTMQECSPVLVHKGKCWYLNFAFKQKVELNETDIQKQKVCAVDLGLNNDAVCSVMDAEGTVIARRFIRQAVEKDHLYTVLNRIRKQQQHGARRCKTLWSIADNINREISRKTAGDILSFAYEYNVDVIVFEHLDTRGKKKGKNKQKLSLWRKKEIQRIVEHRAHRLGIRISRICAWNTSRLAYDGSGYVDRGEYMQNGKEKYNYSICVFQSGKQYHCDLNASYNIGARYFVRELLKSDSVRRRLPSRTQDSDYGKGTTRTLSSLIKLNADIHGVSL

SEQ ID NO: 59867 - protein, 406 aa, unknown
  TnpB Polypeptide
MQRLQAFKFELMPNGEQQRAMRRFAGSCRFVFNKALALQKSTYESSKKKLGFAALCKCLTQWRNGNETPWLKEAPVHPLQQTLKDLERAYSNFFAKRADFPRFRKKGQSDSFRYPDPKQIKLDQANSRIFLPKLGWLRYRNSREVLGAVKNVTVSQSCGKWFVSIQTEREVEQPIPNGGAVGIDMGIARFATLSDGAFYAPLNSFRRHETALRRAQQAMSRKVKFSSNWKKAKARVQKIYCRIGNARRDYLHKCSTTISQNHAMVCIEDLQVRNMSKSAAGTTDAPGRNVRAKSGLNKAILDQGWAEFRRQLDYKLVWNGGHLIAVPPQNTSRTCPICGHVSKDNRQTQARFECMECGFEENADVVGAINILRAGHARLACEVSGAVMPPAAGTHRSDSGVAQCRA

SEQ ID NO: 59868 - protein, 327 aa, Oscillatoriales sp.
LKTGTKQSVAGRFRSWKAPKRSIKFQPENYCLGTWYPEQVKGLLFKASEPLPSTEVELQSKQKDNSFKTRTRKGSWNFSTQLIYDKKRWFAVFPVEFEKQESTQQTMVALDPGVRSFLTGFDGEKFIEIGKKDITKIYRLCRFADKLISRKSQLTGRKNKYQRQRVQAKIESLLIRVRHLIDECHKKVAKWLTTEYRLIFLPTFETSQMVAKNGNKKRKINSKTVRQMLRWSHFRFKQTLKFQAFKRGCTVLDVTEEYTSKTCTKCGHVHGLLGGSKKFKCPKCGHSLDRDWNGALGIFLKALRDIAGLDAQVFSTLCQEMSDIVRA

SEQ ID NO: 59869 - protein, 454 aa, Calothrix sp.
MATRRQTFRLYPNKEQEQKLFEARRLHAYLYNACIANRRFEWKANQKTVTYFDQQNCLPEFKEAWPEFAICNSQALQATVKRVDLAYNSFFQGLRGLPQFKSIRDYSGWTYPATSGWKVWGNGKHGRLTLNDLGINIRMRGQAREWGKPTTLTIVYKPNQNKWFASITVDVPILESKFGSQSQLEYEKIIAFDLGTETALTTFDGEKFEQIENPKFTKKSEEKIRKASKQLRRKRAPNKAQNIKASNRWKKARKRVSKLSTKVARTRKDWQHKVTSDIASRYDIGVTEKLETKKMTKKAKKGSKRKKQKAGLNKSILSVGFGTLNQMIAYKIEQKGGLMLILPTKKIKPSQRCPKCGKVHKDWAELSNRYHVCSKCKFEIQRDKGSVMVMYNVATDVQPGCGMRLEDCGCSSSTDSTKKRKQTGSMKQLGQKKRQSFKAKVDRVTQTPSANAAG

SEQ ID NO: 59870 - protein, 418 aa, Calothrix sp.
MQLVERRVIKSNHQVYKQIDEMSFASKNLYNKATFIMRQSFLSWGQSNVPRYERLYHMMKDCEEYKSLPAKVSQQVLKMVAQNWTSFFAASVEYQIEPSKFTGRPSLPGYLEKDGRYCLIFTSQATFKKQLGQGLIRLSEIDYCFETCVKLGKVNKYCQSRIVPKLDHYVLEIVYEIPDVPVLNNDLIAAIDFGVNNLMAITSNVPGFEPVLINGRPLKSINQFYNSKRAAITSNNFNKISKRLKRFTTSRNHKVKDYLHRASTYVINILSELGITKLVLGKNKGWKNGINIGGVNNQNFVQIPHAQLIELLTYKGAMKGIEIIIQEESYTSKASFLNNDFIPTYNSKPVDWEPSGKRVKRGLYVTQDGIALNADINGSYNILVKAFPNAFGIGDREVLVTPRKVNLGGHTPTLVIPF

SEQ ID NO: 59871 - protein, 486 aa, Calothrix sp.
VPTLTYVKGLPTPEKELNSLGFTDFEMFLNAFSPIFKQAVCEAVDIMLSSKNFEKGKSKFNTHLQAAYGLSKRQATGVITLAKAKVNSATECRANHIKQLEGKLKSAKIWLKNANDRLRDSQKFYAQKNWLYSQTGCKVPLACDLTTGRSNWHTLKFQIHHKKRYIYQIEKKIADLKSARLRVKVSSSEIYIVGSKDETSGNSVCQYDGNKICFRVPYCLEERFGKYIETEIGNFDRNINRLPFEGAKTWHFYKKNGRWVVGVQFTSTIVEKVSRPIQYGAIGIDINPGSIGWAYVDYQGNLRASGSIQLLTGLGKNFNTEQIVKACLELAKLANLYACPIVCEELDFSRKKEQLREKGAKYARMLSSFAYSKFYQLLESILSNRGIDLYKRNPAYTSLIGVVKYGRMYGLSSDIAAAIVIARRGMNLSEKLPVSTNAYLGVSPRKHVWSGWSKLNKIISQSVDVVSRHDYYSISNWGLLVKVQVE

SEQ ID NO: 59872 - protein, 503 aa, Calothrix sp.
MSIITYVKGLPTLESEMNHLGYTDFEMFLNAFSPVFKQAVCETVDAILSSKDFEKKKSKFNTHLQKKYGLSKRQSAGVITLAHAKVDSARECRKNHIKQLEGKLKSALLFLKNAEKRLLDSQKFYAKKNWQKSKSGCKVPLSCDLSTKRSNWHALKFQIHNKKRYVYQLEKKIGYLKVAPIRVIVSNSEIYIVGSSDESFGNQTCQYDGNNKLSFRVPYCLEAKFGKYVETQIGSFDRNINRLPDIGAKTWHFYRKNGRWVVGVQFTPKLVEKVSRPIQYGTIGIDINPNSIGWAYVDYQGNLKDCGTIPLLSGLGRNFNSQQLVNASFTLANLATKYACPVVCEELDFSKKKESLREKGRKYARMLSSWAYSKFYQLLESILSNRGISLYKKNPAYTSLIGLVKYSRMYGLSSDIASAIVIARRGMNLSEKLPVSTNAYLGVNPRKHVWSGWSKLNTITKNIALVKSRHDYFNVPNWGVVVKDVVERVAVKRESRAASKSTL

SEQ ID NO: 59873 - protein, 498 aa, Calothrix sp.
MGKAKRALPGSKNKYAGSVVVTRIATVYEIEIAVLEQLEKIARLCGILRSELWNKYGSLKSWGINKFQIEKEFRVTHPPEKYGLTSKLYERTVYKCVDEIHTYQDAVKASVKDEIYRKTDSEIERKYYLFLLERRFWIDVETKRAKWLHSVIRKHFYRGHSNVRNQIVYNAGMYSIKQSGKYSYIELATALRGKRLVLPLRGNPEISGEIRVIIQPDKRVEIHYPKKVEKIVPENRSKDAVGIDRGFTEVYVTSNGEFLGTDFGKVISQEVEYRVERGSKRGKLHSLAQKYEREGNHTKADNIRKNNLGVVKLTRKKRKIEGQLKTLVFTATVQIFRSYGTVVYEDLTEPIKDKKGLKGKAAARMSSWCKGLVADAIKEVSVRLSGQAIAVNAAFTSRADSRYGVLLGERKADSFHCFDGVVMQSDLNAARNILLRKDDAEITRYMKFTTVKSILLRRTEQFQEIRQRDIAKALDSQIPCKHGFTGFKGEQLCLFDLP

SEQ ID NO: 59874 - protein, 443 aa, Calothrix sp.
LICLLSENSSRTFWQLSTSSVLNYTDLENINKKSKKIRIYPETNLKLVYRKWLAACRWCYNQAIAYLRDCFIKGEKQPSKYDLRNIILKSCPDWVEECPYSPREEAIFDAKTAFSKTASKNKSNPSFKSCREPVKSLKIGAKYWGAFPNGKRDNQIVAGFTHYPTIKASINGKTVRIRDLQINPAEPLCGEMPSEFTILVDKGRWFICFTVPFEVSVNNNKNFISLDPGVRTFLTGFDGENILEIGNGSISKIVILCQRLDKLQSLIAQSSGRSNKRLRWKLRKQSEALRTRIRNLTNEVHNKASVVLTKNYKHIFLPTFETSKMVVKKKRKITSKTARNMLSWSHYRFKQTLKFHALKRGCVIHDVTEEYTSKTCSKCGHVHEKLGGNKKFKCPGCGHSLPRDWNGAINIFIKSLNDLTNASTSVEAGEDVPQYTVEISTCC

SEQ ID NO: 59875 - protein, 506 aa, Calothrix sp.
MSKGKRSKTETKNKYAGSVVVTRIAIAHNMEPACLEQLEEIARRCGILRSELWNKYGSLESWGVNKYEIDKQFRITHPPSRYGLTSKLYERTLYKCIDEIHTYQDAIKAAVSDEIYRKTDSVLERKYYFFLLDRRFWIDVLTTRARWLHRIIRKHLVRGHSNVRNQIVYNADMYRVKQVGKYSCIELATLVIGKRLVLPLHGNPDISGEIRVIISKDLRVEIHYPKKLEKVVLPNRSTEAVGIDRGFTEVYVTSNGEFYGSGLGNIITKEVEYRVERGRKRGKLHYLAQKYEKKGLHLKAENIRKNNLGSSKMSRQKRRIDGQLKTLVFTATVQIFLKYGIVVYEDLTEPIKDKKGLKGKAAAKMSSWCKGLVADALKEVSVRLSGQAMAVNAAYTSQTDCRYGVLLGERKADSFHCYDGVVLQSDINAARNILARKDDAEITRYMKFTTVKSILLRRTEQFKEARQRETAKTPDSQNPAKHRLAGFKGEQLSLFDTTLTHSESEV

SEQ ID NO: 59876 - protein, 541 aa, Calothrix sp.
LPQAYQTYVTQIQNGYLREQSAIDLLEKLSPVAALMSRMALEGLQSGMKEHKLNTQIQQTFGVNKRYASGVITFVAGELKSASESYKRHLDVIGAKIKSINETINHLNKRLNKHREYVKALEKYNLAIKYAEKTKTGKAKKVPTLKKKPEFDNACPINGKGDGKTYLQLAKFQLHQKKRQLKIYLDRTAALIKQGFQVNLGNLGKISFVGSTSETSGNSICQFEPGIIPVLKIRVPYFLEKSFGEHVQLPLYKFNDYGSDQIKTAWALNRALTYVFSKNKKGKWIVAITGLVDFSCNSNDRSNGCIGLDVNPGSIGWCATNQHGNPIACSKVNLDLHSCSTNQTESRLSLAVTEITQRALVSNKPIVIEKLDFSEKKKQFGSHRKYNRMLSGFAYSKFFELLKSRCLKLGIRVIEVSSRYSSQIGIVKYMRRYGMGSDTAAALVIARRGMGIYYEKMPARYAFQSSIQAEPRKHVFAHWQKFNKHYKKTGSRNAWFDIPNLTGSTGDTLTNTVHTVKLAVKGMNKASVQGRKFKSRQEVKV

SEQ ID NO: 59877 - protein, 500 aa, Calothrix sp.
MASKKSSITNEYTVTRVVYSVGTINPELIKLASVLGELRSELWNKYGSLKAWGINKNEIIKNIRNSENLRSIYGAERFNLSSEMWERTVQAVLDDIHAVQEAAKVQIIRKIYEYFKPERTLVQKGKKLVWQDIPETSFRQELITAINSRYLVWYQYPILCRWVRQFYKRGHTWVNNQIVINATASSMKGKITKDGRSVTTYKIPTFMDGKKCQWVEIKIHTGRTCPKAGRLRLIFNGEKFELHYPHTTKINITKQSGIIGLDKGFTEGFYGSNGRAYVESLGEVIKAASNKRTKKNKKRSVIFAISQKVDAKKSSQILSNNLGRKKASRKDSIKRLHIKQLIRTDVNQIFNNFGEVVAEDLSKHIKSKKKAKAINRKLNEWSKGELQKSLDEISVRKGAKVTLVNPAYTSQVDSSNGTLLGKRVGDQFITYQGVIFQSDINAAINIKNRALDSEITRFMKKEQIHRILLNRTTQFLDKLGYTLEAALYMGWLDKKHKHLR

SEQ ID NO: 59878 - protein, 394 aa, Calothrix sp.
MVQVYDNYSAIQGIKRSIKKLEAKRKKAEKNNNIQYCHRFKRSINFKRNKIQHLESVIIKLKIDREQGKYHVAFGTKKLFGAQFRLEKNGYADHRDWLSDWRSARSHIIYYEGAAAFATGNQLVRYDIETQTLTITVSPCFKQKYGEKVVMRSVNFPHGLDWLKSAIVPVIKTVTRKDKKGNVRKESRTASLQPVTYRFVIRSGKYYLNATIDAPKKPNITSLEKGALGIDFNPASVDWAVIDRHGNLKRHGSIKINVQDKRSNQTEDIIGKACAELVRLAEFYQVPIVIEDLDFEKKKASMKEKGAKYARMLSNMPYSKFNEMLERRCNKFGIELLKVDASYTSVIGVTKYTAMYSLNSGCAAALVIARRGQNRTEKRTQRTMQLSLRNQRIA

SEQ ID NO: 59879 - protein, 465 aa, Calothrix sp.
VALAKVKGQRIETKTQKNKLIRQGTFIEDTLRVYRESIPFYIQVVNQHPLGINLNRDQMRKFYDELTLGNNAKYPFMYADMPRDLRWDVLATAVGHYRAWSTNYQKWVESEAKRKAKAEKKGKEFKPHKAPKLPTEVNDSPTYYKYSMYKDDSGYDLLLKVRVGNGWGWVKFSYFSYDYNEKDANGNSVWIKGCPTIVFKQDGTCWINWIYERYHIATGGVKAQQDKRVCAVDIDLDGDSICVLSVLEPDVNGEVREVARHFVKGHNSHVRRRKSELGRIAVKMKKTGVVGKGFARTRFERISRRENSEGYRISREIANFAHQHDCKVIVFEYLVNLRPQRGKYSRRSNQKRAYWLKSKVYQFTSHIARTSFNILATRVSPKDTSRYCAIKSEQMYRTDSEIRAQFAFQSPNNWDLSMEQEGSHPGKLAVSRSGYCVHSGLNAARNIGMKFYQRYNFKKLVLVRG

SEQ ID NO: 59880 - protein, 404 aa, Calothrix sp.
LKIRLFPSKELQQVWKRWLAAYRYYFNQCISYLHNNYDTQTRVIIDKKTGKEKEVKLSAEELDKIAQKMDVPEWVKTLPGHQRQESCFEAFDAFKQARSQGGNAKFKSCKATSQAIQFKVGNFKNGTWYSRTTKGLGFTTIGQTVPFQCEYGTELVYRRGKWFGCFPQYKEIVLTGSDRVIALDPGNRTFLTGFDGENVLEIGKGDIGRIQRLCQHLDNLISRSTKTTCRKRRKMRIAANRVRERIQNLIKDLHNKAANLLVNSYKVIYLPTFDSSQMVIKKRSGKKRKINSKSVRQMLTLSHYKFEQHLKQAAQRKGVIVVLCNESYTSKTCGNCGHIHHKLGGNKVFKCPHCGIQISRDVNGARNILLRALQATAFTVTHDSIVLSDSSELTDAIVNHVMSF

SEQ ID NO: 59881 - protein, 545 aa, Calothrix sp.
MSNPQKTKKTKKTASQIKKAANQVQRLLILSGLYLDVWFVIKIEAALKVETTIINPVVECSDIDIINVLIDSLYTVRANTYNVLGSSSFWNHGWMGTQNIVSAKHGKPETILVNGLPMPAKIFEWTVQDTAKNILMQQEAAKIKIISRICKRIPKHTGAELTKQQIAENYVADKQRKKAFDALKSFETIKTIPWLHRYFRMEYKRGRCNQNRQIVYQQQAYTCKRISRYFVKLEVQGLERGKRITLIVKSNRIIKGQIRLIRSENGSLEIHHLETLYNRDYCELINRQPEIGLDRGYTEVFYTSNNQALGTDFGAQLNKKTDRITNIGRNRSKLWSLAYVRYKNNPQKAQRIIENNLGNKTELRRRIKDDAYINTVVNTACKTATKQATTVHVESLIEQIRSNHKLSRRAKNRLEKWEKGTVKDRLTHWSLRNNTNLNWVNGAYTSQIDHRNGTLLGTRNGDNFTTYDRVVFHSDHNAAMNVLHRGLDTEITRFMKYTEVQAVLLRRTALFLSAMGLTLLDAINLGWLDVKHKKCQAFKEILHGL

SEQ ID NO: 59882 - protein, 469 aa, Calothrix sp.
MKTTYQYKFYPDTNQKLELNDWLRISRYWYNRQLGERFTWWQNNHLQLQAFPQWKEIFPTLFGNRPNYYNQKLQLPIIKQDLVRVMHSGELLDFTRVDSTILQDICKRVDEAFARYILGDCNGKRSGKPRFKTEASFRTMTFASANDDWIKLVRKNWLYLRLPKLGVVKVRMHRPLPLGFKLKQVGVTKKVDGWYMQMCLEDTSVPEFNPDSITPTWENSIGLDAVLHEDDYLATSEGTKLASLKSLRRNQHKLDKISIDRNKRKRGSKSRRKLAKKEARRHQKIARSRKDFQYKTAHKLVRTGKKVFFPEKLNLQGLSKRNAPKQDEDGKYLPNGQSAKSGLNKSWMDAAFGQFFEILGHIAGKAGAVVIPQNPAYSSQVLSYRNEIVFTDTDIPEYWDEKEMLKVDRDINASINLKRLGLGIFPRIRRRSGKISVVGTMEESTAKEIIDILKKTLSDAYTIPQVISY

SEQ ID NO: 59883 - protein, 507 aa, Calothrix sp.
MPKRKAATTTEYTVTRIAYSVGDISPDILELASTLGKLRSELWNKYGSLSAWGINKNEIIKEIRNTPHLRKIYGAERFNLSSEIWERTVQSVLDDIHAVQEAAKVQVIRKIYQFFKPEQIRVQKGKKLVWEDIPETSFRQELITALNSSYSVWYQYPLLCRWIRQYYQSGHTHVNNQIVINGTSSYMKSRIKHKTRSITTFLIPSKMVDGKCQWLEIKFKTGRVTPCAGRMRLIFNSSSFELHYPHTTKITVNKQSDIVGLDKGFTEGFYSSDGNIYASGLGEIIKDASQKRTDKNRKRYKLVALSRKTDSEKPERILNNNLGRKKANTKDAIKRQTIKQLIRTDVQNIFNNYGTLVVEDLSKYIKGKKKASCVNRKLSEWSKGELQKSLDEISRRKGAKIILINPAYTSQVDSTNGTLLGKRVGDQFFTYGGVVFQSDKNAATNIKNRASDSEITRFMKKEEVHKILMSRTAKFLEQLGHTFESAISMGWLDKKHLCQGKASRRRS

SEQ ID NO: 59884 - protein, 578 aa, Calothrix sp.
MGKSLLSELTHRSYSKTKNPDGTRTPQLRVGIEARIDYHPFLDDWGDRYQSIMRTALNALLQGQSEDNIEKSFQSRFDIDWAWADSIATDAKGIFDSLIEARALKIKALNDDLVAGWKSVATTIELMSQQLANPTRKNMKGFAKRLMGTKSKFNRLERKQVEKNELEQATRLHICFGGAKLFNAQYHLEENGYSSHNEWRVDWEKKRGGNFYSVGKGSVLGNNPVAKIFYIDDDIFSVTFTVPRYLRGDYGDTVSVEFEVTGQRKHNLLYALESDKPVTVQCFRREHKNDQWYIHLTTYVQDVPTISSRNNGCIGIDLNAETIDVIYIKRDGNPERCRNALSFPIPTGTTGTKVARLRDIVCEIVKLAEFYQCPIACENLDFSTKKNQLRHSVSKEYNRMLTGFIYDKFRSYLVVRAEKYGIEILFKSPFMTSVIGMVKYMAKYGLNSASSAAMVIARRAMGFKEFIPQKWLKTLSSFFEPEDSKDGGFAGGWRRISAWLKTFCIRRPQLFQLDTVLRFLLDSLVTQSQKKTHKRRKPGGSSKSGGKRTGRAKPTEGQVPLEREEVVVTNIGAVTVAP

SEQ ID NO: 59885 - protein, 382 aa, Calothrix sp.
MFFKKGKILSKFDLINELTNNKHYQALYSQVAQQALMNVAESFKSFKGLLREVRKGNVNQRPRVPNYRKSGLVLVSYPKQAIKLKDGMLRFPLGQLVKTWFKIDSFFLPMPTNLKFSDIKEVRILPRNMCFYVEFVYEQPDKVVELNKSNVLGIDHGINNWLTCVSNIGTSFIVDGKHLKSLNQWYNKQISKFKEGKPQGFWSEKLALITEKRNRQVRDAVNKAARIVINHCIKNNIGTIVFGWNKGQKDGANMGVKQNQKFVQIPTGRLKDRIAQLCEQYGIQFVETEESYTSKSSFLDGDTLPTFGEKPEGWQPSGRRVKRGLYKSSQGFLINADCNGAANIIRKVAAKLGLVLNVVNRVLLNAPVRIRLWHAASKQPLP

SEQ ID NO: 59886 - protein, 507 aa, Calothrix sp.
MAKKEKKPSFVTEFELIVTSSSEKELDARFQAGRHLYNAVLGEAIIRVQQVRNSESYQEAKKIKVKNDEDKKLRSELFATARKQSHFSDFELQEFATITAKNAKWIVEKLDSHTIQKIGTRAFKAAERVLFGKARKARFKSFNAFHSLEGKTNASGIRFLGDTDCCVKWGSYLTLPIRFPLEWNEVLEYGYRSKVKYCRILWREINGKRRWYVQLISDGVPYKETPAYKLHNQVNSNTGLVGIDLNVSVVAVVGDEKAGLFPFAENVPKFEQEIKTLQRKMERSRRATNPDNYEPNFEKKVGRSNKRKKGKVKKGTRRWKNSNAYLKYARKKRTLERRKAAYTKYQNRGLANKVVREFGNNIKAEKVSVKAWQRRYGKAISALSPGFFQSELARKAESAGGKFTTFSTNKTALSQTHLDGTRIKKSLSERVHKDVSGFEMQRDLFSAYLSRYVNDNSELNVSQACRDWERTEPFLTQAWSEFKTASAQTSSRARWCHFPRRAELCKD

SEQ ID NO: 59887 - protein, 475 aa, Calothrix sp.
VTFKSKEQKQQDKEKNKDTYVSTVVQHLKLSSLGYAVISDILEHANSLYNTLTYNLRQGFFVYSTLNFQSIAYDLQTDFKENYHYKMLQSQAAQSVCHKVAENFKSFKQLLDKHYIDGSKKPKLPGYRMPGGMFEVTYPGQTVKIEIEHGIKFATISTGIQFRKLRKEDVVGTKLNEYIKLRVPDTVETSTLVELTITSKHRQIYAHWVCRKKAEVFTALDNSNVLGIDIGLNNFVTCIPNTGKEGFIINGRPLKAINQFYNKTVSKLKKGKDVDFWSGSLARATQTRNNQVRDFIKKSARTIINKCLESKIGKIVFGWNQGIKNEIDNGRVNNQNFVQVPFTALRDTLKYLCERYGIEFVVVEESYTSKMSFFDGDELPVFGKETESQKKLKPSGKRTRRGEYKTASGSIINADAQGASNILRKAKIDTSKITYKVCQVLKTINIWIGKKLSKRKGTVASLSSSTAISATEPAQ

SEQ ID NO: 59888 - protein, 533 aa, Calothrix sp.
LLVHNKKKILNIKESAKVQVRWNFKLKPTTTQQNQMSQWLITLRKHRNYALRERELGYNTNNQNITEPIVYAWGSWCDIETHNEYGSCCPLTCPVIKHGIIPNDLKIGIKVTKEKVDAKTGAVIKPSVKAWDSASGIQSKVTTQLRHDRQNFGDIDSDVLQRNLANLDTAFTNFFKHGRGFPNYLRVLNSFEYKPGRVTLNSIRDNYAVAYLPGIGNVKFHNSRDLNNIKEIRTCTIKRSGGYWYISMLVNIPYVIPELKPVEQAKSVVGIDVGINKFVAKSDGSFIENIRPATNSRVARRLAMRQRAVNRKVKGSNNKRKAIEKLALTHHKISQQRDGYNWQAASNIVNTADVIAREDLNIKNMVKRAKPKHDGFGGYQKNGASRKTGLNKVILDCGWGDLFDKITWLAVKSGKPVILVNPKHSSQECPACGHTDKSNRDGEKFVCTQCSYTEHADTKASRTIAKRSGLVFPKNNKTLPVDDGKVTSNSYQSSLVEVRNHAYDQTVIQLTLFDLDEYRSGDKRNIRKYGRNS

SEQ ID NO: 59889 - protein, 371 aa, Bacillales sp.
MILAIKVRIIPNTEQKKQLWKSVGTARFIYNWTIARQEENYRNGGKFINDGELRKEITLMKKTEEYEWLNEVSNNVAKQAVKDACNAYKRFFKGKAQKPKFKSRKKSKPSFYNDNIKLKIKAHMVLIEKVGWIKTSEQIPIGVRYNNPRVSFDGKYWYISVGIEKENPKEELTKESIGVDVGIKDLAICSNGMIFKNINKTRLVKKLEKRLRRLQRKVSKKYEENKEGRTFVKTSNIIKLEKQIRYLYRRLSNIRNNHLHQSTTKIVKTKPSKVVIETLNIQGLMKNKHLSKAIAQQGLYEFKRQLKYKCEIYGIEFVEADKWYPSSKTCSKCGHIKTRLSLSERRYICEECGAEMDRDFNAAINLSRYSA

SEQ ID NO: 59890 - protein, 396 aa, unknown
  TnpB Polypeptide
MKIIRSTQCSLKFATATKREQLKTVLTEYGRLCNLFIDSFWDDCPTKAELLKDIVNKPESWLSARLRKVCAREAIDMIKASQERIANDKKRLLAKAEKAKYSNKANQLKQKAEALTAEKPKHKGNRMYVSCTIADIQPSKTNEFDGWLHLSSIGEKTIIDLPIRYHKHFNKWNNLGQRLNSYIITDKDVQFCFEIQTGEKKEGKNAIGIDSGINALASFSNGEQLGRDIKECVQRIVRCEHGSKGQKRARRALKQRMDEVAKQIVSNEKIDLVVVEKLSNLNHKTKERRRLSKNMRRVIGSWVWRYWLNRVQMGCEENRVSFRSVPCYNTSITCLECGHADKKNRNGEIFLCLGCGHKGNADTNAGRNILNRFFTGPYGAGFKPVGLRIFGALSNA

SEQ ID NO: 59891 - protein, 375 aa, Chloroflexi sp.
MLKTFQYRLYPSRPQRQLLEQTLETCRHFYNACLDERKTAWEERKESLGKFAQMRQVKTLKATNPYASGVHSHVLQGVVADLDKAFQAFFRRVKDPRFKGRNRFHSFGFKEYGNGFRVDGRRLRLSGIGRVAVRWHRPIEGQVKTVRITCKAGQWYASFACEVPENPLPSTGRAVGIDVGISNLIATSEGETVPPQNWYRQEQAKLRIIQRRVARRKRGGSNRRKAVAELQRQHARIQNRRRDFLNKLACGLVANYDFIALENLQITNMVKNQHLSKSILDAGWGYFIRHLAYKAEEAGREVVLVNPAYTSKTCSGCGAVFDGLSLADRWIDCACGVSLDRDVNAAINILNRAGQVRWEPTWAVSPCVSQEAVGL

SEQ ID NO: 59892 - protein, 442 aa, unknown
  TnpB Polypeptide
MQIISSYGVELRKQNIPIRQTLEIYRSAVSYLIGIYVQVWEKLAEIPDAKRRFNAAEHLVHTTKKNHACFDFDIRFPKMPSYLRRSAIQHALGTVSSYKTRLDLWEKTDGKSGKPKLVYENHAMPVFYRDVMYREGAEGKDEAYLKLYDGHDWKWSCVRLDHTDMEYLRKCWSGKKASAPTLEKRHRKYFLRFSYKEEVTLTKTPVKEQIICSVDLGINTDAVCTIMRADGTVLGRRFIDHPSEKDRMYRTLGRIRRSQREHGSAQTQGRWAYTKRLNTELGKKIAGAIVRYAEENHADVIVFEYLEMQGKISGKKKQKLHLWRKRDIQRRCGHQAHRKGMRVSRICAWNTSRLAYDGSGAVTRDWENHSLCTFQTGKRYNCDLSASYNIGARYFIRELLKPLPATERSLLEAKVPPVKRRTSCVYADLRKLHSEMELLKAA

SEQ ID NO: 59893 - protein, 790 aa, unknown
  TnpB Polypeptide
MLKIGSGYILWLCMGEVGCNVRDIEEAANILVNARHAIAFTGAGISTESGIPDFRGPQGLWKQYSPEIATINYFLQHPKEFWLFYRVRMSALFIAKPNRAHRALAELESMGVIKAVITQNVDGLHQAAGSKNVIELHGTMRRAICIACGRAYPMDVVIKKIDSGQVPPLCDECGGVLKPDNNAKPRSLGWGCFTVWAQHQVYKTLPCWGQPVPGLVPPKGGSVSLDELVGRLPTVFTNPGTPSPKPSNIRTVKLRLLPNGSQERRLRRIADATAKLWNELNYARLVQYRDGGEIDFKGTEHEFYHRYRGVLGVNAGQVISLNNWMWNSFFELSRLYKQGKLPKFYRKPSPPGFWKDKLLGKRELRILVRNDRYYLEPINNGEGYLVLKDWGLRVRYAGRIKWSGRQGTLVIKLEDGRWFAYVPITVGEKPARSNPRGYVRGIYEKIQIEKPRGGNKAFIDVGLNNLFAVVFNHSDTAILIKGSTIKAEYYWWKREIKTYQAIRDWLRNHGFESWRKYHAFYLHAVFKRRERLRHYYRTAIRFLAKTLWQMGIDEVFVGYPYMVSQDNGNEYNTNIWWYAKIINWLGEVLEEYGIKLNVVNEYGTSKQCSICNMEHENGRVKRGLYVCKLTGIKINADLNAARNIAKRAGYEVPTPRKILTYIVTTNGIKPITPKEGVTTKTPKIKPRPSGRGGGHTVLFGEPVKDFDRARELAMISDAVLVVGSSLTVYPAAYIPLFVKEMGGKVIIINMEPTELDYIADVNIRCKAGDAMEKLLEKIIEMKKEGTTVTQ

SEQ ID NO: 59894 - protein, 508 aa, unknown
  TnpB Polypeptide
LDLNGELLDSSLVLAQLTSEIRGISGYATFVVRNDMKLGSELAQVGAVQPTTAGHRAGVTMPRFFVEDEDGKPIAGKSGRSRKEALIQHRVVTEYRSWQERVKAINGESDKYVSQGWKRTVSASPPSYGEDYINLGAVNKQYAAIENDPFATGEIVLKMVIQGVWYRLFFRFDSMRFPEGKVTLPLIKIENNQPIFIFTVVTDNPVVQFSGDYTVGVDVGINNYATVVVRNNKTEKIVHQSTLSQRVHSLWNSVRASEKQVCQLKKKAKSLLYDRQARMSALDEARFHREAASRKKRELTIVAAQEIAYLSHLWGNAVVAVEDLSWVANTMQNGRWNRGELINWVTHYVSQNGGWVVSVSAANTSQLCHKCGSKVSHPAHEVSLCPRCGAMDRDVNAAANIATRAVPRVEKARKTRAKNRKLQEQVSLKTPPTRASLKYPGRDRTKNKPTPKRKKKRVVREVNLPSRPARVNMTTVLADCGTHSATGTSKAALKQGNVAYDCRLCSLN

SEQ ID NO: 59895 - protein, 372 aa, unknown
  TnpB Polypeptide
MRKSFKYRLYPSRCQTTILNQTLDGCCWLYNHLLEQRKNSWESEQKGLSRYDQQKTFKQLKEQQPFLKSVHSQVLQNVATRIDLAFRAFFRRIKSGEKPGYPRFRGKSRYDSFTYTQSGFKLLKNVVQLSKIGGVKIKTHRPIEGTIKTCTVRCAPTGKWFITFTCNLEHKPVKPSIDPAIGIDMGLTSFATLSNGEQIENPRFFKQEEKALTKAQRKLSAQEKASKSRAKAKKIVARTHERINWKRHNFVHQESRKLVNRFNTIAVEDLSINDMKKGNFCSINKSIGDAAWRMFLDLLSCKAEWANRRAIKVNPSYTSQTCSRCHNRHKLKLSDRVYHCPICSLSLDRDENAAINILGLGLQSIGISVEAH

SEQ ID NO: 59896 - protein, 423 aa, unknown
  TnpB Polypeptide
LSDKNRVRVGRWKCEKPHEEKRGGAEMIRRVAHTLKFATAAKRQKLDSFFAEYARVVNAFIELYWNIDKLPGKANAEVYLQVDSWMMGKARKCAANQSTKILRSVAKKDRQKTYKAYKKTYSKAMEHNRDVFGILSSKWSEWSKGKSFKHRIKMPVFKGNTIELNSGIVRIQDAKKSSEFDLWIRLGSIFGNRKSLILPTKHHERSRHFERTGWTQKKSVRLRIDVSGGYYVDVFWEKDDPTASQQRQAVGVDIGINKLMTTSNGEELGTKLHTKLNKLNRRKQNSRNWNQTRKEIKDYIGFVTNRFSWNTDVVVMENILNITQKTRGRIGKVTRKLLGHWNINLLYRRMADKAEQHRVFLAFVEPAYSSQTCNSCGVIDKKSRNGEVFKCTSCGYADDADHNASMNILQRFLDGHFTVARGT

SEQ ID NO: 59897 - protein, 380 aa, Amphibacillus sp.
VKALLVNKAYQFRLYPTQEQERQIAKTIGCSRFVFNHFLAKWNDTYKETGKGLTYRACSAQLPQLKQELSWLKEVDSIAIQSSLKHLADSFSRFFKKQNGKPRFKSKKNPIQSYTTKQTNGNISIVGNQIKLPKLGLVRFAKSREVVGRILRATIRRNPSGKYFISILAKTDIQPLEKTESAIGIDLGITDFAILSDGQKVDNHRFTAKMEKKLKREQRKLSRRALHAKNNGIDLLDAKNYQKQKCKVARLHEQVMNQRADFLNKLSTDIIKNHDLICIEDLHTKGMLRNRKLAKSISDVSWSSFVKKLQYKADWYGKTVIKVDKWFPSSQLCSECGHRDGKKSLDIRDWTCPTCYTYHDRDVNASKNILAEGLSVHASA

SEQ ID NO: 59898 - protein, 485 aa, unknown
  TnpB Polypeptide
MDKSTCALKLPLFLKAEQARSVDGQSKICNWLSNHLLEKANKLKEEYKNSGDSNAAKTLYTKHGLRNLLRQLKIDKPFLKAVHSSPLKKVALRLSKTIRAYQSSRKGNRAGKPVGWPKFRSFKKRFFSLEYEEPNKGYKLHDGFLEISLGLGEENKRHHLMIAMPDSRALKNKEISGLRIIKESKVYFAIFTIKKALPAKKMFKRVISLDPNHKNLAYGVDNASEAIEIEPPHWLKNYDKRIDELKSKRDRCKKKSRLIDITDDKGEVIKQYFKPSRRYQKYQQVLQRAHMKRREQTKTYQFTVANALCKHYDLVQIGDYTPKGGGLNTKMRRAMNNGSLIGKFKKTLAWCGDKSGKSVFEWDEKGSTRTCHACLKAVEGGIKPNVRLWKCQHCNKQHIRDENSAINGIRNSEIIKRAPSLLGAVPSSGPVSIEKRWAWRVLPSGVHRTLRGEDSFTKSDRQEIKMKDWEPSTQIGQDYADIAQL

SEQ ID NO: 59899 - protein, 495 aa, unknown
  TnpB Polypeptide
VSSRTSARPPRSRRWSRRSRRSTPARRTSSTCPTTTPPSTWCTRSGRGRRWRGGWTTTPPRSAAGRLHRETNMREEHAVPSGVDNLASGHSNKYSMKVQLRYNYRIYPSPRQQQALARAFGCARVVFNDALADRQAALKAGLPYPTDAELSARLTAAKATQERAWLGEVSAVVLQQALADLNAAYRNFFASLKGDRNGRKAGPPRFRSRKDRRQAIRFTRNARFAVTPGGKLRLPRIGDVPVRWSRRLPAVPSSVTVIRDAAGRYFASFVVQASEDLVPEADAETGIDLGLAHFAVLSDGRKIASPKFLRRAEGKLRKAQKALSRKAKGSRNRDKARARVARVHAKVADCRRDWLHKESTRIIRESQAVYVEDLCVAGLARTRLGKAVHDAGWSAFTAMLEYKARKGGREFRRTGRFEPTSQVCSACGVRDGPKPLSVRVWTCAACGTVHDRDVNAARNVLALGRRESLNARGGQVRPAAVLAPAGEAGSRRGAA

SEQ ID NO: 59900 - protein, 416 aa, unknown
  TnpB Polypeptide
MNPYPLEYFHFPLLKHISCYTETGNSMRKTYQFRLYPNKNQEVKLNSTLSTCRRLYNDSLAERKLQAELNRLRREFDVCPWGKPEWISCYEQQKATAANKTSYQKEVFSQVLQNVLKRVDRSFKNFFNGFGYPRFQGRNRYNSFTYPQSGFGIENGKIILSKIGAIKLIQHREIEGKIKTCTIKKDIDQWYVTFSVEMDDPIPVEIKNEIGVDVGLYSLLRLSNDDRIEPPEFLRESEKKLSRRQIRLSRKKKGSHNRKKQTKIVAKTHRAIRNQRNDFAHKISRMLVNKYDKIVFEDLQIQNMMQNHHIAKSIADAGWYQLIQLTTFKAECAGKIVEQINPKGTSQNCSGCGNPVPKDLKVRIHSCPFCGLVLDRDTNAARNILARSKSTAGTAGINACPSGLNRAMMTQDTQAL

SEQ ID NO: 59901 - protein, 459 aa, Mycobacterium sp.
MARFEIPEGCWVQAFRFTLDPTEDQARALARHFGARRKAYNWAVAVLKADTRAWRETGVETAKPSLQSLRKRWNQAKDGVCVNAETGVVWWPECSKEAYADGVAGAVDAYWNWQQSRSGARTGKRVGFPRFKRKGRDADRVSFTTGAMRVEPDRRHLTLPVIGTVRTHENTRRIERLIRAGRARVLAMTVRRNGTRLDLSVRVVVQRPQQPHTARPGSRVGVDVGVRRLATVADADGNVIERVPNPRPLEAALKAMRHVSRARSRCRKGSRRYRGRSTEMSRLHRRVNDVRTHHLHVLTTRLAKTHGRIVMEGLDAAGMLRQKGLPGARARRRGLSDAALGTPRRHLSYKTRWYGSQLVVADRWFPSSKICHACRHVQDIGWAEHWQCDSCSAFHQRDDCAAVNLARYEEPNSVVGPVGAAVKRGADRKTRRSRAGGCEARKGRGREAAEQPRDGVQVA

SEQ ID NO: 59902 - protein, 441 aa, Oscillatoriales sp.
MSQVITAKLKLNLNAEQKALVAQTALAYRDALNYTSQVAFDAGKTSNGLKLQKAVYNELRVRFGLGAQMACNVPRQVSATYKALWTKVRESNDAIAKGYTKKRYKGLDKVPKYVSRTCTLNYQRDYSFKTEQRVSIITLQGRVVVSYDSYNKHLALIASGYKVGAAKIVYQRSSKTYYLMVSIEVETQIVDPLKITRVSGVDVGMRYLAVETDLQNKSKFYSGKSARHKANRYHKARQTLQRKDTRSAHRRLIALSGRERRFIADVNHQISKEIAKPNSLIGLENLTGIRDRTKSKSGKRTSKKQRKANRNKAKWSFAELHGYIDYKANLNGSLATKVPAHYTSQSCPKCGHTSMGNRPKKGLLFRCECCGHELHADLVGSRNIAMRTLLVRQDWTSTGSLSASPDVSGRETKAEILQRFSELRWSSDTSPHHSGTPLDAG

SEQ ID NO: 59903 - protein, 497 aa, unknown
  TnpB Polypeptide
LVAKTPSFVTEIPLITSSKELAVLAARLEAGRQLYNAVLSEGKNRLDLVRDSEQYKQAWLIDKKDKKAKSTAFQKAREAYHFSDYDLQSFANKTAIASIWIKSHLDANTIQKIATRAFKALERIAFGKGKKVRFKQKGQFASLEGKTNKQGIRWTGDGVEWLKLKLSSIITNDPVILHGLASKIKYVRLVRRILNQKTYWFAQLVCEGQPYQKPKNIVGDGTVGIDLGVSTVAIVGDKETIWTPFAIELTSKQRKIRKLQRKMDRQRRANNPDNFNPNGTVKKGSKRWNKSKRYQKTAAKKREIERKQAAHRKSSHGKLVNQTLNLGKHIKTEKVSVKVWQKLWGKSIGFKSPSFFQSELVRKAENAGGTVLIFSTRKTALSQTCLCGNKQKKSLSQRVHHCSVCGLLMQRDILSAYLSRYVDPKTELLSIQSARNSWQGMEKSLLDGWQNGSNQSARTATSSKSPISNSGLERMSSDLIACEESEPARVNETRSVS

SEQ ID NO: 59904 - protein, 409 aa, unknown
  TnpB Polypeptide
VAQVKVIKCLQFRIYPDAAQQVLIWKTFGCCRWMWNHLLDERIKSNKVLDGVKFKNTTPAHFKKIPENSFLKEVDALALANEQLNVNRACSKCFAKGKTPKFRAKRNERRSYTTNAVNNNIELIHIRDTENYLKLPKLRLVKIIRHRNIPDGAVLKHVTVKETASGKFFAALTYEVMQEEVQPVTEFKDVESFDYNMRDLVVSASGRYDIQAEDIHWYRKMEQKLAKEERRLSHMEYGSNHYRKQKHRVGAIHEKIANRRNDFLHNLSRDVADEFDAVAVEDINLHGMAQALNFGKSIHDNGFGRFRGFLAYKLKAQGKALVKVSWNFPSTQRCSVCHHINSKVKDLSVREWVCPSCGALHNRDKNACANLKQEAINYLNRWANGDSTLILTPEGVLSVKKPHLLKGGE

SEQ ID NO: 59905 - protein, 413 aa, Janthinobacterium sp.
MERYQAYRFELRPTGEQERAMRRFAGSCRFVYNKALALQKENHAAGNKFISYVAMAKYLTAWRNSSETPWLAAAPCSAHQYALKDLEKAYANFFAGRAKFPRFKCKGDRNSFRVAAKGAIRFEQTNSRLRFPKLGWLRYRKSRDFFGEPVSATISQAAGKWFISIQTRREVDPVAPIATSAVGIDVGIARFATLSDGRFIAPLNSFKKHQQCLARYQRRMNRKVKFSSNWKKVVAKVQRIHTRIANARNDFLHKTTTAISQNNAFVCMEDLQVGNMSRSAKGTVEQPGKKVSQKSGLNRAILDQGWGEFRRQLDYKMAWNGGMFLAVPPHHTSQTCPACGHVSKDNRQTQASFLCVDCGHEKHADVVGAINVLERGYRLLACGEMALSGRSKKQEPAEARRKSSRRAVEISVL

SEQ ID NO: 59906 - protein, 370 aa, Brevibacillus sp.
MANKAYKFRLYPTGEQEQLLMKTFGCVRFVYNKMLAEQKEIYMRFKDDKEGLKKQKFPTPAKYKNEFAWLKEVDSLALANTQLHLQKAYKNFFSGRAAFPRFKTRKARQSYTTNVVNENILLLDGFIKLPKLKFVKLKQHREIPDHHIIKSCTVSRTKTGKFYVSILTEYENQPLQKEVHSVVGLDFSMNGLFVDSEEGKTANYPRFYRKALKKLAKEQRILSRRKKGSNRWYKQRMKVARVHEGITNRRKDFLHKQSHKLAKQYDCVVIEDLNMKGMSQALHLGKSVTDNSWGMFTTFLQYKLEEQGKKLIKIDKWFPSSKTCSCCGQIKESFSLSERTFHCKCGFVVDRDWNASLNIKNEGLRLLALA

SEQ ID NO: 59907 - protein, 273 aa, unknown
  TnpB Polypeptide
LSKEDKLILLALNNVKGWLIYDKDEIEVYESKEKRKVKVLEFHKKLARKIFKHLLGKKRRPRFDNISMHLDGKVVEISKKEKDGAKKFDYWIKMSTLEKGKPIYIPLAANTYAEKLEGEFLNYCQVVEDDDGNIEFRRIKQLKKKEYIPATDEIAIDLGLNPLFATNKGDLFGRNFLDVLKAFDSKITKRMSSLQKRNVRPRDDKKYREYRKNFIDYVKNEINRLINVIIKIYKPKRIIIERLDFRSPELSKRLNRMIQNFGKRYIKQKLERL

SEQ ID NO: 59908 - protein, 521 aa, unknown
  TnpB Polypeptide
MNELTTLKEGTRVCGSTQTQQSSFTPESPAPSKKPPSKRKRKCSEKPARKESFSATLHLDSIPNDEPLDPYWNEHCRGNQSAWWLPHQTVSPDQASHSSVTSSNYQVDQSNFWKKKIVPSSSMSERSLHLSLPTATPSMASAVIKGTRKIRVFPKNEPYLLELIRQHRRAYNLAVACFKESDARPELRKSEEMKKTVLRGIIREFVRDEVIDRGGEFASAGCDEAVLNAFRTRYAVIERRKKGEAADFAFRSIKDVRQGFLIQKLSPSFVLKNFDVSEKLPKEAFKKLTRIVHERGRWFICAQKHITTAQNAETQGLRVVAIDPGVRSFATSYTDDHCTTYGDGFYASKVFPLLLEIDKLIGLRARARNDQWKKHYQKRIDRKVNRAKDLINDLHKRVAFDLVSQFDVVLLPSFETQEMASKVERKIRTKTVRSMLGLAHYRFELHLKWMCKKYGKRLVICNESYTSKTRSWDGVIHSSLGGAKMISDGNIRVDRDHNGARGIMLRALYGNLGHEQAVGAT

SEQ ID NO: 59909 - protein, 414 aa, Streptomyces sp.
VIVKLMVQVRLLPTPVQAATLEATLCACNEAAGWASEVVFEKDVKRNFALREHTYTEIKARWNLGAQAVQHVIKKVCDAYATLKANLKAGNLGKPGSKRYRRAMEKPIAFRAQGAQPYDDRMLSWQIAERRVSIWTTGGRVKDVAFTASPEQLATLALYRKGESDLVCRDGMWFVLATCEVPEAALNTDPVDFLGVDLGIVNIATTSDGEIMAGRELNRIRTRERTLRTKLQKKNTPSAKRRLKKRRRKEARRAKDINHKIAKHLVAEAERTGRGIALEDLTGIRERVRLRKPQRATHSSWSFAQLGQFIAYKARRAGGPVVYVDPAYTSRTCAECGHIDRANRVSQAWFVCRSCGFVDHADRNGSRNIRARAWELWRRGAQSTAPAPPPKPKVGAGRKRSITASDARCASPGP

SEQ ID NO: 59910 - protein, 438 aa, Kribbella sp.
VDGGSSDWSRGNPVFRGGLDPRLPPFDDQGLSVAADWVGGVSRFRMYPTPAQEAALLEQCRHARYVWNLALEQWSMWTRDKAATPGYVEQARQLTEARAAFGWLRAGSQTVQQQALRDFDQAVRNFYAGTHRRPTWRKAGLHEGIRIVGPQASRVEQLNRKRARVLVPKVGWVKVRLSRAIPDAKSYRITCDRAGRWHIAFAVIPEPIPAPDTGEVVGVDRGVTVSAALSTGELLACPGLSDREQVRLKQLQRRLARCRRGSQRRLKVKAAIAKLRARAGDRRKDWVEKTSTDLARRYDVVRVEDLRIPQMTRRPKPKPDPARPGAYLANRRRAKAGLNRGILANGWGQLVTRLEDKAPGRVEKISPAYTSQTCSVCGHRAPENRENQAVFRCVACGHQANADVNAAINIAAGRAVSARRATPPRVSPKREPQLATSA

SEQ ID NO: 59911 - protein, 476 aa, unknown
  TnpB Polypeptide
MQIGNRFRCYPTPSQSATLLRWIGCQRFIYNAKVGEDRYFRAFSRKCLALAGTHAPIDQQYSQFKTELTPWLKEVPSQILRNGATKWMQAYSRFFNKLGGRPTIQKKHGEQSVWLTSELFKFVPSYCDKESKALYYELRLGAKKHPLGVLNFKSHKPHKVPNSISISVHAGRWHVSFSYDNEIPEPDEKDTIAWLRQHSEQALLAMTVSGDRGVTIPFATSDNRAFRFSEVQQRRMARQEKHKKRWQRRMARRIKGSSNWHKARQRVANHQRYAADVRRDFAHQTSYRLVSDPRVKLIAVEALKLKNMTARAKGTLEEPGKNVAQKAGLNRAMLGSALGSLKTYMQYKARRSGKLLLEVPPHYSSQECAACGFTHPDNRKTQSGFVCQRCGNRDNADFNAAKVIAKRGVKLLLSEAFRIKEKKGVAIKRKQVGAGCSEPAPAMVPTLVETDVSRLASRGSTQWSLKQETLTTSQRL

SEQ ID NO: 59912 - protein, 474 aa, unknown
  TnpB Polypeptide
VHDLIGRQCGWRVDEQVNMINLNGQRNDSAINPLGACFNELCQPPGDVSLQNLSAASRDPYKVIIDQRYGRLIVSMFLTHRPYYAILAFMRATYIYRFYSHKRNWRLHRQINVGGEIHNHCIRLCKAYYAQYGRTLNFYLLKKHITRLKKRPEYAHWNQLGSQAVQDIVFRIKKGYEKFFRRENKRPPTYRKIDKAKSFTLTQAGWKLVGNKLRIGKGNYKVALSRELEGKVKTLTIKRDALGDLYACFSLDIKTEPVSRTTTGKSAGFDFGLKTFLVGSDGSEIHAPQPLLANLASLKKHSQELSRKAKGSGHWREAKVQLARFHRKIRHARSHWHWSLARELCLAYDAIQLETLELRGMSRLWGRKMSDLGHGNFLHILQHVASKLGTKLTFIDRFFPSSKLCSVCGVINESLTLKDRYWRCDCGTRHDRDENAATNIHRAGTGPNGVGHVRRASARNGCLIPESHAFMRAE

SEQ ID NO: 59913 - protein, 427 aa, unknown
  TnpB Polypeptide
VRTVVVKSVPLPRRVFRVFAELEGVYRNMVEQLALFAVRNNITSFTKLKALKYRELRSLYPHLPSHYAYTACQDASTRAKSFLRLRKKGLTSRGFPEVKMISIWLDDHLWKLGGLTSIEIATHKGWVKVELEPHKQYWKYVNSGWKLASEAKVKLDRKSRRLVVYLTFKKRVEVYEPKSFVAVDVNENHVAVLVDGSVYIFETGFRDVILGYYYRRKRVQEKYDKVYGVSCRAKRKVFRKLKERKVKNDLRWKLANIIVRIAKEKQYAIVLEKLGKNPAREMINHVKDAQLRHRIYQASFRGVQGSVEEKAREYGVPVIYVNPRNTSRLCPVHGTPIVYSNGGRIGRCSTGGELWHRDIAACFNLLLRARLGDGSSALSLDGHLVDGSPVPLGSTATHDPTLIAHEAWARWKSLDATNKNKLMRMNI

SEQ ID NO: 59914 - protein, 367 aa, Moorea sp.
MAPNHSYTTKLKLNNRQKTLMAKHAGFSRWVYNWGNGMWLDGYNQGLKPNIKTLKRLFTNYVKPEYPWMSELSSKVYQYAFINLGEAYKRFFKGLGKSPRFKQKGRNDRFTIDNSGKPIRLGGTCHKLPFIKWVKTFEPLPDCLTKKVTIYQKAGDWYISFSIEREFQPTPKKRERVGVDFGIKSLAVLSNGVEFQGLKPYRNAQKKLARVQRKLAKKVKGSKNYSRALLQVQKLHRRIGNLRKDYLHQMTTYLAKNHGTVVIEDLNVSGMMANPKLAKAIGDLGLYEARRQLTYKCERYGSKLVIADRFFPSTQLCYNCGNKQPMPLSERVYQCGCCGIEIERDWNASLNLEYYNEYGSTCKPVEG

SEQ ID NO: 59915 - protein, 417 aa, Catellatospora sp.
VKVVVPVRLFPDTAQQAALRETLTLCNQAANIASAEAHRTGTTGKNALQKLTYSRLKVMGLSAQPSIHVARKVAGAYATLKANIRAGNLGKPGSKRRRRAEGKPVSFRRHAAQPFDDRCLSWQMPARTVSIWTVAGRMTRIRFGCSEPQYVTLLAHRHGESDLVHRDGMWFLHATCDIPDVQVEEPDGFLGVDLGIANIATTSEGRRYCGKALSQVRHRNQRLRAKLQKVGTKSAKRLLKARRRKEARFAADTNHVIAKRIVTEAERTGSGIALENLGGIRDRVRLRRPQRVTLHSWAFAQLGRFITYKAARAGITVVHVDPAYTSQECNRCGHIDRKNRPNQHTFSCTSCGFAEHADVNAARNIAVRGIASWAAVSRAERGVNIPARYGHDPQARSLKPSSWPSSTRRPSPHVRSR

SEQ ID NO: 59916 - protein, 400 aa, unknown
  TnpB Polypeptide
MKTIKQNIRGLNKTQYIELKRMCKHSNSLYNSTLYFIKCYYKETNSYIGYNKLYHEMKTNIHYKSIPAKISQQILRLADKNYVSFFHLLKQKNNGRYADNISEPKYKKSNSEFILILPQDQVSLKKGKLKITKDLKLNYSYEIDGKIKQAIIKPNNYGYYSLYIVYEENKIDQNYNFDKNNILGIDLGINNLVTCVSNVGRSFAMNGKPLKSYNKFYNKQKSQIQSELKVCNDKHYSKKISILNKNRNNYIDNYFNQIISRIIKYSIDHNIGSIIIGYNETWKKNCNIGKVNNQTFVQIPYFLFKRKLENKCKEYGIDYIMVNESYTSKCSFLDNEEVKKQEKYLGRRIKRGLFKTSKGCLINADVNGALNITRKVFPKAFADGIEGGVVHPVMLNIFNT

SEQ ID NO: 59917 - protein, 420 aa, unknown
  TnpB Polypeptide
MQLVERHIVKDNKFMDVCVKAKSLYNQSLYYYRQSLFGNIEYFGEYELTGLFAEYKEENYKTLPAQTSQQVIKLMFKNVKSWQKARKEYAKNPSKFLGRPKLPNYKKETSICIFTNQQIKVKDGLICFPKMVDLPNIKTKQSGIQQVRIIPKLNHCVVEVVYNSKDVELKKYNGKWMGIDLGLNNLAACTTNESSFIINGKPLKSINQGFNKTRGKVKGLLPLLPKRIVSKTGNRIQKGTSRKIVVITDKRNRKIDDFIHKASKFIVGVANKEGVTKIIVGNNKNWKQEVNIGVKNNNSFCSIPHDTLIEKIRYKAQMVGIEMICIQEAYTSKCSAIDLEAIKKHEKYIGKRKKRGLFVTKYGLQINADCNGSLNIARLGLSATGNEINISESLVRCVSQPKKVNVLYNKIKLLEHFNYK

SEQ ID NO: 59918 - protein, 381 aa, unknown
  TnpB Polypeptide
  misc_feature (297)..(300): Xaa can be any naturally occurring amino acid
MNMRLTRTIKLKLNIPTESIKPTIEAYTKAFNFVCQTGWNDSDSNGVSLHNKTYLKTREYLPSQLAVSARMKATEAIKSIKTRLKKKQKATCPQSKQIAIRYDARSYNVWFDRSELSLLTVGGRIKIPVSVPEYFQQYLAWKRCSADLFIRKNKVFLNIVFSKDIADPEFTGKVVGIDRGIKKIAVTSEKQFFGGGQIKKVSKRYEKIRSTLQSRGSKSAKRHLRKISKKENRFRTDTNHVVTKRIVESLDEGTIIALEKLTGIRQTVRLRKKQRKDLHKWNFFQFEQFLTYKAEAXXXXIEHVSARYTSQKCSACGYISRSNRQSQAVFKCKHCDFSLNADLNASRNIRNNYLDATCYPGRVSVNEPIVTPTRGVTSRLL

SEQ ID NO: 59919 - protein, 257 aa, unknown
  TnpB Polypeptide
MLLVGYALDLIKRVRVVRKGDGYYSQFCVDAERRASVEPSGRVVGIDLGLSHFYTNSEGVRVDNPRHLRRSERSLKRLHRRVSSKVKGSNNRAKARERLGCKHLKVSRQRKDVAVKTARALIMSNDVIAYEDLKVANMVKNRHLSKSISDAGWRSFVTWLGYLAHVYGKVVVAVPPQYTSQHCSGCGERVKKTLSERTHMCPRCGTVLDRDHNAARNILARGLRVLAETTAGHVERNAWGQFALYPPEATGTDTAAG

SEQ ID NO: 59920 - protein, 376 aa, Luteibacter sp.
MQTVTLHLKVQPNAWAWLDQACREVNTAWNWANETSRRAIQTYDDGGRWLSAYDLDKLAVGAGDCFERIGSDVIQRVNAELVTRRIQFRKPVLRFRASGGRRRALGWIPFKAANLRLKGNRLRFMGKSIRLFEMDRFLEHRLMAGAKLGSGNFAQNALGEWFLNVPVQMPYPAGTTFDANGIPQLPVAPIECLGIDLGLKAVVTTSEGQVFEPNRSYRDNEAKLGNLQRAGHKKQAKRLHQKIRNQRQDYNHKLSSALVSQGQWIKIGDVSTAFLGAGTRAKSARDAAHGQLKAFLHYKGHRAGRSVDVVDEKYTTQTCSACLSRTGPKGSTGLRVRQWICSACGASHERDINAARLIKAAAPRCRRPIAGTRELR

SEQ ID NO: 59921 - protein, 396 aa, unknown
  TnpB Polypeptide
LVKAYSIPHSLDVKDLVDNYMCLLNSVLDDLWGMIEWKRKGNRLIPLIRKDSAFKKELRDKHLRGWVYSKHYVDSAIKQAYSVLNSWRKRYLKGKTGRRKPVLRRRFVRVKDTLYSYRDRVVKISIKPFQESISIDLKESWFWDRIQGLELGELILKEDKLVITVRKKIELKVEKPVAWDTNLLTLDGYDGEKDYTIDLKDIYTIHRTYELKRRKIQSLPPKTAKKLLQKYRSRERNRVNDTIHKIAKQLANRTNVFEDLHNFKERIAETKSRSINRQNSKHDYIKLQKYIEYKSTWNGYLTVYVDPKLTSKTCSRCGYINKDLKGAGVFICQNCGLKIDRQKNASRNIWHAFLRMWGSGFTPKGAKLDDMLPMNPEGDKSGDAQGLSMGSIRIHT

SEQ ID NO: 59922 - protein, 393 aa, unknown
  TnpB Polypeptide
MSKKAYTFRLYPTKQQEQTLHKTLALCRELYNASLEERTEAYRMSKVRITYNQQATQLPEMKEIRPEYNDIHSQILQDTLRRVEKAMRAFFRRVKNGETPGYPRFKSFNRFDSFTYPQGGFSLTHDTRVCLSKIGSLKVRLHRPIEGKMKTCTIKKEGDQWYIIFSCEVETIEPLPENNELVGLDMGVTHFAALSHGETIENPRHFRRSQKRLAKISQNLSRCKKGSHRRARVKKQLAKTHRKIKNQRKDFLHKQSRKLVNTYGTIVFEKLHPSHMTHRPKPKKDETTGEYLPNGAAAKAGLNTSILDAGWSQFQQYCTYKAEDAGRAVLFVSPNYTSQICSGCGQIRKKELSERWHSCDCGAELDRDHNAAINILRLGSSQRGVTYVEAPCL

SEQ ID NO: 59923 - protein, 402 aa, Morganella sp.
MKRLQAFKFRLRPNGQQERDMRRFAGACRFVFNRALALQNENHEAGNKYIPYTKMTSWLIEWKADTDTQWLKEAPSQPLQQSLKDLERAYKNFFHKRAFFPRFKKRGTNDAFRYPQGVKLAQKSSCIFLPKLGWIRYRNSREVPGVVKNVTVSQSCGKWYISIQTEYEQPEAQHDSTSMIGLDAGVTKLATLSDGTVFEPVNSFKTNQKKLTILQRQLSRKVKFSANWQKQKRKIQRLHSHIANIRKDYLHKVTTTLSKNHAMIVIEDLKVSNMSKSAKGTADQHGRNVRAKSGLNRSILDQGWYELRRQLEYKQGWRGGQVLAINPAYTSQKCACCSHTAKENRLSQSKFECQACGYTANADINGARNILAAGHAVLACGGMVQSDHPLKQEPTEMIQTLV

SEQ ID NO: 59924 - protein, 393 aa, Deinococcus sp.
VTHIENITLKAFKYRLYPTKAQESALDTTLILCQRLYNGMLEERRGAYKKAGKSLTAYDQMKSLPEVKAALPEYAGVNAQVLQDVAKRLDKSFKGFFRRIKAGQKAGYPRFRGRDRYDSFTYPQPSQNSVIGDGKHVYLPKIGNVRIRLHRPCAGKLKTLAVKREGREWYVVLTCEVPRAEPLPATGSEVGIDVGTTWFYTTSDGEFCENHRFFQRSSRKLRVAQRSLARKPNKRSNRRKKAKERVAKLCRKTARSRLQLHHEEAKKLITNHDLICHEDLNVKGMAQGNLSKQIHDVGWGQFFQILSSKAAEAGRRVIAVDPRFTSQRCRICGHTEKGNRASQANFRCLSCGHSENADVNAAKNILAQGLRFVAQRTSQEDACHEKPQPAGLG

SEQ ID NO: 59925 - protein, 425 aa, unknown
  TnpB Polypeptide
MELMLNYSFELKLNTAQRRFLSQTAGAVRFVWNHFLAEQKAIQESRTAIYHQNKERVEQGLDPLPQPSLLSFNECCKALTALKRTEGTQWLKQPIAQALQQTLRDQDRAIREFFKNGKGFPRFKSRDHGDSFRLPQPKKEDIDEANARIFVPKLGFVRYRKSRDTVEGLVRQVTIKRDGTKWFVVITKLITNYQPLETLASECGIDLGVAQTVTTSDGKVYQIDTDRIKAIEKRIAQKQRALSHNYEARCQLTKCGLAQAFDKTKPSRKRRRLKAQIQKLYQKLRNIRKDFCQQTAKAIARTVGMVYVEDLKIRNMTASAKGTIEEPGRRVKQKSGLNKAMLRFSPHQLVSSLEWALLKHGGYVTKVNPAYTSQTCPSCGHCEKENRPTQAKFECRQCGYTNNADVVGAINVLNRGRTVPSMPAE

SEQ ID NO: 59926 - protein, 319 aa, unknown
  TnpB Polypeptide
MPVFYRDVMYREEKEGKDEAYLKLYDGHDWKWFCVRLNHTDMEYLRRNWWGKKASAPTLEKRHHKYFLRFSYTEEVTLTKTPVKEQIICSVDLGINTDAVCTIMRADGTVLGRKFINHPSEKDRMYRTLGRIRRFQREHSSAQSRGRWAYTKRLNIELGRKIAGAIVKNAEENHADVIVFEYLEMQGKISGKKKQKLHLWRKRDIQKRCEHQAHRKGMRVSRVCAWNTSRLAYDGSGSVSRDPKNHSLCVFQTGKRYNCDLSASYNIGARYFIRELLKPLPVTERSLLEAKVPAVKRRTSCVYADLRELSSEMGLLMAA

SEQ ID NO: 59927 - protein, 287 aa, unknown
  TnpB Polypeptide
MDTYRPCYASLCFKEIRGRVRVFIHLTIEGLPKTKRRKDGSRRHQLGRGVVGCDIGPQTIACTSKKEVILKNLAERGMSIKNREQKEAAIQRKMARSRRAMNPENYREDVNHIRELGNVFVTEPGNAKKLQKRAKKTERQEKLSEVKQKDGTVKMIHKYKRKKRHGRSIQNRCPGYFQAQVKAKFERSGGVYIEVPFDYRASQYDHTCGSYIKKLLSQRMYCLSDGTRVQRDWYSSFLLFCIGHSLDKISRYKCKTYFETMYRMYLALEQYIIENHIRVMNSGIKAA

SEQ ID NO: 59928 - protein, 400 aa, unknown
  TnpB Polypeptide
MLTHNLAHIIRLYPTESQETFFRKACGCARVAYNYGLSEYQKQRKEGGKPKISEIKKKFNQEKKTLYPWMYDTNKDANQQPFSNLQDAFTRFFKRQNRYPKFKKKGIRDSFYISNDRFETKEKKFWIPKLGWVKGAEELRFCGKIMSATVRRKANYWFVVVSVETDKTFTTCDNQAVVGVDLGIKTLATLSDGRVAEAVSPLRARLKQLKRLQRWASRKIKGSSNRHKANRRVAKVHYEIACLRKDILDKLTTYLCENYQVICIEDLNVKGMLRNHCLALAISDVGWGEFRRQLTYKSLLHGNTIIVADKWYPSSKKCSGCGHVKETLLLSEREYVCEHCGLVIDRDLNAAINLRNYALNQLGMACPEITPVDTGALAHSSLIGMSETAVYEAGIFSVPK

SEQ ID NO: 59929 - protein, 434 aa, Cyanobacteria sp.
VIKLFGCQQVLIHTNPDTQALIKYICSESNKVFNCAVYYARQIYFKAHRYVTKAELDNELKANKHFQAMHSQAAQHTCHSVFESFKSFKALNKLFQQGKLTQKPRLPKYRKEGLNIVSYPKQALKLIDGNIRIPLGNKVKAWFGIDSFTIPMPSNLDFSNIRELRILPKNRCLYAEFVYKLNTIETTVNPNKALGIDPGMDNWLTGVSTVGTSFIIDGKHVKSLNRWYNKKVSTIKEGKPQGFWSKKLAHLTEKRNRQMRDAVHKAARLVINHCLQHHIGTIVFGWNQRQKQASNLGSKNNQKWVQVPTARLKTRIQQLCEQYKIRFTETEESYTSSSSFVDDDYLPKYGERPDEWKPSGKRVKRGLYRTALNWYINADCNGASNILRKVATMLGLNLSGVGRVSLTAPQRIFLWSAKRKKFRDAVLTRHETSA

SEQ ID NO: 59930 - protein, 529 aa, Arthrobacter sp.
MTEATGLPREAMKVRAYPLQAFANAGKLSRVHALLGPWRSALGGMQSQLYRQLLDGQPLMKRMPTKVTDLSFTTELSARQVKSIYNQTFQAMNSWTGLVKNAVRELISGSHLDDEARTILYRVNARKAWFAKELSLPVLVNLGTGEVRHSDGKPGKGWAAQDLPVPAELLRLCRHMVKQVGKHAVSLPDLSRVNTMLMDGTIARVEPSKDSSFDYWLRISTLQKGDVARVPLRAHRHFRDAPGEVSDFVQLNVLKDGSLQFVLQKKSPLAQPRPDGVHLGLDWGMKSLFATSDGRLLGVGAMPHLMELDRQTLELAKSLQRQGIRPKTNRRYRNLQRRMGEYITNEVNRILNKLSTEDIQGLAVEKLDARGGGMSRDMNRLVTRFGRAAVKKKLAALTEDTGLDVVEVNAAYTSKECSSCGLVHDGNRSGLKFHCRFCGRKTHADINGARVVLSRRSWHTQGDSRTKSQRGTVRRRLDGAFEARWGCAPPTAGSTGSRIPGSRRRSAVRLATAPSQAPVRMRENVEKVP

SEQ ID NO: 59931 - protein, 191 aa, Geitlerinema sp.
LRGKPKLKLQKKISRVHQRIANTRKDWQFKLAHHLCDSAGMIFVEDLDVRIMAKGMLGKHTLDAGLGQFTNQILPWVGFKRDVYYGKVDARGTSQECPDCGAEVRKDLSTRIHHCHNCGSIKPRDVASGQVIAARGQRVVEIACGGDAAGAGVTQSSWHLLKQEIFGATQGISTQIKDYAWRGCQSSSSLL

SEQ ID NO: 59932 - protein, 413 aa, unknown
  TnpB Polypeptide
MHDERVVRLLNDYRLLVNKAVRYGLQSGVTSKFALCKHLYAQFRCESDMYSKHVVSTFEVAASILKNYRHRARRGLRTKPPFVKRLFLKTENQAFRLDRKAGILRFPLRSREYVWIQLPVNPYHKGMLEDPGLSLGSLTLMPDRIIIAFRKEAPIPFQPEGLLALDTNESSLDGVHARAGKTEYVRARFPEVRHIQSLYFRRRRKLAKKKPHDARIRRRLLHTEGSRERRRVKQRLHILSKGIVAEAAKQRCVLVLEELSIPKLRGRSRRMNRRLSVWPQAELHRQIEYKARWIGVPVLKIDPRNTSRRCPACGWCDKSRMRVASVKGVFTCPCGWRLDRQLNAGVNILQTALASNEALARAVRFQPGALRHDVVIPLCAPKSGAREEPNEGSLAEGKTEPSPTERILAAVPE

SEQ ID NO: 59933 - protein, 301 aa, Streptomyces sp.
LQQSLRDAESAYRNFFASLKGARKGRKVGSPRFKSPKDARQSIRFTANARWSITGSGRLNLPKIGAVKVKWSRPKARGKVARAHAQVADARREFHHQFSTRLISENQGIAVEDLSVAGLARTRLSKSVHDAGWSAIIGMLKYKAERYGRTLVAIGRFTPTSQTCSACGAVDGRKPLHVREWTCGACGAVHDRDVNAAINVKTAAGLAASACGAPVGPGAIPGTARRNRKPRNPDRKPCRLAARFPVEKARILALQGEEHVNRRACPPPRPLRGSRRGGTARCRGRGSSPRCARPHGPPAWR

SEQ ID NO: 59934 - protein, 533 aa, unknown
  TnpB Polypeptide
LLTRQKYDELYDFAVLIQNHKNAVSQYVNDNLLVFLEYNKFQFLKEMRERFKDGIPSSFDAQLYTQVFTCYQNKFDAIQRKLVFEVVTFKGFEFYKRDTKKHKKGELKKVVCDKKKTQLTITLTYLARYGNGNITDYISSNISKCDEKKREFYNNILRCCNKFGFERLYRLALSKRKRIIKHYSEYPIEFKSLTFSGRSRKVKIIDYNSKFGSKINSFVSLSGIGRKSFDIPVIFNKWWHGNMKDYRKNNPDYEYTITFNEKEHQVNIHLCKDGERYIPQANGYTVGIDVNCKHNLFTLSDETTYDYDRKLVNDFCKLSLEIDKLKEKNKEYKVGKRKQQKLDTLKSKMIKSEQQLIADMCKTLHLQGVGHIVMEDLNNGFGKCYVKDKDNEDINYNRKVKFLGLSSLKQEVEHIARKYDIAVSTVQASYTSKMCPVCGCIEDENRPNQETFECIECGHKDNADFNAAKNIRNRVLVTVLRESLLKQLDNGAFEPKKLKREKVKEVLLSFRRNLQETARSEHNKIKINRFEYD

SEQ ID NO: 59935 - protein, 403 aa, unknown
  TnpB Polypeptide
MEIRILIKAFKTEIYPTEKQKQKIIQSIGIARFLYNYYIAYNIRLYRMYQRGMLDSKQKNFISANDFDKYVNHKLRKKFPWISECGSKARKKAIMNAELAFRRFFSGKSKFPRFKKKSRQDVKIYFPKNNPGDWKIFRHKIMIPTLKYVRLKEFGYLPVGLNVISGTVSYVADRFYVSVHVDIDEKSKYNKDLEISYKQYSNGIGIDLGIKNLAVISNGKVFKNINKSSRIRRLEKRLRREQRRFSRKLEFRKKNGGNVTISANIEKQRLKVQKLYHRISNIRVDYENKVIHEIVEQKPRFITIENLNVRGMMKNRCLSKVISAQRFFLFREKLKRKSKIIGIELRIADRFYPSSKICNSCGHIKKELRLKDRLYICEKCGYVEDRDLNAALNLRDAKEYLVV

SEQ ID NO: 59936 - protein, 368 aa, unknown
  TnpB Polypeptide
MFPVVQRSESKVVDGAACCVKVKIPNTLEHGLYDVLTRCELAVERMLANRSLSSSKYYRDLVPCVVSKSLIAKYQKNPKCHQVKNLVIPVCGDKGKQIKLVTGGIRIPALFKKDVLPVQWPREITGHVRSIELFRREGEWFGSICYNTAKDPPLSCDGVIGVDRNSVGNIAVLADPQTGVVRKLGICPARTKFVFRRRRKNLTRAGKTRLLKKLYRKQRRRMSYENHRATRAVVDYAATHRRAVVMERLDNVRSKDSKIRGYSEKNQWAFAQFGSMLRYKCALRGIPLIEVDPAYTSQTCSRCGSIHKPDGKRFKCLTCGHNDHRDANSGFVIAQRGLQALSGGSNSGLSVSELRPIGVARAEKLEAT

SEQ ID NO: 59937 - protein, 359 aa, unknown
  TnpB Polypeptide
MLDVCRSVYNATLAVRKNAYERRGESLSYYDTKKLLPLWKINFTDMTKVHSQVLQDVTMRVDLAFQGFFRRVKTGDNPGYPRFKSTGQYKSITYPQYGNGVKLEGHRLTLSKIGTMRVKLHRPIEGEIKTVTVRRDSVGKWYACFACEVDAKPLEATPCAVGLDLGLKTFACLSDGSKIHRQRWIKRDAKDIARLQRKKERLPKGGSEWRKAVHALQHAYQRATNRRTNFAHQESRKLVNRYQFMAFEQLDIAGLQDLGNAGINRSIADVAWGQFTQYTLYKAENAGRSVVLVDPRGTTQQCSGCGEVVPKALNVRVHDCPHCGLILDRDLNAALNILARGLASVGHRPVEAPAFRRGE

SEQ ID NO: 59938 - protein, 514 aa, unknown
  TnpB Polypeptide
MQVRWNFKLLPNQQQEGTLEDWLVTLRKHRNYALRERKDGFETNNAVANQKIIYAYGSYCDTESKVEYGSCCPLTCPVLKHGVIPNNLELATKLSQVLDKQTLVIVETVIKWDSASGIQMKVTSQLRQTLNSFAAIDSCVLQRNIANLDTAYANFWKHHRGFPQFIRRLDSFEYKPGRVILRHIRKNYATAYLPGIGEVKFHNSRELSLIQDLRTCTIKREGGNWYISMLVNIAEVLPDVMPLEECKSIVGIDVGINKLVASSNGSFAENKRTTTNSRTARRLAIRQRAISRKQKGSKNRIKAIKRLARQQHKLALERDGYGWQVAKVVVKTADAVAREALRIKNMVKRAKPKHDGKGGYKRNGASQKTGLNKVILDAGWASLFNKIAWLALKAGKPVVAISPKHTSQECPSCGHIDKKNREGEKFLCIVCNFTEHADTKASRTIASRVGLVFPKKQKTLPRDSGKVTPNRHQSLRVEVGNHASGATGIQLSLFDIAEYHSPDNRISKRYGKTS

SEQ ID NO: 59939 - protein, 352 aa, unknown
  TnpB Polypeptide
MSKTEVVDASELVKYVTITGKLVPISIEDHMKLARLAHDFKRAVLVATRMVAKGVREAEVLRELRKRLNKAYADSAFKTAKAIVEGCSFNGGNPLHIEVRKLFIVSEGEASRHGNRNVKFESTDVIKVKYPHDGSWLSLRAEFGEKYLPLVRDLVDLAERRRISYHAKIVFRSGKVYLHLSIPIQLYLKYFKEGEARGRLIAGFDLNSDRVNLVIIDEHGEIVDVRTAWFPEATSHGFPREKAKALRLNALARLLKYCHRHGVSVVVFENLLSVKRKRFTRSKKANRKINRFAKKQLIQHGVVMALKYGLRALLVDPKGTTNSREHGELMKKYGLNRHTASAYLIALRGLRH

SEQ ID NO: 59940 - protein, 666 aa, Streptomyces sp.
MQTAQTSRFRGKNKAPKWTKPDHGAVSVMVLSLAVSDPSDLARLERLFGAMWSIKSAVQRDARAKVDAYWAAHRTRDKQGGKDVRQRLGLSREALERCAYKHLEDSGHLKHHATKALAMHIADEVWNGVSRHLFPDATGHRSGRPRAGHRHDFTRIPGRARSHTAENKWETFRLVGTVHGHVMAYADGGRQALMQPRRMPKPAVPEGRVPTGRLTASGKPGMRNANWWDHTGPLAVVFAGGPGSRRGDLVLPVRIAQGAGQRERVQHFLDNPGRWHKVDLVRRRKASAPGGWAYEAHLMVLGLGYSSPAVREMRHKAVRLGRIGGVDGNVSNLSIVSFPAQLDGGVPVSTEIALTDAERARLEKEAKKRRGRARALERSRRATNIAQYAWSKKQTVRAERRAAKGQEPKLVTVPGGARAVRSDGKPKQAFRRDRLSAHYRQQRGRQAEAAASAAERRRHRARMVAREIIAAHGPVLVVEDCDIRTWYRLWGKRLSRTTPGMLIAALDVECKAAGGRLVRASTWSTALSQHCLCGRRARKSLRDREHKCTGCGLVGKRDLVSAALAAFVRFNDPDDPRTAYLDTTASRNAQITYSEALEVALRESTTPSPKPPWRPGRVAVPRQRRETSAPRTAGQRNRAAPDESRPRGHAGKPGHRTACSPQLTLW

SEQ ID NO: 59941 - protein, 461 aa, unknown
  TnpB Polypeptide
VACGGLPQALRHKAFGNLWLGRAKAKNEPKNEPKNEPKNEPKNEPKNEPKNEAKRVLALVNRWYDVPGMRTYEYRARPNKQQEARLMAVLIASRRLYNDALQELVEHYKATGKHMNLFEQDKRHGAKEHPDLPAVVVDTTLKRLHRSFANFFRGRKEGRRVGFPRFKSANAWNTVQFRDAANCLDGNYLKTPKICGGRIRVNVHRPLGGAFKFARLVLRPSGWYVQCVTDYDGERLEPNDKAVGLDMGITYLVADSDGGFIKNPKSFRQSAKKLAHAQKQLAKCRKGSHRRRKAKKQVARVHERIANQRKDRLHKVSRSYVNGYGTIAVEDLKPANMVRNPSLALSISDASWGLLRFFLSYKAESAERRFVAVPPRYTSQKCSRCKELVQKSLSVRTHVCPQCGYVADRDTNAARNILRNMLRIGLDELRIGLDETFAEGRRGAGIASESSVSLKREAPRL

SEQ ID NO: 59942 - protein, 381 aa, unknown
  TnpB Polypeptide
MIRSYRYRLKPNVAQKMFFIKTFGCVRYIYNWALSKRIESFQNNNDDISWKDMSSMLTSLKKESDKLWLNDVSAECLQQSLIDLNSAYTNFFRRKKGFPNFKSKRNCNHYRAINSVVVDQDKCKIRLPKIGWVNFFSNRKYVGKFKSVTISMTPTMKFFISINVDDGKDVIDKPEISYDTSVGIDVGIKNFAVTSNGDVINNPKFLEKSIGRIKVLQKRLNRKTKGSNNYVKSRIKLAKEYEKITNRRNDFLHKISTNIVRENQTIIVEDLNISGLMKNHNMAKSILSASWYSFFKMLEYKCGWYGKNFITIGRFDPSSKMCECGYINDELKLSDRLWSCPNCGIVNDRDFLAAKNIKKFGLQRRNLIGYSPRVAGVELVE

SEQ ID NO: 59943 - protein, 424 aa, Haloferax sp.
MSRTIRTFEATIPNQQQVRDDLDQLGWAASKLWNVGRYYTQEQWDETGEIPDDGELKAELKSHERYTDLHSQSSQRVLEELAEAFNGWFGKRRNGGDRARPPGYRKNGDSHPRSTVSFKAAGFKHDAQFTRVRLSKGRNLKEHRSDFILCEYQTRPDVDLTEWDIQQVRAVYKRDEWRLQFVCRTTIDPEPPGEEVAGVDLGICNFAAVSFGGKSVLYPGGALKEDEYYFTKKKAKCDDSSSREATRLDWKRTGRRTHFLHALSKAIVEECVERSVGSLVVGNLGGIRENDETGGSRNWGDHGNLDLHGWAFDRFTTLLDYKAEAEGINVELVSERDTSKSCSACGHTDDNQRVERGLYVCEECDTVANADVNGAENIRQKVLPSLATDGGDRDNGWLAQPAVHLFDRSEGVFAPREQVVNREP

SEQ ID NO: 59944 - protein, 411 aa, Haloferax sp.
MDWQRNTVRQLYNHALNEFDQIPEDAGTLRQRVWMVRDTLPALKGWWTDLKLVYSTVLQKAVERIRDNIQNLGKLKAKGYDVGSLNWKKPREYRSFTYRQSGFELDKKSGPNGRGLLILKKLKGETREIPIRIHRDLPDHEKVKEVTLKKEPTGAWYVSFCIETETPEKPAVEAIGSDDAVGLDLGVLNFAHDSDGRSIGRLDLSNDRERLEREQRSLSRKDYESNNWERQRRRVTEIHARMSNKKRDFKHKLAHFYTTEYDAVFVEDLNVKGMLESPQNARNKAEVGWRDFITILEHHGEKNGCHVVQVNPRGTTTECASCGVSTGKPLWVREHSCPSCGFELDRDWNAALNVLSRGLDKLGVVHSEDTPVETATAVSTDGGDSSSIVVDASRVTETGSPVLKEAASAAE

SEQ ID NO: 59945 - protein, 411 aa, unknown
  TnpB Polypeptide
MAHRYRLCPDEVQEAALLEHCGHARFVWNLAVEQQSWWRPGRGSAPGSAARMRQLAEARAAEPWLREGSSSVQQQALRDFDRAMAAFLDPANPAGKPSYRSKRGTQGFVVRDVKARRLNRNHAEVFVPKCGWVRFRLSRALPDDPGMARVTCDRAGRWHVSFAAPQPALDREPAGAVTGIDRGVRTALVTSGGQHYRVPRISDRRAARYLALQRRMGRQQKGSRKREKTRLAMAAITAKVTDRKKDWAEKISTRLVEDHDLIVFEKLGTKNMVRRPRPKPDPDQQGNFLPNRRRQKAGLNRGILGSCWGLLATRTDQKAAASGAAVTYVNPRHSSQQCRRCGHVAGGNRESQAVFRCVACGHEDHADANAAKNVLARGLAALAVPAHAPGHGASRPRQTATAAAGTTREAA

SEQ ID NO: 59946 - protein, 351 aa, unknown
  TnpB Polypeptide
VSVSLYLKLQRTIHAKLVLDRQGKREAIAREYIAWQRQLQGANAQLYSATKQQAERFKRRVKKQNHRGLKAREYPLILRHDCVKLQEQENSVFHWWIRIPVYPKGVWAPIQLPYAQEPLLKHELRECKLLRGEDDEWYVNITVQKQARLKRKYATVLPIDMGIRKLATTIEDGKPNFYGKQVRTIRGHHYRLRRSVGKPSIIRKWKHAEQVSVKHEVHVITRRIVEQAKRANALIVIGNLKGIREQDRGRSFNRRLSSQPFYLFKQLLTYKANWEGIRVLTVSEAYTSQICHRCGVRGQRVAGRFSCPNCGLVCDADVNGAWNIGKRAHGLLVHETGAVLAVPRTLAVCKP

SEQ ID NO: 59947 - protein, 460 aa, unknown
  TnpB Polypeptide
MKITCAFQYELYVDETRRAALSRNAGCRRFVFNKALGIQNERKSKGEKLLTYKELAHELVLWKKQPETAFLREAMSQPLQQALRDLDRAIGDSFRPNSDPAHKGWPKFKAKDIGDGFRIPQFAPEHIDDANGRVKLPKIGWIRYRRTRPIEFECADGMLVPGVVKQIHVRKDCGHWFVIFTVEFEVKVPDMKALDVGIDVGVVHAVATSDGRFYDLDTEKIRSIEKRIAGLKRKLSLNQESRKKLAKLGLAEAFDKKQPSCKRRRLKERIQNLYRKIRCIRQDFNRKTAHALAQEYGCVYVEDLKVRNMTASVKGTVENPGKNVKQKSGLNRAILRTGFYSLRQAIEWQLLKVGGVVIPVDPRGTSITCPHCQTRDKRNRPTQAIFKCVNESCGFEANADVVGALNVLRKGRTGPSAHNKKHIAHVVSVGEQGFWPEDSMPSMGTALEPRDRVVQGIPAL

SEQ ID NO: 59948 - protein, 394 aa, unknown
  TnpB Polypeptide
VVKILRVYKTEINPTKEQADKIRQTIGVCRFIYNLYLAENKRRYENGEKFFSYVDFSRWLNHNYLKENPDKLWIKDVSTKSVTHSVINANTAFKNFFKGLSKYPRFKKKDKSDVKMYFVRNSAKEIIECERHRIKIPSLGWVRLKEKGYIPTNHNTHIIKSGTVSYKAGRYYVSVLVEEMQLQKEKLNDFGIGIDLGLKEFAVLSNERIYNNINKTQKIKKLEKKLKREQRSFSRMYESYKKRKVRDETCTKFNYEKQKLKVQRLYHKLNNIRTDYINKCISEIVRTKPSYIAIEDLNVSGMMKNKHLSKAIRQQKFYEFRTKLTAKCKELGIELRVVDRFYPSSKTCHNCGCVKHDLKLSERVYKCPECGFTIDRDLNAALNLRDFKIYKVAL

SEQ ID NO: 59949 - protein, 431 aa, Streptomyces sp.
MIGVQLRYSFRLYPSAGQCSALSRAFGCARVVYNDALRARETARSQGLPFPKTGDLSKALITEAKNAPERAWLGEVSAVVLQQSLRDLDTAYRNFFDGLKGKRPRMGAPRYKSRKDTRQSVRFTANARWSITPGRKLRLPKIGDLKVKWSRSLPSTPSTVTVVKDSAGRYFASFVVETGPGELLPQSMPEVGIDLGLGHFAVLSDGTKADSPRFLRRAAKRLKKAQRDLSRKEKGSKNRDKARVRVARAHARVADARREFHHQLSTKLIRENQAVAVEDLAVKGLARTRLAKSVHDAGWSAFVSMLEYKAARYGRTFVRIGRFEPTSQVCSQCGVKDGPKPLHVRVWTCGACGAVLDRDINAAVNIARAAGLAVSACGAQVRPGLVPAPRGEAGTHSTPQPATARQAGIAVLQGGEDVKSGSCSRQRTARR

SEQ ID NO: 59950 - protein, 273 aa, unknown
  TnpB Polypeptide
MVLYTIALQQACINLDKAFQKFFDPKDSARYPKFKRKHGRQSSYHCTSISAGENWIKVPKLESIKVRIHRNLDGKLKSITLSRTVTGKYYASLLFEDGVTAPAPIQMVDHVLGVDMGLTHLAKTHERLANARADFQHKLSRQLIDENQAVVVETLKVKNLLKNRKLSKHIADASWSALIKILEYKAKAEGKHLVKIDQWYASSKTCSCCGHKVDQLPLSVRNWSRPSCAVELDRDINAAINIRQQGIIKLRTEGLSVPVNRGLHKSGQVRLWP

SEQ ID NO: 59951 - protein, 492 aa, Microcystis sp.
MLVVEAKLKNGTPEQYHRLDEAIRTSQFVRNSCVRYWMDNKGTTRNDLQKLCAVLANNKETPWVNKLNSQARQSAADRAWQSINRFYQNCHAKIPGKKGFPRFKKHSRSVEYKLTGYKLSDDRRKIKFTDGFKAGEFDLWCSQKTLVYYSEQQIKRVRVVRRADGYYCQFLIDVERQEYHKPTGQITGIDLGLKEFYTDAQGNTVENPRYLSKSEKRLKKAQRRLSKKFRKGKKQSNNYHKQRVKVAKLHLKVSRQRKDKAIKDALALVQSNDLVVYEALKVRNLVKNRKLAKSISDASWYQFTEWLNYFAKIYRIVCVAVPPHFTSQDCSVCGTRVQKSLSTRTHQCLNCKTVLDRDHNAAINILKKGLQYLGNYLNASTSLGIDTERSRSVNASTSLGIDTERSRSVNASTSLGIDTERSRSVNASTSLGIDTERSRSVNGTVGQTETDLNALGESDLWVFSGDIENLSCLVEQGISNSDVERIPRHSVA

SEQ ID NO: 59952 - protein, 373 aa, unknown
  TnpB Polypeptide
MNKAYIYRIYPDTEQTILINKTFGCVRFIYNQMLANRKAIYEQYKENKQVTKQQRYSTPADYKKENEWLKEVDSLALANAQLNLNTAYNNFFRDKSVGFPKFKSKHRDKKSYTTNNQGETIRLVDGKHIRLPKLKDIYIKQHRQLPEESRIKSATISQTPTGKYYISILVEFQADTKQVKPTYETTVGLDYSSKSLYVDSQANSADYPKFYLKAEIKLKKEQRKLSKRKKGGKNREKQRQKVAKLHEKVANQRKDFLHKLSRQITNAYDAVVIEDLNMRGMAQGLKLAKSTNDNGFGMLKTFLEYKLKEEGKYLVTIDKWYPSSKLCHICSSVNDELTLADRVWVCCCGAVLDRDVNAAINIKNEGCRMIGVA

SEQ ID NO: 59953 - protein, 486 aa, unknown
  TnpB Polypeptide
MKRTNTFAVRPLTDDDEQVLRDLLDASAALWNEINYQRLMRYNDEDGFEGEDVWDADTGALEGKYKDVLGASTAQTVRRANTEAWRSFFRLKKKFHDESNTSVTDHPEPPGFRGNEDDGRILKGVVRKDAYSVEWGDRSRLEMVVGKELRDRHNSPKSRLRLEIVGDPNWPNYEDQGRLELWYDESDSTFRASQPVTVTDARHTPLADETAALDIGANNLVACTTTTGEQYLYEGRQLFQRFRETTREIARLQSKLREGRYSSKRIRRLYRKRTRRRDHAQEALCRDLIERLYAEGVDTLYIGGLTDVLETHWSVKTNAKTHNFWAFKQFTERLVCTAEEYGISVEVRSEAWTSQECPQCGGIDRTTRHQDTLTCPCGFEGHADLTASDTFLRRHQNSPSSDWRTRRKASRQRHTEKAVRPMARPVSSEIADFRDAENAQRFPARFEWDDHNWSELPRSHRPKEQRTDPSTVHRDGNVASGKSLTG

SEQ ID NO: 59954 - protein, 204 aa, unknown
  TnpB Polypeptide
MLADKISHYQKEKKMLKNTPAGYKKEHLWLKEADSLALANVQMNLEGAFRKFFREAKVGFPNYKSKKHSRKSYTTNMVNGNIHLQKKFLKLPKMTPVKIKLHRPVPEGWKLKSVTVSRESSGKYFASLLFDCENQAVEKRQAEKFLGIDFAMHGLCVFSTGERAGYPMFYRSAEKKLAREQRKISSISSVMTLRRSMMRYVWKI

SEQ ID NO: 59955 - protein, 402 aa, Shigella sp.
VKRLQAFKFRLRPGGQQEREMRRFAGACRFVFNRALALQNENHEAGNKYIPYGKMASWLVEWKNATETQWLKDSPSQPLQQSLKDLERAYKNFFQKRAAFPRFKKRGQNAAFRYPQDVKLDQENSRIFLPKLGWMRYRNSRQVTGVVKNVTVSQSCGTWYISIQTESEVSTPVHPSASMIGLDAGVAKLATLSDGTVFEPVNSFQKNQKTLARLQRQLSRKVKFSNNWQKQKRKIQRLHSCIANIRRDYLHKVTTTVSKNHAMIVIEDLKVSNMSKSAAGTVSQPGRNVRAKSGLNRSILDQGWYEMRRQLEYKQLWSGGQVLAVPPAYTSQRCACCGHTAKENRLSQSKFRCQVCGYTANADVNGARNILAAGHAVLACGEMVQSGRSLKQEPTEMIQATA

SEQ ID NO: 59956 - protein, 142 aa, unknown
  TnpB Polypeptide
MAENPRRIFASANIYQRIGNRRRDRFFKLANQLVSEYAIICIEDLNLDGMKRLWGRKVSDLAFAEFVSALEWVAGNAGSTVVKIDRWAPSTKACHVCGAVNTSLALKQRSWTCESCHTMLDRDTNAAINIKQMGLTMLTTSV

SEQ ID NO: 59957 - protein, 423 aa, unknown
  TnpB Polypeptide
MQLVERHLIKPNHELYKTLDDLTFKAKNLYNHGLYLYRQSYFEHQSNPETPVLSWANIDKTLRMQGHADIRALPSKVANAVLKNLGENITSFWKMVRLKNSGKLTQKPKLPHYLHKTEGRYPLSFNYQTFGKKRGANGELFLCPKGINLPIPTKVANPKQVRIVPSHNNFVIEVIYDAKERAPKSTSKYAGIDLGVDNFATVTFSTENNPLIIKGLELKSINQGYNRLISKAQELLPAPLKTSKPIHRLWSRRSWILKTKIHQMTAFLTTLFDEMQIEKVFIGKNTGWKQNLPFGKTVKQRFAYLPYETFIEQLKYKCQLRGITVVVQEESYTSKASFLDNDNIPVYGETGNPKFSGSRVKRGLYKSGDGQLINADVNGSYNILRKGLANSQLSFNVDNPLIHPLVVDGIGKEPNDKLVQLYM

SEQ ID NO: 59958 - protein, 533 aa, unknown
  TnpB Polypeptide
MTIDKEGRMAKNQTYKAFTVRPTHVMDLNGVLLETAPIMAELAAEVRGISGYATYVVRNDTKLAEKLAQVGTVPPAVAGQRAGVTMPWFFVKDEKGKPIVGKSGKSRKEMLIQHRVVTEYRSWKERVDAVNGESSKRVSQGWKRTANASPPSYGEDFVNLGAVNKQYAAIENDPFVDGEIVLKMVIKGNWYRLIFPFDNTRFPVGKVTLPVIKIQDNQPVFIFTVATDNPVVQFSGDYVIGVDVGINNYATVVVRNTKTGKIAYETTLSRRVHSLWNSVRASERQVRTLREKAKPIIYDRQTKMAALDEAQLHREAASRKKRELAILAAQEIADLSHQYDNAVVAVEDLSWVKNTMQNGRWNRGELVKWLTHYVEQNGGWVVTVNAANTSQLCHECGSKVTHPEHKVSDCPKCGETDRDVNAAANIASRAVAKVKTARNSRAKNRKLQKKTSLKTPAAREALKHPGGSRNKNYPTPKRKKGRSSKGVKLPLRPASVNTTTVLADWDTYGVSETSKAALNQGNTTYECRLCSLS

SEQ ID NO: 59959 - protein, 401 aa, unknown
  TnpB Polypeptide
MQRRFNAIADKEDRVIRMNTNKSSIKLGILGINVRLEAVSPKTHNTLSRYYRAYIALCNLISEAAYTYNTVDLNQILPRIRNDAELYAKKYPGLLFRAFNTVTREYANHVTGTDRFPAPRKYTLNNIPVTLGEDYTVTLYGDNQYGLEFRLAHRTNAFSKAEQFYAEWLNLPAGYSCTDIAPTGTLSYDAEQGWVFKYDLPVIQNKVVGIDMGTRFFAVTYDGERTNFLHGAKTPLQHEMTTYSNLHQKLKKKGTRSARKRLKAISDSWREQLNVRIKKTVKDILNDAEPDTVFILERLTVPHNLDERLVTADIGNMSAAIFALFNQELREEAKKRGHMVLYTSASGTSARCPSCGIFKKRNRKHDTHSYQCPCGFWSNDDRVAAMNIRERGITYLVERFV

SEQ ID NO: 59960 - protein, 547 aa, unknown
  TnpB Polypeptide
LGKNQTYKAFTARPSHVMDLNGVLLDSAPIMAELASEVRGISGYSTFVARNDTELGVELAKIAVSQPAEAGRLAGVKMPDFLVPDKKDENGEPLKDKNGEPIKIKTGRSRKEKLIQHNVVTAYRSWQERIDAVNGESSKHVSQGWKRIMNASPPSYGEVYVNLAATDKQYAVIENNPFMDGEIVLKMVVKGNWYRLIFRFDNTRFPEGKVTLPVIKVQDGKPIFIFTVATDDPVVQFSGDYVIGVDVGINNYATVVVRNTKTGEVAYSSTLSQRGHSLWNSVRASEKQVRQLREKAESLSLYDRQAKMAALDEAQLHREAASRKKRELAILAAQEIADLSHQHDNAVVAVEDLGWVKNTMKNGRWNRGELVKWLTHYVEQNGGWVVSVNAFNTSQVCHECGAEVTHPEHKVSDCPKCGETDRDVNAAANIASRAVAKVKTARNSRAKNRKLQKKTSLKTPAARKALKHPGGSRNKNYPTPKRKKRRSSKGVNLPLRPARVRAICVDTRVLADCLTYGVAETSKAALNQGNTTYECKLCSLNRYSQPK

SEQ ID NO: 59961 - protein, 533 aa, unknown
  TnpB Polypeptide
MDLNGVLLESAPILSQLATEVRGISAYATFIARNDTELEDGLARATAVQAASAGRQAGITMPEFLAADKKDENGEPVKDKKTGAPIKSKTGRSRKEWLVRHNAVTAFRSWQERVKAVNGESSKHVSQGWKRTMDASPPSYGEDFINLGVTDHQYAVIENNPFKDGEIVLKMVVQGKWYRLIFKFDNTRFPEGKVTLPLIKIEDSQPIFIFTVATDNPVVQFSGDYVIGVDVGINNYASVAVINSSTGKIVYSSTLSQRIHSLWNSVRASERQVRALRKKARKILYNRPARRAALEEAQLHREATSRKKRELAILAAQEIAYLSYFWDNAVVAVEDLSWVKNTMQNGRWNRGALVKWLTHYVAQNGGWVVAVNATDTSQVCHLCGSEVTHPEHKVSLCPKCGAMDRDVNAAANIAARAVPKVEKAREKRGNNSKLQEQAPLKTPVARRSLKYPGQDRTKNAPTPKRKKRHTSKGVKTFLSPARVQQISTPVTSALVVTAMTTVLADCLAYGVAGTSAAIKQRTMTNKYRSCSPI

SEQ ID NO: 59962 - protein, 441 aa, unknown
  TnpB Polypeptide
MYRTITLRLNHRFEEDKTKLLETMETFAHAYNMSAEYGFEHKEENKIRNSMAMYHQIRKTIPGLPASMVQSACWMATESLIMTKFKTLPKKSLISCIRYSWRGASIYLESGYATIQALNSRVIATFSVPKHFNKYLGWKVACSYLKFEKSSKKFLLQVVMENTEILETEEQGVLGIDRGLRNPAVCSNNTFYNSKDLKRVKGKYAHLRAQLQAKGTHSALRKLKQVAGRERRFVACENHKMTKQIASMPFKTFVLEDLKGINSKRSPSWQLRRDLNQWAYHEFQTDLIYKAEELGKQTIILNGMFTSQRCSRCRHISHKSRKGPKFKCIECGFELDADLNAARNIAQIGKSELGRLCASKPNATGNDSGLFREPVDDEPSCKSEQKISSTNNEYNSDNWHLWKNKGRGSTTSFFVECGWTGTRLGGYKPSKKEMLERQIDI

SEQ ID NO: 59963 - protein, 441 aa, unknown; identical to SEQ ID NO: 59962
  TnpB Polypeptide

SEQ ID NO: 59964 - protein, 467 aa, Gammaproteobacteria sp.
MSSIAAKGCASKWNCPPASRAKAGIIALWVGQGKGIMQQNQQWHGRLGNCMLDHMSVPSGQSAAAIRAVRYRVLPGTPAKARQLNRLAGACRHVWNWSLDRQRAAWLGWLFSSAERPPPPTFFTLGKAFAELRNSSGHEWLKALPFSAVRYALKHQADAWQAFFKGQRGRPKFKGRGGEAGFTIPQAVRIKDDVIAVPKLGGYRLRRRGGNPHPDGVAKQAVFKREGGKWFCTVFYEVANDPRPDDGSCVGVDRNVRQCALSTGEVIRMPDASRLEARRRRYQRRMARQAKGSGRRKRTKAKLARTHARIRGIRSNWCHQTSRRIADAAHTVAIESLNTKGMTRSAKGTKKEPGTNVKAKSGLNREILASGWHGLERNLDYKAGNVVGINPAHTSQTCHECGFADSANRPSQSTFRCQACGHEANADVNAARNIRRQGLARLDGEGRRCSRASPMTRQTGGGLRQAA

SEQ ID NO: 59965 - protein, 438 aa, Mycobacterium sp.
MARLKVPEGWCVQAFRFTLNPTQTQAASLARHFGARRKAFNWTVTALKADIKAWRADGTESAKPSLRVLRKRWNTVKDQVCVNAQTGQVWWPECSKEAYADGIAGAVDAYWNWQSCRAGKRAGKTVGVPRFKKKGRDADRVCFTTGAMRVEPDRRHLTLPVIGTIRTYENTRRVERLIAKGRARVLAITVRRNGTRLDASVRVLVQRPQQRRVALPDSRVGVDVGVRRLATVADAEGTVLEQVPNPRPLDAALRGLRRVSRARSRCTKGSRRYCERTTELSRLHRRVNDVRTHHLHVLTTRLAKTHGRIVVEGLDAAGMLRQKGLPGARARRRALSDAALATPRRHLSYKTGWYGSSLVVADRWFPSSKTCHACRHVQDIGWDEKWQCDGCSITHQSDDNAAINLARYEEPPSVVGPVGAAVKRGADRKTGPGPAGWP

SEQ ID NO: 59966 - protein, 394 aa, Mycobacterium sp.
MSRFLLLPTSAQQVVLSEHCRHARFVWNLAVEQQQFWQPGRHAPGYNKQSAQLTEARAEYAWLAAGSQTVQQQALRDFARAMEGFFVGTHGRPSWRKARVHEGFGVVGVRPSQVQRLNRRCGQLWVPKVGWVRFRWTQAVPNGVKSYRVTQDRAGRWHVGFPRIPDPIPGPRDGSVVGVDRGVTVSAALSTGELLHAPGLTSGEQARLCRLQQRLTRAKRGSNRRQRTKLSIAKLKAREVCRRRDWVEKTTTDLARRFDTIRVEKLDVRAMTRSARGTVDKPGTRVAQKRALNREISRQGWGQLVIRLSNKAGGRLERVPAAYTSQRCSACGYVAPENRKSQAVFRCVACKAGPRNADVNAARNIAAGRAVPAQGDFAVGRSVNCEPQLSSPAS

SEQ ID NO: 59967 - protein, 433 aa, unknown
  TnpB Polypeptide
LLVLQKGFSRLQEALTFCCLFFSFSYGSDTPLLALGRRAITPISIINIKVFQPTMETRATARIKIETRTEIIRTLKVYHKALQFCINQAWRRGIINNIQLHPFVYQSLRKRGLPSQLAISCIKQSCGIVKKAKTKPVIQRCSMRYNFPRSISMKNNILSISTIKGRIQVPFTIPDCYKEYFTWKVNESLLRIDKKGRCFFLFTFSRDVNANSSCFQNRVLGIDTGITNIAVTSDKQFFNSKQIKKQKLKFKRLRAKLQSKCTRSSRRLLKSISGREKRFMAWCNHNISKQIVNSFDGHTIVVENLKGIRKLRKGKRMNYWLSNWSFFQLQSFISYKAIRKGIKVIKINPSHTSQTCSKCGNLGSRSKGFFVCVHCGYSLNADLNASFNLAKHPSISKDVSVDVNQPYIPSDDAKASCDDELRQSSGIMPHSLL

SEQ ID NO: 59968 - protein, 399 aa, Acholeplasmataceae sp.
MTKGFKYRIYPNKEQTQQLNQMLGNARFVYNWALDKRIKEYQSEKKSISAFSIMMDLTQLKKQPEYDWLNLSVAQSLQQSVVNMDKAFTRFFKQKKGFPKFKSKHIGTHHVGFPQNTKVDFETGKISLPKLGWIKTKISRTFEGKIKTSTIEKTPTGKFFISITVELPNVKVKQKPISKVNAVGIDTGIKTFAVLSDGTEIENPKHLKSNLQRLKVLQRRASKKQKGSANRRKANLKVALLHEKISNQRMDFLHKTTTAIAKQYDTVACENLNISGMMKNHHLAQSIADLGLGRFYTLLAYKMAENGGNYLEIGRFAPSSKMCECGAINKDLKLSDREWVCPVCGRINKRDFLASRNILKFALTEQNKLTAGTVGRACGGVGVSRTNEAGTVSERSLRT

SEQ ID NO: 59969 - protein, 375 aa, Chlamydiae sp.
  misc_feature (348)..(359): Xaa can be any naturally occurring amino acid
MIQRQLKLRIKSKKNIILEEWLYILRGVWNWAIRKIELDAKNCIYYTKKEFQNLLANHSERLDIPSHTLQGILCMAFDSWQRCFKKLSKKPRLKGFRNPLGSIPFPDPIRRPDGVHIKIPGLGRFKFHKQDIPDGKIKCGRIVKRASGWYLCLFIDADAKPIQKISDGKIGIDPGFKTTLTLSTGEKIEQPKEFAKAEKRLIQASKSLGSFKKVKKGEKRKEPKFKRKGKLLARIHERIKNKRKDNNHKLTRKLISENDFIAFSKDNIKGLAKRFGRSVSEAGHYQLRQMLMYKSLIGGTKYIEVNSKKSTMTCSSCGSESGPTGLAGLQVRQWECSCCGAHHDRDIXXXXXXXXXXXXLCDQHAHCRARNEPRE

SEQ ID NO: 59970 - protein, 403 aa, Campylobacter sp.
MNKTKSIYSTVRSVKFVLKPTSKQKEILESFFGLSRAIYNISLYNIKNSKFGTYEIQNGKNKGCIVPRIPNEFDLNNSLPKLKDEYNYLSLFPASYAQAVMKNLSRGFGNFYRTFNYPKFKSKKNNIQSFNCYQGGKIDGNYIVLIKPRGSSYTKDDLKIRFKRHKIKYDFDKVTGFTISKENNKYYISFTFHCNIESKETSDAVGIDLGIKDFCICSDGTVYPNMRFYEKSLRKLKISQRSLCRKQKGSKNREKQRIKVSKLHKKVKNQRNDYQHKVSRELSDKFKVICLETLKVKNMVKNKRLSKAISDVSWSSFISKLEYKVAENQGCLIKIDTYYPSSKTCSNCGCVKESLKLSERTYHCNECGFEIDRDLNASINILNVGVKQNIVATVTTTGTTLKN

SEQ ID NO: 59971 - protein, 415 aa, Chloroflexi sp.
MNRSHVIRLNPTPEQEVYFRKASGVARHAYNWALARWKEARAEGKRVKMKDLKAEYNKIKGEQFPWCYEVTKCAPEQAFADLGQAFANYWRMKEAGTQPKLKHPRKDREEAGFPHFKSKKRDRHSFYLNNDKFRVDGHWILIPKLGKVNMTEELRFHGKMMSATISYRAGWWFVSIAVEVEQETPTHSGGTVGIDLGIKALATLSDGTVFENQKHYRRNLGRIQGLSKGLSRKVEGSQNWWKNTKKLAKAHYRVAGARQDVLHKMSTKVARTYALIGLEDLNVKGMLANHQLAQAVSDASFFEVKRQLLYKAEQYGSYVQLIDRWFPSSKTCHVCGWVKEDLTLADRVWVCEQCGTVHDRDLNAAIMVATEALRLVTDVPVVASSERKIACGAERSGSLCAESETVCGEAGTKVL

SEQ ID NO: 59972 - protein, 429 aa, Glycomyces sp.
VHLRYRYRLYPTLPQRVALSKAFGCARVVFNDAVAARRRAHIEGLSYPTTAVLSKTLITEAKRTAERAWLAEVSAAVLQQALADADRAFRNFFASRKGQRKGPLMGPPRFKRRTGAQSIRFTRNTRFKVLGNGKLRLPKVGDLKVAWSRELPSEPSSVTVVKTATGKYYASFVVAVDEDADLLEPLTDPEAETGIDLGLKDFAVLRGGKVIENPRFFRRLERKLAKAQRILARKAKGSANRGKARLRVAKVHERIRNTRADWVDKQVKTVVAENQGIYVEDLNVKGLSRGRHAKSIHDAGFGLFVTRLEAKAARAGRTFVKVDRYFPSTRLCSVCGALTGPSGLEGLKVRAWACGCGAVHDRDRNAEINIRREGKRLVAAGQADTRNASGGDVRPGTPGRLRNPRQGKNEEPTRNRTAPAARKPGVPAR

SEQ ID NO: 59973 - protein, 412 aa, unknown
  TnpB Polypeptide
MCMNLTYRFRLYPNKTQAAALEHVLSVGWRIYNDVHHLRRSDYLESGKNWKWQELDKLFGEERRKYSYLQVIPYDTVTQLIKRHEKAMKAFFERRDQGVGYPKEKLRRDFLSIPYRYGSGIKWMPVRPGLARLRIFEVGSVRMRQHRPLPCGCQIKQIVVGKSKQGKWYASFQLELPDLEPPIHDGSAVGIDLGIHYLLALSDGQVIENPRWYREAQAKRRVLARKIERQRRANNPDNYNPDGTVKDSVIIWRKSNRQRDTERQYAKHEEHVAEQRKYFWNQVTDWLTKTYSVIALENLTLDFMIENRKLAMSVHDAAFGIFWQMLKYKAEMRGVRLIWIPPQYTSQRCSVCGHVDKENRKTQANFTCVSCGHSENADVNAAKNLLDLATKAPVQGVQGVTQTTGSYVPCEV

SEQ ID NO: 59974 - protein, 365 aa, unknown
  TnpB Polypeptide
  misc_feature (155)..(155): Xaa can be any naturally occurring amino acid
  misc_feature (185)..(185): Xaa can be any naturally occurring amino acid
  misc_feature (193)..(193): Xaa can be any naturally occurring amino acid
  misc_feature (219)..(219): Xaa can be any naturally occurring amino acid
  misc_feature (222)..(222): Xaa can be any naturally occurring amino acid
  misc_feature (233)..(233): Xaa can be any naturally occurring amino acid
  misc_feature (236)..(236): Xaa can be any naturally occurring amino acid
  misc_feature (240)..(241): Xaa can be any naturally occurring amino acid
  misc_feature (256)..(256): Xaa can be any naturally occurring amino acid
  misc_feature (263)..(263): Xaa can be any naturally occurring amino acid
  misc_feature (273)..(273): Xaa can be any naturally occurring amino acid
  misc_feature (276)..(277): Xaa can be any naturally occurring amino acid
  misc_feature (280)..(281): Xaa can be any naturally occurring amino acid
  misc_feature (284)..(284): Xaa can be any naturally occurring amino acid
MMLTKKVRLIVTDETSKLYQAAGVARWAYNYTIRMQEMNHRFGGTFISDNELRKHITKMKKRKKYAWLNEVSNNVVKQAVKDACKAYKVFFKGQAQHPRFKTKRRSTPSFYNDCIKLKVKGNRILLEKIGWVKTNEPLPVDCKYYNPRIKFDGKXWYLTVGIEVNPVKVKLDGRNVGVDIGIKEXAVTSDGVXYNNINKTASVRKAERRLKRLQRRASXKYXKGTPKSKHLLXLEXEIRXXHRRLANIRTNHVHQXTAEIVKXKPSRIVMETXNIXXMMXXKHXAKAVANQKLHFFKQCLQYKCELNGIEFVEADQWFPSSKLCNNCGTLKKDLKRSDRVYHCACGHHCDRDLNASYNLRDYQAV

SEQ ID NO: 59975 - protein, 394 aa, unknown
  TnpB Polypeptide
MDRTVRVHLKPTQEQAEALNETIKQFTESFNAVCRTGWEQGTGNAYTLHRLTYRRCKDAWSALVSDLHIQARQKASETVRSAISRMKKGCKVSCPQSVTCPPRYNLHTFKIYWGRGIISLSTTQGRMKMPFSLPEYARYAAGQPTATADLVYRKGQFYFHVVISLPDVEFTPNGQAIGVDLGVTRPAVTSDNHFHGNRHMKEVVKRIFRLRRALQANGSKSAQRHLKSLAGREQRFRRDCDHVLSASILHGIEPGTTIVVENLTNIRSRVKASRGEAKRRLHSWSFAQLKRFLGYKAEAAGCQVVAVDPRHTSQRCNRCGYTYRGNRKSQSEFSCRKCGFHLNADLQASRNIRDKFLVGWSISPSDSLPSTSVSSRPHLLGLGRDKLAALAISG

SEQ ID NO: 59976 - protein, 222 aa, Bacteroidetes sp.
MEYEYTYRFRLYPNKEQRQVLARTFGCARYVYNWGKELRTNAYHSEGGESMSYTDTARKLTDLKKQEETKWLSNVSAVVLQQSLRNLERAFTNFFEGRAQYPSFKRKHGDQTARYVGTAFDVREGKLKLSKMPGLVKINWSREMPESPTSCTVTKDASGRYHVCFSVKREIPDLPKTKRAVGIDLGLTDVVVTSDGWVCAGSSRSSLGKRKARTPGNAKRSA

SEQ ID NO: 59977 - protein, 446 aa, Acidimicrobiaceae sp.
VTTTIETAKCATLTTVTQAYVFALDPTPEQANALRSHIGGTRFAYNALLGLVKANWDGVRAKKEAGEEVTREDYFGTYHLDHQRLWYQQRDEVAPWWSENGSSTYNYACLNLSKAFANFRAGRTRFPTFKKRSSSRSVSFVSGAVRLTDSHHARVSRIGEIKTYESTRKMYRHLERGTGRILAATITERGGKFSVSFTVQVARVVPATRSPEKVIGIDVGLSTLYTGASPMGDVEIEVQNPRHLVKAANKLVHAQRIASRRQGPGPGVAPSQRWKKANFRVQQTHTDVRNARQNLIHETTTMLAKTYDVIVIEDLNVKGMVKNHSLAKHISDAAWGEFSRQLEYKTKWYGSALVKADRFHPSSKTCSQCGTVKAKLLLDERTYHCEACGLIIGRDVNAAINLARQGLPATNSGTGRGGEVRPEQQKLAATAHPNEASTETLTLVSA

SEQ ID NO: 59978 - protein, 402 aa, Cyanobacteria sp.
MLVLEYKIKAKPSQYKAIESAIRTVQFVRNKCLRYWMDAPKEAKINYAALSRYSTELRNEFNFVKDLNSMAVQASAERGWAAISRFYDNCKAKKPGKKGFPRFQKDNRSVEYKTSGWKLHSTKRRITFTDKKGIGSLKLLGKWDIHTYLIKSIKRVRLVRRADGYYCQFAIDIEAKEQVEPTGKSIGLDVGLEFFYTDSNGHQEENPRFLRKAEQSIKHAQRRIYKKQKGTSGRRKARKRFAKKHLKVSRQRQEHAKRLARYVIRTNDLVAYEDLSVSNLVKNHCLAKSINDASWYLFRQWIEYFAGKFNREIVAVKPHYTSQKCSQCGTIVKKSLSVRTHICQCGCRLNRDENAAINILNLALQAREGHSRSNAVGVGVTTLAGETVSEQILTLSTESPVF

SEQ ID NO: 59979 - protein, 304 aa, unknown
  TnpB Polypeptide
MWLTHRSGYRIKDGYVEIAGGIRLPIVGWDRRYDEYPNREARLVLRRGEMFLMVTKRVPKPEKYRPQGVLAVDVNERQLVVGNSRVEARIETPIRRALHFKRLAERLQRKYSASRYNAWFRRSGIRRRIARFHRKAKNILEDWARKASCRIVGMARQMRCVVAMEDLTNLIESLRRLPKSHKAALLMLGYRGLGFWLDWQAEKRGVPVVVVEPRGTSTTCPRCGARLREAERRRMRCPKCGFEGDRDSVAIANIERRALLKMGGPLAAPTAPQMTDVATNRCGEPVSRPGALPPSRAGRRSDAG

SEQ ID NO: 59980 - protein, 445 aa, Synechococcales sp.
MLKASYCDIKTREESAEIWCSPLTCPVQKHGVIPDDVSLMLKNSKGQVKWDSPSGIQMKVTTKLRHDSPWFGDIDSDVLQRNIAALDTAFTNFWKHGKGYPKFFRVMDSFEYKPGRVVVKSIKNKYGTVYLPGIGDTRFHNSRDFSKITEVRTCNIKRRGGSWYISMLVDDGEVLPELKEDVQSVVGIDVGVNKLIALSDGSFIENIRPTTNNRVARRLRIRTKAISRKVNGSKNKTKAYAKLGKVKQKLAQKRDGHNWQAATRVVKTADLIAREDLKITNMVKRAKPKTDGKRYIRNGAAAKSGLNKSILDCAWGAIFKMIEWLSIKAGKLVVAVNPRHTSQECPSCGHTEKSNRDGEKFVCRNCGYADHADTKASRAIAQRAGFVFPGKKKTLPAGCGKVMPLDTSFSLEKEPRNPILKQLNLFEAGIYREYRSEVSIESQRL

SEQ ID NO: 59981 - protein, 334 aa, Nostoc sp.
MWGKHLNCAKLQSHIAKLRKRTSFWQSVGSQAIQDICQRIEKAYQLFFKHNKKGARPPGFKKVKKYKSFTLKQAGYKFLGGNKVKIGSRVYQFWKSREIEGTVKTLTIKRTPLGELFMVVVVDDGMHPQIKFTTGQIAGFDFGLRTFLTCSDGTTIESPQFFKQSLNAIKKASRHHSQKLKGSSNRERARKNLVRSHENIANRRTDWFWKLAHNLTNRFDVLCFETLNLKGMKRLWGMLVSDLALRDFLDILEWVVKKKGKQIVYIDQWYPSSKTCSCCGHVLEKLDLSVREWRCPSCQVVNGRDENASKIIQTVGASMVGLGNVSRSETAIAV

SEQ ID NO: 59982 - protein, 419 aa, Nostoc sp.
MQKAFQVTLIPNHNQEVLINKTIGCARYVYNRFLALKKEVYNTEQKTLNYNTCSQQLTVLKKEIEWLQEVDKFALQNSLKNLETAYKNFFADFKKVKGKKGVGFPKFKKKYGCKQSYKTNLTNGNIQVIENRLKLPKLGWVRFHKSQDIIGKLVNVTISRTSSGKYIASILCETEIEKYSQVTKNIGLDLGIKSYLVTRDGEVVDNPKYYRTQTRKLRSCHKKLSRSVKGSSNRVKAKIKLARICERITNLRDDFLHKLSTRLIKKNSVICIEDLQVANMVKNHKLALSISDASWSKFVAMLEYKALWHDRIVQKVGTFYPSSQTCNCCGFVNPLVKDLKLREWSCPQCSSYNLRDVNAARNILGEGLRLMSQCGGRVSRHKAPGVAAVGIPEVLNACGELVRPGAIQAQIVEAGITRL

SEQ ID NO: 59983 - protein, 396 aa, Nostoc sp.
MLVFEFKAYGKSAQLVAINDAIRTAKFIRNSCIRLWMDVKGTGKNDLQKYCAVLAANFPFANELNSMARQASAERAWSSISRFYENCKKGIPGLKGYPQFQKDCRSVEYKSSGWKLADNRKSITFTDKKGIGKLKLKGTRDLHFYQINQIKRVRLLKRADGMYVQFCIDVDRSENIKPTGNTIGLDVGLKEYYTDSDGIMIENPKFLRIGEKVLKRSQRRISRKVKGSKNRGKARQILGKRHLKISRQRKDHVVKLARCVVQSNDLIAYEDLRIKNMVKNHCLAKSINDASWYQFRVWVEYFSKVFKRVTVAVNPQYTSQECSSCGEVVKKTLSTRTHVCRCGCVMDRDENAARNILSRGLGTVGHIGTSALDVGNAWGDETSTLVGENLQEQVMS

SEQ ID NO: 59984 - protein, 419 aa, Nostoc sp.
MIFSKFKKLSSIQKAFKVTLIPTHNQEVLINKTIGCAIYVYNRFLALRQELYATEQKTLNYNACSQQLTLLKKEIEWLNVVDKFALQNSLKNLETAYKNFFADLKKSKNKKGVGFPKFKKKHSCKQSYKTNLTNGNIQVIKNRLKLPKLGWVRFHKSQYITGKLVNVTISRTSSGKYIASINSETEIEKHPQVSQNIGIDLGIKSYLVTSDGEVVENPKYYRTQTRKLGKAHKKLSRSVRGSSNRVKAKIKLARTYSRITNLRDDFLHKLSTRLIKENSIICIEDLRVANMVKNHKLALSISDASWSKFVAMLEYKALWHDRIVQKVGTFYPSSQTCNCCGFVNPLVKDLNLREWSCSSCNSYNLRDKNAALNILSEGLRLLTAVGTPEVIKSACGGIVSPELIQAEFVEAGITRLSVV

SEQ ID NO: 59985 - protein, 212 aa, Nostoc sp.
MTFRLYPNEQIEQSLRYHRKLHKDLYNAAVNNRFTQYQKFNHKVDYFEQQNCLPAFKDVWIEYKEINSQALQATLKRVDFAFERWFIGLGKRPKFKSIRHYSGWSYPAKSGYSVESSGENGYLILSKIGRIQMRGQAKYWGKPTTCTIVYRNGKWYASITVEILDQVLKPEILPILKPAPNVDTNTRKHSIFEYMSAVFVAIVRIEISLLPK

SEQ ID NO: 59986 - protein, 390 aa, Nostoc sp.
MKTSYQYKVKPTALQAEKIDKTLEMLCFQYNYLLAQRFDWYEMNRCPVDRCSLICHLPELKEQPNYYNQKATLVQLKVDRPWYKEIHSQVLQEVPKKVELAFDRWIKGDVNGKKSGRPRFKGKGQYKTFTYTQFKRHHFVNNKITLSKIGDIKVIVHRSIPKGFDIKTVSVTKKADGYYVTLSLNDKTVPTIKPDFNPDKIVGIDVGLIDFYVASDDSRIAAPKHLRKAERKLKSAQRKVSRRNKSSNRRKKAIQKLGKQHKKVADTRKDFHFKIAKALLDKYDVIAVEKLNIKRLAKTRLAKSVNDAGWGQFVTILSNKAENAGLRLIAINPNGTSQECSSCGQKVKKLLSQRKHNCPNCKVSLCRDLNAAINIKNRGAHGLKAQSMSS

SEQ ID NO: 59987 - protein, 589 aa, unknown
  TnpB Polypeptide
MINIHSYNSHYSKDFHSFSLNKEKYENLVHKAQYILEFRNKVSKSMCDNINQTLNISKYEAIKLYNQSAFGLLGQDVQNVIDDVHTCYNNKFNAIFEDKLKYKVQSKLIVTHYKRQTVTKDKTFNKGDVKTNRVVLKETTVSNYLDYFIKFGNVNDALDFIHTKHKSASADLKLFYDNLLNFVIKVGELRIESLINKKKQRLIEQYNKVIEFKSLSYRTTSRLMTDFIGKNKNKNSKVEYFLNIGGCYIGKKKDKENKTVANTGTIVVPIDYNKKYHGSPSLYNKEVEKGKLQNVSYILQILKNQRVRVILSHEGERYVYSDGDSIVGVDVNVKHNMLSLEDGSIYDYERKLLDKYVKFLLYLDQVKEAKAKLGLPKDKVNKISVKNTLILKDYQVRFKHSLERVCSKFVKDMKEQGYNHIVMEDLEMSAKMFSKSEEFDGINYGRLFRLLHIANIKNIIEGICYKNGMTLSIVHPHYTSKQCPKCGHIHDDNRKTQEEFECVNCGHKDGADKNSPVNIKNRVFLDVLRLALLNKNKLGELRPKKMSKDKIKEVIESSSVVLLERSCATKQDKQDLHCGGVSCKSDKIC

SEQ ID NO: 59988 - protein, 621 aa, unknown
  TnpB Polypeptide
MTYKKTLFLLEKQLNCVLSTPTHFVNMLMQSMLNAIKHLPDKESIIEKVWKDSVILILLSIKILKIRKLIISTHVSHLKNNWMTLLDKLSTCNHSDLNTLPIFLFQMSLRVLISKEMDYKPYWTPVYKELSENLLLPIETDYVASDSNLLKHSLKKVEGKLQFLTTTEIKVQNKNYLKTYYQLSTSTVANKWENEVTKPNLLKSLKIKMKLNRVQKNIIDSWFNTSNYVYNKTVQCIKEKHPVNFISLRDKLVTTYTKKTNKEYITINETIYNLRKQMKESGKTKFILDAIEEEKNKLKNIKSKLKSVRNQGVFEWETETPKEIRAGAVNDVCKAYKTGFTNLKMGNIKYFNMKYKKKTEQSKCLLIPHSAVKNTDGKISMVPNILKENSSFLMGKKTKKKHKLLKIEHDCRIVKQRNIYWLIIPVSVEIQPKKKPINYCGIDPGCRTFLTTFGNNDSLEYKCDMVRLRKLDNKIMFLKNAKKKKLVKAKITKIEEQKENLINELHWKSINDLLKRNDFIFYGDIKSHDIVKNGKNRTLNKDINNLKFNKFKERLLYKATEKGKKVFEVKEHYTTQTCSFCGTNNKPGCSEIYNCNECKRVIGRDVNAAKNILMKGIVREL

SEQ ID NO: 59989 - protein, 392 aa, unknown
  TnpB Polypeptide
MLKGFKTELRVTEKHINKIYQSIGICRFLYNSYLTKNQELYELYKEGKIDKKQAFMSANDFDKYINNKVKIQEEFKWINECGSKARKKAIVNAETAYKRFFKGQGKFPRFKKKKNQDVKMYFPKNNETDWAVDRHRIKIPTLGFVELKETGYIPTNGKVMSGTVSMKAGRYYVSVLCDIVDRTDYSDIKNEGIGIDLGIKDLATVSNIDKPFKNINKTEVVRKLKKKLRRLQRQVSKKYEMNKDGKKFIKTKNIIKLEAQIRIIYQKLANIRLNYAHQITNILVKNKPEYIVIEDLNVKGMMKNRHLSKAIAEQSFHELRRQLTYKCLWNNVELRVVDKWFPSSKMCSECGSINKDLKLSDREYICKECGIILDRDYNASINLKNAQIFQVA

SEQ ID NO: 59990 - protein, 487 aa, unknown
  TnpB Polypeptide
MSWLSTAPPRPAASGSCSTPRPGSTPRSWPYSRSAATCARPSGASARPPPDPWGRAAGGYAVVASLSHQLGRFAGSSRRSLPLLCGRIPAGGGVRRAYKFRLRPTARQHVALEQCLASHRELYNAALQERRDAWRLRAAAVFYGDQSAQLKEIRAVRPDVAVWSFSSQQATLRRLNRAFIGFFRRVKAGETPGYPRFRSAHRFTSVEWPMDGDGCRWHPDTRKVYLQGVGQVKVTVHRQVQGLVKTIQVRRQGRRWMLILSCDGVPTRPLEPTRAAVGIDLGIASFATTSDGEHLSNPGFGRLAAARLATSQQAMARKRQGSNHHRRARESLAARHRKVANQRRNLHHHAARTLVVRYDLLVVEDLKIRNLVRRSAPRPDPDQPGRFLPNRAAAKTGLNRSIHDVGWAQFVSILRAKAEEAGRVVIDVDARHTSDRCEACGHTAKENRASQAVFSCRGCGHTVNADEHAARNILRAGLARLAANSAA

SEQ ID NO: 59991 - protein, 235 aa, unknown
  TnpB Polypeptide
MKEARLVIRNDKAFLKVVFEKPIEEKVEPKESIAVDINMAEVVVGKDDKNYVRIPTRLHEVHHWKSLAERLQKKYPKRWRENKRILHRIRSFHQRARRIMEDFARKVGKWVVEIAKAFGANVIKLESLKNLIKNVDKLPREFHDKLYLMQYRRLQYWISWQARKHGMVIEFVNPSYSSVSCPKCGRKMKEVSHRWFKCSCGYENDRDVIAVVNLNGRGSLTLSTAPQMRDVIPNR

SEQ ID NO: 59992 - protein, 341 aa, unknown
  TnpB Polypeptide
MSDRTTEYNYLELNPKERPETSKEAKKHSKPLPSCVLCHAIRDIKSKKKAKYFKRLWPSYSYQNFLVEKETSKDGGAVWKASFPTLEKRIGVPVIVQPYQEKYLDIILFGQAKQGSARLVKSGKNWYIHLALIVTVEQTEKPERIMGIDLGLIDLLVASVTGQTLFFPGSQLAYIRRHYADLRRRLQKAGSHRALVKLDNKEHRWVTDVNHKISRAVIDFAISHEITKIRLEDLTGTRWTKQRKSQRKDPGRSLHYWPFYQLRKFIEYKAVLTGIEVELVIPDLTSLTCSRCGHVHESRPKGRWFKCPRCKKIKHTPGSVEGRWPFEPSGAGRVGAAQWVR

SEQ ID NO: 59993 - protein, 387 aa, unknown
  TnpB Polypeptide
MIKAHKIRLNPTEEQKIYLARAAGTARFVWNWALAEWNHQYEAGEKPTALKLKKQFNDIRREQFPWTWDVTKNASDQPFLDLGKAFTAFFEGKSHRPGFKSKKRSHASFYLANDQFELGDHRLWIPKLGWVNMAENLRFHGKVKGARVTRTADWWFVSIQVELPDLEAAPRTCAVGIDVGLNRLATLSTAEEYENQAFLKTALKKLRQANKRLHRRVKGSKNREKARRQVARLHYRVTCLRDDVLQKMTTQLADCYGIIGMEDLHLKGLLKNRRLARSFSDAALGKLLNLLTGKVEQRGGQVIKVGRFFPSSKTCHGCGWKWEDMDLSDRIFLCQNPTCAYYHFLQDRDHNAALNILFEALHLIGLSDRVVTDIGSGDDVNLPMDAG

SEQ ID NO: 59994 - protein, 385 aa, Sulfobacillus sp.
MLKAYRYRLYPTDEQAVFLNRQFGSVRYVYNWALALATTTYQTQGQGITRFQLDKRLTALKQELPWLGEVASQPLQQALVHLDKAFTRFFREKKGYPRFKSKRGKQSATYPQGVKIHWENGVIYLPKAGWIRAVFSRRFSGTVKTVTVSRVPSGKFFVSVLVEDENQVPDAIAGTWERAVGGDLGLHDFLVLSTGEKCGHPQWLESELYRLKILQRRLAKTAKGSKNRTKIRHKIARLHEQMANRRQNFLHKLSTDLVRRFDTVCIEDLNVAGMARNHALARRIAQSGWAEFRRQLEYKAQWYGKHVRVIGRFAPSSRVCLCGYYNHDLTLADSQWDCPNCGRHHDRDVLAANNIKRFAFAKHPTGRDTPGEPGEHPLVDERRKP

SEQ ID NO: 59995 - protein, 460 aa, unknown
  TnpB Polypeptide
MARFEVPEGWTVQAFRFTLDPTGDQARALARHFGARRKAYNWTVATLKADIEAWHASGIETAKPSLRVLRKRWNTVKDEACVNAETGAVWWRECSKEAYADGIRGAVDAYWNWQTSRAGERAGKRAGFPRFKRKGRDADRVCFTTGAMRVEPDRRHLTLPVIGCVRTHENTRRIERLIAKGRARVLAISVRRNGTRLDASVRILVQRPQQPGVALPSSRVGVDVGVRRLATVADADGVVIERVDNPRPLDAALRDLRHASRARSRCTKGSRRYRERTTEMSRLHRRVNDVRTHHLHSLTTRLAKTHGRIVVEGLDAARMLRQKGLPGARARRRGLSDAALGTPRRHLSYKTGWYGSDLVVADRWFPSSKKCHVCGHVQDIGWDEKWQCEGCLAITHQRDDNAAINLARYEETPSVVGPVGAAVKRGADRKTGPRPAGGREARKGRSRKAAEQPRDGVRVA

SEQ ID NO: 59996 - protein, 402 aa, Micromonospora sp.
VQLRYNFRVYPTPAQQDSLARAFGCARVVFNDGLRLRQQAREAGEKYVSDGELSRRLITEARAMPERAWLAEVSSVVLQQALADLNTAYRNFFASLSGKRKGCKAAPPRFRSRKDNRQAIRFTKNARFKVLDNGCLRLPKVGDLEVRWSRTLPSEPSSVTIIRDAAGRYFASFVVTTRTDETLPPIASEVGIDLGLTHFAVMSDGTKIAAPKFLRRATRKLKRLQQDLSRKAKGSNNRKKAVVRVARAHARVADTRRDWQHKLSTTLIRDNQAVYVEDLCVTGLGRTKLAKSVHDAGWASFTGMLEYKAARYGRTFARADRFFPSTRMCSDCARINDKMALDVRAWDCPCGSHHDRDVNAARNIRAAGRADLNDRGAQVRPGLVPAPRREGVTRRELVPSGV

SEQ ID NO: 59997 - protein, 377 aa, Gemmatimonadetes sp.
MRKAFKYRLYPTRKQTGTLATHLEECRMLYNHFVVDRIQAYKDRGESLSLYDQQARLSFLKLDRPTLSQVHSQVLQNVAVRVDLAFQAFFRRVKVGGVPGFPRFRGLGRYDSLTYPQAHGFEIKEGALRLGKIGRIRIKAHRPLEGTSKTCTVRRSATGKWYASIVCEVEPQPLPKSDEAVGIDVGLEKFATLSNGDQIAPPRFFRQEEQVLAKAQRKLSKQKKGTSARAKARKVVARVHERIRFRRHDFAHQLARCLVNHYGLIAVEDLIINGMVRNHCLSKSIHDAAWSQFRQCLSYKAEEAGRTLVAVNPAYTSQDCSQCGHRHRKALSERVHVCPCCGVVLDRDENAARNILRLGLQSQVDEPPRSPSLEAWE

SEQ ID NO: 59998 - protein, 385 aa, unknown
  TnpB Polypeptide
MEGVYHMEQITITAKIQISVSDTDKVLLNDTMSAYSSACNYVSDYIFQTHDLKQFSLNKVLYATVREKFSLKSQMAQSVFKTVIARYKTILENQGEWIKPSFKKPQYDLVWNRDYSLTKNCFSINTLNGRVKLPYFAEGMSKYFDHSVYEFGTAKLVNKHGKYFLHIPVTYDVGDSNISDICNVVGIDRGINFVVATYDSKHKSGFVSGKAIKQKRANYSKRRKELQMRQTASARRRLKAIGQRENRWMQDINHQVSKALVENNPKHTLFVLEDLTGIRSATERVKTKDRYVSVSWSFYDFEQKLIYKAKQNQSTVIKVSPKYTSQCCPVCGHIEKANRNKKLHLFTCRNCGYKSNDDRIGAINLYRMGINYLEDSQVPNTVTAE

SEQ ID NO: 59999 - protein, 384 aa, unknown
  TnpB Polypeptide
MNRVPAACVTLTLRLKIRPESYSWLNAAAVEVNQAWNFCNERAATVLGNLGRWLSGFDLCNETAGSTQYMKRIGADTIQRVCTEYATKRNAVRKQRLRWRVSRGARRSLGWVPFKAASVKRKGKHLRFAGKMFRVFEAERLDGVKWKQGCFAQDAVGDWWLCLPVEQAVSRCVAPREAVGIDLGLASVATTSDGETLEAARFYRDAEQKVGQAQRRGHKRQAKRLHRRAANRRRDALHKFSRRIVDQYQNIVVGDVSAPKLARTRLGKSVLDSGWGMLRQMLLYKGEHAGRSVEVVSERNTSRVCSQCGALSGPQGLRRLAVRAWTCSGCGESHDRDVNAARNILARAKVLASVSGNESSDLPVPPSRLHGRREAGTETARTAA

SEQ ID NO: 60000 - protein, 384 aa, Mastigocoleus sp.
LHICFGSRKLFNAQYHLEENGYSSHEEWLEDWRKKRSGRFYCVGKSSYGGGTMINIYATEDDGKYMMRVQVPRCLQEQCGKYIEAYFTVDDRSGRMRRKDLEYAINHQKPITTQVFRREHKDDNCYVHLTTYVQDIPIVYTIKNGCLGIDFNANSLSVTYVKSDGNIAWCHDFPYQWKGKTCGQRKAQMRDLVCDIVRIADSLKCSIAIESLDFSKRKAQMSEESKLYNGMLSNLSTWLFKTALESRCKRFGVQLVKINPAFTSLIGMIKFMVKYGLSSGTSAGMVIARRAMKMSEAVPQCLSLPVDDGKHAWSAWNRVSRFIKKHGIRRTQLFQWTKALEGILKWEHSNPSLPVDIDKSQTKNPPIHRGEVRPDGNVQLCLFV

SEQ ID NO: 60001 - protein, 406 aa, unknown
  TnpB Polypeptide
MTSLFTAQKPNSHLIFLPSFTSSLVECTDLEATARKSKKIRLFLNSEQKARLKQWFGVSRFVYNTTVKYLQQSGTKANWMAIKSEILNSLPDWAKPVPFQIKSIAIKDACLAVKATKKGFGKDRQFRRCRFRSRKDTRQSIFVPKTAIKDCGIYHSILGKCQLKETLPLSFSDGRLTLAYGEYYLIVSEEVQPQQTDNQGRVVALDPGVRTFMTFFSENSFGWLGNDSNLYIQKLCFKLDSLVARISKAPSPQKKRLKIAANRLRCKIKNLTKELHHKTARFLVDNFDVILIPTFETSRMVSKSRRKLKNKTVRQMLTLSHYEFKTFLKWKAWETSKTVIDCNETYTSKTVSWTGEVIENLGGARVIKSAITGFKMNRDLNGARGIFLRALVDMPWLGEYLNLCVC

SEQ ID NO: 60002 - protein, 308 aa, unknown
  TnpB Polypeptide
MKGIYFMQIGETMKIKLNGITADMDLAFSEMTYQYAQACNYISEYIFSHDMNINSNLLSKKLYRTLRSEFGLKSQLAQSAIKTVTARYQTVDTQLKKSPYKFSVTENGRKKYYSFRRDMFWLQKPIRFSRTQADLVRNRDYSFVEEGKVLSINTLGNRVKVPFDVSEYMKKFFDDDWKFGTAKLVQLKGSWYLHISATREADEFSRDDIRHVVGIDRGLRFITTTYDDSQKTAFIRGKEIRKKRDSFDRVRAELQEKGTRSAKRALKRISGRENRWMSDVNHRISKALVNKYGKGTLFVLEDLEGIFV

SEQ ID NO: 60003 - protein, 266 aa, unknown
  TnpB Polypeptide
VTLRAYKYALNPTPRQARLLDGHCGAARKAFNWGLGRVKAVMDQRTAEASYGISDELSTPVISWSMYSLRKAWNQAKDEVAPWWAEYSKEAYASGLTQLAAALKGWRDSRNGKRAGRSVGFPRFKSKRRAVRSCRFTTGAIGCDERYAVLPRIGRIRLQETPASELLDGTARIVAATIRHERGRWFVSFTVEQQTPARSPERPDAVVGVDLGIKSLAILADPDGEPQTVPNPKHLDASLRKLGKLSRRVSRRVGPDRRTGRLPSKR

SEQ ID NO: 60004 - protein, 374 aa, unknown
  TnpB Polypeptide
VPTQQALRHLDTAFRNFFAGRTTYPSFKRKHGQQSAEYTVSGFRFADGTLTLAKMDTPLKIRWSRPLPNGAKPSTVTVSRDSAGRYFVSLLGLFRDLRDGRNRFHYAVARESAFPARLHGASRSGSRFPVRCRVMSAKLLHTNLGRALLVTDDIHPLPLADTVVGIDLGITSLVTLSTGEKIGNPRHCNSDAKRQRKAQQSLSRKQKGSKGREKARVHLARVEARIGDRRRDFTHKLTTRLVRENQTICCESLRVKNMVRNHSLAKHISDAGWGELVRHLDYKATWYGRTFVAIDRWYPRSKRCSRCGHVLPALPLDIRHWDCPECGSRHDRDVNAAINIASVGQTVFSGGEAVRPGRRKSGRHASGKPESHAL

SEQ ID NO: 60005 - protein, 220 aa, unknown
  TnpB Polypeptide
VSVIIDVENIPQKNTNQGIGIDLGIKDFAICSDKIIYKNINKTQRVRKLEKKLLREQKRLSRKYESLKIRNKKDKGEATRQNIQKQIAKVQILYQRLNNIRTDYINKVVSNVVRNKPSYITIEDLNVKGMMRNKHLSKAVAQQKFNEFRNKLANKCNALGIELRIVDRFYPSSKLCHKCGSIKKDLKLKDRIFNCDCGYVEDRDYNASLNLRDAKIYKIA

SEQ ID NO: 60006 - protein, 381 aa, Trichococcus sp.
MLHGIKGQLTLKPQQKQLVAQSIGNARFVWNQFLAMWNARYQNNALLPTLTEYDLNNLLPTLKKEYAFLKETDSTSLQQVSNELAQSFKNFFQNRSHFKHPTFKSKQHARQSYTSKNVNNSIRLDGNYLRLPKLGWVQFRSGQPITGKIKRATITRTAAGTYECSLLVDDESQVVTHKTHQTVGIDMGVSDLMVLSTGDKIKTIRFHEQLAPKRLYWEQRAARRARKAKENGVALSAAKNYQRAKEQRARIFQKEKNQRQDRLHKLTTRLVREYDIIVLEDLQTANLMKNHQLARSIAAQSWREIRRMLAYKCAKYGKELIVVNPYKTSQICSSCGFDDGKHALDVREWECPSCHVHHDRDINAAKNILSIGLGQALVKSA

SEQ ID NO: 60007 - protein, 230 aa, Cyanobacteria sp.
MLVLEYKVKSESKQYKAIEEAIRTTQFVRNKCIRYWMDAPRDAKINGFALNKYSTELRNEFSFVKDLNSMAVQAAAELGWFAISRFYDNCKAKKPGKKGFPRFQKDNRSVEYKTSGWKLHPTLRRITFTDKKGIGELKLLGKWDIQTYPVKSIKRVRLVRRADGYYCQFAVDVERQETQPTTGNAIGLDVGLESFYTDSNGHTEPNPRLLKIAEKAIKHARAAHLQKGKR

SEQ ID NO: 60008 - protein, 487 aa, Sporosarcina sp.
MTLEKDSPKNYKTRQIWIKKGHRLFPYFQEMTQNAKNMHNTTNFYIRQVYTGLTQDKPLQPLQIEVLSTIEDNLFKINEVQTATFYKKNEKEQSKPEEKRKEVKCNLFEKPSQEQPYVNYNFLDALFKLIGQKDYRSLPAQSSQSVMKTVFQNWKSFYASLKDYKLNPSKYKAVPKIPTYSRASKKEITFTNQNCAIKNNRFLKFPKTKEQLNIGKLGCADGRLKQVRVIPKYNQYVVELVMEVPSEALQLEDNGRFTSIDLGIDNLATIVTNTGRRPVLVKGKNVKSVNQYFNKQKAHFLGVLRQGKQPKQGFYTSKQLERLHQKRQLKIKDIFHKASTTIVKIALEEKTNTIIIGKNKDWKQQINIGKQNNQSFVSIPHNLLINMIDYKAAQYGINVVLTEESYTSKASFLDGDDIPTYAESDTKKPFSGKRIKRGLYCSGRNWLINADVNGAANILKKALYRLTKETDFNIETVNVWNPKSIVI

SEQ ID NO: 60009 - protein, 383 aa, Sporosarcina sp.
MLVNKAYKFRIYPTKAQKILIAKTIGCSRFVFNHFLAKWNETYKETGKGLTYNICSSQLPQLKSELDWLKEVDSIALQSSLKNLADSYSRFFKKQNQAPRFKSKKNNVQSYTTKHTNGNIAIAGNHLKLPKLGLVKISKSREVVGRIMNATIRRNSSGKYFASILVETEVEEKLKTGSVVGIDVGLKDFAILSDGAVYENPKFFRSLEKKLAKEQRILSRRKEQALKQHKPLYEAKNYQKQRIKVARIQERIANKRADFLHKLSTEIVKNHDVIGIEDLQVANMLKNHTLAKAISEVSWSQFRTLLEYKAKWYGKQVVVVAKNFPSSQLCSSCGYRNKDVKHLALREWECPTCNTHHNRDRNASINLKKEALRLLTAGTAGLA

SEQ ID NO: 60010 - protein, 388 aa, Sporosarcina sp.
MLVLKKAYKTEVHFTTSQQQKAIQTIGVCRYVYNLYLETAQNHYKETKKYLSGFDFSKWLNNVHTKQTDQWIKEVSSKAVKKAIMNGDRAFKSFFKGLAKFPRFKKKKNQDVKAYFPKNNATDLIVERHRIKIPTFGWVRLKEFGYIPTDATVINCTLSQKAGRYFIAVLCDVEKSKAAYKSETDGIGVDLGLKEFAVCSNHLVFDTINKRERIIKMEKRLKRQQRKLSRCYEQNKNRKRGEFCAENRQKQLLVVQKLHARLANVRKEYIRFVVSVLVKTKPVFIAIEDLNIKGMMKNRHLSRSIGQQNFRQFREWLIAKCLEIGIEIRLVDRWFPSSKRCSDCGEKNVSLSLADRIFTCENCGMEMDRDFNASLNLKYTKEYTVVTE

SEQ ID NO: 60011 - protein, 395 aa, Nostoc sp.
LLVYEFKLKGKQQQFNLVDEAIRTALFIRNSCVRYWMDNPKVGKYDLSAYCKELAANFEWANKLNSMARQASADRAWGAISRFYSNCKKKIPGKKGFPNFKKRGHSVEYKTTGWKLSDDRKYLTLTDGFEIGRLKLVGTYDLHFYQIKDIKRVRLVKRADGYYAQFCIAVDREIKVEPSKKVIGLDVGLTHFYTDSNGDKAENPRFLRKSEKALKRLQKRVSKKFKKGKPQSNNYKKALDKLARKHLRVSRQRKDFAVKLARYVIQSNDMVAYEDLQVRNMVKNHKLAKSISDASWYQFRCWMEYFGKVYGKITIAVSPQWTSQNCSNCGEIVVKTLSTRTHECPHCGTVLDRDENAALNILAKGLSTTGHLGTNAWGENDLCLDLVTGLDKLAH

SEQ ID NO: 60012 - protein, 376 aa, unknown
  TnpB Polypeptide
MYKSYQFRLYPDKQQIIQIQKTFGCTRLVYNHYLEKRKKDNLTCFDMIKDLPNLYQKYPFLKEVDSCSLRCCLFDLDDAFKRYFNNQNNYPKFKGKYGSKRSYRTNYITSTYNERKYENIKVDLKRNVITLPKLKEVKIKGYRNLSVLPGRIINATISECSNGKYYVSVLVEENHIAPKIIPRKIVGIDLGIKDVVITSDGEKIKNEKIIEKYEKRIKRKQRELARREKGSGNYYKTKKKLAILFQKLKNARKYFIHQITKKLVLENDIIVSETLKVKKMLEEKKYSKFLSDVSLSKICSLLKYKANYYGKRYIQIDSYYPSSQECSRCGYKNEKVKDLTVRDWICPECGSYHDRDINASQNILFEGIKKYTKELI

SEQ ID NO: 60013 - protein, 364 aa, Cupriavidus sp.
MGTVKTLKLRIQDKHAKTMLAMARDVNTVWNFCNETQYRSLKRYCNKPKVWLSGFDLQKLTAGFSKCEGVHVDSRTIQETCKEFATRLKQFKRQRLNWRVSDRKSPKYSLGWVPFKGEGIEYRNGQLHFNGLKIGLWDSYGLSKYELGAGRFNEDSRGRWYVNIAVKVEVEEKRVPDGTTTLGIDLGLKTAATYSDGSEFAMPKWYRLSEADLGIAQRANKKRRVKAIHARIANQRKDAIHKETTALVKKHAAIFVGNVNAKAMAKTSMAKSVHDAAWTTFRTQLKYKAIRQCVVFEEVNEAFSTQTCSCCGVIPPSSPKGRAGLGIRQWTCCACGAEHNRDTNAARNIARLGLQALEVGISGV

SEQ ID NO: 60014 - protein, 408 aa, Megasphaera sp.
VSNLTKTIKLRIHVTPEQETLFRQMTEQYRQACNFVSQYIFDHRFNMAYQSLNRELYSDLRSQFGLKSQLAQSSIKTTIARYKTVKQQLFQNPYRYKDEDGNWQRITKTWEWLWKPIFFTRPQADLVRNRDYSFVDDGQILSINTLGKRTKCTFEGEHFAEYLDGAYDLGTAKLVELKGLWYLHIPVTQAVEDFQKENVRHVVGIDRGLRFLTVSYDEQGKTEFVSGKKMATKRHKFQEVRRQLQSKGTKSAKHRLKAISGRENRWMSDVNHRISKTLVEKYGKDTLFVLEDLTGVSFEESHLSRTAKQNYDLRSWAFYQLEQFLTYKAHENRSEVLKVSAKYTSQRCPKCGTIHKENRDHHKHLYRCQCGYRSNDDRIGAMNIQLLGTMWISGDNRPRYERITTALE

SEQ ID NO: 60015 - protein, 252 aa, Megasphaera sp.
ISDLTKTIKLRIHVTPEQEVLLRQMTEQYRQACNFVSQYIFDNQFDLTYQSLNKKLYSDLRGLFGLKSQLAQSSIKTTIARYKTVKQQLFQNPYRYKDEDGRWQRIPKTLEWLWNPVFFRRPQADLVRNRDYSFVDDGQVLSINTLGKRTKCTFEGEHFAGYLNVSYQLGTAKLVELKGRWYLHIPVTKAVEDFQKECVRHVVGIDRGLRFLAVSYDEQGKTKFVSGKKIATKQISEAQTQSHFWAREPLDV

SEQ ID NO: 60016 - protein, 365 aa, unknown
  TnpB Polypeptide
MARKTFKFRLYPNRLQRENLTATLEVCRELYNAGLQERIEAWKRRTPVRVFDQINQLPDIKAVRPDVARVFSQVLQDTLRRLDKTFKAFFARVQRGEKAGFPRFKGRHRYDSFTYPQSGFRLHGRLQLSKIGNVKIKQHRDIAGHIKTLTIRREAGNWYACFSVEYEPKHLAENGEAIGLDMGLENFATRSDGKPIPNHKFYQQAQAKLRRAQRQVARRKNKKSERRRKAILLLQKVHLHVANQRKDFQHQEAYRLVRDFGTIVVEDLQVKGLSAGRFSKSVHDVGWSSFLAMLRYKAENAGRQLIAVDPRYSSQECPQCHARKKKTLSERVHRCDCGLTMGRDQAAALVILGRGHAFKRKQIGT

SEQ ID NO: 60017 - protein, 364 aa, unknown
  TnpB Polypeptide
MIVNKAYKFRLYPNEEQKIMFAKTFGCVRFIYNKMLEDKIKYYQETKDKLNNTPAQYKSEFEWLKEIDSMALCNAQMNLQSAYNNFFRSPKVGFPKFKSKRKHKDSYTTNNQNGTVSIIDGKLRLPKVGLVKVIQHRVIPLDQKIKSATIEKTRSGKYYASILVEFEKEVPNIQLDKTKALGLDYASHSFYVDSQGREANYPKFYRNAQVVLSREQRKLSLMKYGSNNYEKQRIRVAKIQEHIANQRKDWLHKLSFELAELYDYICVEDINMQNMAQSLKLGKSTNDNGFGMFRTFLTYKLAERGKRLVKIDKWFPSSKMCRFCGCVNKDLKLSDRVWACECGAILNRDENAAINIMNVGLSTV

SEQ ID NO: 60018 - protein, 407 aa, Fischerella sp.
MQLVEKHMINRQHKFWKECDYLTLQSKHLYNAANYVQRQYFFETNKYYNSIEIYHQTKNLEAYRYLPTKVSKQIVRSIAQAWSCWLAALKDWYKHPQKYLGKPKMPGYKHKERGRNVVIYPTDAISKPALSKGIVKLSQTLIELTTNAENVDQVRIIPKVDHYVIEVVYTIEDAAKSNGKYSAGIDLGLNNLMAITSNHPGIRPLLINGRPLKSINQFFNKRVAALQSIEAIRQIKKLNSKRTRRIDNYLHTVSRRVIDWCGLNHIGQLIIGKNQGWKQNLNLGKKNNQEFTKIPHAKLISLLTYKAQLAGIEVVLTEESYTSKASALDGDQLTSFNPQSDIKPVFSGKRVKRGLYKTCTGRTINADTNGSLNIARKVIPNFMDGIVGLPFIPVVLGLWTKITNVDV

SEQ ID NO: 60019 - protein, 254 aa, unknown
  TnpB Polypeptide
MCNIEKIGKVRFKTNYSIPKNCKYSNPYCSYNGRCWVLSFSVEVEENQTALNEDLSIGIDLGVKDLATCSNGNVFKNINKTKRIKNLKSKLKHLQRSISRKYEDNKQGSKFVKTNNIIKLEKQVKQIYRKLSNIRNNYIHQTTNKIIKHYPYRIVIEDLNVSGMMKNKHLSKAIAEQGFYEFIRQIKYKCEFNGIEFIQADRFYPSSKTCSCCGSIKKDLKLKDRIFNCDCGYVEDRDYNASLNLRDAKIYKIA

SEQ ID NO: 60020 - protein, 340 aa, Clostridium sp.
MYITIKLSLDLNEHLKHCLTWYETIYHGEIKRIADIFIKENHSYEYLYKNISNHISFHSKHLVLDFAKKEYEYRCGCKNSRKIRCSSCWSNSSYRLNGDLLQLELGLLEHKRFIDLPMYHNEQPLMQLARGKMMNLELMHIQENWYAFINVDIPIIFSTSRKTMGIDIGMKVPAVAALDNQHYRFFGNGRQRQFYLRKYKRHIQEMQRRKQFKKLRQFRHKLHNVLADQDHKISKDIISYALKNDVGMIYLEKLTSIHDRFNVRQVSNAYLWSYQRLQQFITYKAQLAGIEVRYVNPYNTSKKCPKCGRINKPKDRTYQCKCGYHGHRDVVAAINILHAL

SEQ ID NO: 60021 - protein, 380 aa, Enterococcus sp.
MEQLKAYNFRIYPTEEQAIFFAKTFGCVRKVYNLLLDERIKAYEIMKKDPSQKLKKPTPAKFKNDYPYLKEVDSLSLANAQLNLDKAYNNFFRNKSVGFPKFKSKSHPIQSYTTNNQHGTISLVDNKYIKLPKLKSLVRIKLHRQPQGELRSATISRHASGKYYLSLLCKEEIQKLPKTNTFVGIDLGITDFAILSDGQKINNQRFTSEMEQKLKREQRKLSRRGMRAKKAGKKLSEAKNYQKQKCKVARVHEKVKNQRNDFLNKLSTDLIKNHDVICIEDLHTKGLLRNHKLSKNISDVSWSSFVTKLQYKANWYGREIIKVDRWYPSSQICSSCEHKDGKKALSIREWTCPVCHTHHDRDINASINILNEGLRLQALV

SEQ ID NO: 60022 - protein, 487 aa, Catellatospora sp.
VARFTTFQFCLDPTAEQQAVLRRHAGAARFGYNQCLRLVKQALGGKQRGTVDKVPWSGFDLINAFNGWKHSADAGRVMVAAADGTTTVEATGLPWRAQVCQQVFEEAAVDLGRGLAAFTASRTGDRKGRRVGFPRFKSKKRTPLSFRLRCRTSRAGRASIRVGEQAPRTVTLRGIGTMAVCEDTRRLRRMLAKGRAKVVSATVSHRAGRWAVSLTCEAADLHDNHRHQPNNGTGGWVGVDRGLKAFVVAARADGTEVLRVDDPPRPARAGMARQRRLARAVTRKQLGSNNRRKAVARLGRHHGRVRAIRQRFLHQVSNEVVKTHDRLAIETLTITGILRNRHLAAAISDAAWGELARQLTYKQQWHGGHLTPVDRWYPSTKTCAPCRTVAPAMPLHQRTFTCHVCGYQADRDLNAAVNLAIWAEQHHAQVRDLHAGGPVTNACRGEGSGPRTRAGETSPDDAGTAPTPPGVRRGRPRRALSHNSNEL

SEQ ID NO: 60023 - protein, 274 aa, Lysinibacillus sp.
  misc_feature (254)..(254): Xaa can be any naturally occurring amino acid
MTKQNKAFKFRLLPNKEQSVLLAKTFGCVRFVYNKMLAERKETYEKFKNDKEALKKQKFPTPAKYKGEFPFLKEVDSLALANAQMNLQTAYKNFFEGHAEFPKFKNRKTKQSYTTNFVNGNIEWKDGHIKLPKLKLVKIKQHREIPKNYKLKSCTISRTNSGKYYVSVLTEYKKDIQPKKIENVVGLDFAMAEFYVSSENEKANYPRYYRVMSEKLAKAQRILSKRKKGSARWHKQRLVVAKLHEKVANQRMNXTKQSFQISFVAKQRTIRLIS

SEQ ID NO: 60024 - protein, 203 aa, Okeania sp.
MDRRGLGRKELYRYNTELRSMYPFVQDLNSHACQASVERFWSAIARFFDNCKKNIPGKKGYPRFKKHSRSVEYKTSGWKLLDPKHIQFTDKKGIGRLKLIGTWDLAFYPVEKIKRVRLVRRADGYYCQFCISVDVHVKTLPTKRNVGLDVGLKEFYTDSDGNTEPNPRFYRKSEKRMKFYQRRVSRKQKGSANRQRAINKLST

SEQ ID NO: 60025 - protein, 378 aa, Streptomyces sp.
MQLRYTFRIEPNFGQRIALERAFGCARVVWNDCLQARRDAHAAGLPYPTSAQLSKRFITNAKQTAERAWLKEVSAAVLQQSLRDLEAAYSNFFASIKGTRKGPKVGEPRLKTKRDRRQAVRFTANARWSITTDGKLSLPKIGPIRVRWSRALPSAPTTVTVVKDASGRYFASFVVSVAPARKVDASVPGAGDQGIDLGLTHFAVMADGSRIRAPRFLRKAEKKLQREQRRLCRKAKGSRNRDKQRVRVAKAHAKVANARRDFQHKLSTRLIRENQTVSVETLSVKSLARTRLAKSVHDAGWSAFVAMLEYKAVRYGRTLTKVDRAFPSSQMCSACGHRYGPKPLHIRAWTCDRCGARHDRDHNAAQNVRDEGRRIRAA

SEQ ID NO: 60026 - protein, 504 aa, Calditerricola sp.
LNGLSRTEIKKQGQDLFGLNSRYVDDARLKAQGMIDAQKELLELEIETTEAKLRRARKKLAWAMKKRSRAEKKSLPEGEIQTLDRTVLGRQARVSVLEKRLKELREHKENGTAPTVIFGGRKLWRNVCKGKATRDEWRAARKNRLYARGDSTKGGNPNMKIAFDGREFRLAVTLSHLSEPVGVDRLGRPIMSRAPRVLGRLWIPEKHRARLLGWLTEKRAYTVELIRGLDGRFRVHIALELDDHPETDFSRGVLAVDINPDGACMANVSSRGLPEPWPRGFQVSAPKNLGKYDGEFQIVPYPSGFLYIRVPELAYASGFRRRYLIGVLAKAVVDIAKALGKPIALEALGFSKGRMDTEKPFNRMASQFPYAAIRMAILRRAVKENVGYKQVPPQHTSTIGRLKYEKKYGVSVHCAAALVIGRRAMGFRERITREVRDFVLRVKERLKPTGDLLPREGIGMTRKVEAALHRLEPRLGLHNGLARWQQESFFSCWRELKIFALTFR

SEQ ID NO: 60027 - protein, 546 aa, Escherichia sp.
  misc_feature (382)..(517): Xaa can be any naturally occurring amino acid
VKRLQAFKFQLRPGGQQECEMRRFAGACRFVFNRALALQNENHEAGNKYIPYGKMASWLVEWKNATGTQWLKDSPSQPLQQSLKDLERAYKNFFQKRAAFPRFKKRGQNDAFRYPQGVKLYQENSRIFLPKLGWMRYRNSRQVTGVVKNVTVSQSCGKWYISIQTESEVSTPVHPSASMVGLDAGVAKLATLSDGTVFEPVNSFQKKQKTLARLQRQLSRKVKFSNNWQKQKRKIQRLHSRIANIRRDYLHKVTTTVSKKHAMIVIEDLKVSNMSKSAAGTVSQPGRNVRAKSGLNRSVLDQGWYEMRRQLEYKQLWRGGQVLAVPPAYTSQRCACCGHTAKENRLSQSQFRCQVCGYTANADVNGARNILAAGHAVLACGXXXXXXXXXXXXXXXXXXXXXXXXXXXXXXXXXXXXXXXXXXXXXXXXXXXXXXXXXXXXXXXXXXXXXXXXXXXXXXXXXXXXXXXXXXXXXXXXXXXXXXXXXXXXXXXXXXXXXXXXXXXXXXXXXXXXXXXXRAVVIQRKKIACHKVNSDARYVDIQRTPM

SEQ ID NO: 60028 - protein, 414 aa, unknown
  TnpB Polypeptide
VKILRAYKVELDPNNVQRAALLKHTGAARFTWNWGLARRIQEYKETGKSSNAIEQNRQLNQLKKTDFPWMYDVSKAAPQEALRNLDKAYDNFFRRVKNGEKPGFPKFKSKKAWKSSFRLTGSIQVTNTHIKLPRIGWLKLKEQGYVPTDGLHILHVTISEAAGRWFVSVQCKQEMEITRAIGDPVGIDLGIKDLAVTSDGQRFENPKPLEKAQAKLRQLQRELSRRKKGGKNQEKTRGKIAGTHYRIANIRRDTLHKATSGIVAKTKPENARPSVVVLEDLNVAGMLANRCLAQAISDVGFAEFRRQLDYKTIWYGSELLIADRWFPSSRLCRYCGCINSALKLSDREWTCDCGAVHNRDENAAINLKNLAVRAVRPEQAGRRTPAESAVRPAAVSLAASLKQEPSMGSHRGSQ

SEQ ID NO: 60029 - protein, 346 aa, Mycolicibacterium sp.
MAEKFTVADGWVLQAYRYALDPSAAQAAALESHAGGARFAYNTMLRTVKANLSQRDAERSYGIADADLTPPLSWSFQSLRNDFNRRKHHVAVREDRTPWWPENSKEVYANAVKNLSLALKNWGGSRSGARKGPRMGFPGFKSKRSSRAFAFTTGTIRIEADRHHVTLPRLGTLRVHESTRKVGRRLEAGTARILKATVRHERGRWMVSLTCVVQRAAQRPAHIKALAPVIGVDLGVKDLIVAATPDGRQLLRQHAPRELAHAARRLRALQRKASRQLGPWDHSSKTRREPSNAWRRTQQLIAAQHARVANLRRDRLHKLATQKRAGVKTGPAAGGCLPRLGVGASA

SEQ ID NO: 60030 - protein, 398 aa, Nonomuraea sp.
VQLRHNFRLYPTPGQQIAMAKAFGCARVVFNDALRARQDAREQGLPYLSDGELSKRVITEAKKTPERSWLGEVSAVVLQQALADLNTAYRNFFASITGKRKGSKVAPPRFRSKRDNRQAIRFTRNARFSITTGGKLRLPKIGDVPVRWSRPLPAAPSSVTVVKDAAGRYFASFVVEVTEQPLPPVESETGIDLGLSAFAVLSNGRKLDSPRFLRRAEKKLKRLQRALSRKAKGSNKRAKARLAVARQHAKVTDARREFHHQLSTQIIRENQTVIVEDLAVKGLARTRLAKSVHDAGWSQFVTMLEYKARLYGRAFHRIDRWFPSSRLCSECGTIQQSMPLSVRSWTCPCGAVHDRDVNAAKNILAAGRADRLNACGAQVRPGPGLAQREEAGSLRGAA

SEQ ID NO: 60031 - protein, 371 aa, unknown
  TnpB Polypeptide
  misc_feature (276)..(276): Xaa can be any naturally occurring amino acid
MTKKPYKSYKFRLYPNEKQKEMFSKTFGCTRAVWNMMLADKNKHYKETGEFLQNNTPAQYKKKYPWLKEVDSLALCNAQLNLEKAYKSFFHSGFGFPKFKAKRYRQSYKTNNDHGRLVVENGKVKLPKIGWVKVRQHREILGTIKSATISMSTSGRYYISILCETEISPFSKTGSSVGIDLGLENFAILSTGEKIGNERFLKELSKKLAKEQKILSRRFLNAKKSGRKLSESKNYQKQRIKVAKIHEKIANKRKDFLDKLSTEIIKNHDIICIEDXSSKNLMKNHKLAKAIGDVSWSEFVRMLEYKADWYGKTISKISRWYPSSQICSDCGYSSGKKALSVREWTCSNCGSHHDRDINASLNILYEGLRLV

SEQ ID NO: 60032 - protein, 384 aa, unknown
  TnpB Polypeptide
MLRAIKYELNPNNTQKELIKQTCGCCRKVYNTMLDRKISAYKEDGRTISVIELINQLPQLKSELTYLKDVPSQSLQQIIRNLDTAYANFFRKGGSGFPKFKKKGYRDSFRIPVACVIDYNKWTIKTAKIGTMKFYKGHNKQINGIIKSYTISHTSTDRYFISVLYETMDKENLNNNKSVGIDVGIKDFAILSDGKVFENQKYLKSNLKKLRVLQRTVSRRHQKGKKKEEQSKNWKKSVKQLAKLQEKIAFQRYDYLHKVSTWISQNYSTVCVETLNVKGMMKNHHLAQAISDTSWGMFINMLEYKCDNLVKIDKWFASSQSCSVCGYVNKDVKNLVVREWICPECGTKHNRDLNAARNIEREGLSLCGLKVSGCTMLVPRIPLL

SEQ ID NO: 60033 - protein, 346 aa, Lactobacillus sp.
MFDIILKRKERTNVLKGIKLRLYPNRTQQNQLEQMFGNDRFVWNQMLAMMNERYQNNKALPFLGKFKLNYLLKPLKKEYPFLKTSDSSSLQVVNEFLTQSWKNFFQDKSGQIGKPRFHSRKYLKKSYTGKSTIKTAGKRYLKIPKLGYVKTSKTGVLQNTKVKRYTVVLEPTGKYYLSLQVEISEPEKYSLTGKQVGIDVGVADLAILSNGLKYPSFDRSYFEKKAKVWQRKYARRRHLVKLLVLQNKNKRVLCPRSLESFTNWQKAQKSKAKYQAKAANQRRDYLHKLTTHLVKQYDVIAIEDLKTKNLQKNHHLAKSIANASWRMFRQMLEYKLRMVWQETNCS

SEQ ID NO: 60034 - protein, 409 aa, Lactobacillus sp.
MFDIILKRKEGTNVLKGIKLRLYPNRTQQNQLEQMFGNDRFVWNQMLAMMNERYQNNKALPFLGKFKLNYLLKPLKKEYPFLKNSDSSSLQVVNEFLTQSWKNFFQDKTGQIGKPRFHSRKYLKKSYTGKSIIKTAGKRYLKIPKLGYVKTSKTGVLQNTKIKRYTVLLEPTGKYYLSLQVEISEPEKYSLTGKRVGIDVGVADLAILSNGLKYPSFNSSYFEKKAKIWQKKYSRRRHLVKLLVLQNKNKRVLCPRSLESFTNWQKAQKSKAKCQAKAANQRRDYLHKLTTHLVKQYDVIAIEDLKTKNLQKNHHLAKSIANASWRMFRQMLEYKCEWYGKKLIAVDPKNTSRICSKCGYNSGAKPLEIREWTCSKCQTKHDRDINAAVNILHKGSTKLSGQGLAMVTS

SEQ ID NO: 60035 - protein, 192 aa, Lactobacillus sp.
MVANPRFYRKAKKKLAHAQRVLSRRQRRAKQEGRNLRTASNYQKQRLAVAKLHDKIRRQRADFLQALSTALIKNHDLVVAEELRSKNLLKNHALSQAISDVGWRSFLNMLAYKAQLYGKEFLTIDPKYTTQRCHACGSIMGQNGYRKLTLRDREWACPMCHTHHIRDWNAAINILEKGQKLWQNPKTKEKAA

SEQ ID NO: 60036 - protein, 211 aa, Lactobacillus sp.
MKRMSSLACHFGIKLRFYPSSKQKKIIKLNYDAQRFVYNSYVGRNRTNYHARRFLASRQCQAMPFVFSALNRYETELAETVAANNELLANTIQNYQKAWNNYRKIGHGIPTFHKKRSDWSYQTNCQYPKQLEAYLDNGTAKFIDDKHVKLPKLGVVRIAGFRKLIEARLLNHIPTRIGTVTIKKTADNQFYLSMQLGSDVSFVKDLPKTQS

SEQ ID NO: 60037 - protein, 219 aa, Lactobacillus sp.
MPFAFPILNDYEAKLAETVVANDELLAKPKNIRDAYSFLRVKEIDSLALANAIQNYRKAWNNYRKIGHGIPTFHKKRSDWSYQTNCQYPKQKEAYLDNGTAKFIDAKHIKLPKLGVIRIAGLRKLIKDRLLKRVSTRIGTVTIKKTADDQFYLSMQLGSDIAFAQKLPKTQSQIEIDLNLDNFLTDSNGAMVANPCFYRQVKKEACPRPTRPLSQAKTC

SEQ ID NO: 60038 - protein, 417 aa, unknown
  TnpB Polypeptide
LLGWVATEKILQLNLLPLTDSKHRKLQDTYSVFTTIATAAFDVIKRDKPSSYTRLHHLVYAKNKTNGVASQLVEEAQRHAWQRRKVASKIEHATVRFDRRLFSWKTTRRGHPVLSLRANYERLGLPIRRDGAYARLQEHLRDGWVVTSVLMTRHYRFLGLLQKEPPTPRVMENVVGVDQNSNGIGVTVMRKRDGRILKQLYLGRGISVRQIRYENRRAKLQEHRDKDGHHGRAGLGLRRLSGRQRNYVRTNTWLLARQLTGLAMQHNAAIAIEHLYKLRRCKGQMSRKSRRKTNRIPYGFFRHALTHKSTQLGIPVLEVPAKYTSQTCPNCGHISRRNRRNWRYFRCVRCRFEANADRVASVNICRKAIQATYPVTKQGLVLPTGAPVSVPVRQDEEASWQPETPQSCKPTISIVGS

SEQ ID NO: 60039 - protein, 466 aa, Bacillus sp.
MEVDVIDQRILKRKSKGCLQRNDTRILFSKKVNRMIYNRKITLHLTEEQKWAFDGQSKKCNWLYNHLLDLCQKDYQSGNQKQLIKGRNLRDQVPIIKEDHPFLKTVHSSPLKNTALRLKDAYNGFFNHHRGFPKFRSWKKKWFSLYYDEPNKGFKLIDSITLRVSFGKNEDNRQIKHEVKMKEPFQLNNEKVKTLRITKDHQQYYAVFTLERLFVAPKKQQKTWIAFDPNHKNLMMGIDQDGRTFEFRNLSQLRFWDLVIDHLKSKRDRCEKKSRYMKTDHSAYWKPSRKWDRYNKALERAYHKRREQIKQVLYAIAHWTAKRYDEVIIGDYVPTPDLSIYQTMHRSMLNQTPVGKLRHTLEVQQKSGKYYQEVEEINTTKACCICGHLEKKKPDIRIFTCKQCGNTINRDINSSVNIAKKGNKSLPGSGYMDLKEPMYTVLWRFRQSKLIQQSTTQMNENKVVKI

SEQ ID NO: 60040 - protein, 386 aa, unknown
  TnpB Polypeptide
MITYKFRLYLKKAEEEKLEIAKEVCRQTYNHLLSELNGRYTKNEIQNYLLDLKVCYPEMNEIHSKVLQMENQRLFSNLSSLSKLKKKGHKVGRLRFKGKNWFKTFTYNQSGFKLIKTNKRYDLLHLSKIGYIPIKLHREVEGNIKNITIKKSNEKWYASITTDAIIKRECGTKEIGIDAGIMNYIYDSEGNAYENPKHFDKYHSELKTAQQSLSRKNKGSNSRKKARIKVAKIHEKIANARDDFIHKLSAKLIKENKFIAIEKLNIKNLMSISYNAKNIADASWGKLSCYLHYKAESAGCVVQDVDPAYTTMDCSFCGTRNNKLEISQRKFVCKKCNKEISRDYNSALNILARGKELASMEKASNTEQFVQQDASMKSEAISLNSK

SEQ ID NO: 60041 - protein, 489 aa, Streptomyces sp.
VFSVKRFQPQPGFVVQAYRFALDPNATQERALRSHCGAARAAYNWAVAWVTASWWQRKAEESYGVPEGQLTEWRSWSAYSMRKEFNRVKRTDPQFADWWDENSKEAYSSGLANAEAAFKSYSKSKRGERKGKRVGVPRFKSKRKARLSCRFTTGGFRIEHDGRHVVLPKMGRIRVHERANGLRDRIAAGTARILSATVRHERGRWLVSFQVEVKRPITRVARPDVAVGIDLGVKTLAVMADSTGEIRTVPNPKHYDEGANLLRLLSRRVSRRQGPDRRTGRKPSRRWEKANAERNRVHHRVANLRSDALHKLTTSVRAEYGTVVVEDLNVAGLLRNRRVARAIADAGFGEIRRQLTYKGQRNACRTVVANRWYPSSKTCSACGAVKAKLPLHVRAFTCDACGLVLDRDDNAARNLAALAADCTAGTGVAGDQDAASAVSKPRGADQKTRATTRSRKATGGRAGGATLPHQRQQETRDRRQDTEAQLALW

SEQ ID NO: 60042 - protein, 458 aa, unknown
  TnpB Polypeptide
VNNTWQQEDKHFDCTQTKNKRINCLRHVEIMPIFTMLVLLIGVMNGKRTRNLYLILTTQNCLPAFKKEWVEFAYMHSQSLQATVKRVDLAYGSFFQGLRGQPRFKSIRDYSGWAYPALSGWKVSSSGKHGSVILNDLGITLKMRGQFLQWGSPTTLTIVYKPGKNQWFASIAVDVPTVEAKLGSKSDNSYESIVIFDLGTETALTLYDGENFTELENPRFTKKSESKIKHKSKALRRKRGPNRKKKVKASRRWKKTRKQISNIQSRVADQRKDWQHKVTSDIASRHDIGVTEQLSTKNMVQKAKPGSKRKKQKAGLNKSILSVGFGSLNKMIAYKIEQKGGLILVLPTKKIKPSQRCPKCGKVHKHWAELSNRYHICDGCGFETPRDRGSVMVMYNVATHAQPGLGISLADCGCSGSTELTKKRKHTGSMKQLGQMKRQKPNRKVDEGLETPSACAVG

SEQ ID NO: 60043 - protein, 481 aa, unknown
  TnpB Polypeptide
VRLAERNLRAEQASLQARVRRIEARLEVPTGGKQGRMRGYATAAERHAKMLRLHALRARCAQAGRQAEAGSVSVTRGGRGLLRKRASLAAAGLTEARWRAQWEASRLFLTADGEKDKAFGNETIRWNPGERWLELKLPAPLAQLANRPHGRYRLSCPVEFSHRGDEITAQAATGAIRYDITFDPVRGRWYVDGSWKTAPGPAPALQKLRRHGVVAVDVNASHLAVAIVTADGNILGIPVTIPLDLGKLPAATRDGRLRAAISGLIAAARQHGARAIVIEDLDFAGARAEGREWYGNRPSRGKRGKAFRRVVTGIPTARFRDRLTQMTSNQGLAVIAVDPAYTSQWGARHWLAPLRQHHPETTGHHAAALVTGRRGLGYRARRRATGNQPAPEEAARPAQAPLRTFPASRPAPRKPANPRGPRQPPGAKTRTPHRTLAGDQAAQDRPGPPATQDHVLHARLGTVGSPLRNRPRLGMVAARWR

SEQ ID NO: 60044 - protein, 407 aa, unknown
  TnpB Polypeptide
MQLVERHVIKPADPRFAVIDQAAFASKNLYNAANYVVRQSFIHDGVYLDYHEMHRRMKDHEAYQALPAKVAQWVLRLLDKNWQSYFAARTAWEADPAKFLGHPKLPGYKDKRHGRNLLVYTTQALSVPALRQGVIAPSMLGISVRTRQQPHTVQQVRIIPRTGFYVVEVIYERELVQAKVDPALHAGVDIGLNNLATLTSDKPGFVPRIVNGRPVKSINQFYNKRRAEWQSLLGEAGDAHTSRRLERLTTTRTRRIDWYLHTASRRIIDLLVAEGIGTLCIGQNPLWKQQVNLGKRNNQNFVSVPHTRFIAMLTYKAALVGIQVHITEESYTSKASFLDADPLPVYGDAVIPAFSGRRVKRGLYRAADGRHINADVNGAYNIIRKVAPDAFAQGSRGCVVHPMRLAA

SEQ ID NO: 60045 - protein, 363 aa, Escherichia sp.
VKRLQAFKFQLRPGDQQECEMRRFAGACRFVFNRALALQNENHEAGNKYIPYGKMASWLVEWKNATETQWLKDSPSQPLQQSLKDLERAYKNFFRKRAAFPRFKKRGQNDAFRYPQGVKLDQENSRIFLPKLGWMRYRNSRQVTGVVKNVTVSQSCGKWYISIQTESEVSTPVHPSASMVGLDAGVAKLATLSDGTVFEPVNSFQKNQKTLARLQRQLSRKVKFSNNWQKQKRKIQRLHSRIAYIRRDYLHKVTTTVSKNHAMIVIEDLKVSNMSKSAAGTVSQPGRNVRAKSGLNRSILDQGWYEMRRQLEYKQLWRGGQVLAVPPALRVLWSYSERKSPVTKSIQMPGMWIYSERRCKRRS

SEQ ID NO: 60046 - protein, 251 aa, unknown
  TnpB Polypeptide
MPVRRVTFRLYPNKKQEQTLRYDRKLHKDLYNAAVCNRFTQYQKFNHRVDYFEQQNSLPAFKEVWTEYKECNSTTLQATLKRVDYAFNRWFKGLAKRPRYKSIKHYSGWTYPSKTGWKVHTTGDNGYLDLAKIGSIQMRGKARIWGTPTTCTLVYRNEKWYASITVNLTELQAATRQTDFGSVGIDFGCKSALAITDGENHSFIKAPKLLRKAEAKIKHLSKGKRRKTAPNRKKKQKGRVGGKRPKQKLAK

SEQ ID NO: 60047 - protein, 400 aa, Chloroflexi sp.
MEITRTTRIKIDLDLDVARRTVQAWTDACNFVSVVAFENGNLSNAARLHGLVYRDVRERFGLSAQVAASCIRQIASKYAALRTKKERPRKPVSFKSNGVMLQGGARGRDFSFTHQGLSVTTIDGRIRPVAYHGEPRLSDYLNNWRIGDARLFIRRGKVYLSVSFKCDAPDIERPNDAVIGVDRGINNLAVVTDGKRARFFGGGHTRHVRNRYSLVRASLQRKKTQTNSRSVRRVLNRLSGREARFTRDANHVISRRIVEFAEATGNPTIAIEHLASIRNGRLRKPQRTDLNRWAFYQLETFTRYKAEGRGFEVVEVEASGTSKGCSRCGYTAAHNRSRHDFTCRACGYSLHADLNAARNIRLRGILSRQALAQEGPSSTGPEARVSSETTGKLLASAGGS

SEQ ID NO: 60048 - protein, 384 aa, Microcoleaceae sp.
MAMLTMNYTYRIYPDATQADRLLEWLETCGGVYNYALRELKDWIASRKCMVDRCSLEREYIICASEPFPSYHRQQNNLPKAKKLIPRLGEVHSQVLQTTIRRLHDTWEAFQKRGLGFPRFKKFGQFKSFVFPQFKSSPIEGNFIKLPKIGAVTINLHRPIPDGFVVKQVRVLSKVRGTQWYVVVTIESSVSIPDTPVQGRAIGLDLGLERFLTASDGSFQERPKFFRSMQGKLKLLQRRAAKKKKRSKNWEKAQIEVARMHNRIANRRKDFHLKTAHKLCDQAQTIFAEDLNVKGLTRGMLRKDCVDAGFGQFLSLAEWVCWKRGVYFEKVNPNGTSQICPACFATVKKDLSVREHRCPECGYQTHRDHAAAEMVLSRGKRECK

SEQ ID NO: 60049 - protein, 402 aa, Actinomadura sp.
MAMRTAYKCRAYPDPVQAALFGRTFGCVRLVWNLTLAERHRAWQSEGKRTSYKQTDAALTGWKKTGELAFLSEVSSVPLQQALRHQHAAFANFFAGRARYPRFKTRNSRQSAHYTRSAFRMRKGELWMAKTTAPLAFVWSFDEVDLAALEPTMVVISREPDDRWYVTFAVDAQAPAPMDAAGHQIGVDLGVKDFAVTSDGDRIANPRHLEKKQRNLARYQRRMARKRPGSVNRSKAKAKVARAHRKVRNARADFLHRTSTSLVKKADVIVVEDLAVANMVRNRILARTISDCGWGEFRRQLEYKCERAGRTLVVIDRWYPSSKTCSHCGHLLAELSLSTQAWTCPGCRTRHDRDVNAAKNILAAGRAVAGGTPGDVCGADVRRQGSPLPQSAAKQKHPQREP

SEQ ID NO: 60050 - protein, 378 aa, unknown
  TnpB Polypeptide
MATRRQTFRLYPSKAQEKALLEARRLHCYLYNACVSHRETEYKLHRRTVTYLEQQNLLPEFKQVWVEFAQLNSQALQATVKRVDYAYQRFFRGLSRKPRFKSIRRYSGWTYPARSGWKVNSTGKHGTVTLNDLGITLKMRGQAKHWGVPTTLTIVYKPSRRQWFASFTVAVAIPEPKFGSQSDLRYESIVAYDLGTETALTLFDGAEFREITNPRFTQRSEEKIRRVARLKRRKRAPKKGVKASRRWKKIHRREAQLQAKVARQRRDWQHKVTSEIACRYGEALRAAVGERRNGEAACQRDDPQGWEAQGRAKQVYSVGGVRYIEPDDYLQNRAERWFSSHASHANPQALATLSPMWGSPQGVGGLEQPLSCLLGLWV

SEQ ID NO: 60051 - protein, 367 aa, unknown
  TnpB Polypeptide
VEKAYKYRIYPNKSQKIQIAKTFGCCRFVYNYYLAKRIELYEKNKETFSYVQCANDMKKLKSQLQWLKEVDSTALQSALRDLDMAYKKFFKEHTGYPKFRSKKTYRFSYKSKQVNGNVQYCGKYIKLPKLGMIKTKNKLVPQGRILNATVSQEPSGKYYISLCCTDVDIKPLKRTGNSVGLDLGIKEFCITSDGKMIENPKYLKKSLAKLVKLQRKLSRKPKGSSNRNKARIKIARQHEKIANQRKDFLQKLSTELIKENDIICIEDLQIKNMIKNHKLAKSIADVSWSEFVRQLEYKANWYDKQIVKVDKFFASSQICNVCGYINKETKNLGVRKWDCPCCNIHHNRDINAAINILNEGLRILDVA

SEQ ID NO: 60052 - protein, 511 aa, Lactobacillus sp.
  misc_feature (392)..(392): Xaa can be any naturally occurring amino acid
MLDIILKRKEGTNVLKGIKLRLYPNRTQQNQLEQMFGNDRFVWNQMLAMMNERYQNNKALPFLGKFKLNYLLKPLKKEYPFLKNSDSSSLQVVNEFLTQSWKNFFQDKTGQIGKPRFHSRKYLKKSYTGKSIIKTAGKRYLKIPKLGYVKTSKTGVLQNTKIKRYTVLLEPTGKYYLSLQVEISEPEKYSLTGKQVGIDVGVADLAILSNGLKYPSFNSSYFEKKAKIWQKKYSRRRHLAKLLVLQDRNKRVLCPRSLESFTNWQKAQKSKAKYQAKAANQRRDYLHKLTTHLVKQNDVIAIEDLKTKNLQKNHHLAKSIANASWRMFRQMLEYKCKWYGKKLIAVDPKNTSRICSKCGYNSGAKPLEIREWTCSKCQTKHDRDINAAVNIXLTTHLVKQYDVIAIEDLKTKNLQKNHNLAKSIANASWRMFRQMLEYKCEWYGKKLIAVDPKNTSRICSKCGYNSGAKPLEIREWTCSKCQTKHDRDINAAVNILHKATPTGQGLAMVTS

SEQ ID NO: 60053 - protein, 382 aa, unknown
  TnpB Polypeptide
MLAKKTIKAKILELRKDKEELLKREYENFQRYLHGDKSVPLYSATKQQAERLLRRIKKPKKGKEYPLILRRDVYRAETKLTKYWLKIPIYGVRGGINVPIRPHTPITPNMQTREAKIIKRKGEWFVHITVQAEVQEKNPTSILAIDLGIHNIATTVNSADEKPKFYGKKLRANRGHYFYLRRNLPNHKAIKKVGSHEKRIVNHELHKISKAIVEEATENNSVIVVGKLKGIRKNHKGRRFNRKLNSFPYYKLVSFIEYKASWQGIHVLKVSEAYTSQTCSRCGTRGFRRRGFFQCPHCGLNLNADWNGAKNILKRGIGELKRQSMLGAGLTQPRTSPTVSLSPIMREESPDFSHGECQYESTINECPPNNLSEPSIENNESI

SEQ ID NO: 60054 - protein, 313 aa, unknown
  TnpB Polypeptide
VQLILEGHPLQKPTNRPGKGAVGLDLGPSTVAIVPEVGPARLLLLAEELAPDARTRRRLQRHLERERRANNPQHYDAQGRIKKGQGQGRCVWRESHRYQQTRRRLARTERKLAAHRRSLHGRLANEIIRLGDDLRIEQVSYKGWQRCFGRSVGMRAPGRFVDAVKCVVARTRTAQLHEIPTHQTKLSQYCHACGTYTRKPLWQRFHRCLYCGLGSDGLIQRDLYSAWLASVLDPIRLTFPSRGQLSIHWQSMEACLSAALEETREHASAQGFLRRFGIPGVGACRPERVADPHQEPIASSEESEAVLVAQEPL

SEQ ID NO: 60055 - protein, 389 aa, Nostoc sp.
MEYKAVVKKPQAKAIDEAIRTSQFVRNKVLRYWIDNRGIGKKELYQYNTQLRAEYEFVRDLSSHACQASVENVERAIKRFYDNCKTKKQGLKGYPRFKKHSRSVEYKQQSWKLHPTKRRITFTDKKGIGELKLLGKWDIHTYPVELIKRVRIVRRADGYYVQFCVKVDNKQEAPLTNSVIGIDVGLEYFYSDSFGKHEENPRYLRKAEKDIKRVQRKIYKKKKGSSGRRKARGVYARKHLKVTRRRNEHAKKLARNLCLANAKVVLEDLNVSGLVRNHKLAKSISDASWYNFRQWLEYFGEKLGREIIAVPPHFTSQECSNCGARVQKSLSTRTHSCLHCGHVEQRDVNAAKVILGRANATGGHPGSNASRDVPSTSVGRKSSKSKERQ

SEQ ID NO: 60056 - protein, 446 aa, Nostoc sp.
MRLVERHIIKISHQFYKEVDELAWRSKNLYNYANYLVRQSFIKDSTYLNNVAVFHLVKKHESYTALPAKVSNQVLMVLHRNWKSFFESQKAYRQNPANFNGRPKLPKYKDKLKGRNIVIYELGAISKKGLNQFAIRNSQFAITFCDGDLDPDTKRAAYLAGDLNPQSSLKEGVIRLSKSAIELKTFVDDVKEVRLIPRCGQYIIEVVYELEETPQQLNPFLVAGIDIGLDNLAALTSNKLGFNPVLVNGRPLKSINQQYNKVKAKLQSHLKGNAKTSIRLNALTCKRNNRIDNYLHNASRWIINHLVGEKIGTLVIGKNHQWKQEINLGTKTNQNFVSIPHSRFIEQLQYKAELVGITVLINEESYTSASSFLDLDPIPVYKKGEKHTFSGKRIKRAWYRSSNGKLIHADINASLNITRKVVPATYSLGIEDIAVYPFRVTPGKVA

SEQ ID NO: 60057 - protein, 405 aa, Nostoc sp.
VYPVKELEFIWKKWVAAVRKVYNISIAYLNENQGFNKVGKKGGKMGFRTMLKGSGLIPQWCLDLNVSKILDNASMEAYKAWSETDKNPKTIGKGKDKKPHPQAGLKIAKFRSIRDQKLTIQFDPSAYKNGRWMVSTTKHLPQPEFKGQSFCILTDGSSELTYNKGRWFAHFPVELEQVVSVTNKVIALDPGVRTFMTGFDGSDFLEFANGDFNKIAKLCSHLDKLKSKHDLCVGHKFKRLRYKLRRTMERLRTRIKNLRSECHKQVGSYLAKNYDVIVLPTFETSQMVVKKKRKLKNKTARAMMTWAFYQFSQTLEHLCNRYGSKLVRITEEYTSKTCTKCGHVHRKLGSSKNFICPNCGYEIPRDFNGAVGIFLKAMWDTTFTDIVGDVVLDIQDISNVGKCLG

SEQ ID NO: 60058 - protein, 219 aa, Nostoc sp.
MMVIAELISVLAKGFNLPLVISHWSVQTRLIASVQWSLVNHKGAPPQLKIAKIKLSKQQWHNRNKQFGNRKKAIRASNKAKQYFGEIAKTHAHLANIRQDFLQKTTTDISRNYYRIRIEDLNISQMMANHKLSNAIANLGLYEFRRMLTYKQPFFGTRVELVDRWFPSSKTCCECGHIQSMPLSERVFVCEAGCGNIRDRDENASINLRDAPFDKIRLA

SEQ ID NO: 60059 - protein, 392 aa, Nostoc sp.
MFAIKRELKLNKVETSLMRGNAGFKRFVYNYGLELLTASWSFEDVKASDSKRIDAIKKVLTQVTMQKPEYAWMREYPSTVYQSAFIDLKDAFSKWRKGLGDFPKKKSKKKGDSFSVYKTAGIYLEKGKPALPFTNRVVINAGKIIKLPGLKELRLKERIDFICSSQTFTVSRTADRWFVAFVLDAEKIPPIIHPIKKIGVDLGVKVLATCSDGTFYDMPVTTKKAKIKLGKLQWRNRNKVLGNKKLKIKASNKAKRYYVRLATQHAHVANIRQDATQKMTTDISRKAAVIRIEDLNVSGMIANHKLASAVSNNCFYEIRRQLTYKQPFYATRVELVDRWYPSSKMCSKCHHIQPMGLSERVYRCGGCGNIQDRDENASINLRDAPLSKVGLA

SEQ ID NO: 60060 - protein, 416 aa, Nostoc sp.
VRTAYQYKLRPTTKQAIDIDRWLSMLCAQYNYLLADRFDWYERNRSPINACPLVCHIPELRDNPDYYSQKKTLPQLKKTHPWYGEIYSQVLQDIVKRVKVTFDRFLKGDSNGKRSGRPRFKSRDRYRTFTYPQMKDGCLQGNLITLPMFGIVKVLKHRPIPDGFKIKTASVTKKADGYYLTLSLEDTTVPNIKPDFNADSITGIDLGLKEFLTTSEGDVVSIPQHYRKSQKRLRAIQKRISRRKKGSNRRKKAIKQVAKQHKKVADKRKDFHFKTVNNLLKKYDVVVHEDLNVKGLSRSMLAKSVHDAGWSSFLSILSTKAENAGLLVIAVNPSGTSLDCSSCGVKVPKKLHERWHSCLCGCSLDRDHNAAIVIKNRAVGHPVLKAHRVSVRVASPPGEAIAGFGEKPTLYCTQSV

SEQ ID NO: 60061 - protein, 450 aa, Streptomyces sp.
VHPFVDRADVLFRRSDRQGGVVGETETERVKREDLGIGDRQKHHTRKATPLKAHAKAHDTHHRLYRFRFYPTAEQAEQLERTFGACRWVYNEGLALRSGAWERHRVNVGFAETCRALTGWKRKEETAWLRDVSSTVLQQSLRHLDQAYGRFFKGEARSPRRKKKGRSRDTATYVRTGFKWVEDPARPGTGLITLAKQSEPLDIRWSRALPAGEVPVRLSVTRDRAGRYFVSVLVEERIAPLPVVFVPGTREPKAVGVDVGLASLVILDDGTKFAHPRLLKRYAEKLARLQRDLHRKVRGSKNRQKVREKIARLYALISDVRRDMLNQLTARLVRENQVLVVEDLSVATLMSAVRGKGRRRKAKLNQAIVDASWGELLRQLRYKCEWYGRTLVVVDRFFPSTRRCSACHVMGPRMDVSVRQWTCAGCGILHDRDVNAAVNLRDEGLRLLAA

SEQ ID NO: 60062 - protein, 669 aa, Streptomyces sp.
VGRKLPLAKSQAPRTACAPGLLRTGVVEKSGEVLAPAALTERVSWAADLVSGMATALLAEHWNDVDVDVLASGQDAGGRSLPSNAWMALRRLGWTTGPPHGVRVNDRIVRMAQEQSGRTLRSAKWRADLIAAVLRTWPGDPGKRTAQEWDAMRAAVADGQLLPSNVVKSRTRQITTFARKNHRMPVNVFELEPPPRMARTLLLSACDGQQATIERTDSPGHAILRLQLPTRPDPSSHRDWVWVACPVLLPPTVPDSAVLHLPTLRIHQGRVRVDLAYTHAVPKAARSGHTIALGVDWGLNTLLSAGAARLCDDGRITAPGAGAQFRAAGVLAKQHRLRRLSEHLHAKADRYRQLACGDETHPLAAKLEAHSHEIGQVSSRRSNLNSALSWAAARWAVDQAVAAGASVIYIEDLRSMEASGMGRTMNTRFSQQVRGQIVDRLRHLAAEAGIAVVTVPARGTSRRCPQCLTPLRHRKAPDRPTVAGWKWAVCPDFECGWQGDRDQGAWRRIAARGLTHQARTVLVGSRRTMAIRSVVDSLDVRAVITPATATGQINRNDRSKTGPTRRRTTRPAPRRRRAPSPTGLTGPAGRRPEGHAHTDRIRPLRAAHRNQDVNAISTPALSHRPRGAALGAGFHLHAHATPPKWADPVPDDPPGRGFSMLTRDASRPL

SEQ ID NO: 60063 - protein, 372 aa, unknown
  TnpB Polypeptide
MRTVIKTYKFKLYKNKKNRHLDDGINIAASIWNYCIAMHRRYYRLYGKHLSANRLMKHITKVKKTLHPEWQSLGSQAIQDVVQRVDRSYKAFFDHVKQKRHGRKSPPSFKKRSRYSSFTLKQAGYAFHADNKVTIMEREYKYCKSRSMEGTIKTLTVKRNALGEIYLIVVTRQECNDILPRAGKAVGMDFGLKHFLNLDDGSVIDSPQWYKASLKELRAAHRAVSRCQKGSRNRRRAIRDLERVYQRISNRRRDWFFKLANQLVSEYAIICIEDLNLDGMKRLWGRKTSDLAFADFVAILEWMASNAGSTVVKIDRWAPSSKACHVCGTVNTALALKQRSWTCDCCHTALDRDTNAAVNIKRMGLTQLGIPA

SEQ ID NO: 60064 - protein, 308 aa, unknown
  TnpB Polypeptide
VSKVTAYKAFKFRLYPTKEQTEQINRTLGCCRYVYNHMLERRIKAYKRRQESFSYIKMQNLLPQMKEYLPWLAEADSQALKYTCRCLDNAYKGFFKNGKGFPNFKSKHNHNQSYTTTKGTSIHVSDKAVKLPCLGWVPYRKSRDVEGEICNATIRRSASGKYFISILCKIEVEPKPVIDTVIDLDVGLKSFTVDSNGCEYPNPKYLRKAEAKLRREQRRLSRKQKGSANREKQRIKVARCHEAVANCRSDMLHRLSTALVNENQIICVEDLNVKGMLRNHHLEKIFRMPPGLSSSGSWNTKQRGRDAR

SEQ ID NO: 60065 - protein, 399 aa, Scytonema sp.
MQMFSLTYEFKLKPTSEQIAIFTDWLEQCRRIYNYALGERKDWFKSRSCQINACSLRSEYIIPADTIRPTYAKQCKALTAYRKTSPRLQKVQSQVLQQTLRRLEQAFVSMWEQSHGFPRFKKPGTMRSFVFPQLSKDAIIGNTIKLPMIGWVKFRQSREIPASSKVAQARIVCRATGWYIMLTLQWDVTVPDIMPHGEGIGIDLGISHFAAVSNGKLFPNPRPFKKLERKLKLLQRSVSRKVKGSNNRKKAQFKVSKLHERIANVRAYYHWLYAHNLCDWAGMIFAEDLNLKGLARGFLGKHCLDAGWGQFFQILEQCCFKRGVFFLKVDSKKTSQICPNCLIETGKKDLSERTHSCQHCGYTTDRDVAAAQVVLIRGLAAVGHTGLACFPRVKRLRSP

SEQ ID NO: 60066 - protein, 377 aa, unknown
  TnpB Polypeptide
LSTSTQRIEEGFRVLTLQYPISEDIKEFIKEYRALASHFYWCKRLGLDPSKEVVNKLWERVPSYWRWHLVDPKDPIYLFKGVEKTPMPHRTILRLPLVDALHEKKGAYIRDSKLVLRLNRRVELEIPERALKWLEKRLAEKPDKKYVRVFERGGKLVVQIVLHKINRVEAPRDPLLVVVDVNSSYGVIVHFWDKRLIKTMKFRPPNRGNRWRRVRELMSHRDLLYNQGCLTQKQINVYSSLIRLTLKGSAKGWVQQTVAKIVKRIRRMAKRRGKEPMVLIDTPDYSSLHGTPLQRTLYRFVKYLENLLSWYGVYWEERRLYSTICPVCGGKLVVEEKTRRARIMKCTNCGFKEDRDNVPLYWAIKHLPALKGEASIC

SEQ ID NO: 60067 - protein, 441 aa, Nitrosococcus sp.
MNSRFTASKSNVSTKFDSGLFCFFASSTRVARSSALIRKLSTCLRIAVMYTSLYHVYMITQRAYKFRFYPTPTQKRQLALEFGHARFVWNWALETRTKAYQERGERLNNIGLSRQLTALKKAEYPWLSEATAGCHTQKLRDQDTAFKNFFAGRAKYPRFKRRHHTQSVRYQLDQRHVARNFNAESQRLRLPKLEALKLKWSRDIEGIPKMVTVSKDPAGHYFVSMACEVTIVPLPARRNALGVDVGVKDIAITSEGWKSGAPKYTDRYARQLKRAQRRLSKRQKGSGRRYQQRQRVARIHARIKDSRRDFLHQISSKLINENQVICLEDLHIKGMLRNRRLSKAIADCGLYELRRQIEYKAAWTGRDVLIVDRWAPTSKTCSACGTVQESMALKVRAWTCGCGASHDRDINAAKNVLFFGTAGSAGTSKAHGAVKPPRAVA

SEQ ID NO: 60068 - protein, 401 aa, Actinomadura sp.
VRRSFKFLLRPTGRQAGSLAAMLADHGTLYNAALQERRGAYAHCSQTRVRYGDQSAQLKEIRAFDPDGQGRWSFSSQQATLRRLNRAFEAFFRRVKAGDKPGYPRFRSRSRFDTVEFPKDGDGCRWDSVPHDRVTRVRLQGVGHVRVHQHRPIQGRVKTISIKREGCRWYVIVSCDDVPARSLPVTGRDIGIDLGVTRFLTASDGEHVPNPRHLRTAEDDLAAAQRALDVFPRRCRARDRSKTHRAAVRRVVRLHAKIRRQRLDHAHKTALHLVRSADRIAHEQLAITNMTRRPAPRPDGHGGYEPNGAAAKAGLNRSILDAGWGVFLGILTHKAECAGRELIPVIPANTSRTCPSCGHVAKENRDRERFACTACGHTGHADHVAALNIATRAGLALRAAA

SEQ ID NO: 60069 - protein, 400 aa, Prochloron sp.
MVKRAYKYRFYPDAKQEQLLRRTLGCARLVYNKALAARTEGWYERQERIGYAQTSSMLTSWKKQEELAFLNEVSAVALQQALRHLQTALTNFWSKHAKYPNFKKKRNGGSAEFTRSAFKWKNKQLKLAKCKQPLNIVWSRHFPDECVPSTVTVRLEPSGRWFISILVDDPTVKPLPPVDKKVGLDVGLTTLVTTSDGDKIGNPRQLKKKYQRLRAASKALSRKQLKSNNRAKARTKVAKIHAKIADTRKDYLHKLTTNIIRENQTIVVENLAVLNMIKNRSLARSISDAGWNELVRQLEYKSDWYGRELIKIDRFYPSSKQCGNCGFVIGKLPLSVREWECPQCKTIHDRDINAAKNILAAGLAVSVCGASIRPDRQGSKGQLRNPPGIIDGGGKKQKPK

SEQ ID NO: 60070 - protein, 421 aa, unknown
  TnpB Polypeptide
MEYGVGVSAKRQMMLITKAHKILLDTILEVGRQFVSWCGVARWAYNYGLERKKAAYNNSSQSPGSYILMKEIVALKKTDEYTWLKDTPKSIPRMALLQLETAYTNFFRRVKGGDAKPGFPRFKSRKRSRMCFQLEPDVITIKGNRVRVPKIGWLKMHQPIRFEGRLIGIICVSQTAGKWYASFSVETEVPNPIEKQEKVAVGLDVGVKTLATLSDGKTFDNPKAFYRLGKLLARAQRQITRKQKGSKRRQKAKLRAQRIHKRIADLRANATHHVSAYVAQTYDGVAIEDLNVSGMSQNHNLAKSVLDANFSELQRQLVYKITWAGGEVRQADRFFPSSKACSVCGLINDGLTLANREWTCECGAHHDRDMNAAMNLAIKCFGLMVGGPWTLRVKRSEAPGEASSEVFSQRSKKGDLLGLAI

SEQ ID NO: 60071 - protein, 376 aa, unknown
  TnpB Polypeptide
MIQTTIFRLYPTPIQEKMLSSIFRIYNRVKRIGYNLLFDLKDMDYTKTEIRKIIQPYLMNICQNNPYVNSILIHNEMKLEQQQTWNIKRVKYMKLQIETIQDKINQVKSKDKKDRRLKGLYGRLSSIQNKVNNLKLKPVVFGTKSLFRQRILGRITREEFLIRRDSSFFCIGKKQGINLNLKVLPNETLKIRTFSKVKSKKWLIIPFSVNQRQTKWFNKIFKVEKYTIAIKRRIVKGEIRYFAHVSYKLPELELNYNFSNGAIGLDFNYNFISLSNVDKDGNFKSYQELGFKNLHTLRKNKRNEYISYKMDKVVNYCINKKKGLVIEDLAFEQTFSYNKKSNRKLNNFKTTALTILERKCIKKVWQLEKFTLHILL

SEQ ID NO: 60072 - protein, 543 aa, Streptomyces sp.
VGGLREVAKPFVAPGPTGVAVRTRLKHLTPSDENVLRLVGAHLGALASRDLKRRCQAGLEHSTDTWAARKRELTPVSSSRWAGSITKASHDQWALARRGQLAHIQGLEAGIRTIVHRLSLPIGEKGSNQAPGGYRSRQEWFAKSRRLHVLEDRLEHERADREAGIVHVVRGGKQLARTRHHLDAAQLTEPQWRQYWEAARWFLAADGESGRQCGNETICVSPEGEVRIKLPAPLGHLANAPHGRYVLACHVTFPHRGTEWADRVEARRAVAYRIHYDTGRDRWYLTASWQIPPTRTIPMATALADGVIGVDTNADHLAAWSLDVHGNPTGAPRRFFYDLSGTRDHRDAQVRHALTRLLHWAKTCGVKAIAVEDLDFGGDKTREKHGRRKRFRQLISGLPTGSLRARLTSMADQMGIAIIAVDPAYTSRWGAEHWQKPLTSTTRKTTRHDAAAVAIGRRAQGHPIRRRTAPPHDDRSDRRGHRTVQARPVIPGREGTRRRIPGPRTRSVRAGCGANAEDQNAQDRPGRSTEHEFWQQDSLPLSL

SEQ ID NO: 60073 - protein, 396 aa, Clostridium sp.
MIKGIKVQLIPNNKQNTKLFQYAGAKRFAYNWTLAKQQENYKNGGKFIKDKDLRKKFTQLKKLDEYKWLNSVSNNVTKQAIKDCCIAYKRFFKGQGKYPRFKSKKHDEPKFYQDNIKIQFTATHVKVEGFSSSKKKNKQKLNWIKLCEKNRIPFGKNIKYINPRISFDGLNWFVSVGIEYKDNLELPTNKGIGIDLGIKDLAICSDMDKPYKNINKTKKVKQLKKRLKRQQRQISRKYDKLKQDKVYKKGERPKKTKNIVKLENKINKTHKKINGIRHNYLHQTTSEIMSRKPSYIVLEDLNVNGILKNKHLAKAIQEQCFYEFYRQIQYKCLWNNIKFIEADRFYPSSKTCSECGYVNKSLKLSDRTYVCPHCGCIIDRDFNASINLMKYGQSVA

SEQ ID NO: 60074 - protein, 522 aa, unknown
  TnpB Polypeptide
VLAKNQTYRAFVARPTCILDLNGELLDSAPVMAQLATEIRGISNYATYVVRNDIMLGDELAKITAAQPAEAGRRAGITMPDFLASGRTGRSRKERLVRYNVVASFRSWQERINAINGESDKYVSQGWKRTMNATPPSYSEGDFINLGAIDRNYALIENNPFTDGEITLKLVIRGAWYRLIFDFDNKRFTEGKVTLPLIKIEDNQPVFIFSVVTDNPVVQFSGDYVIGVDVGINDYATIAVRDSKTGKITHHTTLSQRVHSLWNSVKASEKQVRQLREKADSLSLYDRQGRMAARDEADLHRAAASRKKRELAILAAQEIAYLSHFFGNAVVAVEDLSWISNTMQNGRWNRGVLVQWLTHYVGQNGGWVVTVNSANTSQLCHKCGEEVTHPEHKVSRCSKHGDMDRDVNAAANIAARAVLKVEKACKKRSKNSKLQPQAPLKTPVARCSLKYPGRDRTKNAPTPKRKKKGVKTFSSPARAQVICLEASVLADCNTCSACVMGTSQAAINQYNKTYECRLYNLI

SEQ ID NO: 60075 - protein, 574 aa, unknown
  TnpB Polypeptide
MGQRFICEGEMVMARSKGVTISVKVPINWESMAERTRQRLRQTVGRDTRVIRAFLGIIEQNENKLLTGRQKNKIHDGNLDKLTITAIKVKPGYSQRLSVPHDFKVRFPRISQNEMSECRQTAVSLYESYLKLRTKKGWNASRPTSINGTRRIPRWVFSQRFKLIEKKTSVSCWWLDIRDALDSAPKSKFIHDRLSIPLKISPFHLNQIRRGEVKAVQIFTDRSRKWWVTIAVRISIDESPEDSHPVAILGIDLGIEKAACSTLLTPEKTRETHYFVQREKVKVIKKYDRLVADIQREMNTQRNNGLSSDRVAEKLRQMRSKRENVTREYDRVLVRHLLDYISELSKKYTLYVAIGRLKNIRMRAKRGNYHGRRFRGMIHSWAFARITESLKHGLAQQGWKVDGKDPRFRAVPEAWTSIMCWKCGNKGTRPQQNYFHCPSCGYSINADQNGSINIAARLLTLTKSLHSVRGLGLWTRAVVRGTTNQRARLKARKKKPSSKGKSLLSKKESSSGSGESAAVHFVQSDLVSFSDGTGESDNDPAVASTVETLSVTGSDVPAVQQEKEARTSGGIPSR

SEQ ID NO: 60076 - protein, 405 aa, Scytonema sp.
VYAFKRELKLNNKETSKMRGMAGFRRFVYNFGLEMLKASWSFEGIKASDSFRLNEIKKVFTNHVMTLPEYAWTRKYPSLIYQSAFQDLADAIARWRKGLAKFPVLASKKKGDKFTLYKANAVYPKKGEPALPFTNRVVIEPGRHINLPGYGIVKSKEKVDYYYSSQRFTVSRTADRWFVSSNIDAEHVPPIIHKVEKVGIDLGVATFATLSDNSTIVAPTTLKQAKTKLSKLQWRNRHKQLGSKKKGIRASNNAKKFSRELGRKHSKIANVRKDFLHKTTTKISKKYYQIRLEDLNVKGMMANHKLAEAVSNNGFYEFRRQLEYKQSHYGTKVEIVDRWFPSSKTCSECGHKQDMKLSERVFNCGGCQVSIPRDLNAAINLKNADNHLAAFKEKKSIKRSRGKDL

SEQ ID NO: 60077 - protein, 221 aa, unknown
  TnpB Polypeptide
MQSVPLCGRMELSWEESLLIFPVKKTGCTVYWDGYGDSRENMDLHRQRADGLMQKRLNIELGRKIAGAVTKYAKENHADIIVFEYLETKGKISGKKKQKLHLWRKRDIQKRCEHQVHRNGIRVSRICAWNTSRLAYDGTGTVARDPKNHSLCVFQTGKRYNCDLSASYNIGARYFIRELLKPLPVTERSLLEAKVPAVKRRTSCVYADLRKLSSEMNLRVA

SEQ ID NO: 60078 - protein, 332 aa, unknown
  TnpB Polypeptide
MKITSSYGVELRKQNIPIRQTLDVYRSAVSYLVEIYAQVWEELEGILEAKKRFNEAEHLIHTTKKNQARFDFDIRFQKMPSYLRRAAIQHALGSVSSYKTRLGLWEKTGQRESKPKLVYENHAMPVFYRDVMYREDKEGKDAAYLKLYDGHDWKWFHVRLRHTDMEYLRKNWSGKKASAPTLEKRHRKYFLRFSYTEDVILTKAPVEEQIICGVDLGINTDAVCTIMRSDGTVLGRKFIDFPSEKDRMYRVLGRIRRFQREHGSAQAKSRWAYAKTPEHRTGKEDCRSSHKICKREPCRYNCFRIPGDKRKDIREKETETASVEKTGYPEAL

SEQ ID NO: 60079 - protein, 396 aa, unknown
  TnpB Polypeptide
MLKGIKIKLYLNNDQQLTLNKLLGSYRFIYNKCLNLKITNYETDKKNTPLSDLGHFFHQDLRNEYEWLKEHNTKVLKQSIINLEQAYKNFFRGMKDKRKVGFPKYKSKHDVQKVRFPQEAIASKTFDEVNSKLNLTTIIRGLKFECSDRDKQYLYKNKSGIKSITIINNKCGQYYASILIDGDLLRTVNEPIRESIGVDLGIKTLLTLSNGETIDNPRWINSNEKKLKKLHKQLSKKQKGSNNRLKAKLKLAKAHNKIKNKKQDFLHNITTKIVSENQIIYLEDLNVIGMMKNHKLAKAIQELGLGEMVRQITYKAEWYGREVVFIERWFPSSKKCSCCGNIKKDLKLSDREYICENCALVIDRDENASINIKEEGIRIYNETIGQRLPESVPAME

SEQ ID NO: 60080 - protein, 396 aa, unknown
  TnpB Polypeptide
MIVYQYKLKCSKVQKTLLDEAIRTCQFLRNLALRYWIDHKGEKFNKYTLTKLTTEESLKANHKFALKLNSKAREQAVLRATNAILRFFKKQGKFPKFKKDVRSFTLTQSGWKLNNEFNHLTLTDKLGIGKMKLVGKRNLHFYTKEQIKQITVIKRADGYYVLFCIDIERKEDVGYTGKEIAVDLGLEYMYTDSEGVHKENPRFFKKSEVTLKRLQKDVSRKKKGSSNRRKAKIKLQRKHLKVQRQREDFVVKTARQLYLSNDTVFLEDLSVTKMIQKNKFKSIRKSISTICWGKFKDWLKRYSEIFNKKLILVNPRNTSQLCSCCGLMVAKNLNVRVHSCSSCGFEAHRDHNAALNILKIGQGMPESATLKGCEKPKESPTSDLKLISSSQVCSVI

SEQ ID NO: 60081 - protein, 234 aa, Streptomyces sp.
VDQGDEQLHQGIGDLRLPGRAQRGQQRRPYVLARVPEVRWVHPDRPHPPCGHQLLRAVREQPLRQRTGAKARLEVARAHARVADARREFHHQLSTRLICENQAIAVEDLSVAGLARTKLAKSAHDAGWSSFISMLEYEAERYGRTLVKIGRFEPTSQTCSTCGVKDGPKPLNVREWTCTACGTVHDRDTNAALNVKTAAGLAVSACGAPVRPGAIPAQREETGSHGFPTGNRAA

SEQ ID NO: 60082 - protein, 460 aa, Nonomuraea sp.
MRVVQAYHFALDPTTRQVAVLASHCGAVRVAFNWGLAQVRANLAQREAERSYGIPEDRLTPALSWSMYSLRKRWNHVKGEVAPWWAGNSKEAYACGLARLADALSNWRESRQGTRKGPKVGFPRFKTKRRAARSVRFTTGAIRLDGHTHVVLPVLGRIKTHEPVGKLARLLTEGARIASATVRWQEGRWHVSFTVHTERAVATPARPDAVIGVDLGIKTLAVFSDGRPPAANPRHLTTATRKLRRLSRAVSRKHGPDRRTGQKPSQRWLRANAARNRAEHRVAALRRDGIHKLTTALARTYGTIVVEDLNVAGMLRNRRLAKAISDAGFGEIRRQLAYKTGWNGGRLVVAGRWFPSSKTCSSCGAVKAKLPLRMRTYVCEGCGLSMDRDENAARNLASLVKRTVAGSGPETRNGRGADLKTPPGGAGGRETSTPHRAPTARIRRGPSPAPGESLRILETQ

SEQ ID NO: 60083 - protein, 332 aa, unknown
  TnpB Polypeptide
VLRTYVRNDQYTIEFGKRSRLEVPIGSELKDELGLNRNQRLRVEVAGDPKWSGEQGRLELVYDELADTFRAFQPVTVDDSRLDSPLASEEAALDVGANNLVACTTTTGQQYLYEGRDLFEEFREVTEQIAYYQSLLENQRKSSKRIDRLYRKRTNRRNHAQDSLVRDLVERLYDEGVSTLYVGDIKGVLSTHWSPVVNEKTHNFWAFRRFIERLEDVCEEYGISVEEASEAWTSQECRECGEREETVRHEDSLVCPCGFEGHADLVASESFLRRQTVEMRPMARPVYLKWNNHDWREDHSPPSLVETTANEEYTDQSTALGGKVASVEAQDD

SEQ ID NO: 60084 - protein, 340 aa, Escherichia sp.
MLRATKVRIYPTPEQAEFRWLKEYDSIALQQAVINLDVAFSNFFNPKLKAGKPTFKSKHGRQSSYHCVGIKVLDGAIKIPKILPIEARLHREITGMLKSITLSRSATGKYYASLLCDDRMEAPAKPALISNVTGLDMGLAHFVIKSDGNKIASPRHLINASRNLRRKQKALSRKKKGSANRRKARIQLAAVHERVASARADFQHKLSRAIVDENQAVIVETLKTANMMKNHHLARAIGDAGWSGFITKLEYKATEKGVHLVKLDQWFASSKTCHCCGHKMSEMPLHKRIWQCPECGVEHDRDINAALNIKRKGILELQAAGLVVSAHGGQRKSVTQTVAA

SEQ ID NO: 60085 - protein, 397 aa, Synechococcus sp.
LQVRYRYRLYPTPGQKQALARQFGCCPVVWKDALALSQSIYQEGRKYPDGGELQKCCITQAKRTEERSCLSEVSASVLQQSVRDLDKAFRFWWESKGKVRAPRFKKRSTAQSARICGRDFRTTDRDVHFQKVGELKLHRSRPLPSPPSSCTIIKDCPGRCFASFVVDLEDRDLSPVFGQNIGIDLGLASLTVTSDGEKIAPPKFLRAALKPLRRLQRNLKHKQRGSNRLALARLRVAKLHAKVADRRLDFLHKPSTRLIHENQAVCIEDLNVSGMVKNPKLSRAIADAGWRTFRILLEYKADLYGRALKVVSRREPTSQVCSACGHRDGKKPLSVRAWTCPACGAEHDREVNAARNILAAGLAARLNGRGAKSKTSLLAAGCETSTRLNQEGPLCPA

SEQ ID NO: 60086 - protein, 404 aa, unknown
  TnpB Polypeptide
MLVKGAVFYLDTGLPTKAKFLLEDFRLAVNNAIRAGLQARVTSRNALVKIAYKDFRQDHPLMYSLHLVSAFGVACGILKNYRKRDRKGANCRIPYVKRPFMKAENQAYKLDRKSGVVDLPIRAGCHVELKLVVSQYHRKYLDDMTLSLGSLTVLPDRVIVAFRKDAPKPYAPNSLISLDTNEQSLDGVFAEGGVAKAIKAEFPDIAIIQQRHHDRRKRLQKKKAHDRRISRNLCRREGSREHRRIDYRLHQVANSVLKFAEERRSAIVLEDLRGFKSKRSKELNRRLSMWPRGKLHQIIEYKAQWSGIPVFKVDPRNSSRTCPICGRIHDSRMGAEFVCECGWRLDRHINASINLLQTAISKGMAGGLRFNPGAFQHDVMMILYDPVTGARSEPNGTSGIAGVT

SEQ ID NO: 60087 - protein, 501 aa, unknown
  TnpB Polypeptide
MGMPPQTTTNETRKPLRRAVAVELEVAKELNRLLYSVETAYLNIVREVVEYAVENNVTGASQLHGLFYRKYRLEYPGLHSHLIIQAIKQASEIAKSFIARRRMGLVSKPYPEIKAVSIRFDETTWNYEQLVKSIAPVRLELSLLGGRREVWLRPHKRFWLYWWKVLSGEARLASTLVVKRMANKWYAVFIFEIKPRQELPQSVMAFDINENTVAVSKVDLQSTADKVTDWNRQYIMPQLYMIRTDFGKLARRYEKIRNTIIERLKQSFTLPSGKYVNITNTREYKKFVRRLREDNRKLGRVRQIVNELTKVPTLIITEELGKAPQQSMINEIKRSETRHRVSQVPFKSIEKTVEDKALERGSKLVRVSSYRNSKTCPVHFVRLKSTNDWHVLYCPKGHYMHRDYTSILNMLWKVTPEGWVKGVWWDLRRKMNWREYEDRHNPVIPQNIVQYIHAVLKSFVASEQSPAMLARGSPMNPAGGANEGRAREKASLQAVRFTMAK

SEQ ID NO: 60088 - protein, 381 aa, unknown
  TnpB Polypeptide
MLEQIYSDCKKQIEVYIDQIISGKLELKKMPSSRLLSNEYIEQSKWKEMCYQQMTGMIGSQYKRASNKRFNSYKKVYAKLKEQNRYNKFTSKKFSELNLKPIYQTKYFTKPKLTGVNIIVHKDLFNFASDSKNFDSFVRLTTPYKKSAGRYKTINLPIKYHSHSNKFRTSGWKLKNSISLIKVNNNFYIDLLWEKEVPKKIEGESIGLDCGYKKLLISSENKIYDLGMEKIYNKLNRKKQGSKNFKQALTERDNLINQSINKIETENIKTIVVEDLKNVKLGSKFSKKFNNKLQRWSYPKVLNKLSMICEEQGINLVRVDPSYTSQTCSKCGHKDKKNRSGERFLCLSCGMEMDADYNASINILHRGIYSSSTDKANLKVS

SEQ ID NO: 60089 - protein, 406 aa, unknown
  TnpB Polypeptide
MIRTSKHILKFANKNKLDMLEQIYSDCKKQIEVYIDQIVSDKLELKKMMSSKLLSNEYIEQSKWKQMCYEQTSEIIRSQYKKASNKRFNVYKKIYAKLKEQNRYNKFISKKFSELNLKPIQTTKYLTKPKLNNISIIIHPELLNFTSDSNNFDSFVRLTAPYKKKTNKIRNHYQTINLPIKYHSQSNKFRTSGWKLKNSISLIKVNNNFYFDLFWEKEEVVKKVKGKQIGLDCGYKKLLISSDNKIYDLGLEKIYEKLSRKKQGSKNFKQALTERDNLINQSINKLETEEIKIIVVEDLKNVKAGSKFSKKFNNKLQRWSYPKVLNKLSMICEEQGINLVRVDPAYTSQTCSGCGFKDKDNRKAEKFLCLGCGYETDSDYNASVNILHRGIYSSSTENNKANLKVS

SEQ ID NO: 60090 - protein, 365 aa, unknown
  TnpB Polypeptide
MKKLSLLSYGEIRKRYGGFSGYSFCAISKAAGILSARRKSINRGFRTKNPYISRPLLVSCYGFKIENGNLIIHLGAETLESVPLNSHTKALLLDSALRVRSFTLTENSLSLCVSKDVEEMKEQELLGTMGIDRNLRNLAAGNAQIVTCYDMADAVEIGENTRSIIRSFKRPDVRVRRKIASKYGKRRSERTRQLLNLISKGVVRDAKARKEVIVFEDILGIRKLYRIGNGQGRQFRGRMNSWPFRELKRQIEYKPAWEGVPSITLTKGETRGTTMDCPRCGERLQVPIRGDEDHYRQLWCECCKRWRDRDIIAVLNISRRGWLRFDHSSKEGGAREAVRGNPGREEEPVILRVDASKLRHAKKTQ

SEQ ID NO: 60091 - protein, 342 aa, unknown
  TnpB Polypeptide
MIRTYRYRIKDSSAAPQLNQLARSCNLVWNFCNESQDHALRWNQRWPTYQDLCKLTTGSSKELGLHLQTVQAVCEQYDTRRKQFKKRRLRWRGKRSPGWVPFKASGIKVIDDTVRYAGQTFRFWKSRELPGPVKCGNFAQEARGRWYVSFVVDVPDEAPTTGTKQVGIDPGLKTLATCSDGRKIEAPRGYRRQQNRIAEAQRKRRSRQARNLQAKIANRRKDFLHKESDRLTKECELIVVGDVCSSNLAKTNLAKSVNDTGWAMFKNLLSYKAMARKVVYREVSERFSTQTCSCCGSIGGPKGREGLGVREWVCGECGTRHDRNTNAALNILRLGHQSLALK

SEQ ID NO: 60092 - protein, 352 aa, unknown
  TnpB Polypeptide
LRRLSWRWPSKARFQRWAKGRYPGLSAQATQQIIGEFIEAVDATRQLRKNGYAEARYPWKRPRYRDVVYTNQDARIKGKRLVLPNGKSGTLRIPLPDERSLPGRLMEVRLCLGRVLLVCEVPDESRHQKTVVGVDLGVNTLLAATDGTTAVLVSGREAKATVQWRNKRLASASQKQSDMVKGSSRWRRVQRRKKRMLDKSRRRMNDLVHKATRQIANAFPDATCYVGEPFNDAAQKMRPRQAQQVSQVAHRKVTGQLDYKTSGAIQVDEAYSSQTCPVCGTRQKCRRVYRCRTCGIVAPRDHIGATNILCIGRTGAMQIDQPIATEVVYTHPVKVSRHQPSSSGGHPAHSSA

SEQ ID NO: 60093 - protein, 468 aa, unknown
  TnpB Polypeptide
VRRHGVSGKLRPIAAPFVAAAPAGTRVRARLRVSAEDAAVLRAAGSHLGSLAGRDLRTRCREGRLDAKGRAASRRERKRQLTALSSSRWAGSITRTTEDQVRLAERNLGAERATLRSRIKTIEARLPIPAGGRAGRAQGYATPAGRYGKQVRLQVLKARLHRVDQQLSAGRVPVVRGGKRLLGTRRRLAEAGLTEARWRERWEAERLFLTADGEKDKHLGNETIRWHPGGQWLEVKLPAPLGHLANRPHGRYRLSCPVEFSYRGDEAAAQAESGAIRYDIMFDPVKDRWYLDASWKTAQPPAVPLEELRERPVLAVDLNHGHLAAWAVTPDGNAQGGPVTVPLMLAGLPRSQRDGRMRAAISTLIRLARQHGCPAIAVEDLDFADARAQGRERAGRHPSRGRRGRGFRRVVAGLPTARFRDRLAQMTHNAGLSVIAADPAYTGGGPSTGSPRCGNKTRSPQAIMRRRW

SEQ ID NO: 60094 - protein, 352 aa, Moorea sp.
VKTPTKIIRTDKWRLNPRAEQRLLFTETVTVYRRACRYLVGIIYTHWHELGCLTADQLTPAVEHLMHQTAKRPNIKYPQFNKTFYKFPSYYRRAAIRQSRRFANAFAAGQVSSFVTRYREWQSGNRKRKDSKPPKLNADTGCYPALYKGQCYKLHGFDQVEVKVFNGSDWVWTTVQITGLRERHQVVTNKMMSPSLIFNERYCHLSVPFACQPEKRKPEANVTAVDLGINTTATLAVVTHGGTVIHREFIHPRRDIDRRDKRLKSVSVRASKTMGKGGKLHKGFCSKTYQKCQRINNQIGHIVSKRIVEIAEKFNSVRVAWPTALAIVFENLKAWFEVTVRIVEPLQLAGYA

SEQ ID NO: 60095 - protein, 349 aa, Tolypothrix sp.
MIYNHCIALHKRYYRIWDKHLNCAKLQAHIAKLRKRNQFWQSVGSQAVQDICQRIEKAYQLFFKYNQKGVRPPGFKKVKKYKSFTLKQAGYKFVGSNRVKIGSRIYQFWKSREIEGTVKTLTIKRTPLGELFMVIVVDDGRNLEVEVKTGRIAGFDFGLKTFLTCSDGTKIESPQFFKQSLNAIKKASRQHSKKLKGSSNRERASQNLVRKYEDISNRRRDWFWKLAHELTDKFDILCFETLNLKGMQRLWGRKISDLAFGEFLQILEWVAKKKNKLVVFIYQWYPSSKTCSCCGHILEKIDLSIREWRCPFCQSVNGRDENASRNICAVGASTVGLGDVSRYETAIAV

SEQ ID NO: 60096 - protein, 241 aa, Clostridium sp.
VIKAIKIRLKPTNEQEVLMFKSIGCARFAYNWGLSKWDEIYKQGGKPSKAKIRAEFNNTIKNDSNYVWLKEVSAQVTQHAFEDLDNAYNNFFKVLSKYPKFKTKNIIKLEKQIKLIHRKLNNIRLNHIHQATNMIAKLHPYRVIMENLNISGMMKNKYLSESIQEQKFYEFIRQIKYKCEFNGIEFVTANRFYPSSKICSCCGSKKEDLRLKDRIYVCDKCGLEIDRDKNASINLGNYKIA

SEQ ID NO: 60097 - protein, 479 aa, Bifidobacterium sp.
MSQKVVIERVRLRGAAPYLGMCKIDDGGYAPFYSENPDVVMDWLCDAWRCRYNQLRSRRQKWDREKEGLVPVGRDTDMRTDRQVREECSWLAAVPAMVLQSPNRIENTDWWAANKRRKTLKKKGQNPGSMPRFKEKHGKRMFVCWYNNGANARYRQLNKHHGEVVITGQNPGKYKLDGQPCRWELHIRVRVSQRIRAYTSVGVHWDDRTLVFINEPLPVERRVTGAMVGIDRGVKHTLALSDGTFQDLPHKRLKKIDKRIRSLQKSQARRVNMSGKTMKEYRKNPSKTYKRVQKEIGILHRKAHNIINDWQQKTTTRLVRDYDIISMENLQLSDMTKKAKKKEDPNNPKRYLPNGQAAKRGLNRSMRAASLGGISQKLEYKTQLSMTNRLVLINPAYTSQTCSECHYCAKENRKSQADFQCEQCGMSMNADVNAAINILQRGYEHLLGVDDAQRVITEQDTRPANRGKSASARTRKTPT

SEQ ID NO: 60098 - protein, 382 aa, unknown
  TnpB Polypeptide
MEAFRQMVNDSIRFGLKKNVSTMKQLSQLAYRQLANYDMMSYYKLCAISHAAGILANRKKSLQRGHKLRQPYARQPLLISCYGFKVVDGILKVPVGDGQYFDIPLNNYVRAVLSNPSLNVRSFTLTANNSVSICYMKEATQVECTNIDGIDRNLNNVTIGNIERIVQYDLSKAVTITENTRSIIKSFKRNDIRVRKNLYSKYGKRRKNRINQLLHHVSKAVVQHGKENRSAIAFEDIRHIRKLYQHGNHQGRVYRGRLNSWSFAEIKKQIEYKAKWEGLPIIQLSVKDTRNTSKLCPRCGKKITQVDRKTRQLWCDQCKRWMDRDIVAAMNLSNRGRSWFERSQGFAKETMKGNMEKEPLILRVDAGKLTFRLRSKQNLSTK

SEQ ID NO: 60099 - protein, 552 aa, unknown
  TnpB Polypeptide
MVLDLRSVLGVTETDKTWYPPDSPPYTSETAALHLFVTCYGPGERSYMPVARRSRKFSYVDHKVYSALKTALGKTSAEDPPARKRRAKAKGPKEEEDEMHKESISLGNSMGLTPSEFNEKRRDLRAVLQRRATERKRKHPNSPSARRLQKKRMRLGSGMMNRHAIIQSMETDGVGARLCVRTPIDIRPYVKAVEVVQPSEDLPSSSVSKGARSTRKRSRKEKSDERDREKEAAVLKARLESPPPITVGFDAGRKKLFVGAVCRDVIKKPETVTFTRARYYAEMGYWRHQTWSKARTSNSTVARALADVSVSGGYRNCDLDTWRSSLEAERRHEKVLDEEFVVSPDYALWKMRLHRKKRSSLDRNTGHVIRLATHGQSPERLLLLGMGDAKFSSSGKGEQSAPTSAVTEAFRRSMKKEMLRNPKRQILMENVSEFRTTLCCCACGSVTTKARVRSYSIDGGWENRESRRLRLCTTCEETGGKRRDRDVQGARNMLWILQHEYYGGRENRPWYMTRKGCCGNVASTCIRPMTSKAKRHAGAFSTSDRESAVKKG

SEQ ID NO: 60100 - protein, 459 aa, Moorea sp.
MYKTIPVKATFSDEENAFWLFQCEQANSLINCAVYYSKQKHYSWLKQQPEAFTTYWRGDELRYGWKTYKCALKYAELCNSLKDNPHYKAMAAQSAQQTLKTVAESITSYNQLVSLYYKGQVDRPKLLRYRKKGGLAAVTFPRQALNYKNGLFYPSISKESRPELLTEIALEPPGFIDPDWVKQVTIRPYLGQLWIDWVIDDGKQPVENNPNLDYFQAWSFDHGGDNWLTGVSTHGRSLIIDGRKLKSLNQAYARLVAKYKAGKPELYWDSNLDRVQRRRNNQIRDAINKAARFIINRCLSDCVGNLVIGWNEGQKDSSSMGKRGNQNFVVIPTKRLIERLKQLCPEYGIKLTITEEAYTSKASYLDSDSLPRHGEKPKGWKPSGKRVRRGLYKTSNGWLINADCNGAANIARKVATQLGLDLTKVGRGALTLPHRYDLFNSMKRSYRTRSYKARFQPAL

SEQ ID NO: 60101 - protein, 369 aa, unknown
  TnpB Polypeptide
MERAIKTRIYPTEEQKNLINQTFGCYRFVYNKALEKQIERHAQEKNFVGKYEMCRWITEIKQVYDWLYEVDSRALQLSTAHLESAYKKFFKGAGFPKFKNKRGKQSYTTDSAIRVEPHYARVPKVGLIRTYERLDENIKPNSITISMQAGLYFASIQYDDGKKPAEPNNGAKIGVDLGVKDLATFSDGTVILNPKYLKKHEEKIKRLQRKLAQQRKGSNRRTKTKQKLARTFLKVSDSRKDYLHKATTMITKSYGYVAIENLNVSGMIKNHKLAKAISDCGFYEFRRQLEYKAVWYGSKIAVIGTFEPSSKTCSNCGWLKKDLILADRIWVCANCNTKHERDVNAAKNILNFSIAPVGSGEVDVKKPSS

SEQ ID NO: 60102 - protein, 411 aa, unknown
  TnpB Polypeptide
MSRYRLHPTPAQQKALLGHCAHARYVWNLAVEQRSWWQPSRRAPGFAEQCRQLTEARAAVPWLAAGSVIVQQQALRDFHAAYASWFAARAEWRTRTVKLPPEKRSAAPSPPGWRKRDVNEGFRVVAVGPRDVRRLNRRWGEVLVPKLGWVRFRWSRPTPAAKSYRITRDRAGRWHVAFAAVPRTIPAPGNGEVVGVDRGVRVSAALSTGELLKTPALRPTERRRLRLLERRKARQRKGSRRRERTKLAVARLKARETDRRRDWTEKVSTDLARRFDLICVENLDVWAMTRTARGTVERPGRNVRQKAGLNRGILANGWGKLVGRLEQKAPRRVQQVAAAYTSQRCSACGHVAAESRQSQTAFCCVACAWAGNADYNAARNIAAAGQVVAARGGQGSPGPVNREPPTLGAVA

SEQ ID NO: 60103 - protein, 404 aa, unknown
  TnpB Polypeptide
MRVKGVVFYLESDLPSEAKFLLEDFRLAVNNSIRAGLQARVTSRNALCKIAYKEFRQYHPRMYSQHLVSAFEMAGSVLKNHRKRVRKGVTCRIPYVKRLMMKAENQAYKLDRTSGIIDLPIMAGCHVKLRLVVSQYHRKYLDDMALSLGSLTVLPDRVIVAFRKNAPQQFVPASALSLDTNERSLDGVFVEGDGAKAIKADFPEVAIIQQRHHDRRKRLQKKKANDRRISKRLCRREGAREHHRIDYRLHQVANSVLKFAEERRSAIVLEDLKGFKSKRSKELNRRLSLWPRRKLHQIIEYKAQWKGIPVVKVDPRYSSRTCPICRKIQYSRMGAKFKCVCGWHMDRHINASINLLQTAISKGMAGGLRFNPGAFQHDVMMILYEPAMAARSEPNGTSGIVGVT

SEQ ID NO: 60104 - protein, 379 aa, Absiella sp.
MGQMTVTAKIQISVSDDEKTLLDNTMFAYRDACNYVSNYVSQTHDLKQFSLNKALYSTIRERFGLKSQMTQSVFKAVIARYKTILENQKEWIKPCFKKPQYDLVWNRDYSLTQNCFSVNTLYGRVKLSYFAQGMDKYFDHTIYKFGTAKLVNKHGKYYLHIPVTYDVEETSLSDICNVVGIDRGINFVVATYDSKYKSKFVRGKEIKQKRANYSKLRKELQMRHTSSSRRRIKAIDQRENRWMQDINHQVSKALVEKNPKHTLFVLEDLSGVRNATERVRMKDRYVSVSWSFYDLEQKLIYKAKQNQSTVIKVDPHYTSQCCPVCGHIEKANRNKKKHLFTCKNCGYQSNDDRIGAMNLYRMGINYLVDSQVPNTVVVE

SEQ ID NO: 60105 - protein, 381 aa, unknown
  TnpB Polypeptide
MTLVKKGIKIRLYPTEEQKTLIDKTFGCVRFVYNQTLADCKQSYEQSKSFPSRNSRIKNLVLFKERHAFLKEVSAVALQQSVRDFNSALDNFFKNKNHFGFPKFKFKRWCKQSYRVPYNSSNATIVDNRHIKLPKLGKIKTKHFDIPMSYKIFNITVEKTVTDKYYASICIETEVQPLLKTGQQIGFDLGLIDLLIGSDGTKVERPKFNYLDKDKLAKEQRKLSKMRTKLERAKLNLDECKNYQKQKHRVAKLHEHIANKAKDFNHKLSRKLVEDYDFIAVENVNVNGLLKNHKLAYSISDVRWSQLLNFIRYKCLWYGKEFKQVDRFYASSKICSCCGTYHKDIVNSLLVREWICPDCGAYHDRDVNAAINILNKALSVA

SEQ ID NO: 60106 - protein, 596 aa, Rhizobium sp.
MSRAERLLLAQLKAGRSWTGDLKVSFYQPLGISSVHLDMAYRQQVAKLASVSELAKEHAKDLAQKVASKKTDIKRKTLALARAKKARVKLAEELAAVSAKVEKRRSSMMIATEKHRADELFALKQLLTKHHARTAELDSVTVEIQGLRFALHQHQRRLGILVTKHETARDQAVDPTLCFGSKKLFREQFDLQGNGFTDHAEWLCAWKAARSAQFTLDGNSRKEGGNQFARLRPRGNGRFDLELRLPRALAHLATRTFKVTGQTIACVDFRGLSFNHGNDVIQEALATRKPVTVKFVRDAKSWKVAVSIDHALDWKTPDFSAGALGVDLNAGHVSAALVDRDGNPVEVFNFPCVTYGKTSDQAQDAIRKVAAQIVALAERLGVPVVCEQLDFSEKKRTLKDAKDARYARMLSSFAFSAFGKALGSACARQGVALRRANPAYTSIIGRVKFARRYGLSVHEAASVTIARRAMGYSERLPRSSGGTVKVPTNGCDHVTLDLPVRKDASELAPKSRHVWSRWNGLNKEYQKALAALGSSRRRPRPKRGKSQAWGRQLSQAGGGTLAGGAENRSMVLRKRQDVSAESRFSHVARGGQRAGK

SEQ ID NO: 60107 - protein, 423 aa, Acidimicrobiaceae sp.
  misc_feature (354)..(361): Xaa can be any naturally occurring amino acid
MEYGMCVTRRADTDHVPSPATTSVVVTRAYAYALDPTPEQTALLRSHVGGSRFAYNALLGLVKENWDENRAKKEAGVEVTNDDYIDTGHFGLLYLWAHHRPELAPWWAENGSSTYNDAAQRLSKAFTNFRKGRAKFPHFKRKGQGGSVRFMGPAVRLADSHHVRIARIGEVKTYESTRKLYRHLNRGTGKVLAATVTERSGRWTVSFTVEVTRQVPVTREPERVIGVDVGITTLYTGATPDGTRVLNVENPRHFVTAEKKLAHAQRIASRRQGPEKGVAASNRWEKANGRVQNIHTGIANARKNLIHETTTMLAKNYDVIVVEDLNVAGMVQNHSLAKHIEDAAWAEFARQLEXXXXXXXXCGACGLVLGRDHNAAINLARQGLPGTSSGTGRGGEVSPAQQNLVATAHPDEASTETPPVVGA

SEQ ID NO: 60108 - protein, 359 aa, unknown
  TnpB Polypeptide
MRRTIKFSIKSANTNKLKKLAQLRRVYLDAVNYYIKRLAKESLYILNNKEVQKLNSELSYSFKQCAYRQAEKIWKSWRRGYKRNSSLPKFKGSLILDQRFVKFEKSKNSFDYWVKISTLEKNKRVSIPLNTYGYANNYFQDWELVNGCRLKKVGDDWTLYLTFEKETPAIKEEGREIGIDIGIKKLMTTSDRRYYGRKIEGLMDKIQRKEQKSKAFYRALKERNEYINHTAKQLPYQRLKTIVVENIKDIFRNSKKDRKLGRQQRSKFQRWCYSHLFERLKQLAEATGVHLLSVSPIHTSQRCSECDFVHSLNRKGEDFFCRKCGYKADGDWNASKNILQIYLAQEHTLPWKQKRVTIS

SEQ ID NO: 60109 - protein, 320 aa, Bacillus sp.
VSNLKVDSIGGTEQTFNNVNKTLILAKRVRLRPTIEQEIQLWKSVGTARWAYNWTLSKQEESYKNSGKFISDGLLRKELTGLKQTEEFSWIYEVSNNITKQAIKDLCNACEKFLKGLADKPRFKSKRKSKPSFYNDNVKLKVKGKKVLIEKVGWVVVSERISDKKYYNLRISNDGKYWYLSVGVKKSKPIVKLTNVSPGIDVGIKDLAVCSDGTKKKNINKTITVKKAEKSLRRLQSQISRKYEMNKEGNRFVKTGNIIKIEKKIQHLYRRLTNIRLNHLHQSKSEIVKTKPYRVVMEAINIKGMMKNKHLSKAVAKQRL

SEQ ID NO: 60110 - protein, 247 aa, Bacillus sp.
MGVKRMMINKAYKFRIYPNQAQATLVNKTIGCSRFVFNHFLSLWDHAYKETGKGLTYGTCSAKLPAMKKEFVWLKEVDSIAIQSSVRNLADAYTRLFKKQNNAPRFKSKKNNVQSYTTKQTNENIAVVGNKIKLPKLGLVRFAKSREVKGRIVNATVRRNPSGRYFVSLLVETEVQELPKTHSYIGMDVGLKDFAILSDGTTYKNPKFFRSLEEKLAKAQRVLSRRMKGSSRWNKQRVKVARIHDKC

SEQ ID NO: 60111 - protein, 421 aa, Chloroflexus sp.
MEHEAGAGGRKTPMQRVHNIRLNPTPQQTEYLRKACGTARFAFNWGLAEWQRQYAAGEKPSAYALKKQFNTIKREQFPWVLDVSKCAVDTGFRNLDAAFKRFFRRCKNGDTKKGYPKFKSKKRSKLSFRMDGTRVRVDGHWLTLERLDKPINMAEVLRFDGEIRSVTISEHGGHWYAAINVEVEPPKHKHPQGSVGIDVGVKTLAVLSDGMRYENQVLLRSKLRKLKRLNRELSRRQKGSGRWNHTRKKLARFHRRIADKRLDYLHNMTTRIARTYRIIGVEDLNVAGMLRNRRLALSIADAGFGEIQRQLRYKSEWYGGILVEVDRFFPSSRLCPMCGEIKSDLTLRDRTFVCACGYVADRDVNGAQNIEREALRLMSRGRSGFTDSLNGREQNVRPFGAVLDEASKLAEERQPSRPAVV

SEQ ID NO: 60112 - protein, 368 aa, Thermoactinospora sp.
VAQIVKRAYKYRFYPTPEQAEELARTFGCVRYVYNKALEDRTRAYTLEGRRVSYVESSAALTRWKKTPELAFLAEVSSVPLQQALRHLQAAFANFFARRAKYPTFKSRKKSRASAEYTRSAFRWREGRLTLAKMEAPLAIVWSRPLPEGAEPSTVTVSRDAAGRWFVSLLVEEKIALLPPARQAVGVDAGITALATLSTGEKIVNPRHERRDRRALAKAQRALARTAKGSNNRAKARMRVAHIYARIADRRRDHLHKVTTRLVRENQVIAVENLTVRTMVKNGRLARAISDVSWRELRSMLEYKAAWYGRTLVAVDRWFPSSKLCSACGTLQKAMPLNIRTWTCACGAFHDRDVNAAKNLLAAGLAES

SEQ ID NO: 60113 - protein, 391 aa, Tenericutes sp.
MLVSHQGGLVNMMKIFKGYVLRIYPTEEQKLIIKKNINCARFVYNYTLAKIINIDKEKYLTNYFFDSAKELTSLFQKYPKLKEVDSSSLKYSLLNLFNTYRKLAKEKVYPKFKNRDKGNRFKVGNFKSVSLNSDRIRVDFKNGFLILPQLNKVRFRGYRHKNNLIGDIKNVVIKECAGKYYASILAEEPLTLSQLRPARIVGLDLGVKDIIITSYNEKIENSLKALSIKTRIKGLQKGLNRCEIGSKNRYKLKLKIQKAYLKLKNMRKCLIHSITNKIVNESDIIVIEDLDVKSMYKTRSVARSLTDIPLALIKQVLEYKCKWQNKILLTVDRYYPSSQLCSKCGYRNRKVKDLSIRSWECPSCGTLHDRDYNASENIMFEGLKIYMKSLI

SEQ ID NO: 60114 - protein, 402 aa, Streptomyces sp.
LIRAYKFLLRPTARQTAALGEMLRDHCSLYNGALQERRDAYRHTSKANVRYGDQSAQLKEIRAFDPERQGRWSFSSQQATLRRLDKAFQAFFRRVKTGQSPGYPRFKGAGHFDTVTFPKDGDGCRWDPTPHDPVTRVRIQGVGHVRVHQHRPVRGRVKTISVKREGTRWYIVLSCDNVPAEELPPTGAIVGIDMGVAHFLTTSDGEHVANPRFLTAMADELAEAQRSLATFPKRTRQRTKRHRAAARKVAKLYGKIRRQRADFHHKTARALVRDLDVIAHERLNTAGLTKSPAPKPDPDQPGGFLPNGAAVKAGLNRSILDAGWAQFLGILANKAESAGRLVVPVDARNTSRTCPECEHVAKENRVTQAKFECTACGFAANADHVGARNVLSRAGLALCTAA

SEQ ID NO: 60115 - protein, 396 aa, unknown
  TnpB Polypeptide
MQRTFKTRLETNDLESNILAQWCGVSRLAYNTCLDQWNRDYENGVKHNYYSIKKWFNSVKREMFPFITRTSKWVPEAAIRDLDTAFRNMYRHTARHPRFHRKGVRDSFRIDGSVISVSGKTLKLPKGLCLRLMERFRYENRLNKISNVTVSRRAGYWFASVSCDIGEPARENQGTGIIGIDVGVKNLATCSDGMVIDNPKTLYRREKRKKHLQRILARKQKGSNNRRKAKALLARYEYRTAMKRSDWLHKASNRIARGNRVCFMEDLNVKGMISNHRLAKSVSDCSFNELHRQLAYKTTVREIDRWYPSSQICSNCGSRKPMPLSERTYRCEQCGMVMDRDLNAALNILHVGMANYPELMPAEDDTPEATGAASRQATAPDETGIDHQTLRKNRFE

SEQ ID NO: 60116 - protein, 369 aa, unknown
  TnpB Polypeptide
MGFKFRLYPNKTQRHLLNRTLDCARFVYNHFLAVRREQWRANHVALNYVKTSALLTDLKRREEYAWLKEADSMALQEDLRNLDRAYQNFFKLHAGYPRFKSKHAHSQSYRTRNQGKRIRILGNRVKLPKIGAVKIKQSRTFDGRILNATVSRTASGKYFLSLCVEMERSARQKTKHGGEIGIDVGLKAFYSDSQGHVVANPRILRRLTHKLRREQRRLSHKLPRSENRRKQRIRLARVHERITNIRKDFLHKQTTRLVRENQTIAVEHLHIKGMMKNHRLAKAISDVSWHEFFRQLTYKTELYGGELLKVDTFYPSSQTCSTCGYKNKSIKNLGIRTWTCPHCGSCHDRDVNAARNILKHALEEKAKIA

SEQ ID NO: 60117 - protein, 403 aa, unknown
  TnpB Polypeptide
MKKASHSKSAKRQAALGVVTRVLHLRIKDKHAKHLLEQSKEVNQVWNYSQDLALKVFEREHRFISAFDIAEYTKGATKEGLSLHSQTVQAVSEEYVLRRKQFKKAKLRWRVSHGSRRSLGWIPVKAVALGYRNGQVLYQGNPISLWDSFGLADFELRSGSFSEDSRGRWYLNVSVDVKKPEPSQGKTSIGIDLGLKDFATVSDGQQVEAQRFYRDLEPALAVSQRAGHQQRTKAIHAKIANRRKDHLHKLSTQLVKENGAIFVGNVNASGLAKTNMAKSVLDAGWSAFRTMLQYKGDNAGCIVKEINESYSTQECSCCHARTGPKGLDGLAVRQWTCSVCGAEHDRDVNAAKNILARGLLELEKEFAIAGEAKAVEAAMNKSPQGFGVGHDPLVAGIIAPSGR

SEQ ID NO: 60118 - protein, 372 aa, unknown
  TnpB Polypeptide
VIVTVQLQLLPTKEDIVKLEATMRRFNEAADWLAGEAFAIKSANKVAIQKTHYARLRADFGLSAQMAVRCIAEVCSAYKRDKSIRPRFRPFAAIPYDERIASWKSLDRISLLTLEGRILVPYVMGMYQRERFTAAKGQCDLVRRKDGKWFLLVTVDLPDKTRLPSTDFIGVDFGVVNIVTTSDGKQCSGDGIEACRKRFSRQRRSLQQAASAKVKEGIRPKNIRRKLKAVGSHEARFRRDVNHCISKQLVAEAKDTARGIAGEDLTYIRDRTRFRKQQRAKMSGWAFFQLRAFLTYKSILAGVDLRIVDPRGTSRTCNACGFEAKSNRKSQAEFVCGQCGHAANADVNAAKNIRSRALVNAPIVSEVVSHAA

SEQ ID NO: 60119 - protein, 403 aa, unknown
  TnpB Polypeptide
MRTAYRCRAYPDQQQQAVLTRTFGCIRVVWNRTLAARHARWQHQREGTSYAQTDAALTVMKREQDLAFLSEVSSVPLQQALRHQHHAFRAFFARRARHPRFKSRRSRQSAHYTRSAFSMRGGELRLAKTSAPLWFVWSWPEVDVTILNPTMVVVSREPDGRWYVTFAIDADAPEPLEPAGHAVGVDLGVKDFAVTSDGERIANPRHLERKARNLARYQRRLARCRKGSANRAKARAKVARAHRKVRDARRDFLHRASTRLARDNDVIVIEDLVVRNMVRNRKLAKAISDCGWGEFRRQLAYKCERAGRDLIVIDRWYPSSRTCSACGHLLAELSLSTRRWTCPSCGSRHDRDINAAKNILAAGRAVTACGAGVRRSGTSRVRPAVKQEPQPATAGIPVLQGGE

SEQ ID NO: 60120 - protein, 402 aa, Kibdelosporangium sp.
MTAVKRAFKYRFHPTAQQERELLRTLGCVRLVYNRALQARTQAWYAEQRRVNYAETSALLTAWKKTEDLAFLNEVSSVPLQQCLRHLQGAFVNFWEKRARYPRFKSRKRGKASAEYTRSAFRWRDGRLWLAKMDQPLAIRWSRPLPEGTRPSTVTVSRDPAGRWHVSILVETSVAHHAPTSAAVGVDAGITSLLTLSSGEKISNPKQERRERAQLATARRRLAKKTVGSGNRAKAYRKLARVHARIADRRRDFLHKLSTRLVRENQTIVIEDLPVSGMPRDGRPARAIPDATWSQFRSQLEYKAAWYGRRVIALDQWFPSSKTCSACGLLLDALPSGAREWTCPGCGVTHDRDVNASRAILAAGLAVAACGGGVRPTRRQPARQSPVKQETQPARVGIPARG

SEQ ID NO: 60121 - protein, 388 aa, Unicellular sp.
MKQVLTIVIKLQPTSEQSQLLDDTAQAFADACNYINKTVKTNLTNRNSIQAICYQDVKERFGLTANHVVRACARVASNRLTAKRKGRKVKNFKPTSFDCDTRTFRFIETGYLASISTTGKRAKVPMRVSNYHIGKLSGQNPTSAQICQHKDGNWYVHIQLKSDAPKPIKSDKVIGVDFGRRDIAVTSTNKSWSGKEIQEKRDKLTKVRASLQKKATQGTRSTRRRCRQILKRLSGKERRYQAWINHNISKAIINEALATQSFVSIEDLTGIRERTNQQPRNKTERRRSNSWAFYQLRTFLEYKGIKEGIEVIAINPRYTSQTCNCCLHIGLRNNKSFKCSNKACGWIGNADLNGSLMIALVGLSVRQPRGNHLLSCAIDGGLQKARAV

SEQ ID NO: 60122 - protein, 495 aa, unknown
  TnpB Polypeptide
VIVLAIELHQFCLEVGANAGKDAAQIINDVLGEHFAAVFGHKDQMYVHQKYTVSSVPNIIVVAHRPNYTMGMQRLQAFKYELRPDGQQQRQMRRFAGSCRFVFNKALALQKMRYEQGEKKLSYAGLCKELTGWRNGSETPWLADAPVHPLQQTLKDLERAYANFFAKRADFPKFKKKGQRDSFRYPDAKQIKLDQANSRIFLPKLGWLRYRNSRDVLGEVKNVTVSLSSGKWFASIQTEREVEPSAPQASSAIGIDVGIARFATMSDGSYLAPLGSFKTHEVRLRRYQRSMSRKSKFSNNWKKAKAKVQRIHTRIGNARRDYLHKATTTISQNHAMVCIEDLQVRNMSKSAKGDADKSGKNVRAKSGLNKAILDQGWFEFRRQLEYKLAWAGGWLIAVPPQNTSRTCPACGQVSADNRQTQAKFACVECGFEENADVVGAINILARGHRVAACGEDVSRDKPARVRRAASAKQEPTEAIRSGSVPATDTVGIPCL

SEQ ID NO: 60123 - protein, 395 aa, unknown
  TnpB Polypeptide
MRLTYKYRLNPTTAQRTKLERALEVCRWVYNDTLGIRKDTYEKTNKGLSLYDTNKLLTVWKESNPAFSEVHSQVLQNVQERVELAYQAFFRRVKAGALRQAQGATAGELVEPGYPRFKGKGLYDSFTFKQKGFRLDGDKLTLSKIGTVQVKLHRSICGEIKTLTIRRDSLGNWYACFSCECDTNPLPINDKVVGIDLGLTTFAYFSNGQKIKRQRWMKRDADDIAKLQRKKENFAKGSTERKKVIRALNHAYQRSANRRNNFAHQESRKLVNEYQFIAFENLDIKDMQSADDKRYTRGIADVAWGQFVQFTVYKAANAGRGVALVNPRGTTQMCSRCHAIVPKGIEVRIHDCPHCGLKLNRDHNAALNILARGLASINTGGALWAPDVVVEAHVL

SEQ ID NO: 60124 - protein, 768 aa, Rhodoferax sp.
MKKAALPSGDTSKSLARKPVKVVSAKRSESAAKTVKPAKTPKPKKAPKPPQIYRTQKANLPFELAPAIAALSRHARDLHNTTVYATRQIRYAFAWDKDAKESLSRDDAEMGKELAASSQLSILRFNQQIDALNVERAAKANMKAKETAEVAEPKLITRIESSGRRLESRILDMTLLERAMKAWPDDLALDKAPAFSKLPFLIARNVVKDIRSAHAAWLAALKVWSPTTGKGLAGQPKAPGYRKSSGLAVSLDWANKAKLPDLSALELFVDEDKGVKLTAEQAKAFRDFDIKAFADQALARRWADKPSWLAARPTHMDVAMLRLVPARGGQPPRLEMIVAIDKPKTPAGSFMASLESRHPALWLAAKPDAFDGWIAQIMAEQDWVKKKTPPAIGFDYAWVSQNHSAAFVDFGVTNLAGVAWTDGSKTAVLTGTDFHSRMDRLDGRIDRRVATLTTVEQRELQAKLSKLREADPKAKLSQAERSKLKGLSKLVHQDLGLMAMRKRRADFVKDRAHRLADWIAQAALSKKVAVVIVGRNIGWKQESNMGSERNRKFHSIPHGLMIQLLREKLAVLGIALLETEESYTSKMSFLDSDPLPVYGSKSTKVKEGNKEKENKTTNERDDNPFARNPAASHAAPADGPKASGVRGAGRDRNWFFRQGPKPAPDHNMAKAKAAPIRSKIHADANGAFNSGRKICPLFKAHDRLSPKHELWGFSPRGGFFPLSPFLKRGPVKSVAAALKAKAAKERKLASKNSIKVAEAVGGPRLESL

SEQ ID NO: 60125 - protein, 374 aa, unknown
  TnpB Polypeptide
MRTYQYKLKPTKPQLAAMEQTLEVCRRLYNGALAERRNAWENEKRSVNFAQQCASLPALKEKSAYLPNIHSQVLQDVMHRVNRSFENFFRRVKAKEAKAGFPRFKGEGWYDSFQYRQYGNGAKFDSAGRLSLSKVGAIRVCRDRPMTGTPKTVTLARRADGWYACIACDAEPEPLPRAGESVGIDVGLESFATLSNGETIANPRLLRRAERHLKTAQRRVSRRKKGSERRKKARVLLAKAHLKVRRTRLDFCHKTAHGLVARFDTIAVEKLNIKGMVKNHHLAKSISDAGWGLFVSVLTHKAESAGREVVAVNPAYTSQNCFNCGMRVPKKLSVRLHSCPHCGFEAHRDHNAALNILKSGGDTAFGEAATLAAV

SEQ ID NO: 60126 - protein, 397 aa, unknown
  TnpB Polypeptide
MSRYRLLPTPAQQAALRDHCAHARYVWNLAVEQHSHWHPGRASAPSYLEQCRQLTQARAEHPWLRDGSQTVQQQALRDFAQAMAAFFDPANPAGRPSWRKAGRHEGFRVVGRGRQWDVRRLGRRTGEVWVPKAGWVRFRWSRAVPTGVKSYRVTMDRAGRWHLAFAVIPEPVLAPGNGQVVGVDRGVAVSAALSTGKLLHCPAPSERERARLRRMQRRLARAQQGSGRRGRVKHALARLRARETDRRKDWAEKASTDLARRFDLIRVEDLQITNMIRSAKGTRGDPGRNVRAKAGLNRAILGSGWGLLVRRLEDKAPGRVEKINPALTSQRCSACGQVDPVSRESQAVFRCTACGFACHADVNAARNIAAGHAVTARGGDGVARPVNREPHLLLRSA

SEQ ID NO: 60127 - protein, 317 aa, Candidate division WPS-2 bacterium
  misc_feature (37)..(38): Xaa can be any naturally occurring amino acid
LSRSVRDRPSRGPWHRSRRCETHACSAGALPRRGIQXXDSTKSSPLGLVKLRKGRTVPSFGRAWIVEKNGRWYACFECERGTQPLPATGEVVGIDRGVHVLAATSEGELIANGRLADKHRRIVTGHARALDQATVKDAQGRPTNGKDPQRVAAVQRLARAKEPEANARLDSLHKVAHRVVASADVIGLEELNLRGMTRSAKGTVAEPGRDVAAKSGLNRALLDAGFGILRRLIGEKAERAVRRVVDVGARYSSQTCGHCLHVAAESRRRRRFVCVACGFALHADVNAALEIRRRAQLALTSELYPAEDAGRRARCAA

SEQ ID NO: 60128 - protein, 336 aa, unknown
  TnpB Polypeptide
LNEVSSVPLQQALRHQHQAFTAFFAKRARYPRYKSRRARQCAHYTRSAFTMRGVLRLAKMDGPLRFVWSWPAVNITTLNPTMVAVSREPDGRWYVTFAIHTEAPAPLPATGRAVGVDLGVKDFAVTSDGERIANPRHLERKAHKLARYQRRLAHCQNGSANRAKAKAKVARAYRKVRNARSDFLHRASTRLARENDTIVVEDLAVTNMVHNRHLARVISDCGWGEFRRQLEYKCARYGRDLVVIDRFYPSSKTCSACGQLLAELSLSTRTWQCPSCGTRHDRDINAAKNILAAGLAAGAGNGADACGGTVRRVGATRTCVPVKQEPRPAREGIPVS

SEQ ID NO: 60129 - protein, 395 aa, unknown
  TnpB Polypeptide
MSYNVRKIRLRKTRLLDEFSAESGTLYSDTVKFFWRTVRKKGLWLKPSSLMRIFNSDRLHAHSADASVQAFFHSLKSWRALRKTYPEASPPHRLRKFFQVVWKNSAIRVKKGDLVLSNGRGNEPLVLENWKHPLPVQCVLGWNGTGYELACVYDHESPGLHPEKNILSVDLGQIHLAATSQGMIFNGRLLRSLQQWRHKKLSDLQNRMSTKRKGSREWNRLKDCKGKFLRKVGNRVSDILHKYTTGIVSTCKREGMDTLVVGDLRGYRQDNDKGNERNQENHGWLYSRTTKMLEYKCERSGINFRLQEESYTSQTCPTCGNRKKMRGRNYACPKCGFVGHRDVVGAVNILGKYLGHAVPVVAAMRPAFGVRYKPYLNVAQGFAMPLRTCGALAPA

SEQ ID NO: 60130 - protein, 359 aa, Herbidospora sp.
VSSAVLIARNHRARGRCRAYSQPEHPDSAYVRLQGVGHIRVHRHRPVVGTVKTISVKRGGHRWFVVLSWDDVPATRLPTTGTVVGVDLGVARLLTTSDGDHVANPRHLAASADRLAAAQRGLARKERGSRRRRRAVARIAALHAKVGRQRLDHAHKAANTLVRDDDVIVHEALQIANMTRRARPEPDADGFLPNGAAAKSGLNRSILDAGWGVFLTILSYKAESAGRELIAVNPAGTSRTCARCGHRAADNRVSQAEFRCTACGHTAHADVTLRRAVTALRETGAFRHRRSHYCWVIFTSSTAASTSEAVPVSAAETVIWTVWPAKAARLTEAAAQAPLRLLAAPSCWKTWVPLTETRR

SEQ ID NO: 60131 - protein, 405 aa, Streptomyces sp.
MQLRYSFRLYPSAGQRMALARAFGCARVVFNDALRVREEARAAELPFIPSSELSKQLTASKKTPERAWLGKVSSVILQQSLRDLDTAYKNFFDGLKGKRPKMGPPRFKSRKDTRQSIRFTANASWRITTGRKLRLPKIGDVPVRWSRALPSTPSTVTVIKDAAGRYFASFVVETESTEVLPEVDAEVGIDLGLGHFAVLSNGTKVDSPRFLRRAEKRLKKAQRELSRKQKGSANRGKARVKVARAHAKVTDARREFHHQLSTKLIRENQAVAVEDLAVKGLARTRLGKSVHDAGWSAFVGMLEYKAARYGRTFVRIGRFEPTSQVCSVCGVKDGPKPLHVRVWTCGACGAVLDRDVNAAVNVAKAAGLAVSACGAQVRPERVLAQRVEAGTHRDPQMRGVGIPVL

SEQ ID NO: 60132 - protein, 499 aa, Mycobacterium sp.
VISRFGTLVLATGLSVARARLTAMTRYTTFRFCLNPTVEQYEVLARHAGAARFAFNQCLRMVKTALTDRKTDPSIAVPWTGFDLINAFNAWKKTEAAGRVFTVNAHGDVEVVVKGLSWRREVCQQVFEEAAVDLSKGLRAWSDSRCGKRKGKRVGFPRMKKKARDVASFRLRNKHAKGKLAAIRVGDNHRPRSVTLPGVGSIAVRDDTRRLRRMLATGRAKILFATISRRGGRWWLALNVEAADLHPAQQHPVRDRVTEDHWVGVDLGLTTFLVAATADGTEVTRVTNAPKALSAGLKQQRRLSKSLSRKKKGSHHRKDAVARLARHHHRVANVRRHFLHQVSNELVKTHDRLVIENLNVTGMLRNHRLAREISDAGWSEFARLLTYKQAWRGGQLIEADRWYPSTRLCPHCGAVNSAMTLADRMFTCGCGYCADRDTNAAANLARWGHTHHELHRSPDLQAGGRVNNARRRDGSGQHSRVGETSPNDAGTDVHPAPAA

SEQ ID NO: 60133 - protein, 366 aa, Paraburkholderia sp.
MSLTTRVLRFRLKDKHAKLLRVLAREVNFVWNYCNELSHMVWQREQRFLSGYDFHPFTRGAGKAGLHLHSQTLQAIGEEYAVRRKQAGKTRLRWRASGGPRRSLGWIPFKASAIRYRNGQVFFAGTPLSLWDSYGLSRYELGAGNFSEDARGRWYLNVTIKVEKTPKPATGEVERFVGIDPGLKDFAATSDAQVITLDRHYRKLETVLAKAQRARKKARVRALHAKIKNSRKDQLHKLSTALVQQYGAIFIGNVNASALARTRMAKSVLDAGWSLFRTMLQYKSDCAGVWFDEVDEKYSTQTCSCCNRRTGPKGREGLGIREWACFECGAYHHRDINAAVNILAAGRRRLAVGIPVLPALSAAAEG

SEQ ID NO: 60134 - protein, 271 aa, Paraburkholderia sp.
LAFGSRRSLGWIPFKASALRYRIGQVFFAGKALSLWDSYGLSKYELGAGNLSEDARGRWYLNVTIKVEKTPRPAAGEIGKPVGIDLGLKDFTATSGGHVITLERHYRNFEKEVTKAQRARKKARVRALHAKIKNSRKDQLHKLSTALVQEYGAIFVGNVNASALARTRMAKSVLDAGWSLFRTMLQYKSDDAGVWFDEVDEKYSTQTCSCCNRRTGPRGLEGLGIREWACLECGTYHHRDINAAENILAAGRRRLAVGIPALSARCAAAAG

SEQ ID NO: 60135 - protein, 366 aa, Paraburkholderia sp.
MNLSTRVLRFRLKDKHAKLLLELAREVNLVWNFCNELSLKVWQREQRFLSGYEFHPFTKGAGKAGLGLHSQTLQAIGEEYAVRHKQACKTKLRWRVSGGSRRSLGWIPFKASALRYRNGQVFFAGKALSLWDSYGLSKYELGAGNISEDARGRWYLNVTIKVEKTPRPSTGVGVKSVGLDLGLKDFAGTSDGHVITLERHYRNLEKEVAKAQRSGKKARVRALHAKIKNSRKDQLHKLSTALVQEYGAIFVGNVNASALARTRMAKSVLDAGWSLFRTMLQYKSDDAGVWFDEVDEAYSTQTCSCCNRRTGPRGLEGLGIREWACFECGAYHHRDINAADNILAAGRRRLAVGIPVLPAPCAAAAG

SEQ ID NO: 60136 - protein, 435 aa, Paraburkholderia sp.
LHKPAQRVTVTGAAGQIAYSLLFRIARGDLLGVDQPAILQLLELPQALDALRGVVMEPEDCAFPLLQSVEITDDLRVAFRDCDYALLVRSRPRGKGMEQRDLLAANAAIFRNQGQALNEVASHQVKVLVVGNPVNKNAWITRRFAPDLPLTLSAIGLKTSAFRPGMKGRCRQRSRNRVIFNGETATCLYGETTVLAHVPHHPRPALQTQRQTRKAVACTRARGHLNVTLKVEKTPMPATGMGVKSVGLDLGLKDFAGTSDGHVITLERHYRNLEKEVAKAQRARKRARVRALHAKIKNSRKDQLHKLSTVLVQEYGAIFVGNVNASALARTRMAKSMLDAGWSLFRTMLQYKCDDAGVWFDEVDEAYSTQTCSCCNRRTGPRGLEGLGIREWACFECGAYHHRDINAADNILAAGRRRLAVGIPVLPAPCAAAAG

SEQ ID NO: 60137 - protein, 369 aa, unknown
  TnpB Polypeptide
MRTYTYKIGKQSNCVRLGNLLDDLWQVHEYFHKWQRQRYKDGLPYANHAAMCEHLTELKRTTHPHWKALPSQAMQEELKRIHLAYERFFKKLGGRPKIKKRHRFKSFTLKQAGWTLKDNRLTLNFRKWSKGKWRHDKVPYTFHKHRQWHGNISRITIKRDACGDYWLYLITDFVETKPLPTTGKSVGADFGMKDAYLTLSTGEKIQHPQPLKQSLTKLRTLNKSLSRKQKGSNGWWQCVRGLARLYRKVANHRKDFHWQLASKLCEKFDTIVLETLNLDGMKRLWGRKVSDLAFYQFVEILRYKCEKHKRHFVQIGQWTVTTKPCSDCGHSNENLSLSDRQWTCLECGSHHDRDINAAVNILRAGIAVI

SEQ ID NO: 60138 - protein, 231 aa, unknown
  TnpB Polypeptide
  misc_feature (191)..(224): Xaa can be any naturally occurring amino acid
VIRCLKTAFKTSKTNLNRLYKCNRISAQIWNDCLDIAKQYSLANDGKWINKTELQKALKNKYPLHSQSIQAVCHKYLFARDAAHKAKQQGLDNRYPYKKKKNYNTKWAKDGFKIYENGRIELSMGIWNGKRQQPIVVYVKELPIGKIKEIELIYDRGLKLSLAYEDGLIESINNNKNIAGIDVGEIHTISXXXXXXXXXXXXXXXXXXXXXXXXXXXXXXXXXXTQGYVAR

SEQ ID NO: 60139 - protein, 173 aa, unknown
  TnpB Polypeptide
GSSADYPRYYRKAEAKLKKEQRKLSKRMKDGKNREKQRQKVARLHEKVVNQRKDFLHKQSRQITNAYDAVAIEDLNMRSMAQGLNLGKSVNDNGYGILKTFLAYKLAEQGKQLVVIDKWYPSSKLCRFCKTTNKDLRLSDRIWTCNHCGAMLDRDKNAAINIKEESCRILGIA

SEQ ID NO: 60140 - protein, 163 aa, unknown
  TnpB Polypeptide
GNGRQNKYIRRKYKSLRQKLGKAKKLKKIIQIGNKEQRWMKDQDHKISRQIVNFAVKNNVSVIRLENLKNIRNTTRTSRKNEKNLHTWSFYRLTKYIEYKAKLEGIKVEYVNPEYTSQKCPHCGTLTKARDRRYICKSCGYITHRDRLGAINIMKAPVVDGVA

SEQ ID NO: 60141 - protein, 462 aa, unknown
  TnpB Polypeptide
  misc_feature (170)..(203): Xaa can be any naturally occurring amino acid
  misc_feature (420)..(453): Xaa can be any naturally occurring amino acid
LHIIQPCTSTKYFCPAFISSILKPPKIFYALGHFGSIFTFRYFLHVNDIFYSRLLNCPLCAFVFDILYINPIASSVIVNSPILHYSAPSCPGELLCDLLYILLNKLLQYCFLFLPIVNALRGFRGLFFVTLIYFVAGADVTKWRISCYYCRVAKGVYIRSPSFGARRVGXXXXXXXXXXXXXXXXXXXXXXXXXXXXXXXXXXVLGSQVKQEIAERLKDNLRALSKLKQNGHKVGRLKPKMFVNSVPLKQYGVTYSLDFARNRARIQKLGSYRVLGLHQIPRDAEIANAVLVSKPSGYYLHVTCYLSKENFYRKSIGGEVGIDFGVNSKLTLSNGIKINYELHETPRIKRLQKKLAKSEKGSNNRRKTQYLLRREYEKIGNRRKDAQNKILAFLKLYDKVAYQEDLVNGWAALFGKQVYXXXXXXXXXXXXXXXXXXXXXXXXXXXXXXXXXXVPYIPDSHR

SEQ ID NO: 60142 - protein, 262 aa, unknown
  TnpB Polypeptide
  misc_feature (17)..(50): Xaa can be any naturally occurring amino acid
VLPPPSSINALSHPCAXXXXXXXXXXXXXXXXXXXXXXXXXXXXXXXXXXGKYYISILVKFEQYIKPIMPKEENVLGLDMDMKNLYTDSQGIRADYPRFYRQTLDKLKKEQRKLSKCVKGSNNRNKQRLKVAKLHEKVANQRKDFLHKKSRELANEYDSIVIEDLNMRAMSQCLNLGKSVSDNAWGMFTTFLKYKLEDVGKQLIKIDKWFPSSKTCNECGYINQELQLSDREWICKSCGSIIDRDYNAAKNIRNKGLEILLV

SEQ ID NO: 60143 - protein, 202 aa, unknown
  TnpB Polypeptide
SSIRPVTPALKTVLGLDYSSRSLFVDSQANNADYPKFYRKAEEKLKKAQRKLSKRQKGGKNRDKQRRKVAKLHEKVANQRKDFLHKLSRQITDACTAVAIEDINMRGMAQSLNLAKSTNDNGFGMLKTYLAYKLAEQGKQLVVIDKWFPSSKKCRFCNNENKELTLSDRTWTCSYCGAELDRDVNAAINIKNEGCRILDIAK

SEQ ID NO: 60144 - protein, 358 aa, unknown
  TnpB Polypeptide
  misc_feature (69)..(102): Xaa can be any naturally occurring amino acid
  misc_feature (323)..(356): Xaa can be any naturally occurring amino acid
MKIQMTNNRVCRLIEELSQFNLDGMLISSAHNRRYFSGFSGSDGFLLISPKALLIATDFRYWEQAINEXXXXXXXXXXXXXXXXXXXXXXXXXXXXXXXXXXLYNFANYQIRQKFCSENKYITYNQMDKLLKQEGMDYDYRNMPTAQSAQQTLRLLDKNWKSFFKAIKDWSKHKEKYTGRPKLPNYLPKNGRYSLILTNMDCKLKDNQIHFPKCFNGFVLNTKVTNLQQVRILPRNNHIIIEVVYQIEIPETREDNGSYIGIDIGLGNFATIGNNVGAVPIILNGKGLKSINQYYNKKISHYREIAKRMNNLDYTKRMNKLTXXXXXXXXXXXXXXXXXXXXXXXXXXXXXXXXXXRA

SEQ ID NO: 60145 - protein, 251 aa, unknown
  TnpB Polypeptide
  misc_feature (210)..(243): Xaa can be any naturally occurring amino acid
LKWRVSYGSKRSLGYIPFKKGRAEWRNGQVWFNGHYFSVWDSYGLSKYDFRNGTFSEDARGRWYFNVVIEVDAQIPKGQERIGIDLGLKDTATCSNGEKLEAGRFYRDLEDKLAVQQRAKNKKRVRSIHAKIANRRKDALHKFSRKLVEMCGEIYVGDVKSLDIIETNKSTAKSVYDAGWYQLKTMLEYKCANAGIVFAEVDERYTTQTXXXXXXXXXXXXXXXXXXXXXXXXXXXXXXXXXXLYKSRISS

SEQ ID NO: 60146 - protein, 226 aa, unknown
  TnpB Polypeptide
  misc_feature (192)..(225): Xaa can be any naturally occurring amino acid
MINGKSQRIKVKTILTDYQKQQLNNKLGTLRITKKSGKWIAQISVDVPEKQNNDTEIMGVDLGLKVPAVAVTSNGKTKFFGNGRQNKYVRRKYKSLRQKLGKAKQLKKIKQIGSKEQRWMKDQDHKISREIVNFAKENHVSVIRLEKLANIRNTARTSRKNEKNLHTWSFYRLTKYIEYKAKLEGIKVEYVXXXXXXXXXXXXXXXXXXXXXXXXXXXXXXXXXXM

SEQ ID NO: 60147 - protein, 327 aa, unknown
  TnpB Polypeptide
  misc_feature (42)..(75): Xaa can be any naturally occurring amino acid
  misc_feature (288)..(321): Xaa can be any naturally occurring amino acid
VYQVRQDPRTVFFHSSGSTAGWRGKTIWKVSWLYWPGMARQXXXXXXXXXXXXXXXXXXXXXXXXXXXXXXXXXXEFISNNPDYSWIKEVSSKSVKQSIMNADRAFKRFFKGESRFPKFKKKNKSDVKMYFVKTDAKVIIPCERHRIKIPTLGWIRLKEKGYIPTNSNTHIIKSGTISYKAGRYYVSVLVEENNKEQPMLNNYGLGIDLGIKNFAVISNGITKQNINKKNNIKQLEKKLKREQRCLSRKYENLKKKGGTATRQNIQKQKLIVQKLYHRIENIRTDYIXXXXXXXXXXXXXXXXXXXXXXXXXXXXXXXXXXCLQRQT

SEQ ID NO: 60148 - protein, 387 aa, unknown
  TnpB Polypeptide
MSTRTIALTLRPTDAERAALERLRTQFNAACNHISGVAWDAQEFNKVRLQRLVYGDVRAEFGLMAQHTIRAIAVVAAAYKRDHDTRRAFRADAAVVLDTPRLYRVTHNRANITTLDGRVKVELGIGGHQRRMLKDAVKLAEADLIRDRKGRWRLMVSAHYADPPPSDIAGVLGVDVGRTDIAVTSDGATFSGQHVTARRDDYTRVRRSIQRTAAQGTRSTRRRARAVGKRIAGREHRFQRDTNHIISKHIVGRAVKNKQAIACEDLTGIRERANRQPRAKTERRRSNSWAFAQLRSFLAYKCQAAAVPFLLVNPAYTSQMCHCCLHIGERVGKRFACVNPACAWRGDADDNGARNIARLGAVLMRPGGPALCCLYRPDARATTSPAV

SEQ ID NO: 60149 - protein, 415 aa, Cyanobacteria sp.
MLVREAKLKHGTSEQYQALDEAIRTGQFIRNKCLRLWMDTEKCTRAKMQALCKSLASEFPFAKKLNSMARQAHADRAWASVKRFYENCRSGVKPVGYPKFKKQNRSVEYKTSGWKLSKDGFHLTFSDGFQAGTFSLYCNAQAREDILGSKINRVRVIRRADGYYAQFCLDAERVEKGTYTGEVVAIDLGLKHFIKDQNDHSIIYPQFLRKSEQRLKKLQRRLSKRHRPGKKHSANYQKARQQLGKQHLKVQRQRKDWAIKQAQALVASKDVVVYEDLRVANLIKNHNLAKSIADAAWSQFTDYLDYYGKLWGKAVVAVNPAFTSQDCHHCGHRVKKSLSSRSHQCPNCGVETCRDTNAALNLLKRGLEALGREWNQGTGGHPETCGKPRTTGETAASADEGKPDSVSGVAEPVTV

SEQ ID NO: 60150 - protein, 372 aa, unknown
  TnpB Polypeptide
MILGRKVRLKPTEVQEHQLWKSSGTARWAYNWALDRQEKNYASGGNFLSDNDLRKIITQLKQTEEFSWLGEVSNNIPKQAIKDACDAYKKFFKHLADKPKFKSRRKSKPSFYNDTMKLKVKSGIVLIEKVGWIKTAEQLPIGEKYTNPRISFDGKYWYVSVGTEQEQVIEPLTSEVIGIDVGIKVLASCSNGMVFKNINKTQSVKKLEKRLRRLQRKVSRKYQENKKGVRYVKTCNIIKVEKQIRVLHRKITGIRSNHIHQATSAIVKTKPCRVVVETLNIKGMMKNRHLSKAIAQQKLYDFKLKLQYKCEKHGIEFVEADRWFPSSKLCSGCGAIKKDLKLSDRVYRCNCGLVIDRDYNASINLSRYKLVV

SEQ ID NO: 60151 - protein, 642 aa, unknown
  TnpB Polypeptide
MTDRVLTSSATCAARGGVDEKTGEALSSRQVAERVTWLAAITTSLTRELLANAWNSGDLAALAGGVGPDGRALPSRGYVALRRLGWDSAPAAGLYVPDRAVRCAQEYAARLLRGAVHRDAIIAAVAATWPATVRRSPEEWAALWAALPAGTTKAALRGRDRQVGAYLAENGVLPASVTELEAPPQVSATILLAAADSRLVTLERHPLELGRALLVVKLPTCPQPASRVDWAWVALVVKLPAHVPATDRLHTPTLRVAGDRVLVDVPFSASVAVAPRKGHTVALGADWGLNTVLTATAGRLDGAGAMHTSGRPLHFKAPGVQAKIARLRLQRQKLYAKADRYTRALEDLSPGAVALGVKRDLLLHEVEAVSARQRRLGDALARGGARWLLDQTLAAGASAIYVEDLSTMEGRGLGRKLNARLSEAGRGKLLAALRHQCAKESVAVVSVPAKGTSALCPRCLGPLRHTRAPDDDRTGWKWARCGSCGLSADRDHAAAERIVSRGLAGQDKTSVTRAKTYAITTPVETRVRLSRDKKLPTPRVVRHRGRSKVYRGPRLTRLVPAPSAALVADGQRPAGRHQRSLRGSSGLVLHVASTAFTSQPPRRPALSRGLVEAAGVGFHHGVQASPVRVWPGRAGHLDVRLV

SEQ ID NO: 60152 - protein, 476 aa, Desulfofundulus sp.
VQQTVKQKSLPLNNEKWARITETAEAYARQKDAFLVEYGHVKYLHYLGEKRKLRDELVSAGFVSPFGLQARQWKLALDDALYTLERQWEAAIVEVKEYLYRFEALTDEEKHYAFWLLYRHEKHSRDWKRIQAVFTGEDVANEEINLDVEGRAKVRKYLKRVFRRVLGKKPRVKKARSFAVDQQMYRVFATEKRQYIAVATLTPGERVVIPLAGVHAVEGNLRVILLPDEQAVEIHLTRGPRTYPPGEEEAGIDLGVTEVFTDDTGRKYRSEYGEALQEMSDHILDKSRKRGKLRALRRKFLEQDPSKARRILKHNLGLIKQTKRNKKYRTRCENEINRAFNEFYKERRPKIIAYEDLAHLRGKARSRGLSRKVNGWQRSIIKERLEYKNYIYSVTDPGPVNAAYSSQTCPMCGWVDAKNRCGDVFKCQKCGFAADADSVAALNLKSRLHDEEITRYTPYKKVKKILLERYRQKQVS

SEQ ID NO: 60153 - protein, 566 aa, Desulfofundulus sp.
MKKQKKKPINPEDGIKYTVCGEWFPEVYPAGRNLKWARREEDPLATEMRLFCACTRWAFNRLQEGRSREELKKEGQKLFGINSRFCDDAILKAKAIIESQRELLVLEVEETETKLARARKKLGWAEKGLGKAVEANDPVKIEKAKRAVHGRKARVKKLKTKLDELKTHQSNGTIPAVVFGGRSLWKGICKGRVSREEWRQVRQNRLFARGDETKGGNPNIKISYRNGDFSLSVTISHLSEQKGTDKKGRPVMTRAPRVTGKLWLPEKHRLKVWELLLSSAPYTVELLRGRDGRYRMHISFAITTPEPVTNPNRGYLGMDTNPDGVALANVGYFGHPEPWPEGFTVPHPKALHKFAGEFQVTVHPNGFLYIKIPELAYSRGYRRTYLIGVLAKVVVDTAKALGKPIALEDLDFGKDRLDTNKKFNRMAANFPFKKIIEAVMRRAFKEGIGVKPVRPAHTSTIGYYKYMERYGVIVHHAAALVIARRAIGFRERITNELKQKVQAVKEKLNRKVDSLPGEGRGMTRKVKRLFKRLDGKILVHNGLTRYKQESFYSIWHDLKELFLLSR

SEQ ID NO: 60154 - protein, 437 aa, Cyanobacteria sp.
MLRGTQQNLIDPDSNLKAILEFICGEANKLTNCGIYYARQLLFKTHKYVSKFDLNNECKRNKHFQAMHSQAAQQTLQSVAESFKSYKALTAAYQAGKLLNKPRLPNYRKPGLVTVSYPKQALKLVDGIVRVPLGTLVNTWFKLKYFEIPFPGNFPEDSWDYIKELRILPRNGCFYTEWVYQAASEKVELDPNNALGIDHGVANWLTCVSSMGTSFIIDGLHLKSINRWYNKQVSTLKDGKPQGFWNKKLAQITEKRNRQMRDAVNKAARLVINHCIENNIGTIVFGWNKGHKDGAEMGRKNNQKFVQIPTARLKDRIQQLCEVVGIRFIETEESYTSKASFLDNDELPTFGAKLEGWQPTGKRTERGLYRTARNHYVNADCNGAANIIRKVSTTSDLDLSRVCRGTLTCPTRVRFWSLVTAKQKLRLGLKTQGVASV

SEQ ID NO: 60155 - protein, 459 aa, Vulcanisaeta sp.
VRTVRLRLLPNGAQERRLRRIADATARLWNELNYARLVQFRETGRVDFEDTEHEFYHKYKCVLGVNAGQVINLNNQTWKSYFELLKLYKQGRLPKFVNKPSPPGFWKDKVLGKRELRILVRNDRYYIEPINGGEGYIILKDWGLKIKYAGRIKWSGKQGTLIIKLEDNRWFAYVPIEVGAKPAKSNPRGYVRGVYDRVQIEKPRGGNKAFIDIGLNNLFAVVFNHSDTAILIKGSTIKSEYYWWKREIKTYQSVRDWLRNHGFESWKKYHTYYLHAIYKQRERLRHYYRTAIRFLAKTLHEIGVNEVFVGYPYMVSQNNGNEYNTNIWWYAKIINWLSEVLEEYGIRLNIVNEFGTSKQCSICNMEHENGRVKRGLYVCETTGIKINADLNAARNIAKRVGYNAPIPRKILTYIVTSNGVKPITPKEGVTIETPTVETPPLRAGRGSFGLFWSSLESDG

SEQ ID NO: 60156 - protein, 365 aa, Clostridiaceae sp.
MKKGIKFRAYPNKEQQNLINQTLGCCRLIYNKGLAMRDEAYKNGLKVGYSQTSAMLTDLKKHDDFAFLKEVDSIALQQALRDLDRGFVNFFQKRAKHPQFKSKHHNHQSYRTVNQNDNIRIVDKYLKLPKLGYVKIKQSMKVGKINNVTIERTPSGKYFVVLNVDFELEFKPNKGGSIGIDVGIKDFYSDSNGNVVHNPKYLEKSMRKLIREQRRLSRKQKGSNNRNKQRVKVALVHEKITNQRNDFLQKQSTILVRENQTICIEDLKVKNMMRNHKLAQHIGSVSWSKFFDMLSYKSVWYGNDIVKVPTMYPSSQTCSCCGFKNPLVKNLAIRKWECPECHTKHDRDTNASINILNKGLQTRSA

SEQ ID NO: 60157 - protein, 401 aa, Streptomyces sp.
VSVIVSPVKRAFKYRFHPTDVQAAELSRTFGCVRMVYNLALAARTEAWVRRERVNYNATSAMLTAWKRTEELAFLNDVSSVPLQQTLRHLQAAFTNFFGKRAKYPRFKSRKRSRRSAEYTTSGFRFRDGRLTLAKMAEPLAIVWSRPLPEEAQPSTVTVSQDAAGRWFVSMLCDDPSVKSLPVTDAAVGVDVGLDHLLTLSTGEKVANPRHERRDRAALARAQRNLARKAPGDGSNRRKARRKVAKIHARIADRRRDGLHKLTTRLVRENQTIVIEDLTVRAMVKNRSLARAISDAAWSEFRSMLEYKAAWYGREVIAVDRFFPSSKLCSHCGKLAKSMPLHVRTWTCEGCGTTHDRDVNAAKNLKAAGLAVSVCGAGVRPQRRIPGGQPAAKQKTPRREP

SEQ ID NO: 60158 - protein, 165 aa, Streptomyces sp.
SRPPEELLPTGAVVGIDVGTVHFLTTSEGEHEPNPRFLATVAEELAEAQRHLAAFPKRTRQRTRAHRAAARRVARPHARIRRKRLDFHHKTARALIADNDVVAHERLNTAGMTKSPAPRPDPGNDGAFLPNGAAAEAGLNRSILDAGWGQFLAILANKAASAGRL

SEQ ID NO: 60159 - protein, 204 aa, Streptomyces sp.
VTKSRPPEELLPTGAVVGIDVGTVHFLTTSEGEHEPNPRFLATVAEELAEAQRHLAAFPKRTRQRTRAHRAAARRVARPHARIRRKRLDFHHKTARALIADNDVVAHERLNTAGMTKSPAPRPDPGNDGAFLPNGAAAEAGLNRSILDAGWGQFLAILANKAASAGRLGTTTSSAPARPTCTSTGNRCTPSATACRTRRSATRS

SEQ ID NO: 60160 - protein, 412 aa, unknown
  TnpB Polypeptide
MRSQKIRLKLTKEQEVLALWYSKVSRNFWNLLVDIDKRNNKGEFDEILNKNGNNTYYSKFHNRDIYSLNKTDYLNLAKIVVAKNYEKDSENWSWYYQPNQSFIYGFISRELVKIRYRNKGKLNFRTIDKIQPNFDVRCDVSSDNKRPSRIYLKENGKLQIPTIGDVGFGSVRKGFDLSCKKQIANVSFDGKYWYLSYTEDIQNQVTNLPDYTDGLGIDLGIKTLATVSDGTKVPNIKTFRRVRILNKRLKRLQRKVSRKYLINKCNKHNKTKNIIKLERQIKLIYRSLRNIRINHIRKFVSELVKKQPQYIAIEDLNVKGMLKNKHLAKDIANCSFYTIRKHLIKKSTERCIAVRLVDRFYPSSKTCSNCGGYKKDLKLNQRVYHCNHCQENIDRDFNASLNIAKTDKYVLA

SEQ ID NO: 60161 - protein, 412 aa, unknown
  TnpB Polypeptide
MRSQKIRLKLTKDQECLAWWYSKVSRNFWNLLVDIDKRNNKGEFDEILNKNGNNTYYSKFHNRDIYSLNQSDYLNLAKIVVAKNYEKDSDNWSWYYQSNQSFIYSFLSRELVKIRKRNKGKLNFRSVDKIQPNFNIRCDVFPNNKRPSRIYLKDNGKLQIPTIGDVEFGSIRTGFDLSCKKQIANISFDGKYWYLSYTENVETSAGNLPYYTDGIGIDLGIKTLVTVSDGTKIPNIKTFRRVRILNKRLKRLQRKVSRKYRINKCNKHNKTKNIIKLERQIKLIHRSLRNIRINHIRKFVSELVKKQPQYIAIEDLNVKGMMKNKHLAKDIANCSFYTIREHLIRKATERCIAVRLVNRFYPSSKTCSNCGSYKKDLKLTQRVYHCNNCKEKIDRDFNASLNIAKTDKYVLA

SEQ ID NO: 60162 - protein, 413 aa, unknown
  TnpB Polypeptide
MHYAYRFRLNPTAKQRELLDYHRDTCRQLYNHALGEFEQIPDSAGTLNQRVRQVRDQLTDLKEWWDELNDLYSTVAQAAVMRIEDSIKALSELKQNSYNVGSLNWKAPQEFRSFTYVQSGFEFDSKNGQPVLSLSKLADIPIVKHREIPDDMTVKEVTIKKEPTGEWFASFVVDGKQTPEKPADPERCVGIDVGILKYAHDTDGTAVESLDLSDERERLERAQRDLSRKEHGSNNWERQRKVVARRHADLKRKRRDFLHKLSAYYATEYDLVAVEDLDAKGLVELPGNSRNRASAAWGTFKRMLEYKCEREGAHFVAVDPKDTTKECASCGAKTDKPLWVREHSCPSCGFEADRDANAAINILSRGLKQLGVGHSESTPVETELPVDTPISAKRVIEAGSPILKERTASAVSE

SEQ ID NO: 60163 - protein, 414 aa, unknown
  TnpB Polypeptide
VSYSVRGEEPVVIEALRVRALPEGSYDHLLEFLKLYRDAVQLVIDRIWSINEKLSKRKLHKLFYNNLVSMGFRAHHAKEIYVYAESVVKSARGNGGRKPVLRRLSARVDRYDYRLDLDSMTLTLKLHSGYEAKLKLVSSKQRVEKFKGWGNYELVVKYDGSGFWVSVYFRRAVKAVKTRTVMAIDLNFDNITLAILTLDGRLVKLKRFRTPLRKVLTHRIWVERIQRRYPRSWRFIKGVRKAVDRHGEKIKNISWGYAHKVGDLVAELASKHSSIIVLEDLDKLRENNKRGREFNKRLGLWIYRRIQFCIEYEAKERNLEVVKINPRSTSSKCPRCGKKLAEYRHRVLRCRKCGFVGNRDVIATINLYKKCVSKYSRCGVPGVALNAPKPDENPSGVQGNRDDAMKNIKPHELI

SEQ ID NO: 60164 - protein, 441 aa, unknown
  TnpB Polypeptide
MKAKRTGRFKVKPSHPDYEMIRNHTAEAKEIYNYANYVIRQLYFKNSENHKYSMEFIYEYSELLEDFNSYLSEKVQFTSTFYRIICEFARIKKYSLSSKMVQSVVNILKRDWKSYWKLLKLKAEGKYDKPVSIPRYKKKYSIVEYNPQVISRAKLKNGYVGTAGMKEGFKIPKFYREYDCKSARTLWKNNELYMEIIYEKEVPEAKLNKKVASIDLGGKILMAVAYNFNRRGICISANMLRSLNHYYNKMIGAMTSILPKGIKISVAIRNLWRKRDEQIRNLLGYYINRLIEEFKSLGITKLVIGKNKEQKQEINLYSKVENRNFCLIPFNKLIGILKCKCEENGIECIEQEESYTSKASFLNSDFIPVYGTEDRGYEFSGWRNGRTYKIKGKKQKIHADLNGAFNIMRKAEHELIEKVNFLDNRWIFPAGKFKVKNLNYI

SEQ ID NO: 60165 - protein, 449 aa, unknown
  TnpB Polypeptide
MLKQKYTAVTQLHEINNKDIIEYFENASVYFCRLQRKAFHIFKNENIKGNKIDYNSLQKKFMIDYKISKRTASSILKEVQGRIKALAELKRYEIFQKEQKIKSLKKEIEKLDNKILEFQEKIKNKIKVSHFKYWNLKKSRAFKKMKLNKFQMKLEQLKWEIETGHYKLCFGTKNLLKSNKIEFLLQRDSQMSYIGSKEETGRNQMFQLSYNNRNNQFDIKLRKDFGLDVETKYVFGKCYFNNHKNRLIDALETKNSTPLTYSIIRKNGRYYLHCTFEYRIEDKSDFLTRKPYGTIGIDFNKGFLTVSEIDRNGNLVKTDILKYRFGKGNKTKSDLESCISAILKRSLEMGKNVCFENLNFKDKKSKRLKSKTDKGKKYNNMLHSLAYSLYDKLITNMAFRNKVGIIKVNPAWTSWIAKNKFCDKMKLNIHIGASFVIARRGLGIKDTVK

SEQ ID NO: 60166 - protein, 518 aa, unknown
  TnpB Polypeptide
VVIIKAKMYISVQFKLQLNSPDRKKLLELMRKQSSAIRSAYKLLKTKNSHSQIYQKLRQLFPDLPTKYIDSAIYKAKQYPTDKKVVFGSKALFEKLCKNKKKESKERQQLKRKWKEQRQGTLISVGSKADKGNRLLRFESINGELHLRITTGNREFIYTKVLRKPSNEKDKWNTFLAMLWESSKSKVYFPYTVELKLRDGEIYGNISFEVPTPEIWLTKEYGVIAIDTNASPLHLALAEVNPDGNLLSYQTISLHEFMSYSKNRRDYEEWLLAHRIVEIAKEKGKAIAIENLKKVNKGFRGNGKAKLRKRLHHWNFKGLLSKIERTAKLNGVEVIKVNPAFTSVIGALKYAPQLGIDKDIAGAYVIGRRALGFKEEIPENYLKLLSDREYLEYAIYTYEEKEKELKEQFKKETNKYKRNAINSELKQVQKAKDLLLEKLKSLQSEPSSCEGAKGRNSEQGLVKASQSVWQVLRVAFVLPLLGKFFVRDFSPLKSVMIEGKWQRRTSRSVPLEVGGTPR

SEQ ID NO: 60167 - protein, 448 aa, unknown
  TnpB Polypeptide
MSAQSATLPATTAANASAPATRSVVITYRFRLEPTPEQAQRFWQYAGARRWSYNWAFKRRQEHYHSTGKTLSFADLCAELTTLKSQPETCWLKTVNAQLLQQGMRDLCRAFTNFFEKRARYPKLRKKFKHTPTFRFPQSIGLPAHNQIILPGIGVVEMRQSREIIGFVKSATCKWECGHWFVTLVAHQEIEDKPKAILTEENTIGLDLGLKDACVTSEGKIIPALRSYRKTQVRRRKAARVVSRRKGAKKREKPSNRFKKAKAKAARIDRKAANQRADFLHKLSTRLVQDHDGIVIEDLLVKGLGKTNLAKSVFDAGMGMFRRMLEYKADRGSRTIIVIDRWFPSSQLCSVNGCDYRTQVLTLGDRVWTCPQCGTIHHRDVNAARNIEAEGLRIYRTWAQDQSPLNGGGVAAGQVETLNARGCCVSLPNGSSGSNTDVVGQKRESHEL

SEQ ID NO: 60168 - protein, 492 aa, unknown
  TnpB Polypeptide
MTFIPCVAERRGRIPLRLKPESPCDSSNGERAAHNAATCPPLRSSAPRARDTSRARIVGSIKTARGNWLRFALTTPTRKLAITPASNTRYGCTRRLDRVFQAFFRRIKVGQEPGFPRFRGRNRFRTLTFTHGDGATFTETRTIPLRHPFAATVKIQGVGAVPLVYHRRLGEREGGQIAAHVKIGTVEIIHTGDQWVAVFSCTLTIPTPTQKDAYPILPATGIDVGLDYYASLADGEQVPNPRFLRKSMGEVKRLQRKLDRARKDRAAEKRAAKKRETAVVTARAAGAPIPPTPPVEVWVSKRGKKRPKRTAERRARVLSRAVARRHAKIGNQRAFFQWRLARSLIFRFGLIAVEVLTRRNMARRPKKTVGEVKTKEAGQPVYAANGVAAKSGLNKSIYDAAWGMFVQRLSSKAEEAGCLIVGVRAAGTSQRCPRCVRKTPKALKNGGIPVHAGVHSRATWPPLRLFALAGWRAWRRQPPRSPRIYPGEQSHG

SEQ ID NO: 60169 - protein, 392 aa, unknown
  TnpB Polypeptide
MSTRTIALTLRPIAAEKIALLRLQEHFNAACNYISSMAWDAQEFNKVRLQRLVYGDVRAEFGLMAQHTIRAIAVVADAYKLDHDTKRTFRADAAVVLDTPRLYRVKHNRARITTLDGRIKVELDIGGHQRRQLADAVKLAEADLIRDGKGRWRLMVSAHYADPPTHDTEGVVGVDLGRTDIAVTSEGATFSGKQVTATRDHYARIRRSIQRKASKGTRSTRRRARAVGKRIAGRERRFQRNTNHIVSKRIVGHAVESERAIACEDLTGIRERANRQPRTKAERRRSNSWAFYQLRAFLAYKCQAAGVPFVLVNPAYTSQICHCCLHIGERSGKRFSCSNPACACRGDADVNGARNIARLGAVLMRPGGPALCCLYQPDARATTSPRASALGT

SEQ ID NO: 60170 - protein, 185 aa, Paenibacillus sp.
VKAHTSKRLERLHLQRHRLIKDLFHKASHHIVRLAEEQRIGTIVIGHNAGWKQESAMGRRNNQSFCHLPHKQLIAMIQYKAAAKGITVILTEEAYTSKASFLDKDPLPRFGEGGTYLFSGKRIYRGLYASQAGVIHADVNGAANIIRKVFPNVSAKPSDGIEGLDGNQSINVSTPRVLSILKPSG

SEQ ID NO: 60171 - protein, 391 aa, unknown
  TnpB Polypeptide
MLLCKKIRIEVNTQEAEALEFMQGKCRGLYNWWIMRLRNGERWNLERAKKSLRESKTHDPDICFVYGKLLAEVYFRLDKAMQAFFKRVAEGAQKPGFPRVKPRHQFFTLCYPAMYLIVEGSTIILPTGGGGNWGPKRYPNIRAKLTETPPSCFREVAVSRDARGNYYCSFVYEQAEQQASQDGIVAFDLGIKTLATGYSNQGRFYHIGGFKGYRWYNKQLDKIRSKRDKCKKKSRRYIHLSNVYKRVSEQKRNKQRDCLHKASHLIAGRLAERAVVIGDLSQRQMVIKKQEKETPKERRKRQLRNRMVYNDWGLYSFMQMLAYKCLRFGKELHIISERGTTKMCHCCKRKKDMPLWQRTYRCGNCGLVMDRDENSAINIYERFLARLGPHT

SEQ ID NO: 60172 - protein, 376 aa, unknown
  TnpB Polypeptide
MITYNAELIGSIKDMNLIMTLMEEYCIIVNEASKLQFEKQLNSITKLHNGFYYPTREQHPNFPSQMVIRAEMESLASYKSIKSNKHKIIRPFEKHNLSLRLDKRIYSKTDDKTKIKITTKEKKKEFQIILYPKLQELLDKYEYVDPLIFIRDSKLFIALTFDTAVEMQKESLCLGVDLGIRRVAACSDGRLIIDKKFNKEKRKLRYLKSQLQSKGTKSARKHLNTLKHKERNKNKNQTHLVVNEILKTDANIIALENLKGIKAKKHKNQNKNAISQIPIFETRRIVTYKAKNMGKHVCLVSPAYTSQIDSISGIKEGLRKGCRFYAKSGLVYDADINAAVNIARRSKHPISQGDLLDGQGTVNCPIACKSFLLERV

SEQ ID NO: 60173 - protein, 394 aa, unknown
  TnpB Polypeptide
MIKSYKYKLYRSDKNDVLRKDIELYSEVYNHCVALYNRFYKIYKKHIGKYDLQKHLTKIKGRYKPEWKELGSQAIQDITDRLDKAYKLFFSNLKRKVKASPPSFKGRYHYKSFTLKQAGYKVDQKGDEITINKKKYKYFNSRDFEGKIKTLTVKRNHKGEIFIIFAVEQEMKLRVGFETGKTAGFDFGLTTFLVDSDGKKFISPEYLKVSFKKLQVLSRNLSKKEKGSNNRKKAKLQLISLHEKIVNQRNDWQWKLALELVRSYDVICLESLSFLQMQKDKNLETNKQKKNRARKVLDLSPGSLFEKVKYKAVEHDKKVVFIDKWFPSTQMCSNCSHVMGRLDESIREWTCPLCGTHHNRDHNAAKNIKREGTSSHGIGCVSLENTCALEPLPF

SEQ ID NO: 60174 - protein, 408 aa, Cyanobacteria sp.
LKQFLTIVCKLQPTPEQVLKIEELLKAFADGCNYANQSVKASITSKTTIQKLVYQSLREQFGLSANQAVRVCARVGANRKTAKLKDRPVKEFKPTSADYDARIFSFREKDWTVSLTLLNGREHIKIDAGNDQRGKLKGKTPTSAQLCKHRDDKYYIHIQYKGDASNLVKTKNVIGVDFGRRDIAVTSNGDKWDGSGITKARDRFSRVRASLQTKAVRSKRPASLTKGTRTTRRRVRNILKRLSGRERRYQTWLNHTISRAIIQDALKSSSIVAIENLTGIRDRTNQQPRNKTERRRSNSWAFYQLRQFLEYKGIQSGVEVIAVSPRYTSQTCHRCLHIGLRSGKRFGCTNKGCNWHGDADANGSEMIRLLGLSVTQAEGSKILSCELSWDSSGLLKAPSMRERGSLLS

SEQ ID NO: 60175 - protein, 512 aa, Methanosarcina sp.
MLLTYKIKHNRDFSEELRKARKVAEFCIEHRAQNRTLEPPPIQRTGSSGPQLSPSSLPLSSPFPLLSSALSPSSASPSSFPLSVSSAKSSNDSSISSSTHPFSDSLPGADSFSGKDSLFPADVRHIGLRSTISGQIIRKYSRNRDLKSMKNVKLIVPSKAVNVDREEKTLEIPCLKLLLDYHFSSNFKKISQIEIDNVYAYVAVVFQDEKPDSTGRYIGVDLNTKGHIAVVADPESGKVWKFGKMRYHTHKKYENIKKRLYTKGKYKRLKAVKKREKNIVKDLNHKISRKIVDLALYSGCGIKLENLKGVKKLNGKAESVGKGRNKKSVEKKKNQNVGRSRSEEMNKEVIKTENEIKAEIKTKIETKNKTKTRRENKAKKHIWSNEYSLNSWSFHQLQQFIEYKARLQGVEVVYIDPHATSKRCSRCGLTGNRRSKEFECPHCGHVDHADVNAAFNIALTPKGNGQFSAERDAGKGSPDTPQKILARTLLSKRKASEKTSPYFAWEVCQFLA

SEQ ID NO: 60176 - protein, 418 aa, Lyngbya sp.
MFTMNYQYRVYPSKNQEVRMISWLEMCRGVYNYALRERKDWIKSRKCDINCCSLESEYIIPADATYPGYYQQQNALTAIKNSLPHLKDVQSQVIQEPIRRVETAFVAMKQRGHGFPRFKKFGQYRSFLFPQFKTSPIKGNKIKLPKIGEIPIVLHRPIPDGFAVKTVRVTRKHSGWYITLCLQIDVNIPDVMPHGNAIGIDVGLSYFLSTSEGEQVARPRFFDKLQRQLKLLQRCLKRKQKRSNARAKLIQKIGRIHEQIAASRLDWQFKLAHHLCDQSKMIFVEDLDFRIMAKGMLGKHTLDAGLGQFINQVLPWVCFKRGVYYGKVDPSGTSQTCPDCGTRVKKDLSVRIHKCPECGCVKPRDVASGQVIKARGLSGVETASGWELSGCQGTGARQDRVKDEILKSDLGKPTLYCS

SEQ ID NO: 60177 - protein, 397 aa, unknown
  TnpB Polypeptide
MRDLHCAHARFVWNLAVEQHSWWWPGRGSAPGPAERQRQLAGARAAEPWLAGGSSSVQQQALRDFDQAMAAFFDPENPAGKPRFRSKRGTQGFVIRDTKVRRLNRKWGEVHVPKCGWVRFRWTRPLPEKLGMARVTLDRAGRWHVSFPAPQPALDRQPAGAAAGVDRGVRTALVTSGGQHYRVPRISDGDAERYRTLQRRLARQRKGSRKREKIRLAMACITAKVIDRRRDWAEKVSTRLVTDHDVIVFEKLNTKNMVKRPNARPDPEQPGAFLPNRARAKAGLNRGILASCWGTLATRAEQKADASGASVIYIDPKHSSQQCRMCGHIARESRESQALFRCIACGHEDHADANAARNILARGLAAMGVPAHAPGHGAHARVRRRSSGAAGTTPSAT

SEQ ID NO: 60178 - protein, 210 aa, unknown
  TnpB Polypeptide
VRHVYFSATELQSCKELIDFSMNELYVDSTGTHADYPHFFRKSQEKLAREQRRLSHCERGSSRYMKQKKKIARLHAHIARQRKDYLHKESRKITNFYDLVCIESLNMKEMSQDSRFGKSVHDNGWGMFTDFLSYKLERAGKKLVRIDKWYPSSKICSCCGKLKKELKLEDRMYSCICGNQMNRDENAAINICREGLRILEVELDAERKIS

SEQ ID NO: 60179 - protein, 377 aa, unknown
  TnpB Polypeptide
MDIKRAYRFRFVPTPEQETILARTFGSARFAYNYMLRLRTDAWFNKQKRIGYHETSALLTGLKTKPEFEWLNEVSSVPIQQSLQHLQRAFNNFFSHRAKYPTFKKKDGKQSISYVSSAFKWDGKELKLAKMDEPLNIRWSLSIPKAAKVTTCTVSKDCSGRYFVSMLCDDSVSAKPEVDGQVGIDLGLTHFAILSTGEKIASPNTFRKNEARLARLQRRLAKKQKGSANRAKAKMKVARIHANISDARKDFLHKLSTRLINENQVIAVESLAVSNMQKNHCLAKSISDASWAEFVRQLEYKALWYGRTLIGIDRWYPSSKRCNDCGYTIGSLPLNVRGWTCPECGVVHDRDINAARNILAAGLAVSVCGENVSPVLM

SEQ ID NO: 60180 - protein, 377 aa, unknown; identical to SEQ ID NO: 60179
  TnpB Polypeptide

SEQ ID NO: 60181 - protein, 643 aa, unknown
  TnpB Polypeptide
VGGRRQPSRGVYPAPTRSRGRPRLGVQDEGTHPARHSRAAEQVERGAFPRRRHLGDGDGRRGVKLHAVGPGVRGDLVAGLLRARRQGHDRKQSQRLVPAQYGIGVVGQGHHGSQVVALTNTRRRGEQQGCGVVGPQEPRGGRSHRSGPSGRGGVVRPHSTPGGAPAGLLARRAQVLCRWAPTVAPMRSPAPITSTSSVRLRLKPTNAEAAVFLRASGARRFAFNWALAQIKANHDQWSAEATYGIPRPGRTRPFSYFDLTLRWDAARDTVAPWCREQSIWAFRYGIQAAHTAHSQFLKGQSRFPKFKARRRDRTRFTVSGANGLHLQPGRLRIPKYGWIKLAAPCRAQSRLRRLLVRGRARVLNVTMSRDAGGAWYAAICVERTMTADPAPYNRPAGTVVGVDVGIKTCAVVATSDRTLAETLEASRALRDALSHIKHLQRALCRAQKGSANRAKARLRLGRAHVQVAALRNTRLHQFTAKLAKSYGVVVVESIGTANLMRNHCLAQAIGDQGWGELARQLGYKAPRHGGVTLPAPRFFPSSKMCSACGAVKSKLPLSERTYRCDVCPLVVDRDINAAANLAAWGERKLGLVPVSDSQVGDRHPGGPSAQNVEHACGGSNEPVTLTAGALVEAGTSRPRTRVA

SEQ ID NO: 60182 - protein, 364 aa, unknown
  TnpB Polypeptide
MKKTFKYRIKANKDTLARAQKVLESCRILYNLCLDQRKNAWKSYQKSISSNTQKKQLPDLKGGFPEFNKVPSQTLQDVVERVDKAFQGFFRRTKSGEKPGYPRFKGSNRYDSFTLKQAGWELKGKYLAISKIGTFKIILHRPLEGNIKTVTIRKTLADKWFVCFSCDNIPAKPLPKTGKIIGVDMGCESFLTDSNCRKIDNPRFFKHSQDILKARQQKLSQKKKGSNRRRKEKILVAKIHEKIFNQRRDFHFRVANQLLKENDVVCIEKLNSWNSWRPLNRSMRDVAWLNFFSILKAKAEEAGRQIVEVPARGTSQICSGCGKEVPKDLSVRVHNCPFCHLVLDRDYNSALNILRLGASLQGFS

SEQ ID NO: 60183 - protein, 444 aa, Lachnospiraceae sp.
VDRNIFEEDAALRAADQMLIDELYPVSGSTRLYHFQSPKTKKRTSSRKKDNPASYMAYVFEGYPTKEQAAYFCQTIGNCRFLWNRMLDDHRHGIYHTPAWYKKQSELSWLAKADSLALANVQLNLEAAESDAKSGDKQKPRFHKKGVCRDSYKTNCQYLNGKSTITLEDEYLKLPKAGKVRVKMHRPVRPGGVLKSVTVSHEPDGKWLFSVVFQYPEEPFKANEAIQKVWDSGCTDGFRMTGLDMSLPHLYIDADGQMPFYELKDSTVCFDKAYRRLEGRVAREQRKLSHMKKHSHNYRKQQRKVAKLYAKAKHQRHDFLRQMAVRLARKYDLIGIEDLDMQAMKKSLRFGKSVSDNGWGLFTLYLEEACRKTGSLLIRVDKWFPSSKTCHHCGHIYHDLKLNDRTYICPVCGHIMDRDYQAAQNIRDEAFRIFQEISRGKASA

SEQ ID NO: 60184 - protein, 386 aa, unknown
  TnpB Polypeptide
MLNTADDVLPIDINITYRYINIMVKKIIKAKIVGLTNIKEKLLNQEYDNLQEFLQLKDAFWWDKNLGKNLYSANKQQASRFYRKINTNKEYPISARKDLIQVEKRNTKITKYWFRIRVKGRRRFWVAIKPHQNIPDDVTFSESKILRRGKDFYVYLTIEKEVKIKKSYSNILAIDFGVKWIATVCGLDNLRPKFYGRELRRIRGHYFHLRKKVAKKKIKQYYKWISNEKEQRIVNDMIHKISRDIVNQAKETNSMIVFGKLKNIRKQNKGRRFNRKLNSFPYFKLAQYIRYKANWEGIKVVEVSEAYTSQICHKCGKKGIRNKGLFKCECGLEDNSDRNGAINIGKRVLGQVSKIGVSVNIPRTEAVSIKIPIRNSVGDLRSHLTC

SEQ ID NO: 60185 - protein, 369 aa, unknown
  TnpB Polypeptide
VRKSFKYRLFTNKNQELKLNSLLDSARFLYNCALEQRIVCWGQWHKSINYYDQANTLKEIRSFDEGIAQLNYSASQEILRRLDKAFQAFFRRLRSGDKPGFPRFKGRDRFDSITFPAYGDGIRLKAGKLYIQNVGSVRIKLHRPFEGKIKTVTIKQQNERFYASFSCDDVAPKILAPCTEEIGIDVGIKSFATMSNGEIIDNPKHLKHNEANLKELHRQHSKKRTRKTRKKLARLYAKIGNQRRDFLHKVSRKIVNRFGFIFLEDLKPKEMVNSNYKILNKYINDAAWALFFDLLSYKAEEAGRKLIKVNPRGTTQACSQCGKIVPKDLSVRVHACSCGLVIDRDLNAARNILRRGQRLCSKQEAVCFS

SEQ ID NO: 60186 - protein, 402 aa, Halorubrum sp.
VEYRRTAVIKLDTPEGADEYLRETVEQFKYCANTASEWCWHGDDGYHVTSKAKAEDVLYDQLRKDTDLTANLVQKGIRQAVEAIKSGVERLKNGQDTSRPTFTADTAIYDKRSATFHRDHVSLSTPDGRIECDYILPENPKTPPTKYVANEDYEFRRATLHRRDGDWYLHASMLKEDDDTDTTTGHRTVLGVDLGVNQLAVASTGRFWSADEFNHWKREYEKRRGDLQQCGTRAAHAAIAGVERKEDGRFEIFLHRVANEIVAEAAEHSCSHIVFEDLTDIRENIPQASWHHLWAFRRLYEYVEYKAKDQGIEAVQVDPRNTSKRCSTCGFTHDDNRHGADFECQDCGYQNHADYNAAKNIGLQYLRRRQNADTGGAPVDVRLNRGTLNVSGEYNPPASAKA

SEQ ID NO: 60187 - protein, 539 aa, Chlamydiae sp.
MSDASTRTYQTRIDDDLNAPLSAYASLMAHVEHNLFADIAVGKIAGSLKSRYLKDFQITARQFNATRVKLEGKIDSILQLLFSRIEIKKNQIISLEETITRLKNKQTLHQKKRRLAKLKYQLKKLETTHKDKKVALCFGTRKLFQAQFNLEANGYSSHEEWKNDWKQARVSEIFILGSKDESSGNQSCTASIAQDNSITLRVRLPDALSSQFGKYLHISNIHFAYGHDVIIAAIRNCYLRQQLFSLNDPAYKNHGRAITFRFKKDSKGWRLFASTGMQLPSHITCKEKGVIAVDINSNHLAVVETDRFGNPLQTLDIPLYLHNTSKDQTKALIGNASAQIIALCEQTKKPLILEKLDFKKKKAQLREKNPSYSRMLSAFAYASIIAHLKSRGQAKGVEVHNVNPAFTSLIGRVKFGSRYGFTIHIAAALCIGRRFLGVSERMPQGQRDIPDGKGGHVTLDLPVRNRSRHVWHQWGQLNKKFSVALTAHFRAVKTDPGVPKSDSCDGMLSDLVGETQHTNRQHNCSVDVSDLSMRLYRFV

SEQ ID NO: 60188 - protein, 325 aa, Limnoraphis sp.
MQSDLPEWVKETPCHIRQNAVFDAHLAFMKSRDAKFRSCRDRSQAIKFNDANFSSGTWYPRLTKGLTFTTSEPIPSTCEQGTQLVFAKGRWFAIFPQPVKLSKSESTGVISLDPGVRTFLTGFDGNRFLEFGSGDIGRITRLCQHLDDLMSRIAKQPSRKRRRRMRQAAHRMRTKIRNLVDEAHKQIAHYLTHNYSVIFLPTFETSDMVAKVKRKIKSKTARAMLTWAHYRFKLTLKHQAEITGTTVLDVTEEYTSKTCTHCGHVHSQLGGSKVFHCPECGFTLPRDWNGAFGIFLKALRDTASITFKGDSAIVALSGNSRKDVA

SEQ ID NO: 60189 - protein, 402 aa, Streptomyces sp.
MAQQVKRAFKYRFYPTGEQAAELSRTFGCVRLVYNKALEERTRAWSGEQRRISYVQSSAALTQWKKTEEFGFLAEVSSVPLQQALRHLQTAFGNFFGKRAKYPRFKAKKKSRASAEYTRSGFKWRDGRLTLAKMSGHLDIRWSRPLPAGAEPTTVTVSRDSAGRWFVSLLCDDRIAPAPATANAVGIDAGITSLVTLSTGEKVANPKHERRDRARLAKAQRELSRKAKGSVNREKARLRVAKVHARIADRRRDFLHKLTSRIVHENQVVVIEDLTVRNLLKNGKLARAISDASWTELRSMLEYKCAWYGRELVVVDRWFPSSKLCATCGTSRAKLPLNVREWTCDCGATHDRDVNAAENILAAGLAVSACGDGVRPQRESSRTGPSSVKQETQRATAGIPRL

SEQ ID NO: 60190 - protein, 431 aa, unknown
  TnpB Polypeptide
MTESERLLKNNKISQTKHETISRHEKMNCRTYTFKIQENSLNNQQKEFLKMIFIEQKWLKNYILNWCEQDKENKLTKFDTKITKITHKDKVMNDVEVELKYLSAQSKQCLVSRMYSNIKTLHTLKSKGLQKCGKLKYSKEEKIIDLKQYGCSHKIISKNRFKISGCKKPFKVNGMNQFIEIPNIEYANARLLNRADGCYVQLVCYIPKENKIKNEKINKTIGIDFGCSTSFTTSEGEKINVSIQESERLKRLQRKFARQTKGSKNWHKTLELIKKEYQKQTNRKDDISNKIIHKFSQYKTIVIQDEQLKNWSKNHHGKAIQHSILGRVKSKLKTKENVVILSKTVPTTKLCTNCGVYHDELKVWDRTFKCECGVEMDRDVHASKNMVWFYENNVGVERTNIKRVEMEALVLGVIRNSKNQLVSKKHEAYSL

SEQ ID NO: 60191 - protein, 446 aa, unknown
  TnpB Polypeptide
MTDKIVNRALKVRLYPSQEQKEFLNKSLGTSRFFYNYLLNEKIEFYKNEIEPIKEDVKLKSEKYKSFKATTKKQFKEKFDFAKECSDDCLNSTERNLQSAFNNFFKSLNKSRKGKMGFPKFRSKKEHKDSYTECHVKKNAFDFHNRKINISKCTPIYFKHREKLPKWYNKETCILKSITISKNSCGEYWVSLLFELPNFNSNQKPIDENQAIGLDWSPSEFYIDSECHSAKDYGYEPQKQKHAKQLAKLQRRLAKKTKGSVNYEKARIKLAKLEKHIADSRKWWIENESLRLTKNYSTIGIEDLNLQGIAKFLRNAKNVNDCAYGIFTTRLIQKGEELGTSVIKVDRYYPSSQLCHVCGYQNHNLKLSDREWVCPSCGEHHIRDYNASINLKNEAIRLSVPMRRGEFRSAEGVENVNSLVLQALNIGASVETERTTCESVQKAYSL

SEQ ID NO: 60192 - protein, 404 aa, Lactobacillus sp.
MFFSSIIKIRKEVINMVLKGIKLRIYPNQEQIEHIALNFGANRFVWNQMLDMIQQRYENNPESTFLSAYSLNYLLPQLKKEYSWLKLAESTALQATDHDLIEAFKGFFKHIRKQPKFKSKKFPKQSYQCKFISNNIALTDKHVIRLPKLGSVRYKSGQKISGKIKAVTIRKSTTNKYYAVVLVECENQVFSKTKRQVGLDVGVSDLLITSDSVKYSTVRFDKNLERKKHYWEKRLARRRLLAIKDIHKQKKYGLIEPKSLDQYKNYQKAKIMVAKYSEKISNQRKDYLHKITTQLVHDYDTIVIEDIKTNNLLKNHNLARAIANQSWRQLRLMLEYKCTWYDKQLVVIDPYKTSQICSNCGYDDGKHELDVRDWSCPNCHVHHDRDINASKNILNKGLGQALVK

SEQ ID NO: 60193 - protein, 435 aa, unknown
  TnpB Polypeptide
MKIFEYKLYGTESQFQGIDQGIRTTQFIRNKCIRLWIDKASKPKASRKSIGRYDFNNYCVELSHGFDWCAKLNSMARQAAAERAWASVANFYNNCKKKTKGKKGYPKFKNNVRSIEYKTSGWKLSEDFKQLTITDKNGIGTLRMKGGYKLQQEHIKKIKRVKLIKRADGYYAQFSIEIPNTEYVGLTDSLIGLDIGLESFYTDSNGNKIENPRFLRKAEKCLKLFQRRVSKKKKGSKNRRKAIKRLAKKHLQVSRQRKDFAVKTARCVVKSNDFVAIENLQVRNMVKNHKLAKSISDVSWNLFATWLKHFGEKFGKMVIAVNPKNTSQKCSNCGKMPTTKKTLDVRKHSCEFCKYEACRDHNAARNILIDALSTAGHAGSNDWGDESSTCLDANLDKQLLSENQEPLVPFGAGISRLQPGEDVKDIWVTYNWGIN

SEQ ID NO: 60194 - protein, 321 aa, Bacillus sp.
MLRHKAYKFRIYPNQNQEILITKTIGCSRFVYNHFLNLWNKEYFKNGKGLSYHSCSSMLPKMKKDESTNWLKEVDSIALQSSLKNLADSFSRFFKKQNQQPRFKSKKNPVQSYTTQFTNHNIAVLGNSIKLPKLGLVKFAKSQELKGRILHATIRKNGSGKFFVSILCEEEIQELTKINSVIRIDLGIADFAILSDGSKINNNRFTSKMEKKLKREQRKLSRRALVAQKSDITLFEAKNYQKQKLKVARLHEKVLNQRNDFLNKWSTNIIKNHDIICIEDLNTKGMLRNHKLAKSISDVSWSIFVSKLQYKADWYGREISK

SEQ ID NO: 60195 - protein, 158 aa, Bacillus sp.
MDRLTKAQRVLSRRIKGSERWKKQRLFVAKLHEKVANQRKNSLHHKSKELATVFDAVAVEDLNMKGMSRALKFGKSVADNDWVMFTTYLTYKLEEQGKKLIKVDKWFPSTQTCSCCGNKKEMPMSVRTYECSCGSIMERDHNAAINIKNEAIRLLALE

SEQ ID NO: 60196 - protein, 248 aa, Bacillus sp.
MTKQNKVYKFRIHPTTVQALIIRKTFGCVRFVYNKMLANRTAIFDLYKDDRESLKKQKMPTPAKYKAEFEWLKEVDSLALANAQMNLESAYKNFFAGNSDFPTFKSKKDRKSYTTNEVNSNIALLDNHIKLPKLKLVKINQHRQVPVGHNIKSCTIPMTPTGKYYVSILTEYEKQIVQPKLEKVVGLDFAMAELYVDSEGKKANYPRFYRQMMDRLAKAQRVLSRRIKGSERWKKATSFCCEITAKSS

SEQ ID NO: 60197 - protein, 417 aa, Lachnospiraceae sp.
MFLTQTNVIRGLSKKQYACLREMCQYSNNLYNVALYNIRQYFFNEKKFLNYESNYHYCKMNENYGLLQAGIAQQTLKIADRSFKSFFNLIKKCKAGDYRYHDVKIPHYRKKGGCFNLILSTNAIHVKNGMISIPMSHEFAKTHDIKSIQIPFPERLADRKIKEVRVLPNYDGTYFKIQYCYETSTKEPASNNGIMGIDIGVDNLASCITDNGTSFIMDGRKLKSINRYWNKQKAYYQSISDHQNQKWTHRMDALTRKRNNRTKDIMRKSAKYIVNHCIDNGIGTIVVGYNPDFKRDSDLGRRNNQNFVQISFGDFRQILASLCEQEGILYVEQEESYTSKSSFLDNDPLPKFDVEHPYIKKFSGKRVLRGLYCSADGTCVNADINGAANIIRKSSQNFRMEGLRSGLLASPQRIRVS

SEQ ID NO: 60198 - protein, 546 aa, Streptomyces sp.
MAEPKKKLRTIEAPFVVPGPSGVAIRDRLKNLSAEDDKVLRLVGGHLGHLASLDLKARCADGLDHNSDSWAVRKQGLTAGSSSRWAGAITKATHDQWALSRRCQLAHIQGLEAGVRTLTHRLSQPLGDKGTKRAPGGYRSKAEWFQKSRRLHVLKHRLDVARAEREAGVVHVVRGGRRLLNTRHNLAAAQLTEAEWRERWEAERWFLAADGESGKRYGNETIRVTPDGEVSIKLPAPLAHLANAKNGRYVLASTIAFQHRGAEWQGRIGANRAVAYRIHLNAAKGRWYLTASWAIPPVKTIPLETARAAGMVGVDTNADHFAAYRLDVHGNPIGAPKRFFYDLTGTADYRDAQIRHAISRLLHWATRCGVKAVGLENLDFTAEKTREKHGRKKKFRQLISGIPTGRLKARLVSMAAEQGLSIVAVDPAYTSMWGDEHWRKPLTSKKREMSRHDAAGIAIGRRALGHPIRRRTAPPPQHQSDAAGHRTAQAGPGVREREETRPRIPGSRTGCVPPEAERTRETRTPKTVRDVRSRQVWLQESLLLTD

SEQ ID NO: 60199 - protein, 448 aa, Streptomyces sp.
MASELGLVKRQFGHRARLALSPVEVRIIDEQAHAARTLWNCLHSWWRMMPKSDTKLYLADVAIRQARKDLDHLAVLPAQAAQAVLKTYHRAWVNCWEGRAEEPNYKGRFRSVMSVDIPQGRDLNIVRVHRRWGMVSIPKVGRVRFRWTKDLPVGKRADKENRITGARLVKDALGWHIAFRVQVLEAKPDPHQGPEVGIDAGVNIPLALSDGNHQDHGRPPRLQDGTADRDKWLTPKEKAKLLELERQAAHQKSFRKKGEKPSRRLQHTYDQIKQLRATATRRALDWQHQTTTHLARTYSTVVVEQLDILGMTKAPVPKPNPAGAGAFLRNGAAAKAGLNRSIAQEAWGRTVTMLTYKTARYGGRLVKVPAPHTSRRCSACGVITPGSRESQEKFVCKNSDCGFVGNADWNAARNVLHLYRTGHVIVEVPAAGRRGRRAGKTVKPVAAR

SEQ ID NO: 60200 - protein, 438 aa, Streptomyces sp.
MSRFRMYPTRGQEQQMLLHCAHARYVWNLAVEQHSHWRGGRKSAPGFAEQCRQLTEARRDNEWLGAGNADVQQQALKDFAKAKSARFTSGFGEPTWRRKFRHEGFRVIGTDRVPEHNTDGSPKLNAKTGKQVMGRSVVLQKLNRRWAQVKVPGCGWVRFRLSPKGKGAELPSAKTFRVTFRNGQWHIAFAVIPQPIDAPGTGEAIGIDRGVAVTAALSDGRTLNCPQLTTRERAQIRKHQRRAARAKKGSPEKAAGYAKVAKLKAREVNRRKDWCEKTSTMLARTYDLVRFEKLNIKTMTAKARAKPDPDQPGQYLKNGRAAKAGLNRAILAQGWGLLRQRTGHKAPGRIEDVPAPYTSLRCSACGWIDKNSRKSQAEFECSSCGFTCNADTNAGINVAAGQGGVPRPRRTAGAGGATPRKGSSVREPQPAWVGIPLF

SEQ ID NO: 60201 - protein, 468 aa, Streptomyces sp.
MVVKKRVNGTKFRSISIFGVLCVMCVRSVVGMQLRYNYRTYPDASQRRALARAFGCARVVWNDCLRDRKEAHAAGMPYVTSAELSRVRITQAKRTEERAWLAEVSAVVLQQSLRDLDTAYKNFFDSLKGKRQGRKAGPPRYKSKKDSRQSVRLNTNAFSVKDNGTVYVAKVGDLKVKWSRRLPAAPTSLTVIRDGCGRYFLSFVVDTEPDILPETEAECGIDLGLSAFAVLSDGTKVASPRFLRRAEKKLRRLQRELSRKVKGSRNRAKARARVARQHARVADRRRDFHHKASTQIIRDNQAVYVEDLAVYGLARTRLAKSVHDAGWSAFTGMLEYKAARHGRTFAKVDRAFPSSQICSACGFRDGLKPLHVREWTCGACGTVHDRDHNAGRNVLFEGRRIVAAGRAETPNACGAPVRRAPVPAQRGEAGSPRKGRTTQAGIPGLRTREHVNVRGVDGPAGSWRNGLG

SEQ ID NO: 60202 - protein, 434 aa, Streptomyces sp.
MAIVPANTWRKEGKLKRQRGHKARLYLTPSQLATADGQGHAARAMWNCLHSWWTMLPKDKRTLQAADAAIRQSRKDLDFLGALPAQAAQQVLKTYFRAWVNCWEGRAGEPNFKARFRSRMAIDIPQGRDLQIVRLGRRWGRMWAPKIGHVLFRWTKDLPVGKRAGKSNKVTGARLVKEADGWHVVFRVQTEVPDPEPHTGPTVGIDRGITKPLALSDGTFREHGDWLTPGESERLRRLEKESARKRHTRKKGEKTSRRLARTYDQIAQLRAKAKRRAVDWQHKTTTTVAETFSRAGVEDLAITNMVKSAKGTVEAPGTRVRQKAGLNRSIAQEAWGRTVTLLEYKMADRGGIVVKVPAPNTSRRCSACGFITLGSRETQARFVCKNPDCGFECNADTNASRNIDHAAGLAVSGRGAVADGQAEKRQPPAQPRAA

SEQ ID NO: 60203 - protein, 398 aa, Streptomyces sp.
VKTAHVKRAFKYRFYPTDAQAAELSRTFGCVRKVYNLALAARTEAWTRQERVNYDQTSAMLTAWKKTEELAYLNEVSSVPLQQALRHLQVAFTNFFGKRAKYPRFKSRKKSRKSAEYTTSAFRFRDGKLTLAKMAEPLDIVWSRPFPEGAAPSTVTVSQDAAGRWYVSMLVEDPTLKPLPAIDTAVGVDVGLNHLLTLSTGEKVSNPRHERKDRARLAKAQRQLARKAKGDGANRRKARQKVAKVYARIADRRRDNLHKLTTRLVRENQTIVIEDLTVRNMVKNGRLARAISDAAWADFRCMLEYKAVWYGREVIAVDRWFPSSKLCSTCGTLRDKMPLSVREWTCDCGTTHDRDVNAAKNILAAGLAVSVCGAGVRPQRRTPGGQSATKQKHLRREP

SEQ ID NO: 60204 - protein, 401 aa, unknown
  TnpB Polypeptide
MAEQIIKKTYKYRLCPTKIQQEILERQLSLCRWLYNYFLEERRGAYQKDKTKITCFDQIKEIPKIKKEKLELKKVYSQTLQDVVRRLDKSFQNFFRRVKEKQSRKKQKVGYPRFKGYWRYDSFVFPQSGFQLKTNKLNLSKIGSLKIKLHREIEGSIKTLTIRRTRTNKWYACFSTEINKELPEKKEIKNAVGIDMGLTSFLTTDKGEKIDNPRYLIKSEEKLSKFQRKYSKKKLKSKNKSKSRLKVARLHEKIANQRLNFLHQLSRCLVNNFQLIAFEKLHIKGMTRNKYLAKSISDASWGRFLQQLTYKAVEAGTWAIGINPKETSQVCSGCKTTVQKILAIKIHKCPQCGLIIDRDINAARNILQLALNTVGTTGINACGVGRMLLTLKQEAIGFNRW

SEQ ID NO: 60205 - protein, 537 aa, unknown
  TnpB Polypeptide
MAKNQTYKAFTARPSHVMDLNGVLLDSAPLMVELASEVRDLSAYATYVVRNDVALGDKLAKVTATQPAVAGQRAGVTMPEFLVPDKKDENGNTLTDKKTGAPAKIKTGKSRKERMFRHRVVTEYRAWEERIKAANDESSKHVSQGWKRTVNASPPSYGGDTINLGAVDSQYAVIENDPLVDGEIILKMVIQGKWYRLIFKFDNARFTEGKVTLPLIKLEDNQPVFIFSVVTDNPVVQFSGDYVLGVDVGINNYATVAVINSSTGKIVYETTLSQRVHSLWNSIRASERQVKQLREKAEPILYDRQAKMAALDEAQLHREAASRKKKELARIAAQEIAYLSHFWDNAVVAVEDLSWVSNTMQNGRWNRGELVKWLSHYVEQNGGWVVSVNAADTSQVCHLCGEDVYRPTHRVSICPEHGEMDRDVNAAANIAARAVPKVEKARNTRANNRRLQPQAPLKTPVARATLKYPGQDRTKHKPTPKRKKHRISKGVNLPTSPARVNLTSVLADCRTPGDVAGTSKAAIIQGTTTDYRLCSPI

SEQ ID NO: 60206 - protein, 408 aa, unknown
  TnpB Polypeptide
VSDILILCERHIIKPTNPIFAECDSLSFLAKNLYNSTLYYQRQSLFDSDFQNYYAVNRAFTHTNQPDYRALPAKVSKQVQMLVDKAFKSYFALVKKKKTEGYSPKVKLPKYLDKVAGRCVVPYPKDALSLKVEGQVKLSKTSITIKTCVSSETIQGARIVPKGNHYVIEILYKVASKPLRSELPERVAFIDPGLNNLMTITSNCFNPILVNGRPLKAINQLANKEIAKLKSKLSERDLYMSPLLQSVYSKRARRLTDMLHKITTQLVSHLDSYNVDTVIFGHNIGQKQDINLSKVTNQNFVQIPFIQLITQLQYKCQLEGIRFIVTEEAHTSKCSFLDKESVERHKRYKGKRVKRGLFKTAKGIHINADVNGSLNIGRKYLTKAGLYTDKLNQRLIRFMVNPQLVNFV

SEQ ID NO: 60207 - protein, 242 aa, Haladaptatus sp.
VWGFVLDSCPTRVCFRPSEVTRVQNVRAVWNGDEWELHFVCKVELESEDSAGDEVAGIDLGITNIATVAFPDEYVLYPGNSLKQDKHNFTRAEYDTEGENGPSEKSMWARRKLADRETHFYHVLTDAIITECIERGVGTLAVSWPEKVRTSDWGKTGNKKLHSWAFDRIYQYLHYKGDIRGVEVLKENEWDTSKTCSRCGDDTKSNRVERGLYVCSSCELVANADCNGGGEYAPKDNSESSR

SEQ ID NO: 60208 - protein, 208 aa, unknown
  TnpB Polypeptide
MPPEIPTEAVQAAANTALAARIAREASSPVQGPVKECPQSAPGSTESAQTPTSRVSVPPEGAEGISEPHGEHDELAAARVRADVAEVVIKLIRENQAIAVEDLSVKGLARTRLAKSVHDAGWGQFTAMLAYKAARYGRTLVKIDRWFPSSKLCSACGTLQEAMPLNVREWTCPCGAVHERDVNAARNILAAGRAERLNACGGTVRPAA

SEQ ID NO: 60209 - protein, 625 aa, unknown
  TnpB Polypeptide
MRVIKCGLKGVVRDAESLALFEGAVQRLHRARTAAHLLCKLWLLERFRAAEPLPQGQGAVVSLFKDALMAIGSDTDDPRVHRLRALYQEAFPSDALSIRLGAAHNWPQNVANAYGAQVAEHLSRCYPRCLERYLACRLCLKGREHRAALGAALRAVMRKEASQPVPPEEAALLAPPRALLKGYVKYDVKNKKTVLDYLPCMLHMAAYLEGAGDPGFAVLPLVSTLVPASVFLDTDTLLAIIPDKSPLLAGHTKAFYAKEWRTANPTGKRGRVSQERFDDDGWMRKQERLYYGQARLWERVLDLTKLPVRGLSWCFDNRIHTDGVSIVVYLQHERDCRAKGEACYAEYPDEAYVHRLENDARAQYRGRTIVAIDPGKQNIIYAVDASTVRRAGAKLEAKTLRYTAKQRAAEMRLAESCAHAQAFRAITPMMEGRSLEDWEAWLSQQPSRRTLDVAAFRAHIRAFYAYAAAVSTFWADSFHREQRLDAHRRQQRSEARLANAFKTAFGKPEDVVVAFGDGARNGLVGRAPGPSTAIRRLLQRNHYAVLDVHEPYTSKRCFACKRPDAENGPCRTDVFAGRDAWGVRRCCRCATTWARDFHACLNIDRLAREHLAGFDRPDYLRAAGG

SEQ ID NO: 60210 - protein, 460 aa, unknown
  TnpB Polypeptide
MSENDSNIITLKLKYSTDENSKTRILEYIKNYNNVLRFTYNRLHENGDLKTKEITELQKSMNNIFVDSWFKDSAIFDSKTLLHNSKVIFGGKKLFIYRCQNKISKEEFQLKKLRPIYSVGESDKKGNRKFSIVTENHVIFKPTRNEHFLLEINPSKNYQNYLIQLSQLVEEKKMSIDFKLGLEYIYISFDLNKLKNERKIIDKIKDRYFAIDMNPNYVGYSVIEWYDEKEYKIIDKGAISLKDLNDYDDSLKGKGFASESKERKYISDKRNYEISDIAHKLERIANHYRCEFFVMEDLSIPSKDNGKGKRFNRLCNQQWCRNRFTNIIKKLCKLDKIKILEVIPNYTSFIGNLVYRKEKSPDFVLASIEISRRGYEFNHQYILKDKYKKKNIVFGNFDEDKVVYIQSLEELNISEPFSSFQELYDKVKKSKVRYRFPLDLCNYAVFRKNSKSYQSLYKFG

SEQ ID NO: 60211 - protein, 351 aa, unknown
  TnpB Polypeptide
MIDYSKNKSVSRNDLNYFLTELKEQEPWLYSYHSKMLQMISTQIDGAQKALERLRKNGYKTGSLKFAKYEECGSFTYNQSGFKIEEGFLHLSKIGKTRIILHRSIPENVQIKQIMVSKSKSGKWHACVTCDVDTALPKIRFLNSVGLDVGIKNLAYDSDGFATPNPLNLKKLLKPLTRAQRNISRRSIGSQNRKKAVKFYQIVHERIKNRRKDFLHKLSTHYAKKYDVIFVERLAKSNMVKNHKLARNILDSGWGIFTNMLDYKCVLVEVPARNTTVDCSRCGNKVSKSLAVRTHRCDACGLVLDRDHNAAINILKRGLGIFNIKLPQELREVTPVKIPKGSMKQENTTGR

SEQ ID NO: 60212 - protein, 356 aa, unknown
  TnpB Polypeptide
MIEKINKEGFQSRNDLNYFLTDLKEREPWLYSCHSKMLQMISTQIDGAQKALIQLRKNGNKTGTLRFSKHDEFQVFTYNQSGFDITRIGNTDLLYLSKIGSVQIRIHRNIPQDIKQITITKSKSGKWYVCITCNAVTVLPKISLAKSVGIDVGIKNFAYDSDGFVTPNPLNLQKMLKPLARMQRKIARRQMGSQNRKKALKFYQIIHERIKNRRKDFLHKISAQYAKKYDVVFVERLQKLNMVKNHKLAQKILDSGWGTFTNMLDYKCMLIEVPAKNTTIDCSRCGNKVPKSLAVRIHRCDRCGLVIGRDHNAAINILKKGLNIFNIKLPQELREVTPVEIQNGSVKQEETTWLVR

SEQ ID NO: 60213 - protein, 457 aa, Saccharopolyspora sp.
MSTVLQAYRFALAPNPGQESALRSHCGAQRFAYNWGLGLIKANLDQRKAEASYDLDDDELTPSVSWSAYSLRKDWNQAKHTVAPWWNENSKEAYSSGLANLATALKNWSDSKKGMRQGRKLGFPRFKGRREGLSCRFTTGSFGLIETDRRHVKLPRIGVVRTHESTRKLARHVERGTGRISSATVSYRSGRWFVSFSVEIERADPVPVRPEAVVGVDLGIKSLAVLSTGEVIANPRHPEVAQRELRRLQRQAARRTSPDRRAGREPSNRWRKTQARIAKLHARVASARRDGLHKLSTRLVRSCGVIVLEDLNVSGMIKNRRLARHVADVGMAELRRQIEYKASWSGVCVHIADRWYPSSKTCSDCGVVKAKLRLSERVFTCSSCGMSMDRDLNAARNLAKLVEATTSSPSCGVTVNEPDGNPHKTCTMRAAGIATGRPTRSTPRRKATARDTLSHVS

SEQ ID NO: 60214 - protein, 373 aa, unknown
  TnpB Polypeptide
MNTCIRAHKIRLNPTPEQEIYFRKAAGIKRFVYNWALDRWKQMKAQGVTEYGMMAAKKDFNAIKRTAYLWVMDVAKDVAEGAFADLGAALKNYFDWKQGKRTGQKVGFPTFKSKKNTRQSFRLNNDKFRVDGHTIVMPKLGSVNMAEPLRFTGKIMGAVVSKVADWWFVSITVQMGRPQPRRFPKQSTGVDVGITALATLSDGRTFENQKPLRRQIRKLRTLSRAVSRRTKGSHRWWRAKRTLARFHTRIDNQRADAHHKASHAIASTYAIIGVEDLHVKGLVKNRHLSLALADVGLGEFLRQISYKSDAFGGTVVTVGRFYASSKTCYACGHINQHLVLADRTWTCDQCDTTHQRDWNAARNIEREALRLIA

SEQ ID NO: 60215 - protein, 699 aa, Streptomyces sp.
MATATCTAFRGALEGTGERVGRRVLLERVVFLAELSQELTGALVAARWDEESLDVLAAGIDARGETLPSKGWMALRRLNWPQDVPSPAGVYVPDRVRRGVEEYAARTLRLALHRRTVVTGVLATWPADPSRRTGAEWVALRAALPAGVSGAEIRNRTRQIRQFMAEHQQLPAGLCVLEGPPQVAPQVLLAAMDRQQVTLARVDEASARLRVKLPLCAAPAAGRDWAWHVIDIRLPGTIAPDAMLHTPTLRPTPAGRIAVDLPHSRPVPATQASGHTVALGFDWGVNTLLTGTLGRLTGRGPTRRVLTDGRPLVFDATTASAALHRLRDVREHLAAKRDHCRALADGLGSPHLAWGERLDRARVLEAEHRRVCARIRHLNTALAWSAARWAVDQAAALGASVIYLEDLATLEARGHRRGNARLSGQVRGTVTEAIRHLAAKAGIAVVTVPARGTSRLCPGCLGTLTHHPAPDRLAERGWKWAQCTGCGLSMDRDHAAARRIVSRGLLAQAHTVTERATGTRTIRTTVEGTVALARRPRKTTRRLRRQRQTETAPRPRGPKATEGKGHPTPGRPVDPRGRGTRRAVEQAPDQKTSRRMPDVRTVPATTPASGAVQRPAGHDTTTPAAFGPVPGHGVPASDRMRLSRRTCRRRARAAERTGFHHLHTTEVHPLTPRFGPSDGDRRRPRRARKAWKPQAHTEF

SEQ ID NO: 60216 - protein, 463 aa, Solirubrobacterales sp.
MRVTQAYRFCLDPTPAQRRRLASHAGAARFASNWGLAYVKACLKARAWERRILGAAVTEVPWSLAALRREWNADKDRVAPWWAENSKEAYSAGLAALADGLGAFSDSRAGRRKGRRVGFPRRKRRGRSRESFRYTTGSFGVSSRTRVQLPRIGHVRTHEPTVKLARKLEAGQARILSATVSREAGRWHCSFCCRVERSDPAPRRPAQAVGVDVGVRHLAVLSSGERVANPRALGRAGRRLRRLQRRADRQRRAANPGCFDERGRAIPGRRPATRSARLRATERRIARVYARARNLPRAALCKLSTELASTYGTVVVERLNAAGLCRAGNRGLRRAIHDASMAELRRQLAYKCAWRGGALVEAPTLFPSSKTCSGCGAAKAKLSLSERTYRCEACELVIDRDLNAARNLAALASVVAASGAETENARSQTPVRPGAAGLGVDREAGGARVARETGTAFERSEAA

SEQ ID NO: 60217 - protein, 588 aa, Mycolicibacterium sp.
VVIQSAVPLRISVAVDDATGEAISIDARIGWLLDLVEQLSTELMQSLWQPATFAALHGGVDGLGRRLPSTAAAAAARLGWVPTPPIGVYVPSRVVRLAQANVVPVLRTIAFRDALIGPVIAALDEHGRLDRRRLGQDRARYVPSAFLRNLCRQLSHPRGAVVTSIVQIQNQPTVARIARLGAADGQLVELNAADPAGVWLRIKLPTSAAPTGRGEWSWCRLWCPLPPHLKERDIACWHLPTLSVQRGRPLLRFTISEIVPDPATAAAAAALGIDWCPSSLGSATVVVECAGQLFTDAATHVYNDRGLGIKLARLQAEGQALTGKIARLTKLAANAAEPTRAQLTAKIETLHDNRRALGAKRRRINRDMAFDFAVTMTTMATTSGAGVIAVEDLRDLESTGRGRANNNRAAQSARRRAVVALEHTAARAGLEVVMCPPRGTSANCSSCDQELTRPGGYHTATCERCGIRGANRDQIAGQNIAKRVLLAKAKVKRPKGKPKRVTTVEHQPVRKTRRKTTATPKQRRHKRVRRTIPRPLVATRPPSPSFVPARAASVWDRDQQPATTAASTSAQPIPDTGDTHVSANVRDR

SEQ ID NO: 60218 - protein, 500 aa, unknown
  TnpB Polypeptide
MTNVNKKTAGKNKDSEKTTESKSPVTVKQMPDGTFEFSGGRGGFNIVAQKNKALEPYGKCIWNYSVVLELVPGEKQSAINQQIGNARFVHNNYLHERKEYYNLYKKTLTISQYQKGYLPKLKEERDYLKTSDKFVYENACRNVDNAYNRFFKGEAGFPKYASYNKPNGNSFTTNYTNNNIELKMIDRMPYVKLPKLGYIRFVLPKGKTLADIQPHGTSIKAATVTRSNTIYRISIRMEAVIDKPVFSTVIHKDDIMSVDLGLKDFGVFGNLKESDAVPNPKWIQVHAKRLRRFQQSLSRKQYDHDSASIRSPEPDVDGVSDSPYTSNYLMTDGQLKKLAAVSPSIDETHTGSRNWEKARLKVVKEQRKIADQRKDFHHKLSRAIADNCTAFICEDLAVKNMMKNRHLAKAIASVGWSQFLTMVKYKMERAGKYFRKVSRWYPSSQTCGCCGYKNADVKDLAVRKWVCPKCGTLHDRDINAQQNIFRMGMRLLQAEGIKII

SEQ ID NO: 60219 - protein, 421 aa, Okeania sp.
MITLNYTYRIYPDEKQVELLNEWLETCRCAYNYALRELKDWIASRKCPIDRCSLESEYIMSADYPFPGYQQQQNNLPKAKRKFPRLAAVPSQVLQTTIRRLHDGWDFFQNRGYGFPRFKKYGQMKSILFPQFKADPITGWQIKLPKLGKVQINLHRKIPNGFAVKQVRILKKAMGWFAVVSIQSDISISDPTPHGHFIGVDVGLDKYLATSDGFIEPGRKFFATEHRRLKVLQRRLSKKKKRSRNYEKTRIKVEKQHNHIAFKRKDYQFKLAHKLCDMADTIFVEDIDFRTMARMFLGKHTVDAGFGQFRSILSYVGKQRGVYVGEVEHKGTSQVCPNCRIEVRKELSDRWHSCPECKYEADRDVASAQEICNRGYEQLSTQGLWGKEIGCQVGLSGAFCLDKWRRAAMSNSDVGSPRCTS

SEQ ID NO: 60220 - protein, 446 aa, unknown
  TnpB Polypeptide
VGGRSGAAVIQAYRFALDPGPAQQRALCSHAGAARFAWNWALARCRERYDVERVWYSAAELHKLWNQAKKADPALAWWSENSKCAYQEAFRDLDRALRDFVKSRNGRRRGKRLGFPKFKKRGKCRDSFRFSTGTVRCAGATVTLPRLGTIATHESTRKLARRLEAGTARILSATVSRTAQRWFVSFTVEVQRAIRARHARPGTAIGVDLGVKSLLTGVDNAGREITVDGPRALRSSLRKVRRASRACSRKALGSANRRKAAVRLARIHARVANVRADALHQATTHLAARYETVVAEDLNVTGMLANRRLARAVADQGFATVRRMLDYKAAWNGGHLITADRWYPSSKTCSACGWRKPSLTLADRVFACDDCGHTEDRDVNAARNLLALAASGVERINACGSRVRPGSAGHGGKKQEPGTAPAGKTGTVRAQAQAAGHQLSDLQRFA

SEQ ID NO: 60221 - protein, 413 aa, Halococcus sp.
MYYAYKYRLTPSDAMREELDRHRDICRQVYNHFRHRLGEYRENHGELPSMTALRSELPDLKEWWDGLSDVYSRTLQVVVERLFDNLKGLSALKREGYRVGALKWKPPREFRSFTYSQSGFKLDKKGGRTVLSLSKLGDVPIVLHREIPDDAALKQVALKKEPMGEWFATFGVEFDRAPPEPPTDPENVVGIDVGILKYAHDTDGAAVESPDLLDERERLEREQRALSRKQHGSANYERQRRRVAECHADLKRKRRDFLHKLSNHYATEYDLVAVEDLNVRGMLESPSNSRNTASAAWRMFLSMLEYKCEREGTHFAAVEPAGTTKECAACGVSTDKPLWVREHSCPSCGFTADRDANAAWNILSRGLEHIGVVHSESTPVETALPVDTPVSAKRVVEAGSRALKERTASAVSE

SEQ ID NO: 60222 - protein, 417 aa, Halococcus sp.
MEVRRTVPVKLDVSDSATESLFATFAEFRFAANLVVQRARNDDGYIETSKQRLHERTYAEVRGRTDGLTANLVQAARSRAADAIKGVVARWSDGEYAELPTFTADFADYDKRSATFHNDRVSLSTVDGRIEAEYVLPPKTDGTPFTEYVENDAFDVAGATLHYRDGAFYLHLRAKTEMDEPEPAEHPTVLGVDLGIENLAVTSTGRFWSGGLLNHRRDAYERVRGGLQQIGTESAHRTMQSIGDRESRWANDLLHNVSKELVQEAAEHGCSAIVFERLNGIRSRLPKAKEFHTWAFHRLFEYVSYKTEPFGIDTVQVNPAYTSQRCSKCGHTARNNRPSQADFSCAKCGYSLHADYNAAKNVGLKHVRAGQKSRSGRANRQLALKSGTLNTSGEFTPADTVSARVGVHRQANDVSHW

SEQ ID NO: 60223 - protein, 567 aa, unknown
  TnpB Polypeptide
MVVKLVIVRWAPVFVIMNIEKAGLGAPPATGRCGRCVGVARSTGVGLGRIILTIIKPRPFLSWVVFKSGCWFFLWMLCRAVAVELEVPREVSKLLYSVESVYLGIVREVVEYAVTNNVTNPTQLQRLFYSKYRQEYPSLNSHLIIQAIRQASEIVKSFIGRRRKGLASKPYPEIRAVSIRFDETTWNYEQFAKSIAPVRIVISPISTGKRGRGGRRFEVWLRLHKHFRVYWWKVLNGEAELASTLIIRRRLNKWYAVFVFEPKPKDAKPQLITAFDINENTVAVSRVDIIATIDKIASWNRQYLTPQLYMIRTDFGRLARRYERVRNAIIDRLKPGFALPNGNYVNVTNTREFRKRVKRLREEERKVGRVRHVASELTKNPSIIITEDLGEKPQEEMIDGIEKDELRHRIKQIPFKKLENTVEDKALERGSKIFHVSAYRNSRVCPIHFIRLEKTDDWHVLYCPRGHYVHRDYASVINMNWKLTPESWTKGVWWNMKKDMNWREYEGKSNPLIPYSLVQYIHATLREFKASEESPAMLARGSPMNPAGRADEGWARKPPRKGGGQVV

SEQ ID NO: 60224 - protein, 445 aa, unknown
  TnpB Polypeptide
MEYMKQVKRAYKYRFYPTPDQAALLSRTFGCARKVYNKALAERTRAYKDEGRRLSYNDTSALLTEWKKDPELDYLREVSSVPLQQSLMHLNRAFMNFFDKRTAYPRFHSKHAHRDSAEFTYRAFTYTPPSPDTGGQPMLRIAKTTEPLTVTWHRDPPAGATPSTLTISRDPSGRWYASLLFQAPVDTLPAPVHVTAGVDMGQGDTVAVNALNADGTTHTYKTPGLMPRTGLENKLAKAQKVMAHKMKGSKNNTKAARKVARIHATIADQRRDQLHKTALRLVRDNQAIGIEDLSVRDMTASNRGTITNPGHNVQRRSNQNRRNLDVGYRMLRTMIEYKADWHDRTVVPVDRYYPSSKICSTTGCDYLSPAMPTRIRTWTCPRCGTTHDRDINAAINIRAAATAVLACGEGVRLRRGKHPDTAEPFSETGNLDERSSKPGPEGPGS

SEQ ID NO: 60225 - protein, 183 aa, Blautia sp.
LIFKLFAKFGEFVIFSDRSFQIEFLDCKLEGKYLKLPKMTAVRMKLHRPISEKWKLKSVTVSREPSGKYFASLAESFDAVCVEDLNLKGMAGGLHLGKRVHDNGYGLFLSMLEYKLEERGKYLIKVDRYFASSKICSVCGNKKEELSLSDRIYYCECGNRMDRDANAAVNIMNEGKRIFAECA

SEQ ID NO: 60226 - protein, 433 aa, Erysipelotrichaceae sp.
MSARCKDLRNAALFKVRQWFTAYKSDHIHPLQKEVIDEVLATCAKSGRKKLGKLMSYYFLEKLMRCTENPDYFNGLPAQTAQWVLKNAVNDFKGWLKALEVYYIDPSAFTGRPEMPRYCKKDFHSFTITNQECRIYQRDDGTMYLHFPKTKETLNMRMPENAVLKEVKVIPYYGDFLISVTFEYEKSVSERNAVHIAGIDLGVDNIAALVINDGEKPVLYKGGAVKAMNQFYNKNRAKYCGILTKGHDPKKVSLKTKMLDSISGNRAFFLNDELHKISSHIVRECMRRDVGIIVIGKNDQWKTKAEMSKKSNQKFVQIPHCTLIHMIRYKAEREGIKVILQEESYTSRASSFDRDVIPVYGEEENRDYRFSGRRIARGLYRSMNGFVISSDINGSANILRKAFPEAFEGMDMSFLQEVKTIKFFDLHTCRPKN

SEQ ID NO: 60227 - protein, 203 aa, Paenibacillus sp.
VEMKPLPQTDKEIGVDLGLKEFAVCSDKVRVPNPKVFRKYEQKLAFWQRRMARRNQGGSNWQKAKQKVAQIHEKIVGSRHDFLHQLTTKLIRENQTISIENLRVANMLKNHRLAKSIADASWSEFERQLSYKAEWYGRTVKVADTFAPTSQRCHVCGYIHSEVKKLSVRQWECPSCHTLHDRDENAAHNIKSLAIKMSIPPFL

SEQ ID NO: 60228 - protein, 371 aa, Paenibacillus sp.
MLIKKAYKFRIYPTPEQATLINKAIGCSRFVYNRFLARWTDTFHKTGKGLTYSACSAELTGLKQELAWLSEVDSTALQSALKHLADAYKQFFEKRNNAPCFKSKKNPVQSYTTQIQGKSQSPKVSIVESRIKLPKLGWVKFVKSREVTGRIIHATLRRNPSGKYFVSVLAETEVEPLPPAHSEVGIDLGLKDFAVLSNGEVFENPQFFRTIENKLAGAQRKLSRRKKGGSNWNKQRIKVARIHEDIRNARKDYLDRVSTHIVKNHDRIAIEDLSVRNMLKSGRLSKAISEASWSLFRKMLEYKCAWYGRVLVTVGRTFASSQLCSCCGYRNQEIKDLNMREWTCPSCGTVHDRDLNASRNILTEGKRLLEV

SEQ ID NO: 60229 - protein, 370 aa, Paenibacillus sp.
MLVHKAYKYRIYPDPKQRQLIHQMFGCCRFVFNHFLVKWNETYAATGKGLSYNTCATQLPALKQQFDWLQSVDSIALQSAVRNVADSFERFFKKQNQAPRFKSRKHPVQSYTTKYTNDNIAIDGNRLKLPKLGWLRFANSRACEGHILSATLRRNAAGKYFVSILCEVEMNPLPQIDKEIGVDLGLKKFAVCSDGLRVANPKVFRKYEQKLAFWQRRMARRNQGGSNWEKAKQKVAQIHEKIASSRRDFLHQLTTKLIRENQTISIENLRVANMLKNHRLAKSIADASWSEFARQLSYKAEWYGRTVKTADTFAPTSQRCHVCGYIHSEVKKLSVRQWECPSCHTLHDRDENAAQNIKSLAVLTSTPSFL

SEQ ID NO: 60230 - protein, 367 aa, Brevibacillus sp.
MVVNKAYKFRIFPNKAQEVLIAKTIGCSRFVFNHFLAKWNDTYNETGNRLSYGTCSSELPNLKKELTWLKEVDSIAIQSSLKNLADAFSRFFKKQNDAPRFKSKKNKVQSYTTKHTNGNMAIVENKIKLPKLGLVRFAKSREVEGRILNATIRRNPSGKYFVSLLVETDVQQLPKTNKEVGIDVGLKDFAILSNGEVFKNPKFLRNMEQKLIREQRILSRRVKGSSNWNKQRIKVSRIHERIANARTDYLQKISTHIVKNHDIIAIEDLQVSNMMKNHKLAKAISEVSWYQFRTMLEYKASWYGRTVVAVGKTFASSQICSCCGYQNKEVKNLNLRKWTCPSCHSEWDRDVNASLNILAEGKRLLTA

SEQ ID NO: 60231 - protein, 436 aa, unknown
  TnpB Polypeptide
MAISVIKQDDGTFRFSGRSFRPTEEKMQALAPYGMLLHNWGIVLMLLPDPVQTQALDQQIGNARFIRNRYLADRQDYYARSGESLTVACYKSDYMPRLKKEYPFLLLSDKFALEAALEHVDAAYKKFFREHTGFPRFASKYNLSGNQYTTKFTNWNIAVETGKDGLSYVKLPKIGKIRFVLPKGKTVRDIVPEGTSILSASVKRTGQTYTVSLQLEAVVEKPAELAEVSVRDIVAADMGIARFATIGNAEEMETVENPRWIRLHAKRLRRLQKALSRKRYDKKSHTGSKNWEKARRRVAAEQRKCANQRKDFQHKLSRKIADACTVFVCEDLNIRGMVKNRHLSKEISSAGWGRFLTYVRYKLERKGGIFLKAGRFYASSKICSICGKKYEALKLSDRSWRCPECGEIHDRDENAVSNLLKEGRRLLAEKGIAVTA

SEQ ID NO: 60232 - protein, 333 aa, unknown
  TnpB Polypeptide
LFARLEKCLFRLDRQGKLEITLKEGEYLTLDLIVHEYQQEFLSLDKDYGELILKENGVFIPFKEEVEIKKTKGLLIFDTNETNLTGLLITENEVKTIFYDLRKVYHIHRTYEGKQRRIQKLKRQKPLTAAKIQSKYSKRRKRRVRQLIHVLASHVAHIAKEKGVRVVFGDLKGIREKGNKKRRKWKKKNRKNMNRRLNSWNFRLLQFICEYKVLAQGHQTIYISEAYTSRTCPVCGCMREPNGALFVCERCGFAADRHVTAVINMAKQFGYTYKQLQMWGLPLAPNTFYEVTPFGVTEKEGFRYKLTNVIGSQNGQRPFARRSPAEFVAEAHL

SEQ ID NO: 60233 - protein, 349 aa, Streptomyces sp.
VAFAKDLKRRNVLQEAVYHRIKADFDLGAQAAVRTVKKVCDAYATFKANLRAGNYGLEGSKRRIKAESKPVRFRETSAQPFDDRMLTWNLDTKMVSVWTVAGRLKGIPFVCSPEAMRLLAQRKGESDLVMRDGMFFLLATIDIPEPEVSGPDGFLGVDLGIVNIATTSDGRIMSSRQVNRYRQRKRDLRGKLQKKRTKSAARVLKRQRRKEARYATQRNHIIARKLVHTAERTSRGIGLEDLTGIRQRVTAREDQRARLHSWAFAQLGAFVEYKAKRAGVAVVHVDPRNTSRQCSECWHTHRTNRVTQARFVCRSCGIVLHADHNGSRNIAHRADAAWQRGAVNRPRTP

SEQ ID NO: 60234 - protein, 444 aa, unknown
  TnpB Polypeptide
MQESELTQTLSFGLTIESGSSDDLHAGCLESRRIRNEVNRLDKQGWDWDDIHDPVVDNANHVKNTSQLIVQKAIGELENYQDNKDNDWGRPYPYINESYPIRMNHNEGYALNIADNGDVRFRISSKPYNHVKGVLRGSPDHLERVKNAINCDAWRVGVAEVIHKHDEWRLHVTVTHEQKLVGTPEDAETIIGVDINEDCVALAAMTRDVDVEDSIVIEYPDIKRIRHEYFTKRKRMQIAGQTAFETVVRTEERDFVHDQLHKVSCDVVRWVSQFNDPIIVFEDLKDMRDSIDYGTRMNRRLHSLPFAALRDMVTYKAAWNGIPSDEVDPEYTSQRCPRTECLHTSRANRHKKRFKCCECEFQDHADRKAAVCVVQEWLGDQNGNVPSLETLPRVWKMRRTASGLCEEADSHGAVLASGVHRRGKSAQGESQAREELKHVAPTVG

SEQ ID NO: 60235 - protein, 367 aa, unknown
  TnpB Polypeptide
MRKQIALLLKDEEYRNWRTEYGSLSKIEKPSKAEKKRKKALASDMNTRRTKLGLSRSELEKYIKVCGARYKKLLSSQQVQAEAANVWKGVEDFLFSNGKQLHFKKFRDFRTIGGKSNINGICYDTETRQIQWLGLQMQCYLSKKASDREYVLQSLDHKISYCMIKRQMFPNGWRYHIILVLKDDAPQKLEHGFGDMGIDPGVSTMACTADTGCVLEELAPETDRYDRQIQEILRKMDRSRRKSNPDKYNLDGTIKKNDHSRWKNSKNYIRLLRRLQILYRKRSQYILTSHRTLCNRLIQMADRICVERMTYKALQKRSKKTERQDKISEVKKKDGSIVMIRKFKKKKRFGRSINRRRNLRRGQDRNL

SEQ ID NO: 60236 - protein, 492 aa, Natronobacterium sp.
  misc_feature (118)..(118): Xaa can be any naturally occurring amino acid
  misc_feature (207)..(207): Xaa can be any naturally occurring amino acid
MYYAYKYRLEPSDGQRKELDRQRDICRQLYNHTRYRLNEYRENHGELPSMTTLRSELPGLKKWWDDLNDVYSKVLQTVVERLFNNLSSLSALKENGYDVGQLKWKPPREFRSFTYNQXLKENGYDVGQLKWKPPREFRSFTYNQSGFKLDKKGGQTVLSLSKLADIPIRLHREIPDDAALKQVTLKKEPTGEWFATFGVEVDREPPXAALKQVTLKKEPTGEWFATFGVEVDREPPQKPDQPTDVVGIDVGILKYAHDTDGHAVESVDLSDERERLEREQRKLSRKDHGSNNYEKQRRRVAECHADLKNKRRDFLHKLSNYYAREYDLVAIEDLDAKGLVELDGNSRNRAGAAWGTFLQMLEYKCEREGTRFVAVDPAGTTKECAACGVSSEKPLWVREHACPSCGFTADRDWNAAWNILSRGIKQVGAGRSESTSSESPCDSDGLRKSRSDFRTPVETALPTGTTSVPAKRVVEAGSPICSRARSARSHGP

SEQ ID NO: 60237 - protein, 408 aa, unknown
  TnpB Polypeptide
MKINKAYKIRIYPNIIQKETFEKYFGVCRFVWNSVLGYKIDSYKHGIKYSAYNAIKDFTIIKKLEGYEWMNEIDSQVLQQSILNLEKAYLNFFRRVKQGKKELGFPKFKSKHKRQNSFRVPKDFKIDFKNKKIKIPKIDWIKFKDKRIFDSKIKSITISKNKCNQYFASILVEKDFEINLPIEIQESKVFSADMSCKNFLVSSEMEFENQKFYRRKERRLKIRHRKFSKKKNDSNNFEKQRVVLAKTYLNITNQRTGFQWNLAHELVSKFDVLIFEDLNIEGMKQFNKGISKTVTLDFSFSEFLTNLKWKAFKANKHFVTTDRWFPSSKLCSNCGQVKKELLLSERTYICDCGLEIDRDLNASINIKREGINLLKNSTVIKTESYACGNMSEDLNNSAQEIYYLKGFY

SEQ ID NO: 60238 - protein, 402 aa, Escherichia sp.
VKRLQAFKFQLRPGGQQECEMRRFAGACRFVFNRALARQNENHEAGNKYIPYGKMASWLVEWKNATETQWLKDSPSQPLQQSLKDLERAYKNFFRKRAAFSRFKKRGQNDAFRYPQGVKLDQENSRIFLPKLGWMRYRNSRQVTGVVKNVTVSQSCGKWYISIQTESEVSTPVHPSASMVGLDAGVAKLATLSDGTVFEPVNSFQKNQKKLARLQRQLSRKVKFSNNWQKQKRKIQRLHSCIANIRRDYLHKVTTAVSKNHAMVVIEDLKVSNMSKSAAGTVSQPGRNVRAKSGLNRSILDQGWYEMRRQLAYKQLWRGGQVLAVPPAYTSQRCAYCGHTAKENRLSQSKFRCQVCGYTANADVNGARNILAAGHAVLACGEMVQSGRPLKQEPTEMIQATA

SEQ ID NO: 60239 - protein, 413 aa, Methanothermococcus sp.
MSNKTKSKNNQELTYQVVLSYKVSHNYPLKTFLTECKDKLNISIDIIWNNIEYTKKGYPKLPKSNEFKRNLRNKLLENWNYASHYIDGVIKTAYSVLESWLSNYKRGYRTKTKPKVERLFVRVKTTLIKYDKEKGEIRITIKPRKEYLVLNIKNEWFFDKVKDLSIGEIILKENEAFLTFKDNLNYSDKEIVVGVDSNLKSLDLFHPIEGWIRVDLTELHRLKEVYDKKIDFLKSLLKKCPLRVMRKIERLFERRRNRVKDFLHKLTIQLSRLFHNAIFVFEDLNKRKMYKNKYFNRRIDRTNWNSIIQKISYKTIVILVNPAYTSTTCPICRSKMESQEGQVVCCNCSDSFNRQLVGCLNIFKRGLGKIKELMGGSGVTTTGTEVSFRKLMTSNPNVVYCVDYNGKYLIRVG

SEQ ID NO: 60240 - protein, 313 aa, Sulfobacillus sp.
MQLTLTVHLQPNTTQAQSLLGTMERFNAACNAIANIAFREHTASQVKLHHLMYREVRERFGLSAQMAVPAIGKVVESYKRDKSIQPTFRPYRAIVYDDRLLSWKGLDRVSILTLAGRIMVPVVMGSYHVQRLRRVRGQADLIYRDGQFYLAVVVDVPEPPPLQPDDWLGVDLVIVNIAADSDGHTYSGSPLNGLRKRHANLRQRLQKKGTKSAKRLLKKRRRKEQRLATNENHRIAKRLVTKAKDTSRGIALEDLTGIRDRITVKKAQRPRQHSWGIPPIAHVYHLQGETGGRARRLGRSAQYLADVSRLWID

SEQ ID NO: 60241 - protein, 395 aa, Sulfobacillus sp.
MILAHKIALDPNNVQETYFRKAAGTARFAYNGALDQWQQQFDAWKADPTLPKPTEAALRRQLNALKRDAFPWMLEVTKNAPQMAIMHLGQAFKNFFAGIAEYPTFKKKGRHDSFTLTNDPFTVKGQKVHIPKLGWVRMHEPLRFIGTVVEGTVSRTADRWFLSVTVELPDPPSVRRESQAVVGVDLGVSALATLSTGEKIVGPKAYADALAQLRRLSKQFSRQMEVAKVRAGLQPGQPTPKGMPMPLSQNMRKTQRRMARRHARIANIRADALHQLTTDLVQRFDVMAIEDLNVAGMLKNHPLARAIADMGFGEFRRQLAYKAAQCGKTVVIVSRWYPSSKTCSACGYKMPKMPLAMREWTCPECHTHHDRDINAAINLRTVAESSVRSSSPVSA

SEQ ID NO: 60242 - protein, 417 aa, Sulfobacillus sp.
MILAHKIALDPNNVQETYFRKAAGTARFAYNGALDQWQQQFDAWKADPTLPKPTEAALRRQLNALKRDAFPWMLEVTKNAPQMAIMHLGQAFKNFFAGIAEYPTFKKKGRHDSFTLTNDPFTVKGQKVHIPKLGWVRMHEPLRFIGTVVAGTVSRTADRWFLSVTVELPDPPSVRRERQAVVGVDLGVSALATLSTGEKIVGPKAYADALAQLRRLSKQFSRQMEVAKVRAGLQPGQPTPKGMPMPLSQNMRKTQRRMARLHARIANIRADALHQLTTDLVQRFDVMAIEDLNVAGMLKNHPLARAIADMGFGEFRRQLAYKSGPMRENGGHREPLVSEQQNVFRVWIQNAENAARYAGVDVPRMSHTPRPRHQCGDQFANRGREFGEGLLTRVCLTADLLGDSLWSARPWTTGQWP

SEQ ID NO: 60243 - protein, 409 aa, Sulfobacillus sp.
VPSQILSNGAVKFKQAYARFFQKLGGRPKIKKKSGRQIVWVTDELFQFVPLINETGAIASYQLILGTQKFPVGVIAYVAHRSHGVPSSIHIAVEGGHWWLSFAAEDAEVTMPKKTRDATTEQIAEDLRHLSAEQLTARTLGGDRGVAKPLTTSDGQVFDLLPVQKKRIKKTRRQRKRWQRQASRRKKGSQNQKKAYRKVAKYQQYETNVRQDYAHQTSHHLAADEAYDLYVFEALKIQTMTKRPKAKTDAQGRFLPNQAAAKAGLNRAILSSAWGQVVSFTTYKALRHGKLVITVLSAYSSQECAVCTFTAPDNRPSQAAFVCQRCGHTDDADHNAAVVIAKRGVQKLLSGDPLTRTHKTTRIFRKLGPERSEVTHGEIGVSRLGPTASTQRSMSQESFGGDPETPASA

SEQ ID NO: 60244 - protein, 145 aa, Sulfobacillus sp.
MRKTQRRMARRHARIANIRADALHQLTTDLVQRFDVMAIEDLNVAGMLKNHPLARAIADMGFGEFRRQLAYKAAQCGKTVVIVSRWYPSSKTCSACGYKMPKMPLAMREWTCPECHTHHDRDINAAINLRTVAESSVRGSSPVSA

SEQ ID NO: 60245 - protein, 190 aa, Sulfobacillus sp.
MRTPWHSFVGYRNNSVARWKSPKSAPGFSPGQPTPKGMPMPLSQNMRKTQRRMARLHARIANIRTDALHQLTTDLVQRFDVMAIEDLNVAGMLKNHPRARAIADMGFGEFRRQLAYKAAQCGKTVVTVSRWYPSSKTCSACGYKMPKMPLAMREWTCPECHTHHDRDINAAINLRTVAESSVRSSSPVSA

SEQ ID NO: 60246 - protein, 506 aa, Sulfobacillus sp.
MKTTILGVLLDVTPDQDTVLRRLMRKYGFMLRFAFQRLVGGLQNIGGLERHCASETELPLRYAKDAVQEAQDLIRARHQAMKDGATLWTQRVKKTRERLTALRASLHPNARRIAGQERKLTHQEAQQAFYQQHVEAGTFPPVVFGTKKRWLDQFKTLDDPLAEQERQQAWRKEWDESRNGRLSARGDRTKRGNPLLRVRAGTDHWILEISLDCLKPGNPDAKVPRYEKLEIPLYIARKVSKKTGQVHGRDYEGLLRRVLAAGDSYQVEILRRQGRYQVRVTVEEVPAPIQTDPRHGWVGVDTNSTFLALCHVLPNGNACAFATIGDPRLFDVRSTQRDALVGGLAVETVQWAKARGAGLVVEDLQFIHDRDVSAKFNRVTHQFNYRALLTAVERQAAREGVALRKVKPAYTSIIGRFKYQPQYGMSVHHAAALVIGRRGGLKVRRENVPKALRLWMQDRDQWNDPTYRKNDWSAWARIKRIMAKTLASHHQYLSAWLGYRKTLFSE

SEQ ID NO: 60247 - protein, 308 aa, Sulfobacillus sp.
MILAHKIALDPNNVQETYFRKAAGTARFAYNGALDQWQQQFDAWKADPTLPKPTEAALRRQLNALKRDAFPWMLEVTKNAPQMAIMHLGQAFKNFFAGIAEYPTFKKKGRHDSFTLTNDPFTVKGQKVHIPKLGWVRMHEPLRFLGTVVAGTVSRTADRWFLSVTVELPDPPSVRRERQAVVGVDLGVSALATLSTGEKIVGPKAYADAFGTASAVIETIQSPDGSRQSPRRASARPAHPERDAHALVPEYAKDAAAHGPTPCADCEYPGGCVTPTDHRSRAALRCHGHRGPERRRDAQKSSSRPGDC

SEQ ID NO: 60248 - protein, 377 aa, unknown
  TnpB Polypeptide
MDIKRAYRFRFYPSPEQETILAQTFGCARFAYNHMLRLRTDAWYKEQRRVGYHETSAALTLLKKQPEFVWLNEVSSVPVQQALRHLQTSFSNFFAKRAAYPNFKRKDDKQAAEYTASAFKWDGTTLKLARMSEPLNIVWSRLIPKAAKPTTVTVSKDKAGRYFVSLLCDDGVQAKPEVTGKVGIDLGLTHFAILSTGEKIAAPNTYRKYEAKLAKLQRRLAKKQKGSKNRGKAKLKVAKVHAAITDSRKDFLHKLSTQLINKNQVIAVETLAVKNMVKNRHLSKSISDAGWSEFVRQLEYKALWSGRTLVGIDKWYPSSKRCNCCGYVMKKLPLNIRTWECPECKTSHDRDINAARNILAAGLAVSALGETVSPVCI

SEQ ID NO: 60249 - protein, 413 aa, Anabaena sp.
MYGCQQILISPNKELGAILEFLCGESNKLANCGTYYARQLFFKTGKIPSKFDLHRELASNLHFGAMYSQAAQQCLTTVAESFKSYIGLLKGIKKGAVTQKPKLPGYRKGGLNLVAFPGQAIKLKDGKLRFPLGTKVKVWFGLDAFYVPMPSNLEYKNIKEYRILPRNNEFYLELVYKVSPLKVDVNIENVLSIDHGLNNWLTCVSNIGTSFLIDGRKLKSMNQWYNKRVSILKENQPQGFWSKQLASITEKRNRQIRDAVNKSARIVISHCLDNKIGTVIFGWNTGQKDSINLGSKTNQKFVQIPTARLKNRIAQLCEQCSIKFMETEESYTSKASFLDNDFLPTFGEKPEGWKESGKRVSRGLYHSQDGTKINADCNGAANIFRKVAVKLGLSSSGISRGALTSPLRLFIWS

SEQ ID NO: 60250 - protein, 193 aa, unknown
  TnpB Polypeptide
MPNICAIDFGVSNFAAVVCNDGSSMLYKGGAFLSECQWFHKKRAQAVSIITKGHEHMHASSRYLSALSRHHADFIKNQCHKINRSIINYCMEHHAGTLVLGENKRWKQDCDMGSQNNQNFVSMPTGLLKQMIIYKASDAGIKTIMQEESYTSQADITAMDYIPVYGVDAENTDGLHCFAIPAILEQRKRNKMV

SEQ ID NO: 60251 - protein, 546 aa, Thermofilum sp.
MGAAAHARSPSKGGGSMGEGNRGKRSGEKLFEAYRVWEVKASRELRLRLRRLYSAIALAAERASEELERKHGETFRREPERFREELIEEASKLAGLPKRLLCYAGEWCKMLAEARGKSRRRTRFTPPPIPLLVRVVGNGEVLHGNTAAAVVLDASRGMLRVPSANIAIRLRPSLVKAVLEDVERFSDVKLTLQLTSRGRLRLVTHRKVKQVWWDGEGKLAVIAVDVNSSHGLYVVAVAFNGEAKLVAQRVFKPPNTTVLRLLAAIMSSYSELGNWSEAVHRFEERRDVRRLRRAGKGSAVEEAPRLAERLRAKMNMTPEKAERIARQVSRKVRKVNEDWIRSVLREMRALVRKLRDQGYLVVIVADVPQAESLRGTKLQRTLLRVTKRLENIAWYEGAKWFEPENNVSGKRCPLCGKEGVEVQRRYYKCTRCGLVWGRDWAAAFNAAKLFLKACRAERQFEALNQWLQSHPRALIHGSRSFPKQAERNAPALVPAPAESRLAGAARGAKRQGGAEAEPPPHINGRESAGQAEGAEPMKTLNGAPDQ

SEQ ID NO: 60252 - protein, 443 aa, unknown
  TnpB Polypeptide
MKYSPKYRLFPTTEQRESLNWTRNIVRQLYNHALHEFNQIPENKGTLRQRVWQVRDTLPQLKQQWTTLKKVYSTVLQKAVERIRTNINNLGKLKAKGYNVGSLNWKKPREYRSFTYRQSGFELDKKSGPRGRAILRLKKVRGDTLEIPIRLHRDLPEHDDITEVTVKKEPTGAWHASFCISTESPEKPAIDDIDAEDTVGLDLGVLNFIYDSEGLPIERLDLSEERERLEREQRSLSRKQYESRNWEKQRRRVAKVHARMSNKKRDYKHKLAHFYATEYDAVFVEKLNVKPMLESAGNARNKAEVGWSDFRAILKHHCNKHSTHYVEVDPRGTTKECAECGVETEKPLWVREHSCPSCEFELDRDWNAALNVKSRGLSKLGVVHSKVTSSESLSDSDVRTRASLSSTPVETVTAVDSRSVSARHVVESGSSVLKERTAQAVSE

SEQ ID NO: 60253 - protein, 399 aa, unknown
  TnpB Polypeptide
MTKNYKCIKIEIKPTNEQIEKINKTIGTGRYLYNLYIAYNKQIYEKDNRFVTGFEFSKYINNVYLNENPDKKWIKDVSSKANKQSIMNAEKAFKRFFNKLSDFPKYKKKTSPVQSCYFPKNSKTDFEFYRHKIKIPTLKFVRLKEYGYIPKNADIKSGTIIKTAGKYFLSLIIDISNINIKINSNYNDDKNKSSSVFGLGIDLGIKNFAICSSGKVFKNINMSNRVIKIEKRLKRQQRKLSKKYLSCKNLKKKLGESKNFQKQKLKISKTFYKLNCIRTDYINKVVNEITKTKLKYITIEDLKVSDMIKNKYLSKAILNQNFYKFKIKLIEKCKEHNIELRMVDKFFSSSKTCSCCGNIKKDLKLNDRIYKCCKCGLELDRDFNASVNLKNASVYTILT

SEQ ID NO: 60254 - protein, 339 aa, Actinomadura sp.
VEEDRRAGVLGEVSSVPLQQALRHLQTAFTGFFAGRARYPRFKSRKKSRASAEYTRSAFRWQDGCLTLAKMSEPLAIVWSRPLPQGAVPSTVTVSRDAAGRWFVSILCTDTIALLEPVERAVGVDAGITSLVALSTGEKVANPRHERRDRERLARAQKDLSRKAKGSANRDKAKMRVARIHARIADRRRDFLHKLTTRLVRENQTVVIEDLNVRTMVKNHSLARAISDAAWHQLRSMLEYRAGWYGRELIVVDRWFPSTKTCAKCGTITDTLPLEVREWECGGCGVRHDRDVNAVKNVLAAGPAVSACGADVRPKRRRPGGRTATKRETRSATVGIPCP

SEQ ID NO: 60255 - protein, 152 aa, unknown
  TnpB Polypeptide
MNKDGKKFIKTKNIIKLESQIRIIHHKLFNIRLNYAHNITNALVKSKPEYIVMEDLNVKGMMKNKHLSKAIQEQCFYEFRRQLTYKCLWNNIKLRIVDRFYPSSKLCSECGEIKKDLKLSDRVYICKECGIIIDRDKNASINLKNAKIYEVA

SEQ ID NO: 60256 - protein, 484 aa, unknown
  TnpB Polypeptide
MPEYITTRTYYSKSLDNKTYSELKLIAKKLGILRKIIWHKFSSNPKKLNDREIRDQWLNAKNNETNFYPKIIDQIPARLWKETLRDTIGTINAYFEAGFKEAIKTLYRKHGKTKAKELIKILKADYKTNKELHRLVRKLIPKGYSKTDNIICLDQDCYSFLDDQTNIIQVMSLTKNKRLSIPFTTKYRPKGNFKIILKEDNRCEFRVNFKYQTKVQIEKPHEAIGVDKGYTEVFTDSTGERHGNDFGKLLTKKSDFLKEKYKNRNKLYAIMKKANEKGDKKKAENIKRNNLGNKKLNRQKEKANIELKEIIYKSAKILAQKAKVIAIEDLTFKTKSTKFKNVNRRLSSWIKSTIDEAISKYCFIYGTKLVYVNAAYTSQGDSRYNCALVGKRIGNSFIGFDEVVLDADINAALNILARLYDQEISLYTPPEKVKEILIKRANAVFSGLVETAQLRLQPETPTNLSFLAKSELSGNFNKDLTRFS

SEQ ID NO: 60257 - protein, 526 aa, Escherichia sp.
  misc_feature (13)..(13): Xaa can be any naturally occurring amino acid
  misc_feature (19)..(19): Xaa can be any naturally occurring amino acid
  misc_feature (64)..(97): Xaa can be any naturally occurring amino acid
  misc_feature (178)..(211): Xaa can be any naturally occurring amino acid
  misc_feature (382)..(415): Xaa can be any naturally occurring amino acid
VKRLQAFKFQLRXGGQQEXEMRRFAGACRFVFNRALARQNENHEAGNKYIPYGKMASWLVEWKXXXXXXXXXXXXXXXXXXXXXXXXXXXXXXXXXXKLDQENSRIFLPKLGWMRYRNSRQVTGVVKNVTVSQSCGKWYISIQTESEVSTPVHPSASMVGLDAGVAKLATLSDGTVFXXXXXXXXXXXXXXXXXXXXXXXXXXXXXXXXXXARLQRQLSRKVKFSNNWQKQKRKIQRLHSCIANIRRDYLHKVTTTVSKNHAMIVIEDLKVSNMSKSAAGTVSQPGRNVRAKSGLNRSILDQGWYEMRRQLEYKQLWSGGQVLAVPPAYTSQRCACCGHTAKENRLSQSKFRCQVCGYTANADVNGARNILAAGHAVLACGXXXXXXXXXXXXXXXXXXXXXXXXXXXXXXXXXXVEAGTHRNDSGDSLNVAGIHVLQGVEDVNIGFCQRLNSTPRNKRLRQLIPRTQNQSRPASIHLPLPEMPPPPRRAHAHYAAPDTNFRQWYSTAPDLPASGSNLRAGQPSSR

SEQ ID NO: 60258 - protein, 347 aa, unknown
  TnpB Polypeptide
MQEASLHQWLWHLTGVYNWAVKKIEHDAEDGIYYSQKTFQNLLAEHSNRMEIPSHTLQGTLTQAYTAWQRCFKKQAKKPRLKGKRNKLNSIPFPDPIKPPKGNRISIPAIGSIRFHKQDLPEAKIKCGRIVKRASGWYLCLWLDTEHKFPVKQTEAAVGIDPGFKTLLTLSDGKKFENPRELRKGATRLAQAQRAHNKKLTARLLEKQANRRNDRNHKISRYLVENYKTIYFSNDNFKAMARKFGKSVTEAGLNQLIGMTTYKCRTGGREIKPVNSFRTTMTCWKCRALTGPTGLDELAVRQWDCACGAHHDRDVNAAMNVLLAGAGAAHERGIRHIEWCAQYPSET

SEQ ID NO: 60259 - protein, 396 aa, Mastigocladus sp.
VLVLEYKVKGKQQQYQAIDEAIRTTQFIRNKAIRYWMDAPKEAKINKIALNNYSTTLRKEFKFVEELNSMACQSATERPWLAIDRFYSNCKKKVVGKKGFPRFQKDNRSVEYKTSGWSLNQTKRRIIFTDKKSIGELKLLGKWDIQTYPVKSIKRVRLVRKADGYYCQFCLDVPKEVIDPDCLTNWREIGLDVGLEYFYSDSNGHHEPNPRFLRKSEKSIKHAQRQIYKKEKGKNQRRKARQRYARKHLKVSRQRNEHALVLARNVCKLNGLVAYEDLKVKNMVKNHCLAKSINDAAWSTFRRWLEYFAVEFEVELIAVPPHYTSQKCSSCGATVKKALSTRTHKCSCGCELQRDVNAAKNILNLAKARDGQSQSNATGVGTTTLVGASLLEQVLT

SEQ ID NO: 60260 - protein, 402 aa, Escherichia sp.
VKRLQAFKFQLRPGGQQECEMRRFAGACRFVFNRALARQNENHEAGNKYIPYGKMASWLVEWKNATETQWLKDSPSQPLQQSLKDLERAYKNFFRKRAAFPRFKKRGQNDAFRYPQGVKLDQENSRIFLPKLGWMRYRNSRQVTGVVKNVTVSQSCGKWYISIQTESEVSTPVHPSASMIGLDAGVAKLATLSDGTVFEPVNSFQKNQKTPARLQRQLSRRVKFSNNWQKQKRKIQRLHSCIANIRRDYLHKVTTTVSKNHAMIVIEDLKVSNMSKSAAGTVSQPGRNVRAKSGLNRSILDQGWYEMRRQLEYKQLWRGGQVLAVPPAYTSQRCACCGHTAKENRLSQSKFRCQVCGYTANADVNGARNILAAGHAVLACGEMVQSGRPLKQEPTEMIQATA

SEQ ID NO: 60261 - protein, 413 aa, unknown
  TnpB Polypeptide
MYLTQKNQIRALNKTEFLALRELCRLSKNLYNVGLYTVRQHYFQEHQHLRYESVYHLCKGNENYQLLNTDIAQQTLKVVDRKFHSFYGLIAALKSGTYTQKVKLPHYLHKDGYFVLIIPRIKVKEGKFKLPMSVAFKKQFGEVSIPFPERLDPAKLKEVRVHPKYDARFFEVEFVSLVETEPIETIARSAIAIDLGLDNLATCVDTNGASFIVDGRKIKSINQWYNKENARLQSIKDRQGIERLTLAQARLLVNRNNFVRDYLNKTARLIIDHCIAHKIERVIVGFNLGMKQEINIGSRNNQNFVQMPLYSLRGKLKALCERYGLTCQEQEESYTSKASALDGDELPVYNADQPATYQFSGKRVKRGLYRSKDGHLINADCNGAVNIGRKSKQDGFTGLSRGCLAQPLRIRVY

SEQ ID NO: 60262 - protein, 577 aa, unknown
  TnpB Polypeptide
MSKHCWTLKDRYESQFSAAFYPIMLSDTKRAEIIHRAEEIRAVRNDISEVFFSDMLGFQDMSKFEAFNFFNPTFNTRLSSHYLKKAIEEVWKAYQLRFGAIRKKIEFVKVEKLVPSFYKINSHGHKKGELKSIEVHTKKTELTKVLTWLARYGKDESVYWLESVIPTVVETKQKFYRTILEKIHKFGFDRLMRLALSRREAVYAKYIERGKITFDSLTFSGRSRITRPIVDARRNETGKFDYFIEISWDWSSQAYHGPSEHTLCIPFKYNKAYHKSLQRYCNGGDTSYTIVIRGKDIHVVLARDGYRYKSDAEITEENTVGIDVNSKHNMFALSTGEFIPHDEKLIAELEDELFKIDNKQKNYDARFKEYEEHDAFKISSKDKKRIEAITLKLNESNKRRIATMCKDLADRGFKHIVMENLTGFQGSRLNADDKKGFNLGRLHLRIGLSSLKDDVEHISAHYGLGFSLIQPEYTSKMCPVCGGIDDRNRQTQEEFKCVDCLHADNADCNSSINIKFRLTSTVLRGYLLEVGDSGYRCFQPKSLFGWQVRKCLEKCRCDGLFKRSIGNHEKLTMSKFE

SEQ ID NO: 60263 - protein, 438 aa, unknown
  TnpB Polypeptide
MFTRSTNHIISKYANQCKQNELSVLLAEWRRVMQLLCDDMWLNGYIWYEDGIEHEFNITKFKFALPKYLDYNHFDVDTWLSARMLNSLTNQLCGKLRAVLSKEAKRVAMFDKLAGEGKYNERLWDKIESSIPRKPDLSDAGIEVSSKCADFELTEDGYFYGYVRLKCTGGEHIKLPVCRHRHLDRFLDGTWTRCNGYLIDEYGIQLRWQKDVPLRDDGVKIGADQGAKTTISLSNGNVTPDLIVNAPKKGSPGRKLTINLMTIMDKMSKKKKGSKAFKKAVEERKNYVNFAMKRLNLDGVKEIGLEDVVNIRYQQKSSRLMSHWSNPIIRDTLMMKCEERGVRVQLQASAYRSQRCSDCGLVHKASRKGKEYICPHCGLVIDADINAARNHEADLPAIPRCDVLSNLSKKEGFFWLTSGLFRLDGSELGVPDSIKTKP

SEQ ID NO: 60264 - protein, 433 aa, unknown
  TnpB Polypeptide
MNKAERHVYACSYSLPFKGNEVILSAMHKAKSLYNATLWHYRQALDEHHKAKEEGRDPLTEYPDYYKMERKFRDERQINYFSLPQKVSQQVLRDVQSDWKSYVAHVVRNKSYPPGSPERKEQVNPPKYKYRDGYARLRYTKQAISFVKYPGKATPSGIDVGLVIPPFIDPKKIQQIDIEPDGADYIRVTFIYKVELCGLLVDNGRVMGIDMGVTNLATCGTNVGRGIIINGRPVKSINQFFNKRLAALKSENDILLKKENERKVQTQRHRITRNMERLFRKRKYKIKDYLHKAACRIFDFVAESGITTIVVGKNVGWKQECNMQKQNNQNFVQIPHARFIDMLAYKARERGIAFLTAEESYTSKCSFVDGEELCHHDKYVGQRIRRGLFRTSKGILVNADLNGALNIIRKVIPNAFAEGIEAVIVPPLRAIVA

SEQ ID NO: 60265 - protein, 449 aa, unknown
  TnpB Polypeptide
VSRPARAGGGSLAGHRILRCRLPAFRPGRKREPCAANTACWRCFMPFIRYSVLVSRFRLYPAPVQEAALLRHCAGARYVWNLAVEQHAWWRPGKRSAPGYLEQSRQLTAARAGSPWLAEGSQTVQQQALRDFGQAMRNFFAGTHRRPTWRKAGRDEGFRVTGRRGKHWDVRRVSRHWGEVKVPKAGWVRFRWSRPVPEGVKSFRVTLDRAGRWHVAFTAVPGPVPPPGNGQVGGVDRGVAVSAALSTGELLHCPGLSAGGQARLRRLQSKLGSAMRGSSRRRKVKAQAARLKAREADRRKDWVEKTSTDLARRFDVIRVEDLSVRGMTRSARGTAEAPGVNVAAKAGLNREIQRSGWGLLVRRLEDKAPGRVERVDPAFTSQRCSACGRVDRNSRESQALFRCTACNFTLNADVNAARNIAAGHAVKARGGDRVAGPVNREPQLVLLSG

SEQ ID NO: 60266 - protein, 341 aa, unknown
  TnpB Polypeptide
MVGKRINYYDQANQLPDIKEIREEYKDIHSQVLQDVLRKAHKAYEAFFARCKCGDTPGYPRFKGRNQFDSFTFPQSGFSITHDNRVCFSKIGSVKGKLHREIKGSIKTCTIKREGDCWYVVFACEVEPEPLEVCEEAIGIDLGLLHFATLSTGDTIENPRYYRKAEKKLEHLQQSLARKKLGSTRRMKAVKQIAKAHRKVANQRKDFLHKASHALVNSYGLIVFEELQSANMSKRPKPKQDEQGTYMPNGAAAKGGLNKSIVDAGWAMFQKFCTYKAASAGRTVLTVNPKYTSQICSGCGTVCKKELSERWHSCECGTELDRDHNAAINILALGRRVQARA

SEQ ID NO: 60267 - protein, 587 aa, Mycobacterium sp.
  misc_feature (454)..(457): Xaa can be any naturally occurring amino acid
MARLKVPEGWCVQAFRFTLNPTQTQAASLARHFGARRKAFNWTVTALKADIKAWRADGTESAKPSLRVLRKRWNTVKDQVCVNAQTGQVWWPECSKEAYADGIAGAVDAYWNWQSCRAGKRAGKTVGVPRFKKKGRDADRVCFTTGAMRVEPDRRHLTLPVIGTIRTYENTRRVERLIAKGRARVLAITVRRNGTRLDASVRVLVQRPQQRRVALPDSRVGVDVGVRRLATVADAEGTVLEQVPNPRPLDAALRGLRRVSRARSRCTKGSRRYCERTTELSRLHRRVNDVRTHHLHVLTTRLAKTHGRIVVEGLDAAGMLRQKGLPGARARRRALSDAALATPRRHLSYKTGWYGSSLVVADRWFPSSKTCHACRHVQDIGWDEKWQCDGCSITHQRDDNAAINLARYEEPPSVVGPVGAAVKRGADRKTGPGPAGGREARKATGHPAGEQPRXXXXQVILTSTSWMPAPEGCTTASPLPAADSARSVQDPGAAKNRKSPVADATTSAVNSSEESSSRTNAPPTAWPSPSTTRPVITVSFSRSTLAGNVSPCLGPEHISASQLDRGAHQGAVFCPTAVVVLDVLVSE

SEQ ID NO: 60268 - protein, 371 aa, Methanosaeta sp.
LNTAYKFRMYPTKQQEAQLYLTLETCRHLYNLALADRKNAYEVEGISRSYEDQAAMLTAEKKEGNFKGVFSQVLQDVLRRLDKSFKAFFRRVKAGEKPGYPRFKGQGWYKSFTYPQVGFKLDGLKLTLSKIGSIRIFKHREVEGRIKTCTIKKDHLGRWYAILVTEIEDVSQIEPKTAIGVDVGLKSLVALSTGKTIQYPKYYIKDETKLAVAQRDLSRKKKGSSNRRKAKIKVARLHQKIQSHRDEFLHQVSSKIVDSADLIVFENLNISGMLKNHHLAKHIQDHAWGRLIQFTQSKAAKAGKVVELVDARYTSQKCSQCGIMVPKTLADRTHLCPNCGLEMDRDVNAALNIVTLGLRGRACREIGTPTQ

SEQ ID NO: 60269 - protein, 285 aa, Hormoscilla sp.
LAFSKVFTIPGRGFPRFKKKGRNDSLYLEGNIKISGNRIKLPKIGWVRTYEKHLPPILVKSNSNVTISCFAARWFISYKVDVKPEHVEHSYGGVGVNLGLKTLATLSNGKTFPAVKAYRKAKSKIAHLQRSVSRKVKGSNNRKKAILKLQKAHYRVASIRNDATHKLTIYLAKNHSEVVIEDLNVSGMLKNHRLAQAIADGGFYEFRRQLEYKCQWYDSKLTVVDRFFPSSKTCSHCGHVRKGLKLSDRTFVCSSCGFFLDRDWNAAINLALAGSSPVSACGASH

SEQ ID NO: 60270 - protein, 437 aa, Scytonema sp.
MSAKKQRKTEYTSTQVIPVVFCSDETQVNKIMHLCGIPRSLTYNKLGSLQGWGLDWRKADSIVRTIIKPEQINLPSKLWEWSVNDTMKAISAQQEAAKVFLIREICHKYPISAVQRQRLKWIEENKGKKKGDELKAVKQKALELFLPCSVEIARNRLFELLNTDPTKDNWLHRQFRTKYQRGHTFVRNQIVYQSQGYICKRINRHSVELQIQGLERGKRIALKLRCRQIIKGQIRVIRNELGSFEVHCTRSRSLILPSGKPTQKLGIDKGYTEGFYTSGGKAIAPGLGKLMTHKTERITKTNRNRYRIRAFGESIAPHDPQKAARILKNNLGYKVKSRKLKREKETIRNFIRSDLRRNITTPVDIICEDLTEPIIGKQQAKSINRKLNSWMKGELQASLEKISVETGSTISVVNPAYTSQTDSVRSTQNGAIRRKSK

SEQ ID NO: 60271 - protein, 184 aa, Methanocalculus sp.
MPHSIRAGGSITHFSKNVAMQENGIRATMRGTQARIVTLKQDNPFLKGVYSKVLQIVNSSLWSNIAALSQIKKAKSKLEKAYDHITNQKRDFLHKLSRSYIDRYRTICIEDLDIKGLKEKGSSKGLHRSIHDVSWGRFYSFLDYKAESAGIQVIKVDPRNTSQMCANCGSIVKKILSVRGHECP

SEQ ID NO: 60272 - protein, 471 aa, Desulfotomaculum sp.
VGRSKTDSFVVEIPLRANSEQTRKALARFEAGRQIYNACLGEALKRRDQMLRSKMYRAALAMPHKTKEEIKARAEAFKEAREKYGFTEFSLHAYAARIRDSWLGEHIDANTAQTLATRAYSAVNKTVTGEAKRVRFKRYGELNTLEGKTNKQGIRWRDGCLVWNGLELPAIIDEDDPVIMHGLSCPVKFVRLVKRTIRGRTRLYAQLVCEGKPYQKKKNYVTEGKISLDVGPSIVAEVGDTEANLHLFCRELDDIHTKIRVLQRRMDHQRRANNPDNYNPDGTIKKGRLQWKNSKRYLRTRARFAELNRRQAEHRKSLHGKLINDLLRKGNQFYLEDVSYRAFQRNFGRSVNYRASGMFVNRLEQKATAAKGRVVKFPTASTALSQMCQCGRKEKKKLSARWHRCDCGVTAQRDLYSGFLARHVKIDEEGNYYLDRQSAIEEWPTIKPLLDEAIEKVKRSYFYVAPASFGI

SEQ ID NO: 60273 - protein, 389 aa, Chloroflexi sp.
VACAGVARWAWNWGLERRIAEYRATGRSSNAFEQHRQLVALKKTDYPWLYNYSKSIPQNALRDLDRAFRAFFRRLRRGEKPGFPRFKSRKRSPLRFRVDGAIRVEHDRIRLPRIGWLRLKERGYIPTDAHILSATVSERAGRWFVSVQVREAVEVRPATGEPLGVDLGVRAMAVLSDGRRFEAPRPLEKARRKLRRLQRQLARRKRGGRNYEKTRRKLARLYHRLYNVRQDALHKATAAIVARTKPDGERPREIVIEDLNVGGMLKNRRLARAISDVGFYEFRRQLTYKAAWSGSQLRVADRFFPSSKTCHRCGAIHEGLRPSDREWTCPNCGAVLDRDLNAAINLRNLSGTAGSAGTGGAAPNACGEAVRPATTPAASTKQEPGRSSP

SEQ ID NO: 60274 - protein, 381 aa, Clostridium sp.
VIKIKGFTIRLYPTKEQEELMRKHIGCQRYVYNWALALNNELYKQEGKKYSATELGKILTQYKKEVKWLNEVSNATLKEAIRNLDKAYTNFYKKKAKLPKFKSKKTHNNTFYSRYDKIKFYENDTVNLEKIGKVECKSSYDIDFTNVAKFSNPNVTFNGRCWVLTFSIDIENEYIELTDKVLGIDLGIKQLAIVNEEGLDIPNINKTKKVIDLEKKLKRLQRQCSRKYENNKIGGYYQKTKNIAKLELKIKKLHRKLKNIRLNHIHQATTKIVKIKPSMIVMEDLKVSNMMKNRHLAKSIQQQGFYTFIEQMRYKCEWNGIKFVQVPTFYPSSKMCSCCGNIKKDLKLSDRVYKCDNCNSIFDRDKNASQNLVNYGLEISL

SEQ ID NO: 60275 - protein, 410 aa, unknown
  TnpB Polypeptide
MAINTEIRSVEFVVLPVTRAKATKMFQIAGACRFIWNHFREKNLSNYQKFRNNREKMPSASYFSLGVEFTKLRHQTAWLRELPANPVKYTLKYFADALKQAIQGKKCFPKPRSRKKTAPSFTLPGTENFTLKKLNDKYSLLHIPLTGWVKLACRGGNPWENGTPKQVVLRHDGSRWRAFVFYEVEVEEKIDDGKVLGVDMNVHQIADSDGHFYFLPDMRRKEARRKWYQRKMARQIRGSNRRKDTKKKLGKVSSKIANIRKNWIHQTTRELADKCGTIVTENLKVRNMTASAKGTIESPGKNVRRKARLNKGILDTAFGDIRRNLEYKCGRLIEVDPSFTSQTCSKCGHTDKENRKTQSRFQCVCCGFVSNADTNAAVNIRRLGMAQLHGEGAGVSTAPVNREIDARLTN

SEQ ID NO: 60276 - protein, 378 aa, unknown
  TnpB Polypeptide
MNTTFTRTICIRLDVDGHEAILAATQRACNAAASWIASVCWEEHITNTNTAHHRVYGETRTRFGLGAQLAVCARAKAIEAIKAVKAKKRETCPQFGPRGSIRYDARTYRLMSLDRVSLNTLAGRVVCRLVLGERQHSMLVDPAWEIGGADLVWRRGVYFLHVTQSREGSEPSDPEGTLGVDLGIVALATDSDGQTFSGAQVTQVRTRYLKRRQALQQVGTKNAKRRLRQNAGKEARFQRDVNHCISKAVVRKAKDSCKALALEDLTGIRERVTVRHEQRALRHSWAFFQLRQFITYKAAWASVPLHLVDPRNTSRTCHACGHCEKANRKSQAEFVCKACGLAMNADHNAAINISRKQWAAVNQPMASSLRGEMQAPAF

SEQ ID NO: 60277 - protein, 459 aa, Streptomyces sp.
VRRAFKYRFYPTDAQAAELSRTFGCARKVYNLALEARTEAWARQQRVDYNQTSAMLTAWKKTEEPAYLNEVSSVPLQQALRHLQAAFTDFFGKRAKYPRFKSRKRSRKSAEYTTSGFRFRDGRLTLAKMSEALDLVWSRPLPTGAVPSTVTVSQDAAGRWFVSLLCEDPSVKPFPATDAAVGVDAGLDHLLTLSTGEKIANPRHERRDRAALGRAQRILSRKAPGDGANRRKARRKVARIHARMADRRRDGLHKLTIRLVRENQTIVIEDLSVRTMVRNRSLARAISDAARSEFRGMLEYKAAWYGREVIAVDRFFPSSTLCSQCGRLAESLPLHVRTWTCEGCGTTHDRDVNAAKNLKAAGLAVSVCGAGARPRRRTPDGQPTTKQKTPRRKPQDSPSFRRGRKSRYGARRGSAGVCRGPRRRPGPGVRGRRGRRVRPRASRGGRGRRRRGRRVRPGA

SEQ ID NO: 60278 - protein, 359 aa, Paenibacillus sp.
MNMLKAFKYRIYPNQDQQQFFAKTFGCVRFIYNKMLADKIEHYKLTEKMLNNTPAPYKKEFEWLKEVDSLALANVQMNLEKAYKNFFRDKSVGFPKFKSKKSNHFSYTTNNQNGTVYIDDGFIKIPKLKSKIKIRQHRYFEGLIKSCTISKTPTGKYFISILVETVVEQLPANMNKIGVDLGIKEFAITSDGETFKNPKWLRKSEKQLKFLQRSLSRKKKSSKNRNKARLKVAKMHEKIVNQRKDFLHKTSSMMINENQVIVMEDLKVKNMMQNHKLAKAISEVSWSMFRHMLAYKAAWYGRDVMIAPKHYASSQLCHVCEYKNAETKDLSVRQWICPSCGEQHDRDINAAKNLLKLAM

SEQ ID NO: 60279 - protein, 496 aa, unknown
  TnpB Polypeptide
VRAQTASFVVQTKLKLSTSVENHLEKSFRIAASAYNEALSFGLRRFKALKQNPLYQELLENRRDKETQKECDKTLFELRKSYGLTEYGLQTYLNCQRKTLYSPYRKLNSGELQVIASQAYKALEKVLFYKIKAHSLRFRSKYDLNVSYRNRVNTTGTRLVKSDKQGIAYRLYLHKMSTFVDIPVKAFNRYQQESLLRSEKIKYVQIIRKIIRGKRVYILQIVCQGFPPVKITHGNETVGIDPGISTVAYASNSEVELVDLVPKNINQKEKLMKLLDRKIERSRRVNNPDCYREDGTIKKGARFKHPSNRQLRLQVRRLKAYRSLSEERQKLQGQLANRIVSLARLIKIEDLSVKGLQRRSREIRINPKTNRPFSKKRFGKSIFRAAPSAFRNALQTRAHQLGIDFEVISPKDTKPSQYNHITQTFEKKSLSTRIYNLSEDVTDVQRDLYSAFLIGHIENGHYKQEQLTQDFPVFYKLMKTFLHQPPKTSRLIWYLH

SEQ ID NO: 60280 - protein, 382 aa, Micromonospora sp.
VKIVVQVRLYPDAAQEVALSATLKLCNEGANIASAEAFKRRIHAKRELQRLTYGRLKVLGLSAQPAIQVARKVAGAYATLNGKIRAGNLGQLGSKRRIKAESKPIQFRHDAAQPFDDRCLSWRLADRTVSIWSVRGRLTRVRFGCSPQQYLTLVAHRQGESDLVHRDGKWFLYATCDIPDVEAKEPDGFLGVDLGIANIATVDGGRRYCGKGLNRVRHRNQRLRTKLQRIGTKSAKRLLKARRRKESRFVADTNHRIAKQLVTEAERTGRGIALEDLKGIRDRVRLRRPQRVTLHSWAFYQLARLITYKAARVGIRVVRVDPSYTSQRCSVCGYTARANRSRQSTFRCMSCGFAEHADVNAARNIAARGVADWAAASLPNAA

SEQ ID NO: 60281 - protein, 402 aa, Micromonospora sp.
MRTAYKCRAYPTPEQAAVLNRTFGCVRVVWNRTLVARHARWHTERKSTSYAETDRALTEMKCVPELAFLNEVSSVPLQQTLRHQHNAMTAFFAKRARYPRFKSRHGRQSASYTRSAFRMRNGHLSLGKTPGALAFVWSWPNIDAATLDPSTVTVSRNPDGRWYVTFALDVEVPPAPELTGRVVGVDLGLTDFAVLSTGERIPHPKHMERRERRLRRYQRMMARKKRGSNNRAKIKKKIARVHSQVRDARRDFLHKASTALVRRFDAIAVEDLAVANMARNHRLAKAISRTGWAEFRQMLAYKAHRDGRHLAVVDRWYPSSKTCSTCGHLLARLSLQTRRWTCPNCGTRHDRDVNAAKNIAVAAGLAETINACGADVRHGRPPSVRSAMNQELSRAIEGIPVL

SEQ ID NO: 60282 - protein, 459 aa, Micromonospora sp.
VKTIQAYRFALDLTPGQERGVLAHAGAARVAHNWALARVKAVMDQRAAERTYGVPEELLTPSLPWSLPALRKAWNAAKADVAPWWRECSKEAFNTGLDALARALKNWADCRSGKRAGRPVGFPRFKSRRRTTPSVRFTTGAIRVEPDRKHVVLPRLGRLKLHESARKLARRLDNGTARIMSATLRRDGSRWHVAFCVEVQRADCRPRRPGSVVGVDLGVKRLAVLSTGELVPNPRHLVTAQQRMRALGRALARKTGPDRRTGQHASKRWQRAAARLSRVHARVANLRRDGLHKLTTRLAREHGTVVVEDLNVAGMLRNRKLARHVADAGFAEIRRQLAYKTTWNGGRLLVADRWYPSSKTCSGCGAVKTKLTLSDREYLCEACGLALDRDHNASLNLAALAAQFDTAGSGPVAGRGADRKTPLAGPVAVKRQPGTAPAGQTGTVPPQGGTTTRVLTKAQ

SEQ ID NO: 60283 - protein, 420 aa, unknown
  TnpB Polypeptide
MHKYFYTKLNIFMFKAYTFPLNPSTEQHEQIKSHGGAARWIWNQMLAQNIEKYNNEKKFNFRFDMNKITTQLRGEIGWLAEINSQVLQAKNMDLHEAIKSKIARKSKQTGFPKFKRKSDNSDSFRVPQFFKLSNKAVKLPKIGWVKWKQNRKLEGKAKNITIKQVGDKWMAVVLCELPDVPTRNAFAESEVIGIDVGIKDFAVLSDGIKYANPKHLQKREKLLKSRQRSLSNKVKGSANRTKARKCLSNLHRHVANQRKDFQWKLVDLITKNYQVVAMEDLNIRGMGKNRKLSKSISSAGWGLFKMKLTHKLAETGGLLFEIDRFSPSSKTCSSCGTINTMLTLKDREWDCSCGLKHDRDVNAAINIRNFCLNRLGTSQIHYGCGDTSNGEDSALSSSYESTKQQNLGIGLEATEALDSW

SEQ ID NO: 60284 - protein, 361 aa, unknown
  TnpB Polypeptide
MIKAHKKFKIPTMRRSSRIYLTHLNKSKSETLKQFLFKCHDVTQYFVDLFWQRSDKSVTLADLPTVHRGRNRFKITTRLAQALAKQAKETIKNRSNKRKPRLRKHTTTLYYHFVKIEKFKGFFDYAVNLIGSGAPVMTVPVKSTKHLNWMLKRDWIIGKSIRLGIDEKGIFIDFILEKPVPPKRQTGRVLGMDNNYKNGLVFSDGRRFGKEIYDRIQKFNRRQKHTHEECKSMLYKILNRIDFSGVRMIVIEDLKKVKQYTRGKFSRLFNRRLSHWLYACIADWLSQHCEELGIQLEKKSPWKTSQRCSVCGRWDRRNRKGSEFKCVHCGFSDDADHNAAVNLEFLGLAGVYGLRYLKSSK

SEQ ID NO: 60285 - protein, 419 aa, unknown
  TnpB Polypeptide
MKLVHKFNYRKKDTELDALCRVSNDLYNQANYVIKQELNKSGKWIRYNELDRIMKATENLGHDINYRKLKAQVAQQILRMLDKNWNSYFRAFKAFKKDPNKFTGQPRPPRFLKRGNKNLLIYTNQCSQIKDNKIVLEDSISINIPEIDKDFSKFNQIKILPRKNRYEIEIIYNVDCINFELDQKNYLSIDLGVNNLAACVSKDKSFLLDGKPIKSVNQFFNKTLAKNRSFRDKKGGRVCRRKSNELSNYREFFIRDQFHKMTRLLVNYCIVKNIGTIVCGYNKRWKDSIDIGKISNQKFTNIPHKLFLKLLKYKCELVGIVLICKEESYTSKCDGLALEPVKKHEVYLGKRISRGLFQSSVGKLINADIGGSLNTLRKVIGDGSFIRDLIDSVVLFNPVKIRFADLSCKQTLSNFLVRC

SEQ ID NO: 60286 - protein, 397 aa, Bacillus sp.
  misc_feature (218)..(384): Xaa can be any naturally occurring amino acid
MTKHNKAYKFRLYPTEEQSDLIRKTFGCVRFVYNKMLTERKKVYEKYKENKEELKKQKFPTPAKYKAEYEWLKEVDSLALANAQLNLQTAYKNFFSGQSDFPTFKSRKSRKSYTTNQVNGNIMLFHGYIKLPKLKMVRLKQHRGIPQNHIIKSCTISMTPTGKYYVSVLTAYEKEIVQKEVESVVGLDFAMAELYVSSEDEKANYPRFYRQMLDRLAXXXXXXXXXXXXXXXXXXXXXXXXXXXXXXXXXXXXXXXXXXXXXXXXXXXXXXXXXXXXXXXXXXXXXXXXXXXXXXXXXXXXXXXXXXXXXXXXXXXXXXXXXXXXXXXXXXXXXXXXXXXXXXXXXXXXXXXXXXXXXXXXXXXXXXXXXXXXXXXXXXXXXXXNIKKEAIRLLALA

SEQ ID NO: 60287 - protein, 409 aa, Mycolicibacterium sp.
MAHRYRMYPTAQQAVFMLERHCADARYVWNLAVEQFNWGRSGRSAPGPAARQKQLAAARQAFEWLAAGSSAVQQQALRDFDRAVAGFFTGTHRRPTWRRKHLDEGFCIRDSRVEPVNRKWAQVFVPKLGLVMLRLSRPLPAGKLGMARVTCKAGRWHVSFPAPQPGVPAAAGREECMVGIDRGVKTTLALSDGTMLRAPVMRRVEQNKLIRLQQQLARCRKGSIRRGKVKARIATLHARVADRRRDWIEKTTTRITATYGVVAVEKLPTRNMVRAPKPKPDPEVPGHYLPNGKAAKSGLNRGIYANCWGVIAQRLEHKTSASGTTLIEVPAAYSSLECRNCGHSVKENRKSQAEFQCVKCGHQDHADLQAANTILVRATRPAHTSGLEATPATTGVLAQARRPDDAHAA

SEQ ID NO: 60288 - protein, 306 aa, Streptomyces sp.
VQLRYNYRTYPDASQRRALAHAFGCARVVWNDCLRDRKEAHAAGLPYVKSADLSRLRITQAKRTEDRAWFADVSAVVLQQSLRDLDTAYKHFFDSIKGKRRGRAVGPPRYKSKKDTRQSIRVNTNAFCLQENGTVYVAKVGRLKVKWSRRLPAAPTSLTVTKDSSGRYFLSFVVDTEPDILPSLETDAGIDLGLSAFAVLSDGSKIDSPRFLRRAEKKLRRLQRDLSRKAKGSKNRAEARIKVARQHAKVADRRRDWHHKTSTQIIRDDQAVYVEDLAVSGLGHTQPHRRGPHSVGEAGGEGGQPR

SEQ ID NO: 60289 - protein, 262 aa, Streptomyces sp.
MLPSTPSTVTVVKDSAGRYFASFVVETGPSEVLPTTAPQLGIDLGLGHFAVLSDGTKVDSPRFLRRAEKRLKKAQRALSRKEKGSRNRDKARLKVARAHARVADARREFHHQLSTKLIRENQAVAVEDLSVKGLARTRLAKSIHDAGWSAFVSMLEYKAARYGRTFFRIGRFEPTSQVCSVCGVKDGPKSLHVRIWTCGACGAVLDRDVNAAVNVAKAAGLAVSACGAQVRPGLVPAQRGEAGTPVTVFVAPQWGLRPSGPA

SEQ ID NO: 60290 - protein, 298 aa, unknown
  TnpB Polypeptide
MIKRQVIVVKTYCFKLYKAKRNKKLHKVINIAGIIYNHCIALHKRYYRLFKKSLNIYKLQKHLTKLKKIGKFSYFKEVGSQAIQDITQRIDRAYKLFFRNLKHKIRTAPPSFKKIRKYKSFTLKQAGWKLLKGNIIEINKQKYKYFKSRDIEGIVKTITIKRDTLGDIYLYFVCETNENKVLSRTGKSVGYDFGLKPFLTASDNEDIKVPLFFKQNANDIKKANRILSRKKKGSNHRRLAKIALARLHKKIANQRKDFQFKLANDICKKYALICIEDLNIKGMQKRWVEKYLISIVCI

SEQ ID NO: 60291 - protein, 384 aa, unknown
  TnpB Polypeptide
MLHAYKYRMYPTRTQIPLLMRHIHACRFVYNHSLEQKIRAYEQEGRKLSCFDMNNHLPALKEEHPWLKEINSQSLQSANKNLDNAFTRFFRKKKGFPKFKSKKNPVQSFQVPQHYAVDFGRRRIKLPKIGEIKTVFHRIFTGKMKYVTVSVTSTGKWFVSILVDDGAATPEPVPFTLDTTLGIDVGLTDFATLSTGEKVENPRHLKNSLQRLEVLQRRVSRKVKGSKNRQKAIQKLARCHEKVANQRNDFLHKLSNRVVSENQAIAVESLNVAGMQKNHKLAQSIGDVSWSAFFAMLDYKCRKYGKTLLSIGRFDPSSKICSKCGYLKRDLILSEREWICPDCGTHHDCDINAAINIKKFALQEQNLVGVAGAERAVEPVDLPQ

SEQ ID NO: 60292 - protein, 387 aa, unknown
  TnpB Polypeptide
LRQARAGHAAAGTRVCGGGQGRWGTPPVDYDRGIPAAVWDRVALNDPEFAWLRESSCIPQQQALRHLQTAFANFFAKRAKYPAFRSKHGKQSAEYRVGGFKWDAGNRNLSISKVGRLRIRWSREFTSKPTTVTITKDCCGRYFVSLCLDEPAKAALPKTGEQVGIDLGISRLATLSNGERVSNPRHTAKYAARLARAQRDLSRKTKRSGRWVRQKRKVATIHAKIADSRKDVLDKLTTDLVRRFDVIAIEDLNVRGMVRNHSLAKHISCAGFGQFRTMLEYKAEWYGKEVRVADRWFPSSKRCNDCGHVHSKLPLDVREFTCEGCGDHLDRDENASKNILQFARAISPTTGGHPESKARGERVSRAKAPAPARNARRNVNLPGSANV

SEQ ID NO: 60293 - protein, 379 aa, unknown
  TnpB Polypeptide
MIRSYKIRLFPSQEQEQLLWKHINASHFVWNFGISYQMNRYKNNEKHLSGYDLRKVFANLKQQEEYIWLKEISSHTIGEVCLDLDNAYKRFFKKQNGYPKFKKKNKCKNSFPVRQDTFYFKNNYVIIEKIGKVKYQTNYNLPQGRNLMGKFTDPRIKYKNNKWILCFGIECNKQTQILTNNSMGIDLGVKDLAIISCGNEFKVFKNINKTKYIKNINKHLKHAQRRISKKYNTNGNWDKSNNILKTEKRVKQLYNKLSNIRNNYIHQITRQLINLLPYRVVMEDLNISGMMKNKHLSKAIQEQCFYEFIRQMKYKCEEYGIEFVQADRWYPSSKTCSNCGFIKKDLKLSDRVFICPECGFEIDRDKNASLNLMNYKLVG

SEQ ID NO: 60294 - protein, 363 aa, unknown
  TnpB Polypeptide
MSKREKPTTAKKPTKTYLFRLYPTRKQTRTLEEWLGLCCEVYNAALDERKSAYRMADVSLSYEDQCSELPGCKEVRPELAKVPSQVLQDVVKRVDLAFDAFFRRLEEGENPGYPRFKSRFRYHSLTFKQYGNSFNVLDGGKKNRGTLVLAKLGHVKMVMHRAIIGTPKTAVVKRAPTGNWFVSISIELSEKGVQGKGLPVSEEEVGIDVGLKTFAYLSTGEEIANPRFFRAEEAALARAQRKLAKAPKGTKERALKRKVVARIHQRIANRRKTFIEQEVSKLIRRFGFLAVEALVVRNMVKNPKLAKSIADASWSMFFKHLQAKAEEAGRQVVRVNPAYTSQCAASALIRSHLKEGEVGSKDL

SEQ ID NO: 60295 - protein, 340 aa, unknown
  TnpB Polypeptide
MLVLEFKAYGKTNQFAAVDEAIRTAKFIRNSCIRLWMDNKGTGKNDLQKYCAVLAKEFPFADELNSMARQASAERAWSSISRFYDNCKKGVAGKKGFPQFQKDCKSVEYKTSGWKLDNSRKSITFTDKKGIGRLKLKGTRDLHFYQMTQIKRVRLVKRAGGVYVQFCVDATRRENIEPTGTTVGLDVGLTDFYTDSNGETVSNPQFLRKAEKFLKRSQRRVSRKVKASKNRGKASSILGKRHLKISRQRKDHAVKLARCVIQSNDLIAYEDLRIKNMVKNHCLAKSINDASWYQFRVHLEYFGKVFKRVTVAVNPQYTSQECSDCGQVVKKTQSIAHSLM

SEQ ID NO: 60296 - protein, 399 aa, unknown
  TnpB Polypeptide
MILSHKIALDPNLAQRKYCAQGAGTARFAWNWALHEWKAAYEAGEKVTEGGLRKKLNAIKRQEFPWMLDVTKVAPQHAIKCLGTAFQRFFAGTSSYPQPKKKGRKDSFRADNGPGTFNVNGRYLTLPVIGTIKMHEELRFIGKLLSVTISREAHRWFAAIAVDMPDTPQVGQNQAVCGVDLGISRLATVSDGTVVPAVGSLKRELKRLRRCSRALSRKVKGSSNRRKAKHKLARLHARIKHVRLDVLHKTTTDLTSRFGTIVLETLNVKGMMANGHLARAVADVGLYEFSRQVEYKAKIRSGRVLRADPWYPSSKLCSTSGCDYKNVSLTLSERFWTCPLCGHKHDRDLNAAINLASLSTASSAGIEACGAGSSARPGKPGRRSPASKQEPKVGINDHI

SEQ ID NO: 60297 - protein, 345 aa, Lactobacillus sp.
MYAESLILGDKCLKPNEYKVRNELVANKADWQYRFSARCLQLAINDLNKAWKNFFNKSLPDWGKPQFKSKKAPRQGFKTDRAKIVSGKLRLDKPRETGYQWFDIRFKGAESIDGDLKTISVYRENGKYWASLPFEVDIERKTKTNHVTAVDVNVGHINYTGGKINTLPANLKRLYKRIKHYQRMLAKKRVVNGKRATKNDNYVKTRAKLQRDYRKVANIQHDIMQKFTTKLVTQYDKIVIENLAVKEMQMTHVASKGLQRSMFGYFRQILSYKCDQYGKKLILADKFYPSTQRCSKCGHVKTGSEKVGLNGNLKHGTKHNEYICYECGFNCNQDENAVLNLLALI

SEQ ID NO: 60298 - protein, 544 aa, unknown
  TnpB Polypeptide
MKYTLSIGEEKIEDLNLDISLASSNLQLVKQVKVTDVNDVFCCLLLSNTAKKLYNSSLYLFKQQYKQNQTTLTYETLDKLMKNELLHPNFARLYQDLSAKVSQQVLKLFSQNIKSFWGRKKSEKLTEEERKKVNLPRYYTKNGLIPVYYTKQAISKKAFNKEGVLHFSGTDLKIKLDESLLKEIKSFSQINQVRIVPSTRNDKNKRLSDLLNERDLFTIEIVYTAPVSEKRSNNKSLELFYRTSVIYKINPKTNKITTIEKEKLAEARYTEDFLKSVAGIDQNLDQLAVGVVLENQENLMFNYDIKYLKSVNQYWNKQKAKIQEEISKQEKFLEELKYTKLDFYQTFLSEYTASRLIEDIKILIKRLKNKIKKITKKRNRKIDNFTHQLSRKLINHLSELGIKNIIYGKNVNFKQEINLGKVTNQNFVNIPFNQIIERLRYKALLAGINFMTVEESYTSKTSFLDEEKLHSYKRSCDRAPKDYMFLGDRFTRSLFKSKKGYVIHADINASFNIIRKVTGDNIYEFINMGAIRGSCPKRVKINLA

SEQ ID NO: 60299 - protein, 144 aa, Paenibacillus sp.
KAKLKVACIHEKIANARKDYLDKISTEIVKNHDIIGMEDLSVSNMLKNQHLAKAISEVSWSQFKNMIEYKAKWYGKQVVTIARNFPSSQFCSSCGYKNKDVKELGLREWDCPKCDTHHQRDINAGINLKNEAIRLLTVGMTGIA

SEQ ID NO: 60300 - protein, 399 aa, unknown
  TnpB Polypeptide
MPRYRLLPSPAQQVVLRGHCAHARFVWNLAVEQHRHWRPGRKSAPGYLEQCRQLTAARAEHPWLAGGPQMVQQQALRDFARATANYLGGTHHRPSWRKAGRNEGFRVVALKPRDVRRLSRHVGAVRVPKAGWVRFRWSRAVPPDVKSCRVTLDRAGRWHVAFAAVPAPVPAPVPAPGNGQVVGIDRGVAVSAALSTGELLRVPGLGGAERTRMLRLQRKLARARRGSARRGRVRQAIARLQARQRDRRTDWAEKASTGLARRFDVIRVENLDITGMTRSVAGSAAEPGRNVRQKSGLNRAILAQGWGLLARRLRDKAPGRVEKVKPHFTSQRCSACGHVDPKSRESQARFACTACNFAGNADVNAARNIAAGHAVTARGGDGAARPVNREPQLLLQSGQ

SEQ ID NO: 60301 - protein, 353 aa, Clostridium sp.
VKNSSLLNKGYKFRIYPNIHQIAKIEKNFGCVRFVYNYFLSQRIRAYDSAGKTIGYLEQQNHLPLLKKQYPWLKVADSTSLQISIRNLDKAFQNFFKNKAFGFPNFKSKKSIRKCYTVNCVNSNIVIKDGKIKLPKLKWVDAKVHRKVEGRIISATVIKSSSGKYYVSVITEQKKRQIPSTEGKNIISLQMKDFITISNDKSIYYFKYIKKIKKLERKLLSKEKESNNRKKLEKQIGKLYEKIQNKRDDFLHKLSKNIVDENQIIYIQECNVKKGTDYIENCAHLKSFSWSKFCKFLEYKSCWYNKSLIYVENSDSYLNLEYNYKSLNTNIPLNFGEKINVTLMKKILRPHSF

SEQ ID NO: 60302 - protein, 204 aa, Desulfosporosinus sp.
LTDEIIGIDVGVKELAVCSNGMTFKNINKSQRVKKLEKRLRRLQRKVSRKYEMNKEGNRFVKTSNIINVENQIRMQHRKLNGIRNNHIHQATNTIVKTKPCKVVMETLNTLNIKGMMKNRHLSKAIAKQRLYDFKSKLQYKCERFGIEFAEADKWYPSSKLCSCCGTIKQDLKLSDRIYRCECGLVIDRDFNASINLSRYKLAV

SEQ ID NO: 60303 - protein, 402 aa, unknown
  TnpB Polypeptide
MRKINRTYKFRLYPTKAQTELLAKHFGCARFVYNYFLDQRQEQYRLTGKSDNFYAECKSLTELKKHEETAWLKEVNAQSLQFALRCLETAYTNFFKKRAGFPKFKSKRAKSSFTIPQSTHLTNDRLFIIKFKEGIKCRVHREVKGKICKVTITKTPSGKYFASVLTEEEYVTPFEKTNKSVGVDMGLKDFLTTSDGEKIKKNRYTKKYERKLAHAQRHLSRKKKGSRGYENQRLKVARIYEKISNSREDYLHKCSISLVRRYDTICIEDLNVKGMMKNRNLVKSIADVSWGSFVAMLTYKAEWNGKKVLKIDRFFPSSQTCSVCGHINKETKDLSVREWECPACHSHHDRDVNAAINILRLGLKQYTSAGTADYTGGEGVRAVLSESHSSVKPEARKQKACE

SEQ ID NO: 60304 - protein, 224 aa, Planktothrix sp.
MKSHPLTQMRSNDLILQILGKVCYNSGKPQVEGIMLVVETKLKNGTSEQYQKLDESIRTAQFVRNKCVKYWMENKGTTRNDLQKLCAVLAKDSTTPWASKLNSQARQSSADRAWQAISRFSKLVEIDRWFPSSKLCSNCFYQVSEMPLDMREWTCPDCGTDHDRDGNAAINIRAEGIRMLKTDGAAVSAVGGDVRPYLGQKPKLWHSPVSTEADTVLGTPSQCG

SEQ ID NO: 60305 - protein, 177 aa, Planktothrix sp.
LSRKIKDSRNREKARKKVARIHAQIADGRRDYTHKLTTQLIRENQTIVVEDLAVRNLIKNPKLARAISDANWAEFVRQLTYKAEWYGRKLIKIDRWFPSSKRCGNCGHILDKLPLNIREWDCPNCGTHHDRDINAANNILAAGLAVSVCGATVRPEQSKSVQAGAKTRKGRKQKPKS

SEQ ID NO: 60306 - protein, 357 aa, unknown
  TnpB Polypeptide
MLRSHKIALRPTDRQRCWFAMQCGYSDVAYNFALSAWNAGVPKSQLRKTFNARKYQEFEWCEELDQRAAMYGIMNLEDAITRYNKGQNNRPKRKKRGARQSYQMESAKIQIDAKRVKLPQIGWIQMHEEVRFKGEVVNRVTISRTAHRWFISVTVETEDIQQVVDPTAPVIGIDVGINTLATLDDGRKFDNPRPLKCYKRKLAREQRKLSRMRYPSNNYYKQKLKVEKIHYRIRCIREDAHHQATTAILKRASKVGIETLKVTNMLKNRKIAKALSDSALGGFLAMLKSKADAIGIEIVRSPQFFASSKTCSNCGHKKEDLTLADRTYHCDSCGYTQDRDVNAAINLRTIAVGGTEM

SEQ ID NO: 60307 - protein, 405 aa, unknown
  TnpB Polypeptide
MELRRTAVVKLAVPDERRDDLKRTMNTFRDAAQRFADRGWDGDADGYVITSRSHLQRLVYDEIRTDTELHSDLCVGAANHAADALSTCVEKLKDGERTSKPMFTSNTTIYNTNAISYFDGYCSLAAYGGRVHTEYVYPADSIQAEYMESDEWTKKGAKLRYDHHEDTYYLHVTVVQERDQQGEAENQSVLGVDTNVDGYLAVTSTGAFIGNADRLNHERREYERRRARLQQQGTRSAHLTIQSIGDRFARWSEDFLHRASKRLVAEAVAYGCTTIVFERLDGIRDRISDASKFQQWAFRELRRQTAYKAKEEEIAVETVNPAYTSQRCSHTECGFTHEDNRDGDKFCCQKCGKDLHADYNAARNIAQKYLQNRRKSGAGGATHHLALKSGTLNGNGDYSPSTAGG

SEQ ID NO: 60308 - protein, 479 aa, unknown
  TnpB Polypeptide
MRRANSFDVRPLSHCGRLALIELLDASAACFNKINYDRRQAYFSARYDADDHHTVSELTDIVRDAAAQEEYRNKYIQQLSSSIPQQLERKNWRTWSGFFELLNKYRDPEDDDVTDEPSPPGYWKEDGKRHLHTVIRNDTYSLELGERSRLEIPLGTELKEKYGYGYHEKLRLEVRGRPHWEGPNGSLELTYDRTAETFTARQSVGRRHTDPVRRFTDTPALATTSGEDEGVVAAVDIGANNLAAVVTSEGDHMVFHGRPCFERFHDLTAEIADLQSRLPDDRYSTERIERLYRRRREQRDHAQDALVRHLVGWLVERGVMELYVGKLDNLREKHWSATVNEKTDLFWAHGRFRDRLWDVLEDECGITVHEGSEAGTSSKCPECGGEDVHRSGDDLQCLSCDFEGHSDVVGAVNFLAEQTAVGEPMARLAARGQNSPRDAVACLEWDDHRWQHRDQSTKEEPADRSTREGNLASGGTGTA

SEQ ID NO: 60309 - protein, 369 aa, unknown
  TnpB Polypeptide
MLKAYKYRIYPNKKQEILIQKTFGCCRFVYNQTLAYRKTMYESLKKSMSKISCNNYVNQVLKIEYEWLKEVDKFALSNSVYNMDSAYQKFFKEHTGYPKFKSKRNNKKSYSTNYTNNNIEVSFDTNRIKLPKLKWIKAVLHRKFTGKIKSATVSQTPSGKYFVSVLVEKESTPFPSTGAMVGIDLGIKDLLITSDGEKFDNIRTTQKYENKLAREQRKLSHKVKGSSNYNKQRIKVARIYERIRNTRLDNLHKISHKLISENQVIVSEDLSISNMLQNHNLARSISDCGWYELIRQLTYKASWNNRKYIKIDRFVPSSQMCSVCGYINSDTKDLSVREWICPECGTVHDRDINAAINILNEGLRMLEVA

SEQ ID NO: 60310 - protein, 490 aa, Escherichia sp.
  misc_feature (298)..(386): Xaa can be any naturally occurring amino acid
VKRLQAFKFQLRAGGQQECEMRRFAGACRFVFNRALARQNENHEAGNKYIPYGKMASWLVEWKNATETQWLKDSPSQPLQQSLKDLERAYKNFFRKRAAFPRFKKRGQNDAFRYPQGVKLDQENSRIFLPKLGWMRYRNSRQVTGVVKNVTVSQSCGKWYISIQTESEVSTPVHPSASMVGLDAGVAKLATLSDGTVFEPVNSFQKNQKTLARLQRQLSRKVKFSNNWQKQKRKIQRLHSCIANIRRDYLHKVTTTVSKNHAMIVIEDLKVSNMSKSAAGTVSQPGRNVRAKSGLNRXXXXXXXXXXXXXXXXXXXXXXXXXXXXXXXXXXXXXXXXXXXXXXXXXXXXXXXXXXXXXXXXXXXXXXXXXXXXXXXXXXXXXXXXXILDQGWYEMRRQLEYKQLWRGGQVLAVPPAYTSQRCACCGHTAKENRLSQSKFRCQVCGYTANADVNGARNILAAGHAVLACGEMVQSGRPLKQEPTEMIQATA

SEQ ID NO: 60311 - protein, 432 aa, unknown
  TnpB Polypeptide
MYIGNFISESMKGENLMYLTIKQQVKRLSKEDYMTIRELCYIAKNLANEAIYNVRQYYFTEGEFLKYEKNYTLLKNSLNYKALNSNMAQQILKEVDSSFKSFFSLLKLAKHGKYAFTGCKLPHYLPKDGYTTLIIGFVRLNGNKLIFPFSNSFKKTHKLVEITIPPILLNKKIKEIRIIPKANARFFEIQYIYEAECIQRNLNTNNALALDLGVNNLVTAVSNIGKSFIIDGRRLKSINQWFNKENARLQSIKDKQYFGRKSTNRQKATARDRNNKVNDYMNKTARKIIDYCIANNIGTLVVGYNETFQLNPHIGKQNNQNFVNIPYGQLRHKLEYLCKLNDIIFIKQEESYTSKSSFWDKDNIPVYNADNPKEYRFSGRRVQRGLYKTASGKTINADVNGALNIMRKSRVVDVNILYSRGEVDTPIRIRIT

SEQ ID NO: 60312 - protein, 397 aa, unknown
  TnpB Polypeptide
MQKEVQVTVVGRVFKPNTRKVRALNRCFEQYLGLVKWYLQFQSTSKKFLHKNGYDEAKQRFYLNTALIQTARDKAVEILKSFRKTKRKSSILTVKRISIRFDSRCYTFSKTTNVLTPYWLTLSLDGRQRISLPIIFGEYQKERIEKAFSQEWQFKTVDMIKKNGIWYAHFVLSKTICFSEPETVIGIDRGEVNFAVAVAISKSNPEKPLKGQFWRGSKVKQIRGLYSHIRRKLQEKKLLKKVKEIGAKERRKVNQQLHIIANQIIEYAKQFPKPVIVMENLNGIRRNFKKSKKLNRRFHSLPFRKLQTIVEYKANLEGIEVKYLTKKQTRHTTKQCHRCGYVAPKVNGRIYKCPECGMEYDRDLNACINIAHRVMSSMGWGSCDTPKLSGDVKCGKL

SEQ ID NO: 60313 - protein, 404 aa, unknown
  TnpB Polypeptide
MKLTSVLLVEGDYKTLEELAKITNGLWNKAVHLEKEKLKDGKFAFYAELCNRLKNDPLYRLLPSQTAQAVLQKLDGALHSYIKLKHNGRKARMPSYHWPKTAWMVPYKNQQFRFEGDTLKLTLSTAYRREKSVEWLTLKTYGKIREGKVKYLELYPRGGLWFASIVSEVKPARIKTNGNITVDLGIVNQAATWNGQNSEVYKGGAVSAIIRYREKENGWLQAVLATHDKKMSKAKREMNHRLTGQARHAIHSLTKTIVEKAVRERKGIVAGDLTGILDGKRSRKANQKLHKWMFRLMIFQLGYKCRLAGIPFKTKSERNTSRNCVVCHVAHRGGRVHRGLYRCKLYGQYNADSGAAYNLNVSPIPAGVGVVAALAQPAVVLWNRHSWVPRDETNPLNREEPHTP

SEQ ID NO: 60314 - protein, 313 aa, Clostridioides sp.
LNNLKKELKWLKEPDKFSLQNALKDLDNAYKKFFKEKAGFPKFKSKKINRFSYKTNFTNGNIMYCGQYIKLPKLDMVKIRDKQVPKGRILNATISKEPSGRYYVSLCCTDVDIEVFENTNNQIGLDLGIKEFCISSCGEFIENPKYFKKSLNKLAKLQRELSRKTIGSLNRNKARLKVAGLQEHIANQRNDFLQKLSTKLIKENDIICIEDLQVKNMIKNRKLSRLISDVSWSEFIHQLKYKANWYGRQIVKVGKFFASSQICNKCGYKNEEVKDLNIREWICPSCNETHDRDINASINILKEGLRLITIQNK

SEQ ID NO: 60315 - protein, 362 aa, Moorea sp.
MIRRWFGVSRYVFNKTVKILQNGEVKANWKAIKTGILNDLPDWCKSVPYQIKSIAIKDACTAVREAKKKYKKTSQINRVRFRSRKNHVQSCYIPKSAVSVKGIYHTKLGKITFAETLPDNICDCRLTSTNGDYYLVVPYNTTKFKTENQGRVVALDPGVRTFLTFFSETSVGKIGQGDFSRIQRLCQHLDNLISKISKAKGKQKRRMRKAARRMVIRIQNLVNELHHKAARFLVDNFDVILLPTFETSQMSKKSSRKLRSKTVRNMLSFAHYRFKEFLKHKAIENGKIVVDVCEAYTSKTVSWTGELVKIGGSKIIKSKIDGQTMDRDINGARGIFLRALVDTPWLRDSAKPKLREQLALAG

SEQ ID NO: 60316 - protein, 363 aa, Aeromonas sp.
MSIQTKTLSVRIKDRHAPLLRQMAFEANQVFNLANEITSKAYSNACEAGPQIPVWLSVFDVQKQTAGIQKERGWTIGSATVQEVIASHGKARQQFKRAKLRWRSSSGSKRALGWIPFKSRAASWKGGQVKFAGYFFKVWDSYGLSAYQFRAGSFSEDSRGRWYFNVCVQVECKTTTATSAVGVDLGLKDTATPSHGKPLEAGRFYRDLEGSLGKAQRANKKARVKAIHAKIKNRRKDALHKFSSALVRDNAAIFVGDVSPSKLVKTKMAKSVLDAGWAMLKTQLEYKAIARSVVFEVVNESYSTQTCSCCGTIPTSSPKGRADLGIREWTCVECGATHDRDINAAKNILAAGHRRLAVGILVL

SEQ ID NO: 60317 - protein, 194 aa, Clostridium sp.
MTKDYPQTTPFEINKIVGIDLGINFLATIYDSYGKTTFYNGRHIKAKRGHYKILRKQLQQCGSKSARRKIKSIGSRENRYVNDINHTITKALVDKYGANTLFVLEDLTNVRNTTEKVNINNRYVSVSWTFYQFRQLLEYKAKMNNSIVISVNPKYTSQTCPKCGHIEKANRDKKNISLNVKIATINLMMIELDQ

SEQ ID NO: 60318 - protein, 490 aa, Micromonospora sp.
MHCHRQIRAPWNDDGRSPQVYALADAMPARFSALVVVAALSGLRWGELVALRRRDIDLDGGTVRVTRKLAVLRSQLDFGPPKSAAGVRVVALPAAAVEALRAHLAEFTAADADAPVFTGDKGALLRSGNFGRGQVDADGRSVRPAGFHFHDLRHTGNPLAAASGASTRELMQRMGGAGYWHVDGKATNDKETVISTESARQVAEQFLLRDEIRHVSARRQNLNAALAWAAARWAVDQAIASRATVIYVEDLRSLEARGMGATLNTRLSQQVRGQIVDRMRHLAAEHGIAVVTTPARNTSKHCPQCLTPLRHRKAPDKPTVAGWKWAICPHQSCRWQGDRDQGAWRRIAARGLAHQAKTVIDKVSGHMVIRAVVDKLEASAVITKTCRVDRSKTGPTRRKPSRPAPRRRRAPSPTRPSGPAGKRPEGHAPTDRRLPRAAHRHQGVNTISTPTIGHQPRGATLGAGFHFHAHATPPRWETIPETQSDSGSLS

SEQ ID NO: 60319 - protein, 265 aa, unknown
  TnpB Polypeptide
MVQNTAPQDGAEHRDRKLGRRRTMARQHPRGGDHPPSPRPRNAIGIDLGVDSYAVTSDGETIANPRHYKKLAERLEREQRTLSRKTKGSNNRRKAALKVARTYARITDMRRDFLHKLSTRIIRENQTVVLEDLNVKNMAKRCAPKPDPDNPNHWLPNGQSAKNGLNGSIMDAGWSEFRRMLEYKAEWYGRQLITIDRYYPSTQICSHCGAKTGPKGMPGLKVRAWTCPDCGTTHDRDLNAAENILAAGLAVSVCKDGRTGTKVSH

SEQ ID NO: 60320 - protein, 457 aa, Moorea sp.
MYKTIPIKAVLSDEEKAFWEFQCRQANSLFNCAIYYAKQKHYKWLEEQEAFTTYWRGDELRAGWKTYKCVIKYPEIDKALKMSPHYKGMAAQSAQQTLKTVGEAIASYNQLVGLYYKGEVDRPRFPRYRKSGGLASVTFPRQALTYKKGLFYPSVSKESKPELLTQITLNPPGFIDPEWVKEVTIRPCYRQLWIDWVIDDGKQPLATNPDLDYSQALGIDHGGDNWLTGVSTLGKSFIIDGKKLKALNQGYSRLVAKHKAGKPERYWDSSLDRIQLKRNNQMRDAVNKAARFIVNRCLHDGIGNVVFGWNKGQKNRSNMGRRGNQNFVAIPTNRFIERLKQLCSEYGIKLVITEESYTSKASFLDRDSLPKLGEKPAGWRPSGKRVRRGLYRTASGQLVNADANGAANIIRKVTTQSFDLTKVARGALTLPHRYDLFSDLSKSYRNKGGAVWVYPTA

SEQ ID NO: 60321 - protein, 307 aa, unknown
  TnpB Polypeptide
VRKINRAVKIRIYPNKEQITQIEKTIGCSRFLYNRMLADKIRYYQEEKKMLKNTPAGYKKEYPWLKEVDSLALANVQLNLEGAFRKFFREPGVGFPHYKSKKHSRKSYTTNMVNGNICLQDRFLKLPKMQPVKIKLHRMIPEGWKLKSVTVSREPSGKYFASLLFDCENQTAEKRQAEKFLGMDFAMHGMCVFSTGERAGYPMFYRNAEKKLAREQRKLSRCEKGSRNYQKQKKKVALYHEKIKNQRKDFQHKLSHSLAEDYDAVCVEDLNLKGMAGGLHFGKGIQDNGYVSSFPCLDISWKNVENI

SEQ ID NO: 60322 - protein, 414 aa, unknown
  TnpB Polypeptide
MLLSEKHIVKKNNKEFKKLDHFCFLSKNLYNTALYTLKKHYGETGKHLNYNAIEKLFRINKHLDYISLPPNTSQQILMLVDKNYRSFFSSITSYKKSKNKFKGLPSPPKYKHKTKGRNLLVFTTNQAKLKNGFIKFPKRIGIQPFKTNVDNLKQVRIVPQTGCYVIEVIYEKKENVHENLDKTKYLSIDLGLNNLATVVSNQPGCKPTLISGRVLKSINQYYNKKRAILQSKLPHNQHSSNKINTLTLKRNNKIKNYMHHCSKYIIQHALQYNIGNIVIGYNEQWKQYINIGKRNNQNFVGIPFLIFINQIKYKAQLEGINVILHEESYTSKCSAFDLEEICKHDRYVGRRVKRGLFKTSLGYYVNADVNAAINILRKVTNDLFLKEITVSRGLVVSPVSIMINTNSYKCIFNR

SEQ ID NO: 60323 - protein, 226 aa, Escherichia sp.
VKRLQAFKFQLRPGGQQEREMRRFAGACRFVFNRALALQNENHEAGNKYIPYGKMASWLVEWKNATETQWLKDAPSQPLQQSLKDLERAYKNFFRKRAAFPRFKKRGQNDAFRYPQGVKLDQENSRIFLPKLGWMRYLNSRQVTGVVKNVTASQSCGKWYISIQTENEVSTPVHPSASMVGLDAGVAKLATLSDGTVFGACKQFSEKPEEVGETSATVKPQGQIQQ

SEQ ID NO: 60324 - protein, 376 aa, Bacillus sp.
MILAKKVRLIPTPEQEQVLRNHAGAARFAYNYCKRMSDRYYKLFGKSVSQLALQKRFTKIKKRKRYEWLNNINAQVPKQASKDFDQARKHSFKKYKNGSHTSYKSKKDLIQGFYANYERLIIGKKVVHIQSIGEVKTSQQLPRNKKPSNPRVTFDGRHWWISVGFQEDFELQALTNESIGVDVGLKELFVASNGMKERNINKDAKVKKLLKRKKSAQRDMSRRFKKGVKIQSAGYEKAKTEHLRLSREITNIRINHIHQATAKLVKTKPMRIVVEDLPISNLLKNKKLSKAFSFQKLHFFFQCLSYKCEKYGIEYVKADKWFASSKICSCCGVKYDHSVQPEGQWSLKIREWRCASCNSHHDRDLNASINLSRCVK

SEQ ID NO: 60325 - protein, 406 aa, Rhizobiales sp.
VKNIETSMITYKFRLYPTREQEERFTATLNLCRWLYNCALEHRITAYKRAKKSITKFDQIKELSAIKKDFPQFTTTHSRVLEGVIYRLQEAYDGFFRRIKAGEKKAGFPKFQGKKRYNSFNYLGGRGFKIVDNKLRISKIGDVKIRLHREIEGTNLRECTITRKNDNWYACISCFIEPKKTQYTGEKVGVDLGLASLAITSNGEFLESFKYLLKAERRLKFLQRMVSRRVKGSNRRRKAVGMLSKQHEKVANRRNDAINKAVHALLKKYDYIALEDLKIKNMMKNRKLSKRIADSAWGKFITKVQTKAQEMGKEVVLVNPHNTSQLCSECGEIVKKELKVRIHACPYCGYVEDRDVNAAKNILMRALGETPSPKMGQLELQLTEAGSVNRGWMYNSTPDEARNLHR

SEQ ID NO: 60326 - protein, 222 aa, unknown
  TnpB Polypeptide
MDIEGVLGVDLGRTDIAVTSDSATFSGAHVTAIRDRYARNRARRQRKASKGTRSTRRRVRAAQTRLSGREHRFQANVNHTISRRIVDSAVASRQAIACEDLTGLRERTSTQRRSKTERRRSNSWAFHQLRVFLAYKCQAAGVPFVLVNPRYTSQMCHRCLHVGERSGKRFACVNPVCRWCGDADYNGALNIALLGAAVTSPGGPWLCCSYQPGRRASGSPRL

SEQ ID NO: 60327 - protein, 430 aa, unknown
  TnpB Polypeptide
MEYKYIGYKIRLYPTQDQIKIFNEYFGLARFVYNLALEIRDNQYQSYMRGETDVKYLSYISINNEIRRLRKTDPKYKWMCKYSSDTICTCIKDLLNGYMKFARGEVVNKPKFKSKKDLGSHSFPVRPDRMVITDNQVRISSIGWVNCKYIDQKIYGSGDKNVKNLNYINFVNPRVSYDGCYYWISFEIKTYLNDKIISYNSNYNYLYNQEYQLKEYNKVIGIDLGCKKDNWIVMSDGYRQPLPDFHLEKRKIAKLFRKASRQRRINKEKSERTNPINNQYMNPSNNEYKTNKKINKYYKKMVNKRLDSIFKAAKHILKLKPEAVIMENLKSSGIINDFRMMNYGKRKANEMIYDSAFHLIQIKFSYILSSNNIPLYLAPSDFPSTQLCSNCGNIQRVGKKRIYRCPNCGLIINRDDNAAINLSNWYYSQR

SEQ ID NO: 60328 - protein, 510 aa, unknown
  TnpB Polypeptide
MVIKTVPLKIHRPSARKRRTLDDALARYTLAFDRLLQRLRPKLAGFEGPPTRFALQKLMDKDVMRELNRYDVQPFKDALKMDVASTLLSYLARVSAGKTASYPVARLSDETFDKRFGVLCDVYLNGRQFHREYERLLKKYSALRPLLFCRHDVKRDYSLWYNEANKRFYAKLYLLNSKSPLALHGTGAETSALRYVGPGETRLEESMRPRRYIILPLSFGKWQERHLEMALKNPGILKTAQLVKRDGEYYLNVNMVCPTAGPIRVRSLMGVARSLQGCLAVGLHEHEHSEIYFGRVFSSEDAYEPQKIDNMFLHRLANEVVRLASAYGSQIILYTLGEKNDLLAFEDAKPLLNMREYNLLADLVSYKAELNGLPRPIKISPARVFHTCPVCGSNSRKNRMNRELFLCTGCGYIRNVEELGARNLALMIRTYEKNRIVFKTTKHEGSIRFTNAILGFEYESPLDEYAFDRFLEALRQSIADTHGISKQRLSIHKKLARLNDVRDGIRLVES

SEQ ID NO: 60329 - protein, 386 aa, Catelliglobosispora sp.
VKQVQALSACLANHRELYNAALQERREAWRRSAVTVSYGMQSKQLKDIRRVRDDHARWSFSSQQATLRRLNLAMEAFFRRVKAGQTPGYPRYKGERWFDTVVWPSDRDGCRWDSTPDAGHIRLYLQGIGHIRVHAHRCIAGRVKTISVKREGDAWYVILACDEVPTNVLPPTGRVTGIDLGVSEFAALADGTLIRNPAWWRQTEERLTKAARRHSLRYPPGCTRSKRKVRSSQNLAKIHRGNARKRLDFHHKLALNLVRENDILVHEALNIAGMVRAPRPKPNPDRPGEFLANRAAAKAALNKRILDAGWAQFLTILTAKAENAGRLTVVVNARNSSRTCYQCGQVDAASRAGITFRCTTCGHEDHADVNAARNLLRAGLVLIQAE

SEQ ID NO: 60330 - protein, 368 aa, unknown
  TnpB Polypeptide
LVKQKTYKFRLYPTLEQRILFAKTFGCSRFIWNQMLADRIAHYEKTGETLKNTPAQYKEEYPWLKEVDSLALCNVQLNLNKAYKTFFQSGFGFPRFKSKKAVQSYKTNNQKGAMVLLDGKIKLLKAGWVKVKVHRQPKGLIKSATISKTATGKYFISILCEEEILPSPKTNSSIGIDLGLENFAILSSGEKVDNPRFLTSLSNKLAREQRVLSRRALLAKKKGRKLSDCSNYQKQKLKVARIHEKISNQRKDFLNKLSTDLIKNHDVICLEDLASKNLMKNHHLARAIGDASWSEFVRQLHYKADWYGKKIVQISRWFPSSQLCSTCGISSGKKPLSIREWTCEHCGTHHDRDINASINILKEGLRLA

SEQ ID NO: 60331 - protein, 466 aa, Halobacteriales sp.
VSDRPQRTNTYTSDPVSDRYRECLFEWLAAHASLWNQITYRRRQQYFDDNGDVWDAEYTDLYEAYAPILGKATCQQLARKNSDAWRSHFELLSQYRDESNQTVTEKPSPPGYWGNRDDGYELHGLVRNDLYTFDWDENTSTLSFGVGDVLEDRYDFDHNERVTLEVRGNPQWRGDDSRLELIYDEHADQLRVQHPVRIQSDDVQKQRQAAFTHTLNTENTTQSAAIDVGANNTLAIVTETGDTAVYHARPEFERFQDTSERIASLQTELPTDQYTSTLIRRLYDDRSRQRDHSRNAAVKHAADWLLERNVDTVYVGDLTDVLDTHWSADVNEKTHNFWSHRQLVERIKLTLGDVGITVTETSEYDTSSQCPSCRSDAVTRSGDSFRCGACNLEAHADIAGAWNMLQSAVGPMARPAALSADRGRDAPADGAYWQWNDHDWTPAGYGEQSWSLDQPSVSEPASSQPG

SEQ ID NO: 60332 - protein, 452 aa, Aquibacillus sp.
MKMAKSVRHKITNHSRIFDATLAIYNEALTFIMEVIDTEFDTIDDFQAKSIVPAVEKLIHRTKSNPIPKYREFNSRFYKLPCYFRRGAIASAFGKVKSYRSNYRNWLQEKEMALSEGKKFKNKAPTLQLAHKEFPVFYKGNMFERTSDTSAQIKVFYQNDWVWIDITFKEQDLYKRNIWDWKEHNPKLVRVGKKYFLNFSYTNEVTLNKTIMKDQKVCSVDLGINNSAVCSVVDSAGAVLARKFINQAKEKDHLYRMTNKLRKVQRISGWVPAPNYWRQINGLQKHIINHTSHEIATFAKEYNCDVVVFEYLNKMRVPKGFWGAKKLRFKLRYWRKTAIQSKVEEMAHYLGMRISRVNPRNTSALAYDGTGKVVRSHKKDLATFTTGKVYHADLSASYNIAARYFIRAYQKSMSEKSWLSLQAKVPVLAKRTSQTLSSFISLIQALEAPRVA

SEQ ID NO: 60333 - protein, 266 aa, Dolichospermum sp.
VYPVKELELIWKKWMAAVRKVYNISIAYLNENQGFTKIGKKGGKMGFRTMLKASGLIPQWCLDLNVSKILDNAAMEAYKAWIETAKNPRTINKGKNQKPHPQPRLRIARFRSIRDQKLTIQFDPSAYKNGRWMVSTTKHLPHPEFRGQDFCVLTDGSSELTYNKGRWFAHFPVELQPTVSVTNKVIALDPGIRTFMTGFDGSDFLEFGNGDFNKIAKLCSHLDKLKSKHDLSIGHKFKRLRYKLRLAMERLRTRIKNLRSECHDLY

SEQ ID NO: 60334 - protein, 380 aa, Dolichospermum sp.
  misc_feature (361)..(369): Xaa can be any naturally occurring amino acid
MKLKVKNQLTVTRIAILGTKKLNTWKSNELDLIALRLGQLRSDLWNEFGSLKAWGISKFEIDKQLRTSKDKYQLPAKLWEATLYDVIDDIHLVQAACMEKVMKSLGQSFQSFQSKKGVLQLTLESREWLKHPKLCTLVRKFWYRGNTKVCNQIIVKAFDTKLDNKGVVWLRFGGLTKGKNLKLPTTLATEVKCQLRLIKRNGRWEIHYTTDIQKAEKKTEGKIIGCDRGYTEVYATSSNDGARFLGNNFGKIQTEETDYRTAKQVKRNKIKSVFDKSIAKGNSAKADRIKRNNLGKIKWNNRETSFKGRIQTIVFTATHDLMLNAIKVAFEDLTEAIKSKKPLRKRMKRNVSSWCKGVVAXXXXXXXXXCTQILMLLTIF

SEQ ID NO: 60335 - protein, 306 aa, Dolichospermum sp.
MKLKVKNQLTVTRIAILGTKKLNTWKSNELDLIALRLGQLRSDLWNEFGSLKAWGISKFEIDKQLRTSKDKYQLPAKLWDSTLYDVIDNIHLVQAACMEKVMKSLGQSFQSFQSKKGVLQLTLESREWLDHPKLCTLVRKFWYRGHTKVGNQIILRAFDTKLDNKGVVWLRFGGLTRGKTLKLPTTLPTEVKCQLRLIKRNGRWEIHYTTNIQKAIQKTEGKIIGCDRGYTEVYATSSNDGARFLGNNFGKIQTEETDYRTAKQVKRNKIKSVFDKSIAKGNSAKADRIKRNNLGKIKWNNRETSF

SEQ ID NO: 60336 - protein, 407 aa, unknown
  TnpB Polypeptide
MRLVEQHVITRTDPHYRSIDAAAFASKNLWNAANYLVRQAFLKEGIYLNNTAVYHLIKGHAAYQALPRKVSNQVLLQLHQAWESFFEAMQVWREHPEQFTGRPKLPKYKHKTAGRNLLVYERGAIWKRELNRGLIALSGLGALGQTKQSRKTVDQVRLVPKADHYVLEVVYQREVTPAPVAPELFVAADLGVNVLSALVSNKPGFVPRLGNGHPLKATNQLYNKQRAHLQQQLAKANRFTSRQLDRLTTKRNRRVLQYLHTASRRIIKLLVEEGIGTLVIGKNPLWKQGVELGHKHNQEFVQILHARFIDLLTYKAELVGIRVILTEESYTSQASFLDRDPLSTYDPAREEHPHFSGRRDGRWYRASGNRLLHSDVNGAYNIGRKVVPTAFGPGIGAAAVRPRRLAV

SEQ ID NO: 60337 - protein, 477 aa, Streptomyces sp.
VKVTRIAYSKNLNAGKYSHLSEQACRLGRVRALVWRRYGSVGGVGISDRAIRDAWMTDGTAATFGVLANAWKETVRDAVADIKAAREAAKVVVRKAIHRRYHTEEERKAAYTALKYDQWTSDPFLARQMRDHSKHGISHTMNQIVVRSDQYKAFSLSEEGNIWLAVPSLVRRKMITIPLNTTVAPTGTLRLILRGSRVEVHYTIDAPDLTESRPCGNRTVGVDKGYTEVLTDSDGNHHGEELGDLLRTESDFLKAKNARRAKIRAIAEKARRAGNRAKADRINRNNLGLVKRNRRRERFESQVRTITFTAAHAVIDKADKVVAEDLTSRFASQKNLGKNTNRRLAAWTKGVTAEALASVSERRGSALTLVNAAYTSQVAPCCKVLGSRSGDRLHCTRCGDLWQADHAAAINVLERDGDPDITLFTPHTRVKQIIQERTDRHRTRLPVQDSSAVLGRGERMIRSEQQCSSSRKQLTPP

SEQ ID NO: 60338 - protein, 433 aa, unknown
  TnpB Polypeptide
LGKSKKDKVLMGVQQNLIYCDADIKAILTFLCEQSNSLYNCGLYWGRQIFFKTGRIISKFEPIYEVGDNIHAKAMPSVPAQQTLLSVSEAFKSFKELSHKFVIGELDFRPRPPDYRLSGGLFKVAYPNTGSQRPKLSEDGQTLTFSLGNQVNRWFGVKSFNLPMPAKLKYFKVLEFTILPKNGAFYLEASYEIEKESQELNINEALGIDLGCASNLMACVDTLGNSFLVDSKQAKAMNQLYNKRIAQRKKSKSQDYWDVVCDAITRKRNNQMRDMVNKAAKLVIDHCILHKLGTLVIGWNIGIKDECDMGKRENQKFVQMPLAKLKTRISQLCELHGIRFIETEEANTSVASYLDGDSLPKHGQKPKGWKASGKRSLRGLYTTADKSKVNADLNAAANILRKVAGNLGIDLSRLGRRSLATVGRIRIWLTRHC

SEQ ID NO: 60339 - protein, 501 aa, Bacillus sp.
MAKLKKDCFIIELKLIVDIWQKDILCKRFEIARKLYNTTLSYAMKQCKLMKESKHYRKQLRCYQKARKVNHLKEWKEIAKALDSIRQSFGLSEYQLHAYIKKHQHNYKKHIDSYTSQKIASTVWKAMQDVVFKGAKAHFKPYGMLRSVEGKSNKTGIRFKENRVYWNGLLLPVRFRKNDLFIEESLALHTIKYCRLVKKVIRGKDTFYVQLVMGGIPPAKRIHATGAFRHSYQKKQRVGIDIGPSTIAIVSKETVFIQQLAPDVPLFEKEKRRLLRKLNRIRRNTNPNNFNTNGTIKCGIKLHWTCSKNYQKTKSLLNELYRKKASYIKEKHGALANSILSLGDEVYIETMHFNGLAKRTKETKTNQQGKFQSKKRFGKSIGNHAPAMLVEIINQKLKYGKQEIQKVNTITFKASQYNHVTNSYEKKKLHQRWSQIGTHLVQRDLYSAFLLMNSETNLQQTNRELCNKTFTDFLKLHNQHIEELQQTTKILPLSMGMKQIS

SEQ ID NO: 60340 - protein, 418 aa, unknown
  TnpB Polypeptide
  misc_feature (412)..(412): Xaa can be any naturally occurring amino acid
MIETYKFRLYPNDEQKVLLAKHFGSVRFVYNWALEFNQKLYASEQKYKNSIAMGCDGDFVKLKQEHEWLKEVNAQSLIASVGHLDRAFNNFFAHRSGYPKFKSKFDNNQSFEVPQNLKLDFKHGKIQIPKFLKQKKCDNRIKCVFSRKVKHGKIGTATISRNPSGQYFVSFIVHTDEKYPEFDKQITKENSLGIDFGLKHFLNLSNGKKIDSPEYFKQSLVKLRFEQKKLSKKQNGSKNKEKQRLKVARVHQHIANQRQDFLHKLTTGLVKESQFDCFCLEDLNLKGMKKIWGRKVSDLSYYAFQCMLNYKCQKYGKKMIKIGRFEPSSQICSCCGHRQKLSLNDRVYRCPKCGLEIDRDMNAAINIRNFALHNIFKNTEGSSGINACGVGSSDKHDVNCVCETTDNETRKXDLDIFN

SEQ ID NO: 60341 - protein, 438 aa, Moorea sp.
MYGCQQHLITTDPDTRAVIEFICSEANKLTNCGIYYCRQILFKTGRYLKNAELDKILKTNIHFKAMRSACAQQTLHGVIESFKSYKALSKLDKKGQLTDKPRVPKYRKKGGMAVVSYPARWVKLVKGQLKFTLGKQVKAWFGIDHFLLPMASNIDFKSIKEFRFVPRNGCFYLEFVYEQPDIEPVPSTDNALGIDPGINNWLTCVSTTGKSFIIDGRKVKSQNQWYNKQVAKIKKGKSQDYWDDRLAYLTEKRNRQIRDNINKAAKFVINWCLRHQISTVVFGWNERNKDGIKIGTKNNQEFVQIPTARLKNRIEQLCDLHGIKFVETEESYTSKASFLDNDFLPTFGEKPEGWKESGKRVRRGLYQSASNELINADCNGAANILRKVVTQLGIDLAEVSRASLSVPQRYDLDSLSRSYCKRRVREASPKDSARFQPA

SEQ ID NO: 60342 - protein, 326 aa, Actinophytocola sp.
MNRVLQAYRFAQHPTSAQEVALRSHCGGQRYAYNWGLARVKANLEQRQAERSYGLASDELTPSLSWSAYGLRKDWNRVKHEVAPWWGENSKEAYASGLANLARALKNWNDSRNGKSKGRKVGFGRFKGKRAVLSCRFTTGSFGLADTDRRHVQLPRIGTVRTHESTRKLARHVERGAARIRSATVSHRQGRWFVSFSVEIERTDPAPTRPGAKVGVDLGVKSLAVLSTGERVPNPKHLEVALRELRRLQRQAARRSGPDKRTNQKPSQRWRKAQARIARLHTAVANARRDGLHKLTTRLVRTYEAIVIEDLNVNVDTARRRLRTHF

SEQ ID NO: 60343 - protein, 470 aa, unknown
  TnpB Polypeptide
MYRTIKEVLYLENIKRKNELEELFKNYQSDSNYIYSRFSGIKSLNILRFRTIRQILKDEKNSGKLINIKLQGHYFQRCLNDAIGNIKTSWNITIKQVRKKIQNKDLTDIEKHFSMIILKNQHILYQVLVEKPSYEKIIYLKEFNKYKKLYSNCKIRYKYIKSIISRYIRKYKPTIARKKHPNSLKVDNTLYSFNSNKFKIQGLLKGKRIEFIRSSDKLYNSEATLKINKKQQIEIHFLKKVKNKISDNNKIIGIDKGYTDLFHSSTGINNKYGIGFRSKIINKINKDSLKQANRNYYWSLYYKNIKNNKVNKAQNILKYNLGYIKRNNFMYKFKEYKKSLINNAINVMLQKEKPGTVVVEDLSWVSKSKKYINKKLRNELSKWDKGYIKERLEFKCYEKEIKVVEVNPAYTSQICHKCNKIGNRNGEVFSCDKCGSYDANYNAAINIKNRINYKNITKYTSAIKVKQIFS

SEQ ID NO: 60344 - protein, 409 aa, unknown
  TnpB Polypeptide
MKEIVNKAYKFRVYPTDSQKVFFAKHFGCTRFIYNHLLSVRRDAYQNDGVKLSGLACKKLISPMKKQPEYIWLAEVNSQSLQEAAIDLEKAYKRFFDRSLKAGYPKFKKKGLRDSFCVPQHFTVDTKNNRLFIPKLETGIKTVFHRSLKQVEKINSITFSMSASGKYYASINVEELISQQQPVLKVASDTKTVGIDLGIKDFLVESTGKKTNAPKFLRDSERRLKKAQRRLSRKQNGSANRSKQRLRVARLHEKVSNQRKDFLHNESRRIVDENQVIYLETLNVRGMMKNRHLAKSIADSGWSEFVRQLKYKAQWKGSIIVQIGQWEPSSRLCSTPGCDYKHGTLKLSDREWECPQCMANHDRDINAARNIERIGLEAPELTPVKKTTSVFSIKRIQAASLKQESPASS

SEQ ID NO: 60345 - protein, 498 aa, Moorea sp.
MPKKVGATKKISTQIVLVIGMTKVVETELLSTMKKLGIVRSESYNKLGSINYWNLDWKKAIPEVKSFRTPDTLGLPAKLMDWTVNDVGKAITAQQAACKDAVIKKIYKRFPGKENKNKRKEYVTQLKTSAFLDNSLLHRLVRKEFQKGHSWVKNQIVYQQVGYKCKRLSRNTWQLELAGLTKGKRNKIIVKSNRKIKGQIRLIYDQILQIFEIHFLVDHGTVEVPSERRSIGVDKGYTDREAWPKALAFYDSEGQAHGTGLGKIITKKSDRICAKNRNRGKLWALHRKLEKLDPAKSARILKNNLSRKTENRRYRQNQSELTAKIGAASKSLFNGESLKVFAEDLTQPIRNKRRSKTVSRKLNSWMKGVMRDSLQKWANWTGSVVTEVQPSYTSQIDSRTGTLLGKRTGDNFTGFDGVVLQADYNAAKNILARGTDHEITRYMNKNEVQAVLLRRTARYLEGMGLSLVDGVELGWIDPKHSKTKAFKQLLVEMPGAPK

SEQ ID NO: 60346 - protein, 365 aa, unknown
  TnpB Polypeptide
LNKSFKVRIYPTKEQCVLLEKTFGANRFVYNYFLNLKSKLYEFYKINLSYNNSSKVLTELKKTKTWLKEVDSKSLIQTLRDLDRAYQNFFSGRGKYPNFKKKQDKNSYRTNQSIKLVNSFISIPKVGLLRYKDKCKFDDKHILKIYNVTISKTSSGKYYASISAEVYIPNFEKTNQSCGIDLGLKDFAILDTGEKIKNPRILKHLEVKYRKLAKAVSRKVKGSANYQKAKLKLARFHEKVTNIRKDFLHKLSTNLVKTYDIICVETLKVKNMMKNHTLAKSFQDVAHSEFIRQLEYKAKWYGKTISKIDRFYPSSQVCSNCGYKNKDVKNLSIREWICPECGVHHDRDINASINILNEGLRLIEV

SEQ ID NO: 60347 - protein, 413 aa, unknown
  TnpB Polypeptide
MKQQVKHLTKEEYNILRELCRISKNLTNQAIYNIRQYYFQEKQYLRYESNYHELKNSENYKLLNSNMAQQTIKGVDSMFKSFFALIRLAKQGKYSFKHIRLPNYLPKDGYSCLIIAQFSIKDGNVLMIPYSNAFNKKYKTRVSVRVPKVLEDKKIKEIRIIPKFNARFFEIQYTYEIQGENIQLNTNNALAIDLGVNNLCTCVTNIGKSFIIDGRKLKSINQFFNKRNARLQSIKDKQNIKKQTKQQYLISQKRKNRVEDYINKACRYIINYCLSNDIGILVIGYNQSFQSKANLGNINNQTFTQLPFGRVRDKLDCLCKRYNMNYILQEESYTSKASFFDNDILPIYNADNPQTYEFSGKRIKRGLYQTKNNYRFNADCNGALNILRKSKAVDLTVLCSRGELDTPKRIRVY

SEQ ID NO: 60348 - protein, 186 aa, unknown
  TnpB Polypeptide
VGIDLGLKDFCILNDGTKFENPKFLVRNEKRLRLLQKSLSRKICGSKNYEKAKIKLAKFHEYIVNFRKDYLHKISLYLVRNYDILCAETLRVKNMVKNHKLAKSISDVSWYEFCRQLEYKCLWYGKRFVQISTYFASSQICSNCGYKNSDVKNLNVREWTCSKCGSHNERDINASINILHEGLRII

SEQ ID NO: 60349 - protein, 387 aa, unknown
  TnpB Polypeptide
VARKKVKKAFKFRFYPTQEQSEVLERTYGCVRLVYNKALEERTRSWYEDHVSLDYIGTAKLLTEWRNSEELGFLSEVSVVPLQQSLRHLQKAFSSFWKKTAKYPKFKSRKNSTLGLEYSKSGFTIKNGDVFVAKIKSPLNINYSQPIQLENVSTITIKKDRADRWFISMLTEAEIEEKCVSGKTIGIDVGAKDALILDDGRKINPSDLFDVKKKDAKIKKRQKRLSKKEKGSRNRAKARLKLARAYAEKKDAQQDWLHKVTTWLVEEFDVICLEDLNIRGMTRKAKGKGKSAKSGLNRSILTHNLSEFRRMVEYKAQWYGKECVAIDRFYPSSKRCSKCGKINQELKLSDRYWTCQCGAKHDRDVNAATNIKAAGLAVLACGDSVRL

SEQ ID NO: 60350 - protein, 400 aa, unknown
  TnpB Polypeptide
MSNKKVKRAFKFRFYPTPEQEKELLRTWGCVRLVYNKALTMRHTAWYKNQERVNYSQTSAALTQWKKQEDLSFLKEVSSVPLQQCLRHLQTAFTNFFEKRAKYPRFKSRKKSRLGLEYSKMGFRFKGDGLYVARLKEPLNVVWSRGFDRNSISTVTITKDKADRWFVSCLGEVAIEKRRVTGKTVGLDMGVKDTLVLSTGQKLSPRDDRDMEKKLVKVKKYQRRLSKKKPDSKNFAKAKTKLGKAYVQVVDARRDWIHKTTTRLVKEFDVICIEDLNVRGMTRAARGKGRKAKAGLNRRVLEQSFAEIRRCLEYKAEGCGGEVVAIDRFFPSSKTCSSCGYINETLTLNQRFWVCSKCQEHLDRDINAAKNIQAVGLAVLACGDGIRPAKKPRASTVGNY

SEQ ID NO: 60351 - protein, 502 aa, unknown
  TnpB Polypeptide
LKIYGKVKAMSQVVKITKVSVKGATPYLGDRNDDSSQPIFSKSPNAVMEWLCSAWRKRFNDHRSQRKKYGKDKVLIPLGNTVVETTDKQAREEHSFLRAVPSLVLQSPEQIEAKEWFSAVKRRKTLRESGRNPGKMPKFKSYKLHDHIFVCWLNGGRNARFEKVGRRTGIVSITGTNSKGRKKPGDTKKRFTIRIHIRLSREIRPYTSVQINWTKKKLVFVNEPLPITSRVSRGQGSVTGIDRGVAHMTADSQGHFEDLPWETITKLDNKVRRLQRSQERSAKDLGFSSYHAAKKAKKNSKSSLRRDKEIAQTKAKISHVVKDVQHKVSRQLVEDNDIIAIEKLNLAGMSKKAKAKIDPHNPGEYLPNGQSAKRALNRKLHLSALAQFGGFLQYKARLSDGQIIEVDPRNTSRRCSSCGHVARENRESQAVFLCKKCGYSDNADHNAAINILDRALRDHVEEIIDFWGGVHPSVRAYKPVSCGLTMSQHSSTIRKPHVLASR

SEQ ID NO: 60352 - protein, 481 aa, unknown
  TnpB Polypeptide
MTPKRHHRSVELKHCANQTKVDQIAELLRWFSSACAVCKTEKIRHLKTGGRLARFTKSQWVIGKPDVFSARMFKSVENVVDAALKSWQELSVITGRKIIGTWRKTKPYLSSEDFVTLYTLNKSKRWWDPESEFPELRNELITEILRKNPFPVLDGETATLNETVCKIVDSKSTKQESWLEIRGFKEIRIYIPVEKTSFYSESMDRGKECSVTQLHLNQDGKLVIHRVVQKDSVPLRQEGKDIGIDWGLKNLITTSEGQLLGLSLYPWLKERDQELLELTRSLQRQGIKPRSSRRYRALNHRIKQYVKNEVGRVLNRLAEQDIRSITCEDLDFRGRGLSRRLRVIVSRAGRSVFKQKLADLTESHGIEVHKVNPAYTSKQCSGCGLVADKQRKGSSFQCLHCGKTLHADVNAAKNIIGRRSAPSDGFRYCSKESIFDYLNQKFTAYWGQTPDLIIKRYHARTAGLPGTAQCKPGRTSLSISK

SEQ ID NO: 60353 - protein, 471 aa, unknown
  TnpB Polypeptide
MGGFTNVLKVTRILFSKDLNAGKFAVLEEQARRLGQLRSEIWQRFGSINGVGKSDREIRDEWLQQKREFDVPANAWKETLRDAISDVRASREAAKVKVRKTIHCHTKDTAERKHRYTLLKSDNWTTDPYLTRVMRKHWKRGHNHTHNQIIVRADKYRIFELDSRVWLKIPGLTPRKMVTIPLDTTVHPTGTLRLILRDDRVEIHYQIEVKKENRHGDTVLGVDKGYTEVFVDSDGEHHGKELGKLLSSESDYLKTKHQRRNKIKAITERKPHKRANIERNNLGRKKLDRRDRVVKAHVRDKVFKAAHAVVDKAEVVVAEDLTFPISSRKSYGRNMNRRLSAWTKGVIAESLDSVSQRRGSTLALVNCAYTSQVDSRYGVLRGRRRGDSFYCFDGVVLHSDENAARNVLARHYDFEIGRWTSYREVRSILLERTECHRLGLLNQDTSCRPEGLSTVSELPFGHMSYLKRNRR

SEQ ID NO: 60354 - protein, 399 aa, unknown
  TnpB Polypeptide
MLKAIKTRLYLNNEQTIYVNKLIGSSRFVYNNCLAHKIDQYNNHKKSVSFVETGKYLTNLKAIEEFNWLKDSHSKVLQQSLVNLDIAYKSFFSNGNGFPKFKSKHNKQSCRFPVDAIGKINGNRINIIRPLKDIHFKCSRQDEIYLNKNKYLIKSGTLTKTKSNKYYFSILIDKPNKILQKPKNNIIGIDLGIKDFIVSSDNQVFKNIKSTRNNEKKLKRLNQLLSRKQKGSKNKQKIRIKLSKYHEKITNIKENYLHSVVNQLLRENQTIVIEDLNVSGMLKNHHLAKSIQELSLNKFKTILEYKAIWYDREVIQIDRFFPSSKKCSCCGVKNDKLTMKDREWTCSKCNSVLNRDLNAAINIKNEGIRLKSIKDDKINRVEFTQINAFGDETIVLSLN

SEQ ID NO: 60355 - protein, 404 aa, Cyanobacteria sp.
  misc_feature (126)..(160): Xaa can be any naturally occurring amino acid
MFMILNYSYRIKPNAEQESIMLHTLDRLRRHWNYCLGQRLDWLRMTRCQIDRCSLVSEPIGEIPDKVDYYTQQSALKETKQLFPDYKNIWAESQQVNLQRLNKAWERWLFPDKSGKRRGRPRFKKXXXXXXXXXXXXXXXXXXXXXXXXXXXXXXXXXXXRPIPDGFTLKTCTIVHKADGWYCCLSMQDETVPEPMPLDEVKAAVGVDVGLKEFLITSDGKVVPIQQTYRKTQSHLARQQCKLARKQKGSSPAEKQKNFIARIHQRIGRIRENFHYKTAHKLVKQYDLVAVEDLNIRGLARTRLSKSILDAAWGRFITILEAVAVKRGVRVVKVNPHGTSVDCSGCGAKVPKTLSIRLHECHKCGLQMDRDENAALNILDRALNEVGLRKVCAWRLSRWTACEA

SEQ ID NO: 60356 - protein, 378 aa, unknown
  TnpB Polypeptide
LRTPDENGKWRWLESITVLLPKETAEFVQNAERLCAPTLRAVEQPDGSVVAHLDIITEREVRDEPVWQNAGNILAFDWGVRKLLAVVVLSPEGEQISRPFFLNTGGFDGKQARLRRQIDYLKSKRDKLDKTSEKYQKLDHQITVCWRAYKNRNRAMAHLAANFLLMLAELYNCHVIAGEWLATLKAVGRGKHTRSRWRNWRINTTIRSEITDILKYKCKLAGVLFRKENPRNTSHTCPRCGHHAETFASPEENSPVDWGAWLKCANCAWNGSRDYAAAINIGRLAVPFYKKWRTDKAAKKKPSAKGFRIDDDLNYTKPASYIGAGAVSPFLPHSKFVNASETSIGNNLAKRSCKMAYLAGWIFSATVSPLLLKQPVCL

SEQ ID NO: 60357 - protein, 378 aa, unknown; identical to SEQ ID NO: 60356
  TnpB Polypeptide

SEQ ID NO: 60358 - protein, 394 aa, unknown
  TnpB Polypeptide
MIVHRAYKYRVYPTVEQEDRLSNWESALRFLWNLAHEQRLLGLARPKGERKYYSASDQMLQLTELRKELPWLTNVPRNICDNLLTNLDKAWGQCFKKLSKAPRWKRKGRDFLSVCESHSRKWRLDGSSLQFPKLGNLRVVQHRPLEGRPTSCTLKRDGDQWFVVINCEVTLPDPLPRMGPIVGLDRGVVALVADSDGNTVENPRFFERSRKQLARLQRNAARKRKGSNNQRKAQLKVMRLHRRVRRQREWFLHQVSQDYAKSHGVIVIEDLKVGNMVHSNRGLSRSILDSGWGLLERQLVYKLESSGGQLVKVNPAYTSQTCSACGTIDSSSRISQAIFVCTSCDHSENADVNAAKNIKGRWRPSVQPVEGSCRPRTPLRSRKALKGNFQRAPH

SEQ ID NO: 60359 - protein, 371 aa, unknown
  TnpB Polypeptide
MKLTAQLKLEPSEQQAGVLLQTMHAANAAANFVSGIAWDTCQFQQYSLHHACYYSVRSQFGLSAQATVRVIAKVADAYKLDRRTRRTFHPMGGIAYDDRILRIAPNKRIVSVWTLGGREQMPFVCGEHQMRLLQGQRGESDLVLRNGEFYLLATCDVNTPEPSTVDDFLGVDMGVVNLAVDSDGVVHQGKPVNNVRYRHRKLRSKLQRKGTKSCRRRLKKLAGKERRFATWVNHNVSKSIVVKAKGTGRGIAVEELNGIRDRVTVRRSQRAILHSWSFFQLRAFLTYKAALAGIPLVAVDPRNTSRLCPACGHISKANRKIQANFLCVSCNFSGLADHIAAGNISRRAVVNLPHVSIAQITVQRQGQSPWL

SEQ ID NO: 60360 - protein, 387 aa, unknown
  TnpB Polypeptide
MIQIQKAYKFRLNPSKEVKEKFAQFAGCARYVYNYGLSLVKKALEAKSKIPSYADIANLLPQLKLKEETKWLNDVHSQPLQQKLKDLDLAVKQFFNKIKKKEKANLHFKKKDQGDSFRYPQPIKCENNKAYLPKIGWVKYRATQAIEGTIKQATIKKEGDHWYICIVCTIDKEISKAKLDENRAVGIDLGLLNFAYTSDNLIIENPRLLKASLKKLGKVQRIHARAKRGSQNKKKITKKLIKVHLKIKNQRNDFLHKATTMLVNNHDIIVVENLAIRNMVRNRHLSRSISDAAWGIFVNLLKYKCSWNGKHFVQIDKFQPTSKLCSHCQNKQDMPLNKRIFNCSSCGLAIDRDLNASKNILAAGMSVLKLVDGNDISLPNEARIGGF

SEQ ID NO: 60361 - protein, 625 aa, unknown
  TnpB Polypeptide
MAKTQTLSFPIRLPDAMQAEVLRLLDASRPAINEIITDLWPQLDLFATDRGGPAWKQVEKHLVRRSGHGSRQQRCEMEQAGRILRAQASRKQVFLSVLPLLSEGLIRPVEGKRPARKDHRQIKEQVRTLRAQMQDAGEDTDAFMAMTNVLEQACNRYLQTERFPTTYEELQPAPVLSVGQLTFAGDDGMNAGQAYRARIKVSKFCDLASRQVHEQATLFLKLRAPTIQGKWAWGEWSEEIPLPETVFRYLDQGAVPMAPTLREIRRDDGSRLAVLDLILEVPAKYVSALEQDTRVLGFDWGIRSLITVSILEKPEGDEPYRQVSRPVFLDTGGLDGRQARLRREIDRLKTCRERYVKLMQAARKVYDEQHIPLPTHFSGWQEQIRFYEKQIKTCWKKYERRNRELAHLASNLLILLALLYDCRLICGENLTTLKTEGPGRGVRGRFRNWRNNTTVRGELWRVLKYKCHLLGIRARQVEPRGTTHTCPHCHQPAKTYLSPATEHRKKALDWGPWVVCVSCSWNGARDYAASLNIAALGMAFLITYHDTKGYQTYRMTESSVKPALYIRAGATLLLPSQGITPRPHEGKHIYYAGWSYSTALRTSRPKSLLAMLSTSRLRKHVLRSA

SEQ ID NO: 60362 - protein, 649 aa, unknown
  TnpB Polypeptide
MPVLTYKYGALYPTDWDNDCAVQIELQVDFWNKLAKIHRETGDIIRSLTPSTAELEEIIRKIDELKLEQAQIESGLKAEKTQRYRMNRFGVPSDKPNTGIAMVRLKEIRLTIKELAQRRATLSKIVRYELAAEKVILTYRTQQRMIKEARRASAANGLWWGNYNAVMASFDGSRSQIAKTGGVIKEKRYNGEGRLTVQLQGGASPEQLFSSSSSGARNEAYLIDAPPPGWEPRHQKNNQTPPTSGSRRSTRQRIVTLVMTVYTRRDDLNRLTRRVVHVPIVYDRPLPSDCRVQQIVLTRRKGNRRPTGDWRYDVMFILRVPEPECRHTQRAAAIHIGWRKVEDGIRAATVVDNNDVTYFVLPDNLVSRFVDASQWLSRADTEAESFRREILTWPLSDIPPSLKEDLEFLGRARSVGGIGRAMRWMTRNWSKYFYDYMPDYLNLLNRWMDDDLKCRWRARNIQQNAIRHRRDLVRVWISRLAKRYDVAIVQQYDISHLHRKDISLKSLPSGRRNIQRIAPGEIRANVVSTLRSRGVEVISYEKKVTWICHCCGTEIAPHDPLALRQRCTHCGEHWDIDENAARNALAALKQMATVRDVPSANVDASTPPSPDGISVEAGRFAFRKVASKIRRLQKVVSDRKGIAVSDETG

SEQ ID NO: 60363 - protein, 402 aa, Garicola sp.
MLAKSLGCARAVFNDFVAERGRLYQAGFHREVSFAETSRRVLIEAKAPGGARPYLAEVSSAMLQQSVRDAEAGYRNFFASLSGTRKGPRIGRPRLKSKHQHTHRMRFARNAGFKVEDQSHQGHGFLTLPKIGRLPLVLSRPLPSAPSSVTVTAHADGTYEVSFVVEVEPRKALEPAHAAAGVDVGITSLAAVAYEDGTSHKIVNPRHLKARERKLARAQRKLSRCQKGSKNRQKTRTQVAKQHRKVRQARLDHHHKQARALVDNTHAIGLEELNVAGMIRNHRLAKALSDTGMSQFLRLIREKAEETGRTVVTVDQWFPSSQLCSECGCSGGKKGLGIRQWSCSCCGAVLDRDINAAVNVMIAAGLAEIENACGGSVRPAPVLAEPMKQEPAEQTPTLLGAV

SEQ ID NO: 60364 - protein, 509 aa, unknown
  TnpB Polypeptide
VKYYDTVTRHRFTTENRVDVEQVERDLAQMIAWMAEAEQEVLASQEFHDLAVKVLRGDRPTGSLNSWGRKRFSRYDFSFQKHNMNEMLVSNVVGALDAYAVSIGLFQVMSTHPKETKPERILSCYRGTYPGATQPTSGMIRAHLIRYHKKGERKAPLPGVSAKLNLAVCDTHFAPKVFREDVDSLSVIVQVKTPTYGLTKISLRLPENTDRFGEGKVCRPTIRLNNKGQVVFDIAIEHKIDNRQTSKVVGVDPGKVEPFVATVINPRAKHKSAPFHANYKRRLGSLVKKEQQRRDLSRHLHERAALCEKHNRAQHAQVLRTEAKRVSAKATRIKHEISQCIASQVVSIADQNDAHISLENLSWLDAKGGRWPHAEIQHKIENTAKRYGIKVTKVSAKDTSRTCSRCGGRVSNNSRTRVGACTTCGFLLNRDVSASREIGLRAVSNARNRERMRSLLRQRQEMRSSAVTRQSKPATALSGIQGHTGTSSNGSEATLMMVREPLDSRGSPT

SEQ ID NO: 60365 - protein, 194 aa, unknown
  TnpB Polypeptide
MVGIDVGLESFATLSNGEKIANPRFFREEEKELTRVQRKLSKASKGTPERRSALKVVERVHERIANKRYEFAHRVSRDLVNRFGLIAFEDLNIQNMIKNHNLAKNIGDVAWNMLVTLTSYKAANAGSMVVLVDPRNTSKMCSRCGILVEKDLSERVHNCSQCGLSLDRDWNAAINILRLGLQSVGIKTVEARPL

SEQ ID NO: 60366 - protein, 489 aa, unknown
  TnpB Polypeptide
MYDMANSNKKKARKLQATKQAKAAEKDKAVKKAKPAEEKPIKYTVTAEQQADGTFEFHGGKGGFNIIKQKNKALEPYGKCIHNYGVLLELIPEDKQAAINQQIGNARVVHNDYLSKREEYYKETKKALTVSQYKKEYLPALKKEKEYLKDADKFVYENACRNVDDAYNRFFKGLSGFPKYASKTKPNGNSFTTNFTNNNIELKMIDSIPYVKLPKVGCVRFILPKGKILTDIQPHGVTIKAATVSREPDGSYRIALRMESVIDKPVFPTAINAREIISVDLGLKEFGVFGNLEESIPVPNPRWIQVHAKRLRRFQQSLSRKQYDHKTHTGSKNWEKARAKVAKEQRKIADQRRDFHHKLSRAIADNCVAFICEDLAVKNMMKNRHLSKSIASVGWSQFLTMVQYKMERAGKYFRKISRWYPSSQTCGCCGYKNTDVKDLGVRKWICPKCGTWHDRDINAQQNIYKIGAKMLHDEGIQVVSLPVTNESAN

SEQ ID NO: 60367 - protein, 308 aa, Enterobacter sp.
VIKKKAFKFLLEPSKSQISDVLVFAGACRFVYNKGLALLSENYNNGKPFLNYNKLAPLLVEWKSDHKFEWLKLCPSQCLQQSLRDLDRAFQNFFSGRALYPRFKKKGRSDSFRVPCQRVRLNQEKGLVSLPKLGWVKYRKSREVTGNLKNVTISKKLDKWYISFNTEEFVSEPVHPSINKTKVLLNDGYVTLCAGNEVSVESFTGIVDEKKIKRLNKELSRKVKHSNNWLKSKIKIYIIRTSSGNFRLDALHKITTAICKKHAVVEVVDVKNFVSDKNNIAKNMRYEFVRQLLYKQEWLGGKIVQLDA

SEQ ID NO: 60368 - protein, 435 aa, unknown
  TnpB Polypeptide
MKRTVTVKLQPSKEAERILLESADTGAKVWNEVNYLRRQQFFNHEKVDFNKTEKIIYEKYKREIGSATVQQIARKNTEAWKSFLSLIKKKRKGGLPRWLKPGPPNYQKQDNRRKPLIVLRNDQYKIEGNRLILRGLGKFKKLEVQFKGRIHLKGKQGRLEIVYNNVKRKWYAHISYTIEEKLEGNSWVRLPREPKGNLTAGIDLGVNNLMAVYVENGESFLVNGRPLKSIAFYWQKRIANYQSKLNKSGAKTSRKLKRMYERTKLQARHYINTAVRQTVRILYELGVSKIVVGYPKEIARESNKGRKQNFLLSHVWRFNYVIKRLKEVSEEYGIEVKFVNEAFTSQTCPLCGKPHEGARFVRGLFKCPAEGLVFNADLVGAFNILKKVVRTITPSLPGLTVGRGNGGKTLPEGLKARFEVGFNGAPRTSSSVARG

SEQ ID NO: 60369 - protein, 378 aa, unknown
  TnpB Polypeptide
VLKAYKYRIYPTKTQIALIEKHFGSVRFVYNYFLEYRQREYAKGNKKIGYMLTQSELTKLKKLDEYKWLNECGSQSLQMALRSLDGAFTRFFKKQGGYPKFKSKKYTHQSFTAPQNIKVANNRVYLPKFTKEGLKVKLHRNIPENAILKQATISRQNNQYFISILIEDNIPTPKPTKAKTAVGLDMGIAHHIITSDGVKYPNNKYYNKSQKKLLKLQRRLSKKQKGSNNREKAKLKVQKLHTKITNQRKDNLHKISNEITNQYDIICLETLNVKGMIKNHKLAKSIADVAWSEFIRQLEYKATWKGKTIIKIDKWFPSSQICSYCGASTGKKALNIRKFDCPHCKKANIDRDVNAAINIRNYGLGQVDNRNTVGTIGI

SEQ ID NO: 60370 - protein, 425 aa, Thermococcus sp.
MKRSVTIKLQPSKVQEKILKELALISSKVWNRVDYLRRQEFFDGKPIDFNKTEKIVYEEFKAEIGSATVQQIARKNAESWRSFFSLIRNKRNGELPKWFKPKPPNYIKERGLIVLRNDQYRIEGNKLILKGLGKFKRLEVQFEGGRIHLKGKQGRLEITYNPIRRKWYAHISYTVEEKLINGEWVELPRQPLGNLSAGIDLGVNNLMAVYVENGESFLVNGRPLKSIAFYWMKRIAECQSKLNKSGAKSSKKLARMHQKAKLQAKHYINTAVRQTVEKLYHRGVSRIVVGYPKGIARNSNKGRKQNYLLSHVWRFNTVIKRLKEVAEEYGIQVLVVDEAFTSRTCPVCGKPHEGGARFVRGLFKCPAAGGLIFNADLVGAFNILKKAVKTITPPNLGGLYAQGRGGNGGGKTSLGGAEKPTFIGL

SEQ ID NO: 60371 - protein, 422 aa, unknown
  TnpB Polypeptide
MNKREKEIKKIKILIQKYNNKVPLNDIPINNFIESHSWFDIKESEEFDFSNNLKIKKIENKDKIIKCKKIILLPNEKQKKMLLEWLNSVRLMYNQTLSFIKNKYRLKEKIIINFRNLRKELKEKKNILKELYKTPTHILDSGIKLATISYKSSFTNFKNNNIKHFYIRYLKLRKITHIMDIEKSFFNSFTFCPRLLGKKMKNKSNFSYDKITKDCKLHYNRKTDIFTLLVPEEIKKKSIDFDNSFISLDPGVRTFLTGLSNNKNYEICTNSYNIISKHLKKVDKVKKEKNKEKWKYKLRNKITDLHWKSINFLMKQKKNTIVIGNWSTKNCISKKGSLNKMLKRVCNSLRYYDFLNKLIYKSNYNNISLKIQNESYTSKLCSKCGTINNNLGSKKVFNCNSCNMKYDRDMNACRNILIKSLN

SEQ ID NO: 60372 - protein, 340 aa, Dorea sp.
MVKAIKVMLIPNNVQKTKMFQYAGASRFAYNWALAREKENYEKGGKFISDSELRKEFTKLRHSEEYAWLLNISNNVTKQAIKDACTAYKNFFKGLQKFPRFKSKKRSMPKFYQDNVKIQFSNTHVKFEGFSSSRKANKQKMNWVRLAEHGRIPTDVKYMNPRISFDGLKVKKLEKQKRRLQRSISRSYEKNKKGESYCKTNNVIKKEKLLLKRNHRLTNIRKNYLNQTISEIVNRKPRFICIEDLNVSGMMENRHLSKAVQEQGFFWFRKQLEHKCGDKGIQLIVADRFYPSSKLCSCCGNIKKDLKLSDRVYRCACGNIIDRDFQASINLKAYGERFAS

SEQ ID NO: 60373 - protein, 441 aa, unknown
  TnpB Polypeptide
MGVEEATMTVQARMFIESGERSWLKDARFAAQQIANETLALKQQGYTRTEIQRKVDRDDFLRNNKCAVVGKALQAWDSYQELLDWWENNKEETRMGKPSAPATDKKGGYPLVMAHEEGYRLSYDEEGERVQFRVSPKPYKKVTGHLRARESDLTLIKHALTSNGWSLGQAELLYRDGVYYLHVTVNTEFTVPEPDEAETLIGVDINERNVALTALDRESMDTLGTLVMDYGSVKAERQRYHTITKRCQDHGQDSIHYQLSDKEERYTEWNLHRLSLAVVEFAEQFPNPAIVFEDLSGIRKSIEYGTYMNRRLHKLPFHKFEDMVRYKALWREIPCDTVEAEYNSKTCSCCGERGYRQDRRFRCTNDECDVSQDHADRNASVNIAWRAWAKQQGIEDVDTVNYRTRKTQPQVRLVRLSGSGRVSRPTSSLQLAEQGVLHATG

SEQ ID NO: 60374 - protein, 576 aa, unknown
  TnpB Polypeptide
MSATHLSLPLHLPFEDRERYTQLEELTLQGANTLIGQYWTPDRLSEINESSYQAWKYFDEHDAFDEFDIYLPSRYKRCLLQKVGETLRSHADKREAFQKIKPLLPDHKIRRIHTRRIKERLWESDEYLSSGYVDALINQLNAYYDVHGTYPDTYFDFQDCPEYSSGVLPYSADDGPTSGQAVKYQYDESTQQLTVELKTPDTLDPETYGDWTWTEYTLDGYESFHELVEHGSLSAPEFQPSTSKQGDEYYELSFPVEVEHTDTADDVETVLAIDGGLRKDATAVVIDNDGEQLSTPYFIQNTERERMRNLNRERNQLNSKLAHLRRQGRDHTDHFKHVQSEYERVNNKIRHKREQLVHDVANQILALALVYDVDAIVHEDLRSLSPPRGEGQLSWELSSWARREIVENIEYRADIAGLHVERVYAGNTSRSCPRCGSTGHTTKSPDHYFEVWHGGHFRCDNSRCGYQADRDYVGAVNVARVFFADSAQLDSDFTSSYTGDSEIELASRSAGSRPTFGTSLIAYTGQSRVTAGGGSAFIAPAVTQTGTKNAVSSKNSVSSPATHSYSRFLRDAAVCC

SEQ ID NO: 60375 - protein, 404 aa, unknown
  TnpB Polypeptide
MLVFEFKAYSKASQLAAIEEAIRTCQFIRNKAIRFWMDNPKATKYDLNKQCAVLAKEFPFADELNSQARQSAAERAWAAITRFSDNCKNKVPGKKGFPQFQKDCRSVEYKATGWKLAENRKSITFTDKKGIGKLKLKGTRDLNFYQPDQIKRVRLVKRADGYYVQFGIAAERRETIPPTHRTIGLDVGLESFYTDSLGNKVENPRCYRTGEQKLKRSQRLVSRKVKGSRNRNNSRIRLSKVHLKISRQRKDHAVKLARCVITSNDVVVYEDLRIKNMVRNHCLAKSINDAGWFQFRVWLEHFGQVFGRITIAVNPAYTSQECSNCRVIVKKSLSTRTHICECGCILDRDFNAALNILNSGLGTTGHVGTSVLDTGNASGELTSTVVGASLLQQVDSLREESLCL

SEQ ID NO: 60376 - protein, 431 aa, unknown
  TnpB Polypeptide
MMYNNKMNIAHQYKLLPTQAQKIQMSRWLDMLRHQYNFLLSDRFNWWEQNRCNINACPLICHLPKLRDNPEYYGQKRSLVPLKVSRPWYKEIHSQVLQDLVMRVKLAFDRFIKGDCNGKRSGRPRFRGKNRYRSFTYNQVEAKDLQGNHINFPKIGLVKLVLHRSIPEGFKIKTAIISKKPDGWYVTLSLEDTSVPELAVDMKPTVDNSIGIDVGLEKFLADSEGEFEEIPQYFRKSEEKLARLQQKSSARKKGSRAKKLLNRKVARLHQKVARQRKQFHFETASKVLNKADVVFVEDLTVKNMSRRCKPKQDADGKFLPNGQSQKAGLNKSIEDAGWSQFIDILTFKAERAGLKVVKVNPKGTSQHCSICLNAVPKTLEDRWHSCPKCGLEVDRDTNSAVLIKKVGLGVVLTIKRSTRKGREARAMPLVG

SEQ ID NO: 60377 - protein, 369 aa, unknown
  TnpB Polypeptide
MKLTAQVRLYPTKEQAAALKRTLEVANAACNYISERAWETKTFKRYPLQSLTYYEVREKFNLTAQVVIRCLAKVADAYRLDTKTQRTFRPLGSIAYDDRLLSWYTEKSAVSIWTVNGREYIPYGAGERQRELLAYRQGETDVVYFNGMFFLLAACDIPDPDERDVEGVLGVDLGVTNIAADSDGNFYTGEQVERNRQRMHILRSNLQACGTRSAKRHLKRLAGRQRRFQKNINHVISKRLVETAQRTNRAIALEDLTGIRARTRARGADQRARHSNWAFAQLRTFIEYKAKLAGVPVILVDPRHTSQQCSRCGFVDKRNRRSQSEFLCLSCGYADHADTNAAKNLISRAACQPAYRSARSGGQLQALGL

SEQ ID NO: 60378 - protein, 287 aa, Cyanobacteria sp.
LVLLEETTNNFFKVFTLSYEFKLEPTQSQASTIDGGLEVCRKVYNHALAEGKAWVNSRKCSINACSIRGEYIIAADAKRPTDASQGKSLATAKKESSHFTIPQSHLLQQTLKRLETAFVGMWEQGFGLPRFKKVAQLRSFLIPQLNRKVIVGNRIKLPKMGQVKVRRSRSIPDGFKIKQARVIRKAEGYFVILSLQSDVEVPSIPLSGYPIGIDLGLESFIATSENQFIARPKFVDQSEGKLKSLQRKLKHKRKGSRWWNQIKQQIARLHFHVSSKRKDWHFKLAHH

SEQ ID NO: 60379 - protein, 240 aa, Bacillus sp.
MKKYFNSTWKFGTAKLVHKYKKWFLHIPMTKEYQTLDFADVNNIVGVDLGINFLATTYDSQGKTTFYNGNIVKHKRGKFKATRKQLQTRQTPSSRKKIKQIGSRENRYVTDVNHQITKALVEAYPRGTMFVLEDLTGVRSATEKVRVKNRYVSVSWAFYQFRQMLEYKAELNGQKVIVVDPKYTSQTCPKCGNIEKANRNKKLHTFKCKNCQYQSNDDRIGAMNLHRKGIKHISVVTTGV

SEQ ID NO: 60380 - protein, 468 aa, unknown
  TnpB Polypeptide
MGQAKRTTKLLLDLGKRTQGGANPGKRAYLDETAQVLNQGRAFYIAFFLAHADKLQETVVYYSNTHLEMRERPISPNELLTWAEAATVATPDHPHPWTDWNFSEKFPEMPFVYRRSVIKDAIGKVRSYLSTCKNWKQSGKKKGKPGLPGAANHPTLYQGTLTLDLETPGASSHFIQLKVYTGERWEWHNYPVQASRYFEQRIKEASWDQESPKLVLRQRSAELHFPQTKRIEAKKVVESKQDPDLVTVGVDLNVRNLAVITVRQHERLIETVFVRDHGLDRARYLHLKRISKKQYLSGKPVQGEHSNQQLWTHVRRMNEDAAHKVSRIVASVCRKYPGCILLFERLRTIKRGGGSKSRRMNRRQSNHLRGKINQYAKEKNYTQGLVTVEVNPHGTSQYCSKCGAKGERFSFRNGAWVKEKWGKVFRCPVCQYEANADHNASANMHHSFYREWHWQSKRKPPPQARPSG

SEQ ID NO: 60381 - protein, 416 aa, Mastigocoleus sp.
VLVLEYKVVAKKIQYQAIEDAIRTTQFIRNKAIRYWMDAPKEKNVNKAVLSAYSKVLRDEFKFVKDLNSMACQAATERAWSAIYRFYGNCKKKVAGKKGFPRFQKDNRSVEYKNTGWKLHPTKRRITITDKKGIGELKLLGKWDIHTYDVKLVKRVRLVRRADGYYCQFAVKVDNSQPLEPTGNQVGLDVGLEYFYSDSNGNHVENPRFLRKAEKNIKRSQRRIYKHKKGSNRRRKSRKVYAQKHLRVSRQRTEFAKRLALTLVRSSDLVAYEDLNVKNMVKNHCLAKSINDAAWYQFREWIEYFSDKYGRQYIAVAPHYTSQNCSSCGAKVKKSLSTRTHKCSCGCELQRDVNAAINILVKALGPRDDVSRKGMPSKTATGGQPESNARGVATSTLLGESLVEQVATLNRESSCL

SEQ ID NO: 60382 - protein, 366 aa, unknown
  TnpB Polypeptide
MKAHRAILIKLPRDKCDADYIKRLMALSNLAYRDYEVWTPDLPRTIQHQLYGFKNFMESLVFGTTPKKWFAETWVPLKTLRIYADGSMKGDKGAPVALDFRSDVIRLRQVCRSEPGSVVEVPMPRWVVERVGEGGDVRFAMIGLKDDKPYLALIAEREVESYIPSEYILAVDVNSWGHGIAWGLIRDGKIVSFKQEGLNPRRIVSLYNQAVRRERKVGRLKRLGLDDETNAKRAGRLARRLRSRVYRLIRAEAVFLARKLTKKALRYKAMVVIDDVNWESLKELLIRRYGGRVGKLLLSGLKRFVKLLVTQLQWYGAPYEFRRLYSRKCPRCRHKLTQQRGRVMVCDNCGFKAPRDKVPIHWAMKL

SEQ ID NO: 60383 - protein, 376 aa, Paraclostridium sp.
MIKSVKIRLIPTLEQEVVMFKSIGVSRFTYSWGLNRYNELLSLNEKPSKEIIKKEFNNTIKKQEEYKWLYEVSSQTISQVFSDLNNAFSNFYKKRARYPKFKSKRKSRQSFYVRYDALKFEDGKVNLEKIGKVKYKTNYNIPNLNKYVNPRCSFDGKYWYLSFGFEHDENQVELNDISVGIDLGIKDLATVSHINSPIKNINKSSKVRKLKKKLKRLQRQVSRKYEENKCGNKFVKTNNIIKLEKQIKLLYRKLSNIRKNHIHQATNKIIKLYPYKVVMEDLNVSGMMKNKHLSKAIAEQCFYEFIRQMKYKCEFNKIEFIQADRFFPSSKKCSCCGEIKQNLKLKDRVYKCDKCGFKLDRDKNASINLSYYEKLA

SEQ ID NO: 60384 - protein, 437 aa, Myxosarcina sp.
MFYGCQQDRLKLDSFEQRVVEYLCRQANSLTNCAIYALKRAARQSGQVDYNYYDLDKHLKQNKHYKCLFSQVAQQTLMSVCESFKSHYEVIQLWYRGELEDKPKMPRYRKSGGMSGFTYPAQHLRLNETIETGLIRLPLGAEIGKLEGIKEIYIPAPKNIHPEKIKEVRIFPRNRCFYVEWVYQRKEKQYQLEFKKALGIDPGVKNWLTCVSTTGDSFIIDGKRPNFWNRTLNREVAKHNKGQSGDCRLSPSGERRCAPRAWSKKLALMTEKRNRRLSDYINKIARTIANYCIDSGIGTVVMGWNQGIKQKANLGKRNNQNFYQLPTAKLKERLKVVLTEIGVNFVEVNEAYTSKASFFDGDFIPKYGEKPDNWKSSGKRIATKLFRTAKGWLVNADAQASANILKVASIPSVNLDEITRGSVTCPTRLNLYPTVSV

SEQ ID NO: 60385 - protein, 413 aa, unknown
  TnpB Polypeptide
VDAFRAYRFRLYPSRAQAERLAETFRLCAELYNAALEQRRFSNRYGSSVTYQMQQDELPKLRAEIPEFKRIHSQVMQDVLRRLDRAFANYYARVETRKTGKRIKAGYPRFKSASGYSSITYPQAGNGWKDLVNGHFWLSKLGNVRAFRHRPMKGTAKTLTVKRDRVGDWFVVIVCKINAAEPPSHQNGKTALGVDLGLTKLVAISSGEFVEAPKFYRIAERRLQNLQRVQERKQYGSSNRGKAKLHLAKAHRKVERKRDDFLHKLSSAIVSRADVIVFEDLKTAALVKNHNLAKSILDASWGKLLRYTSYKASSAGKAVEWVPPGGTSVNCSRCGTAVAKPLSERVHRCPKCGLVLDRDLNAAVNIRSKVGGSTAESKPVEMRPLLLTKQVSSVRQEARGYPWEDVTLWTLVS

SEQ ID NO: 60386 - protein, 345 aa, Clostridium sp.
LEQNWKGYFSAISDYKKNPSKYLGCPRQPKYKNTNDRKNEVIFTKLAIRVKDNTLMLSLSKAMQIEYGVKSLNFEVSDKLQSLFDINSINQAKIKWEQSTKSWYIILIHERTENILSSDFNNIMAIDLGLSNLATLTFLEDENTYIVNGKPLKSINSFVNMKIAYLQSILMHMKDSTKFKDSKAITKLRRYRSNYINNYLHKASKIIVDLALKHNCKTIVIGDIKGIKQNKDYAKSFVQIPLAQLVSLITYKAKLIGIEVKLQKEAYTSGCSALDLESINKKFYNKNRRIYRGMFKSNSNVIINADVNGSLNILRLYVKDKCIPKAINIVRDKGYVSNPIKLRVA

SEQ ID NO: 60387 - protein, 390 aa, Clostridium sp.
MKKLKRAYKIEINPTDEQKSKIHRTIGVSRFIYNFYIAHNKEVYEKEGKFVSGMDFSKWLNNEYIPNNQDKKWIKEVSSKATKQAIMNGDKAFKDFFKGTKGFPKFKKRKNQDVKAYFPKNNKTDWTLERHRVKIPTLGWIRFKEFGYIPTNSVVKSGTVSQKSNRYYVSILVEEDDIQIFDPINEGIGIDVGIKDFAICSDGVKFKNINKTSTVKKVEKKLKREQRKLSRKYESLKIRNKNIEEWRATRQNIQKQVVKVQKLHQRLANIRTDYINKTVFSIIKQKPSYITIEDLAVSNLMKNKHLSKAIASQKFFEFKTKLMSKCKENNIELRIVDRFYPSSKTCSQCGKVKKDLKLSDRIYRCDCGLTIDRDLNASINLKNAKKYKIA

SEQ ID NO: 60388 - protein, 368 aa, unknown
  TnpB Polypeptide
VSILTYRYRIKDATSGTHLRQMAGAIHDVWNYCKEVSLLAFRRDKTWLTAYDLHKLTAGTSKDLRLSADTIQQVCTEYATRRRQCKKIKLTWRSRKRSLGWIPFKAAYIRLEDDTITYCGHRFRLWLSRPVEGGVKTGSFTQDARGLWYVNLQCDVADAAAPVGQLDLGIDLGLTHQITCSDGVQYSRANLTRRYEDALAMAQRAHKRRRVKKVQATIANRRSDLTHKATTAIARRAQLIIIGDVSSAKLVNTPFATSTYDAAWHRVRTQLRYKAIKLAGVCVSGREAFSSVTCSGCGARCGPRGLSGLGVRTWVCLCCGLMHERDVNAARNILAFRSGRATPSKGIPVLEGGEDVNTLLNIQECLRV

SEQ ID NO: 60389 - protein, 421 aa, unknown
  TnpB Polypeptide
MSEEKNLKIKDTLRATKERRSNMDCRVFSVKVQENKLSRAKEEKLNRCFLEAKWLRNAVVATENLSLEDTSRVQVKVKDKFEIREIFNLSSQMKQSVVDSVKTNVSNLSKAKKKGFKVGRLQYKHECNEINLKQFGNTYKIKSHNKISVQNIGVLVVNGLEQISLDEVEFANAKLIKKPSGFYIHLTVYTKKQPQSNVEKEILGLDMGIKDQLTFSNGIKVNFYLEESEQLKGLMGKLNRQVKGSNQYKQTLSRIKRIFEHIDNKKNDVVNKLISVLKNNYIVCFQDELLNSWKRKKFKQKFSFGRQVQHGILGRVKANLKKNPSNIMLESSVPTTQTCPECGCLTKHSLDKRKYHCVHCGYESPDRDIHSASMMVLLSGYGTYRSLNTDTVSTEKMVGFLNSLSELGVVVTTNSMGAHCL

SEQ ID NO: 60390 - protein, 169 aa, Escherichia sp.
MIRNPKLSKAIADAGWSELVRQLQYKGKWAGRSVVAIDQYLPSSKCCSCCGFTMQKMPLNVRKWHCPECGADHDRDINAARNIKAAGLAVLAHGEPVNPESQHAAWFGSLKWNPRHSGRGAVKSPPFLFAESVARNPHADFPLLAKNVSSCTARLTAAVRRCNCCGRII

SEQ ID NO: 60391 - protein, 204 aa, Escherichia sp.
VRFVYNSILRWRTDAYYERKERSVIYRPTLALRRSKEPEYIWLNDVSCVPLQQSLRHQQAAFANFFAGRVAYPAFKSKRHKQVAEFTASAFKHRDGELYIAKSKSPLDVRWSRELPSAPSTVTISRDSAGRYFVSCLCEFEPVSMPVTAKTVGIDVGLKDLFVTDTGFKTDNPRHTAKYAKRLTLLQRRLSRKQKAQETVLKPA

SEQ ID NO: 60392 - protein, 373 aa, unknown
  TnpB Polypeptide
MSKTTMQVRIYPTPEQGRLLMAHSLEYISTVNVLVSALESGVLPEKASTKDFRSCLPSAVKNQALRDAQSVFKRSLELGCTPILKKPLCQWNNQNWRIEQSVLVLPLYQDGKTQQVRLRCAEVEMTGKGGILRMKKKRGKWIADIALTVEDASPSDGQAVMGIDLGIKVPAVAHVRGEGTRFFGNGRYQRYMRRCFYARRKKLQKAKKTRAIKGSKGKEAGWMKNINHQLSRQIVNHAHEQGVGTIKIETLQGIRKRTTRTSGGAKARKNNRMKNSWSFYQLSMFIAYKAERLGIKVEQVDPAYTSQECPACHARNKAQDRTYVCADCGWRGHRDTVGAINISRRAGLSDKRIGATGAERLGLWMGCLRQPEL

SEQ ID NO: 60393 - protein, 377 aa, unknown
  TnpB Polypeptide
VVVKRGYKAELDLNNEQRTACTKHVGAARWAYNYALTRKKENYLRGDKTPYASDLHKEINLLKQSTPWMYDVSKCSFQEGLRDADSAFDHFFRKCRLKKEGKWKGKCGYPKYKSRKKQIGSARFTGTIKVYPDVIQLPRLGTIRLKEQEYLPMNVKIGSATISEYAGRWFVSITVHEEMKEPTRATGEAIGVDLGIKTLATVSDGRTFDNPKALRKKINALKRASRKHSRKKKGSKNRAKTKQKLARVHVRIANVRKDALHKATSAIVARTKPDCERPCVIVLEDLNVSGMLKNHKLARACADVGLYEFKRQVLYKAAFAGVEVKLASRWYPSSKKCHCCGWIKEDLTLKDRVYVCEECGNVTDRDYNAACNLAALA

SEQ ID NO: 60394 - protein, 432 aa, Streptomyces sp.
MSRFRMHPTPAQAEQMLLHCVHARYVWNLAVEQHAHWKPGRRSAPAFAEQCRQLTEARAENEWLAAGNADVQQQALKDFAKAKAARFTFGFGEPTWRKKYVHEGFRVIGTDRVPEWNKDGTPKLNAKGKQVMGRLVVVQKLNRRWAQVRVPGCGWVRFRLSVKGKGAKLPSAKTFRVTWRNGQWHVAFAVVPEPAPAPGTGEVIGIDRGVTITAALSDGRKLNCPQLTVKERAQIRKHERRATRAPKGSALKTAAYAKVARLKVREVNRRKDWCEKTSTMLARSYGVIRFEKLNIKNMTRTAKGTAAQPGKNVRQKAGLNRGILAQGWGLLRRRTEQKAPGRVEDVPAPFTSLRCSACGWIEKKSRKSQADFVCVSCGFTCNADENASINVAAGQGGIPRPRRTAGAGGVTAAAGRSSAREPQPAWVGIPLF

SEQ ID NO: 60395 - protein, 335 aa, Helicobacter sp.
LKKDEWLEDNFLHRKMRKAFKHGKNSVFNQIIVRSDDYKVFELNDQCWLSIPSLIKNKRIKIPLNTTMEYKPSGTLRLIIKNNVVEVHSSYEKRTNRACGNGIIGIDKGYSEVFVTSNNEFLGNGLGKILTQYSDKLKAKYQRRNKLLALVKKYQKTNKSKKANRIEQNNLGKIKQNKENHRIKQRLKTLIYNACHQVIDRAKVVVCEDLRGNFSKKTGYGKNTNRRLNSWVKGLIEYALKSVAECRGSALHLVNPAYTSQCDSFCNNLLLGCRKGNDFYPYNGGKIQADYNAARNILARYFDKEIKRDTPFNAVKEILLKWTDSYRLTTVQARL

SEQ ID NO: 60396 - protein, 396 aa, Lactobacillus sp.
MVLKAIKARIYPNQTQKEQLLVNFGCVRFVWNQMLNMQIERHKNNKDAKYQNHFAMNNMLKAMKLEYPWLKQAESTSLQVANRDLDDAFKRFFNKKLKNGFPRFKRKKCAQSYTSKAVKNNIQVLDNHHIKLPKLGVVKYRTGRKITGKIKAVTLRINSQGQYYLSVLTESENQTFKKTGKVIGLDLGLSDLIITSDGIKHDTIRFDKDMQAKLRLHERKLARRLHKAKVEIAFDKHEKVLFPRTKLTQFPRYQAERKTVAKLKNKVANQRLDYLHKITTKLVKDYDVIVVEKLNTNGMLKNHHLSRSIANAAWSKLVSLLDYKCKWYGKQLIIVDPKNTSRICSNCGKKNHDFDKLTQQEWLNTREWNCPNCQTHHDRDVNAAKNILARGLKTLA

SEQ ID NO: 60397 - protein, 429 aa, Streptomyces sp.
MARFRLYPTGEQEQQMLLHCAHARYVWNLAVEQHSYWYRGRKAAPGFAEQCRQLTEARTTSEWLRKGNADVQQQALKDFGRAKQARFTSGFGEPTWRRKHRHEGFRVVGTDRVPEFDTDGGPKLNAKTGRQIMGRSVVVQKLNRRWAQVKVPGCGWVRFRLTRTELPQAKTFRVTWKNGQWHIAFAVVPAPVMAPDPGEVIGIDRGVTITAALSDGRTLNCPQLTTRERAQIRKHQRRAARAPRNSPQKTAGYARVAKLKAREADRRKDWCEKTSTMLARSYGLVRFEKLNIKNMTRSAKGTIEEPGKRVAQKAGLNRAILAQGWGLLRRRTEHKAPGRVEDVPAPYTSLRCSACGWIDKNSRKSQAEFVCSSCGFTCNADTNAAANVAAGQDGESRPGCQARAGGTTPPRRRSSVREPQPTRVGIPLF

SEQ ID NO: 60398 - protein, 418 aa, Streptomyces sp.
VSGAEPAGNGKKKRRGFEARPGFHVVGHRLALDPNASALQALASHCGAARVAYNWAVRHVLASWSQRAAEETYGVPEAERVAWRSWSLPSLRKAFNEAKHTDPFLREWWAQNSKEAYNTGLANAAAAFDNYAKSRRGERKGARMGRPRFKSKRKARPACKFTTGTIRLDDRRHIVLPRLGRIRLHEDVQPLVDAIAEGGTRILSVTVRFERGRWFAVLQTEERHTIAPAIRPGTAVGIDLGVKTLLVMADSAGEVREVANPKHYDQALTQLRKASRTVSRRRGPNRRTGQAPSRRWEKANAVRNRVHHRVANLRENHLHQATARIPAEYGTVVVEDLNVKGMVRNRRLSRRISDAAFGELRRQLTYKTQRHGGRLIVADRWMPSSKTCSRCGVVKAKRATRGRTPPVRNWPGKGERYG

SEQ ID NO: 60399 - protein, 395 aa, Streptomyces sp.
VSEIAFERGEFKNFALRKQVYGEVKSRWGLGAQAAEHVIKKTSDAYATLKANLRAGNLGRPGSRRHRRAAEKPIVFRPRGAQPYDDRMLSWQMAERRISIWTVAGRIKDVAFTASLEQLATLALYRKGASDLRVRDGMWFLLATCAVPEAEPNTDPHDFLGIDLGIVNIATTSDGEIMAGRELNRTRVPERGLRAKLQRKNTPSAKRRLKKRRRKEARRARDINHKIAKHVVAEAGVPPTPLRQWGSTGRGIALEDLTGIRERVRLRKPQRATHSSWAFAQLGSFVGYKARKAGVPVVHVDPAYTSRTCAECGHVDKANRVSQAWFACRNCGFVDHADRNGSRNIRARAWELWRRGAPSTAPAPPRKPGAGLDANAASPPVMPVVQARRFSDKAA

SEQ ID NO: 60400 - protein, 276 aa, Streptomyces sp.
VSEIAFERGEFKNFALRKQVYGEVKSRWGLGAQAAEHVIKKTSDAYATLKANLRAGNLGRPGSRRHRRAAEKPIVFRPRGAQPYDDRMLSWQIPDRTVSIWTTSGRVKNVAFTASVEQLATLALYRKGESDLLQRDGIWFLNATCEVPEAPLNTDPVDFLGIDLGIVNIATTSDGEIRAGRELNRTRVRERGLRAKLWSGFGEEFPEVHGHGVDITDLDECAEHHLPLLAPDVLANIPTVWPSSATPSSGSRSTACLRSVNASSMRCIVPSGRCAS

SEQ ID NO: 60401 - protein, 433 aa, Streptomyces sp.
VCPPVRSPRGEEPCRPCGGRGDRGGRGMKRFRPQSGFMVQAFRFALDPNAAQETALRSHCGGARAAYNWAVGWVSASWWQRRAEETYGIGEGELTQWRPWSLPALRKEFNAVKRTDPRFAGWWEDNSKEAYSTGLANAAAAFDNYATSKQGKRRGKKVGMPRFKSKRKARLSCRFTTGTIRVEPGGRHVTLPRLGTIRVHEPTAKLLGPLRAGTARILSATVRHERGRWFVSFQVETAREIRRVTRPDVAVGIDLGVKTLAVLADSTGEIRTIANPRHLDTALRHLHRASHVVSRRRGPDRRTGQKPSKRWEKANTRRNKVHHRVANLRTDALHKLTTAVTAEFGTVVVEDLNVAGMLRNRRLARRIADAGFGEIRRQLTYKTRRNGCRVVAADRWFPSSKTCSGCGAVKAKRATRGRTPPVRNWPGKGERYG

SEQ ID NO: 60402 - protein, 420 aa, Streptomyces sp.
VDTQVKRAFKYRFYPTHAQATELSRTFGCVRKVYNVALGARTEAWARQERVNYNATSSMLTAWKKTEELAYLNEDSSVPLQQALRHSPAAFTHFFGKRAKYPRFKSRKKSRKSGEYTTSAFRLRDGELRLAKMAEPLAIVWSRPLPEGASLSRVSVSQDAAGRWFVSMLCEDPSVQPLNAANAAVGIVADAGYGDAAAFRHGRNLRSGDPAGIEQEMWSLLTLYQALRTVMVGAAESLPGTDPDRCCFSITLHTARDQVIQANGIVTADTDRDTLLGMIGRRILTGLLPSRRQRVSTRKVKSPMSRYSERHADGRPDTSHTVTHLNVTVLEPLDHSPVLPSASRDDRHAAPAARRRHRILALLQEDPTRLWQPRDIAAHFGDVTLETMYRQLNRWAASGLIHKLGPGLYAATPWSPASLA

SEQ ID NO: 60403 - protein, 399 aa, Streptomyces sp.
MGDHVKRAFKYRFYPNDAQAAQLTRTFGCVRKVYNLALQARTTAWFTEHRRINYVQTSALLTDWKKTEEYAFLAEVSSVPLQQTLRHLQGAFTNFFERRSAYPRFKSLKKSRKSAEYTRSAFTYRDGRLTLAKMQEPLDIAWSRPLPEGQVPSTVTVSQDGAGRWFVSMLCEDASVKALPAISAAVGVDVGVTSLVTLSTGEKVTNPKFEKRDRARLSHAQRELSRKAEGSSNRNKARARVAGIHARIADRRRDFLHKLSTRLVRENQTIVIEDLTVRNMLKNRTLARAISDASWTELRSMLEYKTQWYGRDLIAVDRWYPSSRTCSACGHLVAKLPLNIREWTCAACGTVHDRDENAAKNILAAGLAVSACGAGVRPQRRTSGRAVGAEAGMLRRSTA

SEQ ID NO: 60404 - protein, 430 aa, Streptomyces sp.
MVLSVSERGLETRQFGHRARLALSPALALKADDQAHAARTMWNLLHAWWQMMPKEKRTLANADAAIRQARRDVDFLAVLPAQAAQAVLKTYFQAWKNCWADRADAPDFKARFRSTLTVDVPQGRDLNIVRVHRRWGMASLPKIGRVRFRWTKDLPVGKHTGKENRITGARLVKDTLGWHIAFRVQTLEKAPETHQGPQVGIDVGITVPLALSDGQTYEHGQWLTNREQARLLGLEQRAAQRKKHRKPGERTSRRLHHTYDQIAGLRAKAKRRALDWQHKTTTDIARTYSVVVMEALQITSMVKSAKGTIEEPGKNVAQKSGLNRSISGQAWSRTVTMLTYKLARQGGTLAKVPAPGTSRRCSACGLTTSGSRQTQALFVCKNFNCGWSGNADHNAARNILHLYRMGHALIPAAGRAVARRAPRVKPATAR

SEQ ID NO: 60405 - protein, 397 aa, Streptomyces sp.
VATHVKRAFKYRFCPTDAQAAELSRTFGCVRKVYNMALAARTEAWVTRQERVNYNQTSAMLTAWKKTGELAYLNEVSSVPLQQALRHLQTAFTNFFGKRARYPRFKSRKKSRRSAEYTTSAFRFRDGELRLAKMSEPLCMVWSRPLPEGVSPSTVTVSQDAAGRWFVSLLCDDPGVKPLPANGNAVGIDAGLEHLLTLSTGEKITNPRHERRDHAALAKAQRRLAKKEKGSANRARARLKVAKIHARIADRRRDTLHKITTRLVRENQTIVIEDLTVHNMVKNHRLARAISDAAWGEFRSMLEYKAQWYGREVIAVDRWFPSSKLCSHCGALQDTMPLNVRTWTCDCGTTHDRDVNAAHNLLAAGLAVTVCGAGVRPQRSSPGGRSAMKQKPSRREP

SEQ ID NO: 60406 - protein, 385 aa, Streptomyces sp.
VKLVVQVKLLPTPVQASALEATLRACNRAATHASTVAFNRGVRDRNGLQKEVYADLKAAFGLSAQPAVRAVKKVVDAYATLRANLHAGNLGPSTSRRYRKALSTPIVFRPEAAQPFDDRCLSWQHDARTVSIWTVDGRMKGIRYTGHPDQLKTLVQYRRGESDLIQRGGKWFLIATCEIPDAEMFEPADWIGVDRGIANLATTSDGTNYQGRRLSRYRRWQARKRAELQKKKTRSARRRLSRRRCKEQRHATHVNHVISKGIVSVAQRTGRGIAVEALDGIRERVRLRRDQRGTLSSWPFHQLGQHLAYKARRAGVPFLEVDPAYTSQRCPRCGHTERANRPTRDRFCCRRCGLAGPADVVAGVNVRDRARSVWVFVTMPVPPPV

SEQ ID NO: 60407 - protein, 399 aa, Streptomyces sp.
MIRAYKFLIRPTVGQQSALAEMLRDHCSLYNGALQERRDAYRHTSKTTVRYGQQSAQLKDIRAFDPERQGRWSFSSQQATLRRLDKAFAAFFRRVKAGEKPGYPRFRSNKRFDTVEFPKDGDGCRWDSTPHDPATRVRLQGVGHVRVHQHRPVPGKVKTIAVKREGRRWYVILTADQAAPEPLPATGSVVGIDLGIANFLADSNGEFVPNPRHGRKAAAKLEAAQQALARCKRGSKRRRKAVETVARMHRKVRRQRLDHAHRTALDLVRAHDIIAHEDLKIRNMSKTPAPRPDPEQPGSFLPNGATAKAGLNRSIADAGWGVFLAILAAKAEGAGREVIAVDPRNTSRRCPACGHTAKENRPTQEKFHCVSCRHNAHADTVGALNVLRAGLVRRDARPA

SEQ ID NO: 60408 - protein, 378 aa, Streptomyces sp.
VIVKLVVQVKLEPTPKQAATLEATLRACNEAATWVSEVAFERGEFKNFALRKHTYDAVKSRWNLGAQAAQHSIRKVCDAYTTLRANLRAGNLGRPGSRRYRRAAEKPIAFRPRGAQLYDDRMLSWQTAERTVSIWTTSGRVKSVAFTASVEQLATLALYRKGESDLLERDGMWFLNATCEVPEAALNIGPVDFLGIDLGIVNIATTSDGEITAGRELNRTRLRERGLRTKLQKKNTPSAKRRLKKRRRKEARRARDINHKIAKHVVAEAGGTSHALEAVGEHRSRNRPGRPDRDPRAGTASQAPTGHPLRLVVRPVGELHRIQGPPGGGGGGVRRSGVHLPHLRRVRAHRQGEPGLPGLVRVPELRGSKRRRLGRRWG

SEQ ID NO: 60409 - protein, 397 aa, Streptomyces sp.
VSTHVKRAYRYRFYPTDAQAAELSRTFGCVRKVYNMALAARTQAWARQERVNYNQTSAMLTAWKKTEELAYLNDVSSVPLQQALRHLQTAFTHFFGKRAKYPRFKSRKKSRKSAEYTTSAFRFRDGKLTLAKMTGPLAVVWSRPLPEGAKPSTVTVSQDSAGRWFVSMLSEDPSVQPLPATGQAIGVDVGLDHLLTLSSGEKIANPRHERRDRTRLAKAQRNLARKARGDGANRRKARLKVAKIHARIADRRRDGLHKLTTRLVRENQTIVIEDLTVRNMVKNHRLARAISDAAWSEFRSMLDYKAVWYGREVIAVDRWFPSSRLCSACGTLQDRMPLNVRTWTCDCGTTHDRDVNAAHNLLAAGLAVTVCGAGARPQRSTPDRQSATKQKPSRREP

SEQ ID NO: 60410 - protein, 492 aa, Streptomyces sp.
MQLRYAFRLDPGPGQRVALARALGCARVVYNDAVAARERARREGAAFPGAGALSKTLISEAKQSPGRQWLSEVSAVILQQALRDVERAYTNFFASLSDSRQGARVGAPRFRSKRDARQAIRFTANARWKITGAGRLLLPKIGEVKVRWSRTLPSVPSSVTVIRDAAGRYFASFVIETDPGADLARMPEADNLPSVGIDLGLTHFAVLSDGRVIDSPRFLRRAEKKLKKAQRELSRKQKGSKNREKARLKVARAHAQVADARRDFHHQLSTRLIRESQAVAVEDLAVKGLARTRLGKSVHDAGWSAFVALLEYKAARYGRVFVKVGRFEPTSQVCSVCGVKDGPKPLHVRTWTCTHCATVHDRDHNAAKNVKQAAGLAVTACRAQVRPEPVPAQREEAGSHGIQTGVRAAQRHGTGEEGQNPPASAGRASQWTNATAAASDPAPGFLATGLQGTESHGFRTCDYQNGLDFFDDLGLIVVTDDEVGVFWSFGAY

SEQ ID NO: 60411 - protein, 404 aa, Streptomyces sp.
MIRAYKFLMRPTVGQAAALAAMLADHCSLYNGALQERRDAYRHVSKTSVTYGQQSAQLKEIRGFDPERQGRWSFSSQQATLRRLNKAFAAFFRRVKSGETPGYPRFRGVNWFDTVDFPKDGDGCRWDSTPHDGVTRVRFQGVGHVRANQHRPVAGKVKTVSVKREGKRWYVVLTAEQEPPEPLPKTGSVVGIDMGIASFLTTSNGEHVANPRHGRKAAAKLEAAQQVLSRFPRVRRDKRTANHQRAVDNVAKLHRKVRRQRLDHAHRVAVDLVREHDVIAHEDLKIRNMVKAPAPKADPDQPGSFLPNGAAAKAGLNHSISDAGWGVFLTLLHAKAESAGREVIAVDPRNTSRRCPACGHTAKENRPTQEKFHCVSCRHNAHADTVGALNVLRAGLVHRDARPA

SEQ ID NO: 60412 - protein, 410 aa, unknown
  TnpB Polypeptide
LEEKLNSNDNKIYRSVKIRLLPTKEQEVLFWKSVGVARWSYNYFLSESYRVYQEWLEDNSKPKHISEQEVRKYINNHLKKTTHTWLKDVGSNVMKQGVKDANIALQGFFRHGKGYPKFKSKKRSKPSFYVNYESLSRTSNGFRGEKIGVVKTKESLPKIGKNQKYRSPRISFDGKFWYLSVSFETKRIDVRLTDDKLGIDLGIKELAVVSNQDGTVVKKYRNINKTYEVKRLERKLKREQRKFSRKILINTSHCDDKNRPKYKKELDLCKNIQKQKHIIQRLYRRLSNIRTNYLHQTTTEVVKNKPSRVVLEDLNVSGMMKNRHLSKALMCQKLYEFRYQIEYKAELYGIEVVIADRWYSSSKTCHRCGHIKKDLKLSDRVYRCDCCGNVIDRDVNASINLANYNIESIK

SEQ ID NO: 60413 - protein, 366 aa, unknown
  TnpB Polypeptide
LNKCFKVRIYPNKEQIRVIEDTFNSTRYLYNYMLNLREKLYKFFGINLSYNQSSKVLTELKRHKIWLKSVDSTALQQCLKDLDNAYTRFFSGQVNYPKFKSKKRSKNSYRTSMNISLSIENYTIKIPKVGSIRFRDKNDFSNITKIYSVTISKTSSGKYFASISTDVYIPCFERTNQNIGIDLGLKDFAIFSDGDRVGNPRYLVNAQKKLAKMQRKLSKKVFGSQNYQKYKIKVARFYEKIKNKRLDFLHKLSLRLVREYDIVCCETVKVKNMMKNHRLAKSFLDTSLSEFIRQLEYKAEWYGKTISKVDTFYPSSQLCSNCGYKNSEVKNLSIRDWTCPKCGTYHDRDINASINILNEGLRVLSS

SEQ ID NO: 60414 - protein, 365 aa, unknown
  TnpB Polypeptide
LNKSFKVRVYPTREQQVLLEKTFGASRFVYNYFLNLKSKLYEFYKINLSYNNSSKVLTELKKQKTWLKEVDSKSLQQTLRDLDSAYQNFFSGRVEYPNFKKKQGKNSYRTNSNIKIDNRYITVPKIGKLRFRDNYKLEDKNILKLYNITISKTVSGKYFASVSAEVYIPCFERTNQNVGIDLGLKDYLILNIGEKVKNPRILKHLEVKYRKLAKSLSRKVKGSANYQKAKLKLARFHEKISNIRKDFLHKLSTNLVKSYDIICIENLNISGLMKSHKLAKSFQDVSFSEFIRQLEYKARWYSKTISKVDRFYPSSQLCSSCGYKNSEVKNLKIREWTCPKCGVHHDRDINSAINILNEGLRLLEI

SEQ ID NO: 60415 - protein, 385 aa, unknown
  TnpB Polypeptide
MYKGYKFRIYPNKEQLALINKTLGSTRFVYNYYLNKIKESKENEHTDTDAYSCIKDYITNLRYEHSFLQDISLSIIESTIFILINNFKRYQNGMSNYLKFKSKNYTQKYTIPAVYKTSNNKIYSNIKLDLKTKRINLSNIESIKIKGYNDIYNINGKIVSATISKEQTGKYYVSVIYEIYDKVPIVDAKSIVGIDLGVKKLLTLSNGITYDNNKYIAKYEKRIKRKQQELSRKVEGSENYKKCQKELAKLYSKLSNARKYYTHKITKEITDDYDIIACESLSTQKMIENGKSSDLSKRISDVTFNEILKQLSYKSKNKGKIFYQVSPKFPSSQICSKCNNIDSTYKDISKREYICKKCGNSLDRDINASLNILNEGLKLYIKDNL

SEQ ID NO: 60416 - protein, 356 aa, unknown
  TnpB Polypeptide
MKIARSSKTTLKFATRKKRELLERIMKEYSRVVNIFIEMFWGNPFTRQMLLAPVINAPETWLSARMRQCAAREALGMIDCAEESAKVKGTVPIKPVHTGQKMILSAQVVKIEKGRNSFDLWLVLSSIGEGIKIYLPLKRHRHFNFFANWKMSNSVVIHQNDVQFSFEIETGPKKNAGPQIGIDVGINHLLATSEGELLGSEVRLLIQKIKNKRQGSKAYQKAKKTLSYYLHKTVKEFFKTHDLLLVVVEHLQGLKQGKQPNRGKEFRKTLSNWNYRELLDIIQMRTEENRVCFRSVNPYKTSQQCPICSHTERGNRSNEKFCCLRCGYSEQADLVGARNILDRFISGQYGAAFQAT

SEQ ID NO: 60417 - protein, 254 aa, Clostridioides sp.
VIAVKKAYKFRLYPNKKQQELINKTFGCCRFVYNKYLAKRIDVYKNNKETFTYKQCSSDLTNLKKELKWLKEPDKFSLQNALKDLDNAYKKFFKEKAGFPKFKSKKINRFSYKTNFTNGNIMYCGQHIKLPKLGMVKVRDKQVPKGRILNATISKEPSGRYYVSLCCTDVDIEAFENTNNQIGLDLGIKEFCISSCGEFIENPKYLKKSLNKLAKLQRELSRKTIGSLATYSHFIFSFFSYYNGFDKSVINFYK

SEQ ID NO: 60418 - protein, 378 aa, unknown
  TnpB Polypeptide
MRTYKFKLYQSKKNKHLHQQIDIAGLIYNHAIALHRKYYKLTGKSLNQYELMKHITKLKKLPKYNHWHLVGSQAIQDIVQRIDKAYKLFFGNLKRKVRTSPPGFKKVKKYSSFTLKQAGWKLLDGNRVYIQGRVYKFFKSRELPTDIKTVTVKRDTLNNLYLYFVVEEEASQVDQAMTGNSAGFDFGLKTFLTTSDGHELASPLYYRQALAALQTAQRAMSRKIKGSNNWKKAKANVARLYQTVVNRRRDWFFKLAHELTDQYDHLFFEDLNMKGMQALWGRKVSDLARSEFMGILGYVASTKNKVIHLVDRFYPSSKTCADCGQVYHDLKLSDRRWVCAGCGVIHDRDHNAALNIHRVGASTLGLEVVRPALQANLV

SEQ ID NO: 60419 - protein, 360 aa, Firmicutes sp.
MMFKAYKYRLYPNKEQERKLNETLWLCSLVYNRCLAERREAWKNERRSLTAYDQIKQLPAWKKEGPRLNQVYSQVLQDVVRRVDKAFQAFFHRVKAGEKPGYPRFKSASRYDSFTYPQSGFQLQNGRLKLAKIGLVKIKLHRPLQGKVKTLTIHRKADGWYACFSVEVDPVVLPPSDKAVGVDLGLEFFATTSDGEFFPSAKYLRKSERNLKRLQRMVSRRQKGSRRRQKVVRQLAKAHAHIANQRRDMAHKIARSLVNRYGLIAIEALNVKGMLRNHRLAKSISDAGWGLFINILKGKAAEAGRQVVEVNPRNTSQICSGCGCIVEKPLSQRWHKCPHCGTSLHRDVNAAINILHRAVA

SEQ ID NO: 60420 - protein, 419 aa, unknown
  TnpB Polypeptide
VELLKLVFKLKSKFTTKQLEIMKELSWHTSKLYNIVNYQIINDENIKPIYNQIEKQFKSDWHCEFLHSHNRQQCFKQLAQDWKSFFSSIKDYKKNPSKYKGQPRPPKFKNIDKNPNEVIFTNFATRVKEGKLLLSLSKEIKSKYDVESLNFELPLAVQNIINLDNLQQTRLKQDKLSKEWYILMIYKVEEMEESAYPNTMAIDLGLDNLATLTFKDDSESYIINGKTLKSKNAYFNREIARLSSIRMKQVGSDKFKDTKHMKRLRLNRRDYVKDYLYKASRIIVDLAIKHRVSTIVIGNIKNIKQGNKSKSFVQVPVQRLVELIKCKAKLKGIEVALVNESYTSGCSAIDLEELNKSNYNKSRRIKRGLFQTGNKIINSDVNGSINIMRKYLKDKCIPKMICQIRDNGVMYTPKGIRVA

SEQ ID NO: 60421 - protein, 458 aa, Hamadaea sp.
VARFAAFRFTADASPSQLVVLGRHAGAARFAFNQCLAMVKDALDAKGKTADGSVKVPWTGFDLINAFNGWKRSAAGRVWVVDSSEQATMHSTGLRWRGEVCQQVFEEAAVDCGRALTAFADSRKGKRRGARVGFPRFKRKTATTGSFRIRNKTTAGRAAIQVGDPVAGPRTICLPKIGIVRVREDTRRLRRMLRNGRATIRYVTVSRHAGRWTISVTVEAADLHPARRHPAREDGQRGWVGVDRGLTALVVAADGTGREILRVEPPRPLRTGLPRLRRLSRRVSRARCGSKNRSRAVARLARCHRRIRDVRAHALHEVANRLVKTHDRLVLEDLNTAGMVRNRRLARSISDAGWAELARMIGYKQQWAGGQVITAGRWFASSKTCSRCSAILAVLPLAQRMFTCAACGHVADRDLNAAANLAVWGEQHDAQTRDPEARGPVINALPRDGSDRRASARR

SEQ ID NO: 60422 - protein, 408 aa, Salmonella sp.
LFKIAGWKRLQAFKFQLRPNGQQEREMRCFAGACRFVFNRALALQNENHEAGNKYISYTKMTSWLVEWKNATETQWLKDAPSQPLQQSLKDLERAYKNFFQKRAAFPRFKKRGQNDAFRYPQGVKLDQENSRIFLPKPGWMRYRNSRQVTDVVKNVTVSQSYGKWYISIQTESEVSDPVHPSVSMVGLDAGVAKLATLSDGTVFEPVNSFQKKQKKLARLQRQLSHKVKFSNNWQKQKRKIQRLHSRIANIRRDYLHKVTTTISKNHAMIVIEDLKVSNMSRSAAGTVSQPGRNVRAKSGLNRSILDLGWYEMRRQLEYKQIWRGGQVLAVPPAYTSQRCVCCGHTAKENRPSQSKFECQACGYTANADVNGARNILAAGHAVLACGGRVQSGRPLKQEPTEMIQATA

SEQ ID NO: 60423 - protein, 363 aa, unknown
  TnpB Polypeptide
MRKGVKFRAYPNKEQKDLINRTLGCCRLVYNKGLDMRKTAYAAGKKPSYGQTSAMLTELKKTEAFSFLKEVDSIALQQSLRDLDRAFVNMFQKRAKHPVFKSKRDTRQSYRTINQGDNIRIAGKYLKLPKLGYVKIKQSMEVGHINNVTVERTPTGKYFVVLNVDFEPEFRPNAGCMIGIDVGIKEFYSDSNGNVVNNPKYLEKSMRKLVRAQRRLSRKQKGSANRNRQRIRVARIHEKVTNQRNDFLQKQSTMLVSENQTICIEDLNVKGMIRNHKLAQHIASCSWSKFFAMLEYKAAWYGNNIIKVPTMYPSSQTCSCCGYRNPLVKNLAVRTWECPVCHTTHDRDKNAAVNILRKGLATA

SEQ ID NO: 60424 - protein, 398 aa, Actinomadura sp.
MPTAVKRAFKYRFYPTPEQAAELARTFGCVRKVYNMALAARTQAWALRRQRITYNQTSAMLTTWKKTEELAYLNEVSSVPLQQALRHLQAAFTNFFAKRAKYPRFKSRKKSRDSAEYTTSAFRYRDGQLTLAKMAEPLHIVWSRPLPVGAKPSTVTVSRDSAGRWFVSLLVEDPTVRPLPASGNAVGIDAGLDHLLTLSTGEKITNPRHERADRERLARAQRNLARKAKGEGANRAKARRVVARIHARITDRRRDHLHKITTRLVRENQTLVIEDLHVRNMIKNGTLARAISDAAWSQFRSMLEYKAAWYGRDVIAVDRWFPSSKLCSECGARQEKMPLNVRTWTCTCATTHDRDVNAAKNILAAGLAVSACGAGVRPQRRPPGGQSAMKQEALRREL

SEQ ID NO: 60425 - protein, 432 aa, unknown
  TnpB Polypeptide
MELVRSENTKTKIRASMSATKARRQTQVCRVFELKVSIRHNPKETFQKLFNCFKEAKWVINDMLSLSKDNPGNSVFDYKYTEHKNVIHYDKDKNPVTSTITLPSVLHRATVAQKKTDIINLAKAKKKGIKVGALKFKSEVNCLPIITGFTQILDGCRITIPGFRKLRVHGLNQLNQFEKFELADAKLIRKASGYYVKISVMLPKEKRIPTNRNVGIDFGIKDSITTSYGDKYKCNVRETDRLKFLSRKLNRRGKKKNEKGSKQYYRCLRQLKREYEHIANVRKDMTNKIYHKLVTDYDVIYFQDEQIKNWHKGLFGKQVQSSCLGALKQRLVALETSGRSFKISKWEPTTKLCPVCGTINHPTLADRIYKCDCGYEMDRDIHSARVVLMIGSSKRAECLEQASPELSPLPKCNPIASRQDSVSMARTEAHRL

SEQ ID NO: 60426 - protein, 275 aa, unknown
  TnpB Polypeptide
MRVGDGLTVKQDRLRIVGIDSSIKVRWHRRIPDGAKLGHAVLSRNGGHWHICFSAELPDAEEVPREFSPVGIDVGITSLAALSTGELVANPKWSSEADAKLRRLNRAIARKHRYSRGWKRAKAALRQHHGHIVAKRTDFLHKLSTQLVREHSHIAVEDLNIKGLSRGMLAKDVLSAGWATFFNMLRYKAESASSVVEAVDPRGTSQTCPACGGDVAKTLADRWHSCPHCGCEADRDVAAAQVILLRASFMGPGIGLGAQSKPGAVGLAPEAVCFS

SEQ ID NO: 60427 - protein, 258 aa, unknown
  TnpB Polypeptide
MAVKAYKYRFYPTDEQRQILARTFGCVRYVWNWALATRSAAYQERQESLNYNDLSGALSVLKKDPQTEWLSEVSAVPLQQTLRHQEQAFRNFFAQRAGYPTFKKRHNRQAATYVSTAFSWKDGQLKLAKMDEPLDIRWSRWFEGTPTTVIVTQDPADRYFISLRVEETVQEKPINPHMVGIDLGLNDLVVLSTGEKVGHPQFFRVRRRVEFAIIWSIRCRCMCVPGRVRVVMRPTTAMSTQRTWFWPPGWRYQPVEKP

SEQ ID NO: 60428 - protein, 251 aa, Clostridioides sp.
MYFSQHIKLPKLGMVKIRDKQVPQGRILNATISKEPSGRYYVSLCCTDVDIEAFENTNNHIGLDLGIKEFCISSCGEFIENPKYLKKSLNKLAKLQSELSRKTIGSLNRNKARLKVARLQEHIANQRKDFLQKLSTKLIKENDIICIEDLQVKNMIKNHKLSRSISDVSWSEFIRQLEYKANWHGRQIVKVGKFFASSQICNKCGYKNEEVKNLNIREWICPSCNETHDRDINASRNILKEGLRLITIQNK

SEQ ID NO: 60429 - protein, 450 aa, unknown
  TnpB Polypeptide
MEQQCGRKIGLRLTKEQERKCFRSCAAARRAYNWKLAAQNAAYELAKQNTPEGQKVKCKLGSPIDWHREWVEYKHLEGNEWLMELSKCCGQEALRDLGTAWQKFFKGTGKHPQFHKFGERDSFRITGSVYIGHDFVQLPSLGKVKLKEKGYIAIPEGSDKVPIPMATVSRQGSHWYVSFAYKTDIIPLYENVEITDDEYDVVGVDLGVKDLAITSFGEVIANPKAYKKHLQRLKRWQRKISRRKKGSKNRKKAIRKVADLHRRITNIRINSAHQCTTSLTRKLAPKMLVIESLKPKNMSRNRKLASSVLDANFNRIATQLEYKCKWLGIKLVKAPQFYASSQYCSECGCYRKEDLKLTDREWTCPHCGCRHDRDVNAARNLRFYGLWLLGYAKQQTAASYAVAACPSCERLTEGSGSEPRPKDLRLQFFETQEQCRSLKQEITSSIRHCA

SEQ ID NO: 60430 - protein, 433 aa, Streptomyces sp.
MARFHAYPTVEQEQQMLLHCAHARYVWNLAVEQHSHWQPERKSAPGFAEQCRQLTEAWYENEWLRAGNADVQQQALKDFAKARAARFTSGFGQPTWRRKHEHEGFRVIGTDRVPEFEPDGRPRLNPKTGKQVMGRSVVVQKLNRRWAQVKVPGCGWVRFRLSRKGKGAAPPAAKTFRVTFRNGRWHIAFAVIPEPLDAPATSDVIGVDRGVTITAALSDGRKLKCPQLTVKERARIRKHQRRAARAPKGSKAKASEHAKIAGLKIREANRRKDWCEKTSTMLARTYGLVRFERLNIKNMTRSARGTLAEPGRNVAQKAGLNRAVLAQGWGLLRQRTEHKAPGRVEDVPAPFTSLRCSACGWIEKKSRKSQADFVCVSCGFTCNADENASINVAAGQGGIARPRRTAGAGGVTTATGRSSAREPQPARVGIPLF

SEQ ID NO: 60431 - protein, 334 aa, Crenarchaeota sp.
MVNESVRIGLANDVFSLRRLSLLSYNQLAQYDSPSCYKLCAISRAAGILAARKKSLKRGFPTRTPYAVRQQLVSCYRFKAKNDGLEIPIARGRHLSIPLTRHTLDVISQPGVAVRSFTLTRNRLSLSIARDLATVECTSTVGVDRNLRNLTVGNEEETRHYDLSETVRIASTTIRIVASFRRDDARIRGAIASKYGERRTARIGHLLNTTTKTIVALAVQRRQALVLENIQGIRSLYRKGNSQGRRYRGRMNGWSFSEAQRQLEYKARWACLPVIRLSKRETRGSSMTCPRCGERLQSDKRLARKLWCSSCRVVMDRDRVAAVILARRGEQLKQ

SEQ ID NO: 60432 - protein, 405 aa, unknown
  TnpB Polypeptide
MATVLKGIKLRLYPNKEQECDLRQMCGNDRFLWNKLNEILQSRYENNKHLYNGDKSKEAKKKRKHVILSAYDMNYLLPLLKVEFPFLEYSDSSSLQVVTLNLSNAYSNFFKKPEQFGLPKFKKLGVCKLSYTGKSKISILARHSLKLPKLGCIKTSKTGVLKDVVIKRYTIEQDSTNRWYISFQVEVNVDEFTKTNKTVGLDLGLTDMVIGSDGFKSGRFLVPELENEIKSKQKVYSKRRHYAKNKIAQDKNKQVINPRTLLDFINVEKARVTKAKSQKRLANKRKDFLHKLSTNLVKTYDIIVIEDLKSKNMMKNHKLANAIGNASWYEFRTMLEYKCQWYGKQLIIVPPHYTSQECSECHYNSGKKALDIREWTCENCGIHHDRDINAAKNILTKGLKTLQTM

SEQ ID NO: 60433 - protein, 427 aa, unknown
  TnpB Polypeptide
MTDITLVAESKLYLKDNTPLYDYFDDYSKLFNFLVRRCVHHLNHKLNGESESESRYRTNLMLEFKITNRMAKAVIRTAKNQLKLLKESARYQYNNLYKRRRSLCKKIAKLKAILSSRSASLKQRKLAKVRLFWTQMRLNKVNQLILNGLKLHLTFGTKHLLKTNKQKFLAKRDNQVVYIGDKNETYGNQQFQINFNSKYNQFEYKLRLDNQWVSGTDKYIYGSFALKNKEAKVHILKTLSEKKSNPLTYRIIKRDNSLYLQIMYRRETTDVTRYNHGVLGVDFNKGFISVSEIDSTGKLTSLTRYNYLHQGKATKTKTSMLDLVSKLVSQAVSVGKDIVIEDLVSLDSNKKQEKTTSKNYNRMINSLKFGLFKRCLLSKSTKEGVSIHIVNPYNTSKIAKESYTDRMKLNVHDAASYVIARRFYQYD

SEQ ID NO: 60434 - protein, 511 aa, unknown
  TnpB Polypeptide
MSESAVQSREAALPRRKRSSETLTLTLLSSATLPAALTSAEKDSSTYWNAQCAVMSSMLWLPHKTALPVRDSNLSDTLSNYQADKSQHWMTRLTPLSRSIQTPLSVSLPASATVTTVGEAQSAVVKATKKIRFFPHDEEKYRQALFLYRRAYNLTAERYREGTHRDEKGELINLRPWIKSICKPEQKGAGRVYNSLICDNAVREATKTFVAVCKKNKQLSKGNAPAQMHFKTRRGEAHSFRMCRLPAGLCPAVKALGKITLTESVPQEAVDQSVTVTCNKGRWFINVQHRIRLKSEKQGVAKCVSVDPGVRTFATCYSPSEVIVAGDNIAKEKLFPLMKKVDNLLSQRQRILNQCKGIKFPDMPQWARDRLTFIDKTICRLKCKKEDIVRDLHQRLAHYLTEEYDVIFLPHFQTRGMVKRTKGRVLRRNTCRQMLSLEHYAFKLRLKWLAKKKGKLVLDTNESHTSKTVSHTGRVIENLGGRKIIHDENKRIDRDINGARGIFIKTLSQAT

SEQ ID NO: 60435 - protein, 383 aa, unknown
  TnpB Polypeptide
MVMANLTLTLKLPFYRLNKAKAIEFERLTAINTSVANDLLRMDKRERKKLTSADFKHVEIGSMWINQTIRNCNAKTKVKHFKTMWLEVNNQGYEVLKSGDLYTLSFSLYRGRKGRIPLHVHSASHNDVLDKLIAGEVKLGSIKLCKSKKGIWYALISVSMEVPDAADATGWIGVDRGQNNIAVASLPKSFGKFWKGGRVKALRRQFQRTRCSLQKAKQLKEVKRLEQRERRIMTHINHVISKELVQFALDFGMGLRFEDLSGCRQTMKQRKKTKSYAANNRDSWAFYQLEIFTRYKAIRAGVPVESVPAPYTSKSDHRNGVIGKRNGDWFRGFDGYRCNADWNASQNIGQWLGFSCPLHLQEVLAAMAMADTEGEVNDSPQIV

SEQ ID NO: 60436 - protein, 393 aa, unknown
  TnpB Polypeptide
MLKTLKFKLYNNDNYQKRFDKEISICRKVYNAAKETYEYAAASGVYLSEFDLNNQLPSCKKEFPYLKKVHSGCLQAVISTFRKAYDNYYRQLKNGTVAKLKAKYLNRCSQNNQSVNYKHLREIGRPKWAKKKEFNSIQFKTFQIKNGKIKLPNWGFIKVFNEKYLNKYEITRTRNAILKKEVDGLYISIVIDIVPIQKDNNNQVVGIDMGIKYFCVTSDGEFIDNPRFLEKQFKTLRVAQRKLSRKYKKGVKIQSKNYYKQVDVVARLHKKVKDARRDFLHKKSTYLANNYNIVIHEDLNIAGMVKSNLSRHIYDVSWGTFFLMLAYKTQVIKVNPAYTSQKCSNCGHICKENRLTQSIFKCVSCNFEQNADHNGSLNIKKAGTSAINANLNH

SEQ ID NO: 60437 - protein, 373 aa, unknown
  TnpB Polypeptide
MILKAFKYELSPNEDQCTMLNKALGCARFVYNWGLNEKSKAYAKDQTNLSCFDLTKQITELKKQEQYIWLSEVHSQPLQMALRNLDVAFTNFFKKRSKFPNFKKKSRNQSFQYPQGVKVKDNLVFLPKIGWCHFYKHRDILGEIKTVTVSKTPTGRYFVSILCDTKLEVPTKQPIKKETAVGVDLGIKTFAVLSNGKVFENQKHLTNKLRQLRVEQRKLQRCVKGSNNREKQRIIVANLHEKITNQRKDFTHKVSYYLTENFNTICMEDLNVAGMVKNQKLARSIGEQGWSMLNTQIQYKSEWKGKNYIQIGRFQPSSKRCNCCGYINKDLKLSHREWTCGNCKNVNERDANAALNIRDYGVGFDPVNAKLSQ

SEQ ID NO: 60438 - protein, 321 aa, Lachnoclostridium sp.
  misc_feature (294)..(315): Xaa can be any naturally occurring amino acid
MLRAVKIRLYPNKTQTEQFNKLLGCYRFVYNQCLARKINSYKENKVSENLSTLGHFVHHELLKDDNLIWLREQNTKVLKQAVNDMLSAYKNFFNQHKGFPKFKSKRDNKQSCRFELGAISKKNDYTSYHLSLANIKNIKFKCNKKYAEYLQKHKPNIKQATLSKLPCGEFYLSILVDGDLTHKGLRDTDNAVGIDLGVKDFVITSDGEVFDNLHFKKSQSNKIKRLQRQLSRKVKGSNNRNKARIRVAKTYKKINDKKQYYLHQVSNTLINENQVICMEDLNVKGMLRNHKLAXXXXXXXXXXXXXXXXXXXXXXNGTIER

SEQ ID NO: 60439 - protein, 270 aa, Nostoc sp.
HLQTASYTQFKKHHFVNNKITLSKIGDVKVIVHRQIPDGFDIKTVSVTKKADGYYVTLSLDDQTVPTIKHDFDVNNIVGIDVGLIDFIVTSDNERIAAPKFLRKAERTLKSAQRQVSRRKKGSNRRKKAIKKLGIQHKKVADTRKDFHFKTAKLLLNKYDVIAVEKLNIKGLAKSRLAKSINDAGWGQFVAILSNKAENADLKVISVNPNGTSQECSSCGQKVKKPLSQRMHNCPVCHTNLCRDLNAAINIKNRGTHGLKAQNMSSLRSL

SEQ ID NO: 60440 - protein, 435 aa, unknown
  TnpB Polypeptide
MCSLTTLTQAYTYALDPTPGQVSMLRSHIGGSRFAYNALLGLVKDNWDENRAKMEAGIEVTRDEWVSTSHFGLLYLWAEQRAELAPWWPENGSSTYNDAAQRLSASFANFRKGRTKFPHLKRKGQAGSVRFMGPAVRLIDAHHVRIARIGGVKTYESTRKLYRHLDRGTGRIVAATVSERAGKWKVSSNVEVTRQVPVTRGTERIIGVDVGITTLYTGATPEGEQVLEVANPRHFQSAEKRLAHAQRIASRRQGPKKGVAPSIRWKKANARVQKVHARVHNSRSNLIHETTTMLAKNYDVIVIEDLNVADMVKNHSLAKHIADAAWGEFARQLEYKTTWHGSTLVRVDRFYPSSKTCSRCGTARATLSLEMRTYHCETCGLVLGRDHNAAVNLARQGLPATSSGTGRGGEVRPDCLDSKAHPDEASTETLAVASA

SEQ ID NO: 60441 - protein, 435 aa, unknown; identical to SEQ ID NO: 60440
  TnpB Polypeptide

SEQ ID NO: 60442 - protein, 437 aa, unknown
  TnpB Polypeptide
MQLVERHVITRADRRFAAIDRAAFASKNLDNAANYALRQSYIFQGVYLSYPDMHQQMKNHEAYQALPAKVAQQVLRVLDKNWQSCFAALEAWKADPSKFLGQPRLPRYKDKQQGRNLLIYTIQALSLPALRAGRICPSMLGITVQTRQRTVQQVRIIPRSGCYVVEVIYEREPVPAAVNSALHAGVDIGLNNLAMLTSDKPGFVPRAVNGRPVKSINQFYNKRRAELQSQLGTADTSRRLERITTKRTRRIDHYLHTASRRIIDLLVAAGIGTLCIGKNPLWKLEAHLGRRGNQNFVSVPHARFIAMLTYKAELVGLQVKLTEESYTSKASFLDADPLPVYGDEDIPAFSGRRVKRGLYRAADGRHINADVNGSYNIVRKVAPDAFAQGGTRRASTDLPGLVALSIPAPLSRRARSWSPRPVTHVPVSAQALLYQVY

SEQ ID NO: 60443 - protein, 519 aa, unknown
  TnpB Polypeptide
MFVSLQFKLELRKEAKEKLIKLMREQSSAIRVAHNMLKELEKEKAKNPHAQIYHRLRQLFPNLPTKYIDSAIYKAKQYPTNKTVVFGGKRLFEKLCKNRLTGKAREKLKKQWRELRQGTLISIGSKADKGNRLMRFEDLNGQLHLRITTGNREFIYAKVLREPSNSKDKWITFMAMLLESWQTKSYFPYTVELKLRDGEVYGSVSFELPTPEVKYTKENGVIAIDTNASPIHLAIAEVSKTGELLSYKTISLHHLLGLSQNSKDHQEWILAHQIVNLAIEKGKAVAIENLKKLKKGMRGDGKAELRKRLHHWNAKKFMQKLKRVARLKGVEVVEVNPAYTSAIGMLKYAPQLNTDKDIAGAYVIGRRALGFKEDVPENYERLLKDKAYLEFALKRYEEREKELAELLEKETNQYKRNALESELKNVQNAKELLANQSLQSESSSCEGANGRNPEQGRGNLASSSAWQVLKVALLFSILGKVLPRDLSPLKPVLVEGVWDRVRSRLVPFEAGGTVPIRDF

SEQ ID NO: 60444 - protein, 403 aa, unknown
  TnpB Polypeptide
MIEVTRFRLYPNKEAEDKLFSNFKICSFVYNWCLEHNIWNDSVLPQLKEVYPDIKEVHSIVLQNVIHQVRDNIKVLSALKKKGKKVGRLRHKPRHSMIYEQTGFKIDGNLLRLSRIGAIPIVISRPIKGEIKQIIIKHTKTNNWFAVVVSRTNEIDDWFAFRKTYRKPVSFKAIGIDLNVSNFSTDSDGLVIEHPRNVRKAEKKLRRQQKKLSRKTRGSHNRNKQRRIVAKVHEKVENRRNDFLHKVSRYYVNNYDLISLEDLNIKGLIGMSNSGMAKAIHDASWGKFDNYVQYKAENAGKLAVFVIAKGTTIDCSACGKAVPKELSERTHRCPYCGSVMPRDYNSSRNINFRGLQMVGVWAQPNHGFFDNEKLNTLAEIRTSILDINNPEQVFVVEAKNLPP

SEQ ID NO: 60445 - protein, 191 aa, unknown
  TnpB Polypeptide
MPYTCAIDFGIDNFAAIVCDDGSSAIYKGGAVLSDTQWFHKQKAKYVSILTKGHKNQYATSARLKDLSFHHANFTKDQCHKISRSIIDFCVEHQAGTLIFGVNPLWKQNSRIGKINNQKFVSMPIAFLRTMITYKALNAGIKIIEQEEVILPKQISQQKTIFLPMVWMIKMYSFLGFVSNEVCIVVQMERS

SEQ ID NO: 60446 - protein, 233 aa, unknown
  TnpB Polypeptide
LSRRDRGANHGYGSKRYNRALGRVRRIHARIAAQRADNIGKLTTWLADNYSDISIEDLNVQGMSHNRRLAKHVLDADFREFRRQLEYKTARAGARLHVIDRWYPSSKTCSNCGTVKAKLPLSERVYHCDKCGLDMDRDLNAAINIQVAGSAPETLNARGEDVRQTGSSRTMPTPVKHEPSGGASRVRLGAGLGNETMQARTNQIATEHHPRNLRGAVASQLLWAWPDRAANTR

SEQ ID NO: 60447 - protein, 411 aa, unknown
  TnpB Polypeptide
MQTTTLKYRAATTSHGYRQLEQAMLHMGHLRNALIRHRMAASGSHKRRWSLKLQTAHLTDLRRNDPVYNGYSRRLLESTAKRVNTAFNEYFKTPERGKPRTSSPYRCNTLELSEPAVNHLKVSKDGRKGHIHVKGLPRLSFRIDGRLPRKEQPRIIRITRTPRRFNVLLVFNQEIPTVPAANHSVGIDPGVKHLLTAVDESRQVTQIPGLKDQQHRKVMRRLKRRMQRQRDSALKDGRARFTSQKISNGRTKQRFRWTDGPSHNYLKTLATLRRVEQKRQDSLTGLQHRITSKLVRDHQIICIEDTRISNMVRSARGTAESPGTNVRQKAGLNRSILFQGWYGVRQKLKYKCWWYDRDFITVPAMNTSRFVESAVRLTRQTAGRSRSFNVGTAATAPTPTSTRRKTSGARD

SEQ ID NO: 60448 - protein, 417 aa, Euryarchaeota sp.
MKVKRTEQIYIGKNETISKLCHISKNLYNQTNYVLKQQFLKKEKLSSYEDLVKLFQTPSENDEENNYQKLPAQTAQWTIRKVREAWNSFFKAMKTWKKHPEEFKEMPKPPKYKNKNGEFILVFTNQQCKIENGLLKFPKMVGLEVETRLDDVNLREVRIIPRGVGYLIEIVYEKEIMDFAKDKLHRIMGIDIGVRNIVTIGDSISREGIAVKGGVLKSINQYYNKESARLKSISDRQNKDKRLTKRQKRLLMKRNRKIKDIMHKLSKAIVQYAKTRNIDTIIIGHNNGWKQSANMGRINNQNFVQIPFNTLINQIKYKAEEAGIQVIIQDEEHTSKCSFLDNESIEHHDEYMGKRIKRGIFRSKDGILMHADLNAVYNIIRKAFPEAFADGIEGIGLYPRSLSIPEFIGMITSKSGC

SEQ ID NO: 60449 - protein, 374 aa, unknown
  TnpB Polypeptide
MYKSIKLRIYPNKKQEELIIKTFGCSRFVYNYYLDKKIKLYEDKKENLSYNQCSKDLTGLKKELEWLREPDKFSLQASLENLNSAYDRFFKGLGAYPKFKSKKYNKQSYTTKFSNNNIQIFERHIKLPKLGLVKYRDNSFIENKITRVTISKTKTGKYFASVTYEKEEEPLGKTGSSIGIDLGLKDFCIFSNGEKISNPKYYTSLQDKLIREQRKLSRMQRLALDQNRKLEDCKNYQKQRLKVAKVHEKIANKRTDFLQKLTSDIVKNHDLICLENLNVKGMLKNKRLAKSISDVSWYEFIRQLTYKAEWYGKEVIILDRWFPSSKTCHVCGYKKEDLQLKDRSWVCPVCGTDHDRDINAAINILNEGLRLLSA

SEQ ID NO: 60450 - protein, 320 aa, unknown
  TnpB Polypeptide
MLTAHKIELAPTADQVNYFRRTCKTDRFTWNWALAEWNRQFDAGLKPSALKLKKQFNAVKYAEYPWLKEVHRDSHADAFSRLSNAWTKLFNDIKKGKEAHSPMFKRKGRYVDSFYVANDKLTLNERDVKLPLVGKVKLKESPRFVDKLLGATVIREGTRWFLSVQFDALLSVLKSKAEQEVIGVDLNVAEIVCSDGTRYKTPRPLKAMTRRINIRHRRVAHKVEAVKTAVGLGGKAIPKGTRLPQSNNHRKASQMLSRAHYHVGCIRRDFLHKTTTDITRKTQAAVVENLSVEGMTVSAHGTAKKPGKRVKQKAGWHRIL

SEQ ID NO: 60451 - protein, 463 aa, Vulcanisaeta sp.
VGGKRVKRTNVVKLVVDKEMHEKLRDLAVVTAKCWNEVNWLRMQQFKRGERVDFAETEKEVYEKYKHVLKVNAQQVARKNAEDWRSFFSLIKEKREGKLPKWFKPRPPGYWKGEDGKYKLVIIIRNDRYVVDEDKRIIYLRDFDLTLRFKGKLKWHGRQGRLEVIYNEARRSWYAHIPVEVEVVAEAKGNLRAGVDLGIVNLATVYVEDGTWYIFKGGGVLSQYEYYSKKIRRVQKLLARHGQRTSRRLRLLYDKRSRFLKHALNSMVRKIMGELREKGVGEVVVGYPKDVARNHGNKLTVNFWNYGYTIRRFKEVGEELGIRVIDVPEPNTSKDCSLCGDAHEGGRVERGLYKCPRMGKVINADLNGARNILHIPESLGSVSRGQLTVRDRGNGLKTQPVVYRWTSRAGWVRTAPTSNEAMRMKAVNHKPMNRPKGTPTLQDGEEVSSALARGGRRLCGILS

SEQ ID NO: 60452 - protein, 382 aa, Vulcanisaeta sp.
MTARRAVLIKLPRDKCDVDYVKRLMALANLAYRGYEVWVPNMPRTIQHQLYDFRDFKDSLVFGTTPKRWFAETWVPLKTLRIYQDGSMKGDKGAPVALDFEDDVIRLRQVCRNEHRYVVEVPMPRWVIERVNEGGDIKYAMIGLENDEPYLALVAERVVEPYQPSNYMLAIDVNAWNNGITWGLIRDGRLVKWKPERPNLSEIDGLYDLSMRLSREYGRLKRLGLHRTVEGRRLWRNIKKVRRKIYAKLRDYAQKLVHRLVRKALRHKALVIIDDMIEESRRELIEEKIPRGLRKVYLAETRRFVKLLITQLRWYGVPYEFKRLPSTICPVCQHELTQLPDRTMACTNCGFKAPRDKIPIHWAIKSHQEGDGKNNPPPLERR

SEQ ID NO: 60453 - protein, 387 aa, Frankia sp.
LPIQFLVAPGSDPWSWCEPEGVGSCERSRVLHRAAVVRCRVPRSHRRCCRVTTLQAFRFALALAPTPAEHAGLFRHAGAARFAFNRGLARVTAVLAQRDAEKSYGLHDDVVSPVPWTLAALRREWNAAKSTAAPWWAECSKEAYSAGLDQLARGLKNVTDSRSGKRRGRRVGFPRFTKRARASFRYTTGSYGPDGDRHVKLPRVGRVKVCEPMGALTGRLADGRARPLGATVSRTAERWFVAFTVEVDRQVPTGPLPRQRGAGPVGVDLGVKHLAVLVTGEMIPNPQQLAASLRRLRTASRAHARSKPASVGRRRPAARLARLHAQVASQRRDGLHKLTTRLATTHDAIVVEDPHLAGMVRNRRLARAVSDTAMAEVRRQLGYKTGW

SEQ ID NO: 60454 - protein, 450 aa, unknown
  TnpB Polypeptide
VSQKVRIDGVKHVGASVFLGVDHCGNPRWTRNPERVMVWLCDGWRTRFNQRREQRPHNVSVKDEAGGIIDWVKEPLGGPDVADLLSDKEARLRCSWMAGIPAPILSSTDRIENTEWSAGLKRKKTIGGRVPGFKSRHRGLGFVCWRNASKTGNALFHQTGRKSGVVAITGMNPTGWVRPGERAHWRVIIHVRVSQPIRPYTSVHVDWTHRTLVFVNMPLPLPRTGNGEVGIDRGCVHTLALSDGILMDMPKPSKAELKRLKYLQRRMSRQDRVNEARGGRTAKFESKRRRRTLSEFNALNGRIVRRRNDWIEKTTTSLAKANVLVAMEDLDVKTMTKRPKPKPDPDKPGQYLHNGARVKAGLNRSILSNNWSRLMTRLKDKMDANGGRLVVVPAAYTSQACHKCGHVAKENRESQAVFHCVECGYEANADVNAAMNILGRALNQTGGGTA

SEQ ID NO: 60455 - protein, 536 aa, unknown
  TnpB Polypeptide
MNEKEYKKSLRQFHKHSDRHILVVETDMSFSDIQKVVALSDKIRKAGNELVGLMRKNYDQLIRTKRYRKVRKLYGATEEKKKRKVLASQLNEMQKQYHVTWDDCRTSMIPIGKKYGIDAIFALTKAEDIWRGIEKCLYANGKTLHFSKYGVLPCIRAKQRNRGIPISVKENQLQFKFGKSTFGIQRKDRFQSDEIHAVLDYLAEPEIIDKKAIQIFAEKAYCINTYRPCYATLVPKLIRGKYRVYLHLTIEGKAKPKYDRFGNPRHKFGKGIIGVDIGTQTVAYTSDTEVGLKNLSERGNSIQKSERLERLYYRAMDRSRRATNPQNYNEDSTIKKGRKIWNYSNHYKRLKAKHAELCRINAKNRQLAIKEDANSLRSLGDVLITEPKNASKLMKRAKETTKNKKGKFNKKKRFGKSIKNRCPGGFQTTIEKKFEVSGGRYIEVPSNYSASQYDHTADAYVKKKLSDRMYHLADGTLVQRDWYSSFLLYCYDDKIEEINKTKCRAEFEKHYKREKALIEWIQANQIKILNSGIKTA

SEQ ID NO: 60456 - protein, 233 aa, unknown
  TnpB Polypeptide
MLAVDLGVNTDAVCSVMTKDGTIHARKFINFAGDKDRIYHTLNKIKKVQKYSGSQNTKKLWRYARFHNDELARKVASKIAETAIEYQCDVIVFEHLDTKGKKNGSKKQKLQMWKKNTIQKIVEQKAHKDGIRVSHICAWGTSKLAYDGSGYVLRGTEAGNRSYSVCRFPNGKTYNCDLSASYNIGARYFIREIQQNQSVKNWSVITAKVPECQKRTQCTYNTLLKINALDLAS

SEQ ID NO: 60457 - protein, 417 aa, unknown
  TnpB Polypeptide
MKQQTLLPLEANKQKVFKKAFQYEFYPNDEQKVLLAKTFGCVRFIYNRNLALTKTYYENYVKANEMYKNGLIKTQPIRPIITDYVLSANVAQIKSDPELSWLYEVSSVALQQTAIDLNTAYSKFFKHTSKFPKFKNKRDKQSFRLVGKAFKVDMETGLMFLPKSKVGIKLSYSRKLPCEPSRVTISKLPCGKYIATFLCEITKDKTNGQGKTGIDLGIKDFATLSDGAKISNEKYSDKSKKKLKRLQQSLSRKQKGSNNRNKTHLKVAKLHYHIAQQRKDFQHKLSTKLINENQVICLESLRPSNMIKNRKLSRHIADASWSSFKDMLAYKARESQHCNVVFVDPFYPSTHTCNTTGLKLDYKLKLSERAWKCPHCGETHDRDLNAARNIRDEGLYQLAVHDPKSVLTGTCILTSRH

SEQ ID NO: 60458 - protein, 432 aa, unknown
  TnpB Polypeptide
MDRQSARKLTKTKRQSQTCKVYEVKVDRSHLSQKSLDHLSSLFREAKWFYNYCLSLENVNKADYTAKSVPVKVKDEFEERKFTVLKGQMKQSIKTRTFGSIKALSTLKKKGKKVGRLKFKSRVNSIPLVQLGTNKHSGTYYIDKDRSRIRIQGMTQWLRVRGLEQIKDYVDIANATLVRKCNDFYVQITTFEDKEERLVPDASIGIDFGCQTQLTFSNGIKAEFQVTVSERLRRLDRRIDKKVDGKVGKNRPSNNRRKLQQKRHKEYERITNKKKDIRNKIVSVITKNYKYVCFQDESIHAWSMGGHGKKIQNSGIGGIISDLKHKSHTPVMVDKFFPSTQLCPQCGALNKLKVSDRIYECGCGFVEDRDIKSAQCIETEGMRTLELPMDRRDIKLEENVSSTFFNFLSNIGGIKASKMCSMSQEATGLAPS

SEQ ID NO: 60459 - protein, 432 aa, unknown; identical to SEQ ID NO: 60458
  TnpB Polypeptide

SEQ ID NO: 60460 - protein, 407 aa, unknown
  TnpB Polypeptide
MLRRQAYKFRIEPTGEQQRLMHRFAGSCRFVFNQALALQQANREAGGKFIGYVAMARQLTAWRNSTETVWLKEAPVHPLQHALKDLDRAYQNFFEKRADFPRFKRKGQRDSFRFPDSKQFKLDQGNSRIFLPKLGWLRYRNSRQVLGTLKNVTVSLSAGHWYVSIQTEREVAVPLHAAPLAVGIDLGVVRFATLSDGTVYAPLNSFKRHETALRKAQQAMSRKVKFSANWKKAKARVQRLHARIGNARRDYLHKTSTAISQNHAMVCIEDLQVRNMSKSAAGTTEQPGRNVRAKSGLNKAILDQGWFEFRRQLDYKLAWRGGWLVTVPPQNTSRTCPCCGHVSADNRQTQARFACVECGFEDNADVVGAINVLRAGHARFACEVSGEVMPPAAGTHRSDSGAAQCRA

SEQ ID NO: 60461 - protein, 451 aa, Glycomyces sp.
VTQAYRFALDPRPDQVEAFLSHCGGRRFAFNHMLALVKANLSQRDAERSYGLAETDLTMVPDWSAYGLRKLWNRRKAAAAPWWRENSKEAYASGCADLAAALRNWTESRNGRRAGRPVAFPRFKSRRSRLSCGFTTGIIRIEPDRRHVTLPKLGSIRTHESTRKLARHLDRGTGRILSATLSLGRGGRWFVSFTCEIERADKPLKRPAAVVGVDLGIKNLAVLSTGESVPNPRSLEEARQQLRRSSRRLARRRAPDPKAGIPGSGRWERARRDLNRLHAKVANRRADAMHKLTTRLASTFGTIVVEDLHAAGMLKNRRLARHIADASFGEVRRQLAYKTAWRGGNLVVADRWLPSSKTCSGCGAVKAKLRLSERTYRCGHCGLVVDRDLNAARNLANLIAGFDLELPGEEKTARQKPRKTSPAGSGIAAGRPPDREANADTARRRLDFRVL

SEQ ID NO: 60462 - protein, 432 aa, Helicobacter sp.
MLRLTHKIELSPNNKAKTHFKKAFGCARLAYNWGLAKWKENYQKGIKSNHFALKKEFNTLKKEKFPFVYEVTKYATARPFTHLNLAFQKFFKDLKLGKLSYPCFKRKREHQGSFYIGGDQIKIIQGGTKDYLKIPNLPKIKMTERLRFKGKINGATITQRGSKFFVSIQIDTPQEEFNRTHKPIKNNHTLGIDTGIKAFASLSNGLQIQAPKPLNRLTRRLKRLSRQLSKKSKHSACLPKTKGREQNAPHTRKSANYLIATLCLNRLHTRIANIRNDFLHKLSTALIRHAEVLCLESLKVKNMLKNSRLAEALSDVSISAFNTLLDYKARYYGRTILRAHTFYPSSKTCSSCGNVKKDLSLRDRVYYCSACGMAIDRDFNASVNLVKHLVGGVPTEFTPMDMTALLGCFAKNGLVTSMVEVGIQQKPLNAVL

SEQ ID NO: 60463 - protein, 387 aa, Rhodococcus sp.
LYGAGVQLRYRYRVYPTPGQQDMLVRSFGCARVVFNDALRARQDAYAAGVRLSDTAVQKQVVTEAKRTPARVWLGEVSSVVLVQACQDARRAYRNWFESLSGKRKGRRVGAPRFRSRKDTRQSVRLIRNGFSVRDNRTLYIAKVGELKVAWSRELPSEPSSVTVIKDSAGRYFASFVVETTDEPMPELDSEVGIDLGLTTFAVLSDGKVIESPKFFRRAERKLRKAQQNLSRKEKGSNNRAKARIKVARAHARVADARSEWAHRQSTMIIRENQAVFVEDVCVAGLARTRLAKSVHDAGWAMFTRMLEEKAARYGRVFVKVDRWFPSSQLCSVCGVRDGRKPLSVRVWTCLGCGVVHDRDLNAARNILAAGRAERRNACGETVSLPA

SEQ ID NO: 60464 - protein, 345 aa, Haloarchaeobius sp.
MEVVRNIQVKLDVSNEGAEVLDETFEQFRQAAQHVADHGWNDNPYNITDTKNTLHKETYSDVRDELSLQSSLVQSARNLAATALGNCKDRKFDGERASKPEFKGTVVVYNGRTITYNDDHVSLATTGKRVTAEYVTPVNEEGTPFEDYWTDEWEKREATLHKRNGTYYLHVAVKKDVEPSCDEESENGVVLGVDLNVDGYVAVTSTGAFLGNADYLNHRRDEYERRRGNLQQTGTRSAHLTIQSVGDRFARWSADYLHRISKALVQEAVENDCTAIAFENLNHIRKRISNASKFQQWAFKELQRHVEYKAEEHGIDVDDVNPAYTSQRCSHGECGFTHEKNCRVE

SEQ ID NO: 60465 - protein, 373 aa, unknown
  TnpB Polypeptide
MSIKTLLSVSLLKLQRTIHAKLILDREGKRQAVEREYDAWQRQLHGNDEQLYSATKQQAERLKTKIRKQQEQAAKQLETKRKKQRRVRGINPLKEYPMTLRRDLVKLQEQKASVFKWWIRIPVSPKSIWVPIQLPYEQESLLKYDLRECKLLHGEDGEWYVNITMQKEARLKRKYAQILPIDMGVRKLATTIEDGKPQFYGKKVRTIRGRGYHLRRSVGKPSIIRKWKHREQRAVQHQIHTITRRIVEHAKRMNAVIVIGDLAGIRNQSKGKSFNRRLGSQPFYMFKQYLTYKAAWEGIRVLTVPEAYTSQTCSRCGVRGQRVAGRFSCQNCGLVCDADVNGAWNIAKRAHGLLAHETGGLLTVPRTLAECEP

SEQ ID NO: 60466 - protein, 369 aa, Bacteroides sp.
MEYAYKFRIYPTAEQEDLILRTFGCVRFVYNYYLDQRMQAYKKTGKSPTRFEQDKELTRLKRKKETNWLREVDKCALQNALKHLDAAYKNFFRGVRQGIRIGYPHFKSKKSRYQSYQTNSNIKVLDKAVQLPKLGRVKCRISKEVNGHILSATVSRNPSGKYFVSLCCTDVDILPVPSSGATIGLDMGIKSFAVTSDGVEFTNPKYLSKSQKKLARLQRQLSRKTKGSNRWEKARLEVARLHEHVTNQRKDMLHKLSTDLVRQYDVICLEDLAAKNMVRNHRLARSIADASWGEFHRQLEYKAVWYGKRVVTIDRFFPSSQLCSSCGTQWSGTKDLAVRKWVCPVCGASHDRDLNAAKNILNEGLRLLA

SEQ ID NO: 60467 - protein, 334 aa, Halomonas sp.
MVAPPALQAKYDRDHSAALLLNLGISTTGQAEFLNRQFGTVRFCYNTGLRIMSHRYKRHGQSLSAKHDIKKLLPVAKKSRQYGWLRDADSMALQQALINLDKAFQRFFDPKQAAPEPIQCVEGSKIIGLDIGLSHLAIDSTGRKVANPRFLKKAQKNLKRKQQALSRTKKGSARRAKARRLVAKAHERVANARNDFQHKLSRQIVDDNQAVIVETLKVSNMMKNAGLAKHIGDASWQALTTKLDYKAKEQGKHLVKIDPWFASSKTCRVCQHKMDAMPLNVRSWECPACHTLHDRDVNEALNIKHQGIIKLKAEGLSVSAHGGSRKPGMSPVAA

SEQ ID NO: 60468 - protein, 422 aa, Streptomyces sp.
VSSVVTYTKRSRVTATTRKEVGRIIRAYRFLIRPTVGQAAALSAMLADHCSLYNGALQERRDAYRHASKTSIKYGMQSAQLKDIRAFDPERQGRWSFSSQQATLRRLDKAFAAFFRRIKSGETPGYPRFRGVNWFDTVEFPKDGDGCRWDSTPYDPQTRVRFQGVGHVKVKQHRPVVGKVKTVSVKREGRRWYVVLTAEQAQPGPLPATGAVVGIDMGIASFLTTSDGEHVANPRHGRNAAAKLGTAQQALSRCKRGSKRRRKTVQKIADLHRKVRRQRLDHAHKTALDLVREHDLIAHEDLKIRNMAKTVAPKPDPKQPDTFLPNGASAKAGLNRSISDAGWGVFLTILHAKAESAGREVIAVDPRNTSRTCPECGHTSAENRPTQEKFHCTGCGHRAHADVVGASNVLRAGLARRQAHPA

SEQ ID NO: 60469 - protein, 433 aa, Clostridium sp.
MFAIVNCDILILKGKGVLKLYLTIKQQVKNLNKNEYLTLRELSHIAKNLTNEALYNIRQFYFREGKILSYNENYKILKNSKNYKLLNSNMAQQIIKEVDGSFKSFLELLKLSKKGEYKESVRMPKYLKNDDFATLIIGFIRIKNNKLKIPYSYKFRENHNYIEIKIPAILENKSIKEIRIVPKAKARFFEIQYIYEVVETQMKLDKNKALAIDFGINNLATCVTSDADSFIIDGKRLKSINQWYNKENSRLESIRVNQGYINKTNRQNKNTLKRNNRVNDYISKAAKLILNYCIDNKIGCIVCGYNLNFQKKNNIGKINNQNFYNIPFGKLYKKIKYLARLNGIKFILQEESYTSKASFLDRDFIPQLDNINSTKVEFSGKRIKRGLYQTKYGKIINADVNGALNILAKSKVVSLDRLYCRGELKTPLRIRIN

SEQ ID NO: 60470 - protein, 381 aa, unknown
  TnpB Polypeptide
VNLGAVDKQYAVIENNPFLDGEIILKMVIQGEWYRLIFSFDNNRFTEGKVTLPVIKVEDGTPVFIFTVVTDNPVVQFSGDYTIGVDVGITDYATVVVREVATGRIVYETTLSQRVHSLWNSVQASEQQVRFLKKKSDNLLPHRQARMSALDEAQLHREAASRKKRELAILASQEIAYLSHVWGNAVVAVEDLSWVANTMQNGRWNRGELVRWLTHYVTQNGGWVVAVNSSNTSQLCHKCGAKVTHPTHKDSVCPEHGTMDRDINAAVNIASRAVPLVTKARVTRAKNRKIGPQAALRTPVARNSLKHPGRDRTKNKPTPKRKNHRLISKGVILPSCPARAQAVCLVAMVLADQVARSALGTVQAALKQGNKTYEYRLCSLI

SEQ ID NO: 60471 - protein, 399 aa, unknown
  TnpB Polypeptide
MLIFEYKVDASKEQSSAIEEAMRVVQFIRNKCLRLWMDERGISKNDLQCYCAVLAKDYPFARSLNSQARQASADRAWFAISRFYDNCKAHKPGKKGYPRFQHDNRSVEYKQTGWKLEPDGKHVTLTDGCGIGRLRLVGNPKQQIAAFPTEQIKRVRIVHRADGYYVQFVIKAERCIVHQPTGKQVGIDMGLKAYYTDSEGKTVDNPRHYRKAEQKLKRLQRHVSRKQKKSANRKKARKDLARAHLQVQRQREDFARKTASTLVSSHDLIAYEDLQIRNMVKNHHLAKSIHDAGWGTFISWVKAYGVAHHIHVIAVAPHFTSQECSACGTLVKKSLSVRTHICPSCGFVLDRDHNAALNILAKARACTLGHRETSGSPENASGQTASTCTPKRATGKRAG

SEQ ID NO: 60472 - protein, 248 aa, Photorhabdus sp.
MLRRLPGLTGAVRIIPSHYASILCNDGAEARVKPTRISGVTGLDMGLTHFAIKSDGNKVPNPRHLINASCHLRRKQKALSRKKKGSANRRKARIRLAAVHERVASARADFQHKLSRTIVDENQAVIVETLKTANMMKNPRLARAISDAGWNGFITKLEYKAAEKGVHLVKLDQWFASSKTCHCCGHKMPEMPLHKRIWSCPECGVEHDRDINAALNIRRKGIQELQAAGLVVSAHGGQRKSVTQTVAA

SEQ ID NO: 60473 - protein, 409 aa, unknown
  TnpB Polypeptide
MRVLATARVKAVAPDPSSLYKLIQFLRAYRDWIQYVVDEIWFDKRIPSMKGLHHRFYNMLRKHGFRAHHCHKIERRAREIVKAVKKNKGRKPVLRKLTARLDYQDYKLVLNSKRIKIAVLNNEWIELELIWYDYLGRYFNGSWKLKEISVSYKYGTIWVYFTFQKEVVFRQPRAVMGVDINFGSIAYTIIDMKGRLITMGTIPFNGLRRALTHKIIVEKIQRKYSRKWRYVKGIREAIERHGRRARNILIDSCHYISRRIVEIAKEYNAIIVLEDLNKLRSKASNSRKFNKKLTLWTYSRIQSYIHYKALIEGLNIVYVNPRGTSRTSPLGGKLIFINYRWVKLSNGYIITRDLIASWNLALRGLKLLTRDVGPRGSMAAPKAPDQMQPQEGMKGKPVQVSIISKIPKI

SEQ ID NO: 60474 - protein, 345 aa, unknown
  TnpB Polypeptide
MQAANAVCDHISAWAWENQTFQQYPLHKGQYAAQRGASGLTAQVVVRAIAKVADAYKLDKRTQRTFQPTGAIAFDDRILTWYTDKGQVSIWSIDGRLKLPFVCGAYQRGLLAFRQGEADLAFVGGNFYLMATVSIPDPPLVETDGVLGVDLGIVQIASDSEGRQYSGEPVKVCRRCSRTHRSGLQKTGTKRAKRTLKKMSRKASRFSRHVNHVISKQLVQSAHSSRKALALENLTGIRERANGFSREMRWQMGNWAFDQLKNFVGYKAKMAGIAVFLVDPRNTSRTCSACGYCDKANRQSQSQFLCLQCGLRANADLNASANIARKGLEARGAIVRHPIVAPIRG

SEQ ID NO: 60475 - protein, 583 aa, Escherichia sp.
VKRLQAFKFQLRPGGQQEREMRRFAGACRFVFNRALARQNENHEAGNKYIPYGKMASWLVEWKNATETQWLKDAPSQPLQQSLKDLERAYKNFFQKRAAFPRFKKRGQNDAFRYPQGVKLDQENSRIFLPKLGWMRYRNSRQVTGVVKNVTVSQSCGKWYISIQTESEVSTPVHPSASMVGLDAGVAKLATLSDGTVFEPVNSFQKNQKRAAFPRFKKRGQNDAFRYPQGVKLDQENSRIFLPKLGWMRYRNSRQVTGVVQQSLKDLERAYKNFFQKRAAFPRFKKRGQNDAFRYPQGVKLDQENSRIFLPKLGWMRYRNSRQVTGVVKNVTVSQSCGKWYISIQTESEVSTPVHPSASMVGLDAGVAKLATLSDGTVFEPVNSFQKNQKKLARLQRQLSRKVKFSNNWQKQERKIQRLHSRIANIRRDYLHKVTTTVSKNHAMIVIEDLKVSNMSKSAAGTVSQPGRNVRAKSGLNRTILDQGWYEMRRQLEYKQLWRGGQVLAVPPAYTSQRCACCGHTAKENRLSQSKFRCQACGYTANADVNGARNILAAGHAVLACGEMVQSGRSLKQEPTEMIQATA

SEQ ID NO: 60476 - protein, 374 aa, Kroppenstedtia sp.
MIKACKIRLNPNNKQRTQLEQSAHVARWAYNWALNQKKSHYEETKKSYSQGDLRKHLTKLKKTDEYKWLYNFSNNITKQAIKDCDEAFKRFFKGLAKFPRFKSRRRSKWSFYNDPYKVKLEPTRIRLEKIGWIRLAETDTLPENFKPLSYRIGREGIHWFVSITVEVPEYVDHSKPTNQPIGIDLGIKTLATLSTGKAYKNINKSGKVKRLEKRFKRLQRRASRKYQMNKEGNGYRKTRNLIKLEKSIAKLRSHINNIRKDYIHKMTTEIVKTKPSHIVIEDLNVKGMMKNQHLAKHIQQCNFYEIRRQLEYKCKWYNIELVMADRWYPSSKTCSSCGQIHKGLRLSDRWIKCDCGLNLDRDLNASINLAKLAS

SEQ ID NO: 60477 - protein, 476 aa, unknown
  TnpB Polypeptide
MAKTEKPRGVQQMLLHPDKETKAILEYLCEQSGKLYNMGVYFARQVFFKRALLLTGKFDLIYEPSIGKSQIAQSLPSTPAQQTLLSVAEAFKSYKGLRQAWFKGRLPNRPKPPGYLKGSKLFKIAYPNSGGQKPKLIGGQLQFSLGVTVRRWFGIDSFRLPVPTNLDVTKVKEWTILPKNGVFYLEASYEIPKQKTFVGIDDQALAIDLGTTDNLAACVDTLGNSFLIDARAMKAFNQYWNKQVSTRKEGKPQGYWDGWLDRVTRKRNHRLKDGINKAARLIINHCLKYGISKIVLGWNEGFKNNANIGRLNNQKFVQIPLGKLKDRLQQLCEIHGIHLEVTEEAYTSKASYLDGDSLPKFGEKPDGWKASGRRVKRGLYRNRNGSIVNADLNGSANILRKVARKLGIDLNRLGRRCLTTVARVRLWELPQSTLSAESPRMRDRGVSRHNDSRVGSLLAVKGEMTKAKAVPPELDN

SEQ ID NO: 60478 - protein, 476 aa, unknown
  TnpB Polypeptide
MNEKRKQRKQKKHVTVGEPYLVTKAMTHIRLVEVNPGKLAALDALAPVYLALCQQYVTLFCTQERPNKVRAPLYATPLSERWHRVTIMQAAGIAQSWRSNRAVAYQQYQNELAQYQKQQTDEASTTKAQAPRWREWHVPTLREPCLQANVNVVKLEASQDSTYDYWLTISTLEKGHPIAVPVKLAPYHKAALTDPKTGQTRKLNSSVQLNQREGLWWLMLSYNEEVTVQTPPDAPVVGIDVGIANFVTTSTGKHYGSFHKNLRARHKRDRAKRRRKAKLRACLKKKRVKQLPSTSSRSGGRLIRHVKQAINHAVNQCFTDPEHEGVQFAYEQLSVASMRFKARAQNAYLRASHLGQIPRQIRWNSQKRGVVATPVISAYSSQECSVCHYTDRKNRPEQRTFRCQVCGFEAHADHNAAINLSRRVGDTQLRACRDRTAIKTVLMQRHEAWKQQQGMGNSSPVKRRKRGTPSTSTSSI

SEQ ID NO: 60479 - protein, 566 aa, unknown
  TnpB Polypeptide
MVKRTNKPATIDRSYPQKPLANKGKVSRLWDLLLLYRKDAEIINKFQKRLFFEEFRANKNASKPKSSLFINYRGTERYRQTQQYQVVYQIDGFLGRLKKEFTKIVFKSSLDDSLKHKLCYINKAGLWLVPPKKWKSTVTKKLSSKTGLSIEDVAKTAKTIFKRLLKRNTWPTCSNWLTMALDGKVAIISHKGGRIGQSKKQGTAKIADYWIRVSNYQKGKPIHVPLKTYKRFIDAPGRRSNNLTISFNKEGSLKKISFIRGRLKKPKKPLPDVAKFLRIDVGLNTQIATNYGDLLGQDYKKQLDYYDKIENDLKEELKKRKLDYWKNKRWKNISRIRTEYIKNETGRNVNKLIKIHRPDIIISEGLNWQGCNFSSKQNRHLHRYGQGVMERKIDRFIEEGLLNNHIKKNPAYSSKMCNSCIYIDAKNRNKDVFRCRVCGHRAHADCNAAKNQELGSSKVTDSTEKVLRELVAASVIRLRKMPLSQEAIASILDNPYYSSYHKDFLGNQRAEDSSRGKSLTLEKEGSPHLARLEHLPADRSENNICGGRPVVGYDSGSQLTPVKQVS

SEQ ID NO: 60480 - protein, 381 aa, unknown
  TnpB Polypeptide
MNKTIRKAFKFRLKVNAETDQKLKNYTGGCRFVWNKALALNLERLNQKQPILRYDALDFWSKLWKQSDEYGFLKDLPSQVLQQKLMDLDKAFKDAFDKNQPLKRIPVFKRKGQSNADKIRYPQGFKIEQQTNRVFLPKIGWVRYRNSRKIIGTPKNVTVSRKGKHWYVSIQVEYETEIKPHQSTSAVGIDMGVKRFVTLSDGVFFEPLNSFKKSAEKLATLQRKLSHKKKLSKNWFKQKAKITKHHEKIAAARFDYLHKISTQICENQAVICVEDLKIKNMSKAAKLKNIRQKSGLNKAILDQGWGMFFEMLEYKQDWNGGILIKVPPQYTSQECPRCHHIAKANRRTQAEFVCVECHYTNHADVVGAINVLTRGLSGASL

SEQ ID NO: 60481 - protein, 389 aa, unknown
  TnpB Polypeptide
MAVRKVAQRIPFTPSKTQAALLEQCFGARRFAYNRQVEAFNSYDKETNPRPKYPGVTDMKNANEWLRDSPVPSNALGNAIQDFRKTQAAYFRKAEYGKNRPRFASKNDSVQSFRNTMPMRHVDGNRYPLSRKLGSVRIRRRDRIRYPLESLSSWTVKRENGVYYLVLLFNVDVQPKPPVSGEVGIDVGVKDFLTLSTGEKVNYPDRLRQLEEKVRWEQRKLSRRVKGSSSYRKQKAVVAKAYAKARYFRENFQHQLSHRLIEDNQFIGMETLAVGNMTRRAKKRLDANGRYARNVQSAKRVMNRSILRNGWSSFVDKITYKAQWYGRALVQVDRFYPSSRLCHNCGYKYDELRLSEREWVCESCGVSHDRDVNAAMNILGEALRISQTG

SEQ ID NO: 60482 - protein, 376 aa, unknown
  TnpB Polypeptide
MFRTVKVVLPFEQALLQTAIAFNKACQIVLDYGSKHKVYNKSVLNKATYQQVRKEVPNLPSALVQTARDEASETLLRTTFAAAVKKRLSVRYDNRCFKFYPESNYASLTTVFGRLNFPFKHYAYMDKWRGEYTNAQLIVRRNRVFLNVQVKLPDSPSKVTGKVLGIDRGILNVAVCSDNTFFNSKRLRAVKGRYQFLKRRLQYVGTRSAHRKLRELSGRERRFVLNTNHCISKAIVNKPFDVFALEKLEIRKKKKNGKRFNRKLGLWSYGELQRFIGYKAEAQGKIMVFANPRHTSQRCSRCGFVHRWNRHGLGFRCGNCGFSLNADLNAARNIEVLGKSEYLRLFVNEPIVASCETLPKGIADDSYKPPLSRGGS

SEQ ID NO: 60483 - protein, 402 aa, Escherichia sp.
MKRLQAFKFQLRPGGQQEREMRRFAGACRFVFNRALARQNENHEAGNKYIPYGKMASWLVEWKNATETQWLKDAPSQPLQQSLKDLERAYKNFFQKRAAFPRFKKRGQSDAFRYPQGVKLDQENSRIFLPKLGWMHYRNSRQVTGIVKNVTVSQSCGKWYISIQTESEVSTPVHPSASMVGLDAGVAKLATLSDGTVFRPVNSFQKNQKKLARLQRQLSRRVKFSNNWQKQKRKIQRLHSRIANIRRDYLHKVTTIISKNHAMIVIEDLKVSNMSKSAAGTVSQPGRNVRAKSGLNRSILDQGWYEMRRQLEYKQLWRGGQVLAVPPAYTSQRCACCGHTAKENRLSQSKFRCQVCGYTANADVNGARNILAAGHAVLACGGMVQSGHPLKQEPTEMIQATA

SEQ ID NO: 60484 - protein, 362 aa, Paenibacillus sp.
MLHHKAFKYRIYPNKAQHALIQQMFGCCRFVFNHFLHLWNDTYAATGKGLSYNSCATQLPALKKDRPWLKDVDSIALQSAVRNVADSFDRFFKKQNQAPRYKSRKHPVQSYTTKYTNGNIAVNNNQIKLPKLGWLRFANSRTLEGRILSATMRRNAAGKYFVSIVCEVEIQPLPQANKHIGVDLGLKEFAVCSDGLRIANPKVFRKHEQKLAFWQRRMARRNKGGSNWQKAKQKVACIHEKIANVRHDFLHQLTTKLIRENQTISIEHLRVANMMKNHKLAKSIADASWSEFQRQLTYKSEWHGRTLKVADTFAPTSQTCHVCGFVHKEVKNLKVRQWECPSCKTLHDRDENAAHNIKKVAV

SEQ ID NO: 60485 - protein, 368 aa, unknown
  TnpB Polypeptide
LENEQEKMIRQSTVNLSYGNMDKISQIRDFLSRYTEAVNKFIDLLWNIQRFYGSFVEKKLVDQIDLSLTFAAKQSAACTALHIVKSQWKKKNKIKPTFSGRSFNLCQSFVQIQEGSNSFDLWIKVGRTGHKPGEKCIPLLLPTIKHKHYRKYADWTQKKSIRLRIADDGRLFADIFFEKEAPTKKEEGAIIGLDCGYKKLAVLSTGQRVGEHLVQKIEKIARKKQRSKAFKRALQERNDYISREVKKINLSDLKAIVVENLKNVKHKSKGRIHHKVMNKLQRWTYPYFLNRLEQIAEISGVLISKVNPAYTSQKCEKCGSIHKENRVGELFLCKECGYTQDADLNASRNILNRFLTGETFEPCLEDSV

SEQ ID NO: 60486 - protein, 239 aa, Catenibacterium sp.
VKEIRIIPKADARFFEIQYTYEAECIQRNLNTTNALALDLGINNLVTGLSSKGETFIIDGRRLKFINQLFNKENARLQSIKDKQHFGKKTTNRQKALARRVIDYCIDHDVGTLVVGYNETFQKDSNIGRRNNKTFINIPFGLLRDKLEYLCELNGITLVMQEKSYTSKASFWDKDVIPVYKSDDTEEHHFSGKRIHRGQYRTASGQVLNADVNGALNIMRKSSVVDVNILYSRGEVDTQ

SEQ ID NO: 60487 - protein, 372 aa, unknown
  TnpB Polypeptide
MEIYRAYKLCIKPTKAQTTAIENTFQCCRFVWNHFLERKSKAYKRRGENLSYYDMGKLLTEMKVYLPWLGKCNRHALEFTIQHLCNAYDGFFRRCKKGKGKVGYPKFKEKKNPKQSYTTNGSVIVTEKFVQIPSIGKVKRGKDKRVVVGVPINVTVSRSASGKYWASVLCREEVKPLPLLSTEAGIDVGLHVFAADSNGNTYENPHCLIYNEKRLAREQRKLFRMHKDSSNYKKQRLKVAAIHEHIANQRRDYIHKLSRKFVNENQVIAVEDLNIKGMVKNHKKAKAITDVSWGGFFRMLEYKSQWAGRTFVQIDRFFPSSQTCSFCGYKNVAVKDEKVRAWTCPKCGAHHDRDINAAINILRKAKETCATV

SEQ ID NO: 60488 - protein, 387 aa, unknown
  TnpB Polypeptide
MFVFWYNGHMKAYITRQLKIGKTEQLDNLAHESGNVYTQTVVMFWRIVRRKGHWMSEYAMKRFIRNGALHSQTVQGVIETFYESLSSWRKLRLVNPNAHPPRRRRWYHAIPYKESAIKLADGMLRLSNGKGNEPIIVPWCWDKPKFCEISFNGEEYVINATYAVEIQGKAKGDGTAGIDLGEIHTAVVATGKRVIIANGRVLRSKRRYQNKVKAHFQRKMDKCKKRSRKWKRYNKTKNRVLRKLNNQINDILHKQTTIIVGAIITDGVQTVGIGDLRDLRQNVDYGNKANQRIHQMSCGKARQMLTYKAERAGLTVKLIDESYTSQTCPQCGVRNKSGNRNYKCPICGLKYHRDGVGAVNIRQKTMYQGLVPVVGEMAPPVGIRYTA

SEQ ID NO: 60489 - protein, 262 aa, Bacillus sp.
MKQYKPKEFSEMLNVSVKTLQRWNNQGVLTAYQNPKGRYFVSVLCELEEMATKLALNKIGLGIDLGVKDFATRSDGIVHENINKTIKVKKIEKRLKREQRSLARKFENLKKRGEKSVTNRRVNIDKNVLRVQKLHARLANIRIEYVKSIVTNVVKTKPTFITVEDLNVKGMMKNKHLSKTIAKQSFFTFKTWLLTKCEEYGIELRQVDRFYPSSKLCSCCSQKKADLKLSDRVYTCECGNVMDRDLNAAINLLQAKEYTILT

SEQ ID NO: 60490 - protein, 387 aa, Dorea sp.
MVKAIKVMLIPNNVQKTKMFQYAGASRFAYNWALAREKENYEKGGKFISDSELRKEFTKLRHSEEYAWLLNISNNVTKQAIKDACTAYKNFFKGLQKFPRFKSKKRSMPKFYQDNVKIQFSNTHVKFEGFSSSRKANKQKMNWVRLAEHGRIPTDVKYMNPRISFDGLNWWISVCVEFPDCKETLNDDGVGIDLGIKDLAVCSDAVKYKNINKSQKVKKLEKQKRRLQRSISRSYEKNKEGESYCKTNNVIKKEKLLLKRNHRLTNIRKNYLNQTISEIVNRKPRFICIEDLNVSGMMKNRHLSKAVQEQGFFWFRKQLEYKCSDKGIQLIVADRFYPSSKLCSCCGNIKKDLKLSDRGYRCACGNIIDRDFQASINLKAYGERFAS

SEQ ID NO: 60491 - protein, 454 aa, Oscillatoria sp.
MSAWLDMLRSQYNWSLNDRINQYNQQFIQGDYCDLRTQSKACPLTCFVSKNGATGNPWKDSKVDKEGKIRNPRRSAGDIQITALPELKVSRPWYAGIDSTVLQQNVKRLDTAYKNFFDGRGFPSFKNRSNFKSFTYTMGVKIQGNKIYLPKLGWMRFHNSRSIPNGFTIKACTVRKRQNGWYISVRIEDSTIPEHTPKTIGDKPKVLGIDLGLTKLVHLSDGYQIDNPKFSTNKKAKRTLKIRQRRVIRKVKGGKNRKKAAIRVGKFHQKISDKREAYQWKVAHKIASRKVDIIAIEDLNISGIMRRCKAKTDEKNGRFLKNGQSRKKGLNRAISDASWGNLGLKVVYLAAKQGKTVVKVNPKYSSQECRNCGHTEKANRENEKFICNQCGYHEHADIGAAKTIRDRALSIVRGDSAKLGASSPKRPKDISTLKSSKRAEFGNPSNRDIKNAIS

SEQ ID NO: 60492 - protein, 480 aa, Oscillatoria sp.
MIFIQAEVEAMVKKKSQKQTKRKNTPKESNIRTDVWQLVMTQEQRKLALLTVAQYRRFLKPLVLISYWNWGQLSQLTSQTRVNTLEKLIHKTVDNPNPRYHWYFQKAISNHPSFLKFPSYLRRAAIGDALGIVSSFVTRWDTWNRGERKHRHDKPPRLTVMCNSYPALYKGQQVKYHSNFAFVELKIWNGTDWVWMENIPVKKHGKSRHIREGAKLLSPSFIANSKRVHLSMPVEVNPQPLPDADYVCAIDIGINTIATCSIVGKDGTVKARQFINPARDIDRRDQRKQRIATKSKLTRKIINQDLPKGFCQGLYRKSKNINKHIAQTVSRQIVDFALKHDVGVIVFEDLSNWKAKAGKHGSLQKQRFHEWCKDKLVELTIEKFSELGGKVSKINAKYTSAYAFDGSGKINRSNKKYSQAIFPNGKRYNADLSASYNIGARYWYAVLTNSKFTRVWEGKSSSHTLRTPVTLSSLWRLSKA

SEQ ID NO: 60493 - protein, 300 aa, Ruminococcus sp.
MVEGIRNTWDWITINLKKSDMDYIYRYCSFRKKCAPTLQKRGKEWFLDFPFEEKVKLADISVYEQTIVAVDLGINTAATVSVMRSDGTILGRHFCKLTKETDHLMHCVNRIKKAQQHGNYKTPRLWAKAKGINHDIATKTAACIVDIAVLYNADVIVFEHLDKNGKVRSSKKQKLNLWRSQEVQSIVTNKAHRLGMRVSHICAWNTSRLAYDGSGFVLRGKFGGFNTYELCKFQNGKTYNCDLSASYNIGARYFIREILKSLDENSWLLIEAKVPQCSKRSTCTFSTLVNLNAEFIAHTA

SEQ ID NO: 60494 - protein, 400 aa, Kibdelosporangium sp.
MRTAYRCRAYPGPEQVTVLNRTFGCVRLVWNKTLAERYHAWRVEGKRTSYRETDTALTGWKRTQELAFLSEVSSVPLQQTLRHQHAAFANFFAGRARYPRFKSRAGKQSAHYTRSAFRMRDGQLFLAKISAALRFVWSWPEIDPATMNPTMVVVSREPDGRWYVTFAIDTGDTTAGGSGPAPGIGPEIGIDLGVADFMVDSTGDRVANPRHLERKARNLARYQRRMARCQRDSVNRRKAKAMVARAHRKVRNSRQDFLHRQSTRLVRDHNLIAVEDLAVANMVRNKRLARAISGCGWGEFRRQLEYKAMRAGKTLVVVDRWYPSSKTCSTCGHLLAELTLSVRHWTCPACRTRHDRDINAARNILAAGRAVARGDTLGDACGADVRRQGSPLPQSAVNQE

SEQ ID NO: 60495 - protein, 212 aa, unknown
  TnpB Polypeptide
MPSGKYYVSILVETEHMELPHTDQNTGIDLGIKDLCITSKGKKYENPKTIRKYEKKLAKLQRQLAHKKKRSQNYNKIKKKIALCHEKITNSRKDYLHKISHEIISENQVIVSENLQIQNMLKDHHLAKAISDVSWYELTRQLEYKAKWNGRKYIKIDTFYASSQLCSVCGYQNTEIKDLSIREWSCPVCGAKHDRDINAAKNILAEGLRQIA

SEQ ID NO: 60496 - protein, 446 aa, unknown
  TnpB Polypeptide
LKSFKTFSTVLEEDNAKEIIEYFEETAQNYGFLKRCTLHILRNCPEMSRNDLNKFLQEKFSITTRTASSAICEVEETINSALALIPLNIEKLETRIDNKIKLIEKKKKEMAKIHASRKTNTKRLGKLKFHIYNIHNSINRIKQKIENLERQLNEKKPNICMGTKKFARNDIKAFKQHRDSQINYIGRACEKQGNTNFQMQYIRKGNFFTMKVRRDFGKWKDDRSPERFAYGKCHFKYGGKQLRIAMKGNASPVTVSVIRRNGRYYLFVTVAVSYESSAIATRKEYGVIGIDFNKGFINICETDEKGNIVSIEKMKYPFGKAGITNAGLADVISKVCHKATETGKSIVAEDLSFEKKKRKSKKAVTPTEKERMRTLHSLPYSRYAQILENITFNRKIELIKVNPAYTSRTAEQKFCNQMKLNIHNGAAFVIARKGMGIKDKYLKKTG

SEQ ID NO: 60497 - protein, 441 aa, unknown
  TnpB Polypeptide
MKVKRTGRFKVKASHPDYEMIKNHTIEAKEIYNYSNYIIRQIFFKNSGNHKYSLEFIHEYPELNEDFETYLKENNQFTSTFYRIICNFSRIKEHSLNSKMVQGIVNILKRDWKSYWKLLKLKKTGKYDKPVSIPRYKKKYSVVEYNPQTISKAKLKNGYIGTALMAEGFAIPNFYKEYSCKSARALWKNDSLYMEIVYEKEIPEAKSNKKVASIDLGGKILMAVAYNFNRRGICISANMLRSLNHYYNKIIGTMTSLLPKGIRISKAIQNLWKKRDEQIRNLLGFYANRLIEELNSLNVAKLIIGKNKEQKNGIDLHSELENRNFCMIPFNKLIEILRYKCQENGIECIEQEESYTSKASFLDNDFIPVYGEENDKYEFSGWRNGRIYKIKGKNQKIHADLNGSLNIMRKAEHELVENVPSFKKDWIFPIGKYKVKNLSYS

SEQ ID NO: 60498 - protein, 368 aa, unknown
  TnpB Polypeptide
MKKVFDMQLTYVLELLKPTKRKKYIFLNNIAEVVKNRQAVAAKLKAGEIKLSSADFKEINLPAAVKNQNIREVKTLYKLFLNSGSDKDNIEFKANQPICYNNQNYKIDHHIISIPLYTTKCQRFAFPVKQTERFEKLQKHIDSGCKLGKASLFHKRGKWYFAVTIKIAVKKNTNSNLMGIDIGLRQLAVASVKTPQGKEINRQFYNGKQAGFIRKKYRMLRRKLGQSKKVKAIKRINDKEQRWMTDLNHKISRQLINFAVQKKVGTIIMENLENIRNTARSLNRADRNIHSWTFYQLQQFIQYKAELVGIKVEYINPKYTSQSCSKCNKIKKSNRKANLYSCECGNHIHSDLNASRNISNKYLEQQPT

SEQ ID NO: 60499 - protein, 393 aa, unknown
  TnpB Polypeptide
MKHVKAVTVKLECSPDLVMPTIKAYTKAFNHVCSVGWKDKDINAVSLHHKTYQFCKTLLPAQLTCSARNKAAEALKGVKAIIRKGRKATCPISKQSSIRYDHNSYTVWFDRKELSISTISGRKKLFFKAPPYFNDFADWRRTSAELFVRKGKVLLSLVFEKEITDIKPSGSIVGIDRGINKISVTSDNQFFGGSHVKQIVNRYKKLRKALQSKGTTSAKRHLQRINMKENRFRRDVNHVISKRIVSNLSQGTTLVLEDLTNIRTGSKKFRKEQRFWINGWSFFQLESFLKYKAAFAGCFVDFVDARYTSQKCSKCGHTERGNRTKQSLFKCKHCGFQLNADLNASRNISQNYQDAICHPDRGPVNDPIVIGILSERPQSDSPNCKPRTLVRGG

SEQ ID NO: 60500 - protein, 396 aa, unknown
  TnpB Polypeptide
MLILEFKVKATPAAYSAIDEAIRTVQFIRNKCLRFWMDNEQVSKYDLNKYSAVLANQFSFADKLNSMARQSSAERAWSAISRFFENCKQKVTGLKGYPKFQKNNRTVEYKTTGWKLALDRKAITFTDKNGIGRLKLIGTRDLNFYQSDQVKRVRLVKRADGYYCQFAISVDRNEVLPATGNTLGLDVGLETFSTDSNGKKIQNPRFYRTGEKKLKRSGRLVSRKVKASGNRRKARVKLGRVHLKISRQRKDHAVKLARCVITSSDVVVYEDLRIKNMVKNHNLAKSINDAGWYQFRVWLEYFGKVFGRITIAVSPAYTSQECSSCGTVVKKSLSTRTHICQCGCRLDRDENAALNILTKGIGTVGHTGTWGLNPLNASGESTSTLVGEILLEQVGS

SEQ ID NO: 60501 - protein, 458 aa, Bacillus sp.
MCQGAKNLYNTTNFYIRQVYTALRQDKPLEPLQQEVMDTLQTNIGPMNERQLQAYQSRLQKQLQKPPNQRKGSRCNLFEMPTRESPYMDFLFLDCLFKVMNQADYRALPTQSSQWVMKLVFSTWQSFYSCLKDYRANPNKYTGRPRIPGYTRTKTREVILTNQDCEIKDHKYLKFPKTKHRLNIGKLGYTDGQLKQVRIVPRYSKYVVELVFACSTEEANVKKGNVLAIDLGINRLATIVTNTGHRPVCVKGKPLKAINQYYNKLKAHYTGILRQGKHPKEGSHTSKRLEQLHLKRHQRIKDMFHKTSHYIVKLAKEEQIGTIVIGYNQGWKNQSELGRRNNQSFCHIPHQMLVSMIRYKAESLGIEVILTEEAYTSQASFLDRDPLPKFEGGVIQTFSGKRVHRGLYRSRNGLIHADVNGAANILRKVFPKACSDGIAGLDGTQSVNVSTPLMLSVS

SEQ ID NO: 60502 - protein, 414 aa, unknown
  TnpB Polypeptide
MTGAMMSDMPTRGVAFRIKGELPPEAKFLLEDFRLAINNTIRAGLRTRVTSRNALCKLLYKDLREEHPRIYAKHLVSAFEVAGNILKNYRRKLRTRYASRAPYVRRLMMKAENQAYKLDRENGIVDLPIRAWCHVKLELEVSDYHRRYLDDRSLRLGSLTVLPDRVIVAFRKEAPRPYAPESALSLDTNERSMDGIIVMGDGARAVKVDYQDITVIQQRRHDRRKRLQKKKAHDRRTSKRLCKREGQREHHRIEYRLHQVANSVLSFAENQKSAVVLEDLRGFRPRRNRELNRRLTLWPRRKLHQIIEYKAQWKGIPVVKVDPRNSSRTCPICGRIQDSRMGTEFECECGWHLDRHINASLNLLQTAISKGLEVAGGLRFNPGAFQHDVMMILYEPAMAARSEPNGTSCIGAVT

SEQ ID NO: 60503 - protein, 342 aa, Microbispora sp.
VARRSRGHDFLYEVSSVPLQQALRHQHTAFVNFFAGRARYPRFKSRHGRQCATYTRSAFRWRDGRLFLAKMDDPIAFVWSWPEIDPAVINPTTVAVSRDPDGRWYASIAIDTGTEPEPLPVTGVDVGVDLGVSDFAVLSTGEKIPNPRHLERKARNLARYQRRMARKQRGSNNRARARAKLARAHTKVRDARADFLHRTSTRLVRDHDLIVIEDLNVKGMIRNRCLARAISDAGWGEFRRQLEYKTARAGRRLVVIDRWYPSSKTCSACGHLLATLSLSTRHWTCPGCGTRHDRDVNAAKNILAAGRAVSACGADVSPQGSSLRRSAVKQEAQPARAGIPVP

SEQ ID NO: 60504 - protein, 394 aa, Microbispora sp.
VRRSFKFLLRPTRHQEMALAACVEDHRLLYNAALEHRRTAYRKAGVTVRYGDQSGELKHIRADDAEGQGRWSFSSQQATLRRLDKAFAAFFRRVKAGAKPGFPRFKGRGWFDTVEWPKDGDGCRWDSQPGHPAATFLRLQGVGHVRVHRHHPVRGRVKTIAVKREGNRWYVILSCDDVPAEPLPATGAAAGIDMGVASLVTTSDGEPLANPRHLEASAGRLASVQRDLARKKRGSKRRRKTAARVAALHARVRRQRLDGAHKTALALVRAYDVIVHEDLRIANMTRSASGTIDNPGRNVAQKSGLNRSILDAGWGVFLRVLAHKAESAGRELIAVNPANTSRTCSRCGHCAKENRLNQAGFRCQACGHSAHADVNAAVNILRAGLALRDAAEAA

SEQ ID NO: 60505 - protein, 409 aa, unknown
  TnpB Polypeptide
MLKAIKIRLYPTDEQQRIINQLLGCCRFVFNKCLAYRKDAYEKENKSVSGVDAIKHLVDLKKEFPWLKDAHSKVLQQAVRDMNTAYDNFFKHHRGFPKFKSRKHSNVESCRFPSDAFIGIRGNRIDLTKKLSDIHFKCSRLDEITLNRQQSSVRSLTLTRGASGKYLLSVLIECEVEQRSDAKGIIGIDLGVKDFVIASDGTRYANMHFKKSVSKRLKRLHRQLSHKQVGSKNRDKARIRLAKAYEKVCHRKDWYLHDVSNKLIDENQVVCMEDLNVKGMTRNHRLAESICEVNLGEFRRMMEYKCQWYGRTLVLVGRFYPSSKTCHDCGYIKRDLTLNDREWICPSCGAVIDRDLNAALNIRDEGLRILGVGLSSPEFTPVENPPMDDRHASGLRSCGSAKQEKNVFQ

SEQ ID NO: 60506 - protein, 538 aa, unknown
  TnpB Polypeptide
MEIASKYTKVFVSDDLTRQKYDELYDLAVSIREHKNLISKEVCSDILRYLDVSPLNFVKEMRGKYKQVINSNFDKQLYQQVIDAYQNKFDAITKRMKFEKVSFLGFDFYKRNCKGHSKGDMKSVRLERKSTDLTICLTYLARYGNEHTLEYINTQLANGGLDEKKAKFYQNILGKCSKLGFERLMRLALSLRGRMLKRYAKPIEFKSLTFAGRSRKKRIVAYNKNYNSEINAFISLSFPTRKSMDIPVKFSKDYHGSMSDYAKKSNDYEYVVSFDEWHKQAKVNLVKDGERYIPTVTDNDKTVGIDVNVKHNLFSVSNGTTYDYDRELVEDYCRMKRQTDLFKSQNPDYVIGKRRQRKYDTLRNKMLKSEQQLISTMCKNLMLGGVTHIVLENLDNGFGKTYVTDELLDDINFNDIVKFLRISSLKGEIEHIGRKYGIAVSTVQSYYTSKTCPVCGCIDNGNRLTQEDFCCVECGHTDNADHNASVNIRNRATVTVLRDRLLKQVSNGAYKPKKLKKEKVKDVLLSYRTDNQTIGGNI

SEQ ID NO: 60507 - protein, 547 aa, unknown
  TnpB Polypeptide
MEIASKYTKVFVSDDLTRQKYDELVGFAVMLRGHKNIVSEYVNSNLEHYLEYSKLEFLKEMRARYKDAVPSSFDVQLYTQVFNCYQNKFEAIRKHLEFEIVRFNGFEFYKRDTKKNKSGNLKKVVTEKSKTPLSICLTYLARYGNDNTLGYISKQLELCDDKKRKFYENIIRCCDKFGFDRLMELALRKRNRIIKRYSEHPIVFKSLSFGGRCRKTRIIDYNKCFGSVINSFVSLSGIGRKSFDIPVKFNKDWHGSMKDYVKKTNDYEYVLTFNEKYRQVSINLCKDGERYIPEAGDNIVGIDVNCKHNLFSLSNKTTYDYNRKLVNDFCKLSLEVDELKKDKNYTIGKRKQWKLDTLKMKMVKSEQQLISRMCKSLMFDGVNHIVMEDLDNGFGKCYVKDKDNEDINYNRKVKFLGLSSLKDEVEHIARKYGITLSTVQASYTSKMCPICGCIADENRPNQETFECVECGHTDNADHNASKNIKNRVTVTVLRDSLLKQLGNGAYEPRKLKREKVKEVLLSFRRSLMVTSKSECSEIINLNTFDYV

SEQ ID NO: 60508 - protein, 440 aa, unknown
  TnpB Polypeptide
MYLTTTVLQTPKNHEVDLAVLKALCYQSARLYNASLYNIRQHYFATTRYLSYNDNWRMTKDNLNYRLLISDSAQQIMRMADRDMQSFFKLLYLKSQGKYSARVNLPRYKKGDDCSTYVVCGRSARIQKDGTVNIGVTKEFREKYGYDSRYIKFTIPRNLRDVKEFKEVRINPQYNATQFCVQFIYESAQAPQQASGDGWMSIDLGLDNLMACTAFSNGGSRQFLIDGRRLKHINRYYNKEIAHLKAARPDKFDLSKRMIRLMNGRKNRISQYFDRTVKYVVGECLALGVTRVVVGHNEGWKQEVNLKDFNNQNFTFIPHYLLLRKLRSKCEFHGIKFLTVEESYTSKASCLDMDDIPTYTPNDHVKYKFSGRRKYRGLYKSKEGLLINADINGAVNILRKYFVNGKLDWIFQDSVRALVNAPCPRVHPFGSSPRTSVVGG

SEQ ID NO: 60509 - protein, 492 aa, unknown
  TnpB Polypeptide
MRDCDDGGYARPCASFRERATHDCATVSNTATEGAFSTYPAFGIPTPQDQAPQFMDTFVFHRERWGSVRGIRQKIYRKPKERMIRNYTYRLYSSKHHKALSTLITTANHTWNHIVALCHRYYHRYGKSVSEGQLKHHMAKMAKRDRYMSKLHSQSLQAICERYEDALKQAFRIKGRGLPHDRRMFGKGSVLFKGNGGYVLEAIGNKGVLRINKLGKNWKFRFKLTRQWGEVRNVTVKRDDDGYYYLTVCCNVPDERLEREGYASIGMDFGMKTFLTLSDGTAVQIPDYHRKALAELKAADRSLSHKRNAKVYGSSYRRAKHHRQVAYAKVANRRSDFHWKLAHELCKRYSFIAIEDLHMKSMQMHRNWGRKVSSLGYSEFVMKLMVVAEKYGTVIHKIDRWYASSQTCNVCGCVYKGTKDLKVREWICPSCGTVHDRDVNAAINILNVALNDIGGKGVSRVGSNSKTPKGKPSEAVAHGSCDPATDQESHSL

SEQ ID NO: 60510 - protein, 419 aa, unknown
  TnpB Polypeptide
MKELRGYRYRIYPNAEQSTIIARTIGCARLVYNLLLADFTSQLGGEEKPKLHEVTYFKKDRPFLSEVDSLALANAKQNIQTALTNWSKSRKGQRKGKRVGFPTFHSKAKSRLSYKTNNQNGTVRIEGNYLKLPKVGYVKIVLDRPPAGDIRSCTVEQTRDGKFFVSLCMEVEIETKQKNKRYDDLKVVGVDMSFPHFSVDSEEISGDTKAKYVRQYRENEKKLKRLQRWVSRKNKGSANYAKAKRRLAELHAYIANCRRDFCHKTSRWYAENWDVIVLEGINMQTMARLHNNGKSANDLGFGMFKGFLEYKCRETDSIVMYVDRWFASSKTCHCCGYKKTDLELRDRKWTCPQCGTHHDRDLNAALNLRDYFYRVVTEENYNTAGTAGIYASGEATSTLRETLRQAASLNEETPSFRWG

SEQ ID NO: 60511 - protein, 355 aa, unknown
  TnpB Polypeptide
MAKMAKRDRYMSKLHSQSLQAICERYEDALKQAFKIKGRGLPHARRMFGKGSVLFKGNGGYVLEAVGNKGVLRINKLGKNWKFRFKLTRQWGEVRNVTVKRDEDGYYYLTVCCNVPDEHLEREGYASIGMDFGMKTFLTLSDGTAVQIPDYHRKALAELKAADRSLSHKRNAKVYGSSYRRAKHHRQVAYAKVTNRRSDFHWKLAHELCRKYSFIAIEDLNMKSMQMHRNWGRKVSSLGYSEFVMKLMVVAEKYGTVVHKIDRWYASSQTCSKCGYVYKGTKDLKVREWTCPVCGTVHDRDVNAAINILNVALNDISGKGVSRVGSNSKTPKGQPSEAVAHGSCDPATDQESHSL

SEQ ID NO: 60512 - protein, 281 aa, unknown
  TnpB Polypeptide
MEETYGIHEKFLYLENKIFRNMDRIKQLRIYPPENGKCDLIVIYEMEEPEQLSQNGHYLSIDLGLHNLMTCYDSENGRTFILGRQYLSLERYFHKEIARVQSVWYAQQSERGIKYPKSSKHIQRLYRKKQNAVKDYLHKVTRWIAEYCRKEDIRCVVVGDIRNIRKEKDMGHKTNQKFHGLPYNKLYIMLEYKLKLYGIQLIKQEESYTSQCSPFSPEISKRYAESSNRKERGMYITDGVRFNADAVGAFNILRKYLSVSGKQKELSVTGLKNPEIIKVAV

SEQ ID NO: 60513 - protein, 381 aa, unknown
  TnpB Polypeptide
MTIVQKGIKVRLYPTEEQEVLIDRTIGCCRFAHNQTLADCNKSYEQTKHFPSKKERSANLVPLKEANDFLKEVDACALQQSVRDLNSALDNFFKNRSHFGFPKFKSKHSLKQSYRTPGGRSNIGIIDNKHIKLPKVGKVKTKKFFMPDVYKIFNITVEKTPTGKYYASICIETEVHPLPKTGKQVGFDLGLKDLLIGSDETRFSRPKFTYAFKDKLAEEQHRLSKMRTKLERAKLNLDECKNYQKQKRKVAKLHEHIANCAKDFNHKLSRKLVEEYDLLAFENLNVDGMKKNHYLAYSISDVRWSQLLNFIRYKCLWYGKEFRQVDRFYASSKICSCCGTYHKDIVNSLKVREWICPDCDTHHDRDVNAARNILNQALSVA

SEQ ID NO: 60514 - protein, 382 aa, unknown
  TnpB Polypeptide
VTTVQKGIRTRLYPTEEQEILINKTIGCCRFVHNQTLADFKQSYEQTQRFPSQSERIKNLVPLKDEFEFLKEVDAKALQQSIRDLNHALDNFFKNRSHFGFPKFKSKHSQKQSYRTPHNNGAADVIDNKHIKLPKLGRVRTKRFDMPEVYKIFNITVERTNTGKYYASICIETEVQSLPKTGKQVGFDLGLIDLLIGSDGTKYERPKFAYAFKDKLAQEQRKLSKMRTKLKRANLNLDECRNYQKQKHKVAKLHEHISNCAKDFNHKLSRKLVEEYDFLAFEDLNVEGMKQNHKLAYSISDVRWSQLLNFIKYKCQWYDKDLRQVDRFYASSKICSCCGTYHKDIVNSLKVREWICPDCGTHHDRDVNAAKNILIKALSAGV

SEQ ID NO: 60515 - protein, 461 aa, Solirubrobacterales sp.
MLVHRSYKHRLRLTPEQEVLCRRFAGCARLVYNSGLEQRSLGYALTGQGMSYMRQTYFLKEVKADPAFAFLREAPAHVLQQALRDLDRAYQNFFAGRSRYPKPRRRGEHDGFRFPDPDPKQIGVHDPARIGQVRLPKLGWVSLRNCWPRLGERLFEGECKNVSVVREADDWYASFACEVEMADPSTPERGALGLDAGVSNSYATSGGERHHLPVLTDSEWAKIGRLQSCVNRRQKGSRNREKALRRLARYRHRASRRKHDELHKLTTRLAKGHALLFAEDLRVKNMTASAKGTVQEPGVNVAQKAGLNRAILDQCWGEGRRQLSYKCLWYGSGFHIVNACRSSQECSNCGHVAAESRESQAVFRCVACGFERHADVNAACNIRERGLAEHRAAQAEAEASAAPAASAGGMPVPEGRKTRRACEGRASSKTPETPGPSRKRREQGTGQPVPQARAIVTPLGA

SEQ ID NO: 60516 - protein, 396 aa, unknown
  TnpB Polypeptide
VRTAYKCRAYPTPEQTAVLNRTFGCVRLVWNKTLDDRNNRYHSSGVRTSYRETDAALTTWKRTEELAFLSEVSCVPLQQTLRHQHTALQNFFAGRARYPRFKPRSGRQSAHYTRSAFRMRDGVLVLARTSSPLRFVWTFDVEPTNVDPTTVVVSRDPDGRWYVTFVVNADTPAPAEPTGHAVGVDLGLTDFLATSDGERIANPRNLARKACNLARYQRRMARCRRGSNNRLKAKVKVARAHRKVRNARQDFLHRTTTRLVRSADMIAIEDLNIAGMVRNHRLARAISDAGWGEFRRQLEYKCARAGRTLVMVNRWYPSSKTCSACGYRLDELALSTRHWTCPGCRTRHDRDLNAAKNILAAGRAVTRGDSGDACGADVRRQGPSLPQSALNQEPTP

SEQ ID NO: 60517 - protein, 395 aa, Escherichia sp.
MSGDYVKSKKIRIYPTPEQAAFLNAQFGAVRFAYNKALHIKKHAYQRHGVNLSPRKDLKPLLSVAKKSRRYAWLKEFDSMALQQAVINLDVAFSNFFNPKLKARFPTFKRKHGKQSSYHCVGIKVQDNAIKIPKLAPIEARLHRELHGKLKSITVTRSATGKYYASILCDDGASAPEKPTYLKEEKITGLDMGLEHYAITSDAVKVPNPRHLINAGRNLRRKQKALSRKQKGSANRKKARIRLAVLHERVANARADFQHKLSRAIVDENQAVIVETLKTANMMKNHNLARAIGDAGWHSFITKLEYKTATKGVHLVKLDQWFASSKTCHCCGYKMPEMPLHKRIWRCHECGAEHDRDINAALNIRQKGILELKAAGLVVSAHGGQRKSVAQTVAA

SEQ ID NO: 60518 - protein, 364 aa, unknown
  TnpB Polypeptide
VNKAYKFRLYPNAGQRVLIAKTFGCVRFIYNKMLGDRIEHYQRTKQSLKNTPAQYKAEFPWLKEVDSLALANAQLHLNAAYRSFFSKPEHGFPQFKSKKTSEDTYSTNNQKGSVRIANGKIKLPKIGFVKLKQHRAIPDSWTIKTVTVSKNPAGKYFVSILFEYDNQVREVVPKKFVGLDFSMRELYVDSENNSPEYPRFYRQSLHQLAREQRKLSLCQKGSNNRQKQRRKVALVHEKIANQRKDFLHKRSRELADRFDAVCVEDLNMQGMSQSLNFGKSVADNSWGMFTTFLQYKLTEQGKPLIKIGKCFPSSQLCHECGYKYEGTKDLSAREWVCPSCHAHVQRDWNAAMNIRDEGRRLYFV

SEQ ID NO: 60519 - protein, 405 aa, Lachnospiraceae sp.
MQLAEVLKLKLNTDPDMDKAFENTSYQYMLACDYISRYVFEHEFQINSAALSKELYRDLRSKFLLKSQMAQSAVRTVTAGYKTVNTQLQKEPYRFQADGKWYSVQRDMRWLTKSLEFHRPQADLVRNRDYSFVHEGREISINTLGRRVICPFTVPDCMKKFLDGSWHFGTAKLVCMKNIWYLHISATKEVPDFTRDDVKQVVGIDRGLRFLETVYDSSHHTSFESGNQILLKRNSFDRVRAQLQAKGTKSAKRTLKRISGRENRWMSDVNHRLSKALVNKYGSGTLYVLEDLEDVSTNEQNFKSAGQTHDLRNWAFYDLETKLTYKAHETGSEVLKVDAHYTSQRCPHCGRICKENRHHNTHIYVCDRCGFQTNDDRVGAMNIWLLGTLWASGTDNPAFTAEAPA

SEQ ID NO: 60520 - protein, 450 aa, Weissella sp.
MKLEKLSKMIENIYVRRYRVVATQELIEHHARNMRTQKQLWNFANKYLEKTYGRKHLNRPYPSNKSQKNYVINAIKSKFIKEKYNLNRWNARIVGLHSQGANEFLMTLLTNFGEYRKIMYRASKMTAQEKLEYGNNIHGNNPQHQSCYRKGSLNYLRGSNSFKTVALPNNNQVEIASDHYIKIQDYGELQVVENIRKLRNTTIVITNLKRKNNGQFELQLVVKRQVERVTPMTKVAGDWNMTNNKVFHTSNDEEIYINDGVIAKADDLERRINGLKSKRDKSVWLRQNSRRIVRLNEEIRWLNTKRENVLDEHYKQLAHDLMDNYDVVVIENLNAKDMRIKRRQARRVNRKLAMIKPCRMTQFIEMLANRTGKTLIKVDAYKTSQVEYGTTHEEKHDASVREWVSIVTGKLISRDLNASWNILDWGLNPEHHIKLKDYPRLSASSLVTIN

SEQ ID NO: 60521 - protein, 353 aa, Symploca sp.
MVIANNEQYLTVSCKLAVTDNQREKLEATLDGFCNVCRHINADVDPSVRNKLKLQSAIYHQLREQYPHVNSNLVIAALGRVAANRKSAHERKQQVKTFRPTSIDYNARTISFREKDWTVSLSLVGGRERLRLEIGEYQKKLLTGTEPTSATLVKRGNQYYINLQVKYLTSPPIAGEQIIGVKFGLETIAALSTGEVYSGSKLREVRDRYTRVRRSLQKKASKGTRTTRRNCRKVLKRLSRRERRFATGVNHNISTDIVKKAKENGAMLALEELTGVRERTNPEIKTKLMKRRLNSWSFYQLRQFIEYKARIAGVPIILVKGNEKQECFADVRGATDLLGATVNSPERSLLKAS

SEQ ID NO: 60522 - protein, 365 aa, unknown
  TnpB Polypeptide
MDYSVQSIDKMLEGLYVNFDRYRKGQYKRIHYWSEKDTQKYLATHKCGLSGYGRISYKHSYDDVHSVTFKQNHDRIALMNNYCLKVPYFGKIKSEESLTAFKHKKIVEAKIIKRREHDYELQVVTKFEEQRQITKEMVKQAVGLDVNLKDNHFFVLSNKQIVSWGKDVEAYYRKADAKSRKLQRYLTKHNKGRDNSKTTRRVKQQLSRLQTKTAYKIDAWQLKTTISFATKYPVLAMEELHSFDIRVSKRAKNYKMRKNINHKLAMLQPSTFRKQMEYIYQDRHGLLLEVNTIDTSKTCNKCGFINHDLKFEKQWTCPHCHQKLDRDINAAYNIRDWAVTPKKHAALQQPDRFPYLNEKNIVTTF

SEQ ID NO: 60523 - protein, 386 aa, unknown
  TnpB Polypeptide
MLVRRGYKYRILPSEEQGKLLLQCGGNARFLWNYALKVNQDYYKETGKFKFYHELAVSLPKLKEEYPFLKESFSQSLQMVLRQFDRALKDSFKKEKGFPSFKKKILLNDGFTCPQKWRLGKGFVFIPKIGEVKWVKHRSMRGKPKSITISQDGSKWYCSVLCEYEVTEEEKKFDSIVGCDVGIKEFATLSDGTIVSNPKYTKRYEKKLAKEQRKLSEKQKGSKNRFKQRLKCRKVQNKIRDSRKDFLHKTSDSIAKKYDGIAVETLNIKVMMKNHCLAKSIGDVSWSEFNRQLEYKCKWNFKHYIKIDRFYPSSKTCSNCGCIQEMTLDKRTFNCPDCGISIDRDLNASLNIRNIGFNTDGQSGIYACGDGSIEPSLKQEKECLVN

SEQ ID NO: 60524 - protein, 384 aa, Aphanothece sp.
VNETSISDEALVIRGGRNRPEDIRRGIGTHPCGITGISVESGVGLKVEQLAKNIPHGQIGITTVREKLLARSQEDSTSKEKNFLPYWNELCQELSEQLLSLTKTDWQDLGSIGLTGSVSNLTVQSWFSTRQTFLQKQKWLKTSLLSSTASQADCMDSENIKLRSRKIKIYPTPELKIMWNKWAAACRYCFNQAIAYQKKNGRMGKTKLRNIIMQSNLPEWVKETPCHIRQNAIFDAHQAYTASKDCKFRNCHAPRQTIKFNNSNFAQGKWYPNVTKGLEFESSEPIPLKNAYATQLIKSKSGEWFAVFLNSVEQAENSNNNIISLDPGVRTFLTGFDGQRFIEIGQKDIGKINRLCSYLDDLMRFVKWVVMLFVPLEEAIIMQR

SEQ ID NO: 60525 - protein, 436 aa, unknown
  TnpB Polypeptide
MFEAVKVALDPTPAQERLMLSHAGAARFAYNAALAHVKAALEAGERPEWSFYSLRRWWNANKDVLAVNKDGTPWWRENSKCAADTGLEALSKGLLNWSKSRKGKRKGPRVGFPKFKAKARETPRFRYSISRPSDGGLIKGDAKALWLPRIGRVHCLENVTARVDGARVLNMTISRRAGRWYAALTVERDEPTVKKAPKGGAVGVDLGIKALATLSDDTVIPNPHHLQADEQRLKRAQKALSRKKIGSKRRAKAKDRVARLHARIANRRNDTLHKLTTMLAQTYSDISIEDLNVAGMVKNHHLAKAVMDASFYELRRQLEYKTAKTGAKLHVIDRWYPSSKTCSNCGSVKAKLSLTERTYKCEHCGLVIDRDLNAAINIQVAGSAPETLNAHGGTVRRGNQPGCATLDPVKCEPSRHESAVRLGAGGRKTTLQAETH

SEQ ID NO: 60526 - protein, 367 aa, unknown
  TnpB Polypeptide
MTKNNAKKITRKEIVSDIKEQILLSKDSKNDVEFEYQSLFEQFEDFVIEMKSQGLIYKDIREFIELFVETPKVTTVSHNIQYPTLTIPDLDVTEKTVVQEGKAGKYNIVITELYKEEVSRAKVIEESTVTEIIKVPMLSEERNSVSFVGESYEREKNKGDKDLSAAIDINTSYKDDNIITTVFSDQRRPVSFVSEQYKSYLGTLKTDPTNKKFNSKNVGSAFYRKTLNYAIGVIKELKRIGVTKLYLGRSGAMSLNNSNDFMLSLYSQIVTACSILTLELVVVDEHRTSTADSIANDDFGKEILSGERSRSNCHNYKSGTGVVVDADVNAAYNILRKGTKGEFKVSPELIQVSFDKETVQLQEVNYM

SEQ ID NO: 60527 - protein, 379 aa, unknown
  TnpB Polypeptide
MRKTFKYRLYPTKLQITKMNNILEQTRWVYNETLSLRKNAWELEKKSISLYDTANKLPEWKVNKSELSDVYSQVLQNAQIRVDLAFKAFWRRCKSGENPGFPRFKGKGWYDSITYPQSGFRLHPDGVYLSKIDRVKIVLHRPIQGTIKTCTVKKTPTGKWFVYFSCETERPESLPKTDKIVGIDLGLITYVQCSDGSKIDKPRFFKQEQGALAQAQKRFSKDKNPRNKHSVALVHERIRNKREDFCHKAAKSLVDKYDFIAHEDLNVKGMLEQKKFSKSISDAAWSTLVLFLTYKAENAGRIRVAVNPRGTSQRCSQCGTVVSKDLSVRVHHCSHCGFKASRDLNSALEILRLGLESVERPVPRRKAAALVKAHRSPRL

SEQ ID NO: 60528 - protein, 369 aa, Leptolyngbyaceae sp.
MKRTVSIPVDLPHERFLPLMGFCAEIFNAHADWAKENRTFNKNKAHKALYADLREKYPQVPSALLQTVRDSAMEAIKATRFKRIPRKKSTSGLRYDKRTMTLRGNQLTLSCIGKRVQLILNVPDYFKDVFESWEFCGATVTYTKRKKQFWVRLVFETEDQPRQEGEVVGVDRGLYHLMVTSDAQFFSSNRVRAAQRRYLHNRRTLQQKGTRSAKRRVKAMSGREKRFMRNENHCITKKLANTPGVAIFVLEDLSGIRVKQRGKKLNKWLSSWTLYQQDLFLTYKAEALGKRVVYDDPRYTSQKCNVCKHISRTNCNKSRFHCRNCGNKDHADLNAAKNHRDDYILSTTLLKTVEQVPVNAPYASGANAS

SEQ ID NO: 60529 - protein, 372 aa, Clostridioides sp.
VIAVKKAYKFRIYPNKKQQELINKTFGCCRFVYNKYLAKRIDVYKNDKETFTYKQCSSDLTNLKKELNWLKEPDKFSLQNALKDLENAYNKFFKEKAGFPKFKSKKTNRFSYKTNFTNGNIVYCGQHIKLPKLGMVKIRDKQVPKGRILNATISKEPSGRYYVSLCCTDVDIEVFENTNNQIGLDLGIKEFCISSCGDFIENPKYLKKSLNKLAKLQSELSRKTIGSLNRNKARLKVARLQEHIANQRKDFLQKLSTKLIKENDIICIEDLQVKNMIKNHKLSRSISDVSWSEFIRQLEYKANWYGRKIVKVGKFFASSQICNKCGYKNEEVKDLSIREWICPSCNETHDRDINASINILKEGLRLITIQNK

SEQ ID NO: 60530 - protein, 509 aa, Frankia sp.
LVRRRLCRGGACRVRSQTRRRRPGRPGRRSCPGHDGDPDVDVCPALWPPDRRGPGRPRGGRRYRGRAVKVLQAYRFALDPNDAQLADLRRHAGAARFAYNWGLARVKAALEQRDAEKSYGLTGDLLTPVPWTLPALRRAWNAAKNEAAPWWSACSKEAYSSGLDQLARGLKNFTDSRTGKRKGKRVGFPRFKKRGRARDSFRYTTGAYGPASDLQVKLPRLGRVKVHEAMGALTGRLAAGSARLLGATVSRTAGRWFVAFTVEIDREIPQNPSARQRAGGAVGVDAGVKHLAVLSTGEQVDNPRPLTRSLRRLRTASRAYARSKPGSAGRRRRAAALGRLHAHVANQRRDGLHKLTTRLATKHATVIVEDLHVAGMVRNRRLARAVSDTGMAEIRRQLTYKTVWYGSRLHVADRWYPSSKTCSGCGWRNPSPTLSDRTFACQSCGLVIDRDLNAAVNLRHLVAASTSETENARGADRRTQPAGRVAVKREPGTARAGRTGGSSPRGEAA

SEQ ID NO: 60531 - protein, 282 aa, Varibaculum sp.
IGFPNFKKKKSRKTYRTTAAKIVDDSHVWIPKVGLVKARISRPVKGRITSATIKQTSSGKYFIVFTCVDIPEPPKSKTGKAVGIDLGIKSMVATSDGEKINGVADTRKLDKKLARQQRKLSRKKKGSNNRKKQKIKVARVYEKIANKRKDHLHEVTAKLISENQVICAETLNVAGMMKNHHLAKSIAAQSFATIFGFLEYKAKERGKIFVQVDRWFASSKTCHKCGVKEEKMPASKRRWKCKACGARHDRDINAAQNILAEGIRILNGTEGHSGTAAITVAA

SEQ ID NO: 60532 - protein, 330 aa, unknown
  TnpB Polypeptide
MRIFNDACNFISQLAFEKKTFNKVKLQQECYYAIREKFTLSAQFVIRAISKVTESYKGNKKTLHTFKSTGAIIYDQRLLSFKGLEYASLLTMAGRILVPMVFGQYQKGVLEGKRIRGQADLVLVDGIFYLLVVVELPDGSPSDTKDFLGVDLGIKNIAVDSFGEVFSGDKVNGIRKRHAKLRAKLQKKGTKSAKRLLKKRRRKEQRFATDTNHCISKKLVAKAQGTGHGIALEDLKGIRDRVTVRKSQRRQHHSWAFYQLRQFIQYKAVLAGVKLVFVDPRNTSRTCPLCGHIDKKNRSSRDEFCCQSCGCAGPADSIAARNIASRANVI

SEQ ID NO: 60533 - protein, 391 aa, unknown
  TnpB Polypeptide
MSIVTRSSQHDLKITNINKLDIINQMFVDYEQTLYHYIKLITSGQLPFKKYVSSKDLPVITLIESHHREMCYQLAFSIIKSNLKFTTNSTFKRYQKIYRYFSNKQRQTNFLSKRYRELHVDLLKRVKIDIKSVKIPFGYKIFNIRTGNHFDYFIRITTPYRKSETRYHTINIPINEHKHSLQYTNWKRKSYIELFKINGNIYLKFVYEKEVSTKTSGESIAFDCGYKKLLSDSNGVHYGKELFSLYNKLSKMKRGSKNYKQIVIHKNNEINRIINSVPLENIKTVIVEALKNVKKNSKLSSKTMNKMQYWCYSQVMRKLEARSQEEGFNLINVNPAYTSQTCGSCSTIDKSNRQGEVYQCKTCGLLIDADSNAAINILHKGTGVPLTIKDN

SEQ ID NO: 60534 - protein, 173 aa, unknown
  TnpB Polypeptide
MEKKYENPKIIRKYEKKLVKLQRQLAHKEKRSQNYYKTKKKIALCHEKITNTRKDYLHKMSHEIISENQVIVSEDLQIKNMVKNHHLAKSISDVSWHELTRQLEYKAKWNGRKYVKIDTFYASSQLCSVCGYQNTETKNLSVREWICPVCGTNHDRDINAAKNILEEGLRQIA

SEQ ID NO: 60535 - protein, 405 aa, unknown
  TnpB Polypeptide
MQYNYKYRLNPSEALTETFLQHVDTCRQLYNHVLHLLNEADNIPARYEVQGRLPDLKTWWTDLGNVHSKVLQMVVKRVYDNLSTLKAQKENGRAVGMLKWKPPREYQSLTYNQSGFKLKNTGGRSVLWLSKIGEIPIHLHRDIPENASIKQVTVKQEPTGGWYATFGIDVDGGTLDKPENPEKVVGIDVGILKYAHDTNGTAVESPDFSDERERLERAQRELSRKEHGSANWESQRKVVVERHADLKRKRRDFLHKLSNYYATEYDLVAVEDLDVKGLVELPSNSRDRAGAAWGTFVRMLEYKCEREGTHFAAVDPRGTTKECASCGVKTDKPLWVRKHACPSCGFEADRDANAAWNVLSRGLEYVGVGYSESTPVETALPVDTPVSAKRVVETGSPITRTGGSG

SEQ ID NO: 60536 - protein, 373 aa, unknown
  TnpB Polypeptide
LQEKVEEGFRILTLEKDVDKDVLEFIRNYQILASHLYWSRRLDIKPSDTTIEKLRRDVKSYWRWHVVDEKDPMYLFKNVERTPRPSSMLIRIPLVDALHPRKGAFVQGSKLVLRVNKKVEIEMPKRAVEWLNKRLSENPDKKTVRVFERDNKLVAQIVLSKKNVVKLPENPLLVIVDFNSSYSMVVHYWDNRLIRTEKYRPPNRNIKWKSVKRLMKVRDNLYNQGTITQRQINLYSALIRKTLEGSMKSWIQQTVDKIVRRTKRLSKRHKKEPLVLMDMPDDDSLRGSSLQRSIMSFSRYLENILSWYGVYWEETRLYSTICPKCGGKLNLEQKTKRMRIMKCQKCGFREDRDNIPLYWAINRLPAPRRGEAS

SEQ ID NO: 60537 - protein, 404 aa, unknown
  TnpB Polypeptide
MFSMNAKQVHQRTITVPLDVSEEQRQLFIRVIELYNKAWSNVVSWCTKNHSVNRSRLQKELYHELRETYPELPSQFISIALRDAAGSVKTWNANNKKKRWETKAQRRRLTLNYDLRVMSMRGNLLSLSTLHGNKRQKFLVAIPSWFTSRYPGAALNAAKLSVKKDRVLLHLIYRVEPADKIAGTEIVGIDRGIKNIVVTSREGGDNTISSAKTRGVKRRYAYNRATLQAKGTRSAKRRLKAMAGREKRFISDVNHQISKRLALDPNVGTYVLEDLTGIGKTREKSRRRLGKKMRCWVSGWSYFELEFFLVYKCALVGKGVEFVSPAYTSQRCNRCGFTARGNRSGARFDCGRCGYSADADWNAACNIRDKYLFAIDGKAGCSQPPVMDEAFSLRPSPDPCGQGS

SEQ ID NO: 60538 - protein, 498 aa, unknown
  TnpB Polypeptide
VVKGGLEEIDLRDVLGLLERDVRFITDMVGWQLSTPGVLETYLDYDGNITQPNTLGRTLGFTLPADVLKGFMKGKSGLSRYEFLFQDRLVRELSSWAERYKAVNNESSKYISQGWKRTADGTRPTDLIPEYHLSAVNKQFAYVNNNPVVDGEIRLRIIINGSWHELRFPFDNKRFGDCRRVTLPNVRVSGGRIVFDFTAEYEYIYRAFSDRYIVGVDVGKTTYATAVVYDRETENVAHVYVMSRRACSLQNSITATEKQISHLHKHYGADYPEIPLQRASLSNKRRELAILVAQEIADIAEVWDNAVIAVEDLSWVKNTMQNGRWNRGGFVSWLEHFHALNGGRLIKVNAYNTSQECPHCHGKVLHPRWKDSYCGDCGVLWDRDVAAAIIIAQRAVKTVEKCIATRGKSKKLTCNRCRRTPVTRQTLKYPGRDRTKNKPTSKRPLINRKHWREYSLFVKNRCSAYCSDDRMVYADGTRLGSARTLEKQHDNDSTVLLL

SEQ ID NO: 60539 - protein, 449 aa, unknown
  TnpB Polypeptide
MDIKSSYAVEVKNVRKLFNPTIKIYNQAVTFCIQAFENEWSVLKDINDSKIQCGVARNLIHSTKSNKAKYSEFDKLFHKMPSYCTTAVINASLGVLNSYHSNLQNWYDEGCKGNRPTLQIHTNKYPVFYKDNMYKWADTKNAILLKLFINNDWQWVKLRLKHTDVQSIKKHSINAKISVPTLEKKHKKWFLRFAFESKAILNKTPLSKQRILAVDLGINTDAICSVMDYYGTVLARCFINHASEKDYIKHNLNRIKKYQAAGQKDVVRKLWSLVKNYNNELASKTANAIVDYARQLNVDVIVFEHLDMKGRKRGSKRQLLHMWNKNTIQRIVTHKAHLSGIRISHICARNTSKLAYDGSGYVLRGKDAGLLTYELCRFQTGKIYNCDLSASYNIGARYFIREIEKLYTGKSICKKINIWSDIQAKVPECQRRTQNTLSTLRAIHQCLAV

SEQ ID NO: 60540 - protein, 395 aa, unknown
  TnpB Polypeptide
MHGAVMPQVVETLKFRLNPEKEARAVLSRYAKECQRIMNHVFRDAWMPFSRATNYYALNAKHLRAENPLSEKFDLRAKAYYEALLVKVSATIQKRGVLFKRPFIVCRSRMGRIRREDGKYVFGIKHPYEKGWLEMPIEPGHGKSDWRKEGIRKMEALVESKSDFPSYEMHRNRFGGWILHISLKGMVAEVESHNIMGVDVGIRNNAVAVVRGAENSHVATRFWKGSEFQAVMRRFQARKKEIQEQKKSKRLEVSGWTNAYLNKVAKEMVDFAVANSVSVIRFEDLRAFRPAKVSPGKGGKMERQMNRMLGSWQRGALLRAVEQKAMREGIKTEEVPAANTSRTCPKCGQVREAYSDAMFDCSACGYVNNRDWVGAWNICGGGVSDQARNQPISRE

SEQ ID NO: 60541 - protein, 412 aa, Sphingomonas sp.
MPQQILTHVYRLQPTRAQHAALAKILKDQRFLYNAALQERRDAWRRAKVSIGLNDQTRALTEIRGFDPTYSGVPYDVSKWTLKRLDDAMRAFFKRVKAKAGKAGFPRFRSEARWRSFGFHQKDGLRVRNGRLLFSGGIVGGLRMRMHRPLPDDAVLKSAVFTREGNVWRVALTIKTETAPGHSRASTAIGVDVGVNWLAATSDGVFFENHRPRRQREKALRRAARALARCQQGSRRRRKVRARLQREQRHVRNIRTTCMHDVANAIARSASTIFVEALNLKNMTRSASGSLAEPGVQVMQKRGLNRSLADAAPGRLIAMLRYKAERAGVEVVAIDPRNTSRTCSACGVVDAAQLGRDRYRCGCGLDLQRDHNAAINILQRGFAVHEAARRLGDRNVAGRGERGPVNADPLAA

SEQ ID NO: 60542 - protein, 382 aa, unknown
  TnpB Polypeptide
MRTYKFRLYPDKEQNKILLETFDLCRFVHNKMLEEHSKNPDKNHISRYITVLKKQYPELKQIYSQILQYECYRLFSNIKTLSQLKKKGYKVGRLRFKNKERFKTIVFYKEGFRILDVGTRYNILQLSKIGNIRLLQHREMNGKIIMVTIKRKVDSWEAHIVTDADTEFKRGDKIVGIDLGIKSFLTDNTGNKIDNPLFLNQSLNKLKKLHQNLARKKKGSKNRYKAKIHLSKHYEYITQQRDDFLFKTTTKLINNCKFIAIEKLNIANMKKISYNSRNINDSSWGKFLQILDYKAESAGCQIVKVNPRNTTKECSNCGNIQNMPLNIREYNCKKCGISLDRDINAAKNILHIALEQGNAKIKNNLSMTQETLTQNRVGSSQC

SEQ ID NO: 60543 - protein, 459 aa, Micromonospora sp.
VKTFQAYRFALDLTSRQELDVLAHAGAARVAHNWALARVKAVMDQRSAERSYGVPDELLTPSLHWSLAGLRKAWNAAKPAVAPWWGEVSKEAFNTGLDALARGLKNWADSRQGVRAGRPAGFPRFKSRRRTAPSVRFTTGAIRVEPDRMHVVLPRLGRLKLHESARRLARRLDNGTARIMSATVRRDGGRWHVSFTVEVERAERVPARPQSVVGVDVGITHLAVLSTGEMVGNPRHLLDAQQRVRSWGRALPRKTGPDRRTGRRASKRWERAAARLGRAHARVANVRRDGLHKLTTRLAREHATIVVEDLNVAGMLRNRRLARNIADAAFAEIRWYLTYKTLWNGGRLVVADRWYPSSKTCSGCGAVKAKLALSEREYECEACGLVLDRDHNAALNLAALAADLDTAGSGPVAARGADQKTRIRGQVAKKREPGTASVGQTGTVLPQGRTTNRVLTKTH

SEQ ID NO: 60544 - protein, 385 aa, Frankia sp.
MLSLMGSKVVKRAYRYRFYPTPSQAAQLARTFGCVRYVYNRALAERHRAWFQEQRRVTHAETDKMLTEWKRDPETLWLAEPSKGPLQATLRHLQTAYVNFWEKRAGYPSFKKKGRTLDSATYFRNCFSYRGGQVRLAKQDQPLNVVWSRPLPEGAVPSQVTVSRNSRGQYHLSFLIEETITTLPAVSGRVGIDAGITSLVTLSTGEKVTNPRHERADRIRLARAQRELSRRAKGSANRAKARLKVARVHGRVRDRRRDHLHKLSTRIIRENQTVAIEDLSVRTMVRNHALARAISDASWSELRRMVEYKAGWYGRELIAIDRFYPSSKTCSACGSIVEKLPLDVREWACHACGAVHDRDINAAKNILAAGLAASACGDGVRPPRS

SEQ ID NO: 60545 - protein, 410 aa, unknown
  TnpB Polypeptide
MEQTVRYRYRAYPTAVQEQSLKRLFGCCRVVWNDTVCLFRKLFDPNGRMPSSAALQKKVLADAKRTEERAWLAEVANVPLLQMHRDALRACWNGVRKTQRQRRARYRSLKRNPVNSARFTANGFRLRDNGRLYLAKIGDLKIKWSRDLPSTPSSCTIILEADGSWYVSFVVRRETTPLPAIPVSNAIDLGFNHLGSLVDTDGNRRRIPAPKPLNQTQRRLAKAQRKEARQQQGSKRYQKQKQRIARLYAKARHQLDDYQNKQALRIVRETQAIGLETLNVHGMSRIHGRSVLTVAPSRFVMKLEQKAQQYGRQIRHIGRFQPSTRLCSQCGHHVKGGIPENVRVWKCAECHTILDRDYNAALNILDAAGLAESLNARGDSVRLHLATAGRSNSQGNANHRHHNDAGISML

SEQ ID NO: 60546 - protein, 414 aa, unknown
  TnpB Polypeptide
MPISKRSLKARNKRIKASRKTTRNRRKTQVCRVFTCKVDYGKLTEKQRNALTELFRDAKRLYNDCVLADSVFDYAIPKSVTVRMPDGSFENRDLNRIGAQSAQGVVQQAKDNIRGLKALKEHGHKVGALKPVKHVDCIPLKQAGRTYRLNGSYIKVEKIPGMMHLTGTRRLESWEVGPAKLLRRATGYYIAFSCFKDKAEYEKSRPAKPAPLIPIGGIDAGLKADITESDGTTTIRHYPDSAKARYWARRMSKRDKADKGWWKANRQYRMEMDRLKARRKHAAIAERQRLEAKYATIVIQDEQYAQWRKRKGWFKAGRILQGGILGRLYALLKPLPQVIVLDKWQPTTAWCRNCGRRTPTPLKKRTYTCAYCGVREDRDQHAALNMIALKDMPLTHEELRRPRDIPIGPYGLTA

SEQ ID NO: 60547 - protein, 652 aa, unknown
  TnpB Polypeptide
MNIKEEPPDDFFKCIKVSLKHVLKHFNINQPKINKSVIKANKIVIHTLQFMKLYLLDYYDKNNTLPIVDKEFINSCMKILCNEKTTGRPPKKEIKELKDRLKLFYNEHYKPLCKDEELNYTHMNTILDYLTIDILTMYENNIKQHYIDYVERYVNVVWEQKYMSTKIRKIKKTKIDRETTIRNLNSQLRKIKNDLLNIENSEYKSKSFYHKWINQHKQYIIPNKNKFRKDNLYYDLQCCPQDYFGCMLFMMKQVEKKGYTTTNPFPLRNEIVPKHIRLDTTTLVHLLMNKKQGNKSDYLFNGNLKRFEDKIWNFFFRTERKCFLKNWYSFHHMIETDGISCSILLLRKDKVGKRIIINKIPTKEKYIDEVKNYSAIIDKNIVAIDPGKMDLLFCVDNCNKDANEYRYSQDRRRKETKSKKYGKILLEQKLAKIDNKTIIEWETELCKYNRKTLDIEKFKEYCKKKNQMNYKLFEFYEKNLFRKLKLNGYWNRLKSEQKLLNQFKKIFGKPEETIVCFGDYEQRKHMKYKEATKGKGMRTLFKKNGYKTYLVDEFRTSCKCSKCDGGSCEKIMVRENPKPFRNNLRLVHGLISCKSCSNVWNRDCNGAKNIYKIAYNSINKLERPSYLCKKSSDVLHDTSKSKFTRLETGKPS

SEQ ID NO: 60548 - protein, 652 aa, unknown; identical to SEQ ID NO: 60547
  TnpB Polypeptide

SEQ ID NO: 60549 - protein, 405 aa, unknown
  TnpB Polypeptide
MVMRAEKHIIKKNNEYYPMLSEFCHLSKNLYNFANYHARQGYIKNGRIPNYYELEKLAKQESSTNNDYKSMPTAQAAQQTLRLLAQNWASFKESRNDYKKNPEKYTGRPNLPGYLSKDGEYNLILTNQNCKLKDNVIYFPKAFSGLTVKTKVEGSFQQVRILPRNKHVVIEVVYKVEVPETLPDNERCMGIDIGLDNLAAIASNTGINPVIINGKGLKSLNKHYNKRKSHYQEVAQRRNGRYYSNRMNSLTVKRNRRVDDTMHKASRYIIDLAIENDINTIIIGNNKDWKRESPLSKKVNQTFVGLSHQRMIEMISYKAEDVGIRIELTEESFTSGTSFLDNETPVRDYYNKSRRVHRGLFVSNDGFRVNADINAALQMIKKVSPNAFSNGVEGIGLCPVVVNVS

SEQ ID NO: 60550 - protein, 376 aa, Bacillus sp.
MTVLLNQKYEMFPTEEQKETLDRWLQYCRQTYNAALLDKERKYKQNKENYNRYDMQRQLTLDKKKYPFLKEVPSQPLQEVFVRLKKAFDNFFRKDAKYPKQKKYNEYSSMTFPQFGFNKKGNRMAMSFSPNGKLYHTKLGEIHALIHRPIEGTIKQLIIKRQGKRWYAIFCVERQAPPPTIDTNNAIGIDVGLHKYAVLSNGLEYENPRFLRKKENQLKKAGRKLSKKKQGSANYRKQVQRVRQLHEKIANQRRDFLHKLSRNLSKAYSIIAVEHLHIRNMVRNRKISKSISDAGWGIFRNMLAYKCEKNGGLLIKVEPKYTSQDCSSCGNRVEKSLSIRTHICTKCGTVLDRDHNASLNIIQKALEELFEANKIT

SEQ ID NO: 60551 - protein, 392 aa, Mycobacterium sp.
VRRAYVFRLRPTARQHQALAACLDAHRELYNAALQERRDAWSHSKSRVFYGDQSAQLSEIRAVRADQAVWSFSSQQATLRRLAKAFDGFFRRVKRGQTPGYPRFKGKARFDSVEWPKDGDGARWLPEHKRVYLQGVGQVKVHVHRQVQGRVKTIQIKRQGRRWVLVLSCDDVPPSPLPATGRQAGIDVGVASFATTSDGTQVENPRWGRAAQDKLAAAQQRLARAKRGSNNRAAKRETVGARHRKIANQRKDFHHKQARQLVESYDVLVVEDLKIANMVRRPKPVPDDDNPGQHLANGARAKSGLNRSISDAGWGRFVSILRAKAEDAGRIWIEVDPRHTSDGCENCGHAARANRVSQAVFECQCCGHRAQADEHAARNILRAGLARHAHAA

SEQ ID NO: 60552 - protein, 387 aa, Mycobacterium sp.
MVVGGTRLWRQRHNLAHSDMTELQWRQQWDAVRMFITADGEAGKVGGNETIRVDPQGCLRVKVPAALTAEFGPHVVIEQPVHFAYRGDEWAERVASRQAVRYDVHFDADRGRWYLDASWRTSPKPVPSLEELRAERVLGVDLNADHLACCVLDASGNPIGEPNSIEVVTAGLAALHRDGRVRAAIVTLLNLAQQHNCGAIVIENLGFTDCRATGRETLGRGKRGKRLRRTVAGIPTAKFRRRLIGMAARRGINVIGVDAAYTSRWGAQHWIQPLRQQTSDPTTVTSHHGAAAAIGRRGLGLAIRRRPAGPRTGQRTGAGKPPVRPSRHLSTTRRYSSSDPPTCPQRGVSVRRKTPIARGQHRSGRSEAVRTPAHSSGTVEGSSPSAT

SEQ ID NO: 60553 - protein, 524 aa, unknown
  TnpB Polypeptide
MALFQVTEQRGDTGASVSTTTPSHRTPPPKRESQSATVESQVRSSGTILSDNPSTCESDIPTLKSSKILARESISNGKDCGPYWNERCAELSSRLWLPTETVLQDSGARSSSLLYSSPAENSWFLTKFHSHQSKNLLPTCLPSFTSFLVDCTDSENTGLRSRKIRVYPDFEQRKILRHWFGVSRYVYNKTIEYLKKPDTKANWMEIKLWLLKDLPEWCDGVPFQVKSIAVKDACQAVKNAKARWKREKQFSIVGFRSRKNPSQTIFIPKSAMNPTKGPYYTMLGEMSFSEIVPSPQGDCRLTYRSGRWFVTVPVETAIKTAESQGRVVSIDPGVRTFTTFYSPDCCGKIGTGDFSRIQRLCHYLDDLISRTRKEKNKNRRYRMKKAQARMRWKIKDLIDELHHKAALFFVRNFDVILIPKFETSQMSRRLTRKIRAKSVRSMLTFAHFRFQEFLKFKAWEHGKLLFNVNEAYTSKTCSWNGKIKKIGGAKFIKDDGVVVDRDYNGARGIFLRGLCEIQPSLEDE

SEQ ID NO: 60554 - protein, 424 aa, unknown
  TnpB Polypeptide
MILTKKIKLNIKKGSLDKLWEVSNLCTELWNVALEQRRYRSSFGKVNIYSQKRELPLIKKEFNEFKIPSSQVLQNVLFSLDRGYKMFFTKLKKGDRDVNPPKFKSRKYFFTQEYSQPNSSFVIENNQLKLAFGKNKKEWIIIDLKGEVLPESAKTIDLSYDNVSKVFYASVTYEIKDVIIKKKGSEIYFDPGCKTSLVGLKNNGQFFEYDMNPLRKINFDTYKLIDKLCSKKDKKVKNSNAWRRLNKRIKKLWQKIKTRTKTYLHTLANKILGDHKDVKSFKIGDWTSQKTVSKDEHGFINKRINRAVQNNNPLEILIGYLSYKAKMKGQIVERFDERGTTRTCSKCDKKHEDGLNPSIRVFKCIDDKCGFTYSRDHQSCLNFYKKFNSAKWLRLLGKLPKSSIKVSLKALSFKPQVEEIQLSS

SEQ ID NO: 60555 - protein, 407 aa, Lactobacillus sp.
MEQTLTAKVRLYPNSEQAKQFKEVTKEYQRLCNIISQWYFDEHFLPERKRFQKEMYHDLRLQSKLNSLMIQSVFRTVVARYKTVKTQLYQHPYKYRDINTSEWHREFRDLNWLQKPITFSRPQADYVRSYNYSFVQKGTKISLNVLNKRIKVPFNSKYLPFSLEDKGIKLGTAKLVCLKGRWFLHMSYTKKVDSWKIENNQHVVGIDRGLRFITTAYDEKGKTNFVSGKNIAYKRKKYAYLRSKLQSKGTKSAKRKLKRLSQKENRWMADFNHCLSKTLIEKYGQNSLFVLEDLTGVTFEKSNVNKNLTRELHSWSFYDLQTKLTYKAQGNQSQVLIVSAKYTSQRCPKCGQIRKENRNHDLHEYKCTSCGFRTNDDRVGAMNLQELGKQYISGIETPKFELNNVTD

SEQ ID NO: 60556 - protein, 381 aa, unknown
  TnpB Polypeptide
MQRAHKIRLVPTRTQEQQLRKACGVARYSWNWALAEWNKQYQAGKRPSALSLKKQWNTCKPKWVYEAPKDCNQQPFANLGKAFTAFFRKTANRPGFKKKGVHDSFYVSNDKFKCSGKKVRLPVIGQMRMREVLRFDGRILAGTVSWQAGQWYLSVQVEVLQPPKAARASASVVGIDAGIGCIGVASDGSECANPKMLKKLKSKLSKAQRILAHKLKGSSNRKKAIVKLQRIHKRAVDVRNDKIHKFTSQLAKNHSTAVIETLDILEMKDKAQRWLRILLQDTAMREMHRQLEYKMSVQKAPKFYPSSKTCSTCGTKKAVLALSERTYRCEACGLELARDLNAAINLKLMRWVTPCRPVEGIPVGNPTKQEARTAHLCAQLV

SEQ ID NO: 60557 - protein, 357 aa, Planktothrix sp.
MFTALKVRLYPTEQQRTQLAKEFGCARFVYNHFLAEWNNTYQETGKGLSYAKCANQLPRLKQEKPWLTEVGSQVLQHSLKNLEAAFKNFFKGIGRAPRFKSKHRQQSVTYPQGFKLNQSTIKFPKLGEIKAKFHRPIKGNVKAITVSMTPSRQYFASLRIEVDREYPEALTQGKVIGIDLGLDSLIVTSDGEKIKPPKFYRKYERKLAKYQKRLSRKQKGSQNRIKARIKVAKVHNKIANCRSDSHHKLSRKLVDKNQVIVFENLNIKGMSKNHCLAKSVNDAAWGMLQTLTEYKAKEQGKVVVFVGTSGFLVLKLVIIVGIKSSLCPYKSELGNVQNAECCMIGISMQRKICGTIF

SEQ ID NO: 60558 - protein, 391 aa, Actinomadura sp.
MNPWQDHGVQLRYNFRLYPTPGQRQALAKAFGCARTVFNDGLRTRQEARAQGLPYISDGELSKRVITEAKKTPQRSWLGEVSAVILQQALADLNQAYRNFFSSATGKRKGPQVAPPRYRSKRDNRQAIRFTRNARFQVTAGGKLRLPKIGDIPVRWSRDLPSAPSSVTVIKDAAGRYFASFVVEVGDEPLPQTASEVGIDLGLTHFAVLSDGRKIDNPRFLRRAERRLKKAQQALSRKEKGSNNRKKAVVQVARAHARVADARRDFAHQLSTRIIGENQAVVVEDLSVKGLARTKLAKSVHDAGWAQFTAMLAYKAARHGRTLTRIDRWFPSSKLCSTCGTLAESMPLNVRSWTCPCGAVHDRDVNAATNILAAGRAERLNACGGTVRPAA

SEQ ID NO: 60559 - protein, 433 aa, Pseudomonas sp.
MSCVAKVVVVAHGPTYIIPMQRLQAFKYELMPTGEQQRDMRRFAGSCRFVFNKALAMQKARYEQGEKKLGYAGLCKQLTAWRNGLETPWLKDAPVHPLQQTLKDLERAYANFFAKRAAFPRFKKKGQSDRLRYPDPKQIKLDQANSRIFLPKLGWLRYRNSREVLGAVRNVTVSLSAGKWCVSIQTQREVEQPVPQATTAIGIDVGIVRFATMSDGSHLAPLASFKTHEVRLRRAQRAMSHKTRFSNNWKKAKARVQRIHARIGNARRDYLHKATTAISQNHAMVCIEDLQVSNMSKSAAGTVETPGKNVQAKSGLNKAILDQGWFEFRRQLDYKLQWAGGLLIAVPPHNTSRTCPQCGHVDAANRRTQAQFRCVACGLEENADVVGAINILARGHRVAASGETVQSGRSMKQEPTEATTRESSCSTVGIPCL

SEQ ID NO: 60560 - protein, 367 aa, unknown
  TnpB Polypeptide
MDYITYKFKLYSRCDRNKYLHRDIDAFAGVYNHFIALHKRYYSRFNKYPSKFTLINHLTKLKRTTRFAHWCLLPSQALQNVVERIDFGYQKFFARDNKRPPTFRSKFRYLSYMLKQAGYKFLEGNKVRIGKRVFRYHKSRCFDADSIKTVTIIRDRVGDLWLCVVAKAEGIKSFIVKNGKTAGFDFGLKTYLTASDNTRTQSPLFFSRNTRQVKKANRNLSRKQKGSNNRHRARLHLAKVHRHVANQRRDYHWRLAHHLCKEYDIVCFEKLNIKAMQTLWGRKINDLGFANFLTILKYVAQKTGKKVKQLNQWLPTSKTCSACGTVKEDLPLRERTFRCECGSEMDRDLNAAINIHRWGHPPMQEVA

SEQ ID NO: 60561 - protein, 453 aa, unknown
  TnpB Polypeptide
MQIQLMKQFCGCARYVYNRTLSLERSLYKKDNKHSFKYAEAVNRLPEWKKKNPFLKECHSQVLQQSLKDLDQAYINFFRKRANFPKYKKKFRNDSIRFPQGVELDEAKQQIRLPKIGWVGYRKSRDIMGAIKNVTVSRRGEKWDVSIQTEYEVSSPASNPSEIGIDMGVKRFVTMSNGDFVEPLNPFKQEQEKLAKLQRKLARQKKGSRNSRKTKRKIARLHRYIADSRRDFLHKTSTKIAKNHSIVYVEDLKVSNMSASAGGTKESPGKNVRQKSGLNRSILDQGWYSFFQMLSYKLERGGGKLIKVDPRNTSRTCPRCGFVSAENRKSQATFACIGCGYRSNADEVGAINILRAGQARLACAMSGAVRPLSAGTRKRSTAALGHGRCRGGMESLSFMTRRMSISVTLRQMSCPGRLRFFYNFGEEVIVGRIRDFDVHKVSRLHIRIVFNKD

SEQ ID NO: 60562 - protein, 421 aa, unknown
  TnpB Polypeptide
MYEERNRKIRENGKATRERHAQMDCRVFSGKIREDRLSKAKLEKLYRCFLEGKWLYNAVVATDSLSLEDTSHVQVKVNGSFETREINTLSVQMKQSVVDSAKQNVFNLAKAKRKGLKVGKLQYKHECNEINLKQFNHTYKIKGKNKIHIQNIGVLVVNGLEQIDLDEVEFANAKLIKKPSGFYIHLTVYSKKPPQSNTEKEVLGLDMGIKDQLTFSNGVKVNFYLEESEQLKGLMRKLSRQHKGSNQYKQTLNRIRRIYEHQNNKKADVGNKLNSVLKKNYIICFQDELLNSWRRKKVTGKFSFYKQVQHGILGRVKSNLKKNSSNIMLESSVPTTQTCPECGCLTKHSLDKRIYHCNHCGFENADRDIHSANMMVLLSGYGTYRSLNTDTVSTEKMVSLLTNLSNLGVVVTTDSMETHCI

SEQ ID NO: 60563 - protein, 382 aa, unknown
  TnpB Polypeptide
MRAVQKSVRVRLYPTEEQEVLINKTIGCCRFVHNQTLVGCKISYEQTKKFTPKNKRITDLVPLKEEYSFLKDVDSGALQQSVRNLNSAFDNFFKNRNHFGFPKFKSKHNPKQSYRTPYNGGTADVLDNKHIKLPKLGKVKTKRFDMPEVYKIFSITVEKMPTGKYYASICIETEVEPLPKTGKQVGFDLGLKDLLICSDGTRYERPKFAYVYKDKLAKEQRKLSKMRTKLERDNLNLDECKNYQKQKHKVAKLHEHIANCAKDFNHKLSRKLVEEYDLLAFENLNVEGMKKNPYLAYSISEVRWSQLLGFIKYKCSWYGKRFVQVDRFYASSKICSCCGTYHKDIVNSLKVREWICPDCGTHHDRDVNAAKNILNQALSVGV

SEQ ID NO: 60564 - protein, 464 aa, unknown
  TnpB Polypeptide
MLKRKLNQDFILFKKSKFYEDDEKTEPIRTANWYNQRIQFLTLKFPVPQDRELIRIYPQNQHLSSQTNRTWIPLQFFNNSIPKYNYVKVKNQNVIQTPLNITTTERTRLRLSETEKKLYHKMFSIHNLIQKDFLYEINMYLQDKINFINKKDFVNFKKISFKSEEICKINFDLIKANVLDSKQNMRAQALHPHIFKTDFYSENSKSKAIDWVIKRLLSGLSITIRNKDNSKLSCVSDNGDIITYSRPGRYYICKSRYISSSSPSSSETLTENQEKKIIALDPGIKTFLAGYNNQGQFLEFGKGVGKRLLRMKLKMEKLNQSKNFIGRLNHKIKDVNGDMQNKIIHDLNYRYTHVLIPKLDTPKMLKEKSLLPNVLKQVECLNHPRFLQNLLHKSKIDNNKCKVSIANEHQSSIGCPECGKINETLGSSRNFACSRCPYRFDRDLGSARTIFLMNVENHCGKLIL

SEQ ID NO: 60565 - protein, 410 aa, unknown
  TnpB Polypeptide
MVISYNAVLRFPNTDTESRYKEVLDVEKDCYNYLSQLFDRIDFKHHRLSRYDVQSTYYKELREKFPLLSSQMVLKAILEAVGNWTTCIANEKDKFEPPIKKNLSMVLDKRLYNKLTSNSVDLTVPGFNRVHCTVDSYKQLDKLFYLYKPQSCNVFYRRGQFYLTIQFDVSEMEHIEGEAIGVDRGIRRIVTCSDGTGWINREFNKKRRKLRYLRRCLKAKNTKSAKRHLKKLSHTERNRSKNEVHRVVNWLLAKDYTTYVLEDLSKIKKSTSKKTIKVDGQKKEVKRTKHNNRFGQIPLKEIQTTLEYKAPLLGKEVVTVEPAYTSRLDYRGLPEGKRLGTRYYASDGELLDADGNGACNIVLRHRPDSIVVKPTYGSMVFSGRPMSTGQSWLRLAQTVATTSSPPLCGA

SEQ ID NO: 60566 - protein, 450 aa, unknown
  TnpB Polypeptide
VKTQIAFSHQLNQGKYNALLEQAKRLGVIRSEVWQRFSSLNGVGLQDRKVRDEWIKEGRKFNVPANAWKQTLADAMGDIKAHREAAKVQVKRAIRRRTHENSEQKRLYTLLKSDKYADDKYLSRVMRAACRRGHNHTHNQINARSDDYTVFTLKKNVWIKIPSLVKGKRIAIPLNTTIAPKGNLRLILRNEKVEVHYAIEVTKTNDCGTKTIGVDKGFTEALTDSDGEHHGINLGDVLSKESDHLKLKYQRRYKLRGIALKKPHVQKHNLGRKKLDKQAIKHQSTVKTIVHEAVNTVINKAAVLVVEDLTSPISGKKFGKNVSRRLSSWTKGVIAHAIENISHRRGSTVVHVNAAYTSQMDSRNGTLTGKRCGDKFYCADGVVLQADVNAARNVLARLQDTEISLWIPYQQVKSILLKRTECHRLKLLNQDSSCKLFGLSTESELPNAYV

SEQ ID NO: 60567 - protein, 414 aa, Moorea sp.
MLTMNYTSRIYPTVDQQALMGEWLETCRHLYNRCLRALKDWIASRKCSLYSCSLNQEYIMSPELPFPSYLEQKRQLTQWKKTDPCYKAVHSQVTQDVVKRLHNTWEAFKARGHGFPRFKKFGRYQSFLFPQFKENPISGNQIKLPKIGTVAINCHRPIPEGFKVKGVRVVSRARGSIWYVVVTIQWDVKVPDPSPFGRGIGIDIGLESFLVTSDNFRVEPARFFRDLQSRLKELQRKASRKKKGGQNWEKAQIKVAKLHHQIANTRKNFHFQIAHQLCDQADIIFVEDINFKMTSRGFLGKQMLDGGFGQFRDLLSWVCWKRGKYFAQVDHKYTSQICPECNTHTGKKELSERIHKCRECGYQTSRDHASGRVILNRGLNNLVPMDCREKKLSGNGVLSGILYLDKCRSRNANS

SEQ ID NO: 60568 - protein, 379 aa, Gemmatimonadaceae sp.
MERAYRYRIYPTAAQESLLRCTMGCVRLVFNRALAARTQAWYERKERIDYPASSAMLTNWKKQDDLSFLNQVSSVPLQQALRHLQKAFSNFWAGRAKYPNFKKKHHGGSAEFTRSAFRFKAGRLYLAKCDEPLPVVWSRPLPDGAEPSTVTVKLDPAGRWHVSLLVNADIAPLEPVDRVIGLDAGISALVTTSDGQKVTNPRHFNQHYRRLRRAHKALARKQKASRNRERTRRVVARVSAKIADCRKDFLHKLTTKLVRENQTVVVEDLAVKNMVKNHKLARAISDAGWGEMVRQLTYKCQWYGRTLVQIDRWFPSTKRCGTCGHILSKLPLSIREWTCPECGCVHDRDVNAAHNILAAGLAESRNACGADVRPERDGS

SEQ ID NO: 60569 - protein, 239 aa, Microcoleus sp.
LPSLKKEYSWLTDAYSQCLQYVALNLSTAYKNFFEKRTGFPRFKSKHGKQSISYPSNVKLDGDYLKLPGKVGLIYCKQDRKFDGQIKTVTVSLNPDGKYYASVLVDDGRELAQVSTEGKAIGIDLGLTHFCITSNGSKFDNPRHTTKYARNLKKKQQSLARKQKSSKTRYKAKSKVSKVHSKIRRVREDFLHKLSRKIVNENQVIAVENLNVKGMVRNHNASESNIRLWLGSILYDAQV

SEQ ID NO: 60570 - protein, 366 aa, unknown
  TnpB Polypeptide
MISKTMGCNRYVYNYYLNKMKEFGYQNGFTNILDYTNNLKYKATFLQEVDSIVVRQTLFNLDNAFQKMFKEHSGYPRYKNKHNKSSYNTCAIYRKYKDKEYCNIEIDLCKRMIKLPKLKWLKIRGYRNLKVIIGRIKRATIQRESNGKYYVSVLYEQDDIKYKVIPRNVVGIDLGIKKLLTLSDGTSYDNNKCLLKYEKRIKRKQRELSRKVKRSNNYYKCKKELAKLYSKVANSRKYYIHKITKDITDEYDIITCEKLHTKSMIMEGTKNHLSKSIADASFNEIIRQLLYKSNYKGKYFYQVDEYYPSSQICSVCDHQNKVYKDLGKRTYKCNNCGVTIDRDLNASINIMFSGVTNIYKKILISR

SEQ ID NO: 60571 - protein, 392 aa, unknown
  TnpB Polypeptide
MGEIRAYQYRLYPTEEQVKILARTFGCVRYVYNWALRLRIETYKETKRSLSTNELSRRLTRLKQQSEQTSLNEVSSVPLQQSLRHLADAFTNFFEGRAAYPKFKARHGKQSAEYTRSAFTWDGNVLRLAKMEDPLSLRWSRPLPQGARPTTVTISKDTAGRYFVSIRVEEEIVPLPPANKAIGLDLGLKSMIVTSDGEAIGNPKFFARDEKNLAHAQRRMSKKKKGSRNREKAKRKVARIHARIADRRRNYQQHLSTRIIRENQTICVESLRVKNMVKNHSLAKSIHDVGWGEFVRQLEYKAAWYGRTLCKIDTFFPSSKRCFDCGHVLETLALEEREWTCPKCGVHHDRDKNAANNILAEGLSVAACGETARPERAKARTGKPRRSRKALP

SEQ ID NO: 60572 - protein, 318 aa, unknown
  TnpB Polypeptide
LRRGQPTKNPYSLKPQITAYQGFKIRDGALRIPVGKRSFQYVPLTSHTVSVLSDHAVTVRSFTLTPTSLSLCISKEVHEVECTETIGVDRNLRNLTVGNGSRVVQYDLSDTVRIAEKTVEIIGSFKRNDYRIRKKIASKYGLRRRNRTQHLLHKQTRRIVAEALERKQAIVFENIEGIRRLYRRGNGQGPTYRGRMNGWSFSEAQRQLEYKARWVGLPVIRLSRRETRGTSVTCPQCGERLQEDKRIKRKLWCGECRLMMDRDVVAAVNLSRRGRLRFDRSRAQNGLEGGAVEAVKGNPTPTVILRVDASKSIQETQS

SEQ ID NO: 60573 - protein, 562 aa, unknown
  TnpB Polypeptide
MQTRTYFSVHIRKDLMSPSSVQDVEDDIVLFNRVRHAATADLEIRRASSRKGSGGSVPDMRKKENRAFLVNAAPSPHLRLKARFHTDDHFTNSAVNTAKAAIQSAKELNALNIEETQARLSDLRSARAGRRRNLTRLRNIKQMLIRASRAVKEGKAPSYSLAGIFERYDASTGEFLILRRGKIKQSYSDPYLFEIRYVDPEIRRLEHTIRLLDEKEERLRIKAARMKETPPGICYGTKNFFRRQYDHDRYPDHDIWKQSFRKRRCRALMVSGRKDAVQGNFLFRYDPENRTLTYTSQQGRHKVIFPGVVFPYGQEKVEAAVLAPKADRHATAWRIIDTGGSFLIQCIVSEDEAPRLNDFFLDGCVCMDTNYDNLSIAQLDGCGNPLWHKVIPFDLEGCSSERAGHILSNVLEKVFGACRLANMPLAMEDLKLKHTADHYGSKKRNRVTSRFAFSKITDLVDSKSFKYGISVTKVDPAYTSQMGKVLYVKKYGLSVHEGAAVVIGRRAMGLCDRLPEPFRMGLSAAQASDKRLRQWKAAYREIKQLLPKDMYAFDFRAHTDTG

SEQ ID NO: 60574 - protein, 389 aa, unknown
  TnpB Polypeptide
VILKAYKYRIYPTNEQRTLLHKTFGCARFIYNWGLALRIKKFQEEKVSINSIDLCLLLTELKKEKTTEWLGEVCAQSLQAALRNLDNAYTRFFREKKGFPKFKKKSGHQSFQCPQHSKVDFANNTISIVKIKNIKAVFDRKFEGKVKTVTISKTPTNKYYASVLVETPDNPKLKVEPVFDKAIGVDLGLKHFAILSTGEKIENPKHLQKSMKQLRRLSKKLTKKKDKTSKRREKARLKLARLHEKVSNQRNDFLHKLSTRLIRENQSICLEALNIAGMLKNHCLAHSISSASWSRFIEMLKYKAEWYGVNILQIGRFEPSSKMCSCGHINNALKLDDRNWTCEKCNTTHDRDILAANNIKNFAFNEQSLIENLGNHGGENRAGLARINA

SEQ ID NO: 60575 - protein, 401 aa, Actinomadura sp.
MARQVKRAFRYRFYPTGEQAAELSRTFGCVRLVYNRALAQRTRAWYQERRRTSYVETSAWLTAWKRTEELGFLSQVSSVPLQQALRHLQTAFTNFFDKRAAYPRFKSRKKSRASAEYTRSAFTWRDGRLTLAKMSGPLAIVWSRPLPEGAEPSTVTVSRDGAGRWFCSILCEDTITRLDPVKAAVGVDAGVTSLVTLSTGEKVTNPRHERADRERLAKAQKDLARKAKGSKNRDKARQRVARIHARITDRRRDFLHKLSTRLLHENQVVVIEDLNVAGMVRNHCLARAISDAAWRDLRTMLEYKADWYGRELIVIDRWFPSSKLCGRCGTIAEAMPLKVREWRCGCGAVHDRDVNAARNVLAAGLAVSACGADVRPKRRKPSGQTATKQETHPAREGIPRL

SEQ ID NO: 60576 - protein, 462 aa, Nostoc sp.
MPQALRCANATLAGRKPTPPSGLTMYRAIKLRIYPTDEQESNLAQCFGNTRWLWNYMLNATTTEYKETGKGLSKVAMDKLLPGLKKEYEWLGLAYSQVLQRVTFNLSSAFVNFFEGRAKYPNFKSKHGKQSIQYPQNVKLIPQDSVIKFPGNLGIVKAVFHKELAIAKFTTVTLSKNADGRYYASILFNQEDIPVVAINEAIGVDLGLKNFAITSDGSKYDLPKKRLAKLEKNRKRKQKKLSRKKDKTSNKRRKAKRLVAKVSSKISRVRVDFLHKLSRKIAYENKVICVEDLAVKNMVKNPNLAKAISDQGWGMFLTMLKYKAERFGHTYQEINRFFPSSQLCSETLLPIPMLQNGYDSLGVRFVDCPHCQKQHDRDINAATNIKNEALRLLVSQCGLLCETLRDGVSPSGATGEPVRVLGTSTSAQGGNVTPKTSGRKKSTKSEAVPNDLGSLHRTARSM

SEQ ID NO: 60577 - protein, 372 aa, unknown
  TnpB Polypeptide
MKRSSTPSFVLTLKLNTSKEDERILTDRFFSGWKIYNTIVRHVRKVLRSMRQDPSYRDAMNRYHKDRKSKAIKKELSDIRNQYGLSEYALHKFVKLQQKRYVADIDSLTAQKIATHVWQAAEDILFDSGKQIHFRKWKDFGSLEGKNNQSGIRFRDGRMHWKGLVIQPKLSRKDRYAREALRNRVKYCRIFRKTVGGRYQFYLQLVLEGTPPDKHPMGSGRCGVDIGPSTAATVSETDCSLKVLAPEAESIEREQRILLRKMDRSRRVMNPDNYNPDGTVRKDPKRWKKSNTYKETERRYQNLCRKRADIVKQSHEREANRLIAQADQFYVESMNFQGRARRAKETKRDESGRCKRKTGSVRVLGTGRLQNS

SEQ ID NO: 60578 - protein, 427 aa, unknown
  TnpB Polypeptide
MGYVTYTFKVKRPNPGKVRRLVAFMAGPWRRGLNFCVEQAKQHRPRHAFDLHAFVSHPLRRGCGLPSQVAEACRDTAYEAYASHQSRRKNGGRGRFPHWTGVPALRLNIPRSLRLFTRGDQYWVEVSLGGPPVRLRITGKARALRKAWTGRTTHGELVWRHGELFLHVAIRVPARVPPARVCQTAIGVDLNVTGYLVVAVARDLVGRVLGTFWVPAGRLNETRRRGRLARAARQRAGRRDTVRAMKDREARRVRAYLHEATTALIRWTAQFPEPFVAMETLTGIRAKVRAGKAWNRRLHSWPFGSGQDMVRSKGARQGMRVKPLSGAFSSRDCSRCGSRQTRRSGAAFACQRCGYGLNAHLNGARNMSWRAARYIRAAAGRAGETTAERHSGPEGKRDEERPLSSHNVSLRWPFRVPPKPRTLVRGS

SEQ ID NO: 60579 - protein, 470 aa, unknown
  TnpB Polypeptide
MLRCTAPPGCCGELAAVGMARFEVPDGWVLQAFSFAVDPLPQQARILARQFGGRRYACNWAVRQLKEGIEAYQCGLAGLDAVPPSFYGLRRRWNQVKNDECVDKQTGEVWWPEISKEAFADGIRGAVDAYWRWQNSRNGEAGGKRAGFPRFKRKGRDPDRFTITTGAMRVNPDRRSVTLPKVGTVRTCENTRRLERLISLGRARILAVTIRRRGTRVFAIFRVIVSRRARTPGRPGSTVGVDVGVRRLATVGAPDGTIVEVTDNPRALDRNLAGLRRAGRARSRRKQGSIRYQQANREITRLHRRIADIRTDAISKLTTRLAKTHGTVVVETLSAAGMLQQKGLPGARSRRRRLADAGLAQIRTRLRYKQAWYGCRLIEADRFYPSSQICSKCDLQTAIGWAEEWDCPGCGAHHQRDDNAAVNLARYPDSGWQAVGPVGSRVKRRADGKTGPHPARGDEAPNHNPDRGAA

SEQ ID NO: 60580 - protein, 368 aa, unknown
  TnpB Polypeptide
MKSSVDLLWEQDKVPKFIPKNTTDKLDSWLTRRAIQCAAKQASGIVRGTRKKQEQRIFQHKELVKQGKFKQARRLKKYIDKAKVSKPVTTSLSAELDSRFVKLDWDNSTSFDGWLTLTSLGNKLKIKLPVKKNKPFNWMSAKGTLKAGIRISKEEVTFNFELPDVEKKKSGSTLGIDIGSTTTLSCSDDYQSKVDKHGWDLSKIQDRLKRRKKGSKGFSKAQTLRTNYVNWTVNKLNLSSVKKIRIERFKGFRKGRRSSRKLSHWTYTTIFDKLEDICSTSGVQIEQVNPTYTSQRCSRCGWVRKSNRKGKQFKCKACSFEYDADLNAAKNIALEGLPAISKSQRLLRANRKGFYWREVVQECIVSET

SEQ ID NO: 60581 - protein, 405 aa, unknown
  TnpB Polypeptide
MLRAFKTEVELTQQQKQIFAKTVGVMRFVKNLYIERNQEIYKTEHKFITAYEFSVWLNNEYLAENPDKQWIKEVHQKAVKQSIINTETAFKRFFKGIAGYPKFACKSRQDVKFYFVRNGKSQPVKASRVSIQIPTMGWVFIKEKGYIPEKGIHSGTIQQRGGRYFISVLADVDAVLPAKPNQAARPGGLGLDFGIKSSVMDSDGISVADIEKTERVRFLERKFLRERRRLSRMWEAKVKDKQYYSSGKKKGQLKSFSYKRPLRECANYQKQRKVVQGILLRLDNIRLNAQRQQVAEWVRAKPTYIAIEDLNVKGMLKNRHLAKAVSKRNFYRLRLLPTQKCAENGIQLRIVNRWYPSSRTCHNCGCYKDDLKLSDRIFVCPECGEKLDRDYNAAMNLRDTKNYMV

SEQ ID NO: 60582 - protein, 389 aa, unknown
  TnpB Polypeptide
MITAKKVRLLPTEGQEGQLWKSAGTARFAYNWALDRQIGHMKATGKLGKIKDNELRKGLTELKRTEKYSWLYEVSNNVAKQAVKDACEAIDRFHGEGKKHGYRYRAAATKSGRELDFTDFEGFPRFKSRKRSKASFYHDTEKLRVYSDHVHLEKIGKVGLAEHDRIPTDRKYANPRITHDGKYWYISVGVEQEFEKPELTGETIGIDLGIKELAIVSSFDKPIGNINKTAEVRRLKKKLKRKQRQISRKYEKNKIKTERAYKFTKTKKHREIRERSKADTPKAGQHTTEPHTSGDDQDSENQAVEGSRRGSERERDDEKQAFVEGDSGAVFRHVRDHTGVQVQNAGHRAGGGRQVLSIEQAMFAVRGDQKRLETQGQDLYLPEMRARAE

SEQ ID NO: 60583 - protein, 294 aa, Klebsiella sp.
MKRLQAFKFQLRPNGQQERDMRRFAGACRFVFNRALALQNENHEAGNKYIPYTKMASWLIEWKSHPDTQWLKDAPSQPLQQSLKDLERGYKNFFQKRAAFPRFKKRGQNDAFRYPQGVKLDQANNRISLPKLGWVRYRNSREVIGEVKNVTVSLSCDKWYVSIQTEYEVADPVHNAESMVGLDAGVTKLATLSDGTVYHPVNSFKANQRKLAMLQRQLSRKEKFSANWQKQKRKIQRHHSHIANIRRDYLHKVTSEISKNHAMIVIEDLKVSNMSKSAKGTSEQHGRNVRANQA

SEQ ID NO: 60584 - protein, 409 aa, unknown
  TnpB Polypeptide
MHYNYKYRLDPPEALREELRHHVDTCRQLYNHVLYLLNESDDIPTRYEVQGRLPDLKTWWDDLGDIHSKVLQIVVKRVYDNLSTLKSQKENGRTVGMLKWKRPREYRSLTYNQSGFKLKNTSGRPVLWLSKIGEIPIHLHRDISENATIKQVTVKREPTGKWYATFGIDVDKDTPEKPKTPEQVVGIDVGILKYAHDTDGYAIESPDFSDERDRLERAQRDLSRKKHGSENWEKQRKVVAERHDDLKRKRRDFLHKLSNYYAREYDLVVVEDLDAKGLVELPGNSRNRAGAAWGTFLRMLEYKCEREGMHFVAVDPKDTTKECASCGVKREKPLWVRKHSCPSCEFEADRDANAAWNILSRGLEQVGVVHSESTPVETALPADTPVSAKRVIEAGSLTLKKRTASGVSE

SEQ ID NO: 60585 - protein, 434 aa, unknown
  TnpB Polypeptide
MKKLSEERKQQIKESLIATRERRKTQVIKVIELKVDCHHTSKETFNRMYECFKQAKLVTNDMIASDDIMKYYYKEHKEVQRKDKDGNFIKESIDLPVLLHRGVVQQVKTNICNLSKAKNKGVRIGGLRFKSEVNSIPIITGGIKIKDKTHITIPGFTNLKVYGLDQLDKYPKYEIADGKFVRRPSGFYVMVSVCIDKDYRQSYTNRVVGLDFGIKDNITTSDGEKFNCNVRESEQLKYLQKQIHRKQKGSKRYYRLRNQIQREYEHLSNKKKDDSNKLLSYLFKTYDLIYYQDEQISEWRKTKKSKKSRRVLSFGKKVQSSYLGRVKAKLSLSPKGYMISKWIPTTKYCPQCGRLNALGLDERMYRCLCGYEQDRDIHSAKNMVLFGSTHRAECLEQASAESPASIYSGSEMSQDMQADSMKRKQEATALKGGA

SEQ ID NO: 60586 - protein, 260 aa, Methanoculleus sp.
MAFPRGDLLPDQWIGVDLNTTGHIAVVAHPASGKVMKLGKKAPHVAAKCRSLLERYRKAGKYTKARRIKDRERSILKDLNHRISKEIVNLARMLECGIKFEKLFSTRQIRKRKKTASIEFSLDNGSFFQFQKMVETKARKVGVQVAYVNPVCTSKHCSRCGETGTRRRKRFECPHCGHADHADVNAAFNIASASCSVDRLHADRVACNGSTDTPVRILRERRRTPGLPSSALVGGMSESIHAENLLFLLERPAVMACGGR

SEQ ID NO: 60587 - protein, 252 aa, unknown
  TnpB Polypeptide
MVPQQYFVAPRLSAKKQIYPNILKGCTWTEKVPEDAIGKTVIVTYTNGQWFANVKFVQPIQQVATKGLSIVALDPGVRTFQTAFSVEDAISYGDQFVNDKLVPLMSELDRLLSERDKFHSKDRSLQWVKDRLKNLNRRIHWVRARHQNLVEDLHRRVAYDLVTLHDVILLPSFETKQMVQKSDETRKRFLRRKTVRGIQGLAHYKFKQTLKWMAKKYGKMVVDVNESYTSCNYVGWFNSQKLGRESFNSFPR

SEQ ID NO: 60588 - protein, 358 aa, Lysinibacillus sp.
MSQAITVKVKLLPTNQQASILNAMGKEYISTINMLIAEMVAEKKSTKKTTKDVSVTLPSAVKNQAIKDAKSVFQKAKKSKYTNIPVLKKPVCVWNNQNYSFDFTHIHLPLMIDGKAKKMPIRALIVDKHNRNFDLLKHKLGTLRITKKAEKWIAQISVTISTSEKTGKKILGVDLGLKVPAVAVTDDGKTCFFGNGRQNKYVKRTFKSKRKKLGTLKKLNAIRNIDDKEQRYMKDQDHKVSRAIVQFAVEHNISAIRLEQLTNIRQTTRTSRKNEKNLHSWSFYRLSQFIEYKANLLGIKVEYVNPAYTSQTCPNCSERNKAKDRTYKCKCGFQTHRDRVGAMNIRYAPVVGGNSQSA

SEQ ID NO: 60589 - protein, 490 aa, Paenibacillus sp.
VKRKLNQVEQYQTHQVWIKPGHRLFLYFQVLCGQAKNLYNTTNFFIRQTYTALKQENDLQPLQQEVLDMLRTHINTMNEVQLLSYKKREAKELLKSEDQRKIVKANFFSLPTREEPMLNYNFLDALFKAMKQENYRSLPTQSSQNVMKVVFQNWKSYFESVKAFRKNPSAFKAKPRIPSYCRNHQREIILTNQDCVIKEGKFLKLPITKERLNIGKLGYTKGKLMQVRVIPSYGRFVVELVFSCEITEQAFPKERVMAIDLGINNLATIVTNTGKKPTLVKGKVSKAMNQYYNKQKAHYLGILRQGKKPNEGQQTSHRLVRLNRKRFLKMKDFFHKASYQIIQFAIEEQIGTIIIGRNTQWKSETNMGKRNNQSFCHIPHNLLIQMMTYKAKRLGIEIIVREESYTSKASFLDGDVIPTYGESDLLNNFSGNRIHRGMYRSKAGICINADVNGAYNIMRKEVPNALANGIEGLDNLMAVAVSTPLVLNVL

SEQ ID NO: 60590 - protein, 382 aa, Exiguobacterium sp.
MRRSMSSDTTSKKRRGVISLLKAYKFRLYPTKFQQEYFVKTFGCVRFVYNKMLEERIRLYKESKLDPDVKQKLPTPAKYKPEFPFLKEVDSLSLANAQMDLNKAYQNFFRDKSVGFPKFKSKHNDRASYTTNNLKGSIRIEACQVKLPKIGFVKLKQHRPFTGVIKSATISMTRTRKFFISILVDQAEEQWIPAKHKVGIDLGLEHFAILTNDKHFSEKVANPRFLRKSEDKIKKAQRGLSRKKIGSKNREKARMILSKKHEKIANQRQDFLHKLSKRIVDDNQVIVVETLKSKNMMKNHKIAKSIGDVSWYEFVRQLAYKCKFYGRTLIKADQWYASTQICSSCGIKSEKKAMDVREWSCICGDLHDRDINASINLLMLAY

SEQ ID NO: 60591 - protein, 438 aa, unknown
  TnpB Polypeptide
MLTTRRTHICRIQNHSQVAGALDRHGWSASKLWNVANYYARQQWDETGEIPDEKELKHELKTHSKYKGLHSQSSQKVLEELSEAFSSWFGSDDNRDNPPGYRKKNYYDQQGRRVHEEHPRSTVTWKQNGIKHDAKNNRVRLSKGANHKEHPKAWEYILVEYEARPGVTIENLQQVRAVHDKAKQRWELHLVCKDEIETPTTPGNETVGVDLGICNFAAVAYSTEEADLYPGNRLKQDGYYFPKEIAKCDDSGGERATRLHKKWSERRTHFFHSLAKHIVERCVQKGVGYINIGELAGVREDENGESKNWGKHGNLDLHGWAFDRFSNILEYKAKVEGIEVVEVSERGTSKTCCVCGREDDNQRVERGLYVCEECDAAFNADVNGAENIRLNINEESNSESAPGLGGDRSTGWLAQPGVYLHDLSRGFQPRTEVVDCKP

SEQ ID NO: 60592 - protein, 367 aa, unknown
  TnpB Polypeptide
MLQTLMVKLDPSQEQYQALLDTMHRFNQACNDIAETIFELHSANKFELHKVVYYPIREKYGLSSQLTVRAISKVSEAYKRDKSIKPEFRPDGAIVYDQRILSWKGLEKVSLVTLGGRQVISVRMGDYQKARMDRIRGQADLILSNGLFYLGVVVEVAEESPYDPKGVLGVDLGIKYLAVDSDGEVHSGEQVNQTRYRLDSLKASLQSKGTKSAKRHLKELSGRMSRFSKDVNHRISKHIVTKAKDTLRSIALEDLQGIRSRVTVRKAQRRSLHTWNFGLLRMFVEYKSKVAGVPLVFIDPRNTSRTCPSCSHVAKTNRPTRDEFRCESCGFAGPADHIAAMNIAFGAAVNQPIVAGKHLASVASSGL

SEQ ID NO: 60593 - protein, 557 aa, unknown
  TnpB Polypeptide
MARNEGVTISVKIPIKWEVMTERTRQRLRQTVGRDARVIRAFLGVIEEHEDELLVGRRKNRIDDGKLDQLTMTAIRVKAGYSQRLTVPHDFKVRFPRISRNELTECRQTAVQMYEGYLELRRKKRRRVSRPCKITSSRRIPRWVFSQRFSLVEHNTAVARWWIDLRDSFDSVPEKRRVHDRLLIPLRMSPFHLNQIDRGEVKALQIFTDRHHKWWVTLAVRVDVPESETEGLPLAVLGIDLGVRKAACTALVTPEKVRETRYFVQNEKVARIEELDQLVANLQHEYHSRKNDGHPTDKIAKRLRSLRSKRENVAREYDRVLVRQLVDYISDLSEQYHLYVAIGRLKHIRAIARRGNYRGRRFRGMVHSWAFARITEELKYQLAQLGWPVAGKQSRFRAIPEGWTSIICWKCGHRGRRPKQNYFVCPTCGNRCNADRNGAINIAGRYITLTSSLHDVRGLGKWASAVARSSRPKTRGKTGSSRRRSLLSTKGTTSGPGESAAVHPAQSSLLDVGDDIEMGDHDPAVGSTAETLTVVGSDAPAQTQEEETRSVGGIPSP

SEQ ID NO: 60594 - protein, 383 aa, Enterococcus sp.
MLTAIKIRLKPTKEQEILFRKSCGVARWSYNYFLAENEKYYTEHKKMLKETEVRKHINNMLKPTTHTWLKEVGSNVMKQAVKDAELALKRWLKGISGKPKFKSKHRCKDSFYVNYESLKRTKDGFRGEKIGNVKTCGSLPKIKKGEHYSNPRISFDGKNWYLSLGYDREFEKDELTNESLGIDLGVKNLAVTSNGKVYKNINNTKEVKRLEKKLKREQRKLSRKIERNIAGYTKNRKPIYKKPLKEIKNIVKQKEIIKSLHKRLSDIRKNHLHQTTSDIVKTKPYRIVMEDLNVKGMMKNEYLAKSIASQCFYEFKRQMKYKCERLGISFVEVDRWYPSSKTCSHCGKIKKNLKLSDRVFRCECGFTLDRDLNASINLANYQI

SEQ ID NO: 60595 - protein, 442 aa, unknown
  TnpB Polypeptide
LPDSILESSSSCLRVTASLLSGVRKFYPSHTKRNWLKTCCLCSRHFQQKSMVSVQPSAGSRKLMEILRAYRAELDPNNTQRTTLLKHAGAARFAWNWALARRKQEYEETGRSSNAIEQHRQLNALKKTDFPWLYEVSKAAPQEALRDLDKAYRNFFRRVKNGEKSAGFPRFKSRKNGIGSFRLTGSIHITETHIKLPRIGWLRLKEHGYIPADGIHILSVTVSESAGRWFVSVQCKQEIKATQAIGEPIGVDLGVKELAVVSDGRRFENPKPLKKAQAKLRRLQRELSRRKKGGKNREKTRKKVAKAHQRIANIRRDTLHKSTSVIVAKTKPDNERPSVVVLEDLNVSGMLANHCLAQAISDVGFAEFRRQLEYKTVWYGSELIVADRFFPSSRLCRHCGCINSELKLSDREWTCDCGAIHDRDLNAAINLKNLAAKLPRVR

SEQ ID NO: 60596 - protein, 402 aa, unknown
  TnpB Polypeptide
MPVQRAHKIRLNPTPDQAQWLRQAVGVSRFAFNWALAEWKRRYETGEKSSAYALKKQFNAIRREQFPWTYTVTKCSVDSGFRNLDKAFKNFFRRCKQGVEKKGHPKFKSRKNKHQSFTLDGVRVKPDGYWVKLEKLATLVNMTEELRFVGKITSATISTDGEHWFISFNVEVEKPEGYQHPQESVGIDLGVKTLAVLSNGVQFENQKLLRSELNKVKRLNRELSRRKKDSNRWKATKLKLARLHRKIANRRLDYIHKMTTKIAQTYRIVGMEDLNIAGMLHNHKLALSIADAGFGEINRQMAYKVDWFNGELVKIGRFFPSSKLCSVCGAIKSDLTLSDRLYICECGNKKDRDWNAATNIENEALRIVAGMVISTLKTDVDGSVRPLAAVPCEASTYLGVYN

SEQ ID NO: 60597 - protein, 417 aa, unknown
  TnpB Polypeptide
MTGRSRLELYTPAKLGTCITTTRPDIDSLYIPVKSGKNGEKMIANKAYKYRIYPNKGQEELIQKTFGCVRFVYNHFLFDRITAYKENGEIRSCFQQIKMLTDLKNEYEWLKEPDKNALQCALRNLDKAYQNFFRNVKKGDTPGFPKFKRKKDNQKSYQTVGCGNQTRIENGNVRLPKLGVVKTKLSRNLPEGARILNATVSQEPSGKYFVSIGFEYELDIPEHEVNAENSIGLDYSSPHFYVDSDGNKANMHHFYREAERKLAREQRRLSRKQKGSANYEKQRIKVARAFEKVRNCRQDWQHKLSTKLAEQYDIVAVEDIDYKAMSQGLHLGKATNDNGFGQFRTFLSYKLAERGKKLITIDKWFPSSKTCRHCGYINSELTIKERKWKCPKCGELIDRDVNAAINIRNEGIRIYAV

SEQ ID NO: 60598 - protein, 562 aa, Lachnospiraceae sp.
MKVTINGPRYYKEDLKPDAFDLCVQSICCYNDFKIQMYNVMYANRYLPGSKWDILGLKNITYSAWMKEYGINDYYSTSLYAEVTGLLSSQREFRKWYRARIEEDLAARKRKIISLTESLTKLQAIKQTIVSYVKTGKFKQPYKGCMLKISGQTAFPGGKHVYALEEYERLVEQRIRHTKARLHNIQAAFRRRECKLEKLGKSNPDRILFGSRAFYKTKDTVGCDDTWRREFHRRRHRTMQATGRHTSRYGNYLVHPDETGNLYWVLPKGMGTVVFPKFHLARYEAEWRACFQCSKDLRQAVSYRMKRMTDGNGREYLIVSATFDLPNHEAPADLPEGCISCDLNVDHLAWAEVDPSGKLLRYGKIPFDLEHKSSTQRDQIIGDVVSRVAVLNKETGRPLVFENLDLTTNRASMKYGVKRSNFLVSSFAYQKFRFHLDSQGSRRGFSAIYVSPAYTSFWGKLLFMRKYGISIHTAAAYCIGLRALERLDELTIPDVYGHLLDSKKQTGPYYAAEKDAALYKKLSGIRTHAFYLDLPDLGTVAKLKDWLRQNDKSCPAWYAAAL

SEQ ID NO: 60599 - protein, 405 aa, unknown
  TnpB Polypeptide
MNTKTVKRAYRFRFYPTTEQENMLRRTLGCCRKVYNMALDARSTAWTLHREKVGYSDTSRMLTAWKKTEEHSYLTEVSSVPLQQSLRHLQAAFKRFFDKTGSYPRFKAKHEGGSATYTVSAFTWDWGHRALTLAKMHDPLPVRWSRTLPRKSRPSSVTVSLDAAGRWHVSILVEDEIRQHTKNGNMVGIDMGLEHFAILSDGEKIDNPRYLRKHLRKLKLAQQRLAKKQKGSNNYRKARLKVAKAYAKVKDCRTDFLHKLSTRIIRENQTVVIEDLKVRNMSRRCKPKPDLNNPGQYLHNGQKAKSGLNKSIQDASWRQFRTMLEYKAEWYGRQLTVIDQWYPSSQICHTCGKNTGRKTLDVRTWQCPYCHTIQDRDLNAAINILSAGLAVRACGDSRLTEATLR

SEQ ID NO: 60600 - protein, 258 aa, Natrinema sp.
VISPRHATRDVEERSEVSAEERTPIGVDIGEASLVTVCHRDDYGSPTAPELWVDEGKTVRRLRKTYFTAKRRLQTRGSERIAESFGDDLWNQIDDVFHRVTCEVVEYAESVENPALVLEDLTYIRESMDYGDFMNRRLHGWGFAKLHAQIRYKAVEKGIPVETVNPHNTSKECHACGKVGYRPRQATFKCTNGACWMGEYQADVNGAINIADRYLSGESHSREHTDDDDSAEDGGRLTAPQDSQADATQQETLGTYAS

SEQ ID NO: 60601 - protein, 345 aa, unknown
  TnpB Polypeptide
MSKHCGFARVAYNFALSSFNAGRAVGEWRSCYDLKKEFNAVKYDKFSWCKELSQNAGKNAIHNFDDAVDRWQKGQNRYPVHKKRSDKISYQADNGPDTIDIDDKRIYLPKIGWIRMCEALRWQGQIRRVVVSKRNGTWFASILVNVDIVAEGKQSSLFHITPKQPIGVDVGIKTLATCSDGVVYENPRPLQRFLKKLRRANRSQSRKVRYSKNWQKAKKRLQAIHYRIACIREDAHHKATTDIVRRASSIGIETLKITNLLKNKKIAKALSDSALGGFLSKLEYKADRHKVKIVKAGSFFASSKTCSRCGHKIQDLTLSDRTYHCSECDLRIDRDLNAAINLCPS

SEQ ID NO: 60602 - protein, 329 aa, unknown
  TnpB Polypeptide
MSYYKLCAISKATGILRNYRKTRKKNPKTKEPYARRLQLTTCYGFKIKTIEKVLLLPFKPKQPLSIPLNAYVLGVLSEPNIQIRSVTLTNERLSISYSKEVEPIQPRGLIAIDRNLDNLAIADSDGHITKRNLANATEVKGRYSEIRSHMRRNDMRVRERVTGKYGRKQREKVKQIFHRASKEIVLDAKRKKFGVVMEKLTGIRKLYRKGNWQGRSFRGRMNAWSFAELQRQIEYKARWEGIPVIYVNPSGTSVKCSICGSRMKPEENRTLKCPSCGFTVDRDLNAARNILARGVRFAPFASASEAMVQEPQRRVILKVDADELAKSGS

SEQ ID NO: 60603 - protein, 663 aa, Streptomyces sp.
VGEGEVQQVAAACARALRGVDVVSGERLGEAALVERAGWLSALVGSLAQGMVQEHWSGADLARLASGVDRSGASLPSQGWMALRRLGWPVTVPQGVYVPDRVVRIAQEQAGRVLRSAWWRAEVTAALLATWPADPARRTEGEWEALRAALPDGGAVASGVLLARTRQIAAFQARHSRLPADVTECESAPGAGGQVVLAAADRQLATLQRCPEDPFRYAVLTLRMPLRPDPACRADWHPVRIRFRLPPHVPAAAVLRPPTLRVREGRLLLDVPYAQAVLKPERAGHRRAVAFDWGLNTLLTGGTLYLTDEAQPRVVTDARPVYFRATGVLAKADRLRIHAERIGARIDRLRTLITSRQERGMRPDPWLVAKLAALEAERDRVARRRTRLNAALAKAAARFMTDHAIAAGASVIYLEDLRDMQARGKGRTLNTRLSQTVRGAFVTHVRHRAAAHGIAVVIVPPQGTSKHCPRCLTEFRHHKAPNRRAAGWAWATCPNIACGYSTGRDNAAWQRIGARGLTHQHQTRLDRTAGVFVIRSVVEALDRTGTVQHQTRDRTKSGPTNKRPVPGKRRRVPAPPGNRGPTARRGGKRPAGRTPTHPRHRSRRWSRQQGPNAIGTPVRHQPDGARLGAGFHRHAHTTPTRGWPSHSPERSRTRGIAQETQAD

SEQ ID NO: 60604 - protein, 500 aa, Hydrococcus sp.
VQVRWNFKLKPTQAQQMQMSKWLVTLRKHRNYALRERETGYNTNNRDVSDAIVYAWGSYRDLDTRIEYGASCPLTCPVVKHGVVPRDLNLALKTSKGIIKWDSASGIQKKVTTQLRHKRENFATIASDVLQQNLTKLDDAFSNFWKNGRGFPRYLRVLNSFQYPPHRVKLKSIRKTYAIVSLPGIGKVKMHNSRDLTEIEEIRTCVIKRSGGYWFISMLVEIPYELPKPMSIEQANSVVGIDVGVNKLVAISDGSFVENIRATTNPSTARRLAMRQKAASRKVKGSNNKAKAYSKLSRTQHKLAALRDGYNWQAASKIVKTADAIGREDLNIKGMVKRAKPLHDGKGGYKRNGASAKSGLNKVILDCGWGDLFGKIAWLALKAGKPVVAVNPKHSSQVCPSCGNIDKKNRDGEKFICTNCGYTDHADTKASREIASRVGLVFPNKKTLPADCGKVMPAKISLPKCKESRNQAYEQMEIQLSLFDLAGYTNADKRISRRYG

SEQ ID NO: 60605 - protein, 404 aa, unknown
  TnpB Polypeptide
MLVLEFKAYGKTNQFTAVDEAIRTAKFIRNSCIRLWMDNKGTGKNDLQKYCAVLAKEFPFADELNSMARQASAERAWSSISRFYDNCKKGVAGKKGFPQFQKDCKSVEYKTSGWKLDSSRKSITFTDKKGIGRLKLKGTRDLHFYQMTQIKRVRLVKRADGVYVQFCIDTVRSENIEPTGNTIGLDVGLTNFYTDSNGETAPNPRFLRKGERKLKRSQRQVSKKVKASKNRGKARQICSLRHLKISRQRKDHAVKLARCVIQSNDLIAYEDLRIKNMVKNHCLAKSINDASWYQFRVWLEYFGKVFQRITVAVNPQYTSQECSQCGQIVKKALSSRTHDCSCGCVLGRDENASRNILSRSLGTVGHTGTFALDASNALGDESSIQIGANLFEQDTSLIKESQCL

SEQ ID NO: 60606 - protein, 398 aa, Lachnospiraceae sp.
LRVQRVEQQIIRKNNPIWIIVDKHCFYSKNVYNEANYLLRQAFIKENKILTAYEVQKIMQPMDCYKECGSQAAQKTIQLLDENWKSYFAAIKDWKKSPGKYLGMPKLPRYLPKDGRQVFMLKNIQCSLKDGIFRISYKPFKQYTVPTHANGKLMQCRFVPKPNYYVMEIVYQIEVPDISEERNKICSIDLGTENLITMVNNFGEQPVIIKGGDIKSANQFYNKKKAELQSQLKKDTSRDWSNKLQKLTDKRNEKIKYLMHCASKQVVDYCVLYSVDTLIIGLNKKWKQENCNMQNFTYIPYDMFINQLKSKCEENGIEVIITEESYTSGTSFLDNESPVKENYNKDRRVYRGLFVSNTGKKINADVNGAYQIMKKVIPDAFSEGIEGAGLHPIQLKAV

SEQ ID NO: 60607 - protein, 367 aa, unknown
  TnpB Polypeptide
MTNSLVLASLLLAVKSVRQKHQASVELLWLLDEFRRMVNVCIAVGIEENISSLKTLSLKSYYRLSREMLGYYRLGAIGIATVMLHNYRKAKKKNPRTRIPWARKLMLTTCYGFRVKDSLLRLPVKPWRYVYLNLNTQTLKVLSGVDIRSVTLTPHSLSMTYRKDTIEIKPEGYVGVDRNLDNVTVASTDQTVRTFDLSKATRIASDYRYVKSQFKRNDARIRVRVFSKYGERQRNRVQSMLHNVSKRIVAEAKTKRYGIVMETLTGIRRLYRKGNGQSRNYRARMNSWSYGELQRQVEYKARWEGVKVIYVPARNTSKRCSICGYKTLEHPPKTVVSTMWSHPRQGRERGQEPGCKRAEVQPQRASR

SEQ ID NO: 60608 - protein, 405 aa, unknown
  TnpB Polypeptide
LAFKSVWQYYVPRSDVLHLLELFRRMVNESLRIGVANSASSLRKLSLLSYNPLAQYDSPSYYKLCAISRAAGILAARKKSVRRGHAARTPYAFRQQLVSCYGFRIRNGLLEIPVARGRRFAIPLTKHTLQVISRPDVKVRSFTFTRTRLCLCISQDSPMIECTSTLGVERNLRNLTVGNDDQISHYDLSKTVRVTSATTSIVASFTRDDTRIRKRISSKYGRRRTARTSHLLHNATKTIVAVAVQRGTAIVLENIEGIRSLYRKGNGQGRKYRGRMNGWSFGEAQRQIEYKARWVGLPVVRLSRRETRGSSIACPRCGERLQSDKRLRRKLWCGQCRVVMDRDMVAAVNLARRGRVRFARSRPPIPLEAQGRASEAMKGNPTPTVIPGVDAPKLTHPNEVLAEPS

SEQ ID NO: 60609 - protein, 412 aa, unknown
  TnpB Polypeptide
MKRAFKYRVYPTREQEDLLNKYLEESRQLYNSLLEESIKAYKEDGNTLLGYNLQKTALKLRKEKGFTVYAQSTQDVADRVTKSFKNFFRRVKENKSGKKQKAGYPRFKALGRYKSIAFPQYPHGFKILDDSLLPVSGVGTLKIKYLKDITGKIKTLTIKKEPTGNWYAIIIAEGEFKNENHVCESDKAVGIDVGLTSLIATSYGELIENPKILKNSEKILKIRHRQLSKKKKGSKNRNKARIRLAKAYKKVERQRKTFLHDLTNKLIKDYKIIFVEKLNINGMVRNHYLAKSILDASWNELARQLSYKAEEAGSIVLQVDPRNTSKACSNCGWINNDLTLADRIFRCQKCGIELNRDVNAAKNISRLGLGTLSRRGTESNACGDEATTTGKPIASIVAEAGKLESDLHFRNY

SEQ ID NO: 60610 - protein, 344 aa, Campylobacter sp.
VTISHKIELIPNNKAKTHFKKAFGCSRLAYNWGLAKWQEYYKQGIKKSHLELKKEFNAIKKEQFPFVYEVSKYATQQPFLNLNFAFQAFFRDLKKAKVSYPKFKKKRESFGSYYIGGDQVSFKKEKYLKVPNLGLLKMREKLRFEGKINSVTISQKANKFFASFSVEINEENFHKTHKKVLNTNNCLGIDVGLKSFISLSNGLQIKAPKPLNKLNRLLVKRARQLSKKQHAKTKQEILQGIKKSNNYKKASIKLNKLHSKISNIRADFLHKLSSLIIRNFNYIGLEDLNIKGMLKNHHLAKAISDVSFYEFKECLVINHNIIKEKLLKLLDFIQVLKLVLLAKV

SEQ ID NO: 60611 - protein, 419 aa, unknown
  TnpB Polypeptide
VRVNQAFRFELSPNAAQRRALAQHIGAARFAYNWGLERSRKALEEGKRLPSAAELHREWNRWKRENAPWWTEVSKCAPQEAFRDLEKALKNWKAKRARFPRFKRKKSLDDNKARLTGTIKVFPQQVQLPRIGLVKTKERTDRLVGLIQAKKARILSATISREADRFYVSLTCEVERPDPKPKEVRSEEDVVGVDLGLSSFATLSDGPPIDAPKPLAKKLRLLKRRSKQLSRKEKGSNNSKKAALALARLHRKVKNLRRDFLHKQTTWLARTKPAIVVEDLNVKGLSRSPLSRSVADVGWGTFLRMLEYKAKWYGATLIVAPRSFPSTRLCSRCGHLQRRMPLSQRVFHCEACGLEMDRDLNAALNLKAYGLAHLTGPTASSAGSDAPGDSSGGGTAPLSRSTSHGSLKGEAARRQPLKG

SEQ ID NO: 60612 - protein, 400 aa, unknown
  TnpB Polypeptide
MEKENIIQVRSRKIKITKLLTVQKQKLQEWNNSHRYSYNKSISLINLNYEEQSSDFNWLKEKYKDVDIKKAGYEFYSAYELRDLIVPKLVCSRTPWLLNTPKEIRASACFEARKNLDVCLKNMKNTHINHFDLRFKSKKNNSWTIGIAKTAIKQINSKELGIYVKTMPYTFKLTERVKEIKHDCLLHFDGIDYYICIPEEKQMKKNTSDKWFVASDPGSRKFQTLFCPDENEYLKIGEKATYQIYKYLLTLDNLLSNFSKKPSNQLKLRILKLRRKINNYQRELHNKVSNYLCENYKTIYIPKLTKNNDIINCKTRKINTKTVRQIAVLGHSKFIETLKTKADLYTNVQVHIITEEYTSQTCLKCQKRTKSTSEIFNCIYCDYKLDRDLVGSTNILLKNW

SEQ ID NO: 60613 - protein, 244 aa, Okeania sp.
LRFNDNRDFQLKPLKKRVGVDVGISSLIATSDGTKVNNPKYFNKLYKKLRLAQKSLSRKTKGSNNYQKARLKVARIHAKIKDSRLDYTHKLTTQLIRENQTIVVEDLAVKNMVKNHKLAKAISDANWGELVRQLEYKAEWYGRELIKIDRYFPSSKRCSNCGHVVEKLPLDIREWDCPECSAHHDRDINASINILAAGQAVSVCGATVRPEGSKSRRAGAMKQKAPKARREQVSEGGCYETESP

SEQ ID NO: 60614 - protein, 214 aa, Nocardia sp.
LGEVSAVVLQQALADLNTAYRNFFASVTGKRKGARVAPPRYRSRKDNRQAIRFTRNARFALTPGGKLRLPKIGDVAVRWSRELPADPSSVTIIRDAVGRYFASFVVAITDQPLPQVGGEVGIDLGLTTFAVLSDGTMIDSPRFLRRAERRLRKAQKALHRKQKGGNDRAKARRRVANAHAKVADAGESQPVREALLSGEPLVPVVAVVFDMRRD

SEQ ID NO: 60615 - protein, 252 aa, unknown
  TnpB Polypeptide
MFSGRLMRKLSKDIPLFFKDLHCHYPAWQRIHIIMDKTNRIFIMVQVNIPDKEVIKKEDVKVLGMDRGIKNIAVLSMFFNSKHLREVKGRYQYLKRKLQHLGTHSAHRKLRKLSGRERRFVRDVNHVISKKIVSLPYDVFALEALNPAYMRENGHGSRFRKMLGSWSPAELQSFMEYKAVDAGKITVYINPKHTSQRCSRCGYIDKNNRYGSSFKCKNCDFELNADLNASRNIEVLFTILQAAVNQPIVAAR

SEQ ID NO: 60616 - protein, 188 aa, unknown
  TnpB Polypeptide
MRGINFMEQITITAKVQIVATDTDKVLLNKTMSVYCDACNYVSDYVFRTHDLKQFSLNKILYSTLREKFSLKSQMAQSVFKTVIARYKTILENQNEWIKPSFKKPQYDLVWNRDYSLTQNCFSVNTLNGRVKLPYFAEGMSKYFNHSIYKFGTAKLVNKHGKYYLHIPVTYEVEESNISDICNVVGID

SEQ ID NO: 60617 - protein, 399 aa, unknown
  TnpB Polypeptide
LGKQREHRHHHQKDQRRQGVPHGAAQAYQHHRDDQQREPCEQLVGSAEQRPDDQTTGAISAGAKGQHQAGRNRQQRGYRRLFHPLLVIDFAPFLEDIALQAQTGIHGGAGKQRRHHGQKRGRSRFRQADAVADDVGTAFHKGVDAALAERIVHRTPFTKGGKAGGRGKNRAQCQHAFAHRAKVVGLDMGLSHLAIDSSGKKTANPRFIKQAQKNLKRKQQSLSRKTKGSAKRAKARLLVAKAHERMANARNDFQHKLSRRIIDDNQAVSVETLKVKNMMKNGKLAKHIGDASWHALITKLEYKAKEQGKHLVKIDQWFASSKTCHACQHKMKSMSLDVRSWDCPTCNTHHDRDINAALNIKHQGILKLKAEGLSVSAHRGARNAGMSPVAAVEVGSLAR

SEQ ID NO: 60618 - protein, 288 aa, Halophilic sp.
VPVHVPEKDTHLLDDEYIRDSELVDQDGDWYVHLVCKRSVAVADAYDDVLAVDMGAKWIAVSTFLSDRDTQFHGAEVRRVREHYKQLRKSIGKAKVRQGAQVIERIGDKESRTVEHELHQVANELVARARERNAVIVFGDMTGLRFDNDKGQYVNDKTHKMPYAKMANILTYKAHLDGRECLPVNEYDTSVTCWRCGSQSTNRDVQGRVECHDCGLDDNADKNGASNIGKRAVGKDITIPLSTVGAVVTQPETQVRLNGTRGEMEPANSPEDVGLTLSERSPRLQSWE

SEQ ID NO: 60619 - protein, 419 aa, Halophilic sp.
MEVRRTAPVKVNIPDQRCEDFHESAQQFLYCANRAAEFCWDNTDYEACVTANSTARDALYDDLRAETDLTANLVQEAIRRAVHAVKGCVERWKQGKRVSQPEFTSWSMVYDKRSATFYRNKVSLSTVNGRVECDFELPSDSPTPYEQYVLSAEFEFRASTLQYDNVTDEFYFHITTKKYDTEDDGGKDTEVSADAGHQTVLGIDLGVNSLAVASTGRFWNGDEYDHWCREFETRRGEMQQRGTQAAHNALLRLGKREKAWRKQYLHIVANEIVTEAVEHECDVIVFEDLTDIRERLPQAKWHHIWAFRRLVEYVEYKAPEREVSVKQVEPNHTSQRCSRTDCGFTHENNRDGEQFCCLKCGYEVNADYNAAKNVGIRYARKEHHRLRSSPTSAGGDAPVGVRVNGGMLNGDRYQPIAGD

SEQ ID NO: 60620 - protein, 427 aa, Actinobacteria sp.
VRLSYRAEIRPTPRQRQALLQHAGNARWAYNWGLRQHRDAYEQWVELGKPKKWKGWPNAISLHRDLNALKKAASEDGGVPWMYEASKAAPQEALRDLDRAFKNFLAGRARYPRFKSRSRGIGGFRLTGAIKIDHRTIQLPVIGRVPLQPGERGYLPWGKHAQVSVTEQAGRWFVSVVGAEVEDAAPNGKPVVGVDLGVARLATLSDGTVIENPKALQRGQRKIKRFQQEVSRKKKGSANRSKARAKLARAHARVRDVRRDSLHKATTTLAKSHGKVIIEDLRVRNMTRSGASRKRGLNRVILDAAFGEFRRLLEYKGKLYGCEVVAVPPHYTSQRCSVCGHVDAGNRRSQGDFRCISCGHEANADLNAAINILEAASSTDSLNACGEDVRPDQPRLIRQTSLKQEPGTSLRVGSDRGPSSQEAGSVS

SEQ ID NO: 60621 - protein, 467 aa, Streptomyces sp.
VTPTGTPPRPPSATGTSPPSSRRSGRSIRSGRAAGRSPPSKPPCAAWTRRSRRSSAGSSAGRARATPASRASGTSTPSPSPRTATAADAPHDPVTRVRIQGVGHVRVHQHRPVRGRVRTISVKREGTRWYIILSCDNVPAEELPPTGSIVGIDMGVAHFLTTSDGEHVANPRFLTAMAEELAEAQRNLATFLKRTRQRTKHHRAAARKVATLHARIRRQRADFHHKTARTLITGHDVITHERLNTAGWPRALHPRPTPSSPECSCRTVLPRRPASTAASSTRVGRGSSESWRTRLRLPVASWSRWTRTTPPARAPSASTSRRETASPKRSSHAPPRRSRPRLRERLSSGQVSSHRMRLGRRSRSAGWPGPRSSLRLRRFGWRRGRRTGPRHRTPRFRAGSVRRALRPRGRLRARRRWSGPARSRSWRGTWGRGRRTSCRPGRRPSPGGRARSRRAGRPCRRSARWGR

SEQ ID NO: 60622 - protein, 229 aa, Streptomyces sp.
VTTNAVKPLAAGGSAVGVDVGLDHLLTLSTGEKIVNPRHERKDRCKLAKAQRELSRKARGEGANRRKARQKVAKIPARIRDRRRDHLHKLTTRLVRENQTLVIEDLTVRTMVKNRSLARAISDAAWAEFRGLLEYKAAWYGREVIAVDRFFPSSKLCSHCGTLQPEMPLHVRMWTCDSCGTTHDRDVNAAKNLLAAGLAVSVCGAGVRPQRRTPGGQSAMKQKTPRREP

SEQ ID NO: 60623 - protein, 419 aa, unknown
  TnpB Polypeptide
MLTLNYTYRLYPNAIQQSLIQEWLETCRQTYNYALRELKDWLASRISLSDRCSLEKEYIIPANAPFPSYQAQQDALPKAKKSFPRLAEVPSQVLQTTVRRLHDTWESFQKRGFGFPRFKKYGQFKSLLFPQFKECPVTGIYIKLPKLGLVPINLHRPIPDGFVVKQVRIIKKADRWYASINIQCDVNVPSPMPYGHPIGVDVGLSKFLATSDGVIVKPPKFFKQMQSELKLLQRRLSRKQKRSKNYEKQRLKVARLHHTIDNTRKNFHFKLAHALCDSADMVFMEDLDYRVNAKGMFGKHMLDGGFGQFRSLVKYVCWKRGKFFAEVNARGTSQECPECGAEVRKDLSVRVHFCPECNYITDRDVASGQVIRNRGIALISTPGLGGTETVCAVDLPGAEAIPSRQEAKPRKGKTRKAKL

SEQ ID NO: 60624 - protein, 406 aa, Scytonema sp.
VLVLEYKAVVINTQAQAINEAIRTSQFVRNKVLRYWMDNRGIGKKELYQYNTQLRAEYAFVKDLNSHATQASVENVERAINRFFDNCKNKKPGKKGYPRFKKDSRSVEYKTSGWKLHSSKRRITFSDNKGIGELKLLGKWDIHTYPIELIKRVRIVRRADGFYVQFCVKVDNKQDAPTATSEIGIDVGLQYFYSDSNGHHEENPRFLRKSEKEIKRAQRKIYKKEKGSSGRRKARSVYARKHLRVTRQRNEHAKRLARNLCLASAKVVLEDLNVSGLVKNHKLAKSISDASWYNFRQWVEYFGAKFGRTIVAVPPHFTSVECANCGKKVQKSLSTRTHSCPSCGYIEQRDVNAAKVILSRANEQFGGGFPSVRNCGARDGQSQSNASGVVASTCVGRKTCTGKRRR

SEQ ID NO: 60625 - protein, 438 aa, unknown
  TnpB Polypeptide
MRKEENLIAKKNNNIAYLTQRQQLKHLSSKEFVALKELCRLSKNMFNVAIYNIRQHFFNTGQYLSYQDNYKVSKDNENYGILNTNMSQQILKEADGAFKSFFGLLKLKKNKNYNKKVKIPQYLPKDGFFTLVIGQIRIKDNGMLDIPMSPSFKRLYGKISIKIPSNLQGKKIKEIRIIPKFEARFFEIQYSYETEIIQRELNKQNVLAIDFGVTNLATCVTNKGKTFIIDEKKLKAINQWYNKQNSKLQAFSDKVLKPQNDNKTVVTKKMAKLTINRNNKVKDYLSKTARLIINYCVANDIGTITVGRNKNIGQNINIGSTNNQNFVNIPTGALIEKISYLSKYNQINFEEQEESYTSKADFFSNDFMPVYDEGNIKTYTFSGRRVTRGQYKSANSKIYNADCNGALNIMRKCSLGGSELTALQSSGNLDMPMRIRVS

SEQ ID NO: 60626 - protein, 395 aa, unknown
  TnpB Polypeptide
MEVKRTVQIIIENDPDLRATLDAFQQVCSALSPLCWNNGKPFGRRKLHDVAYHQVKGIVRAQMTQTALRLVAGCYSKKKRKKLTEPVKFKRPFACFLVGKRGRDARFCPDGTISLWTVGGRKRLRYYLPSYVGSLFHSATQINSITVKERNGKLIGYVCITLPPPEATGTILVGVDRNETNPLVAVKEMGEIFFKGGVSLKVWRTKHRKKLARLQRKLAERKGQRRDTRSVRRRLQHLRLRQRHYTKTYCHTVAKRLVEWAGRDAILVLEQLRFPQGKKGSAALNRRLSQFPHGLLLRCIKDKAAMAGIPILMVNPAYTSQTCPCCAQLGNRQRHKFSCPHCGFSLHADVAAAWNLLRRAEKLLSPFTGAVGRPSVVPEAPPFLLWQGQGSQRLL

SEQ ID NO: 60627 - protein, 410 aa, unknown
  TnpB Polypeptide
MDVLAYRVVEIAWQPRTAAQWSVFTASRLEAACCWNDMVTRHARIRRLGARLNNKVKWPTFGRWMRWVKGRYPAMSAQSAQQAVGEFLEAVSSCAKLRRKQISDGGAAIARYPWRLHRYRDVTYTNQCVGARSDLLRLSNGRGNEPLRVKLPRALPGRIVEVTVAFGVVRVVCEITAPSAAPTSVIGVDLGVNTLVAAGDGERAVLVSGREAKATIQWRAKNLASISAAQSTLTKGSRRWRRLQRRKHKMLDKAASRIKDITHKATRAVTVTFPGATVVVGKPFNDAAQKMGRGQAQQVSSACNAKIIAQLAYKMNGAREVDEHYTSQTCPVCGERRRMRRVYRCSGCGFEAPRDVVGLTNIRSIGLHGEMVFPAEVPKRVVFVRPLRKYPGARLQVVPGDPRQVARRAA

SEQ ID NO: 60628 - protein, 394 aa, unknown
  TnpB Polypeptide
MRRAYKFRLRPTARQHVALGQCLASHRELYNAGLQERRDAWRLQGTGVSYGDQSAQLKEIRQIRPDVAVWSFSSQQATLRRLNRAFAGFFRRVRVGETPGFPRFKSAHRFDSVEWPRDGDGCRWQADIHRVYLQGIGQVKVTVHRRVQGRVKTIQVRRQGRHWMLVLSCDEVPLRPLEPTGTAVGVDLGIASFATTSEGQHVPNPGWGRVGAARLGTAQQVLVRKQRGSNNRRKARATLAARHRKLANQRRNFHHQVARALVARYGLLVVEDLKIRNMVRRPAPRPDPDQPGRFLPNRAAAKTGLHRSIHDAGWAQFLSIRRAKAEEAGRVVIDVNARHTSDRCEACGHTAKENRASQAVFSCRGCGHTLSADEHAARNILRAGLARLAATPAA

SEQ ID NO: 60629 - protein, 377 aa, unknown
  TnpB Polypeptide
MQLSETIKLYMSKTKYQLVKDTMTEYINTVNSLVSDAINGVSISKYTTADVKANLPSALTNQCIRDAKSIVKKYNKACRDADRKNAKLAKQGKDIKIVATVPVLKKPCCYINNQNFKINGDYIEFPIMVNGKSKRLSVKTKMTDNQKSVFANSKLGTMRIVYKNNKIVAQIVYEAVEPAYNSEGNVMGVDLGIKCPAVSYVSDGSVKFYGNGRKNKYMRRHYNCLRKKLQKAKHIDAVKRINDKEQRIMKDIDHKLSHDIVETAVAHNVKTIKLERLANIRSTTRTSRKNTHSLHTWSFYRLTQYIEYKAKLAGIKVEYVNPVYTSQTCPVCGHVHHAKDRNYVCKCGFHIHRDLLGAMNICNSTEYVGDSDIRHTA

SEQ ID NO: 60630 - protein, 234 aa, Proteobacteria sp.
MEVPDAEPTGRWSGIDRGQNVPLAAATPDGPVLFWKAKGLRPIHRVYARRRQRRQAAGTHRTVKKLERREGRMITHLNHCLSQDVVQLAKRCGAGIRLEDLSGIRSRARQRHTTKTDAGQNRDYWPFFQLEQCIISKAHRAGVACEKVPAASTSKSGHRCGALGTRKQHAFACPRCHSHAHADANAAQNIRAWLGLSVRWFFRLQRTGHMTCPRTRYGTRRRTRSGNKNVHPSA

SEQ ID NO: 60631 - protein, 514 aa, unknown
  TnpB Polypeptide
MRAKNSKDDVNSAVMTTPTFVLELPVKLGQGELAEVRKRFNYARNLYNATVGTALGQLQQMRQDPQWRQACSMPKGKERTTTFRRLDEKYRLREYDLHAIIAKHREASGRKHDLGINEAQKLATRVYEVVTKYKLGLGGKPRFKTQSRGLHSISGKTNKTGLRFKPEKSRLYWNSLEMFVEIDRKDRYIFEALHVDKDPSRFKRIKYCSLVRKVINGKERYYLQLSLEGQAPIKHIYAPQTERLAIDPAPKAITVFHKEKVFKASIEVSVHAEKQKKLQKQMSRSLQLNNPDAFDENGTLKKGARLQVKSKSYLKKQTQLCEVHRRAAAARKNLHGQVSNLLLSLAGEIVLEKNSWKALQRGHFGKSLGKSGMGAFERTLISKAERAGCKVHLVAPYILKPSQYDPFKDAFEKIPLKQRWRRMDDKELIQRDMLSAVLLYCADLANERHNRTEIFQTLEGAKQLLSDGGFVVKENPTSNPALDPRFAPERKAQAIEEVRREILCGCKGQLNANR

SEQ ID NO: 60632 - protein, 401 aa, unknown
  TnpB Polypeptide
MIANRVEQQIIRRTHSLWGVIDEMCFNAKNLYNYANYIIRQEYINNKRYVSYKEMNINLKTHQQYKDCMSQPANCVLRLLDKNWKSFFKGLKEYEKNPKKFLGRPQMPKYLKKDGRFNWMIPNNACYFENGELKFRVLKLQSVRWKCRCVGRLIQVRFVPKGCVYVMEIVSQIEVPDAMSDNKRIVGIDLGVNNLATTSNNIGEQPFIINGRGLKSINQFYNKRRSELQSKLPKGQFWSKQLEQITFKRFNRVKNYMHHASHYIVKWCVQHQIDTLVVGHNDEWKQNLRMDKVNSQNFVFIPYKMLIQQLKYKCEDVGIEFVETEESYTSGTSFLDGELPCKENYNKRRRVKRGLFQANNTLINSDVNGSLQIIRKVFPDAFSYGIEVCLTPTIINVVNGC

SEQ ID NO: 60633 - protein, 404 aa, Halorubrum sp.
MAEVRRTVVVKLDVDDSDATLLHETVEEYLWACNYVVRDAWQDDYKPTSKNELHDRTYSDVREQTRLQANLVQSARNRAAEAIKGVITRWQNGKKASQPNFTTPSVRYDNRSATFHDDHVSLSTVNGRIEAEYVLPPEGDNPQTTYLRNDEYEVTSATLQYREVTDTFFLHIGTKADVESEIPGDGDAEHSTVLGVDLGIEQIAVTSTGMFWSGDYLKHRRREYERVRGDLQQTGTESAHRTIKRMSGRETRWVEDYLHRISKAIVQEAVAHECDRIAFEELTGIRDRMPGARKFHAWAFRRLYDYVAYKAEAEGIEATQVNPAYTSTQCSKCGTTLAENRQSQAKFRCQKCGYVVNADYNAAKNIGFRLLRAGQKSPHGGATRHLALKSGTLNVNGGYSSATQ

SEQ ID NO: 60634 - protein, 432 aa, Halorubrum sp.
VRRTNTFAVRPLSNDDKRLLRDLLDASASLWNELNYERRQQFFDGDSVWDTADYRKQYVDVLSSATAQQIIRKNTSAWQSFFAARENGENTAPPGYWGNEDDGRELRTFIRNDQYTLEAGERSRVEIPVGHALKDEYGLGYHDRLRLEVAGNPKWDGEQGRLEIQYDETDDTFRAFQPVTVPDSRQDSPLASHEAALDVGANNLVACTTTTGQQYLYEGRDLFARFRETTEEIARLQSKLREGQYNSQRIRRLYRTRTRRRDHAQDALVRHLMERLYAEGVTTVYVGDLTDVLSTHWCAEGNAKTHQFWAFRAFIERLSYTAKEYGITVEVRPEADTTRTCPVCGEQDDTDRDGDVFRCPCGHEAHADLCASRTFLDEQASEPVRSMARPVRLTWDDHTWSELSHSPERASPNEERTNQSTGDGKLASVGTA

SEQ ID NO: 60635 - protein, 557 aa, unknown
  TnpB Polypeptide
MARSNSVIVSVKAPINWEVMTEKKQQRLRQTVGRDTRVIRAFLGVIERHEDALLTGKNRDRISDGKLDQLTMTAFKVRAGYQQRPSVLHDLKVRFPRMSQNEMAECRKTAVSQYESYLKLRKQKGRVASHPTRVSSSRRIPRWVFTQRFSLVEGPTSVARWWVNIRDALDSTTKGKRVHDRLVIPLRISPFHLNQFSRGEVKALQIFTDDTRKWWTTFAVRVDVPDVSETLPPAVIGIDLGIEKAACVSLLTPERVRETRFFRQGEKVERIKALDNQVAGLQRELDFRKNTGLRYDQVASKLKGLRHKRENVSKECNRVLVHQILDYINELSERYTLYVAIGRLKNIRQQARKGNFQGRAFRGMIHSWAFSRITKSLSHNLAQLGWSIERKNSRFRVVPESWTSIMCWKCGRKGVRPRQSLFICPTCGNKCNADMNGAINIAARLVTLTKSLHSVRGQGKWNDAIQRAKSPRPQAQGKTPSRGKSLLSSKSRASGAGESAVIHTAQMSLLSFSDGAEMSDDDHAVERTVEILSAAGKDAPALQQEKEVRSIGGSASR

SEQ ID NO: 60636 - protein, 417 aa, unknown
  TnpB Polypeptide
MNYSYRYRLKPTDRQRGTLDYHRDTCRQLYNHALYRFEQIPEAEGTVRQRVRQIRDELPDLKDWWEALTDVYSKVLQPTVMRVAHNVTALGKLKDNGYDVGHLQWKSPREFRSFTYNQSGFELDEKGGQTVLSLSKLADVPIVLHRPIPDDATIKEVTLKKETTGEWFAIFGIEMDTEPPAKPPLDDIDAAEMVGIDVGILKYTHDTDGVAVESLDLSDERDRLEREQRTLSRKDHGSNNWESQRQTVAACHRRIKRKRRDFLHNLSTYYAREYDLVAVEDLDVREMLESPRNSRNAASAAWDTFARMLAYKCEREGTHFVAVEPAGTTKACARCGVETDKPLWVREHSCPACGLEADRDGNAACNTLSRGLTDLGVGHSEGTPVETALAVDTTVVSAKRVVEPGSPCLNERAQASE

SEQ ID NO: 60637 - protein, 373 aa, Proteobacteria sp.
MKYRLKPTTKQVHLLQDQLEECRCLYNHFLEDRKRGWEERQESLTYYGHKATLPHLKAFCPELSNVHSQVLQDVVMRVDLAFKAYFRRCKTGEKPGYPRFRGYGRYDSMTFPQYGNGWQLADGVLKLSKVGALRVVQHRPVEGTPKTCTIRRSATGKWYVTMACEVEAQPLPSTGETVGIDMGLRSFATLSTGESTPCPKFLRTDEKDLKRTQRKLSAATRGTPARQKRRRIVARVHERIVHRRTNFAHQESRRLVNRFDVLVVEDLSVNRFVHNHCLAKSIHDAAWSQCATFLSYKAACAGRAFGAVNPAYTSQDCSGCGHRQKKTLAERTHACVCCGLTLDRDHNAALNIKRLGLQSLGLSQEAPGLSHGE

SEQ ID NO: 60638 - protein, 313 aa, Microbispora sp.
LRGVGRGVAAGAGRSDTAYRNFFASISGKRKGPKIAPPRFRSKRDNRQAVRFTRNARFSINPGGKLRLPKIGDVPVRWSRDLPSQPSSVTVIRDAAGRYFASFVAETADEPLPAAASEVGIDLGLTHYAVLSDGRKIDNPRFLRRAERRLKKAQQALSRKAKGSANRKKAVARVARAHARVTDARRDFAHKLSTRIIRDNQAVMVENLAVSGLGRTRLAKSVHDAGWSQFVSMLEYKAARYGRHFAKIDRWLPSSKMCSACGAIQPSMPLAVRSWTCPCGAVHDRDVNAAINILAAGRVDRLNACGGTVRPAA

SEQ ID NO: 60639 - protein, 243 aa, Cupriavidus sp.
MSYRSGASLSSSSTIPHAGHAVADDDQARTGFGGLGWHHAGTVQVAVMVGPPQGKTEVGIDLGLKELFATSDAQTVDAPQFYRDLEPKLATAQRAGKKNRMRALHARIAHRRKDFLHKCSTALVQRHRAMFVGNVNASTLAQTRAAKSVLDAGWSAFRTMLQYKCDSAGVWFKEVNEAYSTQDCHVCSSRSGPKGLNGLSVRHWQCSHCFARHNRDINAARNIRKRGLAWLEESPAAACRPSA

SEQ ID NO: 60640 - protein, 326 aa, Myxosarcina sp.
MKTFEFKLYQHKRNKHLHRAIDAASSVYNHCIALHKRYYSMFGKHLNKNRLMKHIAKLRLRNAYWLLVNAQAVQDIVQRIERAYELFFKHHSKGVRPPNFRKKIKYKSFTLKQNGYRFLADNQLRIGKRVFKFWKSREIEGKIKTVTIKRNSLGELFVYVVTDFVDSQIEIATGKNAGFDFGCKVFLTCSDGTEIKSPLFLKQSLGQLQVASRTHSTKKRGSKNREKARQNLVRVHKKVVNRRSDWFWKLAHQLTNKFDYLFFETLNLKGMQRLWGRKIGDLALAEFLKILDFVAEKKGKVVSYIDRWYPSTKTCSECNFVIDKLG

SEQ ID NO: 60641 - protein, 391 aa, unknown
  TnpB Polypeptide
VFRAYPTRPQEGRAAKLLRDHCDLYNAALEERREAWRMRKASVSYGMQSAQLRDIRKADPGGQGMHSFTAQQQTLRRLNDAFAAFFERARNGNKKPGYPRFKPYSRFRQVRFVNGDGAKWIPAESGGWAHATFQAVGSVKVRQHRQIRGTVKALQLQREHRRWYVIVIAETEPAPLPATGREVGVDVGVARFLTASDGEVVDNPRFLAASADVIADLERPKSRARPGSGNRKRIRRALAREWRKVRNRRRDFHHKTARMLVSECDVIALEELNVAGMTKRPAPKPDTENPDAYLPNQAAAKAGLNKSILDAAWHQFTCILIGKAEEAARRVVLVNPAGTSFTCHRCRARCARPRQDTVICPACGPMDADVNGAINIASRAGLGSGHAAPAA

SEQ ID NO: 60642 - protein, 408 aa, unknown
  TnpB Polypeptide
MIQYRTYTIRLFPNREQEQELKNLSLARNTLYNMLVGIEQKTYEETRKIKTEFDLDRDITVLRKEHPFLTKLNSKASQRVAKEVYSAYKSFFSLVKKDNTAKPPQQIKDVDRFHTVAYNQTGWKFISENILKLNGLVVNYKGIPGMDYKFMSIKEVKLKRVNGKYLLDLGVANSVEEKQTITNENKVLAIDLGLKNLCNGVDNIGSVVVLPNKARRINRYFRKQISAIQSKMDKRIKGSSRHSKLKKTKRKLYNRRNAQIKQTLHIQSKKLVDMNYKTIVVGDLSVKKLMEKGSNKLTKTSRSFSESSIATFMEYLAYKCQNSNTELVTINEMWTTQQNCLTGKLFKEKVGLSDRTVMLSDSIEIDRDLNAAINIMKRYEQNHLALLTAPLDVSSVVNRHNLLTDTCS

SEQ ID NO: 60643 - protein, 457 aa, Escherichia sp.
  misc_feature (358)..(375): Xaa can be any naturally occurring amino acid
VKRLQAFKFQLRPGGQQECEMRRFAGACRFVFNRALARQNENHEAGNKYIPYGKMASWLVEWKNATETQWLKDSPSQPLQQSLKDLERAYKNFFQNRAAFPRFKKRGQNDAFRYPQGVKLDQENSRIFLPKLGWMRYRNSRQVTGVVKNVTVSQSSGKWYISIQTESEVSTPVHPSASMVGLDAGVAKLATLSDGTVFEPVNSLQKNQKKLARLQRQLSRKVKFSNNWQKQKCKIQRLHSRIANIRRDYLHKVTTTVSKNHAMIVIEDLKVSNMSKSAAGTVSQPGRNARAKSGLNRSILDQGWYEMRRQLEYKQLWRGGQVFAVPPAYTSQRCACCGHTAKENRLSQSKFRCQVCGXXXXXXXXXXXXXXXXXXIGFCQRLNSTPRNKRLRQLIPKTQNQSRPASIHLPLPEMPPPPRRAHAHYAAPDTNCRQWYSTAPDLPASGSNLRAGQPSSR

SEQ ID NO: 60644 - protein, 384 aa, unknown
  TnpB Polypeptide
MIKTHKIALRPNRDQIAWFYQQCGYAKFAYNAALSDFKVELASDTFLSKNRLANRFNQKKKDFDWTASQDQRAAKYAIDNLGHAIANWVAKRTKFPKFKKRGCKHSYTTDEQAVRIKGKRIKLPKIGWVKTFEKLRFVGKIVSVTISRTAHRWFASVSVEVQPPIHRCPASCEFVDGFASNVDIGTPHQIERSIYPTIGIDVGISTLATLDNGRKYENPKALKRYERKLKREQRKLSRKVFLSQNWYKQKRIVEHLHYRIACIRRDAHHQTTTDILKCVSKIGIETLSVTNLLKNRKLAKALSDASLGGFLEKLKTKAKTLGIPIVQADRFFASSKNCSNCGYKKDDLTLSERDYHCRQCGTSIDRDVNAAINLKHVAVGYTET

SEQ ID NO: 60645 - protein, 283 aa, Streptomyces sp.
VGRPHPGEPGRRLPHPRRHRPGPLVPDRLLDHPPGPGGAAGGGPRRWSGRRGHQRRSPGRLAHRPHGNPIGAPRRFGYDLTGTTQRRDAQIRHALIRLLYWAKRHGLAIAVEDLDFAAEKTREKHGRKKRFRNLISGLPVGRLRARLASMAAELGIPVIAVDPAYTSRWGAQHWQKPLTTKTRKATRHHAAAVAIGRRALGHPVRRRTAPPPAHRSDEQGHRTVQAEPAAPECEGTRPRIPGPRTRSVRAGRGANAGDQCAQNRSGHAAEHGSWRQDSLPLSL

SEQ ID NO: 60646 - protein, 365 aa, Chloroflexi sp.
MIRTYRYHLYPTQKQQDILKDILWIACWLYNRALDYRRKRWNESRRSVSYNEQAAMWRDWRNEDPQENPLRLLNMSAGQQVLRRLESAYRQFLTGKRGRPKFQKSSRFNSVNYKPGDGASLKDKRLYLQNVGLVKVRMHRALPEGKLKNIILLRKPSGWYVLLQIELPDPQVEKSTHPPVGVDVGITHALALSDGTTLDSPKYLQASLKKLGVLQRSVSRKQKRSQNWSKAVKKVARLHEQIANQRLDWWHKTTRQLVDQYGALVLEDLPLNFMLQNGHLSRSAHDVGLGMFRTLLDYKAIEAGVEIVRINPKHTSQVCSGCGRIVLKSLSVRVHQCAHCGLTVDRDVNAACNILWLGRSQLALT

SEQ ID NO: 60647 - protein, 383 aa, Ruminococcus sp.
MSYRAIKIKLFPTREQEKLLWQSAGTARFAYNWAKEFADTYYRLYKKNLSTGKARKHFTKLRNHKKYVWLKEVSSEIPQQAIKDYFEALDKFFKKIAGYPRFKSRKRSVVSFYHLNSKFIVSDNMIKLEKIGEIKMKDDNRLPKGNYKCDKIKVCNPRVKHNGKYWYISVGIEYECEKCELDKTLSVGIDIGIKALATVSNFEKPFGNINKTQRVRRLKKQLRRLQRQVSRKYEKNRSGNRYSKTNNILKLERKIKLLHKRLSDIRLNYLHQVTIAIAKTKPYRIVMEDLNIKGIIKNKHLVKAISEQGFAKFIKLMKYKAEKFGIEFIQADRFYPSSKTCSHCGSLKKDLRLSERIYHCSCCGFTIDRDKNASINLANYKLA

SEQ ID NO: 60648 - protein, 379 aa, unknown
  TnpB Polypeptide
MMTYTYKLYRSKRTANLDAMLREACFVWNHALALQKQYYALFGKYIPCGRLKAHFAKRIRRTLLHSQTTQEILERLDLSYKRFFNRLSRRPPKFRKAREFSSIVYKQGGFKLDGNILIVNSIRQHFQFSYPRPYEGRIRQIRIRRSRLGEYYLYIVTDAVAGSVAHGKSHKGASVGMDFGLKTYLTLSDGTRIENPQFLIQGLSELRRKSRALSRCERSSAHRRRRREDLERLHERIHNRREDWQWKTCHELCKRYRFICIEDLNLLGMTRLWGRKTHDLAFGAFVQKLEHVAVKYGTELVKIDRFYASSKTCSVCQYVNERLSLRDRRWVCPECGVNHDRDLNASINILKQGIASSGSIRKTQLAAQGALATGESPML

SEQ ID NO: 60649 - protein, 461 aa, unknown
  TnpB Polypeptide
MITLQTRLQIENKEDLEKLYNLMRRYCSAYRYAYNRLLEKKKETDIRKEIQNLFNINSQYAQSAIWEAKALIRSCKERGQNPKKVIFGGRLLFEKLSKKHLTGKRRRKLKEKWKEKRQKVLYTVGGKYKKGNTNLRLIKNDDNWYLRINVGKKEWIYAKIIRKVKREKDKWIDFIRNLETAENSKGSYAERYFPYTVRVLSKNGKLYAHISYEEKVPEKFKIIKENGIIGIDVNASPFHLALAISSKDGNLLDYKKISLHELINANKNKRKYLEWLIAHEVINYALENNKAIAIEKLEGLKNEKRGSGRAKFRKRLQQFCYRNILEKIKILAKREGIEIIEVNPFYTSVIGKLKYSPIYNIDKDTSAAFVIARRALGFREEIPKNYEKLINDEDYLSYAITELEEKVEEIKKKKNKEKNKYKRNAIKTELKKLKNELNLLKKHLENLKSGKCKPATNNLLI

SEQ ID NO: 60650 - protein, 412 aa, unknown
  TnpB Polypeptide
MSLWEGLTPLHSGASHTLSEGYRTKGQSQMYTTKKVKYDKTSEFDMLAHESGRCYSKIVSLMRKVKRKKGFWLSQGAVQKYMRLRCYKLHSQTVQSIIQSYFDSLKSYFQIVKRNPEAKPPNRTPHFYKVRWIQNGITFKDGVIRLSNGRGNSSITLKSDAKPAYVEMYFQQGSYYFSLVYKVQVPPKLETGKAVAIDMGEIHPIVSHDGEHTIIYNGRVLRAIKQYLNKFKAHIQSKMDRCKQRSNHWYRLKRIKTKILAKLDAQIQDAEHKITSRFISDCIKAKADTIVMGDLKGIRKRAKFSKKSNQKEHQWAFARLQSMICYKAELAGLTIKFVSEAYSSQTCPTCGNRKKPTNRNYKCNHCGFQYHRDGVGAINIWNKVSGFLLSPVVGVMASPIGVRFHPHLCKSG

SEQ ID NO: 60651 - protein, 416 aa, Halorubrum sp.
MEYSHRYHAYPTQEVAERLDYHIDVHRQAYNYTLYEYENTDADDIGSAYKHHSRLPDWKDEFSIFSDVNSKALQRTVTRFYQNLTGLSEQKQNGNTVGKLTWKSPRDYQSMTYSQSGFELKNTSGRTATLWLSKIGDIEIRYHREIPDEATIKEVTVKQETTGEWFVSFGLETDTADLPGKPDVETLDTSNSIGIDLGILNYIHTSDGNTVDWLELEDEYDRLRREQRKLSRKEYGSNNYENQRQTVAKVKRHIRQKVLDYQHKLTAWLVTEYDAVFVEDLNVTGMLQSDGNARNKQDAAWRQFITLLEYKGELYGTHVVQVDAAGTTKECATCGVETAKPIWVRDHSCPSCGFECDRDANAAINILQRGFSELGLGWPEDTSVETALPTDTISVSAKRVVETGSPTLNEATYVAE

SEQ ID NO: 60652 - protein, 441 aa, Okeania sp.
MRTAYQYKLRPNKEQIATIELWLELLRRQYNYRLGERFSWWSENLCPVNACPLVMPIPQLRDNPNYYSQKRDLVNTKDKFSEYKLIHSQVLQDCIKQVKLAFDRWLKTDKNGHKLGKPRFNGIGRYRSFTYPQIKLDCIERNKINLPKIGKVKLIQHRPIPEGFIIKTVTISRKADGYYVTLSLEEKSVPALTTEVEPTLKNTLGIEMGLKQFLVTSVGESVPIPQYYRKSQKRLKTLQKRLSRKKEGSKRWLKALIAVAKQHKKADATPRRRQSQGNAHQAVADKRKDFHFKTANELLSKADVIVHENLNIKGLAKTSLSKSINDAGWSQFLSILTVKAVSAAPPEEANAGQKTIAVNPKNISQDCSNCGEKVPKELNILTHSCPHCGTVIDCDLFAQHDLGNAAINIKNRAVGHSVLKARGSRCNGRAGKREARTIVPA

SEQ ID NO: 60653 - protein, 443 aa, Leptolyngbya sp.
MRLLDNDFKLAKPIMRIAYQYRLKPTYEQRRQMARWLDMLRCQYNWMLADRFEWWEMNRTPVNACPLVCSIAEPREQPNYYSQKRSLVPLKAERSWYKEIHSQVLQDMVKRVGKAFDRFVKGDKNGKRSGKPRFKGKNRYRTFTYPQAKPDWIEGNRIKLPKIGLIKFIQHRPLPDGFTVKTVSITLKADGWYVTFSLEDKSVPEQPVAEIEPTEANSIGVDTGLEYFIACSDGTTQQPPKFYRQAEAKLAQLQAKREARAKGSKPRRKLNERIAKLHQRIARQRRQWHFETAQALIDKAEVIFVEDLKVSNMARRNKPKQGEDGTFLPNGQAAKSGLNKSFADAGIAGFLNEILPYKAAKAGRLVVKVNPAGTSQHCANCLNRVPKELSDRWHECPHCGASMARDVNSGILIKKVGLGHRLTIKRESRSGRRSPCCTAKRSA

SEQ ID NO: 60654 - protein, 192 aa, unknown
  TnpB Polypeptide
MFRKAGRPRFKSFRRGLNSIEGTNNQEIMYKPERGAIVWRKHVMTYMKPDTGYMKEALASDRHVKYCRIVRRTLNGVKRWFVQLVVEGLPPVRKVYAPKCEVVGIDPGPSRIAYFHECQAAIVEVAPHVDLKEPKIRLLQRRIDRSRRANNPDGTVKKGFVDLEHKQSRTQDGGKACRAPSVPGGHPQARPR

SEQ ID NO: 60655 - protein, 369 aa, unknown
  TnpB Polypeptide
MKTEKYELYHQSNIIQIGNLIDDLHRVHVHLILLQRRYYRIYRKYAPLSRILKHITKLKRTSKPHWNQLPSQMIQDVAIRIDLGYQAFFDNIEDRKLGKTKRKVGKPKIKPNHKYKSITLTQAGYKIAGNRLTINCLKKSFTLWKHRQWTGRIKKITIKRDTVGDYYLYLVCEDCKPSKKLPLTGNEAGVDFGMKTFLILSDGIKIASPEFYKQSLNAIRSANKALSRKQYLSRGWFRAKRHLARVHKDIANRRRDWFFKLALRLVRRYDRIAIETLNLEGMKKLWGRKVSDIAFGEFSLILQWTCAKYGKVFAKAGRWQPTTKACHACKYKSETLTLSDRYWTCSKCSTSHDRDINAAINILQAGVAV

SEQ ID NO: 60656 - protein, 541 aa, Sphaerotilus sp.
VQAARQLALGGAGRAEQQHMLAGQRGQQRQTGLGVALEQAVAERVDQRAQALGEGRGRRSSRAEADMAAILVCRSGIGNLSRRGRRFASPESARSPVLQGGDAERRLAQRAIGLVVEPIRAFRFQLRPTPGTAHTLRRFAGACRWVWNRAIGEQQRLRAAGEKFAGFAAMCRWLTVWRNDPDTAWLAETPVQAQQQTLKRLEASYRRFFEGSGGYPRFRGRGQDAGLRFPKASDCKLDAENQRIKPPKLGWMRMRQSQAVEGSVRNYTLTQARGRWFVSIQVEQADVIPAAGLVPTLGIDFGVALFAATTDGECVAPLNALKRQQKYLKRVQRSVSRKVKGSKNRRKAIDRLGKVHARIAAQRKDWLHKLTTKWADAHPVIAIEDLKVAAMSASAKGTATEPGQRVRQKAGLNRSILDQAWGEARRQLDYKTAARGGAVVPVDPAYTSQRCSACGHTARENRPTQARFECEACGHEENADLNAAKNVLAAGHAVWVARPEACGAEVRRARPVRGRHAAARKQEPAEGSAAQAVVPAGIPVL

SEQ ID NO: 60657 - protein, 333 aa, Methanoculleus sp.
LHYERTPWEQEQRSISLYETNKILTQWKQDRPELKQVYAQILQNVQVRVDLALKAFFRRVKSGEAPGYPRFKGKDRYDSFTYPQAEKGGFKFAGDSLHLSKIGDVRVVLHRPIEGTIKTCTVRRSSTGKWYVCFSVEYEPSPAPRKETVVGIDVGLESFATLSNGEKIENPRFFRTDEKALAKAQRKLSKEGKGTPERKKARKIVAHIHERIANRRLNFAHQTSRQLVDRFGTIVFEDLNITTMQKNPHLAKSIADVAWNMFITVTKSKAEDAGSHVILVNPRNTSQQCSGCGMIVAKTLSVRVHSCPHCGLVMDRDRNAAINIMRLGLQSQG

SEQ ID NO: 60658 - protein, 445 aa, unknown
  TnpB Polypeptide
MKGEVMLKRKFTVVSQLHETNNQDIIHYFEEARFTYARAVRKSFHIIKNTSTFNKTHYNTALQSEFGILKRTAGSIISDAQGKLNALKELKQFEKKQLAYKIESLEQLIERLQQQKITNTQKLQQKQAMSLIRHRNLKRKLVAKKAQLNQLTQKYQNLLYQIDNNKYKLCFGSKRLLQSDYQAFVEQRDSQISFVGCKSEPSGNQMLQLQFNSKKNQFQIKLRKDFGGFKSSDDKYAYGQVYFNYHKNIIKHILRDKNSPLSFKIIKKNNRYYLYCTFEIQVEPGEFKTRSTYGTIGLDFNKGFITLSETNQYGHLVQTQLLRYRFKSGHKTTTDLQQIAKQVITLALATGKDICIENLDFNRTKAKTQRRQNKKYNEMLHSLAYKQFVDCIEQCGYRHLVYTKRVNPAWTSWLAKQNYCPTMKLNIHIGASYVIARRGQGYTER

SEQ ID NO: 60659 - protein, 391 aa, unknown
  TnpB Polypeptide
MLERKVYRFRVDPTARQEAALARFAGARRFVFNWALARRKEIYEQTGKSISWSALSVELTELKNNSGFEWLKEIDSQLLQQALADCKRAFDNFFQKRACFPKFKRKHGARQSFRIPQRVKLDRGRVYIPKIGWVAVRQSQPCDLPLKSATFKREATGKWYVSLVAEFDLPDLPKPAIESETAIGIDVGFDRFATNSNGGVVENPRFFRKAERKIKRAQRRLSRKQKGSANRTKARRALAHEYEKITNRRADFAHKFSTSVVKDNSTIACETLNLKGMSRTKLAKSVSDAAHRETFRQIEYKARWYNRNFVFIDRWFPSSQLCSECGHRHQELSPSDRFWTCPVCGVRHDRDHNAAKNVRDEGVRILVAVGHTETLNACGASVRPATAGRSR

SEQ ID NO: 60660 - protein, 349 aa, Hymenobacter sp.
MKLTTYRFRLKDSACRVRLRKLGWACNDIWNYCNERNAYQWSFRRKLLSAFDLHKLTAGVGKELGLHSQTVQAVVDEYAKCGKQFKRPKLNWRSRKRSLGWIPFKAVGVKVSADSVTYNGHTFRFWSSRPLPGKVRFGSFAEDAQGRWYVNFVCEDLTPERAPTGKQAGIDLGLKTLATLSDGVELTRESLTRTFEVQLATAQRARKKKQVTRIHAKIKNKRKDWNHKQTTRLTNEYDVLVVGNVSSSKLKKTTMAKSVSDAGWADFKTMLSYKSLRLGITYLEVNESFSTVTCSVCSERTGPSGLSALGVRTWGCSTCGTEHNRDQNAAANILRSAGDIQRQRESPCL

SEQ ID NO: 60661 - protein, 349 aa, Hymenobacter sp.
MKLTTYRFRLKDSACRVRLRKLGFGVNDIWNYANERNAYQWSFRRKLLSAFDLHKLTAGVGKEFGLHSQTVQAVVDEYCKCGKQFKRPKLNWRSRKRSLGWVPFKAVGVKVSADSVTYNGQTFRFWNSRPLPGKVRFGSFAEDAQGRWYVNFVCEDLTPERQPTGKEVGVDMGLKTIATLSDGIQLSRENLTRKFEVKLAVAQRARKKKQVTRIHAKIKNKRKDWNHKQTTLLTNEYDVLVVGNVSSSKLKKTSMAKSVSDAGWADFKTMLSYKAIRLGITYLEVNESFSTVTCSVCFTRSGPSGLSALGVRTWGCSSCGTSHDRDRNAATNILRSAQDIVRRRESPCL

SEQ ID NO: 60662 - protein, 426 aa, Cyanobacteria sp.
MINLRYQYKLEPTKAQSQTMTDWLETSRKVWNYALGERKDWYKSRSCRVDACSIKSEHIIPADAQRPTFANQCKALTQAKNTNPDLKAVQSAVLQQVLKRLEQAFTSMWERGFGFPRFKKAGQFRSLTFPQLADHPVQGNRIKIPKIGLVKARISRPIPDGFVIKQAQVVRKASGWYVMLNLQCNVDVPSPTVKGNAIGLDVGLQSLVATSDKELIPAPKFFVRLQRKLRLLQKRASRKQRGSSNWKKAHHRVAKLHEHIANCRQDFFYKLAHRLCDRAGMIFVEDLNFITWAKGLFSKHMLDASFGKFFRILEWVCWKRDVLFLKVDASHTSQICPECGAHTGKKKLSQRVHNCPDCGYTNSRDVVSAEVIRDRGLSAVGMPVDLKQKACGGGLAGAISLAKSLKQESCANAKALAQRERFNNVQ

SEQ ID NO: 60663 - protein, 408 aa, unknown
  TnpB Polypeptide
VTKKIRIFPENIQSYKEATTLYRRSYNIATSHYIENTYRDESGKNKNLRLDTKSIVKQESLENNTIYNSLIVDNGVLDSKTTFIQVCKKNKENKGTNSTFSSMSFKSRKSVKHSFKIDRLPKHGMPFKKALGSIKITEEIPKEAFGKTAIITCDKDRWFLSVQQHIIIKPEIQGKVNCVAIDPGVRTFGTTFSNDEVAIVGEDFAKNKLFPIMKKVDSFISKRQKILNKFKEKDKEFSFKELPQWARNRIVHCDNQINKLKCKKEDIVSDLHHKFAFYLVSNFDCIFLPHFETKQMVKRKGKTRTIRRNTARSMLDLGHYKFKLLLKWYAKKYGKKVVDCNEAYTSKTRSWSGEIDLKLGSKKVIKDENKLIQVDRDVNGARNIFIKCLTASFRIKGSLSLESQQQSQ

SEQ ID NO: 60664 - protein, 375 aa, unknown
  TnpB Polypeptide
MKQTLVVKLLPTPAQATSLLATMERFNAACDTIAAVAFGAGTSSKFAVQKLVYADVRRDFGLSAQMTIRAIAKVCEAYKRDKATLPHFRPHGAMTYDERILSWQGPSAIAILTLDGRLTVPYTFGAYQAARLDRIKGQADLVYRDRRFYLHATIETPAAPESDPTGWLGVDLGIVHLAADSDGTTYSGAQVNGLRIRHERLRKRLQAQGTRSAKRLLGKRRRKQGRFQSHTNHTIAKHIVAVAQGTHRGIALEELRGISQRVTVRKRERSRHGNWAFARLRGFVEYKARLAGVPLALVDPRNTSRECPACGHTAKENRPHRSSFLCVSCGLSGPADTIAATNVARRASVNAPYVPDAGTPPVAPGTSPRSLAVGI

SEQ ID NO: 60665 - protein, 427 aa, Moorea sp.
MIIIEFKAYGKNNQYLAIDEAIRTVKFVRNSCLRLWKDNKGIGKYDLSKYCKVLAKQFPFANELNSTARQAASERAWSSIGRRPRYANVRFYDHCKKNKPGKKGFPRFQKHCRSVEYKQSGWKLSPDKKAITFSDKKGIGKLKLKGKWDLWRFDKKQIKRVRIVKRADGYYVQFCIAVDIKEDLEPSKKNIGLDVGLKEFYTDSDGNTEPNPRFFRKGEKRLKFYQRRVSRKKKGKAVGHATRTANRRKAVNRLGRTHLKISRQRVGVACAKRIEHAKRLARCVIRSNDLVAYEDLRVKNLVKNHCLAKSINDAGWYQFRKWLEHFSAKFGRVTVAVNPAYTSQNCSECAEVVKKSLSTRTHVCKCGCKLDRDHNAAINILKRALGTVGHIGTWIIDPNASGDLTSTVLGSGQVQQVGSLSEESPRL

SEQ ID NO: 60666 - protein, 344 aa, Streptomyces sp.
VKTLRDHCSLCNGASQERREAYRHVSKTSVRYGDQSAQLTEIRAFDPERQGRWSFSSQQATLRRLDNAFQAFFKRVKAGRAPGCPRFKGAGHFDTVTFPKDGDGCRWDSTPHDRQTRVRLQGVGHVRVHQHRPVQGRVKTILVKREGNRWYVILARDNVLAEELPPTGAVVGIDMGTAHFLTTSEGEHEENPRFLGSVAEEPAEAQRHLSTFPKRTRQRTKKHRAAARKVAKLHAKVRRKRLDFHHKTACASIAENDVIAHEQLNTAVLTDKAESAGRLVIPVDPRNTSRTCPPSLGGCGHVAKENRVGQAKFQCTACGFTANADHVGASNILDRAGPVLCAAA

SEQ ID NO: 60667 - protein, 429 aa, unknown
  TnpB Polypeptide
MLRLQAFKYELIPNGRQERLMRRFAGSCRYVYNKALVLQKERHEKGEKKLGYAGLCRLLTEWRHSEETAWLADAPIHPLQQALKDLERAYTNFFAKRANFPQFRKKGRSDSFRYPDPKGIKLDQANSRIFLPKLGWLRYRNSREVLGTVKNVTVSQSCGKWFVSIQTEREVETSRPKGGTVGIDLGIAHFATLSDGTFFAPLNSFKRHEVALRKAQQSLSRKVKGSNNRKKALARVQKIHVRIANVRRDFLHKVSTAISKNHAVVAIEDLKVGNMSRSAAGTADAPGKNVHTKSGLNKSILDQGWYGFRRMLEYKLSWKGGRLVAVPPQNTSRTCPSCGHVSADNRQTQARFVCVACGYENNADVVGAINILSRGIQLLRDEGQDTANALVGMQVDWLPVSARMACGSNCIGSRKQEPAETTARGAIRA

SEQ ID NO: 60668 - protein, 275 aa, unknown
  TnpB Polypeptide
VKLDKKSRRLVIYLIFKKSVEVYKPKGFISVDVNENHVAVLIEDKVYLFETGFKDIVLGYYYRRKRVQEKYDKLYGIKCRVKRRILKKLKEKKVKNDLRWKLANIIVKVTRKNHYGIVLEKLGKNPAREMINHIKDDQLRHRIYQASFKRVQRAIGEKAREYNVTVIYVDPKNTSRLCPLHSAPIVYSNSNRVGKCSVGGEPWHRDVVACINLLLRAHLGNGSYALSLGGLGVDGSHVPFGSTATHDPTGIPKSLWARRKPLDATNKYKLMRMSI

SEQ ID NO: 60669 - protein, 275 aa, Oscillochloris sp.
VIRAHTIRLNPTPEQENLFRQAAGTARFCYNWGLRVIKDALDQDVTVPTPRSLRDAFKRIRATEFPWTFNVGKSAIDGAFVNLGRAIKNFFDSRSGRVTSEGEVFENQKHLTRALRTVKRLQRSVSRKVKGSANRRKAVLKLAKAHFRVACQRKDVLHKLTTALVQQASLVGIEDLHVAGMLKNHRLAQAIADGAWAELRRQLEYKAPVFGSHVVAIGRFVASSKTCNQCGHVNDDLTLAMREWECPNPNCCAHLDRDLNAARNIRNEAVRLAGA

SEQ ID NO: 60670 - protein, 372 aa, unknown
  TnpB Polypeptide
MEYSYKFRIYPNIAQAQQIHRTFGCCRFVWNHYLAQRIEAYRETGKSPTRFIQDKDLTSLKKQDGTIWLREVDATALQSSLQDLDTAYQSFFRRVKKCAEPGYPKFKSKRNHRQSYKSKCVGTNIKVLEGAVQLPKLGKVKCRISKHVEGRILSATVSQTPSGKYFVALCCTDIDIEHLPSTGTVVGIDMGLKAFAITSDGVEYPNHKYLSKNQKKLAKLQRQLSRKTKGSNRWNKDRIKVARAHEHVSNQRQDTMQKLSTQLIRGNDVICIEDLAPKNMVRNHKLAKSISDASWGEFRRQLQYKADWYGKKVVAIDRFYPSSQLCSCCGTQWAGTKDLSVRDWICPVCGARHDRDVNAARNILNEGLRLLA

SEQ ID NO: 60671 - protein, 385 aa, unknown
  TnpB Polypeptide
VIVQKAFKYRFFPTDEQAAELARTFGCARYVYNLALEYRSKSWQQEKKSIDYHDTASKLTEWKKEPEKAFLSEVSSVVLQQSLRNLDTAFTNFFERRAQYPKFKSRRHRQSARYATNAFTFRDGRIILAKQSEPLDIAWSRPLPDNAKILNLTVSRDTSGRYFVSILVETDIKPLGKTKAEVGIDVGIKTLATTSDGEKIENPHPLLRCEKRLKRLQRRLSRKVEGGANRKKIRFKVANLHARISDARRDALQKFTTKIARENQAIFVEGLNVVGMVKNHNLAKHIVDAAFGEIFRELEYKAEWYGRTYFRLDKFFPSSKLCSSCGHLLDELPLSVREWDCPACGVHHDRDINAAINIRRAGQYLLKTTGSGARKVTPTRNQRRR

SEQ ID NO: 60672 - protein, 445 aa, Microcoleus sp.
VLDKQQSYQLNEWLYKLCRIHNLMLEERFNWWERNRSPVNACPIFVTYLPDLKDPPTYYSQKRATHWSRESNKHLYEGVYSQVIQEAIKRVEDTFNRFIKGDLNRKRSGKPRFKSVRRYRTVSIPQLKADCLSVTVNPHRTKNGGTRRDIAYINLPKVGQVKLIYHRPIPEGFTIKAALVSHKADGWYICLTLEDKSIPKFKPSEIEATEDNSIGLDVGLEKLWTASDGEIEPIQQHYRQSEAKLARLANRKDGKPHKSASRRKLAKKISKHHQKLQRKRKQFHYESATRLVSRDEKVFFVEDIKPGNLSRKNKPKQDKDGKYLPNGQSAKSGLNKSINDAGWGQFLSILNYKAAKAGKLVVKVKPHNTSQVCSCCNRVEQKDLSVRIHHCLCGFVLDRDWNAAINIKKVGLGIFPTIKRRKRRFSPERSRRAKTEPQRKPTPYP

SEQ ID NO: 60673 - protein, 389 aa, Methanoculleus sp.
VLTTKTVILKMDCPDSDLLDRTVQTYTEGMNYVSAVVYNLGKPKGSTALQKIVYPALREEIGLKSQMSCNVVRQVAGTYRTLQEQVRTKKTEWQQVTYAPTSMTFSFGRDFSLDGDKIGLTTLEGRKKYRFFRYPHMIQYLDGTWKFGASKLVKHKDGTYYFHLCCERETESREVAESSTFMGVDVGQNFLAVASTTDKKCRFFCGGKAKDLRNIYSTMRKRLQSKGTRSAKRMLKHLSGRERRLMTDMNHRVSKEIVWFAVQNRVDVIGLEDLSGIRDRPDTPPKKRRYTHHSWAFFELQSFIEYKAREKGISTVYVDPAYTSQTCPRCNHISKDNRNGRSFVCECCRHSLHADLIGARNIESRARTYRYTLEVQGCSQPPGRELSTR

SEQ ID NO: 60674 - protein, 538 aa, unknown
  TnpB Polypeptide
MINDEYKKILKKYHKLSDRHILVIETDMPYSDALKVVALSNKIRKAGNELVGLMRKNYKQLMRTKRYRKLLSLYGNAEEKSKRKDLAVQLNEMQKSYNVTWNYCRTSMIPIGKKYGIDAIFALTKAEDIWSGMEKCLYGNGKTLHFSKHGDLPCIRAKQINRGIPIFVNDNKLQFKLVRTIFGIKVNDRFQTDEVDAVLEYLNDLEIIDNKAIRTLLDETYCIDTYRPCYATLVPKLIRGKYRVYLHLTIEGKAKPKYDRSGKLRHKFGKGIIGADIGTQTVAYTSDTEVGLKNLAERGNSIQKSEKLERLYYRAMDRSRRTTNPQNYNEDGTVKKSRKTWKYSTHYKKLKAKHQELCRINAVNRQLAINEDANHLRSLGDIFVTEPKNASKLMKKAKETTVNSKGKFNKKKRFGKSIKNRCPSGFQTTIEKKFKVTCGTYIEVPNNYRASQYDHTADDYIKKKLSDRMYRLTDGTLVQRDWYSSFLLYCYDYKSKKIDRNRCVSKFEKCYSKEKDLIKRIMANKIKVLNSGIKIKIA

SEQ ID NO: 60675 - protein, 504 aa, Vibrio sp.
MPKSTTPTFTHNFPIYVNRVVRKELNSRFNAAQQLYNACLTDALKRVDLMLLDDDYKTARSLSRKAYTYTKDSEEQKATKQEAAKLYTTLREKYGLQKYSLNPVAAKHRKAAPHIYQHIDSQSAKAIAARVMKSIDKYLLNYGKKNKKGRSLYRPHFKRFGMVNSIESLNHQQGILFDPETSTVNWNACRANVAAKHSALTFHVMYASKEGKSLYEQHALQHRIKFCRILRKTYGRNTAFVLQVCFEGTPYKRPELLDNSKSKTPKGIDVNSHSIAIASAREAKLHPLPIACKGVAMLQAELSAIERKMSRSRMASNPECFEIGSKRKGRKTVEVNRPLKGKRMKNFSNNYKKLSNRKARLSRKLAAGRKTNQGELANLILSDSSYLKIEKVWYKGWQKSRLGKAIGKHGHGALERLIKRRCAELDIGFEYIDPWKTALSQYCHVCQNRTKKVIYERHTCCNQGWDRDKYSALLALFCSFDGASWHIDNEGVEAALKSNPESFK

SEQ ID NO: 60676 - protein, 294 aa, Caldilineales sp.
VLRSQAVRFLKEGTERHPKWYAVVSYKVPAELLAEHARTGALGVDRNVGQATDSEGEVYEVPDDPKLDANIKRKQRGVEKARSRSRGSGKPMSNRGRRVCGQLKKLQRRKKRRRENANHQASRKLADSAHTVVLEDLDIANMTKSAKGTAEEPGRNVKQKSGLNREILSTGWGQLERNLDYKAGRVVKVDPAYTSQTCSACGHTHPENRRTQATFKCVACGYKANADHNAALNILARGLALLPKARGNGASARRDAFDPWPLPPATAKSTSATREQDMPDDAPGPPGSCAWSGL

SEQ ID NO: 60677 - protein, 219 aa, Lactobacillus sp.
VEQADPIKPPLDGSPIGIDVGLKNFAILSNGFIYGNQNKSSRLQRIRKRFRRLQRKLSRQYRALKARKLKEGRSATDLNLAKTQLKVQRLYQRLTNIQIDYQNKIVATVVRTKPQWVALEDLNVSGMMKNRHLAKAIAQQGFYNLKVKLIAKCRQLGIPVHLTGRFEPTSKLCHNCGAKKVSLKLSERTYRCPNCHYTNDHDVNAVLNIRDTANFVLAY

SEQ ID NO: 60678 - protein, 451 aa, unknown
  TnpB Polypeptide
MILTFNQKIELILTESEKKIIDSQSRTLNYLYNMLLDKVEIEYKENNDSTLLKGYNLRNLIPKIKEERPYLYTIHSSPLKNVALKLKQSYQMFFKGINNHPHYLSFKRKFFSLYYDEPNKGIKIEDNKVRISLGKDVNNNRLYINARIKEDILPYKIKNFRITKDNSKYYLIICLQKEQVNKEINRNKFIAIDPNHKNMFVGVDYLGNTIQLNNFSSIKFLDKEIDKLKSKRDKCKKQSKKIVTINNHFYYKTSKKYHRYNNALERVYQRRREQIKCFCYTIANMLTDNYDVIAIGNYVPSKTKVRQINKVIINESIIGKFRKVLKWVCDKKGKELIIVDEYHTTKECCNCKHEENKDPTIREFTCPKCGIKIERDKNSAINIAEKAKIILSGSDYLMKENNFIKYTISYNYRNNKITIDKINDYYENICESIINMNKLNPSLFDEMYRFV

SEQ ID NO: 60679 - protein, 425 aa, unknown
  TnpB Polypeptide
MKRTNEFEVVPQSDEDEELLRRLLDASAALWNEINYQRRTNFEDPDGDVWEIDEYRGRYSGTLGASTVQQIERKNREAWRSFFALREKGEANGKPGFWGSGDDRELRTYIRNTSYSVEWGEYSRLEILVGQDLKDEYGLGYQERLRLEVRGEPNWKEYDKQGRLELYYDDVSETFRAFQPVTIDNSRLAQPLADETAALDIGANNIVACTVSTGEQYLYEGRELFEQFCETTHRIAELQSKLDNQRRTSKRIDRLYRRRTRRRDHAQDALARDLIERLYDEGVATVYVGDLTDVLETHWSVRTNEKIHNFWAFRRFIERLADTAEEYGISVEVRSEAWTSQTCPNCGSTEDTTRHQDTLTCICGFEGHADLTASEAFLRRHEEVARPMARPVCLKWDSHNWLELPRSHRPNEEHTDPQVASVDSA

SEQ ID NO: 60680 - protein, 370 aa, Epsilonproteobacteria sp.; identical to SEQ ID NO: 13

SEQ ID NO: 60681 - protein, 441 aa, Halorubrum sp.
MSVVVRRTNTFAVRPLSDDDERLLLDLLDASASLWNELNYERRQQFFDGESVWDTADYRKQYVDVTGSGTAQQVIRKNKSAWNSFFAALDDWHNGDRNERPSPPGYWGNEDDGRELRTFIRNDLYTLETGDRSRIEIPVGSALKDEYDHTGRLRLEVAGDPKWDGEQGRLEIQYDEIDDTFRAFQPVTVPDSQQDSPLASEEAALDVGANNLIACTTTTGQQYLYEGRDLFDRFRETTDEIARLQSKLREGRYSSNRIRQLYQKRTRRRDHAQEALARDLMEQLYADGVKTVYVGDLTDVLSAHWCAEVNAKTHQFWAFRAFIDRLSYTAEEYGISIEVQSEANTTRTCPVCGEQEGTDRDGDVFRCPCGHEAHADLCASRTFLEQQACELEVGSMARPVRLKWDDHNWSETPHSPERESPNEERTNQSTGNGKVASVGTA

SEQ ID NO: 60682 - protein, 395 aa, Oscillatoria sp.
MLLTQTNRLKLNHREAEVAKQLCRLSKNMFNVGLYNVRQYFFQERKHLRYEGNYHHSKTNENYELLATDIAQQTLKIVDRSFNSFFKLLQMKQRGELSARVNIPAYLPKEGYFLLVIPIRPRDLEKMPGKNWLFTVPTSRKFRREHGTFSFQVPERLRGLNIKEIRILPKFDGRYFDVAYVYEGQEEKQVEQSVEMLGIDLGLNNFASCVSTTKESFVIDGRNVKSINQWYNKENARLQSIKDLQKIQGLTHRQASLLDRRNHQVQDFLNKSARQVVNWCIKRSISKIVVGYNPDMKQSVNLGKRNNQNFTQIPVFTFKRKLQSLCERYGIEVVEQEESYTSKASALDGDTLPAWNADNPKKYEFSGKRIKRGLYRTAQGWIVNADCNGALNIRR

SEQ ID NO: 60683 - protein, 482 aa, unknown
  TnpB Polypeptide
VPHNTASSSSRWRTVIAPVTLTGADHRRAHDACHAAAGLWNQAVDWVHEQWTFREADVSRYAIRAFLTALPAAQRPLHAHTTEEIAYDLKDVIDGSRASRRAGLKVRAPWRKKNYRPLSFTAGYGWRIRGGRLSLSLGRGRPPLTAPVPGVTDPVTGRDVAWQLWGEIRLCWDRDARAWSLRIAVPAAPPFAMDPAKITAIDEGIINPVALAACAPDSTAGHPVIDVTIVNGREARAIKRDRSKAAGKLARKMSRCADGSRRKKHLQRARKKANARAKARLRDFNHQVSRKAADFIQAHGTGTVKAGDVRGIEHKTRVRRRASRSTRQQLSQWDRGVHEALIGWKTGVPVGHVCETHSSKTRPACLTRNRPAGRRYRCRECGFACHRDAVGAINILMRAIYGEYCRIDPGTVIRVTYLRAVGRWSPGQRQAHSSVQRRKARARSKAPNRAAASPPTGGVAGGQAGVSATVSALTADRVVAAA

SEQ ID NO: 60684 - protein, 403 aa, unknown
  TnpB Polypeptide
VNKLCAFKTELDLNNIQKTACARHAGAARWAYNWGLARKIDAYQNNENVPTAIDLHRELNVLKRGELAWMYEVSKCAPQEALRNLDQAYAHFFRRVKEKKAGKKIDAGFPKFKSRKNGLGSFRLTGAIHVYESSIQLPRLGRLRLKESGYLPMEGVHILSATVSERAGRWFVSVQVEMRQPEPLETAKPVAGVDLGVLALATISDGTRIENPHALKSDLSKIKRLQRVVSRRKKGSANREKARKKLAKAHMRVANVRKNALHQTTSMLARTKSAVVLEDLNVSGMVQNHHLAQAIADVGFHEFRRQLVYKGQWYGCQIILAPRFYPSTKRCSQCGHIKGEMGLNERVYICDHCGLTIDRDLNAAINLKQIATGSFPGSYACGESVRPGFQAVLVEAGTEHRST

SEQ ID NO: 60685 - protein, 550 aa, unknown
  TnpB Polypeptide
LAGRTPRPDRLARRDADGTSRADGPGRGLTEALGGAGPGVPAGDGRLPSIRLALALDIGLDDAWRHSAARRGEVGRRPQVLAVGADPVPLAEPSRGHALEGVHQGRDRDFGRVLNQQVPVVNVECGKHVPAMAVLRRDCHRPMACSGVMQIRYRYRLCPSPGQQQALARVFGCARVVFNDCLRLREEAHAAGEKISDTEVQRRVVTLAKATPERAWLGEVASVALVQACQDARRAYRNWFGSLSGKRKGRKAGHPKFRSRKDHRQSVRLTRNGFALHGSRLYVAKVGDIKLRWSRELPSEPSSVTVIQEADGRYYASFVVEVAVTPLPVIARDVGLDLGLGVLAATSDGEFIANPRHVRKAERRLAKAQRSLCRKQKGSANRAKARVRVAVQHRKVREARADHLHKTVLRLVRDNQAVYVEDLAVSGLARTRLAKSVHDAGWAMLVRLLEEKALRYGRAVTKVGRWFPSSQLCSACGHRDGPKPLSVREWACAACGTVHDRDVNAARNIRLEGRKVAGGQPETINGCGGTVRPGLALAGPGETATHRSAP

SEQ ID NO: 60686 - protein, 384 aa, unknown
  TnpB Polypeptide
MLTTVRYRIYPNQQQRILINKTIGCARLVYNLMLHDFYTNNLIKTPAKYKNEYPFLKDVDSLALANSQMDLKQAFRNYKNNKNHFGKPKFKKKSNAKLSYKTNNHKQKSTIRIENSKLILPKFKSGIKIVLHRQIYGLIKSATIEKTPSGHYTASILYNTEDQPEKPLLSKENIVGLDLGLTHLAITSDHQKYTNPKHFHKLQAKLRKEQRTLRRRLEENVAKRIYDKNGTVINTIYKKPLKDCKNYQKQKRKVAKVHDKIKHQRLDYLHKVSHNIVKNHDYIVLETLKIKNLMKNRKLSKSIADVGWSMFVNMLRYKSERSGKAVVQIDQWFPSSQICSHCKHQDGKKALSIREWTCSNCHVKHDRDINAAINIKNKGLELIS

SEQ ID NO: 60687 - protein, 423 aa, Kouleothrix sp.
MIRTHIIDCHLNRAEADALNRASGAIYTQTLVTHYRVYRKRGARTRHWLSQFAAMRLNDYFTRDDPPLLHAHSKDAAQEGFYKACKTAKASREKGAKYPHKRTWWRTTIWKQSGIRRQGDTLLLARARGLPPIMVELPEHLRDVLCVLEVRLVYDRCAHLYTWHLVVENGKQPKVAPGPNVVSVDLGEIHPAVVGDEQQATIITCRERRHEQQGHAKRLAKLSKALSTKRKGSRRERRWRAARTRMRAKHKRIMHDMEHKISRAVVDAAVEQQAGTIAIGDVRDVADGVNHGKKHNQQASQWNHGHLRQLITYKAEAEGMAVELVDEHYTTQTCPNCGCRHKPRGRNYTCGRCGFSTHRDVVGQINILSRYKAGQAGRLRAPAEIKHRIPHNLRVMRRCRDTGQPAMAVARGTGRQPREAAAL

SEQ ID NO: 60688 - protein, 218 aa, Bifidobacterium sp.
MGLPPEPETTRGKRTVIYTRVSSRGRRGDLDNSDGTVFDNADTSGRIRKLERRKRRLERSLARSRRANQGKDKEHGWHNYRKILLRKRCVEQRLANIRTERMRRVCDELARRQPSSLTIEHLNVKGMMKNRHLAPALHKQALATFLELVEHTCHRHNIELRQVDRWYPSSRLCHECGWKNTGLTLNMRVWRCPMCGSRHDRDVNAALNLRDATEYQLI

SEQ ID NO: 60689 - protein, 402 aa, Escherichia sp.
MKRLQAFKFQLRPGGQQECEMRRFAGACRFVFNRALARQNENHEAGNKYIPYGKMASWLVEWKNATETQWLKDSPSQPLQQSLKDLERAYKNFFRKRAAFPRFKKRGQNDAFRYPQGVKLDQENSRIFLPKLGWMRYRNSRQVTGVVKNVTVSQSCGKWYISIQTESEVSTPVHPSASMIGLDAGVAKLATLSDGTVFGPVNSFQKNQKTLARLQRQLSRKVKFSNNWQKQKRKIQRLHSRIANIRRDYLHKVTTTVSKNHAMIVIEDLKVSNMSKSAAGTVSQPGRNVRAKSGLNRSILDQGWYEMRRQLEYKQLWSGGQVLAVPPAYTSQRCACCGHTAKENRLSQSQFRCQVCGYTANADVNGARNILAAGHAVLACGEMVQSGRPLKQEPTEMIQATA

SEQ ID NO: 60690 - protein, 394 aa, unknown
  TnpB Polypeptide
MLIQEFKVKAKPLQLAAIDDAIRTAQFIQNKALWFWMDNEKVSKFELSKLCKTLAAEFDFAKELNSMARQASAERAWSAISRFYDDCKKGIKPVGYPKFKKFARSVESKTSGWKLTGTKRIAFTDKKSIGLLKLVGTHDLAHYPVELIKRVRLIRRADGYYCQFCIAVDRSEPLEPTGRTTGLDVGLESFYTDSNGHKEPNPRFYRQSLAKRRTLQRRLARTKKGSNNRKKAINKLARFDLKVSRKRKDHAVKLARSVMRSNDLVAYEDLRIKNMVKNHCLAMSINDAGWYQFRQWLERFGSVFGRVTVAVNPTYTSQQCSSCGAIVKKSLSTRTHACACGCRLDRDENAALNILSAGIRTTGHVGTTLLDRVNASGEMTATQLDLCLAVQVAS

SEQ ID NO: 60691 - protein, 221 aa, unknown
  TnpB Polypeptide
VSILVEEDIKANDKTYSCGIGVDLGIKDTAICSSGMKFKNINKTSKVKKIERKLKREQRRLSRKYESLIIRNKNNKEVATRQKIQKQIVKVQKIHQRLSNIRNDYNNKIVSELVKNKPVFITIEDLTISNMMKNKHLSKAIQQQKLYDLTNKLISKAHKNNIEIRQVSRWYPSSKLCNKCGRIKKDLKLSDRIYDCDCGYSLDRDINASYNLRDAREYKII

SEQ ID NO: 60692 - protein, 233 aa, Salmonella sp.
MMLILKAYKFRLELTPEQSQRLRQLCGCARFVWNLGLAETKRILGSGEKLPSAFELNRMLTVWKKMPEHIFLQDAYTDNLQQKLKDLHAAWKRCFDKKLAAKAPVWKRKNEGRDSIRFVNFEKYCRLENRRVKLPSGLGWVKFRQSQRVNGKIKNATISQLAGQWYISFQVEVETAEPNHTSTTIVGLDAGVTKLATLSDGTVYQPVNSFKASQRKLATLQRQLSRKVKFSSN

SEQ ID NO: 60693 - protein, 232 aa, Ruminococcus sp.
MNRAIKIRIYPDKEQRIQIEKTIGCSRFIYNQMLADKISYYQKEKKMLRNTPAGYKKEYPWLKEVDSLALANAQLHLESAFRKFFREPSCGFTRYKSRKHSGISYTTNAVNGNILLQDTHLKLPKMSAVKIKLHRQIPSDWKLKSVTISRESSGKYYASLLFCCESQTVEKRRAERFLGIDFAMQGMCIFSTGEKAGYPMFYRKAEKKLAREQRKLPTVKKEAGTIRNRRKR

SEQ ID NO: 60694 - protein, 392 aa, unknown
  TnpB Polypeptide
MEQKRAYKYRMYPTDEQKTILARTFGCCRFIYNWALRQKTDAFYHEQQRLYYKDLSEALTQLKKHPDYSWLNEVSSVPVQQALRHLDKAFLNFFEGRAQYPTFKKKRTQQSATYLSNAFQWDGSTLTLAKMETPLAIVWSRPLPDGAKPSSVTITKDSADRYYVSILVEEDIPSLPQTATAIGADLGLKSFVVLSDGQDIGNPQFFRKDEKKLARAQRRHAKKQKGSQNREKARRKVARIHARITDRRRDFLHKLSTRLIRENQTICIESLQVKHMVKNRKLSKAISDVGWSEFVSQLDYKAQWYGRHLVKIDKWYPSSKRCFECGHILDSLPLDVREWTCPACGTHHERDINAAKNILAAGLAVAACGESVRPGAVKANPGTTRRSRKASR

SEQ ID NO: 60695 - protein, 471 aa, unknown
  TnpB Polypeptide
MGQASRTTKLLLDLGKRTQRGANSEKRAALDATAEVLNQARAFYIDFFLAHAKKLAERMTYYSEEHMEMRERLISAHELLTWAEACTVATTAHPLPWTGWNFTERFPGMPFAYRRSVIKDAIGKARSYLSNRANWEASGKKKGKPGLPAASDHPTLYQGCHALDMEVLDTKEAFVRIAVYTGQDWTWKHYPVCSSHYTVQRLKEADWKRQSPTLVLRPHAAELHIPQVKKIEARKVMERKQDPDLVTVAVDLNVKNLAVITVRQHSRVVETVFVTDHGLDAHRYHHLKRIAKKQWQSDKPVKGEHSNQQLWRHIDRLNEDAAHKVARIIATVCARYTGCILLFERLRKIKAGKASKSRRMNRRRANQLRGKINQHAREKAYAQGIVTVEVNPHGTSHYCSRCGAKGERFSYRGGKRITEKWGKLFACPVCHYEAHADFNASVNVHRSFYREWHWQPRQAKAPLPPVVEDGT

SEQ ID NO: 60696 - protein, 236 aa, unknown
  TnpB Polypeptide
VQRRGVWFLHLTQHRAAPPADDPTGYIGVDLGMTRIATDSEGATYDGTQVKAVRERRFAHRHRLQAKNTWRARARLRRVAQREARFQQDVNHCISKHLVTKAKESCKALALEDLTGLNQRATMVRHEYRYQRMSWAFYQLRTFLTYKALAAGVRVILVDPRNTSRTCVQCGSCDKGNRREQSHFLCLQCGHAANADVNAAINISRKAAVNRPIVLPPAGLRLGMASTSPRALAVGR

SEQ ID NO: 60697 - protein, 587 aa, unknown
  TnpB Polypeptide
MDEKQFARKDRSEKLLNRKFISETVVKCSLQSILVKDDFTDMFVEAVEKRMVACSKRTWNASICLNLLIRERFQGISDPTLVQLPDFCDQTFLRQLLLGTSGAVKPFPEITDLFDRHPKLLSHEERHIGDRNIYSAAAIKLSTNIKNHLVVNFPRFLKKYLYKVSGLTHDEAVASLYLINGWKQQRKKDIVLDMVKVDYCSRKLRYILGIGDETKVTDRWLKSNLPSILRLFVYINRALELNSLPLFNILPIMKIKAHFITMDTSVFTGILKDIGVAYEVPPETEMDFWYSVFNIQKITGKGKTFTRTMDTDGVAVNVHFNKPKVASDIKSVMNLKGKRVIGVDPGRTNIFEMVEKLKDGTYKEYSLTRNQYYTEAGMIEARKHSEHWNRYIRKEIAALSEASPKSMKLSKFMIYIKTSQQAQAALWNEYLNKHWRQQRLRLYGGKKRVFSKFLNRLGPLDNTVLAYGSAKFASGGKGEMSVPTTRAFKECSYRLPIVLVDEFRTSKIYWKNGTILELVNTFGSKKPLRGLLWCCSTSTEKGKFINRDVNAAINILNCATLPTRPIALQRSPNLRKIVQHVGKTIRF

SEQ ID NO: 60698 - protein, 364 aa, unknown
  TnpB Polypeptide
MILTYKIKHNQDFLTELEMARKIAIFALKTKSRSSKDVKHIGLKSSISNQILKKYSSNKKLKKINSVKLTVPGQSIKFENYKIKISCLKMEIDFEKDIEKINQIEIDKEFAYISCTVKEEEKIECEGWLGIDRNTTGHCAVIADNKNNKVMFLGKAAQHLHKKYGKIRKKLQNRKKLKKLKAIKRRESNIQKNINHKISKKIVNYAKNNKCGIKLEKLKGIRQTTKQAKSFKYSMNSWAYFQLEQFIEYKAQLAGVSVVYVDPAYTSQTCHKCRRLGNRNGKVFKCPHCGYTSHADVNASWNISYSEKLWVEPKAEHRAKSGSCQRQVYSPRLMQEGVCIKGNTDIPQGAMATQMQPTLEPLWL

SEQ ID NO: 60699 - protein, 341 aa, Aeromonas sp.
MAFLAEAYTDNLQQKLKDLHGAWMRCFDKKLAAKAPVFKKKSDNRDAIRFVNFDKYCRLEKGRVKLPAGLAWVKFRQSQPVEGKIKNATVSQAAGHWYISFQVEQETSEPIHPSGSMVGLDAGIAKLATLSDGTVFEPVNSFKTNQTKLARLQRQLSKKVKFSSNWKKQKAKIQRLHSHIANSRRDYLHKVTTTISKNHAMIVIEDLKVASMSKSAAGTTSQPGRNVRAKSGLNRSILDQGWFDLRRQLEYKQAWRGGQVLAINPAYTSQQCACCGHTAKDNRQTQSQFKCAACGYEANADVNGARNILAAGHAVLACGGVVQSGRPMKQEPGTARAAITQ

SEQ ID NO: 60700 - protein, 403 aa, Aeromonas sp.
MRQALFAEKPISASQADKILKREHASVYQLLPSAGAQRTTQILGDNWKGWISSKKDYDKHPHKYKAKPRLPKYAKAAKTYVVGRNGHKIMDGKLFLASGNEFGFAPLSITCCKNQPYNSKASETIVNDVRIVPLGTAFMVEVIYRENIADPVKLNPDNVFGIDLGINNLVTLISTQQDVAPVLIKGKVIKSINAKYNKLTAALAANGKRAHILSKSRKRYSQISDYFHKVSYWLIEECLRTDTGKIVIGLNADWKQSINIGRVNNQKFCFIPHARLIGMIRYKAERYGIEIIVREESYTSKASSLDLDVVPDYAKVKQSGVTVAFSGKRVKRGLYRSANGRYINSDVNGTANILRKEIGNEWLIAHLEAGKGVMDMPITVKHIDLLLEARPRPCETTSNREAA

SEQ ID NO: 60701 - protein, 378 aa, Domibacillus sp.
LALLVNKAYRFRLYPSKEQEILIAKTIGSSRFVFNRFLSLWKETYKTTGKGLSFNVCSSHLTQLKKELEWLKEVDSHALQSSLKNLVDSFDRYFRKQNEAPRFKNKRNNVQSYTTSIEKKNQNPEVSIAGNRLKLPKLGWVRFANSREVKGRILNATVRKTSSGTYFVSFLVETEVKDLPKTDSTIGIDVGLKDFAILSNGKVYKNPTFFRTLEEKLAKAQRILSRRQCLATQQKRPLAEAKNVQKQRVKVTRLHEQIANARTDYLQKITTEIIKNHDVIGIEDLNVSSMLKNQKLAKAISEVSWSEFRTMLEYKAKWYGRQIIAVDPRHTSQKCYSCGHTAKENRQTQAAFICVSCGHSENADINASRNIHELAISH

SEQ ID NO: 60702 - protein, 481 aa, unknown
  TnpB Polypeptide
LAFIFGNFKNRCTAETDFSRWTISAGDTDGGAERSKCAWSGMISIDTIFQPLATQHSERTWRSSISTESTRTGCRNFVHQARSYSREKTACFVDNIPIGRYYIKMFRAMSISVSLPREKFLPLMEQCSFVFNAHTKWAMKNKTYNKSKAHHALYATLRERHPEIPSAMIQAVRDIAMEAVKQNKFEKRPRKRRHSSLRYDRRTMTLRGRQLTLSCIGKRERVVLDIPEYHREAFETGKFSGGTLSYRGSKKGFFIQLVFEFKTPEIVRSGSVLGIDRGLHHLAVVSDGRKFSGNVIRATQRRYLHNRKTLQAKGTPSSLKRLASMAGREKRFSRDVNHCISKKLARTEGVSVFVLEDLSGIRNRKRGRKLNKRIGSWPFFQMQAFLAYKAEALGKSLAFVDPRYTSQRCNRCGYIHRENRKGGRFTCRVCGFRIHADENAAMNIRDLYFSLPSAKASGEQAVVNPPHVAGRPVHEPGGAML

SEQ ID NO: 60703 - protein, 390 aa, Oceanobacillus sp.
MKVKKAFRFRIYPNTSQIMLNHQTIGCAHFVYNYFTGKQKEKDSYWYMVNEMVQNGQLLQNNWKGGFFQKNTSIKAIPELKKHYPFLKEVDSIALQKAVENVNDSYTRYYKKQNKAPRFKSKKNPVQSYTTKYVNGNIEVLGKHIKLPKLGLVRFAKRREVEGRIMNATIRRNPSGKYFVSIVAETEVRHHGKTGSSVGIDVGVTDFATLSDGTVYENPRFFRTLEEKLVKAQVILSRRQVGSANWQKQKRKVARLYEKISNKRKDMLDKISTEIVKNHDIIGLEDLSVKNMLKNRNLSKSISDVSWSAFRTMLKYKAAWYGKQVVTVAKNYPSSQLCSNCGHQNQDVKNLALRAWTCDICQCHHQRDKNASINLRKEALRLTAGTVEIA

SEQ ID NO: 60704 - protein, 514 aa, unknown
  TnpB Polypeptide
MRAQTPSYAVSTKVPLPESIAKRLEKSLRISNSAYNEALSFGLKRFEALKRNSHYQELLEARRPVVAELAALKKAKKKDKALSKQVKDYNGALFELRKAYGLTESELQKHLARQRRKPGSPYQQFNSGEIQVIASQAYKTLEKVLFYQIKPHKVRFRSKFDLDVSFRNRVNTTGTRLEPSDRKDIAYRLYIHKASTFVDIPVKAFNKYQQMSLLRCERIKYVQIIRKTIRGKKVYYLQIVCQGFPPSKVTKGEGVVGIDPGISTVAFASPTEVALADLVPKNITRKEKLLKQLDRKIERSRRVNNPECYEENGTIKKGARFKRLSNRQVRLRNRRRKVCRSLSEERKKIQGQLVNRLVSQASIIRVEELNVKGLQKRSRDIRINPKTNRPYSKKRFGKAIFRAAPSAFRTALETRAFQLGINVEVISPKDVKPSQYNHITQTFEKKSLSTRVYALSDDYPSVQRDLYSAFLIGHIEKGHYQQAQLNQDFPDFYKQMKDFLQEPIETERLAWYLN

SEQ ID NO: 60705 - protein, 401 aa, Scytonema sp.
VLVLEYKVKVKRQQCKAIDEAIRTTQFIRNKAIRHWMDAPKEQKIDKIALNNYSTALRKEFGFVKDLNSMACQAATERAWLSIARFYDNCKSKKPGKKGFPRFQKDNRSVEYKTSGWSLNPTKRRITFTDKKGIGEVKLLGKWDIHTYPVKSIKRVRLVRKADGYYCQFAIDIEVKTEPRAGNGEIGLDVGLEFFYSDSNGHHEENPRFLRKAEKAIKHAQREIYKKEKGKNQRRLARRRYARKHLRVNRQRNEHAKRIARNVCKANALVAYENLNVKGMVRNYCLAKSINDVAWSLFRRWLEYFAQKFNTTVVAVNPKYTSQKCSDCGAIVKKSLSTRTHKCGCGCQLQRDVNAAINILNLVRARDGQSRSNATGAATSTLLGASLVEQVATLNVESPRL

SEQ ID NO: 60706 - protein, 292 aa, Turicimonas sp.
MQIRRAFRFELCPSGAQARLMSQFAGSCRYVYNRTLATEKSLYGTDKAHRFNYVECANRLVLWKKKHSFLKECHSQVLQQALKDLEKGYKNFFAKRAKFPRFKKKFQRDSFRFPQGFIIDEDKQRIYLPKIGTVGYRKSRSIIGKPKNITVSREGLKWFVSIQTEFEIGPKRMINSEIGIDMGVKKFVTFSNGTFVEPVNSLKNNLKQLAKLQKKLSRQQKGSSNSKKTKAKITKLHRRIANIRRDFLHKITTTIAKNHGIVFMEDLKVSNMSASASGTVEQPGKKSDRKAV

SEQ ID NO: 60707 - protein, 544 aa, unknown
  TnpB Polypeptide
VLVYSHHGSSGDGRSGGRLRPRLPRRVVPKVPAARPDGCSACPLRGPDPGQVRRTRLAGHRTGSDARPRPPVREGSPEALPLVHRQPVEGVDEPRPADRVPPPAVPVADLVVPVVLRGHRGRRQRGHGPAVHRHAVRASVAEGCDVRRTFKFQIRPTVHQSAALTACLDAHRDLYNAALQERRDAYRHSTRTTIQYGDQSAQLKAVRGADPAQARWSFSSQQATLRRLDKAFAAFFRRVKSGETPGYPRFRGRNWFDTVDWPKDRDGCRWDSTPGNPGSTRVYLQGVGHVKVNQHRPVAGIVKTVSVKREGRRWYVVLSCDGVPARPLPATGAVVGVDMGVASFLTTSDGQHVANPRHLAASAGKLARAQQAIARCKRGSNRRRKVRDRVAAAHRKVRRQRLDHAHKTALALVHDHDLICVEALQVRNMVRRAKPKPDPDMPGSFLPNGGAAKTGLNKSISDAGWGCFLAQLHAKAESAGRTVIEVNPANTSRTCPECGHCSADNRRTQAAFRCVRCGHTAHADVNAAVNILRAGLALHAAQAA

SEQ ID NO: 60708 - protein, 438 aa, unknown
  TnpB Polypeptide
MSIGFNFRATPDKLVACVLLRWIGSQRFVKNAKVREDRYYRTFQRKFLEFAGQYAPVDQSYSHLIGDGGGDKDNNTTWLREVPSVVLRNGAVRFYQGYQRFFKGLARRPTITSRHGKQSVWLTSELFKFTPVVDKDGVISGYRLFIGTKKFPCGELPFTVNMGREKNAQGKRLPLSFTPPASIHVSVNAGRWQLSFCNETVESAESAAPSPQQTLDHLRQFTEEELLARTIGCDRGVAVPLMVASATSATSAGGAGLARPFELLDAQKSRLTKKQKSRARWQRIAARRCKGSKNRRKANLRAAHYGLYAADVRKDYAHKTSHALVSMPQMLLFVFEALQVKNMTRSATGTVAEPGKKVAQKRGLNRSILASAWGEVKMFTKYKALAAGKLCIEVPAHYSSQESLRNVSVRAWFVKCSSALGLVGYLSCNARIVESSAS

SEQ ID NO: 60709 - protein, 367 aa, unknown
  TnpB Polypeptide
MKQVIAVKLEPSQEQYQALLKTVEAFNRGCQYAADVAYQKRLANKIALQPFVYGTLRSEYGLPAQLAIRAISKAVEAYKRDKRVHVQVDPHGAVVYDPRIMSFKGLTLVSLMGLNGRELVPMRYGAYQAARLDRAKGQADLILRDGTFYLYVTVDLPSAPPIDPQDVLGVDLGIVQLAVDSDGQAHTGDGVKRCRHKFQRLRRGLQKAGTKSAKRHLRKARRRESRYQRDVNHCISKHLVSKALAGQKALAIEELRGIRDRMRAMVQKTQRYERLSWAFAQLRAFLRYKCEAAGIPLIVVDPRNTSRTCVVCGHCAKENRRSQSEFLCRQCGFQDNADFVGSVNIRRKGLEARAAVIPPTVSAVAFV

SEQ ID NO: 60710 - protein, 352 aa, unknown
  TnpB Polypeptide
MQITVKAKLMPTKEQSQLLKSTTREYIRLVNYIVSDCIDTGKTVKHTSATVSANLPSAVRNQAIRDGKSVYQKYKKTNIQSILKKPVCIWNNQNWKLKEGVLSFPVLINGKSQRIAVPVLVSDYQLRQLNGSQLGTLRITQKSDKWIAQIAVEKPEPAINNTKIMGVDLGLKVPAVAVTEDGTTRFCGNGRQNKYMKRKFRSHRKKLGKQKKLSAIRRLNNKEQRWMKDQDHKISRQIVDFAISQNIGIIRLETLSGIRQTARTSRKNEKNLHTWSFYRLAQYIEYKARLAGIRLEYVNPEFTSQKCPICGKLNKAKDRDYRCICGFHTHRDRLGAINIIDAPTADGNSLSA

SEQ ID NO: 60711 - protein, 460 aa, Microcoleaceae sp.
MKTTYQYQFYPDTNQKLELNHWLRICRYWYNRQLGDRFDWWDMNRTGIDACPLVSSIANPREKPNYYNQKALLPFIKKDLVKVFHSGELLDFKQVDSTVLQDVSKRVDKAFERFIIGDSKGGKSGRPRLKTEADYRTMTFATASNDWIKLIRKNWLYIRLPKLGVVKVRKHRPIPDGFILKQASVTRKADGWFVQLMLEDTSVPEFTPDKIVPTWDNSIGLDAVLHEDVYLATSEGEKLPSLKPLRKNQAKLDRISQKRNKRKRGSKSRRKLAKREARRHQRIARSRQDFHYKTAHKLVKTGAKFFFHEELNLKGLTKRNKVKQDDDGNYLSNGQSAKSGLNKSWLDAAFGQFFKTLEYIAAKAGSVVVPQKPAYTSMVLSYRNEIIFTDCSIRDYWDEQNSLMVDRDLNAAINLKRLGLDIFPSIKRRSGNLSVVGTMDNSTVKEILYTLNRAAKMPTS

SEQ ID NO: 60712 - protein, 319 aa, unknown
  TnpB Polypeptide
MPTVGLRFRAYTDERTLRALKAQLKLASEAYNTLRWADIYFHERDGKGLTETELRQLALDLRKQDEQYQQIYSQTLQQIADRFYDARQRSFDGLARYPKEKKAHKWYSLVYPQSGWKVLRMRWIRTKSKKVITLKLSNLGIFNVVVHRDFQVDRVKRVVVKLTPSGRVYITFVVEQEYPQLPKTNKVVAVDVGVEKLLTTSDGEYVPSQRPYEKALNKTRRLHKALSRKLFLSRNWFKAKIKLARAYEHLKNLRRDLFMKLGKWFAEHYDVLVMEDIQVKQLVGKSFRRLRMRLHDVAIHELRSVMEYQLGKYGKRFFS

SEQ ID NO: 60713 - protein, 422 aa, Streptomyces sp.
VIRAYKFLLRPTVGQQVALGEMLRDHCSLYNGALQERRDAWRHVSKTSLTYGRQSAQLRDLRAFDPERQGRWSFSSQQATLRRPDKAFAAFFRRVKSGDTPGYPRFRGVNWFDTVDFPKDGDGCRWDSTPHDPATRVRFQGVGHVKVHQHRPVAGKVKTLSVKREGKRWYVVLTAEQDKPEPLPATGAVVGIDLGLASFLITSDGEHVPNPRHGRTAAAKLEAAQQALSRFPRHKAKNRTANHRRAVEKVAKLHGKVRRQRLDHAHKTALDLVRAHDVIAHEDLTIRNMVRAPAPKPAPGTPGGFLPNGAAAKAGLNKSIHDAGWGVSLTILYAKAESAGREVIAVDPRNTSRTCPACGHVSAENRPTQEKFHRAACGHTAHADTVGAINVLRAGLIRREAPPAQREAPSSMRGRSHGYPAP

SEQ ID NO: 60714 - protein, 435 aa, Trichococcus sp.
MPVETVHRGYVYSGTPTSDEIESYFFQCFGADRLMYNLHTAHLYEYLEKNGYTIGDKLPTFKEMGMPTVKEFKQTHVNEEGDAYLYEVDAFASNEAKQHFKKAISTFNKNAFKGQFKKSALKRQKTLGIEPTFRDLKGMPKFHSRKNSKLSYTTFNQNDNIFIDENKVLHLPTARKSKLSEVTITLNTHRPLPKGSCIKHVTVTTNSQGKFEVSITVAFEMVVESIGIPAVERILGLDYSQANFFVDSEGKKANYPHYYRIMEECLAKEQRKLSRMVQGSNRWERQRLVVAKLNTKVVNQRKDWLHKKAYALANRYDMVVVEDLDLRAIGQTLKLAKNQQDNGFGNFRLYLKYKLEQQGKYFVKTPKIFASTQICSDCGVKNTALKGDISTREWTCDHCHEWHDRDHNAGLNLRNYGIRWIDEVLLAPPLVAALP

SEQ ID NO: 60715 - protein, 209 aa, Trichococcus sp.
LKYFAVVSDETVYENPRFFHKLESKLSKEQKILSRRAKQAKKDGRKLSESKNYQKQRVKVARIHERISNARTDYLQKTSTKIVKNHDVIGIEDLHVSGMLKNKKLSKGILEASWAQFRTMLEYKSKWYGKQVVAVARNFPSSQLCSCCGYQNKDVKNRSVREWDCPQCNAHHDRDLNASINLKNEALRLLTVGSYGDSLVNNHSIERCS

SEQ ID NO: 60716 - protein, 570 aa, unknown
  TnpB Polypeptide
MQLTRTINADKRYYLDEDEIQNVESLIQTMERFNHIKIKLYNCLYDKSFLKRGPLLEGTYSSWLKRNYGTTDYYNCAIYTYASSVLSSQKELNRLYQRTKEKDIETRNQKIKRTQEELEKKQGIKSSLRTYFKSGIWERPYPKCRITMERNQIFLPNGTYFPAEEYERKIERSIRRLKTRIALLESSKKRAIQRLEWLKKFPPKRIVFGGRKQYQKKDNPKVDREQWKQEFFEFRHASMSLPGRHTSKNCNFLVRKEERNLIVKCMDGKETVFKQFHLARQQKIWEEMLQAEKQERKAICYNFQLKREKTGRRYLIVSVTLLLENKYCNESLEKGCVSIDLNYDHVAVSELDEKGNRLGGTVIRFSPELKTKGQISEEIGRVMAKVGRYCVERKKPLIMEDLDTTLAKHGMKYGCKKKNRHASLFAYRKMTTCLENQAYKQSFGIYKMNPAYTSQMGKFLYLRPFGLSIHEAASYAIGLKGMGIREKLLPDERLLALLPEKTKEKLKNGTDIVSIIPAWKQLTKAFRGVSPHSFYRELPYEVLEERKKGTLKSIASEMKKWTQNNRYEYA

SEQ ID NO: 60717 - protein, 518 aa, unknown
  TnpB Polypeptide
MKKSTTPTFLLELPLVVDAGQAKRHRAHFEAARCLYNALLGEALKRLRAMRADPAWQEARAIPQAQKQERKAAFSRLRQAYGFSEYALHEFVKTANGSWIADHIDSMMAQTLATRAYQAVNRICLGEAKNVRFKSKGRGLDSVENKWNRSGLRFILQQPAEGNQGWLVWGKDRLPALIDWDDPVVCHGLRHPIKYARLVRRKASSPNAQGADAQGYRYYAQLILEGKPHQKKKHTVGSDVVGLDLGPSTIAVVPRQGEAQLLPLCEELKPDARAKRRLERKLDRQRRANNPHNYDEKGRIKKRGKRHLIWKNSKGYLATRRRLAHKERKLAAHRKSLHGRLVHQIVRCGNTIHTEKLSYKAWQKQYGKSVGHSAPGMFIDHLRRTVASTGGTLTEFPTRTTELSQYCHGCKTYVKKPLSQRWHHCACGIGPVQRDLYSAFLAAHLDPSDTTPSIAHDEWEGADLRLLAAVEVLQQRAKEGKVLPRSVGIPRAGARLPESLAPNRLELVYRHGRREALG

SEQ ID NO: 60718 - protein, 283 aa, Spirulina sp.
LDKAIKLPKIGDVKAKFHRVFDGKLKTVTVSMSRTGKYSASLLFDDGLPKPEISSQGKAVGIDLGLAHFAITSDGSKFDNPKPLKKREKNLKRKQQKLSRKQKGSKRRAKARRIVARVHERIANTRKDFQHKLSRKLVNENQVIVVEDLSVKNMVKNHNLAKAISDCGWSEFTRQLKYKAEKDGKTYLEIGRFFPSSKTCHVCLNQIDSLPLDVRSWECPNCKTQHDRDVNAAINIRDEGLRILSLGTSDTAQGGNVRPKRGRKSSVEAVAVELGSPVPLWAG

SEQ ID NO: 60719 - protein, 407 aa, Spirulina sp.
MQLVEKHIINRQHKFWQECDYLAWQSKNLYNSANYVQRQYFFATRKYYNSIDIYHQTKNLEAYGYLPTKVSKQIVRRVAEAWKAWWRALKDWSRHPEKYLGKPKIPGYKHKERGRNVVIYPKDALSSPLLYQGIVKLSQTNIELTTEANNINQVRIVPKLDHYVIEIVYTVSEPDKLDGKYLAGVDLGLNNLVAITSNHPGIRPLLINGRPLKSINQFFNKRVAKAQSIKAYRQVKKLNSKRDRRIDNYLHTVSRRVIDWCQLNEIGQLIIGKNQRWKQSLNIGKKNNQEFTNIPHAKLINLLTYKAKLAGIEVVLTEESYTSKASALNGDYLPNIQAKTEAKVVFNGKRVKRGLYLTSTGRIINADINGSMNIARKVIPDAFEGIEGLPFIPVVLDLWTKITNVAV

SEQ ID NO: 60720 - protein, 409 aa, Spirulina sp.
MFVLEYKLRGKPSQYQAIDEAIRTVQFVRNKCLRYWEENQSVGQKDIYRYTTQLRDEYPFVKELNSTACQQACERIWTAILRFYNNCKRKIAGKKGYPKYSKRTHSVEFKKSGWKLNRDAKKITFSDGKNIGELKLIGSRDLFYFQEWQIQRVRIVKRAEGYYCQLMLKLDVRDITPQLEPTQQCVGLDMGLKYLYVDSNGNTVEPPKYYRKAEKHLNKLNKRKSKKFKKGNRQSNNYKKASRKYAKGHLKVSRQREEFAKKLALRLIRSNDLIAYVGEACTKCIDLKVKNLVRNQKLAKSINDAGWSQFRKWIEYFGIKYGRLTIAVNPAYTSQECFNCGRLIQKSLSVRTHVCWCGYVEDRDKMAALNILKKATIGHIGSWSLDLNAWGDLSSILVGRNTCQDNLSQ

SEQ ID NO: 60721 - protein, 274 aa, unknown
  TnpB Polypeptide
MKQVLTIVVKLQPSPEQVAFLEATLQAFADACNYVNENTNPKLTNKIAIQSLVYQTIKKKFNLVANMAVRACARVAANRKVAKQKGKPVKRFAPSSIDCDKDLFRFREQDWTVSLATVHGRERIELKSGNYQRGKLKGRNPTSAQLCKHRDGQFYLHIQIKDEAPDSSVKDKVIGIDLGRRDIAVTSEGKKWDGLHIHPVKGKSYRSGKTFRCGHCGWHGDADFNGANNIALVGLSINQPGGTGLSCKLNRTIKYVQLSLFDDFRATKNPDLSS

SEQ ID NO: 60722 - protein, 372 aa, unknown
  TnpB Polypeptide
MKMNKAYKFRLYPNAEQIIMFAKTFGCVRFIYNKMLGDKIAYYNENKQDLYCYPSQYKKEYEFLKEVDSLALVGAYNNLKTAYKNFFRDKSIGFPKFKSKKNHHYSYTTNCVSQNIKVKDGYIALPKVGTVKIKLHRAIPDDYILKSVTVSRTPSGKYYASILFEYEKIIIPAIVQDTIGLDFSMKELYVDSNGEEPQYNRYYRRSLAKLKKMSRTLSKMTKFSNNWHKQKRKIAILHEKIANQRKDFLHKQSRQIANAYDLVGVEDLNMKAMSQSLNFGKSVADNSWSMFRTFLKYKLEEAGKYFVTVDKWFPSSKKCSTPDCNYIYKDLTMDVREWTCPECGVHHNRDHNAAINIRDEAFRIYSEKLVLV

SEQ ID NO: 60723 - protein, 377 aa, unknown
  TnpB Polypeptide
MSTRTIALTLRPDAAERAALARLRERFNAACDDISGVAWGAQEFNKVRLQRLTYATARADYGLMAQHAIRAIAVVADSYKADKTRRHTFRPTAAVVLDTPRLYRVEHNHASITTLDGRLKVQLGIGGHQRQMLKDATKLAEADLVCDEKGRWRLKVCAHFPDAPATTPGDVLGVDLGIVSIATDSDGVQYSGATVLGLRARYAHMRRKLQKKGTASARKLRRKRSKREHRFQADVNHVISKAIVQRAAHSGRAVAIEDLTHLTQRVKGRLKRSQRRTHSSWSYADLRAKIAYKGAMHGVVVVVVDPRYTSQTCSRCGHCAKANRQSQSSFQCTSCGLSLNADVNAALNLRERGRATVRLPHIPRPGVSNGAGTSPLL

SEQ ID NO: 60724 - protein, 471 aa, Mycobacterium sp.
MRGLTAEVADLNAAVNVLSERCALNPGEHSTAEVDHGCLASARRSGVRRGYRSKAERFTKTRRLAVLRQRVRAAEEALAGGRPAIVVGGKRLWRQRHNLVHSDLTELQWRHQWDAVRMFITADGETGKVGGNETIRVDPEGRLRIKVPVALTAEFGSHVVIERPVRFAYRGDEWADRMTARQAVRYDIHFDTKRGRWYLDASWRSSPKPLPSLEELRAGHVLGVDLNADHLACCVLDASGNLIGEPNSIEVVTAGLTASHRDGRMRAAIVTLLNLAQQHNCRAVVIENLGFNDSRTIGRETLGRGKRGKRLRRTVSGIPTANFRRRLIGMAARRGINVIGVDAAYTSRWGAQHWIQPLRQQTSDPATVTSHHGAAAAIGRRGLGLAIRRRPAGPRTGQRTDAGKPLARPSHHLSTVRRYGSSDPPKRPPRGVSVRRKTPIAGGQHRSGRSGAAPSPAHSPGTVEGSSPSAT

SEQ ID NO: 60725 - protein, 354 aa, unknown
  TnpB Polypeptide
LPQGGSASGRGDSAAEQDWLDACGAAPPLAGGVRAQNCTVVRKADGWYVCISLEDKSVPLPEPVPIKRVVGIDVGLDRFLTTSDGEVVPIPRYYRRAQKHLARQQRQLSRKVKGSANWKRQATKVACLQLHVARQRKAFHYQVAHWLVGQYDLLVVEDLNVRGLARTRLAKSILDAAWGQFLDILTAVAVKRGKQVLRVDPRGTSQNCCVCEERVPKALSERVHDCPRCGSWDRDLNAAIEILKRGLRSPRIQGGGGTAALWLWRILVYQSVEAATPRSDSRKLPSTARQGLAGEDVTFTFLRSTEPWCWIAPPALAGASTSLPAKRCVLSRGKPSGSLWWRWEARVWCMAATG

SEQ ID NO: 60726 - protein, 436 aa, Kitasatospora sp.
VGGSCAGGRGHPRRVGADAPRDCFGSGGVAVGGHFVAVFGHEGRVRGRGSAGRVVAASGRGPGGYGAVVQLRYSFRVYPTAGQRAALARAFGCARVVYNDALRAREDARAAGLPFPRVGDLSKALITGAKKTPQRAWLGEVSAVVLQQSLRDLEAAYRNFFDGLKGRRPRMGVPRFKSRKDTRQAVRFTANARWSITPGGKLSLPKIGDLAVKWSRTLPSTPSTVAVVKDSAGRYSASFTIETDPAADLARMPDTDRTIGIDLGLGHFAVLSDGTKIDSPRFLRRAENTRLIRDNQAIAVEDLAVKALARTRMAKSVHDAGWSAFVAMLEYKAARYGRRFVRIGRFEPTSQVCSHCGVKDGPKPLDVRAWTCGACGTVLDRDINAAVNVAKAAGLAVTACRAQVRRAPVPAPRSEAGTHPKRPTQPVREQAGIPSP

SEQ ID NO: 60727 - protein, 195 aa, Clostridium sp.
IDLGVKDFAVVNCLDKPIKNINKSVKIRKLKKRLKRLQRQVSRKYLMNKQNNKFIKTNNIIKLEHEIRLIYRKLNNIRNNHIHQTTNKIIKLKPHRVVMEDLNIQGMMKNKHLSKAIQEQCFYEFIRQMKYKCEWNNIKFIQVDRFYPSSKTCSCCGNVKKDLKLSDRVYKCDKCGLVIDRDYNASINLSNYKIA

SEQ ID NO: 60728 - protein, 426 aa, Acidithiobacillus sp.
MLNRKVTYRLYPNVEQEARLQETLGLHQRLYNTALEERIRAYQETGKGLSFADQCKVLTQWRKAVPALAGLNAQSEQVTLKRLHLAFQHFFRRVKNDETPGFPRFKNIHRYPGWGYKTHGDGWKLHPSQGASPGQPGAHGKIYLQGIGLVPMRGKPRTAGDPVTCEILHKAGKWYASVTLEMETVQRERGTEMAAFDWGLTDFLTIATPQGVETVANPRHLRNQLTELKHLGQEVARKIRMAQKLSGKQKGFPVSGNLRRAIQHLSRLHAKIARQRKDFMHQTSAWLVKRFGALATEALDVKNMIHKGGAHKKGLNREIHAAAPAAFLKMTRTKAEEAGSWYEEAPTREIKPTQRCHGCWKLPNVKKTLSDRIHRCDCGACCGRDENAAKVLLRWLEAELTGREPSEMRSGGSFAAMKHETHTIAG

SEQ ID NO: 60729 - protein, 345 aa, unknown
  TnpB Polypeptide
MITTVGVRVRLYPTKGQKILIDKTTGCCRFVYNQTLENCIQSYEQTKHFPPKNGRITNLVPLIGFPKFKTKHTAKQTYRVPYNSSNAKVLDNRHIKLPKFGRVKTKRFDMPKVYKIFNFTIEKTATGKYYASICIETEVQPLPRTGKQVGFDLGLKDLLIGSDGTRHERPKFAYAFKDKLAKEQRKLSKMRTKLERANLNLDECKNYQKQKRKVAKLHEHVVNCAKDFNHKLSRKLVKEYDLIVMEDLNVEGMKRNHYLAYSISDVRWSQLLNFIQYKCQWYGKNFVQVDRFYASSKICSCCGTYHKDIVNSLKVREWTCPDCGTHHDRDVNAARNILNQALSVA

SEQ ID NO: 60730 - protein, 307 aa, Bifidobacterium sp.
MGWPRFKSKRRSMLKFAYTTGSFGLIGGDPKALKLPRIGRVHCMENIARRVGDAKVVRMSVGRRAGRWYASLTVERGDPPNPCAPKGGAVGVDLGVKTLAAFSDGTGIANPRHLKRGLRALGHAQRALGRRQEGSRRWSKAKARVQRAQARIAAQRHDGLHKLTDWLTRTYADISIEDLNVAGMVGNHRLAQAVSDCGFAELRRQLVYKSARTGAAIHIIDRWYPSSKTCSNCGTVKAKLSLNERTYVCDACGLRIDRDLNAAININVAGSAPETLNARGGDARHDRHAPAAQTPVKREPSNARQGV

SEQ ID NO: 60731 - protein, 371 aa, unknown
  TnpB Polypeptide
VNRLSVKYRIFPSQPQERLLNETLAVCRLVYNSMVHERTVCYQVQGKSPSMRDQQKEMTQWKKSHEELTTVHSQVLQNVAVRVELAFQAFFRRVKAGEGKTERTPGYPRLKGKGQYDSITYPQEGYKVSQSTITLSKIGQVKVKIHRACPGTIKTCTVRKDGEKWYVCLSCEYEPVPLPPCDDSVGIDVGLKTFAALSNGEFIENPRFFRKEETALAKAQRRFDKVKDKHGSKERKQTKKVVRRVHERIKNRRHNFVHQQSRKLVNRFGVIAVEKLNVKGMVQNHCLAKSISDASWTQFRNSLTMKAESAGRLVVAVNPAYTSQDCSACGYRAKKRLSERWHHCPMCGLVLDRDTNAAVNINALGQQCVAH

SEQ ID NO: 60732 - protein, 1008 aa, unknown
  TnpB Polypeptide
MADSGLDGSSGRIEHLFDMVATGSPRLVHRTATVRLRSTRRQANRCYGLLRSAGDVWAWLLDTNRQRQRRGESAISNYQARCRELTSAGPFGELSVTGARSVLQRDADAWFQAANRRKAGQKDAGFPRRKRALVPVRCYHGTFKIDGQRVRLPVASGQPALWVRLARALPYPPEQIRAVILLADGGRLWLAVTAAVPVQDHDLDGGRVAGVDLGVIHPDAVVTETAGLLVSGRALRADSYLHLDDQKSRQAKAARRVPRPGQRGSRRWRRHRARVRRAEACHRRRVHQAQHQAAKQVIAFAVHHQVGTLVVGDLKGITNQDAGGCRTSGCGSGAAPTCSKPCATRLSKPGSWCGWWMSVAPPPPVPPAGGGSPSPRAGGSAVPIAPSRGTGIWSVPTTSPRRLAADLRARRCLCSSSTVGPASCRHGVTDAATSTTSGGVGPAWPRATHRAIMRPLGVARHASPTWRMARIKQRCPTGQTLPEGALVDGAAEEQPDADHRERGQGGGQDQDRDPGWDVGHGGLQGGPHALADIGERVEGGHDLEPAELVERGPRVLAGPGEQQRGEDQGEHDVDPVDRHGRAQDEPERRPDQRPEQQDGDEQGHAAGPPRDGAEDQDADREHDRARHQRPHGREHDLLHPDHPHRHGGQQAVLDLLGEAEIDHQREGGALERGEHDGHGHDAGEQHLGVAGLGEAEIGQHPAEHEEQEQRLEHHLGQEHRQLPPGDIQVAAEHRPEHLGPAGRDRLGGGGKLDGRAHRSALPVRWMKTSSRLGVPMETSVSSAFRRLTTAATGATMRGASPATYSRARSSLGAAAPSGGPAPGGGPGGPGGPPIPGGPPAKAAGPPWAAATRSTRSTPSKAPRAASSSSAGVPSRVTATSRVVRPGSPRVRASGRSRASSLPWSMIPTRSARVAASSMSWVVSTMVTPRDLMSATRSQTNRRAAGSRPVVGSSMNSTLGACMSALATMTRWAWPPENMSGLSSARPSSPNSASSASARWVRSSVGTPW

SEQ ID NO: 60733 - protein, 397 aa, Streptomyces sp.
MTTHVKRAFKYRFYPTDAQAAELSRTFGCVRKVYNLALAARTEAWTRQERVNYNQTSALLTAWKKTEEFAYLNDVSSVPLQQTLRHLQVAFTNFFGKRAKYPRFKSRKKSHRSAEYTTSGFRFREGGLTLAKMTEPLAIVWSRPLPEGASPSTVTVSQDAAGRWFVSLLVEDPTVTSLPVADMAVGVDVGLNHLLTLSTGEKIANPRHERRDRVRLALAQRRLAKKAKGDGANRAKARRKVAGIHAKITDRRRDILHKLSTRLVRENQVVVIEDLAVRNLLKNHALARAISDAAWTQFRTMLEYKAAWYERELIAVDRFFPSSRLCSTCGALRDKMPLNVRTWTCNCGATHDRDVNAAKNLLAAGLAVSVCGAGVRPQRSTPGGRSAVKQKTPRRKP

SEQ ID NO: 60734 - protein, 201 aa, unknown
  TnpB Polypeptide
VELPQYQSTGSVVGIDLGIKEFCITSDGIIVENPKYLKKSLDKLAKLQKELSRKTIGSSNRNKARIKVAKRHEKIANQRKDFLHKLSTNIVKDNKIICLEDLQVNNMIKNHKLARSIADVSWSEFVRMLEYKANWNNRQIVKVDKFFASSQTCNVCGYVNKETKNLEVREWDCSCCDTHHDRDINAAINILNEGLRILQVA

SEQ ID NO: 60735 - protein, 279 aa, Thermoanaerobacter sp.
LSTQTKQYLKEKYGIESKYLWIDLPKNLSLNTVQEIEIVPKTLYGHTTYFVHIVYKKDIPEVEPADKKMMGIDFGIKNFAAIVIEENPETFIIDGGYLISRLRLLAKEKARIQSVISKQGYKTSYKLHNLIIKEKNFVKDYIHKVSRYIIELARQNGVSKIIIGGMSDGIRDMDIGHKNNEKLHKIPFGRLFDMIKYKAREYGIEAKKVEEAYTSQTCSVCGIVEKNNRIYRGLYVCSRCRTVMNADINGAVNILKRVTLNPRLDRGRGFGNPKRIRVA

SEQ ID NO: 60736 - protein, 398 aa, Hormoscilla sp.
IPPNSVLKIPLFPEPGLHAIWKKWLAAYRWVYNQCVEFYNNNRSLSDGQSLDQYIQQLQNLPANEWTKCLGNTRHEAVCEAENASRQSRKANGGKCSLRFRSCRNKSQAIQFKNSAYRNGTWFPSKIGNFQFVVAKGYELPMNSVYGTELLYQRGQWFACFPQYIREVTTDSDRVIALDPGNRTFITGYDGENILEIGKGDIDVRQGVRRVARPSHIEGRLTRLCLHLDKLIGRKVKASRKVNKRLRYKLNKAIDLLRFKIRSLVDDLHRKAASLLVNSYLLIFLPTYQTSQMVVKANRKMFRLSVRNMLTWAMGRFASHLEQAAKRKGVLVVRCNEAYTSKTCPKCGHVHKKLGGSKVHFCPTCGHKASSYKLTPLRGLGWRFQHNVESFAGCSLRC

SEQ ID NO: 60737 - protein, 597 aa, Hormoscilla sp.
MNTRAQPHRQLTFWEYIHNPNEDGSKKAISRSTGRAGNSSSLKRRSQINQESNCQLQLFVTRGSKIIPKVTILSDNLRRCADNIQKKDLFEKLSSGLTLDGDKNEPFGDELSDRISSGLSLPTTPDSADCNLNRLSSYAKTMQSNSWFSTRSNWAQNESLYKICCPSSTASVIGCTVKKNTEKKKSRSYGKNRFKRSQNIPPNSVLKIPLFPEPGLHAIWKKWLAAYRWVYNQCVEFYNNNRSLSDGQSLDQYIQQLQNLPANEWTKCLGNTRHEAVCEAENASRQSRKANGGKCSLRFRSCRNKSQAIQFKNSAYRNGTWFPSKIGNFQFVVAKGYELPMNSVYGTELLYQRGQWFACFPQYIREVTTDSDRVIALDPGNRTFITGYDGENILEIGKGDIDVRQGVRRVARPSHIEGRLTRLCLHLDKLIGRKVKASRKVNKRLRYKLNKAIDLLRFKIRSLVDDLHRKAASLLVNSYLLIFLPTYQTSQMVVKANRKMFRLSVRNMLTWAMGRFASHLEQAAKRKGVLVVRCNEAYTSKTCPKCGHVHKKLGGSKVHFCPTCGHKASSYKLTPLRGLGWRFQHNVESFAGCSLRC

SEQ ID NO: 60738 - protein, 405 aa, unknown
  TnpB Polypeptide
MLIRKAFKYKLDTPVEIAQLMSQYAGNCRFLWNKALALNLHYLDNKQPLLWYQELDWFSKLWKQSEAYGFLKLSPAQTLQQTLKQLERAFKAGFDKSQPLKKLPTFKKRGERDSFTFPQGFKIEGKRIFLPKIGWVTFRKSRDIEGIPKNITVSRKGKHWYVSIQVEKEIIQLVHPATSMVGIDMGVKRLCTLSDGQFEEPIEVNVWQDKIKRLQKRLARKVKFSNNWRKLKAKITRLHTRIANIRHDTLHKLTTTLSKSHAVIVLEDLQIKNMTKSAKGNLENPGKRVKQKSGLNRVILDQGWGMFKTFLEYKQHWRDGQVLYVDPRHTSQTCPECYHVSKDNRQTQAAFECVECQYQAHADVVAAKNILERGHRLLACGEPWVAKLCEAGTGKLSDELEPAVI

SEQ ID NO: 60739 - protein, 303 aa, unknown
  TnpB Polypeptide
MYKYRLYPSRKQKERLINSLKVCKTIYNELLAISIDGYKFGKVSLSGFDFNKYLTGKYPEVYSQTKQNVSDRVHKAFQGFFRRVKNKSCKEKGFPRFKSRVNSITFPQSGFKILSDKRIKLSKIGNIPVVLHRVPKGKIKALTIKENKVGQWFATFACELPTNASTHIITNISSHVGIDVGLENFAVLSDGTSIPNPRYLVKSEKRIKRLQRRLSRKKKGSNNRRKGRFRLAKQHLKVANQRMDFLHKLSRNLTMRYGIIAVEKLNIEGMVKNHYLARSINDVAWKQFLSMLPLQSCKKRWRD

SEQ ID NO: 60740 - protein, 337 aa, Lentzea sp.
VVLCIRVFASLSVPLQQCLRHLQAAFTAFWHKRARHPRFKARKRGISSAEYTRSAFRWLDGKLTLAKMSQPLLIVWSRPLPEGADPSTVTVSRDPAGRWHVSILTESAVATLPPAEGRVGVDAGLSALITLSTGEKTANPRHGERDRHRLARAQRALARKQRGSKNRLKARQRVARVHARIADRRRDYLHKVTTRLVRDNQTIVIEDLAVRNMLSNRRLARAISDASWATLRSMLEYKAEWYGRDVLVADRWCPSSKKCSMCGRSLDQLTLSDREWTCSCGTVHDRDINAARNILAAGLAVAACGGDVRPTWHKPGRQSPVKQETRPARVGTSRLQF

SEQ ID NO: 60741 - protein, 405 aa, unknown
  TnpB Polypeptide
MSKNYANILGHMCYAAYKLWNVCNYERLHYKEIASLTEYPDWYYQKKAHKDDLWYKQLPSQTAQEVCKRLDKSWKSFYALVKSGNIENPRPPRFKRDKIAITYIQNGFKLSDDTLQLSLSKQLKDYMAETYGIHETYLFLKNKHFKNMKSVKQVQIYPPKPNGECEVILIYEVDDVPLKEDNQKYLSIDLGLHNLMTCFDNATAKTFIVGRRYLSLCRKYDKQIARIQSQWDKCQSSKGVKYPRKSKHVLSLYKKKQNCINDTLHKLTHYLVNYCVENDIHTLVIGDIKNIRKDSNFGAKINQKLHGLPYEKIYELLAYQCAMAGINFIKQEESYSSQCSPNAEAVTKENACKNNRIRRGCYREGTCIYNADSVGAYNILRKYNKKVALTNTSVLSSPQILKVAV

SEQ ID NO: 60742 - protein, 369 aa, unknown
  TnpB Polypeptide
MLKAYKYRIYPNKQQEGQIQKTFGCCRFVYNQTLDYRKKLYETDKKSMSKIDCSNYVNRVLKKEYIWLKGVDKFALTNSVYNMDNAYKKFFKEGAGYPKFKSKRDNRKSYKTNSTNNNIEVSFDSNKIKLPRLKWIKAKVHREFVGRIKSATISQTPSGKYFVSILVETEHDILPSTGSMIGIDLGITDLLITSDGAKFDNIRTTKKYEDKLAKEQRKLSHKQKGSENWNKQRIKVARIHEKIHNTRIDNLHRISHKLISENQVIVSEDLAASNMVKNKNLAKAISDCGWYELTRQLQYKSDWNNRQYIKIGRFVPSSQLCSDCGYQNPDTKNLSVREWTCHICGTVHDRDVNAAKNILNEGLRLLGVA

SEQ ID NO: 60743 - protein, 330 aa, unknown
  TnpB Polypeptide
MNSQARQAAAERAAYSIQRCLKPDVNGERSEPPAFQHDNRSVEYKITGWKLSEDRKRISFTDGMGIGTLKMLGTRDLTLYELKLIKRVRILRRADGDYVQFCLDVHRSEPQPSTGKPLGLDVGLAKFYTDSNGNSVECPMFLRKAEKAIKREQRKLSRKVKGSKNRQKARKRLARKHLKVQRQRKDFAIKLARCVVKSNDFVVIEDLSVKNMVKNHCLAKSISDAGWSTFLAWLVYYGSVFGKPVIKVPPAYTSQDCSSCGTRVKKSLSTRTHVCQCGCVLDRDYNAALNILVKGLASISLIYSPYPGALGNGEGLPSATLVEKEPLLVS

SEQ ID NO: 60744 - protein, 405 aa, unknown
  TnpB Polypeptide
VDNKVNMLSFKYRIYPSKKQRKRLNSQMALLAELYNILLAKSKQYYKETGKTFGQFAMNKFITELKQQRPELQNVHSQTLQNVSKRISDAYKAFFRRVKEKKAGKKIKVGFPRIKQMVYSITYPQSGFKFRNERRLYLSGIGDIPIILHRAPKGKIKTCTIKVYHSGKWYVGFSNEIPEEEFQSNCKERIGIDVGLKDLATLSNGEKIFPPKFLRKSEKKLKLLHRRVSKKKKGSNNKRKARFRLSRQYEKVTNQRYDFLHKLSRKQVKAYSLIKVENLKITNMMRNHCLAKSIADASWGKYIQMLHYKAWSAGCEVKEVAPENTTKDCHGCGNREDIDLSERTFRCSSCGNIDDRDINAAKNILKKTTVGLTGSNACGDLPSTSLARPKMQDISQKQELYGTRT

SEQ ID NO: 60745 - protein, 520 aa, unknown
  TnpB Polypeptide
MLRRAYPVSFAFLTARKRLLVAEICRSYQAAVNRFVRVLWRNDKITCYTQVTLRTRLSTGFLDDAFHQAQGLVKSARESAASLGVSPGRPYFKGKPTLGSNVVRVERGAGSFDLVIRLSVLNKGHKIDLPTKATTPIRERLTLEGAYLAQTVELDPDEPILFVASPPPAPRAQGDVTALDVGANVLFADSQGGLFFENNDFKEILEKIRRCEPGGKGRRRALAERDNYIRWAIKKLPWDKIRVLVLEDLKGIKKGKKKAKRLRKLLGPWNQAEVYWLLANKAKDEGILQVFVEAYGNSITCPACGCRMKRQRQGSRFRCRNSECGFRGHADTVGAKNAASKANRRCWTPPKPRHKPRPMLVENAFKSHVEDMAWQRPVLIKKAAKAALLSNKIQERGRERALAAKAKKQRTESKLTGSRRTATRGRRSAPMTLEIKTAPCAVLTSVAGAPAPGNVGGDFMVGRKAGPAVVAVVAGEITRPSVSEGGRQVSAVKSTTAGASSTGSHGPFTSGKVTSLGPVT

SEQ ID NO: 60746 - protein, 414 aa, unknown
  TnpB Polypeptide
MAEGPPGHSAGVLSGAVPRAGRLRAGMLWRTGHHRGPVGAAPLFRRLVRRRRPPQEGGRLGAVPAAAPQDDAGALVSRQVGCGWPTAADPGGPGLPAVTGPPGPRPALSARTDPVGHPAVRSGPTVGGRDRRGPGYGLPSRSGAGSGAGGRGGPGHHPPHAVAGRDGQALLVSGRAIRAEHHQHLKDTKARQRAVTRRAPKPGQRGSRRWRHYRRRQQIVEARHQRRVRQAQHEAARTVIGWAADRRVGTLAVGDPRGVLSIDAGRRHNQRTRDWRVGHLIATLRDKAELAAITLVLTDERGTSSTCPACRARVPKPRGRVFCCPHCGLAGHRDLIAAANIAGRLPGGITPAVTAADVTHRRAGNHLPGVSAARRDPRRRPHHGDIRGSPGRHLPAPTGVTAGRGVARLTARTS

SEQ ID NO: 60747 - protein, 269 aa, unknown
  TnpB Polypeptide
VSMVGVDCNLRNLTVGNDDQTRYYDTSETMRIAKVTTRIVSSLKRNDVRIRESVASKYGRRRSAKTRHVLHNATKEIVTVAVQKRTAIVLENIEGIRRLYQKGNGQGRKYRGRMNGWSFGEAQRQIEYKARWAGLPIIRLSRRETRGSSVTCPRCGERLQSDKRLERKLWCGKCRIVMDRDMVAAINLSRRGRVRFARSRPPIAEAQGRAVEAMKGNPTPTVIPGVDAPKPTSHTASSSNHHRLKLVLLSLSSRSLSPPERRRAQVRQI

SEQ ID NO: 60748 - protein, 443 aa, unknown
  TnpB Polypeptide
LAVKSVWQYYVSSSDVLMLLEVFRRMVNDSLRIGLVNSVSSLKKLSLLSYNQLAHYDSPSYYKLCAISRAAGILAARKKSIRRGFTTRTPYSFRQQLVSCYGFKIENGYLHIPVSRGKRFSIPLTKHTLKIILQPGVKVRSFTLTTSRLSLCIARDAPLLQCNSTVGVDRNLRNLTFGNDNQTYRYDLSESVRITSTTTRIIASFRRDDDRIRTRISSKYGGRRTARTDHLLHNATKTIVAFAIQGRTAIVLENIEDIRSLYRKGNGQGRKYRGRMNGWSFGKAQRQIEYKARWIGLPIVRLSRRETGGSSVTCPRCGERLQSDKRLGRKLWCSKCRVVMDRDRVAAVNLSRRGRVRFARSRPPILLEAQGGAVEAVKGNPTPTVIPGVDAPKLVYRRNQQNHDVTVRGLVETGSALSQDRIDVSFPCIELGGVLGIVLVELV

SEQ ID NO: 60749 - protein, 315 aa, unknown
  TnpB Polypeptide
MLTTCYGFKIQNGLLRLPVRPRRYVYVKLNSRTLQVLSGHDARSVTLTSDSLSITYSKETVEIEPKGYVGVDRNLDNVTVASTDGRVRTFDLSKANKIKADYRYVKSRFKRNDSRTMARVFSKYGEKQRNRVQPILHNVSRRIVDDARTKRYGTVMEKLTGLRRLYRRGSFRSRNYRARMNNWSYGELQRQIEYKARWEGLKVIYVPARNTSKQCSICGYKTLESTQRKLWCPKCGTVLDRDENAARNIASGGLRFSPDGPPGEAMVEEREPENATLILKVDGGKLSQQPTTTTRPDEEDLTEPKNKHLVYSVSS

SEQ ID NO: 60750 - protein, 266 aa, Burkholderia sp.
MILVYRYRVKSLNGLLNKQSRVVNYVWNFCNDTQKHALKWNKKWPTGFDLNVLTTGSSKELGIHSGTVNATCEQYAKSRSQRRRPYLRYRGRKSLGWVPLKGRDLKREGDAFRFAGNTFRVFNSRPLPEGKIKDGTNFAQDARGNWFLNIVIEMPDVQARPIRSGVGIDLGLKDFATLSTGEKLPNDQFGRRAAEKLAKAQRARKHKRHIAKLHAKVANSRADFQHKLALDLVRRFDYIAVGNVSAVKLARTRMAKSVYDASWSSF

SEQ ID NO: 60751 - protein, 315 aa, Streptomyces sp.
VESKPVTFRPEAAQPFDDRCLSWQYDAGTVSVWTVAGRLKNVRFACSPDALKMLREHRKGESDLIERDGVFYLAAVCDIPEKPVNEDPAGFVGVDLGIVNIATTSAGYRAAGRGLNRHRARQLELRRKLQAKGTKSAKRLLKKRSRKEARHTANINHIVSKTIVTTAERTGSGIALEDLTGIRSRVRLRKDQRTSLHSWSFHQLASFVDYKAKQAGVPLVYVDPAYTSQQCSECGHIDRKNRVDQATFACRACGLLANADDNASHNIARKGETVWTAGRESRVPVTPQRGVWTEDPTQQPAGRCLQARPFRAGSG

SEQ ID NO: 60752 - protein, 526 aa, Tibeticola sp.
LDVRGHCRPGFRHELSKEGPEAPARCDHRWSGRALGHHAQRPAAALWRGTGVRHLRGEERRSRDPQPGRGHDVRGRFGKRRAGDHHRLQRPAVRQPLPQEPEAHRRRAGRRGGCAMLIAHRIALDPNNVQATYFARAAGTARFAYNWALVHWKCQYEAWKADPSLPKPSQQSLRRQLNAIKREQFPWMLEVTKNAPQMAIIQLGQAFQNFFAGRARHPQFRKKGVHDRFTLTNDQFDIDGSRIRIPNLGWVRMREPLRFAGKLMSATISRVADRWFVSITVDTPDSSHLSKAENQGAVGVDLGVLALATLSTGEAIPGPKAHTALLARLKRLSRSLSRKQKGSTNRKKARARLAKLHVRIANIRADALHKLTTDLTRRFHTIGIEDLNVRGMVKNRHLARSIMDMSFFEFRRQLEYKAAMRGGEIVVADRFFASSKICSACGHKLDDLPLSVRRWTCPDCGAVHDRDVNAAINLKKVAESSAGGCQPFQRQADCSATACGEAGSGLGRKLKTKPASMKQEVSFVPV

SEQ ID NO: 60753 - protein, 417 aa, unknown
  TnpB Polypeptide
MYEERNCKIKESSKATRERHSNMDCCVVSVKIQENRLSKAKLGKLIRFFLEAKWLYNAIIASETLTLEDTSIVKIKVKDTFEEREIKNLSAQMKQSIVDSTKTNVSNLSKAKRKGLKVGRLQFKKECNEINLKQFGQTYAIKGKNKIRVQNIGILVVNGLEQINLDEVEFANAKLIQKPSGFYINLTVYSNKQQEISTEKEVIGLDMGIKDQLTFSNGVKVNFYLEESEQLKRLMRKLSRQIKGSNQYKQTLNRIKRIYEHLNNKKNDVVNKLNSVLNKNYIVCFQDELLSQWKRKKSKRRFSFGRKVQHGILGRVKDKLTKNSSNHMLESSIPTTQTCPVCGCLTKHGLDKRKYHCDHCGFENPDRDAHSANMMVLLSGYGTYRSLNTDAVSTNKMMNLLVHLFPVGVVVNTTRSM

SEQ ID NO: 60754 - protein, 320 aa, Bacillus sp.
  misc_feature (222)..(255): Xaa can be any naturally occurring amino acid
MEVNEMMINKAYKFRIYPNKAQAILINKTIGCTRFVFNHFLSLWSHAYKETGKGLTYGTCSAKLPAMKKEFVWLKEVDSIAIQSSVRNLTDAYTRFFKKQTSAPRFKSKKNNVQSYTTKQTKENIAIVGKKIKLPKAQRVLSRRMKGSSRWNKQRIKIARIHEYILNARKDYLDKISTEIIKNHDVIGIEDLQVSNMLKNYKLAKAISEVSWSQFRLMLEYXXXXXXXXXXXXXXXXXXXXXXXXXXXXXXXXXXVFYAKENVEQQDMIIVSFDGIEVTYTKPDLNQITHAYCCSIHKSQGSEFKPFRFQPIKFISNIKK

SEQ ID NO: 60755 - protein, 412 aa, Herbidospora sp.
MLNRTFGCVRVVWNRTLAWRRARYHGERVKTNFTQANAYLTAMKASDELAWLNEVSSVPLQQAIRHQQVAFANFFAGRARHPRYKSRNGRQSAEYTRSGFRWRDGTLTLAKMNAPLAFVWSWPDVDATTLDPTTVTVSRDPCGRWYASLAVDVADPEQAPATGAVVGVDLGVTDFAVTSGSEKIANPGHLAKRERNLARYQRRMARKQRGSANRGKAKAKVARAHRKVRAARADFLHKTSARLVRDHDVIVIEDLNVRGMVRNRSLAKAISDCGWGAFRRMLEYKTAKHGRHLIVIDRWLPSSKICSRCRHLLAELSLGTRTWQCPSCGTRHDRDVNAAKNILAAGLAVSACGADVRHSGSSRVRSAVKQESPSFKAGSSQVCGTPLRSPMINPPDRTGSGGSSRKAPEGTK

SEQ ID NO: 60756 - protein, 393 aa, Hapalosiphonaceae sp.
LLTNYVYKLRPNLTQKTKMGNWVDMLRSHYNWCLNDRLTQYAHQYVQGNYCDIKTRAEACPLTCFVSKNGATGEPWKDSNQKNPRRGAGDIQITALPELKKARPWYCGIDSTVLQQNVKRLDIAYKNFFEGRGFPKFKNRSNFTSFTYVMGVKVDGNKIYLPKLGWMRFHNSRLIPTGFLIKASTVRKRQDGWYVSIRIEDKTVPDYVASPLTEVKKIIGCDLGITKLVHLSDKHQIENPKFATNKKTKRTLKIRQRRVSKKLKGSSNRKKARLKVGLLHKKIADKRQAYQWKIANKIVSRNVDAIAVENLNVSGMKRRCKPKVDEQTGRFLKNGQSRKKGLNRSISDASWAELILKIEYLAVKQGKIVIKVNPKHSSQKCRNCGHTDESNRD

SEQ ID NO: 60757 - protein, 420 aa, Hyellaceae sp.
MKARYNYRIYPKQSQLTPLAKAFGSSRVVWNDAWWLYKNAERNKLDRPTKISSLVITQAKKTETRKWLSEVSSVVLQQSLRDLQQAWSNYFDGKTGKRKGKEVGKPKPKKKHGRQSIRFASNAFSVHSQSVYLAKIGHVKVVFSRSLPSKPSSVTIIKDTSGRYFASFVIEVSEQITPIVDQSCGIDLGLTHFAILSTGEKIENPRLHKKMLRRIKLANRRLAKAKKDSNRRKKRKLRLAKLHAKVKDQRIDFLHKLTTRLVAENQSLAVEDLNVSGMVKNRKLSRAISDAGWRGFKTMLEAKCDKYGRDLTIVDRWYPSSQVCSCCGKSGGKKELDVREWECLFCNTVHDRDINAATNLNRYHKGTMWAGGQSDQYNNGVEHGRETRPFPPHERGASVSLAVPAVCGEALTIPKQLKLF

SEQ ID NO: 60758 - protein, 408 aa, Selenomonas sp.
MFDLTKTIKLRIHVTSEQEVLFRQMTEQYRQACNFVSQYIFDNQFNMAYQSLNKELYSDLRSSFGLKSQMAQSSIKTAIARYKTVRQQLLQKPYRYKNEDGKWEYITKTLEWLWKPVSFSRPQADLVRNRDYSFVDDGQTLSINTLNKRTKCTFEGEHFAEFLDGSYDLGTAKLVELKGLWYLHIPVTKTVEDFQKENVRHVVGIDRGLRFLTVSYDEQGKTEFVSGRKIAAKRHKFQEVRRQLQSKGTKSAKRKLKAISGRENRWMSDVNHQISKTLVQKYGKDTLFVLEDLTGVSFEESNLSKTAKQNYDLRSWSFYQLEQFLTYKAHENRSEVLKVSARYTSQRCPKCGSIHKKNRDHHRHLYSCQCGYNSNDDRIGAMNIQFLGTMWISGTETPRFQKPIPITD

SEQ ID NO: 60759 - protein, 558 aa, Desulfurella sp.
MNANKLPLNSELRIFTIRIKNKKFVKTLTDYIYKYRHFENILLILIKENYELFLQGKTENDFKYLTSKITLRNALLNYNSKNSKDSNYLNEKYKDHKLWQALKETVKTIKQHNFTYCIERVKANYKTYFTNLKAYNKNSSAYTGMPKPPKAKKLSKLLNYSIDLDKYCSLSFKKLNQNLIGINLADKMLYIHHSKSDIESIVGNLKNINSAKLVFDRSQISLQVSYIKKIKPLKLLKPVKEAGLDIGLNNLASLFVNDETTPSLIVDGKPYKHYNTKFNRLLGKLQESLKDHVLEWSISKTGTKYPAKYDKKGYQILKFISYLHSKRNRFFFDKFHKVSKRILEYCQMHDVTDLYISKNLAQLKNNGDCNLRKAQKQNFIQIPFIKLLKDIEYKAKYYGINVHIIDEAYSSKTSSVSGNVVYIQKQAQALGHDTIKQLAKTDLANAFSGKRAKRGLFIDTTIKKVFNADLNGAVNHIKIAKDINTSYLKRKLFKLCNPIKLKSDCDFCRLMQNSVSGKAIGTDLLQRQVSNAHGSKYGKLNSGSSYGNSLYQSLIGLE

SEQ ID NO: 60760 - protein, 344 aa, Geobacillus sp.
MLKHEQVYKELPAQTSQQILRLLDKNWKSFFEAIKDWSKNKEKYLGKPKLPKYKKKNGRNVVIFTNQQCKIKDGYIKFPKTSLKLKTKVIKGLQQVRIVPKGSIYIIEVVYKKEIPDMIHEGNRVVGIDLGLNNFATIVNNIGETPIVINGKGIKSINQYYNKQKAYFQSILKKQNGLDWSKRLEKITLKRNNKIKDFMHKASRYVVNYCINNNISTIVIGNNKNWKQNINLGTINNQNFVQVPYDMFINQLKYKCEEVGIKLIVTEESYTSGTSFLDGEAPTKENYNKNRRIKRGLFKSNKGILINADVNGAYQIIKKVSPNAFNKSYGVEAVVLQPSKISVS

SEQ ID NO: 60761 - protein, 380 aa, Clostridiales sp.
MTLYEHLQKNCLTNTEYYHLFKDHFRCGYLQAHTYCQAIKQAMKDMKSYYALVKKYNDSPDFNQNPSAPRFKHEKRLLSPVFMKTAIRVRNGQLLLSLGKKMKSDKQIKEINITLPKEVYGLLSDRNIKMITVDKCCDDKHGLHIVYEVKEIPLKETGDIMSIDLGVSNLAAITFMDQVNQYLIDGNVIKSKIAGFNNKLSEAYSIEMSRTQSRYFKLTKKMKKQLAKRNGYIENYIHTASRKIINIALSHDVKTIVIGDFKHIKLENRQKYFVQIPHSRLIEQIKYKAKLLGIQVIMQNEAYTSSVSSLDLEPVNSYYSDKSRRFKRGLFKTSYGVMNSDINGSLNILRKYTNDKKIPRLISAARDKGCRDNPIRLLVI

SEQ ID NO: 60762 - protein, 426 aa, Planktothrix sp.
MIVIEAKLKGTQYQYSKLDEAIRTGQFIRNTCLRYWEDNKGVTRNDLQKLCSVLAENKETPWAKKLNSQARQAHADRAWSAIWRFYKNCRLGKTGKKCYPKYKNFSRSIEYKNSGWKLSADRKQITFTDGFEVGTMDLWSSRDLVWYSEKQISRVRVIRRADGYYAQFLVDWDRREEHEFQGKMVGIDLGLKDFHTDSDGNTVENPRYLRKSERRLKMLTRRVSKKHIKGKKQSNRYRKARKALAKQHLKVSRQREDKARKDALALVKSNDLIVYEDLKIQNMVKNHHLAKSISDASWYQFTQWLQYFAKVNGVIVIAVPPHNTTVDCSCCGAKVKKTLSTRTHRCSSCGTVLDRDHNAAKNILAKGFKLLTEYLNSTVGHTESDLKKVKAQGETDLWLKNSDGLVLNRLDELRTKNSWESPAIPR

SEQ ID NO: 60763 - protein, 406 aa, Planktothrix sp.
MLIYEMKLEGINDQYGQLDRAIRSGRFIRNSIIRAWMDGKIKSRNDAYAYCKVLADNPEFPWASQLNSMARQAHAERAWASIERFYRNCKAKVAGKKGYPKFAKEQVRASLEYKTTGYKLSEDKRYLTFTDGFKAGTFKLWGSRNLHFYQLSQIKRVRVVRRHDGYYVQFLIDHTREENKELTGKQIGLDVGLNHFYTDSAGNKIDNPRFLRKDERKLKKLQRRLSRTQKGSKNRAKARNRLGRAHLSVSRRRNDWVCKLARHVIQSNDLVAVENLRVRNMVKNHHLALSINDAAWYRFREWLEYFGKVYGVPVIAVEPKLTSQNCSNCGKKVVKTLSTRTHQCPHCKYVADRDENAAKNILKSALKQWANTVGQAGINASGENDSSLDGETQPSKSTLRKRKSQM

SEQ ID NO: 60764 - protein, 395 aa, unknown
  TnpB Polypeptide
LIISYKYPIFPDKATSQKLAKALDACRWLHNKLLEKMNDARENGIKLKTYDTQNMIPSLKLENPKLKLVYSKVLQMVNYNLWSNIKGLSASKKNGRKIGHVRFKGYGWYKTMNYNQSGFKLDQDHGLLHLSKIGDIRIKMHRKIQGCIKAVLIKREGRQWFAIVQADQEPESLPETGKSIGLDVGLKSFVVDTDGNSVENPRFAEKSADKLAKAQRKLSRAEKGSNNRLKIKERIEKIHAMVNHQRDDLLHKLSRLYVNNYDNICVEDLEVKGLKEKGHNKGMHRNIHDASWSKFFFMLSYKAESAGRKLIKVDPRNTTQRCSSCGSIVKKELSDRVHECPYCGFSCDRDYNASRNILIAGMEQPVAPIESKPLHHISVMQVLAMKWEAVPFRVQ

SEQ ID NO: 60765 - protein, 335 aa, Enterococcus sp.
MLKAFKFRIYPTASQKQWFVQNFGCVRFTYNHLLKARQESYAKTGVIDYTLTPASLKKQYDFLKKADSLALANAQLNLDRAFRNYFKKRASFPKLKNKKSMWQSYTTNNQKGTIYLKDKYLKLPKQKELIQVNLHRPIEGEIRSATISSRYNEAFYVSLLCEVSAKEITESRRWIGVAYDPQKLIETSSPVDVPLPLLKKTEKEMQLAKRKLGIKGRAAQKRKARLERSKNYQKQKRKVMDLYLKQKFQKENYLEQLSGKLIRYYDYLFVEAVPNETFLSDFSLQDWYKLVTKLRYKANWYNKTLILINMNEQTDPLVIKKSLELEKIGKQVVFE

SEQ ID NO: 60766 - protein, 379 aa, Staphylococcus sp.
LPIEKRGRQNMLRAFRTEINPSFEQRLTINQTIGTCRWIYNKFIEINQYLYKKEKSYMDGYTFSKWINNEYLPSNPDKHWIKQSASKAVKQSIMNAHRAYQTFFKKQKGYPKFKKKSGIGSYYLIGTIHVQRHRIRLPKLGWIKLKEKGYIPTNNIRSATVIREFDRYYVSVLIDCEQPLRFKPKQTDGIGIDLGLKEAVFTPSGVKIRNFKTNQSIVKLDKSLKRHQRKLSRKKKGSHNWYKQLLKVQRLYRRIKNIKRNIKRKGILSIVRTNPQFITIENLNIKGMMRNKRLANSFQQIGLGNIVECFKIKCQDYGIELRQVDRFYPSSQICSDCGHRQPMPLNQRTYHCHHCGMIKDRDINASINLKQATDYTVIV

SEQ ID NO: 60767 - protein, 516 aa, unknown
  TnpB Polypeptide
MEVRTISFTWRTIHVEFPETLVPLYDKMSEVFNTILSDPSLRAGVVSVDTSLRRGNYVNEMRRVIGDEVRDLLGPDFPNRAWHCKMIFEQLRRMVESLRERQIIFDTLDGGDPDSLFWARVHDQGVYPTMGTVANVRDSKTRPELPHHALFVLDYSASNTQMFRQHGHTFSAKTIDNEWTTFSVSLPLSTREGATGRVAKPQFRCTRDGHYIGDLAYEVEISRDPSDGSVLGVDLGKVKDFSAVVLHPDGETSQEYIPSKIIGRLDKKIDDLNREKNDVRSTCWRAKPYIESLHSLTDSVAKDARRRKTMEHLSVKITRLKMERSRLIARDLVSIAVDNHCSEIHVENLSWLKSRGGRWEHSLIQQHIREAAELHGTTVVRVNAAHTSRQHPLTGNMGEWVGRDVVFDNSERFDRDHLASVNIARRGRKPRSVTHICRASSKRARPPSRARIRKRMRELLHAREDQVVSLSPAAPGTITFHERWTTVIVDASTMSMRRHRPPVMNHDRIKERQCVV

SEQ ID NO: 60768 - protein, 355 aa, Lactobacillus sp.
  misc_feature (321)..(323): Xaa can be any naturally occurring amino acid
MMVLRTQKVKLYPNQTMKKVLDGLCDYRRYCWNQGLALWNDMYDASVILADKKQRPNERKVRDELVANKADWQFQLSARCLQLAISDLGKAWQNFFDQAQPDWGKPHFKSKKAPRQGFKTDRAKLFNGCLRLDKPRGVKTPWFDIKFKGARNLTGELKVVSIYRENGQYWANLPLEVAMGPKAKTAVDVNVGHLDYTDGQIKTLPSHLQAIYKRIKHYQRQLARKRKVNGKQATQSKHYAKTRAKLQRDYRRVANVQHDLMQKFTTQLVNTYDQFVIEDLAVKKMQMSHVTAKGLQRSMFGYFRQVLTYKCDWYGKTLLVXXXTSTVCINAGGFFVPSIKVTKDYSLGIISRGSR

SEQ ID NO: 60769 - protein, 306 aa, Hormoscilla sp.
MLVVNPAKPTQASVTYDFALAEISLKLFSSKIMHTKTERGPKRKLVIYNSQLLKVTNYQLTAYTGLSYFISGGNGLLAFLNIPEVTTGSDRVIALDPGNRTFLTGYDGENLLEIGKGDIGRLTRLCLHLDKIIGRKMKAIGKANKRLRYKLNKAIERLRFKIRSLVDDIHRKAASMLVNHYKLIFLPTYQTSQMVVKANRKINRKSVINMLTWAMGRFASHVRQAAKRKGVLLVRCNEAYTSKTCPKCGHVHKKLGGSKVHKCPACGQKARSGPPPLRGLGRRFQHNVESFAGCRLRYQRWRYHYL

SEQ ID NO: 60770 - protein, 494 aa, unknown
  TnpB Polypeptide
MKKTIKNYTSSKVDLIPFEAYLERYNACKNLFYNEFWNKLDVVFKQGHRVVRNELVKDLELKVKTNPEYNLLVNLPSKLWKLALEESFSNIKTTWSMYKKDVRKIINRNKELTKTEKHYLNYVLKSDSILDDILNEKNEILDKFKHLDIVKLNKYLNRIIRKHKFKKLFTQGKSYMLEDVQYRFTTESGRLCINLSTLIKNKRIKLELSNKIQFKGNIRVVLKNDKLEIHKGLDVKVKRHADFVHEIGIDKGFVALLSTSSGKQYGNEFNELLKDKSNYLNNKNAKRHKLKQQVKQLRKDKNDKKADRIVKHNLGTKKLDNFKKRTQESVKSFVNNSINQMIDTEKPQVIACEDLSWNKSSKGKRQKNTNRWLNAWQKGYLQDRLVFKSFVNNIKLVLVNCAYTSKVCSRCGHFGVRNGAHFNCTKCRLSIDADINASINILARLYDKDISLYTKYMTVKDIINGRLELDALHPSTDASKTSVASSMEERMKVA

SEQ ID NO: 60771 - protein, 418 aa, Streptomyces sp.
VKSCALNSNFDLYLSRRQFVRVATTHVKRAFKYRFYPSGEQAAELSRTFGCVRKVYNMALAARTEAWARQERVNYNATSAMLTAWKKTGELAFLNEVSSVPLQQSLRHLQAAFTHFFGKRAKYPRFKSKKKSRKSAEYTTSGFRFRDGRLTLAKMREPLDVVWSRPLPEGAKPSTVTVSQDAAGRWYVSMLCDDPTVKPLPVKNAAVGVDVGLDHLLTLSTGEKVANPRHERKDRSRLALAQRRLAKKARGSANRAKARRKVARIHARIADRRRDGLHKLTTRLVRENQTIVIEDLTVRNMVKNRTLARAVSDAAWAEFRSILEYKAAWYGREVIAVDRFFPSSRLCSACGNLQGKMPLHVRTWTCGCGTTHDRDVNAAKNLLAAGRAVSACGAGVRPQRSTPGGQSAMKQEVSRREP

SEQ ID NO: 60772 - protein, 375 aa, Oscillatoriales sp.
MVYKAFRTKLKLNDHQATLMAKHAGYARFVFNWGLHLWRSAYEEGLKPNINSIKKVFTNYVKPQYPWMSELSSRVYQYAFINLGDAFKRFFKGISKYPKFKQKGHHDSFSLDNCGKPIRLSGTRHKLPFVGWVSTLEAIPESLVKKVTISRQAGEWYISFFVEITPEITPKCRERIGVDLGINNLATCSDGTKFSNPKAYKSAAKKLARLQRHLSRKTKGSKNWYKCLLKVQRLHQRVANIRRDTTHKITTFLAKNHSQVVIEDLNVSGMLKNHCLAGSIADASFYEFRRQLDYKSSWYGSKLIIADRFYPSSQLCSNCGARQKMPLNQRIFQCQNCGLVTDRDLNASINLEKSSGCGDYTCGRGAADSPGRSKK

SEQ ID NO: 60773 - protein, 391 aa, unknown
  TnpB Polypeptide
MIKTIRVLLIPNNKQKTKLFQYANTSRFAYNWALGREKENYKNSGKFISDGDLRKEFTQLKKTEEYAWLNEISNNVTKQAIKDACDAYKKFFKGYSKFPKFKSRKFSKPSFYQDNVKIKFTDTHVKVEGFATSKKKNKQKLNWIRLAEHNRIPMDGKYINPRIKYDGLNWWLTVGIEYENSTNLPVNEGIGIDLGIKDLAICSDSNKYKNINKTQTVRKLEKQKRRLQRSISRSYEKNKKGKEYCKTKNVIKKEKLLLKLNHRLTNIRQNYLQQTTSKIIKREPSFICIEDLNVSGMMKNRYLSKAVQQQGFREFRRQIEYKSEWNNIPVVIADRYFPSSKLCSCCGKIKKDLKLSDRLYRCECGNKTDRDVQAALNLKRYGENVLSQSVA

SEQ ID NO: 60774 - protein, 393 aa, unknown
  TnpB Polypeptide
MYFVRKLKLGVSEQLQLLSRAAGELYSQTLVSFWRVVRKKGLWLKPATLMRWFPSDPENRLHAHSADAVVQSFFASLKSWRERRKTDPNARPPRRRRYYYKIQWKASAIKVVNGKLRLSNGKGNEPLVIPWAWDTPVWVEIGWDGRQYELRACYKLSDARPKEERKESGVAGVDLGEVHLAVAHDGENTYIANGRLLRSKRRYQNKLKSTLSRLLARKRRGSRRYRRVLASGRKQLAGLNHQIRDILHKQTTRLVSTLYARGVQTVVIGDIRNIRVSADYGTRLNQKLHQMLHGQTRHHITYKAERLGMKVVLLDERYSSQTCPACNKRNKPRGRVYRCGCGFEFHRDGVGALNLRRTYLGLGPVVGVMASPTGLRFQPHALCSSAGRSHPAV

SEQ ID NO: 60775 - protein, 321 aa, unknown
  TnpB Polypeptide
LQATVEYYCNAQEAFFKQTPVGRKPPKFKGRHFYRQSATLKNVPSKRKDGSLLYPIQTVNKYCLRIGTRKPIFVETSSLNRLKHKVIKRMMVVYRADLDRFYLSFVVADQKEELPQYQAKTQKTGKMIGIDVGLGNEWLVTSDNHRWSVPQTFEAEKAKNLRQSHCDRNRTAVEKRVARFNQKHKETKIDKYDFANWQKLRKTKSKYQVKINNIRLDYIQQATTWLVKHYDVIAIEDLKTKNLLGNHKLAHNIANAGWSMFRRMLAYKCKWYGKKLIVVPPQYTSRICSDCGQKNSCFCAYENTRLAKRKRMDLSVLSCRA

SEQ ID NO: 60776 - protein, 370 aa, unknown
  TnpB Polypeptide
MLKVYKYRIYPNKQQEEQIHKTFGCCRFVYNQTLAYRKDKYEQDKQSMNKTSCNNYCNQVLKKNYEWLKEVDKFALTNSIYNMDLAYQKFFKEHTGYPKFKSKKNPKRSYTTNFTNGNIEVSFDNNKIKLPKLKWVKAKIHREFQGQIKSATISQIPSGKYFVSVLVETKHTPMESTGCTVGIDLGIKDLLITSDGEKFDNIRTTKKYEDKLSKEQRKLSHKVKGSKNWNKQRIKVAKIHEKIHNTRIDNLHKISHKLVQENQLIVSEDLAISNMVKNHNLAKAISDCGWYELIRQISYKSDWNNRQYIKIGRFTKSSQPCNICGYINIETKDLSVREWTCPVCGTKHDRDVNAAINILNEGLRLVNEVA

SEQ ID NO: 60777 - protein, 535 aa, unknown
  TnpB Polypeptide
LIIYYYIHTTSTDTTKDTDITDTLICQWYKKNVKKLSDNLWLPVITDEIDYKPKYSFTQTTSIKFEAKTNKNLIKNNIDYVSNQNDIKTYIEHFNKRLNKLNNSNLNNDEKKKKKIKLYDEHIKIFEHYNDVIKTTQIHLNLNKEQKSTIEYWLIECDNVYNYCVKKYNENPYSFDMNYKSLKLEVFKQLYGTNKKPCPYDMLTDEVRIFCSNLKSCQSNLANGHIKHYTMKRRNTNYSQSILIPKNSITKTGIFPSFLGDIKGFKLDSEYANCDSRLLIDKIHKKYTLCIPQYQKKFFEKQTEKIINNIECKQIYDKEINEIGAIDLGERIPFTIYSENHYVKIGEDIRKNILDYQMRIRQMQRALSKNINKKNKRLTNKKKLKVKIRLTYRHIKNLVKELHNQTANYLVKNYKKILIPEFKTQEMIKNINLTDNKQKARVNKLDKRVKFVLLMLSHYRFRQHLTNKCVEYGCQIDVVTEEHTSMCCTKCGSLSKKYNGREKHCDNCGYKINRDVNGARNILLKNAKQHIKLRL

SEQ ID NO: 60778 - protein, 153 aa, Bartonella sp.
LCQNWRNLQAKIANLHYQIFHFCKDFLRQTSSQISENHAKIYLEDLQVCNLLKLAKGTVKEPGTNVKQKSGFNRSILDQFWFKFRRQLDCKSQWQGRLMRSVPSHKMSYYCLCCGHVIKENRQTPASFQWIECGYNGHADMLVHGIECHGGVL

SEQ ID NO: 60779 - protein, 232 aa, Streptomyces sp.
VGLHPARPCYPRPLPGRRPRQGQPAPRRGRPGQDRVGQALSRFPRRKAKDRTANHRRAVEKVARLHGNVRRRRLDHAHKTALGLVRAHDVIAHEDLIRNMSKAPAPKPDPGRPGAFLPNGAAVKAGLNASISDAGWGVFLTILHAKAESAGREVIAVDPATPPAPAPHAGTWRRRTGPHRTSSTASPAATTRTPTQWQPPTFYGPGWSVATPTRRNEKPRPSGRGGVTWLSR

SEQ ID NO: 60780 - protein, 396 aa, Streptomyces sp.
MASCEKRAYRYRFYPTDAQTAELSRTFGCVRKVYNMALAARTEAWTRQERANYNQTSAMLTAWKKTGELAYLNEVSSVPLQQALRHLQTAFANFFGKRAKYPRFKSRKKSRKSAEYTTSAFRFRDGELRLAKMSEPLRIVWSRPLPEGVSPSTVTVSQDAAGRWFVSMLCDDPGIRHLPATDAAVGIDAGLDHLLALSTGEKIANPRHERRDRAALAKAQRRLAKKEKGSANGIKARRKVARIHARIADRRRDSLHQITTRLVRENQTLVIEDLSVRNMVKNRKLARVISDAAWREFRSMLEYKAQWYGRDVIAVDRWSPSSKLCSACGTLQDKMPLNVRTWTCGCGATHDRDVNAAKNLLAAGRAVAACGAGVRPQRSSPGGQSAMKQEVSRREP

SEQ ID NO: 60781 - protein, 339 aa, Streptomyces sp.
MQLRYAFRLDPNPGQRAALARAFGCARVVYNDAVAARERARREGAAFPSAGVLSKTLITEAKQRPGRQWLSEVSAVVLQQALRDVERAYTNFFSSLKGSRRGARVGAPRFRSKRDGRQAIRFTANARWKITEAGRLLLPKIGEVRVRWSRRLPSVPSSVTVVRDAAGRFFASFVVESDPDADLARMPDADGLPSVGIDLGLTHFAVLSDGRVIDSPRFLRRAEKKLKKAQREVSRKQKRSKNREKARLKVARAHAQVADARREFHHQLSTRLIRESQAVAVEDLAVKALARTRLGKSVHDAGWAAFVNGRSYSLGFVGSERHASSLGQAGQPRVAAAVQ

SEQ ID NO: 60782 - protein, 412 aa, Streptomyces sp.
VKLVVQVKLLPTPVQAAALEATLRACNEAATWVSETAFERGEFKNFALRKQVYSEVKSRWGLGAQAAQHVIKKTCDAYATLKANLKAGNLGRSGSRRYRRAAEKPIVFSPQGAQPYDDRMLSWQIPDRTVSVWTVAGRVKNVAFTASPEQLATLALYRKGESDLLQRDGMWFLNATCEVPEAPLNTDPVGFLGVDLGIVNIATTSDGEIMAGRELNRIRVRERGLRAKLQKKNTPSAKRRLKKRRRKETRRARDINHKIAKHVVAEAERTGRGIALEDLTGIRERVRLRKPQRAIHSSWAFHQLGAFIAYKARKAGVPVVHVDPAYTSRTCAECGHIDRANRVSQAWFACRNCGFVDHADRNGSRNIRARAWELWRRGAPATAPAPPQKPGSGAGRKRSITPSDARCASRSL

SEQ ID NO: 60783 - protein, 421 aa, Streptomyces sp.
VDPLSARLVAAVPATGEDCEVDILKENLWTPPVETEYGLVVALPDVIGTKVRALADRGAARDLIDVHAAAEHHTTNDLERLGERHGRDEFRLQDLHDRLACAEWYDDEEFAPTDSPRTRPHVYGPGPKRKARPACKFTTGTIRLDDRRHIVLPRLGRIRLHEDVQPLVDAIAEGGTRILSVTVRFERGRWFAVLQTEERHTIAPAGRPGTAVGIDLGVKTLLVMADSADQVREVANPKHYDQALTQLRKASRTVSRRRGPNRRTGQAPSRRWEKANAVRNRVHHRVANLRENHLHQATARIPAEYGTVVVEDLNLNPPPAEAGGFLAQAACGSSGPTGLTPSTPAGSEPARFGTTSKGVAVLAWLSLSTVCALGSRNAHRPRYPIAWTVFRPGGETPFPALLRRSPIPSRPEGRGILGGTR

SEQ ID NO: 60784 - protein, 397 aa, Streptomyces sp.
VTTHVKRAYRYRFCPTDAQAAELSRTFGCVRKVYNMALAARTEAWTRQERVNYNQTSAMLTAWKKTGELAYLNEVSSVPLQQALRHLQTAFANFFGKRARYPRFKSRKKSRKSAEYTTSAFRFRDGELRLAKMSEPLRIVWSRPLPEGVSPSTVTVSQDAAGRWFVSMLCDDPGIQPLPGNGNSVGIDVGLDHLLTLSTGEKIANPRHERQDRARLARAQRELSRKAKGDGANRAKARRKVARVHARITDRRGDHLHKLTTRLVRENQTLVIENLSVRNMVRNRNLARSISDAAWSEFRSMLEYKAQWYGREVIAVDRWFPSSKLCSACGTLQDKMPLNVRTWTCDCGATHDRDVNAAKNLLAAGRAVAACGAGVRPQRSSPGGQSAMKQEVSRREP

SEQ ID NO: 60785 - protein, 385 aa, Streptomyces sp.
MKIVTQVKLMPDAVQASVLERTLRTVNDAANWVSEVAFEHGVPREYELRNHTYAELKARGLGAQAAQHVIKKVRDSYTTLKANIRAGNLGTEGSERRRKAESKPITFRPQAAQPYDDRCLSWQYDQQTVSIWTVDGRVKNVSFVCSPDALKMLQAHRQGESDLIERDGVFYLVATCDVPEAEQYEPDGFIGVDLGIENIATASTGYLAAGRRLNRYRKRQLALRAKLQKKHTNSAKRRLKARARKEARHAANQNHIISKTIVTEAERTGRGLSLEELKGIRNRVRLRKPQRVALHSWAFAQLGDFIVYKAKRAGVPLVFVDPAYTSQTCAECGHVDKRNRVDQGLFICRGCGVVAHADRNASHNIATRGGSVWNAGRESRVPATP

SEQ ID NO: 60786 - protein, 481 aa, Streptomyces sp.
VTKFQVQPGFVMQAYRFALDPNTGQEHALRSHCGAARAAYNWAVGWVSASWWQRRAEGSYNIPEAELTQWRPWSLPALRKAFNAAKHTDPRFADWWQENSKEAYSTGLANAAAAFDNYSKSKRGQRKGTRVGMPRFKSKDRARPACRFTTGTIRVEADHRHVTLPRLGTIRTHESTRKLQRRIENGTARILSATVRFERGRWFVSLQAEVKREFQRVARPDMTVGVDLGVKVLAVLADSLGEIRYVPNPAHCDTALGTLKRLSRQVSRRQGPDRRTGQKPSKRWLKANEQRNRMHHRVANLRTDALHKLTTRIRAEYGTVVVEDLNVAGMLKNRRLARKIADAGFGEIRRQLTYKGRRNACRTVVADRWYPSSKTCSDCGAVKAKLPLHVRVFTCDACGLVMDRDENAARNLAALAATVRTGTGVAGDLGAQAPNPRGADRKTRAIAPSRKAGSGRAGGAIPQQRTEARDRHQDTEALTHW

SEQ ID NO: 60787 - protein, 433 aa, Streptomyces sp.
MGRKYRLYPTPTQEKVLTEWGHSARALWNLALEQRQYAYQQRQVTLRSVEQGLHLTVARREIAWLAELPATVGQQVLRHMDLAFDNFFNASHPAGYPQFKKRGHKLKVSFPGQKVKIRKLSRRWAEICIPKMGWIRFRLSRALGGVVRNATISKDGVGWHVSFGVATGVKPLPPVDKPGCGVDFGVAASAYVSTEDRPRQMPASLSTTEKARLKHLEQKKARQTTYAKKHQGGQYSKRLRKTIAQIAKIRAKQACRRRDFTHKLTTELAKNHGYVGIEDLRVKNMTKSARGSVKNPGMRVKAKAGLNRSILDNCPGERRRQLEYKCRLYGSELRAVPAIHTSVTCGNPACGKVDPESRKGCGRLFACVHCGFEDDADHNAAVEIDARARRGTPPTRARRTGGSVNNSTHRRLTASSPGSIRRRMREAQTAAFE

SEQ ID NO: 60788 - protein, 548 aa, Streptomyces sp.
VGEPKKPLRTIDAPFVVLGPSGVSIRDRLKGLTAEDDTLLRLLAERLGSLASRDLAARCADGLEHSTDTWAARKRGLTGQSSSRWAGSITKATHDQWALARRGQAAHLNSLDAGIRTLRHRLSLPVGEKGSKHAPGGYRSKYEWFQKTRRLHVLEDRRAAVAADHEAGRVQVVRGGRKLLNTRHNLKAAQLTEAQWRERWESARWFLAADGESGKRYGNETIRVTPDGEVSIKLPAPLAEYANAKHGRYVLAAKVAFAHRGEEWADRIEGNRAVAYRIHLDVARGRWYLDASWTRPLVRTIPLEAARAKGMVGVDTNAGHFAAWHLDAHGNPTGRPRRFSYDLSGTAEHRDAQIRHAISQLLHWAKRTGVAAIAIEDLDFQTEKTREKHGRKKRFRQLISGIPTGRLKARLVSMAVETGLSIVAVDPAYTSQWGAQHWHRPMTAPRHTTTRHDAASIAIARRALGHPIRRRTAPPRAHQSDVHGHRTIQAGSGFRGREETRRPVTDRGHEPPARMRNNERTRATSAPKTVRDARSDGQWVQDSLLLTE

SEQ ID NO: 60789 - protein, 392 aa, Escherichia sp.
MMMLILKAYKFRVEPTPEQLQRLRQLCGCARFVWNSGLTETKRISGSGEKLPSAFELNRMLTVWKKMPEYIFLQDAYTDNLQQKLKDLHTAWKRCFDKKLAAKAPVWKRKNEGRDSIRFVNFEKYCRPENRRVKLPSGLGWVKFRQSRRVNGKIKNATISQLAGQWYISFQVEIETAEPNHTSTTIVGLDAGVTKLATLSDGMVYQPVNSFKASASWQKQKRKIQRLHSRIANIRRDYLHKVTTTISKNHAMIVIEDLKVSNMSKSAAGTVSQPGRNVRAKSGLNRSILEQGWYEMRRQPEYRQRWRGGQMLAVPPAYTSQRCACCGHTAKENRLSQSQFRCRVCGYTANADVNGARNILAAGHAVLACGGRAQSGRPLKQEPDAEQSVVTH

SEQ ID NO: 60790 - protein, 455 aa, unknown
  TnpB Polypeptide
MVSEKYVYKHIFVKLEPETPEQKQMLLSLMRESTWLINHVIEYLNKEGLIYEVASKGLSKSLYGRLFHMLKNTYGLPDWLITSVLHGVSTTLKQWYGSGTYEKGHYPQAKAPRLYVPTTRFFPDLDNLDKPRKIKRSKQGYLELPNGLKLREIGMNIKYLKDQDWANAKLANWAMLIYREEYDAFFLEIILMKETPPPRTDLKAFIAVDINLNEIVVGNNDKYLEKRYPTVISDPNVSPKIDFLTKQLETLKRKCPRKGNRVLLERCKSLRRRVLRIIRARNEIAKHHIVKIAKAIFEERVLPLNAYLVLEELKGLQGKLAEESDKPKEVKEKIRLMDYYRLNKRLVFLAKLHGIPVIYVDPSGTSTTCPRCGSKMVQVEDPVLGKRTMVCTNPSCGFKEDRDTVALMNLVKRAREKLEKERALRLRKQKVSVGQKSSKRKKNTKWSKGKKAFKF

SEQ ID NO: 60791 - protein, 431 aa, unknown
  TnpB Polypeptide
MRLTFKYPVYPTQEEKRILEKWLAHLCDLQNSARHDRLVAYETEGAFVSLSDQQTLLRVARETYNDFREVPQDFQNHALRRNDKAFTAFRKRCKENAAKKGYPRYKKRVRSLTWSLRKYTKVVGKKTKDTEKQTIRVRENPIIETDFRHNRLKVPKLGQVKIRMHRPLQGDPKEVTLVKKASGWYTHIVCEIPDTPKVEPTAAVAVDVGTTHYLTTSEGETEDNPRWYRQAEGLLRKHSKDFSRKKKGSERWQKQKHKLALHHERTTNKRKDFIGKLVYKLYHHYENNVLVAEDLRVSNMIQNKHLSKSISDTSWATFFKWCADMVSERDGLHFHKVDPKNTSQTCSACGQKSQKKLSLAIRTFNCQFCGTSLDRDHNAAINILLRAETCVRRGERWVTDLYEARNKNEARDTGNLQNAKQLLLFATGTSL

SEQ ID NO: 60792 - protein, 253 aa, unknown
  TnpB Polypeptide
MKSAYPFNLRPTFPPASETDRWLSCCCAQYSFLLADRINRYEQGRFPIKAYPLACLHPDLQERPDYYSQIRPLPQLKKSHPWYTEFYSQVLQDVAKQVKVTFDRFLKGDSNGKRSGRPSFKGRNRYRTFTYPQFKDGCLQGILINLPMFGKVKVILHRPLPDGFNVKTASVTKTTDGYYITLSLEDKTVPEIKPDFNPDKITGIDVGLKEFLTTSEGETVAIPQYYRKAQKRLRVIQKRFTTQKRKQPQAKSS

SEQ ID NO: 60793 - protein, 421 aa, Lactobacillus sp.
MQNAQVLKMQIKFAPDDTVGPAAMQETMNHYRDACDLISRHVFDRDFKFSAFYLHSVFYKKLTNKTSTMYLKSQMAQSTTRTVAARYKALDTVQHQKNWGWKNPDTGKWVKERAKDLTDLWYPIRFKRPQVDLVFNRDWSVLDNWAKLSLNTIRGRVIVTPVTTHWEKYLTGAWKFGTAKVIKSGQKWFVHISVTQEVPDVPLESIQRIVGMDRGLINILTAYNDETGETEFISGKKLLNRRRRGKQQRKHLQQKRTSAARQRLKKIGHRENGWVTNMNHQLAKALLDFYGPGTLFPIEKLNDIREALEKSPKDKKYEQVSWPFYQLEQFLLYKAQQYGCIVIKVDAHYTSQRCPKCGTIDKSARNHQLHEYHCKQCGFRTNDDRVAAMNLTELGRRYLAGDKEPSFDSKKQKKANRSGMA

SEQ ID NO: 60794 - protein, 382 aa, Escherichia sp.
  misc_feature (63)..(66): Xaa can be any naturally occurring amino acid
MIWPMKRLQAFKFRLRPGGQQERGMRRFAGACRFVFNRALALQNENHEAGNKYIPYGKMASWXXXXERAYKNFFQKRAAFPRFKKRGQNDAFRYPQGVKLDQENSRIFLPKLGWMRYRNSRQVTGVVKNVTVSQSCGKWYISIQTESEVSTPVHPSASMVGLDAGVAKLATLSDGTVFEPVNSFQKNQKTLARLQRQLSRKVKFSNNWQKQKRKIQRLHSCIANIRRDYLHKVTTTVSKNHAMIVIEDLKVSNMSKSAAGTVSQPGRNVRAKSGLNRSILDQGWYEMRRQLEHKQLWSGGQVLAVPPAYTSQRCACCGHTAKENRLSQSKFRCQVCGYTANADVNGARNILAAGHAVLACGEMVQSGRPLKQEPTEMIQATA

SEQ ID NO: 60795 - protein, 399 aa, unknown
  TnpB Polypeptide
VNKVRYRFRFYPTREQESVLARVFGCCRYVYNEALRLRSEAWKERKERIGYKQTSAALTKWKREPERVWLSEVSCVPVQQALRHLNSAFQRFFKGLGGYPDFKKRSHRQAAEYTRRAFKYVVSDPRNPTLSVSGLGRLKVRWSRDFGKRQPSSVTIIREASGKYFVSIVVEETFAKFEPTGKSVGIDLGINCLAVLSDGTRVENPKHTNENQVRLAKAQRVLSRRVKGSGRWQRARIRVARHHERIGNSRKDHLDKVTTEIVRKFDRISMEDLNVKGMVKNRRLSKSISDVSFGMIRRMLEYKCERYGRELVLVDRFYPSSKTCSSCGYRLDVLPLKLRSWDCPSCGAKHDRDANASQNILAEGHSVSARGGRVRRPKISLGSLGCSGRRNVNHLVSRA

SEQ ID NO: 60796 - protein, 381 aa, unknown
  TnpB Polypeptide
MRKAFLYRLYPNKAQSDKLGSLLDTARNLYNAALQERRDAWKMQHKTLNYYDQANELKELRSELPEVAQLNFSATQDMLRRLDKSFKAFFRRIKSGGKAGFPRFKGRDRFDSITFPTYGDGIKIRDNRLYVQNVGLVKIKLHRSLEGGINTVTIKRECDKWYVVFSNTVEIEPLSVSNKAIGIDVGLESFAVTSDGEIIDNPRYLKEAESVLRRLKRSVSRKKRGSHNRRKAVVLLAKHHLKVKRQRKDFAHKISRNLVNVYGLIAVENLRIKNMVRNHHLARSISDAAWGQFLNILSYKAEEAGRKLVMVNPNGTSQICSECGSTVHKSLSTRIHNCPDCGISLNRDLNAALNILRVGLTLAGVTWQNTACVPAEAVCFS

SEQ ID NO: 60797 - protein, 371 aa, Bacillus sp.
MILAKKVRLKPTKEQIIQLWKSVGTARWVYNWALAKQEENYKIGGKFISDRILRKELTILKKTDEFAWLYEASNNITKQAIKDLCDAYNRFFEGLTHKPQFKSSRKSKASFYNDNVKLKVKGNKVLIEKVGWTVTSETIPNEKYFNPRISFDGKYWYLSVGIDTSRPTVELTDISLGVDVGINKLAICSDGEKKKNINKTISVKKAEKRLRRLQRQVSRKYNKNKEGNRFVKTGNIIKIENKIRHLHRRLSNIRRNHLHQSSNDIVKTKPYRIVMENLNIEGMMKNKHLAKAIAKQCLYEFKRQVQYKCEKYGIEFVEANKWYPSSKMCSSCGNIKNDLKLSDRLYSCKCGHKMDRDLNAAINLSRYELAI

SEQ ID NO: 60798 - protein, 379 aa, Mycobacterium sp.
LAEHCRHARYVWNLAVEQQRHWQPGRRAPGYNEQCAQLTEARAEYEWLAAGSQTVQQQALRDFAQAMRNFFGGTHRRPSWRKAGVHEGFRQVGVKPHHIEQLNRRLGRVWVPKVGWVRFRRTRVVPDGVKSYRVTCDRAGRWHVAFAHVPAPIAGPGDGSVVGVDRGVTVAAALSTGDLLYAPGLTRSEATRLKVLQQRLARAQRGSHRRARTKLAIAKLKARETDRRKDWVEKTTTAIARSFDTIRIEALDVRAMTRSARGSVEQPGRLVAQKRGLNRGISRSGWGLLAMRLQHKACGRVEQIPAAYTSQRCSVCGHVAVGNRKSQAVFDCESCTTGPCNADVNAARNIAAGRAVTARGDLGASRSTNREPQHCSPAA

SEQ ID NO: 60799 - protein, 126 aa, unknown
  TnpB Polypeptide
MKDIDHKLSREIINTAKNHDVSVIKLERLQNIRSTTRTSRKNNHSLHTWSFYRLAQFIEYKAKLAGIKVEYVDPAYTSQICPICGSVHHANDRNYTCRCGFHTHRDLLGAINICNSTEYIGNRYTA

SEQ ID NO: 60800 - protein, 407 aa, unknown
  TnpB Polypeptide
MNVTRTIKVRLILNNTNESLLLNNMLTQYAAACNFVSQYVFDNGFELNSNKLSNKLYHDVRTKFNLKSQLASSVFKTVTARYKALNTVLSKKTHRIFDGVKTLYIKRDLNWLQKPIIFKRPQADLVRNRDYSFVDDLTQLSLQTLGKRIKVKYSTHGFEQYLDDTWKFGTGKLLRSGQKWFLHIAVTKSVTESDIHQDVKHVVGLDRGLRFLATSYDERGKTTFFDGKKILRKRAYYNKRRTELQALGTKSAKRKLKSLSGKENRWMTDVNHQLSKTLITRYGDHTLFVLEDLTGVTFNTDNLPKSLRNSNRSWSFYQLEQFLTYKSALTASQVVNVSAQYTSQRCPKCGVVRKANRDHSIHEYICENCGYHSNDDRIGAINIQLLGTQYISGIDKPRFTKNIIATA

SEQ ID NO: 60801 - protein, 333 aa, Thermoactinospora sp.
VRLVWNKVLAWRHARYHQGGVKTSYAQTDRYPRYKSRHGRQSATYTRSAFRWRDGRLHLAKMDTPLAFAWSWPEVDPAALNPTTVTISRDPDGRWYAALAVETADEPEQAPATGSAVGIDLGVTDFAVLSTGEKIANPRHLARKARNLARYQRRMARKAKGSNNRAKARAKVARAHRKVRDARADFLHKTSARLVRDHDVIVIEDLAVTNMVRNRRLAKAISDCGWGTFRRLLGYKTARYGRHLIVIDHWYPSSKTCSACGHLLAELSLSTRHWTCPACRTRHDRDVNAAKSILAAGRAVSACGADVRHSGSSRVRSATKQETSPVRAGLPLL

SEQ ID NO: 60802 - protein, 554 aa, unknown
  TnpB Polypeptide
MSSRKKPPLNSECTSEHLPFGNKKARSRRSKPLRDSGGMIWSHTQLVLDLSLAQSSMLESVPALNNQTLIDKLPLLSPFIPMPKSLAKSEGDSTSSEKSFKPYWNESCKELSDALWWHTRIGSPDLALTTTSGFVSYTGVRSWYSTRQHSVLNANSLKISLPSSTALAQDSTDCESTSLKCRKIQIYPSPELNRIWKQWNAACRYVYNRAIAYQKANGRIGKLKLRNIIMQSELPIWVLDAPCHIKQNAIFDARRAYIASKNCQFRSCRAPSQTIKFNDCNYSRGKWYPNLTKGLTFMASEPVPQECDQGTQLVKCKGRWFAVFPEPAAVTTSTSDKVIALDPGVRTFLTGFDGSKFLEFGAGDMGRITRLCQHLDKLMSRITKSNNRRQRPMMRRAAGRMRTKIQDLVNETHKQVTCYLTQNYRIIFLPTFETSQMVQKVKRKIRSKTARAMLTMAHYRFKLFLKQAAHRRGCIVVDVTEEYTSKTCTRCGHIHTKLGGAKKFKCPGCGFELPRDFNGAFGILLKALRDTSYVISDDGVAIVALRDNISCSAA

SEQ ID NO: 60803 - protein, 256 aa, Bacillus sp.
VGGELASNKGWKGAILIVRFAKSREVEGRIVNATVRRSPSGRYFVSLLVETEVQELPKTHSYIGIDVGLKDFAILSDGTIYKNPQFFRSLEEKLTKAQRVLSRRMEGSSRWNKQRVKVARIHEYISNARKDYLDKISTEIIKSHDVIGIEDLQVSNMLKNHKLAKAISEVSWSQFRTMLEYKAKWFGKQVIVVSKTFASSQLCSCCGYQNKDVENLNLRKWDCPSCRTQHDRDINTSINLKNEGIRLLTARTAGIA

SEQ ID NO: 60804 - protein, 307 aa, unknown
  TnpB Polypeptide
MKLVERHIVKDNRFEDICLKSGLLYNYVLFNVRQGIFDGNDLKEYEFSTKLCKENQIDFRNLPAAVSQQVIAQVFSSIRSWIRSKKEYENNPSKFKSKPKLPKYKRGKKQNMVVFTTSSCRLKDDGCIHFIKSVIPPIKTKIGDSKLCQVRIVPQATCYVVEVIYEKKEQDINLDKDNFLSIDLGLNNLCTCISNVGINPFIVNGKIIKSFNRWYNKKGARLMSYIGDKGTSKRLRQLNNYRNFWIDDKIHKVSRYIVNYCIDNNIGSLVIGLNKGWKNGINLGKRINQKFVEIPFSKLIDKISYKM

SEQ ID NO: 60805 - protein, 378 aa, Peptococcaceae sp.
MSSDMSNPKVIRNYKFRIYPNKEQERIFFRWQETCRRIYNNALAQRKETWEREKQSISRTEQQVWLKENKKENGFFKEVHSQVAQEVLFRVDRAFDGFFRRVKNGETPGYPRFKGKGHYKSITYTQFGDGLGASFQNGKLKLSKIGLVKIELHREIPGTIKTVAIKKEAGGNWYAVFAVEIDKSQFEIHLGSATGLDVGLEKFASMSDGNTIENPRYLRKTEKRLKHAQRNLSRKQKGSRNRKKARYKVAKLHTKVRNQRKDFLHKESRKLVEIYSLIAVEDLNIKGMVRNHHLAKSISDAGWSEFLAMLCYKAEDAGSKIVKVNPCGTSQDCSNCGNTVPKELSIRIHQCPFCGLVLDRDINAARNILKKALALEAA

SEQ ID NO: 60806 - protein, 463 aa, Moorea sp.
VKTPTKVIRTDKWQLNVTSVQRTLFRETIKVYRQACRYLVGIIYTHWSELGCLTADQLTPAVERLMHKTAKRPNIKYAQFNKSFYKFPSYYRRAAISFAAGQVSSYVTRYREWQSGTRKRRDSKPPKLNADTGCYPALYKGQCYKLHGFDQAEIKVFDGSDWVWTTVQIAGLRERHACASNKMMSPSLIFNERACHLSVPFTCKPEKRKPESNVTAVDLGINTAATIAVVTHSGTVIHREFIHPGRDIDRRDKRLKSLSMRASKTMGKGGRLHKGFCSKTYQKCQRINTQIGHIVSKRIVEIAEQFNSEAVVFENLKGWKPKGGRKRSNLRQRFHGWLKAKIRDFTQMKWTELGGKVIEVVAAYTSKLAYDGSGTVRRDSRNYALATFPSAKLFNADLNGAYNIGARGVLKLVRRNDNEGRSSKSSGRPPRSWACLCDLWTLRSSKVCIGHSHLGDSQVGEAS

SEQ ID NO: 60807 - protein, 166 aa, Microbispora sp.
VFDLRLVVQVKLLPTPEQAAALEATLHAANRAADLVNHVIAKQIVTEAERTGRGTALEDLSGVRERVRLRKPQRVTLHSWSFHQLGSFIAYKAARAGVAVIHVDPAYTSQTCSSCGHVDKRNRPDQATFACTSCGFAEHADVNAARNIAARGVAGWAVSHAADDAA

SEQ ID NO: 60808 - protein, 274 aa, Methanosarcinales sp.
MLSYKFRLYPSKHIQERLGEHLEFCRRLYNRLLEELDKAREEGRRLTKYDTQALILKLKEEKPELNNVYSKVLQMVNYQLWSNIKALAKLKENGKKVGKLRYKGKGWFKTMNYNQSGFKLEGDKLILSKIGAIKIKLHRKIEGEMKGVIIKRERSGKWYAIFQVEDEPKPLPKSGKVVGVDLGVKHFLTDSDGRQIENPKYYEKTLERIRILQRNLSRKQKGSKNWEKARIKLAKAYEKLVNQRDDFLHKLSRFYVDNYDLIVVENLLIWLETT

SEQ ID NO: 60809 - protein, 495 aa, unknown
  TnpB Polypeptide
VYNCFKKDTLVETELVKKGSPLWGFCKEVTFVAASIRNRILYLFRQDFFESKKSGSGYSYSLSGYISEVARLYAEERKESVVDSNGNRVPPGKLVSNVGRSLTADVTSFRALMGLWYGENHGNLTGRPRIPNYSGARGKEKAYKAEFNNQMISELPCDKITKQGKRLYRYVIMPKTYNIEFYAVHQIKAVTVVKSGNGFKLLKMYDSEYVQSQDCLLYNLDLCEDNGNYLSIDLGVSNLITMVGISDREILPSYILSGQPLKSINRQCFRVVSKLNQYLDNTNKNRGKGVARQSKSTHRIKAAWSKRKRQSDAILHEYTSSVVNYAAEHGICRIYVGYNPKITQKASLGRKNNQMFVSMCWGQIISQLKYKAAKYGILVLACDESYTSKCSFLDNEYPRKHDAYLGSRVKRGLFRTAQGIRWNADVNAAWNILVKNNDNVSSNLDRNEVERFVVDPVVLIPSGFNRDKNDAASGKSGCGVTENRHELNLVPDHLS

SEQ ID NO: 60810 - protein, 389 aa, unknown
  TnpB Polypeptide
MSHRYRLAPTGDQESVLRVHVGQARFVWNLALEQCEHARSLGCYADQKVWDRQLAEARREVDWLGAGSSSVQQAALRDLRQAFRNWWSNPAHFGYPRRRKHGVSEGFAVRDLKLRVLSRKWAAVAVPKCGYVKFRLSRPVPTDAKSARVTLDRSGRWHVSIVAVPDQVDGPGTGEVVGVDRGVAVTAALSTGEMLHAPLPDRARRARLQRRFARQQKGSNRRARTKHRLAKLAAQEADRRRDWIEKTTTDIARRFDIVRIEDLNVANMVRSASGTVEEPGVNVAQKRGLNRSIAEQSWGMFARRLGDKIGDRLETVPAAFTSQRCHECGHTAAASRDGQSRFCCVACGHTANADVNAARNIAAGLAVCGRGGLPLGGSVKRQPSLVGAA

SEQ ID NO: 60811 - protein, 367 aa, unknown
  TnpB Polypeptide
LLYSTLKEKFSLPSKLAQDCYREALTIAKSWLRNKNRGKIPTVKTLRIWLVHGYSYRVRGEHVELIGGLKLKVIGWNRRYDGYPNGDTRLVYGDGKLILHISKRVPKPAKYNPRCVLAVDINEKHIAVGNSVFEYRFETAIEKALRYRHLAERLQKKYSSPGYNAWLRRRGIRERIKYFHRKARSIVEDWAKKTSHKIVVLTKQYLYTVARENLTGLVESLRKLPKDHRVALMILSYRKLEFWIDWQAEKHVVPLITVEPKGTSSICPKCSNKMRENGYRLLRCPACGFEADRDTVAVLNIEKRALLEMGVASDPPDCPADDRCRPESMRGTSEPPKESPRSFRAGRRSGIRQDPTLNQLTYTRKHL

SEQ ID NO: 60812 - protein, 418 aa, unknown
  TnpB Polypeptide
MLRGIKVRLYPNKEQQSRLKQVLGCYRFVYNQCLDRKQKEYNENGNNLGLTELSKWFHGTLLKDENYAWLQEQNTKVMKQSIRQMLDAYSKFFKQHNGFPKFKSKKDKQSALFPSEAISKRNTFNERKITLTQDLKDIRFRCSDLYFKRLQDYKDKIRSATVSRTKSGNYFLSILVDIPQEELQKFKHTNQCVGIDLGVKDFVITSDGEVFENKHFFKKQEQKVNRLQKQLSRKVKGSNNRNKQRIRLAKAFERLTNRKEAYIYYVVNCLLKDYDLVCMEDLNVQGMLKNHKLAKAIQEIGLYRFRQVLTDKALLNGKQVVFVDRFYPSSKTCHKCGYINKDLTLSNREWTCPMCGEHHDRDINAAMNILSEGLKTIGVRSTEFTLADCPTMDDRSEMNLKSSGRLKQERRTNNYNFY

SEQ ID NO: 60813 - protein, 412 aa, Nostoc sp.
MQLVERHIIQRNHPHYQEIDRLCFAAKNLYNYANFHIRQSFLFEQKYLDYNCLAKQLKSTEPYLAIPAKVAQQVLLGLHRNWLSFFAAIKAYTSDKPKFLGKPKLPKYKQKDKGRHLLVYTAQSVSKPKMKAGLIHLSKTQIYIPTQIEYAHLDQVRIVPKIDHYVVEVVYEKEELDYGLDSNVIAAIDLGIDNLATLTSNQPGFFPVLVSGRIIKSINRYYNQRFANLQSLLPSSQKTSKQLRILTKKRNFRVDDYLHKASRLVIARLVKHGIGTLVIGQNPLWKQNANLGIKNNQNFVCIPHARFVQQLSYKAKLVGIQVLISEESYTSVASFLDRDPIPVYGEANSKEVKFSGRRISTKLYRAGNGLLIHADVNGSLNILRKVVPTAFSLGIGGVVVRPVGVIPGAQRA

SEQ ID NO: 60814 - protein, 273 aa, unknown
  TnpB Polypeptide
MEQITITAKIQIVATETDKVLLDETMSVYRNACNYVSDYVFHTHDLKQFSLNKVLYSTLREKFGLKSQMAQSVLKTVIARYKTILENQNEWIKPSFKKPQYDLVWNRDYSLTQNRFSINTLNGRVKLSYFADGMSKYFDHTIYKFGTAKLVNKHGKYYLHIPVTYDVEESNISDICNVVGIDRGINFVVATYDSKHKSGFVSGKAIKQKRANYSKLRKELQMRRTASSRRRIKAIGGRENRWMRDINHQVSKALVKNNPKHTLFVIGRSVRYS

SEQ ID NO: 60815 - protein, 402 aa, Escherichia sp.
  misc_feature (5)..(5): Xaa can be any naturally occurring amino acid
  misc_feature (45)..(45): Xaa can be any naturally occurring amino acid
  misc_feature (210)..(210): Xaa can be any naturally occurring amino acid
  misc_feature (256)..(256): Xaa can be any naturally occurring amino acid
  misc_feature (312)..(312): Xaa can be any naturally occurring amino acid
  misc_feature (329)..(329): Xaa can be any naturally occurring amino acid
  misc_feature (336)..(336): Xaa can be any naturally occurring amino acid
  misc_feature (343)..(343): Xaa can be any naturally occurring amino acid
  misc_feature (365)..(365): Xaa can be any naturally occurring amino acid
VKRLXAFKFQLRPGGQQEREMRRFAGACRFVFNRALARQNENHEXGNKYIPYGKMASWLVEWKNATETQWLKDAPSQPLQQSLKDLERAYKNFFQNRAAFPRFKKRGQNDVFRYPQGVKLDQENSRIFLPKLGWMRYRNSRQVTGVVKNVTVSQSCGKWYISIQTESEVSTPVHPSASMVGLDAGVAKLATLSDGTVFEPVNSFQKNQKXLARLQRQLSRKVKFSNNWQKQKRKIQRLHSCIANIRRDYLHKVTTXVSKNHAMIVIEDLKVSNMSKSAAGTVSQPGRNVRAKSGLNRSILDQGWYEMRRQLXYKQLWRGGQVLAVPPAXTSQRCAXCGHTAKXNRLSQSKFRCQVCGYTANADVXGARNILAAGHAVLACGEMVQSGRPLKQEPTEMIQATA

SEQ ID NO: 60816 - protein, 147 aa, Actinokineospora sp.
VYVEDLCVVGLGRTRLAKSVHDAGSACFTAMLEYKAARYGRTFARVDRFFPSTRMCSDRGRVNDRMALNVRTWDCPCGSTHDRDVNAAINVLAAGQADNGKRPWSARKTSTRAGSARRSGNPRSGTPVRTSTTTSAPPSSTRSTAKA

SEQ ID NO: 60817 - protein, 385 aa, Actinokineospora sp.
MKIQGFRVELAPTDEQLTRLAQHAGLSRLVENFALERVKSALDQRDAETSYGVPDAQLTPVPWTAPALAAAWRAAHPKRFPWFTGSRVPKEACRLRAAGFRNFFDSRDGKRKGHKVGFPSWRKRKHGGRFRYDADRARPLDARTTQLPGVGKVAAREDMSWLVDRLSASPARVLGATVKERAGRWWISFQVEVDRCELDKRRAVPHGSPACGIDLGLRTFATVVDDDGTVTEIQSAKPLKAALRKLRTANKALSRSQRDSANRAKRRAEVARVHLRVVNRRSDFIHKTTTMLARTKSAIAVETPNIKGMTGNRRLARAISDAGWSEFVSPTRLQSRMVRVAGMESRPLVPEFENLLQPHVWTATRWPDPRRPYLDVYRVRRHSRA

SEQ ID NO: 60818 - protein, 292 aa, unknown
  TnpB Polypeptide
LRKVRLPKHRHYPLILRRDVIRLERRDTKIVPYWLKLPVFGVRGGIWLGLKPHCDVPLDCSLREAKLIRRKNSWTVHLTIQREVPGPVIDERPILAIDLGERYLATVCGSNGINPQFLGKEVRGIRRHYGWLRKRLGERKLLSIIEKVGPTEQRKVNDICHKVSRQIVNQAKETGSVIVLGNLKGIRKKAKGRRMNRIVSGMPYYKLTQFIKYKAAWEGIPVVVISEAYTSKTCHRCGCLGSRPCQGLFLGHSCGLRYSADLNGARNILKRAGEYISSAGAALAQPVTQVRT

SEQ ID NO: 60819 - protein, 571 aa, unknown
  TnpB Polypeptide
MSSWNKTAATGERCVIELPLSYSRHQHDTLDKMFRIANNMKNNLIAWYSRQLTEMMRTRIWRSNQKVLADLYSEYVDEVETLEKLQEKISRKKKNAGKKKAVRLFGKDEQQLAYLQSRVDEFTEKKKALCVLRNEIIRRYGFSKADFEKQMKKYRKSYQTLIGSTVAQKIADSVWAMFDAKLYRNGKDISFSPFAQFAAIEGKSNKTNIVFDKEKMAVTLGGGSNKLCIRVKRSRKDPYGYEKDALSRRVCYCRIIRKAYPEGWRYFLQLVLEGPSPVKVKPETGELLHIMGKGCVGLDIGPQTLAFSANKNVGLEELAEGVQLAQDEIRRIKRSMDRSRKNSNPKMFTADGQIVRKNKLPAECLNSRGRRIWVKTNRYKKMEILLRSLYRKQAALRKHMHRRMANQLLAMGNEFYVEDMRWKALAKRTKETRRNKKGKILSKTRYGKSIANKAPAMFLAILEQKVIASGGSFQRIVTWKAKASQFSHETGKCNKKKLSQRWHYLEDGTKVQRDLYSAFLIQHTNKNLESFNLRTCEKDFPIFLKMHQEEIERLQSLDKRMPSSMGIKKAA

SEQ ID NO: 60820 - protein, 475 aa, Fusobacterium sp.
MANYVLTLPLKTEKWQEDILDKRLNIARLLYNASLNEILKRYRKMQNDVEYKHMKHLDPKEQSKKYKEFDKKYGISKFDLNQYIKPMTQKFKKNIGSQMGQEIAERAYLAFEKLKYGKAKKVYFKRYGDFYSVREKGNKTGLRLFKEENCISWLGFKIPLIIRKNDSYAQKCFLDNLLFCKLLKKVIRGKNKYYVQITFEGVPPKKHEVRNHAEVGLDIGTSTIAIVSDKEVKLQILAKNIEINEKEKIKLQRKLDRQRRANNPNKYNTDGTIKSNNKEKWKTSNSYLKTQLKLSDMQRKIAEKRKQSHTILANSILEIGTIVKVENMSFRGLQKRSKKNEISEKTGKFKKKKRFGKSLSNRAPALLIEIIDRKLRYIGKNIIKINTFKVKASQLNHETEEYEKKSLSKRWVEIVGNKIQRDLYSAFLIKNVKENLEEVDIEKVKKEFKNFVRLHNEEIERIKKSDVKTLKCMGF

SEQ ID NO: 60821 - protein, 559 aa, Thermofilum sp.
VALTAAAVVAVAALLPLSLLLAGPALLLSVASDAAVAAEGVVAAPTGVCAGPAGWRRRLPRLEPELHPPRVQPRQLAPGFSVRGTPRARARDHQVRAGGGGQGGSGENGGAREGLVPLNAWAQLLVGRGDLRGSGGSGAWAEAVWVWRCDTVKLLPTPEQEELLRRVGDATARLINMENYRRRRLFFEGRGIDKSWQSAWERRRTEYVEVYRLLGSRNFHEVCRVVGEAWRSFAELLKARREGRLEPWQEPRPPGYRKREGQRLPIVIVRFDNYRVDLERRVLHLGYWNIELRFAGKPRWLTRPNAKQGRLILTYDEVKRRWYARVSVEVLLQTSSTPGPKAGIDPGREILAAVAAEDGTALLYRGGVLKSEYFYFERRVSEVERALNLEEVDQEVLREKRRWLFDMRKRRMEQIFANMAAHMARELARRGVGVVFLGYPRGIAHDHVGKGNTNLWSYKKLITRLATTLENHGIAAFAVAEDGTSMTCARHGCEVARRPRGLVWCPHGHVAHSDVNAALNILLRGLSALGLAAELPGRVKVYSYTPTPSRVVEPKKKRP

SEQ ID NO: 60822 - protein, 415 aa, unknown
  TnpB Polypeptide
MKLSRVERHIIVKSEILEDLTHKSKNLYNYANYLIRQHFFETGKLLKEFELTTQLAKENQVDYRDMPTAQSAQQTIKLLFKNWKSFFKAIKDYKKNPSKYKGQPKLPKYKDKKGHNIVVFTNQNCKIKTDEKGENYVYFPKKTGLEPIKTKIEGNLKQVRIIPQATCFIVEIVYEKEFQKVVEENNRVLSIDLGLNNLVTTFNNIGEKPFIVRGKIIKSINQYYNKKKAKLMSFVGNKGTSNRIKKLTLKRNNKINDYLHKTSRTIIDYCLFNDISKIVIGNNKDWKQNINIGKKNNQNFVSIPFEKLITQIEYKAEEVGIEVLTTEESYTSKIDHLAKEELKKQENYLGKRVKRGLFKSSTGRFINADVNGAIGIFRKVVPDLFNQWLDTVGNRGFASNPLVIKLDYKGNFNNV

SEQ ID NO: 60823 - protein, 378 aa, Bacillus sp.
MEVNQIMMNKAYKFRIYPNQAQAILINKTIGCSRFVFNHFLSLWDQAYKETGKGLTYGTCSAKLPAMKKELVWLKEVDSIAIQSSVRNLADAYTRFFKKQNSAPRFKSKKNNVQSYTTKQTNENIAVVGNKIKLPKLGLVRFAKSREVEGRIVNATVRRNPSGRYFVSLLVETEVQELPKTHSYTGIDVGLKDFAILSDGTHYENPKFFRSLEDKLAKAQRVLSRRMKGSSRWNKQRVKVARIHEYISNTRKDYLDKISTEIIKNHDVIGIEDLQVSNMLKNHKLAKAISEVYWLQFRSMLEYKAKWYGKQVIVVSKTFASSQLCSCCGYQNKDVKNLNLREWNCPSCRTHHDRDINASINLKNEAIRLLTARTAGLA

SEQ ID NO: 60824 - protein, 430 aa, unknown
  TnpB Polypeptide
MERAYKFRIYPNRNQKEILAKTFGCCRFVYNYYLAKRIELYKTSNKTLTYNQCSNDLTQLKKALVWLKEVDCTALQSSLKDLDVAYQNFFKGHKGFPKFKSKKMHKYSYRSKCINSNIQYLDKHIKLPKIGTIKIRDKQIPQGRILNATVSQEPSGKYYVSLCCTDIEIKPLEKTGSMVGLDLGIKEFCVTSNGEMIKNPKYLKKSLCKLAKLQRELSQKSKGGSNRNKARIKVARQFEKISNQRKDFLQKLSTKLIKANDIICIESLQIKNMIKNHKLARAISDVSWSEFVRQLKYKAIWYGKRVVNVDKFFASSQLCSVCGYKNTEIKNLGVRVWDCPQCGTHHDRDINASINILNEGIRTLTYNICKNRRDYGDSLVNIFSLEKISQESCDFSRGRFRDKIPISREKLSEDFGIELGIVGSNDNLEE

SEQ ID NO: 60825 - protein, 411 aa, unknown
  TnpB Polypeptide
MKVRRTCVVELVVDEETEKKLRQLCDLSVKLWNEVNYARLRMWLEKKFIDFDGTYKEFYERYKLLIGAVTAQTILLRNGNAWKAFFRLLELRREGRLPPFMTWVSPPGFGKRNGSRTLWTAIRKDRYEVSGDRISLKYLGIIGRIEVKYKGIIHLRGERGELRIRYDADRGKWYAHIAFEVSEKAVRGEWRQVPRQPRGNLTAGVDIGINNLMAIYIEGGLTKLINGRPLKAISFYWRERISKYQSMLNKYGLETSRKLRRMYAKWKRQVKHYINTKVREAIEWLHNAGVSTIKVGYPKGITQRNGNFDNNRVWTYRYLLKRIAEVAEEYGISVIYVDERGTSSRCPWHSDGCGIRVYRGLFKCTTTNKVFNADLIAAYNILLAPVTPESRRGIGGNGRRPGQGLNLPKGM

SEQ ID NO: 60826 - protein, 458 aa, unknown
  TnpB Polypeptide
LFINKNKLGILLKKWYICSMKTTLSAKVKLHTTPKQFQALRQTQLAYRDALNFVSRYAFAHGKMSNKVGLQEGTYADVRQQFGLPSQMACSVPRQVGATYKGLWTKVKQNAQARKDKRTKKRYKGLDQPPKYVSPTLTYQYGKDYSFKRDTHVSILTLDGRVNIPYTGYSQHVALLQEGSDIGAAQLWYDKPKKTFYLIVTLEVETPDPTPDMYKGVVGVDVGVRYLAVASNTKGDSSFYSGKQIVSKANHYARLRKRLQHKGTRSAARRLVAMSGRERRLKQDANHTVSKRIVEQYPHALIGLENLTDIRERTRRKKGKKASVKQRKANTRQSTWAFAELHSMITYKALLCQSMTVKVDAHFTSQACPVCGHTSKDNRPRKGLLFVCQNCHYTLHADLIGARNVSLRTVLIRQDWMSTGVLSVRPDVSDNEAKALRLQRYSELRWSPDTSPRLPDVG

SEQ ID NO: 60827 - protein, 201 aa, Lactobacillus sp.
MKSMAKMQYHYGLKMRCYPSDQQKQLIKINSDASRFIYNEMVAIGKELMQLRRVKLPIDTVQDRIKQLTMRQSAKQMSNHYKFLEDERIDSLAKANAIQNYRKSWNAFRKVHSAGVPKFHQKSYRWRYQTNCQYPGQKTALLTNGTVCFLDNSHVKVPKIGRLRVAGSQARLLKRMCETRIGTVTLTKDSTDRFFLLIPRS

SEQ ID NO: 60828 - protein, 411 aa, Ruminococcus sp.
MPEFTKTMKLHIHVSEEDAALLCELTERYAEACTEISKYVFDNGFPLNFMDIQKAMYDDIRKTFQLKSQMTISSFKTVTARYKTVQDQLKKKPYRYEDEHGEWRSIQRTLEWLQRPIVFSRPQSDLVRGRDYSFTDDGKVLSLNTLGKRIKVTFDVPEYFQEYFDGTWKFGTGKVVSLLGEWYFHIPVTKYIKPPDTDSIRHVVGIDRGLRFLATVYDEKGQTLFFNGKEILAKRDVYNKVRAELQEKGTKSAKRVLKRISGRENRWMTDVNHQITKTLVDRYGPDTLFILEDLVDVSFDEQNLSSRTKEQRNQLRSWAFYQMGQFLAYKAAESNSMTLEVPADYTSQRCPKCGRIHKANRKHGTHEYICDRCGYRSNDDRTAAMNLQVLGTMYISGDENPRFGVRKKTKR

SEQ ID NO: 60829 - protein, 260 aa, unknown
  TnpB Polypeptide
VEKWYFSIQYQYPSKEERDNTFLETERDVSSLKVIGLDMSIPHMYVDSNGEFPYYYNNGNRVDFEKHSLATEKKIAREQRKLSRMEKDSANYRDQCIRISRLHAKAKHQREDFKKQAACRLAGEYDVVAVEDLDIAAMKKSLRLGKSLSDNGWGGFIQLLEQQCIKYGHLLIRVGKWFPSSKTCISCGYIHRELKINDRLYVCPECGNAMDRDHQAALNIKKEAVRILAEEYSAGKECGWKPISLEGLMEELRERTLLYA

SEQ ID NO: 60830 - protein, 374 aa, unknown
  TnpB Polypeptide
MRKTFKYRLNPTPAQERALHATLDECRWLYNRLLEERKMAYETTGTGPTLYGQQAAFGALKVARPALAGVHSQVLQNVAVRIDLAFQAFFRRVKAGEKALGYPRFRGRERYDSFCYPQSGFTLDADQGRVFLSKIGHVKAVIHRPLDGTVKTCCVRRTGAGKWFVAFSCEVEARPLPATETAVGIDVGLEKFATFSTGEQIANPRFFRRDERDLARAQRRLSKEPKPARGERATPDRRKRRTVVARIHERIANRRANFAHQESRKAVNAYDVIAVEDLSVNQMVHTHCLAKSIHDAAWRKFIAYLTYKAEDAGRRVVAVNPAYTSQTCSRCGHRARKELSDRVHRCSCCGLTLDRDHNAALNIVALGLQSLARA

SEQ ID NO: 60831 - protein, 305 aa, unknown
  TnpB Polypeptide
MENEKLPVIEFESQVIEIKTETPTTKTLVFDVSDIDFNFYPGQYVMLQVPYPPTGEILKRAYSIASPPTQKDKLELTIKRRRLSLYKWAYRSVLEKIEVCARRMGVQVIKVNPAYTSIIGKLKYSPMLGIDKDVAGPYVIARCGLGFEERLPKNYRELLKDKEFLAYAITKVDERINKLKSELKKETNEYKRNALKGRVKRLRRLLKLLLSYTWDSGKSEPATQQAVNRKTKPMRGRARSLQKSWRVLSVALAVLLATTCFEWCPDHSPLKRVLISGDKVAGKGSPSLPGQGTVAQNRCSFIHSG

SEQ ID NO: 60832 - protein, 348 aa, unknown
  TnpB Polypeptide
MQITLKLRLRDRHAAKLARHARAVNYVWNYCNERQRQAVRECRRWLSYPALAALTAGTSVDLDLHAHTIQRVCLAYAAARRAHKKPWLRWRGRRSLGWVPFNTGHVSFDGEAFTFRGVRYETMHLREIPTGAVIGAGSFNADARGRWYINLPVEVLEATSASITHVGIDLGLKDFATLSTGEKIAAPRFYRASETKLATAQRARKTRHARAIHRKIAARRRDFLHKTSVQLVKRFGLIFVGDINPSQLVRTTMAKSVLDAGWSNFRAMLRYKSRLRGGGVCLEVSEHLSTQTCSECGRLPASRPRGIAGLRERVWRCDDCGTVHDRDVNAARNILRLGQQTLGGGAHV

SEQ ID NO: 60833 - protein, 372 aa, unknown
  TnpB Polypeptide
MILGKKVRLKPTEEQEHQLWKSAGTARWAYNWALDRQEKNYASGGKFLSDNDLRKELTQLKQTEEFSWLYDVSNNITKQAIKDACEAYKKFFKHLADKPKFKSRRKSKPSFYNDNMKLKVKVGIVLIEKIGWIRTAEQLPLGEKYTNPRISFDGKYWYVSVGIEQGQVIEPLTSEIIGIDVGIKVLASCSNGMVFKNINKTQGVKKLEKHLRRLQRKVSRKYHKNKEGVRYVKTCNIIKVEKQIRVLHRTLNGIRNNHIHQATSAIVKTKPCRVVVETLNIKGMMKNRHLSKAIAQQKLYDFKSKLQYKCEKYGIELIEADKWFPSSKMCSSCGAIKKDLKLSDRVYSCDCGLEIDRDLNASINLSMYELVV

SEQ ID NO: 60834 - protein, 235 aa, Fusibacter sp.
  misc_feature (145)..(145): Xaa can be any naturally occurring amino acid
VKIKQHRAIPKEYKLKAVTVSQTATGKYFASILYEYEVTIETVQPKTFLGLDFSMKALFLSSDGISAEYPRYYRQSLEQLKREQKKLSLCQKGSKNRKKQSIKVAKIHEKVTNQRKDFLHKQSKQIADAVDAVCIEDLDMKVMSXALNFGKSVMDNGFGMFVSMLNYKLMEQGKHLVKIDKWFPSSKKCSVCGIVKKTLSLSERTYHCEDCGMTMDRDYNASINIKTEGIRLLLG

SEQ ID NO: 60835 - protein, 449 aa, unknown
  TnpB Polypeptide
MATTTATVHQAYRFALDPTPRQQGKLASHTGAARFAFNWGLALVKERLDRRAAGEDVRVPWSLFELRREWNQAKRDVAPWWPENSKEAYSSGLDGLARALTNWSDAKRDRRKGARMGFPRRKRKGRARDACRFTTGAIRVEPDRHHVTLPRLGRLRTHESTRKLARRLEQGTARILAATISRQGGRWFVSFTCEVQRAIRGPHRPQARIGVDVGIRHLAVLSDGRRVPNPAPLQAAMRQLRRLNRQLSRRCGPIAPDGSNREPSKGWQQTKRELLSAHAKVANLRRNGLHHLTSALTDTYGTVVVEHLNVAGMLRNRRLARRIADAGLGELRRQLTYKAVWAGGMLVQADPFFPSSKTCSGCGHVKAKLPLSERTYRCERCGMMLDRDLNAARNLAALVEASPRDAALLVVAGSGSETRETPVDGGVSPGLGWAAPGEAGSRRQAVGLG

SEQ ID NO: 60836 - protein, 479 aa, Lechevalieria sp.
VIVHQAYRFALDPTPAQARALSAHCGAARFAFNWGLALVKAVMDQRQAEKSCGIAPEALTPALQWSHCSLLWIWNRAKHEVAPWWTECSKEAYSGGLYRLALALKNWTDSRTGKRTGPTVQFPRFKSRRRARRSCRFTTGGIRVEPDRHHVTLPKLGRIRTYESTRKLARRIEAGTARVMSATVCVEGGRWFCAFTCEVQRNDPPPAQPDAVVGVDLGVAHLAVLSRPLHGVTDAAGFVLNPKHFVRESTALRRISRKVSRRCGPDRRTGARPSKRWERANQRRNRLHCRVANVRRDGLHKLTTALATEFGTIVVEDLNVAGMLRNRRLARSIADAGFTEVRRQLAYKTRWRGSRLVVADRWFPSSKTCSDCGVVKTKLPLHIRVFRCESCGLNIDRDLNAARNLAALAASTTTGTGVAGDPEPSGSNGRGADCKTCAPRASSREAFTSHRATVSDEDRRLGSARDSRRTGSPSRPSGS

SEQ ID NO: 60837 - protein, 324 aa, Lechevalieria sp.
MREHAFDTITRVKLVVPVRLLPTPAQAAALAATVSIWTTDGRLKDLRHIGSADQLATLRVHRRGESDLLFRDGSWFLIATCEVSEPEVFEPADWIGVDRGITNLATTSDGDNFRGRRLQRYRRWHAHKRAELQAKRTKSANRHLKTRARREARHSTHINHRIAKDIVAVAQRTGRGIALEELQGIRDRVRLHRHQRAIQSSWPFRQLEQHITYKARRAGVPMLQVDARYTSQMCPRCKYTDRSNRPSRDSFSCRRCGLAGPADVVAAVNIRDRARRAWALVNVPLPAPVRAAGRCGPFTTASGERGTRLAWKDRTYARSFQPRS

SEQ ID NO: 60838 - protein, 601 aa, Lechevalieria sp.
LPPTPEQASALGDTLRACNTAASSLSERMYTDQVFRKFDVQKRLYTELRERFGLAAQPAIRVIGKTVDAYTTLRANLNAGNYGPPGSDRRRKVEDTPIRFRPQAAQPFDARCLSWQLGDAGRDGTVPIWTVAGRLRTVRIVGNPRHLALLRSRPAIGVTDLLHQNGVWLLHAVVDSPEAAQSEPANGFLGVDLGIVNIATTSDGDRFCGARLNRYRERQNRIRKRLQVKKTSSARRLLKKRRRKEARFAADVNHRISKNIVAEAERTGRGDRRRGTDGNPRAGTASQAPTGHVALLGVRPARSVPDLQGPAGGCGGGGGAGRSGLHLADLPSLRARRLQRSAQHRGSRCCALGRSHAPRRSAHPGSQLGRQQQAWNRRSRRLASSFLQGRVHDLGLGGALQGGVLGLHAVAHRLAHEVIRAAGEDAVDQQLVGHEHGSVGLGCERAAALAVDEPGVPARVLPAEPLTGHAVEHDVLRGHRARAQDHVDLHLVARRGAARGPDDPRVPARIAGEVRDQPVDALLGRRDHRVDAIDHRVLAGCTRIERGTARQHREHETCCQHVTTSKDPPGRRREESTRLRPGGQRPIRQSTAAARKHAESR

SEQ ID NO: 60839 - protein, 671 aa, Lechevalieria sp.
LRLAQQAEPRHVRADVGLHPRDRVRDRVRIGVLGDRAEDRVAHDHRRIRRVEHDDRLAALRSPDRLDALAGRAGELVDVGPRPRSRRHRRHARDDLRVRHRDDARHRVHHGNRGLATARDQVDVGRVLVLAEVHRGHDVRPDRRRCQVDRPDARLRVARRVGPVHRRGRRLEDDVRQLVLTQQPLHAVGRHLKAQRRRPAQTLAGRVDAHHPARFQHRRAQELVEQVGADVAGPDDGRLHRDHQPPPQALRTIRWSGVVLIMAPGKLRIVRTAYRCRAYPTPEQAAVFNGTFGCVRLVWNRTLSERSDRYRDSGARTSYKQTSATLTEWKRTEELSPLSEVSPVPLQQTLRHQHAAFQNFFARRARYPKFKTRNGRQTAHCTRSAFGMRHGMLTLAKTGLPLRFVWSFADVDVTTLDPATVVITREPDGRWYVTFAVDAEEPAPTEPVGHATGVDLGLTDLLVTSDGLRIANPRQFARRARNLARYQRRMARCQRGSNDRRKAKTRVARVHRTIRNARRDFLHRTTTNPVRSADLIAVEDLNVAGMRRNHHVAHAISDVSWGEFKRQPAYKCARAGRTLVVIDRWYPSSKTCSACGHRLTELALSARHWPCPCCRTLHDRDLNAAKNILAAGRVVARSTSGDACGADVSRQGSSLPRSAMNQESSAVRRSP

SEQ ID NO: 60840 - protein, 394 aa, Lentzea sp.
VKQVVQVRLLPTPEQSAALLTTLHVCNAAGSWLSEQMHAAGEFRKFDVQKRFYVQLRERFGLAAQPTIRVISKTVDAYTTLRANLTAGNYGRPESDRRRKVESRPIVFRPEAGQPFDARCLSWRLAEAGREGTVSIWSTAGRLRGVRIMGHPGHLALLRSRSIGETDLVNRDGVWTLHAVVDGSQAPHREPVHGFLGIDMGIVNLATTSDGDRMSGARLNRHRKRQQRLRRRLQAKKTSSSRRLLKKRRRKERRFAADVNHQISKRIVAEAERTGRGIAVEQLTGIRDRVRLRKPQRATLHSWSFAQLGQFLAYKAERAGIAFVRVDPAYTSQQCSSCGEIDKKNRRSQASYVCGRCGFVGHADHNAARNIATRGVACWGEVMRPHAAPTLAAS

SEQ ID NO: 60841 - protein, 524 aa, Erythrobacteraceae sp.
MPNHLNYKYAIFPTTPQRRHLGRQMRECRVQWNRAVATRKRVKASLQCFKAEPVLREVLSIQKDNSQGLRSKAINRLREAFPNCDPKDLPMLYDLRKIFGNAFAITAEHLDLGQLATEIQPMLREELTANRAYWRLPEKDRAKLPPKRPIYYKLLSAASNFAGLEAQRYMNKAFVSQRTIARSVVRFTVSGSEGKSRFEDACSPSPEQRKIGHPGEPRRKRRVESFGYQETGEVLDGDQLTVKGLPGGMDRVRVLLHRPIPEASKLKRMTLMQEGRQWYAVLTLEVPDEVYRLEPKNPDLSIGLDPGAVSALTAAIVNEKQDVVTYEKFDWRPLEENLEKLVLISEQLSRMQGPDRRKQQRASKRWLKLNARRRRLHGRIRNQRRDVLHKLSRHLADHGFIAIGHWEPLRKVTGRADFKEGKTETVEAGPKGVVTIRREGRDRSVATLRTLTAEKADRSGVQVITHAEEYNTTRRCSACGELTGPKGDPSIREWTCSHCGAEHDRDQNAALNILMLALEGQVQP

SEQ ID NO: 60842 - protein, 551 aa, unknown
  TnpB Polypeptide
MEENPDTCPWYDDNIKKINKKIWFPNKVKDNDKHIYKFDSNVIDFESSIPINHTNTLKIKVPVINDIEQDTYKCKLSHQLKILTLIGKYKKISTEYYKDPEKYINENEKYDNKKELIKFQAKNRRLLEKHPKQLKLIGKEVHAHKIKLNLNNSQKNIIKNWMKESEKVYNYCVKQYNTNKDFPKNFMGAKLVVFKDLYADKIRTVPYDIITYEVKDFFSNLQSAYSNLENKNIKFFEMSYKNTKKQQTITIYKNCISKNGIYTTLLGKIKGFTDQIDSNDIMCDSKLTYDKITNNYYFYVPSYVNCANSSKEKKSICAIDPGEKVPFTYYSTNDYGLIGNDIRKDILKFEAKIRKFQRLLNNREKKDKTKTKKIKKGKIIKRINMLYRKIKGLVNELHKKAALFFCKNYNIILIPKFETQKMICDKKAIKKKVFENITDIKEKNKDNVTELKKELKVYKRKRRLNSRVKFVLQQLSHYKFKQHLFSKAKEYGCLCIEVTEEYTSQLCAKCGKLDKTYVNRMKKCKHCKQEINRDVNGSRNILLKYISSFVL

SEQ ID NO: 60843 - protein, 367 aa, Proteobacteria sp.
MKIVRTIACKLAPTDEQRTELDATCAAFAAACTFIADVARQEHTTNKVKVQHACYAEVRRRFGLSANLAIRAIARVCAARKVPAKMHATFAPTSVDYDARIFSFRAWDWTCSLTLLHTRARLATVLGDSQKARLQGQTPTSATLVKRRDGLYLLHVQITALPPMPRTPTATLGVDLGLRRVAVDSDAQRYEATEVQRLRAHYPKVRRSLQRKGTQEAKRLLKRLSGREARHMRAIHHTIAKRLVAQARTTRRQIALEDLTGIRQRTKVRKPQRYQHQSWAFYQLRQFVAYKAQDAGVPVVLVDPAYTSKTCHLCQHRGHRSGLTFSCTRCSVVMDADWNAAMNIAAAGAVVTRLEDASHESVKAAAL

SEQ ID NO: 60844 - protein, 465 aa, unknown
  TnpB Polypeptide
VYKTIPIKAVFSGEEKAFWQFQCQQSNSLFNCAVYYVKQKHYKWLEEQEAFTTYWRGDELRTGWKTYKCGIKYPEIDKALKMSPHYKAMAAQSAQQTLRTVGEAIKSYNQLVGLYYKGEVDKPRFPRYRKSGGFASVTFPRQALTYKEGVFYPSVSKESKPELLTQVTLTPPEFVDPDWVKEVTVRPCYGQLWIDWVIDDGKQPVTANPQLNYSHALGIDHGGDNWLTCVSTLGKSFIIDGKKLKAMNQGYSRLVAKHKAGKPERYWDSTLDRIQLKRNNQMRDAVNKAARFIINRCLNDGIGNIVIGWNEGQKNRSNIGRKGNQKFVVIPTKRLIDRLKQLCPEYGIKLIITEESYTSKASFLDGDSLPTLGAKPVRVASALPKGWRPSGKRVRRGLYRTASGKLINADSNGAANILRKVSTQSFDLTKVVRESLTVPHRYDLFSHLSKSYRYKGGAGRVHPPA

SEQ ID NO: 60845 - protein, 462 aa, Halorubrum sp.
MEVRRTVPVKLDVADSDAALLHETISEFLWAANYVVDHAWQGEYKTTSKAQLQRETYDDVRAKTRLQANLVQNARNKAADAVQSVVARWKQGDYAGKPHFSAPTLVYDKRCATFNDDHATLSTVAGRITARYVLPDGDRETPHSEFLFNDDYDVTGAELHYRDDEFHLHARTKADAEFETADDGNDGHNTVLGVDLGIENVAVTSTGTFWNGAELNHWHREFEKRRGSFQRCGTRAAHEPIQSVGRTETGRYDHFLHTVSKELVAEAVEHDCDVIAFENLTGIRDRMPNAKTFHVWASRRLCAYVEYKAEMVGISVEQVSPAYTSQRCSKCGFTHEDNRPASNEPDVFECLKCGYSPHADYNAAKNIGLKHLRSGQTSSGGGAPVNVRLNRGRLNVNGDYEPASDGQNGSPRESPTLNEANGSAVSELGRVVHSRLYHSTYLCFRASNGYDEIMDESLEQPA

SEQ ID NO: 60846 - protein, 416 aa, Halorubrum sp.
MWYDYRFRAYPDRTGVTAEVERHIDIHRQAYNHTRYEYSVLDTDEDNIGSAYQHQKRLTEWKDEWPVFSKVHSKALQKTVERFYDNLSNLSEKKQNGHKVGWLYWKSPSEYQSMTYSQSGFELKNTSGRTATIWLSKIGDIPIRYHRSIPDNADIKEVTLKKETTGEWYVTFGLEVEDTTLPEKPAVDDVDVEDCVGLDLGIQNYIYTSDGNSVDWLDLSDEYERLRREQRNLSRKEHGSNNWEKQRRGVAKSKRRIKRRVEDFQHKLTTWLVTTYDAVFVEDLNVSGMLQQRGNARNKQDAAWRGFIEMLEYKGDLYGTHVVQVDPAGTTKECAECGVETDKPLWVREHSCPSCGFEADRDANASYNVLFRGLQELGLGQAESTPVETATAVETDGGQSSSVPVSRVVETGSLGA

SEQ ID NO: 60847 - protein, 437 aa, Halorubrum sp.
MLEVHRTHQAKILNHGQVVESLDRHGWSASKLWNVANYYSREVWDETGEIPDHGDLKDELKTHNKYKGLHSQSSQRVLEELAEAFNSWYGSDDDRDNPPGYRKENYYDQQGRRVHEEHPRSTVTWKQKGIRHDSKNDRVRLSKGRNHKEYPRAREYILVEYETTPGVTVENLQQVRAVHDNSNGQWELHLVCKDEVETPDAPGTETAGIDLGICNFATVAYSTEEADLYPGNRLKQDGYYFPKEIAKCDDSGGEEATRLHAKWSERRTHFFHSLAKHIVQRCVENQVGRINVGDLGGIREDEDGSSKNWGRHGNLDLYGWAFDRFTELLEYKAKVEGIKVVEVSERDTSKTCCMCGREDGSQRVERGLYVCEECDAAFNADVNGAENIRLNMNGSNSESSASLDEDRSTGWLAQPGVYLYDLSSGFQPRDQVVDCKP

SEQ ID NO: 60848 - protein, 406 aa, Cyanobacteria sp.
MKARYRYRIYPTFGQQILLSRLFGCVRVVWNDALAFSVDQYRSGKKKPSNSQLQKKFITQAKKESNRQWLSQVSNIPLQQSLRDLNTAYQNFFKSSKGERKGKPVRPPRFKKKQSRQSARFARHGFSIKRDKVYLAKIGLLKVIWSRPLPSKPSSVTVIKDAAGRYFLSFVVEIAPESLAPNQHSVGIDLGISTFATLSTGEKIDAPKPLKKQLKRLRRVDKNLSRKQQGSKRYEKAKKRRGKLYAKIKDIRNDFLHKLSTRMIRENQTIVLEDLNVAGMVKNRRLSRAISDLGWRQFRTFLESKSDKYGRDFRVINRWEPTSQRCSCCGFKGGKLDLSIRKWTCLNCGATHDRDVNAAVNILVAGGYSETLNGRRGERKTSVKGAATVEASTHLEFKQLSLFDTA

SEQ ID NO: 60849 - protein, 393 aa, unknown
  TnpB Polypeptide
MKTYKFKLYNSKRIKYLDNLLNTACDIYNFALTYKKQLYDNSKISISKYDLQKILSSLRGTDGYENWNNLGSQVIQQITDRIYNGYNLFFRNLKSKQNKRTKPPKFKKYFKYKSITFKQAGYKILSNNTIRIGDKLFKYHNSRNIQGEIKTLTVKRNRIGEYFIYVTTDHTDLIKLTTLSGNMIGFDFGLKQFLTGSDGNNITAPLFFKKDKRKIAKLSRNLSSKNKKSNNRKRARIQLARAHEDIKNRRDDFHWQLATDLFNKYDIIFIEDLNLYEMSRRFGKKIADLGFADFVKILEYVAKKYNKQVIKIDRWFPSSKICSNCGNINKELQLRERMWICDKCGTTHNRDYNASINILKEGCRTVGTSTVKISTINPDLSLVCRDDLRIPRL

SEQ ID NO: 60850 - protein, 388 aa, unknown
  TnpB Polypeptide
MKSIRVRLHPNNKQLTKLFQYAGCSRFAYNWAIAREKENYKLGNKFLSNNELRKEFTQLKKQENYKWLNNISNNVPKQAIKDACDSYKRFFKGQSNYPKFKSKRCSRVSFYQDNVKIRFTNTHVKVEGFTMSGKRNKQKLNWIKLCEKGKIPTNCKYMNPRFTYDGLHWWVSVSIEVDNNSKSTPSNEGIGIDLGLKDLAICSDGNTYKNINKSQKVRKLEKRKRLLQRSISRKYDKNKKGVRCKKTSNTIKREKELLKLTKRLTNIRRNHLHQITSEIVKRKPSFICIEDLNVGGMMKNKHLSKSIQQQGFYEFRRQIQYKSEWNNIPVIIADRFFPSSKLCSCCGGIKKDLKLSDRIYRCDCGNIIDRDYQASLNLKQYGENVINL

SEQ ID NO: 60851 - protein, 388 aa, unknown
  TnpB Polypeptide
VVKIITKIMISYKYNIYKSKNTKHLDKMLKECAFVWNHALNLQKRYYRRFEKYISIGKLKKHFAKRIRRTLLGAQTVQEILERLDDSYKRFFKKLCKRPPKFKRANKFNSFVFKQDGFKLNGNTFTINKINKRFKFSYSRPYKGNIKQIRILRETCNRYSIVIITDYKSNKTYRKSRNGASVGIDFGLKIYMTLSDGSFVQSPLFFKQYQKKINRCNQRLSGSDKRSNNRKRRSFELQQAYRRIKNLRSDFQWKLAHQLCKQYDFIFLETLNIEAMKHLWGKKVSDLSHSMFIDKLKYVASKYGVTVHQIDKWYPSSKVCKCGYIYKDLSLKERSWKCPACGSKNERDLLASQNILRKGISELESMDKSNGRKTEVPYVIIQESHSLQ

SEQ ID NO: 60852 - protein, 272 aa, Granulosicoccus sp.
MDQASSNQKQLRTLRLRVKDKHAAELSRQARAVNYVWNYINELSERSIRELGRFLSVFDLHSYTTGASKELGLHSHTVQKVAGSYVQARIQFRKRKLGKSTGKIAMGIDLGCKDAATTSEADVLHGRWYRADEKALATAQRARKKRQTKKIHARIRNRRSDGIHQFSTRIVEKSAAVFVGNVSSKAMVKTTMAKSALDAGWSSLKRALEYKCASAGVIYQEVNEAYSTRAFQGACSVCGALSGPKGLKDLVISGPRRGNGAVSSVEARTIAI

SEQ ID NO: 60853 - protein, 296 aa, Granulosicoccus sp.
MGAERLYNRAVKSTCIKVLKVRVKDRHAPLLRSMATEVNQVWNYCNELSDRMIRERGRWMSGFDFSTYTVGASKQFEHIGSSTIQETAEHYASKRFSAKRRKLRWRKSFGDKRSLGWVPFKARAAHWKHGQVFFAGSHFKVWDSFGLANYKFRAGCFTEDARGRWYFCICVSVDRTCPKGQFSRNLVNRCGEIYVGDVSSSKLTKTTMAKSALDASWASFKTMLDYKSQQAGIVYREINEAYTTRACSECGSLCGPQGIRALSVRDWQCVECGVQHDRDVNAARNILRLGAGHCAP

SEQ ID NO: 60854 - protein, 340 aa, Granulosicoccus sp.
MNQSVSNPTHLRTLRLRVKDKHAAELARQARAVNYVWNYINELSERSIRERGVFLSAFDLHRYTTGASKALGLHSHTVQKTSASYVQARIQFRKRKLAWRKSGGVRRSLGWVPFNTGHARWRNGQVHFNGTAYGVWDSYGLAGFTLRSGSFSEDSRGRWYFNVAVETETKLSAGKSVIGIDLGCKEAATASNAEKLRGRWYRDDEKALATAQRAGKKRQVKKIHARIKNRRKEDTHQFTTGLVEKSGAIFVGNVSSKAMVKTNMAKSALDAGWYSLKKTLEYKCASAGVLYQEVNEAYSTRTCSECGALSGPKGLKELGISGPRRGNGAVLSVEARTTAM

SEQ ID NO: 60855 - protein, 356 aa, Granulosicoccus sp.
MDQASSNQKQLRTLRLRVKDKHAAELSRQARAVNYVWNYINELSERSIRELGCFLSVFDLHSYTTGASKELGLHSHTVQKVAGSYVQARIQFRKRKLAWRRSGGVRRSLGWVPFNTGHARWRNGQVHFNGTAYGVWDSYGLAGYTLRSGSFSEDSRGRWYFNVAVEVPIRKSTGKIAMGIDLGCKDAATTSEADVLHGRWYRADEKALATAQRARKKRQTKKIHARIKNRRSNGIHQFSTRIVEKSAAVFVGNVSSKAMVKTTMAKSALDAGWSSLKRALEYKCASAGVIYQEVNEAYSTRTCSECGALSGPKGLKELGIRQWSCVECGSSHDRDINAARNIAALGIQSLAEGAYE

SEQ ID NO: 60856 - protein, 412 aa, Granulosicoccus sp.
MERLQAYKFELRTNGEQLGKLRQFAGSCRFVYNRALGLQQENHKAGLKYIGYVPMANCLPKWRKEEGTCWLKNAPAHPLQQSLRDLDRAFQNFFAGRAGFPRFKKKGDGDSFRYPEPKQFKLDQANNRVFLPKLGWIRYRNSRKVLGTLRNITISERCGKWFFSVQTVREVEASQHPSTSLVGIDMGIKVFAAQSDGENHLPLNSFATYQRKLAREQRSLARKKKFSNNWRKQKDRVARLYRRIANARADYLHKKTHTISNNHAVVCIEDLKVANMSRSASGSQALPGKNVKAKSGLNRAILDQGWGEFRRQLGYKLGWAGGELVVVPAQYTSQQCSCCGHIAKENRQSQTGFCCQSCGYSDNADTNAAKNIEAAGHAVLACGGDVRPELREHVIQAAPVKQEPAEAIWAIA

SEQ ID NO: 60857 - protein, 358 aa, Granulosicoccus sp.
MGAERLYNRAVKSTCIKVLKVRVKDRHAPLLRSMATEVNQVWNYCNDLSDRMIRERGRWMSGFDFSAYTAGASKQFEHIGSSTIQEIAEHYASKRFSAKRRKLRWRKSFGDKRSLGWVPFKARAAHWKHGQVFFAGSHFKVWDSFGLANYKFRAGCFTEDARGRWYFCICVSVDRTCPKGQDSIGIDLGLKTVATCSDGTVLEGRWYRHLEGKLAKAQRARRKRRTRAIHAKIRNRRADALHKFSRHLVNRCGEIYVGDVSSSKLTKTTMAKSVLDASWASFKTMLDYKSQQAGIVYREINEAYTTRACSECGGLCGPQGIRALSVRDWQCVECGVQHDRDVNAARNILRLGAGHCAP

SEQ ID NO: 60858 - protein, 232 aa, Granulosicoccus sp.
LGITVFAAQSDGVIHLPKNSFTQLQRQLAHAQRSLARRCKYSRNWKKQKAKIARLYIRIANVRADYLHQKSHLICLGGPAQNHAVVCIEDLKVSNMSRSASGTRQAPGKNVKAKSGLNRAILDQGWGEFRRQLGYKLKWAGGDLIVVPAQYTSQQCSGCGHIAQENRKIQESFCCVSCGHAENADVNAAKNIVAAGHAVMACGGDVRPELHEHAVKAAPVKQEPTEAIQACA

SEQ ID NO: 60859 - protein, 427 aa, Granulosicoccus sp.
MSVAYSLSVQCIIQFMERLQAFKFELRPNGEQTRQLWQFAGSSRFVYNKALALQQENHKAELKYISYAQMCKNLTIWRKDKDTLWLQLAPAQALQQSLKDLDRAYQNFFAKRAAFPKYKKKGRGNSFRFPEPKQFKLDQANNRIFLPKLGWMRYRNSRNVIGTLRNITVSERGGKWFFSVQTAQQVETPLHPSTTAIGLDLGITVFAAQSDGVIHLPKNSFAQLRRQLAHAQRALARQCKYSRNWKKQKAKIARLYIRIANVRADYLHQKSHLISQNHAVVCIEDLKVSNMSRSASGTRQAPGKSVKAKSGLNRAILDQGWGEFRRQLSYKLKWVGGDLIVVPAQYTSQQCSGCGHVAQENRKIQESFCCVSCGHAENADVNAAKNIVAAGHAVMACGGDVRPELHEHAIEAAPVKQEPTEVIQACA

SEQ ID NO: 60860 - protein, 397 aa, unknown
  TnpB Polypeptide
MLKAYEFRIYPTKEQEEIFNQTLGLCRLYWNIVVANKNENHEMLIRGYKPIFEKYKPEALQWAKDAACSIPLAQMWSDVRAAYTNFFKSCKGQRKGKFIQPPKFKSKKNPKDSFRYSCSNCNPKIDENGLFLTNKLGYIDIRAHRFAQGKWKNITFRRTATGKWFVKICVEKKEEPKVHNGKAIGIDWNCDDEDFISMSNGTKIKCPRFLRKKQKQLKHYQKEMSRKIVSSNNYLKAKYKVAKLHEKVAWQRKDWLHKVSRDLANKFEYVIVENINLQNMAENLHHGKAVGDQGFGMLRSMIAYKTNLIKVSAKDTSKTCFDCGYVNPKVVVGIKKWKCPVCSKEHDRDINAAKNILKKGVTSLGIVGREPSEIINACGAPSSAVKQESPNSLQITA

SEQ ID NO: 60861 - protein, 400 aa, unknown
  TnpB Polypeptide
MKGQHRCDSRADVNDLTRDRFVTRTLRLKVKAEAAAWLNAAAVEVNTVWNWANEVSAKAARPYAGRPKWLSGFALNNLSAGSAEHFQKIGAETIQRVNEEYAQKRRAARRFRLRWRVSQGARRSLGWVPFKAASLRRKGRMLRFCGKTFRVFEQQRLESVRWRQGCFAQDAVGDWWLCVPVETAVEYALAPSHAVGIDLGLKDVAVTSDGDRCEAGYFYRGIEREIAQAQRRAHRLTAKRLHRRAANRRRDALHKFSRQIVNRYQNIVVGDVSSPKLVQTHMAKAVLDSGWGMLRQMLQYKGEHAGRSVTVACEKYTSRACSSCGSLTGPLGINGLRVRRWRCANCGESHDRDINAARNLLRRAEVSASVSGNESPPLRVPRMGAQNSCPGITEALRGVA

SEQ ID NO: 60862 - protein, 556 aa, Scytonema sp.
LSVVTIQTTATNNIQNKTALDYLEEYGVIFGQATRLAFSLRNRIGKTQSKESELEKTICKELEKRFGISNSEAKNAYNKASATYSSQAELVDLYIEENYDRIRETRRTIKKLEFHLNKAIASGQESTAKKLKRKIHFKQQKINQLDAKICRLKESKATGHFTVTFGSSQLFEKQYRLEENRYKSHEEWLLDWRNARSNRSFFIGSKNFLSGNQLVRYDALQHTLTITCTPGLRAKYGDSVILHDISFFRGQEWLLAAIEPVRRTSTRHGKNGEKIETSRNGSYLPVTYEIVNKDDKVYINATLESPDPHLKSSLENGALGIDFNPGSIDWVLIDRYGNLKRHGSIKINVQSKRSAQTKDIIGKAVSEVVRIALKYSVPVVIEDLDFAQKKASMKEKGAKYARMLSNMAYSQFTQMIESRCIKSGVELIKVNAAYTSVIGVTKYMAAYGLNSGCAAALVVARRSQNRTERLPAHLDSYFKKPEDKLKSGAWKKVAKRINICGGFNRHRWYSLGIKQARTNSSLYSKLRQTKTSLRFDTVQVLVTPHIHKKPPRYGFS

SEQ ID NO: 60863 - protein, 539 aa, Lachnospiraceae sp.
MYHVECIDIRKKDPMYLYLDRACLCANNMRNTANFHIRNLMTGLKKRPDERTANEAAVIKAVAEAIPAVNKDLRDKYELKVRNIQARKDLSEAERSKRIANVKCVQFEVPTPEKWFASYGLLDAVFKHMDHPDYRSFHIHVVQNAIRDCCGSWKGFFESLKSFGLSSGHPGRPKIPGYRKSGGRSSAIFSNIACTRHHGTLFFPYCHESDVPGGREKRRRCSIRIGRLPHAAKDKLIEVRAVPYFGMYQLQIVTDDGLKEENFLPKEKDIIGADGKSAGVMMLDIGLSNFVAMADNRGNTPIVIKGGAVKARNQWFNKRMAQLRAAQMRGHDLKTYHPPVTGQMKRISRKRNAFLRDTFYKYAHCICRLMRERGLTYLIIGYNKGQKQGAAMGRRNNQAFVQVPFERFRQILQTVCARYGICVIRQEESYTSRACFGSRDRIPTYGTGEAEKITFKGRRIKRGLYLQDDGKILNADINGAVNIGRKYDERIFQRQADIRYLYGKVISMTYKDVLRKSQANSKSNPGQTGQRASVCPVSA

SEQ ID NO: 60864 - protein, 397 aa, Catellatospora sp.
VSILVTQTKCYSDPVKLVVQIKLQPTSEQESALAATLRACNTAASQVAVVARQSGAYRNYDLRKHVYQAIKDQHRLGAQAAQHVIKKVSDSYKTLKANIRAGNLGKPGSKRRANAETKPISFRWDAAQPYDARMLSWRPDARTVSIWTVDGRLKTVAYTGSPQQLKAVATLPIGESDLVHRDGMWLLYASVEVAEPELIDPCGFLGVDLGIANIAYDCDGTRYAGTRLNGYRRRQLRLRKRLQAKGTKSARRLLARRRRKETRHAANVNHAIAKTIVTEAVRTGRGIAVENLTGIRDRVRLRKPQRVTLSSWSFGQLGVFLTYKARRAGVPLVQVDPRYTSQTCNRCGHRDKRNRPDQETFTCRSCGVVAHADHNAALNIAQRGVERWGAVNRPHAA

SEQ ID NO: 60865 - protein, 240 aa, unknown
  TnpB Polypeptide
MEVRRTVPAKLDVDSDDAALLRETVDEFLWAANYVVDHAWQGEYKTTSKAQLQEETYDEVRDQTRLHANLVQNARNKAADAVQSVVARWKQGEYAGKPQFLNPTAVYDKRCATFHDEYVSLATVNGRIEVEYILPDDDRDTPHSRYLDTDDYEVTGAELHHRDGEWFLHLRTKTEVESDTPDQATTGHSTVLGVDLGVNQLAVTSTGTFWSGDEFDHWRREYEKRRGPLQQCGPLIGSLR

SEQ ID NO: 60866 - protein, 503 aa, unknown
  TnpB Polypeptide
MGEIVSTMEIYQETVNRFIKRFSEYKLLDKLNYKYLYKPENKDTRIASNYSTNALAYAVTLLNNRLDLIRKGCKARIFNHIQDKEERHYLFYLLKNPKYIEAIMLRKSFAVDKDFKISRTDYLNKYLHRILRHEFKSNKLPQLKKPMLRTDIITAKIEKYKNSKQFSYVLKLSTINKGKRVVIPFNPNKWAQKFFNKRKGCFIVCLDVQGNLNLHIPIEEEPPKNNNTQEISIDKGFKTLLVDSNKQEYGEHWNDLEKKLDDIFQAKQKQRNKLYALRKELHKKWTETKDIKYYKKIKHLEKYNLGKKKFNKNKFKTKQTIKNNVNKVVNRFISTNPNLGTIALENLNFKGGKKFSKKTNRQLNNWKRGFLKDKLTFISQLNSIELAYQNSAYTSQLCPSCGYVHRDNRHKEEFTCIMCGFSENAHVVGAWNILHRGSDTEIGLYTPYKQVKKILLERYSVGAIKPPRLEILNHIGCESYKQSIQEHNTVLVTGGESLNSTNK

SEQ ID NO: 60867 - protein, 517 aa, Bacterium sp.
MFVSLQFKLEMKKEDKEKLKKLMRKQSSAIRVAYNMLRDLEKEKTKNPYAQIYQRLRKLFPELPTKYIDSAIYKAKQYPTDKPVVFGGKRFFEKLCKNHLTGKERERLKKQWKEQRQGTLISIGSKVDKGNRLTRFEDLNGQLCLRITIGNREFIYAKVLREPSNSKDKWITFMIMLLESWQTQSYFPYTVELKLRNGEVYGSVSFELPTPEVRYKRENGVIAIDTNASPIHLAIAEVSKTGELVSYRTISLHHLLGLSQNSKDHQEWILAHQIVDLAIQKGKAIAIENLKKLKRGMRGDGKAELRKRLHQWNAKKFLQKLKRVAMLKGLEVIEVNPAYTSIIGMLKYAPQLNIDKDIAGAYVVGRRALGFKEDTPENYEKLLKDKVYLEFALKRYEEREKKLVELIEKESNEYKRNALKSELKNVENAKKLLINFLQSLQGKPSSCKGAEGRNPEQGETKKVSQVAWQVLRVALLFPILGKVLPRDLSPLKPILVEGVWDRARKRLAPLEAGGASR

SEQ ID NO: 60868 - protein, 372 aa, Microbispora sp.
MMCGVAQTVKRAYKYRFYPTPEQAAELARTFGCVRLVYNKALEERTRAYTREGRRVSYAESSAALTAWKREKELAFLAEVSCVPLQQALRHLQAAFAHFFARRAKYPTFKSRKKSRASAEYTRSAFRWRDGRLTLAKMDGPLDIVWSRPLPEGAQPSTVTVSKDAAGRWFVSLLVEQTMDPLHPTGNAVGVDAGITALVTLSTGEKITNPRHERADRRALARAQRAFARKTAGSSNRAKARVKVARLHARIADRRRDFLHKLTTSLVRENQTVVIEDLAVRAMVKNHSLARAISDASWRELRSMLEYKTAWYGRELVVTDRWFPSSKLCSACGTLQKSMPLNVREWACACGAVHDRDVNAARNILAAGLAER

SEQ ID NO: 60869 - protein, 376 aa, Microbispora sp.
VAQIVKRAYKYRFYPTPEQVSELARTFGCVRLVYNKALEERTRAYTREGRRVSYAESSAALTAWKREEELAFLNGVSCVPLQQALRHPQAAFANFFAKRASYPVFKSRKRSRASAEYTRSAFRWRDGRLWLAKMDGPLDIVWSRPLPEGAEPSTVTVSRDAAGRWFVSLLVEEAIRPLDPSGDVVGVDVGITSLVALSRPIPGVTDQDGKVANPRHERTDRRRLAKAQRSLARKSAGSANRAKARLKVARAHARISDRRRDFLHKLSTRLVHENQVVVIEDLSIRNLVRTHTLARAISDASWRELRSMLEYKARWYGRELVVIDRWFPSSKVCSACGALQKSMPLNIRAWECACGAVHDRDANAAKNILAAGLAER

SEQ ID NO: 60870 - protein, 373 aa, Chloroflexi sp.
MYTWGMKQTMLLKLHPTTEQHQALLDTMHAFNQAATYVAEIAFAEKTANTFELQKMVYGELRTTYKLAAQLAIRCISKASEAYKRDKSIQPTFQPEGALVYDERVMSFKGLTTVSLLTLSGRVLVPFLIGSYQASRMGSIKGQADLLYRNGTFSLAVTLDVPTPTPGTSDGTLGVDLGIVNLATDSEGETFSGEAVEKTRQRHHALRQRLQKRGTKSAKRHLKQLSGKEARFRKNTNHVISKRIVQKAKATGQGIAIEELRHIRKRTDSTVRRSQRNRHTSWAFGQLRQFLSYKAALAGIPLHTVDPRNTSRRCCACGHCAKANRKSQAAFCCVACGYTDNADRNAAINISRASVMVPIVSLGSRSGSTQIGA

SEQ ID NO: 60871 - protein, 542 aa, Nitriliruptorales sp.
MGHDRQLDSLEVQTAVGGRVTRAVEVVLDPSPSQERWLRSYTGSMRAAYNWAISQVRDNLAVRAAERERGVPEEDLTPALGWSRESLTAAWRAVRDEVHPWHRDVSIHAFRTGLDNAAAALKNYSESRSAKRRGARVGFPRFKNRHSRQAVTFVELAEGVDHRHWINPATRAHVRLMLPQRAGDGTWERRHTRPKSEQPAGRDRRGEIAWLHTHQPDVIRQVWNLCASGRATVQALTIKHEGGRWVAVFRMRLADGTTRLRKPGHPVKRHGGAVGVDLGLKHLATLDRPVAGLTDEHGHVPNPRVLQAHLARLQRIDRAIARSVKGSKNRAKLLRRRAKLHGRVTRTRVLYLHELSRRLAGGFDVVCVEDLNIAGMAARKGLRNGRSVAEASMGELVRQLDYKTTDQGATLVKVGRTYPSTQTCSRCQARTKLALWQRVYTCSTCGLSLGRDVNAARNIRAEGERLLREQQHRQHQQHEQVSQRALAVASIRGETQNGEPRPARSRPGETEPAPGAGGRGSFEAATDPSAPAEPERVPAGAV

SEQ ID NO: 60872 - protein, 214 aa, Okeania sp.
MIIIEFKAYGKVNQYAAIDEAIRTVKFIRNSCIRLWMDKKGTGKYDLSKYCKILAKEFPFANELNSTARQAAAERAWSSISRFFENCKKKVPGKKGFPRFQKHCRSVEYKQSGWKISPDKKSITFSDKKGIGKLKLKGTWDLWRFDKKQVKRVRIVKRADGYYVQFCVSVDVTEQLNPADATVGLDVGLKEFYTDSRGNTEPNPRFYRTHLRSI

SEQ ID NO: 60873 - protein, 237 aa, Okeania sp.
LSAITLHKRLVAEVKSEKPWYYEVSKCAPQEALRDLDRAFKNFLTIPQRGFPKFKKKGKKDSFYLEGSIKILKGNYIKLPRIGVVKTYEILPCVPVKNVRISKRAGNWYISFKYDERPTPTAKQGDIIGVDVGINALATCSDGTTYPNVKAYKQAKKRLSRYQRRVNEKELGSKNRVKAIKKLAILHKKVADIRADALHKLTTWASFEPQHHSDRRLECKWNAQKAVRPRDDVSRTW

SEQ ID NO: 60874 - protein, 381 aa, Acidilobales sp.
VIKATRTVVVPSVRLTEKKLEVFRELEDLYRQVLVELVNYGFRSNIDSFVRLKKDKYHELRGRYPHLPSRYIHTACQDASTRIKSFNKLKKKSLAKSEKPVVNRVSIWLDDHLWKRIGYTIILIYTHKGWVPVELSPHKLYWRYINSGWILRTQPKIKLDHRHKRLLVYFVFVKSVNTDENNIKHVVSIDVNENNVAVKLLNKVYILETEIKRITIGYARYREAVQSVKDNGYAGRAIHGRERERKKDIRLKIANIIANTAKNLNAIVVLEKLPKQCPKNMIKNVKDSILRHRIYQAGFKGMIKAIEEKCLEKGVPVAKIDPRNTSSKCPFCGSKLMRGDAPRQLKCPRCGFKAGRDIVAVLNLERKYLTLKGLVPLAVSQ

SEQ ID NO: 60875 - protein, 361 aa, unknown
  TnpB Polypeptide
MIQFITYEYKLYSSKRNKKLNKMIDLSALIWNYCIALHRKYYKLYHKHLKSNNLKKHLTKIKRLKKYTYMTELDAQSVQNIAERIEVAYQRFFNKKSGIPKFKKVKKYKSFTLKQCSYKFLNENTLFIMKQKYRFHKNQKLEGDIKTVTIKRNALGDIYLFVVCKTDKSKVLLRLGNKIGYDFGLKVFLTASTSPKDDIVSPLFFKTNMNEIKRLCRNISKKKKNSNNYKKARMQLARLHKRIANLRKDFHYKTAYDICSKFTIICIEDLNIKAMQKLWGRKINDLAFYQFVKILESVARKCGCEVLKAGRFFASSQTCSCCGNINKDVKDLRIREWECSKCHTLHDRDRNAAINILNACI

SEQ ID NO: 60876 - protein, 384 aa, unknown
  TnpB Polypeptide
VQKAFKVTLQPNHNQEVLINKTIGCARFVYNRFLALRKELYSTEKKTLNYGGCSQALTQLKKEIEWLREVDKFALQNALKNLETAYKNFFADLKKPKAKRRFGFPKFKKKYGFKQSYKTNLTNGNIQLRENYLKLPKLGWVRFHKSQEITGDIVNVTVTRTTTGKYIASILCETEIIVHPYTTKSVGVDLGVKSYLVTSNNEVVANPKYYRTQQRKLRRANKRLARSQKDSSNRVKAKTKLARVHERIANQRQDFLQKLSTRIIRENAIICLENLAVKNMSRNRKLAKSIMDCGWSMFVAMLEYKALWHDRIVQKVSRFYPSSQTCSCCGYVNLEIKDLSIREWDCPACNTRHLRDANAAVNILNEGLRLLTAVGAPEVSNACP

SEQ ID NO: 60877 - protein, 415 aa, unknown
  TnpB Polypeptide
VTEGQGRGGRDSVIIIELKAYGKPHQYQSIDEGIRTVKFIRNSCIRLWMDNKGTGKYDLSKYSKILAKQFPFANELNSTARQAAAERAWSSISRFFENCKKKVPGKKGFPRFQKHCRSVEYKQSGWKLSPDKKSITFSDKKGIGKLKLKGTWDLWRFDNKQIKRVRIVKRADGYYVQFCISVDVNEQLEPADATVGLDVGLKEFYTDSRGNTEPSPRFYRKGEKRLKFYQRRVFRKKKGSSNRKKAINRLGRQHLKISRQREEHAKRLARCVIRSNDLVAYEDLRVKNLVKNHCLAKSINDAGWYQFRKWLEHFGHKFGRVTVAVNPAYTSQNCSECGEVVKKSLSTRTHVCECGCELDRDHNAAINILKRALGTVGHTGTWIIDPNASGDLTSTVLGSGQVQQVGSLSEESPRL

SEQ ID NO: 60878 - protein, 298 aa, Halorubrum sp.
VYDKRSATFHRDHVSLSTVDGRVECDYILPDSSETPPTKYVSDGDFEFRMAHLQYRDGDWYLHASMRKVEADEGSSESESKHRTVLGVDLGVNNLAVASTGRFWSADKFNHWRREYENRRGSLQQCGSRYAHENIESVGQKEDGRFEIHLHTVANEIIEEAIKSGCSHIVFEDLTHIRENIPEAAWQHVWAFRRLYEYVEYKSEEHGIEVVQVDPRNTSKRCSTCGFTHDDNRDGESFECQKCGYENHADYNAGKNIGLQYLRRRQNADAGGAPVDVRLNRGALNVSGKYVSLASAEA

SEQ ID NO: 60879 - protein, 384 aa, unknown
  TnpB Polypeptide
MAKIKKNKAIKYRIFPTEEQIQMIEQTFGCCRFLWNHMLNDEHEFYVATDKHYIPTPARYKKDFPFLKQVDSLALANVQLNINEAFSDFFSGTKKHPKFKSKKHNPVNSYTTNCQYSKPTPNNQFPNPTIRLIHKAIHVPKIGDIPAKIHRVPKKGWKLKSATISKEPTGKYYCSVLYEIIEDEPTDVEPVFDTSIGLDYSSPSFYIDSDGNAAESPTAYRKMQDKLAKEQRRLSRMQKGSKNYNEQRIKINLLHEKIKNRRLDFVHQESRRITNAHSSVCLETINLRAMSQTLNLGKSTTDNGFGMFRRMLEYKLADQGKKLLLVGRWYPSSKTCGVCGFINKDLKLRDRDWICPNCGSFLMRDTNAASNIRAKAIADYFDVA

SEQ ID NO: 60880 - protein, 692 aa, unknown
  TnpB Polypeptide
MSDAGPRGSTSLKLALGRLLPSRAVRDQIELTVQTIQILALRGSLVANTAVINSLEAGRGCPPVHDTTWWRNCIAVCGYGIGVRGPDKTAQLTELQTIALQLFGWETYESPLQHDVAPNVEHPPVLTNDMASHMSALVNEMQTGCHNMVSSTFHKQLSKAFYREISIFCREGNVTFQDGTVRAITRSCISRTTGNTILTDMPDECPLALQQRLDVLVTSWSTTFADILPCPSPSFIENDLKMTKTCRFLEWLYALQQHRLACVQHMAHLLPPSLPPPGKSVNGYFYKKSSKPQALLPLCHAEVRHIQINNSTMVNLINAIVARGDLPHVYRITSKTATLQHYMTHFPGLRVFQNHARYVDNGVFTFQSFRTDGVSASLLFGPKHVHSKRRTSSQCDEQKQAKKRRKTSSKTSVDSTPSPLEGKRIVAIDPGRRDMIYAVYGTEHLVDGRFSVPTANFRQRCHTAENQALGEKCLKRVLLDDGRTLLTAMGSLPSAKDMFQWRTFTDAYLPLLTPLALAKRSRCLRRTRFDSFIRRDMVLDQVIKEIVGGSLSRQACESTWVAFGAAKVCSTGFGHASSPQARLLHRLEKVHKVKVTMIDEFRTSQVCSCCNLARLYKSKVHGKRRWVLESCPNCRNDAGTGPKILHHDLHGAMNIRKIFLEGVAGSGRPQCFTRGTEKLSNLPSTFHPVIMH

SEQ ID NO: 60881 - protein, 402 aa, Sutterella sp.
MRLKINGRRFSARFFDNACRLAFFTWSAGQMFVYNQKVQEQNYYNSLCRLIDETKRHCQPIRPECCVERPAPDQKYSDLIDTKAIPWLSQVPSAILGIGAYRYYQAFKRHMSGLAGKPRVHVIKESDRMLQLTCDYFTIEPSSRKDRFLLKFGSPKKLGGSILFKAHRDFMMPAMLVVKLSAGSLTVSFAYEEPQDQNRFPETPKEMAERLKQYSKEELEAITVGIDRGVARPIQMSSREEPYQLSDAQIEKIRRGERHRRHLQRKLAKCRKGSQNSRKTKYRLRRTYNYKRNVIEDFAHQTSHELVSLEDIQVYAIEALKVRNMVKHPKPKYDEETGRPLKNGASAKSKLAESILSSGWGRSRTHLKNKALKAGNLVCFATIGNQPVPSSENQPVRHDDGT

SEQ ID NO: 60882 - protein, 381 aa, unknown
  TnpB Polypeptide
MIKVERHFCKGNPEIIRLCHLSKELYNKCNFFMRDNFSKGIRTPDISTLINLVKDEDCFKNLHNTKTAKQTIRQCLSDWTNFFRSMTAYKKSPEKFIRFPKPPKYKKEMAQVIFYNETIRRKPLKQGIIQPTNDCFQIKSDKPFKQVIITPKSFGFVIEVRYEIPDEPTKPRAKGTCSIDLGVNNLAAITSDQHDPILINGRIVKSFNQWFNKNPNKFNSMKRYWRLENYFHHVSKMIVENCKANNVGTIIIGKNDGWKNEMNMGKKNNQTFQYIPFCRLIQKIQYKAEMVGIKVIFTEESYTSKASFIDGDPLDGSKISGKRINRGLYKSKEGKLINADVNGSLNICKKVIPKIEEDRWGRSVAATPVAVNPLSWFTAQT

SEQ ID NO: 60883 - protein, 305 aa, unknown
  TnpB Polypeptide
MEHQLIKKGMGIDQAKEQAKTIIKMFTLKFKSKKRKKIQSFFIRERDWNYESGNVSWMKQIKSKEPFEIKYDTRVLKDGVGKYFILVLKPLEPITVSERRKIVSIDPGQRTFLTCYDPEGSIFEFGKNDSDSLIKLGMRADKLQSLHDEDENDKSKKFNSKKRRNLKKKFQKIKYKIQNKVKDCHHKISKYLVQSYDNILLPTFSTSEMVKKNDRKISSQTVRRLLTWSHYKFKQIIQSKSKRFDAFVIPCEEHYTSKGCGNCGEINNELEDSKEFECPQCKFRSDRDINAARNILLKYLIENSQ

SEQ ID NO: 60884 - protein, 387 aa, Thiorhodospira sp.
MLIANKIELRPTPEQADYLNRACGSRRHCDNQLLHYFSQDGVKWSKAAAYPYYIQVLRVQFSWYAKVSSRVTRNAIDDLDNAFKHFFRRVKAKANKPGYPRFKKKDLHDSFALRESTKCDVDGRTLRIEKLKTRIKMRQGLRFTGQTKQVTISKRAGRFYASILVDTDEYNPHAPEQASVGVDLGIKDLATLSTGEVIPANQRLKKHLKYLKRRQRKLSRKVKGSRRSAKAKRSVARLHQRISHQRKAVLHELSDKLTRTYQVITLEDLNVSGMIKNHCLARAIADAGFGELRRHIEYKAAWRGVTVIFANRFYPSSKTCHACGKIHDMPLNQRTMACDCGHVMDRDLNAAKNLDRYGLDRLDALRPDVKRTQESGKTGSPARVLTA

SEQ ID NO: 60885 - protein, 621 aa, unknown
  TnpB Polypeptide
MEQLSLIEPNPAKDDITSRHILGWNNKRVSSAIVESQTKNSEATLIELSSLCNQDTQTLKSSKILAAGSIISVKGLNPYWDAQCEANNSKLWLPIKTDSQDERRKLRYFVSVLNLSNGLSNKTVEKSWFSSRLIYPQSKNLQTIFLASSRFSPVGCTDLDTKWRRSRPTTKNKFAKHWDTQKLSHEDDTVCSALLRQNDCRCYVFNETIKYIRSCVNFNPSIKEIKNDLLKQLPKWCDDVPFKIKEKAVKEAHRVFKSVEDEPMTRAKTIKLKPTSEQKQIFKRWNDCSRYVFNQTIDYILSCVNFSPSWMEIKKDLLKQLPSFCDETPFQIKGQAVKEAHQAYWKAKAHPKFRSRKNPTQSCYIPKSAIKKAGIYPRVSGKNLSYTEALPEEPLDGRLIYQYHEWFLSVPQKIETRVAENQGRVVALDPGVRTFQTFFSEFMAGQIGYDDFGRIQRLCFYLDDLISRTSKAKSKAKRRMKNAQARMRKKIKNLVKEIHLKTARFLVDNFDVILLPTFETSQMASKSGRKLRSKTVRAMLTWAHYQFKVRLKNKALEFGKKVIDVCEAYTSKTVSWTGELKKVGGSRVIEAGGIKMDRDLNGARGIFLRSLIDSPALMGQP

SEQ ID NO: 60886 - protein, 423 aa, Bacillus sp.
  misc_feature (251)..(412): Xaa can be any naturally occurring amino acid
MKRMSQTLTVKVKLIPTKGQICLLEQSSHEYIKVINTLISEMVETKESTKKSTKDIEANIPSAVKNQAIKDAKGLFATKVKKSKYKIIPILKRPVCVWNNQNYSFDSTHISIPFKVKGKSTRLKVRALLIDKKNRNLDLLKHKLGTLRITKKSNKWMAQISVTLPTNERAGTKILGVDLGLKVPAVAITDDDKVSFFGNGRHNKYKKRKFRSVRKKLGKDKKMNAIRRMDDKEQRWMQDKDHKISRAIINXXXXXXXXXXXXXXXXXXXXXXXXXXXXXXXXXXXXXXXXXXXXXXXXXXXXXXXXXXXXXXXXXXXXXXXXXXXXXXXXXXXXXXXXXXXXXXXXXXXXXXXXXXXXXXXXXXXXXXXXXXXXXXXXXXXXXXXXXXXXXXXXXXXXXXXXXXXXXXXXXXCERLVIQESHP

SEQ ID NO: 60887 - protein, 411 aa, unknown
  TnpB Polypeptide
MRRRHQVGFVYECKIVEKRLNKKQREELKRLFVEGKWFYNHVLSLHREGLELSKINSADIREVVHFDRNREKLTDSLTTLNAQEKQAIVKRMASNEQTIATLTKKGKQKNGELHFLSEMTSIPLKQYGVTYKFKSANKVRIGGISGTVLVRAGGQLDNVDEFANANLVHRADGYFLKVTCFINEENYKPKPTNGKEIGLDFGIKTTITTSEGEKIDVHVEESERLKKLQREMFKRRKGSSNRYRTVLKIRREYQKMRHRKSDKANKIVSRLKQYDAIVIQDEMIAGWHRGLFGKEVQHSCLGMVKAKLMRLPQTTVLSSGIPTTKMCPKCGTVNQYITLADRTYHCGCGYTEDRDIHSARNMIAIRDMVLSHLKKLPTEHREVTLTEFRASIGGLVAPDKPERGSEKMLAL

SEQ ID NO: 60888 - protein, 488 aa, unknown
  TnpB Polypeptide
VISYKFKLHSKAKEEGFLGDKITKHLLLYNRLVDLGNRFYKRYKKILRSKTIHKYLQMKKHDPSWDYILKGLNAWAVQQTVRRRDEAFDRFFKYLKKKKKNSNVKPKESPPDKHRVHGEGSFKLAKGCGWRLVDGGVQVGRLWNNFGVPKDVHTYRFFGNREILGTIKNAVFKRDRCGDFWCIITTDHTSYRYLAPTGRIGGFDYSQEHFFVSDDGRTWDIPKVLLEHFDELSKVNHKMHKAKDGSGNRKRLVAKRARLYRKITNIRKELHYALAWKMCREYDVLCFEHNNYEEMYDPKRVVDGHRVSKKQRIRLRALAPASFITILKEVAKKAGRNLFFADQHFASSQICSNCGHVNKAVKKLRVRKWTCLKCGTKHDRDINAAKNLVKEFERTAGGASSVATQEGTETAKETYWNRIRKSALVKRAAGAGEKSPCPQIHQVADADKADETVEKCPELYTDAVTVQIKKEEEKKHDCGQKIGLKPPD

SEQ ID NO: 60889 - protein, 411 aa, Bacillus sp.
MVRKATKKKDEELAEQGLKLRHYGLRLRVRPNKEQEEKILRYFGCARFTRNFYLSERMEVYKQTGENLTGAEFKKSFIILKSHSEFGWLKEPDKFVLECAIEQVEDAFTRFFKGQNKFPKFKSKRQAQQSYTTKETNGNIKLNVEDHTIQLPKVGKVNVLLSKKHRKMFENEGFSGKIKQATVSYHSSGQYHVSLKIEEVVKREEPIELSYLREEDVMGVDLGLTHFLIDSNGVKIDNPKHLRQHLVKLAKLQRKLKKKKLHSCNYKKMQNRISKLHLHIANKRKDFLHKQSRKLVNENQVIVLEDLYVKGMIKNKKLSQSIADVSWSQFKTFVSYKADWANKRVVLVDRFFASSKLCNGCKKKQTLLSLSTRVWVCPECGQQHDRDMNAAQNIKEEGLRILRSQPLLNPV

SEQ ID NO: 60890 - protein, 359 aa, unknown
  TnpB Polypeptide
MKRLSAYQFELKPNGEQQRLMRRFAGSCRFVYNKALALQKERYGRGEKKLGYAGLCKLLTGWCNSADTAWLADARVHPLQQMLKDLEPAYSNFFAKRADFPRFKKKGRSESFRYPDPKQIKLDQANNRLFLPMLGWQRYRNSRDVLGTVKNVTVSQSCGKWFVSIQTEREVEPPIQQGGAVGIDMGIARFATLSDGTFYAPLNSFKRHEAALRKAQQAMSRKVKVSNNWKKTKARIQRIHARIGNARRDYLHKTSTAISQNHAMVCIEDLQIRNMSKSAAGTTEQPGKNVRAKSGLNKSILDQGWFEFRRQLDYKLAWRGGWLVAVPPQNTSRSCRIALTRPPNFIGVDQRSHSTDQIR

SEQ ID NO: 60891 - protein, 424 aa, Thermococcus sp.
MKRSVTVKLQPSKEQEKNLFELAQATAIIWNKINYERLKQFKEFGKIDFNGTEKEAYHAFKNWVGGSTVQQLARKNAEAWRSFFALSRKKKSKELPEWFKPKPPKFIREKNGRKLFIISLRNDQYRIKGNVLELRRLGKFGKLEIQFKGRIHLRGKQGRLEITYDEVKRKWYAHISFTVEEKLDGRKLVKLPRKPKGDLSAGIDLGVNNLMAVYVENGESFLVNGRPLKSIAFYWQKRIGEYQSRLNKSGAKTSRKLKIMHERAKLQAKHYINTVVRQAVMRLYELGVSRIVVGYPKGISRNSDKGRKQNYLLSHVWRFNYVIKRLTEVAEEYGIEVVVVDEAFTSQSCPLCGQRHSNGRISRGLFECHGEGVVMNADLVGAFNILKKAVKTITPSLGDLFAQRGVMGGRPSPRGSKDPLRGLP

SEQ ID NO: 60892 - protein, 535 aa, unknown
  TnpB Polypeptide
VLGPDVGRLAAGCCRSILCSIYCYVKVSMELVGVMPDEPSADHEPRDGANPPHDGDPMVPECFDAGFLRRDAEVRVVKRAYKYRFYPTPEQADLLNRTFGSVRYVYNRALAERSRAWTQEQRRVTFAETCRMLTGWKNDPDTAWLYEVSNVALQQGLQHLQNAYVNFWAKRAGYPAFKSRRKSRASATFTTSGFRYRDGQIWLAKTSAPLAIVWSRPLPEGAEPSTVTVSRDAAGRWHISILAECPVETLPPATSAVGVDAGITSLVTLSTGEKVTNPRHERRDRARLALAQRRLAKKQKGSANRARARVKVARVHARITDRRRDHLHKLSTRLIRENQTVIIEDLSVRNMVRNHTLARAISDASWSELRAMLELRAMLEYKADWYGRTVIAVDRWYPSGKTCSACGVITATMPLNVREWTCAACGALHDRDVNAAKVLCAAGLAVQACGDGVRPPDLPARSAGRRPSVKQEPWPARAENPRPSGRGEVNTVWSPQPAPSPQGLGGVRVGSAGRGRWRVFRRCASRSWSGSPGPG

SEQ ID NO: 60893 - protein, 396 aa, Desertifilum sp.
VRTAYQYRLRPTRQQATEIDRWFSMLCYQYNYLLADRFNWWEQNRSPVNACPLVCYLPELRDNPDYYSQKKTLPQLKKTHPWYSEIYSQVLQDVVKRVKVTFDRFLKGDSSGKRSGKPRFKARNRYRTFTYPQMKEGCLQSNLINLPMFGKVKVVLHRPIPDGFKIKTASVTKKADGFYLTLSLEDKTVPEIKPDFNPDKITGIDVGLKDFLTTSEGETVDIPTLYRKSQKRLRVIQKRVSRRKKGSNGRLKAIKQLGKQHKKVADKRKDFHFKTANWLLSKYDVVVHEDLNVKGLARTRLAKSVLDAGWSNFLSILINKAVGEACAKRINAGLLVVPVSAHNTSQECSNCGEKVPKKLYIRWHDCPHCGCSLDRDHNAAIKIERWGNPFLKPRAS

SEQ ID NO: 60894 - protein, 293 aa, unknown
  TnpB Polypeptide
MILAKKIRLYPTEEQEQKLWQSVGTARFIYNWTLNRQEESYKNGGKFIKDSDLRKEITRLKKDKLSWLNEVSNNVAKQSVKDCCNAYKNFFKGLVDKPKFKSRKKSKQSFYNDTSKLKAKEKSVLIEKIGWVKTKEQLPMDVKYTNPRISYDNKYWYLSVGIEEEMPVVQLTGESLGIDVGIKDLAVCSNGMTFKNINKSKEVRRLKKSLKRKQRQCSRKYDFKLKMKYKCEFCGIDFVEADRYYPSSKLCSCCGSIKKDLKLKDRIYKCSCGLNINRDYNASINLSRYKLAI

SEQ ID NO: 60895 - protein, 392 aa, Fischerella sp.
MGSKAYKFRIYPNNEQSAFLAKCFGCSRFVYNYFLRVTTDIYAESKKSLRYKEWAKLLVNLKSEFEWLKEVNSQSLQQTLKDLESAFTRFFKKLGGFPNFKKRSHRQSFRVPQYFSIDENGFLRLPKMTPIKMVIHRKILGTPKNVTISKTPSGKYYASIVTEQDIPHAPLNGDKIGLDLGVKEFVITSTGEKFENPRYFQRSLRRLKIRQKRLSRKQKGSNNRNKALLTVAKIHEKVANQRQDYQHKISLKLTCKNQAISVESLNIKGMVKNRKLAKQISDVAWGNFLTMLEYKGDIYGCEIHYVDRFFPSSKRCSNCGYIKEDLTLSIREWQCPECQIIWDTDVNAAINLMLFSQVKIPLEEGKFTPDQLVVRLGMNRDTGSGQEALSKA

SEQ ID NO: 60896 - protein, 387 aa, unknown
  TnpB Polypeptide
MLKGIKIRIYPDKEQEKLLLSYCKDYHNMKNFLVAKFKDNLPNVGKHGIIGYKEHKLLQDYESEYNCKTEMLMRSVRGAITDYVSGVKRFYHKLSSKPPKFHKYDPNKQSFYIVDGKYLVKDFTIPMPVRKDLRVKYKSTISRKIPINKKYIEKEHLTYLKDIRFKYEKGKWYVSGCYDIPDVTINQNKEFLGLDWGIKNFMTTSESTLINYPKEVVREYYRIRKLQHYLDKKVKNSNNYKRLKKKFDKAYKRMNGLKRNFIHQETTKLARQYHIVIGDILFQDISKDKKGKKRKFIRRMNMISPKHIFEEQLEWKCKKFGSHFIKVNPKNTSRTCSVCGQIHDMTLKDRTMICSCGNKMDRDINAAINIKNAGMNKILAESICYTR

SEQ ID NO: 60897 - protein, 392 aa, unknown
  TnpB Polypeptide
MFCEYTHLAKNLYNHANFLVRTEFTKTGKWLRYQELDKILRRDVDYPDYKNMMAAQSAQQTLRLLDRNWKSFFNSIKDWSKNKDKYSGKPKLPKYKPKDGKMVFMITNQQIKQKDDLLHFPQSLQGFTVKPRCIHLSNFKKINQIRIVPNNQVFCVEIVYSISIDDTLLLDNGRYMSIDLGLDNLATIVTNIGSNPVIVNGKGLKSNNQYYNKKNAYYKSVAKQMNNKFYTNRLYRLTQKRNFKIEDSLHKISKFIVTSALSNDIHTIIIGNNKDWKRDISLGKRVNQSFVNIPHQKLIEKVVYKARNVGISVILAEESYTSGTSFIDGEFPKKEFYNKKRRKHRGLFVSNQGVQINADVNAAYQIMKKVFPNVFADGIEGVVLHPVRVDII

SEQ ID NO: 60898 - protein, 438 aa, unknown
  TnpB Polypeptide
MVFDDDSPCRKSREGGCCRWRGDAMILGRQLALRPAPGQLAALSRTSGCARWAYNWAIAQQREALARGEKLPTAIDLHKALNKLKKLPAEDGGVPWMYETSKCAPQEALRDAERAWRNCFAKRAHRPCFRKRTDGGRFRLTGKIRVANGRVTLPRIGCVRIASGDRGYAPDGVYSTISLTEVAGRWFASVRVQVEEAAEKTGPVVGIDVGVRDLAYLSDGTIFANPKALACEKRRLRKATLAVARKRRTADKRLGAWRKGERRQRSNRLKQVHRKIARLQARVAGVRRDALHKATTWIAKAYAGVVVEDLRVKNMTRRCRGQGRAAKAGLNRAILDSGLGQIRALLAYKMPLHGGKLIAVSAAYTSRTCSVCGARNDPGASKTYECASCGAILDRDFNAACNIKAAASWPEALNARGGGGSPAVARPTAAPGEARIGA

SEQ ID NO: 60899 - protein, 397 aa, unknown
  TnpB Polypeptide
MKRGESMPLKGLKVRIYPNKKQKLLIQSNFGYNRFVWNQMLHMLIERYKNNPKTPFLNAYTLNNLLPALKKEYPWLKDAESTSLQATNHDLVEAYKKFFKQKHGFPKFKSKKSFKKSYQCKCVNQNMKQVATHSIQLPKLGRLRFKAGKPIPKVIKSVTIRQSFTGKYYAILLVEDENQAFTKTNARIGLDLGISDLLIGSDEQKIPSIRFDKKQAKKLHEWEKRLARRRLHAQKAMAWDKHNQVLQPRQLADFKNVQKARLMVAKFHEKMANQRQNYLHQITTKLVKNYDLIAIEDLKTKNLLRNHKLARVIANQAWGEIRRMLEYKCSWYDKQLIVVSPYKTSQICSHCGHDDGKHELGVREWTCPHCGVHHDRDVNAAKNILTLGLGQALVKEL

SEQ ID NO: 60900 - protein, 455 aa, Burkholderia sp.
VEGKGAPCAGTILLWCVESGGTLRGEANDAIGTSSIDLPEAFFVGRFQRQRYDIWMRRFQAFKFELIPSSGQQRDMRCIAGACRFVFNKALALQKENHEAGGRFIGYVAMAKQLTAWRNGSETPWLKNAPVHPLQHSLKDLERSYKNFFAKRAALPKFKKRGQRDSFRYPDPKQIKLDQANDRIFLPKLGWIRYRNSRDVLGDLRNASICLSAGKWFVSIQTEREVEQPVPQAGGALGIDMGIVRFATMSDGSYLAPLNSYKQHEARLRRAQRSLSRKTKFSSNWKKAKAHIQRIHARIGNARRDYLHKATTTISKNHAMVCIEDLRVRNMSKSAAGSADMPGKNVRAKSGLNKSILDQGWFEFRRQLGYKLAWQGGWLVAVPAQNTSRACPVCNHMSTENRRNQARFVCTACGFEENADVVGAINILARGHRVAACGEPAQSGRLMKQEPAEAI

SEQ ID NO: 60901 - protein, 424 aa, unknown
  TnpB Polypeptide
MTTEPTATKTLEATLAPPTAHKERRLQRTVATYRRALEDAFESGANTPSAVNDIVTPYTLTSYAKDALKSYVPKLRDTYDASELDDNHPVRFTNRGFCLDHSEDRRHEFCWRVPQAGRGNAFWIPLRINPEQRDLWADLFDGELSGGEFRLQQNRTNWVLHVTVEYEIEATEMPEDPTPVGFDIGESKLLMGCALTEQGTPKEPFLFDGSRARQLRKEMHTTLKRLQERDCAEWRRDERFDYYQNALADIVEKASRQAVEYARQFDSPVIVLEDLSYIREQLDSGTYMNRRLHGWAFARLTDRIEDKAADAGIPVRFVNPAYTSQTCHVCGHIGRRGSQAEFRCTNGGCWVTEYQADINAAANIAGRLDPWGESLPWKPAGDDSPQDGLVVTLPQDTTRRVRNPDRRRLWRFSPETSLDARLPL

SEQ ID NO: 60902 - protein, 223 aa, unknown
  TnpB Polypeptide
VSDEKKSIVQQPITKVVGIDVGLDNFVYDSDGHAVKNPRHLKHNEIKLTKLQQNLSRKKKGSKNHVKQRIRVACRHEKIKNIRTDFLHKISYYYTTQYDAIGMEDMPMTLKKDKFSKSRQDASWGRLRQFIAYKAASAGKLLIPVATKGTTQRCSQCQTIVPKELWQRTHECRSCGFTAARDYNSALEIKRLTLKEIGWGTAESTLVEMEQVVPSMKQEAPLF

SEQ ID NO: 60903 - protein, 200 aa, Trichococcus sp.
MVGIDMGESDLMVLSTGDKIKTVRSHEQLAPKRLYWERRVARRARKAKQNGTTLTEAENYQRAKEQRARIYQKEKNQRQDRLHKLTTKLVRDFDVIVLEDLQTANLMKNHQLARSIAAQFWREIRSQLAYKCVKYGKELIVVNPYKTSQICSSCGFDDGKHALDIREWDCPNCHAHHDRDVNAAKNILSIGLGQTLVKPA

SEQ ID NO: 60904 - protein, 378 aa, unknown
  TnpB Polypeptide
LIANKSWNNGRQEAKAKSVLIKNHDGSWRTEEFKHLGSQVKQLLADQLVSNEKTLEKLEEKKLQKSGEFRFKRFVNSVPFIQPGVSFRLNGNKLQLQKFPGVLRVFGGKQLVGLEIASAKLVRKPDGFYFFVSCFENVGVGEFAVQSPVVPLGLDFGVRSHFSFSDGRESSVVFRESDRLRRLKRKRKRQVKGSKGYHKTRAAERREYQKLNRSKDAAAQKIVHDLTSDFQVFTQDDPFNQWKVKRGRNLQHALLGRVKQGIKRDPNSVVLPWWAPTTQFCPNCGILTKHPPKEKVFTCSECNYTSPRDKHAANNMILLGKLWLALKLGQELASTPVEGLSDKAQVSAVALLVPKEAGNDMEKKPGPAAEAALVSTTP

SEQ ID NO: 60905 - protein, 378 aa, unknown; identical to SEQ ID NO: 60904
  TnpB Polypeptide

SEQ ID NO: 60906 - protein, 403 aa, Cyanothece sp.
MLDVLKIRIYPNPQQELALVKNLGSARFVYNYYLNQTNNQYLETGKGMTYCQMAKDLTQLKKHSDYEWLAEATAATLQQSLKNLEVAFNNFFEKRANFPKFKSKRRKQSIRYPESCSIRNNKLKLPKIGFVKAKIYRDIKIKGKIKSVTVSQTTTGKYFASLLFETDDLTVNKEPKISGIDLGLSSLVTVFDGENSDKVDPIKPIRKYAKRLKRRQQKLSRRVKGSKNCKKAIKEVAKVHEKITNTRADFLHKLSRKLVDENQIIVAEDLCLKGLARTKLAKSIHDAGFGMLLNFLSYKLEREGGKLIRVDRFYPSTKLCSCCNFKNDLLTLSIRDWVCPECQTHHDRDENAAKNLRQEGLRILSTNTEGHSEFEACGETVRLVNTCIKKRVSVNQESPVILR

SEQ ID NO: 60907 - protein, 402 aa, unknown
  TnpB Polypeptide
MAKLVKRAYKYRFYPTPAQAQELARTFGCARKVWNLALDARTTAWYQRQQRVGYVQTSALLTEWKRSEDLAFLNEVSSVPLQQALRHLQGAFASFWDKRACYPKFKSRKKSRASAEYTRSAFRYRGGQLTLAKMDAPLDIRWSRPLPEGAEPSTVTVSRDAAGRWFVSLLCECPINPLPPSGATVGVDAGLTSLVTLSTGEKITNPKHEKRDRARLALAQRRLSRKAKGSENRAKARVKAARVHARITDRRRDYLHKLSTRLVRENQTVVIEDLNVAGMLRSHCLARAISGAAWSDLRRMLEYKADWYGRDLIVVDRWFPSSKTCSDCGHQIGALPLRIREWVCPKCGVLHDRDINAARNIRAAGLAVLACGGGVRPQPGNRGGQSSAKQENQRVTAGIPRL

SEQ ID NO: 60908 - protein, 402 aa, unknown; identical to SEQ ID NO: 60907
  TnpB Polypeptide

SEQ ID NO: 60909 - protein, 466 aa, unknown
  TnpB Polypeptide
VFDMAITVAAPRPVHRTALVRLRVTRRQAHRCYGLLRSAGDVWAWLLDSNWQRHQQGDPLVTGYQALCRELTKSDGFGELSVVGARSVLQRYTDAWFQAAARRKAGVAAGFPRRKRALVPVRCYSGTFKIEGQRVRLPVARGRPELWVRLARPIPYSAEQVRAVTLLADGGLWLAVTAAVPVQQHDLDEGRVAGVDLGIIHPYAVVTEQAGLLVSGRALRAESYLHLEDQKARQATAAGRAPKPGQRGSRRWRRHRARLRRAEARHRRRVHQAQHQAARQVIAFAVQQRVGTLVVGDPTGITDRDVGRVQNLRLRRWRRTHLLQALRDKAEHAGMVVRLVDERGTSSTCPACCQRVPKPRGRAFHCPLCTFHGHRDLVGAANIAAKAGGGPTSTGLSVLVEHRRAGILPARRDRRRHLHDQRRRRSCPASGHPGDDPASLGCRSPCVPDLAPGEDQAAPPKRVHVA

SEQ ID NO: 60910 - protein, 384 aa, Geobacillus sp.
MYIITQKEVKVMIVNKAYKFRIYPNKQQEVLINKTFGCCRFVFNHFLAKWNDAYKETGKGLSYNTCSSQLTQLKKEFTWLKEVDSIAIQTSLKHLADAFTRFFKGQNKSPRFKTKKNPIQSYTTKYTNGNIKIENNRIKLPKLGWIRFAKSREVEGRIINVTIRRNASGKYFISVLTETEIKPLSKTDSAIGIDVGLKHFAILSNGEVFENPKWLRKLERKLIREQRKLSRRKIGGSNWNKQRIKVARIHEKIVNARKDYLHKLSTYIVKNHDIIGVEDLSVKNMLKNHKLAKSISEVSWSEFISMLEYKCKWYGKQLVKVAKNFPSSQLCSSCGYQNKNVKNLNLREWVCPNCGTHHDRDLNASINLRNEALRLTAGTAGIAY

SEQ ID NO: 60911 - protein, 591 aa, unknown
  TnpB Polypeptide
MKKLTTSTLFKSYILEHKSNPSKVDLLFDLYSVYQSEYKFHMTNSWTLFTKNQTNNNKFSHLGSTKHIKTQLNSAYLQCLLSQVCASLNNYTANIANKFSEFINHSSIKDKDLLHKLRTINSKHAWLNQNITYYTNLRMDDYGYLFESISKHEVLIEKSVLRLAKQIFNHIVDKDRVRFPNVNKPRFLIDDRLYSLEPSKTSTFDYWLKITTLTPGKRIAIPINKNTYFNLAKGSIGKSIELDFKSYDYSVVQHKHSSLSNGSGKKLIKPKDYKFNKVNKQIRFIFNKKIEIDDYFNNLNQINTVKDKTVAFDLGLCNFIATSDGELYGQYWLYKLKQYDEKINELFSHRQYCLTNYNKKNPTKKIKIRSKRYDNLINQVRGFIKTETNRILNQYFDKHQDIKTVVIEKLRFSSPELSKRLNRIIQNFGYSLFKSKLEELSLFYGYEIVELNPAYTSQECSNCGYVAKNNRKSQSEFRCECCGHEKNADVQSSRTNLKRFEDKQGSAYKALHKGTILRKVKFNFSNRIEYLISNGIVGRRNLYKLLKANKYFQYDIREIVRTTEASGVKPITVKNYDKYLKEYLSIIPNKI

SEQ ID NO: 60912 - protein, 612 aa, unknown
  TnpB Polypeptide
MQTTLTATLLENQDYLIEIKTQLDKVVVLHNHVQRKLYKDIISYKIKNQVEVLPKSKINELKSSYQTKYKINARQYNSIHIELLGKINSVLELNKGYIEDTKDNILSITKAIKSKEKTLSDLVIKMAKDNYVETLVDKNNLAKLKTKLYYLKIKLNKANNKLNKLVKIEKSGNPKLCFGSNKLFRQQFEINKPNNLTQFKSHEQWKKEYLSSRNKSFILVGSCDETLGNDNCQIKHISGNIYELKVNVNPKEVKFKDRFMTVQIKVHNDDKNLIQQAILNNNQALTYRFYKEKNNYRVLINLDKAKQQPKVISNKLLGTVGIDINADHLAVSEIDRFGNLIKSFDLILNLKDKSSDQALDNIACAVKKITDYANAKNKPIVIEKLNFSQKKKDLKDSYNKKYKVMLSSFAYSKIIELIKNRAFDKGIEIIEVNPAYTSKIGKFKYQNKYKLTTHQAAAFVIARRGLLSYEKEIKVTVKRKIKEEELTNVIDNKLSRNGVIINLSKNKKNEYVEEVIESKTITVINKEKTISAQLSKYYCFELPVRNIQRKQNVYWKDIEQSYLKAKKHRFLIKRKKRNLIQGKQDLPCEITQVADNDGANRGSYTNLLFQPF

SEQ ID NO: 60913 - protein, 361 aa, Mycobacterium sp.
LDSFTGNTPKSARAGKAVRFTTGAIRVEADRRHVTLPRLGPIRTHESTRKLARRIEAGTARILSATVRQDSAGRWHCALQVIVEAKARPAHAQRSAHPVVGVDVGVKADALLVVATPDGVEVDRIPAPKSLTAAHARLRALQRRAARQHGPYDPATKTKQVPSKRWLRTQARIGRTHAHAAAVRRDVLHKATTTLAQHHQVIVVETLHAAGMRAKGGARKRGLNRALADAALAEVRRMLSYKTRWYGSDLIEADRYFPSSKTCTGCGRRKPNLTLADRVFDCEHCGVRIDRDLGAAINLARLGEPCWGEQSPAGSGPAAGRGATHETEPAPAGDAAGRETSTPHHHPVDQTGTASPQGEAA

SEQ ID NO: 60914 - protein, 388 aa, Nostoc sp.
MTQKAFKYRFYPTSEQKTLLRRTMGCARLVYNKALAARTEAWYERQERVGYAETSAMLTQWKKQEDLQFLSEVSCVPVQQGLRHLQTAFTNFFAGRSKYPNFKKKHHGGNAEFTKSAFKWRDGQVYLAKCASPLAISWSRNIPEGAQPSTITVKLSPSGRWTVSLLVDVQIETLPESPNQIGLDLGITSLIALSNGEKVANPKAFKAKRRKLRKAQKTLSRKKKGSNNRHKARLKVAKVHAEISDARNDFIHKLTTRLVRENQMIAVEDLSVKNMVKNHKLALAISDASWSELVRQLEYKCDWYGRTFVKIDRWFPSSKRCGHCGHIVDKLPLNIREWDCPKCNTHHDRDINAAKNILAAGLAVNVCGATVRPEESKSRKAGAKKQKL

SEQ ID NO: 60915 - protein, 456 aa, Streptomyces sp.
MDDQAHAARTLWNCLHDWWTMLPKDKRSLAAADAAIRQARKDIAWLAVLPAQAAQAVLKTYFQAWKNCWDGRADAPNFKARLRTVMSVDIPQGRDLNITRVHRRWGMVNIPRIGRVRFRWTKDLPVGKHADTGNRITGARLVKDALGWHIAFRVQTLEAAPEPHTGPDVGIDAGVNLPLALSDGNHHDHGRPPRLPDGTADRDKWLNPQEKAKLLRLERRAAQRKQHRGRGEKTSRRLQHTYDQIRQLRAKATRRAVDWQHKTTTSIARQYGTVVVEQLNTTNMVKSAKGTIEEPGKNVAQKSGLNRSISQEAWGRTVTMLTYKTARHGGTLHKVPAPGTSLRCSACGLTTPGSREDQATFVCKNPDCGWSGNADWNAARNVLHLYRMGHALIPAAGRAVVRRPRGVKPAAARQAGITLVHEGEHFNVGSHSPARSSPAVADHGPRSRSERMRENA

SEQ ID NO: 60916 - protein, 420 aa, unknown
  TnpB Polypeptide
MEMLLSHKTSIKISQEYSNIIGHMCYAASKLWNICNYERRHYKELGLEKYPDWYYQKKAHKGNLWYKQLPSQTAQETCKQLDKAWRSFYVLKKTGGIKDPNPPRFKQDNIPVTYMQMGIRHEKGSDQLRLSLSKDLKSYMEETYGIHEKFLYLENKIFRNMDHIKQLRIYPPENGKYDLIVIYEIEEPEQLSQNGHYLSIDLGLHNLMTCYDSGNGRTFILGRKYLSLERYFHKEIARVQSVWYAQQSERGIKYPKSSKHIQRLYRKKQNAVKDYLHKVTRWIAEYCRKEDIRCVVVGDIRNIRKEKDMGHKTNQKFHGLPYNKLYIMLEYKLKLYGIQLIKQEESYTSQCSPFSPEISKRYAESSNRKERGMYITDGVRFNADAVGAFNILRKYLSVSGKQKELSVTGLKNPEIIKVAA

SEQ ID NO: 60917 - protein, 388 aa, unknown
  TnpB Polypeptide
MVVQRNFRYRIYPSGKQEVRMNKSISDCCFIYNKLLETKINAYKEDKTNLSQFDLNKLTKPFDVELNSQVKQNISKRITDAFKHFFRRVKEKKRKVGFPRFKSFQRYKSITFPQSGFKVNHKKIYLSKIGNVPIVLHREIKGKIKTLTIKRYADKWYAIFSCEGIVLDKIKPLEKKIGIDVGLENFATLSNGEVIENPKFFRRNEKQLVKLQRRLSSKKKGSKNRQKAKLRVSRQHEKIFNQRNDFLHNQTAKIVRRFKIIAVEKLNVKGMVQNKYLAKSISDAGWSSFVQMLSYKVENTGGKVEQVNPRYTSQICSSCGNRQKMSLNKRNYKCLCGLEMSRDLNASRNILVGLDKPKLNAFGEIVRPLEIKANLDEIGTILEEDAQP

SEQ ID NO: 60918 - protein, 385 aa, unknown
  TnpB Polypeptide
MSMQMNYKYRIYPSRVQVLKLKQSLLGACELYNILLGVKINAYETDKTSLSGFDLNKIAKDIDVPLHSQVKQNISKRIDEAFRHFFRRVKEKKGKFGFPRFKTKNRYNSITYPQSGFKIVSDKKLFVSKIGNMPIVIDRVPKGKLKTFCIKKTAIGWFAIFSCSDVPVDRIEIQDNQIGIDVGIENFATLSNGEVIENPKFLRKSEKKLIRLQRRLSRKKKGSMNRRKARIKVAKFHERIFNQRHDFLHKTSFNIIKRFKIISVEDLQINNMVKNHHLAKSINDVSWNSFIQMLSYKVERTGGQLIKVNPRNTSKTCSNCGTILDMPLSKRTFKCLNCSFVCHRDLNASLNINTAGQAEINACRETVRPSEKARLVEAGTIFEPA

SEQ ID NO: 60919 - protein, 326 aa, Streptomyces sp.
VKLVVQVRLLPTPVQAAALEATLRGCNEAATWVSRVAFEHGEFRNFALRRLTYEQVKSRWNLGAQAARHTIKKTCDAYATLKANLRAGRLGRPGSARYRRATQKPVAFRSFGAQPYDDRMLSWQIAGRTVSVWTTGGRMKNVAFTASVEQLATLALYRRGESDLVHRDGMWFLNATCEIPEAEPNTEPVDFLGIDLGIVNIATTSDSSWSFAQLGQFITYKARKAGVPVVHVDPAYTSRTCAECGHIDAANRVSQAWFACRSCGFVDHADRNSSRNIRARAWELWRRGAQSTAPAPPPKSVGGAGRRRSITASGARCAPVALATGS

SEQ ID NO: 60920 - protein, 213 aa, Anabaena sp.
LSLEDKTVPVVSHDFDVNNIVGIDVGLIDFIVTSDDERIPAPKFLRKAERKLKSAQRRVSRRKKGSNRRKKAIQKLGKQHKKVADTRKDFHFKTANNLLKKYDVVAVEKLNIKGLAKSRLAKSINDAGWGQFISILLNKAENAGLKVIAVNPNGTSQECSNCGTKVIKVLSERTHNCPDCKVSLCRDLNASLNIKNRGTHDLKAQIMSSLKSL

SEQ ID NO: 60921 - protein, 489 aa, unknown
  TnpB Polypeptide
MKEDKKIFVYTLKLKTTNKHVEQLNRRFKMAQDIFKKSLIECLRRDKASKKDPLYKQAMKHEASSKERKKLLKELDKKYDLSDFSLRKFANDYRNARNYSPYIPSDVAITLGKRAWGAFSKVKFAKGANRISLNSPFISMEGAHDTGLIIRNGIFKMGTSTDKAKFSCPVIYEDDEMEKGVLRNKVKYCRLIRKQEHNKTNFYVQVILEGYPYIKTAEPLDAKVGVDIGLTTIATSSRLGTNLEELAPDIDNNERLIAKLRRKLDRQRRANNPSNYNPDGTIKKGRKTWHDSKNYLKTKKKLAELSRIQAEKRKLAHNNLANKLVEIGNEFVVKKINFADLAKRLEVGDISKITGKNLSKKQFGKLIGRRAPATLIEKLRYKAEFRGSKFTLIDNEKIAAAQLNHLDGERHPIKLSERVKMVGDHPVQRNLYSAFILEHVTEDGENVDLKNCSKDFNRFLRNQEHTMDNLTNVTPSMGVKRFKSIKSKK

SEQ ID NO: 60922 - protein, 367 aa, unknown
  TnpB Polypeptide
MLEFNLTNRMAKAVIKTAKSQLKLLKESARYQFNNLYKRKRSLYKKIQKYKLMLSLSTTSLKQRKLTKLRLFWTQMKLNKANQLIANGLKLHLTFGTKHLLRTNKQKFLAKRDNQVIYIGDKNETCGNQQFQVQFNSKYNRFDYKLRLDNQWVSGSDKYIFGSFVLKNNEAKKAILKTLSEKKSNPLTYRIIKRKGNLHLQVIYRRESNDLTRATHGVLGIDFNKGFISVSEIDSDGVLKSLTRYNYLHKGKATKTKTSMLGLVAKLAAQAVSVGKDIVIEDLVSLDSNKKQEKTASKDYNRMINSLKFGLFKRCLLSKAMKEGVFVHNVNPYYTSKIARRSYTDRMKLNVHDAASYVIARRFYQYD

SEQ ID NO: 60923 - protein, 390 aa, Moraxella sp.
MTIIRGHIIELKPNNKQATHLKKACGVARFAYNWALSEWQKQYEADKNYRETCQKLGLTLDETKLHKPTQGKLRKQLNAIKREQFPFMLEITKCSPQLAIMQLGDAFKRFFKGESKYPQYRKKGFNDRFSLSNDQFKLKSKNNKPHIQIPNLGLVRMTEHLRYNGKILSAKVFTKGGKWFVSVAVELDEINKPLNKTGEQVGIDLGISDLAVLSDGTKAQAPKPLKTKLKQLKRLSKQLSRKQKGSKNREKAKTKLSRLRYKISCIRKDFTHKLTTQLVKSYDVICLENLNVKGMVKNRKLARSIHDLGFYEFKRQLIYKANQWGKTIKELDRFYPSSKTCSNCGFIMAKENLTLAVRHWICPSCHANHDRDINASINILNQADKVLTLS

SEQ ID NO: 60924 - protein, 475 aa, Mycobacterium sp.
MAEKFDVPTGWVLQAYQYALDPTDAQTALLESHAGAARFAYNTMLRAVKDNLSQRAAERSYGWADTDLTPLLSWSFQSLRNDFNRRKHVVAVRDDGTPWWGENSKEAYANACKNLSSALTNWSTSRKGTRKGPRVGFPSFKSKRSTKVFAFTTGAIRIEPDRHHVTLPRLGSLRVHESTRKLARRLEQGSARVLKATVRFERGRWLVSFTCVVERAAKRPAHVTRRAGVVGVDLGVKDLIVVATPDGRELLRVAAPREFARASRMLRALQRKAARQAGPWDAAAGTRREPSKAWTRTQQGIGAQHARVANLRRDRLHKLTTLLALSFDVIGTETLAVKNMMAKGGSGKRGLNRSIADAGLGEFSRQLDYKTAWYGSRRVQADRWYPSSKTCSGCGSVKAKLNLSERTYVCEHENCGLRIDRDLNAAINLARIARAEQSACFDNGGADRKTTASAALVAVKPESSNGSASPQGEAA

SEQ ID NO: 60925 - protein, 352 aa, unknown
  TnpB Polypeptide
MRYRDLYILLKNTVAYKNLPAQTAQQVLRLLDQNWKAFFKAFKDWRSHPCKYLGRPQLPRYKPKNGESIVIFTNQQCHIRNQFIVFPKKTQLLPIKTRITGRFCQIRLLPWGNHYILEIIYEKISVDHKLNPRRVISIDLGLNNLVTVVNNAGLAPWRVKGGCVKSINQYYNRIRAKLHSLLDKRGLVRSTRRLQRLLRKRRNKITDVFHKVSRQLIEYCLTNDFGRIVIGYNETWKQCIGLGQRTNQNFVNVPFLRLVRQIQYKAALVGIEVMSVEENFTSKVSFLDDEPIRHHQTYRGQRVTRGLFQSSTGRILNADVNGAYNIGRKAVPKAFTADGIEGVGLHPYSVTI

SEQ ID NO: 60926 - protein, 594 aa, Actinobacteria sp.
LRRRVPLAEHETARTAGARGLLRAGVDEASGEPQAVSVLTERVGWAVALATGMATKLLAAHWNSADVAVLASGKDGEGRKLPPNAWMAMRRLGWTGEPPEGVRVNDRILRMAQEQAGRTLRSARWRAELVAGVLRSWPADPARRTADEWVQVRAAVPAGRHLSSSVIKGHTRQLAAFLKANGRLPADVFELEGVPRAARMLLSACDGQQACIERAGGPDRALLRLRLPTRPDPRSCQDWTWVACPIVLPPTIPSRALLHLPTLRLDRGRVRIDLAYTHAVPRAARTGHTVALGVADEIRRVGARRSNLNAALAWAAARWAVDQAVTAGAGVIYLEDLRSMEARGMGRTHNTRVAQTARGQISDRMWHLAAEAGIAVVTVPARNTSRHCPQCLVPLLHRKAPDAPTVPGWKWALCPGCGWQGDRDQGAWQRIAARGLAHQARTATDRVTGVMAVHTVVDELEARAVSTPAATRKTCRADRSKIGPTRLRPTRPVPRRRRTPSPAGRSRPAGQRPEGHAHTDRFRLPRAAGRNQGVTTISPPPPGPRRGERAADRHRPRGAALGAGFHLHAHATPPRREHVRAPDTPVRRGIILPI

SEQ ID NO: 60927 - protein, 440 aa, Bifidobacterium sp.
MSAYEAVRIRLDPTPRQTRLLESHAGGARFAYNLMLAHVQRQISLGEKPDWTLYAMRRWWNEWKDEIAPWWRENSKEAYGSAFEWLSQALRNWSDSRKGRRAGRRVGWPKYKSKRSSVPRFAYTTGSFGLIEDDPKALKLPRIGRVHCMENATERVHGRRIVRMTVSRHAGFWYAALTVERPTESVPAKNRKQKNRNRQVGVDLGVKTLATLSDGTTFPNPRNYVRMQRKLRHAQQALSRRDRGMSHGCGSKRYNRALERVRRIHARIAAQRADNIGKLTTWLADNYSDISIEDLNVQGMSHNRRLAKHVLDADFHEFRRQLEYKTARAGTRLHVIDRWYPSSKTCSNCGTVKAKLSLSERVYHCEECGLVIDRDVNAAINIQVAGSAPETLNARGGSGRQTRLECGTMRHPAKREPSGGDSRVRLGAGLGNEAMQMTSL

SEQ ID NO: 60928 - protein, 430 aa, unknown
  TnpB Polypeptide
MFEIISKSNNMYNVLDTEDGVVESYSFLDIIYYVQIGVKIKGVSLINDECVFEIDGLVCHKIMKGYKFRLYPNKEQQTFFQKCFGCCRFLWNNMLADKISYYEEYKESLDTQPASYKSEYSFLKEVDSLALASEYRNLNTAFKNFFRDASVGYPKFKKKHDNHKSYTTYNQKGSISIANKHIKLPKIGYVKMKQSQPILGNIKNATVSQVPSGKYFISFNVETWVAKLQRSDKDIGLDLGIKELVITSDKEHFENPKTLCKYEKQLAKLQRQLSHKKKFSNNWCKQRHRIAVLYEKITNIRKDNLHKISHKLVQENQLIVSESLKVSNMIKNHHFAKSIADASWYELTRQIAYKSVWYARFYIRVNTYYPSSQTCSCCGFKNPITKDLYVRYWTCPNCGTYHNRDENAADNILFEGKRIIESMMNFNNSD

SEQ ID NO: 60929 - protein, 548 aa, unknown
  TnpB Polypeptide
MKFDSQYSRSFPSDRLSDTKLKSIHDLAVLIRRTKNELSKIVNSDLLHYFKISKFDFQKEFRPLLIDKIPSNFYIQLCDDVSVAYANKFTQIKQKMIFKEILSLSILFYVRDSKKHRKGEIKEIKRKTRETRLSKTLTYLAKYGDDKIITWLPELLSKEVEPKKIKYYQQILACISKFGITRLMETALSRRDRIIKKYSEVPIEFKSLTFRGRSRLKGAILSYNKDFDSTIKAFINISWIERNSVMSIPVKYAKSFHGSMKQYQNKTDTFYKICFNDNGDIRIVLSCKGKRELPENKNNFVGIDVNTKHNLLQCSNGSSIDFDRRTMSKLADELKKVDELKAIDKDYVAGKRKTRIMNHLRREIHSKIRHSMSNMCKGFNASGVNHAVFENLDNGFGKSHAKTPDDLNQNRMMNELHLSSLKNEFDHIARNYGIATSYVHSEYTSQTCSQCGCVDSENRESQEEFKCVECGYECNADVNASVNIRDRVGLTVLRTSLLDEKINGSGVYEPKALPRDKVKETLLSLRKRPDSMDRLAKEPAFKSDFRFT

SEQ ID NO: 60930 - protein, 423 aa, unknown
  TnpB Polypeptide
MDELSQRVKTKRATKLRRSSMKINQIDFKVDDSKMSLSKRKLTDSIFTQVKYLTNDIIASNNICFYDTKIDKVPVIWSDKNKITHTEERSIEDLPAQVKQIVKINLISNLKTLSTCRKKGQKVGSFKFKSEVDTIHFYQHGTTWRFTKQKDYKKHSHNSIKLVGIGFVNVTGLDNPIINDIVEWGPAKLCRRPDGLYIQCTGFSEKKESKAPKGSVVGIDMGIKDQIVLSTGEKYNFTPNEETKKLKRLQRIYAKKVKRSANYWKAKKRFTKKHQKVNNRKKDVTNKFVHGLQQRFETICIQDENLKGWQSSLFGKAMTHGVLGRIKTRLKQSNTTRVVHKKHPTTKLCPKCGKKNSTNNLNDRTYLCESCGFTMDRDTKSAQTIACMGLVEDFISVPTERRDIKPVESLASVLELYTALYAS

SEQ ID NO: 60931 - protein, 423 aa, unknown
  TnpB Polypeptide
MKELTKRQISRKETKIRRSSMKINMIDFKVDDSKLSHTKRKLIDSIFKQSKYLTNDIISSGDAFLYDTKVKDVPVVWFDSDKVIHEDIRSLECLPEQVKQQVKVEIISNLKTLSSLKKKGYKTGKLKFRTEIQSVTFNQFGCTWAFPTQKDLRKHSPNTIRLALLGFINVTGFENEAINGIVEWGPAKLCRRPDGLYIQCIGFSEKKESKAPTGSVVGIDMGIKDQIVLSTGEKYNFSPNEETKRLKRLNRIYSKKVKRSANYWKAKRKFQKKHQKVSNRKKDVTDKFVHGLQQRFETICIQDENLKGWQSSLFGKAMTHGVLGRIKSRLQESNTTRVVHKRHPTTKLCPVCGSKNASNNLADRTYLCESCGFTMDRDTKSAQTIACMGLVNDFLVPTERRDIKPVESLASVLELYSALYASR

SEQ ID NO: 60932 - protein, 418 aa, unknown
  TnpB Polypeptide
MDVRRTAVVKLTVSDEQRDALHRTAEQYLYCTARTEPLITVGPTPLTPSVRPTSERCVTRSTPNFERRQTYRPSLFKPPSNALLKLSKRVSNDGKMDSASLNRRSPPKRWTTTRAARPSTGTRCRWQLLRDESNRRSFVLPADSPTPYERYVLSENYEFRESTLRYDAATDEFYLNISMRRTDGDDEVSEDTGHPDQTVLGIDLGVNSLAVSSTGTFWQGDDYDHWCREFEKRRGEMQHCGTQAAHKALLRLGKREEAWRKQYIHTIANELVSEAIEHDCDVIAFEDLNDIREGLPQAKWHHVWAFRRLFEYVSYKAPEQGVSVEQVEPNHTSQRCSRTDCGFTHPNNRQGEHFECQKCGYEVNADYNAAKNIGLRYARKRTHRLRSSPKSGNGDAQVDVRINGGTLNGGSHQPIAGD

SEQ ID NO: 60933 - protein, 429 aa, unknown
  TnpB Polypeptide
MEQKKMGSVTTTYKLHLYRKHLNWLRLTQELYHSVFAFYYEVLLNHQELLERSNYSLMRELEILTVGTKEMKKAEQKPEYPLETFPKLPLYFRRAVINGAISLVRSYQKNLENWEQNPEVFSCPSTARQFHAAPVYYKGMYKDFTESSICLKLYTGEIWKWVKYRYTGRELPKNAEWLSPSIKIGKKEAWLHVPVVETVGDIRTIAERMETEEKILAVSFPGNDVMAVCCVLDKDGKKRKSCFLRGGKELKAKRKQLVRKMEKVRKSRGKKERSEGEVVPERVYLEKIERLNEMYAHRISRKIVSFAQEEDIKVIVVPHYEEEIAFQKMRYFKVSEYDWIGRKIIRFLKYKAFQKGIVVGSVGAYHIADRCSECGSEIKKYNEGHRANKRYYGGKLYVCEKGHRGNSGENTARNIGKRFLERYQGIDEL

SEQ ID NO: 60934 - protein, 552 aa, unknown
  TnpB Polypeptide
MTFIRTSKILFKPSGPNGINQGKLNELSSFIDLCNVALNFYLVNFIECYELDKLFAIKSGTKNANRFTNKAIFSNKSKLTILNNIFYELSQKDTDDEKEIKYCFKRKLKFYPSGIGDGTDLRRIQVVEKKLEFNKQSPLSSRTLKSVENQAFAIIKSWVKQILKSYQFGYLSQKNKNEVKVYKKSHRRNLIKRCHQKCKLVKSIKNGKYQFKIDKFEFNSGNCKLLRRDSVVTDEETIGLFELSDKSPFDSLFILSSMYKRNSNILDNNKLYFPLKLHSHKHFNNLKNGIVANIQCKLEEISNSFLVSKDGIEVRFKLSSIAKEAEFKFNKVGIDQGQRKLFSAVSLLSDKENNLSKNNSFYSYLSETDLQVQLQNYTYKETCDKIARRQKGSKGFKRAQEHRKNLINQAVNILARIFNFEDDVAEVRLEKLRRLGEGKKKSRKLQAFNYADLRHKIERKCQETNVELTETSNAYRSQRCSLCGFVHKKNRLNGGEEFACLKCGFALDADFNSAINQIAELPQLYRNRKLYPNSSTGFYWLSSGVAYLDTTA

SEQ ID NO: 60935 - protein, 425 aa, unknown
  TnpB Polypeptide
MKLTYKFRMSRTRHLDVLCSISKKLYNQANWYIRQDFFHLENWLRYQDLNFILKNSNHYKLLKTQTSQQILKILDKNWKSFFNAIKERKKDKKKFNGRPRPPKYKKNCRNLLIFTNQNSKIKDNVITLTMSRMFKEIFPEFGNPLKITIPKYKNRSFEDYQQICILPRKKFHDVEIVYNKEIEKSKLEQNYYLSIDFGLNNLITIVENQNSKPIIISGKLLKSINRQWNKQKAKLYSIKDKQKLKWTDRLDKITIKRNSVLKDYLHKTAQFIVGYCLKNQIGNICLGELKGIKQNIRMGKQNNQNFVNVPIQTLKQRITYKAQLVGIKVHKVDESYTSKCSSLDLEAIQKYKKYFGKRIKRGLFQGSNYILNADVNGALNILRKVVGDGFIQNLSDRGCWFQPVQIRDMFQTSHEQFLLRSTNNS

SEQ ID NO: 60936 - protein, 483 aa, unknown
  TnpB Polypeptide
VRKTPVRATEEEKKKRKRKKKTKQTITRSVTHIRLIEANPGKLDALDHLVVAYLALTQQYVTLFCEAEPSPDKFAVPIFETELSDRWHRVAMQQAAGIARAFRTNRQNAYEAYLEDRADYAKAKAKAEASGAPLDPKRIEPEWREWKLPELRVPSIQANANVVVVEKSEDSTFDYWLRISTLDKGNPLRVPVKLASYQKQTIAGRTLNTSTTLHKRKGIWWLTLSFDEDVPLQTASEAPKVGVDVGIVHFITTSTNNEYGSFHGKMARQHKRNREKRRRKAKLRACLEKKGVPSERLPSTSSGTSQRLGRFVRQEINRAVNEMIKDHPNARIISEELNVASMRFKARAMNSYLYASNLGHIPEQIAWATAKRGMAAHTVKAAYSSQECPRCHFVARANRPHQQTFCCGVCGYKEQADRKAAHTLADRWGDKELVACRDKQAVKALLLKRHENWKHNNGLVVVQPAVQLGLWDLSQTSTDVAER

SEQ ID NO: 60937 - protein, 431 aa, unknown
  TnpB Polypeptide
MKYTNVVRVLPDKRQKQVLEIIGDRCAALWNTIQYRCRQAFFEGEPVPSYETLCSEFKEHPAYKALPAHIGQEVIKKARKAWDSFFALLRLYRKGEMERPPRIPRYWKDRRTRRRIFCIIPVKAPTSYSLNARCLSLTLPQDLRKGQGDRLVLHTKGVLRFHGTPKTLELKYDRVKKRWYAHQVVEVPEPVRRTRPEKRAALDLGARTLAALAIEGFHRQILFSGRGVWKDFLYWTKRIAEEQARLSRAGRRTSRQLRRLYQVRTRRLKHAFVALAAETTRILKRHRVTTLFFEDLTGIREDMDFGPGNLLVHNFWAFRMLRNLIEAACARAGIEVIPVEPRGTSSRCAVCGSPLERFVRHKVSCSKCGCVWHADANAAINILFLGSSKGHGAEATPLKPLALRWNRHRWVSRFESAAGTLYATSGSRMAA

SEQ ID NO: 60938 - protein, 330 aa, Bacillus sp.
MEVNQMIINKAYKFRIYPNQAQKILINKTIGCFRFVFNHFLSLWDHAYKETGKALTYGTCSAKLPAMKKEFVWLKEVNSIAIQSSVRNLADAYTRFKSKKNNVQSYTTKQTNENIAVVGNKVKLPKLGLVRFAKSREVEGRIVNATVRRNSSGRYFVSLLVETEVQELPKTQYVLSRRMKGSSRWNKQRVKVARIHEYISNTRKDYLDKISTEIIKNHDVIGIEDLQVSNMLKNHKLAKAISELSCSQFRSMLEYKAKWYGKQVIVVSKTFASSPLCSYCGYQNKDVKNLNLREWDCPSCCTNHDRDINASINLKNEAIRLLTARTAGLA

SEQ ID NO: 60939 - protein, 583 aa, Acidobacteria sp.
MRQGSAYQPLSYDIRLPDEIQADALRLLEVSREAINAALVQLWPYLDAFMQALPGPAWKQAELYVVQRSGHGNRLERCELEQAGRIMRAQAERKQVFLLIQPILTSGFIRPKEDKRPAGKNRKQIKEAISALQKSLDDDETSFVTMQNVVEQCCNFFLREGRFPTSYEELQPIPLLWVGLLTYAGDDGGAVGQAYRLSFDLDAGVALLSLRAPDAQGRFARDWYKRTITVPLPPCVVEQLRAGVQLAPTLRELVKADGSSVAVLDVMVQVKKAELTAWSDMDRLLGFDWGVHSLLTAVVLQTNPDAPEQPLQISRPLFVKTGGLDGHQARTRRQIDQLKAARDTLLPDDAKRADYEEEIRRCWRVYEARNRELAHLAANLLLLFASVWGCSLICGESLKTLKSTGRGKGVRGRWRNWRNNTTIRSEIWRILRYKSHLAGIRFRSEKPRGTSHTCARCGKPAQTYRSSRLPHRTEPVTWGRWLWCAHCGYNADRDYCAALNIARLGIAYLTHVQATTKGKAFSVTEIASIKPRPYIARGAVLLFPPQTDITRLLDAGKLYINGWKRSVTLRSSYETPLLLRLCS

SEQ ID NO: 60940 - protein, 385 aa, Glycomyces sp.
MSVQARHRAYRFRCYPTSEQAEQLARTFGCARLVYNKALDYRHKAYFRRRESVTYNQTSKMLTVWKRRKDLAFLNEVSSVPLQQALRHLQKGYSTFFKGQTDYPRFKKKRVLSGSAEYTRSAFTWSRGQLTLAKQTEPLKIRWSRRLPVDAVPSTVTVSRDAAGRWFVSLLIEEDIPTLPEREGAVGIDAGITSLLTLSTGEKITNPRHERADRDRIRKRQKDLSRKRKGSANYRKAQIKLARAHARVADRRADHLHKLTTRLVRENQTIAVENLNVRGMLAGHMLARAIADASWSSFRSILEYKADWYGRDLIVVDRFLPTSKTCSACGTLIESMPLTQRTFICPDTECGHTEDRDVNAAKNILAAGLVESRNACGDGVRHDPS

SEQ ID NO: 60941 - protein, 387 aa, Escherichia sp.
VKRLQAFKFQLRPGGQQEREMRRFAGACRFVFNRALARQNENHEAGNKYIPYGKMAFWLVEWKNATETQWLKDAPSQPLQQSLKDLERAYKNFFQNRAAFPRFKKRGQNDVFRYPQGVKLDQENSRIFLPKLGWMRYRNSRQVTGVVKNVTVSQSCGKWYISIQTESEVSTPVHPSASMVGLDAGVAKLATLSDGTVFEPVNSFQKNQKKLARLQRQLSRKVKFSNNWQKQKRKIQRLHSCIANIRRDYLHKVTTTVSKNHAMIVIEDLKVSNMSKSAAGTVSQPGRNVRAKSGLNRSILDQGWYEMRRQLAYKQLWRGGQVLAVPPAYTSQRCACCGHTAKENRLSQSKFRCQVCGYTANADVNGARNILAAGHAVLACGGCQQTG

SEQ ID NO: 60942 - protein, 566 aa, Streptomyces sp.
VGGLRELASPFVVPGPAGVAVRDRLRVSAADAVVLAEVGVFLGSLAAGDLAVRCRQGLAHDAAGWAVRKRELTGKSSARWAGSITKATHNQWALARRGQAAHMARLRGEIEWVEARLARPLGARADKREGLARGYGSRGEWHAKSRRLQMLKARLAVVEANWAAGRVHVVRGGRHLAHARHHLAAAGLSEQAWRERWQAQRMFLAADGESGKRFGNETIRITDTGQVSIKLPAPLAHLANAPHDRYVLDATVRFQHRGQEWRDRVTANRAVAYRIHHDVLRGRWYVTASWQRTAAPILPLDAALARGVVGVDMNDDHLAAWHLDTHGNPVGEPRRFFYDLTGSSEHRDAQIRHALTRLLHYTRRCGAAAIAIEDLDFTDGTSREKHGRNKRFRRLLSRFPTARLRARLVSMAAEQDIAVVAVDPAYTSRWGAQHWQQPLTTPTRKISRHDAASIAVGRRALGHPIRRRTAPPHTHRSDGCGHRTVQAASDTQRREEARPRIPGPRTRSVSPDAERKRATRTSNTVRDVRSDQVRVQDSLLLTDRERSAPTGSPAPPPCARRMARKR

SEQ ID NO: 60943 - protein, 421 aa, unknown
  TnpB Polypeptide
MSQKAFRTQLRPTKGQVETFLHWAKVRRGVYNWGRSVKKTRYERHGESVNRQYLRGLASDKKERPGFTHWSDPPFRVIYYALKDVIEAFDGFFDRVERGETPGYPGRRYEGDPTFSVYGNDSGFHVREGEVKIPCMDEPVALEEKGYIPTGGNYNRVTVKKDTGRWIISVGTAVENPIDESRLTPEEQRPELLAVHPGVRVWVAMREKFARAEFPGTFPDTGEPFGGELPTGKTDSDIRHDLPMDRMFDLMNRIDRQQRALSRRQKDSGGWHRARQNLARTFQQLRHLREDATHKMTAKICYDIRPKKLIIQDWNVADLMERPIGDLPRRVERKVKRRMANANIGELYEQIRYKAGWAGVEILEVPASVEVSQRCSRCGTVNEDLGGSKMLECNGCGLEIEREVNALNNYFLEHEAEQVAA

SEQ ID NO: 60944 - protein, 381 aa, unknown
  TnpB Polypeptide
MLKVVKVRLYPNKAQQQLIHKTFGSCRYVYNMLLDAKIKAYECGDSLSAYELKKRLVPMKNAKGGEFLKEVDSTALQNSVLKIDIAYKNFFRRVKLGEKAGFPCFKSKHNSYQSYQSSTASIKENRLYLPKIGKVKAKFHRGEIIGKIKTVTISYEANQYFASINYEDGLQETIGSNNGKSIGIDVGVKVFAYTSDNQKIKHINLKKEIANIIKAQKILSRRKKGSKNRQKAKLKLAKKHLKLKNKRNDFLHKVTKKLSENQTVAVENLMIKNMSKKAKGSIDNPNMRASAKSGLNRSILQQSWGKFFELLEYKLKRNGGELIRVDPKYTSQKCSSCGHISKENRQTQGKFICTKCHTTLNADYNASVNILNAVGTTVKAS

SEQ ID NO: 60945 - protein, 302 aa, unknown
  TnpB Polypeptide
VNLDLEPSKEFYKLLARGFKPTSHAKIKLDRKNRRAIFHLSLEKKVEIYKPENIKPVDVNENSVATLYEAFAVILETDLAETTLGYSYRKESIQRRNGSGGKEARKAMEKLKEGKKKRDYRMKTENLIVRDALRTRGVIVIERISGEDIRVMIARYRNRQLRHRIYQGALKGELNAIIDKAREYGILVLVVDPRNTSKICPIHNALIEYGEDRIGVCSKGGERWHREVVALINIYLKALEALYEGYVQKGFGVLSLDGSSMPLGSTAINEPIEIPRSLWGLEVPRWPQGYNNIPVDQEKQQP

SEQ ID NO: 60946 - protein, 307 aa, Escherichia sp.
  misc_feature (138)..(138): Xaa can be any naturally occurring amino acid
VKRRQAFKFQLRPGGQQEREMRRFAGACRFVFNRALALQNENHEAGNKYIPYGKITVSQSCGKWYISIQTESEVSTPVHPSASMVGLDAGVAKLATLSDGTVFEPVNSFQKNQKTLARLQRQLSRKVKFSNNWQKQKXKIQRLHSRIANIRRDYLHKVTTTVSKNHAMIVIEDLKVSNMSKSAAGTVSQPGRNVRAKSGLNRTILDQGWYEMRRQLEYKQLWSGGQVLAVPPAYTSQRCACCGHTAKENRLSQSKFRCQVCGYTANADVNGARNILAAGHAVLACGEMVQSGRSLKQEPTEIIQATA

SEQ ID NO: 60947 - protein, 629 aa, Micromonospora sp.
VDEESGEVLSQAVLAQRVGWCADLVVGMVSGLLVERWNCADVEVLASGHDAGGRKLPSNAWMALRRLGWTVTAPVGVRVNDRVVRMAQEQAGRVLRSASWRAGLIAGVLATWPDDPRQRTAQEWEQVRKTVPGGEHLPSSVIKSRTRQAARFLAVNGRLPVDVFELEGVPRVARMLLLAACDRQQATIERSDTDPARVLLRLQLPTRPDPRSYRDWTWVACPISLPPTVPASAVLHLPTLRVTGGQVRADMAYSHPVPKARRTGHTVAVGVDWGLNTLLSAGALRLHEGGRITALGAGGQFRAAGVLAKQHRLRRHSERLHAKADHYQRLIGVDSRHQLVGKHAVLRDEIRHVSDRPTNLNAALAWAAARWAVDQAIAARATVIYVEDLRSLEAKGMGATLNTRLSQQVRGQIVDRMRHLAAETGIAVVTVPARNTSKHCPQCLTPLQHCKAPDKPTVAGWKWAICPHQSCRWQGDRDQGAWRRIAARGLTHQAKTATDKTSGHMVIRAVVDKFETSAVITTSHRGDRSKTGPTRRKAPRPAPRRRRAPSPTRPHSRAGKRPEGHAPTDRPRLPRAAHRHQGVNTTSTPTTGHQPRGAALGAGFHFHAHASPPRWETIPETPSDSGSLS

SEQ ID NO: 60948 - protein, 427 aa, Micromonospora sp.
VKVHAGRRYRLYPTEGQAERLTSWGHTCRWLYNTALEQRQFAWRQRKTTLGVTAQCAYLTEAREELDWVADLPAQSGQQVLRQLDQAYRNWWNPQHPAGAPTHRRRSARLSVPFPGQAIQVWRLNRRWGAVSLPKVGVVKFRWSRPLGGAVRNAVVSFDGVAWYVGFGVHIDVTTPEMHARPDTVVGVDRGVKVALAMSDGRMWNRTFTSPGQERDLARLKSKAGRQDTTRRKRGAKTSNRARKVRAEIARAEAKTRNRRRDFVMWAANRLCAQHAAISIEGLNIKAMTATAKGTVEEPGTNVRQKAGLNRAILDKGWGLFQVALANRARITGTRIVKVPAAFTSQQCSRCGNTNRNNRESQAVFRCGSCGYQANADVNAAINVRDAAEAAPQLTGRAARDRGRPAPCRPPAQRRRQPALEAGISRH

SEQ ID NO: 60949 - protein, 413 aa, Scytonema sp.
VLVLEYKVKGKRQQYQAIDEAIRTTQFIRNKTIRYWMDAPREAKINKIALNNYSTALRKEFKFVEELNSMACQAATERAWSAIDRFYGNCKSKKPGKKGFPRFQRDNRSVEYKTSGWSLHPTKRRITFTDKKGIGEVNLLGKWDIHTYPIKLIKRVRLVRKADGYYCQFAVDIEVKPEQRTGNGELGLDVGLEFFYSDSNCHHEENPRFLRKAEKAIKHAQRQIYKKEKGKNQRRKARQRYARKHLKVNRQRNEHSKRLGRCVCKANALVAYEDLNVKNMVKNHCLAKSVNDVAWSLFRRWLEYFASKFNTTVVAVNPRMTSQKCSDCGAIVKKSLSTRTHRCACGCELQRDVNAAINILNLGRQARDGQSRSNATGLVTSTLVGESLLEQVTRKNVESPGFPLRCDPFARNE

SEQ ID NO: 60950 - protein, 452 aa, Methanococcaceae sp.
MRGGHFIYTAPQNYIWLKVHKIMFIRTTVNFMQVARVLTINLTRSLNKEQLTIINHLTYSASKLWNVSNYEVIQRDINPNKIDTQMKNNFWFKNLHSQSAQAVCQKLTIAWNNFFKQHTKRPRYQPKDGHYPVKWKKQGFKIVGNKLRLSLSKQTKNYLKGKYGIKSKYLWVRLPKALPLDVINGLKEIEIVPQTIYGITYYILHLIYKKAVIPSPAKENNILSIDLGIKNLATAVTNTGRAVIYDGKRLISKFRWFAKTKGGLQSELRRSGELQNPKDFVQSTLTKQELKNNKRLSRLTVKEKSYTKDYLHKVSKMIVDFAVENETSKIIIGELNKGISNINIGRKNNEKLHRIPFGRLVSMIMYKAEEKGITVEQVNEAYTSQTCSNCGVVKKSNRKFRGLYVCSNCGTVLNADINSALNILKKVYGVALNLLNGDRGSGLGHPCRVSPY

SEQ ID NO: 60951 - protein, 419 aa, Halonotius sp.
MEVRRTAPVKLDIPDQRREDFHESAQQFLHCANRAAAFCWDDTDYKACVTANSTARDALYDELRAETDLTANLVQEAIRRAVQAVTGCVERWKQGKRVSQPEFTSWSMVYDKRSATFYRNKVSLSTVNGRVECDFELPSDSPTPYEEYVLSEDFEFRASTLQYDKATDEFYFHITTRKYDSENDGDKHTEVSEDIGHQTVLGIDLGVNSLAVASTGRFWNGDEYDHWCREFEKRRGEMQQQGTQAAHNALLRLGKREEAWRKQYLHTVANEIVTQAVEHECDVIVFEDLSDIRERLPQAKWHHIWAFRRLFKYVEYKAPERGISVEQVEPNHTSQRCSRTDCGFTHEDNRDGEQFCCLKCGYEVNADYNAAKNVGTRYSRTEHHRLRSSPTSGSGDAPVNVRINGGTLNGESYQPIAGD

SEQ ID NO: 60952 - protein, 436 aa, Fischerella sp.
MEQVLTLVCKLNPSQKQAEEIELVLAAFASACNYANQKVKPQITSKMTIQNLVYNEIRALFGLSANLAVRACARVGANRKTAKLKNKPVKAFKPTSADYDARIFSFREKDWTVSLTLMNGREHIKIDAGNYQRGKLKGKKPTSAQLCKHRDGNYYIHIQIKDEAPEPIKSNNVIGVDFGRRDIAVTSNGDKWDGKQINDVRDKFSRVRSSLQKKATKGTRSTRRRVRQILQRLSGKERRFQQWLNHNISKSIIQDALKNNAAVAIEDLTGIRERTNQKPRNKTERRRSNCWSFYQLRSFLEYKGIQFGVEIIAVPPAWTSQTCHQCLHIGLRSGKRFKCTNEACSWSGDADYNGSKNISAIGAVFVNQPRGSNYLCCNLSTDSSGLLKARTVPDKGSVWVVYPVLPHHKLSQSHELLLNVARLTPDFCVQRGYCKC

SEQ ID NO: 60953 - protein, 433 aa, Lactobacillus sp.
VDKMPEYYIKTKSYELFPNKQMKAVFDRNCDYRRFCWNEALALWNDEYDIRQLMLDKEIKAELRKAKSQRKFTAEQEEMLASYPAPNWKAIRNKLVAEKEDWQFSYSAHLLQLAVQDLGKAWQNFFNKAQKDWGKPKFKSKRAPKQGFKSDQARIVNGKLVLEKPQGLKANWQPIKLSEKPFDYPTGTMSFYRVRDRYYVAIPYKIPKDRFEVKKKTGKATGVDINVGHFNYEDGQLLIIPKSLTKTYSKIKHYQKQLAKKRTVNGRIKGAQSKKYLKTRIKLQASYQRAQNIQTDLMHKFTTELVNNYDQIAIEDLEVKGMLMSHVASKGMHRSMFGLFRKLLTYKCEWYRKELIIANKLYPSTQRCAACGLVKKGDEKITLQGNKKHGTKHNEFVCYNPNCPNYNKKVDRDENAMANLTLLVKHPELNRAL

SEQ ID NO: 60954 - protein, 442 aa, Tengunoibacter sp.
MAKTTITLRQTLTCQPNHHEWFATNQALFNRVVCFYFDVINAHENLLQLSNKEALTALEKLTHTTKETPDPIMPLQALAPDIPALFRRAAINAALGSARSFFSHLYRWRAQKTKAEARGKKYKARPPVPPRTWNKSVPLYAGMWKERTAETTMVKIWNGTCWNWVKVRTQGRDVAEGYELGSPSLVCKGATWRLHTPLEKTFKGPAKIAEQVTDPDTKLCSVDLNFGENLAVCVIQTAKGTPLASTFLKGGKELNGFRKQQLGKIARNRNKTGLIAEGEQDNAALWCKIRDRDEDLAHQISVRIIQFAQQWGATILVFEHLGNLKPEKGKYSRRGNSKRAFWMKGRIFAYSKYKAYNAGILTSRVSPRNTSRECARCHAPVARYRQGQPAQGYTVGAPLVSCSACSMKGNADRNAALVVGQRLITRHQKKPSTPHAGHERDA

SEQ ID NO: 60955 - protein, 434 aa, Tengunoibacter sp.
MHLVEQHVIQKTDARFPTIDAACFASKNLYNAALYALRHHYIWHQTFLTSVEMDKRMQSHEAYQALPAKVAQQVLRVLEKNWISFFASLAEWKNHPEKFKARPRLPGYLDKTAGRNVLIYTMQAVSRSKRTLGRRIIQPSGLAIQVKTQQDPSSIDQVRIVPKSGFYVVEVIYEPKPNLSAVDPAWVAGIDVGMNNLAALTSNKPGCVPILVNGRGIKSTNQWYNKRLAQLQKARGRPGFTRQMQALTTRRTRRIDHDLHHASRLLIDLLIADGIGTLVIGKNEGWKQNSHLGTRTNQQFVQIPHARFIEMLTYKAQRVGITVILTEESYTSQASFVDRDPLPPYQKGKATEQRFSGKRITRGLYRTKEGRLINADLNGAGNIVRKVAPNAFGSDGVEDGRGHEPVVHPVKAVIPFTPRKRKRLPGPVSGFASV

SEQ ID NO: 60956 - protein, 403 aa, Thermosporothrix sp.
MLVYEYKLSGSRQQYAAIDEAIRIVQFIRNKSLRLWMEQRGTSKNDVQTNCAVLAKAYPFASRLNSQARQAGADRAWFAISRFYENCKNNKPGKKGYPKFQRNNRSVEYKGTGWKLDPDGRHILFTDGCGIGRLKLIGNPNQRIQEFPIKQIKRVRIVKRADGYYTQFCVQTERKVEHVSSGKQLGIDVGLKSYLTDSEGNTVENPRHSRKAEKKLKRLQRRLCRKQKQSANRKKARKALAKQHLKVQRQREDFARKVANTYVSSCDLIAYEDLQIRNMVKNRKLAKSIHDAGWGLFLQWVKRYALLHGIPVIAVAPHFTSQKCSDCGTIVKKSLSVRTHVCTGCGIILDRDHNAALNILHEALQSVSNGTVGHTGTCPTGQNASGDLASPASSKRRRGTSGR

SEQ ID NO: 60957 - protein, 379 aa, unknown
  TnpB Polypeptide
MAGKASRAEGQVIQYTTIKARLYPTPAQAELFEKTFGCCRYLWNQMLADEQRFYWETGAHFIPTPAKYKKGAPFLTEVDNQALIQEHNRLSQAFRQFFKNPESFRHPNFKRKKDDRDSFTACNHVFESGPTIYTTRDGIRMTKAGIVKAKFPRRPQNGWRLKRITVEKTRTGKYYCCILYQYTVQRPAAAIPTPETTLGLKHSPLHFSVDDAGRMADPPRWLSQSQEKLGRIQKKLSRMEPGSKNYQEAVQKYRLIHERIANQRRDFLHKESRRIANAWDAVCLRDDPLDEMALGEGSGFGMFRELLRYKLERQGKPLILVDRYTPTTRTCSACGQALDSVPSRTWACPGCGAVHDREVNAAKNIKLEGLAHLPTAGPA

SEQ ID NO: 60958 - protein, 367 aa, unknown
  TnpB Polypeptide
LNIAYRFRIYPTEEQKILLGKTFGCCRFLYNQMLNDKIREYKKTKKLLKNTPAMYKKECSFLKEVDSLALANVQLHLEKAYKNFFRDPKVGFPRFKSKHHSKNSYTTNVVNGNILVEDNRIRLPKLKWISMKKHREPAENCRLKSVTVSMEPSGKYFASLLYEGYSCENQAADRDYSNAKILGIDYAMQGMAVFSEEIEMEEAGFFRKNEKRLAREQRKLSRCVKGSRNYVRQKKKVARCHEKIRNQRKDYLHKLSRRITDQYDIVAVEDIDMKAMGQCLHFGKSVQDNGYGMFRNMLDYKLAWKGKKLVKIDRFFPSSKKCSKCGKIKKELGLSERVYRCTCGNEMDRDRNAAINIREEARRMLAV

SEQ ID NO: 60959 - protein, 394 aa, unknown
  TnpB Polypeptide
VSQRAGLKHYTVRRLKIGQTARMDALARAAGDLYSRAVTSYWRTVRHKGLWLKPKHLMRWHTSAALHAHTSDACVQSFFAAMDAWRARRTTDPDAHPPRRRKRYYRVQWKASAIRVKGAMLHLSNGRGNAPLVVPWAHGLPVQVEMGWDGRQYEVRATYAGEATTTAPVENGTVAGVDLGEIHPAVAHDGERTVIMNGRYLRAVRRYQNKTRGQLQALLDRKKKGSRRWKRLARSKKRQQRRWDHQVRDIAHKITSTLVSTLHNAEVQTVAIGDIRDIRKRVDVGHRGNQRIHQMPSGMIRRMVTYKAQRLGMAVVIQDERYTSQTCPACQVRHKPRGRAYRCQACGFVAHRDSVGAYNIRQKYLGAVPVVGVMASPTVGVRYHAHLSRSLLLL

SEQ ID NO: 60960 - protein, 402 aa, Salmonella sp.
MKRLQAFKFQLRPNGQQEREMRCFAGACRFVFNRALALQNENHEAGNKYISYTKMTSWLVEWKNATETQWLKDAPSQPLQQSLKDLERAYKNFFQKRAAFPRFKKRGQNDAFRYPQGVKLDQENSRIFLPKPGRMRYRNSRQVTDVVKNVTVSQSYGKWYISIQTESEVSDPVHPSVSMVGLDAGVAKLATLSDGTVFEPVNSFQKKQKKLARLQRQLSHKVKFSNNWQKQKRKIQRLHSRIANIRRDYLHKVTTTISKNHAMIVIEDLKVSNMSRSAAGTVSQPGRNVRAKSGLNRSILDLGWYEMRRQLEYKQIWRGGQVLAVPPAYTSQRCVCCGHTAKENRPSQSKFECQACGYTANADVNGARNILAAGHAVLACGGRVQSGRPLKQEPTEMIQATA

SEQ ID NO: 60961 - protein, 348 aa, Rugamonas sp.
MKLVYRYRVKSLSGLLNQQARTVNFVWNYCNDRQKDALRFGRRWHTGFDLIKLTTGCSKELGLHSGTVNDVCQRYAASRAMSHRPYLRYRGRKAMGWVPLKGRELKREGNAFRFAGRTFRVFYSRPLPEGKILDGTNFSRDRRGNWFLNIVVEAEPAPVRAPARAVGIDLGLKTLATLSDGTTIEAPRFYREAEAALARAQRARKKRCIKAIHAKIANRRHNFLHTRTSAIIAAFDYIVVGNVNAQGLAKTSMAKSVYDAGWSSFRTQLAYKAVKHGAWFEEVDERFTTQVCSHCGALPDTRPKGIADLGVREWCCSDCGAVHDRDRNAAVNILRRGRATLAVGISAP

SEQ ID NO: 60962 - protein, 488 aa, unknown
  TnpB Polypeptide
MLVIFKYTFNKSTIRMPASTQLISDEERGPISPANSDAGVHESEGGKEEFLVRAVRASKERANIVRLLPSGAQERKLMRLADLSAKLWNELNYERRQQWHGGQRVDLEGAKRKYREKYKGALGPHNADEVINKNNEAWGSFFSLLKAKKEGRLPKHERVSPPGYWKDREEGKRRLIFVVAGDSYVVDEVNHTVRINLGKKKRPLEIPFAGRLKWYGKQGRMEIHHDGAKRAWHAYISVKVGAEETRNKKPARRIVRGERKSIRIAEPKGKVAAAVDLGINILASAVTSTGAWLLYRGSRAKEDFFYLNKEIAEVQSKADSARNSGDTEEFLRQNRRRRRLFRKLVRRMAHLYWNLANHLVRGLWELGVSKIYLGYPHDIAQDKGNKLTVNMWRYRELMDAIELKAQEYGIRVYEVLEYNTSNHCAIHGAEVTRGPRGVVRCPLGHRLHSDLNGALNILRRGAGAIPTTIKKPHSFLVDHGGVAPVKRA

SEQ ID NO: 60963 - protein, 500 aa, unknown
  TnpB Polypeptide
MYPDETQEGKLHELFTIYNRMKRIGYNLLFHGEDYMTARFGEGKTIQQCLMSLCHNNPYVNTILIDNKQTLETQKTWLKKQRKYMTKQLKTINKKINKIKEQDTHDRRLKGLYARRSSIMARLSNLHLEPVVFGTKKLFRQRIRGTITREEFRIRRDSSFSCVGKKQQGLKNLNLKILPDKIVKIRTFSKQKGRKWLIIPMSINFVQEKWFQEVLNADKYTVTVKRKFFKEKLRYFVHVSYELPEPTPRYGYQHGAIGLDFNYNFAALTNVDQHGKLLSYHTISFGNLCSYRTNKRNDYISYKMDKVVNYCINIGKGIVVEDLQFDQEFSYNTKRNRKLSNLKTTALQLLERKCKKRGVSFRKVFPGYTSIIGKYKYSGLHNLSGHHVASYVIARRGLGFKEAIPAIYDWVLSHVGEFIKPRVKQGSSYRRWTMVHDLFKHSGITSFKIAEILRKTVLMKHVLHSVTSAQPDNLKAGLSTNGKIDDYYKTWTFVNNFTAL

SEQ ID NO: 60964 - protein, 378 aa, unknown
  TnpB Polypeptide
MKILRGYVFRLYPNKEQETLINKTIGSSRFIYNYLLNDRINYYKETKKSKTMYDQNKMIPNLLEQYQFLKEVDSCALRTASFNLEDAYKNFFNKSGFPKYKIKGIKESYKTNNIKSTYKEKEYNSIEINLEEKTIKLPKIKTIKIRGYRNLKEIKGNIKSAVIKKESKKYYVSILVEEELVRPSFVPNKIVGIDLGIKDLIVTSNNEKIKNTIKINEKRIKGLQKALSRSQKGSKNRNKIIQKIQRMWQKIKNARKHLIYQITNKIIEENDIIAIEDLDIKKMYQNHRIAKQLTLNPLNELVRVLKYKTEWKNKRLIQIDRYYPSSQECNVCGYKNEQTKDLKIRNYECPKCHNELERDLNASINIMFEGIKQYMKII

SEQ ID NO: 60965 - protein, 407 aa, Streptomyces sp.
MQLRYAFRLYPNSGQQRALAKAFGCARVVFNDAVRAREDARKAQQPFPKIGELSTRLITQAKQTTPRSWLGEVSAVVLQQSLRDVETAYRNFFASLKGTRKGPKVGAPRFKSRKDTRQSIRFTANARWNITDSGRLNLPKIGPVQVKWSRTLPATPTSVTVIKDAAGRFFASFVVDTDPATDAARMPGTDQAIGIDLGLTHFAVLSDGTKIDSPRFLRRAEKKLKKAQRKLSRTQKGSRNRDKARRKVARAHARVTDARHEFHHQLSTQLISENQGIAVEDLSVVGLARTKLAKSVYDAGWSSFINMLQYKAERYGRTLVKIGRFEPTSQICSTCGVQDGPKPLDLREWTCAACGAVHDRDVNAAINVKTAAGLAVSACGAPIRPEPVLAQREETGSHGFPTQARAA

SEQ ID NO: 60966 - protein, 418 aa, unknown
  TnpB Polypeptide
MLLSKKTSIKVSREYANLIGHMCYAASKLWNVCNYERQHYKETGMEQYPDWYYQKKAHKEDLWYKQLPSQTAQEVCKLLEKAWKSFYALKRSGGIETPRPPRFKQESIPITYMQMGIVHERDTDRVRLSLPKTLKKYMEETYQIHENFLYLENKIFRGMDQIKQLRIYPPEKRSCKIIVVYEVPDQEELPQNGHELSIDLGLHNLMTCYDSENGKTFILGRKYLELERYFHKEIARVQAQWYGQQSGKGVKHPVTSKHIRKLYKRKQDSVTDYLHKITRYLAEYCREQGITCVVTGDIRNIRREKDLGHRTNQKFHSLPYNRIYIMLEYKLKRYGIRFIKQEESYTSQCSPLSPKVGKRYAEPSNRKERGLYRDGNRTYNADAVGAYNILRKYRSVSGVKRELSVTGLKTPEIIKVAV

SEQ ID NO: 60967 - protein, 426 aa, unknown
  TnpB Polypeptide
MNLTKKIRIFPTPEQEEVLWKLSEKCRLIYNFALAERRHAYRQGIKDVNYRKQQNDLPIIKKHYPGYNWVFSKVLQYVLRTLAADYESFFALRKNGHTDACPPRFKGKNYFTTIVYNQSGFKLKNGKISFSHHYNNIPLEFAIPEKISFDDKKVKQVTISAQRTRYFVSITYQVEEPPYVDNGRYQAIDLGVTHIVTAVNSQGKFLVVDNQRPDKYWNPKIARIQARRDSCKKFSNRWKLFNRIKHKYERKRDAQLKNFQHKLSTKLVNNTKANTLIVGDLEVKVMAQSTKVPNFMKSGLNRATQNTGTLGRFVQFLTYKSKRVGKRVIEFNERNTSRECYVCGKLHYMPVWQRVMRCECGNVIARDKNSCVVLMKRYLSQNAKWTGYQTFLDNLRHTAKGKTKVPSPNFGYGSEDSQEAPSVRIG

SEQ ID NO: 60968 - protein, 404 aa, unknown
  TnpB Polypeptide
MEPVSRKVVYRLYPSRSQDAALLDMLGLHQRLYNAALEQRIAAWRLRRKSLSAYVQMRDLTDLRAEDERYAGLNAQSAQVTLNRLHLAYGAFFRRCKKGETPGFPRFKAFDRFSGWGYKTHGDGFGFTPGDGNRHGKLRLSGIGTIAVRGRARTPGIVKTCEIQHKAGRWYASISILCEPAREAGTDAVGLDWGVQTFATLAHENGTYSSVENPRFFTEMKVALETAQQNLARKEKGSKNRMKARRIVAGIHRKTAAKRHNFLHQASANIIAHCNLIATESLTIKNMVRSAKGTLESPGRNVAQKAGLNREILATAPRAFFDMLRYKAAEAGIAFIEVPSRKVKPSQTCSGCGARRKKTLSERQHVCVCGLVLSRDQNAARVNLLWAIAQTGREPTGCLASIAS

SEQ ID NO: 60969 - protein, 366 aa, unknown
  TnpB Polypeptide
VWNQTLAFNELRHDRGEKRLWYSGMAAYLRYLKTEYPFLAEAHSQCLQQTLMDLGKAYQRAFDPRLAAQLPRFKKKGYCASIRFPQGFKLNGKGIYLPKIGWIGFRKSREILGKAKNVTVSLDGGHWYVTIQTEREVAEPIHRSNTVVGLDLGITRFAALSDGTFIEGANAFKKHEKRLAFYQRRMARKVKFSANWRKAKAKVTRIQRTIGNVRSDQLHKASTIISKNHATVVMEDLRIANMTKSAKGTIEAPGANVRAKSGLNRRILDQGWGEFRRQLKYKLEWGGGELALVNPRNTSRTCSCCGHISKENRLTQATFKCIMCSHAANADTNAAVNILRRAGQARIACGDSPLGESVKQETQRAA

SEQ ID NO: 60970 - protein, 265 aa, Moorea sp.
MHRQIPDGFTLKQCTIVKKADGWYACFSMLDDTVPKLLPVDLVRSAVGIDVGLEKFLTTSDGEAIAIPQLYRKAQNRLAQAQRVMSRRVKGSKNWQKAKQKVALLHLHLTRCRQEFNYQVAHWLCSKYDLIAHEDLNIKGLARTKLAKSIYDAAWGSFLEILQAVAVKRGLLVQKVDPRRTSIECFNCGKRVEKDLSDRVHHCSSCEVKIDRDWNSGINILNRGLMAVGLPLNGCGKSLQDIVRESGGRRRGTASLNCEVEKLTS

SEQ ID NO: 60971 - protein, 291 aa, Ferrovum sp.
MYSRLRLGAYQEPLRFKGKIMSATVSRVAKHWYASINVETLDETKSKTESQGAIGVDLDVSALATFSTGEKVSGPKAHKALTPRLIRLSRSLSRKKKGSENRKKAKAKLATLHANITNIRRDSLHKLTTKISSQFDTIGIEDLNVNGMTKNRHLARVVSDMGFFEFRRQLTYKTGINGGYLFVADRWYPSSKTCSCCGHKVEKLPLSVRSWTCLTCGVEHDRDVNAAINLKSMAVSSAGGCQPYQHTVDCTVSVCGEKGAGLILANQTKPASVKQKLSREVCSVMSGFAQV

SEQ ID NO: 60972 - protein, 423 aa, unknown
  TnpB Polypeptide
MQLTERHLIKPNHELYRTLDDLTFKAKNLYNHGLYLYRQSYFEHKKNPDVPVLSWADIDKSLRAQGHADVRALPSKVANAVLKNLGENITSFWKLVRLKNKDGLAQKPRLPHYLHKAEGRFPVSFNYQTFGTKRGTNNELFLCPKGLNLPIPTKVGNPKQVRIVPNRNNFIIEVIYDVDERAPKSTSKYAGIDLGVDNFATITFTTENNPLIIKGLELKSVNQGYNRLISKAQELLPDSLKTSKPIHRLWSRRSWILKTKIHQMTAFLATLFDEMQIEKVFIGKNTGWKQGLPFGKKVKQRFAYLPHETFIEQLQYKCQLRGITVVVQEESYTSKASFLDGDDIPVYGETEKPKFSGRRIKRGLYRAGNGQLINADVNGSYNILRKGLANNQLSFNVDNPLIHPLVVKGISKEPNDKLVQLYM

SEQ ID NO: 60973 - protein, 412 aa, Microcoleus sp.
LPLFIHYFCAIVVSVRPSKSMLVFEFKTYGNLEQFAAIDEAIRTVQFIRNKCIRLWMDAPKTGKYDLSKQSAVLAREFSFADKLNSTARQAATERAWSAISRFYDNCKAKISGKKGYPKFQKDNRSVEYKASGWKLADDRKSITFTDKNGIGRLKMKGTRDLNFYQPDQIKRVRLVKRADGYYVQFCIQIDREEKIQPTHKTIGLDVGLESFYTDSLGNKVENPRFYRTGEKKMKRSQRLVYRKVKGSKNRRKARVKLARVHLKISRQRKDHAIKLARCVITSNDVVVYEDLRIKNLVKNHCLAKSINDAGWYQFRVWLEYFGKVFKRATIAVNPAYTSQECSSCGSIVKKSLSARTHICQCGCKLDRDHNAGINILNSGLGTVGHTGTFALDASNASGEPTSILVGANLLG

SEQ ID NO: 60974 - protein, 593 aa, Streptomyces sp.
LHQARLLRPAHRRRARQTSAGGPARRHGRAPHRGRPGRRHGPGRRAAHARRSQEGPRPLRRRPPQPASRRPDLRLAAQSRTRQRRPDARRVGRLPRRLRQPGLRCRLRRRRPGHQGIRTHARGLLPLGLQQTPPPGHHDLRGQQPPRQRLGSGHLPAGPRPRHGPPARDPRPGPRMGPRDLPLLAQPRALRPRPTRRGTTRPAPARAGSSGLRLTQGVSWVLLLRVQKRCERREQGGGLLLHHKVAAIGDGDGLCPGCDIMQCGCQAPAGRTLAAHREHRHRQRRARTHPDPVRLAVGEQRPVVPERGVQRVAAGVRPGVRGDGLVGDDAGCGRLSGEPSAEELRLVAVQQHRRHFRLHEQPEVPQPAGGHVHRLFQAQARQREVDEGEPRDPVRVVPGEAERDHAADVVPDEPDRLAHAEFVEQAAEVPGLVILGIPVRRPFGLAGTAQVRGDHPVTRADERRQQRQPGPRGRLARAISDAAWADLRMMLEYKCAWYGRDLVVIDRFFPSSKLCGGCGTVAAKLPLNVRAWTCEHCGAVHDRDVNAARNILAAGLAASACGDGVRPQRESSRTGRSSVKQESQRATAGIPRV

SEQ ID NO: 60975 - protein, 523 aa, Mycobacterium sp.
MGTFLGSVYRRELAARIVLGRMDRRQHSVWRACRKQQLTVVSSSRWAGAITRAVEDQYQLGMRALTANVTDLRSAIAVLERRCVLRPNEVAAPDPDVAGGPRRRSRRPVSGYRSTAERFAKTRRLAVLRDRLAAAETALSAGKPSVTVGGNRLWRTRNNLAAAELTVAQWRARWDAGRLFLTADGESGKTGGNETIRVDEQGQLRVKVPAALADQLGSHLTIAAPVAFNHRAGQWADRVAGRQAVRYDITFNPAKGRWYLDASWQTAPAQVPGLEQLRAGPVLGVDLNADHLACCVLDGSGNPVGEPATIAVKTAGLRASRRDGRVRAAITTLLDLAEHRQCTAVVVENLNFADARTTGRETLGRGKRGKAFRRTVAGIPTAKFRERLTSMASRRGITIIGVDPAYTSAWGRQNWLKPLQQQTSDPATITVHHGAAAAIARRGLGTPIRRRPAGPRTQQRMRAGTPPARPNRAPGTTRRCRSSGSPPGPQRRQGPTVHQKTPTVSGQHRSGRNTGQNSVSLSA

SEQ ID NO: 60976 - protein, 411 aa, Natrinema sp.
VTTTATKTLEATLAPPTTGKEQRLERTVATYRRALSDAFESGADTQAAVNDTVTSYTLTSYAKDALKNYVPQLRRTYNASELEDDHPVRFTNRGFRIDHSDERAREFCWRVPQAGRGNAFWIPLRINPEQESLWFDLLDGDVSVGEFRLQQYRTNWVLHVTVEYEIAEPETPDDPTRIGFDIGESKLLTGCACQNGTPTRPYIYGGGRARALRKEMYTTLKRLQERGAAEWRVDERFDHFQNALTDIVEKASREAIEYAESFNDPIIVLEDLTDIREDLDYGKYMNRRLHAWAFARLTGRIEDKALEAGIPVEFVNPRYTSQTCHACGYIGSRGSQAAFKCTNAACHVSTFQADINAAANIAARVDPWGESVPWKPERDDSPRNGSRCDTATGHRTPSRRSRQTTLAAFES

SEQ ID NO: 60977 - protein, 499 aa, unknown
  TnpB Polypeptide
MERVRRAVAVEIENPRPELYAVEEPYRKIVEEVAVYVAERGRLEKEKYNELYRRFRERYPLPSQLIQQAMNQGVEIGKSFLALKRDGRVHKPRPEVRRVSIRFAKNSWSYRKTAASAAPVKIAVSLPGGRREIWIKPHRRFWLYWWRVLRKEAELASTLILKRRRNKWYAVFVFDLAPEREPPAEAVAFDVNENSVAVARVSLLSTVDAVALWNRQYVDPAVYSIRTDFGRLAKRYEAVRNAKLEELKRKYPYAGRDEEERRQNVADTREFRKFVRRLRERRRKEGRVRRIVREMTKSPALIITEEFGKNPQEEMIGLEEKKVGKRELRHRIKQTPFRRILRAVEDEAREGGSVVFYVSSFRNSKVCPIHFALLKNGGSWHALHCPRGHAVDRDAAAVLNMLWKTTPTGWVKGVWWDVKETRKRLKKGVVPKEAVRKTNPIIPRPIIHAVWASLMALKASPQWPAVLARAAPMTPAQGADEGGTRAPPHGAPAPGEEVG

SEQ ID NO: 60978 - protein, 372 aa, Herpetosiphonaceae sp.
VRTSFRYRLYPTRQQTRAMTQMLDTHRHLYNRALAERKDAWEQEQRSVRYGDQSAQLKVERTTNPYLAQTNFTSCQQTLRRLDKTFQAFFRRVQCGETAGYPRFKGRDRFDTVDFVVGDGSKISGNRVYFQHIGNVRIVLHRPINGMIKTLSFTRRADHWYLIVSCDRGGPAPVHHDGPAVGIDVGLEKFATLSTGEYIANPRFFRRDEQVLARAQRRMSKYAKGTPERGYHKRIVRRTHERIANRRKDFAHKLSRRLVSEFGLIVFEDLTITRMIKNHALAKSIADASWNQLMRYTQYKAEGAGALCIQIDPRGTSQRCSACNAVVRKDLSIRVHQCPSCGLEIDRDLNAALNIVGVGLHSLELAPRSRCL

SEQ ID NO: 60979 - protein, 490 aa, unknown
  TnpB Polypeptide
MAEYITTRIYYSKKLDEQTYAELTLIAKKLGILRKIIWHQFSSNPKKLNDRKIRDIWLKEKENGTNLYPKIIDQLPARLWKETLRDTIGNINAYFEAGFTEAIKILYKKYGKKQGKVLAKQLKTDYKANNELHRMVRALIPKSYSNVNNIICLDEGCYSFIDDESKIVQVVGLTPMKRLSIPMTTKNKPKGNFKIILKDGRCELRVSNKYQVVAADIPKTHEAIGVDKGYTEVFTDNTGERHGEGFGKLLTKKSDFLDEKYKNRNKLWAIMKKARESGDFKKANNIKTNNLGNKKLNKQKEIMKAELKEKIYSAAKKIAQKASIIAIEDLTFKTKAKKSKKAKKGKRTNRLLSSWIKGVIDEAIIKYCFIYGTKLVYVNAAYTSQGDSRYDCALMGTRIGDSFIGFDEVVLDADINAAINILARLYDSEINLYTSAEKVKEILTKRANAVLSASVETAQLGLQDVAPINLGLHPKSGLSKKSSKKLAKVS

SEQ ID NO: 60980 - protein, 440 aa, unknown
  TnpB Polypeptide
VQTIKIPYSSDYDFSLLLKQYNNAIHFAFNRFQENLSQKEIEKFVSNLKNINLLSKRIQLYAICDAKFMFSKHKDKKIIFGGKFNFLQRCKNKITKEQFRENKLSPLNLQGELKVRGNRYFKFELKNNQIIFKLNRKEHINLKLPNLSKNYNKLLNKINELSQQNLLSYSIMISKTHICVGYDETILKLHEQFKTKSNRILGIDLNPNYIGCSILEFDKNNNQKIIHKFCYDLSKLTIKSEESSSHKKSKYLHNKLKHEYYQIIKDIITKCKSFHVGNISVESLSFNKNLPCKELNRLCQSKWLKGLFLNNLTKWCNIYNLKLVEINPCYSSLIGNINYEEFDPISASIEIGRRGFECYIQKKKDKFYPKFDQQLIREWCRRKNIVLGSVVESWKEFSQILKKSEIRYRISLNTKLFKVFSLNSIKSNVLLYNMFKICTV

SEQ ID NO: 60981 - protein, 348 aa, unknown
  TnpB Polypeptide
MLKALPAKVSQQILMLLDRNWQSFFEAMSTYNSEPSKFLARPKLPKYKDKKKGRNLLIYTTQALSKTGLKKGLIQPSKTKLSMTTKVKFVDIAQVRIVPKLDHYVLEVVYNVVEKLEACDPNKVASADLGVNNLAAVTFNQPGLKPLLINGRPLKSINQYYNRKKAKLQSALGRENATSNQIKILSTKRNHKVDDYLHKASRYLINVLLFRGIGTLIIGKNVGWKQSTEIGKHHNQNFVSIPHARFIEQLQYKAALVGIKVIVTEESYTSLASFLDDDVIPNYQQGFSNYKFSGRRIKRGMYKSKSGRQLNADVNGAYNIMRKAVPSMSLTEGIEGVVVRPVRVTPAK

SEQ ID NO: 60982 - protein, 397 aa, unknown
  TnpB Polypeptide
MQQLTYRYRLYPSKAQERKLLATLDQCRWLYNQFLERLNRKENGKTPRRYELQATLPRLKRERPELKQIHSKVLQMVLHQLYSNLRALAELKRNGRKVGKLRFKGWGWFKSFTYNQSGFKIVEGHGKRKELWLSKIGAIPIVLHRNVDGKIKQIHIKRERSGKWFACFSIEVEGAPKVGKISKPVGIDLGITHYTTDTSGNFVEHPHSITKSEWRLKREQRGLSRKQKGSKNRAKQRVRLARAHERVRNQRLDFLHKLSRRYVNIYDFIAVEDLGVKELIETAHNGKNRADAAWAAFLHMLTYKAERAGRWAVKVEPRGTTDRCSGCGELVEKPLWVRMHRCPKCGLELDRDLNAARNILQNGLKKIGLEPAEFTPVEIGPLPTRASLIVEAGSPVF

SEQ ID NO: 60983 - protein, 393 aa, unknown
  TnpB Polypeptide
  misc_feature (265)..(308): Xaa can be any naturally occurring amino acid
MNKVIKGIKLRLYPNQSQREQLWQMFDRFVWNQMLGMAKERYQNNPNSLFVNEYGMNYLLKQLKCEYAFLRESDSTSFLVVNHNLAQAFKMLFRHRGGYPHFKNRHSLRQSYTGRSTCKVLARRRMQLPKLGSIRTSKTGLVGDANIKRYTVSYEPTGRYYLSLQVETEVNQLPEMHQSVGLDMGLADLVISSDGVKYGTFNAEWLEKQAVRWQRKYARRRYFAQCEVWKWNHDRFDHLEELDDYSNWQRARVNKARCQKRIANXXXXXXXXXXXXXXXXXXXXXXXXXXXXXXXXXXXXXXXXXXXXASWYQFRAMLEYKCAWYGRQLVVVKPDYTSQICSNCGFSSGKKPLEVREWTCPKCGIHHDRDVNAAVNILHKGLKAIGQGLALVK

SEQ ID NO: 60984 - protein, 410 aa, unknown
  TnpB Polypeptide
VLKAYKYRIYPNSEQRIQIAKTFGCCRFVYNQTLAYRKEIYEKEKKSVSKTDCNNYCNRELKKDYEWLKEIDKFALTNAIYNMDTAYQKFFKEHAGYPKFKSKHDNHKSYTTNFTNGNIAVDFETGKIKLPKLKAVKARLHREYSGQIKSATVSQVSSGKYYVSILVETEHKELAHTNHNIGIDLGIKEDKITYIPNYVSKDDFYPLSQEVIDKRKEKYGIEKNKFIVLGCGQVQTRKGVKDFIKCAELLPDVQFVWAGGFSFGPITDGYKELKAIMDNPPKNVKFIGIIPRTEMNEIFNMADVLFMPSFSELFPMSILEAVNSSKPVLLRDLELYVDILFGKYLKGNSAEEWVELINKLRQDSEFYKSAQEDSKYISEFYSKENVNKIWREYYPRVYNKYIKNGKKIKN

SEQ ID NO: 60985 - protein, 377 aa, unknown
  TnpB Polypeptide
MKLTLQIKLLPTCKQVEMLKDTFSVFNKACNAISQIAWERRVFKQFGLHKEVYYPIKETYRLSSQLVVRAISKVADAYKLDRKKQRCFREFGAITYDSRVLSYNIPKSICSISLIGGREKIAYTCYRPHLMQFAKGEADLVLIKGKFYLYQTIEIPDEEEEDAEDFIGVDMGITNIVSISDGTSISSNEVKNIRDKYNKVRASIQSKGTRNCHKLLKRLRGREKRFATIVNHSISKWLVAKAKKENKGIAIEDLKNIRFGMNSKRRNKTFRRRSNSWSFYQLRSFLEYKCKMNGVKIIAVPPAYTSQTCHECKHIGIRNGKRFHCKYCGNIADADINAARNIATWGYVNTHERWELLSCSIHDDISTSKAHKSLVYG

SEQ ID NO: 60986 - protein, 452 aa, unknown
  TnpB Polypeptide
MQQIITAKLKLITTKEQFEALRETQLRYRDALNAVSSYAFEQGKISNETRLHKGMYAELRARYHLPSQLACSVERQVAATYKGLWTKLKKNVEHRRAKITKKRFKGLDKPPKYSSPTVQYTYERDYTFQCDSRVSVGTLNGRISVPYQGSDKHTALIREGATIGDAKLWDDQPKKQFYLLVSLTLDLPEPTCEHFTEVVGVDVGIRYLAVTSTSTGKAGFHPGKRVRHRANHYARLRKRLQHKGTRGSKRRLRRIEQRERRFKQQANHCIAKQIITEHPHALIGRENLTDIRERTRRRKRKRKKTGKGTEPVSPKARKANRVSSQWSFAELHSLISYKARLSGSLALKVDTDYTSKACPRCGLTSDGNRPRKGLLFVCQNPTCGYRLHADLIGARNVTMRTLLIRQDWIRTGFVSMAPDASDKEAKAARLQRDAELRWSPEVTNKPPASSRR

SEQ ID NO: 60987 - protein, 170 aa, unknown
  TnpB Polypeptide
MGKAKGMGESEAREALSRQKRRLFKRLTGGLLRLYRTLASHLLEELHGLGVSAIYTGYSFNIAQEEGNELAVNICSYRKPMDAVKSRAQEHGVKAFEVVERDASEYCAYHGGEVKGGPRGVSSCPLERKLHSDLNCALNILKKANAAVSRVNKPLSFLVDHNGVAPVKGA

SEQ ID NO: 60988 - protein, 173 aa, unknown
  TnpB Polypeptide
MAQGQSDPVERIEQRHHGLPQGTVGVLPQSPVREASSPFRLKERQHPIVPQYHADTPYECNRYPLSRKLGSVRIRKRDRLRYPIESLSSWTVKRENRTYYLVLLFDVDIQPKTRAESRIGIDLGVKNLLTLSTGEKIDYPNRLRRLEKDVKREQRKLSHRTKGRTTTADRRQS

SEQ ID NO: 60989 - protein, 398 aa, unknown
  TnpB Polypeptide
MLLSKKTSIKVSREYANLIGHMCYAASKLWNVCNYERQHYKETGMEQYPDWYYQKKAHKEDLWYKQLPSQTAQEVCRLLDKAWKSFYVLKRSGGIETPRPPRFKQESIPITYMQMGIVHERDTDRVRLSLPKTLKKYMEETYQIHENFLYLENKIFRGMDQIKQMRIYPPEKGSCKIIVVYEVPDQEELPQNGHELSIDLGLHNLMTCYDSGNGKTFILGRKYLALERYFHKEIARVQAQWYGQQSGKGVKHPVTSKHIRKLYKRKQDSVTDYLHKVTRYLAEYCREQEITCVVAGDIRNIRREKDLGHRTNQKFHSLPYNRIYIMLEYKLKRYGIRFVSRKKVIPASAAHCHRKWGKDMQSRPTGKREECTGMETEFITQMPWGTYNILRKYHSYPE

SEQ ID NO: 60990 - protein, 392 aa, unknown
  TnpB Polypeptide
VKRAYKLRAYPTRPQEGRAVRLLADHCDLYNAALAERREAWRMGNRSVAYGDQSAQLKEIRAADPDGQGRHSFTAQQQTLRRLNAVFAAYFRRVRDAKGKERRVGYPRFKPRQRFDQVLFIAGDGAKWEPTNGSQWAYASFQAVGRIKVSQHRPVVGRVKTLQVKREGRRWYLVVVTEIEVVALPTTGRAIGVDLGVARFLTTSDGEMVANPRFLDAAQERIVDLQRRRQRARPGSGNRRRLRRALAKEWRKVRNRRRDFHHKTARGLVDSCDTIALEDLRVAAMTASAVGTVGTPGRNVAQKAGLNRSILDAGWGQFTSILAAKAESAGRRVVLVHPGRTSMDCHSCGTGCIRPRQDTVVCPVHGELDADLNGARNIATRAGLGSGQASAA

SEQ ID NO: 60991 - protein, 410 aa, Bacteroidetes sp.
MYLTRKLKLGRTDQLDRLARRAGGLWSTIAKWHWRFVRRQDYWLSKGQAQKMYCKGLGGLHSQSAQAVADNFYDSLQSWRKKRENDKYKGLRPPYKQKRYFKVQWKSSAIRLRDDGVLRLSNGRGTDPLLVDWPSDRKPKRVEIGWDGDQYELRAQYKVDEKDEPKGQKKAGVDLGERHLATVYVEDGENISVHGGWLRSLRRQHGRTYSKLQSKIDQKKKGSRRWKRLVKAKDRQLTKIRNRIEDFLHKVTTRLANVLHERRAGTVVVGDLTGIREQIRYGDRINQRLHQWAYSKFEHMLTYKAQLRGMTVERASEAYTSQTCPNCEHRHKPSGRDFDCPTCSFTGHRDVVGARNILSERYPGEVSTDTTQVAGEMTPPTGVRYQPHMRCNPASSRKTCSSRQERRPVE

SEQ ID NO: 60992 - protein, 425 aa, Aulosira sp.
LYNAAVYNRFTQYQKFNHSVSYFEQQNCLPAFKDVWIEYKEINSQSLQATLKRVDYAFERWFKGLGKRPRFKSIRHYSGWTYPAKSGYSVESDGENGYLNLFKIGRVQMRGQAKYWGTPTTCTIVFRNGKWYASITVDVLDQTLKPEILPVGAIGIDLGCNSALSITDGENHQQIDAPKFLRNSEQLIKKASKTKRRKQAPNKNKKIKASRRWKKAQSKVSKLTRKVANQRQNWVHQVASEIVSSNSFVATEKLEVKNMTSKAKKGKRKKQKAGLNKSILDVGFGMLRSTIKYKVEQIGGVFVEVPTKKVKPSQTCPKCGHQHKKTLDIRVHDCGVCGYVQDRDIAAAEVMLYWAKGSHCGLGVSPSGASGVNLTELGTSFVDADVTGSTSRTRKQAGSMKQLGQMKRQKPKSTGLVSETQTSTK

SEQ ID NO: 60993 - protein, 402 aa, Streptomyces sp.
MTRQVKRAFKYRFYPTGEQAAELSRTFGCVRLVYNKALEQRTRAWYGEQRRISYVQSSAALTQWKKTGELAFLSEVSSVPLQQALRRLQTAFANFFAKRAKYPRYKSRKKSRASAEYTRSAFTWRDGKLTLAKMTDPLDIRWSRPLPEGAEPTTATVSRDSVGRWFVSLLCQESIAPAPATDAAVGLDAGITSLVTLSTGEKVANPKHERRDRARLARAQRDLSRKAKGSANREKARRRVAGVHARIADRRRDFLHKLSTRLVRENQTVVIEDLTVRNLLKNGTLARAVSDAAWTDLRMMLEYKCAWYGRTLVVIDRWFPSSKLCGACGTVRGKLPLNVPAWTCDCGTVHDRDVNAARNILAAGLAASACGDGARPQRESSRTGQSSVKQETQRATAGIPRP

SEQ ID NO: 60994 - protein, 457 aa, unknown
  TnpB Polypeptide
MAFSVTQRVISSEDMIYSYCDDFCRKAKLLYNAALFRIRNIFTGYEKEHRTDNEEDVFCEVHSLQDVYPQIHVRKVISYNHLEKLMRVTENPDFFIGLPMQTAQAMVKQAVTDFKNWLASLREYKKHPEKFLGRPKMPHYKKQDLATVIITNQDAVLYPSETGVSLKLPIIKKRLSFSNISEHAFLKEVRIKPYHGRFLFCLTFEEPEQVIETSMPYTCAIDFGIDNFAAIVCDDGSSAIYKGGAVLSDTQWFHKQKAKYVSILTKGHKNQYATSARLKDLSFHHANFTKDQCHKISRNIIDFCLEHQAGTLILGVNPLWKQRTNMGTASNQKFVAMPISILRTMISYKALNAGIRIIEQEESYTSKADITMNDYLPTYGKDDNNATFSGARITRGLYRCADGTLLNADCNAAANIMRKAIPDIWKDTSDYTFLSSPKVYGFHELNPKSIPVKRIVA

SEQ ID NO: 60995 - protein, 408 aa, unknown
  TnpB Polypeptide
MIRTYKYRIYPNKEQEKHFVQAMGCVRYIYNKGFEAKIEHYAKTGKTLSYFDMAGPTGMLIKEKREHEWLNEPYSQSLQMALRNLDNAFQRFFKKKSGFPKFKNKHDGNQSLSYTQWVKVSFQSGKVKIPKAGEMRCVFDREFVGKIKTCTVSKTPTGKFFISILVENDLPLPKKPDINPDRSVGIDLGLKDFAILSNGDKVANPKFLRKKLDRLKILQRRSSKKKKGSNNQRKANRKVAKLHETISNQRTDFLQKLSTKIISENQTIFLEDLNIAGMLRNHKLADAINDVSWYSFVRMLEYKAEWYGNNVVKIGRFEPSSKLCSACGYKNNDLTLKTREWCCPNCNTFHDRDINAAINIKNFGLIVAHARSERPEELVETLTSTTSDCESSSKLGRRSKKQSSSRLK

SEQ ID NO: 60996 - protein, 422 aa, Microcoleus sp.
MQLAERHIIKSTEYRFPEIDELAFKSKNLYNAANYVIRQSFVYGWSYINYNEMNSLMKSHQAYKALPAKVSQQILMILDKNWKSFFEAVKAYKTDASKFTGRPKLPKYKDKVKGRNILVYTIQAISSKQLKKGIVKLSGTHLSIKTKVNPDQICQVRVVPKCDSYVIEVIYDEPESTASDDKFVASIDLGLNNLAALTSNQPGFTPLLINGRPLKSINQFYNKRKARLQSQLKGSRKSSPRIQRLTRCRNQKTDNYLHHTSRLIVDILVAKQIGTLVIGKNAQWKTEIDLGKQTNQNFVSIPHARLIEMLEYKTRLVGIKVVVQEESYTSQSNFLGLDPIPVYGKTDKDDVFTGKRIKRGLYKTSAGQLINSDVNGSYNILRKAIPNAFSNGIESCVVQPRRVNPLKVQAKGEGLDASHVMS

SEQ ID NO: 60997 - protein, 269 aa, unknown
  TnpB Polypeptide
VRKINRAVKIRIYPNAEQRVQIEKTIGCSRFIYNCMLADKIEHYKKEKKMLRNTPASYKKEYPWLKEVDSLALANVQMHLESAFRKFFREPSVGFPRFKSKKSSRKSYTTNVVNGNIFLEGKYLKLPKMTAVRMKLHRPISEKWKLKSVTVSREPSGKYFASLLFCCENQTAEKRPAEKFIGIDFAMQGMCVFSTGKRAEYPMFYQNTEKSLHGNRESCPDVRKAVRIIRNRRKELHCAMKRFEIREKIFSINSVPVLPGASMQFAWKI

SEQ ID NO: 60998 - protein, 716 aa, unknown
  TnpB Polypeptide
LDRCGRGLAGRLGRADRVHGARASAGRQQGGDAGGAPGRPAGGRLPGGEDLPQRRAQPHQRRPAAQQLELHPADLGRPPGQPAAPGGVRQRAGHAGPGPQHGARLRGHRLQGHPPGPGGPAARVRGPARRLQAGAGPLVRPGEQRGRPGRLAEPRDPAAGEHGRRPGLRQRLHGPQRRQVGRPRADRRLEGIRAGFVAGGAAGSSTGGEPHARVELTFASVSDPLLREARRHTTFRFALDPTPAQAAMLVRHAGASRFAFNECHRLVTDALAAKQTDPQVKMPWSGFDLINAYNAWKGSEAAGRVFVVARDGATTKKVTGLAWRHDVSAQVFEEAAVDLGHALAAYGRAKLGKNKGQRVGFPRRKRKGRCRDSFRLRNKQNRSGTSVIRIGERHPRSVTLPKIGTIRVHDDTRRLRRLLHPIDQIDPDTGQLKVAPLARILFITCSRHGSRWYISLNVRAPGFHPERRHQPRLNDDSSGFVGVDRGLAAFAVVATAQGTEVGRYHAPKPLQHNLAGLRRRSRAASRTKPSSRNHVKAIRRLSRQHARISRVRRSFLHEVSSQFVKTHDRLCLEGLAIANLVRNKHLARAIGDAAWAEFARQVGYKAAWFGAELVVADRWFPSTKTCSRCGKVNQEVRLTERVFRCSRCGLVIDRDRNAATNLATWAQAAQMAIRAPARQAGGRVTNAPGGEGAGRRSGDGETGSDEGGTDAHAFVV

SEQ ID NO: 60999 - protein, 368 aa, unknown
  TnpB Polypeptide
MRYYRRYGKELSYSKMSAHLTQLKKLEKYQHWNIPYAWALQNVLKRLSQSFREMKTLGRGHPQFKSCKKHKGMTFDGRQAPLEKVLDEQKHERNHPTYHIRLNGRWYRFALHRPIEGKVIQVHVTRDALGDVYITLTEDYSEVKYEPKTGKAEGFDFGIKDFLTGSDGHPYTSPMFYKHNADKLATAQKVHSRKVKGSHNRERERKNIARIHKKTANQRTDHHWKLAIELCQKFDILFFEDLNIAGMKRLWGKQVSDLGFGEFLRKLKHQSKKRIRSVLKIDRWFPTSKCCCVCGYKNETLTLADRHWQCPRCETHLDRDPNAAMNILKEGVASFGLGVVRPIVLFNRIVGISVEATSPLLKSTNASA

SEQ ID NO: 61000 - protein, 667 aa, unknown
  TnpB Polypeptide
MENPKDKPPEFFKSTKTSLKSILKHPEINTKKINDVVIKAHKIVIHTLQFLKLYMLHHYETNNHILPDIDKILILNIMKVVCGEKTEMRGVKPKKETIELKDKLTAFYTEHYKPYTQPEQLDYEYMSNVLSYLCEDIMTMYENNIQLHYVDYVERFVNVVWKKKMIIEKIRKMFPTKKEREARIRQLEKELRKIKNDLLNVDNSVAYTAHPHYHNWITQQKKHILPSKNNFQKQSIFYDLKCKPMDYFPCMITMMKQVENELETISNVFPLRSSIAPGYIRLDTITLVYLLLRKEQGKKSDYSNQGNTKKHEDKIWRFFFRTEKKVFRKTDFSFHHMISTDGVGVSILFLRDDLLGKRLPSAKKGISRELYIDELNDYSTLQDKKIIGIDPGKSDLIYCVDDASKDANIFRYSQNQRRKETKMKKYNNIILAMKTNKIQGKSVIEYETELSLYNRKTLQIDKFKTYVNEKNRINNLLFGFYAKHLFRKLKFGRHINTKRNEQKMMSDFRKMYGNPENVVICIGDWEQRKQMKYKEPTLGIGMRSLLRKNNYKVYLVDEFRTSCKCSKCDGGVCEKFMVRKNPRPKPKKNTDNPKKEIKYDEMRLVHGLLRCKSGCGSWNRDRNGSSNIYKIAYQAIHKLERPGYLCREIKSNQAVLPNCYKQNIHKV

SEQ ID NO: 61001 - protein, 427 aa, unknown
  TnpB Polypeptide
MLVLEYKVKGKQDQYNAIDDAIRTTQFIRNKAIRYWMDAPQELKIDKFALNKYSTELRSDFTFAAELNSMAVQSAAERGWSAISRFYNNCQSNKSGKKGFPRFQKDCRSVEYKTSGWKLHKTKRRITFTDKKGIGELKLLGKWDIQSYELKDIKRVRLIRRADGYYAQFCIGIDVVDIQPKTGNEIGLDVGIESFYTDSNGHHEPNPQFLRKAEKSIKHSQRRIYKKVKGSSGRKKARKVYAKKHLKGRGEAFAYKNYATNRQLNSANASPVRQRIEHAKKIARNVCKSNDLVAYEDLRVSNMVKNHCLAKSLSDASWYLFRQWIEYFAVKFDKITIAVAPHYTSQKCSSCGVIVKKSLSTKPLVKTFYRTPLPCPQMSIDEILNINLTQFTSDMIKRLIHKSSISNTSSRYLFLDDTLHYLNTLNS

SEQ ID NO: 61002 - protein, 392 aa, unknown
  TnpB Polypeptide
MFRNKSAEKEERRKSQRVISRELKVNNWQTSKTKMKELNYMFVQAKWITNDMIANENIMEYKYNEHKTVKHFDKDKNELFTEITLGAAIHQELCQKVQQDIKNLSKKKNKSKVGKLKFKSEVNCIPLRTGSFRLVNSRNIRIPGFKKITVRGIDNIPENAEFATAKLMKKASGIYIVITCYVEKEKKNISKEIGVDFGVKNTITTSEGKIYNCQVGESERLKRLSKKFNHSQKGSSSRNKLYKLLQKEYEHITNIRNDKGNKIYHELSRDTFVYYQDDNFNGWKSFNMGRKVQYGVLGRVKHHLSNSEYALDVKRFCATTKVCSNCGTVKPEKLGLDVRTFECDECGAKLDRDVNAAINIKLLGQHKRPESGIDFEKRDNPLASDSSDAKIA

SEQ ID NO: 61003 - protein, 292 aa, Methanothrix sp.
  misc_feature (277)..(277): Xaa can be any naturally occurring amino acid
MKTAYKFRIYPNKQQQAVLDVTLETCRHLWNNALADRKNTWDQDHQNTSYEDQAAILTLEKQHNPYLKGVFSQAEQDVLRRLKKAFDNFFRRCREHAKEKGYPRFKAKGRYSSFTYPQSGFKLTGTRLTLSKIPGTIRTFVHRDIEGRIKTCTINRDGTGCWFVIFTTDREDPVKLESNTTIGVDLGISHAAVTSEGTVFDYPKYYFQAEKKNRAAEKTLHRRKIGSQNRKKAQIALSRIGKRVTNLRDEFCHQVSRKLVDSADVVVFEDLNISGLXEEPSLSKTYFGCILG

SEQ ID NO: 61004 - protein, 378 aa, unknown
  TnpB Polypeptide
MKTYKFKLYNSKRNKYLHSQIELACEIYNHCIALQKRYYKIYGKYISAYTMQAHLTKLKRLPRYKHWYGLNSQAIQDIAGRIDRAYCLFFQNLKKGIKTAPPNFKKRKKYKSFTLKQTGYKLIGNNKIRIGKITFKYSKSREIRGNIKTVTIKRDMLGGIYLFIVTDIEESREVPRTGEIVGFDFGLKIFLTASNDEDIQSPLFFKQNRSLIRKAHKKVSSKVKGSNNRRKALANLNRVYRRINNQRDDFQWKLANELTDKYDIMCFENLNIKAMQRLWGRKISDLSFSSFILKLKYLASVKSKTLVFINRFEPSSKTCSECGYINQNLELKDRSWLCPECNTEHDRDRNASYNILRVGASTLGLGDVSPVATLAVSA

SEQ ID NO: 61005 - protein, 382 aa, Planktothrix sp.
MLNLTYNYRLKPNKEQIEIIEHNLDVCKSVWNYALYERKLWYNSRSCKVNMCSLNSEYIVEPFEYPSYHNQSAKLTLAKKNNAFLKSGNAQTMQQTLRKLDRAFNDMKAKNMGFPRYKKKMKSFNLPCSASIDGDYLKMPLLKKVKIRKSREVPEGFKIKQVQIIKKASGYYANLMIELDVNVPKPTPHGHAIGIDVGILNMLSTSDGLVIPRPKFLDQALRKIQLLQRKLKKKVLGSNNWKKLQHRIALLHEAVANRRKNYHFKLAHQLCRDVGMIFVEDINFTSWSQGLFGKQSLDMGLGQFFTILEYVGSQTDTYFCKVDKNYTSQICPNCGTNTGKKELSERVHHCQECGFEIDRDIAASMVIRDRGLNIVAAGASVT

SEQ ID NO: 61006 - protein, 510 aa, unknown
  TnpB Polypeptide
VRYYDTVTRHRFTTEDGVDVEQVERDLAQMIAWMAEAEREVLASSEFHNLVLRVLKGDRPTGSFNSWGRKRLPRYDFSFQKHNMNEILVSNVVGALELYAMSVGLFQVMNTHTKETRPDGILSHYKGTYPNAPQPTSGMVRAHLRRYHVKGERKASLPGVSAKLNLAVCDTYFAPKTFRGDSDPLDVVVQVKTPTYGLTRLYLRLPENTERFSDGKVCRPTIRLNNKGQVVFDIAIEHEVQQRDTNRVVGVDLGKVEPFVATVIDPRAKHRSAPFHANYKRCLGSLVKAERKRRDLASHLYERAEVCSTHNRTEHADVLRTEASRVSAKATRIKHEVSQCVASQVVGIAEKSDANLSLENLSWLDSQGGRWPHAEIQHRIEKTTKRYGLKVTKVSAKDTSKTCSYCGGKVSNNSRTRVGTCTTCGFKLNRDVSASREIALRATSPSSRSQERMRSLLRQRQEMRSSAVTRQSKPVTALGGNQGHTGTSSNGLEATLMMVRDNLDSRCSPT

SEQ ID NO: 61007 - protein, 394 aa, unknown
  TnpB Polypeptide
MKGLALDKSDLIIRTNKYRLYPNAVQKSLLFNLFNNSRFIWNNTLGRIRDGEYGIYKTKDNRFLPQIPTMTEIIKCSTYIKKNYNFVKIPNDYAQAELNNLYMSLREFKRKPERGYPKFKSRKHDYGSISCRAGSRIKIKDDCIIIPKFKGSPFTKDNHLIKFKKHQTNYDIEKITGISIKKDTVGRYWLTVAGYTEPNITHKDKRTKVGIDAGLKELLTCSDGTIVKNKRFTRKYQEKLAILQRRLSKKKIGSKNRNKARIKVAKCHDKIKNCRNHNNHVISRNLINIYDFIGLESLSIQDMMKNKQLSKSIQDVSWYQLISNLKYKASENQTSIVQISRWYPSSKTCSRCGNVKSDLKLSDRTYKCSNCELEIDRDLNASINIYHEALIKAS

SEQ ID NO: 61008 - protein, 465 aa, unknown
  TnpB Polypeptide
MIKRFKRVLWLHYLIVTDKVFNMKMIRSDKLKINTDAQQRKVLGDTLAYYRKYVRDLMVLINARWRTLQRAQGNECIKIVENLIHPTKSRPDIKHPHFHKNYYKFPSYLRRVAIMDAYGQVSSFHTRYNDWLDAGMKKMPPKLTCSTNTFPSLYKGQCVKFSDDNKTAFIKVRMNNDWIWQAFRLSGKSRFLGKGKEMSPLLTLKGKQWALSTPTKLSIPLKESTDFSGQILAVDMGINSAAACAVVDKNGTVVHRAFFDRTDKDRVYRIMQRIRTKAKKATRHGNKLPNAFCTSEHRRLRQLNHNMSHQISRKIVDLATQFECDGIIIEDLTRWKPKGRSKTMKVKFHNWFKSRLADNVESKSMEVGIRTHRVYARGTSSYAYDGSGKLSRDKDNYANAKFSNGKRYNADLNAAYNIATRGIIKIYYPQLRKQMWSRNKPNACPTTGNPLVLSSLWLLQQSKAG

SEQ ID NO: 61009 - protein, 553 aa, unknown
  TnpB Polypeptide
MQTSTYTTLIKSADIDAETESSLSAYAALFGRVERKLYASLCADKMTANERKRHFISTYQISARQYNAVLRTLTGKLDSKRELDKLYQVDKKERIEAVSKTIERLRDQANMLSKTGGVPSEIQKVRFKAHQKSRYRARLSTQIEKIADNIGKIPAMCFGSKKLFNKQFFLKENNLNNHAEWLDEWQSSRSSQFMVLGSKDETCGNQGAQLYVDNDGEFRLSLRLPDALGGGKVELSGFDFNYGKSNILAACAENERRRAANVKALTRSSPWVKDRKTGELRPQTKNEVLSSYGQPLTMRFMRHKFGWTLAMTVEEPAPEEIAGSYENGCLGVDVNADHLAVCVVTQDGNKKHVEDIPCPASAKGLTTGQRMAMIGDAVKRVVEVAKQHHVGVGIEKLDFSRKKQAMKETANKHHRAMLSAFAYDMALSLIERRCYREGLPCKAVNPAMTSIIGMFKYHSTQNTTHQAAAQVIARRTLGLKHDRIRFSVPHNVGTQLCSARSKTVSIDGGPLQRWGKVKAIVKKHTALFKQPEKTGPPVILTVNEHKLQCVSLA

SEQ ID NO: 61010 - protein, 413 aa, Clostridium sp.
MKLSFKFRPNINPTQLEIIEELSYHITKLYNIISYDLRKNGFKNYYEIEKLYKNNWHCDFLHSHTRQQMFKILEQNWKSYFASIKDFGVNPSKYKGLPRPPKFKNTERNKNEIIFTNLAIRFQDGILKLSLSKSIQKLFKVDSLNFEVSNKLQSLINWNRLQQARFNYDKVQKCWYLIVIYNKDEVENSNDNVMSIDIGLDNLATITFKNGINQYVYCGKKLKSVNSYANKRIAYLQAIEMKKYGSDKFKNTKEINRIRKYRNNYINDYLHKVSKNIIDKAIKNNVGKIVIGKLKDIKQDMNYNKSFVQIPIQRLVELITYKAKLKGIKIKLQEESYTSGCSAIDLEPVTKKYYNKSRRITRGLFKSGYGILNADINGSLNILRKSEKCIPDLVNAMRDKGNWTHPQRIRIAC

SEQ ID NO: 61011 - protein, 408 aa, Mycobacterium sp.
LDLTGEQQAQCEEFARVCRAVWNIGLEQRREYRRRGAWMNYHPQAHELADAKADHGWLKSAPSHVLQQTLMDLDKACRTHGTFRVRWRSGRRWAPSFRYPEGSKMVVEKLNRRHGRIKLPKLGWVKFRMSRSLTDVTIRSATVSRAGRHWFISVLVDDGRQAPESHQAPASAIGVDRGVAAAIATSAGEVIDRSFASAGERRRAVALQRRLSRCAKHSANRDKVRAALAALRARERLRRLDFCAQTAHQLAAANAVVAIETLKTKQMTKSAKGTLDLPGRNVRAKSGLNRAILAKGWHQFASALASAARYTGTTVIAVPAAYTSQRCSQCGHVDPKSRESQAVFRCTHCPHCEHADVNAAKNILAAGLAVTACEDQPRPAGRGRSPKQEPAGNRKELLLPPDTAAPAA

SEQ ID NO: 61012 - protein, 335 aa, Microcystis sp.
LTTEETPWVNKLNSQARQSAADRAWQSINRFYQNCHAKIPGKKGFPRFKKHNRSVEYKLTGYKLSDDRGKIKFTDGFKAGEFDLWCSQKTLVYYSEQQIRRVRVVRRADGYYCQFLIDGERQEYHKPTGQITGIDLGLKEFYTDAQGNTVENPRYLSKSEKRLQKAQRRLSKKFRQGKKQSKNYHKQRVKVARLHLKVSRQRKDKAIKDALALVQSNDLVVYEALKVRNLVKNRKLAKSISDASWYQFTQWLNYFAKIYRIVCVAVPPHFTSQDCSVCGTRVQKTLSTRTHQCPNCKTILDRDHNAAINILKKGLKYLGNYLNGTVGQTETDPNA

SEQ ID NO: 61013 - protein, 374 aa, unknown
  TnpB Polypeptide
MLFYHDLFTLLKTEECYKVLPVHTAQQTLKLISRNWRAYFQALKEWKKNPDLFFAMPNPPGYKTRDGEVTAIFTKYQARLRNGWLVLPKKVGYYYKTRLNATTKLREVRIIPRRVGYTIEIVYLKTIPKLRKKSKRKGAIDLGLHNLVTFVDNLGNQPIVVKDHGKGIKSITQYYLKKQTQLREQYVQQQRQQLKNKNKLNYGESFYLLRERWHKKLKDTIHKLTHYLVELWVERGLHEVIIGYNEKWKQGVHFWKKTTQMFVTIPYMRIINILKYKGAERGIKVEMIPEDYTSKCSFIDNEFPQAHPTYAGKRIKRGLFRSAQGHLINADVNAAYNILVKSDPKALPKRTVNGVGGYVMYPLRVSIEHLHCLV

SEQ ID NO: 61014 - protein, 391 aa, unknown
  TnpB Polypeptide
MLKAIKIRLYPNLEQQTEMNKLLGSCRFVYNYCLEAKINSYKNDGKSLSMSDLNKEVIKLKNTDEYSWLKDAHSKVNQQSLINLDSAYKNFFKTKKGFPKFKSKYNPKQSFQCPQSCSVDFDKGTLNLPKIKNIKTVFHRRFKGIIKTVTISRVPSGKYYVSILVEDGKKLPTKAKLERLNAVGIDMGLKDFVVTSDGDKIENPKYLRKSEKRLAIRQRKLSRKKKGSNNRNKQRKKVAKLHEKIANQRKDFLHKVSHQIVHKNHGTICVEDLCVKGMVKNKKLAKSISDVGWGMFYGFLKYKSEWYGKNFLDIGRFEPSSKMCSSCGNIKSNLKLSDREWTCVKCETKHDRDINASINIKNMAFTNQNIIRCIGLEQPESTQVDTVAIAT

SEQ ID NO: 61015 - protein, 361 aa, Oceanobacillus sp.
VQTITLKLELQKPTKEKMAMYQKMTAINTAFSNWLLHFDGLQTATSKVFKHFSDKPFPAAVVNQTIQTVKSKKKKQKTKTFRRMWCGFNNQNFKVERENRLYKVSFPTQEKRIGVPVVCKDHQKPWLDKLLSSEVKQGTTELFEKRGRWFVAISFSFEVEQKQADQAQAKTMGIDIGMRQLATCSIGTTSIFFPGKELGYRRRRFASRRRKLGSLKKLEAIRKSKNKESDWVKETNHKISRQIIRFALDNGVHLIRMEDLTGIRHFRKSKKEAGRTLHRWSHYQLQQFIAYKAQMAGLLVEYVNPTYTSQMCKCGHVDKRNRDRNAFCCRKCGYRSHADINAAINISKAVSGLSEEKSKKN

SEQ ID NO: 61016 - protein, 419 aa, unknown
  TnpB Polypeptide
MLTLTHRYRIYPDAAQEQTFIEWMEVCRSAFNYALREIKDWCDSRKCQVDRCSLEKEYILVADLKFPGEIAQLNNLPKAKKVFPRLSEVPSQVLQQAIKQLHSCWEYFQQRGFGFPRFKKYGQFKSLLFPQFKENPVTNLHISLPKIGAIPINLHRPIPKGFVVKQVRILRKADRWYASISLQCNVSVPDPMPHGHPIGVDIGLSKFLATSDGVLVKPPQFFKKLQSQLKLLQRRLSRKKKRSNNYEKQRLKVARLHHQIDNTRKDFHFKQAHALCDAGDMVFMEDLDYRTSAKGMFGKHMLDAAFGQFRTIVKYVCWKRGKFFGEVNSRGTSQECPECGGEVKKDLSVRIHNCLHCNYTTDRDIASGQVIRNRGIKLISTVGQTGRETACTVDLPGVGATQSRQVAQSRKGKTRKTQP

SEQ ID NO: 61017 - protein, 406 aa, Marinobacter sp.
MQRLQAFKYELMPTGEQRRNMRRFSGSCRFVFNKALALQKERFEQGEKKLGYGGLCKHLTEWKAEPDTAWLKDTPSQALQQSLKDLERAYVNFFAKRAAFPCFKKKGYSDSFRYPQGTKLDQANSRIFLPKLGWVRYRNSREVLGRVKNVTIRTTGGDKWFVSIQTEREVADAVHPSTSIVGVDLGIARFATLSDGAFLEPVNSFKKQQERLARYQRAMSRKTRFSNNWKKAKAKVTKIHRKIGNLRRDALHKTTTIISQNHAIVCIEDLQVGNMSKSAAGSVEIPGRNVKAKAGLNRSILDQGWYEFRRQMEYKQAWRGGQVIAVNPRNTSRTCPACAHVSAENRRTQAQFRCVGCGFEENADVVGAINILRAGHARLACEVSGAVRPPAAGTHRSDSSKASCSA

SEQ ID NO: 61018 - protein, 400 aa, unknown
  TnpB Polypeptide
MSIIRNYKFRLYPTIEQAKELQNNLDACRWVYNKFVESIQSEFVSRNDLNYFLTELKQSEPWLYKYHAKMLQMVSTQLAGAQKALIKMHEIGRKPGNLEFTTYNKHRTFTYNQFGYEITKHGNTDLLYLSKIGFVEIRLHRNFVGEIKQVTVTKSKSGKWHACLVCDVDAELPKISLTKSVGIDVGIKNFAYDSDGFVTPNPLNLQKMLKPLARIQRKISRRQKGSNNRKKAVKFYQIIHERIKNRRRDFLHKLSTQYAKKYDVVFVERLQKLNMVKNHRLARNILDSGWGTFANMLDYKTMLIDVPAKNTTIDCSRCGNMVPKSLAIRTHRCNMCGLVLDRDHNAAINILKKGLDIFGITYQGSNLPQELREVTPVEITEWSRKQECSTALIGSKFTSQ

SEQ ID NO: 61019 - protein, 248 aa, unknown
  TnpB Polypeptide
LLDDFDKTITKEKTIRTAYFLKRRKIQSKIKTGKTRRKLLAKYGEREKNRVLDVYHKVANCIVKKALKNNSAIALENLKNIRRKIKYSSEMNGRLHRWSFRKLQLIIEYKAKLNGVPVIYVDAKGTSRTCPICGEKLSLNGHRIMKCKKCGLGADRDVIGACNIRLRGLEKIDVRSSVPRKSPSMKPEGGRLPLTITIKCSKVSESQNGGTMTWTIQGLRELKWRTKQTYQSLFNEISEWVRKEYMGK

SEQ ID NO: 61020 - protein, 350 aa, unknown
  TnpB Polypeptide
MRVCQAYRYALDPTPEQAADLASHCGAARFAFNWGLARVKAALSQREAEKSYDVPDELLTEVPWSLYGLRRAWNTAKDQAARREGGRWFVAFTCEIDRTNRVPARPDAVVGVDLGVKNLAVLSTGEVVANPGHHRSALKRLRRLNKQLARRVGPRTPDGGGREPSARWATTKAALGKAHAHVANRRRDGVHKLTTRLAGIYGTVVVEDLNVSGMLAGRRLARAVADVGMAEVRRQLTYKTRWNGGGLVVADRWFASSKTCSGCGAVKAKLALSEREYTCTGCGLILDRDHNAALNLAALAADVAQSRGETENARGGAVRPGVRAGRAPAKREPRKSGNAVAATRRLAGAH

SEQ ID NO: 61021 - protein, 471 aa, unknown
  TnpB Polypeptide
  misc_feature (4)..(4): Xaa can be any naturally occurring amino acid
MKQXKKRAKKGEPQTMTKAVTHIRLEAANPGKLAALDQLAQVFLALTQQYVALFCTDELPDGFRAPCFPTPLSERWHRVAMQQAAGIAQAWRTKRANAYQEYLDALAEYQEHQTAGSSDPAAKAPKWREWDVPTLRQPCIQANANVVKLEAATESSFDGWLKVSTLDKGTPLLVPIQFSDYHKEQLTDPKTGQRRKINSSVTLNKRDGVWWLTLSYNETVTVQTPPDAPVIGIDVGIANFLTTSDGKQYGSFHRRLRERQKRDREKRRRKARLRKCLEKQGVPKDKLPSTSSTTGQRLIRHVRQAINRAVNLCFEEHEGCQFAYEQLSVASMRHKARAMNAYMRASNLGHIPEQIAWNATKRGVAATKVKSAYSSQECHVCHSVDRKNRPNQQTFCCQVCGHTTHADVNASRNLAARLHDAELRACTTRHEVKALLMRRHEQWKQIVGLVVVQPPVQLGLWACSETSTDVG

SEQ ID NO: 61022 - protein, 204 aa, unknown
  TnpB Polypeptide
VHVEPRAPKEEAVGVDVGLEHFATFSNGQQITNPRFFKNGEKVLAKAQRKLAKLKKGTPKRRKQGRVVAKVHERISNQRKDFCHKESKKIIDQYQYICVEDLNIKKMVEGSYFAKSIADASWNQFLQFLTYKAAEAGRKLGLVNPAYTTQDCYRCGHREKKQLSEREHRCSQCGYMASRDFNAAQNILALGLDGLGAIPRSPRL

SEQ ID NO: 61023 - protein, 397 aa, unknown
  TnpB Polypeptide
MSIVTRSSQHDLKLTNITKLDILNQMFVDYELTLDHYIKMITSGKLQFKKYLSSKNLPTITLESTKHKEMCYQLVCQIIKSNLKFTTNKTFTRYKKIYTYFNKKQRQIDFLNKRYSELNVNILKRIKIDVKSVKIPFKYDMFNVKTGNHFDYFIRITTPYRDLTTKNRYHTINIPINEHKHSLKYSDWTKKKYVELFKVNDNIYLKFVYEKDLPAKTEGNSIAFDCGYKKLLSDSNGLHYGVELFDIYQQLSKMQRGSKNYKQRIIHKNNEINRIINEIPLHDVKDVVVEMLKKVKNKSKLSSKLMNKMQYWAYKQVMRKLVSRSEIEGFNVIFVDPAYTSQTCSSCQSIDKSNRNGEIYHCKTCNLLIDADYNAAINILHKGTGVPLTVKDMSCLS

SEQ ID NO: 61024 - protein, 376 aa, unknown
  TnpB Polypeptide
MIPVMKQTLLVKLDTTKEQFEALHQTMHHFNDACNFIAQIAHRNRTANKMRLQKLVYREARSKFQLSAQMAIRAIAKVCEAYKRDRSKRPKFRPNGAMVYDQRILSWKGLEHASILTLKGRIRVPIRIGDYQKARMDRIRGQADLILRKGTFYLAVVVDAPEPTPYDPIGALGIDLGIVNLAVDSDGTTYKDKGVDRIMGRCEKLKAKLQKRRTKSAKHHLKRLSGREKRYRRNINHCISRKLVAKAKDTGRMLVLENLKGIRSQTTVRKLQRRRHNSWGFEQLRGFIEYKAKLAGVPVALVNPRGTSHTCPRCGCLDKRNRPDRESFKCVSCGLAGPADYIAALNIAARGAVNRPIVSKCFSNHLVPLQGQAHTL

SEQ ID NO: 61025 - protein, 704 aa, Escherichia sp.
  misc_feature (290)..(396): Xaa can be any naturally occurring amino acid
  misc_feature (539)..(601): Xaa can be any naturally occurring amino acid
VKRLQAFKFQLRPGGQQEHEMRRFAGACRFVFNRALALQNENHEAGNKYIPYGKMASWLVEWKNATGTQWLKDSPSQPLQQSLKDLERAYKNFFQKRAAFPRFKKRGQNDAFRYPQGVKLDQENSRIFLPKLGWMRYRNSRQVTGVVKNVTVSQSCGKWYISIQTESEVSTPVHPSASMVGLDAGVAKLATLSDGTVFEPVNSFQKNQKTLARLQRQLSRKVEFSNNWQKQKRKIQRLHSRIANIRRDYLHKVTTTVSKKHAMIVIEDLKVSNMSKSAAGTVSQPGRNVXXXXXXXXXXXXXXXXXXXXXXXXXXXXXXXXXXXXXXXXXXXXXXXXXXXXXXXXXXXXXXXXXXXXXXXXXXXXXXXXXXXXXXXXXXXXXXXXXXXXXXXXXXXANIRRDYLHKVTTTVSKNHAMIVIEDLKVSNMSKSAAGTVSQPGRNVRAKSGLNRSILDQGWYEMRRQLEYKQLWRGGQVLAVPPAYTSQRCACCGHTAKENRLSQSKFVCQVCGYTANADVNGARNILAAGHAVLACGGMVXXXXXXXXXXXXXXXXXXXXXXXXXXXXXXXXXXXXXXXXXXXXXXXXXXXXXXXXXXXXXXXDQGWYEMRRQLEYKQLWRGGQVLAVPPAYTSQRCACCGHTAKENRLSQSKFVCQVCGYTANADVNGARNILAAGHAVLACGGMVQSGRPLKQEPEAEQSAVTH

SEQ ID NO: 61026 - protein, 481 aa, unknown
  TnpB Polypeptide
MKVTVRAELIDVTEDVSETISSMMLIFCTAVRFSFKRLLESAEPNDLEKIVAAKYGLNIRQAKDAVEEARQIIASQKELVKMYYEDYTKKVKAIEKLLTKENLSKRRKEALQKKLEKRKRKQAYYKGFIDSGTIPPVVFGTKKLFIERCKGNITKEEWRAARNNRIYSRGDKTKLGNPNLRIVPNGDGQTCLEISTLQKTQNNRAVKIRVPVYLPQKKSKKTGLVNGRDYRTMLLEYLKTGEAYQVELIKRSGRYYCHITFEESKINEYKPLYTGHTGMVGVDTNPDGYGVTLISRDGNYKETLYLKQPELQYAGSERRGNICGELSKQIVTYAIKNECAVAMEDLKFRNDKDVGSKFSRIKHQFIYRTLLSMLETACIRAKVEVIKVKPQFTSKIGLYKYSHQYGLDVHNAAAMVIARRAYGFKEKVPKILIDKLIQYKASFKRKTEWGQWVIINNIIKKKGGAGFWIQNRKQELGLSKP

SEQ ID NO: 61027 - protein, 404 aa, unknown
  TnpB Polypeptide
MIVNRVEQRIIHKSHPLWNTIDKMCFNAKNLYNYANYIIRQEYLKSKTYIPYREMNFNLKTHQQYKDCMSQPANCILRLLDKNWKSYFEAIKDWKVHPEKYLGMPKLPKYLPKDGRFNWMIPNNSCLYDYENGEVYFRLRKLQGYHWKSRCLGRLIQVRFVPHDNYYAMEICYEIEVEDIGKDRISKRIAAIDIGVDNLVTMTNNIMESPIIINGKPLKSINQQYNKQKAKMQSDLMKRNGQHWSNKLETLSYKRNQRIKNYMHNASALIIKWCVEHNIDTLVVGKNDTWKQEKKHMQNFTSIPYEMLLGQLQYKCENAGIKYIEVNEAYTSGTSYLDNEAPIKENYNKERRIQRGLFQAKNMLINADVNGSLQIMRKVFPDSYTGYGIEVDLTPIIINAVQAA

SEQ ID NO: 61028 - protein, 554 aa, unknown
  TnpB Polypeptide
MSVMASERRALRRIADPVVATGPAGLRIRTRVHLTDAEASALAAVGSFLGSVYRTELAGRVELGRLDHKAHGAWRARRKQALTAVSSSRWAGAITRAVEDQYQLGMRGLSAHVTDLRQGIEVLEQRCALRPGEQDLAPATAGRRRRGYRTARERFAKTRRLAILGSRLVAAESALAAGRPSIVVGGKRLWRNRNHLEQTAMTEQQWQAHWDGARMFLTADGESGKAGGNETLRVDQTGRLRIKVPAALVAQLGSHLDIAAPVAFCHRGPQWADRVAGRRAVRYDITFNPARNRWYLDASWKQDALTAPPSIEVLRTGPVLGVDLNADHLACAVLDGSGNPIGDPVTIPVDTVGLPASQCDGRVRAAITALLDTAQINNCSAVVIEHLDFADARATGRDTLGRGKRGKRFRRTVASIPTARFRTRLTAMAARCGIAVIGVDAAYTSKWGNQHWAKPLQQQTSEPVTRHHGAATAIGRRGLGLAIRRRPAGPRNGQRTVAGTPPARPQRQPNHDGRHSSSGPPPPTRWVAVHRRTPAASGQHRSGRNRTALTAAHS

SEQ ID NO: 61029 - protein, 218 aa, Paenibacillus sp.
MNKAYRLRIYPTSEQESMIRQTFGCVRFLYNQMLAERKDKSGCDQADAERPNRQKYRTPAAFKTAFPWLREVDSLALCNAELNLKSAFHRFFRDKRNGYPKFKSRKNPVQSYTTNNQKGTIRITADRKHVRIPKLGEIRIKLHRQIPNGHTIKSATISRSSSGSYHIAILTHYEIDVKPIVPQPDKVLGLDYSSKGSTSTTRMQPQIIRSTSAKWRLG

SEQ ID NO: 61030 - protein, 409 aa, Blautia sp.
MHMLLSRREVFLPTEEQKIILGHMGYAAFKLWNVANYEKRNYKEIGMTRYPNWYDQKKRLKENFFYKNLPSQTAQDVLQQLEEAWKSFFVLLRSKGVENPRPPRFRKEKMDITFLKDAIRQEEGKIRLTIPKQLKTYLKSQGVDADHLYLKTKRFSDIQIKEIQIKFDEKRYTAIAVYEETDVPMQEDNGHYLGIDMGLKNTLACYDSAGKTFLLNGLLNTTHYFDKEIARYQGISDRQQSCCGIKYPKKTKKVRSLYRKKKNKVSDLIHKTTRYVAEYCQAEHITTVVIGDMKGIRKGKDLGRINQQLHSFPYEKILQKLEYKLKRYGIRMIRQKENYSSQCSPKSDKVGKAFAQSQNRKYRGLYIDEPDIYNADCVGAYNILRLYLQKNKLPFPEAAGLNCPQKVFV

SEQ ID NO: 61031 - protein, 460 aa, Leptolyngbyaceae sp.
MYATLQVKLNVAEEIRDYLVYQCQQSNNLVNSAIYYVKQTHFEDCPRGEFFSEDEFRTGFKLQKVKTAKYADLCMSLKDNLNYKALGGQSAQQTLKTVAESFKSYNGILSDFFKGDARRPKMPGYRTKGGLAPISYPAQAVQFDIETGRCRLPVSLELGAEVKELMGVKEIWINGCAGIKPEQICEVRILPRNNELYAEYVYEYGHQGATCSLALDHSHALGIDHGGDNWLTCVSTKGKSFIVDGRKLKSKNQRYNKQVANLKEGKAQGFWSDQLASITELRNRQMRDAIHKAARLIVNHCLENKLGFIVFGWNAGQTDKSSMGTRNNQNWVQIPTGRLKTRLQQLCESVGIQFLETEESYTSKASFLDQDFLPTFGEKPASWKPSGRRVKRGVYKSGKGILINADCNGAANILRKVATQLGLSLVEVGKAALNLPKRYDLFKGLKKSYRKRCEACLQTA

SEQ ID NO: 61032 - protein, 389 aa, Bacillus sp.
LKEALSLIVNKAYNFRLYPTKKQETLIAKTIGCSRFVFNRFLERWNDSYTETGKGLTYQSCSAELTKLKRELLWLKEVDSIALQSSLKNLSDSYTRYFKKQNKAPRFKSKKNSVQSYTTKHTNGNISIIENKIKLPKLGLVRFAKSREVIGRILNTTVRRHPSGNYSVSVLTETEVLPKPKTGSSVGVDVGLKHFAILSDGTVFENQKHFSKLEKKLVKAQRILSRRKEAALKRTCKLDDAKNYQKQKVEVARIHEKIRNARSDYLHKVSSEIIKNHDVIGIEDLQVSRMLKNHKLAKAISEVSWSQFRTMLEYKAKWYGKQVIVVSKTFASSQLCSRCGYQNKAVKNLAVREWDCPSCGTHHDRDLNAGLNLRNEAKRISTAGTVKIA

SEQ ID NO: 61033 - protein, 435 aa, unknown
  TnpB Polypeptide
MIIHAEVYFKDSSSIIQLMKDQSSCARSAYQAIHKFGLKTRKDIYAHLKKNFATKLKAIQIYDAIDLVKGIENPGAIFGGKKIWNKFLTGKISKNKWLELRNGQYYASGDKRLKGNRSVRIIGDRVLVSSPTGFREWIEGKIFIPKKWKNIKLTCYNIRLKLRDGKFSLIISQPVSPPSLLSMNSGAIGVDTNPDGLGISEINNTGNLIFHSYMKSQRIQFASNNKRMHDIRILAKSVVDFAIRQNKPIVLEQLNFKNKKSYSKKFNRMRHNFVYRKIIEAIHTRATKFGISIIEVNPAFTSILGILKYQKMLSLNRHTSAALVIARRGLGFKERQNFNVSSKETKKTVRPSLKSGIFHTLEGRGKSITLSDKAWSWLQDSFLKPKPVTLTGSGPEPGSIPGIEPSSGEIPEGESWRITGNPGQFKLNCRVGSDS

SEQ ID NO: 61034 - protein, 538 aa, Streptomyces sp.
MAASFVVPGPAGVAIRDRLRVSDADAAVLTEVGVYLGSLASGDLAERSRQGLAHDAAGWAVRKRELTGRSSARWAGSITKATHDQWALARRGQAAHTAWLRGQIASLEARLARPLGAKADKRAGLARGYATRIEWHAKSRRLQTLKDRLAVVEADRAAGRVRVVRGGKRLANTRHHLEAAGLDEHAWRQRWRAERMFLTADGESGKRFGNETIRVTDTGRLSVRLPAALANLANAPHGRYLLDATVRFQHRGHEWRDRVTANRAVAYRIHYDTGRGRWYVTASWQRAAAPVLPLQAALARGVVGVDMNDDHLAAWQLDVHGNPVGEPQRFFYDLTGSTQHRDAQIRHALTRLLHHTRRCGAAAIAIEDLDFTDATSREQHGRNKRFRRLLSRFPTAKLKARLVSMAAEQDIAIVAADPAYTSRWGAQHWQKPLCTPARTISRHDAASIAIGRRALGHPIRRRTAPPPHHQSDGAGHRTAQARPDTRRREEPRPHIPGPRTRCAPPGRRAKAGDQDAQHRSEHPAEHRSWQQDSLPLSL

SEQ ID NO: 61035 - protein, 402 aa, Escherichia sp.
MKRLQAFKFRLRPDGQQEREMRRFAGACRFVFNRALALQNENHEAGNKYISYAKMTSWLVEWKNATETQWLKDSPSQPLQQSLKDLERAYKNFFQKRTSFPRFKKRGQNDAFRYPQGVKLDQENSRIFLPKLGWMRYRNSRQVTGVVKNVTVSQSCGKWYISIQTESEVSTPVHPSASMVGLDAGVAKLATLSDGTVFEPVNSFQKNQKKLARLQRQLSRKVKFSNNWQKQKRKIQRLHSRIANIRRDYLHKVTTTVSKNHAMIVIEDLKVSNMSKSAAGTVSQPGRNVRAKSGLNRSILDQGWYEMRRQLAYKQLWRGGQVLAVPPAYTSQRCACCGHTAKENRLSQSKFRCQVCGYTANADVNGARNILAAGHAVLACGGMVQSGRPLKQEPTEMIHATA

SEQ ID NO: 61036 - protein, 440 aa, Okeania sp.
MLIYEMKLQGTQSQYNQLDSAIRTGRFVRNSIIRAWIDREIHSRNDAYKYCTKLAHNPEFPWTKQLNSMARQAHAERAWAAIERFYRNCKANVAGKKAVRPRDDGSRKRSEPATTPVARERRPREGTRTKRGFPKFKKYQIRDSVEYKTSGWKISEDRRYLTFTDGFRAGTFKLWGSRNLHFYQINQIKRVRVVRRHDGYYAQFLLDHTREEKKNLTGQQLGIDLGLNHFYTDSKGQKIENPRFLRKDEKKIKKLQRRLSRTQKGSQNRIKARNRLGRAYLKVSRRRNDWAVKLAQRVIQSNDLVAIENLKVRNMMKNHKLAKSIADVAWYRFREWLEYFGRVYGVPVVAVEPAYTSVNCSSCGETVVKTLSTRTHQCPHCGYVADRDENAAINILQSALRELATTLGHRESDASGENDLCLNEETQASKLTRRKRKVSQ

SEQ ID NO: 61037 - protein, 432 aa, Okeania sp.
VRTAYQYKLKPNKEQVAIIELWLHLLCRQYNYRLSERFLWWKENRCAINACPLIVPIPQLRDNPDYYSQKKDLVNTKDKFPEYKLIHSQVLQDCIKRVKLAFERWFKADKNGQRLGKPRFKKKSRYRSFTYAQIKQDCIEEKRINLPKIGKVKFIQHRPIPDGFKIKTVTISRKADGYYVTLSLEDKSVPTFDSDVEPTPENTLGIDMGLKDFLVTSLGKSVPIPQYYRKSQKRLKTLQKRLSRKKKGSKRWLKAVKAVAKQHKKADATPRRPQSQGNAHQAVADKRKDFHFKTANELLSNYEVIAHEKLNIKGLAKTRLSKSINDAAWGQFLAILTVKAVSAAPPQEANAGQKIMAVNPRNTSQDCSNCGKKVPKNLSQRTHSCPHCGLVIDRDVNAAINIKNRAAGHPVLKARGVRCNSRTVKREAHTIA

SEQ ID NO: 61038 - protein, 201 aa, Okeania sp.
LQSTTLNLTKAFKNFFDRRAKYPKFKSYHGKQSCQYSQNCLVVDKEVKVPQVGVIKASIHRLFDGQLKTVTITKTSAGKYYASLLFDTDQQTLEVVTKGKVTGIDLGLKDFCITHDGEKTSKYANPKHLKKHEKNLARKQAKLARKKKGSNSREKARKLVARVHERISNARQDFLHQLSRKIVDNNQVVVVENLNVKGMVS

SEQ ID NO: 61039 - protein, 494 aa, Parasutterella sp.
  misc_feature (114)..(164): Xaa can be any naturally occurring amino acid
MTVTLSHKIELKANNKFKTYCRKAFGVSRFTWNWALERVNDKRERKEKIDVLELKKEFNHIKRRQYPFVMEVTKYASQQPFIFLKRALSQFFDDLKSDKSSSKRKGFPVFKKKXXXXXXXXXXXXXXXXXXXXXXXXXXXXXXXXXXXXXXXXXXXXXXXXXXXFPVFKKKRYSSGSFYIGGDLAVVKKGSEIKDKRFEASDDKTYLYIPKFGWVMLREEIRFPGKINSVTISQDGDKFFASFSIETSEIVYEGTHKENAQEALCGCDWGVKDLLTLSNGIKIKGSKHLKRRQRQLARQQKTLAKKQHPRTKGDKTPTSKNYIKQSRKVGKLYRRIKAQRLDENEKLSTVLVRHFRVICLETLNVKGMMSNHRLAKAVADNSPYALKEMIKRKSSLRERTVVEADQFYASSKTCRRCGEVNKDLKLSDRIFVCPKCGFTEDRDVQAAKNLTEVYINRVGLASPELLKLKPVDLTALLDDLAINGLATSRVEAGI

SEQ ID NO: 61040 - protein, 372 aa, unknown
  TnpB Polypeptide
MKLLPDDKQTASLHKTFETFNAACNYVSEYAFKERCFRAFNMHYALYKIVRAAFPSLSSQFVVRVFKKVEESYRLDRKVQHTFKKYSAVVYDPRLLSFPNLSTASVNTVDGRYKIPVVFGKYAALEEKKLKGQADLVYQNRKFFLCVVIELPDGTPIDHDGFLGVDKGIVNLATTSDGDTFSGSTIDVVRERSVKLRQSLQKCGSKSAKRHLKKIGKRQARFQRHVNHCISKEIVSIAEDTNRGIALEQLKGISSRTRFRKADRQRLGNWAFFQLDTFINYKAKIKGIPVIFVDPRNTSRECHVCGHIAKSNRKSQSLFSCGNCGSTFNADFNAAINISKRAEVNRPIAVHLKALSIAPSPGTAMPRQLAAG

SEQ ID NO: 61041 - protein, 411 aa, Oscillatoriales sp.
MLIAHNIALDPNNVQATYLKKACGVARFAYNWALAKWKHQYEAHKADPSLPGPSEAALRRQLNAIKRKEFPWMLEVTKCAPQMAIIQLGEAFQNFFAGRACYPQFRRKGVHDGFTLTNDQFRINGSRIRIPNLGWVRMRESLRFAGKIMSATISRVANRWFVSITVDTEDLSHLPKAENQGAVGVDLGVSALATLSTGERIAGPKPHTALLNRVRRLSRSLSRKQKGSANRAKTKARLARLHARIAHIRQDALHKLTSDLTRRFHTIAIEDLNVRGMMKNRHLARSMADMGFFEFRRQLGYKAAMRGGVVVVADRFFASSKTCSACGHKLDDLPLSVREWTCPQCGAVHDRDINAAINLKKVAERSAGGCQPFQRQADCSATACGEEGAGLGRKLKTKPASVKQEVSFVPV

SEQ ID NO: 61042 - protein, 328 aa, Streptomyces sp.
VLLACWPSSTVCGQCEALHAKADQYDRLIGGAGDHALAERHQVLRDEIAHVSRRRSNLNDAVAWAAARWAVDQAIVARATVIHVEDLRSVEALGMGRTHNTRMSQQVRGQIIDRMRHLAAEVGIAVVTVPARNTSKHCPACLTPLRHRKAPDRRTTAGWKWAICPNQECGWQGDRDHGARRRIAARGLTHQTKTVADRATGALMIRSVVDRLEAEAVISTAPETSRGRDRSKTGPTRPRTARPAPRRRRAPSPTSPSGPAGKRPEGHAHTARHCLPRAAHRDQGVNTSVKHTHQQRGAALGAGFHLHAHASPPRWEHRDGNSIQPRIA

SEQ ID NO: 61043 - protein, 672 aa, unknown
  TnpB Polypeptide
MAVKKGLGKGLDSLITDKVNTKPAASKNNPTPKSEHAADAIMMNITKVEPNREQPRKKFDEDALLELAESIKQYGVLQPLLVQEREDYYEIVAGERRWRAAKIAGIKEIPVIIKKLTRQEIMEISLIENIQREDLNPIEEALAFKRLLTEFNLKQDEVAERVSKSRTAVTNAMRLLKLNEKVQQMVIDEMLTTGHARALLGIEDQEQQYIIAQKIFDEKLSVRDTEKLVKSLQNEKKKKKELSNIMCIKQKEYNLTKTSLCKFVSKEQKKFKNYINSHQAQAEAEAVYKGVEKVLFEDGRHLHYRRYNSFDCIKQKCAATGVRLLRWDTICFMKHYYKVRVPKNEYIQNILSSVDLKEDVVYSFLKRIEFNSGFKYYVVITLRGDAPKRIKLSEDGGHRTGVDFGTSTIATVSNNEVHLEELAPDSVNYEKEIRHKQNLVDASMRKHNPENYNKNGTVKKGKHKWKTTRRCRRLKRQIRVLYRKQSAYIKTSHHTFINRVVQNTSEFILEPMNFKALQKKSKKTERKEGATAIKQKDGSLKMVRKYKRKKRYGHSIKNRSPGLMQADLKTKATQYGIPYYEIDIHQYRASQLHHDTGEYIKPTLSERFKTIEGCKVQRDLYSAFLICHTDDTLTAPDFKACHIDFPHFIKMQDTLILDMKKCGHTMKSCFGF

SEQ ID NO: 61044 - protein, 1136 aa, unknown
  TnpB Polypeptide
MQIVSSYGVEVKKQNIPIRHTLDIFRKAVSYLIGVYAESWEELSEIGNTQKRFNEAEHLVHETKKNRARFAFDRHFPKMPSYLRRAAIQHALGSVSSYQTRLSLWEKGGLSGKPKLTCENHAMPVFYRDVMYKEAENGEDVAHLKLFDGRDWKWFPVKLLHTDMEYLRKKWSGEKASAPTLEKKHHKYFLRFSYTEETILSKTVVKEQVVCSVDLGMNTDAVCSIMCADGTILGRKFINFSSDKDQLYHVLGRIRRFQREHCSRQVQSRWAYAKRLNMELSRKIAVEITKYARENQANVIVFEYLEMQERISGKKKQKLHLWRKQDIQKLCEHQAHRCGIHISRVSARNTSRLAYDGSGKVDRSTGNHSLCTFTTGKCYHCDLSASYNIGARYFIRELLKPLPETERSSLEAKVPSVKRRTSCVYADLRLLHAELEKYTVNRAVMTKDSCYIIGTISNGVYAIDKKGRLLWKENTDSRLQNNTVLGLYCDADNNVWVALDEGIAYILNNSLVYYYEPPYRKIGMIYDVLVKEDEAYVASNQGVYRMKSGKLELVPGLEEQAWYVKEWGNQILCGHNKGTFQIAGLQASLISDVRGAMCMREIYHEGHPLLLQGTYTFLNLYKENASGVWSFLNSLGGFTHMVRGIEMDHRGNIWVKHLRKGLFRLRISQDLKRVEDLKMYMELGDVKDGNFSLFKINGRVVFSNGKAFYTYEDMTDSIISYEVMNEQLPELKGINDVSHAGGNMYWLVSGRMAYLVKCEMNVFQVEHRIPFSLFEGLSIEERAAMVYDKGSKSSYLCLNNAIARIDADSSLLYKSPVKRSLWVSGITVEAEWTGKKKQLSVQEENKIEAEFSTVCFSLCYPVYNNYTYKVRYKLEGLNDQWVDNERSLEKKYTRLPFGSYVFKAEVYDGNQILASTTLPFVILRPWYLSYWAISGYVLAGLILLLLLQYIVYQSVKKKKDRVIEQQRIAHQAEIEQQEKKIIELEKEQLEADLRFKSKELSGVVMTNIAHQEFLNSLKEEIQQQKLSGQYTRKNLDKLLALVNNNIVSDEESWNMFQANFDRIHENFFRNLKQQYPDLTSGDLRFCALLRLNLPTKEIAKLLNISIRGVDAARYRLRKKFNLPQEDSLTDFMINFK

SEQ ID NO: 61045 - protein, 450 aa, Archaeoglobus sp.
MKPMKQTLQKTIKIPVSDAITNEKLSKLNRLTARLTYGVQLFLDRIVANDVTTVKEAEKFRKEVEAITGLPSAFAQACRDKALWMYKSYKKQHKEWEKKVSKLERAIERCKDKHKRRKLERKLYRLRKKEPSLPTVSRKIPVMFDYRIGSIEFSYSAKEFRLWMRISTLEKGKRIVIPLHSYSYAEKHLKSWSIKSFQIVWKSRLKRYEVHVVVEKEVIIRPKKVVGIDLGLKRLVTAYEQGEDSRAILVEKSEYKEFFIRMRELNNRIAKLQSLGKIRALKKLRRKRRNIAADFRRKLAVEMAKQFNDAIVFIGLPKDVRTDKHYKGSGNKRLRKRVNHWAFREFAVTLQVELMENNNLAYIVNEHGSTRRCSVCGSKKVQVDDREFLCLNCGHKDDRDVNAAKNILKFGLERLAKVSLKGTGAAVSQLELPMMRLMPLKVETPSVRAE

SEQ ID NO: 61046 - protein, 433 aa, Archaeoglobus sp.
LQDPFRKGGGWVVKFIDLVAKKSSGMFPKKEVQLTVVGKVFKPNRKKVLALNRCLEEYFKLVSWYLNFNSTSKTFLHKNGYEKAKQLFNLNTALIQTARDKAVEILKSFNEKKKEGKVKPKPKLKRISIRFDKRCYSFANTTNKLTPYWLTLSLNRKERVTLPVVFGERQKKFIEEALQGKWQFCTVEVVKRNGEWYAHFVLKKEVEFDEPETVIGVDLGEWNVATAVAISKQSKPMKGQFWSGAGIREIRGKYSHIRRNLQRKKRLDLVKQIGHKEERIVNQQLHVIANEIVAYAKQFEKPVIAIEELNGIRENMNSSAKLNRRLHAWGFRKLQQYIEYKANLEGIPVVYVNPKDTSKRCHRCGHVAQANGREFRCPKCGLRYNRDLNAAINIAHALMRGMGWGSCEPPELPDEVLTQSQDRTGEAPCVSVG

SEQ ID NO: 61047 - protein, 406 aa, Nostoc sp.
LSSIQKAFKVTLIPTHNQKVLINKTIGSARYVYNRFLALKEELYASEGKTLNYNACSQQLTILKKEIEWLKEVDKFALQNSLKNLETAYKNFFADLKKIKGKKGVGFPNFKKKHGCKQSYKTNLTNGNIQVIENRLKLPKLGWVKFHKSQEITGKLVNVTITRTTSGKYIAGILCETEIQKHPQVSQNIGLDLGIKSYLVTSNAEVIDNPKYYRTQTRKLRKAHKKLSRSVKGSSNRVKAKIKLARTNDRITNLRDDFLHKLSTRLMKENSIICIEDLRVANMVKTHKLALSISDASWSKFVAMLEYKALWHDRIVQKVGTFYPSSQTCNCCGFVNPLVKDLKLREWSCPSCDNHNLRDVNASLNILSEGLRLLTAVGTPEVIKNACGELVSPEVIQAEIVEAGIA

SEQ ID NO: 61048 - protein, 514 aa, Acidilobales sp.
MSSGGNPRGVPVEGSDPLEAFKKIVEKRKKNNKRTVRLRLLPEKHEEEMLFNIGLTAVRLWNELNYEKRQLFFKNDLTPEKRAEINRKYYHKYKKILGVNAGQIINKNEEAWESFFELSKLKRQGRLPPHIRKISPPGYWKDRITGEKKIHILIRNDRYYLETVNKGEGCLVLKDFKLSIRYVGRIKWEGKQGRLEIIYETGRWFVYIPIEVGVEPSKSNPKGYIKPNYRDEKDRIVDPKSIKQRDFIGDKKAFVDVGLNNLFAVVVSDGSALLIKGGSIKSEYYWWKREISTYQAVRDLLKNAEISTWIKYHEKYLYAIYKRNERLRHLYRTAIRFLAETLWSREVRKVYIGYPIMLSQYNGNEYNTNIWWYRKIILWMIDVFIEYGIDIEIVPEDHTSMKCSICGEIHKNGRIYRGLYICRKTNKKINADINAALNIAKRIGYKITITRKIESYLITHNGVKPLIPRQRANTRDPEIRNPALKGGEGSSISCRTSFLSLSIKISSIFLSYPL

SEQ ID NO: 61049 - protein, 365 aa, unknown
  TnpB Polypeptide
MYLTERHIVKSNEKLDDLCFRAKNLYNKALYLVRQHYFNHKKHLNYYSVNRLMVDSKDVDYYALPTKVSNQTLMLLDKNFKSFFALFKNKKKSEHNKTIRIPKYLDKEGRFIVTFPKDAISKKYLRKGLIKLSSLNILIPTKVTEFDIVEVRVLPRNNHHVVEVVYKVEESKLKTNDNRYVSVDLGLNNLMTIGSNVVKPFIINGRPLKSINQYWNKEKARLQSILESDRKTSKRIENITNKGNNKVKDYLHKSSRILVNFLVSNDISTLVVGYNEEWKQNINIGKKNNQSFVNIPFYTLIKQLEYKYKLEGINFILTGESYTSKCSLLDNESIERHENYLGKRIKRGLFKSAKGKLINADEWFT
